United States Patent Application Publication US 2005/0244851 A1 - sequence listing, part 38

SEQ ID NO: 1469019 - DNA, 25 bp, Homo sapien
catcatattggccaggttgttcttg

SEQ ID NO: 1469020 - DNA, 25 bp, Homo sapien
tcatcatattggccaggttgttctt

SEQ ID NO: 1469021 - DNA, 25 bp, Homo sapien
ccagagtgaaagcagcacgagagct

SEQ ID NO: 1469022 - DNA, 25 bp, Homo sapien
tagctgtccccgagaggtttggtgc

SEQ ID NO: 1469023 - DNA, 25 bp, Homo sapien
ggtttggtgcaatcagccgtccatg

SEQ ID NO: 1469024 - DNA, 25 bp, Homo sapien
gacatagtcagtgggcagagaacct

SEQ ID NO: 1469025 - DNA, 25 bp, Homo sapien
gctccaaactcgtactggaaggcct

SEQ ID NO: 1469026 - DNA, 25 bp, Homo sapien
ccatgcatacatggctccaaactcg

SEQ ID NO: 1469027 - DNA, 25 bp, Homo sapien
ctgtaggccacgatgacagtgaaga

SEQ ID NO: 1469028 - DNA, 25 bp, Homo sapien
taggccacgatgacagtgaagacac

SEQ ID NO: 1469029 - DNA, 25 bp, Homo sapien
tgaaatcgggatactagcagtgccc

SEQ ID NO: 1469030 - DNA, 25 bp, Homo sapien
aatgggtgcctacagaaaaagagtc

SEQ ID NO: 1469031 - DNA, 25 bp, Homo sapien
gtatgtgtgcgatcaaaccgtttca

SEQ ID NO: 1469032 - DNA, 25 bp, Homo sapien
cctggacccgggtttgagaagcact

SEQ ID NO: 1469033 - DNA, 25 bp, Homo sapien
aaggccgaggcgatgacatagttca

SEQ ID NO: 1469034 - DNA, 25 bp, Homo sapien
catgatcatgcggaaggtatagagg

SEQ ID NO: 1469035 - DNA, 25 bp, Homo sapien
tgcttgacattcctgcggtcagcag

SEQ ID NO: 1469036 - DNA, 25 bp, Homo sapien
cggtcagcagccgtcttggccatga

SEQ ID NO: 1469037 - DNA, 25 bp, Homo sapien
gcccaggtctgtgagctgagagccg

SEQ ID NO: 1469038 - DNA, 25 bp, Homo sapien
ccagggcccaggtctgtgagctgag

SEQ ID NO: 1469039 - DNA, 25 bp, Homo sapien
ctggggaaaccagggcccaggtctg

SEQ ID NO: 1469040 - DNA, 25 bp, Homo sapien
gggaaaccagggcccaggtctgtga

SEQ ID NO: 1469041 - DNA, 25 bp, Homo sapien
tggaggagcctttctaacgaggtga

SEQ ID NO: 1469042 - DNA, 25 bp, Homo sapien
tgaggatgtcctcgtctgctgcaca

SEQ ID NO: 1469043 - DNA, 25 bp, Homo sapien
gcagggagggttcctatgtcataca

SEQ ID NO: 1469044 - DNA, 25 bp, Homo sapien
tttgggcaggtaacatccgtggtac

SEQ ID NO: 1469045 - DNA, 25 bp, Homo sapien
agagccaccggaagaaaaaatctag

SEQ ID NO: 1469046 - DNA, 25 bp, Homo sapien
tccaacctgatggaggcctccgagg

SEQ ID NO: 1469047 - DNA, 25 bp, Homo sapien
tttgtcaaagagccaccggaagaaa

SEQ ID NO: 1469048 - DNA, 25 bp, Homo sapien
ccaacctgatggaggcctccgagga

SEQ ID NO: 1469049 - DNA, 25 bp, Homo sapien
ggacagtgctctcctgatgtgactc

SEQ ID NO: 1469050 - DNA, 25 bp, Homo sapien
ccgagtggttgcgacaggcttagat

SEQ ID NO: 1469051 - DNA, 25 bp, Homo sapien
gaacaatcaatcatattgccagaag

SEQ ID NO: 1469052 - DNA, 25 bp, Homo sapien
aagaatcaatgacccagccctactg

SEQ ID NO: 1469053 - DNA, 25 bp, Homo sapien
tatgtagactttggtcatcatgatc

SEQ ID NO: 1469054 - DNA, 25 bp, Homo sapien
gtagactttggtcatcatgatctgg

SEQ ID NO: 1469055 - DNA, 25 bp, Homo sapien
gaatatgtagactttggtcatcatg

SEQ ID NO: 1469056 - DNA, 25 bp, Homo sapien
tggtcatcatgatctggttttcccc

SEQ ID NO: 1469057 - DNA, 25 bp, Homo sapien
gtcaaaggtgagcactcgcagtccc

SEQ ID NO: 1469058 - DNA, 25 bp, Homo sapien
ccagcagtgtagagtagtagacaat

SEQ ID NO: 1469059 - DNA, 25 bp, Homo sapien
cagtgtagagtagtagacaatggag

SEQ ID NO: 1469060 - DNA, 25 bp, Homo sapien
agtgagactccagcagtgtagagta

SEQ ID NO: 1469061 - DNA, 25 bp, Homo sapien
agactccagcagtgtagagtagtag

SEQ ID NO: 1469062 - DNA, 25 bp, Homo sapien
tcatcagatagggaatggcaaagtg

SEQ ID NO: 1469063 - DNA, 25 bp, Homo sapien
catcttcaaaagaataggcctgtcc

SEQ ID NO: 1469064 - DNA, 25 bp, Homo sapien
taatagtgcaggtgttttaactcca

SEQ ID NO: 1469065 - DNA, 25 bp, Homo sapien
tcccagggaatgattaaccaaatgc

SEQ ID NO: 1469066 - DNA, 25 bp, Homo sapien
ggtttggtgacattaaacttgtcca

SEQ ID NO: 1469067 - DNA, 25 bp, Homo sapien
ggtgaagttgatgcccagccactgt

SEQ ID NO: 1469068 - DNA, 25 bp, Homo sapien
gagggtgtggtcaggaaaaatagcc

SEQ ID NO: 1469069 - DNA, 25 bp, Homo sapien
actgtagccaccagcggaggccctg

SEQ ID NO: 1469070 - DNA, 25 bp, Homo sapien
aggcttgtctcccagtgctcgtggc

SEQ ID NO: 1469071 - DNA, 25 bp, Homo sapien
taggcagaccaagagactagcctgg

SEQ ID NO: 1469072 - DNA, 25 bp, Homo sapien
tcagaaggtcagatttaggcagacc

SEQ ID NO: 1469073 - DNA, 25 bp, Homo sapien
gggatacaggtctcgaggcttgtct

SEQ ID NO: 1469074 - DNA, 25 bp, Homo sapien
gacactggacctaagtaaggctgca

SEQ ID NO: 1469075 - DNA, 25 bp, Homo sapien
taggaagccttgtgaaccaaagagc

SEQ ID NO: 1469076 - DNA, 25 bp, Homo sapien
tctgcaatgctttgtgactaacgac

SEQ ID NO: 1469077 - DNA, 25 bp, Homo sapien
cccagcgtggcatttcttagacaca

SEQ ID NO: 1469078 - DNA, 25 bp, Homo sapien
tagagctccctgctatgggaggacg

SEQ ID NO: 1469079 - DNA, 25 bp, Homo sapien
gctctgacacttgcaggcattgaaa

SEQ ID NO: 1469080 - DNA, 25 bp, Homo sapien
ggctcacctttgcactgaaggctct

SEQ ID NO: 1469081 - DNA, 25 bp, Homo sapien
ctgtccacttggaggtatagagctc

SEQ ID NO: 1469082 - DNA, 25 bp, Homo sapien
cacatgaagccaacaggatgggtcc

SEQ ID NO: 1469083 - DNA, 25 bp, Homo sapien
gaaactgagggcaacacactgctct

SEQ ID NO: 1469084 - DNA, 25 bp, Homo sapien
taacgctatgtaagaggtgccacgc

SEQ ID NO: 1469085 - DNA, 25 bp, Homo sapien
caaggaaatgtagcaacagccaggc

SEQ ID NO: 1469086 - DNA, 25 bp, Homo sapien
gctggtcctggacgtggcgttcttc

SEQ ID NO: 1469087 - DNA, 25 bp, Homo sapien
tggccatggacttctcctggaaggt

SEQ ID NO: 1469088 - DNA, 25 bp, Homo sapien
ggacgtggcgttcttcctctgtgat

SEQ ID NO: 1469089 - DNA, 25 bp, Homo sapien
taggtggccatggacttctcctgga

SEQ ID NO: 1469090 - DNA, 25 bp, Homo sapien
tttgtgtaataggtcaggctcttct

SEQ ID NO: 1469091 - DNA, 25 bp, Homo sapien
tgcaggtttgtgtaataggtcaggc

SEQ ID NO: 1469092 - DNA, 25 bp, Homo sapien
caggtttgtgtaataggtcaggctc

SEQ ID NO: 1469093 - DNA, 25 bp, Homo sapien
acctgcaggtttgtgtaataggtca

SEQ ID NO: 1469094 - DNA, 25 bp, Homo sapien
tggccacgttgtagcacagctgcac

SEQ ID NO: 1469095 - DNA, 25 bp, Homo sapien
gatcagtttggccacgttgtagcac

SEQ ID NO: 1469096 - DNA, 25 bp, Homo sapien
cacctcacacgtgggatacgcgtcc

SEQ ID NO: 1469097 - DNA, 25 bp, Homo sapien
tctccttgcacaggtagatcagttt

SEQ ID NO: 1469098 - DNA, 25 bp, Homo sapien
gaaggaggcaaaagacaccgttgga

SEQ ID NO: 1469099 - DNA, 25 bp, Homo sapien
ccacggatccaagggaaaggatggc

SEQ ID NO: 1469100 - DNA, 25 bp, Homo sapien
aaggatggcagagtgatctcgctgc

SEQ ID NO: 1469101 - DNA, 25 bp, Homo sapien
gtttctgtgccagcggagacctctc

SEQ ID NO: 1469102 - DNA, 25 bp, Homo sapien
actgcaccccgctagccttttttag

SEQ ID NO: 1469103 - DNA, 25 bp, Homo sapien
aagctaactgcctggaactgacaag

SEQ ID NO: 1469104 - DNA, 25 bp, Homo sapien
actgacaagtttatacccacttggc

SEQ ID NO: 1469105 - DNA, 25 bp, Homo sapien
tggcttggaatcagctggcacttct

SEQ ID NO: 1469106 - DNA, 25 bp, Homo sapien
gcagatactcaaagggagccgctgg

SEQ ID NO: 1469107 - DNA, 25 bp, Homo sapien
tcagtgggtggacaaacgaacaaac

SEQ ID NO: 1469108 - DNA, 25 bp, Homo sapien
tacccaagcgagagacagaaggcgc

SEQ ID NO: 1469109 - DNA, 25 bp, Homo sapien
tgcaaaggtgatgctaagaaccccg

SEQ ID NO: 1469110 - DNA, 25 bp, Homo sapien
cggaagtggctctccacagtctcct

SEQ ID NO: 1469111 - DNA, 25 bp, Homo sapien
ctccacagtctccttcctggcatct

SEQ ID NO: 1469112 - DNA, 25 bp, Homo sapien
ggaagtggctctccacagtctcctt

SEQ ID NO: 1469113 - DNA, 25 bp, Homo sapien
gctctccacagtctccttcctggca

SEQ ID NO: 1469114 - DNA, 25 bp, Homo sapien
ctgtgatgaacagggtccgcctcac

SEQ ID NO: 1469115 - DNA, 25 bp, Homo sapien
ctggggagtcctgtgatgaacaggg

SEQ ID NO: 1469116 - DNA, 25 bp, Homo sapien
tcctgtgatgaacagggtccgcctc

SEQ ID NO: 1469117 - DNA, 25 bp, Homo sapien
gagtcctgtgatgaacagggtccgc

SEQ ID NO: 1469118 - DNA, 25 bp, Homo sapien
tccaggctgtacaaagaatccactt

SEQ ID NO: 1469119 - DNA, 25 bp, Homo sapien
cagtgtgccggtatgctcaggtttc

SEQ ID NO: 1469120 - DNA, 25 bp, Homo sapien
gactcaaatgcggtcacacagcaga

SEQ ID NO: 1469121 - DNA, 25 bp, Homo sapien
catttacacagcgtcttcttccagg

SEQ ID NO: 1469122 - DNA, 25 bp, Homo sapien
tggtgtgcagccaaaggaggtcatt

SEQ ID NO: 1469123 - DNA, 25 bp, Homo sapien
tgccgcatgaaacccacagtgagga

SEQ ID NO: 1469124 - DNA, 25 bp, Homo sapien
tcctctttgtacttaatggactgag

SEQ ID NO: 1469125 - DNA, 25 bp, Homo sapien
gactgagtgtggtgccgcatgaaac

SEQ ID NO: 1469126 - DNA, 25 bp, Homo sapien
cagtctgtaggtttgctattgttgt

SEQ ID NO: 1469127 - DNA, 25 bp, Homo sapien
agtctgtaggtttgctattgttgtc

SEQ ID NO: 1469128 - DNA, 25 bp, Homo sapien
tcagtctgtaggtttgctattgttg

SEQ ID NO: 1469129 - DNA, 25 bp, Homo sapien
gagaccatcttacatctgaagtggg

SEQ ID NO: 1469130 - DNA, 25 bp, Homo sapien
taaaagactctctgatagcccctga

SEQ ID NO: 1469131 - DNA, 25 bp, Homo sapien
cagttttagcctaggtttgctccag

SEQ ID NO: 1469132 - DNA, 25 bp, Homo sapien
tacaacatagacaagggtgaggagg

SEQ ID NO: 1469133 - DNA, 25 bp, Homo sapien
ctgagaggttgacaggcaggatgac

SEQ ID NO: 1469134 - DNA, 25 bp, Homo sapien
gagaggttgacaggcaggatgacac

SEQ ID NO: 1469135 - DNA, 25 bp, Homo sapien
ccagcaagtcccctgagaggttgac

SEQ ID NO: 1469136 - DNA, 25 bp, Homo sapien
gaggttgacaggcaggatgacacac

SEQ ID NO: 1469137 - DNA, 25 bp, Homo sapien
aggtagtggatggcgtcctccccac

SEQ ID NO: 1469138 - DNA, 25 bp, Homo sapien
tggatggcgtcctccccacaccatt

SEQ ID NO: 1469139 - DNA, 25 bp, Homo sapien
gacaggtagtggatggcgtcctccc

SEQ ID NO: 1469140 - DNA, 25 bp, Homo sapien
ggatggcgtcctccccacaccattc

SEQ ID NO: 1469141 - DNA, 25 bp, Homo sapien
taatgagcagtggaacaggcctcgg

SEQ ID NO: 1469142 - DNA, 25 bp, Homo sapien
gacacagaggaatcttaatgagcag

SEQ ID NO: 1469143 - DNA, 25 bp, Homo sapien
agatggttcgatcgctatccccaca

SEQ ID NO: 1469144 - DNA, 25 bp, Homo sapien
gggctctgcatgaagtgtctcatat

SEQ ID NO: 1469145 - DNA, 25 bp, Homo sapien
tggctcactgcgacctccgccttcc

SEQ ID NO: 1469146 - DNA, 25 bp, Homo sapien
ctggagttgcagtggggtgatcttg

SEQ ID NO: 1469147 - DNA, 25 bp, Homo sapien
tgcgacctccgccttccggtttcaa

SEQ ID NO: 1469148 - DNA, 25 bp, Homo sapien
acagttttgctctttcactcaggct

SEQ ID NO: 1469149 - DNA, 25 bp, Homo sapien
tgcagacggaagatggcagtcagcc

SEQ ID NO: 1469150 - DNA, 25 bp, Homo sapien
ttcctgcctgcaaattcatccagtc

SEQ ID NO: 1469151 - DNA, 25 bp, Homo sapien
gtcgatgacaatctctgaaatctgg

SEQ ID NO: 1469152 - DNA, 25 bp, Homo sapien
ggaggaagtcgatgacaatctctga

SEQ ID NO: 1469153 - DNA, 25 bp, Homo sapien
ttcaaagtcttgttgacctgaggag

SEQ ID NO: 1469154 - DNA, 25 bp, Homo sapien
tttcaaagtcttgttgacctgagga

SEQ ID NO: 1469155 - DNA, 25 bp, Homo sapien
ttttctctagtctcctattcctggt

SEQ ID NO: 1469156 - DNA, 25 bp, Homo sapien
cttttctctagtctcctattcctgg

SEQ ID NO: 1469157 - DNA, 25 bp, Homo sapien
ttctactgcccccctactaaagaca

SEQ ID NO: 1469158 - DNA, 25 bp, Homo sapien
ctctagtctcctattcctggttcta

SEQ ID NO: 1469159 - DNA, 25 bp, Homo sapien
aatgcggccatagtcccagaatctt

SEQ ID NO: 1469160 - DNA, 25 bp, Homo sapien
acaccagggcaatgcggccatagtc

SEQ ID NO: 1469161 - DNA, 25 bp, Homo sapien
gggcaatgcggccatagtcccagaa

SEQ ID NO: 1469162 - DNA, 25 bp, Homo sapien
ggcaatgcggccatagtcccagaat

SEQ ID NO: 1469163 - DNA, 25 bp, Homo sapien
tcttataatagaaaacaccaagatt

SEQ ID NO: 1469164 - DNA, 25 bp, Homo sapien
cttcttataatagaaaacaccaaga

SEQ ID NO: 1469165 - DNA, 25 bp, Homo sapien
taatagaaaacaccaagattaagaa

SEQ ID NO: 1469166 - DNA, 25 bp, Homo sapien
tataatagaaaacaccaagattaag

SEQ ID NO: 1469167 - DNA, 25 bp, Homo sapien
tggccgagttgtagcaataggagtc

SEQ ID NO: 1469168 - DNA, 25 bp, Homo sapien
gcacggtgctgtttttggccgagtt

SEQ ID NO: 1469169 - DNA, 25 bp, Homo sapien
ttgtagcaataggagtcgttgggcc

SEQ ID NO: 1469170 - DNA, 25 bp, Homo sapien
aagcagctgacgtctatgagcagga

SEQ ID NO: 1469171 - DNA, 25 bp, Homo sapien
ggcagacgttcagggctcaaatttc

SEQ ID NO: 1469172 - DNA, 25 bp, Homo sapien
aggcagacgttcagggctcaaattt

SEQ ID NO: 1469173 - DNA, 25 bp, Homo sapien
aaggcagacgttcagggctcaaatt

SEQ ID NO: 1469174 - DNA, 25 bp, Homo sapien
gctttcctgaccagcgagtcctggg

SEQ ID NO: 1469175 - DNA, 25 bp, Homo sapien
gaggtcctcagttggagctgtctct

SEQ ID NO: 1469176 - DNA, 25 bp, Homo sapien
gatgggcccgttggagaggtcctca

SEQ ID NO: 1469177 - DNA, 25 bp, Homo sapien
aggcgtcgggcctaacactcatgtc

SEQ ID NO: 1469178 - DNA, 25 bp, Homo sapien
ttattcctactcaatatgccgaggg

SEQ ID NO: 1469179 - DNA, 25 bp, Homo sapien
aatatgccgagggtaggaaagccaa

SEQ ID NO: 1469180 - DNA, 25 bp, Homo sapien
actcaatatgccgagggtaggaaag

SEQ ID NO: 1469181 - DNA, 25 bp, Homo sapien
ttcctactcaatatgccgagggtag

SEQ ID NO: 1469182 - DNA, 25 bp, Homo sapien
aacttgacaagctctagaaatacca

SEQ ID NO: 1469183 - DNA, 25 bp, Homo sapien
ttgcaagaaggcccgtacaaattca

SEQ ID NO: 1469184 - DNA, 25 bp, Homo sapien
actggcctggtggtcaacttgacaa

SEQ ID NO: 1469185 - DNA, 25 bp, Homo sapien
tatatggatattgttcgttcttgca

SEQ ID NO: 1469186 - DNA, 25 bp, Homo sapien
tggagcacaaaggaaatgacacagc

SEQ ID NO: 1469187 - DNA, 25 bp, Homo sapien
tgcgtaggctgggagccgttccgga

SEQ ID NO: 1469188 - DNA, 25 bp, Homo sapien
tctgcgtaggctgggagccgttccg

SEQ ID NO: 1469189 - DNA, 25 bp, Homo sapien
gggtctgcgtaggctgggagccgtt

SEQ ID NO: 1469190 - DNA, 25 bp, Homo sapien
gcgtaggctgggagccgttccggaa

SEQ ID NO: 1469191 - DNA, 25 bp, Homo sapien
gcgcggggcgtgttccgaccactta

SEQ ID NO: 1469192 - DNA, 25 bp, Homo sapien
tgtagaaggccggaccgtgaaagcc

SEQ ID NO: 1469193 - DNA, 25 bp, Homo sapien
tagtccattactgctcgagccaggg

SEQ ID NO: 1469194 - DNA, 25 bp, Homo sapien
gggcgggtcgcagcatttccaacgc

SEQ ID NO: 1469195 - DNA, 25 bp, Homo sapien
gaaccgcgcggagcgccctgcaaga

SEQ ID NO: 1469196 - DNA, 25 bp, Homo sapien
gtggcctccacaaccggaccgcaag

SEQ ID NO: 1469197 - DNA, 25 bp, Homo sapien
gagccggtggcctccacaaccggac

SEQ ID NO: 1469198 - DNA, 25 bp, Homo sapien
ggcccgccgcgccagggactgctgg

SEQ ID NO: 1469199 - DNA, 25 bp, Homo sapien
accggaccgcaagctcgcgagggca

SEQ ID NO: 1469200 - DNA, 25 bp, Homo sapien
ttgtccatcagcagttcagtcatcg

SEQ ID NO: 1469201 - DNA, 25 bp, Homo sapien
caagtcaagtccctcgatggctaca

SEQ ID NO: 1469202 - DNA, 25 bp, Homo sapien
ggactttagcccagatccagtgaca

SEQ ID NO: 1469203 - DNA, 25 bp, Homo sapien
tgtcagaggaagcaaattcagggct

SEQ ID NO: 1469204 - DNA, 25 bp, Homo sapien
gctggagcctccttggcacgagcgc

SEQ ID NO: 1469205 - DNA, 25 bp, Homo sapien
tggctggagcctccttggcacgagc

SEQ ID NO: 1469206 - DNA, 25 bp, Homo sapien
tatggctggagcctccttggcacga

SEQ ID NO: 1469207 - DNA, 25 bp, Homo sapien
ctatggctggagcctccttggcacg

SEQ ID NO: 1469208 - DNA, 25 bp, Homo sapien
tgtcgaggccccagaaacggccact

SEQ ID NO: 1469209 - DNA, 25 bp, Homo sapien
cgaggccccagaaacggccacttga

SEQ ID NO: 1469210 - DNA, 25 bp, Homo sapien
gatgcactgtcgaggccccagaaac

SEQ ID NO: 1469211 - DNA, 25 bp, Homo sapien
ggctccagcacccagttctcggccc

SEQ ID NO: 1469212 - DNA, 25 bp, Homo sapien
cgccagcgggcccagatgctccctc

SEQ ID NO: 1469213 - DNA, 25 bp, Homo sapien
gggctccccaagcccggctggcgcc

SEQ ID NO: 1469214 - DNA, 25 bp, Homo sapien
ctgcgaggcaaagcggaccagcttg

SEQ ID NO: 1469215 - DNA, 25 bp, Homo sapien
ccagcttgtgggcgccggacgccag

SEQ ID NO: 1469216 - DNA, 25 bp, Homo sapien
gctgccagaagttcacggcctcggt

SEQ ID NO: 1469217 - DNA, 25 bp, Homo sapien
agccgctctcgtggacggacaccag

SEQ ID NO: 1469218 - DNA, 25 bp, Homo sapien
ctcggtcacgtcgaaggccttccag

SEQ ID NO: 1469219 - DNA, 25 bp, Homo sapien
ttccagccgctctcgtggacggaca

SEQ ID NO: 1469220 - DNA, 25 bp, Homo sapien
ggacagccgcccgtgcctgtgcagc

SEQ ID NO: 1469221 - DNA, 25 bp, Homo sapien
ggttggagccgtcgtcgcggacgcg

SEQ ID NO: 1469222 - DNA, 25 bp, Homo sapien
ggacgcgcagccactcgacggtcac

SEQ ID NO: 1469223 - DNA, 25 bp, Homo sapien
cgatgagggaggtgcggttggagcc

SEQ ID NO: 1469224 - DNA, 25 bp, Homo sapien
tgtgctggcctccaacgccaggaac

SEQ ID NO: 1469225 - DNA, 25 bp, Homo sapien
tgtgtgctggcctccaacgccagga

SEQ ID NO: 1469226 - DNA, 25 bp, Homo sapien
aacgccaggaacctgccggccacct

SEQ ID NO: 1469227 - DNA, 25 bp, Homo sapien
aggtgtgtgctggcctccaacgcca

SEQ ID NO: 1469228 - DNA, 25 bp, Homo sapien
ccaggtgcctggcattgggtctagc

SEQ ID NO: 1469229 - DNA, 25 bp, Homo sapien
ttgggtctagctctgggcactgagg

SEQ ID NO: 1469230 - DNA, 25 bp, Homo sapien
cattgggtctagctctgggcactga

SEQ ID NO: 1469231 - DNA, 25 bp, Homo sapien
cctggcattgggtctagctctgggc

SEQ ID NO: 1469232 - DNA, 25 bp, Homo sapien
gccccatgggaccaggggcagcagg

SEQ ID NO: 1469233 - DNA, 25 bp, Homo sapien
gggcagcagggagggagggcctcac

SEQ ID NO: 1469234 - DNA, 25 bp, Homo sapien
ctgccccatgggaccaggggcagca

SEQ ID NO: 1469235 - DNA, 25 bp, Homo sapien
aggggcagcagggagggagggcctc

SEQ ID NO: 1469236 - DNA, 25 bp, Homo sapien
ccacgtactgggccctcacgtgggt

SEQ ID NO: 1469237 - DNA, 25 bp, Homo sapien
tactgggccctcacgtgggtgggga

SEQ ID NO: 1469238 - DNA, 25 bp, Homo sapien
cacgtactgggccctcacgtgggtg

SEQ ID NO: 1469239 - DNA, 25 bp, Homo sapien
ccagggtgggcacctctttgagctg

SEQ ID NO: 1469240 - DNA, 25 bp, Homo sapien
caagaggcagagtggggctgtccct

SEQ ID NO: 1469241 - DNA, 25 bp, Homo sapien
tggggctgtcccttgagaaggctgc

SEQ ID NO: 1469242 - DNA, 25 bp, Homo sapien
agggtctcaggcagctggatgtgct

SEQ ID NO: 1469243 - DNA, 25 bp, Homo sapien
aggagggtctcaggcagctggatgt

SEQ ID NO: 1469244 - DNA, 25 bp, Homo sapien
gattctgccccttttcagtatcctg

SEQ ID NO: 1469245 - DNA, 25 bp, Homo sapien
attctgccccttttcagtatcctga

SEQ ID NO: 1469246 - DNA, 25 bp, Homo sapien
gccccttttcagtatcctgaatgaa

SEQ ID NO: 1469247 - DNA, 25 bp, Homo sapien
tctgccccttttcagtatcctgaat

SEQ ID NO: 1469248 - DNA, 25 bp, Homo sapien
gaggcccagagcatctaagatcctt

SEQ ID NO: 1469249 - DNA, 25 bp, Homo sapien
gcattgttgacatttcataaaggag

SEQ ID NO: 1469250 - DNA, 25 bp, Homo sapien
aggtcgcagattgttaacgagagca

SEQ ID NO: 1469251 - DNA, 25 bp, Homo sapien
catctaagatccttgcccgaggtcg

SEQ ID NO: 1469252 - DNA, 25 bp, Homo sapien
acctggcctctggttggagtcacat

SEQ ID NO: 1469253 - DNA, 25 bp, Homo sapien
ctggcctctggttggagtcacatcc

SEQ ID NO: 1469254 - DNA, 25 bp, Homo sapien
tcaccgactcataaccaagacattc

SEQ ID NO: 1469255 - DNA, 25 bp, Homo sapien
caggtccttgctgaaaccagcccat

SEQ ID NO: 1469256 - DNA, 25 bp, Homo sapien
agctcccagcgagtccagatgttgg

SEQ ID NO: 1469257 - DNA, 25 bp, Homo sapien
ctggatttggcagggctttgtcacc

SEQ ID NO: 1469258 - DNA, 25 bp, Homo sapien
tctgcctgacgggtgcatttgccat

SEQ ID NO: 1469259 - DNA, 25 bp, Homo sapien
gccacactgaccttcgtctgaagta

SEQ ID NO: 1469260 - DNA, 25 bp, Homo sapien
gaccttcgtctgaagtaggtctgcc

SEQ ID NO: 1469261 - DNA, 25 bp, Homo sapien
ggggagcggcctgtattctccatga

SEQ ID NO: 1469262 - DNA, 25 bp, Homo sapien
tctccctcatcccttgactcttcat

SEQ ID NO: 1469263 - DNA, 25 bp, Homo sapien
ttgtgctgaaatcctccccctgctt

SEQ ID NO: 1469264 - DNA, 25 bp, Homo sapien
caggccagctggaggctccactcca

SEQ ID NO: 1469265 - DNA, 25 bp, Homo sapien
ctccactccacccttgtgctgaaat

SEQ ID NO: 1469266 - DNA, 25 bp, Homo sapien
gactctctaggcctcgtcttgagca

SEQ ID NO: 1469267 - DNA, 25 bp, Homo sapien
tggattccagcgctttcccctagat

SEQ ID NO: 1469268 - DNA, 25 bp, Homo sapien
ttcagatggcccacgtcaggctgga

SEQ ID NO: 1469269 - DNA, 25 bp, Homo sapien
cacctgtcgttaaagtgactgactc

SEQ ID NO: 1469270 - DNA, 25 bp, Homo sapien
tgttttctagcatgccccacgagtg

SEQ ID NO: 1469271 - DNA, 25 bp, Homo sapien
tgaaacagtgaaggaaagcgcagcc

SEQ ID NO: 1469272 - DNA, 25 bp, Homo sapien
tgtgcagaaaggactagctctcctg

SEQ ID NO: 1469273 - DNA, 25 bp, Homo sapien
taagagacacccactgggaaatcgg

SEQ ID NO: 1469274 - DNA, 25 bp, Homo sapien
tatttgtcacattgcggtgtccaca

SEQ ID NO: 1469275 - DNA, 25 bp, Homo sapien
caaagtgacaagtccaccacaggct

SEQ ID NO: 1469276 - DNA, 25 bp, Homo sapien
aaagacgcgcccatgcaaagtgaca

SEQ ID NO: 1469277 - DNA, 25 bp, Homo sapien
tagctctttgtgaggaatgttccag

SEQ ID NO: 1469278 - DNA, 25 bp, Homo sapien
tcaaatctttttgggcaacttggat

SEQ ID NO: 1469279 - DNA, 25 bp, Homo sapien
aataactattttaaggctgagcatc

SEQ ID NO: 1469280 - DNA, 25 bp, Homo sapien
aaaatatacccagctcctaaggcca

SEQ ID NO: 1469281 - DNA, 25 bp, Homo sapien
agtattgcacttgctgtgttggccc

SEQ ID NO: 1469282 - DNA, 25 bp, Homo sapien
tgatagctaagaacacagacagccc

SEQ ID NO: 1469283 - DNA, 25 bp, Homo sapien
tcttttgccagggtggactacggtg

SEQ ID NO: 1469284 - DNA, 25 bp, Homo sapien
taagttgcttatccctctaggcctc

SEQ ID NO: 1469285 - DNA, 25 bp, Homo sapien
gcaggcagctcgtaggaacaagtac

SEQ ID NO: 1469286 - DNA, 25 bp, Homo sapien
aaatggtacacctatgaagcaagag

SEQ ID NO: 1469287 - DNA, 25 bp, Homo sapien
gctcgcattgcttggtctgaacaga

SEQ ID NO: 1469288 - DNA, 25 bp, Homo sapien
tcaactaagggctctgaatcacaga

SEQ ID NO: 1469289 - DNA, 25 bp, Homo sapien
gtctccaccaactgagcagcgtacg

SEQ ID NO: 1469290 - DNA, 25 bp, Homo sapien
gcttcttgtgaggagcttccctggg

SEQ ID NO: 1469291 - DNA, 25 bp, Homo sapien
gactgtgggggattccagcttcact

SEQ ID NO: 1469292 - DNA, 25 bp, Homo sapien
gagactgtgggggattccagcttca

SEQ ID NO: 1469293 - DNA, 25 bp, Homo sapien
ggcttcttgtgaggagcttccctgg

SEQ ID NO: 1469294 - DNA, 25 bp, Homo sapien
gaggcctcaactgcattgatgagca

SEQ ID NO: 1469295 - DNA, 25 bp, Homo sapien
tctctagaaagtgcagggcgtggat

SEQ ID NO: 1469296 - DNA, 25 bp, Homo sapien
atggatgctgctccgagtccagcag

SEQ ID NO: 1469297 - DNA, 25 bp, Homo sapien
cgtgttcggatacaggaggcctcaa

SEQ ID NO: 1469298 - DNA, 25 bp, Homo sapien
aaccaactcccacctcagttcagtg

SEQ ID NO: 1469299 - DNA, 25 bp, Homo sapien
ttctacaccctggtcctgaacatgc

SEQ ID NO: 1469300 - DNA, 25 bp, Homo sapien
ggtgtgcgttggaacaggcttccca

SEQ ID NO: 1469301 - DNA, 25 bp, Homo sapien
tcagtgatgcacaagaacccccatt

SEQ ID NO: 1469302 - DNA, 25 bp, Homo sapien
aggcgccgtggcaaacccatcttca

SEQ ID NO: 1469303 - DNA, 25 bp, Homo sapien
gcaaagcctgggccccgagttggat

SEQ ID NO: 1469304 - DNA, 25 bp, Homo sapien
cccgagttggattgccaggcgccgt

SEQ ID NO: 1469305 - DNA, 25 bp, Homo sapien
ccaccatcagccaatgcgtccagag

SEQ ID NO: 1469306 - DNA, 25 bp, Homo sapien
catgggtgcccgtggcgtacactgt

SEQ ID NO: 1469307 - DNA, 25 bp, Homo sapien
tggtcatgcagcgaatcactttggg

SEQ ID NO: 1469308 - DNA, 25 bp, Homo sapien
ttcctgcactaccacaggtgtgttg

SEQ ID NO: 1469309 - DNA, 25 bp, Homo sapien
gcgtacactgtagcgccttcctgca

SEQ ID NO: 1469310 - DNA, 25 bp, Homo sapien
cattagctgccattcgtgggtcaac

SEQ ID NO: 1469311 - DNA, 25 bp, Homo sapien
cccattagctgccattcgtgggtca

SEQ ID NO: 1469312 - DNA, 25 bp, Homo sapien
cgaatgagtggccagggcacggctc

SEQ ID NO: 1469313 - DNA, 25 bp, Homo sapien
tagctgccattcgtgggtcaaccct

SEQ ID NO: 1469314 - DNA, 25 bp, Homo sapien
cacagagctgatggtgacaccagcc

SEQ ID NO: 1469315 - DNA, 25 bp, Homo sapien
aacaggacgtcgctgtgcttcaccg

SEQ ID NO: 1469316 - DNA, 25 bp, Homo sapien
cacaggagaccacgatgtgtctggc

SEQ ID NO: 1469317 - DNA, 25 bp, Homo sapien
tcggccccaatctcatccaggatga

SEQ ID NO: 1469318 - DNA, 25 bp, Homo sapien
gactccaaactgagaagcaggaccc

SEQ ID NO: 1469319 - DNA, 25 bp, Homo sapien
gaaagattgtcacgttcctggagta

SEQ ID NO: 1469320 - DNA, 25 bp, Homo sapien
tctgccaggtaagaaggccctatgg

SEQ ID NO: 1469321 - DNA, 25 bp, Homo sapien
cattgagctgcccaagagaaggtgg

SEQ ID NO: 1469322 - DNA, 25 bp, Homo sapien
gctattatcttgtgagccgacagga

SEQ ID NO: 1469323 - DNA, 25 bp, Homo sapien
agcgcggacaccgtgggcaggttca

SEQ ID NO: 1469324 - DNA, 25 bp, Homo sapien
cctgagcgcggacaccgtgggcagg

SEQ ID NO: 1469325 - DNA, 25 bp, Homo sapien
ttcatttctggggagctggctatta

SEQ ID NO: 1469326 - DNA, 25 bp, Homo sapien
gttaccacgctttccctggctctaa

SEQ ID NO: 1469327 - DNA, 25 bp, Homo sapien
gctttccctggctctaaaacccaga

SEQ ID NO: 1469328 - DNA, 25 bp, Homo sapien
accctctacgaggacagaagacgca

SEQ ID NO: 1469329 - DNA, 25 bp, Homo sapien
agagccgtcctaacagtgccagtct

SEQ ID NO: 1469330 - DNA, 25 bp, Homo sapien
agagtctcatctaccccaccggacg

SEQ ID NO: 1469331 - DNA, 25 bp, Homo sapien
tcatctaccccaccggacgcaaact

SEQ ID NO: 1469332 - DNA, 25 bp, Homo sapien
gctgctcaaccagagtctcatctac

SEQ ID NO: 1469333 - DNA, 25 bp, Homo sapien
ttgctgctcaaccagagtctcatct

SEQ ID NO: 1469334 - DNA, 25 bp, Homo sapien
ccgcgaagccgcctcccgcctccac

SEQ ID NO: 1469335 - DNA, 25 bp, Homo sapien
gcccgcgaagccgcctcccgcctcc

SEQ ID NO: 1469336 - DNA, 25 bp, Homo sapien
cccgcgaagccgcctcccgcctcca

SEQ ID NO: 1469337 - DNA, 25 bp, Homo sapien
cgcccgcgaagccgcctcccgcctc

SEQ ID NO: 1469338 - DNA, 25 bp, Homo sapien
ctgcggccgtgaagccccgcgccag

SEQ ID NO: 1469339 - DNA, 25 bp, Homo sapien
tgcggccgtgaagccccgcgccaga

SEQ ID NO: 1469340 - DNA, 25 bp, Homo sapien
gaagccccgcgccagagcataggcc

SEQ ID NO: 1469341 - DNA, 25 bp, Homo sapien
acgcctcctgggagccgcacgaacc

SEQ ID NO: 1469342 - DNA, 25 bp, Homo sapien
ggtccgcggttcacgcctcctggga

SEQ ID NO: 1469343 - DNA, 25 bp, Homo sapien
cgcacgaaccccctcagcgagggac

SEQ ID NO: 1469344 - DNA, 25 bp, Homo sapien
cctcagcgagggaccggaagtaacg

SEQ ID NO: 1469345 - DNA, 25 bp, Homo sapien
gaccggcgagctaacagcagcttct

SEQ ID NO: 1469346 - DNA, 25 bp, Homo sapien
cgaacgggcggcgtgccgaggaccg

SEQ ID NO: 1469347 - DNA, 25 bp, Homo sapien
agcagcttctgggatggtgcaaccc

SEQ ID NO: 1469348 - DNA, 25 bp, Homo sapien
gggatggtgcaaccctattctcccc

SEQ ID NO: 1469349 - DNA, 25 bp, Homo sapien
ctccttcacaacttcctaatgctgc

SEQ ID NO: 1469350 - DNA, 25 bp, Homo sapien
tccttcacaacttcctaatgctgcc

SEQ ID NO: 1469351 - DNA, 25 bp, Homo sapien
ggctgtggtctgttgtggggagctc

SEQ ID NO: 1469352 - DNA, 25 bp, Homo sapien
tcctggctgtggtctgttgtgggga

SEQ ID NO: 1469353 - DNA, 25 bp, Homo sapien
ggcactgcagggccctttgcttttc

SEQ ID NO: 1469354 - DNA, 25 bp, Homo sapien
agggcactgcagggccctttgcttt

SEQ ID NO: 1469355 - DNA, 25 bp, Homo sapien
cttgcgttgatatctcccgtttccg

SEQ ID NO: 1469356 - DNA, 25 bp, Homo sapien
tggttgccttgcgttgatatctccc

SEQ ID NO: 1469357 - DNA, 25 bp, Homo sapien
gcgttgatatctcccgtttccgctt

SEQ ID NO: 1469358 - DNA, 25 bp, Homo sapien
ttgccttgcgttgatatctcccgtt

SEQ ID NO: 1469359 - DNA, 25 bp, Homo sapien
tattatagtcttgcgccctagaggt

SEQ ID NO: 1469360 - DNA, 25 bp, Homo sapien
gaatgagagttgtgtgagaaaatag

SEQ ID NO: 1469361 - DNA, 25 bp, Homo sapien
tcattgtgttgctctcattccccat

SEQ ID NO: 1469362 - DNA, 25 bp, Homo sapien
taactattatagtcttgcgccctag

SEQ ID NO: 1469363 - DNA, 25 bp, Homo sapien
gagatcctagcttgtggccctgtca

SEQ ID NO: 1469364 - DNA, 25 bp, Homo sapien
ggtcacacaggagcactaaattggg

SEQ ID NO: 1469365 - DNA, 25 bp, Homo sapien
aaatgacgagccaaagccttctgcg

SEQ ID NO: 1469366 - DNA, 25 bp, Homo sapien
tgacctaaatatgcacgggcaaggc

SEQ ID NO: 1469367 - DNA, 25 bp, Homo sapien
agaccacctctatgcacacgttcag

SEQ ID NO: 1469368 - DNA, 25 bp, Homo sapien
ttaagaccacctctatgcacacgtt

SEQ ID NO: 1469369 - DNA, 25 bp, Homo sapien
attaagaccacctctatgcacacgt

SEQ ID NO: 1469370 - DNA, 25 bp, Homo sapien
taagaccacctctatgcacacgttc

SEQ ID NO: 1469371 - DNA, 25 bp, Homo sapien
tatggctggagcctccttggcacga

SEQ ID NO: 1469372 - DNA, 25 bp, Homo sapien
gctggagcctccttggcacgagcgc

SEQ ID NO: 1469373 - DNA, 25 bp, Homo sapien
ctatggctggagcctccttggcacg

SEQ ID NO: 1469374 - DNA, 25 bp, Homo sapien
tggctggagcctccttggcacgagc

SEQ ID NO: 1469375 - DNA, 25 bp, Homo sapien
acgatcatgggcagcgaggcagtct

SEQ ID NO: 1469376 - DNA, 25 bp, Homo sapien
gaggcagtctccgaggcgatacact

SEQ ID NO: 1469377 - DNA, 25 bp, Homo sapien
ggcaggtgcccacacactcgtaagc

SEQ ID NO: 1469378 - DNA, 25 bp, Homo sapien
gggggctccagcacccagttcttgg

SEQ ID NO: 1469379 - DNA, 25 bp, Homo sapien
tcggtcacgtcgaaggccttccagc

SEQ ID NO: 1469380 - DNA, 25 bp, Homo sapien
ctgcgaggcaaagcggaccagcttg

SEQ ID NO: 1469381 - DNA, 25 bp, Homo sapien
gctgccagaagttcacggcctcggt

SEQ ID NO: 1469382 - DNA, 25 bp, Homo sapien
ttccagccgctctcgtggacggaca

SEQ ID NO: 1469383 - DNA, 25 bp, Homo sapien
cgatgagggaggtgcggttggagcc

SEQ ID NO: 1469384 - DNA, 25 bp, Homo sapien
ggacagccgcccgtgcctgtgcagc

SEQ ID NO: 1469385 - DNA, 25 bp, Homo sapien
ggttggagccgtcgtcgcggacgcg

SEQ ID NO: 1469386 - DNA, 25 bp, Homo sapien
tccatgccgaacaccagcaggtgtg

SEQ ID NO: 1469387 - DNA, 25 bp, Homo sapien
cactggctctagctctgggcactga

SEQ ID NO: 1469388 - DNA, 25 bp, Homo sapien
tggcactggctctagctctgggcac

SEQ ID NO: 1469389 - DNA, 25 bp, Homo sapien
gcctggcactggctctagctctggg

SEQ ID NO: 1469390 - DNA, 25 bp, Homo sapien
ctggctctagctctgggcactgagg

SEQ ID NO: 1469391 - DNA, 25 bp, Homo sapien
cggggccagcagggagggagggtct

SEQ ID NO: 1469392 - DNA, 25 bp, Homo sapien
ggccagcagggagggagggtctcac

SEQ ID NO: 1469393 - DNA, 25 bp, Homo sapien
tgggaccggggccagcagggaggga

SEQ ID NO: 1469394 - DNA, 25 bp, Homo sapien
catgggaccggggccagcagggagg

SEQ ID NO: 1469395 - DNA, 25 bp, Homo sapien
tggctgcgccgcagcaggactacat

SEQ ID NO: 1469396 - DNA, 25 bp, Homo sapien
gtacgggcacctcgctgagctgcag

SEQ ID NO: 1469397 - DNA, 25 bp, Homo sapien
gccgcagcaggactacatactgggc

SEQ ID NO: 1469398 - DNA, 25 bp, Homo sapien
atgtcggccctgtccagtacgggca

SEQ ID NO: 1469399 - DNA, 25 bp, Homo sapien
gagcaggaggcagagtggggctgtc

SEQ ID NO: 1469400 - DNA, 25 bp, Homo sapien
ggggagcaggaggcagagtggggct

SEQ ID NO: 1469401 - DNA, 25 bp, Homo sapien
ctgggggagcaggaggcagagtggg

SEQ ID NO: 1469402 - DNA, 25 bp, Homo sapien
gcaggaggcagagtggggctgtcct

SEQ ID NO: 1469403 - DNA, 25 bp, Homo sapien
ctagggaggttgaaggagggtctca

SEQ ID NO: 1469404 - DNA, 25 bp, Homo sapien
aggagggtctcaggcagctgggtgt

SEQ ID NO: 1469405 - DNA, 25 bp, Homo sapien
gggaggttgaaggagggtctcaggc

SEQ ID NO: 1469406 - DNA, 25 bp, Homo sapien
aaggagggtctcaggcagctgggtg

SEQ ID NO: 1469407 - DNA, 25 bp, Homo sapien
cctcccccagatgtcttgctgatat

SEQ ID NO: 1469408 - DNA, 25 bp, Homo sapien
agatgtcttgctgatatttctgcat

SEQ ID NO: 1469409 - DNA, 25 bp, Homo sapien
cccccagatgtcttgctgatatttc

SEQ ID NO: 1469410 - DNA, 25 bp, Homo sapien
ccagatgtcttgctgatatttctgc

SEQ ID NO: 1469411 - DNA, 25 bp, Homo sapien
tcttggacaaagactcccattgggc

SEQ ID NO: 1469412 - DNA, 25 bp, Homo sapien
gagctgggagtcgtcatgatgaaca

SEQ ID NO: 1469413 - DNA, 25 bp, Homo sapien
ggcatcgaggccttatccactggga

SEQ ID NO: 1469414 - DNA, 25 bp, Homo sapien
caatggacaggagcataggcatcga

SEQ ID NO: 1469415 - DNA, 25 bp, Homo sapien
ctgtatgtaggagcccaaactttac

SEQ ID NO: 1469416 - DNA, 25 bp, Homo sapien
gggactgtatgtaggagcccaaact

SEQ ID NO: 1469417 - DNA, 25 bp, Homo sapien
ctggagaaacctctgaggtatgcag

SEQ ID NO: 1469418 - DNA, 25 bp, Homo sapien
agaaacctctgaggtatgcagattg

SEQ ID NO: 1469419 - DNA, 25 bp, Homo sapien
ggtgctgaccgtgcctctgcagcgc

SEQ ID NO: 1469420 - DNA, 25 bp, Homo sapien
gctggaggcgggcttcggtggaccc

SEQ ID NO: 1469421 - DNA, 25 bp, Homo sapien
gaatcacggtgctgaccgtgcctct

SEQ ID NO: 1469422 - DNA, 25 bp, Homo sapien
agacatgggaatcacggtgctgacc

SEQ ID NO: 1469423 - DNA, 25 bp, Homo sapien
cccaaagtgtctaacagtgatattt

SEQ ID NO: 1469424 - DNA, 25 bp, Homo sapien
taaatagaatcttacatagaactcc

SEQ ID NO: 1469425 - DNA, 25 bp, Homo sapien
ctgagtgtaaggcttgatgctcact

SEQ ID NO: 1469426 - DNA, 25 bp, Homo sapien
tcatcgtcctgagcaaccacagaaa

SEQ ID NO: 1469427 - DNA, 25 bp, Homo sapien
taagcttaagaaggctgcagtggct

SEQ ID NO: 1469428 - DNA, 25 bp, Homo sapien
taaaagttatatcgtcggccaggca

SEQ ID NO: 1469429 - DNA, 25 bp, Homo sapien
gaagtggcacatcaactctaggtag

SEQ ID NO: 1469430 - DNA, 25 bp, Homo sapien
tcaccatgacagacaacatattggg

SEQ ID NO: 1469431 - DNA, 25 bp, Homo sapien
tcagttcacatttgagcttctccaa

SEQ ID NO: 1469432 - DNA, 25 bp, Homo sapien
gctcctttgccagtcctctgacaga

SEQ ID NO: 1469433 - DNA, 25 bp, Homo sapien
agagaagagtcttgctgcccgctcc

SEQ ID NO: 1469434 - DNA, 25 bp, Homo sapien
cacatttcagtccaagggccatcag

SEQ ID NO: 1469435 - DNA, 25 bp, Homo sapien
aggtgaacgccaataaatctatagt

SEQ ID NO: 1469436 - DNA, 25 bp, Homo sapien
ggtgaacgccaataaatctatagtt

SEQ ID NO: 1469437 - DNA, 25 bp, Homo sapien
tataactcaacaaactcaaatgctg

SEQ ID NO: 1469438 - DNA, 25 bp, Homo sapien
gcttaatgagaatcccatgcctctg

SEQ ID NO: 1469439 - DNA, 25 bp, Homo sapien
ttgcaactgttctacccaccaagtg

SEQ ID NO: 1469440 - DNA, 25 bp, Homo sapien
taaaactaattgtcagacctctccc

SEQ ID NO: 1469441 - DNA, 25 bp, Homo sapien
cagtgggctcctcttctatgggttc

SEQ ID NO: 1469442 - DNA, 25 bp, Homo sapien
tgtaaccatcctgctttccatgtgc

SEQ ID NO: 1469443 - DNA, 25 bp, Homo sapien
gcagtttggcaacggcaacgttttc

SEQ ID NO: 1469444 - DNA, 25 bp, Homo sapien
tcttcaggtgctacctcagcaactc

SEQ ID NO: 1469445 - DNA, 25 bp, Homo sapien
gtattcactactctcgccctctgag

SEQ ID NO: 1469446 - DNA, 25 bp, Homo sapien
ttggagcatggaaacccattcctga

SEQ ID NO: 1469447 - DNA, 25 bp, Homo sapien
ggctgccatctcgacaccattgcta

SEQ ID NO: 1469448 - DNA, 25 bp, Homo sapien
tctggtgatccatggtctgtattca

SEQ ID NO: 1469449 - DNA, 25 bp, Homo sapien
ctgtttgagatttagtaggccattg

SEQ ID NO: 1469450 - DNA, 25 bp, Homo sapien
cgtttccgattctcactgatttctg

SEQ ID NO: 1469451 - DNA, 25 bp, Homo sapien
taggccattgccgtttccgattctc

SEQ ID NO: 1469452 - DNA, 25 bp, Homo sapien
catctcctctttcccgcactggctc

SEQ ID NO: 1469453 - DNA, 25 bp, Homo sapien
ctttgaggacggaatcctccagacg

SEQ ID NO: 1469454 - DNA, 25 bp, Homo sapien
cttttcagcctctcgctcggcttgt

SEQ ID NO: 1469455 - DNA, 25 bp, Homo sapien
ttcagcctctcgctcggcttgttgt

SEQ ID NO: 1469456 - DNA, 25 bp, Homo sapien
cctctcgctcggcttgttgttttac

SEQ ID NO: 1469457 - DNA, 25 bp, Homo sapien
ctcgctcggcttgttgttttaccca

SEQ ID NO: 1469458 - DNA, 25 bp, Homo sapien
catcgcgtagtctccttccactgag

SEQ ID NO: 1469459 - DNA, 25 bp, Homo sapien
gattgacatcgcgtagtctccttcc

SEQ ID NO: 1469460 - DNA, 25 bp, Homo sapien
ttttcatgattgacatcgcgtagtc

SEQ ID NO: 1469461 - DNA, 25 bp, Homo sapien
gcgtagtctccttccactgagatcc

SEQ ID NO: 1469462 - DNA, 25 bp, Homo sapien
aatctgagcaccaagtgctcggagc

SEQ ID NO: 1469463 - DNA, 25 bp, Homo sapien
tctgagcaccaagtgctcggagcat

SEQ ID NO: 1469464 - DNA, 25 bp, Homo sapien
ggttgtcttctcaatctgagcacca

SEQ ID NO: 1469465 - DNA, 25 bp, Homo sapien
ttctcgattggttgtcttctcaatc

SEQ ID NO: 1469466 - DNA, 25 bp, Homo sapien
gcaaagtctgggttccaaactataa

SEQ ID NO: 1469467 - DNA, 25 bp, Homo sapien
ctccatgctgcactgtgtcactggt

SEQ ID NO: 1469468 - DNA, 25 bp, Homo sapien
tccattgcatttcacaaagaagttt

SEQ ID NO: 1469469 - DNA, 25 bp, Homo sapien
ctccattgcatttcacaaagaagtt

SEQ ID NO: 1469470 - DNA, 25 bp, Homo sapien
tcacaaagaagttttccactggaac

SEQ ID NO: 1469471 - DNA, 25 bp, Homo sapien
caaagaagttttccactggaacatt

SEQ ID NO: 1469472 - DNA, 25 bp, Homo sapien
ttcctaacaggaaccgaaatcctca

SEQ ID NO: 1469473 - DNA, 25 bp, Homo sapien
ccgccccggacagacctactccgca

SEQ ID NO: 1469474 - DNA, 25 bp, Homo sapien
ggacagacctactccgcacccagcg

SEQ ID NO: 1469475 - DNA, 25 bp, Homo sapien
tcctaacaggaaccgaaatcctcac

SEQ ID NO: 1469476 - DNA, 25 bp, Homo sapien
gcaccgccttgcacccgaagccagg

SEQ ID NO: 1469477 - DNA, 25 bp, Homo sapien
atcccggacggtgcaccgacccgag

SEQ ID NO: 1469478 - DNA, 25 bp, Homo sapien
agccagggccgcgaatccacaccag

SEQ ID NO: 1469479 - DNA, 25 bp, Homo sapien
ttggcagtgccggtggataaaatcc

SEQ ID NO: 1469480 - DNA, 25 bp, Homo sapien
caccgactacccgaacctcaagcct

SEQ ID NO: 1469481 - DNA, 25 bp, Homo sapien
cggcgcctcttgatgacgcgagcat

SEQ ID NO: 1469482 - DNA, 25 bp, Homo sapien
tacccgaacctcaagcctctctgag

SEQ ID NO: 1469483 - DNA, 25 bp, Homo sapien
ctctctgagacaccaggcgccgcaa

SEQ ID NO: 1469484 - DNA, 25 bp, Homo sapien
catgtaacaactgagaggcactttg

SEQ ID NO: 1469485 - DNA, 25 bp, Homo sapien
tttgagcctcttaaccaaaagcttc

SEQ ID NO: 1469486 - DNA, 25 bp, Homo sapien
gaagtaggctggaagccaacctgag

SEQ ID NO: 1469487 - DNA, 25 bp, Homo sapien
catggctcaagcagacagggagcag

SEQ ID NO: 1469488 - DNA, 25 bp, Homo sapien
ttcagcctcacaccgcagtttggaa

SEQ ID NO: 1469489 - DNA, 25 bp, Homo sapien
catttaatgagcacccgcaaagaac

SEQ ID NO: 1469490 - DNA, 25 bp, Homo sapien
tctgagtttcatcctggccgctaca

SEQ ID NO: 1469491 - DNA, 25 bp, Homo sapien
tagcagtgcttctacccctcaaaga

SEQ ID NO: 1469492 - DNA, 25 bp, Homo sapien
ctagtaaagccaattcaggactgac

SEQ ID NO: 1469493 - DNA, 25 bp, Homo sapien
agttcacctctctcattagctatag

SEQ ID NO: 1469494 - DNA, 25 bp, Homo sapien
tacttccctgtgcaaagcagtgctt

SEQ ID NO: 1469495 - DNA, 25 bp, Homo sapien
tatctagactctacagttcacctct

SEQ ID NO: 1469496 - DNA, 25 bp, Homo sapien
taactaatgcagaacagccttcctg

SEQ ID NO: 1469497 - DNA, 25 bp, Homo sapien
taatgcagaacagccttcctggata

SEQ ID NO: 1469498 - DNA, 25 bp, Homo sapien
cttcctggataaatccaacaataaa

SEQ ID NO: 1469499 - DNA, 25 bp, Homo sapien
atttaactaatgcagaacagccttc

SEQ ID NO: 1469500 - DNA, 25 bp, Homo sapien
aggggtggaaatcgccgccgcttcg

SEQ ID NO: 1469501 - DNA, 25 bp, Homo sapien
gcttcgcaccctggggtaactcgct

SEQ ID NO: 1469502 - DNA, 25 bp, Homo sapien
atgacccgcgcgggcctcttaacta

SEQ ID NO: 1469503 - DNA, 25 bp, Homo sapien
tggggtaactcgctttttgctgcct

SEQ ID NO: 1469504 - DNA, 25 bp, Homo sapien
gctaacaattttctagtactctagt

SEQ ID NO: 1469505 - DNA, 25 bp, Homo sapien
ggtagacgtaatcttcaccctttca

SEQ ID NO: 1469506 - DNA, 25 bp, Homo sapien
tttttgatttttcaatgctggtagg

SEQ ID NO: 1469507 - DNA, 25 bp, Homo sapien
tgagaggtgattgatactgctaaca

SEQ ID NO: 1469508 - DNA, 25 bp, Homo sapien
ggtactgtggcgctccgtgaaatta

SEQ ID NO: 1469509 - DNA, 25 bp, Homo sapien
ttcccttccagcgtctggtgcgaga

SEQ ID NO: 1469510 - DNA, 25 bp, Homo sapien
tgtggcgctccgtgaaattagacgt

SEQ ID NO: 1469511 - DNA, 25 bp, Homo sapien
tgattcgcaaacttcccttccagcg

SEQ ID NO: 1469512 - DNA, 25 bp, Homo sapien
gcttttcagacagctataagtatac

SEQ ID NO: 1469513 - DNA, 25 bp, Homo sapien
cagacagctataagtatactaagaa

SEQ ID NO: 1469514 - DNA, 25 bp, Homo sapien
ttcagacagctataagtatactaag

SEQ ID NO: 1469515 - DNA, 25 bp, Homo sapien
gctataagtatactaagaatttgag

SEQ ID NO: 1469516 - DNA, 25 bp, Homo sapien
tagcacgccgcatacgtggagaacg

SEQ ID NO: 1469517 - DNA, 25 bp, Homo sapien
caaaagacatccagctagcacgccg

SEQ ID NO: 1469518 - DNA, 25 bp, Homo sapien
ctaagtatatgattgcgagtggaaa

SEQ ID NO: 1469519 - DNA, 25 bp, Homo sapien
taagaatccactatgatgggaaaca

SEQ ID NO: 1469520 - DNA, 25 bp, Homo sapien
agtgaggtccgctcctgaggcctca

SEQ ID NO: 1469521 - DNA, 25 bp, Homo sapien
gctgcggccctgaaggtgccgcata

SEQ ID NO: 1469522 - DNA, 25 bp, Homo sapien
caaatcgggttagtgctcagcagcc

SEQ ID NO: 1469523 - DNA, 25 bp, Homo sapien
aaggtgccgcatatcctgccgagtg

SEQ ID NO: 1469524 - DNA, 25 bp, Homo sapien
tctgccccgcgaaagtgacctcagg

SEQ ID NO: 1469525 - DNA, 25 bp, Homo sapien
gctccgcagcgctcgagcctgttct

SEQ ID NO: 1469526 - DNA, 25 bp, Homo sapien
gactcagtaattcccggctccgcag

SEQ ID NO: 1469527 - DNA, 25 bp, Homo sapien
cgcgcgtcgcgggactcagtaattc

SEQ ID NO: 1469528 - DNA, 25 bp, Homo sapien
ctctgtgtggggtgggggtgtcggg

SEQ ID NO: 1469529 - DNA, 25 bp, Homo sapien
gagaagggatgtttgcaaatcacca

SEQ ID NO: 1469530 - DNA, 25 bp, Homo sapien
gggatgtctacctaaactggaacca

SEQ ID NO: 1469531 - DNA, 25 bp, Homo sapien
ggagcctagggttagtgtagcctct

SEQ ID NO: 1469532 - DNA, 25 bp, Homo sapien
cagcaaatgaaggatgccgtcctcc

SEQ ID NO: 1469533 - DNA, 25 bp, Homo sapien
cacggaagagatccgagggcatttc

SEQ ID NO: 1469534 - DNA, 25 bp, Homo sapien
tgaggtagtcttgcccgggccctgc

SEQ ID NO: 1469535 - DNA, 25 bp, Homo sapien
tctgagtctctgtcgcgtgacggag

SEQ ID NO: 1469536 - DNA, 25 bp, Homo sapien
cctggaggaaccgaggagccacgtt

SEQ ID NO: 1469537 - DNA, 25 bp, Homo sapien
gatgaatattcttcctgcaccgcca

SEQ ID NO: 1469538 - DNA, 25 bp, Homo sapien
cttgtgacagaagccccgacttgct

SEQ ID NO: 1469539 - DNA, 25 bp, Homo sapien
gattagacaggatgtgccctggcca

SEQ ID NO: 1469540 - DNA, 25 bp, Homo sapien
ccaaagccagtaaggtgaggcgctt

SEQ ID NO: 1469541 - DNA, 25 bp, Homo sapien
ggagcggtgtggggccgcatgcgaa

SEQ ID NO: 1469542 - DNA, 25 bp, Homo sapien
gcatgcgaagctgcctccgcgcctt

SEQ ID NO: 1469543 - DNA, 25 bp, Homo sapien
ggccgcatgcgaagctgcctccgcg

SEQ ID NO: 1469544 - DNA, 25 bp, Homo sapien
ggggccgcatgcgaagctgcctccg

SEQ ID NO: 1469545 - DNA, 25 bp, Homo sapien
atgtgacgtgcctcggtgttagata

SEQ ID NO: 1469546 - DNA, 25 bp, Homo sapien
ggcccccggtggcatacattgaatg

SEQ ID NO: 1469547 - DNA, 25 bp, Homo sapien
agaataagatgtaacagaagccaga

SEQ ID NO: 1469548 - DNA, 25 bp, Homo sapien
gacgtgcctcggtgttagatactgt

SEQ ID NO: 1469549 - DNA, 25 bp, Homo sapien
ggtatatacttttgaaaacctcatg

SEQ ID NO: 1469550 - DNA, 25 bp, Homo sapien
catgcagatttgcggagagacaaat

SEQ ID NO: 1469551 - DNA, 25 bp, Homo sapien
ctcatgcagatttgcggagagacaa

SEQ ID NO: 1469552 - DNA, 25 bp, Homo sapien
tggtatatacttttgaaaacctcat

SEQ ID NO: 1469553 - DNA, 25 bp, Homo sapien
tgtactaatgcttcagagagtaact

SEQ ID NO: 1469554 - DNA, 25 bp, Homo sapien
ggaaccgctgctatgtaaagtaaca

SEQ ID NO: 1469555 - DNA, 25 bp, Homo sapien
gacaaatttgtaatcaaaggctgga

SEQ ID NO: 1469556 - DNA, 25 bp, Homo sapien
taaagtaacatacactgctcccaag

SEQ ID NO: 1469557 - DNA, 25 bp, Homo sapien
catgaacacatgacaggaaccgctg

SEQ ID NO: 1469558 - DNA, 25 bp, Homo sapien
gatgtacctcttcccgtcaataaag

SEQ ID NO: 1469559 - DNA, 25 bp, Homo sapien
gagctgggactacttctgaatcaaa

SEQ ID NO: 1469560 - DNA, 25 bp, Homo sapien
agtatgaacacctatgagctgggac

SEQ ID NO: 1469561 - DNA, 25 bp, Homo sapien
tgaaaaccctcctacaagaagtgat

SEQ ID NO: 1469562 - DNA, 25 bp, Homo sapien
tagaggacactgtaactacgggctc

SEQ ID NO: 1469563 - DNA, 25 bp, Homo sapien
tctgaacgagatcaaactgaggcca

SEQ ID NO: 1469564 - DNA, 25 bp, Homo sapien
aaagccagctgcacctgatatagac

SEQ ID NO: 1469565 - DNA, 25 bp, Homo sapien
ctacgggctctcataagacacatgg

SEQ ID NO: 1469566 - DNA, 25 bp, Homo sapien
cccaaagtatgaatgctaaagagtc

SEQ ID NO: 1469567 - DNA, 25 bp, Homo sapien
tgctggtcagcacccaagggctgga

SEQ ID NO: 1469568 - DNA, 25 bp, Homo sapien
ttttgattcccagcaagagttcaca

SEQ ID NO: 1469569 - DNA, 25 bp, Homo sapien
ggtaaactgtgactctaatgctcca

SEQ ID NO: 1469570 - DNA, 25 bp, Homo sapien
caggcacaatctcatccagcaaagg

SEQ ID NO: 1469571 - DNA, 25 bp, Homo sapien
catgacagtcccgtcggtacacagg

SEQ ID NO: 1469572 - DNA, 25 bp, Homo sapien
tataatagactctgtagtagactga

SEQ ID NO: 1469573 - DNA, 25 bp, Homo sapien
tgaccgccacaaagagtaggagttg

SEQ ID NO: 1469574 - DNA, 25 bp, Homo sapien
ctttaaatgggatgaagtgacgctc

SEQ ID NO: 1469575 - DNA, 25 bp, Homo sapien
ttacctctagaaatgaacccctgcc

SEQ ID NO: 1469576 - DNA, 25 bp, Homo sapien
tacaagacacggtaggacagtagct

SEQ ID NO: 1469577 - DNA, 25 bp, Homo sapien
ggtacaagtacagggaatgccatct

SEQ ID NO: 1469578 - DNA, 25 bp, Homo sapien
taagtacagtaatttgtatgcatac

SEQ ID NO: 1469579 - DNA, 25 bp, Homo sapien
gacatctgcagacagtctgacttta

SEQ ID NO: 1469580 - DNA, 25 bp, Homo sapien
actttaatgagtccctgtgatgcaa

SEQ ID NO: 1469581 - DNA, 25 bp, Homo sapien
gagaaaacagtagtgccccctggct

SEQ ID NO: 1469582 - DNA, 25 bp, Homo sapien
catgggtgggtactcgaacagtgac

SEQ ID NO: 1469583 - DNA, 25 bp, Homo sapien
tctttgatctgaggtcgtgtccaca

SEQ ID NO: 1469584 - DNA, 25 bp, Homo sapien
gcccactgtaatcacggaatctgca

SEQ ID NO: 1469585 - DNA, 25 bp, Homo sapien
tcactgacatgcacgctgacagcag

SEQ ID NO: 1469586 - DNA, 25 bp, Homo sapien
gcctttcacagatttggaattatga

SEQ ID NO: 1469587 - DNA, 25 bp, Homo sapien
tataacctgacttcatgacttttgc

SEQ ID NO: 1469588 - DNA, 25 bp, Homo sapien
ggaattatgacatctggacaaacac

SEQ ID NO: 1469589 - DNA, 25 bp, Homo sapien
gagtcaccagagcattagattcaga

SEQ ID NO: 1469590 - DNA, 25 bp, Homo sapien
tctttttcggagctgtcagtgtgtg

SEQ ID NO: 1469591 - DNA, 25 bp, Homo sapien
tgtgttttggcctgtccattaactg

SEQ ID NO: 1469592 - DNA, 25 bp, Homo sapien
atgatgtaggcaaggaagacccagc

SEQ ID NO: 1469593 - DNA, 25 bp, Homo sapien
ccagttctttttcggagctgtcagt

SEQ ID NO: 1469594 - DNA, 25 bp, Homo sapien
cagatgtgtaccaacatgccaggct

SEQ ID NO: 1469595 - DNA, 25 bp, Homo sapien
gagattacagatgtgtaccaacatg

SEQ ID NO: 1469596 - DNA, 25 bp, Homo sapien
tacagatgtgtaccaacatgccagg

SEQ ID NO: 1469597 - DNA, 25 bp, Homo sapien
attacagatgtgtaccaacatgcca

SEQ ID NO: 1469598 - DNA, 25 bp, Homo sapien
tactgctgatagtgttgctcctgca

SEQ ID NO: 1469599 - DNA, 25 bp, Homo sapien
caagctggacttgatacaactgctg

SEQ ID NO: 1469600 - DNA, 25 bp, Homo sapien
tcgtagttccctggatactgttggg

SEQ ID NO: 1469601 - DNA, 25 bp, Homo sapien
tgcaactggcggatgagaatttgct

SEQ ID NO: 1469602 - DNA, 25 bp, Homo sapien
ttttgctgctccaaccgaagccttt

SEQ ID NO: 1469603 - DNA, 25 bp, Homo sapien
ttgctgctccaaccgaagcctttct

SEQ ID NO: 1469604 - DNA, 25 bp, Homo sapien
cttcctccttttgcagacgttctct

SEQ ID NO: 1469605 - DNA, 25 bp, Homo sapien
tcttctctcctacgtttctcttcct

SEQ ID NO: 1469606 - DNA, 25 bp, Homo sapien
tttgtgggacgcaacatatgttgaa

SEQ ID NO: 1469607 - DNA, 25 bp, Homo sapien
tgttgaaaagagatggcaacaccta

SEQ ID NO: 1469608 - DNA, 25 bp, Homo sapien
ggcaacacctatttaagagcttgac

SEQ ID NO: 1469609 - DNA, 25 bp, Homo sapien
ccttctctattttgtgggacgcaac

SEQ ID NO: 1469610 - DNA, 25 bp, Homo sapien
tctttagacatgtttcccagggctg

SEQ ID NO: 1469611 - DNA, 25 bp, Homo sapien
ctctttagacatgtttcccagggct

SEQ ID NO: 1469612 - DNA, 25 bp, Homo sapien
tgtcattccccaacacatcaaagaa

SEQ ID NO: 1469613 - DNA, 25 bp, Homo sapien
aaagaatccaacctcaggacaagtg

SEQ ID NO: 1469614 - DNA, 25 bp, Homo sapien
acaagtgtctggattatatgggccc

SEQ ID NO: 1469615 - DNA, 25 bp, Homo sapien
gaacttgcttatgcagtgccacaag

SEQ ID NO: 1469616 - DNA, 25 bp, Homo sapien
ataaatgttgtagtccaatttcacc

SEQ ID NO: 1469617 - DNA, 25 bp, Homo sapien
tttcattataaatgttgtagtccaa

SEQ ID NO: 1469618 - DNA, 25 bp, Homo sapien
cagttaaaataatggaaagcagctg

SEQ ID NO: 1469619 - DNA, 25 bp, Homo sapien
aacagttaaaataatggaaagcagc

SEQ ID NO: 1469620 - DNA, 25 bp, Homo sapien
gagggctcaactcattgtgcaatga

SEQ ID NO: 1469621 - DNA, 25 bp, Homo sapien
gccattaccaattccccaagctagt

SEQ ID NO: 1469622 - DNA, 25 bp, Homo sapien
gctagttagtacacagagggctcaa

SEQ ID NO: 1469623 - DNA, 25 bp, Homo sapien
tcaagccggtgatctaaaagtcaaa

SEQ ID NO: 1469624 - DNA, 25 bp, Homo sapien
aagcgcagtgccaggccgtacaact

SEQ ID NO: 1469625 - DNA, 25 bp, Homo sapien
tgaagaagcgcagtgccaggccgta

SEQ ID NO: 1469626 - DNA, 25 bp, Homo sapien
aagaagcgcagtgccaggccgtaca

SEQ ID NO: 1469627 - DNA, 25 bp, Homo sapien
ctttgaagaagcgcagtgccaggcc

SEQ ID NO: 1469628 - DNA, 25 bp, Homo sapien
tccaggccgaaaccccagcgctgct

SEQ ID NO: 1469629 - DNA, 25 bp, Homo sapien
aggccgaaaccccagcgctgctcca

SEQ ID NO: 1469630 - DNA, 25 bp, Homo sapien
gccgaaaccccagcgctgctccagc

SEQ ID NO: 1469631 - DNA, 25 bp, Homo sapien
ctccaggccgaaaccccagcgctgc

SEQ ID NO: 1469632 - DNA, 25 bp, Homo sapien
tgagcgtgaggccgtcgacggacac

SEQ ID NO: 1469633 - DNA, 25 bp, Homo sapien
cgaccggatccaggtggcgagggcg

SEQ ID NO: 1469634 - DNA, 25 bp, Homo sapien
ggctgagcgtgaggccgtcgacgga

SEQ ID NO: 1469635 - DNA, 25 bp, Homo sapien
ccgcgaccggatccaggtggcgagg

SEQ ID NO: 1469636 - DNA, 25 bp, Homo sapien
gctctgcgttcagcaccgccgccat

SEQ ID NO: 1469637 - DNA, 25 bp, Homo sapien
tcgagtcgctctgcgttcagcaccg

SEQ ID NO: 1469638 - DNA, 25 bp, Homo sapien
ctcgagtcgctctgcgttcagcacc

SEQ ID NO: 1469639 - DNA, 25 bp, Homo sapien
gtcgctctgcgttcagcaccgccgc

SEQ ID NO: 1469640 - DNA, 25 bp, Homo sapien
gacagacggcagccacgtatcgact

SEQ ID NO: 1469641 - DNA, 25 bp, Homo sapien
ggacagacggcagccacgtatcgac

SEQ ID NO: 1469642 - DNA, 25 bp, Homo sapien
ttaccgacaccggaacttccgctgc

SEQ ID NO: 1469643 - DNA, 25 bp, Homo sapien
ccgacaccggaacttccgctgctga

SEQ ID NO: 1469644 - DNA, 25 bp, Homo sapien
acaccggaacttccgctgctgagga

SEQ ID NO: 1469645 - DNA, 25 bp, Homo sapien
gacaccggaacttccgctgctgagg

SEQ ID NO: 1469646 - DNA, 25 bp, Homo sapien
ctgctggccggagacggtagcgctg

SEQ ID NO: 1469647 - DNA, 25 bp, Homo sapien
ctgccccagccgctcagtgcttatg

SEQ ID NO: 1469648 - DNA, 25 bp, Homo sapien
ggccggagacggtagcgctgcccca

SEQ ID NO: 1469649 - DNA, 25 bp, Homo sapien
gccccagccgctcagtgcttatggg

SEQ ID NO: 1469650 - DNA, 25 bp, Homo sapien
ctggcagagggatgggatggggctg

SEQ ID NO: 1469651 - DNA, 25 bp, Homo sapien
tggcagagggatgggatggggctgg

SEQ ID NO: 1469652 - DNA, 25 bp, Homo sapien
cttttgcagctttcctcttctgcca

SEQ ID NO: 1469653 - DNA, 25 bp, Homo sapien
ctttcctcttctgccaaaagctcaa

SEQ ID NO: 1469654 - DNA, 25 bp, Homo sapien
cctcttctgccaaaagctcaaccat

SEQ ID NO: 1469655 - DNA, 25 bp, Homo sapien
tcctcttctgccaaaagctcaacca

SEQ ID NO: 1469656 - DNA, 25 bp, Homo sapien
caagtgaccagcaacacatattccc

SEQ ID NO: 1469657 - DNA, 25 bp, Homo sapien
agtgaccagcaacacatattccctg

SEQ ID NO: 1469658 - DNA, 25 bp, Homo sapien
tcaagtgaccagcaacacatattcc

SEQ ID NO: 1469659 - DNA, 25 bp, Homo sapien
aagtgaccagcaacacatattccct

SEQ ID NO: 1469660 - DNA, 25 bp, Homo sapien
tccggcagatggctgaaatgcccct

SEQ ID NO: 1469661 - DNA, 25 bp, Homo sapien
tgtccgcgctgttcctgcaactcaa

SEQ ID NO: 1469662 - DNA, 25 bp, Homo sapien
gcatttggccgtctccgtctgtccg

SEQ ID NO: 1469663 - DNA, 25 bp, Homo sapien
gctctttttccgttctctgaagctg

SEQ ID NO: 1469664 - DNA, 25 bp, Homo sapien
gaagtggtcggactcccaaggtcat

SEQ ID NO: 1469665 - DNA, 25 bp, Homo sapien
tgcgggaagtggtcggactcccaag

SEQ ID NO: 1469666 - DNA, 25 bp, Homo sapien
ggaagtggtcggactcccaaggtca

SEQ ID NO: 1469667 - DNA, 25 bp, Homo sapien
ctacgtgcgggaagtggtcggactc

SEQ ID NO: 1469668 - DNA, 25 bp, Homo sapien
agttggggttccagcatttcctaca

SEQ ID NO: 1469669 - DNA, 25 bp, Homo sapien
caaccactgcctgagcgaccaccat

SEQ ID NO: 1469670 - DNA, 25 bp, Homo sapien
gggttccagcatttcctacaaccac

SEQ ID NO: 1469671 - DNA, 25 bp, Homo sapien
tgcaccctcaggagttggggttcca

SEQ ID NO: 1469672 - DNA, 25 bp, Homo sapien
aatctgcagcatcaataacatcagc

SEQ ID NO: 1469673 - DNA, 25 bp, Homo sapien
taggaagaatcaccaagatactcca

SEQ ID NO: 1469674 - DNA, 25 bp, Homo sapien
cattagtgtaggaagaatcaccaag

SEQ ID NO: 1469675 - DNA, 25 bp, Homo sapien
ctcatgaaatctgcagcatcaataa

SEQ ID NO: 1469676 - DNA, 25 bp, Homo sapien
cagtggaccaagagtgggctaccca

SEQ ID NO: 1469677 - DNA, 25 bp, Homo sapien
agagctaccagaaaggatgcaccct

SEQ ID NO: 1469678 - DNA, 25 bp, Homo sapien
gcccggccggcaatgtggagaattt

SEQ ID NO: 1469679 - DNA, 25 bp, Homo sapien
cctaggaacccaggactgagtgtgc

SEQ ID NO: 1469680 - DNA, 25 bp, Homo sapien
gctggagctcgtcttccgccggacc

SEQ ID NO: 1469681 - DNA, 25 bp, Homo sapien
cccggtaccccgacatccacttgcg

SEQ ID NO: 1469682 - DNA, 25 bp, Homo sapien
ttgcgcgagcgcctggccgcgctca

SEQ ID NO: 1469683 - DNA, 25 bp, Homo sapien
tggagctcgtcttccgccggacccg

SEQ ID NO: 1469684 - DNA, 25 bp, Homo sapien
tggctaggccggagattatcctcaa

SEQ ID NO: 1469685 - DNA, 25 bp, Homo sapien
tcggcgtcagagtgggaaatccttc

SEQ ID NO: 1469686 - DNA, 25 bp, Homo sapien
tgctcctggaactgaaacgaaatgt

SEQ ID NO: 1469687 - DNA, 25 bp, Homo sapien
ggtagatgtgaactgcctgcccgaa

SEQ ID NO: 1469688 - DNA, 25 bp, Homo sapien
ttgtgtactgttggattttaaccag

SEQ ID NO: 1469689 - DNA, 25 bp, Homo sapien
taaactctgcactaaagttctgcag

SEQ ID NO: 1469690 - DNA, 25 bp, Homo sapien
tacaagattaacattttaggcagcg

SEQ ID NO: 1469691 - DNA, 25 bp, Homo sapien
gcagtggcacaataccaacaaagaa

SEQ ID NO: 1469692 - DNA, 25 bp, Homo sapien
tgatctacagaaccatgtcacattg

SEQ ID NO: 1469693 - DNA, 25 bp, Homo sapien
caaaaacaatgtcccgtgcagttgg

SEQ ID NO: 1469694 - DNA, 25 bp, Homo sapien
gaagactgagatggtgatcaactaa

SEQ ID NO: 1469695 - DNA, 25 bp, Homo sapien
tgccaccgacatgaataaaaagacc

SEQ ID NO: 1469696 - DNA, 25 bp, Homo sapien
gctgcaaaggcatgtaagtttccca

SEQ ID NO: 1469697 - DNA, 25 bp, Homo sapien
acatggatttctacattattctgaa

SEQ ID NO: 1469698 - DNA, 25 bp, Homo sapien
tggtgttatttgctgcaaaggcatg

SEQ ID NO: 1469699 - DNA, 25 bp, Homo sapien
tggatttctacattattctgaaagc

SEQ ID NO: 1469700 - DNA, 25 bp, Homo sapien
tcagtagtagttgaacaaatatgct

SEQ ID NO: 1469701 - DNA, 25 bp, Homo sapien
gaagcgtctattgtactcttgatat

SEQ ID NO: 1469702 - DNA, 25 bp, Homo sapien
tgagtctgtaagtgatttgaattca

SEQ ID NO: 1469703 - DNA, 25 bp, Homo sapien
ctgatattagaagcgtctattgtac

SEQ ID NO: 1469704 - DNA, 25 bp, Homo sapien
tttgaattcaaaggaattcaggtct

SEQ ID NO: 1469705 - DNA, 25 bp, Homo sapien
tcattttcaacgcagggctgtcctg

SEQ ID NO: 1469706 - DNA, 25 bp, Homo sapien
gcctggaaattaagtctgtcagatt

SEQ ID NO: 1469707 - DNA, 25 bp, Homo sapien
ttgaggaatttgcatgccgaacaat

SEQ ID NO: 1469708 - DNA, 25 bp, Homo sapien
cacacctgcgtctcatatctgttgg

SEQ ID NO: 1469709 - DNA, 25 bp, Homo sapien
tcaagctccagaacaattgttgcat

SEQ ID NO: 1469710 - DNA, 25 bp, Homo sapien
atgcaaaactttgtttaggtccttg

SEQ ID NO: 1469711 - DNA, 25 bp, Homo sapien
taggtccttgttcagctgttcaagc

SEQ ID NO: 1469712 - DNA, 25 bp, Homo sapien
gcaatactgttgaactttatgcaaa

SEQ ID NO: 1469713 - DNA, 25 bp, Homo sapien
gcaatttcaatgatctaaaaggaga

SEQ ID NO: 1469714 - DNA, 25 bp, Homo sapien
aaggagatttgacttatctaaaaag

SEQ ID NO: 1469715 - DNA, 25 bp, Homo sapien
aattgttatagtcttgtctgtgata

SEQ ID NO: 1469716 - DNA, 25 bp, Homo sapien
gataatggcattgttatttaggaga

SEQ ID NO: 1469717 - DNA, 25 bp, Homo sapien
taaaaactccattgtctagtctacc

SEQ ID NO: 1469718 - DNA, 25 bp, Homo sapien
tattgtgtctcctattgtgtcttga

SEQ ID NO: 1469719 - DNA, 25 bp, Homo sapien
cattagaccttcctcactgtatttc

SEQ ID NO: 1469720 - DNA, 25 bp, Homo sapien
aatctgctgtggttgtatccaccga

SEQ ID NO: 1469721 - DNA, 25 bp, Homo sapien
tcttaatgccttgttaatgctccag

SEQ ID NO: 1469722 - DNA, 25 bp, Homo sapien
gagtaaatgccacgtttgagttctg

SEQ ID NO: 1469723 - DNA, 25 bp, Homo sapien
tagtctactcttaccaaaagcagaa

SEQ ID NO: 1469724 - DNA, 25 bp, Homo sapien
tatttacagcaggaaggttaatcca

SEQ ID NO: 1469725 - DNA, 25 bp, Homo sapien
tcatgagaatttttgataatctggt

SEQ ID NO: 1469726 - DNA, 25 bp, Homo sapien
gtgttcatttcccttaatttcttga

SEQ ID NO: 1469727 - DNA, 25 bp, Homo sapien
tcctttttaatcatgagaatttttg

SEQ ID NO: 1469728 - DNA, 25 bp, Homo sapien
tcttgatatgttcctttttaatcat

SEQ ID NO: 1469729 - DNA, 25 bp, Homo sapien
attctactggaaaaccacctaatgt

SEQ ID NO: 1469730 - DNA, 25 bp, Homo sapien
aaaccacctaatgtttcagtgtcag

SEQ ID NO: 1469731 - DNA, 25 bp, Homo sapien
agtgtcagagccagaaattttactt

SEQ ID NO: 1469732 - DNA, 25 bp, Homo sapien
cctaatgtttcagtgtcagagccag

SEQ ID NO: 1469733 - DNA, 25 bp, Homo sapien
gagaggaggagtataatgtaaccgt

SEQ ID NO: 1469734 - DNA, 25 bp, Homo sapien
gagaaggccgctgtttttgtccaaa

SEQ ID NO: 1469735 - DNA, 25 bp, Homo sapien
ggtcataaaaaatcgagaaggccgc

SEQ ID NO: 1469736 - DNA, 25 bp, Homo sapien
tttgtccaaaggcagcaattggcat

SEQ ID NO: 1469737 - DNA, 25 bp, Homo sapien
caagccctgtcctatcaaaagttac

SEQ ID NO: 1469738 - DNA, 25 bp, Homo sapien
tccaagccctgtcctatcaaaagtt

SEQ ID NO: 1469739 - DNA, 25 bp, Homo sapien
catagtcagggatggtatgggttcc

SEQ ID NO: 1469740 - DNA, 25 bp, Homo sapien
gatggtatgggttccaagccctgtc

SEQ ID NO: 1469741 - DNA, 25 bp, Homo sapien
acagcatctatttgtccagtgaaca

SEQ ID NO: 1469742 - DNA, 25 bp, Homo sapien
tataagtagcattaagagtatccac

SEQ ID NO: 1469743 - DNA, 25 bp, Homo sapien
ccatcatgaacaccacgtaatcgtg

SEQ ID NO: 1469744 - DNA, 25 bp, Homo sapien
tttgtccagtgaacaaaccatcatg

SEQ ID NO: 1469745 - DNA, 25 bp, Homo sapien
ttcgttccaataaccagaggcaaag

SEQ ID NO: 1469746 - DNA, 25 bp, Homo sapien
ctgtaactttcgttccaataaccag

SEQ ID NO: 1469747 - DNA, 25 bp, Homo sapien
ttttctgccgtttctgttttaatgc

SEQ ID NO: 1469748 - DNA, 25 bp, Homo sapien
ctttgttgtaagagccttattttct

SEQ ID NO: 1469749 - DNA, 25 bp, Homo sapien
gacatacacagaagtcattatcacc

SEQ ID NO: 1469750 - DNA, 25 bp, Homo sapien
cataagccgccgaatttttccccat

SEQ ID NO: 1469751 - DNA, 25 bp, Homo sapien
tcctttagacatacacagaagtcat

SEQ ID NO: 1469752 - DNA, 25 bp, Homo sapien
cacagaagtcattatcaccttcaaa

SEQ ID NO: 1469753 - DNA, 25 bp, Homo sapien
acaccatttatgtgctttaggaagc

SEQ ID NO: 1469754 - DNA, 25 bp, Homo sapien
tagaaccactcgtatatacaccatt

SEQ ID NO: 1469755 - DNA, 25 bp, Homo sapien
gaagcttgagcagattacgtaatcg

SEQ ID NO: 1469756 - DNA, 25 bp, Homo sapien
tacgtaatcgaaaaccaatcttctg

SEQ ID NO: 1469757 - DNA, 25 bp, Homo sapien
gttgggtatgggaaaatagattcaa

SEQ ID NO: 1469758 - DNA, 25 bp, Homo sapien
tatatagggtattagcagctcatcg

SEQ ID NO: 1469759 - DNA, 25 bp, Homo sapien
ggaatcttctattgactgattgaga

SEQ ID NO: 1469760 - DNA, 25 bp, Homo sapien
aactatattaaggacccgcctgttg

SEQ ID NO: 1469761 - DNA, 25 bp, Homo sapien
accattgcaaccctctggtttcttt

SEQ ID NO: 1469762 - DNA, 25 bp, Homo sapien
ggaaccattgcaaccctctggtttc

SEQ ID NO: 1469763 - DNA, 25 bp, Homo sapien
atttatttgcctatcatcttcatca

SEQ ID NO: 1469764 - DNA, 25 bp, Homo sapien
ctgtggaaccattgcaaccctctgg

SEQ ID NO: 1469765 - DNA, 25 bp, Homo sapien
aagaactgtacttttcattccacgt

SEQ ID NO: 1469766 - DNA, 25 bp, Homo sapien
tgtacttttcattccacgtgttaga

SEQ ID NO: 1469767 - DNA, 25 bp, Homo sapien
agcagagcttgtattcctgcctttc

SEQ ID NO: 1469768 - DNA, 25 bp, Homo sapien
ttttcattccacgtgttagataagc

SEQ ID NO: 1469769 - DNA, 25 bp, Homo sapien
aactgacaagggcttttgctgaaga

SEQ ID NO: 1469770 - DNA, 25 bp, Homo sapien
tttaaactgacaagggcttttgctg

SEQ ID NO: 1469771 - DNA, 25 bp, Homo sapien
ctgacaagggcttttgctgaagagc

SEQ ID NO: 1469772 - DNA, 25 bp, Homo sapien
ttaaactgacaagggcttttgctga

SEQ ID NO: 1469773 - DNA, 25 bp, Homo sapien
gggcacgtgcctaaagtgtcagcta

SEQ ID NO: 1469774 - DNA, 25 bp, Homo sapien
caaggaagctcctcatacatgcaaa

SEQ ID NO: 1469775 - DNA, 25 bp, Homo sapien
gaaacatcaggctacaggttctggt

SEQ ID NO: 1469776 - DNA, 25 bp, Homo sapien
gggattctgttgcaggtaacccact

SEQ ID NO: 1469777 - DNA, 25 bp, Homo sapien
gagaggacggattaatcctccttgc

SEQ ID NO: 1469778 - DNA, 25 bp, Homo sapien
tctcatataaatggataacagactt

SEQ ID NO: 1469779 - DNA, 25 bp, Homo sapien
gcaacagataaagtatggcagttat

SEQ ID NO: 1469780 - DNA, 25 bp, Homo sapien
ctcagaattggatgtatacattgca

SEQ ID NO: 1469781 - DNA, 25 bp, Homo sapien
ggtgcatgccaccatacgcagctaa

SEQ ID NO: 1469782 - DNA, 25 bp, Homo sapien
acaggtgcatgccaccatacgcagc

SEQ ID NO: 1469783 - DNA, 25 bp, Homo sapien
cttccaggtagctaggattacaggt

SEQ ID NO: 1469784 - DNA, 25 bp, Homo sapien
ttcaagaaattctccccacctcagc

SEQ ID NO: 1469785 - DNA, 25 bp, Homo sapien
ggctctcggtttccggccctggcgc

SEQ ID NO: 1469786 - DNA, 25 bp, Homo sapien
gccgggcgagtggtgcaggcggcga

SEQ ID NO: 1469787 - DNA, 25 bp, Homo sapien
cggcaacaccggagtgggaggacta

SEQ ID NO: 1469788 - DNA, 25 bp, Homo sapien
agacaccataacaaaggcggcgacg

SEQ ID NO: 1469789 - DNA, 25 bp, Homo sapien
gagccgcgccgctttttcaaaggct

SEQ ID NO: 1469790 - DNA, 25 bp, Homo sapien
ttttcaaaggctgcccgccgcggtg

SEQ ID NO: 1469791 - DNA, 25 bp, Homo sapien
gctccgccatcttgaacgagccgcg

SEQ ID NO: 1469792 - DNA, 25 bp, Homo sapien
tctcgtcaggcaactggtcgagctc

SEQ ID NO: 1469793 - DNA, 25 bp, Homo sapien
ggaggttcgaatgcggagctcgctg

SEQ ID NO: 1469794 - DNA, 25 bp, Homo sapien
cgctcccggcgcatgttccgcggcc

SEQ ID NO: 1469795 - DNA, 25 bp, Homo sapien
gggcggagactgtctttgcgaggga

SEQ ID NO: 1469796 - DNA, 25 bp, Homo sapien
gcgcggggggagcagtaccagctcc

SEQ ID NO: 1469797 - DNA, 25 bp, Homo sapien
ttgcttgggcgcctccgtcccctca

SEQ ID NO: 1469798 - DNA, 25 bp, Homo sapien
cgaaacccacgttgcttgggcgcct

SEQ ID NO: 1469799 - DNA, 25 bp, Homo sapien
gttgcttgggcgcctccgtcccctc

SEQ ID NO: 1469800 - DNA, 25 bp, Homo sapien
cccacgttgcttgggcgcctccgtc

SEQ ID NO: 1469801 - DNA, 25 bp, Homo sapien
ttcccgaatgttggaagctgagctg

SEQ ID NO: 1469802 - DNA, 25 bp, Homo sapien
atccgggcacgcctttcccgaatgt

SEQ ID NO: 1469803 - DNA, 25 bp, Homo sapien
cacgcctttcccgaatgttggaagc

SEQ ID NO: 1469804 - DNA, 25 bp, Homo sapien
gcgtcgcgacgtccgggactcggtc

SEQ ID NO: 1469805 - DNA, 25 bp, Homo sapien
cagctctgtgccttgggtaactggg

SEQ ID NO: 1469806 - DNA, 25 bp, Homo sapien
tctgtgccttgggtaactgggtgct

SEQ ID NO: 1469807 - DNA, 25 bp, Homo sapien
tgccttgggtaactgggtgctgcca

SEQ ID NO: 1469808 - DNA, 25 bp, Homo sapien
ccttgggtaactgggtgctgccatg

SEQ ID NO: 1469809 - DNA, 25 bp, Homo sapien
acacaatcatcgtgctcaggagcta

SEQ ID NO: 1469810 - DNA, 25 bp, Homo sapien
acacacaatcatcgtgctcaggagc

SEQ ID NO: 1469811 - DNA, 25 bp, Homo sapien
cacacaatcatcgtgctcaggagct

SEQ ID NO: 1469812 - DNA, 25 bp, Homo sapien
aacacacaatcatcgtgctcaggag

SEQ ID NO: 1469813 - DNA, 25 bp, Homo sapien
acattcatttcttcttgttgtacga

SEQ ID NO: 1469814 - DNA, 25 bp, Homo sapien
tttcacattcatttcttcttgttgt

SEQ ID NO: 1469815 - DNA, 25 bp, Homo sapien
ttattgctgcagtttcacattcatt

SEQ ID NO: 1469816 - DNA, 25 bp, Homo sapien
tcacattcatttcttcttgttgtac

SEQ ID NO: 1469817 - DNA, 25 bp, Homo sapien
gccacatacatatcttgcctcactg

SEQ ID NO: 1469818 - DNA, 25 bp, Homo sapien
gccccagtggaatcatggcctatag

SEQ ID NO: 1469819 - DNA, 25 bp, Homo sapien
gaatcatggcctatagccacataca

SEQ ID NO: 1469820 - DNA, 25 bp, Homo sapien
taagagggccccagtggaatcatgg

SEQ ID NO: 1469821 - DNA, 25 bp, Homo sapien
cccaggacgtggattgcttccataa

SEQ ID NO: 1469822 - DNA, 25 bp, Homo sapien
tccacgtttactgccttgcagtgga

SEQ ID NO: 1469823 - DNA, 25 bp, Homo sapien
gcttccataatggttacggcctgct

SEQ ID NO: 1469824 - DNA, 25 bp, Homo sapien
ccgctggtaattgtgtggaggaccc

SEQ ID NO: 1469825 - DNA, 25 bp, Homo sapien
ctacacagccaaggtacttcctggg

SEQ ID NO: 1469826 - DNA, 25 bp, Homo sapien
tacacagccaaggtacttcctgggg

SEQ ID NO: 1469827 - DNA, 25 bp, Homo sapien
cacagccaaggtacttcctggggtt

SEQ ID NO: 1469828 - DNA, 25 bp, Homo sapien
acacagccaaggtacttcctggggt

SEQ ID NO: 1469829 - DNA, 25 bp, Homo sapien
cggagtcagaagtggtaacgtgttc

SEQ ID NO: 1469830 - DNA, 25 bp, Homo sapien
taaccctcgctacagaggtctgtgg

SEQ ID NO: 1469831 - DNA, 25 bp, Homo sapien
taaattcctggcgagaggtgaagcc

SEQ ID NO: 1469832 - DNA, 25 bp, Homo sapien
tagaccaatcaacgggacatgggag

SEQ ID NO: 1469833 - DNA, 25 bp, Homo sapien
acttctttctctcggtccgttgaag

SEQ ID NO: 1469834 - DNA, 25 bp, Homo sapien
ttgatcggcgagtcattgccaccac

SEQ ID NO: 1469835 - DNA, 25 bp, Homo sapien
ccgttgaagtcatctacgtttttca

SEQ ID NO: 1469836 - DNA, 25 bp, Homo sapien
caaatgtaatgaatcccaaatcact

SEQ ID NO: 1469837 - DNA, 25 bp, Homo sapien
caggagcttcttggaggtaaccggc

SEQ ID NO: 1469838 - DNA, 25 bp, Homo sapien
taagtgccgctttgtttctctccag

SEQ ID NO: 1469839 - DNA, 25 bp, Homo sapien
gcactggcaacgagcttggcaacct

SEQ ID NO: 1469840 - DNA, 25 bp, Homo sapien
tctctccagcgggtaattatgttcc

SEQ ID NO: 1469841 - DNA, 25 bp, Homo sapien
aaagccctcccgagaatctcctggg

SEQ ID NO: 1469842 - DNA, 25 bp, Homo sapien
ctgcagtggtacaaggagccccaaa

SEQ ID NO: 1469843 - DNA, 25 bp, Homo sapien
gagccccaaacagccatatggtagc

SEQ ID NO: 1469844 - DNA, 25 bp, Homo sapien
tccccttggtaatcaggatcagtcc

SEQ ID NO: 1469845 - DNA, 25 bp, Homo sapien
caggtcagaggtgaatgattcccaa

SEQ ID NO: 1469846 - DNA, 25 bp, Homo sapien
tatagagcggaataaaaccagccca

SEQ ID NO: 1469847 - DNA, 25 bp, Homo sapien
taaaagcagtacttgaggtttgccc

SEQ ID NO: 1469848 - DNA, 25 bp, Homo sapien
agtacatactatgcccgcaccaggg

SEQ ID NO: 1469849 - DNA, 25 bp, Homo sapien
tagttgctaccctgagataggactt

SEQ ID NO: 1469850 - DNA, 25 bp, Homo sapien
tgaaattttaccagttggcgaagat

SEQ ID NO: 1469851 - DNA, 25 bp, Homo sapien
cattttagttgctaccctgagatag

SEQ ID NO: 1469852 - DNA, 25 bp, Homo sapien
aaattttaccagttggcgaagatgg

SEQ ID NO: 1469853 - DNA, 25 bp, Homo sapien
tctgcatttttaatcgagtattact

SEQ ID NO: 1469854 - DNA, 25 bp, Homo sapien
tttaatcgagtattactattagccc

SEQ ID NO: 1469855 - DNA, 25 bp, Homo sapien
taatcgagtattactattagccctt

SEQ ID NO: 1469856 - DNA, 25 bp, Homo sapien
tcgagtattactattagcccttggg

SEQ ID NO: 1469857 - DNA, 25 bp, Homo sapien
aaagtgcccataagaaagtcaagaa

SEQ ID NO: 1469858 - DNA, 25 bp, Homo sapien
taagtatatttgtggtagagtttta

SEQ ID NO: 1469859 - DNA, 25 bp, Homo sapien
gacaaaagtgcccataagaaagtca

SEQ ID NO: 1469860 - DNA, 25 bp, Homo sapien
tggtagagttttaatttggaagaca

SEQ ID NO: 1469861 - DNA, 25 bp, Homo sapien
ccctcaccacaagaggcaaacaaaa

SEQ ID NO: 1469862 - DNA, 25 bp, Homo sapien
gggacaataagtgcaagataaaaaa

SEQ ID NO: 1469863 - DNA, 25 bp, Homo sapien
caagagctcccatgttcagtattcc

SEQ ID NO: 1469864 - DNA, 25 bp, Homo sapien
tgagaaattgttagcgttccttcct

SEQ ID NO: 1469865 - DNA, 25 bp, Homo sapien
tagtctatgcaacagaatctctctc

SEQ ID NO: 1469866 - DNA, 25 bp, Homo sapien
cagacattctaacgaagcttggttt

SEQ ID NO: 1469867 - DNA, 25 bp, Homo sapien
ttttccataggactagtctatgcaa

SEQ ID NO: 1469868 - DNA, 25 bp, Homo sapien
aggcagacattctaacgaagcttgg

SEQ ID NO: 1469869 - DNA, 25 bp, Homo sapien
agccaccgggtgtgactcggctacc

SEQ ID NO: 1469870 - DNA, 25 bp, Homo sapien
gagccaccgggtgtgactcggctac

SEQ ID NO: 1469871 - DNA, 25 bp, Homo sapien
gtgcagaagcgcttcgggtgaattc

SEQ ID NO: 1469872 - DNA, 25 bp, Homo sapien
gaatttcagtttcagcagatacttc

SEQ ID NO: 1469873 - DNA, 25 bp, Homo sapien
tttcagtttcagcagatacttcaga

SEQ ID NO: 1469874 - DNA, 25 bp, Homo sapien
cagtttcagcagatacttcagattt

SEQ ID NO: 1469875 - DNA, 25 bp, Homo sapien
tcagtttcagcagatacttcagatt

SEQ ID NO: 1469876 - DNA, 25 bp, Homo sapien
ctgagcaatatcatagacaatgtac

SEQ ID NO: 1469877 - DNA, 25 bp, Homo sapien
cagccatacaacagagggtatgtac

SEQ ID NO: 1469878 - DNA, 25 bp, Homo sapien
ggctgggttgcctcatctccccggg

SEQ ID NO: 1469879 - DNA, 25 bp, Homo sapien
ccagcctgaaagtcactctaaggcc

SEQ ID NO: 1469880 - DNA, 25 bp, Homo sapien
gaagcttgttaaggagccaacagcc

SEQ ID NO: 1469881 - DNA, 25 bp, Homo sapien
ctggaaactgggggaaggctcatac

SEQ ID NO: 1469882 - DNA, 25 bp, Homo sapien
aggctcataccctgtaagccaggct

SEQ ID NO: 1469883 - DNA, 25 bp, Homo sapien
aggctatgcacagggagggaccaca

SEQ ID NO: 1469884 - DNA, 25 bp, Homo sapien
caggctatgcacagggagggaccac

SEQ ID NO: 1469885 - DNA, 25 bp, Homo sapien
gctcgagaacatccctttgtgctca

SEQ ID NO: 1469886 - DNA, 25 bp, Homo sapien
cataagtgactctgtagctcgagaa

SEQ ID NO: 1469887 - DNA, 25 bp, Homo sapien
ttgtctgccccaggtaatctgacag

SEQ ID NO: 1469888 - DNA, 25 bp, Homo sapien
caggacagcctctaatccttgtctg

SEQ ID NO: 1469889 - DNA, 25 bp, Homo sapien
tcgttatatagtagagaggtgtcat

SEQ ID NO: 1469890 - DNA, 25 bp, Homo sapien
gactaatgttagctgaaggatcagg

SEQ ID NO: 1469891 - DNA, 25 bp, Homo sapien
gaggaacgtctacaccatccagact

SEQ ID NO: 1469892 - DNA, 25 bp, Homo sapien
cagactaatgttagctgaaggatca

SEQ ID NO: 1469893 - DNA, 25 bp, Homo sapien
tctacaccatccagactaatgttag

SEQ ID NO: 1469894 - DNA, 25 bp, Homo sapien
agggagatgagctctatttgatgtt

SEQ ID NO: 1469895 - DNA, 25 bp, Homo sapien
gagatgagctctatttgatgttggg

SEQ ID NO: 1469896 - DNA, 25 bp, Homo sapien
gatgttgggtccatgtggtctttct

SEQ ID NO: 1469897 - DNA, 25 bp, Homo sapien
tgagctctatttgatgttgggtcca

SEQ ID NO: 1469898 - DNA, 25 bp, Homo sapien
caatcatggtcagttgcagcatatt

SEQ ID NO: 1469899 - DNA, 25 bp, Homo sapien
aacctccaatcatggtcagttgcag

SEQ ID NO: 1469900 - DNA, 25 bp, Homo sapien
cctccaatcatggtcagttgcagca

SEQ ID NO: 1469901 - DNA, 25 bp, Homo sapien
tccaatcatggtcagttgcagcata

SEQ ID NO: 1469902 - DNA, 25 bp, Homo sapien
tccagggtgcctcgggctgtagcaa

SEQ ID NO: 1469903 - DNA, 25 bp, Homo sapien
gaatctccagctgtttgacagccag

SEQ ID NO: 1469904 - DNA, 25 bp, Homo sapien
taaaatgaatctccagctgtttgac

SEQ ID NO: 1469905 - DNA, 25 bp, Homo sapien
gcctcgggctgtagcaacagctttg

SEQ ID NO: 1469906 - DNA, 25 bp, Homo sapien
gtgcttgcccttgggtaacttgctg

SEQ ID NO: 1469907 - DNA, 25 bp, Homo sapien
gaacatagtttgtgcccagcgatca

SEQ ID NO: 1469908 - DNA, 25 bp, Homo sapien
cagcagctctaggtttccgtccaca

SEQ ID NO: 1469909 - DNA, 25 bp, Homo sapien
tgggctctcgaaaccaacagtttga

SEQ ID NO: 1469910 - DNA, 25 bp, Homo sapien
aaagaatcctaattggtgcgtccag

SEQ ID NO: 1469911 - DNA, 25 bp, Homo sapien
gcctattgggtctccctgagacgta

SEQ ID NO: 1469912 - DNA, 25 bp, Homo sapien
taagcctattgggtctccctgagac

SEQ ID NO: 1469913 - DNA, 25 bp, Homo sapien
tattgggtctccctgagacgtatgg

SEQ ID NO: 1469914 - DNA, 25 bp, Homo sapien
attgggtctccctgagacgtatggc

SEQ ID NO: 1469915 - DNA, 25 bp, Homo sapien
ttgagcaagccacccagctaagtgc

SEQ ID NO: 1469916 - DNA, 25 bp, Homo sapien
tctaattctcacaatgcccatggtg

SEQ ID NO: 1469917 - DNA, 25 bp, Homo sapien
aggctgtcagatcctagctctgcca

SEQ ID NO: 1469918 - DNA, 25 bp, Homo sapien
gcaagaagctacgtaacctctctgg

SEQ ID NO: 1469919 - DNA, 25 bp, Homo sapien
cttaaagggcttgtaacgctggcat

SEQ ID NO: 1469920 - DNA, 25 bp, Homo sapien
ggggctatccgaagaccctgggaca

SEQ ID NO: 1469921 - DNA, 25 bp, Homo sapien
cgccttcacgctctatcttaaagat

SEQ ID NO: 1469922 - DNA, 25 bp, Homo sapien
tgtaacgctggcattcgccttcacg

SEQ ID NO: 1469923 - DNA, 25 bp, Homo sapien
agtcatacgcattgtgtgtggttgc

SEQ ID NO: 1469924 - DNA, 25 bp, Homo sapien
catacgcattgtgtgtggttgcatg

SEQ ID NO: 1469925 - DNA, 25 bp, Homo sapien
gtcatacgcattgtgtgtggttgca

SEQ ID NO: 1469926 - DNA, 25 bp, Homo sapien
atacgcattgtgtgtggttgcatga

SEQ ID NO: 1469927 - DNA, 25 bp, Homo sapien
cacacatggaagtttgggaccgctg

SEQ ID NO: 1469928 - DNA, 25 bp, Homo sapien
gagttaaaacacaatgggccagagg

SEQ ID NO: 1469929 - DNA, 25 bp, Homo sapien
aaggttctcaaaggaccaccagcag

SEQ ID NO: 1469930 - DNA, 25 bp, Homo sapien
aaatttgtacgccaagctgaggtgc

SEQ ID NO: 1469931 - DNA, 25 bp, Homo sapien
tgagcagactgtaggccacctcgat

SEQ ID NO: 1469932 - DNA, 25 bp, Homo sapien
tcgatgggatccttgctgctatcat

SEQ ID NO: 1469933 - DNA, 25 bp, Homo sapien
agttgacatcgatgggatccttgct

SEQ ID NO: 1469934 - DNA, 25 bp, Homo sapien
tgacatcgatgggatccttgctgct

SEQ ID NO: 1469935 - DNA, 25 bp, Homo sapien
ttctggaatgttaacaaggccttgt

SEQ ID NO: 1469936 - DNA, 25 bp, Homo sapien
agttgagaggtggaagaactgtctt

SEQ ID NO: 1469937 - DNA, 25 bp, Homo sapien
gaatgttaacaaggccttgtggcct

SEQ ID NO: 1469938 - DNA, 25 bp, Homo sapien
gggagttgagaggtggaagaactgt

SEQ ID NO: 1469939 - DNA, 25 bp, Homo sapien
ggagcggaggcttcttcatcccaaa

SEQ ID NO: 1469940 - DNA, 25 bp, Homo sapien
ggattccaggaatttcgcagacagc

SEQ ID NO: 1469941 - DNA, 25 bp, Homo sapien
tgggattccaggaatttcgcagaca

SEQ ID NO: 1469942 - DNA, 25 bp, Homo sapien
cagtgtcacttggtgctctatatgc

SEQ ID NO: 1469943 - DNA, 25 bp, Homo sapien
cagagatggaagagcggggccactg

SEQ ID NO: 1469944 - DNA, 25 bp, Homo sapien
ccacaaatataagcggaaccctcca

SEQ ID NO: 1469945 - DNA, 25 bp, Homo sapien
ggctccgggactggtagaccttgaa

SEQ ID NO: 1469946 - DNA, 25 bp, Homo sapien
aagttgacagatccggttcagcgcc

SEQ ID NO: 1469947 - DNA, 25 bp, Homo sapien
caaggagagaggttcactgctcaga

SEQ ID NO: 1469948 - DNA, 25 bp, Homo sapien
ggacctcactgaggatggagtatgc

SEQ ID NO: 1469949 - DNA, 25 bp, Homo sapien
ctcactgaggatggagtatgcggcc

SEQ ID NO: 1469950 - DNA, 25 bp, Homo sapien
tcactgaggatggagtatgcggcct

SEQ ID NO: 1469951 - DNA, 25 bp, Homo sapien
acctcactgaggatggagtatgcgg

SEQ ID NO: 1469952 - DNA, 25 bp, Homo sapien
aggagacaggggatttcgctctgaa

SEQ ID NO: 1469953 - DNA, 25 bp, Homo sapien
gggatttcgctctgaaagctgggca

SEQ ID NO: 1469954 - DNA, 25 bp, Homo sapien
gacaggggatttcgctctgaaagct

SEQ ID NO: 1469955 - DNA, 25 bp, Homo sapien
caggggatttcgctctgaaagctgg

SEQ ID NO: 1469956 - DNA, 25 bp, Homo sapien
tcacttcctttacggctgggcttag

SEQ ID NO: 1469957 - DNA, 25 bp, Homo sapien
gcagttagttaagtgcacccctggg

SEQ ID NO: 1469958 - DNA, 25 bp, Homo sapien
cacgtctggacgaagatatagcata

SEQ ID NO: 1469959 - DNA, 25 bp, Homo sapien
gtttcaaacagtccagcacgtctgg

SEQ ID NO: 1469960 - DNA, 25 bp, Homo sapien
caaagatcatcttgatgaggtcctg

SEQ ID NO: 1469961 - DNA, 25 bp, Homo sapien
atcaaagatcatcttgatgaggtcc

SEQ ID NO: 1469962 - DNA, 25 bp, Homo sapien
atactttccacatcaaagatcatct

SEQ ID NO: 1469963 - DNA, 25 bp, Homo sapien
tcatactttccacatcaaagatcat

SEQ ID NO: 1469964 - DNA, 25 bp, Homo sapien
cgtacccacacggccccaggacctg

SEQ ID NO: 1469965 - DNA, 25 bp, Homo sapien
tgggatacttcgtgaaatttttgga

SEQ ID NO: 1469966 - DNA, 25 bp, Homo sapien
tacttcgtgaaatttttggagtgcc

SEQ ID NO: 1469967 - DNA, 25 bp, Homo sapien
tcatgaagtgctcaatggcatcctc

SEQ ID NO: 1469968 - DNA, 25 bp, Homo sapien
tcctttaacgatgtccaccaggcca

SEQ ID NO: 1469969 - DNA, 25 bp, Homo sapien
cagaagctgcagcttgtagtaggag

SEQ ID NO: 1469970 - DNA, 25 bp, Homo sapien
cctttaacgatgtccaccaggccaa

SEQ ID NO: 1469971 - DNA, 25 bp, Homo sapien
aagctgcagcttgtagtaggagttg

SEQ ID NO: 1469972 - DNA, 25 bp, Homo sapien
tgctcctcctttaagagttaatttc

SEQ ID NO: 1469973 - DNA, 25 bp, Homo sapien
gctgctcctcctttaagagttaatt

SEQ ID NO: 1469974 - DNA, 25 bp, Homo sapien
cagctgctcctcctttaagagttaa

SEQ ID NO: 1469975 - DNA, 25 bp, Homo sapien
gctcctcctttaagagttaatttca

SEQ ID NO: 1469976 - DNA, 25 bp, Homo sapien
tgcgctaagaacaactcctgaaggc

SEQ ID NO: 1469977 - DNA, 25 bp, Homo sapien
gtgcgctaagaacaactcctgaagg

SEQ ID NO: 1469978 - DNA, 25 bp, Homo sapien
gaaggctcttggtggaggcggagac

SEQ ID NO: 1469979 - DNA, 25 bp, Homo sapien
cctgaaggctcttggtggaggcgga

SEQ ID NO: 1469980 - DNA, 25 bp, Homo sapien
ggacagcttcccgagagtcaggatc

SEQ ID NO: 1469981 - DNA, 25 bp, Homo sapien
cagcttcccgagagtcaggatcttc

SEQ ID NO: 1469982 - DNA, 25 bp, Homo sapien
ccgggacagcttcccgagagtcagg

SEQ ID NO: 1469983 - DNA, 25 bp, Homo sapien
gttccgggacagcttcccgagagtc

SEQ ID NO: 1469984 - DNA, 25 bp, Homo sapien
aggtgacacccgtccagaactggag

SEQ ID NO: 1469985 - DNA, 25 bp, Homo sapien
ccaaggtcaggctaggaaggctgca

SEQ ID NO: 1469986 - DNA, 25 bp, Homo sapien
tgtccatgatagtccctcaaagcag

SEQ ID NO: 1469987 - DNA, 25 bp, Homo sapien
tccctgtgagggcaaacaactagga

SEQ ID NO: 1469988 - DNA, 25 bp, Homo sapien
tcttgaggtaagagatttctcggaa

SEQ ID NO: 1469989 - DNA, 25 bp, Homo sapien
gtggagggcggaggcgtggccgcca

SEQ ID NO: 1469990 - DNA, 25 bp, Homo sapien
tgaggtaagagatttctcggaattc

SEQ ID NO: 1469991 - DNA, 25 bp, Homo sapien
ggccgccacggaggcgctggtttct

SEQ ID NO: 1469992 - DNA, 25 bp, Homo sapien
ccaggctgctgggcctgggtcctgc

SEQ ID NO: 1469993 - DNA, 25 bp, Homo sapien
aggctgctgggcctgggtcctgctg

SEQ ID NO: 1469994 - DNA, 25 bp, Homo sapien
gctgctgggcctgggtcctgctgag

SEQ ID NO: 1469995 - DNA, 25 bp, Homo sapien
ctgctgggcctgggtcctgctgagt

SEQ ID NO: 1469996 - DNA, 25 bp, Homo sapien
gaacaccatgccatcagctactcgg

SEQ ID NO: 1469997 - DNA, 25 bp, Homo sapien
tgacgtccccagtgcagtaataggc

SEQ ID NO: 1469998 - DNA, 25 bp, Homo sapien
ctccttccggttgggtgtctgtgtc

SEQ ID NO: 1469999 - DNA, 25 bp, Homo sapien
agtaataggcatcgctcttgaagac

SEQ ID NO: 1470000 - DNA, 25 bp, Homo sapien
tgcgtgtcccacttaacacaaaggc

SEQ ID NO: 1470001 - DNA, 25 bp, Homo sapien
tgtcccacttaacacaaaggcagct

SEQ ID NO: 1470002 - DNA, 25 bp, Homo sapien
cgtgtcccacttaacacaaaggcag

SEQ ID NO: 1470003 - DNA, 25 bp, Homo sapien
atgcgtgtcccacttaacacaaagg

SEQ ID NO: 1470004 - DNA, 25 bp, Homo sapien
cttcaggtcattagttgaacacact

SEQ ID NO: 1470005 - DNA, 25 bp, Homo sapien
tccttcaggtcattagttgaacaca

SEQ ID NO: 1470006 - DNA, 25 bp, Homo sapien
tcaggtcattagttgaacacacttt

SEQ ID NO: 1470007 - DNA, 25 bp, Homo sapien
ccttcaggtcattagttgaacacac

SEQ ID NO: 1470008 - DNA, 25 bp, Homo sapien
ggctttttcaagcttactatccttg

SEQ ID NO: 1470009 - DNA, 25 bp, Homo sapien
tttttcaagcttactatccttgtct

SEQ ID NO: 1470010 - DNA, 25 bp, Homo sapien
aagcccttgagctgactcgcactgt

SEQ ID NO: 1470011 - DNA, 25 bp, Homo sapien
ccttgagctgactcgcactgtactc

SEQ ID NO: 1470012 - DNA, 25 bp, Homo sapien
tgaagcccttgagctgactcgcact

SEQ ID NO: 1470013 - DNA, 25 bp, Homo sapien
gcccttgagctgactcgcactgtac

SEQ ID NO: 1470014 - DNA, 25 bp, Homo sapien
aagaattgctaacattccccttaag

SEQ ID NO: 1470015 - DNA, 25 bp, Homo sapien
ctgcctggacatgtgaagaattgct

SEQ ID NO: 1470016 - DNA, 25 bp, Homo sapien
ttccccttaagatgtttctgctgac

SEQ ID NO: 1470017 - DNA, 25 bp, Homo sapien
gtgaagaattgctaacattcccctt

SEQ ID NO: 1470018 - DNA, 25 bp, Homo sapien
cctacctcggccttgcctggctaat

SEQ ID NO: 1470019 - DNA, 25 bp, Homo sapien
ctcctacctcggccttgcctggcta

SEQ ID NO: 1470020 - DNA, 25 bp, Homo sapien
aggcttaagtgaccctcctacctcg

SEQ ID NO: 1470021 - DNA, 25 bp, Homo sapien
ccaggcttaagtgaccctcctacct

SEQ ID NO: 1470022 - DNA, 25 bp, Homo sapien
tcttctccatacaccccttgcacgt

SEQ ID NO: 1470023 - DNA, 25 bp, Homo sapien
tctatcttctccatacaccccttgc

SEQ ID NO: 1470024 - DNA, 25 bp, Homo sapien
tccatacaccccttgcacgtacttc

SEQ ID NO: 1470025 - DNA, 25 bp, Homo sapien
atacaccccttgcacgtacttctgt

SEQ ID NO: 1470026 - DNA, 25 bp, Homo sapien
taagtcagacacaagtatatgtaag

SEQ ID NO: 1470027 - DNA, 25 bp, Homo sapien
tcactaaggcttctaatttccatta

SEQ ID NO: 1470028 - DNA, 25 bp, Homo sapien
aagcctggaagcatactgacgtctc

SEQ ID NO: 1470029 - DNA, 25 bp, Homo sapien
tacttctatttaccaaagtgttgaa

SEQ ID NO: 1470030 - DNA, 25 bp, Homo sapien
gattaggaataagacgaagctatct

SEQ ID NO: 1470031 - DNA, 25 bp, Homo sapien
taggaataagacgaagctatcttcc

SEQ ID NO: 1470032 - DNA, 25 bp, Homo sapien
taagattaggaataagacgaagcta

SEQ ID NO: 1470033 - DNA, 25 bp, Homo sapien
gaataagacgaagctatcttcccat

SEQ ID NO: 1470034 - DNA, 25 bp, Homo sapien
cgtgcccggctcgacatggaggaat

SEQ ID NO: 1470035 - DNA, 25 bp, Homo sapien
ggaatgactaggcaaagcacagaga

SEQ ID NO: 1470036 - DNA, 25 bp, Homo sapien
ctctggaggctaccataaaggtaca

SEQ ID NO: 1470037 - DNA, 25 bp, Homo sapien
tggaggaatcttaagagcacattgc

SEQ ID NO: 1470038 - DNA, 25 bp, Homo sapien
cagctataaccatggaccactctgg

SEQ ID NO: 1470039 - DNA, 25 bp, Homo sapien
cagttataaccatggaccactccga

SEQ ID NO: 1470040 - DNA, 25 bp, Homo sapien
tagggctagcgggtatatggaaact

SEQ ID NO: 1470041 - DNA, 25 bp, Homo sapien
gagaatccgtctccaacaacaacga

SEQ ID NO: 1470042 - DNA, 25 bp, Homo sapien
tacgcttgatctgcacatgtgggag

SEQ ID NO: 1470043 - DNA, 25 bp, Homo sapien
tgctgaaataacatgggcaccatac

SEQ ID NO: 1470044 - DNA, 25 bp, Homo sapien
caaaataccaaatatcatgcaacag

SEQ ID NO: 1470045 - DNA, 25 bp, Homo sapien
catgcaacagatgatgctgagtcca

SEQ ID NO: 1470046 - DNA, 25 bp, Homo sapien
gggacttttccatcaaacatgggcg

SEQ ID NO: 1470047 - DNA, 25 bp, Homo sapien
ggacttttccatcaaacatgggcga

SEQ ID NO: 1470048 - DNA, 25 bp, Homo sapien
gatagagcttatccgaagactccgc

SEQ ID NO: 1470049 - DNA, 25 bp, Homo sapien
ggcgtactcgactcgatagagctta

SEQ ID NO: 1470050 - DNA, 25 bp, Homo sapien
ccgctcttggcgtactcgactcgat

SEQ ID NO: 1470051 - DNA, 25 bp, Homo sapien
ggcgcgcccgctcttggcgtactcg

SEQ ID NO: 1470052 - DNA, 25 bp, Homo sapien
ccaccgccgttccctgatagattgc

SEQ ID NO: 1470053 - DNA, 25 bp, Homo sapien
tagctgccgccaaagctccggaagc

SEQ ID NO: 1470054 - DNA, 25 bp, Homo sapien
gacgccacgacctagaaacacgctg

SEQ ID NO: 1470055 - DNA, 25 bp, Homo sapien
tgagcggccagagccgccaccgaac

SEQ ID NO: 1470056 - DNA, 25 bp, Homo sapien
ctctgttgagccgccttgagcatcc

SEQ ID NO: 1470057 - DNA, 25 bp, Homo sapien
atagtgcagtgtgagttgctccagg

SEQ ID NO: 1470058 - DNA, 25 bp, Homo sapien
ctgttgagccgccttgagcatcctc

SEQ ID NO: 1470059 - DNA, 25 bp, Homo sapien
acttgtgtctctctgatagtgcagt

SEQ ID NO: 1470060 - DNA, 25 bp, Homo sapien
agaagccttctttttgggctgcttg

SEQ ID NO: 1470061 - DNA, 25 bp, Homo sapien
tcatttttgccacatcagctttcct

SEQ ID NO: 1470062 - DNA, 25 bp, Homo sapien
aagccttctttttgggctgcttgcc

SEQ ID NO: 1470063 - DNA, 25 bp, Homo sapien
tttccttcagttgagaagccttctt

SEQ ID NO: 1470064 - DNA, 25 bp, Homo sapien
tgggctcaccatgttctagggtctg

SEQ ID NO: 1470065 - DNA, 25 bp, Homo sapien
caattttgtccacgtatccagaagg

SEQ ID NO: 1470066 - DNA, 25 bp, Homo sapien
tggtgacaagatggccattccacag

SEQ ID NO: 1470067 - DNA, 25 bp, Homo sapien
caaggaatgaccaggtggcctgacc

SEQ ID NO: 1470068 - DNA, 25 bp, Homo sapien
gattactcacaggtgcggttccact

SEQ ID NO: 1470069 - DNA, 25 bp, Homo sapien
tacggtgattactcacaggtgcggt

SEQ ID NO: 1470070 - DNA, 25 bp, Homo sapien
tgttgcccattctgcagtacggtga

SEQ ID NO: 1470071 - DNA, 25 bp, Homo sapien
tctgcagtacggtgattactcacag

SEQ ID NO: 1470072 - DNA, 25 bp, Homo sapien
ctacaggtacacgcttctgtgcctg

SEQ ID NO: 1470073 - DNA, 25 bp, Homo sapien
tacaggtacacgcttctgtgcctgg

SEQ ID NO: 1470074 - DNA, 25 bp, Homo sapien
ttagtcctcaggcccactgttgcac

SEQ ID NO: 1470075 - DNA, 25 bp, Homo sapien
cctcaggcccactgttgcacatcct

SEQ ID NO: 1470076 - DNA, 25 bp, Homo sapien
agtcctcaggcccactgttgcacat

SEQ ID NO: 1470077 - DNA, 25 bp, Homo sapien
cccactgttgcacatcctggccttc

SEQ ID NO: 1470078 - DNA, 25 bp, Homo sapien
cttcagcatccacagcggccccaac

SEQ ID NO: 1470079 - DNA, 25 bp, Homo sapien
acagcggccccaacttcagtccctt

SEQ ID NO: 1470080 - DNA, 25 bp, Homo sapien
tcagcatccacagcggccccaactt

SEQ ID NO: 1470081 - DNA, 25 bp, Homo sapien
ccacagcggccccaacttcagtccc

SEQ ID NO: 1470082 - DNA, 25 bp, Homo sapien
taccatatgctctcctaccagtgct

SEQ ID NO: 1470083 - DNA, 25 bp, Homo sapien
agctaccatatgctctcctaccagt

SEQ ID NO: 1470084 - DNA, 25 bp, Homo sapien
tatgctctcctaccagtgcttggag

SEQ ID NO: 1470085 - DNA, 25 bp, Homo sapien
aagtccagacagcagagcggtgcgg

SEQ ID NO: 1470086 - DNA, 25 bp, Homo sapien
gccacataggcatctaactgttaca

SEQ ID NO: 1470087 - DNA, 25 bp, Homo sapien
tgcaggtgcggccacataggcatct

SEQ ID NO: 1470088 - DNA, 25 bp, Homo sapien
taggcatctaactgttacaaggcac

SEQ ID NO: 1470089 - DNA, 25 bp, Homo sapien
ggtgcggccacataggcatctaact

SEQ ID NO: 1470090 - DNA, 25 bp, Homo sapien
gcttcaggtaggccccagatgtctc

SEQ ID NO: 1470091 - DNA, 25 bp, Homo sapien
ttcaggtaggccccagatgtctcca

SEQ ID NO: 1470092 - DNA, 25 bp, Homo sapien
agcttcaggtaggccccagatgtct

SEQ ID NO: 1470093 - DNA, 25 bp, Homo sapien
tcaggtaggccccagatgtctccat

SEQ ID NO: 1470094 - DNA, 25 bp, Homo sapien
tattgatttgccctagtctgtcaga

SEQ ID NO: 1470095 - DNA, 25 bp, Homo sapien
aaacaggctttcatagaatccaagg

SEQ ID NO: 1470096 - DNA, 25 bp, Homo sapien
gagcttgtgtgctcgttctttcctc

SEQ ID NO: 1470097 - DNA, 25 bp, Homo sapien
aaacatctgctgagaagaattacag

SEQ ID NO: 1470098 - DNA, 25 bp, Homo sapien
caaatccagatgtctttgacttaac

SEQ ID NO: 1470099 - DNA, 25 bp, Homo sapien
agcagctgtggtatgctcagtgcag

SEQ ID NO: 1470100 - DNA, 25 bp, Homo sapien
gacttaacacttagggtctcctcat

SEQ ID NO: 1470101 - DNA, 25 bp, Homo sapien
tcaggacccctgtatttatggagca

SEQ ID NO: 1470102 - DNA, 25 bp, Homo sapien
ctcttctatgaccaatgtgctggga

SEQ ID NO: 1470103 - DNA, 25 bp, Homo sapien
tcttctatgaccaatgtgctgggaa

SEQ ID NO: 1470104 - DNA, 25 bp, Homo sapien
cagggccacttccagagtgatgatg

SEQ ID NO: 1470105 - DNA, 25 bp, Homo sapien
gtcagggccacttccagagtgatga

SEQ ID NO: 1470106 - DNA, 25 bp, Homo sapien
gccacttccagagtgatgatgaggc

SEQ ID NO: 1470107 - DNA, 25 bp, Homo sapien
agcagcctttgcctgtcagggccac

SEQ ID NO: 1470108 - DNA, 25 bp, Homo sapien
gagtgtctttgcctggacttggtct

SEQ ID NO: 1470109 - DNA, 25 bp, Homo sapien
tgtctttgcctggacttggtctggc

SEQ ID NO: 1470110 - DNA, 25 bp, Homo sapien
agtgtctttgcctggacttggtctg

SEQ ID NO: 1470111 - DNA, 25 bp, Homo sapien
gtgtctttgcctggacttggtctgg

SEQ ID NO: 1470112 - DNA, 25 bp, Homo sapien
gccagtctggctcaccagagtacca

SEQ ID NO: 1470113 - DNA, 25 bp, Homo sapien
agccactgtagaactctcccctgga

SEQ ID NO: 1470114 - DNA, 25 bp, Homo sapien
taacttgctgtaggcacgagtggtg

SEQ ID NO: 1470115 - DNA, 25 bp, Homo sapien
cagagtaccataacttgctgtaggc

SEQ ID NO: 1470116 - DNA, 25 bp, Homo sapien
ccgaacttgggtgatctacccactt

SEQ ID NO: 1470117 - DNA, 25 bp, Homo sapien
tcccgaacttgggtgatctacccac

SEQ ID NO: 1470118 - DNA, 25 bp, Homo sapien
cccgaacttgggtgatctacccact

SEQ ID NO: 1470119 - DNA, 25 bp, Homo sapien
ctcccgaacttgggtgatctaccca

SEQ ID NO: 1470120 - DNA, 25 bp, Homo sapien
gctttgatgctttttcattaattca

SEQ ID NO: 1470121 - DNA, 25 bp, Homo sapien
ttagctttgatgctttttcattaat

SEQ ID NO: 1470122 - DNA, 25 bp, Homo sapien
ctttgatgctttttcattaattcac

SEQ ID NO: 1470123 - DNA, 25 bp, Homo sapien
agctttgatgctttttcattaattc

SEQ ID NO: 1470124 - DNA, 25 bp, Homo sapien
ttctggtagtaaattgtggcaggtc

SEQ ID NO: 1470125 - DNA, 25 bp, Homo sapien
ggtcctccacttcattcccatcagc

SEQ ID NO: 1470126 - DNA, 25 bp, Homo sapien
tggtagtaaattgtggcaggtcctc

SEQ ID NO: 1470127 - DNA, 25 bp, Homo sapien
ggtagtaaattgtggcaggtcctcc

SEQ ID NO: 1470128 - DNA, 25 bp, Homo sapien
gccaccgccattgggcaggtcatgg

SEQ ID NO: 1470129 - DNA, 25 bp, Homo sapien
gtaagtaggagcgaaactgctccgc

SEQ ID NO: 1470130 - DNA, 25 bp, Homo sapien
ggcagccaccgccattgggcaggtc

SEQ ID NO: 1470131 - DNA, 25 bp, Homo sapien
attgcttctcactcagtaagtagga

SEQ ID NO: 1470132 - DNA, 25 bp, Homo sapien
cacatttgccgtgcccttggtgtga

SEQ ID NO: 1470133 - DNA, 25 bp, Homo sapien
gcacatttgccgtgcccttggtgtg

SEQ ID NO: 1470134 - DNA, 25 bp, Homo sapien
tgcacatttgccgtgcccttggtgt

SEQ ID NO: 1470135 - DNA, 25 bp, Homo sapien
ggccagctgaatccctggcactgca

SEQ ID NO: 1470136 - DNA, 25 bp, Homo sapien
acaggaggccagctgaatccctggc

SEQ ID NO: 1470137 - DNA, 25 bp, Homo sapien
agagcaagagtgttccaagcaggga

SEQ ID NO: 1470138 - DNA, 25 bp, Homo sapien
ctgctcccaccacgatgcacaggag

SEQ ID NO: 1470139 - DNA, 25 bp, Homo sapien
ccggatagagagcaggatcagctcc

SEQ ID NO: 1470140 - DNA, 25 bp, Homo sapien
gctctggaggctgccgcccatttat

SEQ ID NO: 1470141 - DNA, 25 bp, Homo sapien
ctccagctctggaggctgccgccca

SEQ ID NO: 1470142 - DNA, 25 bp, Homo sapien
cggatagagagcaggatcagctcca

SEQ ID NO: 1470143 - DNA, 25 bp, Homo sapien
gagaaccacagccgagccgcaggct

SEQ ID NO: 1470144 - DNA, 25 bp, Homo sapien
agagaaccacagccgagccgcaggc

SEQ ID NO: 1470145 - DNA, 25 bp, Homo sapien
cagagaaccacagccgagccgcagg

SEQ ID NO: 1470146 - DNA, 25 bp, Homo sapien
agaaccacagccgagccgcaggctg

SEQ ID NO: 1470147 - DNA, 25 bp, Homo sapien
ttggtaggttgacttctcaaactta

SEQ ID NO: 1470148 - DNA, 25 bp, Homo sapien
tggtaggttgacttctcaaacttac

SEQ ID NO: 1470149 - DNA, 25 bp, Homo sapien
gaagggagaatcttgtggtagaaat

SEQ ID NO: 1470150 - DNA, 25 bp, Homo sapien
tcttgtggtagaaatagtctgggtc

SEQ ID NO: 1470151 - DNA, 25 bp, Homo sapien
tcgtgcttggatgaattaactgtgt

SEQ ID NO: 1470152 - DNA, 25 bp, Homo sapien
gtcaggttcttcgtgcttggatgaa

SEQ ID NO: 1470153 - DNA, 25 bp, Homo sapien
ggtcgcttgctcaggatctaaagtc

SEQ ID NO: 1470154 - DNA, 25 bp, Homo sapien
gtggtcgcttgctcaggatctaaag

SEQ ID NO: 1470155 - DNA, 25 bp, Homo sapien
gtcgcttgctcaggatctaaagtcc

SEQ ID NO: 1470156 - DNA, 25 bp, Homo sapien
tggtcgcttgctcaggatctaaagt

SEQ ID NO: 1470157 - DNA, 25 bp, Homo sapien
taactgcatctggaagaatgtgttc

SEQ ID NO: 1470158 - DNA, 25 bp, Homo sapien
catctggaagaatgtgttcatggca

SEQ ID NO: 1470159 - DNA, 25 bp, Homo sapien
tgcatctggaagaatgtgttcatgg

SEQ ID NO: 1470160 - DNA, 25 bp, Homo sapien
aaataactgcatctggaagaatgtg

SEQ ID NO: 1470161 - DNA, 25 bp, Homo sapien
ttaataaccgtccacaccgtcacca

SEQ ID NO: 1470162 - DNA, 25 bp, Homo sapien
tgattccccttaataaccgtccaca

SEQ ID NO: 1470163 - DNA, 25 bp, Homo sapien
taataaccgtccacaccgtcaccat

SEQ ID NO: 1470164 - DNA, 25 bp, Homo sapien
ctctgaatgattccccttaataacc

SEQ ID NO: 1470165 - DNA, 25 bp, Homo sapien
gggtagaagctagtaatctctgcaa

SEQ ID NO: 1470166 - DNA, 25 bp, Homo sapien
ggaaatgtagccctttagctagaaa

SEQ ID NO: 1470167 - DNA, 25 bp, Homo sapien
tgtctcctagttgagtcagaactcc

SEQ ID NO: 1470168 - DNA, 25 bp, Homo sapien
tgctttatgacacaaaatagctgct

SEQ ID NO: 1470169 - DNA, 25 bp, Homo sapien
caaccagccgtgagggaaacaaaca

SEQ ID NO: 1470170 - DNA, 25 bp, Homo sapien
ggcgaagaacgtagtcctccaggtg

SEQ ID NO: 1470171 - DNA, 25 bp, Homo sapien
gcggattgggaacattctttgtgct

SEQ ID NO: 1470172 - DNA, 25 bp, Homo sapien
ttgtgctctcgttgattgacagctg

SEQ ID NO: 1470173 - DNA, 25 bp, Homo sapien
cattctttcgattaggccagctgcc

SEQ ID NO: 1470174 - DNA, 25 bp, Homo sapien
tataataactcctaagccggtggct

SEQ ID NO: 1470175 - DNA, 25 bp, Homo sapien
ccagattatggaggaagcatcacca

SEQ ID NO: 1470176 - DNA, 25 bp, Homo sapien
gactcattgcaagggtggatttcgc

SEQ ID NO: 1470177 - DNA, 25 bp, Homo sapien
tggttccctggatgcctagatgtcc

SEQ ID NO: 1470178 - DNA, 25 bp, Homo sapien
tagatgtcctcactggagatgcacc

SEQ ID NO: 1470179 - DNA, 25 bp, Homo sapien
atgagcgcagcccaatccggttctt

SEQ ID NO: 1470180 - DNA, 25 bp, Homo sapien
gagatgcacccattgcatgagcgca

SEQ ID NO: 1470181 - DNA, 25 bp, Homo sapien
gttgttatttggcgcacattcctca

SEQ ID NO: 1470182 - DNA, 25 bp, Homo sapien
tgttgttatttggcgcacattcctc

SEQ ID NO: 1470183 - DNA, 25 bp, Homo sapien
ctgttgttatttggcgcacattcct

SEQ ID NO: 1470184 - DNA, 25 bp, Homo sapien
ctctttagcttccttgccatcaatt

SEQ ID NO: 1470185 - DNA, 25 bp, Homo sapien
cataactctttagcttccttgccat

SEQ ID NO: 1470186 - DNA, 25 bp, Homo sapien
ggaacccctgccttcaataaatctg

SEQ ID NO: 1470187 - DNA, 25 bp, Homo sapien
ggtatagtttccataactctttagc

SEQ ID NO: 1470188 - DNA, 25 bp, Homo sapien
gagattggtcccgggtttgtctgcc

SEQ ID NO: 1470189 - DNA, 25 bp, Homo sapien
tgttccagtacctcccgtgtgggag

SEQ ID NO: 1470190 - DNA, 25 bp, Homo sapien
ggtttgtctgccccactccttaatc

SEQ ID NO: 1470191 - DNA, 25 bp, Homo sapien
ccccaagtcctgtagctgacctagt

SEQ ID NO: 1470192 - DNA, 25 bp, Homo sapien
tccttaagtgtatgccagggctttc

SEQ ID NO: 1470193 - DNA, 25 bp, Homo sapien
gcccaatttcgaagagccagctgaa

SEQ ID NO: 1470194 - DNA, 25 bp, Homo sapien
ggtgttgcctctatgttatcagcca

SEQ ID NO: 1470195 - DNA, 25 bp, Homo sapien
ccagctgaattttgggtacccatga

SEQ ID NO: 1470196 - DNA, 25 bp, Homo sapien
gggttccagagtcggctgccagtct

SEQ ID NO: 1470197 - DNA, 25 bp, Homo sapien
gaccgggaagcaacaatctgggttc

SEQ ID NO: 1470198 - DNA, 25 bp, Homo sapien
aaaggtctcatggagcttcagcacg

SEQ ID NO: 1470199 - DNA, 25 bp, Homo sapien
aaggatcactagaccgggaagcaac

SEQ ID NO: 1470200 - DNA, 25 bp, Homo sapien
caaagagccggaaactttgcggcca

SEQ ID NO: 1470201 - DNA, 25 bp, Homo sapien
ctctgccggcttcggagtagggctc

SEQ ID NO: 1470202 - DNA, 25 bp, Homo sapien
ctcaacactttcgtgccgggactgg

SEQ ID NO: 1470203 - DNA, 25 bp, Homo sapien
tcggatcagaatgagctctagggcc

SEQ ID NO: 1470204 - DNA, 25 bp, Homo sapien
cattgacagcatcggctgcagggca

SEQ ID NO: 1470205 - DNA, 25 bp, Homo sapien
ccctttgtgagatcagaatcctatg

SEQ ID NO: 1470206 - DNA, 25 bp, Homo sapien
gagctgtaggtgcacagatttctga

SEQ ID NO: 1470207 - DNA, 25 bp, Homo sapien
ggaaacaaatgcattggtgccaggt

SEQ ID NO: 1470208 - DNA, 25 bp, Homo sapien
tgggaacctttttgccgttgctgtc

SEQ ID NO: 1470209 - DNA, 25 bp, Homo sapien
atgtgacaggaacaccttaatccag

SEQ ID NO: 1470210 - DNA, 25 bp, Homo sapien
tttttgccgttgctgtctccaagtt

SEQ ID NO: 1470211 - DNA, 25 bp, Homo sapien
gctcttggggaagggtgatcgtttg

SEQ ID NO: 1470212 - DNA, 25 bp, Homo sapien
ttggtccccgaccactcagggagga

SEQ ID NO: 1470213 - DNA, 25 bp, Homo sapien
atgagggcagatgtgttgtcctgca

SEQ ID NO: 1470214 - DNA, 25 bp, Homo sapien
ggcagatgtgttgtcctgcagcgtg

SEQ ID NO: 1470215 - DNA, 25 bp, Homo sapien
ccttggtccccgaccactcagggag

SEQ ID NO: 1470216 - DNA, 25 bp, Homo sapien
acagaggagagttgttgctaggaca

SEQ ID NO: 1470217 - DNA, 25 bp, Homo sapien
gagttgttgctaggacagatggcct

SEQ ID NO: 1470218 - DNA, 25 bp, Homo sapien
gaacagaggagagttgttgctagga

SEQ ID NO: 1470219 - DNA, 25 bp, Homo sapien
gagagttgttgctaggacagatggc

SEQ ID NO: 1470220 - DNA, 25 bp, Homo sapien
taagccagtcacatcctctctctta

SEQ ID NO: 1470221 - DNA, 25 bp, Homo sapien
gtctaccagccataagtaagtcagg

SEQ ID NO: 1470222 - DNA, 25 bp, Homo sapien
aggtctaccagccataagtaagtca

SEQ ID NO: 1470223 - DNA, 25 bp, Homo sapien
aatccaaactactgtactctaagcc

SEQ ID NO: 1470224 - DNA, 25 bp, Homo sapien
ggtgccaggaatgagggtggcctct

SEQ ID NO: 1470225 - DNA, 25 bp, Homo sapien
ctggtgccaggaatgagggtggcct

SEQ ID NO: 1470226 - DNA, 25 bp, Homo sapien
tggtgccaggaatgagggtggcctc

SEQ ID NO: 1470227 - DNA, 25 bp, Homo sapien
gtgccaggaatgagggtggcctctc

SEQ ID NO: 1470228 - DNA, 25 bp, Homo sapien
ctggaggctgaaggttcccagaaag

SEQ ID NO: 1470229 - DNA, 25 bp, Homo sapien
tggcctggtctgacgctccagcagg

SEQ ID NO: 1470230 - DNA, 25 bp, Homo sapien
cagattggcctggtctgacgctcca

SEQ ID NO: 1470231 - DNA, 25 bp, Homo sapien
agacagattggcctggtctgacgct

SEQ ID NO: 1470232 - DNA, 25 bp, Homo sapien
agggccattgtcttcatgggagtaa

SEQ ID NO: 1470233 - DNA, 25 bp, Homo sapien
gaggctttagtcagattccgactca

SEQ ID NO: 1470234 - DNA, 25 bp, Homo sapien
ttggaggctttagtcagattccgac

SEQ ID NO: 1470235 - DNA, 25 bp, Homo sapien
gcttttggaggctttagtcagattc

SEQ ID NO: 1470236 - DNA, 25 bp, Homo sapien
gctttagtcagattccgactcaggg

SEQ ID NO: 1470237 - DNA, 25 bp, Homo sapien
gtgctttctcaaaatgtctttacgc

SEQ ID NO: 1470238 - DNA, 25 bp, Homo sapien
gctttctcaaaatgtctttacgcgt

SEQ ID NO: 1470239 - DNA, 25 bp, Homo sapien
tcaaaatgtctttacgcgtcatcat

SEQ ID NO: 1470240 - DNA, 25 bp, Homo sapien
tctcaaaatgtctttacgcgtcatc

SEQ ID NO: 1470241 - DNA, 25 bp, Homo sapien
cactcagtaggtacttcgtaagtgc

SEQ ID NO: 1470242 - DNA, 25 bp, Homo sapien
tcagtaggtacttcgtaagtgccag

SEQ ID NO: 1470243 - DNA, 25 bp, Homo sapien
caggacactgaagcactcagtaggt

SEQ ID NO: 1470244 - DNA, 25 bp, Homo sapien
aggacactgaagcactcagtaggta

SEQ ID NO: 1470245 - DNA, 25 bp, Homo sapien
ggatgatgaggatgctagaactgtt

SEQ ID NO: 1470246 - DNA, 25 bp, Homo sapien
aggcatcgagggcactggcagattc

SEQ ID NO: 1470247 - DNA, 25 bp, Homo sapien
cctttgctgctccaggatagaggca

SEQ ID NO: 1470248 - DNA, 25 bp, Homo sapien
tgcaaaagtgtgtggatgttcagga

SEQ ID NO: 1470249 - DNA, 25 bp, Homo sapien
gccgctggtgtaagttccaaagttc

SEQ ID NO: 1470250 - DNA, 25 bp, Homo sapien
ccagttagtcctgagaggtccccag

SEQ ID NO: 1470251 - DNA, 25 bp, Homo sapien
gaagataaagcgtctcaccctggaa

SEQ ID NO: 1470252 - DNA, 25 bp, Homo sapien
tgtagtaagccaaacagtggcccct

SEQ ID NO: 1470253 - DNA, 25 bp, Homo sapien
ggctgaacattgcagcagccctcat

SEQ ID NO: 1470254 - DNA, 25 bp, Homo sapien
caaatcctcactgccatcgtcatgg

SEQ ID NO: 1470255 - DNA, 25 bp, Homo sapien
ccatcgtcatggtgggctggatcat

SEQ ID NO: 1470256 - DNA, 25 bp, Homo sapien
tctggggcatggacatggtcatcct

SEQ ID NO: 1470257 - DNA, 25 bp, Homo sapien
gcagctgtgagcccacgggagccgc

SEQ ID NO: 1470258 - DNA, 25 bp, Homo sapien
gcagctttgggcacaaggaccttta

SEQ ID NO: 1470259 - DNA, 25 bp, Homo sapien
cagctgtgagcccacgggagccgct

SEQ ID NO: 1470260 - DNA, 25 bp, Homo sapien
gctttgggcacaaggacctttacat

SEQ ID NO: 1470261 - DNA, 25 bp, Homo sapien
taacttcccggcagagtgtggaaca

SEQ ID NO: 1470262 - DNA, 25 bp, Homo sapien
gcctcaaaatctggtgccccgagtg

SEQ ID NO: 1470263 - DNA, 25 bp, Homo sapien
tcctcgcagctgaaatctgagggct

SEQ ID NO: 1470264 - DNA, 25 bp, Homo sapien
tgtggtagacccgtcctgtgggacc

SEQ ID NO: 1470265 - DNA, 25 bp, Homo sapien
aggctccgtactcccacctgcctgg

SEQ ID NO: 1470266 - DNA, 25 bp, Homo sapien
aaggtgccccttcctgagggtgttg

SEQ ID NO: 1470267 - DNA, 25 bp, Homo sapien
cctgtcatcacttagggggagttgg

SEQ ID NO: 1470268 - DNA, 25 bp, Homo sapien
ttctccctcccatatgtgggggcgg

SEQ ID NO: 1470269 - DNA, 25 bp, Homo sapien
tcttggaagaaaacgtctaatgtcg

SEQ ID NO: 1470270 - DNA, 25 bp, Homo sapien
gacgtagggacgcttccagacttgc

SEQ ID NO: 1470271 - DNA, 25 bp, Homo sapien
cactgttcttagagaagaccctgag

SEQ ID NO: 1470272 - DNA, 25 bp, Homo sapien
cagtccagccatgagggtatttcca

SEQ ID NO: 1470273 - DNA, 25 bp, Homo sapien
atgcctgtctaagggtccccagcag

SEQ ID NO: 1470274 - DNA, 25 bp, Homo sapien
catcagaagctccggttgcatgact

SEQ ID NO: 1470275 - DNA, 25 bp, Homo sapien
agcagaagaggccatcatcagaagc

SEQ ID NO: 1470276 - DNA, 25 bp, Homo sapien
agaggtccctcagatgcctgtctaa

SEQ ID NO: 1470277 - DNA, 25 bp, Homo sapien
gagtccatcttacagggccagggct

SEQ ID NO: 1470278 - DNA, 25 bp, Homo sapien
tacatgacactaaaggcaagcctgg

SEQ ID NO: 1470279 - DNA, 25 bp, Homo sapien
gaaaccttccgagaatgctaagcag

SEQ ID NO: 1470280 - DNA, 25 bp, Homo sapien
tctgggctctttctaccaagtggga

SEQ ID NO: 1470281 - DNA, 25 bp, Homo sapien
tattgccaataagaggccccatggg

SEQ ID NO: 1470282 - DNA, 25 bp, Homo sapien
gaaatgtacatgtcccgtgggcagg

SEQ ID NO: 1470283 - DNA, 25 bp, Homo sapien
caataacaaatgatgccaggaggcc

SEQ ID NO: 1470284 - DNA, 25 bp, Homo sapien
cctgaggctgctaatcggaagacac

SEQ ID NO: 1470285 - DNA, 25 bp, Homo sapien
gacatctcggtcaggatgtcgacga

SEQ ID NO: 1470286 - DNA, 25 bp, Homo sapien
cgaggttattgagccccgagaggta

SEQ ID NO: 1470287 - DNA, 25 bp, Homo sapien
aaagtcgatcatccacactttggcc

SEQ ID NO: 1470288 - DNA, 25 bp, Homo sapien
tggcctgttccttcttgtcgtggat

SEQ ID NO: 1470289 - DNA, 25 bp, Homo sapien
gattacgggcatgaatcacactgca

SEQ ID NO: 1470290 - DNA, 25 bp, Homo sapien
gcacaacccctgcagattcagcgtg

SEQ ID NO: 1470291 - DNA, 25 bp, Homo sapien
ggcagaccctatagggccttcccag

SEQ ID NO: 1470292 - DNA, 25 bp, Homo sapien
aggtgcccaggagcgtccaaactat

SEQ ID NO: 1470293 - DNA, 25 bp, Homo sapien
gcaggaggatgcttcatcaagtgga

SEQ ID NO: 1470294 - DNA, 25 bp, Homo sapien
cttcatcaagtggaaaggagaggcc

SEQ ID NO: 1470295 - DNA, 25 bp, Homo sapien
ccccatcgtccagagaggcagctgg

SEQ ID NO: 1470296 - DNA, 25 bp, Homo sapien
catcaagtggaaaggagaggccaca

SEQ ID NO: 1470297 - DNA, 25 bp, Homo sapien
catgtagggtttatgagtgtgatct

SEQ ID NO: 1470298 - DNA, 25 bp, Homo sapien
ctggactccccatgtcagggtctca

SEQ ID NO: 1470299 - DNA, 25 bp, Homo sapien
gcccgagagtggcacctgaagacct

SEQ ID NO: 1470300 - DNA, 25 bp, Homo sapien
acgtatgcaaagttgggagattcca

SEQ ID NO: 1470301 - DNA, 25 bp, Homo sapien
aacttctagagtggttcgaatggcc

SEQ ID NO: 1470302 - DNA, 25 bp, Homo sapien
acttctagagtggttcgaatggcct

SEQ ID NO: 1470303 - DNA, 25 bp, Homo sapien
cttctagagtggttcgaatggcctt

SEQ ID NO: 1470304 - DNA, 25 bp, Homo sapien
actgtgcccggcgtgcctttgactt

SEQ ID NO: 1470305 - DNA, 25 bp, Homo sapien
gggtgccttgtcctccccatgggca

SEQ ID NO: 1470306 - DNA, 25 bp, Homo sapien
aaagtctctgccagtggcctctcta

SEQ ID NO: 1470307 - DNA, 25 bp, Homo sapien
ctctacagagccctacgaactcggg

SEQ ID NO: 1470308 - DNA, 25 bp, Homo sapien
tgctccctcgttttggtcttcttga

SEQ ID NO: 1470309 - DNA, 25 bp, Homo sapien
tatggtttcctttagtgaactctct

SEQ ID NO: 1470310 - DNA, 25 bp, Homo sapien
tgaagtcccggttcacggtgccgtc

SEQ ID NO: 1470311 - DNA, 25 bp, Homo sapien
tgaaggcctcggtgacctgctccct

SEQ ID NO: 1470312 - DNA, 25 bp, Homo sapien
tctttagggacaaagggaatgctcc

SEQ ID NO: 1470313 - DNA, 25 bp, Homo sapien
caggtgtccacgtatggcgcatgga

SEQ ID NO: 1470314 - DNA, 25 bp, Homo sapien
catccccaggcgagtgaacagtggt

SEQ ID NO: 1470315 - DNA, 25 bp, Homo sapien
gaccctcgggcagaaactgttctca

SEQ ID NO: 1470316 - DNA, 25 bp, Homo sapien
gctgccttcgacaggactggcagga

SEQ ID NO: 1470317 - DNA, 25 bp, Homo sapien
ctgccttcgacaggactggcaggac

SEQ ID NO: 1470318 - DNA, 25 bp, Homo sapien
gaagctacgtctaaatgccatctga

SEQ ID NO: 1470319 - DNA, 25 bp, Homo sapien
caaatttaacagcaagggtgcacac

SEQ ID NO: 1470320 - DNA, 25 bp, Homo sapien
cggctgttctgacggctggacaata

SEQ ID NO: 1470321 - DNA, 25 bp, Homo sapien
gatgatgcagaccatgactggacag

SEQ ID NO: 1470322 - DNA, 25 bp, Homo sapien
tgcatgtaccgtggcttggtcacag

SEQ ID NO: 1470323 - DNA, 25 bp, Homo sapien
gatcctgaaccccagggtggccgtg

SEQ ID NO: 1470324 - DNA, 25 bp, Homo sapien
tccacctcgatcatcttctggtaca

SEQ ID NO: 1470325 - DNA, 25 bp, Homo sapien
ttcttccgggccttcgtgagctcct

SEQ ID NO: 1470326 - DNA, 25 bp, Homo sapien
ggttggctcttgatccaggagaaaa

SEQ ID NO: 1470327 - DNA, 25 bp, Homo sapien
gggggtggctggtcctgatcctgct

SEQ ID NO: 1470328 - DNA, 25 bp, Homo sapien
ggtgtcgggggtggctggtcctgat

SEQ ID NO: 1470329 - DNA, 25 bp, Homo sapien
aagcccatcggctggcctcacaaag

SEQ ID NO: 1470330 - DNA, 25 bp, Homo sapien
tgtcgggggtggctggtcctgatcc

SEQ ID NO: 1470331 - DNA, 25 bp, Homo sapien
tccataaagcgagggcttccaaagc

SEQ ID NO: 1470332 - DNA, 25 bp, Homo sapien
tgagcctgcccataagtgtctctgg

SEQ ID NO: 1470333 - DNA, 25 bp, Homo sapien
gaaaatgcttccaactcaactgcct

SEQ ID NO: 1470334 - DNA, 25 bp, Homo sapien
tgctcatcccagagacatgcctggt

SEQ ID NO: 1470335 - DNA, 25 bp, Homo sapien
gggcgggatgcccacaggaaggtga

SEQ ID NO: 1470336 - DNA, 25 bp, Homo sapien
ggggcgggatgcccacaggaaggtg

SEQ ID NO: 1470337 - DNA, 25 bp, Homo sapien
tggggcgggatgcccacaggaaggt

SEQ ID NO: 1470338 - DNA, 25 bp, Homo sapien
ccagcattgtttggtgaccggccct

SEQ ID NO: 1470339 - DNA, 25 bp, Homo sapien
gagacaaagtcgaagctccaagcca

SEQ ID NO: 1470340 - DNA, 25 bp, Homo sapien
aagtgctcctttgagacaggccagc

SEQ ID NO: 1470341 - DNA, 25 bp, Homo sapien
gacagtgttgactctccaggacaag

SEQ ID NO: 1470342 - DNA, 25 bp, Homo sapien
ggaaaggccacattctagaggtgac

SEQ ID NO: 1470343 - DNA, 25 bp, Homo sapien
tggaaaggccacattctagaggtga

SEQ ID NO: 1470344 - DNA, 25 bp, Homo sapien
catggaaaggccacattctagaggt

SEQ ID NO: 1470345 - DNA, 25 bp, Homo sapien
atggaaaggccacattctagaggtg

SEQ ID NO: 1470346 - DNA, 25 bp, Homo sapien
tttggccaggtctgagtggacacca

SEQ ID NO: 1470347 - DNA, 25 bp, Homo sapien
ttttttggccaggtctgagtggaca

SEQ ID NO: 1470348 - DNA, 25 bp, Homo sapien
gagtggacaccacttggattattct

SEQ ID NO: 1470349 - DNA, 25 bp, Homo sapien
ctgagtggacaccacttggattatt

SEQ ID NO: 1470350 - DNA, 25 bp, Homo sapien
aaggaaaggggccatcatgggcaaa

SEQ ID NO: 1470351 - DNA, 25 bp, Homo sapien
gaaaggggccatcatgggcaaagcc

SEQ ID NO: 1470352 - DNA, 25 bp, Homo sapien
gagaaggaaaggggccatcatgggc

SEQ ID NO: 1470353 - DNA, 25 bp, Homo sapien
aggggccatcatgggcaaagcccag

SEQ ID NO: 1470354 - DNA, 25 bp, Homo sapien
cacatccccatggtaggcaggtacg

SEQ ID NO: 1470355 - DNA, 25 bp, Homo sapien
tgcttcttcaggatcctgccattgg

SEQ ID NO: 1470356 - DNA, 25 bp, Homo sapien
cagcaggtcgtccatctggttgtag

SEQ ID NO: 1470357 - DNA, 25 bp, Homo sapien
tcacacagggcgagtcgaagtcggc

SEQ ID NO: 1470358 - DNA, 25 bp, Homo sapien
aggtaagcgaaatgcgggaccttgt

SEQ ID NO: 1470359 - DNA, 25 bp, Homo sapien
ccatgtgccttgagttgggccagtg

SEQ ID NO: 1470360 - DNA, 25 bp, Homo sapien
gtggccaacgaggtaagcgaaatgc

SEQ ID NO: 1470361 - DNA, 25 bp, Homo sapien
gagccagaccaagtaagtattcaca

SEQ ID NO: 1470362 - DNA, 25 bp, Homo sapien
tcttgaaggacatgacgaagggaga

SEQ ID NO: 1470363 - DNA, 25 bp, Homo sapien
ttgaaggacatgacgaagggagacc

SEQ ID NO: 1470364 - DNA, 25 bp, Homo sapien
cttgaaggacatgacgaagggagac

SEQ ID NO: 1470365 - DNA, 25 bp, Homo sapien
gccagctggatccaggggtacttct

SEQ ID NO: 1470366 - DNA, 25 bp, Homo sapien
ttttttatcttcctccatgatttgc

SEQ ID NO: 1470367 - DNA, 25 bp, Homo sapien
gttttttatcttcctccatgatttg

SEQ ID NO: 1470368 - DNA, 25 bp, Homo sapien
tttttatcttcctccatgatttgct

SEQ ID NO: 1470369 - DNA, 25 bp, Homo sapien
gctgcagagatgaagatcaagtgtc

SEQ ID NO: 1470370 - DNA, 25 bp, Homo sapien
aggctgcagagatgaagatcaagtg

SEQ ID NO: 1470371 - DNA, 25 bp, Homo sapien
caggctgcagagatgaagatcaagt

SEQ ID NO: 1470372 - DNA, 25 bp, Homo sapien
ggctgcagagatgaagatcaagtgt

SEQ ID NO: 1470373 - DNA, 25 bp, Homo sapien
tgctgggtccccaaggtgaagtcaa

SEQ ID NO: 1470374 - DNA, 25 bp, Homo sapien
tcctgagaaagtggatcctggacca

SEQ ID NO: 1470375 - DNA, 25 bp, Homo sapien
tgaagtcaaggtgaaatcggcctcc

SEQ ID NO: 1470376 - DNA, 25 bp, Homo sapien
gagactcagccgcttctgtcatcag

SEQ ID NO: 1470377 - DNA, 25 bp, Homo sapien
gaagaaatttcacattctgggcagg

SEQ ID NO: 1470378 - DNA, 25 bp, Homo sapien
ggcaggtgcgggctccacttcattt

SEQ ID NO: 1470379 - DNA, 25 bp, Homo sapien
tggtttaccctggtgggcgctcaga

SEQ ID NO: 1470380 - DNA, 25 bp, Homo sapien
ttgcccatctggagcccggtcagag

SEQ ID NO: 1470381 - DNA, 25 bp, Homo sapien
atccaactaggcactttcagagggc

SEQ ID NO: 1470382 - DNA, 25 bp, Homo sapien
catgtatgtggaactctgctaggca

SEQ ID NO: 1470383 - DNA, 25 bp, Homo sapien
tgggcacggcaggtatcaatgcaca

SEQ ID NO: 1470384 - DNA, 25 bp, Homo sapien
taaaaggcagcccacggagttggat

SEQ ID NO: 1470385 - DNA, 25 bp, Homo sapien
tctcaggccactctagccccacgcc

SEQ ID NO: 1470386 - DNA, 25 bp, Homo sapien
caggccactctagccccacgccact

SEQ ID NO: 1470387 - DNA, 25 bp, Homo sapien
ggccactctagccccacgccactcc

SEQ ID NO: 1470388 - DNA, 25 bp, Homo sapien
ctcaggccactctagccccacgcca

SEQ ID NO: 1470389 - DNA, 25 bp, Homo sapien
acagccggcaggaatccaatactcc

SEQ ID NO: 1470390 - DNA, 25 bp, Homo sapien
agccggcaggaatccaatactcccg

SEQ ID NO: 1470391 - DNA, 25 bp, Homo sapien
gcacagccggcaggaatccaatact

SEQ ID NO: 1470392 - DNA, 25 bp, Homo sapien
atccaatactcccggcatctggctg

SEQ ID NO: 1470393 - DNA, 25 bp, Homo sapien
catatgtgacggacatggctccctg

SEQ ID NO: 1470394 - DNA, 25 bp, Homo sapien
aggcatcatatgtgacggacatggc

SEQ ID NO: 1470395 - DNA, 25 bp, Homo sapien
tcatatgtgacggacatggctccct

SEQ ID NO: 1470396 - DNA, 25 bp, Homo sapien
catcatatgtgacggacatggctcc

SEQ ID NO: 1470397 - DNA, 25 bp, Homo sapien
taccctcagggacagctaaggcgat

SEQ ID NO: 1470398 - DNA, 25 bp, Homo sapien
ggagaccctaagatctaccctcagg

SEQ ID NO: 1470399 - DNA, 25 bp, Homo sapien
tagagcatgtgcagcgtcatgcccc

SEQ ID NO: 1470400 - DNA, 25 bp, Homo sapien
taatgggaccatgctgaacatatga

SEQ ID NO: 1470401 - DNA, 25 bp, Homo sapien
tgggtaaaaacaatctcaggtgcca

SEQ ID NO: 1470402 - DNA, 25 bp, Homo sapien
gatgttgtctcgaactgtcgcccag

SEQ ID NO: 1470403 - DNA, 25 bp, Homo sapien
gggtttcactacttgcctcagctgg

SEQ ID NO: 1470404 - DNA, 25 bp, Homo sapien
tagcctggactagaagatgcacgcc

SEQ ID NO: 1470405 - DNA, 25 bp, Homo sapien
tgtagtcctactgtgctgcctccga

SEQ ID NO: 1470406 - DNA, 25 bp, Homo sapien
ggatgacaaggtgactccacgagaa

SEQ ID NO: 1470407 - DNA, 25 bp, Homo sapien
caagggttaaagatgctgtagtcct

SEQ ID NO: 1470408 - DNA, 25 bp, Homo sapien
gaactgcgtttgacctctgtgtggg

SEQ ID NO: 1470409 - DNA, 25 bp, Homo sapien
tgggaaacacttgcacaagcactcc

SEQ ID NO: 1470410 - DNA, 25 bp, Homo sapien
aagccggccacactgggaaacactt

SEQ ID NO: 1470411 - DNA, 25 bp, Homo sapien
ttagcagcgttcaagaagccggcca

SEQ ID NO: 1470412 - DNA, 25 bp, Homo sapien
tacaactttccattagcagcgttca

SEQ ID NO: 1470413 - DNA, 25 bp, Homo sapien
caagacagtccaatcacgaagcaca

SEQ ID NO: 1470414 - DNA, 25 bp, Homo sapien
tcaagacagtccaatcacgaagcac

SEQ ID NO: 1470415 - DNA, 25 bp, Homo sapien
agacagtccaatcacgaagcacaga

SEQ ID NO: 1470416 - DNA, 25 bp, Homo sapien
aagacagtccaatcacgaagcacag

SEQ ID NO: 1470417 - DNA, 25 bp, Homo sapien
ggacacagatacaggtccatgtttt

SEQ ID NO: 1470418 - DNA, 25 bp, Homo sapien
gaaaaactctcatgatcacttccct

SEQ ID NO: 1470419 - DNA, 25 bp, Homo sapien
gaacgtctcagcactggaaaaactc

SEQ ID NO: 1470420 - DNA, 25 bp, Homo sapien
tccatgttttttccagaacgtctca

SEQ ID NO: 1470421 - DNA, 25 bp, Homo sapien
tccagcaggctgaacttgcaaggag

SEQ ID NO: 1470422 - DNA, 25 bp, Homo sapien
ctccagcaggctgaacttgcaagga

SEQ ID NO: 1470423 - DNA, 25 bp, Homo sapien
ctgtagaatttctgtagaagatccc

SEQ ID NO: 1470424 - DNA, 25 bp, Homo sapien
gtagaatttctgtagaagatcccat

SEQ ID NO: 1470425 - DNA, 25 bp, Homo sapien
tctgcccacacttctgtagaatttc

SEQ ID NO: 1470426 - DNA, 25 bp, Homo sapien
gaatttctgtagaagatcccatagt

SEQ ID NO: 1470427 - DNA, 25 bp, Homo sapien
tgcttctgccggataccactggact

SEQ ID NO: 1470428 - DNA, 25 bp, Homo sapien
tattgctggaggtactccctcttcc

SEQ ID NO: 1470429 - DNA, 25 bp, Homo sapien
tcctgtgaatctcagacaagcccag

SEQ ID NO: 1470430 - DNA, 25 bp, Homo sapien
cacatccaccctgaatattgctgga

SEQ ID NO: 1470431 - DNA, 25 bp, Homo sapien
ttcataaagcccttttgccttgaag

SEQ ID NO: 1470432 - DNA, 25 bp, Homo sapien
agcccttttgccttgaagcccatag

SEQ ID NO: 1470433 - DNA, 25 bp, Homo sapien
gcccttttgccttgaagcccatagg

SEQ ID NO: 1470434 - DNA, 25 bp, Homo sapien
aagcccttttgccttgaagcccata

SEQ ID NO: 1470435 - DNA, 25 bp, Homo sapien
agggcacttcagcagaacccaaggg

SEQ ID NO: 1470436 - DNA, 25 bp, Homo sapien
cagcaggcttccgaaccagttctgt

SEQ ID NO: 1470437 - DNA, 25 bp, Homo sapien
gcaggcttccgaaccagttctgtct

SEQ ID NO: 1470438 - DNA, 25 bp, Homo sapien
acccaagggaaagccatgtgggcca

SEQ ID NO: 1470439 - DNA, 25 bp, Homo sapien
gaggctctgacaagccagtgggcag

SEQ ID NO: 1470440 - DNA, 25 bp, Homo sapien
caggacttttcataaccctagtatt

SEQ ID NO: 1470441 - DNA, 25 bp, Homo sapien
aggctctgacaagccagtgggcagg

SEQ ID NO: 1470442 - DNA, 25 bp, Homo sapien
ttcataaccctagtatttacgtcaa

SEQ ID NO: 1470443 - DNA, 25 bp, Homo sapien
acttttcctcaccacaactatggga

SEQ ID NO: 1470444 - DNA, 25 bp, Homo sapien
cttttcctcaccacaactatgggag

SEQ ID NO: 1470445 - DNA, 25 bp, Homo sapien
cacttttcctcaccacaactatggg

SEQ ID NO: 1470446 - DNA, 25 bp, Homo sapien
cttgatgcagtcccaagcactctgc

SEQ ID NO: 1470447 - DNA, 25 bp, Homo sapien
tctacagggggcttttcttcgccgc

SEQ ID NO: 1470448 - DNA, 25 bp, Homo sapien
gccgcggtttcttcccctgtcgctg

SEQ ID NO: 1470449 - DNA, 25 bp, Homo sapien
caccgcccgacgctggctggccgag

SEQ ID NO: 1470450 - DNA, 25 bp, Homo sapien
gggatttcgggcagggcggtgaagc

SEQ ID NO: 1470451 - DNA, 25 bp, Homo sapien
tcctcccgcgcgcgctctgcccgcc

SEQ ID NO: 1470452 - DNA, 25 bp, Homo sapien
tcacaaggaaacatgtagagtccct

SEQ ID NO: 1470453 - DNA, 25 bp, Homo sapien
gatgaccccgtaattggctcagtct

SEQ ID NO: 1470454 - DNA, 25 bp, Homo sapien
cacttagactttacagatgaccccg

SEQ ID NO: 1470455 - DNA, 25 bp, Homo sapien
cattcttggtattggacgttgcccc

SEQ ID NO: 1470456 - DNA, 25 bp, Homo sapien
taaatgatgtagtagctcaaagttc

SEQ ID NO: 1470457 - DNA, 25 bp, Homo sapien
gatgtaaatgatgtagtagctcaaa

SEQ ID NO: 1470458 - DNA, 25 bp, Homo sapien
tcaggaatcagaccacacagttgat

SEQ ID NO: 1470459 - DNA, 25 bp, Homo sapien
ccaaaggtaggagtaagatgatgta

SEQ ID NO: 1470460 - DNA, 25 bp, Homo sapien
aaactgagggcttgtgacctggtcc

SEQ ID NO: 1470461 - DNA, 25 bp, Homo sapien
gttttagatccactacggccaggca

SEQ ID NO: 1470462 - DNA, 25 bp, Homo sapien
aattcagagttcacgaaggacaccc

SEQ ID NO: 1470463 - DNA, 25 bp, Homo sapien
tcgtggtctggaggaatttctaaca

SEQ ID NO: 1470464 - DNA, 25 bp, Homo sapien
tctgttgaacaactgcaaccagcat

SEQ ID NO: 1470465 - DNA, 25 bp, Homo sapien
tgcaaccagcatcaaacctaggttt

SEQ ID NO: 1470466 - DNA, 25 bp, Homo sapien
ccaactttggtcttgagcccaatca

SEQ ID NO: 1470467 - DNA, 25 bp, Homo sapien
acatgctggacaattctagtgggcc

SEQ ID NO: 1470468 - DNA, 25 bp, Homo sapien
tatttcacacactaccgggttcatg

SEQ ID NO: 1470469 - DNA, 25 bp, Homo sapien
tggagaccaaatcctcccgcaggta

SEQ ID NO: 1470470 - DNA, 25 bp, Homo sapien
tatagacttcatcataccgagggag

SEQ ID NO: 1470471 - DNA, 25 bp, Homo sapien
ggttcatgtatatcaccgggcagaa

SEQ ID NO: 1470472 - DNA, 25 bp, Homo sapien
gagatgaccaaacaccttcacctga

SEQ ID NO: 1470473 - DNA, 25 bp, Homo sapien
tcagagatgaccaaacaccttcacc

SEQ ID NO: 1470474 - DNA, 25 bp, Homo sapien
atgaccaaacaccttcacctgaagc

SEQ ID NO: 1470475 - DNA, 25 bp, Homo sapien
gatgaccaaacaccttcacctgaag

SEQ ID NO: 1470476 - DNA, 25 bp, Homo sapien
ggtgccacacccttcacctctatca

SEQ ID NO: 1470477 - DNA, 25 bp, Homo sapien
aggtgccacacccttcacctctatc

SEQ ID NO: 1470478 - DNA, 25 bp, Homo sapien
gtgccacacccttcacctctatcac

SEQ ID NO: 1470479 - DNA, 25 bp, Homo sapien
ctggaggcaggtaactcaactcgat

SEQ ID NO: 1470480 - DNA, 25 bp, Homo sapien
tgcttaggtgctgacattataagcc

SEQ ID NO: 1470481 - DNA, 25 bp, Homo sapien
tgctgacattataagcccacaacag

SEQ ID NO: 1470482 - DNA, 25 bp, Homo sapien
actcaactcgattgcattcaattcc

SEQ ID NO: 1470483 - DNA, 25 bp, Homo sapien
ctgttggactcatgcgcaggccgtg

SEQ ID NO: 1470484 - DNA, 25 bp, Homo sapien
tcacagtatagcagtacctagcaag

SEQ ID NO: 1470485 - DNA, 25 bp, Homo sapien
tgggtgcttcacagtatagcagtac

SEQ ID NO: 1470486 - DNA, 25 bp, Homo sapien
ctgcctgggtgcttcacagtatagc

SEQ ID NO: 1470487 - DNA, 25 bp, Homo sapien
tctgctgaaaccctctttcccgtgg

SEQ ID NO: 1470488 - DNA, 25 bp, Homo sapien
accctctttcccgtgggcagatctg

SEQ ID NO: 1470489 - DNA, 25 bp, Homo sapien
catgctctgtatctgctgaaaccct

SEQ ID NO: 1470490 - DNA, 25 bp, Homo sapien
gacacgtgcagatccatgctctgta

SEQ ID NO: 1470491 - DNA, 25 bp, Homo sapien
tctaggccagttcaaaatgccaaag

SEQ ID NO: 1470492 - DNA, 25 bp, Homo sapien
gaaaatctaggccagttcaaaatgc

SEQ ID NO: 1470493 - DNA, 25 bp, Homo sapien
gcagggctccgttcagcttcttggg

SEQ ID NO: 1470494 - DNA, 25 bp, Homo sapien
tgcagggctccgttcagcttcttgg

SEQ ID NO: 1470495 - DNA, 25 bp, Homo sapien
taaaaacgctcttcacaactggtgg

SEQ ID NO: 1470496 - DNA, 25 bp, Homo sapien
atgttcagcccacgccaaggtctag

SEQ ID NO: 1470497 - DNA, 25 bp, Homo sapien
aacgtgactcgagccaattggtgaa

SEQ ID NO: 1470498 - DNA, 25 bp, Homo sapien
caattagctgtacttgggacaacgt

SEQ ID NO: 1470499 - DNA, 25 bp, Homo sapien
gaacatgcttgctcaatggccgtac

SEQ ID NO: 1470500 - DNA, 25 bp, Homo sapien
taagccgttcttctcagcacaggtg

SEQ ID NO: 1470501 - DNA, 25 bp, Homo sapien
tgtcttagaaggcagatccccaagg

SEQ ID NO: 1470502 - DNA, 25 bp, Homo sapien
gaagggaaatccagctccgtggaaa

SEQ ID NO: 1470503 - DNA, 25 bp, Homo sapien
tcaaaatgtcccctacactggcgaa

SEQ ID NO: 1470504 - DNA, 25 bp, Homo sapien
gaaaacaaattgagttgagcccgga

SEQ ID NO: 1470505 - DNA, 25 bp, Homo sapien
aatggcccaccccttcagaagagtt

SEQ ID NO: 1470506 - DNA, 25 bp, Homo sapien
gaaccaaatccttctcgcggcaggc

SEQ ID NO: 1470507 - DNA, 25 bp, Homo sapien
tctgcaaaggcgagtaaggagctta

SEQ ID NO: 1470508 - DNA, 25 bp, Homo sapien
tgttcaaagctgaggtggatctgca

SEQ ID NO: 1470509 - DNA, 25 bp, Homo sapien
tagcacccttatccctgtggcagca

SEQ ID NO: 1470510 - DNA, 25 bp, Homo sapien
catgtgtagactggaatttcaccca

SEQ ID NO: 1470511 - DNA, 25 bp, Homo sapien
caaaagactcactccatcaagatgt

SEQ ID NO: 1470512 - DNA, 25 bp, Homo sapien
aagtccagaaaagagaatgctacat

SEQ ID NO: 1470513 - DNA, 25 bp, Homo sapien
ttttgacccaatgagctgatgtttg

SEQ ID NO: 1470514 - DNA, 25 bp, Homo sapien
ttatctatcaaacacagaaaggccc

SEQ ID NO: 1470515 - DNA, 25 bp, Homo sapien
cacagataaggctccagcgtaacaa

SEQ ID NO: 1470516 - DNA, 25 bp, Homo sapien
acagataaggctccagcgtaacaat

SEQ ID NO: 1470517 - DNA, 25 bp, Homo sapien
caaagctcaaaagtccctaggatcc

SEQ ID NO: 1470518 - DNA, 25 bp, Homo sapien
ctgctctgcgggtgtctgaaaacct

SEQ ID NO: 1470519 - DNA, 25 bp, Homo sapien
ctcaaatggcatcgttctggcaaat

SEQ ID NO: 1470520 - DNA, 25 bp, Homo sapien
ggtagactggacaacaggctggcct

SEQ ID NO: 1470521 - DNA, 25 bp, Homo sapien
tgacccaaaccagaggcacgtgaaa

SEQ ID NO: 1470522 - DNA, 25 bp, Homo sapien
tcaagatgaaatcggaaggctacct

SEQ ID NO: 1470523 - DNA, 25 bp, Homo sapien
gaaacataaagctcccagtcgtggt

SEQ ID NO: 1470524 - DNA, 25 bp, Homo sapien
gaaagcccagaccttttcagaagtg

SEQ ID NO: 1470525 - DNA, 25 bp, Homo sapien
ggccgaggaagaggacagtttcctc

SEQ ID NO: 1470526 - DNA, 25 bp, Homo sapien
cagggtgcgctcagggtcactggag

SEQ ID NO: 1470527 - DNA, 25 bp, Homo sapien
tgggtgcccatgtctgtaatgatga

SEQ ID NO: 1470528 - DNA, 25 bp, Homo sapien
tctgagtcttcgtaggatgaggaga

SEQ ID NO: 1470529 - DNA, 25 bp, Homo sapien
ctgcaggccttcctcaggaaaggct

SEQ ID NO: 1470530 - DNA, 25 bp, Homo sapien
ttcctcaggaaaggcttgtccggat

SEQ ID NO: 1470531 - DNA, 25 bp, Homo sapien
ggccttcctcaggaaaggcttgtcc

SEQ ID NO: 1470532 - DNA, 25 bp, Homo sapien
ccttcctcaggaaaggcttgtccgg

SEQ ID NO: 1470533 - DNA, 25 bp, Homo sapien
cagctccggacttgggagggcatca

SEQ ID NO: 1470534 - DNA, 25 bp, Homo sapien
ctttcagatctttcgcagcgtccca

SEQ ID NO: 1470535 - DNA, 25 bp, Homo sapien
gaggactctgcgctttgcacgctca

SEQ ID NO: 1470536 - DNA, 25 bp, Homo sapien
cattctgccagaaggaattcccgcc

SEQ ID NO: 1470537 - DNA, 25 bp, Homo sapien
ggactggcagggatacccttctcca

SEQ ID NO: 1470538 - DNA, 25 bp, Homo sapien
gagctaggcagctccgagttcccgg

SEQ ID NO: 1470539 - DNA, 25 bp, Homo sapien
tggccatcgttaagctagctccgaa

SEQ ID NO: 1470540 - DNA, 25 bp, Homo sapien
tggcccagtggatgtaactctcgct

SEQ ID NO: 1470541 - DNA, 25 bp, Homo sapien
gagcataggctgggccctcctttcc

SEQ ID NO: 1470542 - DNA, 25 bp, Homo sapien
tgtgcgcctcaaacatgcccacttt

SEQ ID NO: 1470543 - DNA, 25 bp, Homo sapien
tgcacgttctgcaactcgcgctgca

SEQ ID NO: 1470544 - DNA, 25 bp, Homo sapien
cactttctggttcacctgcacgttc

SEQ ID NO: 1470545 - DNA, 25 bp, Homo sapien
aggactttgtcctccgttcctcgct

SEQ ID NO: 1470546 - DNA, 25 bp, Homo sapien
gctgccggtcccctcgcaggcgacc

SEQ ID NO: 1470547 - DNA, 25 bp, Homo sapien
ctggcggggagagggtaccggctgc

SEQ ID NO: 1470548 - DNA, 25 bp, Homo sapien
ggagagggtaccggctgccaccacc

SEQ ID NO: 1470549 - DNA, 25 bp, Homo sapien
tgccggtcccctcgcaggcgaccag

SEQ ID NO: 1470550 - DNA, 25 bp, Homo sapien
tctcccggggctgaaaacgctgccg

SEQ ID NO: 1470551 - DNA, 25 bp, Homo sapien
gctgctactattcagcctgcgccgg

SEQ ID NO: 1470552 - DNA, 25 bp, Homo sapien
gccactgccgctgctactattcagc

SEQ ID NO: 1470553 - DNA, 25 bp, Homo sapien
gggacagcgactcggctggggggaa

SEQ ID NO: 1470554 - DNA, 25 bp, Homo sapien
tctcgttggcgctattcatgatcac

SEQ ID NO: 1470555 - DNA, 25 bp, Homo sapien
cttcatctcgttggcgctattcatg

SEQ ID NO: 1470556 - DNA, 25 bp, Homo sapien
gccgccgctcttcatctcgttggcg

SEQ ID NO: 1470557 - DNA, 25 bp, Homo sapien
gctcttcatctcgttggcgctattc

SEQ ID NO: 1470558 - DNA, 25 bp, Homo sapien
ctattgagcgcatagcagtacacag

SEQ ID NO: 1470559 - DNA, 25 bp, Homo sapien
tattgagcgcatagcagtacacagc

SEQ ID NO: 1470560 - DNA, 25 bp, Homo sapien
attgagcgcatagcagtacacagcc

SEQ ID NO: 1470561 - DNA, 25 bp, Homo sapien
ctgggggcacgaccgcgggctcagc

SEQ ID NO: 1470562 - DNA, 25 bp, Homo sapien
agtactgggtcccgcgctgcccgcc

SEQ ID NO: 1470563 - DNA, 25 bp, Homo sapien
caaagctccataaacaaccgtgcgg

SEQ ID NO: 1470564 - DNA, 25 bp, Homo sapien
cagatggggcggcatggcctgggca

SEQ ID NO: 1470565 - DNA, 25 bp, Homo sapien
cagaggcgcaaacctcgtagggacg

SEQ ID NO: 1470566 - DNA, 25 bp, Homo sapien
tgcacgcccttttcgaccgtggaga

SEQ ID NO: 1470567 - DNA, 25 bp, Homo sapien
gagatactgcccctgtcagtgtctg

SEQ ID NO: 1470568 - DNA, 25 bp, Homo sapien
tgtgtagactacatgcccagaggcg

SEQ ID NO: 1470569 - DNA, 25 bp, Homo sapien
gcagttattcaggatctgagcagtt

SEQ ID NO: 1470570 - DNA, 25 bp, Homo sapien
caggtctctgagcagttattcagga

SEQ ID NO: 1470571 - DNA, 25 bp, Homo sapien
gagcagttattcaggatctgagcag

SEQ ID NO: 1470572 - DNA, 25 bp, Homo sapien
tctctgagcagttattcaggatctg

SEQ ID NO: 1470573 - DNA, 25 bp, Homo sapien
cgtctgctcattgctatcatcatca

SEQ ID NO: 1470574 - DNA, 25 bp, Homo sapien
cttcatggacccacaggcatctgtc

SEQ ID NO: 1470575 - DNA, 25 bp, Homo sapien
tcttcacgcctttgaactctttgaa

SEQ ID NO: 1470576 - DNA, 25 bp, Homo sapien
agcatcctgctatggctgcaccact

SEQ ID NO: 1470577 - DNA, 25 bp, Homo sapien
cacacttgtcacgttagactgagga

SEQ ID NO: 1470578 - DNA, 25 bp, Homo sapien
tattggagtgcagggatttttagcc

SEQ ID NO: 1470579 - DNA, 25 bp, Homo sapien
tggtaccatgaacccctttggcagt

SEQ ID NO: 1470580 - DNA, 25 bp, Homo sapien
gagtgtgatctctatccttggcagc

SEQ ID NO: 1470581 - DNA, 25 bp, Homo sapien
cctgatcttcacaaggaggtaatgg

SEQ ID NO: 1470582 - DNA, 25 bp, Homo sapien
tcttcacgaggaggtaatgggtcct

SEQ ID NO: 1470583 - DNA, 25 bp, Homo sapien
caaggaggtaatgggacctgtctct

SEQ ID NO: 1470584 - DNA, 25 bp, Homo sapien
gatcttcacgaggaggtaatgggtc

SEQ ID NO: 1470585 - DNA, 25 bp, Homo sapien
caccggatgccttggggtcctgtcc

SEQ ID NO: 1470586 - DNA, 25 bp, Homo sapien
caagggtgctcaggagagagctgaa

SEQ ID NO: 1470587 - DNA, 25 bp, Homo sapien
attggttggaggacaatggtgacct

SEQ ID NO: 1470588 - DNA, 25 bp, Homo sapien
tcaccccacaagggtgctcaggaga

SEQ ID NO: 1470589 - DNA, 25 bp, Homo sapien
tctggacgccctgcgtcatgggggc

SEQ ID NO: 1470590 - DNA, 25 bp, Homo sapien
ctgaggactcggctgtggttttcgg

SEQ ID NO: 1470591 - DNA, 25 bp, Homo sapien
tggttttcggcaggggcatcagtat

SEQ ID NO: 1470592 - DNA, 25 bp, Homo sapien
agaaagcccagtgggcagtcaagca

SEQ ID NO: 1470593 - DNA, 25 bp, Homo sapien
gagaaagcccagtgggcagtcaagc

SEQ ID NO: 1470594 - DNA, 25 bp, Homo sapien
ttccacagggctccgaaggctgatg

SEQ ID NO: 1470595 - DNA, 25 bp, Homo sapien
ggctgtgtgcctatgggcttccaca

SEQ ID NO: 1470596 - DNA, 25 bp, Homo sapien
tgtgcaagcagcagtctggctgtgt

SEQ ID NO: 1470597 - DNA, 25 bp, Homo sapien
tctgtgcagcgcatgagggtcctct

SEQ ID NO: 1470598 - DNA, 25 bp, Homo sapien
cacggggtgcaggtatatggccacc

SEQ ID NO: 1470599 - DNA, 25 bp, Homo sapien
gaggatgcttgcactcgccctggaa

SEQ ID NO: 1470600 - DNA, 25 bp, Homo sapien
ccaggagcagtggtggtgtgttaga

SEQ ID NO: 1470601 - DNA, 25 bp, Homo sapien
ttaaggcaggttcccggtgttggca

SEQ ID NO: 1470602 - DNA, 25 bp, Homo sapien
ctgcatctgaggaaactatgccagt

SEQ ID NO: 1470603 - DNA, 25 bp, Homo sapien
catctgaggaaactatgccagtcat

SEQ ID NO: 1470604 - DNA, 25 bp, Homo sapien
tgcatctgaggaaactatgccagtc

SEQ ID NO: 1470605 - DNA, 25 bp, Homo sapien
gcatctgaggaaactatgccagtca

SEQ ID NO: 1470606 - DNA, 25 bp, Homo sapien
tcaggttccactaatttgctggagc

SEQ ID NO: 1470607 - DNA, 25 bp, Homo sapien
ctttcaaagccaattggaagcccca

SEQ ID NO: 1470608 - DNA, 25 bp, Homo sapien
tatgggtttatgactgtcaggtctc

SEQ ID NO: 1470609 - DNA, 25 bp, Homo sapien
tgtccttcaatgaacagctctaaat

SEQ ID NO: 1470610 - DNA, 25 bp, Homo sapien
ccacactcacttggtggcaggtcaa

SEQ ID NO: 1470611 - DNA, 25 bp, Homo sapien
cacttggtggcaggtcaattatggg

SEQ ID NO: 1470612 - DNA, 25 bp, Homo sapien
cactcacttggtggcaggtcaatta

SEQ ID NO: 1470613 - DNA, 25 bp, Homo sapien
caaactcaaaaatagttccaagtgg

SEQ ID NO: 1470614 - DNA, 25 bp, Homo sapien
tacttttcagttgttgggatgtcca

SEQ ID NO: 1470615 - DNA, 25 bp, Homo sapien
tggatttggataagtgtatacaccc

SEQ ID NO: 1470616 - DNA, 25 bp, Homo sapien
cacacagctgtatgttgaatataca

SEQ ID NO: 1470617 - DNA, 25 bp, Homo sapien
tgtttacaatggtcaagaaaagagg

SEQ ID NO: 1470618 - DNA, 25 bp, Homo sapien
aaaaaacaggctgcattgccaagac

SEQ ID NO: 1470619 - DNA, 25 bp, Homo sapien
atggaaccaaaaaacaggctgcatt

SEQ ID NO: 1470620 - DNA, 25 bp, Homo sapien
gaaccaaaaaacaggctgcattgcc

SEQ ID NO: 1470621 - DNA, 25 bp, Homo sapien
ccaaaaaacaggctgcattgccaag

SEQ ID NO: 1470622 - DNA, 25 bp, Homo sapien
agcctcttcactgagtgggagaatg

SEQ ID NO: 1470623 - DNA, 25 bp, Homo sapien
gcctcttcactgagtgggagaatgg

SEQ ID NO: 1470624 - DNA, 25 bp, Homo sapien
agagcctcttcactgagtgggagaa

SEQ ID NO: 1470625 - DNA, 25 bp, Homo sapien
gagcctcttcactgagtgggagaat

SEQ ID NO: 1470626 - DNA, 25 bp, Homo sapien
ttccattggccttaaatgttaaggc

SEQ ID NO: 1470627 - DNA, 25 bp, Homo sapien
agttccattggccttaaatgttaag

SEQ ID NO: 1470628 - DNA, 25 bp, Homo sapien
tgcccgtgagtcagcctccggggag

SEQ ID NO: 1470629 - DNA, 25 bp, Homo sapien
ctgcccgtgagtcagcctccgggga

SEQ ID NO: 1470630 - DNA, 25 bp, Homo sapien
cagttccctacgaggagtgttccca

SEQ ID NO: 1470631 - DNA, 25 bp, Homo sapien
gctgagatgcgcaaagagtgtgctc

SEQ ID NO: 1470632 - DNA, 25 bp, Homo sapien
tcctgttcttgttacggcagtcaca

SEQ ID NO: 1470633 - DNA, 25 bp, Homo sapien
accagactttggctcccgctttggg

SEQ ID NO: 1470634 - DNA, 25 bp, Homo sapien
cctggactcagttgtgcacggtggc

SEQ ID NO: 1470635 - DNA, 25 bp, Homo sapien
tctctgtacatcaatcatgggttgc

SEQ ID NO: 1470636 - DNA, 25 bp, Homo sapien
cagtggttccttcagcaagtgttca

SEQ ID NO: 1470637 - DNA, 25 bp, Homo sapien
caatacttcgggaggtcgagtcgga

SEQ ID NO: 1470638 - DNA, 25 bp, Homo sapien
aacagggatttcttgcacagggcaa

SEQ ID NO: 1470639 - DNA, 25 bp, Homo sapien
ggaaaaccatcctaagcctattcag

SEQ ID NO: 1470640 - DNA, 25 bp, Homo sapien
taagtcccaaactgattggcacgca

SEQ ID NO: 1470641 - DNA, 25 bp, Homo sapien
aaattttgccttcagtgtaatccag

SEQ ID NO: 1470642 - DNA, 25 bp, Homo sapien
ccgggggcgctcttagaatgtggat

SEQ ID NO: 1470643 - DNA, 25 bp, Homo sapien
tggctttagagcctggagcttgtgc

SEQ ID NO: 1470644 - DNA, 25 bp, Homo sapien
caggacgaccttgctggccacgtgg

SEQ ID NO: 1470645 - DNA, 25 bp, Homo sapien
cttgctggccacgtgggccaagccg

SEQ ID NO: 1470646 - DNA, 25 bp, Homo sapien
acggtcctcagatgtcagtgtttgc

SEQ ID NO: 1470647 - DNA, 25 bp, Homo sapien
tgatgggaggctcttcagacagacc

SEQ ID NO: 1470648 - DNA, 25 bp, Homo sapien
cctgaagcgggtggttgtgttctca

SEQ ID NO: 1470649 - DNA, 25 bp, Homo sapien
tatgcctgtggcaacacctttcctg

SEQ ID NO: 1470650 - DNA, 25 bp, Homo sapien
cacaggcgctgtgaatttttgtaca

SEQ ID NO: 1470651 - DNA, 25 bp, Homo sapien
gtagccagcgctttccacggtttct

SEQ ID NO: 1470652 - DNA, 25 bp, Homo sapien
gatgaagccccactgctcggtcagt

SEQ ID NO: 1470653 - DNA, 25 bp, Homo sapien
gtgtcaccagttccagccaaaggct

SEQ ID NO: 1470654 - DNA, 25 bp, Homo sapien
gctttggcgcgtgtaccctcttctg

SEQ ID NO: 1470655 - DNA, 25 bp, Homo sapien
tattctggagaatgacgacccgtat

SEQ ID NO: 1470656 - DNA, 25 bp, Homo sapien
actggttcagcgtgaggcccttggc

SEQ ID NO: 1470657 - DNA, 25 bp, Homo sapien
cacagcccatttgcaagggttggga

SEQ ID NO: 1470658 - DNA, 25 bp, Homo sapien
agtgacacctgccagcacggctgat

SEQ ID NO: 1470659 - DNA, 25 bp, Homo sapien
cagtgagacgtctcctctctagaca

SEQ ID NO: 1470660 - DNA, 25 bp, Homo sapien
cggctgatgccaggtctgcatcaca

SEQ ID NO: 1470661 - DNA, 25 bp, Homo sapien
atcagctgcagttgaggaccacgtc

SEQ ID NO: 1470662 - DNA, 25 bp, Homo sapien
ctcttcttaagggtatttgctgttg

SEQ ID NO: 1470663 - DNA, 25 bp, Homo sapien
tcagatccctggctgaaactcttgt

SEQ ID NO: 1470664 - DNA, 25 bp, Homo sapien
ctggctgaaactcttgtggccctct

SEQ ID NO: 1470665 - DNA, 25 bp, Homo sapien
cttcttaagggtatttgctgttgtc

SEQ ID NO: 1470666 - DNA, 25 bp, Homo sapien
tgtgctcaccagacatgggctacgg

SEQ ID NO: 1470667 - DNA, 25 bp, Homo sapien
gtgatcccggccaaaggcggcaaat

SEQ ID NO: 1470668 - DNA, 25 bp, Homo sapien
aaatgcagctcatctagttcagggc

SEQ ID NO: 1470669 - DNA, 25 bp, Homo sapien
cattgtttggtagcagaggatctct

SEQ ID NO: 1470670 - DNA, 25 bp, Homo sapien
tcagaaatagacgtggccactaagt

SEQ ID NO: 1470671 - DNA, 25 bp, Homo sapien
ggccactaagtaacaaaatgacata

SEQ ID NO: 1470672 - DNA, 25 bp, Homo sapien
acataaatgtaaccagtctttctca

SEQ ID NO: 1470673 - DNA, 25 bp, Homo sapien
ctggcttttccttaatgatacctga

SEQ ID NO: 1470674 - DNA, 25 bp, Homo sapien
taatctcggcttgggatggcctcct

SEQ ID NO: 1470675 - DNA, 25 bp, Homo sapien
tgacaatgatccaactaaagggcca

SEQ ID NO: 1470676 - DNA, 25 bp, Homo sapien
tgctgaggacaaggatctaccaagt

SEQ ID NO: 1470677 - DNA, 25 bp, Homo sapien
gacaagtcgcccagttagcctggca

SEQ ID NO: 1470678 - DNA, 25 bp, Homo sapien
tccccaggtgactagagcctatgac

SEQ ID NO: 1470679 - DNA, 25 bp, Homo sapien
cttatggcaactacaacaggaggaa

SEQ ID NO: 1470680 - DNA, 25 bp, Homo sapien
tagagatgagttcgccttttgctgc

SEQ ID NO: 1470681 - DNA, 25 bp, Homo sapien
caaatgtgagcttgaggcctttcca

SEQ ID NO: 1470682 - DNA, 25 bp, Homo sapien
gactctactgtgaaagcaaaatctg

SEQ ID NO: 1470683 - DNA, 25 bp, Homo sapien
gagtcgtgtcgtcagaactcctgaa

SEQ ID NO: 1470684 - DNA, 25 bp, Homo sapien
gattaagagcttagtgagccactcc

SEQ ID NO: 1470685 - DNA, 25 bp, Homo sapien
tctaagctgctacggaaagtctgtc

SEQ ID NO: 1470686 - DNA, 25 bp, Homo sapien
ccagggagaggctcttggtttttcg

SEQ ID NO: 1470687 - DNA, 25 bp, Homo sapien
tggaatgcctcggagagtcagagtc

SEQ ID NO: 1470688 - DNA, 25 bp, Homo sapien
gctgcttaggttggaactgttggaa

SEQ ID NO: 1470689 - DNA, 25 bp, Homo sapien
agctcccgcggtcagtgctctccag

SEQ ID NO: 1470690 - DNA, 25 bp, Homo sapien
gcttggcactgtagcttcctccaga

SEQ ID NO: 1470691 - DNA, 25 bp, Homo sapien
acttccttggtccatgcctccagag

SEQ ID NO: 1470692 - DNA, 25 bp, Homo sapien
gtcaaagtccctcgctggggcatca

SEQ ID NO: 1470693 - DNA, 25 bp, Homo sapien
aattccctctttaatgcgctgccat

SEQ ID NO: 1470694 - DNA, 25 bp, Homo sapien
cctggtcctgcctttttttagctgg

SEQ ID NO: 1470695 - DNA, 25 bp, Homo sapien
gtgaatctgcctggtcctgcctttt

SEQ ID NO: 1470696 - DNA, 25 bp, Homo sapien
ctgtgaatctgcctggtcctgcctt

SEQ ID NO: 1470697 - DNA, 25 bp, Homo sapien
cctgcctttttttagctggtaggct

SEQ ID NO: 1470698 - DNA, 25 bp, Homo sapien
gctggcacactcgatcgacactctc

SEQ ID NO: 1470699 - DNA, 25 bp, Homo sapien
ggcacactcgatcgacactctctct

SEQ ID NO: 1470700 - DNA, 25 bp, Homo sapien
acactcgatcgacactctctctgat

SEQ ID NO: 1470701 - DNA, 25 bp, Homo sapien
actcgatcgacactctctctgatct

SEQ ID NO: 1470702 - DNA, 25 bp, Homo sapien
tacactctagaaggactctgggact

SEQ ID NO: 1470703 - DNA, 25 bp, Homo sapien
tacctcgggacctttggacatgcgt

SEQ ID NO: 1470704 - DNA, 25 bp, Homo sapien
tattctgccaagtagggattcatcc

SEQ ID NO: 1470705 - DNA, 25 bp, Homo sapien
catactaaggccctagcaggaagtc

SEQ ID NO: 1470706 - DNA, 25 bp, Homo sapien
gactgagccactgaatactgtccga

SEQ ID NO: 1470707 - DNA, 25 bp, Homo sapien
tgatagatggaatactgactgagcc

SEQ ID NO: 1470708 - DNA, 25 bp, Homo sapien
tgtccgactttcctgaggccgaggg

SEQ ID NO: 1470709 - DNA, 25 bp, Homo sapien
agccactgctagcactcatggagcg

SEQ ID NO: 1470710 - DNA, 25 bp, Homo sapien
taacagctgatacgtccatttggag

SEQ ID NO: 1470711 - DNA, 25 bp, Homo sapien
gacgctgcaatactcacaacctagg

SEQ ID NO: 1470712 - DNA, 25 bp, Homo sapien
actgggattagaaataagacgctgc

SEQ ID NO: 1470713 - DNA, 25 bp, Homo sapien
gactcacaccaatagtagtactggg

SEQ ID NO: 1470714 - DNA, 25 bp, Homo sapien
cctgtgaattcaccagatactaata

SEQ ID NO: 1470715 - DNA, 25 bp, Homo sapien
tgcaacagaacaccaagctaactag

SEQ ID NO: 1470716 - DNA, 25 bp, Homo sapien
catttcgggctcagaaaatattact

SEQ ID NO: 1470717 - DNA, 25 bp, Homo sapien
aaaaatgttacaactgtctgcctaa

SEQ ID NO: 1470718 - DNA, 25 bp, Homo sapien
ggctgacagttcagtttgtcctggt

SEQ ID NO: 1470719 - DNA, 25 bp, Homo sapien
ttactaaacgtcctcatacttgccc

SEQ ID NO: 1470720 - DNA, 25 bp, Homo sapien
tggttataagcaggcatatggttcc

SEQ ID NO: 1470721 - DNA, 25 bp, Homo sapien
gggtcctcagcttttgggctgacag

SEQ ID NO: 1470722 - DNA, 25 bp, Homo sapien
ctcagagtcataaagcttggtgtac

SEQ ID NO: 1470723 - DNA, 25 bp, Homo sapien
cctcagagtcataaagcttggtgta

SEQ ID NO: 1470724 - DNA, 25 bp, Homo sapien
gagatcagaccggagtgatgatgag

SEQ ID NO: 1470725 - DNA, 25 bp, Homo sapien
ttcaaagttgatcggagaggagatc

SEQ ID NO: 1470726 - DNA, 25 bp, Homo sapien
cagagacggggaatattcagggttt

SEQ ID NO: 1470727 - DNA, 25 bp, Homo sapien
tttcagcagaattaacagtcatgtg

SEQ ID NO: 1470728 - DNA, 25 bp, Homo sapien
gatctttcaggatctgtattccatc

SEQ ID NO: 1470729 - DNA, 25 bp, Homo sapien
tgggcagatctttcaggatctgtat

SEQ ID NO: 1470730 - DNA, 25 bp, Homo sapien
catgggcagatctttcaggatctgt

SEQ ID NO: 1470731 - DNA, 25 bp, Homo sapien
cagatctttcaggatctgtattcca

SEQ ID NO: 1470732 - DNA, 25 bp, Homo sapien
ctcatttctggatctcgtagcattt

SEQ ID NO: 1470733 - DNA, 25 bp, Homo sapien
tcatttctggatctcgtagcatttc

SEQ ID NO: 1470734 - DNA, 25 bp, Homo sapien
tgtttcaggtactaccagttcgtcc

SEQ ID NO: 1470735 - DNA, 25 bp, Homo sapien
ctcttctgggactctgaaggaataa

SEQ ID NO: 1470736 - DNA, 25 bp, Homo sapien
ggaataacgccgcttattgttaatg

SEQ ID NO: 1470737 - DNA, 25 bp, Homo sapien
ccatttgtttccgactattatctga

SEQ ID NO: 1470738 - DNA, 25 bp, Homo sapien
tatattaatctaatggtctccaacc

SEQ ID NO: 1470739 - DNA, 25 bp, Homo sapien
atatattaatctaatggtctccaac

SEQ ID NO: 1470740 - DNA, 25 bp, Homo sapien
cctaaaagatttaatgatccttcat

SEQ ID NO: 1470741 - DNA, 25 bp, Homo sapien
gatttaatgatccttcattgtttaa

SEQ ID NO: 1470742 - DNA, 25 bp, Homo sapien
cattttcactgtacaccgagagata

SEQ ID NO: 1470743 - DNA, 25 bp, Homo sapien
cactgtacaccgagagatatggtgc

SEQ ID NO: 1470744 - DNA, 25 bp, Homo sapien
tacaccgagagatatggtgcattgt

SEQ ID NO: 1470745 - DNA, 25 bp, Homo sapien
tctgaatccattccatggagttcac

SEQ ID NO: 1470746 - DNA, 25 bp, Homo sapien
aactgcgcagatagcatccattggt

SEQ ID NO: 1470747 - DNA, 25 bp, Homo sapien
tttactggagatctcaactgcgcag

SEQ ID NO: 1470748 - DNA, 25 bp, Homo sapien
tggcagtcagtgtatatcccaatgc

SEQ ID NO: 1470749 - DNA, 25 bp, Homo sapien
tgttgtctagatcttcggccctggc

SEQ ID NO: 1470750 - DNA, 25 bp, Homo sapien
gaatcccacacagagttgttcactg

SEQ ID NO: 1470751 - DNA, 25 bp, Homo sapien
aatcccacacagagttgttcactga

SEQ ID NO: 1470752 - DNA, 25 bp, Homo sapien
acattatatgggacttgaatttctt

SEQ ID NO: 1470753 - DNA, 25 bp, Homo sapien
taacagaggacctgccttttcatag

SEQ ID NO: 1470754 - DNA, 25 bp, Homo sapien
tgaaatagttcataacagaggacct

SEQ ID NO: 1470755 - DNA, 25 bp, Homo sapien
tagttcataacagaggacctgcctt

SEQ ID NO: 1470756 - DNA, 25 bp, Homo sapien
tgtaaaaatcggtctctcgcccatc

SEQ ID NO: 1470757 - DNA, 25 bp, Homo sapien
tcgcccatccaatgctgacatagga

SEQ ID NO: 1470758 - DNA, 25 bp, Homo sapien
cataggaaaaagtcgtacatgacga

SEQ ID NO: 1470759 - DNA, 25 bp, Homo sapien
gacgatttcgtcctgagatcacagc

SEQ ID NO: 1470760 - DNA, 25 bp, Homo sapien
atgtacaacaaataacccttcttcg

SEQ ID NO: 1470761 - DNA, 25 bp, Homo sapien
gacatgtacaacaaataacccttct

SEQ ID NO: 1470762 - DNA, 25 bp, Homo sapien
ggtgacatgtacaacaaataaccct

SEQ ID NO: 1470763 - DNA, 25 bp, Homo sapien
gtgacatgtacaacaaataaccctt

SEQ ID NO: 1470764 - DNA, 25 bp, Homo sapien
gagtgctgtcataagcctctttggg

SEQ ID NO: 1470765 - DNA, 25 bp, Homo sapien
tatgattgcggctgcctgggttgtt

SEQ ID NO: 1470766 - DNA, 25 bp, Homo sapien
ctttgggaacatagactgagcggtc

SEQ ID NO: 1470767 - DNA, 25 bp, Homo sapien
cagtgtctgctagcatcaggattga

SEQ ID NO: 1470768 - DNA, 25 bp, Homo sapien
tatacagggtatatctttccgactt

SEQ ID NO: 1470769 - DNA, 25 bp, Homo sapien
gaagccaagactgaactcacagaaa

SEQ ID NO: 1470770 - DNA, 25 bp, Homo sapien
aacatcagaagccaagactgaactc

SEQ ID NO: 1470771 - DNA, 25 bp, Homo sapien
tttccgacttgcatggataacatca

SEQ ID NO: 1470772 - DNA, 25 bp, Homo sapien
atgttgcaatgatacaaataatttt

SEQ ID NO: 1470773 - DNA, 25 bp, Homo sapien
ctatgttgcaatgatacaaataatt

SEQ ID NO: 1470774 - DNA, 25 bp, Homo sapien
cctatgttgcaatgatacaaataat

SEQ ID NO: 1470775 - DNA, 25 bp, Homo sapien
tatgttgcaatgatacaaataattt

SEQ ID NO: 1470776 - DNA, 25 bp, Homo sapien
gtacagaaagagtttgaagtcacac

SEQ ID NO: 1470777 - DNA, 25 bp, Homo sapien
cttttccttcagcaatatcgtacag

SEQ ID NO: 1470778 - DNA, 25 bp, Homo sapien
aatgacaacactgggctgagatgct

SEQ ID NO: 1470779 - DNA, 25 bp, Homo sapien
acacactatagccagtgctctctgc

SEQ ID NO: 1470780 - DNA, 25 bp, Homo sapien
aatgtacacgttttataagtctgcc

SEQ ID NO: 1470781 - DNA, 25 bp, Homo sapien
gccattctggttggtaaagtagcag

SEQ ID NO: 1470782 - DNA, 25 bp, Homo sapien
tgaagacctacagataatgtacacg

SEQ ID NO: 1470783 - DNA, 25 bp, Homo sapien
cattaaaataacactcatgggtttc

SEQ ID NO: 1470784 - DNA, 25 bp, Homo sapien
tgaggatctatacccaggggacctt

SEQ ID NO: 1470785 - DNA, 25 bp, Homo sapien
cctttctgaggatctatacccaggg

SEQ ID NO: 1470786 - DNA, 25 bp, Homo sapien
atatgctgttcctattcctttctga

SEQ ID NO: 1470787 - DNA, 25 bp, Homo sapien
gaccttcatatgctgttcctattcc

SEQ ID NO: 1470788 - DNA, 25 bp, Homo sapien
gttatatggcatgagaatccacaca

SEQ ID NO: 1470789 - DNA, 25 bp, Homo sapien
gaggaactggacaagtggttggagc

SEQ ID NO: 1470790 - DNA, 25 bp, Homo sapien
caagttatatggcatgagaatccac

SEQ ID NO: 1470791 - DNA, 25 bp, Homo sapien
ttacacaagttatatggcatgagaa

SEQ ID NO: 1470792 - DNA, 25 bp, Homo sapien
tgcaagggtcactagtgggcattaa

SEQ ID NO: 1470793 - DNA, 25 bp, Homo sapien
tccttgaaaatggagtttttcaatg

SEQ ID NO: 1470794 - DNA, 25 bp, Homo sapien
tgacatcttcggtttggcaaactct

SEQ ID NO: 1470795 - DNA, 25 bp, Homo sapien
gcattaagctacctgacatcttcgg

SEQ ID NO: 1470796 - DNA, 25 bp, Homo sapien
caatctggatctttcactttagctg

SEQ ID NO: 1470797 - DNA, 25 bp, Homo sapien
caggcgattccttctcaggttaact

SEQ ID NO: 1470798 - DNA, 25 bp, Homo sapien
tcaaagtactcagatacaggctaac

SEQ ID NO: 1470799 - DNA, 25 bp, Homo sapien
tgtgagaactaaccaaacagaatgc

SEQ ID NO: 1470800 - DNA, 25 bp, Homo sapien
ttaaacccaccatcaaggaggtaca

SEQ ID NO: 1470801 - DNA, 25 bp, Homo sapien
gacacttggtaggagtagtaaaaga

SEQ ID NO: 1470802 - DNA, 25 bp, Homo sapien
gaacagccctgtcttattaaaccca

SEQ ID NO: 1470803 - DNA, 25 bp, Homo sapien
tcaaggaggtacactgatgacactt

SEQ ID NO: 1470804 - DNA, 25 bp, Homo sapien
acatggtggtaagcaaatgtagatt

SEQ ID NO: 1470805 - DNA, 25 bp, Homo sapien
tacatggtggtaagcaaatgtagat

SEQ ID NO: 1470806 - DNA, 25 bp, Homo sapien
ttacatggtggtaagcaaatgtaga

SEQ ID NO: 1470807 - DNA, 25 bp, Homo sapien
cttaggtggaaagccagttgaacca

SEQ ID NO: 1470808 - DNA, 25 bp, Homo sapien
ccttaaggttggtgtgtgaactgaa

SEQ ID NO: 1470809 - DNA, 25 bp, Homo sapien
ttccttaaggttggtgtgtgaactg

SEQ ID NO: 1470810 - DNA, 25 bp, Homo sapien
gccagttgaaccaggacatcctttt

SEQ ID NO: 1470811 - DNA, 25 bp, Homo sapien
tcctttcaggatgccaagcaaaaaa

SEQ ID NO: 1470812 - DNA, 25 bp, Homo sapien
gaatacatagacagagactgacact

SEQ ID NO: 1470813 - DNA, 25 bp, Homo sapien
gaatattttataagcactacagcct

SEQ ID NO: 1470814 - DNA, 25 bp, Homo sapien
aagagccactgcttaatcagcaaag

SEQ ID NO: 1470815 - DNA, 25 bp, Homo sapien
taaaaagaatcccagtcaccacagc

SEQ ID NO: 1470816 - DNA, 25 bp, Homo sapien
tagcagggtcacttgttcacatggg

SEQ ID NO: 1470817 - DNA, 25 bp, Homo sapien
tgtgggatggctcaccataccaggt

SEQ ID NO: 1470818 - DNA, 25 bp, Homo sapien
tgagagtatccaaacagatccatgc

SEQ ID NO: 1470819 - DNA, 25 bp, Homo sapien
tagcaaagaattagtatctagagta

SEQ ID NO: 1470820 - DNA, 25 bp, Homo sapien
agcaaagaattagtatctagagtat

SEQ ID NO: 1470821 - DNA, 25 bp, Homo sapien
ggagtgaaaattggtccaaccactg

SEQ ID NO: 1470822 - DNA, 25 bp, Homo sapien
taagtagttgtggtatatgccacag

SEQ ID NO: 1470823 - DNA, 25 bp, Homo sapien
caagctggcaaaagttaatgtgtga

SEQ ID NO: 1470824 - DNA, 25 bp, Homo sapien
gaacggtatacacgaggatgtttca

SEQ ID NO: 1470825 - DNA, 25 bp, Homo sapien
gagcagggatgctccaataaggcac

SEQ ID NO: 1470826 - DNA, 25 bp, Homo sapien
acacaagtgaaaagttggggagcag

SEQ ID NO: 1470827 - DNA, 25 bp, Homo sapien
ggagcagggatgctccaataaggca

SEQ ID NO: 1470828 - DNA, 25 bp, Homo sapien
caagtgaaaagttggggagcaggga

SEQ ID NO: 1470829 - DNA, 25 bp, Homo sapien
tgtggaccgtgactggatgtgaaac

SEQ ID NO: 1470830 - DNA, 25 bp, Homo sapien
gatgtgaaacttgacgctcgggttc

SEQ ID NO: 1470831 - DNA, 25 bp, Homo sapien
gacgctcgggttccatacatatgtg

SEQ ID NO: 1470832 - DNA, 25 bp, Homo sapien
catatgtgttctcaacgggatcagt

SEQ ID NO: 1470833 - DNA, 25 bp, Homo sapien
aacatctggcaagtgtatgggaaga

SEQ ID NO: 1470834 - DNA, 25 bp, Homo sapien
tatgggaagaataggctagcaggct

SEQ ID NO: 1470835 - DNA, 25 bp, Homo sapien
gcaggctgggaaacactatcgtgcc

SEQ ID NO: 1470836 - DNA, 25 bp, Homo sapien
cagtcaacttctgttcaatgtggag

SEQ ID NO: 1470837 - DNA, 25 bp, Homo sapien
caccaccaggccataaactttcagc

SEQ ID NO: 1470838 - DNA, 25 bp, Homo sapien
accaccaggccataaactttcagct

SEQ ID NO: 1470839 - DNA, 25 bp, Homo sapien
accaggccataaactttcagctact

SEQ ID NO: 1470840 - DNA, 25 bp, Homo sapien
tactggatttgggaggagtagggag

SEQ ID NO: 1470841 - DNA, 25 bp, Homo sapien
gccaggcctgtatcccaactcaagt

SEQ ID NO: 1470842 - DNA, 25 bp, Homo sapien
taaagcttaccagctgaatatcagc

SEQ ID NO: 1470843 - DNA, 25 bp, Homo sapien
aaaactgggccactgaactaaagct

SEQ ID NO: 1470844 - DNA, 25 bp, Homo sapien
taccaactgctaggatactcaatat

SEQ ID NO: 1470845 - DNA, 25 bp, Homo sapien
taataatcaaggaggctaagttata

SEQ ID NO: 1470846 - DNA, 25 bp, Homo sapien
aagacacattttggcccagtttaca

SEQ ID NO: 1470847 - DNA, 25 bp, Homo sapien
ctccacagcagagtaatttactcaa

SEQ ID NO: 1470848 - DNA, 25 bp, Homo sapien
cctgatagtaaattttgaccaggaa

SEQ ID NO: 1470849 - DNA, 25 bp, Homo sapien
tcctcctcctagttttcataagatt

SEQ ID NO: 1470850 - DNA, 25 bp, Homo sapien
cctcctcctagttttcataagatta

SEQ ID NO: 1470851 - DNA, 25 bp, Homo sapien
tcctagttttcataagattatacac

SEQ ID NO: 1470852 - DNA, 25 bp, Homo sapien
cctcctagttttcataagattatac

SEQ ID NO: 1470853 - DNA, 25 bp, Homo sapien
aagtttctgacctgttgcaaaaggc

SEQ ID NO: 1470854 - DNA, 25 bp, Homo sapien
ctatgtgtaagaaactgagccatct

SEQ ID NO: 1470855 - DNA, 25 bp, Homo sapien
tgcgaagttcctgtgtgaaaggtaa

SEQ ID NO: 1470856 - DNA, 25 bp, Homo sapien
caaaaggctttatttagccccacag

SEQ ID NO: 1470857 - DNA, 25 bp, Homo sapien
gaggttctacactataccactgaga

SEQ ID NO: 1470858 - DNA, 25 bp, Homo sapien
gaaatacactgatgtcccagggaac

SEQ ID NO: 1470859 - DNA, 25 bp, Homo sapien
gccttgaattcttgagccgaactga

SEQ ID NO: 1470860 - DNA, 25 bp, Homo sapien
tacgtgggctataaaatctctgctc

SEQ ID NO: 1470861 - DNA, 25 bp, Homo sapien
gaagcagcaggccacccctactgct

SEQ ID NO: 1470862 - DNA, 25 bp, Homo sapien
cagaaagacaggaccacaggaagca

SEQ ID NO: 1470863 - DNA, 25 bp, Homo sapien
aagcagcaggccacccctactgctt

SEQ ID NO: 1470864 - DNA, 25 bp, Homo sapien
caggaagcagcaggccacccctact

SEQ ID NO: 1470865 - DNA, 25 bp, Homo sapien
gatgctccagcagtagagcttcact

SEQ ID NO: 1470866 - DNA, 25 bp, Homo sapien
gatactaagccgactttgcaaggga

SEQ ID NO: 1470867 - DNA, 25 bp, Homo sapien
gacatggaagttcacagactggtag

SEQ ID NO: 1470868 - DNA, 25 bp, Homo sapien
cctagaggagggaacttatagacta

SEQ ID NO: 1470869 - DNA, 25 bp, Homo sapien
tttccattatggaggctaaagtctc

SEQ ID NO: 1470870 - DNA, 25 bp, Homo sapien
cagagttaatagtaaaccaggatta

SEQ ID NO: 1470871 - DNA, 25 bp, Homo sapien
tagaaggcccggagagttctaaaga

SEQ ID NO: 1470872 - DNA, 25 bp, Homo sapien
agtctcaggttcaaacctagttact

SEQ ID NO: 1470873 - DNA, 25 bp, Homo sapien
tatgcagatcgttttccaaagtgct

SEQ ID NO: 1470874 - DNA, 25 bp, Homo sapien
catttattatgtgcagagtatatgc

SEQ ID NO: 1470875 - DNA, 25 bp, Homo sapien
ttttaaagatgtagaagatggatca

SEQ ID NO: 1470876 - DNA, 25 bp, Homo sapien
ccctataaggtaggaattatgatcc

SEQ ID NO: 1470877 - DNA, 25 bp, Homo sapien
tgccaagcaagggacaattctaact

SEQ ID NO: 1470878 - DNA, 25 bp, Homo sapien
aataagcttttctggatcctcctgg

SEQ ID NO: 1470879 - DNA, 25 bp, Homo sapien
taaatatctgactgtctgctggaca

SEQ ID NO: 1470880 - DNA, 25 bp, Homo sapien
gaacatactcatctgtgaagaccca

SEQ ID NO: 1470881 - DNA, 25 bp, Homo sapien
caattcaaactttaggtcttcaaca

SEQ ID NO: 1470882 - DNA, 25 bp, Homo sapien
tctatacgtacaagttccagctgca

SEQ ID NO: 1470883 - DNA, 25 bp, Homo sapien
tagtcaatactagtcttattccctt

SEQ ID NO: 1470884 - DNA, 25 bp, Homo sapien
gctgcaattcaaactttaggtcttc

SEQ ID NO: 1470885 - DNA, 25 bp, Homo sapien
tatcacactatagagttaaccagag

SEQ ID NO: 1470886 - DNA, 25 bp, Homo sapien
taccactgtacacgaggagagttct

SEQ ID NO: 1470887 - DNA, 25 bp, Homo sapien
tcctgagcagcagattataacatgc

SEQ ID NO: 1470888 - DNA, 25 bp, Homo sapien
gatcaagaagttcctttagcagaac

SEQ ID NO: 1470889 - DNA, 25 bp, Homo sapien
aaaaatcaatcagtgaagatgagga

SEQ ID NO: 1470890 - DNA, 25 bp, Homo sapien
tcatccaaaaaatcaatcagtgaag

SEQ ID NO: 1470891 - DNA, 25 bp, Homo sapien
ccaaaaaatcaatcagtgaagatga

SEQ ID NO: 1470892 - DNA, 25 bp, Homo sapien
gtcatccaaaaaatcaatcagtgaa

SEQ ID NO: 1470893 - DNA, 25 bp, Homo sapien
ccccagaggatatgtgacatgttta

SEQ ID NO: 1470894 - DNA, 25 bp, Homo sapien
cccagaggatatgtgacatgtttaa

SEQ ID NO: 1470895 - DNA, 25 bp, Homo sapien
ggcgtattcaaaaatgccaagaaag

SEQ ID NO: 1470896 - DNA, 25 bp, Homo sapien
gccaagaaagaatgctgtgagtctt

SEQ ID NO: 1470897 - DNA, 25 bp, Homo sapien
tcaaattgatccagagcatcggtag

SEQ ID NO: 1470898 - DNA, 25 bp, Homo sapien
ccagagcatcggtaggcgtattcaa

SEQ ID NO: 1470899 - DNA, 25 bp, Homo sapien
tcctatttgccattagggccacgag

SEQ ID NO: 1470900 - DNA, 25 bp, Homo sapien
gctgtggtaaacatgccttcagtga

SEQ ID NO: 1470901 - DNA, 25 bp, Homo sapien
caatcaatgtcatctggcgtgcaag

SEQ ID NO: 1470902 - DNA, 25 bp, Homo sapien
tcaaatattgagagtgtgccagaca

SEQ ID NO: 1470903 - DNA, 25 bp, Homo sapien
atcagctgttcgatttctgagagta

SEQ ID NO: 1470904 - DNA, 25 bp, Homo sapien
ttttcagatctaagctcttcagtgt

SEQ ID NO: 1470905 - DNA, 25 bp, Homo sapien
gtcctttatcagctgttcgatttct

SEQ ID NO: 1470906 - DNA, 25 bp, Homo sapien
ttcagatctaagctcttcagtgtcc

SEQ ID NO: 1470907 - DNA, 25 bp, Homo sapien
tatccagtttcgcaaaacgacgcat

SEQ ID NO: 1470908 - DNA, 25 bp, Homo sapien
tagatgctttaactttattcaactc

SEQ ID NO: 1470909 - DNA, 25 bp, Homo sapien
atccagagccgactgcaactccagt

SEQ ID NO: 1470910 - DNA, 25 bp, Homo sapien
ccgactgcaactccagtctagctga

SEQ ID NO: 1470911 - DNA, 25 bp, Homo sapien
tcagtcattttagaagctaaggcct

SEQ ID NO: 1470912 - DNA, 25 bp, Homo sapien
tgctcgtgtacccaagctggaattt

SEQ ID NO: 1470913 - DNA, 25 bp, Homo sapien
tacccaagctggaatttcttaatgc

SEQ ID NO: 1470914 - DNA, 25 bp, Homo sapien
gaagataccctcgtgcatccttttc

SEQ ID NO: 1470915 - DNA, 25 bp, Homo sapien
atttctgtgatttgggcttcccaat

SEQ ID NO: 1470916 - DNA, 25 bp, Homo sapien
ctgctggttgtgtatacttaagttc

SEQ ID NO: 1470917 - DNA, 25 bp, Homo sapien
ttaagttctcatacaaagtagtaag

SEQ ID NO: 1470918 - DNA, 25 bp, Homo sapien
gcttcccaatgtgcaactgattctt

SEQ ID NO: 1470919 - DNA, 25 bp, Homo sapien
cctgcaacttgataggcaatgcact

SEQ ID NO: 1470920 - DNA, 25 bp, Homo sapien
aatgtaggctttcaatgggttcaac

SEQ ID NO: 1470921 - DNA, 25 bp, Homo sapien
ttcatactgcgaactcctgcgggtc

SEQ ID NO: 1470922 - DNA, 25 bp, Homo sapien
catatctgcaaatgcctaaagagga

SEQ ID NO: 1470923 - DNA, 25 bp, Homo sapien
gatgtaagctaatctgtcacagaag

SEQ ID NO: 1470924 - DNA, 25 bp, Homo sapien
ggtaggatgtaagctaatctgtcac

SEQ ID NO: 1470925 - DNA, 25 bp, Homo sapien
taagctaatctgtcacagaagcaaa

SEQ ID NO: 1470926 - DNA, 25 bp, Homo sapien
aggtggtaggatgtaagctaatctg

SEQ ID NO: 1470927 - DNA, 25 bp, Homo sapien
gagatccagggaagctatcactcac

SEQ ID NO: 1470928 - DNA, 25 bp, Homo sapien
tgtaccttagggtgtgccatttgcc

SEQ ID NO: 1470929 - DNA, 25 bp, Homo sapien
taggaattctactgatgacacagga

SEQ ID NO: 1470930 - DNA, 25 bp, Homo sapien
gatgcaagtattttcacctctgtgg

SEQ ID NO: 1470931 - DNA, 25 bp, Homo sapien
tgttacccattaaaacactgagttg

SEQ ID NO: 1470932 - DNA, 25 bp, Homo sapien
caaactctgggtagtggtgtcatct

SEQ ID NO: 1470933 - DNA, 25 bp, Homo sapien
tacggtcacgccaattgattacagc

SEQ ID NO: 1470934 - DNA, 25 bp, Homo sapien
cagccattctcgagggtatacagca

SEQ ID NO: 1470935 - DNA, 25 bp, Homo sapien
acaacactttttctcgttcatattg

SEQ ID NO: 1470936 - DNA, 25 bp, Homo sapien
caagttcactcgtcagctttttatt

SEQ ID NO: 1470937 - DNA, 25 bp, Homo sapien
ttaacaacactttttctcgttcata

SEQ ID NO: 1470938 - DNA, 25 bp, Homo sapien
cttatcaagttcactcgtcagcttt

SEQ ID NO: 1470939 - DNA, 25 bp, Homo sapien
caaggaataagtttttgaagactat

SEQ ID NO: 1470940 - DNA, 25 bp, Homo sapien
gcaaggaataagtttttgaagacta

SEQ ID NO: 1470941 - DNA, 25 bp, Homo sapien
tctcttgctgatgttctatgctgca

SEQ ID NO: 1470942 - DNA, 25 bp, Homo sapien
gctgaccttctgaatcatgcagttc

SEQ ID NO: 1470943 - DNA, 25 bp, Homo sapien
tgttgagagcaagttgctgaccttc

SEQ ID NO: 1470944 - DNA, 25 bp, Homo sapien
cagtctttagtttggttatctcttg

SEQ ID NO: 1470945 - DNA, 25 bp, Homo sapien
tcagtttacattccttaatagtctg

SEQ ID NO: 1470946 - DNA, 25 bp, Homo sapien
tgagtattcatataactgcattttt

SEQ ID NO: 1470947 - DNA, 25 bp, Homo sapien
taaatgagtattcatataactgcat

SEQ ID NO: 1470948 - DNA, 25 bp, Homo sapien
ttccttaatagtctgtctttgttgc

SEQ ID NO: 1470949 - DNA, 25 bp, Homo sapien
gaagaaaggctagttttcactgcac

SEQ ID NO: 1470950 - DNA, 25 bp, Homo sapien
tagcttcctactggtaagaacgaga

SEQ ID NO: 1470951 - DNA, 25 bp, Homo sapien
catgactcccatgcagattaccagt

SEQ ID NO: 1470952 - DNA, 25 bp, Homo sapien
gagggtctggatatctaaccatgac

SEQ ID NO: 1470953 - DNA, 25 bp, Homo sapien
ctgtctttagatgcttcagcagcta

SEQ ID NO: 1470954 - DNA, 25 bp, Homo sapien
cactctgttcacgtagcttcctgtc

SEQ ID NO: 1470955 - DNA, 25 bp, Homo sapien
ttagaatagtgctcactctgttcac

SEQ ID NO: 1470956 - DNA, 25 bp, Homo sapien
tctttagatgcttcagcagctagag

SEQ ID NO: 1470957 - DNA, 25 bp, Homo sapien
ggccagtttcctctgacagtgtgcg

SEQ ID NO: 1470958 - DNA, 25 bp, Homo sapien
tccttatctcggacatggcgagcaa

SEQ ID NO: 1470959 - DNA, 25 bp, Homo sapien
tttttaatcgctcactagcctggac

SEQ ID NO: 1470960 - DNA, 25 bp, Homo sapien
ggtgtgcaattctgttagccgctca

SEQ ID NO: 1470961 - DNA, 25 bp, Homo sapien
tctagttcttgcctcacagcattag

SEQ ID NO: 1470962 - DNA, 25 bp, Homo sapien
cacagcattagcttcttcaagttgc

SEQ ID NO: 1470963 - DNA, 25 bp, Homo sapien
atcatctagttcttgcctcacagca

SEQ ID NO: 1470964 - DNA, 25 bp, Homo sapien
tctctttcttgttgtaacgttttga

SEQ ID NO: 1470965 - DNA, 25 bp, Homo sapien
gactagagcccaggaaatcttgcac

SEQ ID NO: 1470966 - DNA, 25 bp, Homo sapien
taaagacggtgaatggtgtatgcca

SEQ ID NO: 1470967 - DNA, 25 bp, Homo sapien
ggtggttccaaatcactcagtctag

SEQ ID NO: 1470968 - DNA, 25 bp, Homo sapien
aactcagggagttgaataatttgcc

SEQ ID NO: 1470969 - DNA, 25 bp, Homo sapien
tatcaatgcccctattcacaggagg

SEQ ID NO: 1470970 - DNA, 25 bp, Homo sapien
tactggcaataagcttggcactagg

SEQ ID NO: 1470971 - DNA, 25 bp, Homo sapien
tcaaggcaacataagaacgagagtc

SEQ ID NO: 1470972 - DNA, 25 bp, Homo sapien
gagttaagactagacccagtgggag

SEQ ID NO: 1470973 - DNA, 25 bp, Homo sapien
tcaggacactgggacctgataaaca

SEQ ID NO: 1470974 - DNA, 25 bp, Homo sapien
taagacgactccgaaatgtgaagaa

SEQ ID NO: 1470975 - DNA, 25 bp, Homo sapien
gaactaaagaagatggtaacccata

SEQ ID NO: 1470976 - DNA, 25 bp, Homo sapien
ggtatgttgaagctgtgacctcaac

SEQ ID NO: 1470977 - DNA, 25 bp, Homo sapien
ttgctgttagtggaccatcaacagt

SEQ ID NO: 1470978 - DNA, 25 bp, Homo sapien
aatctttgcttgctgttagtggacc

SEQ ID NO: 1470979 - DNA, 25 bp, Homo sapien
ctttgcttgctgttagtggaccatc

SEQ ID NO: 1470980 - DNA, 25 bp, Homo sapien
tgttagtggaccatcaacagttgaa

SEQ ID NO: 1470981 - DNA, 25 bp, Homo sapien
gtcagacagaaatctccgatagtac

SEQ ID NO: 1470982 - DNA, 25 bp, Homo sapien
tgcttcaaatacatggccagtctct

SEQ ID NO: 1470983 - DNA, 25 bp, Homo sapien
tttaattgatgtacttgggggctgc

SEQ ID NO: 1470984 - DNA, 25 bp, Homo sapien
caaatttggaaatggtatagggcag

SEQ ID NO: 1470985 - DNA, 25 bp, Homo sapien
gctcaaggcgcttaattcttctttc

SEQ ID NO: 1470986 - DNA, 25 bp, Homo sapien
tttcttgctcaaggcgcttaattct

SEQ ID NO: 1470987 - DNA, 25 bp, Homo sapien
agttgctaagttgttgtctagagtc

SEQ ID NO: 1470988 - DNA, 25 bp, Homo sapien
ttgtctagagtcctctgaacattaa

SEQ ID NO: 1470989 - DNA, 25 bp, Homo sapien
ggaccagccgtaactcttaaacagc

SEQ ID NO: 1470990 - DNA, 25 bp, Homo sapien
tcttaaacagctccgatcagaaagt

SEQ ID NO: 1470991 - DNA, 25 bp, Homo sapien
tgaggtgggaccagccgtaactctt

SEQ ID NO: 1470992 - DNA, 25 bp, Homo sapien
taaacagctccgatcagaaagtaca

SEQ ID NO: 1470993 - DNA, 25 bp, Homo sapien
tgtaaaaccaacaaatggcagatgg

SEQ ID NO: 1470994 - DNA, 25 bp, Homo sapien
aaatgcagtatgtgttggtgggggc

SEQ ID NO: 1470995 - DNA, 25 bp, Homo sapien
cagctactagtatatgtaaaaccaa

SEQ ID NO: 1470996 - DNA, 25 bp, Homo sapien
gcagatggtggccagaaaatgcagt

SEQ ID NO: 1470997 - DNA, 25 bp, Homo sapien
tataaggtgcttcacagttccgaat

SEQ ID NO: 1470998 - DNA, 25 bp, Homo sapien
tctgttgggctactaacttctggaa

SEQ ID NO: 1470999 - DNA, 25 bp, Homo sapien
cttgggctggaaactgaaacctctc

SEQ ID NO: 1471000 - DNA, 25 bp, Homo sapien
tgagccttcgaataagatccttagc

SEQ ID NO: 1471001 - DNA, 25 bp, Homo sapien
gtcacattcaggtccatatctccct

SEQ ID NO: 1471002 - DNA, 25 bp, Homo sapien
ggttcatgatttttccgtatgtctc

SEQ ID NO: 1471003 - DNA, 25 bp, Homo sapien
cataaaatggtgtttctccgtaaag

SEQ ID NO: 1471004 - DNA, 25 bp, Homo sapien
gtatgtctccaccagcgattctgca

SEQ ID NO: 1471005 - DNA, 25 bp, Homo sapien
ataatctggagttcctacagccact

SEQ ID NO: 1471006 - DNA, 25 bp, Homo sapien
aatctggagttcctacagccactga

SEQ ID NO: 1471007 - DNA, 25 bp, Homo sapien
tataatctggagttcctacagccac

SEQ ID NO: 1471008 - DNA, 25 bp, Homo sapien
taatctggagttcctacagccactg

SEQ ID NO: 1471009 - DNA, 25 bp, Homo sapien
gaaattactagcatctaatatgaag

SEQ ID NO: 1471010 - DNA, 25 bp, Homo sapien
gaccctagaatggacaagttcaaca

SEQ ID NO: 1471011 - DNA, 25 bp, Homo sapien
gaagaaaggctaagacgtacagacc

SEQ ID NO: 1471012 - DNA, 25 bp, Homo sapien
cagtggattagatacagttgacgag

SEQ ID NO: 1471013 - DNA, 25 bp, Homo sapien
aaaatctgctaaccgaatatgtcca

SEQ ID NO: 1471014 - DNA, 25 bp, Homo sapien
ccaaaatctgctaaccgaatatgtc

SEQ ID NO: 1471015 - DNA, 25 bp, Homo sapien
tctgctaaccgaatatgtccattca

SEQ ID NO: 1471016 - DNA, 25 bp, Homo sapien
aatctgctaaccgaatatgtccatt

SEQ ID NO: 1471017 - DNA, 25 bp, Homo sapien
ccatcagtatattgtcaggtttaat

SEQ ID NO: 1471018 - DNA, 25 bp, Homo sapien
atccatcagtatattgtcaggttta

SEQ ID NO: 1471019 - DNA, 25 bp, Homo sapien
cagtatattgtcaggtttaatgtct

SEQ ID NO: 1471020 - DNA, 25 bp, Homo sapien
atcagtatattgtcaggtttaatgt

SEQ ID NO: 1471021 - DNA, 25 bp, Homo sapien
gcatgtcttacagtgcaggtcttct

SEQ ID NO: 1471022 - DNA, 25 bp, Homo sapien
ttttgctttaagcagtcatatggtt

SEQ ID NO: 1471023 - DNA, 25 bp, Homo sapien
tttccttggaagtacctgtcatttc

SEQ ID NO: 1471024 - DNA, 25 bp, Homo sapien
tcaggttagttggttgccctatgac

SEQ ID NO: 1471025 - DNA, 25 bp, Homo sapien
gagtcagtgacgtcttgcaaataac

SEQ ID NO: 1471026 - DNA, 25 bp, Homo sapien
cagcgtgagcaacctcatcgctaca

SEQ ID NO: 1471027 - DNA, 25 bp, Homo sapien
gcagccagacaaccagatactaaga

SEQ ID NO: 1471028 - DNA, 25 bp, Homo sapien
gaggcaaggccagtggaacacttga

SEQ ID NO: 1471029 - DNA, 25 bp, Homo sapien
tattttaattgcatgtaccttggcc

SEQ ID NO: 1471030 - DNA, 25 bp, Homo sapien
tctcttcccagcaacatcacattaa

SEQ ID NO: 1471031 - DNA, 25 bp, Homo sapien
cccataagaccaaaatgcggatacg

SEQ ID NO: 1471032 - DNA, 25 bp, Homo sapien
tgcggatacgacattagttaatcta

SEQ ID NO: 1471033 - DNA, 25 bp, Homo sapien
taattctcatacgtggatcatcttg

SEQ ID NO: 1471034 - DNA, 25 bp, Homo sapien
gatacttctatcatgtctttcacct

SEQ ID NO: 1471035 - DNA, 25 bp, Homo sapien
gatcatcttgagttgctggtttagc

SEQ ID NO: 1471036 - DNA, 25 bp, Homo sapien
gatgggacttgctactcctagactt

SEQ ID NO: 1471037 - DNA, 25 bp, Homo sapien
tccaaagatactctcatttgaatga

SEQ ID NO: 1471038 - DNA, 25 bp, Homo sapien
taattcaccaacaacgttctgctgt

SEQ ID NO: 1471039 - DNA, 25 bp, Homo sapien
accatccaaagatactctcatttga

SEQ ID NO: 1471040 - DNA, 25 bp, Homo sapien
tgaatgattaattcaccaacaacgt

SEQ ID NO: 1471041 - DNA, 25 bp, Homo sapien
taggcctctgttgctagatattaca

SEQ ID NO: 1471042 - DNA, 25 bp, Homo sapien
tatccaagaccataattaataaatc

SEQ ID NO: 1471043 - DNA, 25 bp, Homo sapien
ggttgacgataaatgtatccaagac

SEQ ID NO: 1471044 - DNA, 25 bp, Homo sapien
catggtaactcacagccaggtacaa

SEQ ID NO: 1471045 - DNA, 25 bp, Homo sapien
gaactgagtcaattgctatcaccat

SEQ ID NO: 1471046 - DNA, 25 bp, Homo sapien
gtagctgatgaactgagtcaattgc

SEQ ID NO: 1471047 - DNA, 25 bp, Homo sapien
gatgaactgagtcaattgctatcac

SEQ ID NO: 1471048 - DNA, 25 bp, Homo sapien
gctgatgaactgagtcaattgctat

SEQ ID NO: 1471049 - DNA, 25 bp, Homo sapien
tatcttcaggcaatctatcttcaaa

SEQ ID NO: 1471050 - DNA, 25 bp, Homo sapien
ccaacataataatccataaccaggt

SEQ ID NO: 1471051 - DNA, 25 bp, Homo sapien
tccccaccaacataataatccataa

SEQ ID NO: 1471052 - DNA, 25 bp, Homo sapien
tgctgagtagagtaagcaaatcccc

SEQ ID NO: 1471053 - DNA, 25 bp, Homo sapien
ccctttcttcacgaaaacatgctgt

SEQ ID NO: 1471054 - DNA, 25 bp, Homo sapien
atcctggaaagcatagtgcaaggtt

SEQ ID NO: 1471055 - DNA, 25 bp, Homo sapien
gcaaggttgtaatccatttattgtc

SEQ ID NO: 1471056 - DNA, 25 bp, Homo sapien
catccctttcttcacgaaaacatgc

SEQ ID NO: 1471057 - DNA, 25 bp, Homo sapien
aatggtatttcgaggactatttatc

SEQ ID NO: 1471058 - DNA, 25 bp, Homo sapien
aatcttcagctatacttcacaggag

SEQ ID NO: 1471059 - DNA, 25 bp, Homo sapien
gtccctagctggtctaccttattct

SEQ ID NO: 1471060 - DNA, 25 bp, Homo sapien
gcataatactgacctccaaaatggg

SEQ ID NO: 1471061 - DNA, 25 bp, Homo sapien
gctcttttcagcatttcccatttat

SEQ ID NO: 1471062 - DNA, 25 bp, Homo sapien
tatctgcattttttagttttactac

SEQ ID NO: 1471063 - DNA, 25 bp, Homo sapien
catttattcaatattttcatggcaa

SEQ ID NO: 1471064 - DNA, 25 bp, Homo sapien
tttcatggcaaacactttatctgca

SEQ ID NO: 1471065 - DNA, 25 bp, Homo sapien
taagaccacttccaggccattggac

SEQ ID NO: 1471066 - DNA, 25 bp, Homo sapien
taatctgtaagaccacttccaggcc

SEQ ID NO: 1471067 - DNA, 25 bp, Homo sapien
ccagataatctgtaagaccacttcc

SEQ ID NO: 1471068 - DNA, 25 bp, Homo sapien
cattggacttgccataggccacagg

SEQ ID NO: 1471069 - DNA, 25 bp, Homo sapien
caaagcagcaagctttcacaacaag

SEQ ID NO: 1471070 - DNA, 25 bp, Homo sapien
tctgaagcccagaagccttgaagct

SEQ ID NO: 1471071 - DNA, 25 bp, Homo sapien
aggaaactgttgacaggcaacaccc

SEQ ID NO: 1471072 - DNA, 25 bp, Homo sapien
gcagaagcggtgagccaccaggaaa

SEQ ID NO: 1471073 - DNA, 25 bp, Homo sapien
gctgaatttcaattatatcttgctc

SEQ ID NO: 1471074 - DNA, 25 bp, Homo sapien
ctgaatttcaattatatcttgctca

SEQ ID NO: 1471075 - DNA, 25 bp, Homo sapien
tttcaattatatcttgctcactgtt

SEQ ID NO: 1471076 - DNA, 25 bp, Homo sapien
aattatatcttgctcactgtttccc

SEQ ID NO: 1471077 - DNA, 25 bp, Homo sapien
atgaaggactcagctgcattagaca

SEQ ID NO: 1471078 - DNA, 25 bp, Homo sapien
tactccaaaatgaaggactcagctg

SEQ ID NO: 1471079 - DNA, 25 bp, Homo sapien
caaaatgaaggactcagctgcatta

SEQ ID NO: 1471080 - DNA, 25 bp, Homo sapien
tccaaaatgaaggactcagctgcat

SEQ ID NO: 1471081 - DNA, 25 bp, Homo sapien
gtagtacacagacagtaccataaca

SEQ ID NO: 1471082 - DNA, 25 bp, Homo sapien
cagtagtacacagacagtaccataa

SEQ ID NO: 1471083 - DNA, 25 bp, Homo sapien
agtacacagacagtaccataacagt

SEQ ID NO: 1471084 - DNA, 25 bp, Homo sapien
aacagtagtacacagacagtaccat

SEQ ID NO: 1471085 - DNA, 25 bp, Homo sapien
agggaaaggagagataaaaatcagg

SEQ ID NO: 1471086 - DNA, 25 bp, Homo sapien
ctacagggaaaggagagataaaaat

SEQ ID NO: 1471087 - DNA, 25 bp, Homo sapien
gaaaggagagataaaaatcagggtc

SEQ ID NO: 1471088 - DNA, 25 bp, Homo sapien
tacagggaaaggagagataaaaatc

SEQ ID NO: 1471089 - DNA, 25 bp, Homo sapien
cctgtcatggagtcttaagaactga

SEQ ID NO: 1471090 - DNA, 25 bp, Homo sapien
tttaagaaccattgcctaagccaag

SEQ ID NO: 1471091 - DNA, 25 bp, Homo sapien
tgctgccgggcataaagtcttagat

SEQ ID NO: 1471092 - DNA, 25 bp, Homo sapien
caatgtcttttcgtttgcctaggtc

SEQ ID NO: 1471093 - DNA, 25 bp, Homo sapien
gaccctattctatccaccacgtgag

SEQ ID NO: 1471094 - DNA, 25 bp, Homo sapien
ggatagatccaagctgcctcagaga

SEQ ID NO: 1471095 - DNA, 25 bp, Homo sapien
ggtagcctctatgactcccacgtag

SEQ ID NO: 1471096 - DNA, 25 bp, Homo sapien
tacagcaatggttatcacagcaggc

SEQ ID NO: 1471097 - DNA, 25 bp, Homo sapien
aaaatgtgtacttcatggaaaggat

SEQ ID NO: 1471098 - DNA, 25 bp, Homo sapien
atgtgttcaaatgtaggcgctatca

SEQ ID NO: 1471099 - DNA, 25 bp, Homo sapien
ggcgctatcaagaaatgcgaaatga

SEQ ID NO: 1471100 - DNA, 25 bp, Homo sapien
gatatctaagtgatgtgaggtgata

SEQ ID NO: 1471101 - DNA, 25 bp, Homo sapien
tggatactagctcagccacactaga

SEQ ID NO: 1471102 - DNA, 25 bp, Homo sapien
gatactagctcagccacactagaac

SEQ ID NO: 1471103 - DNA, 25 bp, Homo sapien
atactagctcagccacactagaaca

SEQ ID NO: 1471104 - DNA, 25 bp, Homo sapien
ggatactagctcagccacactagaa

SEQ ID NO: 1471105 - DNA, 25 bp, Homo sapien
accactgtgttattggcctttgaac

SEQ ID NO: 1471106 - DNA, 25 bp, Homo sapien
gacaatacctatataagactgcaaa

SEQ ID NO: 1471107 - DNA, 25 bp, Homo sapien
acaagcccagactgcaaagtctaca

SEQ ID NO: 1471108 - DNA, 25 bp, Homo sapien
tgtccagacaccgaaaacatctaaa

SEQ ID NO: 1471109 - DNA, 25 bp, Homo sapien
aaattcatcaagttatctatgtgta

SEQ ID NO: 1471110 - DNA, 25 bp, Homo sapien
taaacatacatgtgaggtatgcaca

SEQ ID NO: 1471111 - DNA, 25 bp, Homo sapien
aatattcaatgtacatgggttagaa

SEQ ID NO: 1471112 - DNA, 25 bp, Homo sapien
gcaatccctgtcaaagtattaatga

SEQ ID NO: 1471113 - DNA, 25 bp, Homo sapien
gcttccaaaataattagcagacctt

SEQ ID NO: 1471114 - DNA, 25 bp, Homo sapien
ccttctatcaaatcttaatctctta

SEQ ID NO: 1471115 - DNA, 25 bp, Homo sapien
ttctctcacaattgtgttcaacagc

SEQ ID NO: 1471116 - DNA, 25 bp, Homo sapien
tattatatcaatcacaacagcacaa

SEQ ID NO: 1471117 - DNA, 25 bp, Homo sapien
agtcttctctatgtaatcgcatttg

SEQ ID NO: 1471118 - DNA, 25 bp, Homo sapien
cgaccaatcacctttaatatttcaa

SEQ ID NO: 1471119 - DNA, 25 bp, Homo sapien
aaaagctcctcgaccaatcaccttt

SEQ ID NO: 1471120 - DNA, 25 bp, Homo sapien
tgtaatcgcatttgtttcactttag

SEQ ID NO: 1471121 - DNA, 25 bp, Homo sapien
taaaatgtgatgcaaattagatata

SEQ ID NO: 1471122 - DNA, 25 bp, Homo sapien
tgaaatgaaagagcaatatcaatta

SEQ ID NO: 1471123 - DNA, 25 bp, Homo sapien
aataatggtgtttcttagttacaca

SEQ ID NO: 1471124 - DNA, 25 bp, Homo sapien
tgtttcttagttacacaaaaattca

SEQ ID NO: 1471125 - DNA, 25 bp, Homo sapien
taataatcttagcaggcattatttt

SEQ ID NO: 1471126 - DNA, 25 bp, Homo sapien
tcagatctatcaggctccaaaagcc

SEQ ID NO: 1471127 - DNA, 25 bp, Homo sapien
gcctttccaacataacaagttgcct

SEQ ID NO: 1471128 - DNA, 25 bp, Homo sapien
gccatctaagccaagtaccatacta

SEQ ID NO: 1471129 - DNA, 25 bp, Homo sapien
ttctttggtcagtgcagaatataat

SEQ ID NO: 1471130 - DNA, 25 bp, Homo sapien
tatacttcctgaaagcaacttttgt

SEQ ID NO: 1471131 - DNA, 25 bp, Homo sapien
gccctgctctttagtatagtaactc

SEQ ID NO: 1471132 - DNA, 25 bp, Homo sapien
caggtttatagacttttgcaatgaa

SEQ ID NO: 1471133 - DNA, 25 bp, Homo sapien
ccttcaggtaagtctggaactggac

SEQ ID NO: 1471134 - DNA, 25 bp, Homo sapien
ttgtgtatgccactgtaattccttc

SEQ ID NO: 1471135 - DNA, 25 bp, Homo sapien
tggaattgtgtatgccactgtaatt

SEQ ID NO: 1471136 - DNA, 25 bp, Homo sapien
ttcaggtaagtctggaactggacct

SEQ ID NO: 1471137 - DNA, 25 bp, Homo sapien
gtcatcacactgaggatttggcttc

SEQ ID NO: 1471138 - DNA, 25 bp, Homo sapien
tctgcaatttctgtcatcacactga

SEQ ID NO: 1471139 - DNA, 25 bp, Homo sapien
catcacactgaggatttggcttcat

SEQ ID NO: 1471140 - DNA, 25 bp, Homo sapien
ctttctgcaatttctgtcatcacac

SEQ ID NO: 1471141 - DNA, 25 bp, Homo sapien
cttctttcgagcatcctcagttatc

SEQ ID NO: 1471142 - DNA, 25 bp, Homo sapien
tgtataaatcaacaactggttcacc

SEQ ID NO: 1471143 - DNA, 25 bp, Homo sapien
gagcatcctcagttatcacaccact

SEQ ID NO: 1471144 - DNA, 25 bp, Homo sapien
cacaccactaataatgtataaatca

SEQ ID NO: 1471145 - DNA, 25 bp, Homo sapien
tctcttggatcccatggtccagtag

SEQ ID NO: 1471146 - DNA, 25 bp, Homo sapien
aacctgtacaactgccagccccatt

SEQ ID NO: 1471147 - DNA, 25 bp, Homo sapien
ttggatcccatggtccagtagacat

SEQ ID NO: 1471148 - DNA, 25 bp, Homo sapien
tgtacaactgccagccccattccag

SEQ ID NO: 1471149 - DNA, 25 bp, Homo sapien
aaagtgggaagactactagggctag

SEQ ID NO: 1471150 - DNA, 25 bp, Homo sapien
cacttccatgattgagcctttctac

SEQ ID NO: 1471151 - DNA, 25 bp, Homo sapien
tacaagaaatgatcctggtatgaca

SEQ ID NO: 1471152 - DNA, 25 bp, Homo sapien
tgcacccaagtactatgctccaagc

SEQ ID NO: 1471153 - DNA, 25 bp, Homo sapien
tgacacgtattctgatgcctcctca

SEQ ID NO: 1471154 - DNA, 25 bp, Homo sapien
gttgtatagttgacacgtattctga

SEQ ID NO: 1471155 - DNA, 25 bp, Homo sapien
tagttgacacgtattctgatgcctc

SEQ ID NO: 1471156 - DNA, 25 bp, Homo sapien
gtatagttgacacgtattctgatgc

SEQ ID NO: 1471157 - DNA, 25 bp, Homo sapien
tgtcctgaaaccttctgaactgcat

SEQ ID NO: 1471158 - DNA, 25 bp, Homo sapien
tatggttcacctctatgcttggtgc

SEQ ID NO: 1471159 - DNA, 25 bp, Homo sapien
caagatgttcatccatatcagatac

SEQ ID NO: 1471160 - DNA, 25 bp, Homo sapien
catcctcccaatatggttacagcat

SEQ ID NO: 1471161 - DNA, 25 bp, Homo sapien
gagagtcagattctccagacaagac

SEQ ID NO: 1471162 - DNA, 25 bp, Homo sapien
tgcctgagccctttactgagaagcc

SEQ ID NO: 1471163 - DNA, 25 bp, Homo sapien
tgatgtgaagctccaaatccttggg

SEQ ID NO: 1471164 - DNA, 25 bp, Homo sapien
ggactgtaccctatagaggctttga

SEQ ID NO: 1471165 - DNA, 25 bp, Homo sapien
catgagctactacacttaactggga

SEQ ID NO: 1471166 - DNA, 25 bp, Homo sapien
gggtaacacattacgaacgcatgca

SEQ ID NO: 1471167 - DNA, 25 bp, Homo sapien
cagggccagatcacaggtagctagc

SEQ ID NO: 1471168 - DNA, 25 bp, Homo sapien
gttatgcttttagctcagggccaga

SEQ ID NO: 1471169 - DNA, 25 bp, Homo sapien
aatggcactggtgaggaagagttaa

SEQ ID NO: 1471170 - DNA, 25 bp, Homo sapien
gcctacagtgacgtttaagcaatct

SEQ ID NO: 1471171 - DNA, 25 bp, Homo sapien
gatattcaccatggaaactctaagg

SEQ ID NO: 1471172 - DNA, 25 bp, Homo sapien
cagtataattagatcaggagtggga

SEQ ID NO: 1471173 - DNA, 25 bp, Homo sapien
taaaacctatcacaaccagcaggag

SEQ ID NO: 1471174 - DNA, 25 bp, Homo sapien
taacagtcaacatagcatagctgca

SEQ ID NO: 1471175 - DNA, 25 bp, Homo sapien
taagtccctaatctatcgtgtgtcc

SEQ ID NO: 1471176 - DNA, 25 bp, Homo sapien
tcactaggttcttgagtaagtccct

SEQ ID NO: 1471177 - DNA, 25 bp, Homo sapien
aacaagtacccaaccaatattgctg

SEQ ID NO: 1471178 - DNA, 25 bp, Homo sapien
catctggcaactacctctaagtgta

SEQ ID NO: 1471179 - DNA, 25 bp, Homo sapien
aatgccagtaaccagtatcatctgg

SEQ ID NO: 1471180 - DNA, 25 bp, Homo sapien
catgtgccagcattgtactagataa

SEQ ID NO: 1471181 - DNA, 25 bp, Homo sapien
ttccttgtactatgtagagatgaaa

SEQ ID NO: 1471182 - DNA, 25 bp, Homo sapien
ctttccttgtactatgtagagatga

SEQ ID NO: 1471183 - DNA, 25 bp, Homo sapien
ccttgtactatgtagagatgaaata

SEQ ID NO: 1471184 - DNA, 25 bp, Homo sapien
tttggaaagtccatgtttagcagtt

SEQ ID NO: 1471185 - DNA, 25 bp, Homo sapien
ccattctaggtattcgagaatgttc

SEQ ID NO: 1471186 - DNA, 25 bp, Homo sapien
gcattcatcataaaggcagatgagt

SEQ ID NO: 1471187 - DNA, 25 bp, Homo sapien
attcatcataaaggcagatgagtat

SEQ ID NO: 1471188 - DNA, 25 bp, Homo sapien
cccattctaggtattcgagaatgtt

SEQ ID NO: 1471189 - DNA, 25 bp, Homo sapien
tccaactgcctcaaacgcacttctc

SEQ ID NO: 1471190 - DNA, 25 bp, Homo sapien
gcctcaaacgcacttctccagacat

SEQ ID NO: 1471191 - DNA, 25 bp, Homo sapien
aactgcctcaaacgcacttctccag

SEQ ID NO: 1471192 - DNA, 25 bp, Homo sapien
ctgcctcaaacgcacttctccagac

SEQ ID NO: 1471193 - DNA, 25 bp, Homo sapien
tcagcggcaatttctccagcgggaa

SEQ ID NO: 1471194 - DNA, 25 bp, Homo sapien
taatcctgaaacgaatccggttgca

SEQ ID NO: 1471195 - DNA, 25 bp, Homo sapien
tgcatcagcaattcacttcccggga

SEQ ID NO: 1471196 - DNA, 25 bp, Homo sapien
cactccatgtcggtggtcgctcgtg

SEQ ID NO: 1471197 - DNA, 25 bp, Homo sapien
ccgccgcgccggaggctcccgacgc

SEQ ID NO: 1471198 - DNA, 25 bp, Homo sapien
gccgcgccggaggctcccgacgccc

SEQ ID NO: 1471199 - DNA, 25 bp, Homo sapien
gcgccggaggctcccgacgccccag

SEQ ID NO: 1471200 - DNA, 25 bp, Homo sapien
gccgccgcgccggaggctcccgacg

SEQ ID NO: 1471201 - DNA, 25 bp, Homo sapien
taagggcatctttccacagcgagga

SEQ ID NO: 1471202 - DNA, 25 bp, Homo sapien
cgcttccgcggctgaggagactaga

SEQ ID NO: 1471203 - DNA, 25 bp, Homo sapien
gggctaagggcatctttccacagcg

SEQ ID NO: 1471204 - DNA, 25 bp, Homo sapien
gctcagcgaggctcctccagtcccg

SEQ ID NO: 1471205 - DNA, 25 bp, Homo sapien
cggttcgcgcacactccagagtaat

SEQ ID NO: 1471206 - DNA, 25 bp, Homo sapien
ttaggtgtctaattacagcacttcg

SEQ ID NO: 1471207 - DNA, 25 bp, Homo sapien
cagcacttcgtgtgtcatttcccag

SEQ ID NO: 1471208 - DNA, 25 bp, Homo sapien
tccgagctaccatcgaagtcttggg

SEQ ID NO: 1471209 - DNA, 25 bp, Homo sapien
gcacgcaaaggatggaatcccccat

SEQ ID NO: 1471210 - DNA, 25 bp, Homo sapien
tgcacgcaaaggatggaatccccca

SEQ ID NO: 1471211 - DNA, 25 bp, Homo sapien
ctgcacgcaaaggatggaatccccc

SEQ ID NO: 1471212 - DNA, 25 bp, Homo sapien
tataggtggatgatgtccaactttc

SEQ ID NO: 1471213 - DNA, 25 bp, Homo sapien
aagtataggtggatgatgtccaact

SEQ ID NO: 1471214 - DNA, 25 bp, Homo sapien
agtataggtggatgatgtccaactt

SEQ ID NO: 1471215 - DNA, 25 bp, Homo sapien
taggtggatgatgtccaactttcat

SEQ ID NO: 1471216 - DNA, 25 bp, Homo sapien
attgtaaacaaaggtatcataatat

SEQ ID NO: 1471217 - DNA, 25 bp, Homo sapien
gcaatatgctacagacacagtctgc

SEQ ID NO: 1471218 - DNA, 25 bp, Homo sapien
tgcaatatgctacagacacagtctg

SEQ ID NO: 1471219 - DNA, 25 bp, Homo sapien
ttagttcctaagttgcagcagcaat

SEQ ID NO: 1471220 - DNA, 25 bp, Homo sapien
caggctgttcaaggaccattactat

SEQ ID NO: 1471221 - DNA, 25 bp, Homo sapien
aacgcttcagcattcaccggcgtct

SEQ ID NO: 1471222 - DNA, 25 bp, Homo sapien
tgacataatacaacgcttcagcatt

SEQ ID NO: 1471223 - DNA, 25 bp, Homo sapien
tcaaggaccattactatgacataat

SEQ ID NO: 1471224 - DNA, 25 bp, Homo sapien
tcagtctccaggtagctggaattac

SEQ ID NO: 1471225 - DNA, 25 bp, Homo sapien
aggtgcgcacctccatgcccagcta

SEQ ID NO: 1471226 - DNA, 25 bp, Homo sapien
tacaggtgcgcacctccatgcccag

SEQ ID NO: 1471227 - DNA, 25 bp, Homo sapien
attctcatgcctcagtctccaggta

SEQ ID NO: 1471228 - DNA, 25 bp, Homo sapien
actccaggagatgcttgtcattagg

SEQ ID NO: 1471229 - DNA, 25 bp, Homo sapien
ggaaatactgatccagtgggtctgg

SEQ ID NO: 1471230 - DNA, 25 bp, Homo sapien
cattaggtaagttccagaatcgctg

SEQ ID NO: 1471231 - DNA, 25 bp, Homo sapien
agcctaagctagaccaccaagggcc

SEQ ID NO: 1471232 - DNA, 25 bp, Homo sapien
acatgagtggctgaattagacaaaa

SEQ ID NO: 1471233 - DNA, 25 bp, Homo sapien
cacatgagtggctgaattagacaaa

SEQ ID NO: 1471234 - DNA, 25 bp, Homo sapien
cagaatgtgcacaattaaaggtaat

SEQ ID NO: 1471235 - DNA, 25 bp, Homo sapien
ttccagaatgtgcacaattaaaggt

SEQ ID NO: 1471236 - DNA, 25 bp, Homo sapien
catcttccttgggagaagtaatctt

SEQ ID NO: 1471237 - DNA, 25 bp, Homo sapien
aatcttttccttcgatggctttgaa

SEQ ID NO: 1471238 - DNA, 25 bp, Homo sapien
tccatgagctctgtttggaagctgc

SEQ ID NO: 1471239 - DNA, 25 bp, Homo sapien
gctgtgctggcgtacatttttatca

SEQ ID NO: 1471240 - DNA, 25 bp, Homo sapien
gtgatcaccattatacaggatccat

SEQ ID NO: 1471241 - DNA, 25 bp, Homo sapien
tgatcaccattatacaggatccatg

SEQ ID NO: 1471242 - DNA, 25 bp, Homo sapien
gatcaccattatacaggatccatgc

SEQ ID NO: 1471243 - DNA, 25 bp, Homo sapien
ttgaagaagtttcaggcccatagag

SEQ ID NO: 1471244 - DNA, 25 bp, Homo sapien
cccccacagagtggtcccgtatggg

SEQ ID NO: 1471245 - DNA, 25 bp, Homo sapien
agagcccccacagagtggtcccgta

SEQ ID NO: 1471246 - DNA, 25 bp, Homo sapien
acagtgcatcgaggcttgctgcaga

SEQ ID NO: 1471247 - DNA, 25 bp, Homo sapien
ctggtccacagtgcatcgaggcttg

SEQ ID NO: 1471248 - DNA, 25 bp, Homo sapien
acaggtgacaaccagacactcaatc

SEQ ID NO: 1471249 - DNA, 25 bp, Homo sapien
gacaggtgacaaccagacactcaat

SEQ ID NO: 1471250 - DNA, 25 bp, Homo sapien
gagagtctgtttgccatagccagag

SEQ ID NO: 1471251 - DNA, 25 bp, Homo sapien
acaggctttatgaggaccaagggca

SEQ ID NO: 1471252 - DNA, 25 bp, Homo sapien
cccaattgatgcaatgagagtctgt

SEQ ID NO: 1471253 - DNA, 25 bp, Homo sapien
caaagctgtgttgtctatcaaccag

SEQ ID NO: 1471254 - DNA, 25 bp, Homo sapien
tcaggttgagggagatatacgtgtc

SEQ ID NO: 1471255 - DNA, 25 bp, Homo sapien
cgtcagtgtactgaagttcctgaaa

SEQ ID NO: 1471256 - DNA, 25 bp, Homo sapien
gatatacgtgtcgtcagtgtactga

SEQ ID NO: 1471257 - DNA, 25 bp, Homo sapien
ttgagggagatatacgtgtcgtcag

SEQ ID NO: 1471258 - DNA, 25 bp, Homo sapien
tcccagccccgccaggtccagcagg

SEQ ID NO: 1471259 - DNA, 25 bp, Homo sapien
cacagtcccagccccgccaggtcca

SEQ ID NO: 1471260 - DNA, 25 bp, Homo sapien
acagtcccagccccgccaggtccag

SEQ ID NO: 1471261 - DNA, 25 bp, Homo sapien
agtcccagccccgccaggtccagca

SEQ ID NO: 1471262 - DNA, 25 bp, Homo sapien
ctcttctgcagaggatatgtgttgg

SEQ ID NO: 1471263 - DNA, 25 bp, Homo sapien
gaggatatgtgttggctgtgtccat

SEQ ID NO: 1471264 - DNA, 25 bp, Homo sapien
tctgcagaggatatgtgttggctgt

SEQ ID NO: 1471265 - DNA, 25 bp, Homo sapien
cagaggatatgtgttggctgtgtcc

SEQ ID NO: 1471266 - DNA, 25 bp, Homo sapien
tggtactgctgatactcagacagca

SEQ ID NO: 1471267 - DNA, 25 bp, Homo sapien
ctgctgatactcagacagcaggttg

SEQ ID NO: 1471268 - DNA, 25 bp, Homo sapien
gcaggttgttcatgttgctcttggc

SEQ ID NO: 1471269 - DNA, 25 bp, Homo sapien
ctgatactcagacagcaggttgttc

SEQ ID NO: 1471270 - DNA, 25 bp, Homo sapien
tcatgggcatgcaacctctgaaaac

SEQ ID NO: 1471271 - DNA, 25 bp, Homo sapien
gcagccactgtcaggtagtggccat

SEQ ID NO: 1471272 - DNA, 25 bp, Homo sapien
gcaacctctgaaaacggcagccact

SEQ ID NO: 1471273 - DNA, 25 bp, Homo sapien
cactgtcaggtagtggccatgacgg

SEQ ID NO: 1471274 - DNA, 25 bp, Homo sapien
aactcagccatggtcagggccgagt

SEQ ID NO: 1471275 - DNA, 25 bp, Homo sapien
ctgctgggtgaactcagccatggtc

SEQ ID NO: 1471276 - DNA, 25 bp, Homo sapien
cagccatggtcagggccgagtacta

SEQ ID NO: 1471277 - DNA, 25 bp, Homo sapien
ctgggtgaactcagccatggtcagg

SEQ ID NO: 1471278 - DNA, 25 bp, Homo sapien
ctggacagtggagcaaagcgaagca

SEQ ID NO: 1471279 - DNA, 25 bp, Homo sapien
ccagcctttgcagatcagtattcag

SEQ ID NO: 1471280 - DNA, 25 bp, Homo sapien
cttgtggtagcagaaaccaggtgat

SEQ ID NO: 1471281 - DNA, 25 bp, Homo sapien
tgtagccaggcaactaggatcacgt

SEQ ID NO: 1471282 - DNA, 25 bp, Homo sapien
tggaacagatgtcacacagaactac

SEQ ID NO: 1471283 - DNA, 25 bp, Homo sapien
ctggaacagatgtcacacagaacta

SEQ ID NO: 1471284 - DNA, 25 bp, Homo sapien
ctgcattttccatgagctggtggac

SEQ ID NO: 1471285 - DNA, 25 bp, Homo sapien
agagcttcactatcaatgcaaaagg

SEQ ID NO: 1471286 - DNA, 25 bp, Homo sapien
cttcactatcaatgcaaaaggtctc

SEQ ID NO: 1471287 - DNA, 25 bp, Homo sapien
gagcttcactatcaatgcaaaaggt

SEQ ID NO: 1471288 - DNA, 25 bp, Homo sapien
gacaccttgggcaaaggcagaacac

SEQ ID NO: 1471289 - DNA, 25 bp, Homo sapien
tgacaccttgggcaaaggcagaaca

SEQ ID NO: 1471290 - DNA, 25 bp, Homo sapien
caccttgggcaaaggcagaacactg

SEQ ID NO: 1471291 - DNA, 25 bp, Homo sapien
accttgggcaaaggcagaacactga

SEQ ID NO: 1471292 - DNA, 25 bp, Homo sapien
aagagtatccatcagagacccggta

SEQ ID NO: 1471293 - DNA, 25 bp, Homo sapien
agagtatccatcagagacccggtac

SEQ ID NO: 1471294 - DNA, 25 bp, Homo sapien
gaagagtatccatcagagacccggt

SEQ ID NO: 1471295 - DNA, 25 bp, Homo sapien
agaagagtatccatcagagacccgg

SEQ ID NO: 1471296 - DNA, 25 bp, Homo sapien
aacatccatcagcgtctccttcagc

SEQ ID NO: 1471297 - DNA, 25 bp, Homo sapien
cttcagctctgcaccttctgtgtag

SEQ ID NO: 1471298 - DNA, 25 bp, Homo sapien
tcagctctgcaccttctgtgtagtg

SEQ ID NO: 1471299 - DNA, 25 bp, Homo sapien
tccttcagctctgcaccttctgtgt

SEQ ID NO: 1471300 - DNA, 25 bp, Homo sapien
cccgaatggcgctgagcacacagag

SEQ ID NO: 1471301 - DNA, 25 bp, Homo sapien
acacagagccgatggtgcccggctc

SEQ ID NO: 1471302 - DNA, 25 bp, Homo sapien
gcacacagagccgatggtgcccggc

SEQ ID NO: 1471303 - DNA, 25 bp, Homo sapien
gcctgaagatcctcccgaatggcgc

SEQ ID NO: 1471304 - DNA, 25 bp, Homo sapien
gttgtagtacatgttgatgcgctcc

SEQ ID NO: 1471305 - DNA, 25 bp, Homo sapien
cctcgttgtagtacatgttgatgcg

SEQ ID NO: 1471306 - DNA, 25 bp, Homo sapien
gcaggtccctgtccccgtggcaggt

SEQ ID NO: 1471307 - DNA, 25 bp, Homo sapien
tgcaggtccctgtccccgtggcagg

SEQ ID NO: 1471308 - DNA, 25 bp, Homo sapien
gacggggggccgcaatacagcccca

SEQ ID NO: 1471309 - DNA, 25 bp, Homo sapien
caggcgcggagacggggggccgcaa

SEQ ID NO: 1471310 - DNA, 25 bp, Homo sapien
ccaggcgcggagacggggggccgca

SEQ ID NO: 1471311 - DNA, 25 bp, Homo sapien
ggccgcaatacagccccagccgctg

SEQ ID NO: 1471312 - DNA, 25 bp, Homo sapien
cccggtctgccatagcacgatctcc

SEQ ID NO: 1471313 - DNA, 25 bp, Homo sapien
cactgcccggtctgccatagcacga

SEQ ID NO: 1471314 - DNA, 25 bp, Homo sapien
ccggtctgccatagcacgatctccc

SEQ ID NO: 1471315 - DNA, 25 bp, Homo sapien
gcccggtctgccatagcacgatctc

SEQ ID NO: 1471316 - DNA, 25 bp, Homo sapien
cagtgttctgcctttgcccaaggtg

SEQ ID NO: 1471317 - DNA, 25 bp, Homo sapien
agtgttctgcctttgcccaaggtgt

SEQ ID NO: 1471318 - DNA, 25 bp, Homo sapien
gcttggatatgggaacaacatggag

SEQ ID NO: 1471319 - DNA, 25 bp, Homo sapien
ctggagtctttgagtagttgcaccc

SEQ ID NO: 1471320 - DNA, 25 bp, Homo sapien
cacactggagtctttgagtagttgc

SEQ ID NO: 1471321 - DNA, 25 bp, Homo sapien
ggaacaacatggagcaggggccctt

SEQ ID NO: 1471322 - DNA, 25 bp, Homo sapien
cataaaagatgcctatgtctcaccc

SEQ ID NO: 1471323 - DNA, 25 bp, Homo sapien
ccccagggcctagcaatatatcatg

SEQ ID NO: 1471324 - DNA, 25 bp, Homo sapien
gtttggcctaatgcaattacaaggg

SEQ ID NO: 1471325 - DNA, 25 bp, Homo sapien
tatatcatggtatgtgacaaagcag

SEQ ID NO: 1471326 - DNA, 25 bp, Homo sapien
tgcaatacgaggtccttgggctcca

SEQ ID NO: 1471327 - DNA, 25 bp, Homo sapien
tctgtagcaggaagttagcactggt

SEQ ID NO: 1471328 - DNA, 25 bp, Homo sapien
tcttcatgaatagcacctgcacatg

SEQ ID NO: 1471329 - DNA, 25 bp, Homo sapien
ttttctagcagacattgagtactca

SEQ ID NO: 1471330 - DNA, 25 bp, Homo sapien
tttcaagtccctctcactgacttgg

SEQ ID NO: 1471331 - DNA, 25 bp, Homo sapien
tgacttggcacttagagaacagcca

SEQ ID NO: 1471332 - DNA, 25 bp, Homo sapien
caccctgctgggcattctatcaagg

SEQ ID NO: 1471333 - DNA, 25 bp, Homo sapien
tatcaaggagaccatcctcatggaa

SEQ ID NO: 1471334 - DNA, 25 bp, Homo sapien
aagacatgatggctaggactggaga

SEQ ID NO: 1471335 - DNA, 25 bp, Homo sapien
tttggtggtccccaaaagacatgat

SEQ ID NO: 1471336 - DNA, 25 bp, Homo sapien
ggctgccatgaccagcccattctct

SEQ ID NO: 1471337 - DNA, 25 bp, Homo sapien
gctgccatgaccagcccattctctg

SEQ ID NO: 1471338 - DNA, 25 bp, Homo sapien
tgcctgcaggaacaactggtccttg

SEQ ID NO: 1471339 - DNA, 25 bp, Homo sapien
ggcctgcctgcaggaacaactggtc

SEQ ID NO: 1471340 - DNA, 25 bp, Homo sapien
cctgcaggaacaactggtccttggc

SEQ ID NO: 1471341 - DNA, 25 bp, Homo sapien
ctgaggtcccgggcctgaggtgggc

SEQ ID NO: 1471342 - DNA, 25 bp, Homo sapien
tggcagaggtcccatggagctcact

SEQ ID NO: 1471343 - DNA, 25 bp, Homo sapien
gggccccaactactgcaggcgctga

SEQ ID NO: 1471344 - DNA, 25 bp, Homo sapien
tggactgcatgggccccaactactg

SEQ ID NO: 1471345 - DNA, 25 bp, Homo sapien
agctcacccagtgcgtgctgtgccc

SEQ ID NO: 1471346 - DNA, 25 bp, Homo sapien
acagagggtgcctgctggatctgca

SEQ ID NO: 1471347 - DNA, 25 bp, Homo sapien
gtgacagagggtgcctgctggatct

SEQ ID NO: 1471348 - DNA, 25 bp, Homo sapien
agggtgcctgctggatctgcaccag

SEQ ID NO: 1471349 - DNA, 25 bp, Homo sapien
gggtgcctgctggatctgcaccagt

SEQ ID NO: 1471350 - DNA, 25 bp, Homo sapien
ggtggctatgttcactgagtggcta

SEQ ID NO: 1471351 - DNA, 25 bp, Homo sapien
cttggtggctatgttcactgagtgg

SEQ ID NO: 1471352 - DNA, 25 bp, Homo sapien
gtggctatgttcactgagtggctac

SEQ ID NO: 1471353 - DNA, 25 bp, Homo sapien
tggtggctatgttcactgagtggct

SEQ ID NO: 1471354 - DNA, 25 bp, Homo sapien
gtcagggttcccttagggtgcagga

SEQ ID NO: 1471355 - DNA, 25 bp, Homo sapien
acagtcagggttcccttagggtgca

SEQ ID NO: 1471356 - DNA, 25 bp, Homo sapien
cagtcagggttcccttagggtgcag

SEQ ID NO: 1471357 - DNA, 25 bp, Homo sapien
cagggttcccttagggtgcaggagg

SEQ ID NO: 1471358 - DNA, 25 bp, Homo sapien
tcgtgggggtccacgattgtagcac

SEQ ID NO: 1471359 - DNA, 25 bp, Homo sapien
gggtccacgattgtagcaccaccag

SEQ ID NO: 1471360 - DNA, 25 bp, Homo sapien
tccacgattgtagcaccaccaggta

SEQ ID NO: 1471361 - DNA, 25 bp, Homo sapien
accaggtagcggcatcccacctctt

SEQ ID NO: 1471362 - DNA, 25 bp, Homo sapien
cctgagcgggcccgatgtagtggaa

SEQ ID NO: 1471363 - DNA, 25 bp, Homo sapien
ccggtcctgagcgggcccgatgtag

SEQ ID NO: 1471364 - DNA, 25 bp, Homo sapien
tcggcggaagggaggccacctcgag

SEQ ID NO: 1471365 - DNA, 25 bp, Homo sapien
gggaaaggcctggagcttcggcgga

SEQ ID NO: 1471366 - DNA, 25 bp, Homo sapien
catctgaaatgttaggcagaaaagg

SEQ ID NO: 1471367 - DNA, 25 bp, Homo sapien
gaattatttgttggctcaggctgag

SEQ ID NO: 1471368 - DNA, 25 bp, Homo sapien
tactgctagatgaccctactgctca

SEQ ID NO: 1471369 - DNA, 25 bp, Homo sapien
ggtgccaaaattagatcctagatca

SEQ ID NO: 1471370 - DNA, 25 bp, Homo sapien
tgttttatatcctctgtgaccaagg

SEQ ID NO: 1471371 - DNA, 25 bp, Homo sapien
tattgctgcttttgttcaaactatg

SEQ ID NO: 1471372 - DNA, 25 bp, Homo sapien
caccgaataatagtttgtagcttta

SEQ ID NO: 1471373 - DNA, 25 bp, Homo sapien
tatacttaagcaaatacaccgaata

SEQ ID NO: 1471374 - DNA, 25 bp, Homo sapien
ctacaataaatctatgggagaagca

SEQ ID NO: 1471375 - DNA, 25 bp, Homo sapien
gtactgttctgctgtcagattggga

SEQ ID NO: 1471376 - DNA, 25 bp, Homo sapien
atggtccaaaactgcggatgcttcc

SEQ ID NO: 1471377 - DNA, 25 bp, Homo sapien
aaactgcggatgcttccttgataca

SEQ ID NO: 1471378 - DNA, 25 bp, Homo sapien
tcagcagtgctgtactgttctgctg

SEQ ID NO: 1471379 - DNA, 25 bp, Homo sapien
cacagagaggcaatgattgctgcat

SEQ ID NO: 1471380 - DNA, 25 bp, Homo sapien
cacatggcaaggccttctggagtct

SEQ ID NO: 1471381 - DNA, 25 bp, Homo sapien
cccacatggcaaggccttctggagt

SEQ ID NO: 1471382 - DNA, 25 bp, Homo sapien
ccacatggcaaggccttctggagtc

SEQ ID NO: 1471383 - DNA, 25 bp, Homo sapien
tttttttgttttgatgagctctcac

SEQ ID NO: 1471384 - DNA, 25 bp, Homo sapien
tctttttttgttttgatgagctctc

SEQ ID NO: 1471385 - DNA, 25 bp, Homo sapien
ctttttttgttttgatgagctctca

SEQ ID NO: 1471386 - DNA, 25 bp, Homo sapien
tttctttttttgttttgatgagctc

SEQ ID NO: 1471387 - DNA, 25 bp, Homo sapien
ttatataggccaggatgtagaacat

SEQ ID NO: 1471388 - DNA, 25 bp, Homo sapien
tgcctgtctgtatgtccaggatggt

SEQ ID NO: 1471389 - DNA, 25 bp, Homo sapien
tgtttgaacaaatttacagtcctac

SEQ ID NO: 1471390 - DNA, 25 bp, Homo sapien
gaatatgagacgtttgtcagataca

SEQ ID NO: 1471391 - DNA, 25 bp, Homo sapien
ccaggatggtactaggttgtatacc

SEQ ID NO: 1471392 - DNA, 25 bp, Homo sapien
gcctttagaatacctgccagggtca

SEQ ID NO: 1471393 - DNA, 25 bp, Homo sapien
tcaccagtcttgttgtgcccatgaa

SEQ ID NO: 1471394 - DNA, 25 bp, Homo sapien
gtgtagttcaccagtcttgttgtgc

SEQ ID NO: 1471395 - DNA, 25 bp, Homo sapien
ttgttgtgcccatgaatggacttgg

SEQ ID NO: 1471396 - DNA, 25 bp, Homo sapien
cagcataaagagatggcattaactc

SEQ ID NO: 1471397 - DNA, 25 bp, Homo sapien
tgcagcccatgtaatttcatacagt

SEQ ID NO: 1471398 - DNA, 25 bp, Homo sapien
tacccaggctgtacaactgcctctg

SEQ ID NO: 1471399 - DNA, 25 bp, Homo sapien
tatgcgtcaatcatagccctttccc

SEQ ID NO: 1471400 - DNA, 25 bp, Homo sapien
taatgtcgtccatatgatcagcatc

SEQ ID NO: 1471401 - DNA, 25 bp, Homo sapien
ctccaggtgtcccaaacttaaagtg

SEQ ID NO: 1471402 - DNA, 25 bp, Homo sapien
gatgggactgttagcaccacctgct

SEQ ID NO: 1471403 - DNA, 25 bp, Homo sapien
gatttctgtgttcacaccatggcca

SEQ ID NO: 1471404 - DNA, 25 bp, Homo sapien
gtttggaaagaatacacagagcaag

SEQ ID NO: 1471405 - DNA, 25 bp, Homo sapien
gaattttcctgtaagctacctgaag

SEQ ID NO: 1471406 - DNA, 25 bp, Homo sapien
tgtctccttaaagcatgtggttcag

SEQ ID NO: 1471407 - DNA, 25 bp, Homo sapien
cagaattgagaacgtgcagagtgag

SEQ ID NO: 1471408 - DNA, 25 bp, Homo sapien
caagcccagtgctagatatgctcgg

SEQ ID NO: 1471409 - DNA, 25 bp, Homo sapien
tgtgaacagggatttgcgcctaacc

SEQ ID NO: 1471410 - DNA, 25 bp, Homo sapien
catttaggactcatgaaagccagac

SEQ ID NO: 1471411 - DNA, 25 bp, Homo sapien
ggaaaagccctaggacagatcccag

SEQ ID NO: 1471412 - DNA, 25 bp, Homo sapien
gatggagtagttggacccatcaaac

SEQ ID NO: 1471413 - DNA, 25 bp, Homo sapien
gagatggagtagttggacccatcaa

SEQ ID NO: 1471414 - DNA, 25 bp, Homo sapien
atggagtagttggacccatcaaaca

SEQ ID NO: 1471415 - DNA, 25 bp, Homo sapien
tggagtagttggacccatcaaacag

SEQ ID NO: 1471416 - DNA, 25 bp, Homo sapien
ctttttgctacactggagggctcaa

SEQ ID NO: 1471417 - DNA, 25 bp, Homo sapien
ctgctgttcatatctcctgtcttag

SEQ ID NO: 1471418 - DNA, 25 bp, Homo sapien
tagatgacgtttctgctagttgcat

SEQ ID NO: 1471419 - DNA, 25 bp, Homo sapien
tgctacactggagggctcaagactg

SEQ ID NO: 1471420 - DNA, 25 bp, Homo sapien
taacagtgccatcatctaattccat

SEQ ID NO: 1471421 - DNA, 25 bp, Homo sapien
ggttctaacagtgccatcatctaat

SEQ ID NO: 1471422 - DNA, 25 bp, Homo sapien
ctaacagtgccatcatctaattcca

SEQ ID NO: 1471423 - DNA, 25 bp, Homo sapien
cttggttctaacagtgccatcatct

SEQ ID NO: 1471424 - DNA, 25 bp, Homo sapien
aaaagatcgaccctggcctaactgg

SEQ ID NO: 1471425 - DNA, 25 bp, Homo sapien
attaaactcactctcctatggaaaa

SEQ ID NO: 1471426 - DNA, 25 bp, Homo sapien
tcaaggaccaaaaaggcttaaatga

SEQ ID NO: 1471427 - DNA, 25 bp, Homo sapien
agacaggagacttgccgatgctccc

SEQ ID NO: 1471428 - DNA, 25 bp, Homo sapien
gtccagtgatgactgaccttaggca

SEQ ID NO: 1471429 - DNA, 25 bp, Homo sapien
cctatgtgagatctctgatgttggc

SEQ ID NO: 1471430 - DNA, 25 bp, Homo sapien
tgatgcgacctaaggcttgacttcc

SEQ ID NO: 1471431 - DNA, 25 bp, Homo sapien
tctgatggctagtgaggattccttt

SEQ ID NO: 1471432 - DNA, 25 bp, Homo sapien
gtgaatactctgatgcgacctaagg

SEQ ID NO: 1471433 - DNA, 25 bp, Homo sapien
cctgaggtatgacttgtgatgaaac

SEQ ID NO: 1471434 - DNA, 25 bp, Homo sapien
gatgcaccctgaggtatgacttgtg

SEQ ID NO: 1471435 - DNA, 25 bp, Homo sapien
gaggtatgacttgtgatgaaacttt

SEQ ID NO: 1471436 - DNA, 25 bp, Homo sapien
caccctgaggtatgacttgtgatga

SEQ ID NO: 1471437 - DNA, 25 bp, Homo sapien
agatttgccttctcatagaaagttt

SEQ ID NO: 1471438 - DNA, 25 bp, Homo sapien
ttctttacattcatacggttgttca

SEQ ID NO: 1471439 - DNA, 25 bp, Homo sapien
attgagatttgccttctcatagaaa

SEQ ID NO: 1471440 - DNA, 25 bp, Homo sapien
tgagatttgccttctcatagaaagt

SEQ ID NO: 1471441 - DNA, 25 bp, Homo sapien
gaaggtcaacccacatccattacat

SEQ ID NO: 1471442 - DNA, 25 bp, Homo sapien
gacttatggtagaaggtcaacccac

SEQ ID NO: 1471443 - DNA, 25 bp, Homo sapien
ggtagaaggtcaacccacatccatt

SEQ ID NO: 1471444 - DNA, 25 bp, Homo sapien
tatggtagaaggtcaacccacatcc

SEQ ID NO: 1471445 - DNA, 25 bp, Homo sapien
aggattttccctctgtgtggattct

SEQ ID NO: 1471446 - DNA, 25 bp, Homo sapien
agcaaaataggattttccctctgtg

SEQ ID NO: 1471447 - DNA, 25 bp, Homo sapien
ataggattttccctctgtgtggatt

SEQ ID NO: 1471448 - DNA, 25 bp, Homo sapien
aaaataggattttccctctgtgtgg

SEQ ID NO: 1471449 - DNA, 25 bp, Homo sapien
ttgatttctgacagaaggatttctc

SEQ ID NO: 1471450 - DNA, 25 bp, Homo sapien
agatttgatttctgacagaaggatt

SEQ ID NO: 1471451 - DNA, 25 bp, Homo sapien
tttgatttctgacagaaggatttct

SEQ ID NO: 1471452 - DNA, 25 bp, Homo sapien
cttagatttgatttctgacagaagg

SEQ ID NO: 1471453 - DNA, 25 bp, Homo sapien
tgttttgtaacacatgattggctaa

SEQ ID NO: 1471454 - DNA, 25 bp, Homo sapien
cacatacatgacgttcaaaagtttt

SEQ ID NO: 1471455 - DNA, 25 bp, Homo sapien
actttatgcttcttactgaatattt

SEQ ID NO: 1471456 - DNA, 25 bp, Homo sapien
ttttcccacatacatgacgttcaaa

SEQ ID NO: 1471457 - DNA, 25 bp, Homo sapien
gaaggcattcctccgtccactatat

SEQ ID NO: 1471458 - DNA, 25 bp, Homo sapien
gctcttgagcaatagtagctgactc

SEQ ID NO: 1471459 - DNA, 25 bp, Homo sapien
tagctgactcattacaggctttccc

SEQ ID NO: 1471460 - DNA, 25 bp, Homo sapien
gtctttcccatagaagcactcttat

SEQ ID NO: 1471461 - DNA, 25 bp, Homo sapien
tgtagtccaatttgaatcttgtgat

SEQ ID NO: 1471462 - DNA, 25 bp, Homo sapien
ctgtagtccaatttgaatcttgtga

SEQ ID NO: 1471463 - DNA, 25 bp, Homo sapien
gtagtccaatttgaatcttgtgatc

SEQ ID NO: 1471464 - DNA, 25 bp, Homo sapien
cagaaagaagtatgttctgaaatac

SEQ ID NO: 1471465 - DNA, 25 bp, Homo sapien
tgatggtttacttttggtaattaca

SEQ ID NO: 1471466 - DNA, 25 bp, Homo sapien
taattacaacttgccacaaatgtct

SEQ ID NO: 1471467 - DNA, 25 bp, Homo sapien
caattatgtcatcaactatctggac

SEQ ID NO: 1471468 - DNA, 25 bp, Homo sapien
gattccactcccttctcaattgatg

SEQ ID NO: 1471469 - DNA, 25 bp, Homo sapien
gctccaggttgaagatcacctcagg

SEQ ID NO: 1471470 - DNA, 25 bp, Homo sapien
tgctccaggttgaagatcacctcag

SEQ ID NO: 1471471 - DNA, 25 bp, Homo sapien
ccaggttgaagatcacctcaggttt

SEQ ID NO: 1471472 - DNA, 25 bp, Homo sapien
tccaggttgaagatcacctcaggtt

SEQ ID NO: 1471473 - DNA, 25 bp, Homo sapien
gagtcctttgagcatcatccaagtc

SEQ ID NO: 1471474 - DNA, 25 bp, Homo sapien
caaggacaccaagctgctgtaggtc

SEQ ID NO: 1471475 - DNA, 25 bp, Homo sapien
catcatgtccctgtacagagtcctt

SEQ ID NO: 1471476 - DNA, 25 bp, Homo sapien
tgtccctgtacagagtcctttgagc

SEQ ID NO: 1471477 - DNA, 25 bp, Homo sapien
tgaaggtcctttgcacacttcccac

SEQ ID NO: 1471478 - DNA, 25 bp, Homo sapien
tcctctgaaggtcctttgcacactt

SEQ ID NO: 1471479 - DNA, 25 bp, Homo sapien
tttcctcctctgaaggtcctttgca

SEQ ID NO: 1471480 - DNA, 25 bp, Homo sapien
tctgaaggtcctttgcacacttccc

SEQ ID NO: 1471481 - DNA, 25 bp, Homo sapien
ctgattctccttcgctgtggcggga

SEQ ID NO: 1471482 - DNA, 25 bp, Homo sapien
gatggccggatttgaaggtaatacc

SEQ ID NO: 1471483 - DNA, 25 bp, Homo sapien
tgggagcaggcacgcatctctgagt

SEQ ID NO: 1471484 - DNA, 25 bp, Homo sapien
cccgattcccgacaggagaggcgag

SEQ ID NO: 1471485 - DNA, 25 bp, Homo sapien
caggcatggtggggtgcacagccat

SEQ ID NO: 1471486 - DNA, 25 bp, Homo sapien
ccaggcatggtggggtgcacagcca

SEQ ID NO: 1471487 - DNA, 25 bp, Homo sapien
tctcgggagcgtctgtgcactgcct

SEQ ID NO: 1471488 - DNA, 25 bp, Homo sapien
tatggagtcatcgatgccggctgca

SEQ ID NO: 1471489 - DNA, 25 bp, Homo sapien
tgcctcctgactgcggaagcatgag

SEQ ID NO: 1471490 - DNA, 25 bp, Homo sapien
ccaatctggagtgaggtatgcaaaa

SEQ ID NO: 1471491 - DNA, 25 bp, Homo sapien
agttcaggagcgcaggaccaagcag

SEQ ID NO: 1471492 - DNA, 25 bp, Homo sapien
cctggatggtaatgggctgcgacct

SEQ ID NO: 1471493 - DNA, 25 bp, Homo sapien
gtgctgccagttcgcactgggccct

SEQ ID NO: 1471494 - DNA, 25 bp, Homo sapien
cttgtgctgccagttcgcactgggc

SEQ ID NO: 1471495 - DNA, 25 bp, Homo sapien
tggagcgcattcattcgacagacac

SEQ ID NO: 1471496 - DNA, 25 bp, Homo sapien
ttccatcctagacaagtgccagcgg

SEQ ID NO: 1471497 - DNA, 25 bp, Homo sapien
tccatctgtaggaggccggatgtct

SEQ ID NO: 1471498 - DNA, 25 bp, Homo sapien
cacgggcaggcaatgtgcatagcca

SEQ ID NO: 1471499 - DNA, 25 bp, Homo sapien
tggactctcggtcaaggacagggct

SEQ ID NO: 1471500 - DNA, 25 bp, Homo sapien
gaggatcccacgagagtccattccc

SEQ ID NO: 1471501 - DNA, 25 bp, Homo sapien
gggcatcctctgcaagaggatccca

SEQ ID NO: 1471502 - DNA, 25 bp, Homo sapien
gtctccacaaactgtggatccacta

SEQ ID NO: 1471503 - DNA, 25 bp, Homo sapien
catacccagtgtgaagaggggctgg

SEQ ID NO: 1471504 - DNA, 25 bp, Homo sapien
cagcagatgggattccaccccatct

SEQ ID NO: 1471505 - DNA, 25 bp, Homo sapien
gcagcagatgggattccaccccatc

SEQ ID NO: 1471506 - DNA, 25 bp, Homo sapien
gcagatgggattccaccccatctgt

SEQ ID NO: 1471507 - DNA, 25 bp, Homo sapien
agcagatgggattccaccccatctg

SEQ ID NO: 1471508 - DNA, 25 bp, Homo sapien
gggtggtccaatggcctgagacgag

SEQ ID NO: 1471509 - DNA, 25 bp, Homo sapien
gcctattaagaggagccaccagaga

SEQ ID NO: 1471510 - DNA, 25 bp, Homo sapien
gtcagctcaggcgtcctggcctaag

SEQ ID NO: 1471511 - DNA, 25 bp, Homo sapien
tcagaagggccacatcccatcttgg

SEQ ID NO: 1471512 - DNA, 25 bp, Homo sapien
cagggagggcggtctttatttctgg

SEQ ID NO: 1471513 - DNA, 25 bp, Homo sapien
cacagggagggcggtctttatttct

SEQ ID NO: 1471514 - DNA, 25 bp, Homo sapien
ttatttctggaagggccccggagca

SEQ ID NO: 1471515 - DNA, 25 bp, Homo sapien
tatttctggaagggccccggagcag

SEQ ID NO: 1471516 - DNA, 25 bp, Homo sapien
cccgtccttctatcctcacgacagg

SEQ ID NO: 1471517 - DNA, 25 bp, Homo sapien
cgtccttctatcctcacgacaggtg

SEQ ID NO: 1471518 - DNA, 25 bp, Homo sapien
ccgtccttctatcctcacgacaggt

SEQ ID NO: 1471519 - DNA, 25 bp, Homo sapien
acccgtccttctatcctcacgacag

SEQ ID NO: 1471520 - DNA, 25 bp, Homo sapien
cactctctggaagtcggggtgcgca

SEQ ID NO: 1471521 - DNA, 25 bp, Homo sapien
agcagctctttgggctgtggtgaga

SEQ ID NO: 1471522 - DNA, 25 bp, Homo sapien
ggggtgcgcaaccaaggaggccagc

SEQ ID NO: 1471523 - DNA, 25 bp, Homo sapien
tgagaacgcgctggtgtccactctc

SEQ ID NO: 1471524 - DNA, 25 bp, Homo sapien
tgtgatgcgcccaacatcaaaggct

SEQ ID NO: 1471525 - DNA, 25 bp, Homo sapien
ctctgtgatgcgcccaacatcaaag

SEQ ID NO: 1471526 - DNA, 25 bp, Homo sapien
tgatgcgcccaacatcaaaggctgc

SEQ ID NO: 1471527 - DNA, 25 bp, Homo sapien
ctgtgatgcgcccaacatcaaaggc

SEQ ID NO: 1471528 - DNA, 25 bp, Homo sapien
ctgttcgaaacccaacccagcaccg

SEQ ID NO: 1471529 - DNA, 25 bp, Homo sapien
gaaacccaacccagcaccgtcctca

SEQ ID NO: 1471530 - DNA, 25 bp, Homo sapien
aaactcttcaaagttgatgcccgag

SEQ ID NO: 1471531 - DNA, 25 bp, Homo sapien
tgaggaagtggtaaaactcttcaaa

SEQ ID NO: 1471532 - DNA, 25 bp, Homo sapien
actcttcaaagttgatgcccgagca

SEQ ID NO: 1471533 - DNA, 25 bp, Homo sapien
tgaccttgaggaagtggtaaaactc

SEQ ID NO: 1471534 - DNA, 25 bp, Homo sapien
tgaccaagggagtctgagccatgca

SEQ ID NO: 1471535 - DNA, 25 bp, Homo sapien
ggagggtagcctccatgcgtagcca

SEQ ID NO: 1471536 - DNA, 25 bp, Homo sapien
tgcaaaggacccgacatgcgcccag

SEQ ID NO: 1471537 - DNA, 25 bp, Homo sapien
acgaagaagggaccattaagacaga

SEQ ID NO: 1471538 - DNA, 25 bp, Homo sapien
agtggtggtgccagtcgggcatgga

SEQ ID NO: 1471539 - DNA, 25 bp, Homo sapien
ggtggtgccagtcgggcatggagtc

SEQ ID NO: 1471540 - DNA, 25 bp, Homo sapien
gtgccagtcgggcatggagtccctc

SEQ ID NO: 1471541 - DNA, 25 bp, Homo sapien
gccagtcgggcatggagtccctcca

SEQ ID NO: 1471542 - DNA, 25 bp, Homo sapien
cctgctgcaagaagcgccacatgtt

SEQ ID NO: 1471543 - DNA, 25 bp, Homo sapien
ttgacccagttgtggttgatggaga

SEQ ID NO: 1471544 - DNA, 25 bp, Homo sapien
tcctgcacggcgcatagctcctgct

SEQ ID NO: 1471545 - DNA, 25 bp, Homo sapien
ttgaagccattgacccagttgtggt

SEQ ID NO: 1471546 - DNA, 25 bp, Homo sapien
ccacagtgaacccagagcaagtaga

SEQ ID NO: 1471547 - DNA, 25 bp, Homo sapien
cagggaagtgggtggcgggctcgga

SEQ ID NO: 1471548 - DNA, 25 bp, Homo sapien
caagtagacccagggaccggcagtg

SEQ ID NO: 1471549 - DNA, 25 bp, Homo sapien
gggctcggaccacctcaggccacag

SEQ ID NO: 1471550 - DNA, 25 bp, Homo sapien
cgcttcctgcgtgatctccaagggt

SEQ ID NO: 1471551 - DNA, 25 bp, Homo sapien
aggtcacgtcgtagggcaggttgcc

SEQ ID NO: 1471552 - DNA, 25 bp, Homo sapien
ccagctgaaggagcggaagatgtca

SEQ ID NO: 1471553 - DNA, 25 bp, Homo sapien
ccagcaagctggttccgtgggtgca

SEQ ID NO: 1471554 - DNA, 25 bp, Homo sapien
cagaggcctggtccaactgaaggag

SEQ ID NO: 1471555 - DNA, 25 bp, Homo sapien
cggcagcaagagcgcctggttcatg

SEQ ID NO: 1471556 - DNA, 25 bp, Homo sapien
gcaagagcgcctggttcatgcctgt

SEQ ID NO: 1471557 - DNA, 25 bp, Homo sapien
gcctcccagtccgttctgtcaccag

SEQ ID NO: 1471558 - DNA, 25 bp, Homo sapien
cattcagccagtcggacgagaagta

SEQ ID NO: 1471559 - DNA, 25 bp, Homo sapien
cagtgcatcccagaactcattcagc

SEQ ID NO: 1471560 - DNA, 25 bp, Homo sapien
gcaggccccgcgtagacaaagcggt

SEQ ID NO: 1471561 - DNA, 25 bp, Homo sapien
ggtagtcatccacatccagtgcatc

SEQ ID NO: 1471562 - DNA, 25 bp, Homo sapien
agggcgcaagggcaccaccgacagc

SEQ ID NO: 1471563 - DNA, 25 bp, Homo sapien
accgacagcacgtgaggcacgagga

SEQ ID NO: 1471564 - DNA, 25 bp, Homo sapien
gtgaggagggcgcaagggcaccacc

SEQ ID NO: 1471565 - DNA, 25 bp, Homo sapien
gggcaccaccgacagcacgtgaggc

SEQ ID NO: 1471566 - DNA, 25 bp, Homo sapien
tgcttattagaaagtactgatcatg

SEQ ID NO: 1471567 - DNA, 25 bp, Homo sapien
tagaaagtactgatcatgcctataa

SEQ ID NO: 1471568 - DNA, 25 bp, Homo sapien
gggcaactgagaccaatcggctcca

SEQ ID NO: 1471569 - DNA, 25 bp, Homo sapien
aatcggctccagtggagcttccaga

SEQ ID NO: 1471570 - DNA, 25 bp, Homo sapien
aacacttgcagccatgcggaagaca

SEQ ID NO: 1471571 - DNA, 25 bp, Homo sapien
taaactgattaaagtgcctcacggg

SEQ ID NO: 1471572 - DNA, 25 bp, Homo sapien
aaaatagctccgttgtgcacccagg

SEQ ID NO: 1471573 - DNA, 25 bp, Homo sapien
ttcacgcagcgctagggaaggcagc

SEQ ID NO: 1471574 - DNA, 25 bp, Homo sapien
cacagtttgcaactggtacaaccac

SEQ ID NO: 1471575 - DNA, 25 bp, Homo sapien
ctctgagagtcatgtgctctttggg

SEQ ID NO: 1471576 - DNA, 25 bp, Homo sapien
ggagtagcccgcctgtatgtactct

SEQ ID NO: 1471577 - DNA, 25 bp, Homo sapien
tgtatgtactctttccagtaggtga

SEQ ID NO: 1471578 - DNA, 25 bp, Homo sapien
aaaccgtctgcagaggaactctcca

SEQ ID NO: 1471579 - DNA, 25 bp, Homo sapien
aaatgaaaggcacggtccatgccat

SEQ ID NO: 1471580 - DNA, 25 bp, Homo sapien
ctgaaatgaaaggcacggtccatgc

SEQ ID NO: 1471581 - DNA, 25 bp, Homo sapien
gtcctcactccaaaccgtctgcaga

SEQ ID NO: 1471582 - DNA, 25 bp, Homo sapien
ggtccgtagcaggtggtcgaagtcg

SEQ ID NO: 1471583 - DNA, 25 bp, Homo sapien
cgtaggtccgtagcaggtggtcgaa

SEQ ID NO: 1471584 - DNA, 25 bp, Homo sapien
taggtccgtagcaggtggtcgaagt

SEQ ID NO: 1471585 - DNA, 25 bp, Homo sapien
cgtagcaggtggtcgaagtcgggcc

SEQ ID NO: 1471586 - DNA, 25 bp, Homo sapien
ctggaaaacacgcagggcaggttgg

SEQ ID NO: 1471587 - DNA, 25 bp, Homo sapien
caaagtcggcgtaggagaaggcgcc

SEQ ID NO: 1471588 - DNA, 25 bp, Homo sapien
gccccgcacaaagtcggcgtaggag

SEQ ID NO: 1471589 - DNA, 25 bp, Homo sapien
gggcagcaagaagccccgcacaaag

SEQ ID NO: 1471590 - DNA, 25 bp, Homo sapien
cggagcctggccgacgccggggaca

SEQ ID NO: 1471591 - DNA, 25 bp, Homo sapien
ggagcctggccgacgccggggacat

SEQ ID NO: 1471592 - DNA, 25 bp, Homo sapien
tcagcacgggtcgaaggaccctcct

SEQ ID NO: 1471593 - DNA, 25 bp, Homo sapien
cacttccgccggagcggaaacggtg

SEQ ID NO: 1471594 - DNA, 25 bp, Homo sapien
ccagaagacgcagggcgccgcgttt

SEQ ID NO: 1471595 - DNA, 25 bp, Homo sapien
gtgaggaccagcctcggaaccagaa

SEQ ID NO: 1471596 - DNA, 25 bp, Homo sapien
gctcgccgcggtcttcactgcgcag

SEQ ID NO: 1471597 - DNA, 25 bp, Homo sapien
gcgcggctcgccgcggtcttcactg

SEQ ID NO: 1471598 - DNA, 25 bp, Homo sapien
cggctcgccgcggtcttcactgcgc

SEQ ID NO: 1471599 - DNA, 25 bp, Homo sapien
tcgccgcggtcttcactgcgcaggc

SEQ ID NO: 1471600 - DNA, 25 bp, Homo sapien
tgtcacttacaagcctgccacggtg

SEQ ID NO: 1471601 - DNA, 25 bp, Homo sapien
tgaagtggcgtggtatcacgtgtcc

SEQ ID NO: 1471602 - DNA, 25 bp, Homo sapien
ttcagtacctgtggtttggtcccag

SEQ ID NO: 1471603 - DNA, 25 bp, Homo sapien
cagacgccgaggtccctggtgtgaa

SEQ ID NO: 1471604 - DNA, 25 bp, Homo sapien
gataggacaccttcattgcttgcag

SEQ ID NO: 1471605 - DNA, 25 bp, Homo sapien
aggactcatgaacgtgctgccagaa

SEQ ID NO: 1471606 - DNA, 25 bp, Homo sapien
tctagctgtgccatggaaagcccac

SEQ ID NO: 1471607 - DNA, 25 bp, Homo sapien
caccctgtggtctgcgtgtgacgac

SEQ ID NO: 1471608 - DNA, 25 bp, Homo sapien
tatggccaaaagacagcgctccttg

SEQ ID NO: 1471609 - DNA, 25 bp, Homo sapien
cactgatccaagcagggtggctttg

SEQ ID NO: 1471610 - DNA, 25 bp, Homo sapien
tcctgggactgaggtccgaggccca

SEQ ID NO: 1471611 - DNA, 25 bp, Homo sapien
aacggtctgagagtacgtcctggga

SEQ ID NO: 1471612 - DNA, 25 bp, Homo sapien
tcaaagatcacctcccctggagttg

SEQ ID NO: 1471613 - DNA, 25 bp, Homo sapien
ccagagtgagttgttggttctcaga

SEQ ID NO: 1471614 - DNA, 25 bp, Homo sapien
tggttcccagagctgttgagtccca

SEQ ID NO: 1471615 - DNA, 25 bp, Homo sapien
gattaaagcacccttgtgaaacctg

SEQ ID NO: 1471616 - DNA, 25 bp, Homo sapien
tcagccgggtgctgtcagggagggt

SEQ ID NO: 1471617 - DNA, 25 bp, Homo sapien
gagggtgagcttgtcaggatcattt

SEQ ID NO: 1471618 - DNA, 25 bp, Homo sapien
agggtgagcttgtcaggatcatttg

SEQ ID NO: 1471619 - DNA, 25 bp, Homo sapien
aggctggtccttctctgctcagccg

SEQ ID NO: 1471620 - DNA, 25 bp, Homo sapien
gcctgtttcctgacatcctcgtaaa

SEQ ID NO: 1471621 - DNA, 25 bp, Homo sapien
tgcaccagacgtaggggagctgcgt

SEQ ID NO: 1471622 - DNA, 25 bp, Homo sapien
cctcgtaaatgacggctgcaccaga

SEQ ID NO: 1471623 - DNA, 25 bp, Homo sapien
tgacatcctcgtaaatgacggctgc

SEQ ID NO: 1471624 - DNA, 25 bp, Homo sapien
agacaagcctgccagccctttctga

SEQ ID NO: 1471625 - DNA, 25 bp, Homo sapien
ctgaggcagatacccaggaactaac

SEQ ID NO: 1471626 - DNA, 25 bp, Homo sapien
cctttctgaggcagatacccaggaa

SEQ ID NO: 1471627 - DNA, 25 bp, Homo sapien
acaagcctgccagccctttctgagg

SEQ ID NO: 1471628 - DNA, 25 bp, Homo sapien
tattggcctcgcaccaaggaggagc

SEQ ID NO: 1471629 - DNA, 25 bp, Homo sapien
tctgggtcatccatccgtattggcc

SEQ ID NO: 1471630 - DNA, 25 bp, Homo sapien
ccagtcttcccgcaggctgctcctc

SEQ ID NO: 1471631 - DNA, 25 bp, Homo sapien
tcctcttgcctttctgatcacaaac

SEQ ID NO: 1471632 - DNA, 25 bp, Homo sapien
cttcacctcaaagcccgggagcgtt

SEQ ID NO: 1471633 - DNA, 25 bp, Homo sapien
ctgttaattgcaatggtggccatgt

SEQ ID NO: 1471634 - DNA, 25 bp, Homo sapien
catcagactctcctgtcacgtgtgg

SEQ ID NO: 1471635 - DNA, 25 bp, Homo sapien
gccatgtagttggagaggccctcaa

SEQ ID NO: 1471636 - DNA, 25 bp, Homo sapien
agggtgagtggggctccccaccagc

SEQ ID NO: 1471637 - DNA, 25 bp, Homo sapien
ggtgagtggggctccccaccagcca

SEQ ID NO: 1471638 - DNA, 25 bp, Homo sapien
ctgagggtgagtggggctccccacc

SEQ ID NO: 1471639 - DNA, 25 bp, Homo sapien
gtgagtggggctccccaccagccat

SEQ ID NO: 1471640 - DNA, 25 bp, Homo sapien
ccatggccataagctggcagtgtca

SEQ ID NO: 1471641 - DNA, 25 bp, Homo sapien
ggcttccggcctatgtcgctgtcaa

SEQ ID NO: 1471642 - DNA, 25 bp, Homo sapien
cagtgtcagccacgcatcagttgcg

SEQ ID NO: 1471643 - DNA, 25 bp, Homo sapien
cagagactttcctagcagggcagca

SEQ ID NO: 1471644 - DNA, 25 bp, Homo sapien
tggaatgagttctcttttaaggcct

SEQ ID NO: 1471645 - DNA, 25 bp, Homo sapien
caagtgcaattttggcaggcaggcc

SEQ ID NO: 1471646 - DNA, 25 bp, Homo sapien
taaggccttcaacgtagtgagacat

SEQ ID NO: 1471647 - DNA, 25 bp, Homo sapien
taattaacttcaagtgcaattttgg

SEQ ID NO: 1471648 - DNA, 25 bp, Homo sapien
ctaggcaagtcccatgaccacacct

SEQ ID NO: 1471649 - DNA, 25 bp, Homo sapien
tagacaaggtaaagaatcaagtgct

SEQ ID NO: 1471650 - DNA, 25 bp, Homo sapien
tagtatttgttgatcatctgtgggt

SEQ ID NO: 1471651 - DNA, 25 bp, Homo sapien
ccttagtatttgttgatcatctgtg

SEQ ID NO: 1471652 - DNA, 25 bp, Homo sapien
gtatttgttgatcatctgtgggtgt

SEQ ID NO: 1471653 - DNA, 25 bp, Homo sapien
caccactgggcgttcactgcagcct

SEQ ID NO: 1471654 - DNA, 25 bp, Homo sapien
ctcagccaccactgggcgttcactg

SEQ ID NO: 1471655 - DNA, 25 bp, Homo sapien
tcctcagccaccactgggcgttcac

SEQ ID NO: 1471656 - DNA, 25 bp, Homo sapien
agccaccactgggcgttcactgcag

SEQ ID NO: 1471657 - DNA, 25 bp, Homo sapien
accaggcccagtgacgtggaggtca

SEQ ID NO: 1471658 - DNA, 25 bp, Homo sapien
aggtcagaggttgaggcacactgac

SEQ ID NO: 1471659 - DNA, 25 bp, Homo sapien
gggccagcacgggtgtccaggcctt

SEQ ID NO: 1471660 - DNA, 25 bp, Homo sapien
ccagcacgggtgtccaggccttggc

SEQ ID NO: 1471661 - DNA, 25 bp, Homo sapien
caagccagtgtttccggttctcagg

SEQ ID NO: 1471662 - DNA, 25 bp, Homo sapien
ggctcgcagcccaagccagagaggc

SEQ ID NO: 1471663 - DNA, 25 bp, Homo sapien
caaccaagcccagtgtttccttggc

SEQ ID NO: 1471664 - DNA, 25 bp, Homo sapien
caggtctggttgactcttctgggga

SEQ ID NO: 1471665 - DNA, 25 bp, Homo sapien
gggaaggtgtgtgcacagggtccac

SEQ ID NO: 1471666 - DNA, 25 bp, Homo sapien
ctgggcaagtgaccagagccttggt

SEQ ID NO: 1471667 - DNA, 25 bp, Homo sapien
ctgggaaggtgtgtgcacagggtcc

SEQ ID NO: 1471668 - DNA, 25 bp, Homo sapien
tgaccagagccttggtgggtccccg

SEQ ID NO: 1471669 - DNA, 25 bp, Homo sapien
gacaggatggtatggggagaccgac

SEQ ID NO: 1471670 - DNA, 25 bp, Homo sapien
gatggtatggggagaccgacacact

SEQ ID NO: 1471671 - DNA, 25 bp, Homo sapien
ctgtagcccgatggacaggatggta

SEQ ID NO: 1471672 - DNA, 25 bp, Homo sapien
tggagacccctggaggccttgatgt

SEQ ID NO: 1471673 - DNA, 25 bp, Homo sapien
tgcagctggcggagggtcctgggct

SEQ ID NO: 1471674 - DNA, 25 bp, Homo sapien
cagcccagagagcaagactgcagct

SEQ ID NO: 1471675 - DNA, 25 bp, Homo sapien
gtgtccacggcccaggcatgcaagg

SEQ ID NO: 1471676 - DNA, 25 bp, Homo sapien
acggcccaggcatgcaaggcccagg

SEQ ID NO: 1471677 - DNA, 25 bp, Homo sapien
ctgtcttcaagtagtaacggtgagg

SEQ ID NO: 1471678 - DNA, 25 bp, Homo sapien
aggacaccgggcttgcagaaatggc

SEQ ID NO: 1471679 - DNA, 25 bp, Homo sapien
acggtgaggagtccttctaaaggtg

SEQ ID NO: 1471680 - DNA, 25 bp, Homo sapien
tgcgtttggaccatgaggacaccgg

SEQ ID NO: 1471681 - DNA, 25 bp, Homo sapien
gacagtagcattcctgttgccaccg

SEQ ID NO: 1471682 - DNA, 25 bp, Homo sapien
ggatggcccatcaacagcatggaga

SEQ ID NO: 1471683 - DNA, 25 bp, Homo sapien
gacacggggtcatcccctggacttg

SEQ ID NO: 1471684 - DNA, 25 bp, Homo sapien
catcatgctgtcagccaggacagta

SEQ ID NO: 1471685 - DNA, 25 bp, Homo sapien
acagcctcttccaccgttagaatga

SEQ ID NO: 1471686 - DNA, 25 bp, Homo sapien
acacaggctggccaatgacctcgaa

SEQ ID NO: 1471687 - DNA, 25 bp, Homo sapien
tccttcatcatgctcaccgtcagtc

SEQ ID NO: 1471688 - DNA, 25 bp, Homo sapien
agaagctgatctggccacacacagg

SEQ ID NO: 1471689 - DNA, 25 bp, Homo sapien
cagttgctgtatgcactgggcagtg

SEQ ID NO: 1471690 - DNA, 25 bp, Homo sapien
tgggccagccagttgctgtatgcac

SEQ ID NO: 1471691 - DNA, 25 bp, Homo sapien
tgcccagcatccgctcctcctgggc

SEQ ID NO: 1471692 - DNA, 25 bp, Homo sapien
gccagccagttgctgtatgcactgg

SEQ ID NO: 1471693 - DNA, 25 bp, Homo sapien
cctgttgtccggaaactgctcagga

SEQ ID NO: 1471694 - DNA, 25 bp, Homo sapien
tctgacccgtgctcgagcaggtgag

SEQ ID NO: 1471695 - DNA, 25 bp, Homo sapien
ccacctggtggatgtcgttggacag

SEQ ID NO: 1471696 - DNA, 25 bp, Homo sapien
tccacccacctggtggatgtcgttg

SEQ ID NO: 1471697 - DNA, 25 bp, Homo sapien
gacgcccttcatagacccaatagtg

SEQ ID NO: 1471698 - DNA, 25 bp, Homo sapien
gacaaaggacaaacccagcgtcttg

SEQ ID NO: 1471699 - DNA, 25 bp, Homo sapien
tgtactataacacagggacggcaga

SEQ ID NO: 1471700 - DNA, 25 bp, Homo sapien
tagagaaatcattgcacgcacggag

SEQ ID NO: 1471701 - DNA, 25 bp, Homo sapien
aacaactaagcagatcagaggcagg

SEQ ID NO: 1471702 - DNA, 25 bp, Homo sapien
gacatgaaccaatcaaagggctgcc

SEQ ID NO: 1471703 - DNA, 25 bp, Homo sapien
gaagtgctcaacgtcagaggtcggc

SEQ ID NO: 1471704 - DNA, 25 bp, Homo sapien
gttccatggccagatgcgagcccaa

SEQ ID NO: 1471705 - DNA, 25 bp, Homo sapien
ggccctgggagtgcagaacaggctg

SEQ ID NO: 1471706 - DNA, 25 bp, Homo sapien
tagacccctcatactgcatgcatgg

SEQ ID NO: 1471707 - DNA, 25 bp, Homo sapien
tgtacgccccgacgtgctagaaaag

SEQ ID NO: 1471708 - DNA, 25 bp, Homo sapien
cagagaggttgcatacgccagacca

SEQ ID NO: 1471709 - DNA, 25 bp, Homo sapien
cattggtgcaatgctctcgggtcag

SEQ ID NO: 1471710 - DNA, 25 bp, Homo sapien
tgcaggtgtagacctcctcacgctg

SEQ ID NO: 1471711 - DNA, 25 bp, Homo sapien
ttgcaggtgtagacctcctcacgct

SEQ ID NO: 1471712 - DNA, 25 bp, Homo sapien
actccacatagcagcaccaacgcac

SEQ ID NO: 1471713 - DNA, 25 bp, Homo sapien
aagctaggcgagtcatccaggtgca

SEQ ID NO: 1471714 - DNA, 25 bp, Homo sapien
tcgccggcagcttcattggtggtgc

SEQ ID NO: 1471715 - DNA, 25 bp, Homo sapien
ctcgcagttcttctcacggtggcac

SEQ ID NO: 1471716 - DNA, 25 bp, Homo sapien
tcatacttgtgcttcagatgcttgc

SEQ ID NO: 1471717 - DNA, 25 bp, Homo sapien
aatatcgggaaccaggtgctaccgc

SEQ ID NO: 1471718 - DNA, 25 bp, Homo sapien
gtgctaccgcacatgcagacgcgac

SEQ ID NO: 1471719 - DNA, 25 bp, Homo sapien
gaaccaggtgctaccgcacatgcag

SEQ ID NO: 1471720 - DNA, 25 bp, Homo sapien
ccggtgctgagggtcagcctgctgg

SEQ ID NO: 1471721 - DNA, 25 bp, Homo sapien
tgtacttaaggttgtctccgcagcc

SEQ ID NO: 1471722 - DNA, 25 bp, Homo sapien
agatccttgcttgaccgtctgccca

SEQ ID NO: 1471723 - DNA, 25 bp, Homo sapien
gaattccttgacgaacttgctgctg

SEQ ID NO: 1471724 - DNA, 25 bp, Homo sapien
tggaagtccacacgggctcgcagat

SEQ ID NO: 1471725 - DNA, 25 bp, Homo sapien
gcgctgcacgccttggccagtgcgt

SEQ ID NO: 1471726 - DNA, 25 bp, Homo sapien
gtcgggtgcctcatcgcaggtacag

SEQ ID NO: 1471727 - DNA, 25 bp, Homo sapien
gcaggtacagcgctccatgcggccc

SEQ ID NO: 1471728 - DNA, 25 bp, Homo sapien
tgcgtcaggccagccgaggagatgg

SEQ ID NO: 1471729 - DNA, 25 bp, Homo sapien
gggccccgtcaaaggccgagtcagc

SEQ ID NO: 1471730 - DNA, 25 bp, Homo sapien
aggccgagtcagcatgccctggcca

SEQ ID NO: 1471731 - DNA, 25 bp, Homo sapien
ctggcatgagccgagggctgtcggg

SEQ ID NO: 1471732 - DNA, 25 bp, Homo sapien
ggccaccagcaacgactgtgcgtgt

SEQ ID NO: 1471733 - DNA, 25 bp, Homo sapien
gaactggcactcgagcgcactcatg

SEQ ID NO: 1471734 - DNA, 25 bp, Homo sapien
tccagcgtgcagttccagcgctcaa

SEQ ID NO: 1471735 - DNA, 25 bp, Homo sapien
agcttcagccggtcgcaggccttgt

SEQ ID NO: 1471736 - DNA, 25 bp, Homo sapien
ttgtagtgcgcctgggcagccgcct

SEQ ID NO: 1471737 - DNA, 25 bp, Homo sapien
cagctttattcaatttcggaaaact

SEQ ID NO: 1471738 - DNA, 25 bp, Homo sapien
tgtgtgcttctaatgtgtcatgttc

SEQ ID NO: 1471739 - DNA, 25 bp, Homo sapien
catgttccagggtgaacttattttt

SEQ ID NO: 1471740 - DNA, 25 bp, Homo sapien
caatttcggaaaactctcatcctct

SEQ ID NO: 1471741 - DNA, 25 bp, Homo sapien
tcagtctttgtggtttcccgagcct

SEQ ID NO: 1471742 - DNA, 25 bp, Homo sapien
tgcggctgtcttttcgaggcccctg

SEQ ID NO: 1471743 - DNA, 25 bp, Homo sapien
tccaaacttgctgggtcagtctttg

SEQ ID NO: 1471744 - DNA, 25 bp, Homo sapien
gagccttgcagccatccccaagtgt

SEQ ID NO: 1471745 - DNA, 25 bp, Homo sapien
cagcaccagttcatgactgctctcc

SEQ ID NO: 1471746 - DNA, 25 bp, Homo sapien
ggctccacgggacacccatacctct

SEQ ID NO: 1471747 - DNA, 25 bp, Homo sapien
agggcccggatgacgacggctccac

SEQ ID NO: 1471748 - DNA, 25 bp, Homo sapien
tctccccggtgaagggcccggatga

SEQ ID NO: 1471749 - DNA, 25 bp, Homo sapien
ctgggatccgaaggccagccagggc

SEQ ID NO: 1471750 - DNA, 25 bp, Homo sapien
ggctgggatccgaaggccagccagg

SEQ ID NO: 1471751 - DNA, 25 bp, Homo sapien
gaacaggtgaccggcggagggcggc

SEQ ID NO: 1471752 - DNA, 25 bp, Homo sapien
aacaggtgaccggcggagggcggcg

SEQ ID NO: 1471753 - DNA, 25 bp, Homo sapien
ggaacatctggattttgtacgtatt

SEQ ID NO: 1471754 - DNA, 25 bp, Homo sapien
attaacttctcgagaagagaaaggg

SEQ ID NO: 1471755 - DNA, 25 bp, Homo sapien
ggcccaaggaagtcgggacctgatc

SEQ ID NO: 1471756 - DNA, 25 bp, Homo sapien
caggctccagccttttggcaaggac

SEQ ID NO: 1471757 - DNA, 25 bp, Homo sapien
aggcggccgaagggcgcagcgcggc

SEQ ID NO: 1471758 - DNA, 25 bp, Homo sapien
taggcggccgaagggcgcagcgcgg

SEQ ID NO: 1471759 - DNA, 25 bp, Homo sapien
gccgaagggcgcagcgcggcgagca

SEQ ID NO: 1471760 - DNA, 25 bp, Homo sapien
gtaggcggccgaagggcgcagcgcg

SEQ ID NO: 1471761 - DNA, 25 bp, Homo sapien
ctcggcggccgaccatcgcgctccc

SEQ ID NO: 1471762 - DNA, 25 bp, Homo sapien
gcctcggcggccgaccatcgcgctc

SEQ ID NO: 1471763 - DNA, 25 bp, Homo sapien
cgcctcggcggccgaccatcgcgct

SEQ ID NO: 1471764 - DNA, 25 bp, Homo sapien
ccgcgcctcggcggccgaccatcgc

SEQ ID NO: 1471765 - DNA, 25 bp, Homo sapien
ccagccatcgggcaacgcccttctc

SEQ ID NO: 1471766 - DNA, 25 bp, Homo sapien
gcaacgcccttctcagagcctgtgt

SEQ ID NO: 1471767 - DNA, 25 bp, Homo sapien
tcaatgaaacaccagccatcgggca

SEQ ID NO: 1471768 - DNA, 25 bp, Homo sapien
gggcaacgcccttctcagagcctgt

SEQ ID NO: 1471769 - DNA, 25 bp, Homo sapien
ggccggcactggtccggggcgcgtg

SEQ ID NO: 1471770 - DNA, 25 bp, Homo sapien
cactggtccggggcgcgtgcagtga

SEQ ID NO: 1471771 - DNA, 25 bp, Homo sapien
gccggcactggtccggggcgcgtgc

SEQ ID NO: 1471772 - DNA, 25 bp, Homo sapien
ggtccggggcgcgtgcagtgaagag

SEQ ID NO: 1471773 - DNA, 25 bp, Homo sapien
tggatcgggggaccctgggggctca

SEQ ID NO: 1471774 - DNA, 25 bp, Homo sapien
aagctgcaggtggatcgggggaccc

SEQ ID NO: 1471775 - DNA, 25 bp, Homo sapien
aggacagggtgggaccatagacttt

SEQ ID NO: 1471776 - DNA, 25 bp, Homo sapien
tttgccaaaagctgcaggtggatcg

SEQ ID NO: 1471777 - DNA, 25 bp, Homo sapien
gagatcagtgtcagtggtgctaaag

SEQ ID NO: 1471778 - DNA, 25 bp, Homo sapien
agtggtgctaaagccatcatcagca

SEQ ID NO: 1471779 - DNA, 25 bp, Homo sapien
ctcctcgtcactcgctatgtcctca

SEQ ID NO: 1471780 - DNA, 25 bp, Homo sapien
ctcgtcactcgctatgtcctcactg

SEQ ID NO: 1471781 - DNA, 25 bp, Homo sapien
ggccaggtcgtatttctgcatctca

SEQ ID NO: 1471782 - DNA, 25 bp, Homo sapien
agggtgtaccattgctcgctcagca

SEQ ID NO: 1471783 - DNA, 25 bp, Homo sapien
ggtgtaccattgctcgctcagcatc

SEQ ID NO: 1471784 - DNA, 25 bp, Homo sapien
ccaggtcgtatttctgcatctcatt

SEQ ID NO: 1471785 - DNA, 25 bp, Homo sapien
tgctgcttgctgaagattatgactg

SEQ ID NO: 1471786 - DNA, 25 bp, Homo sapien
ctgcttgctgaagattatgactgcc

SEQ ID NO: 1471787 - DNA, 25 bp, Homo sapien
tgcttgctgaagattatgactgcca

SEQ ID NO: 1471788 - DNA, 25 bp, Homo sapien
ggtgctgcttgctgaagattatgac

SEQ ID NO: 1471789 - DNA, 25 bp, Homo sapien
ggccacagagtgaccttccacattc

SEQ ID NO: 1471790 - DNA, 25 bp, Homo sapien
gggaacacggccacagagtgacctt

SEQ ID NO: 1471791 - DNA, 25 bp, Homo sapien
agtttgctgggcctcatgtggctgc

SEQ ID NO: 1471792 - DNA, 25 bp, Homo sapien
ctggcagtttgctgggcctcatgtg

SEQ ID NO: 1471793 - DNA, 25 bp, Homo sapien
catgcgaagggctttgagtcaacag

SEQ ID NO: 1471794 - DNA, 25 bp, Homo sapien
ctcaaaggtggcgttcgtagcacag

SEQ ID NO: 1471795 - DNA, 25 bp, Homo sapien
tggcgttcgtagcacagcatgcgaa

SEQ ID NO: 1471796 - DNA, 25 bp, Homo sapien
gcatgcgaagggctttgagtcaaca

SEQ ID NO: 1471797 - DNA, 25 bp, Homo sapien
tgagctgaacaatgccaacaaaggt

SEQ ID NO: 1471798 - DNA, 25 bp, Homo sapien
catcagtaatgtccacgggggctct

SEQ ID NO: 1471799 - DNA, 25 bp, Homo sapien
gggctctcatggtgatattaacgcg

SEQ ID NO: 1471800 - DNA, 25 bp, Homo sapien
taacgcggaggaggtaattcccaca

SEQ ID NO: 1471801 - DNA, 25 bp, Homo sapien
agcgcctcctctcgcctgggggcct

SEQ ID NO: 1471802 - DNA, 25 bp, Homo sapien
ggtgggcagcgcctcctctcgcctg

SEQ ID NO: 1471803 - DNA, 25 bp, Homo sapien
gggcagcgcctcctctcgcctgggg

SEQ ID NO: 1471804 - DNA, 25 bp, Homo sapien
agagcttccggggtgggcagcgcct

SEQ ID NO: 1471805 - DNA, 25 bp, Homo sapien
ctccccgttccaagtgttggaatgt

SEQ ID NO: 1471806 - DNA, 25 bp, Homo sapien
cgttccaagtgttggaatgtgggtc

SEQ ID NO: 1471807 - DNA, 25 bp, Homo sapien
tccaagtgttggaatgtgggtctgt

SEQ ID NO: 1471808 - DNA, 25 bp, Homo sapien
cccgttccaagtgttggaatgtggg

SEQ ID NO: 1471809 - DNA, 25 bp, Homo sapien
ccccttcagtgaggtcacgaggccc

SEQ ID NO: 1471810 - DNA, 25 bp, Homo sapien
gcccccttcagtgaggtcacgaggc

SEQ ID NO: 1471811 - DNA, 25 bp, Homo sapien
ccttcagtgaggtcacgaggcccat

SEQ ID NO: 1471812 - DNA, 25 bp, Homo sapien
ctgcccccttcagtgaggtcacgag

SEQ ID NO: 1471813 - DNA, 25 bp, Homo sapien
cttggaggtccacctggccgctgtc

SEQ ID NO: 1471814 - DNA, 25 bp, Homo sapien
tccacctggccgctgtccccattgc

SEQ ID NO: 1471815 - DNA, 25 bp, Homo sapien
ttggaggtccacctggccgctgtcc

SEQ ID NO: 1471816 - DNA, 25 bp, Homo sapien
acctggccgctgtccccattgcagg

SEQ ID NO: 1471817 - DNA, 25 bp, Homo sapien
ttcttcaggttgacgcatatgagcg

SEQ ID NO: 1471818 - DNA, 25 bp, Homo sapien
gggctggaaccatcacactattttc

SEQ ID NO: 1471819 - DNA, 25 bp, Homo sapien
gcatgtgtttgaacgccgttttcac

SEQ ID NO: 1471820 - DNA, 25 bp, Homo sapien
cacactggtttattcgttcttcagg

SEQ ID NO: 1471821 - DNA, 25 bp, Homo sapien
taaaagtaggcatccttccctcgct

SEQ ID NO: 1471822 - DNA, 25 bp, Homo sapien
gaaaactttgagctgcctgcatata

SEQ ID NO: 1471823 - DNA, 25 bp, Homo sapien
ccctcgctcctgatcttagggtgaa

SEQ ID NO: 1471824 - DNA, 25 bp, Homo sapien
tacatggacaaattgttagtggtga

SEQ ID NO: 1471825 - DNA, 25 bp, Homo sapien
agttcagggtatccaggagagtctc

SEQ ID NO: 1471826 - DNA, 25 bp, Homo sapien
tccaggagagtctccttttcattaa

SEQ ID NO: 1471827 - DNA, 25 bp, Homo sapien
cagttcagggtatccaggagagtct

SEQ ID NO: 1471828 - DNA, 25 bp, Homo sapien
gtattcacgggtcccaccagaagag

SEQ ID NO: 1471829 - DNA, 25 bp, Homo sapien
tggacgcccgcatgcaagaatgaga

SEQ ID NO: 1471830 - DNA, 25 bp, Homo sapien
ggaaagacgctcaaagtcacgagtc

SEQ ID NO: 1471831 - DNA, 25 bp, Homo sapien
gaaaactcatgaccctgaggccgtg

SEQ ID NO: 1471832 - DNA, 25 bp, Homo sapien
gaagccccacattgaggtgtcccgg

SEQ ID NO: 1471833 - DNA, 25 bp, Homo sapien
tcagttgagaccttagagcagaacc

SEQ ID NO: 1471834 - DNA, 25 bp, Homo sapien
gtatttgactctcccggccttggca

SEQ ID NO: 1471835 - DNA, 25 bp, Homo sapien
ccttcgaggtaaacccaggcactga

SEQ ID NO: 1471836 - DNA, 25 bp, Homo sapien
tcggaacacagacggggaccaacag

SEQ ID NO: 1471837 - DNA, 25 bp, Homo sapien
ttgtcaccaagcctcggaacacaga

SEQ ID NO: 1471838 - DNA, 25 bp, Homo sapien
aggtttgctagaatttgtcaccaag

SEQ ID NO: 1471839 - DNA, 25 bp, Homo sapien
aaccactaaggtttgctagaatttg

SEQ ID NO: 1471840 - DNA, 25 bp, Homo sapien
agtgcctttgttgtggactgctgtg

SEQ ID NO: 1471841 - DNA, 25 bp, Homo sapien
tccagtgcctttgttgtggactgct

SEQ ID NO: 1471842 - DNA, 25 bp, Homo sapien
gcctttgttgtggactgctgtgtcc

SEQ ID NO: 1471843 - DNA, 25 bp, Homo sapien
agaatccagtgcctttgttgtggac

SEQ ID NO: 1471844 - DNA, 25 bp, Homo sapien
tcggtacatgtacccagagtcagaa

SEQ ID NO: 1471845 - DNA, 25 bp, Homo sapien
gaaatggtgccatcagacactttaa

SEQ ID NO: 1471846 - DNA, 25 bp, Homo sapien
aatgataaaaccaggccgcctctgt

SEQ ID NO: 1471847 - DNA, 25 bp, Homo sapien
gaggttaagaagagccaagatgtgc

SEQ ID NO: 1471848 - DNA, 25 bp, Homo sapien
tcaccggctccccatttgtccaccc

SEQ ID NO: 1471849 - DNA, 25 bp, Homo sapien
ctcaccggctccccatttgtccacc

SEQ ID NO: 1471850 - DNA, 25 bp, Homo sapien
gcccatgcagtcagcatagccgtaa

SEQ ID NO: 1471851 - DNA, 25 bp, Homo sapien
ccaggtcctgtggtgtgaccagcca

SEQ ID NO: 1471852 - DNA, 25 bp, Homo sapien
ttcctgtggcgtgctccaggtcctg

SEQ ID NO: 1471853 - DNA, 25 bp, Homo sapien
catagccgtaataattcctgtggcg

SEQ ID NO: 1471854 - DNA, 25 bp, Homo sapien
gggagagatctgcccatcgcagcct

SEQ ID NO: 1471855 - DNA, 25 bp, Homo sapien
agcctccagaggcagtgaggacgcc

SEQ ID NO: 1471856 - DNA, 25 bp, Homo sapien
gcttcacagaggtgagatttcggaa

SEQ ID NO: 1471857 - DNA, 25 bp, Homo sapien
ggcctcggcctgcacaaatcaggtt

SEQ ID NO: 1471858 - DNA, 25 bp, Homo sapien
ctgcggccagctccccggcgtctgc

SEQ ID NO: 1471859 - DNA, 25 bp, Homo sapien
cgtctgctccgggcccaggtatgag

SEQ ID NO: 1471860 - DNA, 25 bp, Homo sapien
gtatgagcccgcgcgtcactgcggc

SEQ ID NO: 1471861 - DNA, 25 bp, Homo sapien
tggccccgcgagtgccacaggtttc

SEQ ID NO: 1471862 - DNA, 25 bp, Homo sapien
acgtggccgccgtcagagccgccat

SEQ ID NO: 1471863 - DNA, 25 bp, Homo sapien
aggcgctgacgtggccgccgtcaga

SEQ ID NO: 1471864 - DNA, 25 bp, Homo sapien
gcgcccggaggcgctgacgtggccg

SEQ ID NO: 1471865 - DNA, 25 bp, Homo sapien
ccggaggcgctgacgtggccgccgt

SEQ ID NO: 1471866 - DNA, 25 bp, Homo sapien
caggaaaccaggattagtcaaggac

SEQ ID NO: 1471867 - DNA, 25 bp, Homo sapien
tgcaagcccttgttaccactgtgtg

SEQ ID NO: 1471868 - DNA, 25 bp, Homo sapien
catccaggacatgtctgtcaagtcg

SEQ ID NO: 1471869 - DNA, 25 bp, Homo sapien
tctgttggctgacaaccggctgcaa

SEQ ID NO: 1471870 - DNA, 25 bp, Homo sapien
tgtcaagtcgctaacaaggtcatct

SEQ ID NO: 1471871 - DNA, 25 bp, Homo sapien
tcaaggactttatggcttatcagcc

SEQ ID NO: 1471872 - DNA, 25 bp, Homo sapien
gacttgacagacatgtcctggatgc

SEQ ID NO: 1471873 - DNA, 25 bp, Homo sapien
gctgataagccataaagtccttgac

SEQ ID NO: 1471874 - DNA, 25 bp, Homo sapien
cacacagtggtaacaagggcttgca

SEQ ID NO: 1471875 - DNA, 25 bp, Homo sapien
tgcagccggttgtcagccaacagac

SEQ ID NO: 1471876 - DNA, 25 bp, Homo sapien
caggagaagcctaaatgacaagaga

SEQ ID NO: 1471877 - DNA, 25 bp, Homo sapien
gatgaccttgttagcgacttgacag

SEQ ID NO: 1471878 - DNA, 25 bp, Homo sapien
gaaggcaaaagtgtgacttcatggt

SEQ ID NO: 1471879 - DNA, 25 bp, Homo sapien
cagtctgaacattcctttgtacaaa

SEQ ID NO: 1471880 - DNA, 25 bp, Homo sapien
aaattattggctattggtgaccagc

SEQ ID NO: 1471881 - DNA, 25 bp, Homo sapien
gacttcatggtataggtgtgattga

SEQ ID NO: 1471882 - DNA, 25 bp, Homo sapien
tgactagccctaccctgaagtttcg

SEQ ID NO: 1471883 - DNA, 25 bp, Homo sapien
tacttaagtgtggttcagtctgaac

SEQ ID NO: 1471884 - DNA, 25 bp, Homo sapien
taacagcatctacagccccgtgttt

SEQ ID NO: 1471885 - DNA, 25 bp, Homo sapien
tttgtacaaaggaatgttcagactg

SEQ ID NO: 1471886 - DNA, 25 bp, Homo sapien
gttcagactgaaccacacttaagta

SEQ ID NO: 1471887 - DNA, 25 bp, Homo sapien
cgaaacttcagggtagggctagtca

SEQ ID NO: 1471888 - DNA, 25 bp, Homo sapien
gagctggtcaccaatagccaataat

SEQ ID NO: 1471889 - DNA, 25 bp, Homo sapien
gatgggcagcccctacgaaacttca

SEQ ID NO: 1471890 - DNA, 25 bp, Homo sapien
cagtgaccccacagccattaggaga

SEQ ID NO: 1471891 - DNA, 25 bp, Homo sapien
taggcattacaactcgacacagtga

SEQ ID NO: 1471892 - DNA, 25 bp, Homo sapien
catctgaaggcgagttccactggga

SEQ ID NO: 1471893 - DNA, 25 bp, Homo sapien
gagggcattatctatcaggtctgac

SEQ ID NO: 1471894 - DNA, 25 bp, Homo sapien
agggtcccctctaacacatctgctg

SEQ ID NO: 1471895 - DNA, 25 bp, Homo sapien
caaagaaccgttgcccactagctaa

SEQ ID NO: 1471896 - DNA, 25 bp, Homo sapien
gaatttcactgattgccccacctga

SEQ ID NO: 1471897 - DNA, 25 bp, Homo sapien
tagctagtgggcaacggttctttgg

SEQ ID NO: 1471898 - DNA, 25 bp, Homo sapien
tgttcacattagctatagtcccaga

SEQ ID NO: 1471899 - DNA, 25 bp, Homo sapien
agtggaactcgccttcagatgcagc

SEQ ID NO: 1471900 - DNA, 25 bp, Homo sapien
tcagacctgatagataatgccctcc

SEQ ID NO: 1471901 - DNA, 25 bp, Homo sapien
cactgtgtcgagttgtaatgcctaa

SEQ ID NO: 1471902 - DNA, 25 bp, Homo sapien
ggtgacccaaggacaagcgagttgc

SEQ ID NO: 1471903 - DNA, 25 bp, Homo sapien
tgaaagcagtaagaggttccacgac

SEQ ID NO: 1471904 - DNA, 25 bp, Homo sapien
catggctatggaatgcagggtgacc

SEQ ID NO: 1471905 - DNA, 25 bp, Homo sapien
tgcataggagtaccagaaactgcct

SEQ ID NO: 1471906 - DNA, 25 bp, Homo sapien
caaatcggacccttgcaggctgagg

SEQ ID NO: 1471907 - DNA, 25 bp, Homo sapien
cgcacgtttgccacatgagagtaaa

SEQ ID NO: 1471908 - DNA, 25 bp, Homo sapien
cgacgggctctatgaaggactggac

SEQ ID NO: 1471909 - DNA, 25 bp, Homo sapien
tgtaaatgtggcagacgcagcctgc

SEQ ID NO: 1471910 - DNA, 25 bp, Homo sapien
ggagaccccgcctagcatagatttg

SEQ ID NO: 1471911 - DNA, 25 bp, Homo sapien
tctcatgtggcaaacgtgcggctcg

SEQ ID NO: 1471912 - DNA, 25 bp, Homo sapien
gatttgcagttacggcctggatgcc

SEQ ID NO: 1471913 - DNA, 25 bp, Homo sapien
tgcatggtcacagtagagatccccg

SEQ ID NO: 1471914 - DNA, 25 bp, Homo sapien
catacttggccacagttagaccgct

SEQ ID NO: 1471915 - DNA, 25 bp, Homo sapien
ttagaccgctcataggcccatggct

SEQ ID NO: 1471916 - DNA, 25 bp, Homo sapien
catggctgctgcaaccatgggcagg

SEQ ID NO: 1471917 - DNA, 25 bp, Homo sapien
gggagtccagcctctactgataaat

SEQ ID NO: 1471918 - DNA, 25 bp, Homo sapien
tgctccagagctagctgtcaagtct

SEQ ID NO: 1471919 - DNA, 25 bp, Homo sapien
acccaaggagcttccgaggcaggag

SEQ ID NO: 1471920 - DNA, 25 bp, Homo sapien
gggccatccctggtatgcgaaacct

SEQ ID NO: 1471921 - DNA, 25 bp, Homo sapien
cctggtatgcgaaacctggaggttt

SEQ ID NO: 1471922 - DNA, 25 bp, Homo sapien
ctctgtcatgccacctgcgagacgg

SEQ ID NO: 1471923 - DNA, 25 bp, Homo sapien
gtcatgccacctgcgagacgggctc

SEQ ID NO: 1471924 - DNA, 25 bp, Homo sapien
gcgagacgggctcctcctgtcccca

SEQ ID NO: 1471925 - DNA, 25 bp, Homo sapien
tgtcatgccacctgcgagacgggct

SEQ ID NO: 1471926 - DNA, 25 bp, Homo sapien
tggcagtcagtcactcggaaggagt

SEQ ID NO: 1471927 - DNA, 25 bp, Homo sapien
tcagtcactcggaaggagtcaacca

SEQ ID NO: 1471928 - DNA, 25 bp, Homo sapien
caatggcagtcagtcactcggaagg

SEQ ID NO: 1471929 - DNA, 25 bp, Homo sapien
ggagaccaatggcagtcagtcactc

SEQ ID NO: 1471930 - DNA, 25 bp, Homo sapien
aggaggtggcctcagctggccgcct

SEQ ID NO: 1471931 - DNA, 25 bp, Homo sapien
gtggcctcagctggccgcctgtgct

SEQ ID NO: 1471932 - DNA, 25 bp, Homo sapien
tcagctggccgcctgtgctctttgt

SEQ ID NO: 1471933 - DNA, 25 bp, Homo sapien
agctggccgcctgtgctctttgtct

SEQ ID NO: 1471934 - DNA, 25 bp, Homo sapien
ccagtggctacgtgggttagaaaca

SEQ ID NO: 1471935 - DNA, 25 bp, Homo sapien
gatacaaggtgtgcctcagacccta

SEQ ID NO: 1471936 - DNA, 25 bp, Homo sapien
tcagttacgtagtcacgtggccagt

SEQ ID NO: 1471937 - DNA, 25 bp, Homo sapien
cagccgtgcccttggcaggttgaca

SEQ ID NO: 1471938 - DNA, 25 bp, Homo sapien
aggacctctcttcaagggtgacccg

SEQ ID NO: 1471939 - DNA, 25 bp, Homo sapien
tcctgagtgccctcccacggcacag

SEQ ID NO: 1471940 - DNA, 25 bp, Homo sapien
gacctctcttcaagggtgacccgag

SEQ ID NO: 1471941 - DNA, 25 bp, Homo sapien
tcttcaagggtgacccgagaaactc

SEQ ID NO: 1471942 - DNA, 25 bp, Homo sapien
accccggggcacagctagcccaggt

SEQ ID NO: 1471943 - DNA, 25 bp, Homo sapien
gggccggtgcgccaagagaagctgc

SEQ ID NO: 1471944 - DNA, 25 bp, Homo sapien
cccggggcacagctagcccaggtgg

SEQ ID NO: 1471945 - DNA, 25 bp, Homo sapien
ccgccgggccggtgcgccaagagaa

SEQ ID NO: 1471946 - DNA, 25 bp, Homo sapien
gcccgccgctctctacgcggtgatg

SEQ ID NO: 1471947 - DNA, 25 bp, Homo sapien
ctgctttccgtctgatcctccgccc

SEQ ID NO: 1471948 - DNA, 25 bp, Homo sapien
gggcccgccgctctctacgcggtga

SEQ ID NO: 1471949 - DNA, 25 bp, Homo sapien
ctttccgtctgatcctccgcccgcg

SEQ ID NO: 1471950 - DNA, 25 bp, Homo sapien
ccacccctgttagcccctgctgcgg

SEQ ID NO: 1471951 - DNA, 25 bp, Homo sapien
agcgccccggggagctccgttcagt

SEQ ID NO: 1471952 - DNA, 25 bp, Homo sapien
cgggagaagcgagctctgcggagga

SEQ ID NO: 1471953 - DNA, 25 bp, Homo sapien
tctgcggaggagtctgcgggccggc

SEQ ID NO: 1471954 - DNA, 25 bp, Homo sapien
acacagacagccccagtttggcggc

SEQ ID NO: 1471955 - DNA, 25 bp, Homo sapien
cagtttggcggcctccttgtcctct

SEQ ID NO: 1471956 - DNA, 25 bp, Homo sapien
tgtcctctcgggacatcgccacgcg

SEQ ID NO: 1471957 - DNA, 25 bp, Homo sapien
tccttgtcctctcgggacatcgcca

SEQ ID NO: 1471958 - DNA, 25 bp, Homo sapien
atggcgatgaagacagtacggcagg

SEQ ID NO: 1471959 - DNA, 25 bp, Homo sapien
gggtccgcctcacccgagcaatcga

SEQ ID NO: 1471960 - DNA, 25 bp, Homo sapien
acccgagcaatcgagcccagtgctg

SEQ ID NO: 1471961 - DNA, 25 bp, Homo sapien
aagacagtacggcaggggtccgcct

SEQ ID NO: 1471962 - DNA, 25 bp, Homo sapien
gcctccttcccgcttgcagacctcc

SEQ ID NO: 1471963 - DNA, 25 bp, Homo sapien
ccagcagccggtccacgcccttctc

SEQ ID NO: 1471964 - DNA, 25 bp, Homo sapien
tcccgcttgcagacctccgcgaagt

SEQ ID NO: 1471965 - DNA, 25 bp, Homo sapien
tccttcccgcttgcagacctccgcg

SEQ ID NO: 1471966 - DNA, 25 bp, Homo sapien
agggagcgctcgagtcggccccaca

SEQ ID NO: 1471967 - DNA, 25 bp, Homo sapien
acagggagcgctcgagtcggcccca

SEQ ID NO: 1471968 - DNA, 25 bp, Homo sapien
tgcaggtgcgagagcacagggagcg

SEQ ID NO: 1471969 - DNA, 25 bp, Homo sapien
caggtgcgagagcacagggagcgct

SEQ ID NO: 1471970 - DNA, 25 bp, Homo sapien
aggcccgtgggctgcttcttcacgt

SEQ ID NO: 1471971 - DNA, 25 bp, Homo sapien
caggcccgtgggctgcttcttcacg

SEQ ID NO: 1471972 - DNA, 25 bp, Homo sapien
gcctaccggcgccatcagcgagttg

SEQ ID NO: 1471973 - DNA, 25 bp, Homo sapien
tctgccagcggcctaccggcgccat

SEQ ID NO: 1471974 - DNA, 25 bp, Homo sapien
accaggtgaggtcgcggcccttctg

SEQ ID NO: 1471975 - DNA, 25 bp, Homo sapien
cgcccggcccttggcgtaccaggtg

SEQ ID NO: 1471976 - DNA, 25 bp, Homo sapien
gacgtagacgctgtgagtccagcgc

SEQ ID NO: 1471977 - DNA, 25 bp, Homo sapien
cggacgtagacgctgtgagtccagc

SEQ ID NO: 1471978 - DNA, 25 bp, Homo sapien
ctgcggacgtagacgctgtgagtcc

SEQ ID NO: 1471979 - DNA, 25 bp, Homo sapien
tagacgctgtgagtccagcgcccgc

SEQ ID NO: 1471980 - DNA, 25 bp, Homo sapien
cagtcttcacgtcctcccagttgaa

SEQ ID NO: 1471981 - DNA, 25 bp, Homo sapien
cgtcctcccagttgaactggtcctg

SEQ ID NO: 1471982 - DNA, 25 bp, Homo sapien
cgcctccacgactggagccgaacat

SEQ ID NO: 1471983 - DNA, 25 bp, Homo sapien
tcccgctgcttgtcagtcttcacgt

SEQ ID NO: 1471984 - DNA, 25 bp, Homo sapien
ttgcctggggcctgcggcttgcaac

SEQ ID NO: 1471985 - DNA, 25 bp, Homo sapien
ggcgccgggaaggcagttgcctggg

SEQ ID NO: 1471986 - DNA, 25 bp, Homo sapien
gaaggcagttgcctggggcctgcgg

SEQ ID NO: 1471987 - DNA, 25 bp, Homo sapien
gccgggaaggcagttgcctggggcc

SEQ ID NO: 1471988 - DNA, 25 bp, Homo sapien
gtgaaatcctcaccccaaggcgttg

SEQ ID NO: 1471989 - DNA, 25 bp, Homo sapien
cacaagatgcgcctagttaacaccg

SEQ ID NO: 1471990 - DNA, 25 bp, Homo sapien
gccaattggtcactgctagtcgcga

SEQ ID NO: 1471991 - DNA, 25 bp, Homo sapien
gaagacctggtcagttttgagccca

SEQ ID NO: 1471992 - DNA, 25 bp, Homo sapien
tctgtgcttgagctgatgcctttca

SEQ ID NO: 1471993 - DNA, 25 bp, Homo sapien
caggtttgatctacaccaaccctca

SEQ ID NO: 1471994 - DNA, 25 bp, Homo sapien
tggtgttgggtactgcccacatggt

SEQ ID NO: 1471995 - DNA, 25 bp, Homo sapien
ggcagagcttagagcttggtggtgt

SEQ ID NO: 1471996 - DNA, 25 bp, Homo sapien
caagaacgagtgatttaagaacagc

SEQ ID NO: 1471997 - DNA, 25 bp, Homo sapien
ccaggtggcagcttcaagaacgagt

SEQ ID NO: 1471998 - DNA, 25 bp, Homo sapien
catcttagcaatgtcccggggtggc

SEQ ID NO: 1471999 - DNA, 25 bp, Homo sapien
agtgatttaagaacagccctcccat

SEQ ID NO: 1472000 - DNA, 25 bp, Homo sapien
cttcctcgactggagctgagcctca

SEQ ID NO: 1472001 - DNA, 25 bp, Homo sapien
tgctcgtactccttcctcgactgga

SEQ ID NO: 1472002 - DNA, 25 bp, Homo sapien
tggtccagaactgtcggtagcgctc

SEQ ID NO: 1472003 - DNA, 25 bp, Homo sapien
ggtagcgctccacatgcaagtcatc

SEQ ID NO: 1472004 - DNA, 25 bp, Homo sapien
cgccgtggctccctgtagcggatgt

SEQ ID NO: 1472005 - DNA, 25 bp, Homo sapien
gcacggggtagagtcgtgcataagc

SEQ ID NO: 1472006 - DNA, 25 bp, Homo sapien
tggctccctgtagcggatgtggatg

SEQ ID NO: 1472007 - DNA, 25 bp, Homo sapien
tccctgtagcggatgtggatggtgg

SEQ ID NO: 1472008 - DNA, 25 bp, Homo sapien
gctgtcagctcgccaggaggatgtg

SEQ ID NO: 1472009 - DNA, 25 bp, Homo sapien
cggtgcacacgagtgagtgaggccc

SEQ ID NO: 1472010 - DNA, 25 bp, Homo sapien
ggatgtgtgcaggcggcggagtgca

SEQ ID NO: 1472011 - DNA, 25 bp, Homo sapien
ctggcggtgcacacgagtgagtgag

SEQ ID NO: 1472012 - DNA, 25 bp, Homo sapien
ttcaagctctggtcagccgacagtg

SEQ ID NO: 1472013 - DNA, 25 bp, Homo sapien
taaatgttcaagctctggtcagccg

SEQ ID NO: 1472014 - DNA, 25 bp, Homo sapien
tctggtcagccgacagtgctgcagc

SEQ ID NO: 1472015 - DNA, 25 bp, Homo sapien
tgcagataaatgttcaagctctggt

SEQ ID NO: 1472016 - DNA, 25 bp, Homo sapien
gctggtgacccgtgccggggcagga

SEQ ID NO: 1472017 - DNA, 25 bp, Homo sapien
gagctggtgacccgtgccggggcag

SEQ ID NO: 1472018 - DNA, 25 bp, Homo sapien
cagagctggtgacccgtgccggggc

SEQ ID NO: 1472019 - DNA, 25 bp, Homo sapien
ctggtgacccgtgccggggcaggat

SEQ ID NO: 1472020 - DNA, 25 bp, Homo sapien
tgagcaagggcacaaagcttccagc

SEQ ID NO: 1472021 - DNA, 25 bp, Homo sapien
ctgagcaagggcacaaagcttccag

SEQ ID NO: 1472022 - DNA, 25 bp, Homo sapien
aggggacagtggacaatagcaagga

SEQ ID NO: 1472023 - DNA, 25 bp, Homo sapien
gcacaggggacagtggacaatagca

SEQ ID NO: 1472024 - DNA, 25 bp, Homo sapien
gggtggcccctgacagtaatcccca

SEQ ID NO: 1472025 - DNA, 25 bp, Homo sapien
gaggattagaatggcggtttcctgc

SEQ ID NO: 1472026 - DNA, 25 bp, Homo sapien
tccccagggacctaaaagtccatgc

SEQ ID NO: 1472027 - DNA, 25 bp, Homo sapien
tagaatggcggtttcctgctgaaga

SEQ ID NO: 1472028 - DNA, 25 bp, Homo sapien
tccttacagccccagtggcacgtgg

SEQ ID NO: 1472029 - DNA, 25 bp, Homo sapien
ttacagccccagtggcacgtggagg

SEQ ID NO: 1472030 - DNA, 25 bp, Homo sapien
gtggtcagtacaggccctggcgtgc

SEQ ID NO: 1472031 - DNA, 25 bp, Homo sapien
cacgtggaggtggtcagtacaggcc

SEQ ID NO: 1472032 - DNA, 25 bp, Homo sapien
ctaggcagagaatgaagagatcttt

SEQ ID NO: 1472033 - DNA, 25 bp, Homo sapien
agacacatgtaatcaccacgccact

SEQ ID NO: 1472034 - DNA, 25 bp, Homo sapien
gcttccaagacacatgtaatcacca

SEQ ID NO: 1472035 - DNA, 25 bp, Homo sapien
caagacacatgtaatcaccacgcca

SEQ ID NO: 1472036 - DNA, 25 bp, Homo sapien
ccagcaacccttggacttctcagaa

SEQ ID NO: 1472037 - DNA, 25 bp, Homo sapien
cagcaacccttggacttctcagaac

SEQ ID NO: 1472038 - DNA, 25 bp, Homo sapien
gcaacccttggacttctcagaaccg

SEQ ID NO: 1472039 - DNA, 25 bp, Homo sapien
tcccagcaacccttggacttctcag

SEQ ID NO: 1472040 - DNA, 25 bp, Homo sapien
ctgtagaggtttttccaaaagcaga

SEQ ID NO: 1472041 - DNA, 25 bp, Homo sapien
tttttccaaaagcagaagttggtca

SEQ ID NO: 1472042 - DNA, 25 bp, Homo sapien
tgtagaggtttttccaaaagcagaa

SEQ ID NO: 1472043 - DNA, 25 bp, Homo sapien
gaggtgtgcgaagtaaaagcccagt

SEQ ID NO: 1472044 - DNA, 25 bp, Homo sapien
gaaatcctgctacgtgtcctatgcc

SEQ ID NO: 1472045 - DNA, 25 bp, Homo sapien
tgttctggccgttaccgagtctgcg

SEQ ID NO: 1472046 - DNA, 25 bp, Homo sapien
tggactgcagcctcaaaagtggagc

SEQ ID NO: 1472047 - DNA, 25 bp, Homo sapien
cagcacaggagcctggggctggtcc

SEQ ID NO: 1472048 - DNA, 25 bp, Homo sapien
gctggtccaggagggtcttcgggga

SEQ ID NO: 1472049 - DNA, 25 bp, Homo sapien
ggaaagctccctctcctttcctgct

SEQ ID NO: 1472050 - DNA, 25 bp, Homo sapien
gggaaagctccctctcctttcctgc

SEQ ID NO: 1472051 - DNA, 25 bp, Homo sapien
tccaccgggagggtacagcgcctcc

SEQ ID NO: 1472052 - DNA, 25 bp, Homo sapien
gttcccggcccacacgaggcgccaa

SEQ ID NO: 1472053 - DNA, 25 bp, Homo sapien
cctctgttcccggcccacacgaggc

SEQ ID NO: 1472054 - DNA, 25 bp, Homo sapien
cgggagggtacagcgcctcccgcct

SEQ ID NO: 1472055 - DNA, 25 bp, Homo sapien
cgctgcccggtggaactaagaccag

SEQ ID NO: 1472056 - DNA, 25 bp, Homo sapien
gggacgaggccacgcaggagatcaa

SEQ ID NO: 1472057 - DNA, 25 bp, Homo sapien
ggacaggcggtcctgactcccgctg

SEQ ID NO: 1472058 - DNA, 25 bp, Homo sapien
tgcggccgccacagtcgctgcggag

SEQ ID NO: 1472059 - DNA, 25 bp, Homo sapien
cacgacgtcactggcaggcgctgcg

SEQ ID NO: 1472060 - DNA, 25 bp, Homo sapien
acgtcactggcaggcgctgcgtcgc

SEQ ID NO: 1472061 - DNA, 25 bp, Homo sapien
cgtcgcgcggtatgacgtgttccat

SEQ ID NO: 1472062 - DNA, 25 bp, Homo sapien
ctgcgtcgcgcggtatgacgtgttc

SEQ ID NO: 1472063 - DNA, 25 bp, Homo sapien
cggtgagacacgaagatatacgccc

SEQ ID NO: 1472064 - DNA, 25 bp, Homo sapien
tgggcggtgagacacgaagatatac

SEQ ID NO: 1472065 - DNA, 25 bp, Homo sapien
agaggcaagagtgggcggtgagaca

SEQ ID NO: 1472066 - DNA, 25 bp, Homo sapien
gggagaggcaagagtgggcggtgag

SEQ ID NO: 1472067 - DNA, 25 bp, Homo sapien
ccagggcgggccggcgaggtcgagg

SEQ ID NO: 1472068 - DNA, 25 bp, Homo sapien
cagggcgggccggcgaggtcgaggg

SEQ ID NO: 1472069 - DNA, 25 bp, Homo sapien
accagggcgggccggcgaggtcgag

SEQ ID NO: 1472070 - DNA, 25 bp, Homo sapien
gaccagggcgggccggcgaggtcga

SEQ ID NO: 1472071 - DNA, 25 bp, Homo sapien
cagatgagatgtttggaccagggca

SEQ ID NO: 1472072 - DNA, 25 bp, Homo sapien
gcttattccgggcatttccactggc

SEQ ID NO: 1472073 - DNA, 25 bp, Homo sapien
cactggcctgcagtattccagatga

SEQ ID NO: 1472074 - DNA, 25 bp, Homo sapien
cttgtaaacagagcttattccgggc

SEQ ID NO: 1472075 - DNA, 25 bp, Homo sapien
ccaagacgcagctattgttacagtt

SEQ ID NO: 1472076 - DNA, 25 bp, Homo sapien
tatgaatagttgaagtgcagcctct

SEQ ID NO: 1472077 - DNA, 25 bp, Homo sapien
cagttgcatactcctgttaggtttt

SEQ ID NO: 1472078 - DNA, 25 bp, Homo sapien
tagttgttgtcactatcaccatagt

SEQ ID NO: 1472079 - DNA, 25 bp, Homo sapien
tttttacaagaatcatctgcttatt

SEQ ID NO: 1472080 - DNA, 25 bp, Homo sapien
ttacaagaatcatctgcttatttat

SEQ ID NO: 1472081 - DNA, 25 bp, Homo sapien
ttttttttacaagaatcatctgctt

SEQ ID NO: 1472082 - DNA, 25 bp, Homo sapien
ttttttacaagaatcatctgcttat

SEQ ID NO: 1472083 - DNA, 25 bp, Homo sapien
catctatgtattaaacgtgagtctt

SEQ ID NO: 1472084 - DNA, 25 bp, Homo sapien
gtatttgtatcagaatgggcatcag

SEQ ID NO: 1472085 - DNA, 25 bp, Homo sapien
tataaattacaggtcagtggctctt

SEQ ID NO: 1472086 - DNA, 25 bp, Homo sapien
atatataaattacaggtcagtggct

SEQ ID NO: 1472087 - DNA, 25 bp, Homo sapien
gtcaggttcaaggacacactgttcc

SEQ ID NO: 1472088 - DNA, 25 bp, Homo sapien
agcacagccccataagaatcgccaa

SEQ ID NO: 1472089 - DNA, 25 bp, Homo sapien
actcaaagaggcccgagagccacag

SEQ ID NO: 1472090 - DNA, 25 bp, Homo sapien
ccagatagttcgaatcaaatcataa

SEQ ID NO: 1472091 - DNA, 25 bp, Homo sapien
caaatcataaacctctagcactttc

SEQ ID NO: 1472092 - DNA, 25 bp, Homo sapien
gtcccagatagttcgaatcaaatca

SEQ ID NO: 1472093 - DNA, 25 bp, Homo sapien
cacctccaatactacatagagattg

SEQ ID NO: 1472094 - DNA, 25 bp, Homo sapien
acctccaatactacatagagattgc

SEQ ID NO: 1472095 - DNA, 25 bp, Homo sapien
cccacctccaatactacatagagat

SEQ ID NO: 1472096 - DNA, 25 bp, Homo sapien
cctccaatactacatagagattgca

SEQ ID NO: 1472097 - DNA, 25 bp, Homo sapien
gctcgcatcctccataaattccatg

SEQ ID NO: 1472098 - DNA, 25 bp, Homo sapien
gagcggctcgcatcctccataaatt

SEQ ID NO: 1472099 - DNA, 25 bp, Homo sapien
ggagcggctcgcatcctccataaat

SEQ ID NO: 1472100 - DNA, 25 bp, Homo sapien
tgatggagcggctcgcatcctccat

SEQ ID NO: 1472101 - DNA, 25 bp, Homo sapien
ccactgtcctttagagcccattctg

SEQ ID NO: 1472102 - DNA, 25 bp, Homo sapien
ctgcgaccactgtcctttagagccc

SEQ ID NO: 1472103 - DNA, 25 bp, Homo sapien
cactgtcctttagagcccattctgc

SEQ ID NO: 1472104 - DNA, 25 bp, Homo sapien
accactgtcctttagagcccattct

SEQ ID NO: 1472105 - DNA, 25 bp, Homo sapien
gtcgttcgttagttaggtccctgca

SEQ ID NO: 1472106 - DNA, 25 bp, Homo sapien
acggaaacggcgctgtgacataagc

SEQ ID NO: 1472107 - DNA, 25 bp, Homo sapien
ttctctgagtgacaagcgggacaag

SEQ ID NO: 1472108 - DNA, 25 bp, Homo sapien
tgacgtagcagatgaaagccgggcc

SEQ ID NO: 1472109 - DNA, 25 bp, Homo sapien
tttctgggcacacatccgggtagca

SEQ ID NO: 1472110 - DNA, 25 bp, Homo sapien
tcagcaacctcgttttaaatgggac

SEQ ID NO: 1472111 - DNA, 25 bp, Homo sapien
tacctcctgaggaaatcgggctctt

SEQ ID NO: 1472112 - DNA, 25 bp, Homo sapien
taagacacaaaccaccagacgtggg

SEQ ID NO: 1472113 - DNA, 25 bp, Homo sapien
ccttcacgatgctgcgcggctatgt

SEQ ID NO: 1472114 - DNA, 25 bp, Homo sapien
aaaccggccgagtcttgcacagggt

SEQ ID NO: 1472115 - DNA, 25 bp, Homo sapien
tcgaggaccctgtgcaagactcggc

SEQ ID NO: 1472116 - DNA, 25 bp, Homo sapien
catttaaaacgaggttgctgaaggc

SEQ ID NO: 1472117 - DNA, 25 bp, Homo sapien
caggatgcgtgctacccggatgtgt

SEQ ID NO: 1472118 - DNA, 25 bp, Homo sapien
tttgtgtcttacgagaggccaggcg

SEQ ID NO: 1472119 - DNA, 25 bp, Homo sapien
gaagagcccgatttcctcaggaggt

SEQ ID NO: 1472120 - DNA, 25 bp, Homo sapien
ggatgtgtgcccagaaaccctgcag

SEQ ID NO: 1472121 - DNA, 25 bp, Homo sapien
ccaaagatgccgctgtgctcctgga

SEQ ID NO: 1472122 - DNA, 25 bp, Homo sapien
tgaagccaaagatgccgctgtgctc

SEQ ID NO: 1472123 - DNA, 25 bp, Homo sapien
tcttcagcagggtgctcttcccagc

SEQ ID NO: 1472124 - DNA, 25 bp, Homo sapien
ttcagcagggtgctcttcccagctc

SEQ ID NO: 1472125 - DNA, 25 bp, Homo sapien
gggtgctcttcccagctcccgaagg

SEQ ID NO: 1472126 - DNA, 25 bp, Homo sapien
aaagatgccgctgtgctcctggagc

SEQ ID NO: 1472127 - DNA, 25 bp, Homo sapien
gctgggaagagcaccctgctgaaga

SEQ ID NO: 1472128 - DNA, 25 bp, Homo sapien
gctccaggagcacagcggcatcttt

SEQ ID NO: 1472129 - DNA, 25 bp, Homo sapien
tgagcgggccttcgggagctgggaa

SEQ ID NO: 1472130 - DNA, 25 bp, Homo sapien
ccttcgggagctgggaagagcaccc

SEQ ID NO: 1472131 - DNA, 25 bp, Homo sapien
gagcacagcggcatctttggcttca

SEQ ID NO: 1472132 - DNA, 25 bp, Homo sapien
tccaggagcacagcggcatctttgg

SEQ ID NO: 1472133 - DNA, 25 bp, Homo sapien
ctcgccgggcctcgggttcctcgtg

SEQ ID NO: 1472134 - DNA, 25 bp, Homo sapien
cacgaggaacccgaggcccggcgag

SEQ ID NO: 1472135 - DNA, 25 bp, Homo sapien
ctttgccgttctcctcgccgggcct

SEQ ID NO: 1472136 - DNA, 25 bp, Homo sapien
tgccgttctcctcgccgggcctcgg

SEQ ID NO: 1472137 - DNA, 25 bp, Homo sapien
ctcgccgggcctcgggttcctcgtg

SEQ ID NO: 1472138 - DNA, 25 bp, Homo sapien
tttgccgttctcctcgccgggcctc

SEQ ID NO: 1472139 - DNA, 25 bp, Homo sapien
ttgccgttctcctcgccgggcctcg

SEQ ID NO: 1472140 - DNA, 25 bp, Homo sapien
aggcccggcgaggagaacggcaaag

SEQ ID NO: 1472141 - DNA, 25 bp, Homo sapien
gaggcccggcgaggagaacggcaaa

SEQ ID NO: 1472142 - DNA, 25 bp, Homo sapien
ccgaggcccggcgaggagaacggca

SEQ ID NO: 1472143 - DNA, 25 bp, Homo sapien
cacgaggaacccgaggcccggcgag

SEQ ID NO: 1472144 - DNA, 25 bp, Homo sapien
cgaggcccggcgaggagaacggcaa

SEQ ID NO: 1472145 - DNA, 25 bp, Homo sapien
cgccggctgctatgtcacgctgcat

SEQ ID NO: 1472146 - DNA, 25 bp, Homo sapien
ggcatgctcgatgaagtcgccggct

SEQ ID NO: 1472147 - DNA, 25 bp, Homo sapien
tgaagtcgccggctgctatgtcacg

SEQ ID NO: 1472148 - DNA, 25 bp, Homo sapien
gagaactcggcatgctcgatgaagt

SEQ ID NO: 1472149 - DNA, 25 bp, Homo sapien
gctcgatgaagtcgccggctgctat

SEQ ID NO: 1472150 - DNA, 25 bp, Homo sapien
gctgctatgtcacgctgcatcacct

SEQ ID NO: 1472151 - DNA, 25 bp, Homo sapien
ggcgacttcatcgagcatgccgagt

SEQ ID NO: 1472152 - DNA, 25 bp, Homo sapien
atagcagccggcgacttcatcgagc

SEQ ID NO: 1472153 - DNA, 25 bp, Homo sapien
aggtgatgcagcgtgacatagcagc

SEQ ID NO: 1472154 - DNA, 25 bp, Homo sapien
gcagccggcgacttcatcgagcatg

SEQ ID NO: 1472155 - DNA, 25 bp, Homo sapien
cttcatcgagcatgccgagttctcg

SEQ ID NO: 1472156 - DNA, 25 bp, Homo sapien
tgatgcagcgtgacatagcagccgg

SEQ ID NO: 1472157 - DNA, 25 bp, Homo sapien
cggtggccttgatgttccgcacacc

SEQ ID NO: 1472158 - DNA, 25 bp, Homo sapien
tggccttgatgttccgcacaccctg

SEQ ID NO: 1472159 - DNA, 25 bp, Homo sapien
cacagagatgtagatgggccgcaga

SEQ ID NO: 1472160 - DNA, 25 bp, Homo sapien
cagagatgtagatgggccgcagatc

SEQ ID NO: 1472161 - DNA, 25 bp, Homo sapien
tagatgggccgcagatcggtggcct

SEQ ID NO: 1472162 - DNA, 25 bp, Homo sapien
acagagatgtagatgggccgcagat

SEQ ID NO: 1472163 - DNA, 25 bp, Homo sapien
agggtgtgcggaacatcaaggccac

SEQ ID NO: 1472164 - DNA, 25 bp, Homo sapien
tctgcggcccatctacatctctgtg

SEQ ID NO: 1472165 - DNA, 25 bp, Homo sapien
cagggtgtgcggaacatcaaggcca

SEQ ID NO: 1472166 - DNA, 25 bp, Homo sapien
aaggccaccgatctgcggcccatct

SEQ ID NO: 1472167 - DNA, 25 bp, Homo sapien
ggtgtgcggaacatcaaggccaccg

SEQ ID NO: 1472168 - DNA, 25 bp, Homo sapien
gatctgcggcccatctacatctctg

SEQ ID NO: 1472169 - DNA, 25 bp, Homo sapien
tcggtttcagtgttgcgctgccgca

SEQ ID NO: 1472170 - DNA, 25 bp, Homo sapien
ttcaccaggctctcctcggtttcag

SEQ ID NO: 1472171 - DNA, 25 bp, Homo sapien
tcctcggtttcagtgttgcgctgcc

SEQ ID NO: 1472172 - DNA, 25 bp, Homo sapien
tttcagtgttgcgctgccgcagccg

SEQ ID NO: 1472173 - DNA, 25 bp, Homo sapien
ggtttcagtgttgcgctgccgcagc

SEQ ID NO: 1472174 - DNA, 25 bp, Homo sapien
agcagccagccgcttcaccaggctc

SEQ ID NO: 1472175 - DNA, 25 bp, Homo sapien
gctgcggcagcgcaacactgaaacc

SEQ ID NO: 1472176 - DNA, 25 bp, Homo sapien
ggcagcgcaacactgaaaccgagga

SEQ ID NO: 1472177 - DNA, 25 bp, Homo sapien
tgcggcagcgcaacactgaaaccga

SEQ ID NO: 1472178 - DNA, 25 bp, Homo sapien
ctgaaaccgaggagagcctggtgaa

SEQ ID NO: 1472179 - DNA, 25 bp, Homo sapien
cggcagcgcaacactgaaaccgagg

SEQ ID NO: 1472180 - DNA, 25 bp, Homo sapien
gagcctggtgaagcggctggctgct

SEQ ID NO: 1472181 - DNA, 25 bp, Homo sapien
ccggggtgccgagaacagacagcaa

SEQ ID NO: 1472182 - DNA, 25 bp, Homo sapien
actccacatgctggccaagggcaca

SEQ ID NO: 1472183 - DNA, 25 bp, Homo sapien
ggtggctcaatgctgctgccctggt

SEQ ID NO: 1472184 - DNA, 25 bp, Homo sapien
gagctgccgtatcgcctgccaaggg

SEQ ID NO: 1472185 - DNA, 25 bp, Homo sapien
accccaggatgttccaaccacaggg

SEQ ID NO: 1472186 - DNA, 25 bp, Homo sapien
gggcacagagctgccgtatcgcctg

SEQ ID NO: 1472187 - DNA, 25 bp, Homo sapien
tgtgcccttggccagcatgtggagt

SEQ ID NO: 1472188 - DNA, 25 bp, Homo sapien
ttgctgtctgttctcggcaccccgg

SEQ ID NO: 1472189 - DNA, 25 bp, Homo sapien
accagggcagcagcattgagccacc

SEQ ID NO: 1472190 - DNA, 25 bp, Homo sapien
caggcgatacggcagctctgtgccc

SEQ ID NO: 1472191 - DNA, 25 bp, Homo sapien
ccttggcaggcgatacggcagctct

SEQ ID NO: 1472192 - DNA, 25 bp, Homo sapien
aggaccggcgcctgaggcttgctgt

SEQ ID NO: 1472193 - DNA, 25 bp, Homo sapien
catgtgaaggatgcatgaggatggc

SEQ ID NO: 1472194 - DNA, 25 bp, Homo sapien
atgtgaaggatgcatgaggatggct

SEQ ID NO: 1472195 - DNA, 25 bp, Homo sapien
cccagggtgcctggtatgggcatca

SEQ ID NO: 1472196 - DNA, 25 bp, Homo sapien
tgtcctgagctggaataggtcctct

SEQ ID NO: 1472197 - DNA, 25 bp, Homo sapien
ctaattcagacccagcctcaagagg

SEQ ID NO: 1472198 - DNA, 25 bp, Homo sapien
tggacaggaccataccctctttgag

SEQ ID NO: 1472199 - DNA, 25 bp, Homo sapien
atgtcaacagggtgcatgggcccca

SEQ ID NO: 1472200 - DNA, 25 bp, Homo sapien
tatgggacatcactcctcgagaaag

SEQ ID NO: 1472201 - DNA, 25 bp, Homo sapien
ttggaccagggcagtcagactctag

SEQ ID NO: 1472202 - DNA, 25 bp, Homo sapien
tagatgtgtcacctactaccaggga

SEQ ID NO: 1472203 - DNA, 25 bp, Homo sapien
atggtgcctgtccttatccgtggag

SEQ ID NO: 1472204 - DNA, 25 bp, Homo sapien
cctgcagctgaagtcccaatggtcc

SEQ ID NO: 1472205 - DNA, 25 bp, Homo sapien
tcccaatggtccagcaaatgaaaaa

SEQ ID NO: 1472206 - DNA, 25 bp, Homo sapien
gattgtgtctcatcatgtcacactg

SEQ ID NO: 1472207 - DNA, 25 bp, Homo sapien
agagaggctgtagggtcatgttgca

SEQ ID NO: 1472208 - DNA, 25 bp, Homo sapien
catgttgcaggtaggattgtggtcc

SEQ ID NO: 1472209 - DNA, 25 bp, Homo sapien
tggtccagtggccttgctgcgagct

SEQ ID NO: 1472210 - DNA, 25 bp, Homo sapien
tctcttcatgtaggaggcagagaga

SEQ ID NO: 1472211 - DNA, 25 bp, Homo sapien
tgtgtttcctgaagaatcgggaact

SEQ ID NO: 1472212 - DNA, 25 bp, Homo sapien
tatgagatgggatgagacaagaaga

SEQ ID NO: 1472213 - DNA, 25 bp, Homo sapien
cacaccaatgttctgatcttagagt

SEQ ID NO: 1472214 - DNA, 25 bp, Homo sapien
ctgatcttagagtaagcagacacat

SEQ ID NO: 1472215 - DNA, 25 bp, Homo sapien
tgttccttgtaaatgagtcagcctc

SEQ ID NO: 1472216 - DNA, 25 bp, Homo sapien
tggaggtggaattcccaagtcggcc

SEQ ID NO: 1472217 - DNA, 25 bp, Homo sapien
aagggtaagtccagcccgcttgtgc

SEQ ID NO: 1472218 - DNA, 25 bp, Homo sapien
gactgtccggtctccagaaccgtga

SEQ ID NO: 1472219 - DNA, 25 bp, Homo sapien
ctttattgcccgctggacatggtgg

SEQ ID NO: 1472220 - DNA, 25 bp, Homo sapien
taaggacatcgtgctgggctgcaga

SEQ ID NO: 1472221 - DNA, 25 bp, Homo sapien
cctaggaggttaagactggagtgct

SEQ ID NO: 1472222 - DNA, 25 bp, Homo sapien
tggagtgctgtacaatcgcaccact

SEQ ID NO: 1472223 - DNA, 25 bp, Homo sapien
cattcatcaacttctcttatctcta

SEQ ID NO: 1472224 - DNA, 25 bp, Homo sapien
tacaagttgtagagatcaaaccagt

SEQ ID NO: 1472225 - DNA, 25 bp, Homo sapien
tcatctgcacgatttgcctttatgc

SEQ ID NO: 1472226 - DNA, 25 bp, Homo sapien
gaattactctcttatagctatttgg

SEQ ID NO: 1472227 - DNA, 25 bp, Homo sapien
tcagagcagcgtcttctgaaccagc

SEQ ID NO: 1472228 - DNA, 25 bp, Homo sapien
ctgaaccagcggcttctctggttca

SEQ ID NO: 1472229 - DNA, 25 bp, Homo sapien
cagcggcttctctggttcattttgc

SEQ ID NO: 1472230 - DNA, 25 bp, Homo sapien
aaccagcggcttctctggttcattt

SEQ ID NO: 1472231 - DNA, 25 bp, Homo sapien
gtgcccatgagaacggagccctgtg

SEQ ID NO: 1472232 - DNA, 25 bp, Homo sapien
cagtgcccatgagaacggagccctg

SEQ ID NO: 1472233 - DNA, 25 bp, Homo sapien
gccctgtgtgtctgatggtgaccat

SEQ ID NO: 1472234 - DNA, 25 bp, Homo sapien
tgaccatggggtggcattgaacaga

SEQ ID NO: 1472235 - DNA, 25 bp, Homo sapien
tatgttgagcaccttcccatgtact

SEQ ID NO: 1472236 - DNA, 25 bp, Homo sapien
tagttactatgttgagcaccttccc

SEQ ID NO: 1472237 - DNA, 25 bp, Homo sapien
atttctctagttactatgttgagca

SEQ ID NO: 1472238 - DNA, 25 bp, Homo sapien
tactatgttgagcaccttcccatgt

SEQ ID NO: 1472239 - DNA, 25 bp, Homo sapien
catgttgatttcacggaggtagaga

SEQ ID NO: 1472240 - DNA, 25 bp, Homo sapien
caacataggtttgcaccactgagtc

SEQ ID NO: 1472241 - DNA, 25 bp, Homo sapien
cagcagtgttctcaggatgtcaaac

SEQ ID NO: 1472242 - DNA, 25 bp, Homo sapien
ggttaatgggtagagacacacagtc

SEQ ID NO: 1472243 - DNA, 25 bp, Homo sapien
aaccagcttcccatgtatgcttcaa

SEQ ID NO: 1472244 - DNA, 25 bp, Homo sapien
ttccacagggctgaccgtagaactt

SEQ ID NO: 1472245 - DNA, 25 bp, Homo sapien
cagcttcccatgtatgcttcaaaat

SEQ ID NO: 1472246 - DNA, 25 bp, Homo sapien
agggctgaccgtagaacttgagtat

SEQ ID NO: 1472247 - DNA, 25 bp, Homo sapien
ccttcagggtgggacgatgcactta

SEQ ID NO: 1472248 - DNA, 25 bp, Homo sapien
tggaagctggcaactcaagggacac

SEQ ID NO: 1472249 - DNA, 25 bp, Homo sapien
tataccgggagaaacgttgccagca

SEQ ID NO: 1472250 - DNA, 25 bp, Homo sapien
tctacaagctggtcaaggatggaaa

SEQ ID NO: 1472251 - DNA, 25 bp, Homo sapien
gctctgtagtgtgaatatcccactg

SEQ ID NO: 1472252 - DNA, 25 bp, Homo sapien
gacagcagctccatgaaagttctct

SEQ ID NO: 1472253 - DNA, 25 bp, Homo sapien
caaatacgttgcagggaaataagga

SEQ ID NO: 1472254 - DNA, 25 bp, Homo sapien
cctcccgtggtgtgaaggacaccct

SEQ ID NO: 1472255 - DNA, 25 bp, Homo sapien
ccccaaggtgacaggattagaacgt

SEQ ID NO: 1472256 - DNA, 25 bp, Homo sapien
attgcccggaagagcctgaggtacg

SEQ ID NO: 1472257 - DNA, 25 bp, Homo sapien
tacgctgtgaggacacatagaggcc

SEQ ID NO: 1472258 - DNA, 25 bp, Homo sapien
ggcacgtattcgagcacacacaatg

SEQ ID NO: 1472259 - DNA, 25 bp, Homo sapien
cctggccaagcagggtgcaccaggc

SEQ ID NO: 1472260 - DNA, 25 bp, Homo sapien
ccaagcagggtgcaccaggctcctg

SEQ ID NO: 1472261 - DNA, 25 bp, Homo sapien
ccatgtaaggatgactctgagaccc

SEQ ID NO: 1472262 - DNA, 25 bp, Homo sapien
aggacactcctgtgctcccatgtaa

SEQ ID NO: 1472263 - DNA, 25 bp, Homo sapien
gccatcctcctgcttcagtctcttg

SEQ ID NO: 1472264 - DNA, 25 bp, Homo sapien
cttgagtagctgggacagcaggcac

SEQ ID NO: 1472265 - DNA, 25 bp, Homo sapien
agccatcctcctgcttcagtctctt

SEQ ID NO: 1472266 - DNA, 25 bp, Homo sapien
tctcttgagtagctgggacagcagg

SEQ ID NO: 1472267 - DNA, 25 bp, Homo sapien
ggcctgactgtatgactttggagag

SEQ ID NO: 1472268 - DNA, 25 bp, Homo sapien
ggagcccatagaggcaaattcccag

SEQ ID NO: 1472269 - DNA, 25 bp, Homo sapien
tagcccttttgagtcctgggaggag

SEQ ID NO: 1472270 - DNA, 25 bp, Homo sapien
gcagagttgatgtcaaagtagccct

SEQ ID NO: 1472271 - DNA, 25 bp, Homo sapien
tctgtccggtcgtggaatccagggt

SEQ ID NO: 1472272 - DNA, 25 bp, Homo sapien
gacgcgcaggagaacttcgtgctca

SEQ ID NO: 1472273 - DNA, 25 bp, Homo sapien
cagctctgtgctggtcgtagtgcgc

SEQ ID NO: 1472274 - DNA, 25 bp, Homo sapien
tgcacggtgactgaaggcaagcacg

SEQ ID NO: 1472275 - DNA, 25 bp, Homo sapien
cgagcgccaagtacggcatcgagga

SEQ ID NO: 1472276 - DNA, 25 bp, Homo sapien
cacgttcctatgtgaggtgccccag

SEQ ID NO: 1472277 - DNA, 25 bp, Homo sapien
tgcgcaatgtctcggccgacgacga

SEQ ID NO: 1472278 - DNA, 25 bp, Homo sapien
caaaaagcggctgcaagatctggag

SEQ ID NO: 1472279 - DNA, 25 bp, Homo sapien
aaggataggtgaccccactacaggg

SEQ ID NO: 1472280 - DNA, 25 bp, Homo sapien
gctatggtcgctctgtgtgttggct

SEQ ID NO: 1472281 - DNA, 25 bp, Homo sapien
gaggaacatttaggtctaggctctg

SEQ ID NO: 1472282 - DNA, 25 bp, Homo sapien
ggtctcagggcagctgtaccttgtc

SEQ ID NO: 1472283 - DNA, 25 bp, Homo sapien
ggctgctacaggtctgagggcccca

SEQ ID NO: 1472284 - DNA, 25 bp, Homo sapien
tggctggtggcactggtccctggtg

SEQ ID NO: 1472285 - DNA, 25 bp, Homo sapien
tcctctatcttgttaatcttttccc

SEQ ID NO: 1472286 - DNA, 25 bp, Homo sapien
catgcctggctgttccacctctgtc

SEQ ID NO: 1472287 - DNA, 25 bp, Homo sapien
ttgcctttgagattggaaacagaac

SEQ ID NO: 1472288 - DNA, 25 bp, Homo sapien
catgcacctcacagatgatatggtt

SEQ ID NO: 1472289 - DNA, 25 bp, Homo sapien
catgaaaccttgaaagcgttgcctt

SEQ ID NO: 1472290 - DNA, 25 bp, Homo sapien
tccaacattgtatagcagacagagg

SEQ ID NO: 1472291 - DNA, 25 bp, Homo sapien
tgagctccagctcgaaagtgcgaat

SEQ ID NO: 1472292 - DNA, 25 bp, Homo sapien
cccagacagaggtgacgtggtacaa

SEQ ID NO: 1472293 - DNA, 25 bp, Homo sapien
tgatggtgcttctggctcgtagccc

SEQ ID NO: 1472294 - DNA, 25 bp, Homo sapien
tcgtagccccagcatatctctgtgc

SEQ ID NO: 1472295 - DNA, 25 bp, Homo sapien
tggtcagtggtactgcagaaaacac

SEQ ID NO: 1472296 - DNA, 25 bp, Homo sapien
tttacaagagcgtgaaaagcatcaa

SEQ ID NO: 1472297 - DNA, 25 bp, Homo sapien
tatcgttctttaatctggtcagtgg

SEQ ID NO: 1472298 - DNA, 25 bp, Homo sapien
gaatcagcacgtagaagccaaccat

SEQ ID NO: 1472299 - DNA, 25 bp, Homo sapien
agagtggagttcagtcgtgcaatca

SEQ ID NO: 1472300 - DNA, 25 bp, Homo sapien
agtggagttcagtcgtgcaatcatg

SEQ ID NO: 1472301 - DNA, 25 bp, Homo sapien
gagtggagttcagtcgtgcaatcat

SEQ ID NO: 1472302 - DNA, 25 bp, Homo sapien
caaggacagttgtcagaccaaaggg

SEQ ID NO: 1472303 - DNA, 25 bp, Homo sapien
ggccaagtggagtaacacactcttg

SEQ ID NO: 1472304 - DNA, 25 bp, Homo sapien
aagactcaaatatgttaatgcccag

SEQ ID NO: 1472305 - DNA, 25 bp, Homo sapien
caaagggacagaatcgtgagctcat

SEQ ID NO: 1472306 - DNA, 25 bp, Homo sapien
taaaactttaatttgtcaagacatc

SEQ ID NO: 1472307 - DNA, 25 bp, Homo sapien
gctaacatagattgctaaaaacttc

SEQ ID NO: 1472308 - DNA, 25 bp, Homo sapien
catttgagagcgaaaaggccggtca

SEQ ID NO: 1472309 - DNA, 25 bp, Homo sapien
aagacatcatttgagagcgaaaagg

SEQ ID NO: 1472310 - DNA, 25 bp, Homo sapien
gacaaactgtgattcttgcgctggg

SEQ ID NO: 1472311 - DNA, 25 bp, Homo sapien
cagcatgaggaagccagtggtcaac

SEQ ID NO: 1472312 - DNA, 25 bp, Homo sapien
tgtttgccaaggatcagccggtgca

SEQ ID NO: 1472313 - DNA, 25 bp, Homo sapien
gagctccagctcgaaaatgcgtgtg

SEQ ID NO: 1472314 - DNA, 25 bp, Homo sapien
tcttcttcagttgtgaagcatggaa

SEQ ID NO: 1472315 - DNA, 25 bp, Homo sapien
gagtcattccaaggcaaaattcttc

SEQ ID NO: 1472316 - DNA, 25 bp, Homo sapien
gtatgagtcattccaaggcaaaatt

SEQ ID NO: 1472317 - DNA, 25 bp, Homo sapien
ggaaccagacaagttttgtgcttcc

SEQ ID NO: 1472318 - DNA, 25 bp, Homo sapien
ccaggtatatctaggcatgggcact

SEQ ID NO: 1472319 - DNA, 25 bp, Homo sapien
tccaggtgtcagtacggttggctcc

SEQ ID NO: 1472320 - DNA, 25 bp, Homo sapien
tctggaggctagatggttgagatcc

SEQ ID NO: 1472321 - DNA, 25 bp, Homo sapien
ggattcagtagggtcagtctagcag

SEQ ID NO: 1472322 - DNA, 25 bp, Homo sapien
agttcagaaatgcgggtggagctgc

SEQ ID NO: 1472323 - DNA, 25 bp, Homo sapien
tcagttcagaaatgcgggtggagct

SEQ ID NO: 1472324 - DNA, 25 bp, Homo sapien
cagttcagaaatgcgggtggagctg

SEQ ID NO: 1472325 - DNA, 25 bp, Homo sapien
agcacagccttagggcccttagagg

SEQ ID NO: 1472326 - DNA, 25 bp, Homo sapien
tacatagtgcattcatagtggacag

SEQ ID NO: 1472327 - DNA, 25 bp, Homo sapien
tccaggatgggaaaactcttagttc

SEQ ID NO: 1472328 - DNA, 25 bp, Homo sapien
actcctggaggtatgcaacggtgcc

SEQ ID NO: 1472329 - DNA, 25 bp, Homo sapien
tataaagtgggatcagaccctctcc

SEQ ID NO: 1472330 - DNA, 25 bp, Homo sapien
catcagcagatcaggcaacatgagg

SEQ ID NO: 1472331 - DNA, 25 bp, Homo sapien
tcatgcctgggagcaactgcttcca

SEQ ID NO: 1472332 - DNA, 25 bp, Homo sapien
gggtggtcacacatctctgggctca

SEQ ID NO: 1472333 - DNA, 25 bp, Homo sapien
gggactctgtaggttgggctcacat

SEQ ID NO: 1472334 - DNA, 25 bp, Homo sapien
ccagagaagagaccatcaccactgt

SEQ ID NO: 1472335 - DNA, 25 bp, Homo sapien
cacatgcatgtgtaagagttctttg

SEQ ID NO: 1472336 - DNA, 25 bp, Homo sapien
tggcttgctggtacaataacctgag

SEQ ID NO: 1472337 - DNA, 25 bp, Homo sapien
tgtttgggcctgtgagccccttaga

SEQ ID NO: 1472338 - DNA, 25 bp, Homo sapien
ttcttgggcaaagcgtgcaagcgag

SEQ ID NO: 1472339 - DNA, 25 bp, Homo sapien
tctctgccccgggaagagttcttgg

SEQ ID NO: 1472340 - DNA, 25 bp, Homo sapien
gcctcggtgaaaagcaacccagtgt

SEQ ID NO: 1472341 - DNA, 25 bp, Homo sapien
tacaaaggatacagacacatagggc

SEQ ID NO: 1472342 - DNA, 25 bp, Homo sapien
ttggattatggaagctttgttacat

SEQ ID NO: 1472343 - DNA, 25 bp, Homo sapien
aaggaagaggcgtggagccaccctg

SEQ ID NO: 1472344 - DNA, 25 bp, Homo sapien
ccaccctggaacctatcagacaaaa

SEQ ID NO: 1472345 - DNA, 25 bp, Homo sapien
tcaagtcagaacgtgggcctgcaaa

SEQ ID NO: 1472346 - DNA, 25 bp, Homo sapien
gaactgtgcagcttaggtgaaccct

SEQ ID NO: 1472347 - DNA, 25 bp, Homo sapien
ttggcattaagtggcacccggtggc

SEQ ID NO: 1472348 - DNA, 25 bp, Homo sapien
tccccagggtagagagactgcaagg

SEQ ID NO: 1472349 - DNA, 25 bp, Homo sapien
gagaggcaacaggactcctccagga

SEQ ID NO: 1472350 - DNA, 25 bp, Homo sapien
gaggcaacaggactcctccaggagg

SEQ ID NO: 1472351 - DNA, 25 bp, Homo sapien
agaggcaacaggactcctccaggag

SEQ ID NO: 1472352 - DNA, 25 bp, Homo sapien
tcactggggagccagggtgtccccg

SEQ ID NO: 1472353 - DNA, 25 bp, Homo sapien
cactggggagccagggtgtccccgg

SEQ ID NO: 1472354 - DNA, 25 bp, Homo sapien
gaagaccaggatccagaagccgttg

SEQ ID NO: 1472355 - DNA, 25 bp, Homo sapien
gaattgtaatagctccccaggaaga

SEQ ID NO: 1472356 - DNA, 25 bp, Homo sapien
gagagatgtccagcctcgtagtcca

SEQ ID NO: 1472357 - DNA, 25 bp, Homo sapien
tgacccatcggtggcactgtagaaa

SEQ ID NO: 1472358 - DNA, 25 bp, Homo sapien
ggcaagctggggccatctgcccatg

SEQ ID NO: 1472359 - DNA, 25 bp, Homo sapien
cccaaggtcacccaggcacagccac

SEQ ID NO: 1472360 - DNA, 25 bp, Homo sapien
ccacaggcaagctggggccatctgc

SEQ ID NO: 1472361 - DNA, 25 bp, Homo sapien
caagctggggccatctgcccatgtc

SEQ ID NO: 1472362 - DNA, 25 bp, Homo sapien
aagtatgagcagaggacgttttccc

SEQ ID NO: 1472363 - DNA, 25 bp, Homo sapien
catgggctgtgctagcgaatgctca

SEQ ID NO: 1472364 - DNA, 25 bp, Homo sapien
tcctgtcagtagagggcgggaacac

SEQ ID NO: 1472365 - DNA, 25 bp, Homo sapien
tcctgacctgctagcaagagctgag

SEQ ID NO: 1472366 - DNA, 25 bp, Homo sapien
gaaacctccgcagtgtctctaccag

SEQ ID NO: 1472367 - DNA, 25 bp, Homo sapien
aaacctccgcagtgtctctaccagt

SEQ ID NO: 1472368 - DNA, 25 bp, Homo sapien
ctcgaaacctccgcagtgtctctac

SEQ ID NO: 1472369 - DNA, 25 bp, Homo sapien
tgtctctaccagtcccgggaccctg

SEQ ID NO: 1472370 - DNA, 25 bp, Homo sapien
ctgggggctgcagcttcacatcctg

SEQ ID NO: 1472371 - DNA, 25 bp, Homo sapien
aggcacaacttctgggggctgcagc

SEQ ID NO: 1472372 - DNA, 25 bp, Homo sapien
gggggctgcagcttcacatcctgga

SEQ ID NO: 1472373 - DNA, 25 bp, Homo sapien
gggctgcagcttcacatcctggacc

SEQ ID NO: 1472374 - DNA, 25 bp, Homo sapien
caacccaggtgttgtcgccatggcc

SEQ ID NO: 1472375 - DNA, 25 bp, Homo sapien
aggtgttgtcgccatggccaacagc

SEQ ID NO: 1472376 - DNA, 25 bp, Homo sapien
aacccaggtgttgtcgccatggcca

SEQ ID NO: 1472377 - DNA, 25 bp, Homo sapien
cccaggtgttgtcgccatggccaac

SEQ ID NO: 1472378 - DNA, 25 bp, Homo sapien
catttgagcgtcaggcagcaaaaac

SEQ ID NO: 1472379 - DNA, 25 bp, Homo sapien
ggagaaacagcacactcggtgtcag

SEQ ID NO: 1472380 - DNA, 25 bp, Homo sapien
gtcagtgaccatcgcttgctcctgg

SEQ ID NO: 1472381 - DNA, 25 bp, Homo sapien
ataaaccacccgcagcaaggctcag

SEQ ID NO: 1472382 - DNA, 25 bp, Homo sapien
aaccctgtggttgcactgcttcctc

SEQ ID NO: 1472383 - DNA, 25 bp, Homo sapien
ttgggcgtgcgtccttcctgtgtca

SEQ ID NO: 1472384 - DNA, 25 bp, Homo sapien
ccaagtgggcgcctctgggtgccaa

SEQ ID NO: 1472385 - DNA, 25 bp, Homo sapien
tctgcctgacacttggatgtagggc

SEQ ID NO: 1472386 - DNA, 25 bp, Homo sapien
agctcagctaggtgggcgctctgct

SEQ ID NO: 1472387 - DNA, 25 bp, Homo sapien
ccagcaaacggcgaagacgctcgaa

SEQ ID NO: 1472388 - DNA, 25 bp, Homo sapien
cagcggccctcgagctcggcgatga

SEQ ID NO: 1472389 - DNA, 25 bp, Homo sapien
ctcctctgccagcaaacggcgaaga

SEQ ID NO: 1472390 - DNA, 25 bp, Homo sapien
ctgtggagcccagggagaaggacag

SEQ ID NO: 1472391 - DNA, 25 bp, Homo sapien
cccaggaccctgggagccccagcac

SEQ ID NO: 1472392 - DNA, 25 bp, Homo sapien
tgccacccaggaccctgggagcccc

SEQ ID NO: 1472393 - DNA, 25 bp, Homo sapien
cctgccacccaggaccctgggagcc

SEQ ID NO: 1472394 - DNA, 25 bp, Homo sapien
cacccaggaccctgggagccccagc

SEQ ID NO: 1472395 - DNA, 25 bp, Homo sapien
aagacgcaggtctcatccgcctggg

SEQ ID NO: 1472396 - DNA, 25 bp, Homo sapien
gtctcatccgcctgggcttggaaca

SEQ ID NO: 1472397 - DNA, 25 bp, Homo sapien
gcttccggagatgctccagtgactt

SEQ ID NO: 1472398 - DNA, 25 bp, Homo sapien
cttccggagatgctccagtgacttc

SEQ ID NO: 1472399 - DNA, 25 bp, Homo sapien
cggctccccgacgcccctgcacgcc

SEQ ID NO: 1472400 - DNA, 25 bp, Homo sapien
gctccccgacgcccctgcacgccac

SEQ ID NO: 1472401 - DNA, 25 bp, Homo sapien
tccccgacgcccctgcacgccaccc

SEQ ID NO: 1472402 - DNA, 25 bp, Homo sapien
cgacgcccctgcacgccacccccgc

SEQ ID NO: 1472403 - DNA, 25 bp, Homo sapien
gccggatgcactcgcggcagaagtt

SEQ ID NO: 1472404 - DNA, 25 bp, Homo sapien
aggcgcagctcgtcgccacagaagg

SEQ ID NO: 1472405 - DNA, 25 bp, Homo sapien
tctcggccatcttagcaagcgggcg

SEQ ID NO: 1472406 - DNA, 25 bp, Homo sapien
ttgtggccgcagtcggtcatcaccg

SEQ ID NO: 1472407 - DNA, 25 bp, Homo sapien
gcggacagaggggaggaaggcggta

SEQ ID NO: 1472408 - DNA, 25 bp, Homo sapien
ggcgcggacagaggggaggaaggcg

SEQ ID NO: 1472409 - DNA, 25 bp, Homo sapien
cgcggacagaggggaggaaggcggt

SEQ ID NO: 1472410 - DNA, 25 bp, Homo sapien
gcgcggacagaggggaggaaggcgg

SEQ ID NO: 1472411 - DNA, 25 bp, Homo sapien
gcggcgcaggctcgggcactccggg

SEQ ID NO: 1472412 - DNA, 25 bp, Homo sapien
ttcggtagcgctgggcgcgtaggct

SEQ ID NO: 1472413 - DNA, 25 bp, Homo sapien
ggcgcgtaggctccgagcgctcggg

SEQ ID NO: 1472414 - DNA, 25 bp, Homo sapien
actccagggcgcaggactctgggtt

SEQ ID NO: 1472415 - DNA, 25 bp, Homo sapien
gaagcaactgcaaggactaagggag

SEQ ID NO: 1472416 - DNA, 25 bp, Homo sapien
gctttcacttgctgacctggcgtca

SEQ ID NO: 1472417 - DNA, 25 bp, Homo sapien
cgggacggaattggagagctttcac

SEQ ID NO: 1472418 - DNA, 25 bp, Homo sapien
cgctccggttcttgtggccaggtct

SEQ ID NO: 1472419 - DNA, 25 bp, Homo sapien
tctaggaagcatctgtcagtatacc

SEQ ID NO: 1472420 - DNA, 25 bp, Homo sapien
cctgtgtgtctaatggctgccagcg

SEQ ID NO: 1472421 - DNA, 25 bp, Homo sapien
gcagtaagcagaaggcccacacctt

SEQ ID NO: 1472422 - DNA, 25 bp, Homo sapien
tagaaatcggtccactcagaacgca

SEQ ID NO: 1472423 - DNA, 25 bp, Homo sapien
gggtaagccacaaatcggtccttgc

SEQ ID NO: 1472424 - DNA, 25 bp, Homo sapien
gggacccatcgcttacactgtagaa

SEQ ID NO: 1472425 - DNA, 25 bp, Homo sapien
aacgcgtccccggtgatgttcatgc

SEQ ID NO: 1472426 - DNA, 25 bp, Homo sapien
ctctggcggctctcatacaggagga

SEQ ID NO: 1472427 - DNA, 25 bp, Homo sapien
gcattcagggtcaaaggtgggagtc

SEQ ID NO: 1472428 - DNA, 25 bp, Homo sapien
cattcagggtcaaaggtgggagtcc

SEQ ID NO: 1472429 - DNA, 25 bp, Homo sapien
tggggcattcagggtcaaaggtggg

SEQ ID NO: 1472430 - DNA, 25 bp, Homo sapien
gggcattcagggtcaaaggtgggag

SEQ ID NO: 1472431 - DNA, 25 bp, Homo sapien
ggggttacttgatgcttccacacac

SEQ ID NO: 1472432 - DNA, 25 bp, Homo sapien
cctcccctgctgtgaatctggggtt

SEQ ID NO: 1472433 - DNA, 25 bp, Homo sapien
aatggtcccctaactccgcagaggc

SEQ ID NO: 1472434 - DNA, 25 bp, Homo sapien
gtggatgtggccaatggtcccctaa

SEQ ID NO: 1472435 - DNA, 25 bp, Homo sapien
gaattagaaccaccagtaacgccgc

SEQ ID NO: 1472436 - DNA, 25 bp, Homo sapien
gaactcaacaagattcatcccatga

SEQ ID NO: 1472437 - DNA, 25 bp, Homo sapien
gcagagagaccactgggaactcaac

SEQ ID NO: 1472438 - DNA, 25 bp, Homo sapien
tcatcccatgaattagaaccaccag

SEQ ID NO: 1472439 - DNA, 25 bp, Homo sapien
gcacagtgaatagccagtgaccgtc

SEQ ID NO: 1472440 - DNA, 25 bp, Homo sapien
ccagtgaccgtcaccaggcagtgca

SEQ ID NO: 1472441 - DNA, 25 bp, Homo sapien
aggcagtgcacttgtagaacccccc

SEQ ID NO: 1472442 - DNA, 25 bp, Homo sapien
ctacgaaggcacagtgaatagccag

SEQ ID NO: 1472443 - DNA, 25 bp, Homo sapien
tggggcatcgccaagagatcctggg

SEQ ID NO: 1472444 - DNA, 25 bp, Homo sapien
ctagggggtacagtggggcatcgcc

SEQ ID NO: 1472445 - DNA, 25 bp, Homo sapien
gggcatcgccaagagatcctgggtc

SEQ ID NO: 1472446 - DNA, 25 bp, Homo sapien
agtggggcatcgccaagagatcctg

SEQ ID NO: 1472447 - DNA, 25 bp, Homo sapien
tagcacttcaatctgtccgggaact

SEQ ID NO: 1472448 - DNA, 25 bp, Homo sapien
ttagcacttcaatctgtccgggaac

SEQ ID NO: 1472449 - DNA, 25 bp, Homo sapien
ctagaaagcctcttagcacttcaat

SEQ ID NO: 1472450 - DNA, 25 bp, Homo sapien
aagcctcttagcacttcaatctgtc

SEQ ID NO: 1472451 - DNA, 25 bp, Homo sapien
ctgggcactgcacactcacgttgtt

SEQ ID NO: 1472452 - DNA, 25 bp, Homo sapien
tggttgggggggcaacctctgggca

SEQ ID NO: 1472453 - DNA, 25 bp, Homo sapien
acctctgggcactgcacactcacgt

SEQ ID NO: 1472454 - DNA, 25 bp, Homo sapien
ctctgggcactgcacactcacgttg

SEQ ID NO: 1472455 - DNA, 25 bp, Homo sapien
gcccctgcctgaggggaccacatac

SEQ ID NO: 1472456 - DNA, 25 bp, Homo sapien
caccaggtagaggttcatcttctca

SEQ ID NO: 1472457 - DNA, 25 bp, Homo sapien
gcacaatgcgttctctccgctcctt

SEQ ID NO: 1472458 - DNA, 25 bp, Homo sapien
aggccacgctctcccggagcctgct

SEQ ID NO: 1472459 - DNA, 25 bp, Homo sapien
cagagagtgaccctgccggtccagg

SEQ ID NO: 1472460 - DNA, 25 bp, Homo sapien
tgctcccgaaggtactccatgtcct

SEQ ID NO: 1472461 - DNA, 25 bp, Homo sapien
tgtcctggtgatctgctcccgaagg

SEQ ID NO: 1472462 - DNA, 25 bp, Homo sapien
tgccactcggctaagctctgctcct

SEQ ID NO: 1472463 - DNA, 25 bp, Homo sapien
gcagattccctgtcctggtgatctg

SEQ ID NO: 1472464 - DNA, 25 bp, Homo sapien
cttcttgcccctcgccttttcccag

SEQ ID NO: 1472465 - DNA, 25 bp, Homo sapien
gcaggttcctctgcggggacatctc

SEQ ID NO: 1472466 - DNA, 25 bp, Homo sapien
gaggggctcgtggtgctcctggcac

SEQ ID NO: 1472467 - DNA, 25 bp, Homo sapien
ttgcttctgcagaccaggatgctgc

SEQ ID NO: 1472468 - DNA, 25 bp, Homo sapien
tggagcacgtagcttcctcctgcag

SEQ ID NO: 1472469 - DNA, 25 bp, Homo sapien
agacagatggagcacgtagcttcct

SEQ ID NO: 1472470 - DNA, 25 bp, Homo sapien
ttttctggcgagttccacagcctcc

SEQ ID NO: 1472471 - DNA, 25 bp, Homo sapien
cctgcagttttctggcgagttccac

SEQ ID NO: 1472472 - DNA, 25 bp, Homo sapien
tgggagacacgaggcaggttcccgc

SEQ ID NO: 1472473 - DNA, 25 bp, Homo sapien
acacgaggcaggttcccgcttgagg

SEQ ID NO: 1472474 - DNA, 25 bp, Homo sapien
agacacgaggcaggttcccgcttga

SEQ ID NO: 1472475 - DNA, 25 bp, Homo sapien
ggagacacgaggcaggttcccgctt

SEQ ID NO: 1472476 - DNA, 25 bp, Homo sapien
tctggagaagcctgctaggtcagct

SEQ ID NO: 1472477 - DNA, 25 bp, Homo sapien
agtccagttagagagtccagagtca

SEQ ID NO: 1472478 - DNA, 25 bp, Homo sapien
taggtcagcttagggagaagcccct

SEQ ID NO: 1472479 - DNA, 25 bp, Homo sapien
tgcaagtagcctgactaaagagcct

SEQ ID NO: 1472480 - DNA, 25 bp, Homo sapien
agcgcctagtgcacctggccgagcg

SEQ ID NO: 1472481 - DNA, 25 bp, Homo sapien
cccgcacagcgcctagtgcacctgg

SEQ ID NO: 1472482 - DNA, 25 bp, Homo sapien
gcacagcgcctagtgcacctggccg

SEQ ID NO: 1472483 - DNA, 25 bp, Homo sapien
gggcccgcacagcgcctagtgcacc

SEQ ID NO: 1472484 - DNA, 25 bp, Homo sapien
aaaatagggtaagagagccatggcc

SEQ ID NO: 1472485 - DNA, 25 bp, Homo sapien
aatctgttggcaccgtgaccttgga

SEQ ID NO: 1472486 - DNA, 25 bp, Homo sapien
gcaccacatgaggacgcagtgagaa

SEQ ID NO: 1472487 - DNA, 25 bp, Homo sapien
caattcagactgctcaacaggagag

SEQ ID NO: 1472488 - DNA, 25 bp, Homo sapien
aacctctcaggtggcgagatagccc

SEQ ID NO: 1472489 - DNA, 25 bp, Homo sapien
agcctttggggtgaacgttgcgcaa

SEQ ID NO: 1472490 - DNA, 25 bp, Homo sapien
ctttggggtgaacgttgcgcaacct

SEQ ID NO: 1472491 - DNA, 25 bp, Homo sapien
gaacgttgcgcaacctctcaggtgg

SEQ ID NO: 1472492 - DNA, 25 bp, Homo sapien
ttgccacccgttgacttgcgcgcag

SEQ ID NO: 1472493 - DNA, 25 bp, Homo sapien
ggtgacccgtttggcatggatgaca

SEQ ID NO: 1472494 - DNA, 25 bp, Homo sapien
tcttcacgccgccagtggcaggtgc

SEQ ID NO: 1472495 - DNA, 25 bp, Homo sapien
aaagtcctgagcgatctcgcgcatc

SEQ ID NO: 1472496 - DNA, 25 bp, Homo sapien
agatttcctgccagtcaaaggctcc

SEQ ID NO: 1472497 - DNA, 25 bp, Homo sapien
ctgccagtcaaaggctccggaagct

SEQ ID NO: 1472498 - DNA, 25 bp, Homo sapien
tcaaaggctccggaagcttctgctc

SEQ ID NO: 1472499 - DNA, 25 bp, Homo sapien
tggctggagatttcctgccagtcaa

SEQ ID NO: 1472500 - DNA, 25 bp, Homo sapien
gaggccggtggtcgcgtaggacagg

SEQ ID NO: 1472501 - DNA, 25 bp, Homo sapien
aggaggccggtggtcgcgtaggaca

SEQ ID NO: 1472502 - DNA, 25 bp, Homo sapien
gccggtggtcgcgtaggacagggaa

SEQ ID NO: 1472503 - DNA, 25 bp, Homo sapien
gtggtcgcgtaggacagggaaggct

SEQ ID NO: 1472504 - DNA, 25 bp, Homo sapien
cgcggtaaggcccagagtgcgaaga

SEQ ID NO: 1472505 - DNA, 25 bp, Homo sapien
agacgccgcgtctaagggcagcaga

SEQ ID NO: 1472506 - DNA, 25 bp, Homo sapien
gagcagccgcggtaaggcccagagt

SEQ ID NO: 1472507 - DNA, 25 bp, Homo sapien
cagagtgcgaagacgccgcgtctaa

SEQ ID NO: 1472508 - DNA, 25 bp, Homo sapien
agttgaacatatgctctccatcagg

SEQ ID NO: 1472509 - DNA, 25 bp, Homo sapien
gagccagttgaacatatgctctcca

SEQ ID NO: 1472510 - DNA, 25 bp, Homo sapien
cagttgaacatatgctctccatcag

SEQ ID NO: 1472511 - DNA, 25 bp, Homo sapien
gccagttgaacatatgctctccatc

SEQ ID NO: 1472512 - DNA, 25 bp, Homo sapien
tccacagtgatcacaagtgtgttgc

SEQ ID NO: 1472513 - DNA, 25 bp, Homo sapien
gtgatcacaagtgtgttgctgtctt

SEQ ID NO: 1472514 - DNA, 25 bp, Homo sapien
cagactcagtggttagtggaaactt

SEQ ID NO: 1472515 - DNA, 25 bp, Homo sapien
acagtgatcacaagtgtgttgctgt

SEQ ID NO: 1472516 - DNA, 25 bp, Homo sapien
caatttgcccaggatatttgggctg

SEQ ID NO: 1472517 - DNA, 25 bp, Homo sapien
cttgttggggacaatttgcccagga

SEQ ID NO: 1472518 - DNA, 25 bp, Homo sapien
tgttggggacaatttgcccaggata

SEQ ID NO: 1472519 - DNA, 25 bp, Homo sapien
ggacaatttgcccaggatatttggg

SEQ ID NO: 1472520 - DNA, 25 bp, Homo sapien
ttttttgtgtgtggctatggacacc

SEQ ID NO: 1472521 - DNA, 25 bp, Homo sapien
ttttgtgtgtggctatggacacctt

SEQ ID NO: 1472522 - DNA, 25 bp, Homo sapien
tttgtgtgtggctatggacaccttt

SEQ ID NO: 1472523 - DNA, 25 bp, Homo sapien
tctttttttgtgtgtggctatggac

SEQ ID NO: 1472524 - DNA, 25 bp, Homo sapien
aggagtttccttcttcgctttcagt

SEQ ID NO: 1472525 - DNA, 25 bp, Homo sapien
gagtttccttcttcgctttcagtgc

SEQ ID NO: 1472526 - DNA, 25 bp, Homo sapien
cttcggctttaggaagggcaggagt

SEQ ID NO: 1472527 - DNA, 25 bp, Homo sapien
gaagggcaggagtttccttcttcgc

SEQ ID NO: 1472528 - DNA, 25 bp, Homo sapien
tgattaatgtttgaccaacccgaat

SEQ ID NO: 1472529 - DNA, 25 bp, Homo sapien
gggctattaacacagccatttcagt

SEQ ID NO: 1472530 - DNA, 25 bp, Homo sapien
tggaggtctccgacgctcttaaacc

SEQ ID NO: 1472531 - DNA, 25 bp, Homo sapien
ttcagttaatttgcctggaggtctc

SEQ ID NO: 1472532 - DNA, 25 bp, Homo sapien
cattcatgagcctagggtgatcagg

SEQ ID NO: 1472533 - DNA, 25 bp, Homo sapien
caatcagtccccagggtctcggttc

SEQ ID NO: 1472534 - DNA, 25 bp, Homo sapien
cgttgcccacctcgcaagtatgcag

SEQ ID NO: 1472535 - DNA, 25 bp, Homo sapien
tgaccacacgggaaccttgctagag

SEQ ID NO: 1472536 - DNA, 25 bp, Homo sapien
actgcaggatcagtgcggctctttt

SEQ ID NO: 1472537 - DNA, 25 bp, Homo sapien
cagtgcggctcttttctcgagatag

SEQ ID NO: 1472538 - DNA, 25 bp, Homo sapien
ctcttttctcgagatagtaggtggc

SEQ ID NO: 1472539 - DNA, 25 bp, Homo sapien
ttttctcgagatagtaggtggctct

SEQ ID NO: 1472540 - DNA, 25 bp, Homo sapien
acgcgctccgaatagttgcccttgc

SEQ ID NO: 1472541 - DNA, 25 bp, Homo sapien
ggcgcgcgccttgccaccctgctta

SEQ ID NO: 1472542 - DNA, 25 bp, Homo sapien
caccctgcttaccacgaccggacat

SEQ ID NO: 1472543 - DNA, 25 bp, Homo sapien
ggcagtcaagtactcgagcaccgcg

SEQ ID NO: 1472544 - DNA, 25 bp, Homo sapien
gagtcaaggaaaaaagacaacggca

SEQ ID NO: 1472545 - DNA, 25 bp, Homo sapien
gtctctaggctggcgtgcagtggcg

SEQ ID NO: 1472546 - DNA, 25 bp, Homo sapien
tctctaggctggcgtgcagtggcgc

SEQ ID NO: 1472547 - DNA, 25 bp, Homo sapien
ctaggctggcgtgcagtggcgcaat

SEQ ID NO: 1472548 - DNA, 25 bp, Homo sapien
ctctaggctggcgtgcagtggcgca

SEQ ID NO: 1472549 - DNA, 25 bp, Homo sapien
gataaggagatctgtgagcctgctg

SEQ ID NO: 1472550 - DNA, 25 bp, Homo sapien
taaagagctgcttaggcgcaacgct

SEQ ID NO: 1472551 - DNA, 25 bp, Homo sapien
tgagcctgggtagagtgcatcttct

SEQ ID NO: 1472552 - DNA, 25 bp, Homo sapien
tgggaactgagcctggaaaccgaat

SEQ ID NO: 1472553 - DNA, 25 bp, Homo sapien
gaatcacaggtcacaaccagaccag

SEQ ID NO: 1472554 - DNA, 25 bp, Homo sapien
taagggaaatatgccgttacaaaca

SEQ ID NO: 1472555 - DNA, 25 bp, Homo sapien
gacgaacgcagcctttctaagggaa

SEQ ID NO: 1472556 - DNA, 25 bp, Homo sapien
tggcacgctccttttggagcttgga

SEQ ID NO: 1472557 - DNA, 25 bp, Homo sapien
ggtgacagccttagtgccctcggac

SEQ ID NO: 1472558 - DNA, 25 bp, Homo sapien
cttggtgacagccttagtgccctcg

SEQ ID NO: 1472559 - DNA, 25 bp, Homo sapien
gacagccttagtgccctcggacacg

SEQ ID NO: 1472560 - DNA, 25 bp, Homo sapien
ttggtgacagccttagtgccctcgg

SEQ ID NO: 1472561 - DNA, 25 bp, Homo sapien
tcgccgggcagcagcaggcgcacgg

SEQ ID NO: 1472562 - DNA, 25 bp, Homo sapien
cgggcagcagcaggcgcacggccgt

SEQ ID NO: 1472563 - DNA, 25 bp, Homo sapien
gccgggcagcagcaggcgcacggcc

SEQ ID NO: 1472564 - DNA, 25 bp, Homo sapien
ctcgccgggcagcagcaggcgcacg

SEQ ID NO: 1472565 - DNA, 25 bp, Homo sapien
gatgcccatggccttggacgagatg

SEQ ID NO: 1472566 - DNA, 25 bp, Homo sapien
gtgcgccaggcgggaggcctcgctg

SEQ ID NO: 1472567 - DNA, 25 bp, Homo sapien
gcgctcgaagatgtcattgacgaag

SEQ ID NO: 1472568 - DNA, 25 bp, Homo sapien
ggcctcgctggcgatgcgctcgaag

SEQ ID NO: 1472569 - DNA, 25 bp, Homo sapien
gagccgcccgcgatggctccggcat

SEQ ID NO: 1472570 - DNA, 25 bp, Homo sapien
ttagaagccggagccgcccgcgatg

SEQ ID NO: 1472571 - DNA, 25 bp, Homo sapien
tggagccctttttagaagccggagc

SEQ ID NO: 1472572 - DNA, 25 bp, Homo sapien
ttctgcgccttggtaatggccttct

SEQ ID NO: 1472573 - DNA, 25 bp, Homo sapien
gagcagagtgacttcataccacgta

SEQ ID NO: 1472574 - DNA, 25 bp, Homo sapien
tatttcgccttttaggagcaatgaa

SEQ ID NO: 1472575 - DNA, 25 bp, Homo sapien
aatcctattggtcagggttttgtga

SEQ ID NO: 1472576 - DNA, 25 bp, Homo sapien
gttttgtgaacattcgtgactccat

SEQ ID NO: 1472577 - DNA, 25 bp, Homo sapien
aaaaacacaagattgctcttcccaa

SEQ ID NO: 1472578 - DNA, 25 bp, Homo sapien
aaacacaagattgctcttcccaaag

SEQ ID NO: 1472579 - DNA, 25 bp, Homo sapien
acacaagattgctcttcccaaaggc

SEQ ID NO: 1472580 - DNA, 25 bp, Homo sapien
aacacaagattgctcttcccaaagg

SEQ ID NO: 1472581 - DNA, 25 bp, Homo sapien
gatttcaggatacgacttgggccgg

SEQ ID NO: 1472582 - DNA, 25 bp, Homo sapien
ccctctttcgcaggagttactgaag

SEQ ID NO: 1472583 - DNA, 25 bp, Homo sapien
gagacagcggacaaccagggtagct

SEQ ID NO: 1472584 - DNA, 25 bp, Homo sapien
gcgtatacgagtgtccacgtccgga

SEQ ID NO: 1472585 - DNA, 25 bp, Homo sapien
ggccttgggtccatctacatagttg

SEQ ID NO: 1472586 - DNA, 25 bp, Homo sapien
atccttcaccccgaggcgtgttttg

SEQ ID NO: 1472587 - DNA, 25 bp, Homo sapien
tagttgcgtgtttcaacaatgtcca

SEQ ID NO: 1472588 - DNA, 25 bp, Homo sapien
catgggaagtgtcagcgtgtggctg

SEQ ID NO: 1472589 - DNA, 25 bp, Homo sapien
gctggcaggtggctaaccccattta

SEQ ID NO: 1472590 - DNA, 25 bp, Homo sapien
tagcagtagctcagttgcctgcagc

SEQ ID NO: 1472591 - DNA, 25 bp, Homo sapien
gcttgtgagcggtgcccatttccag

SEQ ID NO: 1472592 - DNA, 25 bp, Homo sapien
tgtgagtttgacctgcccagcgtgt

SEQ ID NO: 1472593 - DNA, 25 bp, Homo sapien
acacctgtgatgcttgcccggacag

SEQ ID NO: 1472594 - DNA, 25 bp, Homo sapien
cagagtctcccacaacatcagtgtc

SEQ ID NO: 1472595 - DNA, 25 bp, Homo sapien
ccaggtccgacagtggcttcaccat

SEQ ID NO: 1472596 - DNA, 25 bp, Homo sapien
tgcttgcccggacaggtcctgatgg

SEQ ID NO: 1472597 - DNA, 25 bp, Homo sapien
ggattgctgggtcacggtactcttt

SEQ ID NO: 1472598 - DNA, 25 bp, Homo sapien
tttgcttctagaccacgtaggttga

SEQ ID NO: 1472599 - DNA, 25 bp, Homo sapien
gatttggtttacgtttccctgatga

SEQ ID NO: 1472600 - DNA, 25 bp, Homo sapien
acacaggagtgtgggtatctcttcc

SEQ ID NO: 1472601 - DNA, 25 bp, Homo sapien
agccgtggatagttgggacccaaag

SEQ ID NO: 1472602 - DNA, 25 bp, Homo sapien
tgggaaagccgtggatagttgggac

SEQ ID NO: 1472603 - DNA, 25 bp, Homo sapien
gaaagccgtggatagttgggaccca

SEQ ID NO: 1472604 - DNA, 25 bp, Homo sapien
ttgtgggaaagccgtggatagttgg

SEQ ID NO: 1472605 - DNA, 25 bp, Homo sapien
tagactgcccatccaattgctgttg

SEQ ID NO: 1472606 - DNA, 25 bp, Homo sapien
cccatccaattgctgttggtggtag

SEQ ID NO: 1472607 - DNA, 25 bp, Homo sapien
ggatagactgcccatccaattgctg

SEQ ID NO: 1472608 - DNA, 25 bp, Homo sapien
ctgtggatagactgcccatccaatt

SEQ ID NO: 1472609 - DNA, 25 bp, Homo sapien
ttaaaagaatcccaaccagagcaca

SEQ ID NO: 1472610 - DNA, 25 bp, Homo sapien
gtgtcagccatggaattacacctag

SEQ ID NO: 1472611 - DNA, 25 bp, Homo sapien
tctgcaagctttctgtgaggttaga

SEQ ID NO: 1472612 - DNA, 25 bp, Homo sapien
gagttgggccccgagctagtctaat

SEQ ID NO: 1472613 - DNA, 25 bp, Homo sapien
gggattgcctcactcaggaagcaca

SEQ ID NO: 1472614 - DNA, 25 bp, Homo sapien
gggtgcagcacaccgtgcgcgagcc

SEQ ID NO: 1472615 - DNA, 25 bp, Homo sapien
gagggattgcctcactcaggaagca

SEQ ID NO: 1472616 - DNA, 25 bp, Homo sapien
tcactcaggaagcacaagcggtcag

SEQ ID NO: 1472617 - DNA, 25 bp, Homo sapien
ttcatctgtctgacaggatctggct

SEQ ID NO: 1472618 - DNA, 25 bp, Homo sapien
cagtctttataaccagctgagcaca

SEQ ID NO: 1472619 - DNA, 25 bp, Homo sapien
atgacagctgcaagccaccacaagc

SEQ ID NO: 1472620 - DNA, 25 bp, Homo sapien
tcataatgcagtctttataaccagc

SEQ ID NO: 1472621 - DNA, 25 bp, Homo sapien
aagcaactctgtcataatgcagtct

SEQ ID NO: 1472622 - DNA, 25 bp, Homo sapien
tcaaaatagggctctgaagtctagg

SEQ ID NO: 1472623 - DNA, 25 bp, Homo sapien
tagggctctgaagtctaggaacaag

SEQ ID NO: 1472624 - DNA, 25 bp, Homo sapien
ggctctgaagtctaggaacaagtcc

SEQ ID NO: 1472625 - DNA, 25 bp, Homo sapien
gaagtctaggaacaagtcctcagct

SEQ ID NO: 1472626 - DNA, 25 bp, Homo sapien
tgtctgaggacacatggacgaagcc

SEQ ID NO: 1472627 - DNA, 25 bp, Homo sapien
gattgcaactgtaaaccctccctga

SEQ ID NO: 1472628 - DNA, 25 bp, Homo sapien
tcaggatggtatcagcactcccagc

SEQ ID NO: 1472629 - DNA, 25 bp, Homo sapien
tgacgcggccttgctctgaatgcta

SEQ ID NO: 1472630 - DNA, 25 bp, Homo sapien
gctgctttccatgccgtgaactggg

SEQ ID NO: 1472631 - DNA, 25 bp, Homo sapien
gcaacaaggatcagaggcagagctg

SEQ ID NO: 1472632 - DNA, 25 bp, Homo sapien
catgccgtgaactgggagcttctgg

SEQ ID NO: 1472633 - DNA, 25 bp, Homo sapien
gctattacgagtcccatggcaacaa

SEQ ID NO: 1472634 - DNA, 25 bp, Homo sapien
cagagcgtcaagctggatgccacag

SEQ ID NO: 1472635 - DNA, 25 bp, Homo sapien
aggcctagcctggcccctgaagtct

SEQ ID NO: 1472636 - DNA, 25 bp, Homo sapien
gctgaggctgatagattggtcacag

SEQ ID NO: 1472637 - DNA, 25 bp, Homo sapien
tccatcctgctggtctgtcacctgg

SEQ ID NO: 1472638 - DNA, 25 bp, Homo sapien
agtggcctcgccgaactttacacca

SEQ ID NO: 1472639 - DNA, 25 bp, Homo sapien
tgaggcccagtgacatcaaagtcag

SEQ ID NO: 1472640 - DNA, 25 bp, Homo sapien
tttacaccatccttgaagcggcagc

SEQ ID NO: 1472641 - DNA, 25 bp, Homo sapien
tggccacgtggtcactcatgaaggt

SEQ ID NO: 1472642 - DNA, 25 bp, Homo sapien
tgtttggttcttgcattgcaggaag

SEQ ID NO: 1472643 - DNA, 25 bp, Homo sapien
tgtgtgattagggagttgtgtgggc

SEQ ID NO: 1472644 - DNA, 25 bp, Homo sapien
gtgattagggagttgtgtgggcaca

SEQ ID NO: 1472645 - DNA, 25 bp, Homo sapien
ttgcattgcaggaaggccctgtggt

SEQ ID NO: 1472646 - DNA, 25 bp, Homo sapien
ccacgctgtctccaagcagtgatgt

SEQ ID NO: 1472647 - DNA, 25 bp, Homo sapien
gtgacccagaccaaccacgctgtct

SEQ ID NO: 1472648 - DNA, 25 bp, Homo sapien
tagtttcctgccaactccaggtagg

SEQ ID NO: 1472649 - DNA, 25 bp, Homo sapien
agtgatgtgaaaggcaacctagaca

SEQ ID NO: 1472650 - DNA, 25 bp, Homo sapien
tggtagcatccctggcccagcttag

SEQ ID NO: 1472651 - DNA, 25 bp, Homo sapien
atccctggcccagcttagaaccttc

SEQ ID NO: 1472652 - DNA, 25 bp, Homo sapien
gcatccctggcccagcttagaacct

SEQ ID NO: 1472653 - DNA, 25 bp, Homo sapien
ccctggcccagcttagaaccttcat

SEQ ID NO: 1472654 - DNA, 25 bp, Homo sapien
tcttggtcgggacaagcgaacgttg

SEQ ID NO: 1472655 - DNA, 25 bp, Homo sapien
cctcttgccaatagaccgggtcttg

SEQ ID NO: 1472656 - DNA, 25 bp, Homo sapien
tccaaaacgatacatccgcgacagg

SEQ ID NO: 1472657 - DNA, 25 bp, Homo sapien
ttgggccagccttgacggctctggt

SEQ ID NO: 1472658 - DNA, 25 bp, Homo sapien
cagcaggaggaccccggctgcggct

SEQ ID NO: 1472659 - DNA, 25 bp, Homo sapien
gcagagtcaggggaggttgggtagc

SEQ ID NO: 1472660 - DNA, 25 bp, Homo sapien
tcaggggaggttgggtagcatggcg

SEQ ID NO: 1472661 - DNA, 25 bp, Homo sapien
gctgcggcgggggtgtaggtgggcg

SEQ ID NO: 1472662 - DNA, 25 bp, Homo sapien
gctgcggcgggggtgtaggtgggcg

SEQ ID NO: 1472663 - DNA, 25 bp, Homo sapien
tgggcggtaaagggggagcagagtc

SEQ ID NO: 1472664 - DNA, 25 bp, Homo sapien
tcaggggaggttgggaagcatggcg

SEQ ID NO: 1472665 - DNA, 25 bp, Homo sapien
ccccagcaggaggaccccggctgcg

SEQ ID NO: 1472666 - DNA, 25 bp, Homo sapien
gcagagtcaggggaggttgggtagc

SEQ ID NO: 1472667 - DNA, 25 bp, Homo sapien
gctgcggcgggggtgtaggtgggcg

SEQ ID NO: 1472668 - DNA, 25 bp, Homo sapien
tcaggggaggttgggtagcatggcg

SEQ ID NO: 1472669 - DNA, 25 bp, Homo sapien
cagcaggaggaccccggctgcggct

SEQ ID NO: 1472670 - DNA, 25 bp, Homo sapien
tcaggggaggttgggaagcatggcg

SEQ ID NO: 1472671 - DNA, 25 bp, Homo sapien
tgggcggtaaagggggagcagagtc

SEQ ID NO: 1472672 - DNA, 25 bp, Homo sapien
gctgcggcgggggtgtaggtgggcg

SEQ ID NO: 1472673 - DNA, 25 bp, Homo sapien
ccccagcaggaggaccccggctgcg

SEQ ID NO: 1472674 - DNA, 25 bp, Homo sapien
gcagagtcaggggaggttgggtagc

SEQ ID NO: 1472675 - DNA, 25 bp, Homo sapien
cagcaggaggaccccggctgcggct

SEQ ID NO: 1472676 - DNA, 25 bp, Homo sapien
tcaggggaggttgggtagcatggcg

SEQ ID NO: 1472677 - DNA, 25 bp, Homo sapien
gctgcggcgggggtgtaggtgggcg

SEQ ID NO: 1472678 - DNA, 25 bp, Homo sapien
gcagagtcaggggaggttgggtagc

SEQ ID NO: 1472679 - DNA, 25 bp, Homo sapien
tcaggggaggttgggtagcatggcg

SEQ ID NO: 1472680 - DNA, 25 bp, Homo sapien
gctgcggcgggggtgtaggtgggcg

SEQ ID NO: 1472681 - DNA, 25 bp, Homo sapien
cagcaggaggaccccggctgcggct

SEQ ID NO: 1472682 - DNA, 25 bp, Homo sapien
gccggcgtgcagtaggggcggaccc

SEQ ID NO: 1472683 - DNA, 25 bp, Homo sapien
gcaccgcgaacggcagggaacccag

SEQ ID NO: 1472684 - DNA, 25 bp, Homo sapien
gagcgggaaggcaccgcgaacggca

SEQ ID NO: 1472685 - DNA, 25 bp, Homo sapien
ggcgaggcggaagcggtgggatgct

SEQ ID NO: 1472686 - DNA, 25 bp, Homo sapien
ttatcttcacgagatcagaggagac

SEQ ID NO: 1472687 - DNA, 25 bp, Homo sapien
tctcctggttttctcaagtggcgtt

SEQ ID NO: 1472688 - DNA, 25 bp, Homo sapien
atcagaggagaccggacgccttcgg

SEQ ID NO: 1472689 - DNA, 25 bp, Homo sapien
ttcatctaagtagcggtctggccca

SEQ ID NO: 1472690 - DNA, 25 bp, Homo sapien
cgggttgtcctcacctcactgctcg

SEQ ID NO: 1472691 - DNA, 25 bp, Homo sapien
ctgtgcgaggagagtgcccggcggg

SEQ ID NO: 1472692 - DNA, 25 bp, Homo sapien
cctcacctcactgctcgcctgcctg

SEQ ID NO: 1472693 - DNA, 25 bp, Homo sapien
tgcgaggagagtgcccggcgggttg

SEQ ID NO: 1472694 - DNA, 25 bp, Homo sapien
tacaaatcaacgaacttaagtggat

SEQ ID NO: 1472695 - DNA, 25 bp, Homo sapien
gaatggtacaaatcaacgaacttaa

SEQ ID NO: 1472696 - DNA, 25 bp, Homo sapien
aatcaacgaacttaagtggatgttt

SEQ ID NO: 1472697 - DNA, 25 bp, Homo sapien
gtacaaatcaacgaacttaagtgga

SEQ ID NO: 1472698 - DNA, 25 bp, Homo sapien
gctcggcggaatacctcttagacaa

SEQ ID NO: 1472699 - DNA, 25 bp, Homo sapien
cggcggaatacctcttagacaagca

SEQ ID NO: 1472700 - DNA, 25 bp, Homo sapien
tctggctcggcggaatacctcttag

SEQ ID NO: 1472701 - DNA, 25 bp, Homo sapien
tggctcggcggaatacctcttagac

SEQ ID NO: 1472702 - DNA, 25 bp, Homo sapien
gtggaaggctcatcaaggactcaaa

SEQ ID NO: 1472703 - DNA, 25 bp, Homo sapien
gataaaaagtgacatacctccctca

SEQ ID NO: 1472704 - DNA, 25 bp, Homo sapien
gcaaccttttgttttatgacctgga

SEQ ID NO: 1472705 - DNA, 25 bp, Homo sapien
gctgggacctatgtcaggcaccctg

SEQ ID NO: 1472706 - DNA, 25 bp, Homo sapien
tgtgcgccgaggaaatcaaagccgc

SEQ ID NO: 1472707 - DNA, 25 bp, Homo sapien
aaatgggtgccggagattcgatgcc

SEQ ID NO: 1472708 - DNA, 25 bp, Homo sapien
gaacgcagtcggatctcagagaaga

SEQ ID NO: 1472709 - DNA, 25 bp, Homo sapien
tcaatactcggacactcagcaacag

SEQ ID NO: 1472710 - DNA, 25 bp, Homo sapien
tgaatactcttgaaaggccaacagc

SEQ ID NO: 1472711 - DNA, 25 bp, Homo sapien
tcttcggcagggaggtgaatactct

SEQ ID NO: 1472712 - DNA, 25 bp, Homo sapien
tcaatcctaggtaacgagggcaaca

SEQ ID NO: 1472713 - DNA, 25 bp, Homo sapien
tactgtaatacgtgcaccaaactgc

SEQ ID NO: 1472714 - DNA, 25 bp, Homo sapien
ttctctccagactatcgtaacctgg

SEQ ID NO: 1472715 - DNA, 25 bp, Homo sapien
tacacaagccaaaatgggagcaagg

SEQ ID NO: 1472716 - DNA, 25 bp, Homo sapien
tatcgtaacctggtgccttaccaag

SEQ ID NO: 1472717 - DNA, 25 bp, Homo sapien
ccaaaatgggagcaaggccttctct

SEQ ID NO: 1472718 - DNA, 25 bp, Homo sapien
tgagcagaatgttgtacttgaaaat

SEQ ID NO: 1472719 - DNA, 25 bp, Homo sapien
agtgtaaatgatgttgagcagaatg

SEQ ID NO: 1472720 - DNA, 25 bp, Homo sapien
gatgttgagcagaatgttgtacttg

SEQ ID NO: 1472721 - DNA, 25 bp, Homo sapien
tcaagtgtaaatgatgttgagcaga

SEQ ID NO: 1472722 - DNA, 25 bp, Homo sapien
tcttgaagtcagtcggttttcccat

SEQ ID NO: 1472723 - DNA, 25 bp, Homo sapien
tgcggagaggtgctgttgtgttctg

SEQ ID NO: 1472724 - DNA, 25 bp, Homo sapien
tcaggttcttgaagtcagtcggttt

SEQ ID NO: 1472725 - DNA, 25 bp, Homo sapien
agctgaggaccagggttcccaggtc

SEQ ID NO: 1472726 - DNA, 25 bp, Homo sapien
ccttcagcttgatctgctgagcagt

SEQ ID NO: 1472727 - DNA, 25 bp, Homo sapien
caggagacaggactgtgaatgtctg

SEQ ID NO: 1472728 - DNA, 25 bp, Homo sapien
caggactgtgaatgtctggtgtcca

SEQ ID NO: 1472729 - DNA, 25 bp, Homo sapien
gacaggactgtgaatgtctggtgtc

SEQ ID NO: 1472730 - DNA, 25 bp, Homo sapien
actgtgaatgtctggtgtccatagc

SEQ ID NO: 1472731 - DNA, 25 bp, Homo sapien
cgatgcagccacattagacactgac

SEQ ID NO: 1472732 - DNA, 25 bp, Homo sapien
ctcgatgcagccacattagacactg

SEQ ID NO: 1472733 - DNA, 25 bp, Homo sapien
tctgcagccacttttggacgctcga

SEQ ID NO: 1472734 - DNA, 25 bp, Homo sapien
cacttttggacgctcgatgcagcca

SEQ ID NO: 1472735 - DNA, 25 bp, Homo sapien
acacagaccgggtgctgggtattgc

SEQ ID NO: 1472736 - DNA, 25 bp, Homo sapien
tcctggggctccgtcagcatctggt

SEQ ID NO: 1472737 - DNA, 25 bp, Homo sapien
tattgcgggaaccaaggagcaagcc

SEQ ID NO: 1472738 - DNA, 25 bp, Homo sapien
ggtccactggagaagcagatacatc

SEQ ID NO: 1472739 - DNA, 25 bp, Homo sapien
gcagctaccagtgctagtaccagca

SEQ ID NO: 1472740 - DNA, 25 bp, Homo sapien
tgctagtaccagcaaaggtgacgta

SEQ ID NO: 1472741 - DNA, 25 bp, Homo sapien
accatttaactggtagcagctacca

SEQ ID NO: 1472742 - DNA, 25 bp, Homo sapien
gtaccagcaaaggtgacgtagcatc

SEQ ID NO: 1472743 - DNA, 25 bp, Homo sapien
gctgggctgccttctctctcagtgc

SEQ ID NO: 1472744 - DNA, 25 bp, Homo sapien
cttgctgggctgccttctctctcag

SEQ ID NO: 1472745 - DNA, 25 bp, Homo sapien
tgggctgccttctctctcagtgcct

SEQ ID NO: 1472746 - DNA, 25 bp, Homo sapien
tgctgggctgccttctctctcagtg

SEQ ID NO: 1472747 - DNA, 25 bp, Homo sapien
gaaagtcattgacctggacaagcat

SEQ ID NO: 1472748 - DNA, 25 bp, Homo sapien
ggcagcccataactctgcttcaagg

SEQ ID NO: 1472749 - DNA, 25 bp, Homo sapien
tgcttcaaggtgtgtcggacattgc

SEQ ID NO: 1472750 - DNA, 25 bp, Homo sapien
tgtcggacattgcacgaggcaggaa

SEQ ID NO: 1472751 - DNA, 25 bp, Homo sapien
ctgatcgtgggcctcactggcagag

SEQ ID NO: 1472752 - DNA, 25 bp, Homo sapien
tcgtgggcctcactggcagaggtca

SEQ ID NO: 1472753 - DNA, 25 bp, Homo sapien
atgggcctgatcgtgggcctcactg

SEQ ID NO: 1472754 - DNA, 25 bp, Homo sapien
atggatgggcctgatcgtgggcctc

SEQ ID NO: 1472755 - DNA, 25 bp, Homo sapien
ctttgtttctaggtagagccttgct

SEQ ID NO: 1472756 - DNA, 25 bp, Homo sapien
tgtttctaggtagagccttgcttcc

SEQ ID NO: 1472757 - DNA, 25 bp, Homo sapien
tttctaggtagagccttgcttcctg

SEQ ID NO: 1472758 - DNA, 25 bp, Homo sapien
cttcctccagtacctcttcaatcat

SEQ ID NO: 1472759 - DNA, 25 bp, Homo sapien
ccttgcccagtaggttgcaggcggg

SEQ ID NO: 1472760 - DNA, 25 bp, Homo sapien
ggctctttgccgagttgagtggttt

SEQ ID NO: 1472761 - DNA, 25 bp, Homo sapien
ctgctgggctctttgccgagttgag

SEQ ID NO: 1472762 - DNA, 25 bp, Homo sapien
gccgagttgagtggtttgtctccat

SEQ ID NO: 1472763 - DNA, 25 bp, Homo sapien
cgtgctgtctgtgcctatggagtct

SEQ ID NO: 1472764 - DNA, 25 bp, Homo sapien
cctatggagtctttgatagactgga

SEQ ID NO: 1472765 - DNA, 25 bp, Homo sapien
tgtgcctatggagtctttgatagac

SEQ ID NO: 1472766 - DNA, 25 bp, Homo sapien
ctgaccgtgctgtctgtgcctatgg

SEQ ID NO: 1472767 - DNA, 25 bp, Homo sapien
ggttgacgatgttcactaatcccat

SEQ ID NO: 1472768 - DNA, 25 bp, Homo sapien
taaagcgtatgtggagaagagaatc

SEQ ID NO: 1472769 - DNA, 25 bp, Homo sapien
gggctcagccattctagtgccagtg

SEQ ID NO: 1472770 - DNA, 25 bp, Homo sapien
tgtgtgtcccatgatttcagactgc

SEQ ID NO: 1472771 - DNA, 25 bp, Homo sapien
aagacagcttcagtccgtacggtga

SEQ ID NO: 1472772 - DNA, 25 bp, Homo sapien
ccatctgctcgtgcaggtatgcaaa

SEQ ID NO: 1472773 - DNA, 25 bp, Homo sapien
ggattattttgccccgatttcactg

SEQ ID NO: 1472774 - DNA, 25 bp, Homo sapien
ttttgccccgatttcactgcaccat

SEQ ID NO: 1472775 - DNA, 25 bp, Homo sapien
ctgctcgtgcaggtatgcaaaggaa

SEQ ID NO: 1472776 - DNA, 25 bp, Homo sapien
ggactttgaggagccgcaggatcct

SEQ ID NO: 1472777 - DNA, 25 bp, Homo sapien
ttacatacagtatgaagatcctgag

SEQ ID NO: 1472778 - DNA, 25 bp, Homo sapien
acatacagtatgaagatcctgagct

SEQ ID NO: 1472779 - DNA, 25 bp, Homo sapien
tttgaggagccgcaggatcctctct

SEQ ID NO: 1472780 - DNA, 25 bp, Homo sapien
gtgcctgcattgtgaagttcacggt

SEQ ID NO: 1472781 - DNA, 25 bp, Homo sapien
taatagcttgactgcattctcgcca

SEQ ID NO: 1472782 - DNA, 25 bp, Homo sapien
gcctgcattgtgaagttcacggtaa

SEQ ID NO: 1472783 - DNA, 25 bp, Homo sapien
gaagttcacggtaatagcttgactg

SEQ ID NO: 1472784 - DNA, 25 bp, Homo sapien
tgaagggccagcttctgcacgggca

SEQ ID NO: 1472785 - DNA, 25 bp, Homo sapien
aggcagctgcacagcgcacagccat

SEQ ID NO: 1472786 - DNA, 25 bp, Homo sapien
gctcctgataagagcaggccacagc

SEQ ID NO: 1472787 - DNA, 25 bp, Homo sapien
ttgctcctgataagagcaggccaca

SEQ ID NO: 1472788 - DNA, 25 bp, Homo sapien
cagttgctcctgataagagcaggcc

SEQ ID NO: 1472789 - DNA, 25 bp, Homo sapien
tcttcaacttcattacacttgacgg

SEQ ID NO: 1472790 - DNA, 25 bp, Homo sapien
acacttgacggtatctctgcacttc

SEQ ID NO: 1472791 - DNA, 25 bp, Homo sapien
tgcacttcttagcacctaccacttg

SEQ ID NO: 1472792 - DNA, 25 bp, Homo sapien
gccgtcattatcaacaaaaccatca

SEQ ID NO: 1472793 - DNA, 25 bp, Homo sapien
ctgggctttgtcaaaagctgggggc

SEQ ID NO: 1472794 - DNA, 25 bp, Homo sapien
agccaaacagtcacggaaattaggg

SEQ ID NO: 1472795 - DNA, 25 bp, Homo sapien
ggcaaggtgagcagccaaacagtca

SEQ ID NO: 1472796 - DNA, 25 bp, Homo sapien
aagctgggggcaaggtgagcagcca

SEQ ID NO: 1472797 - DNA, 25 bp, Homo sapien
gaggatccagggccggtgacacaga

SEQ ID NO: 1472798 - DNA, 25 bp, Homo sapien
cagggccggtgacacagaaaaccag

SEQ ID NO: 1472799 - DNA, 25 bp, Homo sapien
ccaaggaggatccagggccggtgac

SEQ ID NO: 1472800 - DNA, 25 bp, Homo sapien
ccagggccggtgacacagaaaacca

SEQ ID NO: 1472801 - DNA, 25 bp, Homo sapien
caggtcagtccatgaatcgccagca

SEQ ID NO: 1472802 - DNA, 25 bp, Homo sapien
caaggagacccatatgcagattggc

SEQ ID NO: 1472803 - DNA, 25 bp, Homo sapien
caaaagggatttcaataggctcggc

SEQ ID NO: 1472804 - DNA, 25 bp, Homo sapien
gtgaccgccaaagaagactgccagt

SEQ ID NO: 1472805 - DNA, 25 bp, Homo sapien
ttcctccagctcctagtacaaagca

SEQ ID NO: 1472806 - DNA, 25 bp, Homo sapien
tggtgtggtggcaatgccgttcctc

SEQ ID NO: 1472807 - DNA, 25 bp, Homo sapien
ttctggctgaaagtcttcaaatggg

SEQ ID NO: 1472808 - DNA, 25 bp, Homo sapien
gccatctttcatcatggctccttct

SEQ ID NO: 1472809 - DNA, 25 bp, Homo sapien
caggccggcaaaagacacggcgaag

SEQ ID NO: 1472810 - DNA, 25 bp, Homo sapien
cggcaaaagacacggcgaagggaag

SEQ ID NO: 1472811 - DNA, 25 bp, Homo sapien
aggccggcaaaagacacggcgaagg

SEQ ID NO: 1472812 - DNA, 25 bp, Homo sapien
gccggcaaaagacacggcgaaggga

SEQ ID NO: 1472813 - DNA, 25 bp, Homo sapien
ctggaatgaacttctcgtcaaacat

SEQ ID NO: 1472814 - DNA, 25 bp, Homo sapien
gaacattttgctcctaacacagtcc

SEQ ID NO: 1472815 - DNA, 25 bp, Homo sapien
caagtggatacgaacattttgctcc

SEQ ID NO: 1472816 - DNA, 25 bp, Homo sapien
tacgaacattttgctcctaacacag

SEQ ID NO: 1472817 - DNA, 25 bp, Homo sapien
aggctgctgcaagtggatacgaaca

SEQ ID NO: 1472818 - DNA, 25 bp, Homo sapien
tggagggcaaccactgatgcctcca

SEQ ID NO: 1472819 - DNA, 25 bp, Homo sapien
ggagggcaaccactgatgcctccag

SEQ ID NO: 1472820 - DNA, 25 bp, Homo sapien
catggagggcaaccactgatgcctc

SEQ ID NO: 1472821 - DNA, 25 bp, Homo sapien
gagggcaaccactgatgcctccagc

SEQ ID NO: 1472822 - DNA, 25 bp, Homo sapien
caggaaaagatagccgtacacaggc

SEQ ID NO: 1472823 - DNA, 25 bp, Homo sapien
tatgtacatatttcactggcgcagc

SEQ ID NO: 1472824 - DNA, 25 bp, Homo sapien
cgctgttttatctggagcagtgcca

SEQ ID NO: 1472825 - DNA, 25 bp, Homo sapien
tgccagtggtgatgattctgccgcg

SEQ ID NO: 1472826 - DNA, 25 bp, Homo sapien
cctgccagagcgatcgtgtacgtgt

SEQ ID NO: 1472827 - DNA, 25 bp, Homo sapien
tggtctccacgggttgtgagcagca

SEQ ID NO: 1472828 - DNA, 25 bp, Homo sapien
gaacaatttgatttatcctctggtc

SEQ ID NO: 1472829 - DNA, 25 bp, Homo sapien
tgttccctgccagagcgatcgtgta

SEQ ID NO: 1472830 - DNA, 25 bp, Homo sapien
gacggcaccttgaaatgaccacatg

SEQ ID NO: 1472831 - DNA, 25 bp, Homo sapien
tcaggccagaactctaacccagtgg

SEQ ID NO: 1472832 - DNA, 25 bp, Homo sapien
tgggtctgaaacagagacggcacct

SEQ ID NO: 1472833 - DNA, 25 bp, Homo sapien
catgccatcgaaggtaaggtaaggg

SEQ ID NO: 1472834 - DNA, 25 bp, Homo sapien
cataagggtgactcgcaaaattgct

SEQ ID NO: 1472835 - DNA, 25 bp, Homo sapien
tgctggacgatacactccttctgga

SEQ ID NO: 1472836 - DNA, 25 bp, Homo sapien
agatgtcaccttttgtgggtctgcc

SEQ ID NO: 1472837 - DNA, 25 bp, Homo sapien
tctggaagtccatcggctgtgggcc

SEQ ID NO: 1472838 - DNA, 25 bp, Homo sapien
aagactgacgctgcccgatcgcctt

SEQ ID NO: 1472839 - DNA, 25 bp, Homo sapien
tggtagccacttccaaagcccctgg

SEQ ID NO: 1472840 - DNA, 25 bp, Homo sapien
ctgacgctgcccgatcgccttggaa

SEQ ID NO: 1472841 - DNA, 25 bp, Homo sapien
actgacgctgcccgatcgccttgga

SEQ ID NO: 1472842 - DNA, 25 bp, Homo sapien
ctgaccgtgtccgattaatcttcca

SEQ ID NO: 1472843 - DNA, 25 bp, Homo sapien
gaccgtgtccgattaatcttccaaa

SEQ ID NO: 1472844 - DNA, 25 bp, Homo sapien
tctccctgctgaccgtgtccgatta

SEQ ID NO: 1472845 - DNA, 25 bp, Homo sapien
ctgctgaccgtgtccgattaatctt

SEQ ID NO: 1472846 - DNA, 25 bp, Homo sapien
tcccaggagagtgccaaaagctctg

SEQ ID NO: 1472847 - DNA, 25 bp, Homo sapien
tccttgacatgttccgagcataggt

SEQ ID NO: 1472848 - DNA, 25 bp, Homo sapien
tattcccacgctgtgatctcgggcc

SEQ ID NO: 1472849 - DNA, 25 bp, Homo sapien
ttttgttccggaactggctgctgcc

SEQ ID NO: 1472850 - DNA, 25 bp, Homo sapien
tcatgtcacttggtccccctttgcc

SEQ ID NO: 1472851 - DNA, 25 bp, Homo sapien
cctctaaattgtcataaaagtctgc

SEQ ID NO: 1472852 - DNA, 25 bp, Homo sapien
cttgcctctaaattgtcataaaagt

SEQ ID NO: 1472853 - DNA, 25 bp, Homo sapien
gaggagatgatgaacagaagtcagt

SEQ ID NO: 1472854 - DNA, 25 bp, Homo sapien
ccaggctcggcatcacagaagctca

SEQ ID NO: 1472855 - DNA, 25 bp, Homo sapien
ccccaggctcggcatcacagaagct

SEQ ID NO: 1472856 - DNA, 25 bp, Homo sapien
ggctcggcatcacagaagctcagca

SEQ ID NO: 1472857 - DNA, 25 bp, Homo sapien
caggctcggcatcacagaagctcag

SEQ ID NO: 1472858 - DNA, 25 bp, Homo sapien
ttagggctgtgatgacaggatcgcc

SEQ ID NO: 1472859 - DNA, 25 bp, Homo sapien
tagggctgtgatgacaggatcgcct

SEQ ID NO: 1472860 - DNA, 25 bp, Homo sapien
gggctgtgatgacaggatcgcctcc

SEQ ID NO: 1472861 - DNA, 25 bp, Homo sapien
agggctgtgatgacaggatcgcctc

SEQ ID NO: 1472862 - DNA, 25 bp, Homo sapien
ttactccttaagatcattccactgt

SEQ ID NO: 1472863 - DNA, 25 bp, Homo sapien
taagatcattccactgtcccctgga

SEQ ID NO: 1472864 - DNA, 25 bp, Homo sapien
tgtcccctggatttctggtccgcag

SEQ ID NO: 1472865 - DNA, 25 bp, Homo sapien
cttaagatcattccactgtcccctg

SEQ ID NO: 1472866 - DNA, 25 bp, Homo sapien
tctaaaggagcccgcaaggaagagt

SEQ ID NO: 1472867 - DNA, 25 bp, Homo sapien
gaagagtgtggcgaacattcattct

SEQ ID NO: 1472868 - DNA, 25 bp, Homo sapien
cattcattcttgactgtaacggata

SEQ ID NO: 1472869 - DNA, 25 bp, Homo sapien
gactgtaacggataaggagacttta

SEQ ID NO: 1472870 - DNA, 25 bp, Homo sapien
tcggccgcttttgctctgccctgat

SEQ ID NO: 1472871 - DNA, 25 bp, Homo sapien
tcaggagtgagtctggcccaatgcc

SEQ ID NO: 1472872 - DNA, 25 bp, Homo sapien
gatttgctgacgcagcgtgtcagga

SEQ ID NO: 1472873 - DNA, 25 bp, Homo sapien
tgactccggctcagttcccaaaggt

SEQ ID NO: 1472874 - DNA, 25 bp, Homo sapien
agcaccagcttgtcagcctctggac

SEQ ID NO: 1472875 - DNA, 25 bp, Homo sapien
gcaccagcttgtcagcctctggact

SEQ ID NO: 1472876 - DNA, 25 bp, Homo sapien
ccagcttgtcagcctctggactcac

SEQ ID NO: 1472877 - DNA, 25 bp, Homo sapien
tgctatgaagcaccagcttgtcagc

SEQ ID NO: 1472878 - DNA, 25 bp, Homo sapien
cagagcttccgcctttcctgagccc

SEQ ID NO: 1472879 - DNA, 25 bp, Homo sapien
ctagcagagcttccgcctttcctga

SEQ ID NO: 1472880 - DNA, 25 bp, Homo sapien
gcagagcttccgcctttcctgagcc

SEQ ID NO: 1472881 - DNA, 25 bp, Homo sapien
tagcagagcttccgcctttcctgag

SEQ ID NO: 1472882 - DNA, 25 bp, Homo sapien
ggctgcacagcgtggattccaggat

SEQ ID NO: 1472883 - DNA, 25 bp, Homo sapien
gaaaaaagggcgcaggtgtgtgtct

SEQ ID NO: 1472884 - DNA, 25 bp, Homo sapien
tgagtcggggatgggtaggtagagg

SEQ ID NO: 1472885 - DNA, 25 bp, Homo sapien
tgcaggagttgagtcggggatgggt

SEQ ID NO: 1472886 - DNA, 25 bp, Homo sapien
atacccaaatgggagggttctgctt

SEQ ID NO: 1472887 - DNA, 25 bp, Homo sapien
gtcagtgcgctgatgaggccagtcg

SEQ ID NO: 1472888 - DNA, 25 bp, Homo sapien
gtcttcagctttgtagatacccaaa

SEQ ID NO: 1472889 - DNA, 25 bp, Homo sapien
cgcagcacgcagtggagtttgggtc

SEQ ID NO: 1472890 - DNA, 25 bp, Homo sapien
caggatgagaaccatgtgcacagat

SEQ ID NO: 1472891 - DNA, 25 bp, Homo sapien
tgcacagatatttacagctctaggt

SEQ ID NO: 1472892 - DNA, 25 bp, Homo sapien
taggttctgcagtagaggtttctcc

SEQ ID NO: 1472893 - DNA, 25 bp, Homo sapien
tgaagaatgctgctcaagccaacag

SEQ ID NO: 1472894 - DNA, 25 bp, Homo sapien
tagatgtccacacttgaatcaaggg

SEQ ID NO: 1472895 - DNA, 25 bp, Homo sapien
cttgaatcaagggtgaaccagaccc

SEQ ID NO: 1472896 - DNA, 25 bp, Homo sapien
gctggtagatgtccacacttgaatc

SEQ ID NO: 1472897 - DNA, 25 bp, Homo sapien
ttgaatcaagggtgaaccagacccc

SEQ ID NO: 1472898 - DNA, 25 bp, Homo sapien
tgtggccaagagctttcagagacag

SEQ ID NO: 1472899 - DNA, 25 bp, Homo sapien
tggccaagagctttcagagacaggg

SEQ ID NO: 1472900 - DNA, 25 bp, Homo sapien
gtggaggggcaacctccagccgtcc

SEQ ID NO: 1472901 - DNA, 25 bp, Homo sapien
cctccagccgtcccgtgtggccaag

SEQ ID NO: 1472902 - DNA, 25 bp, Homo sapien
cagctctggtagggggtggtgccat

SEQ ID NO: 1472903 - DNA, 25 bp, Homo sapien
tcagctctggtagggggtggtgcca

SEQ ID NO: 1472904 - DNA, 25 bp, Homo sapien
ctctggtagggggtggtgccattca

SEQ ID NO: 1472905 - DNA, 25 bp, Homo sapien
gctctggtagggggtggtgccattc

SEQ ID NO: 1472906 - DNA, 25 bp, Homo sapien
aaaaccaattagagctgtaaaatgt

SEQ ID NO: 1472907 - DNA, 25 bp, Homo sapien
acaaaaccaattagagctgtaaaat

SEQ ID NO: 1472908 - DNA, 25 bp, Homo sapien
caaaaccaattagagctgtaaaatg

SEQ ID NO: 1472909 - DNA, 25 bp, Homo sapien
tattcttctttgtgagatactctga

SEQ ID NO: 1472910 - DNA, 25 bp, Homo sapien
gaagaaaacctattcttctttgtga

SEQ ID NO: 1472911 - DNA, 25 bp, Homo sapien
gctgccagagagctgactagagaat

SEQ ID NO: 1472912 - DNA, 25 bp, Homo sapien
agagctgactagagaatagcccagg

SEQ ID NO: 1472913 - DNA, 25 bp, Homo sapien
tagacatcgggacacccttggctgt

SEQ ID NO: 1472914 - DNA, 25 bp, Homo sapien
aatggcgttttgttccttccacaag

SEQ ID NO: 1472915 - DNA, 25 bp, Homo sapien
tccatgagatagagggtaatggcgt

SEQ ID NO: 1472916 - DNA, 25 bp, Homo sapien
caagtgacgcactttcaagatggaa

SEQ ID NO: 1472917 - DNA, 25 bp, Homo sapien
ctgcctggacttccttgtcctgggg

SEQ ID NO: 1472918 - DNA, 25 bp, Homo sapien
ccttgtcctggggaatgtcacccat

SEQ ID NO: 1472919 - DNA, 25 bp, Homo sapien
gacttccttgtcctggggaatgtca

SEQ ID NO: 1472920 - DNA, 25 bp, Homo sapien
tgcctggacttccttgtcctgggga

SEQ ID NO: 1472921 - DNA, 25 bp, Homo sapien
gccaggtccccactactactttgtg

SEQ ID NO: 1472922 - DNA, 25 bp, Homo sapien
gagtgccacttgtgctcgattgagc

SEQ ID NO: 1472923 - DNA, 25 bp, Homo sapien
gttgctcctccgtggacagaaggca

SEQ ID NO: 1472924 - DNA, 25 bp, Homo sapien
tcctgcttgctctgcgagtgccact

SEQ ID NO: 1472925 - DNA, 25 bp, Homo sapien
gagttgtgcctactttgatctggga

SEQ ID NO: 1472926 - DNA, 25 bp, Homo sapien
gaatccttcactgccgagagtggtc

SEQ ID NO: 1472927 - DNA, 25 bp, Homo sapien
gatcagaggcacgttgaccaattcc

SEQ ID NO: 1472928 - DNA, 25 bp, Homo sapien
cagtactcggtgcttggaccctggg

SEQ ID NO: 1472929 - DNA, 25 bp, Homo sapien
tggaggtggcacgtctgagaacaca

SEQ ID NO: 1472930 - DNA, 25 bp, Homo sapien
agcagggagcagccatagaagctga

SEQ ID NO: 1472931 - DNA, 25 bp, Homo sapien
aagctgaaattaggccactgtggag

SEQ ID NO: 1472932 - DNA, 25 bp, Homo sapien
gcgggggctatgagagacacattct

SEQ ID NO: 1472933 - DNA, 25 bp, Homo sapien
cacttcgaaagtccaggggcggtga

SEQ ID NO: 1472934 - DNA, 25 bp, Homo sapien
aggaagccacttcgaaagtccaggg

SEQ ID NO: 1472935 - DNA, 25 bp, Homo sapien
ttcgaaagtccaggggcggtgacca

SEQ ID NO: 1472936 - DNA, 25 bp, Homo sapien
agtaggaagccacttcgaaagtcca

SEQ ID NO: 1472937 - DNA, 25 bp, Homo sapien
tctggaccactcgagcctgattacc

SEQ ID NO: 1472938 - DNA, 25 bp, Homo sapien
tggaccactcgagcctgattaccat

SEQ ID NO: 1472939 - DNA, 25 bp, Homo sapien
gctctggaccactcgagcctgatta

SEQ ID NO: 1472940 - DNA, 25 bp, Homo sapien
agctctggaccactcgagcctgatt

SEQ ID NO: 1472941 - DNA, 25 bp, Homo sapien
gaatgaaggccacccgagagcctca

SEQ ID NO: 1472942 - DNA, 25 bp, Homo sapien
tgtacgcaggggtgtaagaatgaag

SEQ ID NO: 1472943 - DNA, 25 bp, Homo sapien
caggggtgtaagaatgaaggccacc

SEQ ID NO: 1472944 - DNA, 25 bp, Homo sapien
acaggtgtacgcaggggtgtaagaa

SEQ ID NO: 1472945 - DNA, 25 bp, Homo sapien
catagctctttaggacctgttcgtc

SEQ ID NO: 1472946 - DNA, 25 bp, Homo sapien
gctctttaggacctgttcgtccaaa

SEQ ID NO: 1472947 - DNA, 25 bp, Homo sapien
tagctctttaggacctgttcgtcca

SEQ ID NO: 1472948 - DNA, 25 bp, Homo sapien
ttccatagctctttaggacctgttc

SEQ ID NO: 1472949 - DNA, 25 bp, Homo sapien
ggaggtggagttccacgtgccatca

SEQ ID NO: 1472950 - DNA, 25 bp, Homo sapien
tatttctcagattgggttacccaga

SEQ ID NO: 1472951 - DNA, 25 bp, Homo sapien
tgtggttcacctacaagcctcattt

SEQ ID NO: 1472952 - DNA, 25 bp, Homo sapien
cgtgccatcaccaagtaagggtggg

SEQ ID NO: 1472953 - DNA, 25 bp, Homo sapien
tcttccggagcaatcatgaggtagt

SEQ ID NO: 1472954 - DNA, 25 bp, Homo sapien
gagcaatcatgaggtagtttctggt

SEQ ID NO: 1472955 - DNA, 25 bp, Homo sapien
ctgcttcttccggagcaatcatgag

SEQ ID NO: 1472956 - DNA, 25 bp, Homo sapien
tccggagcaatcatgaggtagtttc

SEQ ID NO: 1472957 - DNA, 25 bp, Homo sapien
ctgggtggtcccaacttctctattg

SEQ ID NO: 1472958 - DNA, 25 bp, Homo sapien
gctgggtggtcccaacttctctatt

SEQ ID NO: 1472959 - DNA, 25 bp, Homo sapien
caggaccgcatggacgcccttgcgt

SEQ ID NO: 1472960 - DNA, 25 bp, Homo sapien
ctcttccccaggaccgcatggacgc

SEQ ID NO: 1472961 - DNA, 25 bp, Homo sapien
catggacgcccttgcgtctttgcaa

SEQ ID NO: 1472962 - DNA, 25 bp, Homo sapien
tgcgtctttgcaacactgtgtccat

SEQ ID NO: 1472963 - DNA, 25 bp, Homo sapien
caagaacagcttccagaggctttgc

SEQ ID NO: 1472964 - DNA, 25 bp, Homo sapien
aagacaagaacagcttccagaggct

SEQ ID NO: 1472965 - DNA, 25 bp, Homo sapien
gacaagaacagcttccagaggcttt

SEQ ID NO: 1472966 - DNA, 25 bp, Homo sapien
gaagacaagaacagcttccagaggc

SEQ ID NO: 1472967 - DNA, 25 bp, Homo sapien
cagggccagacctttggtctctcct

SEQ ID NO: 1472968 - DNA, 25 bp, Homo sapien
cctctgtgtggtgccagccagccac

SEQ ID NO: 1472969 - DNA, 25 bp, Homo sapien
tctgtgtggtgccagccagccacca

SEQ ID NO: 1472970 - DNA, 25 bp, Homo sapien
caccatattgctgggactccttatc

SEQ ID NO: 1472971 - DNA, 25 bp, Homo sapien
tattagctccacgtgactgggcaag

SEQ ID NO: 1472972 - DNA, 25 bp, Homo sapien
gctccacgtgactgggcaagacgca

SEQ ID NO: 1472973 - DNA, 25 bp, Homo sapien
ctccacgtgactgggcaagacgcag

SEQ ID NO: 1472974 - DNA, 25 bp, Homo sapien
attagctccacgtgactgggcaaga

SEQ ID NO: 1472975 - DNA, 25 bp, Homo sapien
cagtgccctgtatcatccacctggg

SEQ ID NO: 1472976 - DNA, 25 bp, Homo sapien
agtgccctgtatcatccacctgggt

SEQ ID NO: 1472977 - DNA, 25 bp, Homo sapien
aaccccagtgccctgtatcatccac

SEQ ID NO: 1472978 - DNA, 25 bp, Homo sapien
gccctgtatcatccacctgggtcag

SEQ ID NO: 1472979 - DNA, 25 bp, Homo sapien
tgacctgaagtgaggctgcaagtct

SEQ ID NO: 1472980 - DNA, 25 bp, Homo sapien
tgtcagttcttgcaaattgacctga

SEQ ID NO: 1472981 - DNA, 25 bp, Homo sapien
aagtgaggctgcaagtcttcttttc

SEQ ID NO: 1472982 - DNA, 25 bp, Homo sapien
tcttgcaaattgacctgaagtgagg

SEQ ID NO: 1472983 - DNA, 25 bp, Homo sapien
ctgccgatcgtctgccctggacatg

SEQ ID NO: 1472984 - DNA, 25 bp, Homo sapien
tccatgccagagtgtggctgccgat

SEQ ID NO: 1472985 - DNA, 25 bp, Homo sapien
cagctggtacgtccatgccagagtg

SEQ ID NO: 1472986 - DNA, 25 bp, Homo sapien
gatgatgtgaattcgggtgagtaca

SEQ ID NO: 1472987 - DNA, 25 bp, Homo sapien
tagatccatgcagacgggcaaagat

SEQ ID NO: 1472988 - DNA, 25 bp, Homo sapien
agaacgctcctctcctttatcaaca

SEQ ID NO: 1472989 - DNA, 25 bp, Homo sapien
tatcatttgatcactctcattgccc

SEQ ID NO: 1472990 - DNA, 25 bp, Homo sapien
ggtctaccatccaggacacagctgt

SEQ ID NO: 1472991 - DNA, 25 bp, Homo sapien
tcagggctttcaaccgagtatgtct

SEQ ID NO: 1472992 - DNA, 25 bp, Homo sapien
tcaaacctgctgagtatgaagacag

SEQ ID NO: 1472993 - DNA, 25 bp, Homo sapien
ctgtgacaagggactagaggactgc

SEQ ID NO: 1472994 - DNA, 25 bp, Homo sapien
gaattgacttggcaggagaccttcc

SEQ ID NO: 1472995 - DNA, 25 bp, Homo sapien
tcaacaatatggtggagcctcgaag

SEQ ID NO: 1472996 - DNA, 25 bp, Homo sapien
aaccagcgcgcaagctctctcgcca

SEQ ID NO: 1472997 - DNA, 25 bp, Homo sapien
atggtggagcctcgaagccaaccag

SEQ ID NO: 1472998 - DNA, 25 bp, Homo sapien
tctctcgccacatgttcttggagat

SEQ ID NO: 1472999 - DNA, 25 bp, Homo sapien
tgacgtcgacagcagtggagaaaag

SEQ ID NO: 1473000 - DNA, 25 bp, Homo sapien
gctttccattgctcattacctcgca

SEQ ID NO: 1473001 - DNA, 25 bp, Homo sapien
gggtatagatgttgacgtcgacagc

SEQ ID NO: 1473002 - DNA, 25 bp, Homo sapien
atgggccagagacacgctttccatt

SEQ ID NO: 1473003 - DNA, 25 bp, Homo sapien
ggcctctcagttttataagcattac

SEQ ID NO: 1473004 - DNA, 25 bp, Homo sapien
gattaaaactactcagtctgactcc

SEQ ID NO: 1473005 - DNA, 25 bp, Homo sapien
gaacttcacaaacaacctgagtggt

SEQ ID NO: 1473006 - DNA, 25 bp, Homo sapien
gctcagagaggcttatttactcccc

SEQ ID NO: 1473007 - DNA, 25 bp, Homo sapien
tctatcaaccgctagctgtgggacc

SEQ ID NO: 1473008 - DNA, 25 bp, Homo sapien
tcacatgtgagagggatcttagcct

SEQ ID NO: 1473009 - DNA, 25 bp, Homo sapien
ttatgaccctgcctccaaacaaggt

SEQ ID NO: 1473010 - DNA, 25 bp, Homo sapien
tcatcttcatgtggtgtactccctg

SEQ ID NO: 1473011 - DNA, 25 bp, Homo sapien
ccatcacgtgaaccatctggcttcg

SEQ ID NO: 1473012 - DNA, 25 bp, Homo sapien
ggaggacaatgagcccctccgagga

SEQ ID NO: 1473013 - DNA, 25 bp, Homo sapien
cttccaaagctctcggccttcagag

SEQ ID NO: 1473014 - DNA, 25 bp, Homo sapien
catctggcttcgcaggaggacaatg

SEQ ID NO: 1473015 - DNA, 25 bp, Homo sapien
ctccaggtgggtggccccagtccta

SEQ ID NO: 1473016 - DNA, 25 bp, Homo sapien
tgctcggtgcaaatccagctctggg

SEQ ID NO: 1473017 - DNA, 25 bp, Homo sapien
caagctgatatgatgccaggtgcct

SEQ ID NO: 1473018 - DNA, 25 bp, Homo sapien
cctgcaggtaagtggctgggtaccc

SEQ ID NO: 1473019 - DNA, 25 bp, Homo sapien
cattaagtttgaggtctctaggccc

SEQ ID NO: 1473020 - DNA, 25 bp, Homo sapien
ttaactcaccccatgctcgtggaga

SEQ ID NO: 1473021 - DNA, 25 bp, Homo sapien
tctgcctgaagttgctcatagacca

SEQ ID NO: 1473022 - DNA, 25 bp, Homo sapien
caatgaaggtgtccagaaaacagca

SEQ ID NO: 1473023 - DNA, 25 bp, Homo sapien
tcacgtcaaattcattagagattct

SEQ ID NO: 1473024 - DNA, 25 bp, Homo sapien
cattagagattctctgagggcaaat

SEQ ID NO: 1473025 - DNA, 25 bp, Homo sapien
ctcacgtcaaattcattagagattc

SEQ ID NO: 1473026 - DNA, 25 bp, Homo sapien
cacgtcaaattcattagagattctc

SEQ ID NO: 1473027 - DNA, 25 bp, Homo sapien
tatgcaacctgttgcctcttcctag

SEQ ID NO: 1473028 - DNA, 25 bp, Homo sapien
ctcaaactatgcaacctgttgcctc

SEQ ID NO: 1473029 - DNA, 25 bp, Homo sapien
ggcagcagagcatacggttacccct

SEQ ID NO: 1473030 - DNA, 25 bp, Homo sapien
agagcatacggttacccctaagtgg

SEQ ID NO: 1473031 - DNA, 25 bp, Homo sapien
agctgaagttgggaagttgggaact

SEQ ID NO: 1473032 - DNA, 25 bp, Homo sapien
gaggaagaagctgaagttgggaagt

SEQ ID NO: 1473033 - DNA, 25 bp, Homo sapien
aagaagctgaagttgggaagttggg

SEQ ID NO: 1473034 - DNA, 25 bp, Homo sapien
ggaagaagctgaagttgggaagttg

SEQ ID NO: 1473035 - DNA, 25 bp, Homo sapien
agaaggtggctcccacagcaggcat

SEQ ID NO: 1473036 - DNA, 25 bp, Homo sapien
gaaggtggctcccacagcaggcatt

SEQ ID NO: 1473037 - DNA, 25 bp, Homo sapien
gaagctggggtcaggcggtgtcagt

SEQ ID NO: 1473038 - DNA, 25 bp, Homo sapien
tgcttccttcacagagcggggagtg

SEQ ID NO: 1473039 - DNA, 25 bp, Homo sapien
gacatagcagtagtgccaagcaagg

SEQ ID NO: 1473040 - DNA, 25 bp, Homo sapien
tagcagtagtgccaagcaaggactg

SEQ ID NO: 1473041 - DNA, 25 bp, Homo sapien
tagtgccaagcaaggactggtccag

SEQ ID NO: 1473042 - DNA, 25 bp, Homo sapien
tgaggacatagcagtagtgccaagc

SEQ ID NO: 1473043 - DNA, 25 bp, Homo sapien
tgacctcaaaagatccacccgtctc

SEQ ID NO: 1473044 - DNA, 25 bp, Homo sapien
gacctcaaaagatccacccgtctca

SEQ ID NO: 1473045 - DNA, 25 bp, Homo sapien
tcctgacctcaaaagatccacccgt

SEQ ID NO: 1473046 - DNA, 25 bp, Homo sapien
tcaaaagatccacccgtctcagtct

SEQ ID NO: 1473047 - DNA, 25 bp, Homo sapien
cagtgcagagataagccccagccag

SEQ ID NO: 1473048 - DNA, 25 bp, Homo sapien
taacttgaggacaaaacgaggcaac

SEQ ID NO: 1473049 - DNA, 25 bp, Homo sapien
gaggacaaaacgaggcaacgtcatt

SEQ ID NO: 1473050 - DNA, 25 bp, Homo sapien
aaaacgaggcaacgtcattccagag

SEQ ID NO: 1473051 - DNA, 25 bp, Homo sapien
tcaattgattcgattctctgatttc

SEQ ID NO: 1473052 - DNA, 25 bp, Homo sapien
ttcccagatttcagtgaggaggcag

SEQ ID NO: 1473053 - DNA, 25 bp, Homo sapien
agccctgtcatttccaaattggttt

SEQ ID NO: 1473054 - DNA, 25 bp, Homo sapien
attgattcgattctctgatttccca

SEQ ID NO: 1473055 - DNA, 25 bp, Homo sapien
acagccatgttcctgctcatgccca

SEQ ID NO: 1473056 - DNA, 25 bp, Homo sapien
cagccatgttcctgctcatgcccac

SEQ ID NO: 1473057 - DNA, 25 bp, Homo sapien
tcacagaaccgagaggcagagagac

SEQ ID NO: 1473058 - DNA, 25 bp, Homo sapien
ttagcacagcaggattcggaagatg

SEQ ID NO: 1473059 - DNA, 25 bp, Homo sapien
ccctgaagggtgaatgctgcagtca

SEQ ID NO: 1473060 - DNA, 25 bp, Homo sapien
gagagacgcacaacatgtccaaggt

SEQ ID NO: 1473061 - DNA, 25 bp, Homo sapien
cagcctgtcggggatggatggggtg

SEQ ID NO: 1473062 - DNA, 25 bp, Homo sapien
tgtgggccaaggctctagtgccctc

SEQ ID NO: 1473063 - DNA, 25 bp, Homo sapien
ccctcctgctgtgggatctgggtgc

SEQ ID NO: 1473064 - DNA, 25 bp, Homo sapien
caggcagggcatgctgcagcctgtc

SEQ ID NO: 1473065 - DNA, 25 bp, Homo sapien
gatgcacaccatccagggtgatgcc

SEQ ID NO: 1473066 - DNA, 25 bp, Homo sapien
acatggcactgccagttctgtgcat

SEQ ID NO: 1473067 - DNA, 25 bp, Homo sapien
tgcatcgggctatgaagaacactct

SEQ ID NO: 1473068 - DNA, 25 bp, Homo sapien
tgggtatggtgaggatgcacaccat

SEQ ID NO: 1473069 - DNA, 25 bp, Homo sapien
cagtcagtctcatcacagggaggcg

SEQ ID NO: 1473070 - DNA, 25 bp, Homo sapien
ggaggcgtgactgcaaagctctcag

SEQ ID NO: 1473071 - DNA, 25 bp, Homo sapien
taaataccgcagtggctaagagctc

SEQ ID NO: 1473072 - DNA, 25 bp, Homo sapien
tacacggtgaatctccatgccaagg

SEQ ID NO: 1473073 - DNA, 25 bp, Homo sapien
gaaacgagaaaacggcagccatgct

SEQ ID NO: 1473074 - DNA, 25 bp, Homo sapien
acgagaaaacggcagccatgctgag

SEQ ID NO: 1473075 - DNA, 25 bp, Homo sapien
caaagaaacgagaaaacggcagcca

SEQ ID NO: 1473076 - DNA, 25 bp, Homo sapien
tcacaaagaaacgagaaaacggcag

SEQ ID NO: 1473077 - DNA, 25 bp, Homo sapien
aagccccaatgtgctgcaaggattc

SEQ ID NO: 1473078 - DNA, 25 bp, Homo sapien
tgaagcccaaagctccagcgaaaac

SEQ ID NO: 1473079 - DNA, 25 bp, Homo sapien
tgcaaggattctgcagctctgcagt

SEQ ID NO: 1473080 - DNA, 25 bp, Homo sapien
gtgaagcccaaagctccagcgaaaa

SEQ ID NO: 1473081 - DNA, 25 bp, Homo sapien
tctctggcagttgttgttaagagca

SEQ ID NO: 1473082 - DNA, 25 bp, Homo sapien
aagagcattttccagcaccctgaag

SEQ ID NO: 1473083 - DNA, 25 bp, Homo sapien
tcaaagagtaataaaacctggatcc

SEQ ID NO: 1473084 - DNA, 25 bp, Homo sapien
ttcaaagagtaataaaacctggatc

SEQ ID NO: 1473085 - DNA, 25 bp, Homo sapien
caaagagtaataaaacctggatcca

SEQ ID NO: 1473086 - DNA, 25 bp, Homo sapien
aagagtaataaaacctggatccatt

SEQ ID NO: 1473087 - DNA, 25 bp, Homo sapien
gacggctccactacttgtactggat

SEQ ID NO: 1473088 - DNA, 25 bp, Homo sapien
tactggattcctccacttcagtcca

SEQ ID NO: 1473089 - DNA, 25 bp, Homo sapien
gatttcagacggctccactacttgt

SEQ ID NO: 1473090 - DNA, 25 bp, Homo sapien
tacttgtactggattcctccacttc

SEQ ID NO: 1473091 - DNA, 25 bp, Homo sapien
cacagatgtttgttgggcacctaaa

SEQ ID NO: 1473092 - DNA, 25 bp, Homo sapien
gcccctgggtggtgaatctgttcct

SEQ ID NO: 1473093 - DNA, 25 bp, Homo sapien
tactgtgtgcttataggtggtgcca

SEQ ID NO: 1473094 - DNA, 25 bp, Homo sapien
ttctgggctgattaaaaggctcggc

SEQ ID NO: 1473095 - DNA, 25 bp, Homo sapien
cagaaggcactggtttggtcaagaa

SEQ ID NO: 1473096 - DNA, 25 bp, Homo sapien
tcggctaccagagcggctagaataa

SEQ ID NO: 1473097 - DNA, 25 bp, Homo sapien
gactaatacacctggcaaactgcca

SEQ ID NO: 1473098 - DNA, 25 bp, Homo sapien
cagattctggatgctcttgacagta

SEQ ID NO: 1473099 - DNA, 25 bp, Homo sapien
gcaattgtacatagaagcctaggca

SEQ ID NO: 1473100 - DNA, 25 bp, Homo sapien
gaactccgaattccgccaatcatgg

SEQ ID NO: 1473101 - DNA, 25 bp, Homo sapien
taataggcattcattcaagtggacg

SEQ ID NO: 1473102 - DNA, 25 bp, Homo sapien
tattagagaaaacaatccccagcac

SEQ ID NO: 1473103 - DNA, 25 bp, Homo sapien
gataaaacacactcggtcagcctgg

SEQ ID NO: 1473104 - DNA, 25 bp, Homo sapien
caagtctctgctcgtgggagtggac

SEQ ID NO: 1473105 - DNA, 25 bp, Homo sapien
tagtctgagcgaggaactttgctgc

SEQ ID NO: 1473106 - DNA, 25 bp, Homo sapien
ttatatgtcatagtctccaccagcc

SEQ ID NO: 1473107 - DNA, 25 bp, Homo sapien
atgtaaggtcatgccacattcttta

SEQ ID NO: 1473108 - DNA, 25 bp, Homo sapien
aagtaccagatacttgaaggaccca

SEQ ID NO: 1473109 - DNA, 25 bp, Homo sapien
ggaaggaaagtaccagatacttgaa

SEQ ID NO: 1473110 - DNA, 25 bp, Homo sapien
cctcacgttgggcattaaatgtaag

SEQ ID NO: 1473111 - DNA, 25 bp, Homo sapien
tgctaactatcactgcagctcactg

SEQ ID NO: 1473112 - DNA, 25 bp, Homo sapien
tctaacgaataggaataacttcagg

SEQ ID NO: 1473113 - DNA, 25 bp, Homo sapien
gaaccaatctgttatactcaggagc

SEQ ID NO: 1473114 - DNA, 25 bp, Homo sapien
tacatagcagtttttcgcaggaaga

SEQ ID NO: 1473115 - DNA, 25 bp, Homo sapien
agatgtttaccagtccctaatcact

SEQ ID NO: 1473116 - DNA, 25 bp, Homo sapien
tgtattctcagattaagactttgat

SEQ ID NO: 1473117 - DNA, 25 bp, Homo sapien
taccagtccctaatcactctttcag

SEQ ID NO: 1473118 - DNA, 25 bp, Homo sapien
tttaccagtccctaatcactctttc

SEQ ID NO: 1473119 - DNA, 25 bp, Homo sapien
gctgaagtaaaagtcacctagaacc

SEQ ID NO: 1473120 - DNA, 25 bp, Homo sapien
caggacagttgaagtttgccaagct

SEQ ID NO: 1473121 - DNA, 25 bp, Homo sapien
tagaaccaagtcctaggctgtcact

SEQ ID NO: 1473122 - DNA, 25 bp, Homo sapien
ggctgtcactttgacgtatcagtgg

SEQ ID NO: 1473123 - DNA, 25 bp, Homo sapien
ttttggatgaaacccttagtctgaa

SEQ ID NO: 1473124 - DNA, 25 bp, Homo sapien
tgttgctcagtctcatcccgaactc

SEQ ID NO: 1473125 - DNA, 25 bp, Homo sapien
tgtgccctgctgaaatgtactgttt

SEQ ID NO: 1473126 - DNA, 25 bp, Homo sapien
agtatttcaccttccatagactgag

SEQ ID NO: 1473127 - DNA, 25 bp, Homo sapien
tgggaaacattgcaccagtggctta

SEQ ID NO: 1473128 - DNA, 25 bp, Homo sapien
ggcttatcaaactaatgtgcacacg

SEQ ID NO: 1473129 - DNA, 25 bp, Homo sapien
gccaccgtgcccgtgtataaatagc

SEQ ID NO: 1473130 - DNA, 25 bp, Homo sapien
tgtgcacacgagtcccctggtgtat

SEQ ID NO: 1473131 - DNA, 25 bp, Homo sapien
tatgacctgatattcaaagactctg

SEQ ID NO: 1473132 - DNA, 25 bp, Homo sapien
tgtcctgtagcccagtgcggctcca

SEQ ID NO: 1473133 - DNA, 25 bp, Homo sapien
tcatcatgttggttatattgcacaa

SEQ ID NO: 1473134 - DNA, 25 bp, Homo sapien
gatagaatgtggcactaaatgcagt

SEQ ID NO: 1473135 - DNA, 25 bp, Homo sapien
gatctaccactttcagtaggacaag

SEQ ID NO: 1473136 - DNA, 25 bp, Homo sapien
tacgtacagtctgagtttgtcccac

SEQ ID NO: 1473137 - DNA, 25 bp, Homo sapien
taggacaagtgacccaagttgttgg

SEQ ID NO: 1473138 - DNA, 25 bp, Homo sapien
tgatccatctaactactcctgtacg

SEQ ID NO: 1473139 - DNA, 25 bp, Homo sapien
tcagcctgctatacatagccagcat

SEQ ID NO: 1473140 - DNA, 25 bp, Homo sapien
catcagcctgctatacatagccagc

SEQ ID NO: 1473141 - DNA, 25 bp, Homo sapien
gaccatcagcctgctatacatagcc

SEQ ID NO: 1473142 - DNA, 25 bp, Homo sapien
aggaccatcagcctgctatacatag

SEQ ID NO: 1473143 - DNA, 25 bp, Homo sapien
caaacgttgtgcaatgaccaggtca

SEQ ID NO: 1473144 - DNA, 25 bp, Homo sapien
caaacttacgatagcacagggaaac

SEQ ID NO: 1473145 - DNA, 25 bp, Homo sapien
tacaaccccgaattattgtgtggcc

SEQ ID NO: 1473146 - DNA, 25 bp, Homo sapien
tactgagaggcgactgtaccataac

SEQ ID NO: 1473147 - DNA, 25 bp, Homo sapien
tcttctggaagttatggcttccaat

SEQ ID NO: 1473148 - DNA, 25 bp, Homo sapien
atcttctggaagttatggcttccaa

SEQ ID NO: 1473149 - DNA, 25 bp, Homo sapien
cttctggaagttatggcttccaata

SEQ ID NO: 1473150 - DNA, 25 bp, Homo sapien
tctggaagttatggcttccaataac

SEQ ID NO: 1473151 - DNA, 25 bp, Homo sapien
tacgcaagtaagatcacctatagcc

SEQ ID NO: 1473152 - DNA, 25 bp, Homo sapien
tttaacatctcctaactaagggcag

SEQ ID NO: 1473153 - DNA, 25 bp, Homo sapien
cagctgagttcaagtgacccaagta

SEQ ID NO: 1473154 - DNA, 25 bp, Homo sapien
taacatacatataaccagaggtgcc

SEQ ID NO: 1473155 - DNA, 25 bp, Homo sapien
taaaaagagttttatgtagcattta

SEQ ID NO: 1473156 - DNA, 25 bp, Homo sapien
tttcagactttttcaacatgaaagg

SEQ ID NO: 1473157 - DNA, 25 bp, Homo sapien
attttaaatatcattgggttctctg

SEQ ID NO: 1473158 - DNA, 25 bp, Homo sapien
aatatcattgggttctctgtttcag

SEQ ID NO: 1473159 - DNA, 25 bp, Homo sapien
cccaagaattaggaacatgattaca

SEQ ID NO: 1473160 - DNA, 25 bp, Homo sapien
gaattaggaacatgattacaaccac

SEQ ID NO: 1473161 - DNA, 25 bp, Homo sapien
tgtcttgcaggttgtcccaagaatt

SEQ ID NO: 1473162 - DNA, 25 bp, Homo sapien
ggttgtcccaagaattaggaacatg

SEQ ID NO: 1473163 - DNA, 25 bp, Homo sapien
caagctggcataggcagagcaccat

SEQ ID NO: 1473164 - DNA, 25 bp, Homo sapien
gcctgagctggatgactaacaccga

SEQ ID NO: 1473165 - DNA, 25 bp, Homo sapien
gattgtcagctgcaacacaagcctg

SEQ ID NO: 1473166 - DNA, 25 bp, Homo sapien
taaaagaggctgtccacgcaagtgt

SEQ ID NO: 1473167 - DNA, 25 bp, Homo sapien
tcttctgttcttggctcgtaatgct

SEQ ID NO: 1473168 - DNA, 25 bp, Homo sapien
ccacatccacagagtgagctcgctg

SEQ ID NO: 1473169 - DNA, 25 bp, Homo sapien
gctcgctgcctttgagcaaccagtt

SEQ ID NO: 1473170 - DNA, 25 bp, Homo sapien
tggctcgtaatgctgattcatgaat

SEQ ID NO: 1473171 - DNA, 25 bp, Homo sapien
atgctatcccctaagatctcccatg

SEQ ID NO: 1473172 - DNA, 25 bp, Homo sapien
atgcccgatgacaggcgcatggccc

SEQ ID NO: 1473173 - DNA, 25 bp, Homo sapien
aacacagaaccacaagggcccagag

SEQ ID NO: 1473174 - DNA, 25 bp, Homo sapien
cagtggccaaaggacacgatgcccg

SEQ ID NO: 1473175 - DNA, 25 bp, Homo sapien
cacagacgttgtgagtcttctggct

SEQ ID NO: 1473176 - DNA, 25 bp, Homo sapien
gctcagtactggtgggtgatttgtc

SEQ ID NO: 1473177 - DNA, 25 bp, Homo sapien
tcgtgcacaggagcggacgcacaga

SEQ ID NO: 1473178 - DNA, 25 bp, Homo sapien
taaggcacttggttgctgtcgaggc

SEQ ID NO: 1473179 - DNA, 25 bp, Homo sapien
gaaaatgctccttagtccttccgtg

SEQ ID NO: 1473180 - DNA, 25 bp, Homo sapien
gcacaacagggagtgatttccatcg

SEQ ID NO: 1473181 - DNA, 25 bp, Homo sapien
gacagcaccacaccctaagggcttt

SEQ ID NO: 1473182 - DNA, 25 bp, Homo sapien
ttgagttactccacccgaaaatgct

SEQ ID NO: 1473183 - DNA, 25 bp, Homo sapien
ggtgccccagttgtttaggccacag

SEQ ID NO: 1473184 - DNA, 25 bp, Homo sapien
ccccagttgtttaggccacaggaga

SEQ ID NO: 1473185 - DNA, 25 bp, Homo sapien
tgaggtgccccagttgtttaggcca

SEQ ID NO: 1473186 - DNA, 25 bp, Homo sapien
tgccccagttgtttaggccacagga

SEQ ID NO: 1473187 - DNA, 25 bp, Homo sapien
agtgatgtgtccacacgctttctcc

SEQ ID NO: 1473188 - DNA, 25 bp, Homo sapien
tccctggtgtttaagaagaggagga

SEQ ID NO: 1473189 - DNA, 25 bp, Homo sapien
tgctcaaacgtttatctgagtgatg

SEQ ID NO: 1473190 - DNA, 25 bp, Homo sapien
tcttccctggtgtttaagaagagga

SEQ ID NO: 1473191 - DNA, 25 bp, Homo sapien
gcaggtgttctgagtggatggtcat

SEQ ID NO: 1473192 - DNA, 25 bp, Homo sapien
ttctgagtggatggtcatgctgtcc

SEQ ID NO: 1473193 - DNA, 25 bp, Homo sapien
catgtgggcgctcggttctgtggct

SEQ ID NO: 1473194 - DNA, 25 bp, Homo sapien
aaggaccatgtgggcgctcggttct

SEQ ID NO: 1473195 - DNA, 25 bp, Homo sapien
ggtaaatacaggcaccatccatatc

SEQ ID NO: 1473196 - DNA, 25 bp, Homo sapien
gagaaaagccatttagcctgataaa

SEQ ID NO: 1473197 - DNA, 25 bp, Homo sapien
catccatatcacaacgctgcctaaa

SEQ ID NO: 1473198 - DNA, 25 bp, Homo sapien
caatttagctagcagatcagtaccc

SEQ ID NO: 1473199 - DNA, 25 bp, Homo sapien
tcactgaagcatcaggatttgtggg

SEQ ID NO: 1473200 - DNA, 25 bp, Homo sapien
ccctgcctccgatgatgagctgaaa

SEQ ID NO: 1473201 - DNA, 25 bp, Homo sapien
gcctccgatgatgagctgaaaatag

SEQ ID NO: 1473202 - DNA, 25 bp, Homo sapien
tgtggggattcacaagtaacatcat

SEQ ID NO: 1473203 - DNA, 25 bp, Homo sapien
tgactgaatgtctaacaggctccca

SEQ ID NO: 1473204 - DNA, 25 bp, Homo sapien
cagtgactgaatgtctaacaggctc

SEQ ID NO: 1473205 - DNA, 25 bp, Homo sapien
gacaacatacatattcccagatcag

SEQ ID NO: 1473206 - DNA, 25 bp, Homo sapien
gaatgtctaacaggctcccaataca

SEQ ID NO: 1473207 - DNA, 25 bp, Homo sapien
gggccatgccttgaaaacacgcgca

SEQ ID NO: 1473208 - DNA, 25 bp, Homo sapien
gaaggaaccattggttactccaggc

SEQ ID NO: 1473209 - DNA, 25 bp, Homo sapien
gaggcgttcaactgggtccccagcc

SEQ ID NO: 1473210 - DNA, 25 bp, Homo sapien
ttactccaggctgtactgaggcgtt

SEQ ID NO: 1473211 - DNA, 25 bp, Homo sapien
tattctttagggacagcgtagcgag

SEQ ID NO: 1473212 - DNA, 25 bp, Homo sapien
tggccccattcatcagacaaagctt

SEQ ID NO: 1473213 - DNA, 25 bp, Homo sapien
ggagaggccctagcacttataaaga

SEQ ID NO: 1473214 - DNA, 25 bp, Homo sapien
taaagatgctctcacagccaagtta

SEQ ID NO: 1473215 - DNA, 25 bp, Homo sapien
gggctcctctgatcaaaaatgggcg

SEQ ID NO: 1473216 - DNA, 25 bp, Homo sapien
ggctcctctgatcaaaaatgggcgc

SEQ ID NO: 1473217 - DNA, 25 bp, Homo sapien
aatctgattaaagctggggctcctc

SEQ ID NO: 1473218 - DNA, 25 bp, Homo sapien
tagaaataagcagatgggactcagt

SEQ ID NO: 1473219 - DNA, 25 bp, Homo sapien
gatgggactcagtggttcgccaaga

SEQ ID NO: 1473220 - DNA, 25 bp, Homo sapien
gtggttcgccaagaaataagatggg

SEQ ID NO: 1473221 - DNA, 25 bp, Homo sapien
gactcagtggttcgccaagaaataa

SEQ ID NO: 1473222 - DNA, 25 bp, Homo sapien
caattgagttcaccgctggctcgac

SEQ ID NO: 1473223 - DNA, 25 bp, Homo sapien
cagccagcggcgcttcaattgagtt

SEQ ID NO: 1473224 - DNA, 25 bp, Homo sapien
gttcaccgctggctcgaccgaaagc

SEQ ID NO: 1473225 - DNA, 25 bp, Homo sapien
ggcgcttcaattgagttcaccgctg

SEQ ID NO: 1473226 - DNA, 25 bp, Homo sapien
gaaataaagggtggcaaaggctgcc

SEQ ID NO: 1473227 - DNA, 25 bp, Homo sapien
gagagacggattctgtcaaccgaaa

SEQ ID NO: 1473228 - DNA, 25 bp, Homo sapien
gcaagaaataagagatcagctgctc

SEQ ID NO: 1473229 - DNA, 25 bp, Homo sapien
agagccagccccgagtggcgcaaga

SEQ ID NO: 1473230 - DNA, 25 bp, Homo sapien
agcaaaccgtccctgcgtgcaggcc

SEQ ID NO: 1473231 - DNA, 25 bp, Homo sapien
cgtgcaggcccctcgcgctcccctc

SEQ ID NO: 1473232 - DNA, 25 bp, Homo sapien
ttagagcaaaccgtccctgcgtgca

SEQ ID NO: 1473233 - DNA, 25 bp, Homo sapien
ctgcgtgcaggcccctcgcgctccc

SEQ ID NO: 1473234 - DNA, 25 bp, Homo sapien
tccgcctcctcctgggtcgccggct

SEQ ID NO: 1473235 - DNA, 25 bp, Homo sapien
cgcgtccccggcctccgcgtcctgc

SEQ ID NO: 1473236 - DNA, 25 bp, Homo sapien
cgttccgcctcctcctgggtcgccg

SEQ ID NO: 1473237 - DNA, 25 bp, Homo sapien
ggcagagccgcgtcctccgcgtcct

SEQ ID NO: 1473238 - DNA, 25 bp, Homo sapien
cgagggcggggcgcaccggggtgcg

SEQ ID NO: 1473239 - DNA, 25 bp, Homo sapien
gcgagggcggggcgcaccggggtgc

SEQ ID NO: 1473240 - DNA, 25 bp, Homo sapien
tcctggtagcgcttcatgtactcgc

SEQ ID NO: 1473241 - DNA, 25 bp, Homo sapien
agctcgcggtagcacggcccgtact

SEQ ID NO: 1473242 - DNA, 25 bp, Homo sapien
cagtcgtcccagagccagggcgcgt

SEQ ID NO: 1473243 - DNA, 25 bp, Homo sapien
agccggcggcctaggcggtagtgca

SEQ ID NO: 1473244 - DNA, 25 bp, Homo sapien
gcctcgagcgccagccgctcctcgc

SEQ ID NO: 1473245 - DNA, 25 bp, Homo sapien
cgcctcgagcgccagccgctcctcg

SEQ ID NO: 1473246 - DNA, 25 bp, Homo sapien
ccgcctcgagcgccagccgctcctc

SEQ ID NO: 1473247 - DNA, 25 bp, Homo sapien
ggacccggtacacgacacagaggcc

SEQ ID NO: 1473248 - DNA, 25 bp, Homo sapien
gggacccggtacacgacacagaggc

SEQ ID NO: 1473249 - DNA, 25 bp, Homo sapien
ctacgggacccggtacacgacacag

SEQ ID NO: 1473250 - DNA, 25 bp, Homo sapien
acgggacccggtacacgacacagag

SEQ ID NO: 1473251 - DNA, 25 bp, Homo sapien
caggcccgaggcgcgcgtggcgcag

SEQ ID NO: 1473252 - DNA, 25 bp, Homo sapien
gcccgaggcgcgcgtggcgcagcag

SEQ ID NO: 1473253 - DNA, 25 bp, Homo sapien
cggccgatcctctgcgcccaggccc

SEQ ID NO: 1473254 - DNA, 25 bp, Homo sapien
gcgcccggccgatcctctgcgccca

SEQ ID NO: 1473255 - DNA, 25 bp, Homo sapien
gacgctgtcccaggcacgcgtcact

SEQ ID NO: 1473256 - DNA, 25 bp, Homo sapien
ctgcttccgtagagagcgcgaggcg

SEQ ID NO: 1473257 - DNA, 25 bp, Homo sapien
gtgcgggcgtgcctgccagtccgag

SEQ ID NO: 1473258 - DNA, 25 bp, Homo sapien
tcctgagcaagatgtcgccgcggcg

SEQ ID NO: 1473259 - DNA, 25 bp, Homo sapien
gttgtgcagaagtatacaaagttgt

SEQ ID NO: 1473260 - DNA, 25 bp, Homo sapien
gtgcagaagtatacaaagttgtccc

SEQ ID NO: 1473261 - DNA, 25 bp, Homo sapien
tgtgcagaagtatacaaagttgtcc

SEQ ID NO: 1473262 - DNA, 25 bp, Homo sapien
gcagaagtatacaaagttgtcccat

SEQ ID NO: 1473263 - DNA, 25 bp, Homo sapien
catggctgatattgaaatctactga

SEQ ID NO: 1473264 - DNA, 25 bp, Homo sapien
tcaccatcttaaaatcatggctgat

SEQ ID NO: 1473265 - DNA, 25 bp, Homo sapien
catccatgcagttatcctcactgaa

SEQ ID NO: 1473266 - DNA, 25 bp, Homo sapien
tgtcatccatgcagttatcctcact

SEQ ID NO: 1473267 - DNA, 25 bp, Homo sapien
tgacacagaatattgagtgccagtg

SEQ ID NO: 1473268 - DNA, 25 bp, Homo sapien
tctccacgcccggtgcaagttacag

SEQ ID NO: 1473269 - DNA, 25 bp, Homo sapien
cagtgagttctccacgcccggtgca

SEQ ID NO: 1473270 - DNA, 25 bp, Homo sapien
tgggaaactccggtctccatcgtaa

SEQ ID NO: 1473271 - DNA, 25 bp, Homo sapien
ctaaacccgggcagacggtgtccat

SEQ ID NO: 1473272 - DNA, 25 bp, Homo sapien
tccacagcttgtagaacaccaaggg

SEQ ID NO: 1473273 - DNA, 25 bp, Homo sapien
catccacagcttgtagaacaccaag

SEQ ID NO: 1473274 - DNA, 25 bp, Homo sapien
ccgggcagacggtgtccatccacag

SEQ ID NO: 1473275 - DNA, 25 bp, Homo sapien
gatgtcctgggttctgcaagtttgg

SEQ ID NO: 1473276 - DNA, 25 bp, Homo sapien
actcaggaacctagcttgggacaag

SEQ ID NO: 1473277 - DNA, 25 bp, Homo sapien
cctttgggccctgatatctgagtgt

SEQ ID NO: 1473278 - DNA, 25 bp, Homo sapien
tctaagtggtcaggccaaatccagg

SEQ ID NO: 1473279 - DNA, 25 bp, Homo sapien
caaatgcgttaccacttgggagagt

SEQ ID NO: 1473280 - DNA, 25 bp, Homo sapien
gggcaaatgcgttaccacttgggag

SEQ ID NO: 1473281 - DNA, 25 bp, Homo sapien
ggcatcatgaaggccctggaagcca

SEQ ID NO: 1473282 - DNA, 25 bp, Homo sapien
ttgggagagtgcttatcagccaggt

SEQ ID NO: 1473283 - DNA, 25 bp, Homo sapien
atcaatgctgcatcctgggttagca

SEQ ID NO: 1473284 - DNA, 25 bp, Homo sapien
ttgccgcccgcatcctgcatgagtg

SEQ ID NO: 1473285 - DNA, 25 bp, Homo sapien
cctgcatgagtgacttctctttgcc

SEQ ID NO: 1473286 - DNA, 25 bp, Homo sapien
tcagaggacatcaatgctgcatcct

SEQ ID NO: 1473287 - DNA, 25 bp, Homo sapien
cccagggatgggtacaatgacaggt

SEQ ID NO: 1473288 - DNA, 25 bp, Homo sapien
gttggcaagtacgatggggcagaca

SEQ ID NO: 1473289 - DNA, 25 bp, Homo sapien
tggccagagggcgtggaattcctcc

SEQ ID NO: 1473290 - DNA, 25 bp, Homo sapien
ggtacaatgacaggttggcaagtac

SEQ ID NO: 1473291 - DNA, 25 bp, Homo sapien
aataaatgccacagcaataatgccc

SEQ ID NO: 1473292 - DNA, 25 bp, Homo sapien
taaatgccacagcaataatgcccat

SEQ ID NO: 1473293 - DNA, 25 bp, Homo sapien
ataaatgccacagcaataatgccca

SEQ ID NO: 1473294 - DNA, 25 bp, Homo sapien
caaataaatgccacagcaataatgc

SEQ ID NO: 1473295 - DNA, 25 bp, Homo sapien
atgctgcaggtttagggagcaggta

SEQ ID NO: 1473296 - DNA, 25 bp, Homo sapien
agatgatggcctcagtccacctctg

SEQ ID NO: 1473297 - DNA, 25 bp, Homo sapien
tgccctggggatgtgtggagactct

SEQ ID NO: 1473298 - DNA, 25 bp, Homo sapien
caggtttagggagcaggtagatgat

SEQ ID NO: 1473299 - DNA, 25 bp, Homo sapien
ccagttcagggtggatacagatgcc

SEQ ID NO: 1473300 - DNA, 25 bp, Homo sapien
tacagatgccaggagactcgctgat

SEQ ID NO: 1473301 - DNA, 25 bp, Homo sapien
tctactcaatgggaatacgtctagc

SEQ ID NO: 1473302 - DNA, 25 bp, Homo sapien
gagtacctgagattaacaagaccca

SEQ ID NO: 1473303 - DNA, 25 bp, Homo sapien
tgagctcgttccgcggttctagcag

SEQ ID NO: 1473304 - DNA, 25 bp, Homo sapien
aagccagcaggtgtcaacccattcg

SEQ ID NO: 1473305 - DNA, 25 bp, Homo sapien
agggatgcctgcctaagccagcagg

SEQ ID NO: 1473306 - DNA, 25 bp, Homo sapien
cagaaccgttgtcctctatcagaga

SEQ ID NO: 1473307 - DNA, 25 bp, Homo sapien
ctcatcccagcctgaaccagtgttt

SEQ ID NO: 1473308 - DNA, 25 bp, Homo sapien
ccagcctgaaccagtgtttgccttg

SEQ ID NO: 1473309 - DNA, 25 bp, Homo sapien
ctgaaccagtgtttgccttgcccat

SEQ ID NO: 1473310 - DNA, 25 bp, Homo sapien
agcctgaaccagtgtttgccttgcc

SEQ ID NO: 1473311 - DNA, 25 bp, Homo sapien
cgatggcagcaacggaagttgttac

SEQ ID NO: 1473312 - DNA, 25 bp, Homo sapien
tcgtcgtcctgagaagtcgcgtgct

SEQ ID NO: 1473313 - DNA, 25 bp, Homo sapien
cactgtgtcagtttacgatggcagc

SEQ ID NO: 1473314 - DNA, 25 bp, Homo sapien
ccccattgagaagattcgtcgtcct

SEQ ID NO: 1473315 - DNA, 25 bp, Homo sapien
tggaagggccggcctcgtcgtactc

SEQ ID NO: 1473316 - DNA, 25 bp, Homo sapien
aagggccggcctcgtcgtactcctg

SEQ ID NO: 1473317 - DNA, 25 bp, Homo sapien
gacgatggaagggccggcctcgtcg

SEQ ID NO: 1473318 - DNA, 25 bp, Homo sapien
gatggaagggccggcctcgtcgtac

SEQ ID NO: 1473319 - DNA, 25 bp, Homo sapien
gccgacagcccgcgcaggccaccac

SEQ ID NO: 1473320 - DNA, 25 bp, Homo sapien
acagcccgcgcaggccaccacccac

SEQ ID NO: 1473321 - DNA, 25 bp, Homo sapien
tggagcccaccccgccgacagcccg

SEQ ID NO: 1473322 - DNA, 25 bp, Homo sapien
accctggagcccaccccgccgacag

SEQ ID NO: 1473323 - DNA, 25 bp, Homo sapien
gatcccagggtacatcgtggtgccc

SEQ ID NO: 1473324 - DNA, 25 bp, Homo sapien
tctctttctgcatgcggtcagcgat

SEQ ID NO: 1473325 - DNA, 25 bp, Homo sapien
ccccccgacatgacgttgttggcat

SEQ ID NO: 1473326 - DNA, 25 bp, Homo sapien
gcggtcagcgatcccagggtacatc

SEQ ID NO: 1473327 - DNA, 25 bp, Homo sapien
gtggtctcgtgaatgcccgccgact

SEQ ID NO: 1473328 - DNA, 25 bp, Homo sapien
ttgtaggtggtctcgtgaatgcccg

SEQ ID NO: 1473329 - DNA, 25 bp, Homo sapien
ctgttgtaggtggtctcgtgaatgc

SEQ ID NO: 1473330 - DNA, 25 bp, Homo sapien
gtaggtggtctcgtgaatgcccgcc

SEQ ID NO: 1473331 - DNA, 25 bp, Homo sapien
gatggtgatgacctgcccgtctggc

SEQ ID NO: 1473332 - DNA, 25 bp, Homo sapien
gttctcgaagtccagggccacgtag

SEQ ID NO: 1473333 - DNA, 25 bp, Homo sapien
aggaggcggccgtcgccatctcgtt

SEQ ID NO: 1473334 - DNA, 25 bp, Homo sapien
agggctggaagagcgtctccgggca

SEQ ID NO: 1473335 - DNA, 25 bp, Homo sapien
tagtcggtgagatcgcggcccgcca

SEQ ID NO: 1473336 - DNA, 25 bp, Homo sapien
gcgcatgatggcgtgcggcagcgcg

SEQ ID NO: 1473337 - DNA, 25 bp, Homo sapien
tgtggtcacgaaggagtagccacgc

SEQ ID NO: 1473338 - DNA, 25 bp, Homo sapien
gcggcagcgcgtagccctcataaat

SEQ ID NO: 1473339 - DNA, 25 bp, Homo sapien
cgccgtcgccggagtccagcacgat

SEQ ID NO: 1473340 - DNA, 25 bp, Homo sapien
ccgtcgccggagtccagcacgatgc

SEQ ID NO: 1473341 - DNA, 25 bp, Homo sapien
acgccgtcgccggagtccagcacga

SEQ ID NO: 1473342 - DNA, 25 bp, Homo sapien
gccgtcgccggagtccagcacgatg

SEQ ID NO: 1473343 - DNA, 25 bp, Homo sapien
ccacgtacatggcgggcacgttgaa

SEQ ID NO: 1473344 - DNA, 25 bp, Homo sapien
gtacatggcgggcacgttgaaggtc

SEQ ID NO: 1473345 - DNA, 25 bp, Homo sapien
tggtcctgccggaggcgtagaggga

SEQ ID NO: 1473346 - DNA, 25 bp, Homo sapien
cggtggtcctgccggaggcgtagag

SEQ ID NO: 1473347 - DNA, 25 bp, Homo sapien
ggattgaggggggcctcggtgagca

SEQ ID NO: 1473348 - DNA, 25 bp, Homo sapien
attgaggggggcctcggtgagcagg

SEQ ID NO: 1473349 - DNA, 25 bp, Homo sapien
tgaggggggcctcggtgagcagggt

SEQ ID NO: 1473350 - DNA, 25 bp, Homo sapien
ttgggattgaggggggcctcggtga

SEQ ID NO: 1473351 - DNA, 25 bp, Homo sapien
gaatctttctgacccataccgacca

SEQ ID NO: 1473352 - DNA, 25 bp, Homo sapien
cacgtaggaatctttctgacccata

SEQ ID NO: 1473353 - DNA, 25 bp, Homo sapien
taggaatctttctgacccataccga

SEQ ID NO: 1473354 - DNA, 25 bp, Homo sapien
tttctgacccataccgaccatgacg

SEQ ID NO: 1473355 - DNA, 25 bp, Homo sapien
gcgaagccggctttcaccaggccgg

SEQ ID NO: 1473356 - DNA, 25 bp, Homo sapien
cggtggtctcgtcttcgtcgcacat

SEQ ID NO: 1473357 - DNA, 25 bp, Homo sapien
ccggagccattgtcgcacacgaggg

SEQ ID NO: 1473358 - DNA, 25 bp, Homo sapien
acgatggacgggaacacggccctag

SEQ ID NO: 1473359 - DNA, 25 bp, Homo sapien
tgttccaggagctggacgctagtgc

SEQ ID NO: 1473360 - DNA, 25 bp, Homo sapien
ctgttccaggagctggacgctagtg

SEQ ID NO: 1473361 - DNA, 25 bp, Homo sapien
ccaggagctggacgctagtgcccat

SEQ ID NO: 1473362 - DNA, 25 bp, Homo sapien
ttccaggagctggacgctagtgccc

SEQ ID NO: 1473363 - DNA, 25 bp, Homo sapien
gcgaggcttcacttggcgctgtccg

SEQ ID NO: 1473364 - DNA, 25 bp, Homo sapien
ggcgggtagctacaactgctactct

SEQ ID NO: 1473365 - DNA, 25 bp, Homo sapien
tgctactctcggctcgggccctggt

SEQ ID NO: 1473366 - DNA, 25 bp, Homo sapien
ctcgggccctggtcgccgcggaggg

SEQ ID NO: 1473367 - DNA, 25 bp, Homo sapien
aaccatgtccactctgagcgccctg

SEQ ID NO: 1473368 - DNA, 25 bp, Homo sapien
gacttccaatatttcaactcctctt

SEQ ID NO: 1473369 - DNA, 25 bp, Homo sapien
gggttctttgctcagatccccaaac

SEQ ID NO: 1473370 - DNA, 25 bp, Homo sapien
ccacttgcgactaccgggaagaggg

SEQ ID NO: 1473371 - DNA, 25 bp, Homo sapien
tggaactccatttctctcttcccac

SEQ ID NO: 1473372 - DNA, 25 bp, Homo sapien
ccctggaactccatttctctcttcc

SEQ ID NO: 1473373 - DNA, 25 bp, Homo sapien
ctggaactccatttctctcttccca

SEQ ID NO: 1473374 - DNA, 25 bp, Homo sapien
gcccctggaactccatttctctctt

SEQ ID NO: 1473375 - DNA, 25 bp, Homo sapien
ccaaaaagctgagccacgtcgaccc

SEQ ID NO: 1473376 - DNA, 25 bp, Homo sapien
aaaagctgagccacgtcgacccctt

SEQ ID NO: 1473377 - DNA, 25 bp, Homo sapien
aaaaagctgagccacgtcgacccct

SEQ ID NO: 1473378 - DNA, 25 bp, Homo sapien
agctgagccacgtcgaccccttccc

SEQ ID NO: 1473379 - DNA, 25 bp, Homo sapien
ggcgcgcagctgtcgcaggatagac

SEQ ID NO: 1473380 - DNA, 25 bp, Homo sapien
cgcgcagctgtcgcaggatagacaa

SEQ ID NO: 1473381 - DNA, 25 bp, Homo sapien
gcgcgcagctgtcgcaggatagaca

SEQ ID NO: 1473382 - DNA, 25 bp, Homo sapien
gggcgcgcagctgtcgcaggataga

SEQ ID NO: 1473383 - DNA, 25 bp, Homo sapien
ctggcggggggaggcgagggcggag

SEQ ID NO: 1473384 - DNA, 25 bp, Homo sapien
gcggggggaggcgagggcggagcgc

SEQ ID NO: 1473385 - DNA, 25 bp, Homo sapien
cggagcgccggggaggaggcgcggg

SEQ ID NO: 1473386 - DNA, 25 bp, Homo sapien
gaggcgagggcggagcgccggggag

SEQ ID NO: 1473387 - DNA, 25 bp, Homo sapien
ctgtcaggcgcaaagcctgagcaca

SEQ ID NO: 1473388 - DNA, 25 bp, Homo sapien
gcaaagcctgagcacacggagctgt

SEQ ID NO: 1473389 - DNA, 25 bp, Homo sapien
tcagggacgcgcagcgcccttgggt

SEQ ID NO: 1473390 - DNA, 25 bp, Homo sapien
acacggagctgtccgcctcagggac

SEQ ID NO: 1473391 - DNA, 25 bp, Homo sapien
cttctgtgatgaactcagggacatg

SEQ ID NO: 1473392 - DNA, 25 bp, Homo sapien
gcagtcttctgtgatgaactcaggg

SEQ ID NO: 1473393 - DNA, 25 bp, Homo sapien
acaggaggagcagtcttctgtgatg

SEQ ID NO: 1473394 - DNA, 25 bp, Homo sapien
ggaggagcagtcttctgtgatgaac

SEQ ID NO: 1473395 - DNA, 25 bp, Homo sapien
ggccttgaaggtaggaaatttgctg

SEQ ID NO: 1473396 - DNA, 25 bp, Homo sapien
aaatttgctgccgttcactggatac

SEQ ID NO: 1473397 - DNA, 25 bp, Homo sapien
tggatacctcaatatttgtgcgcat

SEQ ID NO: 1473398 - DNA, 25 bp, Homo sapien
gctgccgttcactggatacctcaat

SEQ ID NO: 1473399 - DNA, 25 bp, Homo sapien
acagaacaggcccttgagggatctt

SEQ ID NO: 1473400 - DNA, 25 bp, Homo sapien
acaggcccttgagggatctttccca

SEQ ID NO: 1473401 - DNA, 25 bp, Homo sapien
caacactgggtacagttcgaaacag

SEQ ID NO: 1473402 - DNA, 25 bp, Homo sapien
acactgggtacagttcgaaacagaa

SEQ ID NO: 1473403 - DNA, 25 bp, Homo sapien
tattctgtcaaggtcccaagctggg

SEQ ID NO: 1473404 - DNA, 25 bp, Homo sapien
tgatgaagactacgttgtgaaacca

SEQ ID NO: 1473405 - DNA, 25 bp, Homo sapien
gatcgcacacgacactttactcttg

SEQ ID NO: 1473406 - DNA, 25 bp, Homo sapien
tcagggcagcacttatagacaggtg

SEQ ID NO: 1473407 - DNA, 25 bp, Homo sapien
taagagcagtcgttctacgtccacg

SEQ ID NO: 1473408 - DNA, 25 bp, Homo sapien
gcagcacattatcacccgacagggt

SEQ ID NO: 1473409 - DNA, 25 bp, Homo sapien
tacgtccacgcgatcagtgggttct

SEQ ID NO: 1473410 - DNA, 25 bp, Homo sapien
gatgggctttcctgcggtactgtcc

SEQ ID NO: 1473411 - DNA, 25 bp, Homo sapien
taatgctgtcctaacatacaagctg

SEQ ID NO: 1473412 - DNA, 25 bp, Homo sapien
tcttacgatacaagtactcagcggt

SEQ ID NO: 1473413 - DNA, 25 bp, Homo sapien
gttcctaacccagaccctaatgctg

SEQ ID NO: 1473414 - DNA, 25 bp, Homo sapien
tgacagctgacctccacgtaaaagc

SEQ ID NO: 1473415 - DNA, 25 bp, Homo sapien
tgacactggtcaggacaaagctctg

SEQ ID NO: 1473416 - DNA, 25 bp, Homo sapien
ggctctgtgaatccaggaaccggac

SEQ ID NO: 1473417 - DNA, 25 bp, Homo sapien
ggttagtgggcattctactgggcca

SEQ ID NO: 1473418 - DNA, 25 bp, Homo sapien
catgcttttgactagctaggcagac

SEQ ID NO: 1473419 - DNA, 25 bp, Homo sapien
tcatctcataataagtcagcaaaag

SEQ ID NO: 1473420 - DNA, 25 bp, Homo sapien
atgagttaggcccactctcctttgg

SEQ ID NO: 1473421 - DNA, 25 bp, Homo sapien
aaaatgctcccaatgagttcatcag

SEQ ID NO: 1473422 - DNA, 25 bp, Homo sapien
gttcatcagttatcaagctcacatg

SEQ ID NO: 1473423 - DNA, 25 bp, Homo sapien
tcatagtcgcagaaactgaggccta

SEQ ID NO: 1473424 - DNA, 25 bp, Homo sapien
gaaagggcaccgagtacaggaacaa

SEQ ID NO: 1473425 - DNA, 25 bp, Homo sapien
ttgtacatgtgagcagctagaacca

SEQ ID NO: 1473426 - DNA, 25 bp, Homo sapien
agacatttcccattagccctaactg

SEQ ID NO: 1473427 - DNA, 25 bp, Homo sapien
caaaacaaactcgaagtaaggattg

SEQ ID NO: 1473428 - DNA, 25 bp, Homo sapien
tttaagcttccaagctgatccgctt

SEQ ID NO: 1473429 - DNA, 25 bp, Homo sapien
aagctgatccgcttgtagcaggtct

SEQ ID NO: 1473430 - DNA, 25 bp, Homo sapien
taagcttccaagctgatccgcttgt

SEQ ID NO: 1473431 - DNA, 25 bp, Homo sapien
ttccaagctgatccgcttgtagcag

SEQ ID NO: 1473432 - DNA, 25 bp, Homo sapien
ccggtaagtactcactgagctgaat

SEQ ID NO: 1473433 - DNA, 25 bp, Homo sapien
tccggtaagtactcactgagctgaa

SEQ ID NO: 1473434 - DNA, 25 bp, Homo sapien
ggtaagtactcactgagctgaatgc

SEQ ID NO: 1473435 - DNA, 25 bp, Homo sapien
ctccggtaagtactcactgagctga

SEQ ID NO: 1473436 - DNA, 25 bp, Homo sapien
gctggagtggaatggtacgatcgta

SEQ ID NO: 1473437 - DNA, 25 bp, Homo sapien
tgcccagcctattttttggttctta

SEQ ID NO: 1473438 - DNA, 25 bp, Homo sapien
ggagtggaatggtacgatcgtagct

SEQ ID NO: 1473439 - DNA, 25 bp, Homo sapien
cagcctattttttggttcttaattg

SEQ ID NO: 1473440 - DNA, 25 bp, Homo sapien
ctttagatacttcaattggatcatc

SEQ ID NO: 1473441 - DNA, 25 bp, Homo sapien
caaatatactgtctttagatacttc

SEQ ID NO: 1473442 - DNA, 25 bp, Homo sapien
tactgtctttagatacttcaattgg

SEQ ID NO: 1473443 - DNA, 25 bp, Homo sapien
agatcttcacaaatatactgtcttt

SEQ ID NO: 1473444 - DNA, 25 bp, Homo sapien
catattcagtatggaccccaaagta

SEQ ID NO: 1473445 - DNA, 25 bp, Homo sapien
cattacactctagggaacatgcaag

SEQ ID NO: 1473446 - DNA, 25 bp, Homo sapien
gatgttatactcaaggtagctactg

SEQ ID NO: 1473447 - DNA, 25 bp, Homo sapien
caagagacgccaaggaaaacacatt

SEQ ID NO: 1473448 - DNA, 25 bp, Homo sapien
gaaatcccaacacgtctggtcacag

SEQ ID NO: 1473449 - DNA, 25 bp, Homo sapien
caaagaagcaatgccacgagcactt

SEQ ID NO: 1473450 - DNA, 25 bp, Homo sapien
gttgtagattgtatcaggactgaac

SEQ ID NO: 1473451 - DNA, 25 bp, Homo sapien
gcccaccaacagaactcactggttg

SEQ ID NO: 1473452 - DNA, 25 bp, Homo sapien
ctctgaagagctttgcaaaggattt

SEQ ID NO: 1473453 - DNA, 25 bp, Homo sapien
aaggatttccagttttagatcattt

SEQ ID NO: 1473454 - DNA, 25 bp, Homo sapien
aaaggatttccagttttagatcatt

SEQ ID NO: 1473455 - DNA, 25 bp, Homo sapien
cagcaaaacaaaaaaaatcctgatt

SEQ ID NO: 1473456 - DNA, 25 bp, Homo sapien
caaaaaaaatcctgattaaatcctg

SEQ ID NO: 1473457 - DNA, 25 bp, Homo sapien
tcacagcaaaacaaaaaaaatcctg

SEQ ID NO: 1473458 - DNA, 25 bp, Homo sapien
cacagcaaaacaaaaaaaatcctga

SEQ ID NO: 1473459 - DNA, 25 bp, Homo sapien
tcaatatattccaacaagtccaaag

SEQ ID NO: 1473460 - DNA, 25 bp, Homo sapien
aatatattccaacaagtccaaagct

SEQ ID NO: 1473461 - DNA, 25 bp, Homo sapien
ttcttgaaatcatattcattagctc

SEQ ID NO: 1473462 - DNA, 25 bp, Homo sapien
ctcatcaatatattccaacaagtcc

SEQ ID NO: 1473463 - DNA, 25 bp, Homo sapien
caatcatgtaactaatactagagac

SEQ ID NO: 1473464 - DNA, 25 bp, Homo sapien
ttaaaataaggtagaagattataca

SEQ ID NO: 1473465 - DNA, 25 bp, Homo sapien
ggtagaagattatacaatcatgtaa

SEQ ID NO: 1473466 - DNA, 25 bp, Homo sapien
taatactagagacatttatggagaa

SEQ ID NO: 1473467 - DNA, 25 bp, Homo sapien
tactggcatcgcactgagatttagc

SEQ ID NO: 1473468 - DNA, 25 bp, Homo sapien
cagcagctgttcaggtagggtctcc

SEQ ID NO: 1473469 - DNA, 25 bp, Homo sapien
agttgtggtgcagtcaatactggca

SEQ ID NO: 1473470 - DNA, 25 bp, Homo sapien
gcagtagaaagcgctcctgctcagc

SEQ ID NO: 1473471 - DNA, 25 bp, Homo sapien
gaagaatatacagcacatctcctag

SEQ ID NO: 1473472 - DNA, 25 bp, Homo sapien
gcaagggttatctccattggatgag

SEQ ID NO: 1473473 - DNA, 25 bp, Homo sapien
gctaggcagcctcataaacacagca

SEQ ID NO: 1473474 - DNA, 25 bp, Homo sapien
gaaagggtgaaaactgctaggcagc

SEQ ID NO: 1473475 - DNA, 25 bp, Homo sapien
taacatgatctacctctggtggcca

SEQ ID NO: 1473476 - DNA, 25 bp, Homo sapien
taatttaaacccagatcttaggctg

SEQ ID NO: 1473477 - DNA, 25 bp, Homo sapien
tgaacaaactgaggcgaaggagcat

SEQ ID NO: 1473478 - DNA, 25 bp, Homo sapien
tagaacaggcgctactagtgcaaaa

SEQ ID NO: 1473479 - DNA, 25 bp, Homo sapien
cagccaatttactcaagccaagaag

SEQ ID NO: 1473480 - DNA, 25 bp, Homo sapien
ccatatttgccaaacccagaagtgt

SEQ ID NO: 1473481 - DNA, 25 bp, Homo sapien
ttctttgcaaagtaacgagtttcca

SEQ ID NO: 1473482 - DNA, 25 bp, Homo sapien
aaaagtctgaagctaatgcagccaa

SEQ ID NO: 1473483 - DNA, 25 bp, Homo sapien
tcttcttgcaattgagctgagttcc

SEQ ID NO: 1473484 - DNA, 25 bp, Homo sapien
tatatactcacaagcgggattgcca

SEQ ID NO: 1473485 - DNA, 25 bp, Homo sapien
tgtgtgtgcgtataacatcccctca

SEQ ID NO: 1473486 - DNA, 25 bp, Homo sapien
ggagtgcaggtaccttttcaacata

SEQ ID NO: 1473487 - DNA, 25 bp, Homo sapien
ctgagaaatgggctgagataataat

SEQ ID NO: 1473488 - DNA, 25 bp, Homo sapien
taatttcatgtaaccagctgagatg

SEQ ID NO: 1473489 - DNA, 25 bp, Homo sapien
aaatttgccaactgtccatgctgag

SEQ ID NO: 1473490 - DNA, 25 bp, Homo sapien
gagataataatttgcctcgctttcc

SEQ ID NO: 1473491 - DNA, 25 bp, Homo sapien
taccaacggaagagaaagtctgaaa

SEQ ID NO: 1473492 - DNA, 25 bp, Homo sapien
ctccagataccaacggaagagaaag

SEQ ID NO: 1473493 - DNA, 25 bp, Homo sapien
cagataccaacggaagagaaagtct

SEQ ID NO: 1473494 - DNA, 25 bp, Homo sapien
gataccaacggaagagaaagtctga

SEQ ID NO: 1473495 - DNA, 25 bp, Homo sapien
tggagtcggctctggttgtcagtct

SEQ ID NO: 1473496 - DNA, 25 bp, Homo sapien
gtcatgtagcgctggagtcggctct

SEQ ID NO: 1473497 - DNA, 25 bp, Homo sapien
ggttgtcagtctgctcacacatttg

SEQ ID NO: 1473498 - DNA, 25 bp, Homo sapien
gtcagtctgctcacacatttgtacc

SEQ ID NO: 1473499 - DNA, 25 bp, Homo sapien
ttctttattacagttggattaacac

SEQ ID NO: 1473500 - DNA, 25 bp, Homo sapien
ctcttgccaagtatcatgaacttac

SEQ ID NO: 1473501 - DNA, 25 bp, Homo sapien
taacactaccacactgaatatactg

SEQ ID NO: 1473502 - DNA, 25 bp, Homo sapien
tattcaaccctttcatccattcagc

SEQ ID NO: 1473503 - DNA, 25 bp, Homo sapien
agatctgatcttttctgtaggtatt

SEQ ID NO: 1473504 - DNA, 25 bp, Homo sapien
gatctgatcttttctgtaggtattc

SEQ ID NO: 1473505 - DNA, 25 bp, Homo sapien
atctgatcttttctgtaggtattcc

SEQ ID NO: 1473506 - DNA, 25 bp, Homo sapien
ctgatcttttctgtaggtattccat

SEQ ID NO: 1473507 - DNA, 25 bp, Homo sapien
gatgtttcggaggttgctgtctgcc

SEQ ID NO: 1473508 - DNA, 25 bp, Homo sapien
ccagctgctcggtcacgatgtttcg

SEQ ID NO: 1473509 - DNA, 25 bp, Homo sapien
catccaggaagcaatcgatcagggc

SEQ ID NO: 1473510 - DNA, 25 bp, Homo sapien
tattaccgttcggatgccaccagga

SEQ ID NO: 1473511 - DNA, 25 bp, Homo sapien
gtaagggatctagtgatggctaaag

SEQ ID NO: 1473512 - DNA, 25 bp, Homo sapien
taaaaattatgcctcttcatcactg

SEQ ID NO: 1473513 - DNA, 25 bp, Homo sapien
ggctaaaggaaagactaatagcata

SEQ ID NO: 1473514 - DNA, 25 bp, Homo sapien
gttaaagtaagggatctagtgatgg

SEQ ID NO: 1473515 - DNA, 25 bp, Homo sapien
gagtttctattttggcgataatgac

SEQ ID NO: 1473516 - DNA, 25 bp, Homo sapien
cgataatgactagcagcctgcagca

SEQ ID NO: 1473517 - DNA, 25 bp, Homo sapien
gttctttttctagtgattcttctct

SEQ ID NO: 1473518 - DNA, 25 bp, Homo sapien
ccgtccatggaacatattcaggttc

SEQ ID NO: 1473519 - DNA, 25 bp, Homo sapien
gaaatttattaataggcaccaggct

SEQ ID NO: 1473520 - DNA, 25 bp, Homo sapien
tactcattagctgattaataataaa

SEQ ID NO: 1473521 - DNA, 25 bp, Homo sapien
gcaccaggctaacattcaaaatact

SEQ ID NO: 1473522 - DNA, 25 bp, Homo sapien
tcaaaatactcattagctgattaat

SEQ ID NO: 1473523 - DNA, 25 bp, Homo sapien
gctccagtaagcactcacagatggt

SEQ ID NO: 1473524 - DNA, 25 bp, Homo sapien
gaatattgttcacattgatcaccac

SEQ ID NO: 1473525 - DNA, 25 bp, Homo sapien
cacagatggtatctacttgggatac

SEQ ID NO: 1473526 - DNA, 25 bp, Homo sapien
taggtgcatccctcaagacttgctc

SEQ ID NO: 1473527 - DNA, 25 bp, Homo sapien
tcttgagaacaatggcggctgacag

SEQ ID NO: 1473528 - DNA, 25 bp, Homo sapien
ttcggcatgctcacagagcaacagt

SEQ ID NO: 1473529 - DNA, 25 bp, Homo sapien
caggttggatgggatttcatactcc

SEQ ID NO: 1473530 - DNA, 25 bp, Homo sapien
caaagcaatcaatatggctgtgttg

SEQ ID NO: 1473531 - DNA, 25 bp, Homo sapien
cggtgtccctctaactggaaaactg

SEQ ID NO: 1473532 - DNA, 25 bp, Homo sapien
ggtgtccctctaactggaaaactgc

SEQ ID NO: 1473533 - DNA, 25 bp, Homo sapien
aagagtgagctttcatcttgtcttc

SEQ ID NO: 1473534 - DNA, 25 bp, Homo sapien
taagaaaagagtgagctttcatctt

SEQ ID NO: 1473535 - DNA, 25 bp, Homo sapien
tgaaggataatcagtgacgtattgc

SEQ ID NO: 1473536 - DNA, 25 bp, Homo sapien
gacgtattgctgaacccaggtgctt

SEQ ID NO: 1473537 - DNA, 25 bp, Homo sapien
tgggtcagatgctgggtagtcatcc

SEQ ID NO: 1473538 - DNA, 25 bp, Homo sapien
tcaggtctacactgatttgggtaac

SEQ ID NO: 1473539 - DNA, 25 bp, Homo sapien
aggaaaagagctcatcaaccaccat

SEQ ID NO: 1473540 - DNA, 25 bp, Homo sapien
tgccctgtctagttcagaatcagaa

SEQ ID NO: 1473541 - DNA, 25 bp, Homo sapien
tatcttcctgggctatagtttcatt

SEQ ID NO: 1473542 - DNA, 25 bp, Homo sapien
ttgtagtggtctcaaaaatcatact

SEQ ID NO: 1473543 - DNA, 25 bp, Homo sapien
agtttcattctttgtagtggtctca

SEQ ID NO: 1473544 - DNA, 25 bp, Homo sapien
tcttcctgggctatagtttcattct

SEQ ID NO: 1473545 - DNA, 25 bp, Homo sapien
tcactgtttggtccagcaactgaag

SEQ ID NO: 1473546 - DNA, 25 bp, Homo sapien
tccaagtcttctgccaatatagaca

SEQ ID NO: 1473547 - DNA, 25 bp, Homo sapien
cccttgaagtaatagacaccagtcc

SEQ ID NO: 1473548 - DNA, 25 bp, Homo sapien
gtcttctgccaatatagacacattt

SEQ ID NO: 1473549 - DNA, 25 bp, Homo sapien
ggcaccagcacctaaaacactatct

SEQ ID NO: 1473550 - DNA, 25 bp, Homo sapien
ctagaaaaaatgataggaacaccac

SEQ ID NO: 1473551 - DNA, 25 bp, Homo sapien
gaaaaaatgataggaacaccaccac

SEQ ID NO: 1473552 - DNA, 25 bp, Homo sapien
aaaatgataggaacaccaccacagg

SEQ ID NO: 1473553 - DNA, 25 bp, Homo sapien
tgctgtagttgtggtatgaaatgtc

SEQ ID NO: 1473554 - DNA, 25 bp, Homo sapien
gaaagcagcatgcttgaagtgacat

SEQ ID NO: 1473555 - DNA, 25 bp, Homo sapien
caaatgttactatctttgtctgtaa

SEQ ID NO: 1473556 - DNA, 25 bp, Homo sapien
aaaaagcactcagaatgactaatga

SEQ ID NO: 1473557 - DNA, 25 bp, Homo sapien
atgctttctaaaactgctactgtac

SEQ ID NO: 1473558 - DNA, 25 bp, Homo sapien
atcatgctttctaaaactgctactg

SEQ ID NO: 1473559 - DNA, 25 bp, Homo sapien
catgctttctaaaactgctactgta

SEQ ID NO: 1473560 - DNA, 25 bp, Homo sapien
caatcatgctttctaaaactgctac

SEQ ID NO: 1473561 - DNA, 25 bp, Homo sapien
aagtttgggaccgtcaactgacaca

SEQ ID NO: 1473562 - DNA, 25 bp, Homo sapien
ccagttcctgtggagcacacataga

SEQ ID NO: 1473563 - DNA, 25 bp, Homo sapien
gcactttcgttatacagataggcag

SEQ ID NO: 1473564 - DNA, 25 bp, Homo sapien
aactgacacaaaatcaggtcttcag

SEQ ID NO: 1473565 - DNA, 25 bp, Homo sapien
ctacagtaactgcatctgacatttg

SEQ ID NO: 1473566 - DNA, 25 bp, Homo sapien
attgagtgacttctacagtaactgc

SEQ ID NO: 1473567 - DNA, 25 bp, Homo sapien
tcttctattgttatcagagagtaat

SEQ ID NO: 1473568 - DNA, 25 bp, Homo sapien
agtaatagatgagacatggattgtc

SEQ ID NO: 1473569 - DNA, 25 bp, Homo sapien
agtccaaatatcgaatgttgactcc

SEQ ID NO: 1473570 - DNA, 25 bp, Homo sapien
caaatatcgaatgttgactccttct

SEQ ID NO: 1473571 - DNA, 25 bp, Homo sapien
tatcgaatgttgactccttctttaa

SEQ ID NO: 1473572 - DNA, 25 bp, Homo sapien
tcaagtccaaatatcgaatgttgac

SEQ ID NO: 1473573 - DNA, 25 bp, Homo sapien
caaatagcatcggtaatgttttcct

SEQ ID NO: 1473574 - DNA, 25 bp, Homo sapien
tcccaactgtatgcatgcttttctg

SEQ ID NO: 1473575 - DNA, 25 bp, Homo sapien
gaactcgtcaggctataaaagcttg

SEQ ID NO: 1473576 - DNA, 25 bp, Homo sapien
catttactgatgtttgaactcgtca

SEQ ID NO: 1473577 - DNA, 25 bp, Homo sapien
ttcgaccaattcctgaaagcatgcc

SEQ ID NO: 1473578 - DNA, 25 bp, Homo sapien
gagctctcaggtatcaaccgaatta

SEQ ID NO: 1473579 - DNA, 25 bp, Homo sapien
tgtgagatcactactaggagataaa

SEQ ID NO: 1473580 - DNA, 25 bp, Homo sapien
gaaagcatgccttgcccctgaggca

SEQ ID NO: 1473581 - DNA, 25 bp, Homo sapien
tggtgagactgcacgcatgagccac

SEQ ID NO: 1473582 - DNA, 25 bp, Homo sapien
ggtgagactgcacgcatgagccacc

SEQ ID NO: 1473583 - DNA, 25 bp, Homo sapien
caaggcttggccaatagcggataga

SEQ ID NO: 1473584 - DNA, 25 bp, Homo sapien
tacaaaagcctctgtgtaggtatct

SEQ ID NO: 1473585 - DNA, 25 bp, Homo sapien
gtgtaggtatcttcaccagcaaggc

SEQ ID NO: 1473586 - DNA, 25 bp, Homo sapien
actgtaagtcttatcacctcccgaa

SEQ ID NO: 1473587 - DNA, 25 bp, Homo sapien
caagaactctgtctaatctcaggtc

SEQ ID NO: 1473588 - DNA, 25 bp, Homo sapien
ccttcatcaaagaccaaatgggtgc

SEQ ID NO: 1473589 - DNA, 25 bp, Homo sapien
gtctgttcaagtcctagcccctgtt

SEQ ID NO: 1473590 - DNA, 25 bp, Homo sapien
agaggaacccaaaaaccagcagtct

SEQ ID NO: 1473591 - DNA, 25 bp, Homo sapien
taagtcggcactccagtggaaatca

SEQ ID NO: 1473592 - DNA, 25 bp, Homo sapien
aatcactaggtggcagctgaagttc

SEQ ID NO: 1473593 - DNA, 25 bp, Homo sapien
gagtagaatgtgcttcacctgaggg

SEQ ID NO: 1473594 - DNA, 25 bp, Homo sapien
taagaaagagccactaagtcggcac

SEQ ID NO: 1473595 - DNA, 25 bp, Homo sapien
tcttcctgggctagaaaagtccagt

SEQ ID NO: 1473596 - DNA, 25 bp, Homo sapien
tgagttccaacggaacatggccaag

SEQ ID NO: 1473597 - DNA, 25 bp, Homo sapien
tcaggatcccgcagctaactcagta

SEQ ID NO: 1473598 - DNA, 25 bp, Homo sapien
catacacccttttctaggcagcagt

SEQ ID NO: 1473599 - DNA, 25 bp, Homo sapien
ttcatctatgttaatggtcagctgg

SEQ ID NO: 1473600 - DNA, 25 bp, Homo sapien
tctttgcacaccagacaagcccatc

SEQ ID NO: 1473601 - DNA, 25 bp, Homo sapien
aatcttccaaataatgagcttctct

SEQ ID NO: 1473602 - DNA, 25 bp, Homo sapien
atgttaatggtcagctggtcatcga

SEQ ID NO: 1473603 - DNA, 25 bp, Homo sapien
tcacagactcagttatggagtggtg

SEQ ID NO: 1473604 - DNA, 25 bp, Homo sapien
aagagaagatccaaacgttttcaca

SEQ ID NO: 1473605 - DNA, 25 bp, Homo sapien
tagggcttccatgactttaacagga

SEQ ID NO: 1473606 - DNA, 25 bp, Homo sapien
tgtgggaacattcgtgttggtgttc

SEQ ID NO: 1473607 - DNA, 25 bp, Homo sapien
tgcttaagagtccaccagacctggc

SEQ ID NO: 1473608 - DNA, 25 bp, Homo sapien
tatcagatctgtacaaccaagcaag

SEQ ID NO: 1473609 - DNA, 25 bp, Homo sapien
ttaagctcatctagctttaggtgct

SEQ ID NO: 1473610 - DNA, 25 bp, Homo sapien
gggtcattttgcagatctcaacatt

SEQ ID NO: 1473611 - DNA, 25 bp, Homo sapien
tctaaagacaacaacctatccggcc

SEQ ID NO: 1473612 - DNA, 25 bp, Homo sapien
gttgccagacccaaccagggagatc

SEQ ID NO: 1473613 - DNA, 25 bp, Homo sapien
gagtgacttacaccagatcacacgg

SEQ ID NO: 1473614 - DNA, 25 bp, Homo sapien
aatactgtggcattctattccgccg

SEQ ID NO: 1473615 - DNA, 25 bp, Homo sapien
cgagtccggccagcgggccccttcg

SEQ ID NO: 1473616 - DNA, 25 bp, Homo sapien
ctacgccggccgaccggcgagaaga

SEQ ID NO: 1473617 - DNA, 25 bp, Homo sapien
agacccttcctgctagccgtccggg

SEQ ID NO: 1473618 - DNA, 25 bp, Homo sapien
cgcgagcttagcgagctacgccggc

SEQ ID NO: 1473619 - DNA, 25 bp, Homo sapien
cagcgagggatctggccgtcaggtt

SEQ ID NO: 1473620 - DNA, 25 bp, Homo sapien
tgcgcgcggaacttaaacacctaag

SEQ ID NO: 1473621 - DNA, 25 bp, Homo sapien
gactccaaggagcagcgactaggac

SEQ ID NO: 1473622 - DNA, 25 bp, Homo sapien
gcagcctggcctgcgcgcggaactt

SEQ ID NO: 1473623 - DNA, 25 bp, Homo sapien
tgattgtcacagatgtactgtttac

SEQ ID NO: 1473624 - DNA, 25 bp, Homo sapien
attttcctcagattcaaccttgtaa

SEQ ID NO: 1473625 - DNA, 25 bp, Homo sapien
caatgaaatgcaatttcgtaaatac

SEQ ID NO: 1473626 - DNA, 25 bp, Homo sapien
cgtaaatacttctatggcacaagga

SEQ ID NO: 1473627 - DNA, 25 bp, Homo sapien
tctaatcagggaactaataaatgct

SEQ ID NO: 1473628 - DNA, 25 bp, Homo sapien
ttcatgaaatagtggtttcttcttc

SEQ ID NO: 1473629 - DNA, 25 bp, Homo sapien
cttccatttgatttacattgactta

SEQ ID NO: 1473630 - DNA, 25 bp, Homo sapien
tgcttagttcatgggaaaacttcca

SEQ ID NO: 1473631 - DNA, 25 bp, Homo sapien
gcaaattaacagcactgatacaaaa

SEQ ID NO: 1473632 - DNA, 25 bp, Homo sapien
aatggttgtagcattgctttaggaa

SEQ ID NO: 1473633 - DNA, 25 bp, Homo sapien
gaggcaacagcaaattaacagcact

SEQ ID NO: 1473634 - DNA, 25 bp, Homo sapien
aatatggcaaattcaatggttgtag

SEQ ID NO: 1473635 - DNA, 25 bp, Homo sapien
gccttgcttcgcaaaagtactcata

SEQ ID NO: 1473636 - DNA, 25 bp, Homo sapien
tattctgttgaatagcaaggacttc

SEQ ID NO: 1473637 - DNA, 25 bp, Homo sapien
taaggctgaaaattagttatattcc

SEQ ID NO: 1473638 - DNA, 25 bp, Homo sapien
gcaaggacttccaaacttaaatgtc

SEQ ID NO: 1473639 - DNA, 25 bp, Homo sapien
ttcaaataacttgatatatggttta

SEQ ID NO: 1473640 - DNA, 25 bp, Homo sapien
atgaggtgccatgctatattaatta

SEQ ID NO: 1473641 - DNA, 25 bp, Homo sapien
aagaaaatgaggtgccatgctatat

SEQ ID NO: 1473642 - DNA, 25 bp, Homo sapien
taaaactctgaataaaaagatcttg

SEQ ID NO: 1473643 - DNA, 25 bp, Homo sapien
ctgtatatcccatttggttttgaaa

SEQ ID NO: 1473644 - DNA, 25 bp, Homo sapien
gagcttcttgaacaaggtactcatt

SEQ ID NO: 1473645 - DNA, 25 bp, Homo sapien
tcattagttttctgtatatcccatt

SEQ ID NO: 1473646 - DNA, 25 bp, Homo sapien
caagaacagcaaccatattagcatt

SEQ ID NO: 1473647 - DNA, 25 bp, Homo sapien
agaaagcaaagacgtcagtgacacc

SEQ ID NO: 1473648 - DNA, 25 bp, Homo sapien
gacgtcagtgacacccatgtgcttc

SEQ ID NO: 1473649 - DNA, 25 bp, Homo sapien
aaagacgtcagtgacacccatgtgc

SEQ ID NO: 1473650 - DNA, 25 bp, Homo sapien
agcaaagacgtcagtgacacccatg

SEQ ID NO: 1473651 - DNA, 25 bp, Homo sapien
ggattgatggcaaccatgtctgaag

SEQ ID NO: 1473652 - DNA, 25 bp, Homo sapien
cagcccttcctgagcaatgaatttt

SEQ ID NO: 1473653 - DNA, 25 bp, Homo sapien
ctagaactctcaactaggactcagt

SEQ ID NO: 1473654 - DNA, 25 bp, Homo sapien
tctgaagtggacctagaactctcaa

SEQ ID NO: 1473655 - DNA, 25 bp, Homo sapien
cttcatctaggagaagaattttggg

SEQ ID NO: 1473656 - DNA, 25 bp, Homo sapien
ttcatctaggagaagaattttggga

SEQ ID NO: 1473657 - DNA, 25 bp, Homo sapien
caggcacttctacagatggtggata

SEQ ID NO: 1473658 - DNA, 25 bp, Homo sapien
gcacaacacagaatacactaaaaac

SEQ ID NO: 1473659 - DNA, 25 bp, Homo sapien
ctgctaaagagtagagggtccctgg

SEQ ID NO: 1473660 - DNA, 25 bp, Homo sapien
cacaaagaatcacatactgtatgag

SEQ ID NO: 1473661 - DNA, 25 bp, Homo sapien
taaaacattacaagtccagctttgc

SEQ ID NO: 1473662 - DNA, 25 bp, Homo sapien
aatgacccaagcgtttatcagctgg

SEQ ID NO: 1473663 - DNA, 25 bp, Homo sapien
gggatccatccatactacttaacag

SEQ ID NO: 1473664 - DNA, 25 bp, Homo sapien
tttgcaatgcgctgagatcgaccac

SEQ ID NO: 1473665 - DNA, 25 bp, Homo sapien
ctttagcagagcacgggcaatcgca

SEQ ID NO: 1473666 - DNA, 25 bp, Homo sapien
gcagagcacgggcaatcgcaatccg

SEQ ID NO: 1473667 - DNA, 25 bp, Homo sapien
gggcaatcgcaatccgctgtttctg

SEQ ID NO: 1473668 - DNA, 25 bp, Homo sapien
cacgggcaatcgcaatccgctgttt

SEQ ID NO: 1473669 - DNA, 25 bp, Homo sapien
ctactaaaagtgagggaacaaactg

SEQ ID NO: 1473670 - DNA, 25 bp, Homo sapien
tccctatctttgtctcaccccatcc

SEQ ID NO: 1473671 - DNA, 25 bp, Homo sapien
gaacaaactggaagtaggtgtggga

SEQ ID NO: 1473672 - DNA, 25 bp, Homo sapien
caggatctgtgttgattccctccct

SEQ ID NO: 1473673 - DNA, 25 bp, Homo sapien
gaaacggaactggaggatcctacca

SEQ ID NO: 1473674 - DNA, 25 bp, Homo sapien
tgtgtggtgccaatcagtaccctgg

SEQ ID NO: 1473675 - DNA, 25 bp, Homo sapien
gaggtgacgtgctcttaggacaagc

SEQ ID NO: 1473676 - DNA, 25 bp, Homo sapien
gaacctctggttacttcgctgagaa

SEQ ID NO: 1473677 - DNA, 25 bp, Homo sapien
gacaccacagggaatcgctcacttt

SEQ ID NO: 1473678 - DNA, 25 bp, Homo sapien
cacagccgtgagtctattcagcaaa

SEQ ID NO: 1473679 - DNA, 25 bp, Homo sapien
tgcccggccaggaacttgttatctt

SEQ ID NO: 1473680 - DNA, 25 bp, Homo sapien
tatgcacggccctcaagctaagaat

SEQ ID NO: 1473681 - DNA, 25 bp, Homo sapien
atcagcaccataagcaatgttctca

SEQ ID NO: 1473682 - DNA, 25 bp, Homo sapien
catcagcaccataagcaatgttctc

SEQ ID NO: 1473683 - DNA, 25 bp, Homo sapien
tagctgacggatgtcatggccatca

SEQ ID NO: 1473684 - DNA, 25 bp, Homo sapien
gtttagctgacggatgtcatggcca

SEQ ID NO: 1473685 - DNA, 25 bp, Homo sapien
gacggatgtcatggccatcaagact

SEQ ID NO: 1473686 - DNA, 25 bp, Homo sapien
gctgacggatgtcatggccatcaag

SEQ ID NO: 1473687 - DNA, 25 bp, Homo sapien
gacaaacaatgtagtaagccccatt

SEQ ID NO: 1473688 - DNA, 25 bp, Homo sapien
tatagcaagtgaatggtgaatcaag

SEQ ID NO: 1473689 - DNA, 25 bp, Homo sapien
catgggtcaggatttgcaagtcaca

SEQ ID NO: 1473690 - DNA, 25 bp, Homo sapien
cacaggtggtgattccatgggtcag

SEQ ID NO: 1473691 - DNA, 25 bp, Homo sapien
attaagaaaatcccggctgggcgcg

SEQ ID NO: 1473692 - DNA, 25 bp, Homo sapien
ctcttaaagatgttataatccagtt

SEQ ID NO: 1473693 - DNA, 25 bp, Homo sapien
gacattgttgtctactacagggaag

SEQ ID NO: 1473694 - DNA, 25 bp, Homo sapien
gaagatagaagtaaaatcatgtgct

SEQ ID NO: 1473695 - DNA, 25 bp, Homo sapien
aaatatgggcacctctgggcgagct

SEQ ID NO: 1473696 - DNA, 25 bp, Homo sapien
acctctgggcgagctggataggcaa

SEQ ID NO: 1473697 - DNA, 25 bp, Homo sapien
gagctggataggcaaaatgcacgtt

SEQ ID NO: 1473698 - DNA, 25 bp, Homo sapien
aatatgggcacctctgggcgagctg

SEQ ID NO: 1473699 - DNA, 25 bp, Homo sapien
cgttaaaaggcagcttgggctctct

SEQ ID NO: 1473700 - DNA, 25 bp, Homo sapien
ccagtcctttcatcagctccgagta

SEQ ID NO: 1473701 - DNA, 25 bp, Homo sapien
catcagctccgagtagaaagagctc

SEQ ID NO: 1473702 - DNA, 25 bp, Homo sapien
gtcctttcatcagctccgagtagaa

SEQ ID NO: 1473703 - DNA, 25 bp, Homo sapien
gagaagcagaatccacacacatgtc

SEQ ID NO: 1473704 - DNA, 25 bp, Homo sapien
aagcagaatccacacacatgtccat

SEQ ID NO: 1473705 - DNA, 25 bp, Homo sapien
agaagcagaatccacacacatgtcc

SEQ ID NO: 1473706 - DNA, 25 bp, Homo sapien
gaagcagaatccacacacatgtcca

SEQ ID NO: 1473707 - DNA, 25 bp, Homo sapien
aaaagggccaggcaaaatggttcat

SEQ ID NO: 1473708 - DNA, 25 bp, Homo sapien
aaaaataactgtaaggccaggcctg

SEQ ID NO: 1473709 - DNA, 25 bp, Homo sapien
taaaatcataatgccgcagaggaaa

SEQ ID NO: 1473710 - DNA, 25 bp, Homo sapien
tatagtcatactcatcaaccactgg

SEQ ID NO: 1473711 - DNA, 25 bp, Homo sapien
aagtcatcacagaagggtatcgaga

SEQ ID NO: 1473712 - DNA, 25 bp, Homo sapien
cacagaagggtatcgagaaaagttt

SEQ ID NO: 1473713 - DNA, 25 bp, Homo sapien
catcacagaagggtatcgagaaaag

SEQ ID NO: 1473714 - DNA, 25 bp, Homo sapien
gtcatcacagaagggtatcgagaaa

SEQ ID NO: 1473715 - DNA, 25 bp, Homo sapien
acccagaaagcatacattaggaagg

SEQ ID NO: 1473716 - DNA, 25 bp, Homo sapien
gcacgatcaggtttccggagagccc

SEQ ID NO: 1473717 - DNA, 25 bp, Homo sapien
acgatcaggtttccggagagcccag

SEQ ID NO: 1473718 - DNA, 25 bp, Homo sapien
ccaacccagaaagcatacattagga

SEQ ID NO: 1473719 - DNA, 25 bp, Homo sapien
tgctaactgcattacatggtccact

SEQ ID NO: 1473720 - DNA, 25 bp, Homo sapien
ggcatatttctcgatttcagtcatt

SEQ ID NO: 1473721 - DNA, 25 bp, Homo sapien
ccactttgctggcatatttctcgat

SEQ ID NO: 1473722 - DNA, 25 bp, Homo sapien
ttccttgctaactgcattacatggt

SEQ ID NO: 1473723 - DNA, 25 bp, Homo sapien
aggagaagggtcatatttcaagagc

SEQ ID NO: 1473724 - DNA, 25 bp, Homo sapien
taataaatacatttcaggaggagaa

SEQ ID NO: 1473725 - DNA, 25 bp, Homo sapien
ggaggagaagggtcatatttcaaga

SEQ ID NO: 1473726 - DNA, 25 bp, Homo sapien
gagaagggtcatatttcaagagctt

SEQ ID NO: 1473727 - DNA, 25 bp, Homo sapien
ctttggtcagtttccgtagatatcg

SEQ ID NO: 1473728 - DNA, 25 bp, Homo sapien
cagggtgctggcaccataatgaagt

SEQ ID NO: 1473729 - DNA, 25 bp, Homo sapien
aaaccttctgatgactaatacaggg

SEQ ID NO: 1473730 - DNA, 25 bp, Homo sapien
gaatagcagaaatgggctaggcata

SEQ ID NO: 1473731 - DNA, 25 bp, Homo sapien
cactctggttccacacttaatgaaa

SEQ ID NO: 1473732 - DNA, 25 bp, Homo sapien
ggttaatcaattctcctgtgcgagt

SEQ ID NO: 1473733 - DNA, 25 bp, Homo sapien
tcctgtgcgagtcttgtcaaagaaa

SEQ ID NO: 1473734 - DNA, 25 bp, Homo sapien
tactgatgcctacggaagcctgggc

SEQ ID NO: 1473735 - DNA, 25 bp, Homo sapien
catactgatgcctacggaagcctgg

SEQ ID NO: 1473736 - DNA, 25 bp, Homo sapien
ctctatcacccaggcctgaatgaag

SEQ ID NO: 1473737 - DNA, 25 bp, Homo sapien
tgaaactacagatgtccgccactac

SEQ ID NO: 1473738 - DNA, 25 bp, Homo sapien
cacacttggccgagatttttttaag

SEQ ID NO: 1473739 - DNA, 25 bp, Homo sapien
ccaggcctgaatgaagtggcacgat

SEQ ID NO: 1473740 - DNA, 25 bp, Homo sapien
tgaagtttgcatgaggtagacacga

SEQ ID NO: 1473741 - DNA, 25 bp, Homo sapien
cagaggcgggtcaggttgtcgctgt

SEQ ID NO: 1473742 - DNA, 25 bp, Homo sapien
acgaatggcattggcggcagcacca

SEQ ID NO: 1473743 - DNA, 25 bp, Homo sapien
tgaggtagacacgaatggcattggc

SEQ ID NO: 1473744 - DNA, 25 bp, Homo sapien
tgtctacggccatacactctgaacg

SEQ ID NO: 1473745 - DNA, 25 bp, Homo sapien
gggcgaggcctcactagtacttgga

SEQ ID NO: 1473746 - DNA, 25 bp, Homo sapien
tgacctcagaagctacgcagggcga

SEQ ID NO: 1473747 - DNA, 25 bp, Homo sapien
ggagccaactatggaaccgttctgg

SEQ ID NO: 1473748 - DNA, 25 bp, Homo sapien
caccgcacccagccagatttgcatt

SEQ ID NO: 1473749 - DNA, 25 bp, Homo sapien
catgaaccacaggagggttcgccat

SEQ ID NO: 1473750 - DNA, 25 bp, Homo sapien
cccatgaaccacaggagggttcgcc

SEQ ID NO: 1473751 - DNA, 25 bp, Homo sapien
ctgtcccatgaaccacaggagggtt

SEQ ID NO: 1473752 - DNA, 25 bp, Homo sapien
gtcccatgaaccacaggagggttcg

SEQ ID NO: 1473753 - DNA, 25 bp, Homo sapien
gtccccagctaaggcgaaatcttga

SEQ ID NO: 1473754 - DNA, 25 bp, Homo sapien
aacagatgctcccactaagttggtg

SEQ ID NO: 1473755 - DNA, 25 bp, Homo sapien
tgctgcctaagccaaaacagatgct

SEQ ID NO: 1473756 - DNA, 25 bp, Homo sapien
gtaaaatctgcaaacgagtccccag

SEQ ID NO: 1473757 - DNA, 25 bp, Homo sapien
ggcccggccgtgtccctctcggcgc

SEQ ID NO: 1473758 - DNA, 25 bp, Homo sapien
gcccggccgtgtccctctcggcgcc

SEQ ID NO: 1473759 - DNA, 25 bp, Homo sapien
cggccgtgtccctctcggcgccccg

SEQ ID NO: 1473760 - DNA, 25 bp, Homo sapien
gcggcccggccgtgtccctctcggc

SEQ ID NO: 1473761 - DNA, 25 bp, Homo sapien
ccagcctccggcgctcagggtacgc

SEQ ID NO: 1473762 - DNA, 25 bp, Homo sapien
ctccggcgctcagggtacgccagcc

SEQ ID NO: 1473763 - DNA, 25 bp, Homo sapien
gcctccggcgctcagggtacgccag

SEQ ID NO: 1473764 - DNA, 25 bp, Homo sapien
agcctccggcgctcagggtacgcca

SEQ ID NO: 1473765 - DNA, 25 bp, Homo sapien
caggcctcgtcccctgcccaggcag

SEQ ID NO: 1473766 - DNA, 25 bp, Homo sapien
gcctcgtcccctgcccaggcagcgg

SEQ ID NO: 1473767 - DNA, 25 bp, Homo sapien
ggcccgcgccgccaggcctcgtccc

SEQ ID NO: 1473768 - DNA, 25 bp, Homo sapien
cgccaggcctcgtcccctgcccagg

SEQ ID NO: 1473769 - DNA, 25 bp, Homo sapien
gggagccgaggagcgcctggcccgg

SEQ ID NO: 1473770 - DNA, 25 bp, Homo sapien
gagccgaggagcgcctggcccggca

SEQ ID NO: 1473771 - DNA, 25 bp, Homo sapien
ccgaggagcgcctggcccggcaaaa

SEQ ID NO: 1473772 - DNA, 25 bp, Homo sapien
cgcctggcccggcaaaagccccgca

SEQ ID NO: 1473773 - DNA, 25 bp, Homo sapien
aggagccgcgcgaggcccaggacgc

SEQ ID NO: 1473774 - DNA, 25 bp, Homo sapien
cagtgaacggcgatagggacccggg

SEQ ID NO: 1473775 - DNA, 25 bp, Homo sapien
cctcaggccagtgaacggcgatagg

SEQ ID NO: 1473776 - DNA, 25 bp, Homo sapien
cggcctcaggccagtgaacggcgat

SEQ ID NO: 1473777 - DNA, 25 bp, Homo sapien
cgctgcgtgcgacccgtacgcctca

SEQ ID NO: 1473778 - DNA, 25 bp, Homo sapien
ggcgctgcgtgcgacccgtacgcct

SEQ ID NO: 1473779 - DNA, 25 bp, Homo sapien
gtgcgacccgtacgcctcagcccgc

SEQ ID NO: 1473780 - DNA, 25 bp, Homo sapien
tgcgtgcgacccgtacgcctcagcc

SEQ ID NO: 1473781 - DNA, 25 bp, Homo sapien
ttctaccacaaacaagacagtgagc

SEQ ID NO: 1473782 - DNA, 25 bp, Homo sapien
cacaaagaaccttgcaggatgtaat

SEQ ID NO: 1473783 - DNA, 25 bp, Homo sapien
tgttatggcttacggcaaccctagc

SEQ ID NO: 1473784 - DNA, 25 bp, Homo sapien
gcaagtatgttcaacagccatccag

SEQ ID NO: 1473785 - DNA, 25 bp, Homo sapien
cccctgcgtagaatagagagacagt

SEQ ID NO: 1473786 - DNA, 25 bp, Homo sapien
aaggcccctgcgtagaatagagaga

SEQ ID NO: 1473787 - DNA, 25 bp, Homo sapien
taaaaaggcccctgcgtagaataga

SEQ ID NO: 1473788 - DNA, 25 bp, Homo sapien
aaaaaggcccctgcgtagaatagag

SEQ ID NO: 1473789 - DNA, 25 bp, Homo sapien
aagactatttgccaggatcatgccc

SEQ ID NO: 1473790 - DNA, 25 bp, Homo sapien
tgtcagccagggtgatcaatctgtc

SEQ ID NO: 1473791 - DNA, 25 bp, Homo sapien
gaaggattgcaactggaggctttcc

SEQ ID NO: 1473792 - DNA, 25 bp, Homo sapien
catgaggacttgtgagtgacctcca

SEQ ID NO: 1473793 - DNA, 25 bp, Homo sapien
aacacagtgttggtgaaactcccca

SEQ ID NO: 1473794 - DNA, 25 bp, Homo sapien
catatatcctcagcgggtacgtccg

SEQ ID NO: 1473795 - DNA, 25 bp, Homo sapien
gacgcgcaccgagttgtccatggag

SEQ ID NO: 1473796 - DNA, 25 bp, Homo sapien
ggacgttgctcatctgcccggtgta

SEQ ID NO: 1473797 - DNA, 25 bp, Homo sapien
tgatgattgtcccaggctggtggaa

SEQ ID NO: 1473798 - DNA, 25 bp, Homo sapien
cagtggtgaaggcatcacaattgga

SEQ ID NO: 1473799 - DNA, 25 bp, Homo sapien
tgctccccagggatcttgatgattg

SEQ ID NO: 1473800 - DNA, 25 bp, Homo sapien
catgggctaggagcatgggctggga

SEQ ID NO: 1473801 - DNA, 25 bp, Homo sapien
cttggggtctggaatttagcctcca

SEQ ID NO: 1473802 - DNA, 25 bp, Homo sapien
tcttggggtctggaatttagcctcc

SEQ ID NO: 1473803 - DNA, 25 bp, Homo sapien
ttcttggggtctggaatttagcctc

SEQ ID NO: 1473804 - DNA, 25 bp, Homo sapien
ttggggtctggaatttagcctccat

SEQ ID NO: 1473805 - DNA, 25 bp, Homo sapien
ggagggctgctcataccaaggtaaa

SEQ ID NO: 1473806 - DNA, 25 bp, Homo sapien
tatgtcacttaacacctttccaaag

SEQ ID NO: 1473807 - DNA, 25 bp, Homo sapien
aaaaagcaagggactgctatgtcac

SEQ ID NO: 1473808 - DNA, 25 bp, Homo sapien
tctttaagtgggagacaacagaagc

SEQ ID NO: 1473809 - DNA, 25 bp, Homo sapien
catggagccacaggatatgcactgg

SEQ ID NO: 1473810 - DNA, 25 bp, Homo sapien
taaacataggacaagccacagagct

SEQ ID NO: 1473811 - DNA, 25 bp, Homo sapien
gaaagccaataccatccatccagtg

SEQ ID NO: 1473812 - DNA, 25 bp, Homo sapien
ttggtgacctgaaacccaagctgcg

SEQ ID NO: 1473813 - DNA, 25 bp, Homo sapien
cagctgctctgtgttatagaaggca

SEQ ID NO: 1473814 - DNA, 25 bp, Homo sapien
acatccttctggctagcattctgca

SEQ ID NO: 1473815 - DNA, 25 bp, Homo sapien
cggactgttttggaccaggttgaga

SEQ ID NO: 1473816 - DNA, 25 bp, Homo sapien
ggaggcccatccttgactcgcttaa

SEQ ID NO: 1473817 - DNA, 25 bp, Homo sapien
taggacatctctgtaccctgccctg

SEQ ID NO: 1473818 - DNA, 25 bp, Homo sapien
ctctgaatcaataggcaaggaaggg

SEQ ID NO: 1473819 - DNA, 25 bp, Homo sapien
tacaggactatgaatggcccacacc

SEQ ID NO: 1473820 - DNA, 25 bp, Homo sapien
gggtaattgatcctgcccaagagga

SEQ ID NO: 1473821 - DNA, 25 bp, Homo sapien
tatcttggtgatcaggaaataacta

SEQ ID NO: 1473822 - DNA, 25 bp, Homo sapien
atttgatttggttaactgctcttca

SEQ ID NO: 1473823 - DNA, 25 bp, Homo sapien
tttgatttggttaactgctcttcag

SEQ ID NO: 1473824 - DNA, 25 bp, Homo sapien
tatgttggcacaaccagattctgat

SEQ ID NO: 1473825 - DNA, 25 bp, Homo sapien
cactatgttggcacaaccagattct

SEQ ID NO: 1473826 - DNA, 25 bp, Homo sapien
cagacactatgttggcacaaccaga

SEQ ID NO: 1473827 - DNA, 25 bp, Homo sapien
gctgcagacactatgttggcacaac

SEQ ID NO: 1473828 - DNA, 25 bp, Homo sapien
agaagatacacaagtcagggcggga

SEQ ID NO: 1473829 - DNA, 25 bp, Homo sapien
gaggagaagatacacaagtcagggc

SEQ ID NO: 1473830 - DNA, 25 bp, Homo sapien
gaagatacacaagtcagggcgggaa

SEQ ID NO: 1473831 - DNA, 25 bp, Homo sapien
gatacacaagtcagggcgggaaaca

SEQ ID NO: 1473832 - DNA, 25 bp, Homo sapien
tctggcactgtcttgagaagaggag

SEQ ID NO: 1473833 - DNA, 25 bp, Homo sapien
aattccacatggatattgacgtgag

SEQ ID NO: 1473834 - DNA, 25 bp, Homo sapien
tattgacgtgagttctcctgctcca

SEQ ID NO: 1473835 - DNA, 25 bp, Homo sapien
gaggagaagtaattccacatggata

SEQ ID NO: 1473836 - DNA, 25 bp, Homo sapien
tgttagattggccgccatctcttca

SEQ ID NO: 1473837 - DNA, 25 bp, Homo sapien
caggacactgccatctgaatctgct

SEQ ID NO: 1473838 - DNA, 25 bp, Homo sapien
tgccatctgaatctgctcggtacgc

SEQ ID NO: 1473839 - DNA, 25 bp, Homo sapien
atctgctcggtacgcactcgtttca

SEQ ID NO: 1473840 - DNA, 25 bp, Homo sapien
gcaaactgtgaaggctagagacata

SEQ ID NO: 1473841 - DNA, 25 bp, Homo sapien
ttccctacaagtcatacaacagagc

SEQ ID NO: 1473842 - DNA, 25 bp, Homo sapien
tgcccagtgactgtagctaacacac

SEQ ID NO: 1473843 - DNA, 25 bp, Homo sapien
gtatctaattttcgtccatctgcag

SEQ ID NO: 1473844 - DNA, 25 bp, Homo sapien
ctgcgagatccgcattacaacgact

SEQ ID NO: 1473845 - DNA, 25 bp, Homo sapien
ccaggtgtagccgccgactgcaggc

SEQ ID NO: 1473846 - DNA, 25 bp, Homo sapien
tccaggtgtagccgccgactgcagg

SEQ ID NO: 1473847 - DNA, 25 bp, Homo sapien
aggtgtagccgccgactgcaggcca

SEQ ID NO: 1473848 - DNA, 25 bp, Homo sapien
gtgtagccgccgactgcaggccacg

SEQ ID NO: 1473849 - DNA, 25 bp, Homo sapien
ctgggcggccgctccatgactgact

SEQ ID NO: 1473850 - DNA, 25 bp, Homo sapien
tcgtctctgccgcagggtctcactc

SEQ ID NO: 1473851 - DNA, 25 bp, Homo sapien
tccatgactgactgacacggagcgg

SEQ ID NO: 1473852 - DNA, 25 bp, Homo sapien
tccgggatcgggttgcttccgcctc

SEQ ID NO: 1473853 - DNA, 25 bp, Homo sapien
agttacgcagtgtgggttctctacc

SEQ ID NO: 1473854 - DNA, 25 bp, Homo sapien
tccaaaccaggattgccccatagac

SEQ ID NO: 1473855 - DNA, 25 bp, Homo sapien
tccagaatggattagcaccagctta

SEQ ID NO: 1473856 - DNA, 25 bp, Homo sapien
caccagcttagagtaaaaggtacag

SEQ ID NO: 1473857 - DNA, 25 bp, Homo sapien
tggcaagcggtgttctggatctgac

SEQ ID NO: 1473858 - DNA, 25 bp, Homo sapien
cctacggtcctaaagtgtgcacgcc

SEQ ID NO: 1473859 - DNA, 25 bp, Homo sapien
gaaagaatgtacagccacatcgccg

SEQ ID NO: 1473860 - DNA, 25 bp, Homo sapien
gaagcatagatgacctgcctacggt

SEQ ID NO: 1473861 - DNA, 25 bp, Homo sapien
tagaatcctgaaaattgaccctggg

SEQ ID NO: 1473862 - DNA, 25 bp, Homo sapien
gaaaaattgctgactcttgggacct

SEQ ID NO: 1473863 - DNA, 25 bp, Homo sapien
ggtgttccctcgtctgcactggaaa

SEQ ID NO: 1473864 - DNA, 25 bp, Homo sapien
tcaggcaggtcggtgacgtttagca

SEQ ID NO: 1473865 - DNA, 25 bp, Homo sapien
gggcctttcgaagggagttggcagc

SEQ ID NO: 1473866 - DNA, 25 bp, Homo sapien
tgcagggcctttcgaagggagttgg

SEQ ID NO: 1473867 - DNA, 25 bp, Homo sapien
actgcagggcctttcgaagggagtt

SEQ ID NO: 1473868 - DNA, 25 bp, Homo sapien
cagggcctttcgaagggagttggca

SEQ ID NO: 1473869 - DNA, 25 bp, Homo sapien
ttggtcatccttcccatcaaaactg

SEQ ID NO: 1473870 - DNA, 25 bp, Homo sapien
cacgaatgtgtggtaggtccttgac

SEQ ID NO: 1473871 - DNA, 25 bp, Homo sapien
gaatgtgtggtaggtccttgaccat

SEQ ID NO: 1473872 - DNA, 25 bp, Homo sapien
cttcacgaatgtgtggtaggtcctt

SEQ ID NO: 1473873 - DNA, 25 bp, Homo sapien
ttcactcctaaaaacttcatcctgc

SEQ ID NO: 1473874 - DNA, 25 bp, Homo sapien
tgttttgctaatgcagtgtgaaaag

SEQ ID NO: 1473875 - DNA, 25 bp, Homo sapien
tacattctcttgtatcccataatgc

SEQ ID NO: 1473876 - DNA, 25 bp, Homo sapien
tgttactatttgacatatttgctta

SEQ ID NO: 1473877 - DNA, 25 bp, Homo sapien
cagtgggtgtgagcacattcaagtc

SEQ ID NO: 1473878 - DNA, 25 bp, Homo sapien
ctagaagccagtgggtgtgagcaca

SEQ ID NO: 1473879 - DNA, 25 bp, Homo sapien
agccagtgggtgtgagcacattcaa

SEQ ID NO: 1473880 - DNA, 25 bp, Homo sapien
agtgggtgtgagcacattcaagtca

SEQ ID NO: 1473881 - DNA, 25 bp, Homo sapien
tctgtagctttagttggtggagcac

SEQ ID NO: 1473882 - DNA, 25 bp, Homo sapien
catcttgggcggcttcaagtttgct

SEQ ID NO: 1473883 - DNA, 25 bp, Homo sapien
ggtggagcacttccgccactcgaag

SEQ ID NO: 1473884 - DNA, 25 bp, Homo sapien
ctctagtcatgtggttggcctgggc

SEQ ID NO: 1473885 - DNA, 25 bp, Homo sapien
ctttagacttcaccactgggactgt

SEQ ID NO: 1473886 - DNA, 25 bp, Homo sapien
gctttagacttcaccactgggactg

SEQ ID NO: 1473887 - DNA, 25 bp, Homo sapien
tggtgaggcactgatacttgcactc

SEQ ID NO: 1473888 - DNA, 25 bp, Homo sapien
tgaggcactgatacttgcactctgg

SEQ ID NO: 1473889 - DNA, 25 bp, Homo sapien
cactgatacttgcactctggaatca

SEQ ID NO: 1473890 - DNA, 25 bp, Homo sapien
gggcgggtaggctggtctctccttc

SEQ ID NO: 1473891 - DNA, 25 bp, Homo sapien
ctggatgcccagcagtttatcctga

SEQ ID NO: 1473892 - DNA, 25 bp, Homo sapien
gctgcccgtgtccgatggaggagtc

SEQ ID NO: 1473893 - DNA, 25 bp, Homo sapien
tgcccgtgtccgatggaggagtcat

SEQ ID NO: 1473894 - DNA, 25 bp, Homo sapien
ttccagtggacgctgcccgtgtccg

SEQ ID NO: 1473895 - DNA, 25 bp, Homo sapien
cagcctcaagagcaggcacttctgg

SEQ ID NO: 1473896 - DNA, 25 bp, Homo sapien
caggcacttctggttgtgttgaagc

SEQ ID NO: 1473897 - DNA, 25 bp, Homo sapien
ctagaagcccacccagcctcaagag

SEQ ID NO: 1473898 - DNA, 25 bp, Homo sapien
gcacttctggttgtgttgaagccag

SEQ ID NO: 1473899 - DNA, 25 bp, Homo sapien
tagatctaggcagcatcccatgaga

SEQ ID NO: 1473900 - DNA, 25 bp, Homo sapien
ttagatctaggcagcatcccatgag

SEQ ID NO: 1473901 - DNA, 25 bp, Homo sapien
agatctaggcagcatcccatgagac

SEQ ID NO: 1473902 - DNA, 25 bp, Homo sapien
gatctaggcagcatcccatgagact

SEQ ID NO: 1473903 - DNA, 25 bp, Homo sapien
taggcgccgaactctgggagtcagc

SEQ ID NO: 1473904 - DNA, 25 bp, Homo sapien
gccctgtctccaagttaggcgccga

SEQ ID NO: 1473905 - DNA, 25 bp, Homo sapien
ttcttgagcaatgcttggcagccag

SEQ ID NO: 1473906 - DNA, 25 bp, Homo sapien
gcttctgacgcttggatgtcccgcc

SEQ ID NO: 1473907 - DNA, 25 bp, Homo sapien
ctgggcagcagcaaacagacccttc

SEQ ID NO: 1473908 - DNA, 25 bp, Homo sapien
tctgggcagcagcaaacagaccctt

SEQ ID NO: 1473909 - DNA, 25 bp, Homo sapien
tgggcagcagcaaacagacccttca

SEQ ID NO: 1473910 - DNA, 25 bp, Homo sapien
gggcagcagcaaacagacccttcat

SEQ ID NO: 1473911 - DNA, 25 bp, Homo sapien
tttctttgcaacatcaccaatggac

SEQ ID NO: 1473912 - DNA, 25 bp, Homo sapien
gtattcttcctttagctttgcagcc

SEQ ID NO: 1473913 - DNA, 25 bp, Homo sapien
ctgtattcttcctttagctttgcag

SEQ ID NO: 1473914 - DNA, 25 bp, Homo sapien
tgcagcaatatcctttctgtattct

SEQ ID NO: 1473915 - DNA, 25 bp, Homo sapien
tttcctttctcgttagcatatatgg

SEQ ID NO: 1473916 - DNA, 25 bp, Homo sapien
tcgttagcatatatggtcttccacc

SEQ ID NO: 1473917 - DNA, 25 bp, Homo sapien
ttctcgttagcatatatggtcttcc

SEQ ID NO: 1473918 - DNA, 25 bp, Homo sapien
cctttctcgttagcatatatggtct

SEQ ID NO: 1473919 - DNA, 25 bp, Homo sapien
ttaattaacatgaaagttccatgtt

SEQ ID NO: 1473920 - DNA, 25 bp, Homo sapien
tctttactgtcgttaattaacatga

SEQ ID NO: 1473921 - DNA, 25 bp, Homo sapien
ctctgttcttgtactctttactgtc

SEQ ID NO: 1473922 - DNA, 25 bp, Homo sapien
tcttgtactctttactgtcgttaat

SEQ ID NO: 1473923 - DNA, 25 bp, Homo sapien
tcttctagccttttatccacataga

SEQ ID NO: 1473924 - DNA, 25 bp, Homo sapien
cttttttcactccataatgattcct

SEQ ID NO: 1473925 - DNA, 25 bp, Homo sapien
ttttcactccataatgattcctctt

SEQ ID NO: 1473926 - DNA, 25 bp, Homo sapien
tcttgctacgactctccttatccct

SEQ ID NO: 1473927 - DNA, 25 bp, Homo sapien
gcagtgagcggccggtgagagcagc

SEQ ID NO: 1473928 - DNA, 25 bp, Homo sapien
cagtgagcggccggtgagagcagcc

SEQ ID NO: 1473929 - DNA, 25 bp, Homo sapien
cttccttccacgatgctgcagtgag

SEQ ID NO: 1473930 - DNA, 25 bp, Homo sapien
agtgagcggccggtgagagcagccc

SEQ ID NO: 1473931 - DNA, 25 bp, Homo sapien
atttgaataattcgaagtgactgga

SEQ ID NO: 1473932 - DNA, 25 bp, Homo sapien
tgaaatccgacctgagcctggaatt

SEQ ID NO: 1473933 - DNA, 25 bp, Homo sapien
ggaatttgaataattcgaagtgact

SEQ ID NO: 1473934 - DNA, 25 bp, Homo sapien
tgagctcaggttgaaatccgacctg

SEQ ID NO: 1473935 - DNA, 25 bp, Homo sapien
tctctgtcttcctgagtgaggccag

SEQ ID NO: 1473936 - DNA, 25 bp, Homo sapien
ctctgtcttcctgagtgaggccaga

SEQ ID NO: 1473937 - DNA, 25 bp, Homo sapien
atctctgtcttcctgagtgaggcca

SEQ ID NO: 1473938 - DNA, 25 bp, Homo sapien
tcaagcaaggctcggttcagatgca

SEQ ID NO: 1473939 - DNA, 25 bp, Homo sapien
ctcaagcaaggctcggttcagatgc

SEQ ID NO: 1473940 - DNA, 25 bp, Homo sapien
caagcaaggctcggttcagatgcat

SEQ ID NO: 1473941 - DNA, 25 bp, Homo sapien
cctcaagcaaggctcggttcagatg

SEQ ID NO: 1473942 - DNA, 25 bp, Homo sapien
tagcctttaggattagaaagtactg

SEQ ID NO: 1473943 - DNA, 25 bp, Homo sapien
gagacccatatgatagcctttagga

SEQ ID NO: 1473944 - DNA, 25 bp, Homo sapien
tactgttaagacttgagttgaggag

SEQ ID NO: 1473945 - DNA, 25 bp, Homo sapien
cactgtaacattgagacccatatga

SEQ ID NO: 1473946 - DNA, 25 bp, Homo sapien
ctgacctggaattcaccatagatgt

SEQ ID NO: 1473947 - DNA, 25 bp, Homo sapien
tgacctggaattcaccatagatgtt

SEQ ID NO: 1473948 - DNA, 25 bp, Homo sapien
ccattgggaagttcattaaaatgcc

SEQ ID NO: 1473949 - DNA, 25 bp, Homo sapien
caccagttttttggaggtaaatgct

SEQ ID NO: 1473950 - DNA, 25 bp, Homo sapien
tgcaccagttttttggaggtaaatg

SEQ ID NO: 1473951 - DNA, 25 bp, Homo sapien
tggcccattgggaagttcattaaaa

SEQ ID NO: 1473952 - DNA, 25 bp, Homo sapien
tgctatggacctggacctgcgtctt

SEQ ID NO: 1473953 - DNA, 25 bp, Homo sapien
tcagcagaaggaccatgtagggcac

SEQ ID NO: 1473954 - DNA, 25 bp, Homo sapien
catgtagggcacaggctgctatgga

SEQ ID NO: 1473955 - DNA, 25 bp, Homo sapien
ggacctgcgtcttgcctgggtctga

SEQ ID NO: 1473956 - DNA, 25 bp, Homo sapien
tcttcttggggatccaggcaacctc

SEQ ID NO: 1473957 - DNA, 25 bp, Homo sapien
ttcttggggatccaggcaacctctt

SEQ ID NO: 1473958 - DNA, 25 bp, Homo sapien
cttcttggggatccaggcaacctct

SEQ ID NO: 1473959 - DNA, 25 bp, Homo sapien
ttattcttctgtaactctggctcac

SEQ ID NO: 1473960 - DNA, 25 bp, Homo sapien
gctgctttgaaaccatccatttgcc

SEQ ID NO: 1473961 - DNA, 25 bp, Homo sapien
attctggatgctgcccttatctgtg

SEQ ID NO: 1473962 - DNA, 25 bp, Homo sapien
gagcaatttacagccattctggatg

SEQ ID NO: 1473963 - DNA, 25 bp, Homo sapien
gggccaagaactcagactgctcgag

SEQ ID NO: 1473964 - DNA, 25 bp, Homo sapien
gttggtcagcttgagtggaggagaa

SEQ ID NO: 1473965 - DNA, 25 bp, Homo sapien
ggacatttgtgtaggcagtgagctt

SEQ ID NO: 1473966 - DNA, 25 bp, Homo sapien
caggaggccttggaatggccagctg

SEQ ID NO: 1473967 - DNA, 25 bp, Homo sapien
gaatggccagctggacatttgtgta

SEQ ID NO: 1473968 - DNA, 25 bp, Homo sapien
caggcaggcacgtgtttcagtggac

SEQ ID NO: 1473969 - DNA, 25 bp, Homo sapien
tcataggatatcctcacacccaggc

SEQ ID NO: 1473970 - DNA, 25 bp, Homo sapien
ggtttcttccgaggccttgatgagg

SEQ ID NO: 1473971 - DNA, 25 bp, Homo sapien
cctgagcgacagtgactgtcatagg

SEQ ID NO: 1473972 - DNA, 25 bp, Homo sapien
cccccacaacactgaaggtctcctc

SEQ ID NO: 1473973 - DNA, 25 bp, Homo sapien
tgcccccacaacactgaaggtctcc

SEQ ID NO: 1473974 - DNA, 25 bp, Homo sapien
cccacaacactgaaggtctcctcag

SEQ ID NO: 1473975 - DNA, 25 bp, Homo sapien
cacaacactgaaggtctcctcaggg

SEQ ID NO: 1473976 - DNA, 25 bp, Homo sapien
tgtagaaattgtaggcatatttgta

SEQ ID NO: 1473977 - DNA, 25 bp, Homo sapien
tatttgtagactgaacaacaggagc

SEQ ID NO: 1473978 - DNA, 25 bp, Homo sapien
agaaattgtaggcatatttgtagac

SEQ ID NO: 1473979 - DNA, 25 bp, Homo sapien
aattgtaggcatatttgtagactga

SEQ ID NO: 1473980 - DNA, 25 bp, Homo sapien
gccaaggctagttgacagagggcat

SEQ ID NO: 1473981 - DNA, 25 bp, Homo sapien
tcaggagggattctcagagatggca

SEQ ID NO: 1473982 - DNA, 25 bp, Homo sapien
tgttttcactgggtgccaaggctag

SEQ ID NO: 1473983 - DNA, 25 bp, Homo sapien
tcagagatggcactgttttcactgg

SEQ ID NO: 1473984 - DNA, 25 bp, Homo sapien
atggtgtgtatgtgacttgcactga

SEQ ID NO: 1473985 - DNA, 25 bp, Homo sapien
gcagctgagtcttgatgcggagcac

SEQ ID NO: 1473986 - DNA, 25 bp, Homo sapien
ctctgctttcatgaggaaaggcctt

SEQ ID NO: 1473987 - DNA, 25 bp, Homo sapien
ggaggaggctggactttagatcctt

SEQ ID NO: 1473988 - DNA, 25 bp, Homo sapien
aggaggctggactttagatccttac

SEQ ID NO: 1473989 - DNA, 25 bp, Homo sapien
aaatcagcattcagaacctctgctt

SEQ ID NO: 1473990 - DNA, 25 bp, Homo sapien
tggttatatcggctcttctttttgt

SEQ ID NO: 1473991 - DNA, 25 bp, Homo sapien
ggttcctggttatatcggctcttct

SEQ ID NO: 1473992 - DNA, 25 bp, Homo sapien
gtggccagagtaggttcctggttat

SEQ ID NO: 1473993 - DNA, 25 bp, Homo sapien
gagtaggttcctggttatatcggct

SEQ ID NO: 1473994 - DNA, 25 bp, Homo sapien
cccttgctagcatatgctttatgtg

SEQ ID NO: 1473995 - DNA, 25 bp, Homo sapien
aagccccttgctagcatatgcttta

SEQ ID NO: 1473996 - DNA, 25 bp, Homo sapien
cacaaagcctggtgagacatgagga

SEQ ID NO: 1473997 - DNA, 25 bp, Homo sapien
caacacaaagcctggtgagacatga

SEQ ID NO: 1473998 - DNA, 25 bp, Homo sapien
tccagttaaggggatctgagttgag

SEQ ID NO: 1473999 - DNA, 25 bp, Homo sapien
agcctggtagctttgcatctgtatc

SEQ ID NO: 1474000 - DNA, 25 bp, Homo sapien
cacatagcttcgtagcctggtagct

SEQ ID NO: 1474001 - DNA, 25 bp, Homo sapien
aggcacatagcttcgtagcctggta

SEQ ID NO: 1474002 - DNA, 25 bp, Homo sapien
aggaagaagaactcggtgaagacaa

SEQ ID NO: 1474003 - DNA, 25 bp, Homo sapien
aactcggtgaagacaaaagccagaa

SEQ ID NO: 1474004 - DNA, 25 bp, Homo sapien
agaagaactcggtgaagacaaaagc

SEQ ID NO: 1474005 - DNA, 25 bp, Homo sapien
agaactcggtgaagacaaaagccag

SEQ ID NO: 1474006 - DNA, 25 bp, Homo sapien
tatgaacagatgaataggtgtacag

SEQ ID NO: 1474007 - DNA, 25 bp, Homo sapien
gcagctgtgcactgactactggctg

SEQ ID NO: 1474008 - DNA, 25 bp, Homo sapien
gactactggctgtattatgaacaga

SEQ ID NO: 1474009 - DNA, 25 bp, Homo sapien
agatgaataggtgtacagcaccggg

SEQ ID NO: 1474010 - DNA, 25 bp, Homo sapien
tgggctcagatgaagtgtaattggc

SEQ ID NO: 1474011 - DNA, 25 bp, Homo sapien
ggtgaagccacagcgggtctgccgt

SEQ ID NO: 1474012 - DNA, 25 bp, Homo sapien
ccacagcgggtctgccgtgggctca

SEQ ID NO: 1474013 - DNA, 25 bp, Homo sapien
cgggtctgccgtgggctcagatgaa

SEQ ID NO: 1474014 - DNA, 25 bp, Homo sapien
acagactgccccacctcggagctga

SEQ ID NO: 1474015 - DNA, 25 bp, Homo sapien
agactgccccacctcggagctgagg

SEQ ID NO: 1474016 - DNA, 25 bp, Homo sapien
cacctcggagctgaggcagcctcca

SEQ ID NO: 1474017 - DNA, 25 bp, Homo sapien
cccacctcggagctgaggcagcctc

SEQ ID NO: 1474018 - DNA, 25 bp, Homo sapien
attttggaacttccagagaaggcag

SEQ ID NO: 1474019 - DNA, 25 bp, Homo sapien
tagattttggaacttccagagaagg

SEQ ID NO: 1474020 - DNA, 25 bp, Homo sapien
ttggaacttccagagaaggcaggag

SEQ ID NO: 1474021 - DNA, 25 bp, Homo sapien
tttggcgtagattttggaacttcca

SEQ ID NO: 1474022 - DNA, 25 bp, Homo sapien
tgctgcgggcaggttgtcaaatctc

SEQ ID NO: 1474023 - DNA, 25 bp, Homo sapien
caggtctgcctgatggttcacatca

SEQ ID NO: 1474024 - DNA, 25 bp, Homo sapien
caagtctgatttggtcattgctgcg

SEQ ID NO: 1474025 - DNA, 25 bp, Homo sapien
tgcccaacatcacacgaagagagtc

SEQ ID NO: 1474026 - DNA, 25 bp, Homo sapien
tgaggaatgggagttattcttctta

SEQ ID NO: 1474027 - DNA, 25 bp, Homo sapien
attcttcttatggaatctgctctct

SEQ ID NO: 1474028 - DNA, 25 bp, Homo sapien
gtgtcctggcttgggaggatttctg

SEQ ID NO: 1474029 - DNA, 25 bp, Homo sapien
agcagagggtctcatgcatgaggaa

SEQ ID NO: 1474030 - DNA, 25 bp, Homo sapien
gcagaaatatgaaagacccatggaa

SEQ ID NO: 1474031 - DNA, 25 bp, Homo sapien
ctgccaggctgatccagttttatag

SEQ ID NO: 1474032 - DNA, 25 bp, Homo sapien
tattatatcagagagcaaaccaacc

SEQ ID NO: 1474033 - DNA, 25 bp, Homo sapien
tgttggtaaccttgactgccaggct

SEQ ID NO: 1474034 - DNA, 25 bp, Homo sapien
tgggctccctaagatggtgtggtta

SEQ ID NO: 1474035 - DNA, 25 bp, Homo sapien
tgttgagtctaactgactgcagtcc

SEQ ID NO: 1474036 - DNA, 25 bp, Homo sapien
ctgggccttggaagatgagcaaaac

SEQ ID NO: 1474037 - DNA, 25 bp, Homo sapien
ttcacaaatccttgaggccagcgag

SEQ ID NO: 1474038 - DNA, 25 bp, Homo sapien
tcctctttctcgttactccactgac

SEQ ID NO: 1474039 - DNA, 25 bp, Homo sapien
ctctttctcgttactccactgacag

SEQ ID NO: 1474040 - DNA, 25 bp, Homo sapien
tttgttcctctttctcgttactcca

SEQ ID NO: 1474041 - DNA, 25 bp, Homo sapien
cctctttctcgttactccactgaca

SEQ ID NO: 1474042 - DNA, 25 bp, Homo sapien
atagccattctctgtcttgataatc

SEQ ID NO: 1474043 - DNA, 25 bp, Homo sapien
ttatagccattctctgtcttgataa

SEQ ID NO: 1474044 - DNA, 25 bp, Homo sapien
tgtcttgataatctttctccttttg

SEQ ID NO: 1474045 - DNA, 25 bp, Homo sapien
ttttgcctttcattcatttcctctc

SEQ ID NO: 1474046 - DNA, 25 bp, Homo sapien
tagcactgttgttgtggatctcctc

SEQ ID NO: 1474047 - DNA, 25 bp, Homo sapien
tctctctcccaattcctgttttatt

SEQ ID NO: 1474048 - DNA, 25 bp, Homo sapien
ggatctcctccggtccctctctcac

SEQ ID NO: 1474049 - DNA, 25 bp, Homo sapien
tcccaattcctgttttattagattc

SEQ ID NO: 1474050 - DNA, 25 bp, Homo sapien
cacattagcccataaaatctcgtaa

SEQ ID NO: 1474051 - DNA, 25 bp, Homo sapien
cattagcccataaaatctcgtaatt

SEQ ID NO: 1474052 - DNA, 25 bp, Homo sapien
ttagcccataaaatctcgtaattcc

SEQ ID NO: 1474053 - DNA, 25 bp, Homo sapien
acattagcccataaaatctcgtaat

SEQ ID NO: 1474054 - DNA, 25 bp, Homo sapien
gcctgcagaaagcttatgtctcatg

SEQ ID NO: 1474055 - DNA, 25 bp, Homo sapien
cagaaagcttatgtctcatggccat

SEQ ID NO: 1474056 - DNA, 25 bp, Homo sapien
ctttgtatgtagacagcctgcagaa

SEQ ID NO: 1474057 - DNA, 25 bp, Homo sapien
tgtatgtagacagcctgcagaaagc

SEQ ID NO: 1474058 - DNA, 25 bp, Homo sapien
atcactctcatttccaccagagtct

SEQ ID NO: 1474059 - DNA, 25 bp, Homo sapien
catgtccctgcgaatcactctcatt

SEQ ID NO: 1474060 - DNA, 25 bp, Homo sapien
cattcagtaacgctgtctgcaatgc

SEQ ID NO: 1474061 - DNA, 25 bp, Homo sapien
tgtctgcaatgcctgtgatgctggg

SEQ ID NO: 1474062 - DNA, 25 bp, Homo sapien
tgaggttgcatgcaaccatagtttg

SEQ ID NO: 1474063 - DNA, 25 bp, Homo sapien
tgctgggtatgaggttgcatgcaac

SEQ ID NO: 1474064 - DNA, 25 bp, Homo sapien
gctcttgaacacaggtactgggaca

SEQ ID NO: 1474065 - DNA, 25 bp, Homo sapien
tctggcactgaaggcaaaccccttg

SEQ ID NO: 1474066 - DNA, 25 bp, Homo sapien
tcagctttgagacactgtagcaggt

SEQ ID NO: 1474067 - DNA, 25 bp, Homo sapien
accggccagcacatgtgggatctga

SEQ ID NO: 1474068 - DNA, 25 bp, Homo sapien
ggtatggttacattccaaagatgcc

SEQ ID NO: 1474069 - DNA, 25 bp, Homo sapien
gcctacacgggtttatcacatcaag

SEQ ID NO: 1474070 - DNA, 25 bp, Homo sapien
aatggcccagaaccctatggagttg

SEQ ID NO: 1474071 - DNA, 25 bp, Homo sapien
cctccatggacggtgtcatgcaaag

SEQ ID NO: 1474072 - DNA, 25 bp, Homo sapien
tggactctagagtaatgaagtccat

SEQ ID NO: 1474073 - DNA, 25 bp, Homo sapien
tcatcatggacctctaccctgaaat

SEQ ID NO: 1474074 - DNA, 25 bp, Homo sapien
tctagagtaatgaagtccattcccc

SEQ ID NO: 1474075 - DNA, 25 bp, Homo sapien
tctaccctgaaatggactctagagt

SEQ ID NO: 1474076 - DNA, 25 bp, Homo sapien
ggaacagccagcccgggacggaggc

SEQ ID NO: 1474077 - DNA, 25 bp, Homo sapien
tcttgaggcgggtgaccaggaagat

SEQ ID NO: 1474078 - DNA, 25 bp, Homo sapien
cagactgtgtggaggtcttgaggcg

SEQ ID NO: 1474079 - DNA, 25 bp, Homo sapien
gaagatgactgtccagtactcccag

SEQ ID NO: 1474080 - DNA, 25 bp, Homo sapien
agtggcctgcaattggcaggcttga

SEQ ID NO: 1474081 - DNA, 25 bp, Homo sapien
caatagcagcagagtgtcctgtcgg

SEQ ID NO: 1474082 - DNA, 25 bp, Homo sapien
ctcacaggcttcagcaatagcagca

SEQ ID NO: 1474083 - DNA, 25 bp, Homo sapien
ttcagcaatagcagcagagtgtcct

SEQ ID NO: 1474084 - DNA, 25 bp, Homo sapien
cagcagagtgtcctgtcggcgctgc

SEQ ID NO: 1474085 - DNA, 25 bp, Homo sapien
tcacactcacacatcgctccatcca

SEQ ID NO: 1474086 - DNA, 25 bp, Homo sapien
cacactcacacatcgctccatccac

SEQ ID NO: 1474087 - DNA, 25 bp, Homo sapien
tcttttaaagggagcttcagattat

SEQ ID NO: 1474088 - DNA, 25 bp, Homo sapien
cccgtggttcaaggccgggagcttg

SEQ ID NO: 1474089 - DNA, 25 bp, Homo sapien
gccactgaacccacagttcttttaa

SEQ ID NO: 1474090 - DNA, 25 bp, Homo sapien
cccaggggagtcacaaccaggagtg

SEQ ID NO: 1474091 - DNA, 25 bp, Homo sapien
atcactctcatttccaccagagtct

SEQ ID NO: 1474092 - DNA, 25 bp, Homo sapien
catgtccctgcgaatcactctcatt

SEQ ID NO: 1474093 - DNA, 25 bp, Homo sapien
gtgtcaccgcaaacccagaaaattc

SEQ ID NO: 1474094 - DNA, 25 bp, Homo sapien
tgttttactggctcctcggctttga

SEQ ID NO: 1474095 - DNA, 25 bp, Homo sapien
agcagcgttatcttttccgaattcc

SEQ ID NO: 1474096 - DNA, 25 bp, Homo sapien
taaccctcgttactgtgacatttag

SEQ ID NO: 1474097 - DNA, 25 bp, Homo sapien
tctgcctaagcagactgcccggtgg

SEQ ID NO: 1474098 - DNA, 25 bp, Homo sapien
tgggccttcatatctgcgggttgca

SEQ ID NO: 1474099 - DNA, 25 bp, Homo sapien
tcatagggagcatcagagatcacgt

SEQ ID NO: 1474100 - DNA, 25 bp, Homo sapien
gatcgtattagtccagaggtgcttc

SEQ ID NO: 1474101 - DNA, 25 bp, Homo sapien
ttggcaaattatgatactgcgtatc

SEQ ID NO: 1474102 - DNA, 25 bp, Homo sapien
tgtcaataagagattttggcaaatt

SEQ ID NO: 1474103 - DNA, 25 bp, Homo sapien
gtaaggtataattcctggtacttca

SEQ ID NO: 1474104 - DNA, 25 bp, Homo sapien
actgcgtatcttctgtaaggtataa

SEQ ID NO: 1474105 - DNA, 25 bp, Homo sapien
ccaggatgatggagcgggggggcca

SEQ ID NO: 1474106 - DNA, 25 bp, Homo sapien
gcccagatgttggagcaggcagcca

SEQ ID NO: 1474107 - DNA, 25 bp, Homo sapien
gagctgggatgatggagcaggcagc

SEQ ID NO: 1474108 - DNA, 25 bp, Homo sapien
gggagccgggatgagggagcaggca

SEQ ID NO: 1474109 - DNA, 25 bp, Homo sapien
catgcaagctgaaggaaatggtgcc

SEQ ID NO: 1474110 - DNA, 25 bp, Homo sapien
atctccatcagcacccggatgttgg

SEQ ID NO: 1474111 - DNA, 25 bp, Homo sapien
tcagcacccggatgttggcgtacat

SEQ ID NO: 1474112 - DNA, 25 bp, Homo sapien
agctggagccgtggacaggcctgag

SEQ ID NO: 1474113 - DNA, 25 bp, Homo sapien
gaaggcgtcgctgagagtctccatc

SEQ ID NO: 1474114 - DNA, 25 bp, Homo sapien
tttggactttttgagggctctgagc

SEQ ID NO: 1474115 - DNA, 25 bp, Homo sapien
gtctccatcttttgggagtaactgc

SEQ ID NO: 1474116 - DNA, 25 bp, Homo sapien
catggagcccttgaatatctgtttg

SEQ ID NO: 1474117 - DNA, 25 bp, Homo sapien
actagatcggctgcgggctgtgttc

SEQ ID NO: 1474118 - DNA, 25 bp, Homo sapien
gtaaaactagatcggctgcgggctg

SEQ ID NO: 1474119 - DNA, 25 bp, Homo sapien
ctggccaagggtaaaactagatcgg

SEQ ID NO: 1474120 - DNA, 25 bp, Homo sapien
ccaagggtaaaactagatcggctgc

SEQ ID NO: 1474121 - DNA, 25 bp, Homo sapien
gatgatctccccacgtagagacagg

SEQ ID NO: 1474122 - DNA, 25 bp, Homo sapien
tgttttgcctaatccttcccacacg

SEQ ID NO: 1474123 - DNA, 25 bp, Homo sapien
tgaatcttcttaggtcccttgtgtg

SEQ ID NO: 1474124 - DNA, 25 bp, Homo sapien
gaagcggattccgatacctcgcctt

SEQ ID NO: 1474125 - DNA, 25 bp, Homo sapien
tttgagaggacgcatacctcagcct

SEQ ID NO: 1474126 - DNA, 25 bp, Homo sapien
ttgattttgagaggacgcatacctc

SEQ ID NO: 1474127 - DNA, 25 bp, Homo sapien
gagaggacgcatacctcagcctgca

SEQ ID NO: 1474128 - DNA, 25 bp, Homo sapien
ctgggggcccttttgattttgagag

SEQ ID NO: 1474129 - DNA, 25 bp, Homo sapien
tggtgtcctcttgctagcacctgcc

SEQ ID NO: 1474130 - DNA, 25 bp, Homo sapien
gtgtcctcttgctagcacctgccag

SEQ ID NO: 1474131 - DNA, 25 bp, Homo sapien
cacctgccagctgaggttgagccat

SEQ ID NO: 1474132 - DNA, 25 bp, Homo sapien
tttggtgtcctcttgctagcacctg

SEQ ID NO: 1474133 - DNA, 25 bp, Homo sapien
cagggcatgagttctgctcccagga

SEQ ID NO: 1474134 - DNA, 25 bp, Homo sapien
gattcttgcaggattttgtctgtgg

SEQ ID NO: 1474135 - DNA, 25 bp, Homo sapien
catgagttctgctcccaggaaagag

SEQ ID NO: 1474136 - DNA, 25 bp, Homo sapien
ggaaagagattcttgcaggattttg

SEQ ID NO: 1474137 - DNA, 25 bp, Homo sapien
ctctccaaaggagtcagcaggctgg

SEQ ID NO: 1474138 - DNA, 25 bp, Homo sapien
tgagtgcgaggcagtcatgtgcttc

SEQ ID NO: 1474139 - DNA, 25 bp, Homo sapien
catgtgcttctgtttggtaaatggc

SEQ ID NO: 1474140 - DNA, 25 bp, Homo sapien
ctctaactcctgagcgtcctgaagc

SEQ ID NO: 1474141 - DNA, 25 bp, Homo sapien
aagagaggcggctgtattttagcct

SEQ ID NO: 1474142 - DNA, 25 bp, Homo sapien
gcctgataatcttgattcctggttt

SEQ ID NO: 1474143 - DNA, 25 bp, Homo sapien
tccatggtggtgcagtaggttctca

SEQ ID NO: 1474144 - DNA, 25 bp, Homo sapien
cagctggtgggcctcaaagagaggc

SEQ ID NO: 1474145 - DNA, 25 bp, Homo sapien
tggtgctccctagagttgatggtcc

SEQ ID NO: 1474146 - DNA, 25 bp, Homo sapien
tttggtcaggaccagagccgagctc

SEQ ID NO: 1474147 - DNA, 25 bp, Homo sapien
tcccagggttattgaagagcagcca

SEQ ID NO: 1474148 - DNA, 25 bp, Homo sapien
ggctcttgtcgcaccatatcattga

SEQ ID NO: 1474149 - DNA, 25 bp, Homo sapien
tctctctgtataagggtgactgtgc

SEQ ID NO: 1474150 - DNA, 25 bp, Homo sapien
cctggacttcggagtgatagcaaag

SEQ ID NO: 1474151 - DNA, 25 bp, Homo sapien
ggcattgtccgctctgtttcctgga

SEQ ID NO: 1474152 - DNA, 25 bp, Homo sapien
cagtgcatgagggtatgccaactct

SEQ ID NO: 1474153 - DNA, 25 bp, Homo sapien
cccaggcttgggcagactcattcat

SEQ ID NO: 1474154 - DNA, 25 bp, Homo sapien
gcttgggcagactcattcatagggc

SEQ ID NO: 1474155 - DNA, 25 bp, Homo sapien
ctgcgtgcatcataaaatgctgtga

SEQ ID NO: 1474156 - DNA, 25 bp, Homo sapien
gaaaggggtcacaggtattgcccag

SEQ ID NO: 1474157 - DNA, 25 bp, Homo sapien
agcttgcaccctgagccacgtggaa

SEQ ID NO: 1474158 - DNA, 25 bp, Homo sapien
agggatgctgggcacggtaaacaca

SEQ ID NO: 1474159 - DNA, 25 bp, Homo sapien
tgctgggcacggtaaacacagaagg

SEQ ID NO: 1474160 - DNA, 25 bp, Homo sapien
caggagcttgcaccctgagccacgt

SEQ ID NO: 1474161 - DNA, 25 bp, Homo sapien
ctgcggacccccgtagatgggatgc

SEQ ID NO: 1474162 - DNA, 25 bp, Homo sapien
cctgggcgttggaaggctctgccct

SEQ ID NO: 1474163 - DNA, 25 bp, Homo sapien
gctgcggctgcggacccccgtagat

SEQ ID NO: 1474164 - DNA, 25 bp, Homo sapien
ggacccccgtagatgggatgcagct

SEQ ID NO: 1474165 - DNA, 25 bp, Homo sapien
ggcaaactccagtttatacctggag

SEQ ID NO: 1474166 - DNA, 25 bp, Homo sapien
gcaaactccagtttatacctggagc

SEQ ID NO: 1474167 - DNA, 25 bp, Homo sapien
aactccagtttatacctggagctgc

SEQ ID NO: 1474168 - DNA, 25 bp, Homo sapien
ctccagtttatacctggagctgcag

SEQ ID NO: 1474169 - DNA, 25 bp, Homo sapien
ggataagaagaagacctgaccccac

SEQ ID NO: 1474170 - DNA, 25 bp, Homo sapien
tggataagaagaagacctgacccca

SEQ ID NO: 1474171 - DNA, 25 bp, Homo sapien
gtggataagaagaagacctgacccc

SEQ ID NO: 1474172 - DNA, 25 bp, Homo sapien
ggtggataagaagaagacctgaccc

SEQ ID NO: 1474173 - DNA, 25 bp, Homo sapien
caagtggttctccctggtactgcat

SEQ ID NO: 1474174 - DNA, 25 bp, Homo sapien
ggttctccctggtactgcatcctgc

SEQ ID NO: 1474175 - DNA, 25 bp, Homo sapien
agtggttctccctggtactgcatcc

SEQ ID NO: 1474176 - DNA, 25 bp, Homo sapien
tctccctggtactgcatcctgctgg

SEQ ID NO: 1474177 - DNA, 25 bp, Homo sapien
gaggatgtttaacgcaatgatctcc

SEQ ID NO: 1474178 - DNA, 25 bp, Homo sapien
ggatgtttaacgcaatgatctccag

SEQ ID NO: 1474179 - DNA, 25 bp, Homo sapien
gatgtttaacgcaatgatctccagc

SEQ ID NO: 1474180 - DNA, 25 bp, Homo sapien
gggaggatgtttaacgcaatgatct

SEQ ID NO: 1474181 - DNA, 25 bp, Homo sapien
tccttgttgacattccctgggatct

SEQ ID NO: 1474182 - DNA, 25 bp, Homo sapien
gttgacattccctgggatctggagg

SEQ ID NO: 1474183 - DNA, 25 bp, Homo sapien
agagccacttccttgttgacattcc

SEQ ID NO: 1474184 - DNA, 25 bp, Homo sapien
gatctggaggtcacttccagctctt

SEQ ID NO: 1474185 - DNA, 25 bp, Homo sapien
caggaactgggataatgccattttc

SEQ ID NO: 1474186 - DNA, 25 bp, Homo sapien
cctttgccccgcaagcatgggtaga

SEQ ID NO: 1474187 - DNA, 25 bp, Homo sapien
gactgtgggtttagaatttgaatcc

SEQ ID NO: 1474188 - DNA, 25 bp, Homo sapien
tgagcggtgctgtacattatgaaca

SEQ ID NO: 1474189 - DNA, 25 bp, Homo sapien
gattttggtgggtaagagtgctgct

SEQ ID NO: 1474190 - DNA, 25 bp, Homo sapien
aagggatagtgggagtttctcatca

SEQ ID NO: 1474191 - DNA, 25 bp, Homo sapien
cgtatctgtgggatttcgtcaataa

SEQ ID NO: 1474192 - DNA, 25 bp, Homo sapien
tcgtcaataatgctgacaaaatctg

SEQ ID NO: 1474193 - DNA, 25 bp, Homo sapien
gccagggatggtcaggcccccagaa

SEQ ID NO: 1474194 - DNA, 25 bp, Homo sapien
tcttagtactcttctggccatctgg

SEQ ID NO: 1474195 - DNA, 25 bp, Homo sapien
ccccagaaggcctcttagtactctt

SEQ ID NO: 1474196 - DNA, 25 bp, Homo sapien
agaaggcctcttagtactcttctgg

SEQ ID NO: 1474197 - DNA, 25 bp, Homo sapien
ggccagtagtgctcaatatttataa

SEQ ID NO: 1474198 - DNA, 25 bp, Homo sapien
cagctcatgagacatttcacagttg

SEQ ID NO: 1474199 - DNA, 25 bp, Homo sapien
tacagcagcgagcaggtgaggtatc

SEQ ID NO: 1474200 - DNA, 25 bp, Homo sapien
cagttgtactcttcgcctgcttggc

SEQ ID NO: 1474201 - DNA, 25 bp, Homo sapien
tcgttgcgtgcgtcttttccagacc

SEQ ID NO: 1474202 - DNA, 25 bp, Homo sapien
ggaatttgttcagtgatgacttaat

SEQ ID NO: 1474203 - DNA, 25 bp, Homo sapien
aacaccttgcatgtcgttgcgtgcg

SEQ ID NO: 1474204 - DNA, 25 bp, Homo sapien
tagaaaaaacaccttgcatgtcgtt

SEQ ID NO: 1474205 - DNA, 25 bp, Homo sapien
aacctttaattgtcctgtgggctgg

SEQ ID NO: 1474206 - DNA, 25 bp, Homo sapien
gaacctttaattgtcctgtgggctg

SEQ ID NO: 1474207 - DNA, 25 bp, Homo sapien
ctgggaacctttaattgtcctgtgg

SEQ ID NO: 1474208 - DNA, 25 bp, Homo sapien
cagaagcagcaacaaggtgtggtgt

SEQ ID NO: 1474209 - DNA, 25 bp, Homo sapien
aagagatgtccagttgtttgcagca

SEQ ID NO: 1474210 - DNA, 25 bp, Homo sapien
cagcagctgctaggaatgaaatgca

SEQ ID NO: 1474211 - DNA, 25 bp, Homo sapien
tggtaagagatgtccagttgtttgc

SEQ ID NO: 1474212 - DNA, 25 bp, Homo sapien
ctgaagtcccatgcagaactgcggg

SEQ ID NO: 1474213 - DNA, 25 bp, Homo sapien
tcctgaagtcccatgcagaactgcg

SEQ ID NO: 1474214 - DNA, 25 bp, Homo sapien
gggtcctgaagtcccatgcagaact

SEQ ID NO: 1474215 - DNA, 25 bp, Homo sapien
gaactgcggggtggtcctgctgaag

SEQ ID NO: 1474216 - DNA, 25 bp, Homo sapien
gagtgcttgacagctgtgtcgtggg

SEQ ID NO: 1474217 - DNA, 25 bp, Homo sapien
aggtggcttgatgcagatcctcctg

SEQ ID NO: 1474218 - DNA, 25 bp, Homo sapien
tgtgtcgtgggaggtggcttgatgc

SEQ ID NO: 1474219 - DNA, 25 bp, Homo sapien
tgggaggtggcttgatgcagatcct

SEQ ID NO: 1474220 - DNA, 25 bp, Homo sapien
tgtggtgcctgatgcagcacagcag

SEQ ID NO: 1474221 - DNA, 25 bp, Homo sapien
agcacagcaggacgtcaggcaagcc

SEQ ID NO: 1474222 - DNA, 25 bp, Homo sapien
tcaggcaagcccagacgtcaggcag

SEQ ID NO: 1474223 - DNA, 25 bp, Homo sapien
ggcaggcccagaacgtcacctgtct

SEQ ID NO: 1474224 - DNA, 25 bp, Homo sapien
cataatgattacagttgacgatcac

SEQ ID NO: 1474225 - DNA, 25 bp, Homo sapien
agctttctggacctccgggatgtcc

SEQ ID NO: 1474226 - DNA, 25 bp, Homo sapien
tcaccgtggccaccgttgtcttttc

SEQ ID NO: 1474227 - DNA, 25 bp, Homo sapien
ttacagttgacgatcaccgtggcca

SEQ ID NO: 1474228 - DNA, 25 bp, Homo sapien
ggagaagtgtcccagtagaacgcac

SEQ ID NO: 1474229 - DNA, 25 bp, Homo sapien
gtagaacgcactgttgtgtcacttg

SEQ ID NO: 1474230 - DNA, 25 bp, Homo sapien
gaccaccgttgacatcgcagcacag

SEQ ID NO: 1474231 - DNA, 25 bp, Homo sapien
tctgaccaccgttgacatcgcagca

SEQ ID NO: 1474232 - DNA, 25 bp, Homo sapien
gatggccaagccagatatgtaaggt

SEQ ID NO: 1474233 - DNA, 25 bp, Homo sapien
agggtcggattgtccacgtagtgcc

SEQ ID NO: 1474234 - DNA, 25 bp, Homo sapien
cgtgacagggtgatggtagaagatg

SEQ ID NO: 1474235 - DNA, 25 bp, Homo sapien
gcacaggatgatgccctcgaagtaa

SEQ ID NO: 1474236 - DNA, 25 bp, Homo sapien
tcgtccacagtggataagtttttct

SEQ ID NO: 1474237 - DNA, 25 bp, Homo sapien
agaagtcaagctgccgtccaccctg

SEQ ID NO: 1474238 - DNA, 25 bp, Homo sapien
cacttgcagtggagacataggccct

SEQ ID NO: 1474239 - DNA, 25 bp, Homo sapien
gacataggcccttcgtccacagtgg

SEQ ID NO: 1474240 - DNA, 25 bp, Homo sapien
cccgtttccgcgtgcagttttctgc

SEQ ID NO: 1474241 - DNA, 25 bp, Homo sapien
ctctcacatctgtggagcggaagtc

SEQ ID NO: 1474242 - DNA, 25 bp, Homo sapien
tctgcggaagtatttcccaggtcct

SEQ ID NO: 1474243 - DNA, 25 bp, Homo sapien
gtttcccttctgtgtgagagcgtca

SEQ ID NO: 1474244 - DNA, 25 bp, Homo sapien
catctttgcacacgaaggcaaagcc

SEQ ID NO: 1474245 - DNA, 25 bp, Homo sapien
catttaatgcccatgatatctcatc

SEQ ID NO: 1474246 - DNA, 25 bp, Homo sapien
ttgctcctttctccgcaatcacatt

SEQ ID NO: 1474247 - DNA, 25 bp, Homo sapien
gcccatgatatctcatctttgcaca

SEQ ID NO: 1474248 - DNA, 25 bp, Homo sapien
tattagaaggatcagaagaaagaga

SEQ ID NO: 1474249 - DNA, 25 bp, Homo sapien
attagaaggatcagaagaaagagac

SEQ ID NO: 1474250 - DNA, 25 bp, Homo sapien
caggctgtacgtggtgaaggtgata

SEQ ID NO: 1474251 - DNA, 25 bp, Homo sapien
ggctgtacgtggtgaaggtgataga

SEQ ID NO: 1474252 - DNA, 25 bp, Homo sapien
gcaggctgtacgtggtgaaggtgat

SEQ ID NO: 1474253 - DNA, 25 bp, Homo sapien
ctgtacgtggtgaaggtgatagact

SEQ ID NO: 1474254 - DNA, 25 bp, Homo sapien
catcatctcatagtccttcctcact

SEQ ID NO: 1474255 - DNA, 25 bp, Homo sapien
tcactcccttccatgaagtgcttct

SEQ ID NO: 1474256 - DNA, 25 bp, Homo sapien
catctcatagtccttcctcactccc

SEQ ID NO: 1474257 - DNA, 25 bp, Homo sapien
tgaccaccatcatctcatagtcctt

SEQ ID NO: 1474258 - DNA, 25 bp, Homo sapien
tagattccctccatagaagctagaa

SEQ ID NO: 1474259 - DNA, 25 bp, Homo sapien
caggtcctaggaaccagaacttgct

SEQ ID NO: 1474260 - DNA, 25 bp, Homo sapien
cactcggtctgttggcattggaacc

SEQ ID NO: 1474261 - DNA, 25 bp, Homo sapien
cctctgccttgctatgtaaatactg

SEQ ID NO: 1474262 - DNA, 25 bp, Homo sapien
cacagcgctgtactttagggcatct

SEQ ID NO: 1474263 - DNA, 25 bp, Homo sapien
catttacaaagggagcgaagaccac

SEQ ID NO: 1474264 - DNA, 25 bp, Homo sapien
tagggcatctaggtctttccagagg

SEQ ID NO: 1474265 - DNA, 25 bp, Homo sapien
tgcatccaatactctagaccaaggg

SEQ ID NO: 1474266 - DNA, 25 bp, Homo sapien
aggccaccgtaggtctgctctgtct

SEQ ID NO: 1474267 - DNA, 25 bp, Homo sapien
catcccctctctgactgtacacatt

SEQ ID NO: 1474268 - DNA, 25 bp, Homo sapien
tcaggccaccgtaggtctgctctgt

SEQ ID NO: 1474269 - DNA, 25 bp, Homo sapien
caggccaccgtaggtctgctctgtc

SEQ ID NO: 1474270 - DNA, 25 bp, Homo sapien
tccagtgcgtgcggaggggtcagtg

SEQ ID NO: 1474271 - DNA, 25 bp, Homo sapien
cagtgcgtgcggaggggtcagtgct

SEQ ID NO: 1474272 - DNA, 25 bp, Homo sapien
attccagtgcgtgcggaggggtcag

SEQ ID NO: 1474273 - DNA, 25 bp, Homo sapien
ctattccagtgcgtgcggaggggtc

SEQ ID NO: 1474274 - DNA, 25 bp, Homo sapien
gcaggagaagttccgcatctgagtg

SEQ ID NO: 1474275 - DNA, 25 bp, Homo sapien
tgagcaggagaagttccgcatctga

SEQ ID NO: 1474276 - DNA, 25 bp, Homo sapien
agaagttccgcatctgagtgggagc

SEQ ID NO: 1474277 - DNA, 25 bp, Homo sapien
agttccgcatctgagtgggagcccc

SEQ ID NO: 1474278 - DNA, 25 bp, Homo sapien
aactctgtatgccgcaccacagggt

SEQ ID NO: 1474279 - DNA, 25 bp, Homo sapien
gtctcataaacatgcgccgctggcc

SEQ ID NO: 1474280 - DNA, 25 bp, Homo sapien
tatgttgtacttctcggcagctcgc

SEQ ID NO: 1474281 - DNA, 25 bp, Homo sapien
gacggaaccgctgctccatggtaga

SEQ ID NO: 1474282 - DNA, 25 bp, Homo sapien
ctgacgtggatgcattccagatgtg

SEQ ID NO: 1474283 - DNA, 25 bp, Homo sapien
aagtgcttgtggctgtcttcattca

SEQ ID NO: 1474284 - DNA, 25 bp, Homo sapien
gcaaagtgcttgtggctgtcttcat

SEQ ID NO: 1474285 - DNA, 25 bp, Homo sapien
tcttgagacttctgacgtggatgca

SEQ ID NO: 1474286 - DNA, 25 bp, Homo sapien
atgggtgcacatggagactcgcaga

SEQ ID NO: 1474287 - DNA, 25 bp, Homo sapien
gagactcgcagactttcaggtgctg

SEQ ID NO: 1474288 - DNA, 25 bp, Homo sapien
catggagactcgcagactttcaggt

SEQ ID NO: 1474289 - DNA, 25 bp, Homo sapien
ggtgcacatggagactcgcagactt

SEQ ID NO: 1474290 - DNA, 25 bp, Homo sapien
cagctgtagaatttgcttggatttt

SEQ ID NO: 1474291 - DNA, 25 bp, Homo sapien
tagaatttgcttggatttttaacca

SEQ ID NO: 1474292 - DNA, 25 bp, Homo sapien
tgtagaatttgcttggatttttaac

SEQ ID NO: 1474293 - DNA, 25 bp, Homo sapien
tctccagctgtagaatttgcttgga

SEQ ID NO: 1474294 - DNA, 25 bp, Homo sapien
aaaagccctgctgttgaccttcagc

SEQ ID NO: 1474295 - DNA, 25 bp, Homo sapien
tatatagacatatcagacgccccac

SEQ ID NO: 1474296 - DNA, 25 bp, Homo sapien
cagcatggatctgattaaaaagccc

SEQ ID NO: 1474297 - DNA, 25 bp, Homo sapien
tacctaccagcaaacagtgagattt

SEQ ID NO: 1474298 - DNA, 25 bp, Homo sapien
caatagagaaagagtttagttcaca

SEQ ID NO: 1474299 - DNA, 25 bp, Homo sapien
agaaagagtttagttcacacagagc

SEQ ID NO: 1474300 - DNA, 25 bp, Homo sapien
tagagaaagagtttagttcacacag

SEQ ID NO: 1474301 - DNA, 25 bp, Homo sapien
gagaaagagtttagttcacacagag

SEQ ID NO: 1474302 - DNA, 25 bp, Homo sapien
ctgctgattggatgaggtgcaatca

SEQ ID NO: 1474303 - DNA, 25 bp, Homo sapien
gctggagatctggatggagtcatca

SEQ ID NO: 1474304 - DNA, 25 bp, Homo sapien
tgcatggatgggtccacaggacaag

SEQ ID NO: 1474305 - DNA, 25 bp, Homo sapien
tgtgcctgccgagtctgcttctgca

SEQ ID NO: 1474306 - DNA, 25 bp, Homo sapien
tatggaaagtaagtggcagttctgc

SEQ ID NO: 1474307 - DNA, 25 bp, Homo sapien
gttctgccttctcacaattactggg

SEQ ID NO: 1474308 - DNA, 25 bp, Homo sapien
ttcaagtttgatgtagaaagcccat

SEQ ID NO: 1474309 - DNA, 25 bp, Homo sapien
cagcgttgaattcagctacccaggt

SEQ ID NO: 1474310 - DNA, 25 bp, Homo sapien
gcctcacctccgtgtttaatctctg

SEQ ID NO: 1474311 - DNA, 25 bp, Homo sapien
tgcagtgttctgatgatttatggaa

SEQ ID NO: 1474312 - DNA, 25 bp, Homo sapien
ccaggttccgtactgtctgggtgtt

SEQ ID NO: 1474313 - DNA, 25 bp, Homo sapien
atgacaaaacggacgaggtgcccac

SEQ ID NO: 1474314 - DNA, 25 bp, Homo sapien
caataaattccaagggagtaggagc

SEQ ID NO: 1474315 - DNA, 25 bp, Homo sapien
tttgacggaggcctcatcacatggg

SEQ ID NO: 1474316 - DNA, 25 bp, Homo sapien
gggactgacggtttcaagcttctca

SEQ ID NO: 1474317 - DNA, 25 bp, Homo sapien
catcccggagtgcaaggactttgac

SEQ ID NO: 1474318 - DNA, 25 bp, Homo sapien
cacgctgggccttcagaattaatgg

SEQ ID NO: 1474319 - DNA, 25 bp, Homo sapien
gcagctgtcacacgctagtattggc

SEQ ID NO: 1474320 - DNA, 25 bp, Homo sapien
gggtcagaaccaaacaatacctgct

SEQ ID NO: 1474321 - DNA, 25 bp, Homo sapien
cattgtgatctgagccctgcacgct

SEQ ID NO: 1474322 - DNA, 25 bp, Homo sapien
tgcgagctgctactactgtaaggag

SEQ ID NO: 1474323 - DNA, 25 bp, Homo sapien
cgtgtctacccagacccttgtgcgg

SEQ ID NO: 1474324 - DNA, 25 bp, Homo sapien
gaatctggctcgttttaaaatcacg

SEQ ID NO: 1474325 - DNA, 25 bp, Homo sapien
gccaaagtgacttactgcggttgcg

SEQ ID NO: 1474326 - DNA, 25 bp, Homo sapien
tcggcctggcgggtgctgcaccctt

SEQ ID NO: 1474327 - DNA, 25 bp, Homo sapien
ggtgacaaataggacaagccaaatg

SEQ ID NO: 1474328 - DNA, 25 bp, Homo sapien
tcaaaggttctgtgggattcggact

SEQ ID NO: 1474329 - DNA, 25 bp, Homo sapien
tgttggagccgtgtctcaaaggttc

SEQ ID NO: 1474330 - DNA, 25 bp, Homo sapien
tctgccaagtcttcagggaatgtgg

SEQ ID NO: 1474331 - DNA, 25 bp, Homo sapien
ttcccggcaggtctgtgggccgtcc

SEQ ID NO: 1474332 - DNA, 25 bp, Homo sapien
ttgcgctctgatctaggccagccca

SEQ ID NO: 1474333 - DNA, 25 bp, Homo sapien
gccaatgggatttccacatctgcca

SEQ ID NO: 1474334 - DNA, 25 bp, Homo sapien
aaggaagttggtccgatgccagcag

SEQ ID NO: 1474335 - DNA, 25 bp, Homo sapien
gcaacaaggaagttggtccgatgcc

SEQ ID NO: 1474336 - DNA, 25 bp, Homo sapien
tttggcaacaaggaagttggtccga

SEQ ID NO: 1474337 - DNA, 25 bp, Homo sapien
caggtgaggagcatcctcctcatgt

SEQ ID NO: 1474338 - DNA, 25 bp, Homo sapien
tcctccttccgacactcccaacatg

SEQ ID NO: 1474339 - DNA, 25 bp, Homo sapien
ctgggtcctccttccgacactccca

SEQ ID NO: 1474340 - DNA, 25 bp, Homo sapien
tgggtcctccttccgacactcccaa

SEQ ID NO: 1474341 - DNA, 25 bp, Homo sapien
ggtcctccttccgacactcccaaca

SEQ ID NO: 1474342 - DNA, 25 bp, Homo sapien
ttagacaatagggattgcccacact

SEQ ID NO: 1474343 - DNA, 25 bp, Homo sapien
tagacaatagggattgcccacactt

SEQ ID NO: 1474344 - DNA, 25 bp, Homo sapien
aatagggattgcccacacttcatac

SEQ ID NO: 1474345 - DNA, 25 bp, Homo sapien
gacaatagggattgcccacacttca

SEQ ID NO: 1474346 - DNA, 25 bp, Homo sapien
aagggttattactgagttgcatggc

SEQ ID NO: 1474347 - DNA, 25 bp, Homo sapien
ttctggggccggactgcttggttca

SEQ ID NO: 1474348 - DNA, 25 bp, Homo sapien
ttgcatggcggcctggagaagcggt

SEQ ID NO: 1474349 - DNA, 25 bp, Homo sapien
gagaagcggtagtgggtagggctca

SEQ ID NO: 1474350 - DNA, 25 bp, Homo sapien
ctgccagggatagcagggctcctga

SEQ ID NO: 1474351 - DNA, 25 bp, Homo sapien
tcttcctgctgccagggatagcagg

SEQ ID NO: 1474352 - DNA, 25 bp, Homo sapien
tcaggaaatgtccaccatgtcctct

SEQ ID NO: 1474353 - DNA, 25 bp, Homo sapien
agggctcctgagaaggacaccgcat

SEQ ID NO: 1474354 - DNA, 25 bp, Homo sapien
cagggactatgctggcctcttcaaa

SEQ ID NO: 1474355 - DNA, 25 bp, Homo sapien
tctgcagggactatgctggcctctt

SEQ ID NO: 1474356 - DNA, 25 bp, Homo sapien
tgcagggactatgctggcctcttca

SEQ ID NO: 1474357 - DNA, 25 bp, Homo sapien
cttctgcagggactatgctggcctc

SEQ ID NO: 1474358 - DNA, 25 bp, Homo sapien
taggtctttccaaccatcgtttgtg

SEQ ID NO: 1474359 - DNA, 25 bp, Homo sapien
ggtctttccaaccatcgtttgtgga

SEQ ID NO: 1474360 - DNA, 25 bp, Homo sapien
tttccaaccatcgtttgtggaaaga

SEQ ID NO: 1474361 - DNA, 25 bp, Homo sapien
tctttccaaccatcgtttgtggaaa

SEQ ID NO: 1474362 - DNA, 25 bp, Homo sapien
tcatgtgagaatctgtagtgtctcc

SEQ ID NO: 1474363 - DNA, 25 bp, Homo sapien
ttatggcaaggagcacgcaagaggc

SEQ ID NO: 1474364 - DNA, 25 bp, Homo sapien
gcagcagacagggacgtcattcatg

SEQ ID NO: 1474365 - DNA, 25 bp, Homo sapien
catgggaaagcctgctctttggaga

SEQ ID NO: 1474366 - DNA, 25 bp, Homo sapien
cagagatcgtctctccactggagag

SEQ ID NO: 1474367 - DNA, 25 bp, Homo sapien
tgtcagtttgacaaccaggccctgc

SEQ ID NO: 1474368 - DNA, 25 bp, Homo sapien
ttcacaagtactgactccacggcca

SEQ ID NO: 1474369 - DNA, 25 bp, Homo sapien
tcaagatcatcgtcaataacagagc

SEQ ID NO: 1474370 - DNA, 25 bp, Homo sapien
ccagcccgctgatcatgagcacggt

SEQ ID NO: 1474371 - DNA, 25 bp, Homo sapien
gcccgctgatcatgagcacggtgct

SEQ ID NO: 1474372 - DNA, 25 bp, Homo sapien
ccgctgatcatgagcacggtgctgg

SEQ ID NO: 1474373 - DNA, 25 bp, Homo sapien
tgggcagtcggggtttaaggccatc

SEQ ID NO: 1474374 - DNA, 25 bp, Homo sapien
gatcacaatgtcaatcaagtctact

SEQ ID NO: 1474375 - DNA, 25 bp, Homo sapien
cagactgctgctaagggttggggcg

SEQ ID NO: 1474376 - DNA, 25 bp, Homo sapien
tgctgctaagggttggggcgactca

SEQ ID NO: 1474377 - DNA, 25 bp, Homo sapien
ggcgactcagggaaggacagctctc

SEQ ID NO: 1474378 - DNA, 25 bp, Homo sapien
tcagggaaggacagctctccatctt

SEQ ID NO: 1474379 - DNA, 25 bp, Homo sapien
aatggcggctctcctgaactaggga

SEQ ID NO: 1474380 - DNA, 25 bp, Homo sapien
ccttggcgtaaagtgacaatcatgc

SEQ ID NO: 1474381 - DNA, 25 bp, Homo sapien
gaaataatagggactgcatcccctg

SEQ ID NO: 1474382 - DNA, 25 bp, Homo sapien
tgagaacccagaattcagctcctgt

SEQ ID NO: 1474383 - DNA, 25 bp, Homo sapien
aagatgtccctagtataatgtccca

SEQ ID NO: 1474384 - DNA, 25 bp, Homo sapien
tcttgcacgcagcagagttaactca

SEQ ID NO: 1474385 - DNA, 25 bp, Homo sapien
gaagacgttgttcaaactcgaggct

SEQ ID NO: 1474386 - DNA, 25 bp, Homo sapien
tcccatggaccacgggaagacgttg

SEQ ID NO: 1474387 - DNA, 25 bp, Homo sapien
tcctacgattccctcggcaccgtgg

SEQ ID NO: 1474388 - DNA, 25 bp, Homo sapien
ccacggtgccgagggaatcgtagga

SEQ ID NO: 1474389 - DNA, 25 bp, Homo sapien
ccatgtgtgcagtggtgcttgccag

SEQ ID NO: 1474390 - DNA, 25 bp, Homo sapien
tgccatgtgtgcagtggtgcttgcc

SEQ ID NO: 1474391 - DNA, 25 bp, Homo sapien
tggtgcttgccagccccatatactc

SEQ ID NO: 1474392 - DNA, 25 bp, Homo sapien
gccccatatactcagccagggccat

SEQ ID NO: 1474393 - DNA, 25 bp, Homo sapien
cttccctggagacgcataaacctgg

SEQ ID NO: 1474394 - DNA, 25 bp, Homo sapien
catctgcgacaaagcttagggcccg

SEQ ID NO: 1474395 - DNA, 25 bp, Homo sapien
gagtcaccatgatctagagcacagg

SEQ ID NO: 1474396 - DNA, 25 bp, Homo sapien
caaatggccatcgtagagaattcgg

SEQ ID NO: 1474397 - DNA, 25 bp, Homo sapien
agcagctctctgacgagtctctctc

SEQ ID NO: 1474398 - DNA, 25 bp, Homo sapien
cccagcagctctctgacgagtctct

SEQ ID NO: 1474399 - DNA, 25 bp, Homo sapien
tctctgacgagtctctctccaaact

SEQ ID NO: 1474400 - DNA, 25 bp, Homo sapien
cagcagctctctgacgagtctctct

SEQ ID NO: 1474401 - DNA, 25 bp, Homo sapien
taggcgtctgacattttgtacagga

SEQ ID NO: 1474402 - DNA, 25 bp, Homo sapien
tgtacaggatgtaggcattgttgat

SEQ ID NO: 1474403 - DNA, 25 bp, Homo sapien
ctcttcacgtggtaggcgtctgaca

SEQ ID NO: 1474404 - DNA, 25 bp, Homo sapien
tgctgatggcgaaccagaacacctg

SEQ ID NO: 1474405 - DNA, 25 bp, Homo sapien
gctgtatttgtcatcgtatctgcag

SEQ ID NO: 1474406 - DNA, 25 bp, Homo sapien
aggtgagcggcaaacgcctccacgg

SEQ ID NO: 1474407 - DNA, 25 bp, Homo sapien
gtcatcgtatctgcagatgtagctc

SEQ ID NO: 1474408 - DNA, 25 bp, Homo sapien
gtagctcaggtgagcggcaaacgcc

SEQ ID NO: 1474409 - DNA, 25 bp, Homo sapien
tagctgctcccaacttaataatgag

SEQ ID NO: 1474410 - DNA, 25 bp, Homo sapien
gaagaagaacaatcagcaccaacca

SEQ ID NO: 1474411 - DNA, 25 bp, Homo sapien
taatgccactttataaatgtgccta

SEQ ID NO: 1474412 - DNA, 25 bp, Homo sapien
tatcttcgtccagcttagctgctcc

SEQ ID NO: 1474413 - DNA, 25 bp, Homo sapien
catgtcctttgcaggtccacaggag

SEQ ID NO: 1474414 - DNA, 25 bp, Homo sapien
aaggtcaaagtcaaacgggcatgtc

SEQ ID NO: 1474415 - DNA, 25 bp, Homo sapien
cacaactctcactgagggaccgtgg

SEQ ID NO: 1474416 - DNA, 25 bp, Homo sapien
gcaatacttaaatggacaaggtcaa

SEQ ID NO: 1474417 - DNA, 25 bp, Homo sapien
tgtgggaaattgagctgccaaggcc

SEQ ID NO: 1474418 - DNA, 25 bp, Homo sapien
atttcgcatggaagaaacactggcc

SEQ ID NO: 1474419 - DNA, 25 bp, Homo sapien
aacagcagcatttcgcatggaagaa

SEQ ID NO: 1474420 - DNA, 25 bp, Homo sapien
gaaacactggccagcttgtgggaaa

SEQ ID NO: 1474421 - DNA, 25 bp, Homo sapien
agtgcccaaggactgccgtctctct

SEQ ID NO: 1474422 - DNA, 25 bp, Homo sapien
catgtggcccgtgcaggtctcccat

SEQ ID NO: 1474423 - DNA, 25 bp, Homo sapien
caacgcccctcctgaggattcctgt

SEQ ID NO: 1474424 - DNA, 25 bp, Homo sapien
cgagtaggagtaaccccttgtcaca

SEQ ID NO: 1474425 - DNA, 25 bp, Homo sapien
ccacacagccgccacacttaggagc

SEQ ID NO: 1474426 - DNA, 25 bp, Homo sapien
gcttccacacagccgccacacttag

SEQ ID NO: 1474427 - DNA, 25 bp, Homo sapien
acagccgccacacttaggagcgtgg

SEQ ID NO: 1474428 - DNA, 25 bp, Homo sapien
agccgccacacttaggagcgtggcc

SEQ ID NO: 1474429 - DNA, 25 bp, Homo sapien
gaagtgtcctttgttgtaccagcag

SEQ ID NO: 1474430 - DNA, 25 bp, Homo sapien
cggagcaagccgcagcagtaaatcc

SEQ ID NO: 1474431 - DNA, 25 bp, Homo sapien
taccagcagatcaaggacatgttcc

SEQ ID NO: 1474432 - DNA, 25 bp, Homo sapien
catcttgatttggtactggccccgg

SEQ ID NO: 1474433 - DNA, 25 bp, Homo sapien
ccatcggagatgccggcggctcctc

SEQ ID NO: 1474434 - DNA, 25 bp, Homo sapien
caccatcggagatgccggcggctcc

SEQ ID NO: 1474435 - DNA, 25 bp, Homo sapien
tcggagatgccggcggctcctccgc

SEQ ID NO: 1474436 - DNA, 25 bp, Homo sapien
atcggagatgccggcggctcctccg

SEQ ID NO: 1474437 - DNA, 25 bp, Homo sapien
caaggcctttcaggtccttccactt

SEQ ID NO: 1474438 - DNA, 25 bp, Homo sapien
cactctggactcaaggcctttcagg

SEQ ID NO: 1474439 - DNA, 25 bp, Homo sapien
aggcctttcaggtccttccacttca

SEQ ID NO: 1474440 - DNA, 25 bp, Homo sapien
ttgctcacttccactctggactcaa

SEQ ID NO: 1474441 - DNA, 25 bp, Homo sapien
gctggggcttattcttcagcgcatc

SEQ ID NO: 1474442 - DNA, 25 bp, Homo sapien
ggcttattcttcagcgcatccaggc

SEQ ID NO: 1474443 - DNA, 25 bp, Homo sapien
ttcaaacagcgtcaggctggtgatg

SEQ ID NO: 1474444 - DNA, 25 bp, Homo sapien
aactcttcaaacagcgtcaggctgg

SEQ ID NO: 1474445 - DNA, 25 bp, Homo sapien
agcccgagtattcagcaagcacaga

SEQ ID NO: 1474446 - DNA, 25 bp, Homo sapien
taaggcccttgtggagaaaaaatga

SEQ ID NO: 1474447 - DNA, 25 bp, Homo sapien
tctaattttaggcaaggcagcaaat

SEQ ID NO: 1474448 - DNA, 25 bp, Homo sapien
taccaagaaacagtggcggtgacat

SEQ ID NO: 1474449 - DNA, 25 bp, Homo sapien
ggtgacattacttgcctcttaaggc

SEQ ID NO: 1474450 - DNA, 25 bp, Homo sapien
cccctacactggaagagtcatcatc

SEQ ID NO: 1474451 - DNA, 25 bp, Homo sapien
tcagcgtcttggattgaggaactcc

SEQ ID NO: 1474452 - DNA, 25 bp, Homo sapien
caatcgctcaattaggtggctttcc

SEQ ID NO: 1474453 - DNA, 25 bp, Homo sapien
ggattgaggaactccaatcgctcaa

SEQ ID NO: 1474454 - DNA, 25 bp, Homo sapien
actgcagtgtgaaagctctgacggt

SEQ ID NO: 1474455 - DNA, 25 bp, Homo sapien
ctctgacggtgtaaggtattattct

SEQ ID NO: 1474456 - DNA, 25 bp, Homo sapien
aaagctctgacggtgtaaggtatta

SEQ ID NO: 1474457 - DNA, 25 bp, Homo sapien
cagtgtgaaagctctgacggtgtaa

SEQ ID NO: 1474458 - DNA, 25 bp, Homo sapien
aaaagctgtcaaaccaagattagca

SEQ ID NO: 1474459 - DNA, 25 bp, Homo sapien
aaagctgtcaaaccaagattagcac

SEQ ID NO: 1474460 - DNA, 25 bp, Homo sapien
tcaaaagctgtcaaaccaagattag

SEQ ID NO: 1474461 - DNA, 25 bp, Homo sapien
caaaagctgtcaaaccaagattagc

SEQ ID NO: 1474462 - DNA, 25 bp, Homo sapien
tcatgtggctcctctacgtctcctg

SEQ ID NO: 1474463 - DNA, 25 bp, Homo sapien
aaaacaactgtccccgggtcatgtg

SEQ ID NO: 1474464 - DNA, 25 bp, Homo sapien
actgtccccgggtcatgtggctcct

SEQ ID NO: 1474465 - DNA, 25 bp, Homo sapien
atgtggctcctctacgtctcctggc

SEQ ID NO: 1474466 - DNA, 25 bp, Homo sapien
ggcagagatgtcctttccctgcgct

SEQ ID NO: 1474467 - DNA, 25 bp, Homo sapien
aggcagagatgtcctttccctgcgc

SEQ ID NO: 1474468 - DNA, 25 bp, Homo sapien
aaaacaaactttcacgctgctgcaa

SEQ ID NO: 1474469 - DNA, 25 bp, Homo sapien
ccctggcaatggtggaagctacgct

SEQ ID NO: 1474470 - DNA, 25 bp, Homo sapien
gagaaagttctcatgccagtcctgt

SEQ ID NO: 1474471 - DNA, 25 bp, Homo sapien
gctacgctgcttttgactgggagtt

SEQ ID NO: 1474472 - DNA, 25 bp, Homo sapien
atgactcgggcacgtgctcctgctg

SEQ ID NO: 1474473 - DNA, 25 bp, Homo sapien
tatgactcgggcacgtgctcctgct

SEQ ID NO: 1474474 - DNA, 25 bp, Homo sapien
ctatgactcgggcacgtgctcctgc

SEQ ID NO: 1474475 - DNA, 25 bp, Homo sapien
catcgatcaggggttcatgtagcac

SEQ ID NO: 1474476 - DNA, 25 bp, Homo sapien
cacgtggcaatgaatacaggatcct

SEQ ID NO: 1474477 - DNA, 25 bp, Homo sapien
tttttcctctttcgcagctcccgct

SEQ ID NO: 1474478 - DNA, 25 bp, Homo sapien
cagaggctgaatttccgctttttcc

SEQ ID NO: 1474479 - DNA, 25 bp, Homo sapien
atgtggacagctgccttccattctt

SEQ ID NO: 1474480 - DNA, 25 bp, Homo sapien
catgtgtgatgtggacagctgcctt

SEQ ID NO: 1474481 - DNA, 25 bp, Homo sapien
tgatgtggacagctgccttccattc

SEQ ID NO: 1474482 - DNA, 25 bp, Homo sapien
tgtgtgatgtggacagctgccttcc

SEQ ID NO: 1474483 - DNA, 25 bp, Homo sapien
tgaggatcttctcgaagcgggcctg

SEQ ID NO: 1474484 - DNA, 25 bp, Homo sapien
gctggaccttgtagagcccgtgcgt

SEQ ID NO: 1474485 - DNA, 25 bp, Homo sapien
gatgctggtggagatcatgtagccc

SEQ ID NO: 1474486 - DNA, 25 bp, Homo sapien
cagatgctgaggacggactcgcagt

SEQ ID NO: 1474487 - DNA, 25 bp, Homo sapien
gcagggcacgaggaatggattatag

SEQ ID NO: 1474488 - DNA, 25 bp, Homo sapien
cgaggcgtcgactccatccacagct

SEQ ID NO: 1474489 - DNA, 25 bp, Homo sapien
tggattatagggcggccgaggcgtc

SEQ ID NO: 1474490 - DNA, 25 bp, Homo sapien
tatagggcggccgaggcgtcgactc

SEQ ID NO: 1474491 - DNA, 25 bp, Homo sapien
tctgcttgggtaccaaaaggacggc

SEQ ID NO: 1474492 - DNA, 25 bp, Homo sapien
aagcctctgcttgggtaccaaaagg

SEQ ID NO: 1474493 - DNA, 25 bp, Homo sapien
ttaaagcctctgcttgggtaccaaa

SEQ ID NO: 1474494 - DNA, 25 bp, Homo sapien
gcttgggtaccaaaaggacggcaga

SEQ ID NO: 1474495 - DNA, 25 bp, Homo sapien
aggagctcaaggtcctgcaagctgg

SEQ ID NO: 1474496 - DNA, 25 bp, Homo sapien
ggagctcaaggtcctgcaagctgga

SEQ ID NO: 1474497 - DNA, 25 bp, Homo sapien
aaggagctcaaggtcctgcaagctg

SEQ ID NO: 1474498 - DNA, 25 bp, Homo sapien
ctgattttccacggatgtgctcaag

SEQ ID NO: 1474499 - DNA, 25 bp, Homo sapien
ttttccacggatgtgctcaagttct

SEQ ID NO: 1474500 - DNA, 25 bp, Homo sapien
ttctgattttccacggatgtgctca

SEQ ID NO: 1474501 - DNA, 25 bp, Homo sapien
tttccacggatgtgctcaagttctg

SEQ ID NO: 1474502 - DNA, 25 bp, Homo sapien
ccctccatgaccaggggcatgggcc

SEQ ID NO: 1474503 - DNA, 25 bp, Homo sapien
tttcttgagatagtcgggccaggcc

SEQ ID NO: 1474504 - DNA, 25 bp, Homo sapien
taaaagagcagacgagcataaaccc

SEQ ID NO: 1474505 - DNA, 25 bp, Homo sapien
tcaatcagggctactaagaaacacc

SEQ ID NO: 1474506 - DNA, 25 bp, Homo sapien
cccagaggcagttgttttgttccca

SEQ ID NO: 1474507 - DNA, 25 bp, Homo sapien
tgtgtgccctgtgtgagatgcctca

SEQ ID NO: 1474508 - DNA, 25 bp, Homo sapien
tgagcgcatatcagcacgtgcttgg

SEQ ID NO: 1474509 - DNA, 25 bp, Homo sapien
cacgtactagtgttggcagctgtca

SEQ ID NO: 1474510 - DNA, 25 bp, Homo sapien
tatccaggaggtcattggcagacag

SEQ ID NO: 1474511 - DNA, 25 bp, Homo sapien
cagtcactgtcactgaatggtccgc

SEQ ID NO: 1474512 - DNA, 25 bp, Homo sapien
gcctgggtgtcaatcggccctttgt

SEQ ID NO: 1474513 - DNA, 25 bp, Homo sapien
tcactgaatggtccgctcctatcac

SEQ ID NO: 1474514 - DNA, 25 bp, Homo sapien
tgttggctgtgtatcctgcatgaga

SEQ ID NO: 1474515 - DNA, 25 bp, Homo sapien
agagctcgagttctgtagtcaggca

SEQ ID NO: 1474516 - DNA, 25 bp, Homo sapien
atcccggccgggcactatgctgagc

SEQ ID NO: 1474517 - DNA, 25 bp, Homo sapien
gtccccgagagtactttgcacgaag

SEQ ID NO: 1474518 - DNA, 25 bp, Homo sapien
aatcgcttggctgcagatcccggcc

SEQ ID NO: 1474519 - DNA, 25 bp, Homo sapien
ggatagaaaacaaagccctgtgtgg

SEQ ID NO: 1474520 - DNA, 25 bp, Homo sapien
tccaagtggacataagcaacagccc

SEQ ID NO: 1474521 - DNA, 25 bp, Homo sapien
tactaattcagatgccagaccagtg

SEQ ID NO: 1474522 - DNA, 25 bp, Homo sapien
tccaggtgctcaccctaaaggctgg

SEQ ID NO: 1474523 - DNA, 25 bp, Homo sapien
aggtactatccatgccaagcccagg

SEQ ID NO: 1474524 - DNA, 25 bp, Homo sapien
gatgcaaggtactatccatgccaag

SEQ ID NO: 1474525 - DNA, 25 bp, Homo sapien
catgccaagcccaggttatggcttt

SEQ ID NO: 1474526 - DNA, 25 bp, Homo sapien
aaggagatgcaaggtactatccatg

SEQ ID NO: 1474527 - DNA, 25 bp, Homo sapien
catgctgagctatatactgtttgca

SEQ ID NO: 1474528 - DNA, 25 bp, Homo sapien
accatgctgagctatatactgtttg

SEQ ID NO: 1474529 - DNA, 25 bp, Homo sapien
caccatgctgagctatatactgttt

SEQ ID NO: 1474530 - DNA, 25 bp, Homo sapien
ccatgctgagctatatactgtttgc

SEQ ID NO: 1474531 - DNA, 25 bp, Homo sapien
tagaaaagttcagcccagcagcatg

SEQ ID NO: 1474532 - DNA, 25 bp, Homo sapien
cacagtgcttggctctccggcctgg

SEQ ID NO: 1474533 - DNA, 25 bp, Homo sapien
agaggactgtcaggacttcccacca

SEQ ID NO: 1474534 - DNA, 25 bp, Homo sapien
cacaatggagatacaagccccacag

SEQ ID NO: 1474535 - DNA, 25 bp, Homo sapien
tcaaaacatagccatgggccagcat

SEQ ID NO: 1474536 - DNA, 25 bp, Homo sapien
gggtgaagatctcgagcatcagtgc

SEQ ID NO: 1474537 - DNA, 25 bp, Homo sapien
tccttaagggcctgcactgtcacat

SEQ ID NO: 1474538 - DNA, 25 bp, Homo sapien
gcactgtcacatcggtaagattcaa

SEQ ID NO: 1474539 - DNA, 25 bp, Homo sapien
tggatgcagagtgctccaatgagct

SEQ ID NO: 1474540 - DNA, 25 bp, Homo sapien
gctggatgcagagtgctccaatgag

SEQ ID NO: 1474541 - DNA, 25 bp, Homo sapien
tgcagagtgctccaatgagctcggg

SEQ ID NO: 1474542 - DNA, 25 bp, Homo sapien
gatgcagagtgctccaatgagctcg

SEQ ID NO: 1474543 - DNA, 25 bp, Homo sapien
ctcccacctgatacctaacatttac

SEQ ID NO: 1474544 - DNA, 25 bp, Homo sapien
ctacgcagatggtcaggacaggcat

SEQ ID NO: 1474545 - DNA, 25 bp, Homo sapien
agccctacgcagatggtcaggacag

SEQ ID NO: 1474546 - DNA, 25 bp, Homo sapien
aaggcacagccctacgcagatggtc

SEQ ID NO: 1474547 - DNA, 25 bp, Homo sapien
cacagccctacgcagatggtcagga

SEQ ID NO: 1474548 - DNA, 25 bp, Homo sapien
acagacaaagcacactggacacagg

SEQ ID NO: 1474549 - DNA, 25 bp, Homo sapien
gcacactggacacaggtggcgctca

SEQ ID NO: 1474550 - DNA, 25 bp, Homo sapien
tgctgtggggcacagacaaagcaca

SEQ ID NO: 1474551 - DNA, 25 bp, Homo sapien
tggggcacagacaaagcacactgga

SEQ ID NO: 1474552 - DNA, 25 bp, Homo sapien
tcatccccgttgaggtggctcttct

SEQ ID NO: 1474553 - DNA, 25 bp, Homo sapien
ccagggagaagcgtaaatagcaaac

SEQ ID NO: 1474554 - DNA, 25 bp, Homo sapien
tccgagaaacgacccttgagcagat

SEQ ID NO: 1474555 - DNA, 25 bp, Homo sapien
gcactaaggaaagatccgagaaacg

SEQ ID NO: 1474556 - DNA, 25 bp, Homo sapien
cctggcagagatgagtgcagtgacc

SEQ ID NO: 1474557 - DNA, 25 bp, Homo sapien
taaccactctgggtgattccacttg

SEQ ID NO: 1474558 - DNA, 25 bp, Homo sapien
cgcctatctgtagtctccgctgaga

SEQ ID NO: 1474559 - DNA, 25 bp, Homo sapien
tactcctaaggtgacagattccatt

SEQ ID NO: 1474560 - DNA, 25 bp, Homo sapien
ggccctcatcaacaccggttgcgcg

SEQ ID NO: 1474561 - DNA, 25 bp, Homo sapien
gccacaggaaaagccgcatcatgcc

SEQ ID NO: 1474562 - DNA, 25 bp, Homo sapien
tcatcaacaccggttgcgcgcactt

SEQ ID NO: 1474563 - DNA, 25 bp, Homo sapien
tgaacaataatcagagaaggccaca

SEQ ID NO: 1474564 - DNA, 25 bp, Homo sapien
ccggtatcctcgaagcgcgggggcg

SEQ ID NO: 1474565 - DNA, 25 bp, Homo sapien
gccggtatcctcgaagcgcgggggc

SEQ ID NO: 1474566 - DNA, 25 bp, Homo sapien
cgccggtatcctcgaagcgcggggg

SEQ ID NO: 1474567 - DNA, 25 bp, Homo sapien
agatgtgcaggctctcgtagcgcgc

SEQ ID NO: 1474568 - DNA, 25 bp, Homo sapien
aacacgtcgtccgagatgtgcaggc

SEQ ID NO: 1474569 - DNA, 25 bp, Homo sapien
cgtcgtccgagatgtgcaggctctc

SEQ ID NO: 1474570 - DNA, 25 bp, Homo sapien
ggactcgccgaacacgtcgtccgag

SEQ ID NO: 1474571 - DNA, 25 bp, Homo sapien
caccagcgcagcccgcagcacagcg

SEQ ID NO: 1474572 - DNA, 25 bp, Homo sapien
gtgcctcccagccgcacacgccggg

SEQ ID NO: 1474573 - DNA, 25 bp, Homo sapien
cagcgcagcccgcagcacagcgccc

SEQ ID NO: 1474574 - DNA, 25 bp, Homo sapien
gcctcccagccgcacacgccgggcc

SEQ ID NO: 1474575 - DNA, 25 bp, Homo sapien
gtcactgccagctgcgccgcatgct

SEQ ID NO: 1474576 - DNA, 25 bp, Homo sapien
tggttctgaaccaggcgccgccgaa

SEQ ID NO: 1474577 - DNA, 25 bp, Homo sapien
cccgcggacggagtgcgggccgatc

SEQ ID NO: 1474578 - DNA, 25 bp, Homo sapien
cgccgaaacgctccaggtaggcggc

SEQ ID NO: 1474579 - DNA, 25 bp, Homo sapien
gctgccagccacacgcgcctagagt

SEQ ID NO: 1474580 - DNA, 25 bp, Homo sapien
gcgcctagagtcctcttctatcatc

SEQ ID NO: 1474581 - DNA, 25 bp, Homo sapien
agccacacgcgcctagagtcctctt

SEQ ID NO: 1474582 - DNA, 25 bp, Homo sapien
tcagacgagggttttgaagtcctca

SEQ ID NO: 1474583 - DNA, 25 bp, Homo sapien
gttctcatggcctgacttagagctg

SEQ ID NO: 1474584 - DNA, 25 bp, Homo sapien
acttgttctcatggcctgacttaga

SEQ ID NO: 1474585 - DNA, 25 bp, Homo sapien
gaacttgttctcatggcctgactta

SEQ ID NO: 1474586 - DNA, 25 bp, Homo sapien
ttgttctcatggcctgacttagagc

SEQ ID NO: 1474587 - DNA, 25 bp, Homo sapien
tagcacccaaaagatcttgaaacgc

SEQ ID NO: 1474588 - DNA, 25 bp, Homo sapien
gataccatgccatactgctcagcca

SEQ ID NO: 1474589 - DNA, 25 bp, Homo sapien
ggttcagtgtatgtgatagcaccca

SEQ ID NO: 1474590 - DNA, 25 bp, Homo sapien
gccattgggcaaccgatgaggaaga

SEQ ID NO: 1474591 - DNA, 25 bp, Homo sapien
gaccataatggtgggagtctcactg

SEQ ID NO: 1474592 - DNA, 25 bp, Homo sapien
catcacaaggcacgtaatatctggt

SEQ ID NO: 1474593 - DNA, 25 bp, Homo sapien
gagatgtagcagctggctcttgacc

SEQ ID NO: 1474594 - DNA, 25 bp, Homo sapien
cactgatgctcattagggtctccaa

SEQ ID NO: 1474595 - DNA, 25 bp, Homo sapien
tctggccacccatccggttttataa

SEQ ID NO: 1474596 - DNA, 25 bp, Homo sapien
tccatctacacttccaagaccagat

SEQ ID NO: 1474597 - DNA, 25 bp, Homo sapien
caagttgtgaatcccgtaggctcca

SEQ ID NO: 1474598 - DNA, 25 bp, Homo sapien
tccatccatccagttttatctctgg

SEQ ID NO: 1474599 - DNA, 25 bp, Homo sapien
gatgtactcttggataactgtcacc

SEQ ID NO: 1474600 - DNA, 25 bp, Homo sapien
ctgctggttcatagtggaggattcc

SEQ ID NO: 1474601 - DNA, 25 bp, Homo sapien
tagcaacaacaacgcagaaccctgc

SEQ ID NO: 1474602 - DNA, 25 bp, Homo sapien
tgatggaggccagtctagaagccct

SEQ ID NO: 1474603 - DNA, 25 bp, Homo sapien
agtgttgatttttggcgccctcttc

SEQ ID NO: 1474604 - DNA, 25 bp, Homo sapien
cagtaatctctagatttgtgcggca

SEQ ID NO: 1474605 - DNA, 25 bp, Homo sapien
gtgttgatttttggcgccctcttca

SEQ ID NO: 1474606 - DNA, 25 bp, Homo sapien
ggaggggctcccagtaatctctaga

SEQ ID NO: 1474607 - DNA, 25 bp, Homo sapien
tcgagaggtgtggacaacagtttcc

SEQ ID NO: 1474608 - DNA, 25 bp, Homo sapien
gaggtgtggacaacagtttccgaca

SEQ ID NO: 1474609 - DNA, 25 bp, Homo sapien
ctatcagaagaatcgagaggtgtgg

SEQ ID NO: 1474610 - DNA, 25 bp, Homo sapien
ggacaacagtttccgacacatttcc

SEQ ID NO: 1474611 - DNA, 25 bp, Homo sapien
gcatcgtccagcacatagctgtcta

SEQ ID NO: 1474612 - DNA, 25 bp, Homo sapien
gagggagatgcttcagcatcgtcca

SEQ ID NO: 1474613 - DNA, 25 bp, Homo sapien
ggtcctagaattggatcccagacac

SEQ ID NO: 1474614 - DNA, 25 bp, Homo sapien
tctcgaaacgagatgctgatggcag

SEQ ID NO: 1474615 - DNA, 25 bp, Homo sapien
tgggtgccagacactgtctgccagg

SEQ ID NO: 1474616 - DNA, 25 bp, Homo sapien
tgccaggccatggagcagatggtaa

SEQ ID NO: 1474617 - DNA, 25 bp, Homo sapien
caggccatggagcagatggtaaggg

SEQ ID NO: 1474618 - DNA, 25 bp, Homo sapien
ttccactttaccactctgggtgcca

SEQ ID NO: 1474619 - DNA, 25 bp, Homo sapien
caggggtgagcgtggagattttgca

SEQ ID NO: 1474620 - DNA, 25 bp, Homo sapien
tgcagctcacgtaggaagtccagac

SEQ ID NO: 1474621 - DNA, 25 bp, Homo sapien
tgggcctgttacaggggtgagcgtg

SEQ ID NO: 1474622 - DNA, 25 bp, Homo sapien
ttgcagctcacgtaggaagtccaga

SEQ ID NO: 1474623 - DNA, 25 bp, Homo sapien
tggaggcctcctccaacctgcacct

SEQ ID NO: 1474624 - DNA, 25 bp, Homo sapien
tggtttggaggcctcctccaacctg

SEQ ID NO: 1474625 - DNA, 25 bp, Homo sapien
ttggaggcctcctccaacctgcacc

SEQ ID NO: 1474626 - DNA, 25 bp, Homo sapien
aggcctcctccaacctgcacctcac

SEQ ID NO: 1474627 - DNA, 25 bp, Homo sapien
gctgtgccaaattgagtggcagctc

SEQ ID NO: 1474628 - DNA, 25 bp, Homo sapien
gccagctgcctggactaagctggct

SEQ ID NO: 1474629 - DNA, 25 bp, Homo sapien
agctgtgccaaattgagtggcagct

SEQ ID NO: 1474630 - DNA, 25 bp, Homo sapien
aaagaacacaaaagtcatatgactt

SEQ ID NO: 1474631 - DNA, 25 bp, Homo sapien
cagataaaagtatgataagtagatt

SEQ ID NO: 1474632 - DNA, 25 bp, Homo sapien
atgacttatggtacatatcatgagc

SEQ ID NO: 1474633 - DNA, 25 bp, Homo sapien
ggtacatatcatgagcatatctagt

SEQ ID NO: 1474634 - DNA, 25 bp, Homo sapien
ggtgacctgcacgttagaatagtcc

SEQ ID NO: 1474635 - DNA, 25 bp, Homo sapien
tcccttttgcccagtgggtgacctg

SEQ ID NO: 1474636 - DNA, 25 bp, Homo sapien
tttgcccagtgggtgacctgcacgt

SEQ ID NO: 1474637 - DNA, 25 bp, Homo sapien
cgttagaatagtccctgttcactcc

SEQ ID NO: 1474638 - DNA, 25 bp, Homo sapien
tctgtccaactaaccagcttcaatt

SEQ ID NO: 1474639 - DNA, 25 bp, Homo sapien
gcacaggcaattcactcaatttcag

SEQ ID NO: 1474640 - DNA, 25 bp, Homo sapien
agggctcagcacaggcaattcactc

SEQ ID NO: 1474641 - DNA, 25 bp, Homo sapien
gggttgtccatctgtccaactaacc

SEQ ID NO: 1474642 - DNA, 25 bp, Homo sapien
ctttcgtgtatgactctcatgcaca

SEQ ID NO: 1474643 - DNA, 25 bp, Homo sapien
actctcatgcacaatggtgaaactt

SEQ ID NO: 1474644 - DNA, 25 bp, Homo sapien
ctcatgcacaatggtgaaacttccc

SEQ ID NO: 1474645 - DNA, 25 bp, Homo sapien
tatgactctcatgcacaatggtgaa

SEQ ID NO: 1474646 - DNA, 25 bp, Homo sapien
tgtcaactgatgagtggtgatgccc

SEQ ID NO: 1474647 - DNA, 25 bp, Homo sapien
ggtgatgcccttcgctacacagaag

SEQ ID NO: 1474648 - DNA, 25 bp, Homo sapien
tcttctctgttgttcactcagggtc

SEQ ID NO: 1474649 - DNA, 25 bp, Homo sapien
ctgtctggctttgtcaactgatgag

SEQ ID NO: 1474650 - DNA, 25 bp, Homo sapien
aggcctgcattcaagatcaagttaa

SEQ ID NO: 1474651 - DNA, 25 bp, Homo sapien
tgcattcaagatcaagttaacattg

SEQ ID NO: 1474652 - DNA, 25 bp, Homo sapien
agatcaagttaacattgagcagaga

SEQ ID NO: 1474653 - DNA, 25 bp, Homo sapien
acattgagcagagactgccttccac

SEQ ID NO: 1474654 - DNA, 25 bp, Homo sapien
ttgtgtggtttgaaggcctgaaagc

SEQ ID NO: 1474655 - DNA, 25 bp, Homo sapien
gagacctggtggtgtagattccatt

SEQ ID NO: 1474656 - DNA, 25 bp, Homo sapien
agagacctggtggtgtagattccat

SEQ ID NO: 1474657 - DNA, 25 bp, Homo sapien
tttacagtttcagaatcagatggac

SEQ ID NO: 1474658 - DNA, 25 bp, Homo sapien
cagctattcagctcttccacttggc

SEQ ID NO: 1474659 - DNA, 25 bp, Homo sapien
tgtcatgaaatgaacctcagcttgc

SEQ ID NO: 1474660 - DNA, 25 bp, Homo sapien
tcacttgagaggcagtgtcatgtca

SEQ ID NO: 1474661 - DNA, 25 bp, Homo sapien
gagtcaatcagggaggcagaatcac

SEQ ID NO: 1474662 - DNA, 25 bp, Homo sapien
gattgcaccttgcacaattgtggga

SEQ ID NO: 1474663 - DNA, 25 bp, Homo sapien
tacctggaattagtgtcagacccca

SEQ ID NO: 1474664 - DNA, 25 bp, Homo sapien
gcttagccaccataccagttagagt

SEQ ID NO: 1474665 - DNA, 25 bp, Homo sapien
ttcaatatattgatgaccttcttct

SEQ ID NO: 1474666 - DNA, 25 bp, Homo sapien
tattcaatatattgatgaccttctt

SEQ ID NO: 1474667 - DNA, 25 bp, Homo sapien
attcaatatattgatgaccttcttc

SEQ ID NO: 1474668 - DNA, 25 bp, Homo sapien
aatccaaaaaaatcataaatcacac

SEQ ID NO: 1474669 - DNA, 25 bp, Homo sapien
ttttacataatccaaaaaaatcata

SEQ ID NO: 1474670 - DNA, 25 bp, Homo sapien
tcatggttttttacataatccaaaa

SEQ ID NO: 1474671 - DNA, 25 bp, Homo sapien
ataatccaaaaaaatcataaatcac

SEQ ID NO: 1474672 - DNA, 25 bp, Homo sapien
ttcccagtgttaaggatatctatga

SEQ ID NO: 1474673 - DNA, 25 bp, Homo sapien
tgttaaggatatctatgaccatttg

SEQ ID NO: 1474674 - DNA, 25 bp, Homo sapien
gtcatgagttccctggtccagatag

SEQ ID NO: 1474675 - DNA, 25 bp, Homo sapien
ggttggtcatgagttccctggtcca

SEQ ID NO: 1474676 - DNA, 25 bp, Homo sapien
ctcgccttgtgcgagtctccctggg

SEQ ID NO: 1474677 - DNA, 25 bp, Homo sapien
gccttgtgcgagtctccctgggtcc

SEQ ID NO: 1474678 - DNA, 25 bp, Homo sapien
cgccttgtgcgagtctccctgggtc

SEQ ID NO: 1474679 - DNA, 25 bp, Homo sapien
tcgccttgtgcgagtctccctgggt

SEQ ID NO: 1474680 - DNA, 25 bp, Homo sapien
caaatccaccctggaatgaggcaga

SEQ ID NO: 1474681 - DNA, 25 bp, Homo sapien
gaaaggcacaggatacaccatagag

SEQ ID NO: 1474682 - DNA, 25 bp, Homo sapien
tggaatggcatgctagactgactct

SEQ ID NO: 1474683 - DNA, 25 bp, Homo sapien
gatgttgaaatagcccagttggttc

SEQ ID NO: 1474684 - DNA, 25 bp, Homo sapien
tctgctgtcccattcctttttacag

SEQ ID NO: 1474685 - DNA, 25 bp, Homo sapien
gctgtcccattcctttttacaggcc

SEQ ID NO: 1474686 - DNA, 25 bp, Homo sapien
cctctgctgtcccattcctttttac

SEQ ID NO: 1474687 - DNA, 25 bp, Homo sapien
tgtcccattcctttttacaggccat

SEQ ID NO: 1474688 - DNA, 25 bp, Homo sapien
ttcccagtaacggagcccagtggag

SEQ ID NO: 1474689 - DNA, 25 bp, Homo sapien
ttcttccctatgagttcccagtaac

SEQ ID NO: 1474690 - DNA, 25 bp, Homo sapien
tccctatgagttcccagtaacggag

SEQ ID NO: 1474691 - DNA, 25 bp, Homo sapien
tatgagttcccagtaacggagccca

SEQ ID NO: 1474692 - DNA, 25 bp, Homo sapien
cacggtgatacgtccaacctggaaa

SEQ ID NO: 1474693 - DNA, 25 bp, Homo sapien
tgaccgcgcacagggaggtgaagaa

SEQ ID NO: 1474694 - DNA, 25 bp, Homo sapien
ggtgaagaatgcgaccacggtgata

SEQ ID NO: 1474695 - DNA, 25 bp, Homo sapien
aatgcgaccacggtgatacgtccaa

SEQ ID NO: 1474696 - DNA, 25 bp, Homo sapien
catgcataacgaagcagagcagtct

SEQ ID NO: 1474697 - DNA, 25 bp, Homo sapien
aaggcactggaaaagcgttgtagga

SEQ ID NO: 1474698 - DNA, 25 bp, Homo sapien
agcgttgtaggacaatttttcccag

SEQ ID NO: 1474699 - DNA, 25 bp, Homo sapien
ctggccatgcataacgaagcagagc

SEQ ID NO: 1474700 - DNA, 25 bp, Homo sapien
tgccgtcgttcattggccgcggcgc

SEQ ID NO: 1474701 - DNA, 25 bp, Homo sapien
gcgttttctcgcttggatcttggca

SEQ ID NO: 1474702 - DNA, 25 bp, Homo sapien
caaggacgagttcatgaaggtgcgc

SEQ ID NO: 1474703 - DNA, 25 bp, Homo sapien
ggacacgctctgcttcgacaaggac

SEQ ID NO: 1474704 - DNA, 25 bp, Homo sapien
gagacctcgctgcacttcgcaatga

SEQ ID NO: 1474705 - DNA, 25 bp, Homo sapien
tgcagtgcagtcagattgccagtcc

SEQ ID NO: 1474706 - DNA, 25 bp, Homo sapien
tgccagtccccttgtcggaaagaag

SEQ ID NO: 1474707 - DNA, 25 bp, Homo sapien
tgagctgcatgtcaaagccactgtt

SEQ ID NO: 1474708 - DNA, 25 bp, Homo sapien
tgaagatgttaaccggagactggag

SEQ ID NO: 1474709 - DNA, 25 bp, Homo sapien
atttcatgaggtatctccccgcccg

SEQ ID NO: 1474710 - DNA, 25 bp, Homo sapien
tgggaatcccgatgcatttcatgag

SEQ ID NO: 1474711 - DNA, 25 bp, Homo sapien
cccgcccgtcgtcttgattcttgaa

SEQ ID NO: 1474712 - DNA, 25 bp, Homo sapien
tcctgttgagagtagaatgacattc

SEQ ID NO: 1474713 - DNA, 25 bp, Homo sapien
cagatttcagcagaggttccctctc

SEQ ID NO: 1474714 - DNA, 25 bp, Homo sapien
aatatgtctagagaccttccccagg

SEQ ID NO: 1474715 - DNA, 25 bp, Homo sapien
ccaagtgactcaggcagttgtaatc

SEQ ID NO: 1474716 - DNA, 25 bp, Homo sapien
gaacccgaagggcaagtaccatgga

SEQ ID NO: 1474717 - DNA, 25 bp, Homo sapien
taggaagcgctggtacagacagccg

SEQ ID NO: 1474718 - DNA, 25 bp, Homo sapien
tcacagattagaagagcaccaagca

SEQ ID NO: 1474719 - DNA, 25 bp, Homo sapien
ggatcataatcaggtgctgctcacc

SEQ ID NO: 1474720 - DNA, 25 bp, Homo sapien
tattccagcttcagagcggacacaa

SEQ ID NO: 1474721 - DNA, 25 bp, Homo sapien
gcggacacaaggataagctcaaaca

SEQ ID NO: 1474722 - DNA, 25 bp, Homo sapien
gctcaaacaagcaataattcagcag

SEQ ID NO: 1474723 - DNA, 25 bp, Homo sapien
cctcctatgtggacagtgctctgaa

SEQ ID NO: 1474724 - DNA, 25 bp, Homo sapien
tggctcgcgtgatcccagagatgct

SEQ ID NO: 1474725 - DNA, 25 bp, Homo sapien
gcagttggccctagatgttgagtac

SEQ ID NO: 1474726 - DNA, 25 bp, Homo sapien
gcgacgacgacaaaatcaggctgca

SEQ ID NO: 1474727 - DNA, 25 bp, Homo sapien
tcccagtggtggcatgagcgacgac

SEQ ID NO: 1474728 - DNA, 25 bp, Homo sapien
aagagaagagttggacttccaggct

SEQ ID NO: 1474729 - DNA, 25 bp, Homo sapien
tctttgcccaaaagaacacaaaagc

SEQ ID NO: 1474730 - DNA, 25 bp, Homo sapien
caaccgtctgtagcaaagaagtgct

SEQ ID NO: 1474731 - DNA, 25 bp, Homo sapien
gcgtcttctctcagcgtatttgggt

SEQ ID NO: 1474732 - DNA, 25 bp, Homo sapien
gacggaagaagtcccatctgcctgg

SEQ ID NO: 1474733 - DNA, 25 bp, Homo sapien
caaaggactgctaagtactggctca

SEQ ID NO: 1474734 - DNA, 25 bp, Homo sapien
tactggctcagacctcccatggaaa

SEQ ID NO: 1474735 - DNA, 25 bp, Homo sapien
gatggccaccactgcttaccaatgg

SEQ ID NO: 1474736 - DNA, 25 bp, Homo sapien
gcttgcatctttcacgtattgttca

SEQ ID NO: 1474737 - DNA, 25 bp, Homo sapien
gctatggttccgcattcaaacagaa

SEQ ID NO: 1474738 - DNA, 25 bp, Homo sapien
taaggtattacagacactacacgga

SEQ ID NO: 1474739 - DNA, 25 bp, Homo sapien
aacagaaattcaggtgcttgcatct

SEQ ID NO: 1474740 - DNA, 25 bp, Homo sapien
tctttttggaacagtagtcccgcgc

SEQ ID NO: 1474741 - DNA, 25 bp, Homo sapien
caaacaagctggtcggttggaattc

SEQ ID NO: 1474742 - DNA, 25 bp, Homo sapien
aaactgggaggtgcatttgtgccgc

SEQ ID NO: 1474743 - DNA, 25 bp, Homo sapien
catgcagcacacttagaccaaggag

SEQ ID NO: 1474744 - DNA, 25 bp, Homo sapien
gcctttgcctcaaaggccaggggca

SEQ ID NO: 1474745 - DNA, 25 bp, Homo sapien
cctttgcctcaaaggccaggggcag

SEQ ID NO: 1474746 - DNA, 25 bp, Homo sapien
ctttgcctcaaaggccaggggcaga

SEQ ID NO: 1474747 - DNA, 25 bp, Homo sapien
tttgcctcaaaggccaggggcagag

SEQ ID NO: 1474748 - DNA, 25 bp, Homo sapien
gccaggcactgtgttctggggccct

SEQ ID NO: 1474749 - DNA, 25 bp, Homo sapien
ggcactgtgttctggggccctggcc

SEQ ID NO: 1474750 - DNA, 25 bp, Homo sapien
ttgccaggcactgtgttctggggcc

SEQ ID NO: 1474751 - DNA, 25 bp, Homo sapien
gccttgccaggcactgtgttctggg

SEQ ID NO: 1474752 - DNA, 25 bp, Homo sapien
cagtggcgctttgatcatacacagc

SEQ ID NO: 1474753 - DNA, 25 bp, Homo sapien
tctcatccgcttcaagctcaaaaaa

SEQ ID NO: 1474754 - DNA, 25 bp, Homo sapien
cacagcaaacaggaatgggcggttc

SEQ ID NO: 1474755 - DNA, 25 bp, Homo sapien
gcttgttaagctgttgggtagactc

SEQ ID NO: 1474756 - DNA, 25 bp, Homo sapien
tcagcctgggcgagcaggtcctgca

SEQ ID NO: 1474757 - DNA, 25 bp, Homo sapien
caatttttgcaggttcagctcggtg

SEQ ID NO: 1474758 - DNA, 25 bp, Homo sapien
taagatccttgcagcaccagttggg

SEQ ID NO: 1474759 - DNA, 25 bp, Homo sapien
tcggtgtgcagaatggcgggcagct

SEQ ID NO: 1474760 - DNA, 25 bp, Homo sapien
tcaagggacgctccctgagaaggcc

SEQ ID NO: 1474761 - DNA, 25 bp, Homo sapien
ccagcaagggcgttctggagtcaag

SEQ ID NO: 1474762 - DNA, 25 bp, Homo sapien
caagaagctcttggatgtcacaggt

SEQ ID NO: 1474763 - DNA, 25 bp, Homo sapien
gcagcaggaaagaggagctaacaac

SEQ ID NO: 1474764 - DNA, 25 bp, Homo sapien
agtgtggctcccacattccagggga

SEQ ID NO: 1474765 - DNA, 25 bp, Homo sapien
gacagtgtggctcccacattccagg

SEQ ID NO: 1474766 - DNA, 25 bp, Homo sapien
caggacagtgtggctcccacattcc

SEQ ID NO: 1474767 - DNA, 25 bp, Homo sapien
cattccaggggagaccgggaggctc

SEQ ID NO: 1474768 - DNA, 25 bp, Homo sapien
tgagtcaccgagaagttgtcctgga

SEQ ID NO: 1474769 - DNA, 25 bp, Homo sapien
ggaaggtgcccatgccagagagcat

SEQ ID NO: 1474770 - DNA, 25 bp, Homo sapien
tcagtgaagggcacttgagtcaccg

SEQ ID NO: 1474771 - DNA, 25 bp, Homo sapien
tgaggtgctgttgtccacccagaac

SEQ ID NO: 1474772 - DNA, 25 bp, Homo sapien
cagggagggaagagtcacccaagac

SEQ ID NO: 1474773 - DNA, 25 bp, Homo sapien
gagacagggagggaagagtcaccca

SEQ ID NO: 1474774 - DNA, 25 bp, Homo sapien
agacagggagggaagagtcacccaa

SEQ ID NO: 1474775 - DNA, 25 bp, Homo sapien
ctgaaatccagacaggagacaggga

SEQ ID NO: 1474776 - DNA, 25 bp, Homo sapien
tccaaggctcccagatagagagagg

SEQ ID NO: 1474777 - DNA, 25 bp, Homo sapien
ccagccgggaggtgcagttcttgtc

SEQ ID NO: 1474778 - DNA, 25 bp, Homo sapien
tgtgcatgccatatatacggaagcc

SEQ ID NO: 1474779 - DNA, 25 bp, Homo sapien
ttttgcagcgactagcaccagctgg

SEQ ID NO: 1474780 - DNA, 25 bp, Homo sapien
cagactggggtgctcgcttccgcat

SEQ ID NO: 1474781 - DNA, 25 bp, Homo sapien
ctcagactggggtgctcgcttccgc

SEQ ID NO: 1474782 - DNA, 25 bp, Homo sapien
tcagactggggtgctcgcttccgca

SEQ ID NO: 1474783 - DNA, 25 bp, Homo sapien
cggccgggtcacgatgccctattta

SEQ ID NO: 1474784 - DNA, 25 bp, Homo sapien
gatgccagaagcgacactcacgctg

SEQ ID NO: 1474785 - DNA, 25 bp, Homo sapien
tgtagtacccagaacaacggcagct

SEQ ID NO: 1474786 - DNA, 25 bp, Homo sapien
ggttacatcacttggccagaccaca

SEQ ID NO: 1474787 - DNA, 25 bp, Homo sapien
ggcagttctgtaattcaaggcacca

SEQ ID NO: 1474788 - DNA, 25 bp, Homo sapien
gacactactacttcgagggttagga

SEQ ID NO: 1474789 - DNA, 25 bp, Homo sapien
cagtacctatatctgtggagggccc

SEQ ID NO: 1474790 - DNA, 25 bp, Homo sapien
tagctgcagtagtgaatagacccca

SEQ ID NO: 1474791 - DNA, 25 bp, Homo sapien
taggttccccagatttgtggaacac

SEQ ID NO: 1474792 - DNA, 25 bp, Homo sapien
tctctgcctcgggaaccatgagggt

SEQ ID NO: 1474793 - DNA, 25 bp, Homo sapien
gcagggtgcttgagagattcccaag

SEQ ID NO: 1474794 - DNA, 25 bp, Homo sapien
cacatgcagggtgcttgagagattc

SEQ ID NO: 1474795 - DNA, 25 bp, Homo sapien
aatgcgagccgtaagtgtccagcga

SEQ ID NO: 1474796 - DNA, 25 bp, Homo sapien
cccatgggcctgtgcggttagctaa

SEQ ID NO: 1474797 - DNA, 25 bp, Homo sapien
tgagcgcatgagaaacagcctggtt

SEQ ID NO: 1474798 - DNA, 25 bp, Homo sapien
tcaggtatgcggatgaggagctcca

SEQ ID NO: 1474799 - DNA, 25 bp, Homo sapien
tgcttctgcactctgcggatactgg

SEQ ID NO: 1474800 - DNA, 25 bp, Homo sapien
gcttctgcactctgcggatactgga

SEQ ID NO: 1474801 - DNA, 25 bp, Homo sapien
ctgcttctgcactctgcggatactg

SEQ ID NO: 1474802 - DNA, 25 bp, Homo sapien
tgctggcagataaaactggctcggt

SEQ ID NO: 1474803 - DNA, 25 bp, Homo sapien
gataaaactggctcggtcactgctc

SEQ ID NO: 1474804 - DNA, 25 bp, Homo sapien
aaactggctcggtcactgctccaaa

SEQ ID NO: 1474805 - DNA, 25 bp, Homo sapien
tcaacagccatttgctggcagataa

SEQ ID NO: 1474806 - DNA, 25 bp, Homo sapien
ttcaagtttcatcgtgttgtggcat

SEQ ID NO: 1474807 - DNA, 25 bp, Homo sapien
ttcaacaagccaacagaaactatgt

SEQ ID NO: 1474808 - DNA, 25 bp, Homo sapien
gaatttgtctattccaggtatctga

SEQ ID NO: 1474809 - DNA, 25 bp, Homo sapien
cactgtacagatatcccacgttttg

SEQ ID NO: 1474810 - DNA, 25 bp, Homo sapien
tcaaaatcaaatgacgatatacgtg

SEQ ID NO: 1474811 - DNA, 25 bp, Homo sapien
cagtgaatggttttggtagtcatca

SEQ ID NO: 1474812 - DNA, 25 bp, Homo sapien
tgggctctttattccattccgctgg

SEQ ID NO: 1474813 - DNA, 25 bp, Homo sapien
tatacggtgttcagtaaggatccaa

SEQ ID NO: 1474814 - DNA, 25 bp, Homo sapien
gaatctcagcagtccctctgtggag

SEQ ID NO: 1474815 - DNA, 25 bp, Homo sapien
cacatgtgggatccaacaggaaccc

SEQ ID NO: 1474816 - DNA, 25 bp, Homo sapien
catttagaactccagaaggcttgcg

SEQ ID NO: 1474817 - DNA, 25 bp, Homo sapien
tctgcagcatagagacccacagagg

SEQ ID NO: 1474818 - DNA, 25 bp, Homo sapien
cagtaacagacttaggtgacgcaca

SEQ ID NO: 1474819 - DNA, 25 bp, Homo sapien
caaaacgttgaatcgatgtcggcca

SEQ ID NO: 1474820 - DNA, 25 bp, Homo sapien
tgtctccaaggaatagggcaccagg

SEQ ID NO: 1474821 - DNA, 25 bp, Homo sapien
tagagtcacacaactatcgagagtg

SEQ ID NO: 1474822 - DNA, 25 bp, Homo sapien
ctcctggtttgagaaactccctcat

SEQ ID NO: 1474823 - DNA, 25 bp, Homo sapien
gactaagttacaagtcgtcagtaag

SEQ ID NO: 1474824 - DNA, 25 bp, Homo sapien
cactgaatccttgagctgaatccca

SEQ ID NO: 1474825 - DNA, 25 bp, Homo sapien
tgttaattaaagaaagggagacgca

SEQ ID NO: 1474826 - DNA, 25 bp, Homo sapien
taagaaaccatcttcgcatagactt

SEQ ID NO: 1474827 - DNA, 25 bp, Homo sapien
tcttcgcatagactttgcccaaggt

SEQ ID NO: 1474828 - DNA, 25 bp, Homo sapien
tagaggaagatctgccggtcaggca

SEQ ID NO: 1474829 - DNA, 25 bp, Homo sapien
aggatgaagacccacacaggagcct

SEQ ID NO: 1474830 - DNA, 25 bp, Homo sapien
tgctgggccccagacgatactaagt

SEQ ID NO: 1474831 - DNA, 25 bp, Homo sapien
tcccaatagaagaggcagatcacct

SEQ ID NO: 1474832 - DNA, 25 bp, Homo sapien
tggccgctgattctgaggatccctg

SEQ ID NO: 1474833 - DNA, 25 bp, Homo sapien
tgaacagtgccgttagccctgaggg

SEQ ID NO: 1474834 - DNA, 25 bp, Homo sapien
tattgaaaccgagcgctcactggca

SEQ ID NO: 1474835 - DNA, 25 bp, Homo sapien
caaagattaaggcttcaggtgagaa

SEQ ID NO: 1474836 - DNA, 25 bp, Homo sapien
tgagaacgcagtgatggcaacatgg

SEQ ID NO: 1474837 - DNA, 25 bp, Homo sapien
cactggcaggtgtcgcaaagattaa

SEQ ID NO: 1474838 - DNA, 25 bp, Homo sapien
gggcttgaggctctgctcagacgcc

SEQ ID NO: 1474839 - DNA, 25 bp, Homo sapien
cgggcttgaggctctgctcagacgc

SEQ ID NO: 1474840 - DNA, 25 bp, Homo sapien
ggcttgaggctctgctcagacgcct

SEQ ID NO: 1474841 - DNA, 25 bp, Homo sapien
cttgaggctctgctcagacgcctcc

SEQ ID NO: 1474842 - DNA, 25 bp, Homo sapien
actgggcaggacagcctctgagtgc

SEQ ID NO: 1474843 - DNA, 25 bp, Homo sapien
ggacagcctctgagtgcagcagctt

SEQ ID NO: 1474844 - DNA, 25 bp, Homo sapien
acagcctctgagtgcagcagcttcc

SEQ ID NO: 1474845 - DNA, 25 bp, Homo sapien
gcaggacagcctctgagtgcagcag

SEQ ID NO: 1474846 - DNA, 25 bp, Homo sapien
gcaggtctccatgggcactgctgag

SEQ ID NO: 1474847 - DNA, 25 bp, Homo sapien
caagagatactgctgctctgacacc

SEQ ID NO: 1474848 - DNA, 25 bp, Homo sapien
gagttgaccgcaaactccactcttc

SEQ ID NO: 1474849 - DNA, 25 bp, Homo sapien
agagatactgctgctctgacaccac

SEQ ID NO: 1474850 - DNA, 25 bp, Homo sapien
ggtccgtcatgacgcaacctggcta

SEQ ID NO: 1474851 - DNA, 25 bp, Homo sapien
tggggaaggtccgtcatgacgcaac

SEQ ID NO: 1474852 - DNA, 25 bp, Homo sapien
gaaggtccgtcatgacgcaacctgg

SEQ ID NO: 1474853 - DNA, 25 bp, Homo sapien
tccgtcatgacgcaacctggctagc

SEQ ID NO: 1474854 - DNA, 25 bp, Homo sapien
ccaacaggtcacataagcaacaaga

SEQ ID NO: 1474855 - DNA, 25 bp, Homo sapien
ggaagactctaacacaactaagcag

SEQ ID NO: 1474856 - DNA, 25 bp, Homo sapien
tatcagagcaggttaaagactacac

SEQ ID NO: 1474857 - DNA, 25 bp, Homo sapien
ccaaggaaagtggtagccccattgt

SEQ ID NO: 1474858 - DNA, 25 bp, Homo sapien
tgagaacgtcgctgggggccagtct

SEQ ID NO: 1474859 - DNA, 25 bp, Homo sapien
tgttccctggaaatggcgtgagggt

SEQ ID NO: 1474860 - DNA, 25 bp, Homo sapien
aggctggcacatgatgtgagagaca

SEQ ID NO: 1474861 - DNA, 25 bp, Homo sapien
agctgcgagcgctggctgagaacgt

SEQ ID NO: 1474862 - DNA, 25 bp, Homo sapien
gaagttttatttacaagatctcctg

SEQ ID NO: 1474863 - DNA, 25 bp, Homo sapien
tagcatatatatctggttctaccaa

SEQ ID NO: 1474864 - DNA, 25 bp, Homo sapien
gagtgtcaagaaaccagtaaaatac

SEQ ID NO: 1474865 - DNA, 25 bp, Homo sapien
catggttgaaacacatcctttgagg

SEQ ID NO: 1474866 - DNA, 25 bp, Homo sapien
gtccagaaaatcaaatcccgtcttc

SEQ ID NO: 1474867 - DNA, 25 bp, Homo sapien
tcaaatcccgtcttcaagacgacat

SEQ ID NO: 1474868 - DNA, 25 bp, Homo sapien
aaatcaaatcccgtcttcaagacga

SEQ ID NO: 1474869 - DNA, 25 bp, Homo sapien
cagaaaatcaaatcccgtcttcaag

SEQ ID NO: 1474870 - DNA, 25 bp, Homo sapien
agcatctcatttaaaacgacccaga

SEQ ID NO: 1474871 - DNA, 25 bp, Homo sapien
catggaagtaagacgagcctctttt

SEQ ID NO: 1474872 - DNA, 25 bp, Homo sapien
aacgacccagataaaagagcctact

SEQ ID NO: 1474873 - DNA, 25 bp, Homo sapien
acaaaaacatggaagtaagacgagc

SEQ ID NO: 1474874 - DNA, 25 bp, Homo sapien
tacagaccttacagagaaaagaaca

SEQ ID NO: 1474875 - DNA, 25 bp, Homo sapien
acagccatgtttaaatttattcatc

SEQ ID NO: 1474876 - DNA, 25 bp, Homo sapien
aagaacaatgtctctgtatttttct

SEQ ID NO: 1474877 - DNA, 25 bp, Homo sapien
tctgtttctgaatgacagccatgtt

SEQ ID NO: 1474878 - DNA, 25 bp, Homo sapien
tcccctcttgtgagcatgggctgtc

SEQ ID NO: 1474879 - DNA, 25 bp, Homo sapien
tgaaaggttatgaagtgattttccc

SEQ ID NO: 1474880 - DNA, 25 bp, Homo sapien
gcgtgcaccacaaggcctggtttaa

SEQ ID NO: 1474881 - DNA, 25 bp, Homo sapien
ggcttaactgacaggtcccctcttg

SEQ ID NO: 1474882 - DNA, 25 bp, Homo sapien
ttagggcacccagatggactcgcaa

SEQ ID NO: 1474883 - DNA, 25 bp, Homo sapien
tgggccacggaaccctgactggtaa

SEQ ID NO: 1474884 - DNA, 25 bp, Homo sapien
tcccatctgaggacgcgctggtaaa

SEQ ID NO: 1474885 - DNA, 25 bp, Homo sapien
ggttcccgtggaataaggcaccatc

SEQ ID NO: 1474886 - DNA, 25 bp, Homo sapien
gggtctctcacgttcggtgctcacg

SEQ ID NO: 1474887 - DNA, 25 bp, Homo sapien
agcctcgtgcagtgcactgctgaag

SEQ ID NO: 1474888 - DNA, 25 bp, Homo sapien
gtgcaaacttgggttccgagaacag

SEQ ID NO: 1474889 - DNA, 25 bp, Homo sapien
catcgtcctgcctgacatcaggaga

SEQ ID NO: 1474890 - DNA, 25 bp, Homo sapien
tggatagggcggagatactgaactc

SEQ ID NO: 1474891 - DNA, 25 bp, Homo sapien
gggtcagcgactggaactcggcctc

SEQ ID NO: 1474892 - DNA, 25 bp, Homo sapien
tgatcttccagaatgacgcttcctc

SEQ ID NO: 1474893 - DNA, 25 bp, Homo sapien
ccgttgctcggctcctggatggata

SEQ ID NO: 1474894 - DNA, 25 bp, Homo sapien
atgctggggggaaacgccagtcaca

SEQ ID NO: 1474895 - DNA, 25 bp, Homo sapien
ctggggggaaacgccagtcacagtg

SEQ ID NO: 1474896 - DNA, 25 bp, Homo sapien
gggaaacgccagtcacagtggttcc

SEQ ID NO: 1474897 - DNA, 25 bp, Homo sapien
aaacgccagtcacagtggttcctgg

SEQ ID NO: 1474898 - DNA, 25 bp, Homo sapien
taggaaggcagagccccttttgcca

SEQ ID NO: 1474899 - DNA, 25 bp, Homo sapien
tttttgcttcggtgactccacactg

SEQ ID NO: 1474900 - DNA, 25 bp, Homo sapien
cgacatgcagaccataggaaggcag

SEQ ID NO: 1474901 - DNA, 25 bp, Homo sapien
ttcggtgactccacactgttggcca

SEQ ID NO: 1474902 - DNA, 25 bp, Homo sapien
tgaagatcttataagcctttaagtc

SEQ ID NO: 1474903 - DNA, 25 bp, Homo sapien
tgtttgtggctctccaatgaagatc

SEQ ID NO: 1474904 - DNA, 25 bp, Homo sapien
actaaagccacctcctgtttgtggc

SEQ ID NO: 1474905 - DNA, 25 bp, Homo sapien
cactaaagccacctcctgtttgtgg

SEQ ID NO: 1474906 - DNA, 25 bp, Homo sapien
agtgctcatcttgccaagttagatc

SEQ ID NO: 1474907 - DNA, 25 bp, Homo sapien
gagaaaggggcagagtgctcatctt

SEQ ID NO: 1474908 - DNA, 25 bp, Homo sapien
gggcagagtgctcatcttgccaagt

SEQ ID NO: 1474909 - DNA, 25 bp, Homo sapien
cagagtgctcatcttgccaagttag

SEQ ID NO: 1474910 - DNA, 25 bp, Homo sapien
caagccagaccagcgagttggaaag

SEQ ID NO: 1474911 - DNA, 25 bp, Homo sapien
ttgagaagcgttcttccagcagcag

SEQ ID NO: 1474912 - DNA, 25 bp, Homo sapien
tgagccattggttctgccaccagac

SEQ ID NO: 1474913 - DNA, 25 bp, Homo sapien
ggcatggccaggacaagaatccagg

SEQ ID NO: 1474914 - DNA, 25 bp, Homo sapien
taaagactgataggtcccttcacgg

SEQ ID NO: 1474915 - DNA, 25 bp, Homo sapien
aaagactgataggtcccttcacggc

SEQ ID NO: 1474916 - DNA, 25 bp, Homo sapien
ctaaagactgataggtcccttcacg

SEQ ID NO: 1474917 - DNA, 25 bp, Homo sapien
aagactgataggtcccttcacggct

SEQ ID NO: 1474918 - DNA, 25 bp, Homo sapien
tcaatactcaaaggcagcagcctcc

SEQ ID NO: 1474919 - DNA, 25 bp, Homo sapien
tactcaaaggcagcagcctccttcc

SEQ ID NO: 1474920 - DNA, 25 bp, Homo sapien
aatactcaaaggcagcagcctcctt

SEQ ID NO: 1474921 - DNA, 25 bp, Homo sapien
atactcaaaggcagcagcctccttc

SEQ ID NO: 1474922 - DNA, 25 bp, Homo sapien
acacggaacttcagtgagtgaactg

SEQ ID NO: 1474923 - DNA, 25 bp, Homo sapien
aaccaccaagatctgtgatcagcat

SEQ ID NO: 1474924 - DNA, 25 bp, Homo sapien
gaccacattcaaaaccaccaagatc

SEQ ID NO: 1474925 - DNA, 25 bp, Homo sapien
ctgtcagatgcacacggaacttcag

SEQ ID NO: 1474926 - DNA, 25 bp, Homo sapien
cccgcgcaagccggggaagcgcgtg

SEQ ID NO: 1474927 - DNA, 25 bp, Homo sapien
cggggaagcgcgtgagctcctccga

SEQ ID NO: 1474928 - DNA, 25 bp, Homo sapien
gccggggaagcgcgtgagctcctcc

SEQ ID NO: 1474929 - DNA, 25 bp, Homo sapien
gcaagccggggaagcgcgtgagctc

SEQ ID NO: 1474930 - DNA, 25 bp, Homo sapien
ggcaccggtcgatgatctcgtcctg

SEQ ID NO: 1474931 - DNA, 25 bp, Homo sapien
caggcaccggtcgatgatctcgtcc

SEQ ID NO: 1474932 - DNA, 25 bp, Homo sapien
agccgcgcccactcgggcccgtact

SEQ ID NO: 1474933 - DNA, 25 bp, Homo sapien
actcgggcccgtacttctcgcggat

SEQ ID NO: 1474934 - DNA, 25 bp, Homo sapien
gtccagaggccggttcccgctcatg

SEQ ID NO: 1474935 - DNA, 25 bp, Homo sapien
tcagcgacgagaagtaagtgaagcg

SEQ ID NO: 1474936 - DNA, 25 bp, Homo sapien
gtgaagcgctttcgctcccggtcgt

SEQ ID NO: 1474937 - DNA, 25 bp, Homo sapien
gagaagtaagtgaagcgctttcgct

SEQ ID NO: 1474938 - DNA, 25 bp, Homo sapien
cccgggtctccaagccaacccagct

SEQ ID NO: 1474939 - DNA, 25 bp, Homo sapien
cctccatagtggattaccgcggtgc

SEQ ID NO: 1474940 - DNA, 25 bp, Homo sapien
gattaccgcggtgcccgcaggtttc

SEQ ID NO: 1474941 - DNA, 25 bp, Homo sapien
ctgcaccgccgcgtacccgggtctc

SEQ ID NO: 1474942 - DNA, 25 bp, Homo sapien
tagtgaccgccatagcgccacgtgg

SEQ ID NO: 1474943 - DNA, 25 bp, Homo sapien
tggtagccggcgtgtccctgagtcc

SEQ ID NO: 1474944 - DNA, 25 bp, Homo sapien
ttaattcccggtagtgaccgccata

SEQ ID NO: 1474945 - DNA, 25 bp, Homo sapien
tgagtccgcgcccggcgctctgaga

SEQ ID NO: 1474946 - DNA, 25 bp, Homo sapien
gttttcagactcagaggcgacatcc

SEQ ID NO: 1474947 - DNA, 25 bp, Homo sapien
cttggcagttcgacgtttgcaaaca

SEQ ID NO: 1474948 - DNA, 25 bp, Homo sapien
tttgtaattttgaggtgtgtcccag

SEQ ID NO: 1474949 - DNA, 25 bp, Homo sapien
catctggtgctcaaggaaagtcagc

SEQ ID NO: 1474950 - DNA, 25 bp, Homo sapien
gaattgtgtccactcgtaaaataaa

SEQ ID NO: 1474951 - DNA, 25 bp, Homo sapien
tcagctgttatccagggtctttgcc

SEQ ID NO: 1474952 - DNA, 25 bp, Homo sapien
gactcaggtgagaattgtgtccact

SEQ ID NO: 1474953 - DNA, 25 bp, Homo sapien
tatccagggtctttgcctggatagt

SEQ ID NO: 1474954 - DNA, 25 bp, Homo sapien
tgaagtggggcaccgtcatcaccca

SEQ ID NO: 1474955 - DNA, 25 bp, Homo sapien
gctggtctattggtcctgggaccac

SEQ ID NO: 1474956 - DNA, 25 bp, Homo sapien
cctgggggctgacaagattcaaacg

SEQ ID NO: 1474957 - DNA, 25 bp, Homo sapien
gacaagattcaaacgttttggtgaa

SEQ ID NO: 1474958 - DNA, 25 bp, Homo sapien
gtgtcagggtacccttcgctgcctc

SEQ ID NO: 1474959 - DNA, 25 bp, Homo sapien
aacttgtgtcagggtacccttcgct

SEQ ID NO: 1474960 - DNA, 25 bp, Homo sapien
ttgtgtcagggtacccttcgctgcc

SEQ ID NO: 1474961 - DNA, 25 bp, Homo sapien
agcctccagcaatccaggagcacaa

SEQ ID NO: 1474962 - DNA, 25 bp, Homo sapien
ctacagcctggaacacaatcgtctt

SEQ ID NO: 1474963 - DNA, 25 bp, Homo sapien
tcaggtgacgctgggtctggggcac

SEQ ID NO: 1474964 - DNA, 25 bp, Homo sapien
gtctggggcactctgcatctacagc

SEQ ID NO: 1474965 - DNA, 25 bp, Homo sapien
tctgcatctacagcctggaacacaa

SEQ ID NO: 1474966 - DNA, 25 bp, Homo sapien
aatgttgccactttgagatccgtag

SEQ ID NO: 1474967 - DNA, 25 bp, Homo sapien
tcattagccaaagctccgggacttg

SEQ ID NO: 1474968 - DNA, 25 bp, Homo sapien
tgagtttgttctgttacctctttca

SEQ ID NO: 1474969 - DNA, 25 bp, Homo sapien
tccatctgctcgacaagagacttga

SEQ ID NO: 1474970 - DNA, 25 bp, Homo sapien
agcacatcaccaaagccccgggtac

SEQ ID NO: 1474971 - DNA, 25 bp, Homo sapien
acagcacatcaccaaagccccgggt

SEQ ID NO: 1474972 - DNA, 25 bp, Homo sapien
gacagcacatcaccaaagccccggg

SEQ ID NO: 1474973 - DNA, 25 bp, Homo sapien
cagcacatcaccaaagccccgggta

SEQ ID NO: 1474974 - DNA, 25 bp, Homo sapien
ctttggtttgcatcaggccatttgg

SEQ ID NO: 1474975 - DNA, 25 bp, Homo sapien
ccacctgtccaagttctaccaattt

SEQ ID NO: 1474976 - DNA, 25 bp, Homo sapien
ttctgaaggtctgggttaaatgcca

SEQ ID NO: 1474977 - DNA, 25 bp, Homo sapien
tttgcatcaggccatttggttagaa

SEQ ID NO: 1474978 - DNA, 25 bp, Homo sapien
gatgaagctgccttcgagagctact

SEQ ID NO: 1474979 - DNA, 25 bp, Homo sapien
tttatgggacagaccacatgtggac

SEQ ID NO: 1474980 - DNA, 25 bp, Homo sapien
tgatctcaaagctggttatgttagg

SEQ ID NO: 1474981 - DNA, 25 bp, Homo sapien
tgtgaagattcaccaatgtgcacac

SEQ ID NO: 1474982 - DNA, 25 bp, Homo sapien
caagttgtgttcaactaagctgcct

SEQ ID NO: 1474983 - DNA, 25 bp, Homo sapien
tcaggtgtggttcccagaccacttc

SEQ ID NO: 1474984 - DNA, 25 bp, Homo sapien
tctgtgtgaagcacgtgaggtttag

SEQ ID NO: 1474985 - DNA, 25 bp, Homo sapien
gctgcctgtgttcaagacttaatta

SEQ ID NO: 1474986 - DNA, 25 bp, Homo sapien
cactaaagttcttaatgtactagca

SEQ ID NO: 1474987 - DNA, 25 bp, Homo sapien
agagtaatgatcacagagttggagg

SEQ ID NO: 1474988 - DNA, 25 bp, Homo sapien
ttggaggtcagtttcctgtccctca

SEQ ID NO: 1474989 - DNA, 25 bp, Homo sapien
tcttaatgtactagcaaattttgct

SEQ ID NO: 1474990 - DNA, 25 bp, Homo sapien
actttctgaatgttcttatacctga

SEQ ID NO: 1474991 - DNA, 25 bp, Homo sapien
cattttactcactgtcatttaccct

SEQ ID NO: 1474992 - DNA, 25 bp, Homo sapien
ttttactcactgtcatttaccctgt

SEQ ID NO: 1474993 - DNA, 25 bp, Homo sapien
tttactcactgtcatttaccctgtc

SEQ ID NO: 1474994 - DNA, 25 bp, Homo sapien
taaaacaaaggacccacacatggag

SEQ ID NO: 1474995 - DNA, 25 bp, Homo sapien
ggctgccggctaatacatacgcttt

SEQ ID NO: 1474996 - DNA, 25 bp, Homo sapien
aaaagatgctctatcacaatgtgcg

SEQ ID NO: 1474997 - DNA, 25 bp, Homo sapien
cacatggaggttacgtgagtcaaca

SEQ ID NO: 1474998 - DNA, 25 bp, Homo sapien
gtctgtgtttagcacctcaatcatc

SEQ ID NO: 1474999 - DNA, 25 bp, Homo sapien
tggaaacgtttctgatactgatgga

SEQ ID NO: 1475000 - DNA, 25 bp, Homo sapien
tcatcgatcttaacgttggaaacgt

SEQ ID NO: 1475001 - DNA, 25 bp, Homo sapien
ttcttaagacaacgtggagaagagt

SEQ ID NO: 1475002 - DNA, 25 bp, Homo sapien
cacagtgtccgtcagggataattcc

SEQ ID NO: 1475003 - DNA, 25 bp, Homo sapien
cgatcatggtctgctagactcctca

SEQ ID NO: 1475004 - DNA, 25 bp, Homo sapien
caaattgagcaatggtagactacag

SEQ ID NO: 1475005 - DNA, 25 bp, Homo sapien
caaatagacgtgaaaggcaaaactg

SEQ ID NO: 1475006 - DNA, 25 bp, Homo sapien
gggctgtcatagcttcaaagtcgac

SEQ ID NO: 1475007 - DNA, 25 bp, Homo sapien
tttgctaaaggcctctgaaccaggg

SEQ ID NO: 1475008 - DNA, 25 bp, Homo sapien
tggcgactttgctaaaggcctctga

SEQ ID NO: 1475009 - DNA, 25 bp, Homo sapien
catccagcttttggcgactttgcta

SEQ ID NO: 1475010 - DNA, 25 bp, Homo sapien
cacttgccatcagtgctcccacgat

SEQ ID NO: 1475011 - DNA, 25 bp, Homo sapien
ttttccacttgccatcagtgctccc

SEQ ID NO: 1475012 - DNA, 25 bp, Homo sapien
cttgccatcagtgctcccacgatga

SEQ ID NO: 1475013 - DNA, 25 bp, Homo sapien
tccacttgccatcagtgctcccacg

SEQ ID NO: 1475014 - DNA, 25 bp, Homo sapien
tttgcctgctggctcggaggctcgt

SEQ ID NO: 1475015 - DNA, 25 bp, Homo sapien
ccagaacgagtgtagagctgcgagt

SEQ ID NO: 1475016 - DNA, 25 bp, Homo sapien
catttgtaagacgttgtgcttctgc

SEQ ID NO: 1475017 - DNA, 25 bp, Homo sapien
tgtcactccagaacgagtgtagagc

SEQ ID NO: 1475018 - DNA, 25 bp, Homo sapien
actaaggataagattaagttgcaga

SEQ ID NO: 1475019 - DNA, 25 bp, Homo sapien
ctggatcctcgagagagtggcatta

SEQ ID NO: 1475020 - DNA, 25 bp, Homo sapien
taaactaaggataagattaagttgc

SEQ ID NO: 1475021 - DNA, 25 bp, Homo sapien
cctcgagagagtggcattaaattat

SEQ ID NO: 1475022 - DNA, 25 bp, Homo sapien
tgtgtcctttcttccgtggtttgag

SEQ ID NO: 1475023 - DNA, 25 bp, Homo sapien
ctttataaagtgcatctatttcagc

SEQ ID NO: 1475024 - DNA, 25 bp, Homo sapien
ctgtcaaatctttataaagtgcatc

SEQ ID NO: 1475025 - DNA, 25 bp, Homo sapien
aatctttataaagtgcatctatttc

SEQ ID NO: 1475026 - DNA, 25 bp, Homo sapien
ttgtgttcacggtgaacccatcctt

SEQ ID NO: 1475027 - DNA, 25 bp, Homo sapien
cgtgattgtgaatccatcatattcc

SEQ ID NO: 1475028 - DNA, 25 bp, Homo sapien
ttgtctcctgtaatcgtgattgtga

SEQ ID NO: 1475029 - DNA, 25 bp, Homo sapien
acttttgtgttcacggtgaacccat

SEQ ID NO: 1475030 - DNA, 25 bp, Homo sapien
tggttattattcagaatgtgttcat

SEQ ID NO: 1475031 - DNA, 25 bp, Homo sapien
ttcatacgagtgatttcaaatagca

SEQ ID NO: 1475032 - DNA, 25 bp, Homo sapien
tttctgtttgagtctgatgcctgta

SEQ ID NO: 1475033 - DNA, 25 bp, Homo sapien
tgagtctgatgcctgtaggttcttt

SEQ ID NO: 1475034 - DNA, 25 bp, Homo sapien
cttcataatcggaagaaggtcttct

SEQ ID NO: 1475035 - DNA, 25 bp, Homo sapien
cttctactttgtgtaccttttccag

SEQ ID NO: 1475036 - DNA, 25 bp, Homo sapien
cagggcttcccgaacttccagcaat

SEQ ID NO: 1475037 - DNA, 25 bp, Homo sapien
ccagcaatcctttaggattattagc

SEQ ID NO: 1475038 - DNA, 25 bp, Homo sapien
aggtatctcatgttgatcacctgac

SEQ ID NO: 1475039 - DNA, 25 bp, Homo sapien
gtatctcatgttgatcacctgaccc

SEQ ID NO: 1475040 - DNA, 25 bp, Homo sapien
ttctcaaaatattctaggtatctca

SEQ ID NO: 1475041 - DNA, 25 bp, Homo sapien
ctcaaaatattctaggtatctcatg

SEQ ID NO: 1475042 - DNA, 25 bp, Homo sapien
aagaagaaagatgcacaaaaggttc

SEQ ID NO: 1475043 - DNA, 25 bp, Homo sapien
aaaagaagaaagatgcacaaaaggt

SEQ ID NO: 1475044 - DNA, 25 bp, Homo sapien
gaagaaagatgcacaaaaggttcgt

SEQ ID NO: 1475045 - DNA, 25 bp, Homo sapien
agaaagatgcacaaaaggttcgtac

SEQ ID NO: 1475046 - DNA, 25 bp, Homo sapien
ttgatctaaccacagcacgggctgg

SEQ ID NO: 1475047 - DNA, 25 bp, Homo sapien
ctaaccacagcacgggctggtctgg

SEQ ID NO: 1475048 - DNA, 25 bp, Homo sapien
aacctctgctaagacttcgtgctgg

SEQ ID NO: 1475049 - DNA, 25 bp, Homo sapien
ttaaaacctctgctaagacttcgtg

SEQ ID NO: 1475050 - DNA, 25 bp, Homo sapien
cagaggacagtttttgtcacgcaaa

SEQ ID NO: 1475051 - DNA, 25 bp, Homo sapien
tagttgccaggcacaccattatctg

SEQ ID NO: 1475052 - DNA, 25 bp, Homo sapien
ggataaagcaacagctagtccatca

SEQ ID NO: 1475053 - DNA, 25 bp, Homo sapien
taaaaacgtgatgtccatacctaca

SEQ ID NO: 1475054 - DNA, 25 bp, Homo sapien
aactgcaatgtcaaacatgtctctc

SEQ ID NO: 1475055 - DNA, 25 bp, Homo sapien
gcatcaaccgtgtcttcccattcat

SEQ ID NO: 1475056 - DNA, 25 bp, Homo sapien
gcatgacctccaatgcggccaaacc

SEQ ID NO: 1475057 - DNA, 25 bp, Homo sapien
gttggtccatgtacgctgcacggct

SEQ ID NO: 1475058 - DNA, 25 bp, Homo sapien
gatcagccacacaaatcagctcctg

SEQ ID NO: 1475059 - DNA, 25 bp, Homo sapien
catcagggatcccaaacgatcagcc

SEQ ID NO: 1475060 - DNA, 25 bp, Homo sapien
tgtacttcaggcttataactctcaa

SEQ ID NO: 1475061 - DNA, 25 bp, Homo sapien
ctcttgtttggcaggaaaccaggtg

SEQ ID NO: 1475062 - DNA, 25 bp, Homo sapien
tattcacaggcacaaggatagtatg

SEQ ID NO: 1475063 - DNA, 25 bp, Homo sapien
ttctctctgtgcactgtctaggact

SEQ ID NO: 1475064 - DNA, 25 bp, Homo sapien
gctgtagtgcgatggatggatattc

SEQ ID NO: 1475065 - DNA, 25 bp, Homo sapien
tattacagagaagcactgattctgg

SEQ ID NO: 1475066 - DNA, 25 bp, Homo sapien
acatcaatgttatattccgtaaggg

SEQ ID NO: 1475067 - DNA, 25 bp, Homo sapien
gctcttcgtagtcttctatgaggaa

SEQ ID NO: 1475068 - DNA, 25 bp, Homo sapien
gcccagtggtccttaaagcttccag

SEQ ID NO: 1475069 - DNA, 25 bp, Homo sapien
tatcaaggtgtgcatgaagatatcg

SEQ ID NO: 1475070 - DNA, 25 bp, Homo sapien
ggcacacttcattatatggctctag

SEQ ID NO: 1475071 - DNA, 25 bp, Homo sapien
tactttaagatactcagggctagcc

SEQ ID NO: 1475072 - DNA, 25 bp, Homo sapien
cctgggagaggatcattcagcataa

SEQ ID NO: 1475073 - DNA, 25 bp, Homo sapien
taaaactgtcccatggcaacatggc

SEQ ID NO: 1475074 - DNA, 25 bp, Homo sapien
tggagggtttgcacatgattttggt

SEQ ID NO: 1475075 - DNA, 25 bp, Homo sapien
tggtggtagagcatcattccccgga

SEQ ID NO: 1475076 - DNA, 25 bp, Homo sapien
catcattccccggagctggagggtt

SEQ ID NO: 1475077 - DNA, 25 bp, Homo sapien
ttcctgtaagctgccgtggtggtag

SEQ ID NO: 1475078 - DNA, 25 bp, Homo sapien
agctcataggataaccacagagctc

SEQ ID NO: 1475079 - DNA, 25 bp, Homo sapien
ggataaccacagagctcttgaaatt

SEQ ID NO: 1475080 - DNA, 25 bp, Homo sapien
taggataaccacagagctcttgaaa

SEQ ID NO: 1475081 - DNA, 25 bp, Homo sapien
tcataggataaccacagagctcttg

SEQ ID NO: 1475082 - DNA, 25 bp, Homo sapien
ctttacaaggtgctttcaaatctgt

SEQ ID NO: 1475083 - DNA, 25 bp, Homo sapien
cactttacaaggtgctttcaaatct

SEQ ID NO: 1475084 - DNA, 25 bp, Homo sapien
tcatacagcactttacaaggtgctt

SEQ ID NO: 1475085 - DNA, 25 bp, Homo sapien
attcatacagcactttacaaggtgc

SEQ ID NO: 1475086 - DNA, 25 bp, Homo sapien
gcaatgcatggcgtcaggaagccaa

SEQ ID NO: 1475087 - DNA, 25 bp, Homo sapien
tactgtgcatcatgacatcctctgg

SEQ ID NO: 1475088 - DNA, 25 bp, Homo sapien
caatggctctaatcatcagggcaat

SEQ ID NO: 1475089 - DNA, 25 bp, Homo sapien
tctagaccaatacacacgctgaagt

SEQ ID NO: 1475090 - DNA, 25 bp, Homo sapien
gcctgccctagacttttatatgcat

SEQ ID NO: 1475091 - DNA, 25 bp, Homo sapien
tttatatgcatcaataaagtcaact

SEQ ID NO: 1475092 - DNA, 25 bp, Homo sapien
tatatgcctgccctagacttttata

SEQ ID NO: 1475093 - DNA, 25 bp, Homo sapien
gcatcaataaagtcaactttctgct

SEQ ID NO: 1475094 - DNA, 25 bp, Homo sapien
agcatgcttggacgccacagttctt

SEQ ID NO: 1475095 - DNA, 25 bp, Homo sapien
tggtttcggggttcctgtctaatca

SEQ ID NO: 1475096 - DNA, 25 bp, Homo sapien
tgcttggacgccacagttcttcaaa

SEQ ID NO: 1475097 - DNA, 25 bp, Homo sapien
catgcttggacgccacagttcttca

SEQ ID NO: 1475098 - DNA, 25 bp, Homo sapien
gttaaacctttgtatagcatagcta

SEQ ID NO: 1475099 - DNA, 25 bp, Homo sapien
cctttgtatagcatagctataggct

SEQ ID NO: 1475100 - DNA, 25 bp, Homo sapien
tagcatagctataggctggtttttg

SEQ ID NO: 1475101 - DNA, 25 bp, Homo sapien
gaaagttaaacctttgtatagcata

SEQ ID NO: 1475102 - DNA, 25 bp, Homo sapien
tatactactcattcaaacagttggg

SEQ ID NO: 1475103 - DNA, 25 bp, Homo sapien
gcacacctgcttccctatgaggaca

SEQ ID NO: 1475104 - DNA, 25 bp, Homo sapien
tcaggcttgggtcacttacatagag

SEQ ID NO: 1475105 - DNA, 25 bp, Homo sapien
tctggaaagccatgctagttcaggg

SEQ ID NO: 1475106 - DNA, 25 bp, Homo sapien
aagtacagggttccccgatgtctgt

SEQ ID NO: 1475107 - DNA, 25 bp, Homo sapien
tgcttcattaattcgtcccagaggg

SEQ ID NO: 1475108 - DNA, 25 bp, Homo sapien
cgatgtctgtacagccgtgctgagg

SEQ ID NO: 1475109 - DNA, 25 bp, Homo sapien
tgagggctgcagttggatagcttta

SEQ ID NO: 1475110 - DNA, 25 bp, Homo sapien
gactggatcagctctagcctcgctt

SEQ ID NO: 1475111 - DNA, 25 bp, Homo sapien
tgatctatgtatccatgcacctagg

SEQ ID NO: 1475112 - DNA, 25 bp, Homo sapien
tctacttgagccagtattacatggc

SEQ ID NO: 1475113 - DNA, 25 bp, Homo sapien
gaatgaacgcttccaagggctgtga

SEQ ID NO: 1475114 - DNA, 25 bp, Homo sapien
tagttcaggaatatcactcaatcca

SEQ ID NO: 1475115 - DNA, 25 bp, Homo sapien
tactcttctatgttagttcaggaat

SEQ ID NO: 1475116 - DNA, 25 bp, Homo sapien
gaatatctatagaagtagtacacgt

SEQ ID NO: 1475117 - DNA, 25 bp, Homo sapien
taaaggcattaagtaccgacataga

SEQ ID NO: 1475118 - DNA, 25 bp, Homo sapien
taattactcggctcagttcgaacag

SEQ ID NO: 1475119 - DNA, 25 bp, Homo sapien
gctcaaatacctctggacgatctgg

SEQ ID NO: 1475120 - DNA, 25 bp, Homo sapien
gaacagagcaagctcagcattctta

SEQ ID NO: 1475121 - DNA, 25 bp, Homo sapien
gacgatctggttccaaggtaattac

SEQ ID NO: 1475122 - DNA, 25 bp, Homo sapien
tatccctcggccataaattgcacta

SEQ ID NO: 1475123 - DNA, 25 bp, Homo sapien
aaattgcactaaccagatcaggctc

SEQ ID NO: 1475124 - DNA, 25 bp, Homo sapien
ttgcactaaccagatcaggctcctc

SEQ ID NO: 1475125 - DNA, 25 bp, Homo sapien
tttccataggctatccctcggccat

SEQ ID NO: 1475126 - DNA, 25 bp, Homo sapien
gcttcatcatacagaccactgccaa

SEQ ID NO: 1475127 - DNA, 25 bp, Homo sapien
gaaaaatgccgtattgcttcatcat

SEQ ID NO: 1475128 - DNA, 25 bp, Homo sapien
attgttgaaaaatgccgtattgctt

SEQ ID NO: 1475129 - DNA, 25 bp, Homo sapien
ctgccaatcaagacataagcaatag

SEQ ID NO: 1475130 - DNA, 25 bp, Homo sapien
ggcaaacgggaatctcttctgttct

SEQ ID NO: 1475131 - DNA, 25 bp, Homo sapien
gtggcaaacgggaatctcttctgtt

SEQ ID NO: 1475132 - DNA, 25 bp, Homo sapien
agtggcaaacgggaatctcttctgt

SEQ ID NO: 1475133 - DNA, 25 bp, Homo sapien
tggcaaacgggaatctcttctgttc

SEQ ID NO: 1475134 - DNA, 25 bp, Homo sapien
tatgcatgtagactcaacgaggccc

SEQ ID NO: 1475135 - DNA, 25 bp, Homo sapien
caacttctagttgacagaggcgact

SEQ ID NO: 1475136 - DNA, 25 bp, Homo sapien
tggcaaaataccagacgacctatct

SEQ ID NO: 1475137 - DNA, 25 bp, Homo sapien
tggaactagtatcactgggcttcag

SEQ ID NO: 1475138 - DNA, 25 bp, Homo sapien
aaagcaaggagtcacagggtgatga

SEQ ID NO: 1475139 - DNA, 25 bp, Homo sapien
tctgagtcatggaagttcaaaaagg

SEQ ID NO: 1475140 - DNA, 25 bp, Homo sapien
ggtgatgatcccttgggttcgcagt

SEQ ID NO: 1475141 - DNA, 25 bp, Homo sapien
gatcccttgggttcgcagtctgagt

SEQ ID NO: 1475142 - DNA, 25 bp, Homo sapien
tatgctcttaggtgcttaactatga

SEQ ID NO: 1475143 - DNA, 25 bp, Homo sapien
gggcaacagcaaaccaaccaggctg

SEQ ID NO: 1475144 - DNA, 25 bp, Homo sapien
gaataacactaaaagtggcaaccag

SEQ ID NO: 1475145 - DNA, 25 bp, Homo sapien
aaaatagaagtagcaacctgtatcc

SEQ ID NO: 1475146 - DNA, 25 bp, Homo sapien
taatgttttacggtttgcaagtatc

SEQ ID NO: 1475147 - DNA, 25 bp, Homo sapien
gttgtaacttatctaaaggcaacag

SEQ ID NO: 1475148 - DNA, 25 bp, Homo sapien
gcttcctggatggttaaatgaggtt

SEQ ID NO: 1475149 - DNA, 25 bp, Homo sapien
gtatcttgcacaaccattagtgatg

SEQ ID NO: 1475150 - DNA, 25 bp, Homo sapien
gaagtggtgccatcaacggaaacaa

SEQ ID NO: 1475151 - DNA, 25 bp, Homo sapien
ccatcgggttgaaatagagggtcac

SEQ ID NO: 1475152 - DNA, 25 bp, Homo sapien
gggtcacggtctaaaggatacagca

SEQ ID NO: 1475153 - DNA, 25 bp, Homo sapien
gagtttaagcaggaggcgacatcac

SEQ ID NO: 1475154 - DNA, 25 bp, Homo sapien
cttcggcatcctcgggaggccggcg

SEQ ID NO: 1475155 - DNA, 25 bp, Homo sapien
gcatgctgtcagctcatttctcgac

SEQ ID NO: 1475156 - DNA, 25 bp, Homo sapien
tccctcgccccttcggcatcctcgg

SEQ ID NO: 1475157 - DNA, 25 bp, Homo sapien
gagcatgctgtcagctcatttctcg

SEQ ID NO: 1475158 - DNA, 25 bp, Homo sapien
tcggcagagtactggtccccccagt

SEQ ID NO: 1475159 - DNA, 25 bp, Homo sapien
tgagcagggagagcggcgagtagtg

SEQ ID NO: 1475160 - DNA, 25 bp, Homo sapien
tgcttgagcagggagagcggcgagt

SEQ ID NO: 1475161 - DNA, 25 bp, Homo sapien
cgccgcactcggcagagtactggtc

SEQ ID NO: 1475162 - DNA, 25 bp, Homo sapien
cgcagcccggcggacaggaccccca

SEQ ID NO: 1475163 - DNA, 25 bp, Homo sapien
cagcaggacacgccgggcggcgccc

SEQ ID NO: 1475164 - DNA, 25 bp, Homo sapien
agcaggacacgccgggcggcgcccg

SEQ ID NO: 1475165 - DNA, 25 bp, Homo sapien
gccgcagcccggcggacaggacccc

SEQ ID NO: 1475166 - DNA, 25 bp, Homo sapien
tccctcaaggcgcatgcgcgacagc

SEQ ID NO: 1475167 - DNA, 25 bp, Homo sapien
tcaaggcgcatgcgcgacagccctt

SEQ ID NO: 1475168 - DNA, 25 bp, Homo sapien
cctcaaggcgcatgcgcgacagccc

SEQ ID NO: 1475169 - DNA, 25 bp, Homo sapien
cttccctcaaggcgcatgcgcgaca

SEQ ID NO: 1475170 - DNA, 25 bp, Homo sapien
ggtattcagcaaatcctgttctgtc

SEQ ID NO: 1475171 - DNA, 25 bp, Homo sapien
gaccaagaaaccttggtgtcatccc

SEQ ID NO: 1475172 - DNA, 25 bp, Homo sapien
tagtcatcgtgcctctttctgtctg

SEQ ID NO: 1475173 - DNA, 25 bp, Homo sapien
cacttggatttcaatagacagctca

SEQ ID NO: 1475174 - DNA, 25 bp, Homo sapien
ggtatcacagatgtgaaccatggca

SEQ ID NO: 1475175 - DNA, 25 bp, Homo sapien
gtatcacagatgtgaaccatggcac

SEQ ID NO: 1475176 - DNA, 25 bp, Homo sapien
tatcacagatgtgaaccatggcacc

SEQ ID NO: 1475177 - DNA, 25 bp, Homo sapien
gatattcacgggaatctgccgcttg

SEQ ID NO: 1475178 - DNA, 25 bp, Homo sapien
gctggaaagcatcatggtctacttc

SEQ ID NO: 1475179 - DNA, 25 bp, Homo sapien
tccttcttggccgtgttgagtggct

SEQ ID NO: 1475180 - DNA, 25 bp, Homo sapien
gtgaccctaaacatcaaccgtaagc

SEQ ID NO: 1475181 - DNA, 25 bp, Homo sapien
gattttcagcagaatgtggcattct

SEQ ID NO: 1475182 - DNA, 25 bp, Homo sapien
tatgtctgtctggtattaaaatttc

SEQ ID NO: 1475183 - DNA, 25 bp, Homo sapien
ttgtatccaccttaactcagggcct

SEQ ID NO: 1475184 - DNA, 25 bp, Homo sapien
tatacttatctatgtctgtctggta

SEQ ID NO: 1475185 - DNA, 25 bp, Homo sapien
ctccaaggaccaccacaggaacatg

SEQ ID NO: 1475186 - DNA, 25 bp, Homo sapien
acttttgctccaaggaccaccacag

SEQ ID NO: 1475187 - DNA, 25 bp, Homo sapien
ttgaaagaagcagcacaccactgca

SEQ ID NO: 1475188 - DNA, 25 bp, Homo sapien
acatgccaggcaagccaaaagaatt

SEQ ID NO: 1475189 - DNA, 25 bp, Homo sapien
cttaagatgctgtagagccttccca

SEQ ID NO: 1475190 - DNA, 25 bp, Homo sapien
gattatattgcagcacttgcctgtg

SEQ ID NO: 1475191 - DNA, 25 bp, Homo sapien
tgaaatggccaactcacctacggcg

SEQ ID NO: 1475192 - DNA, 25 bp, Homo sapien
tgccttaaatgcagacggagcacaa

SEQ ID NO: 1475193 - DNA, 25 bp, Homo sapien
tattgttgacccattctgaaaggac

SEQ ID NO: 1475194 - DNA, 25 bp, Homo sapien
cagcaatagtgagatgaaagcccca

SEQ ID NO: 1475195 - DNA, 25 bp, Homo sapien
tccgcagtgctgaaggagatcctgg

SEQ ID NO: 1475196 - DNA, 25 bp, Homo sapien
catcagaggcatcttaagaggcagg

SEQ ID NO: 1475197 - DNA, 25 bp, Homo sapien
caaagaaaaaaaagagcactgagaa

SEQ ID NO: 1475198 - DNA, 25 bp, Homo sapien
ctcaaagaaaaaaaagagcactgag

SEQ ID NO: 1475199 - DNA, 25 bp, Homo sapien
tcaaagaaaaaaaagagcactgaga

SEQ ID NO: 1475200 - DNA, 25 bp, Homo sapien
aaagctttcaccgaatcactgggca

SEQ ID NO: 1475201 - DNA, 25 bp, Homo sapien
tctcattatgaatccccagcaggtg

SEQ ID NO: 1475202 - DNA, 25 bp, Homo sapien
caacggaggtgctttcttgcaagag

SEQ ID NO: 1475203 - DNA, 25 bp, Homo sapien
ggagaactccctgcctacaaatgaa

SEQ ID NO: 1475204 - DNA, 25 bp, Homo sapien
tcttcatcgaagaagccgttctcca

SEQ ID NO: 1475205 - DNA, 25 bp, Homo sapien
tgtactcctgaatcgactcgtagag

SEQ ID NO: 1475206 - DNA, 25 bp, Homo sapien
ccctcctgtcgtgcagggagttctg

SEQ ID NO: 1475207 - DNA, 25 bp, Homo sapien
ccagagcgtaagtgcagtctgggct

SEQ ID NO: 1475208 - DNA, 25 bp, Homo sapien
cacttgagtttaatttcagtggaac

SEQ ID NO: 1475209 - DNA, 25 bp, Homo sapien
gtaaaaaacgagaagtcagcacttg

SEQ ID NO: 1475210 - DNA, 25 bp, Homo sapien
cgagaagtcagcacttgagtttaat

SEQ ID NO: 1475211 - DNA, 25 bp, Homo sapien
agtggaacactcagccggcgatctg

SEQ ID NO: 1475212 - DNA, 25 bp, Homo sapien
tgtccagggacagagacgtgtatgt

SEQ ID NO: 1475213 - DNA, 25 bp, Homo sapien
agcagtgacgatgagttgttgtcca

SEQ ID NO: 1475214 - DNA, 25 bp, Homo sapien
tatgtgactacccacacttccagaa

SEQ ID NO: 1475215 - DNA, 25 bp, Homo sapien
tgagggcgctataggcctcaggccc

SEQ ID NO: 1475216 - DNA, 25 bp, Homo sapien
ttcacccagctcgaggatcccaggt

SEQ ID NO: 1475217 - DNA, 25 bp, Homo sapien
ggacttcttcccttgagagtcagag

SEQ ID NO: 1475218 - DNA, 25 bp, Homo sapien
gaggtcacccgtgattctgcctgca

SEQ ID NO: 1475219 - DNA, 25 bp, Homo sapien
aagtgtctgccggtcgaccaatctg

SEQ ID NO: 1475220 - DNA, 25 bp, Homo sapien
aaactgtggataaattgctcagctc

SEQ ID NO: 1475221 - DNA, 25 bp, Homo sapien
gctgagaaactgtggataaattgct

SEQ ID NO: 1475222 - DNA, 25 bp, Homo sapien
cagctgagaaactgtggataaattg

SEQ ID NO: 1475223 - DNA, 25 bp, Homo sapien
gagaaactgtggataaattgctcag

SEQ ID NO: 1475224 - DNA, 25 bp, Homo sapien
cacagaggtgcagactgaacgggca

SEQ ID NO: 1475225 - DNA, 25 bp, Homo sapien
cagagaacacgtagccgcagaagtg

SEQ ID NO: 1475226 - DNA, 25 bp, Homo sapien
cgccgagtgccctgtacacaaggtg

SEQ ID NO: 1475227 - DNA, 25 bp, Homo sapien
tggctgcatccctcgggcagtcaca

SEQ ID NO: 1475228 - DNA, 25 bp, Homo sapien
agcctggatctcaacggtgtgttct

SEQ ID NO: 1475229 - DNA, 25 bp, Homo sapien
ggaggacggctggtctccacattca

SEQ ID NO: 1475230 - DNA, 25 bp, Homo sapien
ggtgtgttctcgcatgcccttggag

SEQ ID NO: 1475231 - DNA, 25 bp, Homo sapien
gaaagcacacgttttgaaaatgcag

SEQ ID NO: 1475232 - DNA, 25 bp, Homo sapien
cactaaacggcttctgatgacctgg

SEQ ID NO: 1475233 - DNA, 25 bp, Homo sapien
gactagactctaaagcgccatcagg

SEQ ID NO: 1475234 - DNA, 25 bp, Homo sapien
gatgacctggtctcctatgtagcct

SEQ ID NO: 1475235 - DNA, 25 bp, Homo sapien
aatattttagacctgccaagctgag

SEQ ID NO: 1475236 - DNA, 25 bp, Homo sapien
tctttagagaatccccagtgtccga

SEQ ID NO: 1475237 - DNA, 25 bp, Homo sapien
gagaatccccagtgtccgactccat

SEQ ID NO: 1475238 - DNA, 25 bp, Homo sapien
ttagagaatccccagtgtccgactc

SEQ ID NO: 1475239 - DNA, 25 bp, Homo sapien
ttctttagagaatccccagtgtccg

SEQ ID NO: 1475240 - DNA, 25 bp, Homo sapien
cgccagagcggcgtccaggttggga

SEQ ID NO: 1475241 - DNA, 25 bp, Homo sapien
gcgccagagcggcgtccaggttggg

SEQ ID NO: 1475242 - DNA, 25 bp, Homo sapien
catctctttgcggagcagcgccaga

SEQ ID NO: 1475243 - DNA, 25 bp, Homo sapien
ctctttgcggagcagcgccagagcg

SEQ ID NO: 1475244 - DNA, 25 bp, Homo sapien
acgccgagtgcagcagcccgctcaa

SEQ ID NO: 1475245 - DNA, 25 bp, Homo sapien
ggatgcgcgacttctgcgcgtacag

SEQ ID NO: 1475246 - DNA, 25 bp, Homo sapien
ctggatgcgcgacttctgcgcgtac

SEQ ID NO: 1475247 - DNA, 25 bp, Homo sapien
agcccgctcaagctctttggcagcg

SEQ ID NO: 1475248 - DNA, 25 bp, Homo sapien
gcgccgcggcccggccacgcgcctg

SEQ ID NO: 1475249 - DNA, 25 bp, Homo sapien
gccgcggcccggccacgcgcctgcc

SEQ ID NO: 1475250 - DNA, 25 bp, Homo sapien
cgcgccgcggcccggccacgcgcct

SEQ ID NO: 1475251 - DNA, 25 bp, Homo sapien
cgccgcggcccggccacgcgcctgc

SEQ ID NO: 1475252 - DNA, 25 bp, Homo sapien
agcaagaacgccagacccacttttg

SEQ ID NO: 1475253 - DNA, 25 bp, Homo sapien
ttcagatcccacgaagcaggccgtt

SEQ ID NO: 1475254 - DNA, 25 bp, Homo sapien
tagtaaacatgcctttcattctggc

SEQ ID NO: 1475255 - DNA, 25 bp, Homo sapien
agtacccgcagcagtcagcaagaac

SEQ ID NO: 1475256 - DNA, 25 bp, Homo sapien
cagctcctttggatgccagctcctt

SEQ ID NO: 1475257 - DNA, 25 bp, Homo sapien
atttccagctcctttggatgccagc

SEQ ID NO: 1475258 - DNA, 25 bp, Homo sapien
agaggcctcatttccagctcctttg

SEQ ID NO: 1475259 - DNA, 25 bp, Homo sapien
gaggcctcatttccagctcctttgg

SEQ ID NO: 1475260 - DNA, 25 bp, Homo sapien
caccaggtagccaaccacgttataa

SEQ ID NO: 1475261 - DNA, 25 bp, Homo sapien
agccattcacccaccaggtagccaa

SEQ ID NO: 1475262 - DNA, 25 bp, Homo sapien
tcagtatctaggcaggttttggttc

SEQ ID NO: 1475263 - DNA, 25 bp, Homo sapien
tatctaggcaggttttggttcccac

SEQ ID NO: 1475264 - DNA, 25 bp, Homo sapien
cactacaccagctgagaagtgttcc

SEQ ID NO: 1475265 - DNA, 25 bp, Homo sapien
gagaacgatttcaatgccacgtggg

SEQ ID NO: 1475266 - DNA, 25 bp, Homo sapien
catagaggaaaatgccagggagatt

SEQ ID NO: 1475267 - DNA, 25 bp, Homo sapien
gcagggccgaaataggaccacagtg

SEQ ID NO: 1475268 - DNA, 25 bp, Homo sapien
actgtgaggtcgtggttattaccca

SEQ ID NO: 1475269 - DNA, 25 bp, Homo sapien
ctgtgaggtcgtggttattacccat

SEQ ID NO: 1475270 - DNA, 25 bp, Homo sapien
ctgttgcttagagtcactactgatt

SEQ ID NO: 1475271 - DNA, 25 bp, Homo sapien
actgttgcttagagtcactactgat

SEQ ID NO: 1475272 - DNA, 25 bp, Homo sapien
tgttgcttagagtcactactgattt

SEQ ID NO: 1475273 - DNA, 25 bp, Homo sapien
tactgttgcttagagtcactactga

SEQ ID NO: 1475274 - DNA, 25 bp, Homo sapien
agtgacctccttgctggtcttgcct

SEQ ID NO: 1475275 - DNA, 25 bp, Homo sapien
gcctccacaatattcagtttcttct

SEQ ID NO: 1475276 - DNA, 25 bp, Homo sapien
ttcctggacccaaagcgctccatgg

SEQ ID NO: 1475277 - DNA, 25 bp, Homo sapien
tccacagtcagcaatagtgacctcc

SEQ ID NO: 1475278 - DNA, 25 bp, Homo sapien
ccagcatttgccgtgaaaaagatgc

SEQ ID NO: 1475279 - DNA, 25 bp, Homo sapien
catgaaatttctctccacagatggg

SEQ ID NO: 1475280 - DNA, 25 bp, Homo sapien
gggctcgccaccagtgtcattatgg

SEQ ID NO: 1475281 - DNA, 25 bp, Homo sapien
gcatttgccgtgaaaaagatgccag

SEQ ID NO: 1475282 - DNA, 25 bp, Homo sapien
ctgccacataagccctggaataatt

SEQ ID NO: 1475283 - DNA, 25 bp, Homo sapien
cagaccagcccactcggggactgga

SEQ ID NO: 1475284 - DNA, 25 bp, Homo sapien
agaccagcccactcggggactggag

SEQ ID NO: 1475285 - DNA, 25 bp, Homo sapien
gaccagcccactcggggactggagc

SEQ ID NO: 1475286 - DNA, 25 bp, Homo sapien
cagcccactcggggactggagcccg

SEQ ID NO: 1475287 - DNA, 25 bp, Homo sapien
ccattgtgaatctcaagaacttcag

SEQ ID NO: 1475288 - DNA, 25 bp, Homo sapien
gctgcaatgatcaagaactgcctgg

SEQ ID NO: 1475289 - DNA, 25 bp, Homo sapien
tgattctcaggacgttcaccaagga

SEQ ID NO: 1475290 - DNA, 25 bp, Homo sapien
caacttatctcagcttgcaacaggg

SEQ ID NO: 1475291 - DNA, 25 bp, Homo sapien
tagaggagatgatagacaagcacac

SEQ ID NO: 1475292 - DNA, 25 bp, Homo sapien
tactgacaggtatgggacagacagg

SEQ ID NO: 1475293 - DNA, 25 bp, Homo sapien
acaaacaattggtatagcctggagc

SEQ ID NO: 1475294 - DNA, 25 bp, Homo sapien
tccaatcagaatcctgtgcggaggg

SEQ ID NO: 1475295 - DNA, 25 bp, Homo sapien
caagcttcacctttccaagagacat

SEQ ID NO: 1475296 - DNA, 25 bp, Homo sapien
cctgcagaccgtttctgggcccggt

SEQ ID NO: 1475297 - DNA, 25 bp, Homo sapien
tggaacatccccctgcagaccgttt

SEQ ID NO: 1475298 - DNA, 25 bp, Homo sapien
cccggtgtgtagacagacttcataa

SEQ ID NO: 1475299 - DNA, 25 bp, Homo sapien
ttctgggcccggtgtgtagacagac

SEQ ID NO: 1475300 - DNA, 25 bp, Homo sapien
ccttggacttcaggctgcccgacat

SEQ ID NO: 1475301 - DNA, 25 bp, Homo sapien
gagccttgagcttagcgaaccccaa

SEQ ID NO: 1475302 - DNA, 25 bp, Homo sapien
cagccggctgcattacaggagagga

SEQ ID NO: 1475303 - DNA, 25 bp, Homo sapien
tgtggagaaacaccagaaacccatg

SEQ ID NO: 1475304 - DNA, 25 bp, Homo sapien
gaagagggctagatcatgacacccg

SEQ ID NO: 1475305 - DNA, 25 bp, Homo sapien
tcaggatccatctcgaagggctggc

SEQ ID NO: 1475306 - DNA, 25 bp, Homo sapien
agtataaaacaaaggcacgtctgcc

SEQ ID NO: 1475307 - DNA, 25 bp, Homo sapien
cacgaagtctcacagagggcaagaa

SEQ ID NO: 1475308 - DNA, 25 bp, Homo sapien
caccatgagtagagtgccagtccct

SEQ ID NO: 1475309 - DNA, 25 bp, Homo sapien
tcctacactggagggatctgagaaa

SEQ ID NO: 1475310 - DNA, 25 bp, Homo sapien
gagtgagccgggatgaacaggcagc

SEQ ID NO: 1475311 - DNA, 25 bp, Homo sapien
aggaagtctgtgttccagcccccag

SEQ ID NO: 1475312 - DNA, 25 bp, Homo sapien
gggagaatggctcttgttttcctca

SEQ ID NO: 1475313 - DNA, 25 bp, Homo sapien
gttgagtgcccgttctgcacaggct

SEQ ID NO: 1475314 - DNA, 25 bp, Homo sapien
cacagcacgaaatcagtgaattcag

SEQ ID NO: 1475315 - DNA, 25 bp, Homo sapien
tgattgaacggctcactctggaagt

SEQ ID NO: 1475316 - DNA, 25 bp, Homo sapien
tcagaagacactgttgagtgcccgt

SEQ ID NO: 1475317 - DNA, 25 bp, Homo sapien
gagggacacggtcaagtagataagt

SEQ ID NO: 1475318 - DNA, 25 bp, Homo sapien
agggacacggtcaagtagataagta

SEQ ID NO: 1475319 - DNA, 25 bp, Homo sapien
tgagggacacggtcaagtagataag

SEQ ID NO: 1475320 - DNA, 25 bp, Homo sapien
gggacacggtcaagtagataagtaa

SEQ ID NO: 1475321 - DNA, 25 bp, Homo sapien
cagccgggacaagggctcataacta

SEQ ID NO: 1475322 - DNA, 25 bp, Homo sapien
gatgagtgtgataaacggccgtgac

SEQ ID NO: 1475323 - DNA, 25 bp, Homo sapien
caagctgagctaggactggagatga

SEQ ID NO: 1475324 - DNA, 25 bp, Homo sapien
gatgttccccgtgagcagaactcac

SEQ ID NO: 1475325 - DNA, 25 bp, Homo sapien
ggctggcagtcgcttgctgaatgaa

SEQ ID NO: 1475326 - DNA, 25 bp, Homo sapien
gaatacatcggtgaatggatgaagg

SEQ ID NO: 1475327 - DNA, 25 bp, Homo sapien
gctgaatgaatacatcggtgaatgg

SEQ ID NO: 1475328 - DNA, 25 bp, Homo sapien
ctctctcctgataggcggctggcag

SEQ ID NO: 1475329 - DNA, 25 bp, Homo sapien
ctgcatgaatcacagcagtggaact

SEQ ID NO: 1475330 - DNA, 25 bp, Homo sapien
aagagtacattctggcaaaagcagg

SEQ ID NO: 1475331 - DNA, 25 bp, Homo sapien
agagtacattctggcaaaagcagga

SEQ ID NO: 1475332 - DNA, 25 bp, Homo sapien
gagtacattctggcaaaagcaggat

SEQ ID NO: 1475333 - DNA, 25 bp, Homo sapien
caagagtacattctggcaaaagcag

SEQ ID NO: 1475334 - DNA, 25 bp, Homo sapien
aatcgggcctgacctggattcctgg

SEQ ID NO: 1475335 - DNA, 25 bp, Homo sapien
tagttggaacaggacaaatcgggcc

SEQ ID NO: 1475336 - DNA, 25 bp, Homo sapien
ctggtttcagcagcgcatccgtgga

SEQ ID NO: 1475337 - DNA, 25 bp, Homo sapien
ccttttagtccctctgtattctttg

SEQ ID NO: 1475338 - DNA, 25 bp, Homo sapien
gctgcctcatcagcaaggctaatga

SEQ ID NO: 1475339 - DNA, 25 bp, Homo sapien
cagcaaggctaatgaggatgcccat

SEQ ID NO: 1475340 - DNA, 25 bp, Homo sapien
tcatcagcaaggctaatgaggatgc

SEQ ID NO: 1475341 - DNA, 25 bp, Homo sapien
gcctcatcagcaaggctaatgagga

SEQ ID NO: 1475342 - DNA, 25 bp, Homo sapien
caacctcctttgtgcccaatgatgg

SEQ ID NO: 1475343 - DNA, 25 bp, Homo sapien
aaggtgagagaaatcccctgtggtc

SEQ ID NO: 1475344 - DNA, 25 bp, Homo sapien
cctttgtgcccaatgatggtgtgaa

SEQ ID NO: 1475345 - DNA, 25 bp, Homo sapien
aaatcccctgtggtccatttcacaa

SEQ ID NO: 1475346 - DNA, 25 bp, Homo sapien
taggcgtttcagtcccagctattcg

SEQ ID NO: 1475347 - DNA, 25 bp, Homo sapien
aattggagtttgtccagccttccca

SEQ ID NO: 1475348 - DNA, 25 bp, Homo sapien
aaggttaggcgtttcagtcccagct

SEQ ID NO: 1475349 - DNA, 25 bp, Homo sapien
ggttccaggcaacggtgagccatga

SEQ ID NO: 1475350 - DNA, 25 bp, Homo sapien
ttattatagattcacttccaccgag

SEQ ID NO: 1475351 - DNA, 25 bp, Homo sapien
ccccttgggagcatgttccttactt

SEQ ID NO: 1475352 - DNA, 25 bp, Homo sapien
gaaggagagtctgcaggattcggcc

SEQ ID NO: 1475353 - DNA, 25 bp, Homo sapien
cccatgggagaagatgtggtcagcc

SEQ ID NO: 1475354 - DNA, 25 bp, Homo sapien
tctctcactgaagtgttagaacctt

SEQ ID NO: 1475355 - DNA, 25 bp, Homo sapien
gcagacccaatgcaggattgataga

SEQ ID NO: 1475356 - DNA, 25 bp, Homo sapien
ggcatgacagtctcctaaaattaat

SEQ ID NO: 1475357 - DNA, 25 bp, Homo sapien
tattaatcagccaattgtgttctct

SEQ ID NO: 1475358 - DNA, 25 bp, Homo sapien
gcttcatggaagtctaggtcttgcc

SEQ ID NO: 1475359 - DNA, 25 bp, Homo sapien
gacaccgcgcctgctttctgagtaa

SEQ ID NO: 1475360 - DNA, 25 bp, Homo sapien
aaagctcatgctcttggtctgcaag

SEQ ID NO: 1475361 - DNA, 25 bp, Homo sapien
tgctcggtgctgtgttgcagtctct

SEQ ID NO: 1475362 - DNA, 25 bp, Homo sapien
caccaagcggtttctgggtctcctc

SEQ ID NO: 1475363 - DNA, 25 bp, Homo sapien
agccctgtccagagctcttggtggt

SEQ ID NO: 1475364 - DNA, 25 bp, Homo sapien
tggtggtgacacacaagacctggga

SEQ ID NO: 1475365 - DNA, 25 bp, Homo sapien
tcttggtggtgacacacaagacctg

SEQ ID NO: 1475366 - DNA, 25 bp, Homo sapien
tggcctttgcttggagcatggagac

SEQ ID NO: 1475367 - DNA, 25 bp, Homo sapien
ctctgggtggcctttgcttggagca

SEQ ID NO: 1475368 - DNA, 25 bp, Homo sapien
tctgggtggcctttgcttggagcat

SEQ ID NO: 1475369 - DNA, 25 bp, Homo sapien
tttgcttggagcatggagacgatcc

SEQ ID NO: 1475370 - DNA, 25 bp, Homo sapien
tgatgcgggcactgcagaccaggcc

SEQ ID NO: 1475371 - DNA, 25 bp, Homo sapien
gaggagaggccaaaaccaggcttca

SEQ ID NO: 1475372 - DNA, 25 bp, Homo sapien
gccctcgggtaaagctctgaggaga

SEQ ID NO: 1475373 - DNA, 25 bp, Homo sapien
caggttcgggaaggtgactgcttgc

SEQ ID NO: 1475374 - DNA, 25 bp, Homo sapien
tggtcctattgctgtggatgttcca

SEQ ID NO: 1475375 - DNA, 25 bp, Homo sapien
cggtcactcgttgttggtatttggt

SEQ ID NO: 1475376 - DNA, 25 bp, Homo sapien
catccactttcggtcactcgttgtt

SEQ ID NO: 1475377 - DNA, 25 bp, Homo sapien
gcagctcttggtcctattgctgtgg

SEQ ID NO: 1475378 - DNA, 25 bp, Homo sapien
ccagggccgctgcagttgactcagt

SEQ ID NO: 1475379 - DNA, 25 bp, Homo sapien
cgatctatctagagtcgcacagggt

SEQ ID NO: 1475380 - DNA, 25 bp, Homo sapien
cacttcacattcatgctgcactggg

SEQ ID NO: 1475381 - DNA, 25 bp, Homo sapien
cagacacttcggcaactagaaatgt

SEQ ID NO: 1475382 - DNA, 25 bp, Homo sapien
ccaatccgtccatttgacaaaatac

SEQ ID NO: 1475383 - DNA, 25 bp, Homo sapien
caaaatactgggagcggacttcttt

SEQ ID NO: 1475384 - DNA, 25 bp, Homo sapien
ctgggagcggacttctttttggatt

SEQ ID NO: 1475385 - DNA, 25 bp, Homo sapien
ttttccaacctgtccaatccgtcca

SEQ ID NO: 1475386 - DNA, 25 bp, Homo sapien
tagtcaagcttaccaacaagcatca

SEQ ID NO: 1475387 - DNA, 25 bp, Homo sapien
tcagcctctctacaatacttgccag

SEQ ID NO: 1475388 - DNA, 25 bp, Homo sapien
gcaaggaatgttctgctaccagctc

SEQ ID NO: 1475389 - DNA, 25 bp, Homo sapien
tgttcagttctcagctccgatgtca

SEQ ID NO: 1475390 - DNA, 25 bp, Homo sapien
cactaggagcccaagaaaacaggct

SEQ ID NO: 1475391 - DNA, 25 bp, Homo sapien
cattcaacagatacagatcggtggc

SEQ ID NO: 1475392 - DNA, 25 bp, Homo sapien
gatcggtggccagaacaaatgacca

SEQ ID NO: 1475393 - DNA, 25 bp, Homo sapien
cagcatgtacaagtgcactaggagc

SEQ ID NO: 1475394 - DNA, 25 bp, Homo sapien
cgtggtatgtcaaagagcaggctat

SEQ ID NO: 1475395 - DNA, 25 bp, Homo sapien
aaggcgtccttgtcagaactcatca

SEQ ID NO: 1475396 - DNA, 25 bp, Homo sapien
cagtgaagcgctctaatgggctagc

SEQ ID NO: 1475397 - DNA, 25 bp, Homo sapien
cagattgttcaaccccaggacctga

SEQ ID NO: 1475398 - DNA, 25 bp, Homo sapien
tcttgaaaatatctgtttcttgggc

SEQ ID NO: 1475399 - DNA, 25 bp, Homo sapien
tctttttcttgaaaatatctgtttc

SEQ ID NO: 1475400 - DNA, 25 bp, Homo sapien
tttcttgaaaatatctgtttcttgg

SEQ ID NO: 1475401 - DNA, 25 bp, Homo sapien
ctgtcctcctgtcctttcctcttct

SEQ ID NO: 1475402 - DNA, 25 bp, Homo sapien
gaatggctattccaggtaagactaa

SEQ ID NO: 1475403 - DNA, 25 bp, Homo sapien
gactaatagtcttacactgaaagct

SEQ ID NO: 1475404 - DNA, 25 bp, Homo sapien
taatgggattcaaacaaaaggcaag

SEQ ID NO: 1475405 - DNA, 25 bp, Homo sapien
gcaagaggtttgtgaccaaaagtca

SEQ ID NO: 1475406 - DNA, 25 bp, Homo sapien
tgcagtctgcagaaccatgctccaa

SEQ ID NO: 1475407 - DNA, 25 bp, Homo sapien
tataaattacgcagcatcaggcatt

SEQ ID NO: 1475408 - DNA, 25 bp, Homo sapien
gctatgctttccatgcagtctgcag

SEQ ID NO: 1475409 - DNA, 25 bp, Homo sapien
tccaaatcagcctcctttctttata

SEQ ID NO: 1475410 - DNA, 25 bp, Homo sapien
ctgtaaaaccttgtaattcacataa

SEQ ID NO: 1475411 - DNA, 25 bp, Homo sapien
gctcctgtaaaaccttgtaattcac

SEQ ID NO: 1475412 - DNA, 25 bp, Homo sapien
tgtaaaaccttgtaattcacataac

SEQ ID NO: 1475413 - DNA, 25 bp, Homo sapien
caaaccggtgcacttctaaacgagc

SEQ ID NO: 1475414 - DNA, 25 bp, Homo sapien
tccttttccataacccgtgatacca

SEQ ID NO: 1475415 - DNA, 25 bp, Homo sapien
cttagcgcccagcataatggcacgt

SEQ ID NO: 1475416 - DNA, 25 bp, Homo sapien
taatggcacgttcctgttccaggat

SEQ ID NO: 1475417 - DNA, 25 bp, Homo sapien
acatctctctccaaaacactaggat

SEQ ID NO: 1475418 - DNA, 25 bp, Homo sapien
attggacgctgactggctctccgtg

SEQ ID NO: 1475419 - DNA, 25 bp, Homo sapien
acattggacgctgactggctctccg

SEQ ID NO: 1475420 - DNA, 25 bp, Homo sapien
tcacattggacgctgactggctctc

SEQ ID NO: 1475421 - DNA, 25 bp, Homo sapien
ttggacgctgactggctctccgtgg

SEQ ID NO: 1475422 - DNA, 25 bp, Homo sapien
ccagaaacatcttagttttgtagct

SEQ ID NO: 1475423 - DNA, 25 bp, Homo sapien
agaaagggtctgaggtctagatctg

SEQ ID NO: 1475424 - DNA, 25 bp, Homo sapien
agctattgatggctttttgagaaag

SEQ ID NO: 1475425 - DNA, 25 bp, Homo sapien
gaaagggtctgaggtctagatctgt

SEQ ID NO: 1475426 - DNA, 25 bp, Homo sapien
cagtgggctacatccacattgcggg

SEQ ID NO: 1475427 - DNA, 25 bp, Homo sapien
gatttccgggtggagtaccatgcag

SEQ ID NO: 1475428 - DNA, 25 bp, Homo sapien
tctactcaggaacaggaagtctggc

SEQ ID NO: 1475429 - DNA, 25 bp, Homo sapien
tccaattagagagagagtagcccgg

SEQ ID NO: 1475430 - DNA, 25 bp, Homo sapien
gaaaaccacattaagacggaggcag

SEQ ID NO: 1475431 - DNA, 25 bp, Homo sapien
gcatacctgaggtcttgagccactg

SEQ ID NO: 1475432 - DNA, 25 bp, Homo sapien
taagagttaactcagcaggcctgtg

SEQ ID NO: 1475433 - DNA, 25 bp, Homo sapien
ttagagctaccttctggtcagaggc

SEQ ID NO: 1475434 - DNA, 25 bp, Homo sapien
ggcctcttatgagagaaccaggtag

SEQ ID NO: 1475435 - DNA, 25 bp, Homo sapien
caaggccgctgaagccatcacatct

SEQ ID NO: 1475436 - DNA, 25 bp, Homo sapien
tccttgaagaagctcgaagcgctct

SEQ ID NO: 1475437 - DNA, 25 bp, Homo sapien
ccagaaggagcacaatgccgctctt

SEQ ID NO: 1475438 - DNA, 25 bp, Homo sapien
tgggctcctgggaccccgcactcac

SEQ ID NO: 1475439 - DNA, 25 bp, Homo sapien
caaatctgttctccacgtgggctcc

SEQ ID NO: 1475440 - DNA, 25 bp, Homo sapien
gttcctcaaatctgttctccacgtg

SEQ ID NO: 1475441 - DNA, 25 bp, Homo sapien
ctcaaatctgttctccacgtgggct

SEQ ID NO: 1475442 - DNA, 25 bp, Homo sapien
tggaggaccccggcccttgctcctg

SEQ ID NO: 1475443 - DNA, 25 bp, Homo sapien
gtcaagaagtgtcggagaactggga

SEQ ID NO: 1475444 - DNA, 25 bp, Homo sapien
agcgtcaagaagtgtcggagaactg

SEQ ID NO: 1475445 - DNA, 25 bp, Homo sapien
cagagcgtcaagaagtgtcggagaa

SEQ ID NO: 1475446 - DNA, 25 bp, Homo sapien
gggtcagccgaggaatcaaccctca

SEQ ID NO: 1475447 - DNA, 25 bp, Homo sapien
ggtcagccgaggaatcaaccctcat

SEQ ID NO: 1475448 - DNA, 25 bp, Homo sapien
tggggtcagccgaggaatcaaccct

SEQ ID NO: 1475449 - DNA, 25 bp, Homo sapien
tgtggggtcagccgaggaatcaacc

SEQ ID NO: 1475450 - DNA, 25 bp, Homo sapien
gcgactgcgcgcatgcgctgcaggg

SEQ ID NO: 1475451 - DNA, 25 bp, Homo sapien
tgccgcgctgcacccccgcttccgg

SEQ ID NO: 1475452 - DNA, 25 bp, Homo sapien
cttccgtcctggctgagatggcggc

SEQ ID NO: 1475453 - DNA, 25 bp, Homo sapien
gggttccgcgactgcgcgcatgcgc

SEQ ID NO: 1475454 - DNA, 25 bp, Homo sapien
aaaaaattgtacaggctacagttgg

SEQ ID NO: 1475455 - DNA, 25 bp, Homo sapien
tatttgaagtcaagtacctactgtt

SEQ ID NO: 1475456 - DNA, 25 bp, Homo sapien
taattatttgaagtcaagtacctac

SEQ ID NO: 1475457 - DNA, 25 bp, Homo sapien
caggctacagttggaaatgcgtttt

SEQ ID NO: 1475458 - DNA, 25 bp, Homo sapien
gctctttggctcaggttaactgcag

SEQ ID NO: 1475459 - DNA, 25 bp, Homo sapien
cagaataattttccgtgctgagaat

SEQ ID NO: 1475460 - DNA, 25 bp, Homo sapien
gtccctgccttgaagcagtagcaga

SEQ ID NO: 1475461 - DNA, 25 bp, Homo sapien
agcagaacttgccacccaacttgag

SEQ ID NO: 1475462 - DNA, 25 bp, Homo sapien
gtctggctaggtaactctctgggca

SEQ ID NO: 1475463 - DNA, 25 bp, Homo sapien
gagaaagattgaccccttcatgctg

SEQ ID NO: 1475464 - DNA, 25 bp, Homo sapien
tatttcttgtggtccctgcgccttc

SEQ ID NO: 1475465 - DNA, 25 bp, Homo sapien
tcatgtcacaaaatcgagggttgca

SEQ ID NO: 1475466 - DNA, 25 bp, Homo sapien
ctgagacataggagtagagctgaga

SEQ ID NO: 1475467 - DNA, 25 bp, Homo sapien
tggacattgcaagcgtgggtactgt

SEQ ID NO: 1475468 - DNA, 25 bp, Homo sapien
catctgaggcaatcttgaagctggc

SEQ ID NO: 1475469 - DNA, 25 bp, Homo sapien
tactgtggatgaagacacggctgga

SEQ ID NO: 1475470 - DNA, 25 bp, Homo sapien
gctctcttcacccacttggcctcag

SEQ ID NO: 1475471 - DNA, 25 bp, Homo sapien
ctgctctcttcacccacttggcctc

SEQ ID NO: 1475472 - DNA, 25 bp, Homo sapien
tcttcacccacttggcctcagccat

SEQ ID NO: 1475473 - DNA, 25 bp, Homo sapien
tctcttcacccacttggcctcagcc

SEQ ID NO: 1475474 - DNA, 25 bp, Homo sapien
ggtctggggtatgattgctcttgtc

SEQ ID NO: 1475475 - DNA, 25 bp, Homo sapien
tctggggtatgattgctcttgtcac

SEQ ID NO: 1475476 - DNA, 25 bp, Homo sapien
ctggggtatgattgctcttgtcacc

SEQ ID NO: 1475477 - DNA, 25 bp, Homo sapien
gaggtctggggtatgattgctcttg

SEQ ID NO: 1475478 - DNA, 25 bp, Homo sapien
gaataaacactaagagacctacctg

SEQ ID NO: 1475479 - DNA, 25 bp, Homo sapien
aaacactcgcatatacatggatagg

SEQ ID NO: 1475480 - DNA, 25 bp, Homo sapien
ataactgtgagaatatagtcagccc

SEQ ID NO: 1475481 - DNA, 25 bp, Homo sapien
cagaccaagggatgagagtactttg

SEQ ID NO: 1475482 - DNA, 25 bp, Homo sapien
tagtagttacctctagtgaatggga

SEQ ID NO: 1475483 - DNA, 25 bp, Homo sapien
caagaggtactgatacgagatgtct

SEQ ID NO: 1475484 - DNA, 25 bp, Homo sapien
cattcactgtgattgacaactaccc

SEQ ID NO: 1475485 - DNA, 25 bp, Homo sapien
ggaaggtctcttcatatgacaccca

SEQ ID NO: 1475486 - DNA, 25 bp, Homo sapien
gaagaaagcccatgccactttgagg

SEQ ID NO: 1475487 - DNA, 25 bp, Homo sapien
gaacacacagattttacctgaagaa

SEQ ID NO: 1475488 - DNA, 25 bp, Homo sapien
gattccaagctcaagtaacaagttt

SEQ ID NO: 1475489 - DNA, 25 bp, Homo sapien
caaagcaagacttaatgccacaagg

SEQ ID NO: 1475490 - DNA, 25 bp, Homo sapien
gatatccagttatggttacaacttt

SEQ ID NO: 1475491 - DNA, 25 bp, Homo sapien
tatccagttatggttacaactttcg

SEQ ID NO: 1475492 - DNA, 25 bp, Homo sapien
aagatatccagttatggttacaact

SEQ ID NO: 1475493 - DNA, 25 bp, Homo sapien
tccagttatggttacaactttcgaa

SEQ ID NO: 1475494 - DNA, 25 bp, Homo sapien
tatacggcactgtaccctttaggaa

SEQ ID NO: 1475495 - DNA, 25 bp, Homo sapien
tgaggcaggttgttttatacggcac

SEQ ID NO: 1475496 - DNA, 25 bp, Homo sapien
caaaatggatcacagcaagcacagt

SEQ ID NO: 1475497 - DNA, 25 bp, Homo sapien
tatctcatactgaagcggtggcagc

SEQ ID NO: 1475498 - DNA, 25 bp, Homo sapien
tagtgtgaccataatttcagaagaa

SEQ ID NO: 1475499 - DNA, 25 bp, Homo sapien
gctagcatactatacgttttaataa

SEQ ID NO: 1475500 - DNA, 25 bp, Homo sapien
tatcaaaggataaaaccgaaatgct

SEQ ID NO: 1475501 - DNA, 25 bp, Homo sapien
tgtgtttgaaactatagagtatgct

SEQ ID NO: 1475502 - DNA, 25 bp, Homo sapien
cgaataagtctagatgcattcctca

SEQ ID NO: 1475503 - DNA, 25 bp, Homo sapien
agaccactgatgttgtactttcagg

SEQ ID NO: 1475504 - DNA, 25 bp, Homo sapien
tttcaggattcacacgaataagtct

SEQ ID NO: 1475505 - DNA, 25 bp, Homo sapien
gattcacacgaataagtctagatgc

SEQ ID NO: 1475506 - DNA, 25 bp, Homo sapien
taaagtggcaccttcgatgcgaagc

SEQ ID NO: 1475507 - DNA, 25 bp, Homo sapien
tcgttcatgagaaagccgtgcaccc

SEQ ID NO: 1475508 - DNA, 25 bp, Homo sapien
tgactacggccaaaccatctaggga

SEQ ID NO: 1475509 - DNA, 25 bp, Homo sapien
gacgaattgcagtatgaacagcggc

SEQ ID NO: 1475510 - DNA, 25 bp, Homo sapien
tggaccggagccgtcgcgggaggca

SEQ ID NO: 1475511 - DNA, 25 bp, Homo sapien
gaccggagccgtcgcgggaggcacc

SEQ ID NO: 1475512 - DNA, 25 bp, Homo sapien
tcgcctggaccggagccgtcgcggg

SEQ ID NO: 1475513 - DNA, 25 bp, Homo sapien
cttcctcgcctggaccggagccgtc

SEQ ID NO: 1475514 - DNA, 25 bp, Homo sapien
gctcggtcagcaaatggctgagctg

SEQ ID NO: 1475515 - DNA, 25 bp, Homo sapien
aacgtaagcgggatgctctccaggc

SEQ ID NO: 1475516 - DNA, 25 bp, Homo sapien
agcagcggcaggcagcaacgtaagc

SEQ ID NO: 1475517 - DNA, 25 bp, Homo sapien
tgcttttctgctcggtcagcaaatg

SEQ ID NO: 1475518 - DNA, 25 bp, Homo sapien
gccgtctctatgaactgccggtagt

SEQ ID NO: 1475519 - DNA, 25 bp, Homo sapien
tgaactgccggtagttctggtagac

SEQ ID NO: 1475520 - DNA, 25 bp, Homo sapien
tctcgcgggccgtctctatgaactg

SEQ ID NO: 1475521 - DNA, 25 bp, Homo sapien
gagatctcgcgggccgtctctatga

SEQ ID NO: 1475522 - DNA, 25 bp, Homo sapien
gttgcgcttcaggttctgcgccgtc

SEQ ID NO: 1475523 - DNA, 25 bp, Homo sapien
cgactgctgcgagagctgcttcacg

SEQ ID NO: 1475524 - DNA, 25 bp, Homo sapien
gagagctgcttcacgtacagccgcg

SEQ ID NO: 1475525 - DNA, 25 bp, Homo sapien
actccagctgccgacgcaggcggct

SEQ ID NO: 1475526 - DNA, 25 bp, Homo sapien
gcactcactgtcactatcggcgccg

SEQ ID NO: 1475527 - DNA, 25 bp, Homo sapien
gaacgagacgagtacgcctgcgccg

SEQ ID NO: 1475528 - DNA, 25 bp, Homo sapien
caaggccaaccgagctcctgggctg

SEQ ID NO: 1475529 - DNA, 25 bp, Homo sapien
ggaagcaggaatgggaacgagacga

SEQ ID NO: 1475530 - DNA, 25 bp, Homo sapien
tgggccatgtggtccgcatcgtatt

SEQ ID NO: 1475531 - DNA, 25 bp, Homo sapien
ttgggccatgtggtccgcatcgtat

SEQ ID NO: 1475532 - DNA, 25 bp, Homo sapien
tgtacaccaggtacggtcctggcgt

SEQ ID NO: 1475533 - DNA, 25 bp, Homo sapien
ccgttgtacaccaggtacggtcctg

SEQ ID NO: 1475534 - DNA, 25 bp, Homo sapien
tacggtcctggcgtctctagcaggt

SEQ ID NO: 1475535 - DNA, 25 bp, Homo sapien
accaggtacggtcctggcgtctcta

SEQ ID NO: 1475536 - DNA, 25 bp, Homo sapien
gccaactgagttagtgtgaactgcc

SEQ ID NO: 1475537 - DNA, 25 bp, Homo sapien
tgaactgcccaagaatgtgtaagga

SEQ ID NO: 1475538 - DNA, 25 bp, Homo sapien
ggggggtatactttcatgaaagcca

SEQ ID NO: 1475539 - DNA, 25 bp, Homo sapien
catgaaagccatctgccaactgagt

SEQ ID NO: 1475540 - DNA, 25 bp, Homo sapien
gtgcgccaccacgcctggctgattt

SEQ ID NO: 1475541 - DNA, 25 bp, Homo sapien
ttggctggtctcaaactcctgaccc

SEQ ID NO: 1475542 - DNA, 25 bp, Homo sapien
aaactcctgaccccaggtgatcctt

SEQ ID NO: 1475543 - DNA, 25 bp, Homo sapien
agctgcgattaaaggtgtgcgccac

SEQ ID NO: 1475544 - DNA, 25 bp, Homo sapien
aagtacactcttaagatgtttgcac

SEQ ID NO: 1475545 - DNA, 25 bp, Homo sapien
tcgttgcctaggagcggcaggctat

SEQ ID NO: 1475546 - DNA, 25 bp, Homo sapien
cagtaacatcctgtgcaggttcgtt

SEQ ID NO: 1475547 - DNA, 25 bp, Homo sapien
tccctgccaagtgaggcacaactgt

SEQ ID NO: 1475548 - DNA, 25 bp, Homo sapien
gctagtctaggtattgctctctcag

SEQ ID NO: 1475549 - DNA, 25 bp, Homo sapien
cataggagaattgcactcccaccag

SEQ ID NO: 1475550 - DNA, 25 bp, Homo sapien
caccagcagtatataggaatgttta

SEQ ID NO: 1475551 - DNA, 25 bp, Homo sapien
tacaccttgtgcatatgaccttgca

SEQ ID NO: 1475552 - DNA, 25 bp, Homo sapien
catagtcatttaggagtcatttcaa

SEQ ID NO: 1475553 - DNA, 25 bp, Homo sapien
cagaagaataaggtgcccatagtca

SEQ ID NO: 1475554 - DNA, 25 bp, Homo sapien
tcaaatggtgctctatagtcttcag

SEQ ID NO: 1475555 - DNA, 25 bp, Homo sapien
tacagatgcttctcactcttacaca

SEQ ID NO: 1475556 - DNA, 25 bp, Homo sapien
caaataaacgacctaggctagaaga

SEQ ID NO: 1475557 - DNA, 25 bp, Homo sapien
aaaagtaacggaatcagcatctgtg

SEQ ID NO: 1475558 - DNA, 25 bp, Homo sapien
agatatccctaagaaattcttcaaa

SEQ ID NO: 1475559 - DNA, 25 bp, Homo sapien
cattcccaaataaacgacctaggct

SEQ ID NO: 1475560 - DNA, 25 bp, Homo sapien
tatttccagctcatgaggccatgcc

SEQ ID NO: 1475561 - DNA, 25 bp, Homo sapien
ggtacatacttgagcatcgccatgg

SEQ ID NO: 1475562 - DNA, 25 bp, Homo sapien
gcaataatcctcgttgaaggcctac

SEQ ID NO: 1475563 - DNA, 25 bp, Homo sapien
gacaagttgatttagccactcgaac

SEQ ID NO: 1475564 - DNA, 25 bp, Homo sapien
gatgaaagggatcattcggaaagcc

SEQ ID NO: 1475565 - DNA, 25 bp, Homo sapien
cagacagtccaatgaccccagggat

SEQ ID NO: 1475566 - DNA, 25 bp, Homo sapien
taacaaatgtcctagactaagccag

SEQ ID NO: 1475567 - DNA, 25 bp, Homo sapien
gagataaatgcctaaccccacttcc

SEQ ID NO: 1475568 - DNA, 25 bp, Homo sapien
caaagacaacttgcgctcctgggtt

SEQ ID NO: 1475569 - DNA, 25 bp, Homo sapien
caggattaaacacatataggccaca

SEQ ID NO: 1475570 - DNA, 25 bp, Homo sapien
tactgagcttcccatagaaaaggtc

SEQ ID NO: 1475571 - DNA, 25 bp, Homo sapien
gcaagcacaacccacagatagtaga

SEQ ID NO: 1475572 - DNA, 25 bp, Homo sapien
ctttatcccatttattcgtattcac

SEQ ID NO: 1475573 - DNA, 25 bp, Homo sapien
tattgtaggtgaagtggggtattgc

SEQ ID NO: 1475574 - DNA, 25 bp, Homo sapien
tgtaggtgaagtggggtattgctgg

SEQ ID NO: 1475575 - DNA, 25 bp, Homo sapien
ttatcccatttattcgtattcacaa

SEQ ID NO: 1475576 - DNA, 25 bp, Homo sapien
accgaccgaatctgaaggtttattg

SEQ ID NO: 1475577 - DNA, 25 bp, Homo sapien
aggtttattgagttcaaccctcaca

SEQ ID NO: 1475578 - DNA, 25 bp, Homo sapien
gagttcaaccctcacacctttttca

SEQ ID NO: 1475579 - DNA, 25 bp, Homo sapien
aagacgtctttaccgaccgaatctg

SEQ ID NO: 1475580 - DNA, 25 bp, Homo sapien
caagagtgctgacctatgtacacca

SEQ ID NO: 1475581 - DNA, 25 bp, Homo sapien
tcgacgtgcgattagcaatggctct

SEQ ID NO: 1475582 - DNA, 25 bp, Homo sapien
ttaacatggaagacctagagtactg

SEQ ID NO: 1475583 - DNA, 25 bp, Homo sapien
tacctagagttaagtggcctttgac

SEQ ID NO: 1475584 - DNA, 25 bp, Homo sapien
gatattttactttagctcgtgctct

SEQ ID NO: 1475585 - DNA, 25 bp, Homo sapien
ctgttagatattttactttagctcg

SEQ ID NO: 1475586 - DNA, 25 bp, Homo sapien
ttttactttagctcgtgctctctca

SEQ ID NO: 1475587 - DNA, 25 bp, Homo sapien
tagatattttactttagctcgtgct

SEQ ID NO: 1475588 - DNA, 25 bp, Homo sapien
caaaattatgcctaaactggaatga

SEQ ID NO: 1475589 - DNA, 25 bp, Homo sapien
ttttttgcaagggaactgcagatca

SEQ ID NO: 1475590 - DNA, 25 bp, Homo sapien
cagcttatttatacagtaaccaggg

SEQ ID NO: 1475591 - DNA, 25 bp, Homo sapien
tagaataggataagaatgatcacac

SEQ ID NO: 1475592 - DNA, 25 bp, Homo sapien
tctaaggaggtctcctgacttccag

SEQ ID NO: 1475593 - DNA, 25 bp, Homo sapien
tcttctacttttgggtggccttgga

SEQ ID NO: 1475594 - DNA, 25 bp, Homo sapien
gaactttactaacacgactgcaccc

SEQ ID NO: 1475595 - DNA, 25 bp, Homo sapien
gcacttgcccgtctctccaatgtag

SEQ ID NO: 1475596 - DNA, 25 bp, Homo sapien
gcttagcttgctactcagtacgtga

SEQ ID NO: 1475597 - DNA, 25 bp, Homo sapien
tatcagaatgttccaagacctttcc

SEQ ID NO: 1475598 - DNA, 25 bp, Homo sapien
tgaatgccggaagctcactatcaga

SEQ ID NO: 1475599 - DNA, 25 bp, Homo sapien
cagtacgtgaattaggatgcaggca

SEQ ID NO: 1475600 - DNA, 25 bp, Homo sapien
tggttgtacttcatgagggttgcga

SEQ ID NO: 1475601 - DNA, 25 bp, Homo sapien
ccagaaaaacagcagtctatcaaat

SEQ ID NO: 1475602 - DNA, 25 bp, Homo sapien
gctggttgtacttcatgagggttgc

SEQ ID NO: 1475603 - DNA, 25 bp, Homo sapien
gaccagaaaaacagcagtctatcaa

SEQ ID NO: 1475604 - DNA, 25 bp, Homo sapien
tctggaaaaattcgaagtatacctc

SEQ ID NO: 1475605 - DNA, 25 bp, Homo sapien
cagcaaactgggctttgccttctgg

SEQ ID NO: 1475606 - DNA, 25 bp, Homo sapien
tgtcagcaaactgggctttgccttc

SEQ ID NO: 1475607 - DNA, 25 bp, Homo sapien
aatgtcagcaaactgggctttgcct

SEQ ID NO: 1475608 - DNA, 25 bp, Homo sapien
atacatgtcacacatcttccatctc

SEQ ID NO: 1475609 - DNA, 25 bp, Homo sapien
cattgcccggataacaagcaaccat

SEQ ID NO: 1475610 - DNA, 25 bp, Homo sapien
cgttccattgcccggataacaagca

SEQ ID NO: 1475611 - DNA, 25 bp, Homo sapien
ttccattgcccggataacaagcaac

SEQ ID NO: 1475612 - DNA, 25 bp, Homo sapien
cccgttccattgcccggataacaag

SEQ ID NO: 1475613 - DNA, 25 bp, Homo sapien
tcaagtacgtttttgtcctgctcca

SEQ ID NO: 1475614 - DNA, 25 bp, Homo sapien
gataggtgaaccaacccagtcaaca

SEQ ID NO: 1475615 - DNA, 25 bp, Homo sapien
gagctcacctcagaacacctacttt

SEQ ID NO: 1475616 - DNA, 25 bp, Homo sapien
tacagataatcaagatcaagtacgt

SEQ ID NO: 1475617 - DNA, 25 bp, Homo sapien
tactaatcacttataggccaggcat

SEQ ID NO: 1475618 - DNA, 25 bp, Homo sapien
tctttacagcaaaccttaggtaggc

SEQ ID NO: 1475619 - DNA, 25 bp, Homo sapien
gccttttgtagaggctgacagctaa

SEQ ID NO: 1475620 - DNA, 25 bp, Homo sapien
gattacctcggtcattctttacagc

SEQ ID NO: 1475621 - DNA, 25 bp, Homo sapien
cactagatggagatattttctatgt

SEQ ID NO: 1475622 - DNA, 25 bp, Homo sapien
ttttctatgtacttacctgagataa

SEQ ID NO: 1475623 - DNA, 25 bp, Homo sapien
ttttcttattcactagatggagata

SEQ ID NO: 1475624 - DNA, 25 bp, Homo sapien
gtcccaattttcttattcactagat

SEQ ID NO: 1475625 - DNA, 25 bp, Homo sapien
gacaccctctgcatacattgcctga

SEQ ID NO: 1475626 - DNA, 25 bp, Homo sapien
ttttaaggagctatgagtcttcacc

SEQ ID NO: 1475627 - DNA, 25 bp, Homo sapien
caacattccaatggtgcatttctga

SEQ ID NO: 1475628 - DNA, 25 bp, Homo sapien
tacttacagaaactatgacaccctc

SEQ ID NO: 1475629 - DNA, 25 bp, Homo sapien
ctcttgatagatacttaggagtgga

SEQ ID NO: 1475630 - DNA, 25 bp, Homo sapien
ttttgtatttccacaagtaatgaat

SEQ ID NO: 1475631 - DNA, 25 bp, Homo sapien
aactttatgagaaatggctaacccg

SEQ ID NO: 1475632 - DNA, 25 bp, Homo sapien
tgagaaatggctaacccgttttcca

SEQ ID NO: 1475633 - DNA, 25 bp, Homo sapien
caaaacaaacgagaacagaggcagt

SEQ ID NO: 1475634 - DNA, 25 bp, Homo sapien
caaatgtgtctggagaggtatgccc

SEQ ID NO: 1475635 - DNA, 25 bp, Homo sapien
gactctcagtcttttatggtacaac

SEQ ID NO: 1475636 - DNA, 25 bp, Homo sapien
tggtacaactgcacatctagaattc

SEQ ID NO: 1475637 - DNA, 25 bp, Homo sapien
ttagagcaaacctttctcctagtac

SEQ ID NO: 1475638 - DNA, 25 bp, Homo sapien
tttagagcaaacctttctcctagta

SEQ ID NO: 1475639 - DNA, 25 bp, Homo sapien
ctttagagcaaacctttctcctagt

SEQ ID NO: 1475640 - DNA, 25 bp, Homo sapien
gacttagcttagatcctaaagggtg

SEQ ID NO: 1475641 - DNA, 25 bp, Homo sapien
ggaggatatctgggaagcagactta

SEQ ID NO: 1475642 - DNA, 25 bp, Homo sapien
ggtgtagaagatctgcattgctggg

SEQ ID NO: 1475643 - DNA, 25 bp, Homo sapien
accagtcaaagaattcacagatgtg

SEQ ID NO: 1475644 - DNA, 25 bp, Homo sapien
tgtaacaatccagatagaaagtgat

SEQ ID NO: 1475645 - DNA, 25 bp, Homo sapien
ttatataggatgcatatgggtagta

SEQ ID NO: 1475646 - DNA, 25 bp, Homo sapien
attagagcggtgcagtgggaattca

SEQ ID NO: 1475647 - DNA, 25 bp, Homo sapien
tgagtgttggtaaatttatatagga

SEQ ID NO: 1475648 - DNA, 25 bp, Homo sapien
tacaagggttctcgcctcaagtggc

SEQ ID NO: 1475649 - DNA, 25 bp, Homo sapien
gatgctgagtacaccaatgttggaa

SEQ ID NO: 1475650 - DNA, 25 bp, Homo sapien
tatcacggtgatgggaagtgccaga

SEQ ID NO: 1475651 - DNA, 25 bp, Homo sapien
gagtcctcgacgcaagatgctgagt

SEQ ID NO: 1475652 - DNA, 25 bp, Homo sapien
gcaagaagcaagttagaggaccttc

SEQ ID NO: 1475653 - DNA, 25 bp, Homo sapien
ttagaggaccttctcaccactttcc

SEQ ID NO: 1475654 - DNA, 25 bp, Homo sapien
tgaggaaatgcacagcactagaaaa

SEQ ID NO: 1475655 - DNA, 25 bp, Homo sapien
cactttccaaacgaaagaaatgagg

SEQ ID NO: 1475656 - DNA, 25 bp, Homo sapien
tagccttaaactgaattgagatgag

SEQ ID NO: 1475657 - DNA, 25 bp, Homo sapien
tattccccaaacttatgattagtcc

SEQ ID NO: 1475658 - DNA, 25 bp, Homo sapien
ctgggttctggagttcatgtttcat

SEQ ID NO: 1475659 - DNA, 25 bp, Homo sapien
tgagatgagattacagcttcctggg

SEQ ID NO: 1475660 - DNA, 25 bp, Homo sapien
acctgagaccatgggctcgcaccac

SEQ ID NO: 1475661 - DNA, 25 bp, Homo sapien
ctctcagtccacacgtcccttatag

SEQ ID NO: 1475662 - DNA, 25 bp, Homo sapien
tcacaatctattaagactaccctct

SEQ ID NO: 1475663 - DNA, 25 bp, Homo sapien
ttcacatatagttgatcacaatcta

SEQ ID NO: 1475664 - DNA, 25 bp, Homo sapien
tgggaggataaaacgagccctcctg

SEQ ID NO: 1475665 - DNA, 25 bp, Homo sapien
aacagaaggattacattaacaaagc

SEQ ID NO: 1475666 - DNA, 25 bp, Homo sapien
ataaaacgagccctcctgcgccaat

SEQ ID NO: 1475667 - DNA, 25 bp, Homo sapien
gccctcctgcgccaattccgtgttg

SEQ ID NO: 1475668 - DNA, 25 bp, Homo sapien
tttcgtccggccattgattttgtag

SEQ ID NO: 1475669 - DNA, 25 bp, Homo sapien
tacagtggcgtatcaggtcgtccat

SEQ ID NO: 1475670 - DNA, 25 bp, Homo sapien
cccagcttcccgttacagtggcgta

SEQ ID NO: 1475671 - DNA, 25 bp, Homo sapien
ccattgattttgtagctgcccagct

SEQ ID NO: 1475672 - DNA, 25 bp, Homo sapien
tgaacttcccggtgtcgtgcagggc

SEQ ID NO: 1475673 - DNA, 25 bp, Homo sapien
catgagcagcccaatggtttcgcag

SEQ ID NO: 1475674 - DNA, 25 bp, Homo sapien
cacagatgccgtgcttgttcatgca

SEQ ID NO: 1475675 - DNA, 25 bp, Homo sapien
catgcacggcacgatgtactcgagc

SEQ ID NO: 1475676 - DNA, 25 bp, Homo sapien
gaacagcgatgagcgggccggcggc

SEQ ID NO: 1475677 - DNA, 25 bp, Homo sapien
agcgggccggcggctcctccttgcc

SEQ ID NO: 1475678 - DNA, 25 bp, Homo sapien
cgggccggcggctcctccttgccgg

SEQ ID NO: 1475679 - DNA, 25 bp, Homo sapien
ctggaacagcgatgagcgggccggc

SEQ ID NO: 1475680 - DNA, 25 bp, Homo sapien
tcggcttcggcagccaccgccgagc

SEQ ID NO: 1475681 - DNA, 25 bp, Homo sapien
cggcttcggcagccaccgccgagcc

SEQ ID NO: 1475682 - DNA, 25 bp, Homo sapien
gcacgacacggcgacgcggccgccg

SEQ ID NO: 1475683 - DNA, 25 bp, Homo sapien
ggcggccgcacgacacggcgacgcg

SEQ ID NO: 1475684 - DNA, 25 bp, Homo sapien
ccggaggcgttgtcccggcgcgccg

SEQ ID NO: 1475685 - DNA, 25 bp, Homo sapien
acgacacggcgacgcggccgccgct

SEQ ID NO: 1475686 - DNA, 25 bp, Homo sapien
gcgcggggccggaatgctggtgtgg

SEQ ID NO: 1475687 - DNA, 25 bp, Homo sapien
cggcgcggggccggaatgctggtgt

SEQ ID NO: 1475688 - DNA, 25 bp, Homo sapien
cggggccggaatgctggtgtgggcc

SEQ ID NO: 1475689 - DNA, 25 bp, Homo sapien
cgcggggccggaatgctggtgtggg

SEQ ID NO: 1475690 - DNA, 25 bp, Homo sapien
agcagtagaaggagctgcggcagcg

SEQ ID NO: 1475691 - DNA, 25 bp, Homo sapien
gacgctggtgctccttgcagcagta

SEQ ID NO: 1475692 - DNA, 25 bp, Homo sapien
agtagaaggagctgcggcagcggct

SEQ ID NO: 1475693 - DNA, 25 bp, Homo sapien
tgacgctggtgctccttgcagcagt

SEQ ID NO: 1475694 - DNA, 25 bp, Homo sapien
ttccgagtcctaagctccggcgcag

SEQ ID NO: 1475695 - DNA, 25 bp, Homo sapien
tgtgcggcgaatggcaacctgggct

SEQ ID NO: 1475696 - DNA, 25 bp, Homo sapien
agcgcagggcatacgggcgccactc

SEQ ID NO: 1475697 - DNA, 25 bp, Homo sapien
cgagaggccggtgcgctacctcagc

SEQ ID NO: 1475698 - DNA, 25 bp, Homo sapien
gacacatagtccaatgcaggaggca

SEQ ID NO: 1475699 - DNA, 25 bp, Homo sapien
gaactccagtagcattgtcgcagcc

SEQ ID NO: 1475700 - DNA, 25 bp, Homo sapien
taatagaatctgtgctgcgcggatg

SEQ ID NO: 1475701 - DNA, 25 bp, Homo sapien
cgaaggcggcgtaatcatggctgct

SEQ ID NO: 1475702 - DNA, 25 bp, Homo sapien
tttcacctgttagccagaatggtct

SEQ ID NO: 1475703 - DNA, 25 bp, Homo sapien
gctgggattagagatgtgagccact

SEQ ID NO: 1475704 - DNA, 25 bp, Homo sapien
tgggattagagatgtgagccactgt

SEQ ID NO: 1475705 - DNA, 25 bp, Homo sapien
ggattagagatgtgagccactgtgc

SEQ ID NO: 1475706 - DNA, 25 bp, Homo sapien
cagcttcttggatttatgagttgat

SEQ ID NO: 1475707 - DNA, 25 bp, Homo sapien
tcgttaatttttagagcctactcag

SEQ ID NO: 1475708 - DNA, 25 bp, Homo sapien
cctgagtctgtttctattgggtgtt

SEQ ID NO: 1475709 - DNA, 25 bp, Homo sapien
cattctaatgtcagggccattcctg

SEQ ID NO: 1475710 - DNA, 25 bp, Homo sapien
ttccctaatatgaccaaatgactaa

SEQ ID NO: 1475711 - DNA, 25 bp, Homo sapien
cttcataggatgagggagtgagttc

SEQ ID NO: 1475712 - DNA, 25 bp, Homo sapien
aaatgacttccctaatatgaccaaa

SEQ ID NO: 1475713 - DNA, 25 bp, Homo sapien
ccataacaaagggtaggtcttcata

SEQ ID NO: 1475714 - DNA, 25 bp, Homo sapien
agtccctgcacaggaagagcttgga

SEQ ID NO: 1475715 - DNA, 25 bp, Homo sapien
gagtccctgcacaggaagagcttgg

SEQ ID NO: 1475716 - DNA, 25 bp, Homo sapien
cagtgtctactcaaggccttcgcag

SEQ ID NO: 1475717 - DNA, 25 bp, Homo sapien
tgtttgcagcgtttgccagtttcca

SEQ ID NO: 1475718 - DNA, 25 bp, Homo sapien
gttgtcagtagttggtgagcacttc

SEQ ID NO: 1475719 - DNA, 25 bp, Homo sapien
tgactacataacactgctactgcct

SEQ ID NO: 1475720 - DNA, 25 bp, Homo sapien
gcacccgatgcaacacccggttaat

SEQ ID NO: 1475721 - DNA, 25 bp, Homo sapien
ggcacccgatgcaacacccggttaa

SEQ ID NO: 1475722 - DNA, 25 bp, Homo sapien
caggcacccgatgcaacacccggtt

SEQ ID NO: 1475723 - DNA, 25 bp, Homo sapien
cacccgatgcaacacccggttaatt

SEQ ID NO: 1475724 - DNA, 25 bp, Homo sapien
gatagacccacgtgatatgttacaa

SEQ ID NO: 1475725 - DNA, 25 bp, Homo sapien
taaccatgggaatgttgacactacc

SEQ ID NO: 1475726 - DNA, 25 bp, Homo sapien
gttcacactcagacaacaaagcatg

SEQ ID NO: 1475727 - DNA, 25 bp, Homo sapien
tatgctgccatagccagttagtgaa

SEQ ID NO: 1475728 - DNA, 25 bp, Homo sapien
gtgcagtatgtgcagatgctatcct

SEQ ID NO: 1475729 - DNA, 25 bp, Homo sapien
gacctcattcgacaaatgtgtactg

SEQ ID NO: 1475730 - DNA, 25 bp, Homo sapien
cagatgctatcctaggcagtggaga

SEQ ID NO: 1475731 - DNA, 25 bp, Homo sapien
acctcattcgacaaatgtgtactga

SEQ ID NO: 1475732 - DNA, 25 bp, Homo sapien
gccaggaaggacatgggttgccatt

SEQ ID NO: 1475733 - DNA, 25 bp, Homo sapien
tacgtagggccttgtaacaactgtg

SEQ ID NO: 1475734 - DNA, 25 bp, Homo sapien
tccaagcagacagagtaggtggtgc

SEQ ID NO: 1475735 - DNA, 25 bp, Homo sapien
taatggaatcactctgcctgctatg

SEQ ID NO: 1475736 - DNA, 25 bp, Homo sapien
tctttgggttgactggatggatcct

SEQ ID NO: 1475737 - DNA, 25 bp, Homo sapien
ctggatggatcctttgctccatggt

SEQ ID NO: 1475738 - DNA, 25 bp, Homo sapien
gcagatgcactcaggagtgagtttg

SEQ ID NO: 1475739 - DNA, 25 bp, Homo sapien
ttggctgtgactgggatgtccaaga

SEQ ID NO: 1475740 - DNA, 25 bp, Homo sapien
ccaagagagctaaagtagaaagtgt

SEQ ID NO: 1475741 - DNA, 25 bp, Homo sapien
ggcatcacttgcgaatgggtaatca

SEQ ID NO: 1475742 - DNA, 25 bp, Homo sapien
taatcagactcctcacgtggtggct

SEQ ID NO: 1475743 - DNA, 25 bp, Homo sapien
gggctgtttaggcatcacttgcgaa

SEQ ID NO: 1475744 - DNA, 25 bp, Homo sapien
tggaagttgaagatcagggtaccag

SEQ ID NO: 1475745 - DNA, 25 bp, Homo sapien
tcttgctctgtcttcatatagcctt

SEQ ID NO: 1475746 - DNA, 25 bp, Homo sapien
ttctcaacagctcaagactggaagt

SEQ ID NO: 1475747 - DNA, 25 bp, Homo sapien
caagactggaagttgaagatcaggg

SEQ ID NO: 1475748 - DNA, 25 bp, Homo sapien
gcaagtagcccaacaagcaaggtcc

SEQ ID NO: 1475749 - DNA, 25 bp, Homo sapien
tcaattgacgtattcacagggctgg

SEQ ID NO: 1475750 - DNA, 25 bp, Homo sapien
caggagcctactttatcctcaagga

SEQ ID NO: 1475751 - DNA, 25 bp, Homo sapien
gaatactggtagatcagacgtcact

SEQ ID NO: 1475752 - DNA, 25 bp, Homo sapien
cttcgtgccagagcagaacatgcct

SEQ ID NO: 1475753 - DNA, 25 bp, Homo sapien
ccaagttactccatttactgttcct

SEQ ID NO: 1475754 - DNA, 25 bp, Homo sapien
cgtgccagagcagaacatgccttgt

SEQ ID NO: 1475755 - DNA, 25 bp, Homo sapien
catgccttgtagttactgccatatt

SEQ ID NO: 1475756 - DNA, 25 bp, Homo sapien
gtctatcattttgtttgggagagcc

SEQ ID NO: 1475757 - DNA, 25 bp, Homo sapien
ctgtctatcattttgtttgggagag

SEQ ID NO: 1475758 - DNA, 25 bp, Homo sapien
tgtctatcattttgtttgggagagc

SEQ ID NO: 1475759 - DNA, 25 bp, Homo sapien
tcacttaaagctcctggcgtcactg

SEQ ID NO: 1475760 - DNA, 25 bp, Homo sapien
cactgccaggaatggaaagttaaaa

SEQ ID NO: 1475761 - DNA, 25 bp, Homo sapien
cacatgccccgaggaaactcgaggg

SEQ ID NO: 1475762 - DNA, 25 bp, Homo sapien
cagctctgtaaggttctgcctggat

SEQ ID NO: 1475763 - DNA, 25 bp, Homo sapien
ttcccacgatcacacagatctcagg

SEQ ID NO: 1475764 - DNA, 25 bp, Homo sapien
tctcaggtccaggaggacgcatcgt

SEQ ID NO: 1475765 - DNA, 25 bp, Homo sapien
tgctgtgaggcttgtagagtcgcct

SEQ ID NO: 1475766 - DNA, 25 bp, Homo sapien
ctttttagtaacagtgcatgctgtg

SEQ ID NO: 1475767 - DNA, 25 bp, Homo sapien
agagggcggccgcaatagtacgctc

SEQ ID NO: 1475768 - DNA, 25 bp, Homo sapien
acttccggccactgcgttgtagtcg

SEQ ID NO: 1475769 - DNA, 25 bp, Homo sapien
agtcggcccggctgcaaagcgtttt

SEQ ID NO: 1475770 - DNA, 25 bp, Homo sapien
agtacgtgagaggagacttccggcc

SEQ ID NO: 1475771 - DNA, 25 bp, Homo sapien
agatcggccctgtttacacctcctt

SEQ ID NO: 1475772 - DNA, 25 bp, Homo sapien
gagcaacaaagaaggtggcgtcctt

SEQ ID NO: 1475773 - DNA, 25 bp, Homo sapien
tgccttcgtcccttgtagactcggg

SEQ ID NO: 1475774 - DNA, 25 bp, Homo sapien
agaaggtggcgtccttaacaacacg

SEQ ID NO: 1475775 - DNA, 25 bp, Homo sapien
gtattcccattgtgagactaagtag

SEQ ID NO: 1475776 - DNA, 25 bp, Homo sapien
gggttacaggcataatcaatcatgc

SEQ ID NO: 1475777 - DNA, 25 bp, Homo sapien
taactctttgttacgtgtcattttg

SEQ ID NO: 1475778 - DNA, 25 bp, Homo sapien
tcagttataccccagtaaaggtgga

SEQ ID NO: 1475779 - DNA, 25 bp, Homo sapien
aatcatttcttatatcttattcatg

SEQ ID NO: 1475780 - DNA, 25 bp, Homo sapien
gccaaatgaatcatttcttatatct

SEQ ID NO: 1475781 - DNA, 25 bp, Homo sapien
tcatttcttatatcttattcatgaa

SEQ ID NO: 1475782 - DNA, 25 bp, Homo sapien
tagccaaatgaatcatttcttatat

SEQ ID NO: 1475783 - DNA, 25 bp, Homo sapien
tgtgaacatgcttcagagtgtacct

SEQ ID NO: 1475784 - DNA, 25 bp, Homo sapien
tcgtgccaagcctcaaaaataggct

SEQ ID NO: 1475785 - DNA, 25 bp, Homo sapien
aaataggcttattccatggaacaag

SEQ ID NO: 1475786 - DNA, 25 bp, Homo sapien
tagttaaacttctggacatgagcgt

SEQ ID NO: 1475787 - DNA, 25 bp, Homo sapien
agctctgtttgtaagggctgattcc

SEQ ID NO: 1475788 - DNA, 25 bp, Homo sapien
tgagcatgacaaccagacatttcca

SEQ ID NO: 1475789 - DNA, 25 bp, Homo sapien
ggaggctttcctattctagcattta

SEQ ID NO: 1475790 - DNA, 25 bp, Homo sapien
gtcccatggtgttaataaagttgcc

SEQ ID NO: 1475791 - DNA, 25 bp, Homo sapien
tctggctgcttgagacattggtctt

SEQ ID NO: 1475792 - DNA, 25 bp, Homo sapien
cttaagactcagactggccgggcgt

SEQ ID NO: 1475793 - DNA, 25 bp, Homo sapien
tggccttaagactcagactggccgg

SEQ ID NO: 1475794 - DNA, 25 bp, Homo sapien
ttctggccttaagactcagactggc

SEQ ID NO: 1475795 - DNA, 25 bp, Homo sapien
cattacatcactgctagaatattta

SEQ ID NO: 1475796 - DNA, 25 bp, Homo sapien
gttgtcaattctaacatataataca

SEQ ID NO: 1475797 - DNA, 25 bp, Homo sapien
gagcatacatatatcaacagtaaga

SEQ ID NO: 1475798 - DNA, 25 bp, Homo sapien
gaagcatacatcatttcaaagcaaa

SEQ ID NO: 1475799 - DNA, 25 bp, Homo sapien
ccactgtgggcaagtagtggtgccc

SEQ ID NO: 1475800 - DNA, 25 bp, Homo sapien
gactaaggaggtgtcacaaccagga

SEQ ID NO: 1475801 - DNA, 25 bp, Homo sapien
tgagagatattgttaggacagccac

SEQ ID NO: 1475802 - DNA, 25 bp, Homo sapien
agagatgccagaagacgactaagga

SEQ ID NO: 1475803 - DNA, 25 bp, Homo sapien
tctaagagagtccaggtagggatca

SEQ ID NO: 1475804 - DNA, 25 bp, Homo sapien
gtagggatcacacccagactctgca

SEQ ID NO: 1475805 - DNA, 25 bp, Homo sapien
aacgctgccccttgacgttcttcgg

SEQ ID NO: 1475806 - DNA, 25 bp, Homo sapien
gagcatgtgcccaatatcactgtac

SEQ ID NO: 1475807 - DNA, 25 bp, Homo sapien
ggttgggctgaatgcgggcgctggg

SEQ ID NO: 1475808 - DNA, 25 bp, Homo sapien
ctgtgattgcttggggatctgagca

SEQ ID NO: 1475809 - DNA, 25 bp, Homo sapien
gtgggttgggctgaatgcgggcgct

SEQ ID NO: 1475810 - DNA, 25 bp, Homo sapien
tggtgggttgggctgaatgcgggcg

SEQ ID NO: 1475811 - DNA, 25 bp, Homo sapien
tgggcccactcagacgtacgtgcct

SEQ ID NO: 1475812 - DNA, 25 bp, Homo sapien
tcatctgcatctctgtaactcgagg

SEQ ID NO: 1475813 - DNA, 25 bp, Homo sapien
tctctgtaactcgaggtcaagcaga

SEQ ID NO: 1475814 - DNA, 25 bp, Homo sapien
ctggtatcctctttgacttcatctg

SEQ ID NO: 1475815 - DNA, 25 bp, Homo sapien
gggttctcttagacaagccatgtgg

SEQ ID NO: 1475816 - DNA, 25 bp, Homo sapien
tcatctctgaagtcgccttctctgg

SEQ ID NO: 1475817 - DNA, 25 bp, Homo sapien
tcttgcctgagagactctccctgtc

SEQ ID NO: 1475818 - DNA, 25 bp, Homo sapien
ctggattctcgccaagatgagctgt

SEQ ID NO: 1475819 - DNA, 25 bp, Homo sapien
ctcaagaatgcagctcagtttctca

SEQ ID NO: 1475820 - DNA, 25 bp, Homo sapien
ctggctcatgctcaagaatgcagct

SEQ ID NO: 1475821 - DNA, 25 bp, Homo sapien
atctgtcaaggcgtctggctcatgc

SEQ ID NO: 1475822 - DNA, 25 bp, Homo sapien
tctgtcaaggcgtctggctcatgct

SEQ ID NO: 1475823 - DNA, 25 bp, Homo sapien
tgttcacaccaagtagaagcaggaa

SEQ ID NO: 1475824 - DNA, 25 bp, Homo sapien
tgtggctgggcaatgaatgaaatac

SEQ ID NO: 1475825 - DNA, 25 bp, Homo sapien
agtcactcgggtcactcgtcacaga

SEQ ID NO: 1475826 - DNA, 25 bp, Homo sapien
gatgctttagccgttcagaatccat

SEQ ID NO: 1475827 - DNA, 25 bp, Homo sapien
gaactggacaactgctttcactgat

SEQ ID NO: 1475828 - DNA, 25 bp, Homo sapien
actggacaactgctttcactgatag

SEQ ID NO: 1475829 - DNA, 25 bp, Homo sapien
tggacaactgctttcactgataggc

SEQ ID NO: 1475830 - DNA, 25 bp, Homo sapien
gatgaactggacaactgctttcact

SEQ ID NO: 1475831 - DNA, 25 bp, Homo sapien
tttgcttccactattatggttgaag

SEQ ID NO: 1475832 - DNA, 25 bp, Homo sapien
ttgaagtcagcggccataagatcat

SEQ ID NO: 1475833 - DNA, 25 bp, Homo sapien
cagaacccagggaagtgtggtgaga

SEQ ID NO: 1475834 - DNA, 25 bp, Homo sapien
tgtgtggcggagacatttgcttcca

SEQ ID NO: 1475835 - DNA, 25 bp, Homo sapien
gtcaggtccaggtgcctttgcctca

SEQ ID NO: 1475836 - DNA, 25 bp, Homo sapien
ctccacctccctggtggtcaggtcc

SEQ ID NO: 1475837 - DNA, 25 bp, Homo sapien
ttgaactccacctccctggtggtca

SEQ ID NO: 1475838 - DNA, 25 bp, Homo sapien
ctggtggtcaggtccaggtgccttt

SEQ ID NO: 1475839 - DNA, 25 bp, Homo sapien
ggctttcccacttgcatggcatgtg

SEQ ID NO: 1475840 - DNA, 25 bp, Homo sapien
taccttcttaggcggtctcatttaa

SEQ ID NO: 1475841 - DNA, 25 bp, Homo sapien
gctgttctctccaccggcaatgacc

SEQ ID NO: 1475842 - DNA, 25 bp, Homo sapien
ggagccatgagctccattgaggaca

SEQ ID NO: 1475843 - DNA, 25 bp, Homo sapien
tgtttccaagagtgcagcagcccct

SEQ ID NO: 1475844 - DNA, 25 bp, Homo sapien
gggattgcttaccacctgcagcgtg

SEQ ID NO: 1475845 - DNA, 25 bp, Homo sapien
tctgtgagaggaacctcggcgcact

SEQ ID NO: 1475846 - DNA, 25 bp, Homo sapien
tacatgagaagctcgacagggcctg

SEQ ID NO: 1475847 - DNA, 25 bp, Homo sapien
cttcagtctcttggctacacgggtc

SEQ ID NO: 1475848 - DNA, 25 bp, Homo sapien
actcttgggacaccctgctcaggaa

SEQ ID NO: 1475849 - DNA, 25 bp, Homo sapien
gcccgagattgtcgtgagctcagat

SEQ ID NO: 1475850 - DNA, 25 bp, Homo sapien
cacttaggtgctcagatttgctctc

SEQ ID NO: 1475851 - DNA, 25 bp, Homo sapien
tcaggtgaggggcaagtttgagacc

SEQ ID NO: 1475852 - DNA, 25 bp, Homo sapien
ccttttccctgcgtttcattccagt

SEQ ID NO: 1475853 - DNA, 25 bp, Homo sapien
aaccagaatccctgccacataagcg

SEQ ID NO: 1475854 - DNA, 25 bp, Homo sapien
caggagcctggcagttagaaccaga

SEQ ID NO: 1475855 - DNA, 25 bp, Homo sapien
cataagcgttgatgtgactgaacac

SEQ ID NO: 1475856 - DNA, 25 bp, Homo sapien
tcctactaggtcatccagacttggt

SEQ ID NO: 1475857 - DNA, 25 bp, Homo sapien
ctaggtcatccagacttggtttctg

SEQ ID NO: 1475858 - DNA, 25 bp, Homo sapien
cttctcctactaggtcatccagact

SEQ ID NO: 1475859 - DNA, 25 bp, Homo sapien
tactaggtcatccagacttggtttc

SEQ ID NO: 1475860 - DNA, 25 bp, Homo sapien
gaaggctgaatgtctaagatcaagg

SEQ ID NO: 1475861 - DNA, 25 bp, Homo sapien
tctcacaattctgaaggctgaatgt

SEQ ID NO: 1475862 - DNA, 25 bp, Homo sapien
ttgtcttcagatgatcttccctcca

SEQ ID NO: 1475863 - DNA, 25 bp, Homo sapien
cacatgtgtctgtctccgcatctct

SEQ ID NO: 1475864 - DNA, 25 bp, Homo sapien
gaataaataaatatgtcaagatgaa

SEQ ID NO: 1475865 - DNA, 25 bp, Homo sapien
tatgtcaagatgaaaagtgctatgg

SEQ ID NO: 1475866 - DNA, 25 bp, Homo sapien
ataaatatgtcaagatgaaaagtgc

SEQ ID NO: 1475867 - DNA, 25 bp, Homo sapien
gtcaagatgaaaagtgctatggaga

SEQ ID NO: 1475868 - DNA, 25 bp, Homo sapien
tattatataccacgaaaaactactg

SEQ ID NO: 1475869 - DNA, 25 bp, Homo sapien
ccacgaaaaactactgaatgattaa

SEQ ID NO: 1475870 - DNA, 25 bp, Homo sapien
taacccctaatgatataatctaaaa

SEQ ID NO: 1475871 - DNA, 25 bp, Homo sapien
acattcttaagtgggttcttaacat

SEQ ID NO: 1475872 - DNA, 25 bp, Homo sapien
tgctcaaggccagacctacacagtg

SEQ ID NO: 1475873 - DNA, 25 bp, Homo sapien
cactgtgttctaagtggtcactgca

SEQ ID NO: 1475874 - DNA, 25 bp, Homo sapien
caggagaaacagtgacgatggtcca

SEQ ID NO: 1475875 - DNA, 25 bp, Homo sapien
agaggcatgggcactgtgttctaag

SEQ ID NO: 1475876 - DNA, 25 bp, Homo sapien
acaaaattcagggtacagacagtgg

SEQ ID NO: 1475877 - DNA, 25 bp, Homo sapien
gggagcatcaactcaatcgctttct

SEQ ID NO: 1475878 - DNA, 25 bp, Homo sapien
agtggctgggagcatcaactcaatc

SEQ ID NO: 1475879 - DNA, 25 bp, Homo sapien
caactcaatcgctttctttctttac

SEQ ID NO: 1475880 - DNA, 25 bp, Homo sapien
ttggattctcaaataatgacctcag

SEQ ID NO: 1475881 - DNA, 25 bp, Homo sapien
tccaagtaatgagagcattgtagtc

SEQ ID NO: 1475882 - DNA, 25 bp, Homo sapien
ggacaatcattaagagactcccctt

SEQ ID NO: 1475883 - DNA, 25 bp, Homo sapien
aatgccccaggtgctatgaagtaca

SEQ ID NO: 1475884 - DNA, 25 bp, Homo sapien
cagagaggtctgcatcaagcaaggt

SEQ ID NO: 1475885 - DNA, 25 bp, Homo sapien
caaggtcttggtctaagcctcatgg

SEQ ID NO: 1475886 - DNA, 25 bp, Homo sapien
tggaagaaatgcacaaccctgacag

SEQ ID NO: 1475887 - DNA, 25 bp, Homo sapien
tcctccttggcatttagaaagggcc

SEQ ID NO: 1475888 - DNA, 25 bp, Homo sapien
caggccagggaaaataatccagtta

SEQ ID NO: 1475889 - DNA, 25 bp, Homo sapien
cagtacgcagatggtcctaaaatag

SEQ ID NO: 1475890 - DNA, 25 bp, Homo sapien
ttttcaggcaacagccagtacgcag

SEQ ID NO: 1475891 - DNA, 25 bp, Homo sapien
tgtaggacacatccctgtttcagag

SEQ ID NO: 1475892 - DNA, 25 bp, Homo sapien
ggcctgtgatccacctttaattaaa

SEQ ID NO: 1475893 - DNA, 25 bp, Homo sapien
ttacatgtaggcctgtgatccacct

SEQ ID NO: 1475894 - DNA, 25 bp, Homo sapien
aaatttttgtgtggtttgaggtatg

SEQ ID NO: 1475895 - DNA, 25 bp, Homo sapien
tatctgaagttcttgcctactccaa

SEQ ID NO: 1475896 - DNA, 25 bp, Homo sapien
aattagcagtgtctctcgtacagag

SEQ ID NO: 1475897 - DNA, 25 bp, Homo sapien
tatggtaacagctacttgcaagagg

SEQ ID NO: 1475898 - DNA, 25 bp, Homo sapien
gcaatgtgccccactaaagtgatga

SEQ ID NO: 1475899 - DNA, 25 bp, Homo sapien
caacaatagttgtggaatgcagcgt

SEQ ID NO: 1475900 - DNA, 25 bp, Homo sapien
ttgttgatttcgcactgtaactcag

SEQ ID NO: 1475901 - DNA, 25 bp, Homo sapien
tcaccatcccttgtgtataaattgg

SEQ ID NO: 1475902 - DNA, 25 bp, Homo sapien
ccctcagatttacgcagcagttttt

SEQ ID NO: 1475903 - DNA, 25 bp, Homo sapien
tcaagttaaaaggacagccctcaga

SEQ ID NO: 1475904 - DNA, 25 bp, Homo sapien
gataattcttttgggaggcatcgcc

SEQ ID NO: 1475905 - DNA, 25 bp, Homo sapien
tcgccatacagtggaaaaagcctgg

SEQ ID NO: 1475906 - DNA, 25 bp, Homo sapien
tagccccttgtatgtgaatttccac

SEQ ID NO: 1475907 - DNA, 25 bp, Homo sapien
tgagtacttacgatatgctaggcgc

SEQ ID NO: 1475908 - DNA, 25 bp, Homo sapien
tccagctcattggtcagtgtggttg

SEQ ID NO: 1475909 - DNA, 25 bp, Homo sapien
gctcattggtcagtgtggttgctct

SEQ ID NO: 1475910 - DNA, 25 bp, Homo sapien
tggtcagtgtggttgctctgtgcat

SEQ ID NO: 1475911 - DNA, 25 bp, Homo sapien
cattggtcagtgtggttgctctgtg

SEQ ID NO: 1475912 - DNA, 25 bp, Homo sapien
taaccaaaggctgctctatggctga

SEQ ID NO: 1475913 - DNA, 25 bp, Homo sapien
cagtaaaaacgatgaagatatttaa

SEQ ID NO: 1475914 - DNA, 25 bp, Homo sapien
taataactgttaatcaactacatag

SEQ ID NO: 1475915 - DNA, 25 bp, Homo sapien
tcactcaggttgtaaccaaaggctg

SEQ ID NO: 1475916 - DNA, 25 bp, Homo sapien
tccatttgccgaggtccgacaagtg

SEQ ID NO: 1475917 - DNA, 25 bp, Homo sapien
aagaaatcccagaggttcacccagg

SEQ ID NO: 1475918 - DNA, 25 bp, Homo sapien
ttatgaatagcactccacaccacgg

SEQ ID NO: 1475919 - DNA, 25 bp, Homo sapien
tcacagaatgatcacggaaggactt

SEQ ID NO: 1475920 - DNA, 25 bp, Homo sapien
tttgcttcagatgagaataggcagc

SEQ ID NO: 1475921 - DNA, 25 bp, Homo sapien
gcatgcaacggatgtacctcttttg

SEQ ID NO: 1475922 - DNA, 25 bp, Homo sapien
gaaagtaattgtttagcatgcaacg

SEQ ID NO: 1475923 - DNA, 25 bp, Homo sapien
tcgtggaaggtttcccgtagctaga

SEQ ID NO: 1475924 - DNA, 25 bp, Homo sapien
cccatacagttagatttgtttagaa

SEQ ID NO: 1475925 - DNA, 25 bp, Homo sapien
gtcgtgttacccataagtcagcagt

SEQ ID NO: 1475926 - DNA, 25 bp, Homo sapien
tcctgttgttgatagatcttcccat

SEQ ID NO: 1475927 - DNA, 25 bp, Homo sapien
ggcccatttgttattgtcgtgttac

SEQ ID NO: 1475928 - DNA, 25 bp, Homo sapien
cctgctgccctaaatgcgaggaaga

SEQ ID NO: 1475929 - DNA, 25 bp, Homo sapien
gcttcagaaggttgatagagagtgc

SEQ ID NO: 1475930 - DNA, 25 bp, Homo sapien
tagagagtgctgatcttgaagacat

SEQ ID NO: 1475931 - DNA, 25 bp, Homo sapien
gaggaagaagccacgttgctggacc

SEQ ID NO: 1475932 - DNA, 25 bp, Homo sapien
tcgttgtgggaaggcggctggagca

SEQ ID NO: 1475933 - DNA, 25 bp, Homo sapien
tgttatcctgagctcgttgtgggaa

SEQ ID NO: 1475934 - DNA, 25 bp, Homo sapien
gtctctgagcggcccgagctgtctg

SEQ ID NO: 1475935 - DNA, 25 bp, Homo sapien
ctgttggtgttatcctgagctcgtt

SEQ ID NO: 1475936 - DNA, 25 bp, Homo sapien
tagattcaccttcagagactggaga

SEQ ID NO: 1475937 - DNA, 25 bp, Homo sapien
ccctcagccgtgcactgggacagtt

SEQ ID NO: 1475938 - DNA, 25 bp, Homo sapien
caaaggagagccatggactgtgtgc

SEQ ID NO: 1475939 - DNA, 25 bp, Homo sapien
acagtggacacctggacttcctctg

SEQ ID NO: 1475940 - DNA, 25 bp, Homo sapien
cacaaaagccttttagaaaagccat

SEQ ID NO: 1475941 - DNA, 25 bp, Homo sapien
tcacaaaagccttttagaaaagcca

SEQ ID NO: 1475942 - DNA, 25 bp, Homo sapien
tgagaggtgtggttgctgccctcaa

SEQ ID NO: 1475943 - DNA, 25 bp, Homo sapien
tgctgccctcaagagacttataaca

SEQ ID NO: 1475944 - DNA, 25 bp, Homo sapien
gagaagtgagaggtgtggttgctgc

SEQ ID NO: 1475945 - DNA, 25 bp, Homo sapien
ttgctgccctcaagagacttataac

SEQ ID NO: 1475946 - DNA, 25 bp, Homo sapien
tatattcggtataaggccatattct

SEQ ID NO: 1475947 - DNA, 25 bp, Homo sapien
tcttaggaagagaatcaatggcttg

SEQ ID NO: 1475948 - DNA, 25 bp, Homo sapien
attatgggtttgtgaaccgttatat

SEQ ID NO: 1475949 - DNA, 25 bp, Homo sapien
ctggtaatatgaccaagtgaagaat

SEQ ID NO: 1475950 - DNA, 25 bp, Homo sapien
tgtatgccagatgcattttgttcat

SEQ ID NO: 1475951 - DNA, 25 bp, Homo sapien
aagagctcctcaatgctattgctga

SEQ ID NO: 1475952 - DNA, 25 bp, Homo sapien
gctcctcaatgctattgctgatctc

SEQ ID NO: 1475953 - DNA, 25 bp, Homo sapien
ttgtgtatgccagatgcattttgtt

SEQ ID NO: 1475954 - DNA, 25 bp, Homo sapien
ccagggtgaatataggtgtttccca

SEQ ID NO: 1475955 - DNA, 25 bp, Homo sapien
tatcccagggggtgctttatgcacg

SEQ ID NO: 1475956 - DNA, 25 bp, Homo sapien
gcacgagggatatggattaagtcca

SEQ ID NO: 1475957 - DNA, 25 bp, Homo sapien
ggtgaatataggtgtttcccagtga

SEQ ID NO: 1475958 - DNA, 25 bp, Homo sapien
ttccagccagcaacattattgtcca

SEQ ID NO: 1475959 - DNA, 25 bp, Homo sapien
gcaacattattgtccacatgccgag

SEQ ID NO: 1475960 - DNA, 25 bp, Homo sapien
agccagcaacattattgtccacatg

SEQ ID NO: 1475961 - DNA, 25 bp, Homo sapien
tattgtccacatgccgagtgtccat

SEQ ID NO: 1475962 - DNA, 25 bp, Homo sapien
tgtcctcacagtcatatcctcaggg

SEQ ID NO: 1475963 - DNA, 25 bp, Homo sapien
ccttagttagaaggccgcagggact

SEQ ID NO: 1475964 - DNA, 25 bp, Homo sapien
gaggctaaatggcttgtagttacac

SEQ ID NO: 1475965 - DNA, 25 bp, Homo sapien
caacgtggagatctggaaaggcaac

SEQ ID NO: 1475966 - DNA, 25 bp, Homo sapien
atatgacttccaagacttccagcac

SEQ ID NO: 1475967 - DNA, 25 bp, Homo sapien
ttccaagacttccagcacagtgaag

SEQ ID NO: 1475968 - DNA, 25 bp, Homo sapien
gcacatggaaaaatgtgggcaccat

SEQ ID NO: 1475969 - DNA, 25 bp, Homo sapien
cagcacagtgaagagcacatggaaa

SEQ ID NO: 1475970 - DNA, 25 bp, Homo sapien
tcaaccttcgacaaggctgaaattt

SEQ ID NO: 1475971 - DNA, 25 bp, Homo sapien
gccgagaagccaatattcactcacc

SEQ ID NO: 1475972 - DNA, 25 bp, Homo sapien
aaattattgttgtgaacataggcct

SEQ ID NO: 1475973 - DNA, 25 bp, Homo sapien
aacataggccttgaagaggaggctg

SEQ ID NO: 1475974 - DNA, 25 bp, Homo sapien
tatacagggtttggcgtctaaagct

SEQ ID NO: 1475975 - DNA, 25 bp, Homo sapien
cttatacagggtttggcgtctaaag

SEQ ID NO: 1475976 - DNA, 25 bp, Homo sapien
ttatacagggtttggcgtctaaagc

SEQ ID NO: 1475977 - DNA, 25 bp, Homo sapien
tacagggtttggcgtctaaagctaa

SEQ ID NO: 1475978 - DNA, 25 bp, Homo sapien
ccagtgcaggtatcaagcaggtttt

SEQ ID NO: 1475979 - DNA, 25 bp, Homo sapien
tgtaggctcctcccctaagagggaa

SEQ ID NO: 1475980 - DNA, 25 bp, Homo sapien
ttttattcaagatccagggaaagcc

SEQ ID NO: 1475981 - DNA, 25 bp, Homo sapien
aggtttttctgggatctacttccag

SEQ ID NO: 1475982 - DNA, 25 bp, Homo sapien
cctctgcttggccaatttggccttt

SEQ ID NO: 1475983 - DNA, 25 bp, Homo sapien
ctctgcttggccaatttggcctttt

SEQ ID NO: 1475984 - DNA, 25 bp, Homo sapien
gccaaatccatttggcataaggagc

SEQ ID NO: 1475985 - DNA, 25 bp, Homo sapien
taagacagttgaggagggcacctcc

SEQ ID NO: 1475986 - DNA, 25 bp, Homo sapien
ttgtaagacagttgaggagggcacc

SEQ ID NO: 1475987 - DNA, 25 bp, Homo sapien
tgtaagacagttgaggagggcacct

SEQ ID NO: 1475988 - DNA, 25 bp, Homo sapien
ctttgtaagacagttgaggagggca

SEQ ID NO: 1475989 - DNA, 25 bp, Homo sapien
tatctactataagcactcgccacat

SEQ ID NO: 1475990 - DNA, 25 bp, Homo sapien
tactataagcactcgccacatagca

SEQ ID NO: 1475991 - DNA, 25 bp, Homo sapien
ctttatctactataagcactcgcca

SEQ ID NO: 1475992 - DNA, 25 bp, Homo sapien
taagcactcgccacatagcaaacat

SEQ ID NO: 1475993 - DNA, 25 bp, Homo sapien
ccattgccattctcataggtccctg

SEQ ID NO: 1475994 - DNA, 25 bp, Homo sapien
gaaccttgccttactaccattgcca

SEQ ID NO: 1475995 - DNA, 25 bp, Homo sapien
cagcatttctttgagcgccctcttt

SEQ ID NO: 1475996 - DNA, 25 bp, Homo sapien
tctcataggtccctgctctactgga

SEQ ID NO: 1475997 - DNA, 25 bp, Homo sapien
tgcctggaagttcttgtgcaggtcc

SEQ ID NO: 1475998 - DNA, 25 bp, Homo sapien
ctgggagataagttgggtccaaaga

SEQ ID NO: 1475999 - DNA, 25 bp, Homo sapien
cagcgtgtcaccaactggtgcttca

SEQ ID NO: 1476000 - DNA, 25 bp, Homo sapien
caaggtacttttaggctgtctggct

SEQ ID NO: 1476001 - DNA, 25 bp, Homo sapien
ggatgggaatcattacactgtcagg

SEQ ID NO: 1476002 - DNA, 25 bp, Homo sapien
tctttccctgtattggacaaccgag

SEQ ID NO: 1476003 - DNA, 25 bp, Homo sapien
tactggcagaatcccatgtttatgt

SEQ ID NO: 1476004 - DNA, 25 bp, Homo sapien
tgaaaggttccacaatcctcctcta

SEQ ID NO: 1476005 - DNA, 25 bp, Homo sapien
gccttcctcctctcgcatgtgttcg

SEQ ID NO: 1476006 - DNA, 25 bp, Homo sapien
gtgttcggggcagatttctggcaca

SEQ ID NO: 1476007 - DNA, 25 bp, Homo sapien
agatgctccgctctgagtctggcct

SEQ ID NO: 1476008 - DNA, 25 bp, Homo sapien
ctgggtcagatgctccgctctgagt

SEQ ID NO: 1476009 - DNA, 25 bp, Homo sapien
tccacagtccttgttatgtcctcct

SEQ ID NO: 1476010 - DNA, 25 bp, Homo sapien
tgccccttgggctcttcatgaggtg

SEQ ID NO: 1476011 - DNA, 25 bp, Homo sapien
tcgcatccagcataaattccacagt

SEQ ID NO: 1476012 - DNA, 25 bp, Homo sapien
tgtaatcctcatctgcaccaggtga

SEQ ID NO: 1476013 - DNA, 25 bp, Homo sapien
ggcggttgtgcaatcgttctcccta

SEQ ID NO: 1476014 - DNA, 25 bp, Homo sapien
tcacttagtggttggttgctgctct

SEQ ID NO: 1476015 - DNA, 25 bp, Homo sapien
cagtcggtctgttcatgagaaaggg

SEQ ID NO: 1476016 - DNA, 25 bp, Homo sapien
tctgagaagtcggttgtgccctgca

SEQ ID NO: 1476017 - DNA, 25 bp, Homo sapien
taaaggagtcacgtgtgggctttct

SEQ ID NO: 1476018 - DNA, 25 bp, Homo sapien
gtgggctgccattcttaaaggagtc

SEQ ID NO: 1476019 - DNA, 25 bp, Homo sapien
tctttgccagaagtaggcatggctt

SEQ ID NO: 1476020 - DNA, 25 bp, Homo sapien
tttgccagaagtaggcatggcttac

SEQ ID NO: 1476021 - DNA, 25 bp, Homo sapien
aaatgactctgcttcccctgcagac

SEQ ID NO: 1476022 - DNA, 25 bp, Homo sapien
tcctgcagttctcatggtaagccat

SEQ ID NO: 1476023 - DNA, 25 bp, Homo sapien
ggaataccagatacgagggagagca

SEQ ID NO: 1476024 - DNA, 25 bp, Homo sapien
cagaaacagaggctgaccattgctg

SEQ ID NO: 1476025 - DNA, 25 bp, Homo sapien
tcatagacgtctcctgaactgcagt

SEQ ID NO: 1476026 - DNA, 25 bp, Homo sapien
tcgccaggcggcacctgtgtgccaa

SEQ ID NO: 1476027 - DNA, 25 bp, Homo sapien
cagcctcgccaggcggcacctgtgt

SEQ ID NO: 1476028 - DNA, 25 bp, Homo sapien
gtgccaagcagcatggcttattcat

SEQ ID NO: 1476029 - DNA, 25 bp, Homo sapien
gtgtgccaagcagcatggcttattc

SEQ ID NO: 1476030 - DNA, 25 bp, Homo sapien
ggccaacgtggtgatgtgcattctg

SEQ ID NO: 1476031 - DNA, 25 bp, Homo sapien
gacttcttatagaggtccacaggaa

SEQ ID NO: 1476032 - DNA, 25 bp, Homo sapien
cacaagggctttgtcgttgatcgac

SEQ ID NO: 1476033 - DNA, 25 bp, Homo sapien
ttcccgtgcttatctggccaacgtg

SEQ ID NO: 1476034 - DNA, 25 bp, Homo sapien
cgtgcagtatgtgagtagccagtgt

SEQ ID NO: 1476035 - DNA, 25 bp, Homo sapien
aagaggacctggcaatgttgagtca

SEQ ID NO: 1476036 - DNA, 25 bp, Homo sapien
ggccaaaagaggacctggcaatgtt

SEQ ID NO: 1476037 - DNA, 25 bp, Homo sapien
caatgttgagtcattgcgtgcagta

SEQ ID NO: 1476038 - DNA, 25 bp, Homo sapien
ctttcggaatatggtggaaccttgc

SEQ ID NO: 1476039 - DNA, 25 bp, Homo sapien
ctccttctttcggaatatggtggaa

SEQ ID NO: 1476040 - DNA, 25 bp, Homo sapien
tcggaatatggtggaaccttgctcc

SEQ ID NO: 1476041 - DNA, 25 bp, Homo sapien
gcttctccttctttcggaatatggt

SEQ ID NO: 1476042 - DNA, 25 bp, Homo sapien
ccagtggatgaagggatatgcagcc

SEQ ID NO: 1476043 - DNA, 25 bp, Homo sapien
tagctgctagtgagcaagatggcct

SEQ ID NO: 1476044 - DNA, 25 bp, Homo sapien
agtcctttctgcttcccggtgatag

SEQ ID NO: 1476045 - DNA, 25 bp, Homo sapien
tatgcatccgtatgaagcactccat

SEQ ID NO: 1476046 - DNA, 25 bp, Homo sapien
tatcctcaccttatctaatctttga

SEQ ID NO: 1476047 - DNA, 25 bp, Homo sapien
gcaaccatgcatttactggtcaatg

SEQ ID NO: 1476048 - DNA, 25 bp, Homo sapien
agaagtgttccaatattatgaattc

SEQ ID NO: 1476049 - DNA, 25 bp, Homo sapien
gtgttgtggagaaaagcaaccatgc

SEQ ID NO: 1476050 - DNA, 25 bp, Homo sapien
gggctcggtacaaatgcatcttgga

SEQ ID NO: 1476051 - DNA, 25 bp, Homo sapien
tagcctcttgagatacggatttgcc

SEQ ID NO: 1476052 - DNA, 25 bp, Homo sapien
tatgttcctccgaagctgtgctgcc

SEQ ID NO: 1476053 - DNA, 25 bp, Homo sapien
gaagagaggaagtccgctttcagct

SEQ ID NO: 1476054 - DNA, 25 bp, Homo sapien
tatgcaatgcagattcaggtactac

SEQ ID NO: 1476055 - DNA, 25 bp, Homo sapien
tcaggtactacttcacgattgctac

SEQ ID NO: 1476056 - DNA, 25 bp, Homo sapien
ctggctgaaagctggtatgcaatgc

SEQ ID NO: 1476057 - DNA, 25 bp, Homo sapien
taatgatgctagtaaagctctctga

SEQ ID NO: 1476058 - DNA, 25 bp, Homo sapien
gatggcagggcttcaaggtgggatg

SEQ ID NO: 1476059 - DNA, 25 bp, Homo sapien
aaggtgggatggttgtggtgggtgc

SEQ ID NO: 1476060 - DNA, 25 bp, Homo sapien
tattgaggagattttcccagaaact

SEQ ID NO: 1476061 - DNA, 25 bp, Homo sapien
ttctcttggagaaggtggaagatct

SEQ ID NO: 1476062 - DNA, 25 bp, Homo sapien
cagccacactccacaaattgtgtac

SEQ ID NO: 1476063 - DNA, 25 bp, Homo sapien
agccacactccacaaattgtgtacc

SEQ ID NO: 1476064 - DNA, 25 bp, Homo sapien
ctttcttgtttctggccgtggcctt

SEQ ID NO: 1476065 - DNA, 25 bp, Homo sapien
gccacactccacaaattgtgtaccc

SEQ ID NO: 1476066 - DNA, 25 bp, Homo sapien
gacaggtactgaacactaagacatt

SEQ ID NO: 1476067 - DNA, 25 bp, Homo sapien
gacagtttgatccacgacaggtact

SEQ ID NO: 1476068 - DNA, 25 bp, Homo sapien
tccacgacaggtactgaacactaag

SEQ ID NO: 1476069 - DNA, 25 bp, Homo sapien
tactgaacactaagacattccggag

SEQ ID NO: 1476070 - DNA, 25 bp, Homo sapien
cccacggaagactttggccccattg

SEQ ID NO: 1476071 - DNA, 25 bp, Homo sapien
attgatagggggcccacggaagact

SEQ ID NO: 1476072 - DNA, 25 bp, Homo sapien
tattgatagggggcccacggaagac

SEQ ID NO: 1476073 - DNA, 25 bp, Homo sapien
acggaagactttggccccattgctg

SEQ ID NO: 1476074 - DNA, 25 bp, Homo sapien
ctggcatgggggcggcaaacgctga

SEQ ID NO: 1476075 - DNA, 25 bp, Homo sapien
ggcatgggggcggcaaacgctgacc

SEQ ID NO: 1476076 - DNA, 25 bp, Homo sapien
gcatgggggcggcaaacgctgaccc

SEQ ID NO: 1476077 - DNA, 25 bp, Homo sapien
catgggggcggcaaacgctgaccct

SEQ ID NO: 1476078 - DNA, 25 bp, Homo sapien
gtagcggctaatgttggtgacaacc

SEQ ID NO: 1476079 - DNA, 25 bp, Homo sapien
agtagcggctaatgttggtgacaac

SEQ ID NO: 1476080 - DNA, 25 bp, Homo sapien
cagtagcggctaatgttggtgacaa

SEQ ID NO: 1476081 - DNA, 25 bp, Homo sapien
aactggtaagtggtaatgaggcagg

SEQ ID NO: 1476082 - DNA, 25 bp, Homo sapien
atcctaattgtcgataaaaaactgg

SEQ ID NO: 1476083 - DNA, 25 bp, Homo sapien
taatgaggcaggaagccgtggatgg

SEQ ID NO: 1476084 - DNA, 25 bp, Homo sapien
aaagctttggattcttcactaatcc

SEQ ID NO: 1476085 - DNA, 25 bp, Homo sapien
cttgggcacacacagctcttggctg

SEQ ID NO: 1476086 - DNA, 25 bp, Homo sapien
ttgggcacacacagctcttggctga

SEQ ID NO: 1476087 - DNA, 25 bp, Homo sapien
tgggcacacacagctcttggctgac

SEQ ID NO: 1476088 - DNA, 25 bp, Homo sapien
cgggccttaaatccagactgctgac

SEQ ID NO: 1476089 - DNA, 25 bp, Homo sapien
tgttcccctgagcttccataatcag

SEQ ID NO: 1476090 - DNA, 25 bp, Homo sapien
tttctggccttgcttcgggccttaa

SEQ ID NO: 1476091 - DNA, 25 bp, Homo sapien
cactcatcggctgaatgttcccctg

SEQ ID NO: 1476092 - DNA, 25 bp, Homo sapien
ctgagcacctacaccgggccaattt

SEQ ID NO: 1476093 - DNA, 25 bp, Homo sapien
gggtcagtcaacatagagggcttgt

SEQ ID NO: 1476094 - DNA, 25 bp, Homo sapien
tcagtcaacatagagggcttgtagc

SEQ ID NO: 1476095 - DNA, 25 bp, Homo sapien
agtcaacatagagggcttgtagctc

SEQ ID NO: 1476096 - DNA, 25 bp, Homo sapien
gctgttgaaagattattgaggccat

SEQ ID NO: 1476097 - DNA, 25 bp, Homo sapien
cagggtgctgttgaaagattattga

SEQ ID NO: 1476098 - DNA, 25 bp, Homo sapien
cttgtctacgtcagggtgctgttga

SEQ ID NO: 1476099 - DNA, 25 bp, Homo sapien
ggtgctgttgaaagattattgaggc

SEQ ID NO: 1476100 - DNA, 25 bp, Homo sapien
agtggcactcacaaaagccatggct

SEQ ID NO: 1476101 - DNA, 25 bp, Homo sapien
gtggcactcacaaaagccatggctt

SEQ ID NO: 1476102 - DNA, 25 bp, Homo sapien
tattaggacgtagcacactcagggc

SEQ ID NO: 1476103 - DNA, 25 bp, Homo sapien
cactcagggccttgataactatcgt

SEQ ID NO: 1476104 - DNA, 25 bp, Homo sapien
gatccttccgttagatgtgatgcca

SEQ ID NO: 1476105 - DNA, 25 bp, Homo sapien
tagggtcataataccctcccaagta

SEQ ID NO: 1476106 - DNA, 25 bp, Homo sapien
acccctgatttgctgtaaacattgc

SEQ ID NO: 1476107 - DNA, 25 bp, Homo sapien
ttcacccctgatttgctgtaaacat

SEQ ID NO: 1476108 - DNA, 25 bp, Homo sapien
cacccctgatttgctgtaaacattg

SEQ ID NO: 1476109 - DNA, 25 bp, Homo sapien
gttcacccctgatttgctgtaaaca

SEQ ID NO: 1476110 - DNA, 25 bp, Homo sapien
gctgtcccatgatgggctctgctct

SEQ ID NO: 1476111 - DNA, 25 bp, Homo sapien
tcctgctgtcccatgatgggctctg

SEQ ID NO: 1476112 - DNA, 25 bp, Homo sapien
tctcctcccctcatttgtcttgagc

SEQ ID NO: 1476113 - DNA, 25 bp, Homo sapien
ctcccctcatttgtcttgagctcat

SEQ ID NO: 1476114 - DNA, 25 bp, Homo sapien
tataggcccaagctatccaaatggt

SEQ ID NO: 1476115 - DNA, 25 bp, Homo sapien
tgaagtcgcagaatcagctgctccc

SEQ ID NO: 1476116 - DNA, 25 bp, Homo sapien
tacactggtgtgtcgcatagagcag

SEQ ID NO: 1476117 - DNA, 25 bp, Homo sapien
tagcagccttgtcagcatacactgg

SEQ ID NO: 1476118 - DNA, 25 bp, Homo sapien
caagagtgatgggaagcagtagggt

SEQ ID NO: 1476119 - DNA, 25 bp, Homo sapien
ctccaagagtgatgggaagcagtag

SEQ ID NO: 1476120 - DNA, 25 bp, Homo sapien
tctccaagagtgatgggaagcagta

SEQ ID NO: 1476121 - DNA, 25 bp, Homo sapien
aagagtgatgggaagcagtagggtg

SEQ ID NO: 1476122 - DNA, 25 bp, Homo sapien
ggttgatgggctaagtacactggcc

SEQ ID NO: 1476123 - DNA, 25 bp, Homo sapien
tagctatgttggcatgacatgggcc

SEQ ID NO: 1476124 - DNA, 25 bp, Homo sapien
ggctaagtacactggcctcagtagg

SEQ ID NO: 1476125 - DNA, 25 bp, Homo sapien
ggagcatcctgcctatggaaggttg

SEQ ID NO: 1476126 - DNA, 25 bp, Homo sapien
tcagtatctcttttccccgggtgta

SEQ ID NO: 1476127 - DNA, 25 bp, Homo sapien
tcagggtggcacttagatgttccga

SEQ ID NO: 1476128 - DNA, 25 bp, Homo sapien
cagcctgatttatttgtggacccgt

SEQ ID NO: 1476129 - DNA, 25 bp, Homo sapien
gggcatgtctacacctgttcagggt

SEQ ID NO: 1476130 - DNA, 25 bp, Homo sapien
agacagtttggtcttccttgcaggc

SEQ ID NO: 1476131 - DNA, 25 bp, Homo sapien
ttggacctgtggatactgcctatgc

SEQ ID NO: 1476132 - DNA, 25 bp, Homo sapien
gcttgtcagaaaggtggcagatccc

SEQ ID NO: 1476133 - DNA, 25 bp, Homo sapien
cagatccctgcttcgaatctcttct

SEQ ID NO: 1476134 - DNA, 25 bp, Homo sapien
gcttgatggatgtcagaacagcagg

SEQ ID NO: 1476135 - DNA, 25 bp, Homo sapien
gctgtggagcgtcttccttccaacc

SEQ ID NO: 1476136 - DNA, 25 bp, Homo sapien
caatcttgagaagtcaggcccggct

SEQ ID NO: 1476137 - DNA, 25 bp, Homo sapien
cctggaacgaagaggccttaacagc

SEQ ID NO: 1476138 - DNA, 25 bp, Homo sapien
gggagtatgaatgggccaccatctc

SEQ ID NO: 1476139 - DNA, 25 bp, Homo sapien
cctcttgggagtatgaatgggccac

SEQ ID NO: 1476140 - DNA, 25 bp, Homo sapien
tcttgggagtatgaatgggccacca

SEQ ID NO: 1476141 - DNA, 25 bp, Homo sapien
tcctccagtcctgtacttccactgc

SEQ ID NO: 1476142 - DNA, 25 bp, Homo sapien
tgtcctttgtgaggccaagtcccct

SEQ ID NO: 1476143 - DNA, 25 bp, Homo sapien
tgactgttactctgaccttggtggg

SEQ ID NO: 1476144 - DNA, 25 bp, Homo sapien
ggagacatgcccagactgtgcacag

SEQ ID NO: 1476145 - DNA, 25 bp, Homo sapien
tcaagttacaagctcgccagaggtg

SEQ ID NO: 1476146 - DNA, 25 bp, Homo sapien
cagaggttgctggtttggctgactc

SEQ ID NO: 1476147 - DNA, 25 bp, Homo sapien
gctgctgtgggagcgaggaccccag

SEQ ID NO: 1476148 - DNA, 25 bp, Homo sapien
caccagtgtgcctttggagaaggct

SEQ ID NO: 1476149 - DNA, 25 bp, Homo sapien
cccacagatgggcatggccaagtgt

SEQ ID NO: 1476150 - DNA, 25 bp, Homo sapien
ggttcagtgtggagcaaatgcgtga

SEQ ID NO: 1476151 - DNA, 25 bp, Homo sapien
gggttcagtgtggagcaaatgcgtg

SEQ ID NO: 1476152 - DNA, 25 bp, Homo sapien
agtgtggagcaaatgcgtgaggcac

SEQ ID NO: 1476153 - DNA, 25 bp, Homo sapien
tcagtgtggagcaaatgcgtgaggc

SEQ ID NO: 1476154 - DNA, 25 bp, Homo sapien
gagtgggcacgctccctttggaagt

SEQ ID NO: 1476155 - DNA, 25 bp, Homo sapien
tgccaggaccacatgtacttcaatg

SEQ ID NO: 1476156 - DNA, 25 bp, Homo sapien
cacatgtacttcaatggccagggtc

SEQ ID NO: 1476157 - DNA, 25 bp, Homo sapien
gtctgtgcacccctggagtgggcac

SEQ ID NO: 1476158 - DNA, 25 bp, Homo sapien
gacttcagccatgggagcaggtccg

SEQ ID NO: 1476159 - DNA, 25 bp, Homo sapien
gaagcaagcactcgccatggatggt

SEQ ID NO: 1476160 - DNA, 25 bp, Homo sapien
gcaggtccggtgctgaaattagcag

SEQ ID NO: 1476161 - DNA, 25 bp, Homo sapien
tttgggaagggcaccactcgcagtt

SEQ ID NO: 1476162 - DNA, 25 bp, Homo sapien
acctgccagaccccttttcagggag

SEQ ID NO: 1476163 - DNA, 25 bp, Homo sapien
cctgccagaccccttttcagggagt

SEQ ID NO: 1476164 - DNA, 25 bp, Homo sapien
tgccagaccccttttcagggagtct

SEQ ID NO: 1476165 - DNA, 25 bp, Homo sapien
agaacctgccagaccccttttcagg

SEQ ID NO: 1476166 - DNA, 25 bp, Homo sapien
ccctgaatcaagtggcttaacagac

SEQ ID NO: 1476167 - DNA, 25 bp, Homo sapien
ctcagcagccctgaatcaagtggct

SEQ ID NO: 1476168 - DNA, 25 bp, Homo sapien
gatgcagagatgagctcagcagccc

SEQ ID NO: 1476169 - DNA, 25 bp, Homo sapien
gagatgcagagatgagctcagcagc

SEQ ID NO: 1476170 - DNA, 25 bp, Homo sapien
cactttgccctgagctaggaagaac

SEQ ID NO: 1476171 - DNA, 25 bp, Homo sapien
tgtagcctccaagaaatccactttg

SEQ ID NO: 1476172 - DNA, 25 bp, Homo sapien
cctgtcgttgggttctttgagctac

SEQ ID NO: 1476173 - DNA, 25 bp, Homo sapien
cagaccccagttgtggtcccacgtg

SEQ ID NO: 1476174 - DNA, 25 bp, Homo sapien
ccagtggcggagatgccctgcattt

SEQ ID NO: 1476175 - DNA, 25 bp, Homo sapien
ctcccagtggcggagatgccctgca

SEQ ID NO: 1476176 - DNA, 25 bp, Homo sapien
agtggcggagatgccctgcatttcc

SEQ ID NO: 1476177 - DNA, 25 bp, Homo sapien
ggtcactcccagtggcggagatgcc

SEQ ID NO: 1476178 - DNA, 25 bp, Homo sapien
ctgtcgtcgtccaattgattttgat

SEQ ID NO: 1476179 - DNA, 25 bp, Homo sapien
caattgattttgatcaggtgcccca

SEQ ID NO: 1476180 - DNA, 25 bp, Homo sapien
gaagcagatcgagtccacctgtgca

SEQ ID NO: 1476181 - DNA, 25 bp, Homo sapien
actttgagaagcagatcgagtccac

SEQ ID NO: 1476182 - DNA, 25 bp, Homo sapien
tgctgctcctaaacaccccttttcc

SEQ ID NO: 1476183 - DNA, 25 bp, Homo sapien
ctgctcctaaacaccccttttccag

SEQ ID NO: 1476184 - DNA, 25 bp, Homo sapien
ccttttccagctgcggccggggtca

SEQ ID NO: 1476185 - DNA, 25 bp, Homo sapien
ggatgctgctcctaaacaccccttt

SEQ ID NO: 1476186 - DNA, 25 bp, Homo sapien
gagcacatttcatcaatggctgggg

SEQ ID NO: 1476187 - DNA, 25 bp, Homo sapien
atgaggccatcgccggaagccaacg

SEQ ID NO: 1476188 - DNA, 25 bp, Homo sapien
ccaggaccccacagtcaaccctctg

SEQ ID NO: 1476189 - DNA, 25 bp, Homo sapien
atcgccggaagccaacgcccaggac

SEQ ID NO: 1476190 - DNA, 25 bp, Homo sapien
actcatgcctgttgccggagtaatg

SEQ ID NO: 1476191 - DNA, 25 bp, Homo sapien
tgcctgttgccggagtaatgtcctc

SEQ ID NO: 1476192 - DNA, 25 bp, Homo sapien
ctcatgcctgttgccggagtaatgt

SEQ ID NO: 1476193 - DNA, 25 bp, Homo sapien
ctgttgccggagtaatgtcctctgg

SEQ ID NO: 1476194 - DNA, 25 bp, Homo sapien
tccattcccttctgcttggggccca

SEQ ID NO: 1476195 - DNA, 25 bp, Homo sapien
tggggcccattcacacaagccctcc

SEQ ID NO: 1476196 - DNA, 25 bp, Homo sapien
cttcaccctcccaacaagtttatct

SEQ ID NO: 1476197 - DNA, 25 bp, Homo sapien
aagtttatctccatacactccattc

SEQ ID NO: 1476198 - DNA, 25 bp, Homo sapien
cccctgagcaaggatagaggcccct

SEQ ID NO: 1476199 - DNA, 25 bp, Homo sapien
gcagagtggcttggaccaggcctct

SEQ ID NO: 1476200 - DNA, 25 bp, Homo sapien
ctgcagagtggcttggaccaggcct

SEQ ID NO: 1476201 - DNA, 25 bp, Homo sapien
ctctcccctgagcaaggatagaggc

SEQ ID NO: 1476202 - DNA, 25 bp, Homo sapien
tccggactttcttggctggccagct

SEQ ID NO: 1476203 - DNA, 25 bp, Homo sapien
cagctcccttttgtctaactgccat

SEQ ID NO: 1476204 - DNA, 25 bp, Homo sapien
ttttccggactttcttggctggcca

SEQ ID NO: 1476205 - DNA, 25 bp, Homo sapien
ctggccagctcccttttgtctaact

SEQ ID NO: 1476206 - DNA, 25 bp, Homo sapien
tgaaatgattaactcgggctccaca

SEQ ID NO: 1476207 - DNA, 25 bp, Homo sapien
gcctctgatctgctgacatcctgca

SEQ ID NO: 1476208 - DNA, 25 bp, Homo sapien
ccaggaagcctgtagatgtaggttc

SEQ ID NO: 1476209 - DNA, 25 bp, Homo sapien
aacccgtgatgtgatggcttctttg

SEQ ID NO: 1476210 - DNA, 25 bp, Homo sapien
agataagaaccagaggagtttactt

SEQ ID NO: 1476211 - DNA, 25 bp, Homo sapien
gaaccagaggagtttacttggataa

SEQ ID NO: 1476212 - DNA, 25 bp, Homo sapien
taagaaccagaggagtttacttgga

SEQ ID NO: 1476213 - DNA, 25 bp, Homo sapien
cagaggagtttacttggataactgc

SEQ ID NO: 1476214 - DNA, 25 bp, Homo sapien
agattgtcttttcttacgggctgtt

SEQ ID NO: 1476215 - DNA, 25 bp, Homo sapien
aaatgaaagattgtcttttcttacg

SEQ ID NO: 1476216 - DNA, 25 bp, Homo sapien
tgaaagattgtcttttcttacgggc

SEQ ID NO: 1476217 - DNA, 25 bp, Homo sapien
tgtcttttcttacgggctgtttcca

SEQ ID NO: 1476218 - DNA, 25 bp, Homo sapien
gattactgctctcattactacttca

SEQ ID NO: 1476219 - DNA, 25 bp, Homo sapien
agccaggtgtcatatttgtggatta

SEQ ID NO: 1476220 - DNA, 25 bp, Homo sapien
attactgctctcattactacttcac

SEQ ID NO: 1476221 - DNA, 25 bp, Homo sapien
agctgagagtcctggccagggtttc

SEQ ID NO: 1476222 - DNA, 25 bp, Homo sapien
tttagaagcctcaggtgcgagccct

SEQ ID NO: 1476223 - DNA, 25 bp, Homo sapien
gggtagacctgctttagaagcctca

SEQ ID NO: 1476224 - DNA, 25 bp, Homo sapien
gagccctgaattcgtgtgtcctgag

SEQ ID NO: 1476225 - DNA, 25 bp, Homo sapien
agtggatgctaagagtggccagcca

SEQ ID NO: 1476226 - DNA, 25 bp, Homo sapien
gggcagtggatgctaagagtggcca

SEQ ID NO: 1476227 - DNA, 25 bp, Homo sapien
tgggcagtggatgctaagagtggcc

SEQ ID NO: 1476228 - DNA, 25 bp, Homo sapien
gcagtggatgctaagagtggccagc

SEQ ID NO: 1476229 - DNA, 25 bp, Homo sapien
tggcagacaagaggatctgcaagtg

SEQ ID NO: 1476230 - DNA, 25 bp, Homo sapien
catggcagacaagaggatctgcaag

SEQ ID NO: 1476231 - DNA, 25 bp, Homo sapien
gcagacaagaggatctgcaagtgtg

SEQ ID NO: 1476232 - DNA, 25 bp, Homo sapien
agacaagaggatctgcaagtgtgcg

SEQ ID NO: 1476233 - DNA, 25 bp, Homo sapien
aatttgcctttacaaccagattgta

SEQ ID NO: 1476234 - DNA, 25 bp, Homo sapien
ctaaaatttgcctttacaaccagat

SEQ ID NO: 1476235 - DNA, 25 bp, Homo sapien
ttacaaccagattgtaaatttcaca

SEQ ID NO: 1476236 - DNA, 25 bp, Homo sapien
ttctcagcagtccaccatttttcca

SEQ ID NO: 1476237 - DNA, 25 bp, Homo sapien
tcttgaagctgacatggcgtctggt

SEQ ID NO: 1476238 - DNA, 25 bp, Homo sapien
tccaggcacacgcagtagccaaaaa

SEQ ID NO: 1476239 - DNA, 25 bp, Homo sapien
agtcagctgctagctcttgaagctg

SEQ ID NO: 1476240 - DNA, 25 bp, Homo sapien
tggcgtctggtcacaggcttcatcc

SEQ ID NO: 1476241 - DNA, 25 bp, Homo sapien
cacccttcagccactgcggcaccat

SEQ ID NO: 1476242 - DNA, 25 bp, Homo sapien
cttcgccctcctggtactcagttgt

SEQ ID NO: 1476243 - DNA, 25 bp, Homo sapien
ccacacccttcagccactgcggcac

SEQ ID NO: 1476244 - DNA, 25 bp, Homo sapien
tggtactcagttgtcccacaccctt

SEQ ID NO: 1476245 - DNA, 25 bp, Homo sapien
ccccatcccattgtctaatgggaaa

SEQ ID NO: 1476246 - DNA, 25 bp, Homo sapien
tcatgatatgtgcaaaatgtgcccc

SEQ ID NO: 1476247 - DNA, 25 bp, Homo sapien
caatgttgggcctaatgtcatgata

SEQ ID NO: 1476248 - DNA, 25 bp, Homo sapien
ggaaatgactgtgcaatgttgggcc

SEQ ID NO: 1476249 - DNA, 25 bp, Homo sapien
tcaaccttgcattgccaatagcagc

SEQ ID NO: 1476250 - DNA, 25 bp, Homo sapien
gctgtaggttttgtgggagagccct

SEQ ID NO: 1476251 - DNA, 25 bp, Homo sapien
aggttttgtgggagagccctgtcca

SEQ ID NO: 1476252 - DNA, 25 bp, Homo sapien
aatagcagctgtgggctgtaggttt

SEQ ID NO: 1476253 - DNA, 25 bp, Homo sapien
gcctctaagctggagtgtctgagat

SEQ ID NO: 1476254 - DNA, 25 bp, Homo sapien
tgggagctcacagtggtttaggcaa

SEQ ID NO: 1476255 - DNA, 25 bp, Homo sapien
caactctgcaggattgatgcacccc

SEQ ID NO: 1476256 - DNA, 25 bp, Homo sapien
cagcctctaagctggagtgtctgag

SEQ ID NO: 1476257 - DNA, 25 bp, Homo sapien
cttctatgcttcttgggttcattat

SEQ ID NO: 1476258 - DNA, 25 bp, Homo sapien
tccttctatgcttcttgggttcatt

SEQ ID NO: 1476259 - DNA, 25 bp, Homo sapien
ttcctcttgccaacactctccttct

SEQ ID NO: 1476260 - DNA, 25 bp, Homo sapien
tctatgcttcttgggttcattatta

SEQ ID NO: 1476261 - DNA, 25 bp, Homo sapien
tcccaatacgagctcaaacagatga

SEQ ID NO: 1476262 - DNA, 25 bp, Homo sapien
cagatgaaatgtgggtacaactcag

SEQ ID NO: 1476263 - DNA, 25 bp, Homo sapien
ttgcaacacaaaggcaaatgctccg

SEQ ID NO: 1476264 - DNA, 25 bp, Homo sapien
catttctttgtcagaggccgccagc

SEQ ID NO: 1476265 - DNA, 25 bp, Homo sapien
gagcttttggggcactaaaagccaa

SEQ ID NO: 1476266 - DNA, 25 bp, Homo sapien
agcttttggggcactaaaagccaag

SEQ ID NO: 1476267 - DNA, 25 bp, Homo sapien
tcagcaggagcttttggggcactaa

SEQ ID NO: 1476268 - DNA, 25 bp, Homo sapien
gcaggagcttttggggcactaaaag

SEQ ID NO: 1476269 - DNA, 25 bp, Homo sapien
gcgtagctgcttataaaactgtcca

SEQ ID NO: 1476270 - DNA, 25 bp, Homo sapien
gtggcttatagaattgcccacattt

SEQ ID NO: 1476271 - DNA, 25 bp, Homo sapien
tgtggcttatagaactgctcatatt

SEQ ID NO: 1476272 - DNA, 25 bp, Homo sapien
gctcatatttcacgtagcatagctg

SEQ ID NO: 1476273 - DNA, 25 bp, Homo sapien
tgtgtttcttgcaacatgatctggg

SEQ ID NO: 1476274 - DNA, 25 bp, Homo sapien
gtcacttgtgtttcttgcaacatga

SEQ ID NO: 1476275 - DNA, 25 bp, Homo sapien
cacttgtgtttcttgcaacatgatc

SEQ ID NO: 1476276 - DNA, 25 bp, Homo sapien
tttcttgcaacatgatctgggcctg

SEQ ID NO: 1476277 - DNA, 25 bp, Homo sapien
tgtgtttgctcccacttggcagcca

SEQ ID NO: 1476278 - DNA, 25 bp, Homo sapien
gaggtctggcaaatgccctagggct

SEQ ID NO: 1476279 - DNA, 25 bp, Homo sapien
ggttgctgcctagagaaagtgccat

SEQ ID NO: 1476280 - DNA, 25 bp, Homo sapien
tgtcagcctgaggaaggaagtctcc

SEQ ID NO: 1476281 - DNA, 25 bp, Homo sapien
ttgggaagtgtctcccccgcagctg

SEQ ID NO: 1476282 - DNA, 25 bp, Homo sapien
cttccaagcctttcccttcattgtc

SEQ ID NO: 1476283 - DNA, 25 bp, Homo sapien
cccagagactgcgtgttgaatttca

SEQ ID NO: 1476284 - DNA, 25 bp, Homo sapien
tgttgaatttcatgatgaactcaga

SEQ ID NO: 1476285 - DNA, 25 bp, Homo sapien
ttcaacgcccagagactgcgtgttg

SEQ ID NO: 1476286 - DNA, 25 bp, Homo sapien
gattaaagtcaaggctgtgagtcca

SEQ ID NO: 1476287 - DNA, 25 bp, Homo sapien
gccaggcttgagatcacgggccctt

SEQ ID NO: 1476288 - DNA, 25 bp, Homo sapien
tgagcaatgcgcttgagcaactagc

SEQ ID NO: 1476289 - DNA, 25 bp, Homo sapien
tgccatgcacgtacagaagggctga

SEQ ID NO: 1476290 - DNA, 25 bp, Homo sapien
taggacgagtgggtggagatgtccg

SEQ ID NO: 1476291 - DNA, 25 bp, Homo sapien
gggcatgttgaatttaggacgagtg

SEQ ID NO: 1476292 - DNA, 25 bp, Homo sapien
ttggaagtggatatggactggggat

SEQ ID NO: 1476293 - DNA, 25 bp, Homo sapien
atgaggaagaatgttgaagtcagtt

SEQ ID NO: 1476294 - DNA, 25 bp, Homo sapien
ggatcgccagaggaccaggtgtttt

SEQ ID NO: 1476295 - DNA, 25 bp, Homo sapien
cggtgaaggaggcgtctttgatcat

SEQ ID NO: 1476296 - DNA, 25 bp, Homo sapien
cagttaactgatggatcgccagagg

SEQ ID NO: 1476297 - DNA, 25 bp, Homo sapien
cagagggccttgtagacacggtgaa

SEQ ID NO: 1476298 - DNA, 25 bp, Homo sapien
gcagccagactcaatggttggagaa

SEQ ID NO: 1476299 - DNA, 25 bp, Homo sapien
gctcaggactggcacagcatcactt

SEQ ID NO: 1476300 - DNA, 25 bp, Homo sapien
gggttccaagatcaaaagcatatgt

SEQ ID NO: 1476301 - DNA, 25 bp, Homo sapien
gaaatcaactccaccgcttgacagg

SEQ ID NO: 1476302 - DNA, 25 bp, Homo sapien
tagcctgtagatcctttaagttgtg

SEQ ID NO: 1476303 - DNA, 25 bp, Homo sapien
gcctttggttcttggatagcctgta

SEQ ID NO: 1476304 - DNA, 25 bp, Homo sapien
tctggacttcctgttgcgaggcagc

SEQ ID NO: 1476305 - DNA, 25 bp, Homo sapien
caaatatgatgtcccgtcttctgga

SEQ ID NO: 1476306 - DNA, 25 bp, Homo sapien
tccattttgtccccttcgagtagag

SEQ ID NO: 1476307 - DNA, 25 bp, Homo sapien
tctctgcttggaggttttagccttt

SEQ ID NO: 1476308 - DNA, 25 bp, Homo sapien
ccgttctaccaacagagagaactgg

SEQ ID NO: 1476309 - DNA, 25 bp, Homo sapien
caactttcatatcccgttctaccaa

SEQ ID NO: 1476310 - DNA, 25 bp, Homo sapien
gtccaaagcctgtgacaactcccaa

SEQ ID NO: 1476311 - DNA, 25 bp, Homo sapien
tgcctgggcgtctgcctgtgtctca

SEQ ID NO: 1476312 - DNA, 25 bp, Homo sapien
gggacatctgcgtgtctgaggtttt

SEQ ID NO: 1476313 - DNA, 25 bp, Homo sapien
ctctggaaagagtgactgttctggg

SEQ ID NO: 1476314 - DNA, 25 bp, Homo sapien
ctgaggtttttcctgctagtcagac

SEQ ID NO: 1476315 - DNA, 25 bp, Homo sapien
cagacgcactgttgccaagcagagc

SEQ ID NO: 1476316 - DNA, 25 bp, Homo sapien
gacaggtggatcagacgcactgttg

SEQ ID NO: 1476317 - DNA, 25 bp, Homo sapien
tcaaaataaggatatacctgacagg

SEQ ID NO: 1476318 - DNA, 25 bp, Homo sapien
taaggatatacctgacaggtggatc

SEQ ID NO: 1476319 - DNA, 25 bp, Homo sapien
tgtaaaaacatgaaacacgggtatc

SEQ ID NO: 1476320 - DNA, 25 bp, Homo sapien
aaatcccagtacagagccaagcagc

SEQ ID NO: 1476321 - DNA, 25 bp, Homo sapien
aggaccacatcagggaaggcccctg

SEQ ID NO: 1476322 - DNA, 25 bp, Homo sapien
gatcacacagtgaggaggtgtcacc

SEQ ID NO: 1476323 - DNA, 25 bp, Homo sapien
ccattggtggttccaattacatcgt

SEQ ID NO: 1476324 - DNA, 25 bp, Homo sapien
tctgccattggtggttccaattaca

SEQ ID NO: 1476325 - DNA, 25 bp, Homo sapien
tgtctgccattggtggttccaatta

SEQ ID NO: 1476326 - DNA, 25 bp, Homo sapien
ttctgtgtctgccattggtggttcc

SEQ ID NO: 1476327 - DNA, 25 bp, Homo sapien
gacccatgagtaaaaacaagcagca

SEQ ID NO: 1476328 - DNA, 25 bp, Homo sapien
tctgctgtcttgtcaaaccacacag

SEQ ID NO: 1476329 - DNA, 25 bp, Homo sapien
aagagcgtgcacaagctccctgtcc

SEQ ID NO: 1476330 - DNA, 25 bp, Homo sapien
tccccgtgcctcttgtagggtgcag

SEQ ID NO: 1476331 - DNA, 25 bp, Homo sapien
cagtatctgtgcagttgttattcct

SEQ ID NO: 1476332 - DNA, 25 bp, Homo sapien
tagggaggggcgacagtatctgtgc

SEQ ID NO: 1476333 - DNA, 25 bp, Homo sapien
tgcagttgttattccttgaggcatt

SEQ ID NO: 1476334 - DNA, 25 bp, Homo sapien
tctgtgcagttgttattccttgagg

SEQ ID NO: 1476335 - DNA, 25 bp, Homo sapien
aatagcaactggtctcatacgtgag

SEQ ID NO: 1476336 - DNA, 25 bp, Homo sapien
caaatagcaactggtctcatacgtg

SEQ ID NO: 1476337 - DNA, 25 bp, Homo sapien
aacaaatagcaactggtctcatacg

SEQ ID NO: 1476338 - DNA, 25 bp, Homo sapien
agaacaaatagcaactggtctcata

SEQ ID NO: 1476339 - DNA, 25 bp, Homo sapien
ctgtccctctagtgaggacacctcg

SEQ ID NO: 1476340 - DNA, 25 bp, Homo sapien
tgactgtccctctagtgaggacacc

SEQ ID NO: 1476341 - DNA, 25 bp, Homo sapien
attgactgtccctctagtgaggaca

SEQ ID NO: 1476342 - DNA, 25 bp, Homo sapien
gtccctctagtgaggacacctcggc

SEQ ID NO: 1476343 - DNA, 25 bp, Homo sapien
ggtggtgagtcagcccatctgcact

SEQ ID NO: 1476344 - DNA, 25 bp, Homo sapien
tgcaactctcgctgctgaggatgca

SEQ ID NO: 1476345 - DNA, 25 bp, Homo sapien
tgagctccgaattgcattgcgtggg

SEQ ID NO: 1476346 - DNA, 25 bp, Homo sapien
taagttgtatctgcaactctcgctg

SEQ ID NO: 1476347 - DNA, 25 bp, Homo sapien
ttctcctaacctcaacatcgggaca

SEQ ID NO: 1476348 - DNA, 25 bp, Homo sapien
tagcaagcatagactccttctcagt

SEQ ID NO: 1476349 - DNA, 25 bp, Homo sapien
ctcaacatcgggacacttggcaaag

SEQ ID NO: 1476350 - DNA, 25 bp, Homo sapien
gggcacagggcatctgtagcaagca

SEQ ID NO: 1476351 - DNA, 25 bp, Homo sapien
tgttcgatgaccaggggagatatta

SEQ ID NO: 1476352 - DNA, 25 bp, Homo sapien
ccttgcgtatgctctggtgttcgat

SEQ ID NO: 1476353 - DNA, 25 bp, Homo sapien
gggagatattactatgggagccagg

SEQ ID NO: 1476354 - DNA, 25 bp, Homo sapien
tctacacttgtaccttgcgtatgct

SEQ ID NO: 1476355 - DNA, 25 bp, Homo sapien
taaagtgaagggattggtctcctcc

SEQ ID NO: 1476356 - DNA, 25 bp, Homo sapien
accgtatatctagaacttagtcttc

SEQ ID NO: 1476357 - DNA, 25 bp, Homo sapien
agaacttagtcttctataaagtgaa

SEQ ID NO: 1476358 - DNA, 25 bp, Homo sapien
ctcttcaaccgtatatctagaactt

SEQ ID NO: 1476359 - DNA, 25 bp, Homo sapien
gtgacacaatcgttccatccagtag

SEQ ID NO: 1476360 - DNA, 25 bp, Homo sapien
gagtttgacctgaaagtagtgggcc

SEQ ID NO: 1476361 - DNA, 25 bp, Homo sapien
gaatctgaggctatttaatgatccc

SEQ ID NO: 1476362 - DNA, 25 bp, Homo sapien
caaggagcaggtgattttcctattc

SEQ ID NO: 1476363 - DNA, 25 bp, Homo sapien
gttcagagaatagtgtccgccacac

SEQ ID NO: 1476364 - DNA, 25 bp, Homo sapien
tctgggattctatgagaaaggagct

SEQ ID NO: 1476365 - DNA, 25 bp, Homo sapien
tactccttcctgaaatcgatctggg

SEQ ID NO: 1476366 - DNA, 25 bp, Homo sapien
aggcagtcttgcgtaaattacttca

SEQ ID NO: 1476367 - DNA, 25 bp, Homo sapien
aaaatggtaaagcaatacaaacaat

SEQ ID NO: 1476368 - DNA, 25 bp, Homo sapien
gcaatacaaacaatgtgttactagc

SEQ ID NO: 1476369 - DNA, 25 bp, Homo sapien
acaatgtgttactagcagcatccag

SEQ ID NO: 1476370 - DNA, 25 bp, Homo sapien
gcatccagtcgttagaatctctcac

SEQ ID NO: 1476371 - DNA, 25 bp, Homo sapien
tcatcgtagtgcaggccaaaccaaa

SEQ ID NO: 1476372 - DNA, 25 bp, Homo sapien
cactcggtgagccatttacaaggca

SEQ ID NO: 1476373 - DNA, 25 bp, Homo sapien
gaagtgactactgaccactcggtga

SEQ ID NO: 1476374 - DNA, 25 bp, Homo sapien
cattgtacaagtggttccgctggct

SEQ ID NO: 1476375 - DNA, 25 bp, Homo sapien
gtactatgcctcctttcttattgct

SEQ ID NO: 1476376 - DNA, 25 bp, Homo sapien
aactatgtactatgcctcctttctt

SEQ ID NO: 1476377 - DNA, 25 bp, Homo sapien
ttgctatggtaatgtggctgtggaa

SEQ ID NO: 1476378 - DNA, 25 bp, Homo sapien
cttattgctatggtaatgtggctgt

SEQ ID NO: 1476379 - DNA, 25 bp, Homo sapien
catctacgattggttgaaagcacac

SEQ ID NO: 1476380 - DNA, 25 bp, Homo sapien
cctgctgtggtgaatggtgctacac

SEQ ID NO: 1476381 - DNA, 25 bp, Homo sapien
gaaaaaggtctcaactgtcgccagg

SEQ ID NO: 1476382 - DNA, 25 bp, Homo sapien
ttaccgagaaagagtcgaggctccc

SEQ ID NO: 1476383 - DNA, 25 bp, Homo sapien
tgtcctgtctcaggtgctgcacttc

SEQ ID NO: 1476384 - DNA, 25 bp, Homo sapien
ttctgtgaatttccgcagctgagct

SEQ ID NO: 1476385 - DNA, 25 bp, Homo sapien
tgagctgtcgcggtctgggactcct

SEQ ID NO: 1476386 - DNA, 25 bp, Homo sapien
ttttgtcgatggtggtgaaaaacca

SEQ ID NO: 1476387 - DNA, 25 bp, Homo sapien
ttcaatttatctgtagtagttataa

SEQ ID NO: 1476388 - DNA, 25 bp, Homo sapien
tatctgtagtagttataaggggctg

SEQ ID NO: 1476389 - DNA, 25 bp, Homo sapien
ttttcaatttatctgtagtagttat

SEQ ID NO: 1476390 - DNA, 25 bp, Homo sapien
aatttatctgtagtagttataaggg

SEQ ID NO: 1476391 - DNA, 25 bp, Homo sapien
ttgactttcccggtcagtggtgatg

SEQ ID NO: 1476392 - DNA, 25 bp, Homo sapien
tggagttgtcgaagaattaattcca

SEQ ID NO: 1476393 - DNA, 25 bp, Homo sapien
aagaattaattccagctgattgact

SEQ ID NO: 1476394 - DNA, 25 bp, Homo sapien
agctgattgactttcccggtcagtg

SEQ ID NO: 1476395 - DNA, 25 bp, Homo sapien
ttatgtcagaatgggaaagtgtcca

SEQ ID NO: 1476396 - DNA, 25 bp, Homo sapien
aagtgtccatattgctgatctagtg

SEQ ID NO: 1476397 - DNA, 25 bp, Homo sapien
gatgcagaaactctatagatatacg

SEQ ID NO: 1476398 - DNA, 25 bp, Homo sapien
aattatttcatgtgcttagagccca

SEQ ID NO: 1476399 - DNA, 25 bp, Homo sapien
ccaacatatttcagtggagggcatg

SEQ ID NO: 1476400 - DNA, 25 bp, Homo sapien
tcggcgagttatccctgcatggtgc

SEQ ID NO: 1476401 - DNA, 25 bp, Homo sapien
acagtgaggctcgtcaccatgggca

SEQ ID NO: 1476402 - DNA, 25 bp, Homo sapien
ggcacagggtcacaagtcttggcag

SEQ ID NO: 1476403 - DNA, 25 bp, Homo sapien
catgctgcatatctgtcagggtgca

SEQ ID NO: 1476404 - DNA, 25 bp, Homo sapien
gtgcagaaggatgccaccctctggt

SEQ ID NO: 1476405 - DNA, 25 bp, Homo sapien
gatctacacataagggcagctcttg

SEQ ID NO: 1476406 - DNA, 25 bp, Homo sapien
gccactgcctggatctacacataag

SEQ ID NO: 1476407 - DNA, 25 bp, Homo sapien
gaaagaagggttagtaatcaatgca

SEQ ID NO: 1476408 - DNA, 25 bp, Homo sapien
ggttagtaatcaatgcaaggcaatg

SEQ ID NO: 1476409 - DNA, 25 bp, Homo sapien
acacagaaagaagggttagtaatca

SEQ ID NO: 1476410 - DNA, 25 bp, Homo sapien
aagggttagtaatcaatgcaaggca

SEQ ID NO: 1476411 - DNA, 25 bp, Homo sapien
gtgtggtgacagagcagccccagtt

SEQ ID NO: 1476412 - DNA, 25 bp, Homo sapien
taggacgtgtggtgacagagcagcc

SEQ ID NO: 1476413 - DNA, 25 bp, Homo sapien
ctagataggacgtgtggtgacagag

SEQ ID NO: 1476414 - DNA, 25 bp, Homo sapien
gataggacgtgtggtgacagagcag

SEQ ID NO: 1476415 - DNA, 25 bp, Homo sapien
gatggcgatctctaccaccaactgg

SEQ ID NO: 1476416 - DNA, 25 bp, Homo sapien
cccaaacagctatgggaagatggcg

SEQ ID NO: 1476417 - DNA, 25 bp, Homo sapien
tgctctgtttaagaaaccaagggcc

SEQ ID NO: 1476418 - DNA, 25 bp, Homo sapien
ggcagcaacatggaatccagagtct

SEQ ID NO: 1476419 - DNA, 25 bp, Homo sapien
tgaaaacaacattatccattcaaca

SEQ ID NO: 1476420 - DNA, 25 bp, Homo sapien
gtttgacccatagccaggttttctg

SEQ ID NO: 1476421 - DNA, 25 bp, Homo sapien
cctagagcttttgaagagactccac

SEQ ID NO: 1476422 - DNA, 25 bp, Homo sapien
actgtttgacccatagccaggtttt

SEQ ID NO: 1476423 - DNA, 25 bp, Homo sapien
tctgatgaatgagagctactcaaaa

SEQ ID NO: 1476424 - DNA, 25 bp, Homo sapien
acattatcaggtacccccaaacttg

SEQ ID NO: 1476425 - DNA, 25 bp, Homo sapien
tatcaggtacccccaaacttgacat

SEQ ID NO: 1476426 - DNA, 25 bp, Homo sapien
cattatcaggtacccccaaacttga

SEQ ID NO: 1476427 - DNA, 25 bp, Homo sapien
ttatcaggtacccccaaacttgaca

SEQ ID NO: 1476428 - DNA, 25 bp, Homo sapien
cccctctgggttgctctggacagag

SEQ ID NO: 1476429 - DNA, 25 bp, Homo sapien
ctctggtgctgggtcatgcccaaga

SEQ ID NO: 1476430 - DNA, 25 bp, Homo sapien
agacagcgtccctgtgctctggtgc

SEQ ID NO: 1476431 - DNA, 25 bp, Homo sapien
gctctggacagaggtaaagacagcg

SEQ ID NO: 1476432 - DNA, 25 bp, Homo sapien
gagcagtgagcgcacattcatgttg

SEQ ID NO: 1476433 - DNA, 25 bp, Homo sapien
cttcctcctagcaagctgcctttca

SEQ ID NO: 1476434 - DNA, 25 bp, Homo sapien
ttagggagcagtgagcgcacattca

SEQ ID NO: 1476435 - DNA, 25 bp, Homo sapien
tgagcgcacattcatgttgcagaag

SEQ ID NO: 1476436 - DNA, 25 bp, Homo sapien
cacttgagagtggattccaactcct

SEQ ID NO: 1476437 - DNA, 25 bp, Homo sapien
cctgtgtccacttgagagtggattc

SEQ ID NO: 1476438 - DNA, 25 bp, Homo sapien
cccctgtgtccacttgagagtggat

SEQ ID NO: 1476439 - DNA, 25 bp, Homo sapien
tgtccacttgagagtggattccaac

SEQ ID NO: 1476440 - DNA, 25 bp, Homo sapien
aggccaggatctgcgcacttggact

SEQ ID NO: 1476441 - DNA, 25 bp, Homo sapien
tccacgaggtgggtccaatctaacc

SEQ ID NO: 1476442 - DNA, 25 bp, Homo sapien
ttcaaatgcccgtgcagcatccacg

SEQ ID NO: 1476443 - DNA, 25 bp, Homo sapien
gcgcacttggacttatctgataagg

SEQ ID NO: 1476444 - DNA, 25 bp, Homo sapien
agcccagagtgagtcagaacatggg

SEQ ID NO: 1476445 - DNA, 25 bp, Homo sapien
cagaacacgggcaccactgccccct

SEQ ID NO: 1476446 - DNA, 25 bp, Homo sapien
gcccagagtgagtcagaacatgggc

SEQ ID NO: 1476447 - DNA, 25 bp, Homo sapien
gcacgggcaccagcccagagtgagt

SEQ ID NO: 1476448 - DNA, 25 bp, Homo sapien
ctcttcgggaaacggtgcaagagcg

SEQ ID NO: 1476449 - DNA, 25 bp, Homo sapien
atggctgggctcttcgggaaacggt

SEQ ID NO: 1476450 - DNA, 25 bp, Homo sapien
ctgggctcttcgggaaacggtgcaa

SEQ ID NO: 1476451 - DNA, 25 bp, Homo sapien
gaaacggtgcaagagcggcatagct

SEQ ID NO: 1476452 - DNA, 25 bp, Homo sapien
tgtggcttcccgtctgtttacccaa

SEQ ID NO: 1476453 - DNA, 25 bp, Homo sapien
tctggcttgcgcacctgctcaagcg

SEQ ID NO: 1476454 - DNA, 25 bp, Homo sapien
gctcaagcgacattgatcttgtggc

SEQ ID NO: 1476455 - DNA, 25 bp, Homo sapien
atcttgtggcttcccgtctgtttac

SEQ ID NO: 1476456 - DNA, 25 bp, Homo sapien
gatgtatcaccaaataagaaggttt

SEQ ID NO: 1476457 - DNA, 25 bp, Homo sapien
agcctagagaactttttccgagtag

SEQ ID NO: 1476458 - DNA, 25 bp, Homo sapien
tttcttaagtgtagctattggagga

SEQ ID NO: 1476459 - DNA, 25 bp, Homo sapien
ctattggaggagatgtatcaccaaa

SEQ ID NO: 1476460 - DNA, 25 bp, Homo sapien
aacagaatgtcgttgggcagggcct

SEQ ID NO: 1476461 - DNA, 25 bp, Homo sapien
tggagacaggttcccatagaacgaa

SEQ ID NO: 1476462 - DNA, 25 bp, Homo sapien
tgcggtaaagcgacctccttggaga

SEQ ID NO: 1476463 - DNA, 25 bp, Homo sapien
tctcgtcagacagcgtgcggtaaag

SEQ ID NO: 1476464 - DNA, 25 bp, Homo sapien
cttcaaagctccctaagtcactaac

SEQ ID NO: 1476465 - DNA, 25 bp, Homo sapien
catgttgagtctctgcaacagcatc

SEQ ID NO: 1476466 - DNA, 25 bp, Homo sapien
gtctgatgctgagttgctgtggaca

SEQ ID NO: 1476467 - DNA, 25 bp, Homo sapien
gggctgtcaggaagcatcaatttca

SEQ ID NO: 1476468 - DNA, 25 bp, Homo sapien
tgatgctgagttgctgtggacatga

SEQ ID NO: 1476469 - DNA, 25 bp, Homo sapien
gcagtttcaacagccacaaacgcat

SEQ ID NO: 1476470 - DNA, 25 bp, Homo sapien
tgtaaagtgcctgtagtggtaagaa

SEQ ID NO: 1476471 - DNA, 25 bp, Homo sapien
catttgtgaaatgagctcaactaca

SEQ ID NO: 1476472 - DNA, 25 bp, Homo sapien
gttcacttttgctgcgtttgctcca

SEQ ID NO: 1476473 - DNA, 25 bp, Homo sapien
aacccctttctcacctcattctgga

SEQ ID NO: 1476474 - DNA, 25 bp, Homo sapien
cccctttctcacctcattctggaca

SEQ ID NO: 1476475 - DNA, 25 bp, Homo sapien
aaacccctttctcacctcattctgg

SEQ ID NO: 1476476 - DNA, 25 bp, Homo sapien
ctttctcacctcattctggacactg

SEQ ID NO: 1476477 - DNA, 25 bp, Homo sapien
aaaagagtccttcgcctaaacatag

SEQ ID NO: 1476478 - DNA, 25 bp, Homo sapien
tgactttccaaaagagtccttcgcc

SEQ ID NO: 1476479 - DNA, 25 bp, Homo sapien
cgtggaaatgcataaaccctgggct

SEQ ID NO: 1476480 - DNA, 25 bp, Homo sapien
cattaaaactgtccgaatgggctcc

SEQ ID NO: 1476481 - DNA, 25 bp, Homo sapien
gctatcgcaggcaggtacagcagag

SEQ ID NO: 1476482 - DNA, 25 bp, Homo sapien
gacctgatcatttagcacgagtatt

SEQ ID NO: 1476483 - DNA, 25 bp, Homo sapien
cacacgcctgatgacgctatcgcag

SEQ ID NO: 1476484 - DNA, 25 bp, Homo sapien
tgaattcccgtgaagcactcagaag

SEQ ID NO: 1476485 - DNA, 25 bp, Homo sapien
aaaatgctgaccagagaagaacagc

SEQ ID NO: 1476486 - DNA, 25 bp, Homo sapien
tgcttagtcaatccctacagtgaaa

SEQ ID NO: 1476487 - DNA, 25 bp, Homo sapien
aaatacatttgcttagtcaatccct

SEQ ID NO: 1476488 - DNA, 25 bp, Homo sapien
gaaaaatgctgaccagagaagaaca

SEQ ID NO: 1476489 - DNA, 25 bp, Homo sapien
tgtccgctgctgtgagacacgatgt

SEQ ID NO: 1476490 - DNA, 25 bp, Homo sapien
attcagtcacttcaggctcctcggg

SEQ ID NO: 1476491 - DNA, 25 bp, Homo sapien
catggacccgggaacctgttgtccg

SEQ ID NO: 1476492 - DNA, 25 bp, Homo sapien
cagagacccactactttttgaacag

SEQ ID NO: 1476493 - DNA, 25 bp, Homo sapien
gaggcccctttgatgtaggtcagcc

SEQ ID NO: 1476494 - DNA, 25 bp, Homo sapien
taacttggctggctcgtcgtcaggc

SEQ ID NO: 1476495 - DNA, 25 bp, Homo sapien
ggtcgccagacccaaagtgcttgtc

SEQ ID NO: 1476496 - DNA, 25 bp, Homo sapien
gacgcgtagccatgcacagaatata

SEQ ID NO: 1476497 - DNA, 25 bp, Homo sapien
tttaaatagatacggtgaggctgac

SEQ ID NO: 1476498 - DNA, 25 bp, Homo sapien
ttgaccttttcatcatacactgata

SEQ ID NO: 1476499 - DNA, 25 bp, Homo sapien
gactcaagacaaggtcgcggtcaca

SEQ ID NO: 1476500 - DNA, 25 bp, Homo sapien
cacaccatgtatccctttgctgaaa

SEQ ID NO: 1476501 - DNA, 25 bp, Homo sapien
actttggaaggtgggccatgccatt

SEQ ID NO: 1476502 - DNA, 25 bp, Homo sapien
aggactttggaaggtgggccatgcc

SEQ ID NO: 1476503 - DNA, 25 bp, Homo sapien
gagctctttctttataggaacccag

SEQ ID NO: 1476504 - DNA, 25 bp, Homo sapien
gctctttctttataggaacccagga

SEQ ID NO: 1476505 - DNA, 25 bp, Homo sapien
ctccgtcacattccaaagggcctga

SEQ ID NO: 1476506 - DNA, 25 bp, Homo sapien
tcacattccaaagggcctgagccct

SEQ ID NO: 1476507 - DNA, 25 bp, Homo sapien
gcctgagccctggtgttcgagcagt

SEQ ID NO: 1476508 - DNA, 25 bp, Homo sapien
tgagccctggtgttcgagcagtaga

SEQ ID NO: 1476509 - DNA, 25 bp, Homo sapien
gctgctggctactgcggactggact

SEQ ID NO: 1476510 - DNA, 25 bp, Homo sapien
tggtgggattggtcaactcagtgtc

SEQ ID NO: 1476511 - DNA, 25 bp, Homo sapien
gattggtcaactcagtgtctttgtt

SEQ ID NO: 1476512 - DNA, 25 bp, Homo sapien
tactgcggactggactgcgtggata

SEQ ID NO: 1476513 - DNA, 25 bp, Homo sapien
cgtcgtagcccacttgtggtctcca

SEQ ID NO: 1476514 - DNA, 25 bp, Homo sapien
ccgtcgtagcccacttgtggtctcc

SEQ ID NO: 1476515 - DNA, 25 bp, Homo sapien
cgctcccgccgggtccagggtcgct

SEQ ID NO: 1476516 - DNA, 25 bp, Homo sapien
cccgccgggtccagggtcgctggag

SEQ ID NO: 1476517 - DNA, 25 bp, Homo sapien
gaagtcttaatgagcttggaacctc

SEQ ID NO: 1476518 - DNA, 25 bp, Homo sapien
ggcatctgaaaaccctcaccagctt

SEQ ID NO: 1476519 - DNA, 25 bp, Homo sapien
gcttccaatggtactggatttaact

SEQ ID NO: 1476520 - DNA, 25 bp, Homo sapien
gagaaaactcatggcattaccgtgc

SEQ ID NO: 1476521 - DNA, 25 bp, Homo sapien
gtggacatggaggaaggatactgga

SEQ ID NO: 1476522 - DNA, 25 bp, Homo sapien
tggacatggaggaaggatactggat

SEQ ID NO: 1476523 - DNA, 25 bp, Homo sapien
ccagtggacatggaggaaggatact

SEQ ID NO: 1476524 - DNA, 25 bp, Homo sapien
gagccagtggacatggaggaaggat

SEQ ID NO: 1476525 - DNA, 25 bp, Homo sapien
tcagaagtgattaagcaaaaccctc

SEQ ID NO: 1476526 - DNA, 25 bp, Homo sapien
tgtgaacaagctaactcagaagtga

SEQ ID NO: 1476527 - DNA, 25 bp, Homo sapien
tcaccccagtgatttacaagggccc

SEQ ID NO: 1476528 - DNA, 25 bp, Homo sapien
cccttgaggaaacggaaccagcatt

SEQ ID NO: 1476529 - DNA, 25 bp, Homo sapien
gcacccggtgccacgtggtgttcct

SEQ ID NO: 1476530 - DNA, 25 bp, Homo sapien
tttatattccaccatagggatccgg

SEQ ID NO: 1476531 - DNA, 25 bp, Homo sapien
gggtgccctcgctgtcgagtttata

SEQ ID NO: 1476532 - DNA, 25 bp, Homo sapien
catcgggcagcttccggtcgaagga

SEQ ID NO: 1476533 - DNA, 25 bp, Homo sapien
tgttgggccaagaagaaatggtgag

SEQ ID NO: 1476534 - DNA, 25 bp, Homo sapien
ctgttgggccaagaagaaatggtga

SEQ ID NO: 1476535 - DNA, 25 bp, Homo sapien
tccaaccgggagataaccacatagt

SEQ ID NO: 1476536 - DNA, 25 bp, Homo sapien
tctttggaaacaaaagccgatcctc

SEQ ID NO: 1476537 - DNA, 25 bp, Homo sapien
caagaacagttactgcagcctacac

SEQ ID NO: 1476538 - DNA, 25 bp, Homo sapien
gcagtggcatacatgaaataggcac

SEQ ID NO: 1476539 - DNA, 25 bp, Homo sapien
tccgttttaacagccccagtgctca

SEQ ID NO: 1476540 - DNA, 25 bp, Homo sapien
gcattttctacactaccctgagaca

SEQ ID NO: 1476541 - DNA, 25 bp, Homo sapien
ttattacttggaaagggtgacagca

SEQ ID NO: 1476542 - DNA, 25 bp, Homo sapien
tgagtgaatgcaaggcaatctacct

SEQ ID NO: 1476543 - DNA, 25 bp, Homo sapien
cagcttctgagtcaaaaccaaacac

SEQ ID NO: 1476544 - DNA, 25 bp, Homo sapien
cattgtacaaatgagtgacatccca

SEQ ID NO: 1476545 - DNA, 25 bp, Homo sapien
tcgaacgagtgacatcccaacaaca

SEQ ID NO: 1476546 - DNA, 25 bp, Homo sapien
tgtacaaagacacacttgactgcat

SEQ ID NO: 1476547 - DNA, 25 bp, Homo sapien
tctgaggaccttgcaggagcactga

SEQ ID NO: 1476548 - DNA, 25 bp, Homo sapien
agtggccacggctactttgcagatc

SEQ ID NO: 1476549 - DNA, 25 bp, Homo sapien
tttgcagatctccacgaggcggctc

SEQ ID NO: 1476550 - DNA, 25 bp, Homo sapien
agggtcatttccacagtctcgcagc

SEQ ID NO: 1476551 - DNA, 25 bp, Homo sapien
cagtcacagaagtacggagcaggtc

SEQ ID NO: 1476552 - DNA, 25 bp, Homo sapien
tatgcttgcctgagtggtgaggacc

SEQ ID NO: 1476553 - DNA, 25 bp, Homo sapien
cagccctagggacatactgtggagt

SEQ ID NO: 1476554 - DNA, 25 bp, Homo sapien
gaggacagacaactgcctatgcttg

SEQ ID NO: 1476555 - DNA, 25 bp, Homo sapien
ggtgaggaccactcagatccatggt

SEQ ID NO: 1476556 - DNA, 25 bp, Homo sapien
aaacatgggctcattaagtatcacc

SEQ ID NO: 1476557 - DNA, 25 bp, Homo sapien
gtatcacccgatgactatgacctca

SEQ ID NO: 1476558 - DNA, 25 bp, Homo sapien
cctcacctatctgtgggaatttcaa

SEQ ID NO: 1476559 - DNA, 25 bp, Homo sapien
ggtatcatactcctatccccaaaag

SEQ ID NO: 1476560 - DNA, 25 bp, Homo sapien
aagtactcctgcctcgttcgagtgg

SEQ ID NO: 1476561 - DNA, 25 bp, Homo sapien
tcagcacagttgtctaccgaggaca

SEQ ID NO: 1476562 - DNA, 25 bp, Homo sapien
ggttgtgacaaagttctccgccaga

SEQ ID NO: 1476563 - DNA, 25 bp, Homo sapien
tcacagaggtatccacggtggcggt

SEQ ID NO: 1476564 - DNA, 25 bp, Homo sapien
aaaaacagaaacaaaatgagatgag

SEQ ID NO: 1476565 - DNA, 25 bp, Homo sapien
taaaaacagaaacaaaatgagatga

SEQ ID NO: 1476566 - DNA, 25 bp, Homo sapien
gtaaaaacagaaacaaaatgagatg

SEQ ID NO: 1476567 - DNA, 25 bp, Homo sapien
agtaaaaacagaaacaaaatgagat

SEQ ID NO: 1476568 - DNA, 25 bp, Homo sapien
tcgagcattctgctgcgctcatggg

SEQ ID NO: 1476569 - DNA, 25 bp, Homo sapien
tgacagctgtaaggcctatgaattg

SEQ ID NO: 1476570 - DNA, 25 bp, Homo sapien
caggctgcacgattttcattagaga

SEQ ID NO: 1476571 - DNA, 25 bp, Homo sapien
gagaaggtgatctcaaccgcacagc

SEQ ID NO: 1476572 - DNA, 25 bp, Homo sapien
gcaagaatacgctgccactcaacac

SEQ ID NO: 1476573 - DNA, 25 bp, Homo sapien
cgtgggtccgcgtcagcaagaatac

SEQ ID NO: 1476574 - DNA, 25 bp, Homo sapien
tcaacacccgaaaaaagctcaggag

SEQ ID NO: 1476575 - DNA, 25 bp, Homo sapien
aaaacagctttcacgggagcttgcc

SEQ ID NO: 1476576 - DNA, 25 bp, Homo sapien
tggattatgcactttgactatgaca

SEQ ID NO: 1476577 - DNA, 25 bp, Homo sapien
caaagacatgctgaaagtgagaccg

SEQ ID NO: 1476578 - DNA, 25 bp, Homo sapien
attttcggtacatggattatgcact

SEQ ID NO: 1476579 - DNA, 25 bp, Homo sapien
gagaccggatgctttttggagtaaa

SEQ ID NO: 1476580 - DNA, 25 bp, Homo sapien
cgaacgcaggctggcaaaacctgac

SEQ ID NO: 1476581 - DNA, 25 bp, Homo sapien
aacctgacggtactatttgtttgag

SEQ ID NO: 1476582 - DNA, 25 bp, Homo sapien
gatggcaaaccacaaacgaacgcag

SEQ ID NO: 1476583 - DNA, 25 bp, Homo sapien
ggcgaacttctttctaggtatgtaa

SEQ ID NO: 1476584 - DNA, 25 bp, Homo sapien
ctgttgttgggcatgtagggaagca

SEQ ID NO: 1476585 - DNA, 25 bp, Homo sapien
gagagagtgcgtgcccgtggaatca

SEQ ID NO: 1476586 - DNA, 25 bp, Homo sapien
tttgtatgtggtatagagagagtgc

SEQ ID NO: 1476587 - DNA, 25 bp, Homo sapien
cacgtggaacatgagttcgtagtct

SEQ ID NO: 1476588 - DNA, 25 bp, Homo sapien
gctgagctcgatatttactaaatcc

SEQ ID NO: 1476589 - DNA, 25 bp, Homo sapien
tggtcccgccgtctcattgttatac

SEQ ID NO: 1476590 - DNA, 25 bp, Homo sapien
aatcctttcagtcggactctctggc

SEQ ID NO: 1476591 - DNA, 25 bp, Homo sapien
tcccgatcttgtgctgaaagctcag

SEQ ID NO: 1476592 - DNA, 25 bp, Homo sapien
ccacatcatctgaaggccatctttg

SEQ ID NO: 1476593 - DNA, 25 bp, Homo sapien
tcacctgagaccattgccagtgcca

SEQ ID NO: 1476594 - DNA, 25 bp, Homo sapien
accattgccagtgccatgtgccaca

SEQ ID NO: 1476595 - DNA, 25 bp, Homo sapien
tctccattgccccagcacgcaaagg

SEQ ID NO: 1476596 - DNA, 25 bp, Homo sapien
ggcaaaggccaaacaactggacaac

SEQ ID NO: 1476597 - DNA, 25 bp, Homo sapien
cggagagccttgtgggcttgctatt

SEQ ID NO: 1476598 - DNA, 25 bp, Homo sapien
ttcctctctgactcggagagccttg

SEQ ID NO: 1476599 - DNA, 25 bp, Homo sapien
ctctcattcaggcaaaggccaaaca

SEQ ID NO: 1476600 - DNA, 25 bp, Homo sapien
tcttcccagccatcggacacaccag

SEQ ID NO: 1476601 - DNA, 25 bp, Homo sapien
gttgtactgtcaacttcacacccct

SEQ ID NO: 1476602 - DNA, 25 bp, Homo sapien
gactgttgtactgtcaacttcacac

SEQ ID NO: 1476603 - DNA, 25 bp, Homo sapien
tgctgactgttgtactgtcaacttc

SEQ ID NO: 1476604 - DNA, 25 bp, Homo sapien
gaactgcctcggatagcttctagat

SEQ ID NO: 1476605 - DNA, 25 bp, Homo sapien
tctagtagaagaaaggtagccacat

SEQ ID NO: 1476606 - DNA, 25 bp, Homo sapien
ccattaggatgtggcagatcagagc

SEQ ID NO: 1476607 - DNA, 25 bp, Homo sapien
caaagacattcgaaaggagcttgca

SEQ ID NO: 1476608 - DNA, 25 bp, Homo sapien
ccacagtattatttggtcaaccaag

SEQ ID NO: 1476609 - DNA, 25 bp, Homo sapien
tagaattctagccatctgcggtgcc

SEQ ID NO: 1476610 - DNA, 25 bp, Homo sapien
taaaataagttgcatgcacttgagc

SEQ ID NO: 1476611 - DNA, 25 bp, Homo sapien
catgcagaagaatcctacttgggaa

SEQ ID NO: 1476612 - DNA, 25 bp, Homo sapien
taaaataaatgatcttacaagaaag

SEQ ID NO: 1476613 - DNA, 25 bp, Homo sapien
ttaaaataaatgatcttacaagaaa

SEQ ID NO: 1476614 - DNA, 25 bp, Homo sapien
accatgcctagcagtagagggtata

SEQ ID NO: 1476615 - DNA, 25 bp, Homo sapien
ggaagcctgtcgcaaacactgaatg

SEQ ID NO: 1476616 - DNA, 25 bp, Homo sapien
tcttctaaaattgctcctctcagtg

SEQ ID NO: 1476617 - DNA, 25 bp, Homo sapien
gaggtagtcctcgtgcggtaccatg

SEQ ID NO: 1476618 - DNA, 25 bp, Homo sapien
tgctgactgctactggaccaaggtt

SEQ ID NO: 1476619 - DNA, 25 bp, Homo sapien
ctgaaagccaccctgtagttgaact

SEQ ID NO: 1476620 - DNA, 25 bp, Homo sapien
ttctctctccggatgctgactgcta

SEQ ID NO: 1476621 - DNA, 25 bp, Homo sapien
tgtagttgaactgggatccttcttt

SEQ ID NO: 1476622 - DNA, 25 bp, Homo sapien
gccctttgtgggttcctgcaacact

SEQ ID NO: 1476623 - DNA, 25 bp, Homo sapien
aataatagggcattcgttcttcttc

SEQ ID NO: 1476624 - DNA, 25 bp, Homo sapien
ttgaaatagcatacagacagccctt

SEQ ID NO: 1476625 - DNA, 25 bp, Homo sapien
acagacagccctttgtgggttcctg

SEQ ID NO: 1476626 - DNA, 25 bp, Homo sapien
tgtgtatctgggcaattcctcccca

SEQ ID NO: 1476627 - DNA, 25 bp, Homo sapien
agcccttggtgctgaatctcatgtg

SEQ ID NO: 1476628 - DNA, 25 bp, Homo sapien
tgcaagagagaaagccccggtgttt

SEQ ID NO: 1476629 - DNA, 25 bp, Homo sapien
gacggccacatggagcccgtgcgac

SEQ ID NO: 1476630 - DNA, 25 bp, Homo sapien
ggcgcctgtgggacttgacgggacc

SEQ ID NO: 1476631 - DNA, 25 bp, Homo sapien
cgcctgtgggacttgacgggacctc

SEQ ID NO: 1476632 - DNA, 25 bp, Homo sapien
gcctgtgggacttgacgggacctcc

SEQ ID NO: 1476633 - DNA, 25 bp, Homo sapien
ctgtgggacttgacgggacctccgt

SEQ ID NO: 1476634 - DNA, 25 bp, Homo sapien
cacaggacttaccactgttgatggt

SEQ ID NO: 1476635 - DNA, 25 bp, Homo sapien
tgtttgccaggctactccattgtaa

SEQ ID NO: 1476636 - DNA, 25 bp, Homo sapien
tgcagaagagtcattcatagccggg

SEQ ID NO: 1476637 - DNA, 25 bp, Homo sapien
tgggtaccagtcagggattttgcag

SEQ ID NO: 1476638 - DNA, 25 bp, Homo sapien
caagttaaggatttcgtcaccaagc

SEQ ID NO: 1476639 - DNA, 25 bp, Homo sapien
cataaagtagggcacagaaccgttt

SEQ ID NO: 1476640 - DNA, 25 bp, Homo sapien
tacattcagaggaacacgcgctcct

SEQ ID NO: 1476641 - DNA, 25 bp, Homo sapien
tggctctagcaaaacaacgttcccg

SEQ ID NO: 1476642 - DNA, 25 bp, Homo sapien
aacacacagtgtctgggctctgcca

SEQ ID NO: 1476643 - DNA, 25 bp, Homo sapien
tcaacacacagtgtctgggctctgc

SEQ ID NO: 1476644 - DNA, 25 bp, Homo sapien
tgtcaacacacagtgtctgggctct

SEQ ID NO: 1476645 - DNA, 25 bp, Homo sapien
acacacagtgtctgggctctgccac

SEQ ID NO: 1476646 - DNA, 25 bp, Homo sapien
tgaccgtggtcaagcacaactagaa

SEQ ID NO: 1476647 - DNA, 25 bp, Homo sapien
aatgtgtcttcatggttatcgcccg

SEQ ID NO: 1476648 - DNA, 25 bp, Homo sapien
tgatgctcacatgactgaccgtggt

SEQ ID NO: 1476649 - DNA, 25 bp, Homo sapien
taatgtgacaaacggcaccaatgtg

SEQ ID NO: 1476650 - DNA, 25 bp, Homo sapien
catgaacacgggcatgagggttatg

SEQ ID NO: 1476651 - DNA, 25 bp, Homo sapien
ctctgcatgaacacgggcatgaggg

SEQ ID NO: 1476652 - DNA, 25 bp, Homo sapien
atgagggttatgagttattttcaca

SEQ ID NO: 1476653 - DNA, 25 bp, Homo sapien
gggttatgagttattttcacagcag

SEQ ID NO: 1476654 - DNA, 25 bp, Homo sapien
tgacaattccaagggcgaatgcccc

SEQ ID NO: 1476655 - DNA, 25 bp, Homo sapien
tgcagggtcacagcggaaaaattca

SEQ ID NO: 1476656 - DNA, 25 bp, Homo sapien
tctgggcacttccaagacggagaca

SEQ ID NO: 1476657 - DNA, 25 bp, Homo sapien
gaatttgcggtaataataggcccca

SEQ ID NO: 1476658 - DNA, 25 bp, Homo sapien
tggcctccacgaagtccagatcgag

SEQ ID NO: 1476659 - DNA, 25 bp, Homo sapien
gctttcataactggtctgagaccgg

SEQ ID NO: 1476660 - DNA, 25 bp, Homo sapien
tttttaggaggccattcagacaccc

SEQ ID NO: 1476661 - DNA, 25 bp, Homo sapien
gatgtctccgattgtgtacttggcc

SEQ ID NO: 1476662 - DNA, 25 bp, Homo sapien
catctggctggtcatgagtatttcc

SEQ ID NO: 1476663 - DNA, 25 bp, Homo sapien
tctaattacattgctaccgaccacg

SEQ ID NO: 1476664 - DNA, 25 bp, Homo sapien
gaccacgccataatacttgcagata

SEQ ID NO: 1476665 - DNA, 25 bp, Homo sapien
aaaagcattccttaagacatctggc

SEQ ID NO: 1476666 - DNA, 25 bp, Homo sapien
tgagcaagcagacgcctggataggc

SEQ ID NO: 1476667 - DNA, 25 bp, Homo sapien
gaagcacacataagtactccagaag

SEQ ID NO: 1476668 - DNA, 25 bp, Homo sapien
ccacgagacgcttggtgcactgcaa

SEQ ID NO: 1476669 - DNA, 25 bp, Homo sapien
tctctggagacatgactgggaccct

SEQ ID NO: 1476670 - DNA, 25 bp, Homo sapien
tcctccttcctgtaacgggcaactc

SEQ ID NO: 1476671 - DNA, 25 bp, Homo sapien
taacttcaagcatctctcctgctcc

SEQ ID NO: 1476672 - DNA, 25 bp, Homo sapien
ttcctgtaacgggcaactctcctct

SEQ ID NO: 1476673 - DNA, 25 bp, Homo sapien
taacttatagacaaattcattaact

SEQ ID NO: 1476674 - DNA, 25 bp, Homo sapien
gcctgaggccctccataaaagcgta

SEQ ID NO: 1476675 - DNA, 25 bp, Homo sapien
tgcagtctttcttgtataaccagaa

SEQ ID NO: 1476676 - DNA, 25 bp, Homo sapien
cccctgtcacattttagccatggag

SEQ ID NO: 1476677 - DNA, 25 bp, Homo sapien
tctcctttaagcacatgcctgaggc

SEQ ID NO: 1476678 - DNA, 25 bp, Homo sapien
aagcgactgctatcatgggacagga

SEQ ID NO: 1476679 - DNA, 25 bp, Homo sapien
tcatgggacaggatcagaaaggttg

SEQ ID NO: 1476680 - DNA, 25 bp, Homo sapien
tgtaggtgccggtatgggcgttaac

SEQ ID NO: 1476681 - DNA, 25 bp, Homo sapien
cataacttgttcaaagcgactgcta

SEQ ID NO: 1476682 - DNA, 25 bp, Homo sapien
tataaggtttcagttggagcaggtg

SEQ ID NO: 1476683 - DNA, 25 bp, Homo sapien
cagcacctgagttgaatatactgta

SEQ ID NO: 1476684 - DNA, 25 bp, Homo sapien
agtcagcacctgagttgaatatact

SEQ ID NO: 1476685 - DNA, 25 bp, Homo sapien
tatactgtatgagatggtggatata

SEQ ID NO: 1476686 - DNA, 25 bp, Homo sapien
ctaggcaacacagcaggccctacct

SEQ ID NO: 1476687 - DNA, 25 bp, Homo sapien
gaggctaccgggagctatgattaca

SEQ ID NO: 1476688 - DNA, 25 bp, Homo sapien
cagcaggccctacctttacaaaaag

SEQ ID NO: 1476689 - DNA, 25 bp, Homo sapien
ggtgacagagctccactctatctca

SEQ ID NO: 1476690 - DNA, 25 bp, Homo sapien
caactgtctgctcattttcatgcct

SEQ ID NO: 1476691 - DNA, 25 bp, Homo sapien
ggcccagtgacacaactgtctgctc

SEQ ID NO: 1476692 - DNA, 25 bp, Homo sapien
gtaaacgggacaggcccagtgacac

SEQ ID NO: 1476693 - DNA, 25 bp, Homo sapien
ctgtaaacgggacaggcccagtgac

SEQ ID NO: 1476694 - DNA, 25 bp, Homo sapien
ctgaaggcagataacaagcccagca

SEQ ID NO: 1476695 - DNA, 25 bp, Homo sapien
gggttggagctggatacacagatca

SEQ ID NO: 1476696 - DNA, 25 bp, Homo sapien
cagatcacatgttcatccgatgtcc

SEQ ID NO: 1476697 - DNA, 25 bp, Homo sapien
gatacacagatcacatgttcatccg

SEQ ID NO: 1476698 - DNA, 25 bp, Homo sapien
gttcatccgatgtccttctctacca

SEQ ID NO: 1476699 - DNA, 25 bp, Homo sapien
tttttagaccccatcaggtcgactg

SEQ ID NO: 1476700 - DNA, 25 bp, Homo sapien
aataaaccggcacgttctgtgcttg

SEQ ID NO: 1476701 - DNA, 25 bp, Homo sapien
ggcagctacaagaaaccatcagatg

SEQ ID NO: 1476702 - DNA, 25 bp, Homo sapien
aggagtgccacccttctagagagca

SEQ ID NO: 1476703 - DNA, 25 bp, Homo sapien
ggttctgacgctatcacaaaatctg

SEQ ID NO: 1476704 - DNA, 25 bp, Homo sapien
tgggacacagtagcttattcaagga

SEQ ID NO: 1476705 - DNA, 25 bp, Homo sapien
ttaaataagtatgccgtctcctcgg

SEQ ID NO: 1476706 - DNA, 25 bp, Homo sapien
aacaaatcctaacttcgccaatggg

SEQ ID NO: 1476707 - DNA, 25 bp, Homo sapien
ctccaaagtgcagtaaaggccagaa

SEQ ID NO: 1476708 - DNA, 25 bp, Homo sapien
agtgcctgtttcccatagtactcca

SEQ ID NO: 1476709 - DNA, 25 bp, Homo sapien
tccccagctgtgtccgggcagcatg

SEQ ID NO: 1476710 - DNA, 25 bp, Homo sapien
gggcagcatgaggtgtcccttagct

SEQ ID NO: 1476711 - DNA, 25 bp, Homo sapien
agttctgagaaagtgaaggcaaaca

SEQ ID NO: 1476712 - DNA, 25 bp, Homo sapien
cagctgttttctccgcaaaagaaag

SEQ ID NO: 1476713 - DNA, 25 bp, Homo sapien
tgagaaagtgaaggcaaacattttc

SEQ ID NO: 1476714 - DNA, 25 bp, Homo sapien
aggttcatcagctgttttctccgca

SEQ ID NO: 1476715 - DNA, 25 bp, Homo sapien
gcaaccatggcacctaaagtttctg

SEQ ID NO: 1476716 - DNA, 25 bp, Homo sapien
ttgtaaggaaccatccctgcccttg

SEQ ID NO: 1476717 - DNA, 25 bp, Homo sapien
cccacattccgttctggttcttgta

SEQ ID NO: 1476718 - DNA, 25 bp, Homo sapien
ccatggcacctaaagtttctgtcct

SEQ ID NO: 1476719 - DNA, 25 bp, Homo sapien
tttatgctcatcatcacccacagcc

SEQ ID NO: 1476720 - DNA, 25 bp, Homo sapien
attttatgctcatcatcacccacag

SEQ ID NO: 1476721 - DNA, 25 bp, Homo sapien
cattttatgctcatcatcacccaca

SEQ ID NO: 1476722 - DNA, 25 bp, Homo sapien
ctcattttatgctcatcatcaccca

SEQ ID NO: 1476723 - DNA, 25 bp, Homo sapien
gatacaacgcatccacagactcttg

SEQ ID NO: 1476724 - DNA, 25 bp, Homo sapien
tgccaggcacttgacaaagcacttt

SEQ ID NO: 1476725 - DNA, 25 bp, Homo sapien
tacatcaagcagaaggatacaacgc

SEQ ID NO: 1476726 - DNA, 25 bp, Homo sapien
tgctccagtgtaggcagacaagtta

SEQ ID NO: 1476727 - DNA, 25 bp, Homo sapien
caaaaactcggtgctatggaagatg

SEQ ID NO: 1476728 - DNA, 25 bp, Homo sapien
gtcactggttgagacctggactcac

SEQ ID NO: 1476729 - DNA, 25 bp, Homo sapien
cagaagtaccaatctgtgagggatt

SEQ ID NO: 1476730 - DNA, 25 bp, Homo sapien
cagggctaaagcaagacacaaaaac

SEQ ID NO: 1476731 - DNA, 25 bp, Homo sapien
catcttgggagtacagtatagcaaa

SEQ ID NO: 1476732 - DNA, 25 bp, Homo sapien
caaaaagagctcaagatcacaagga

SEQ ID NO: 1476733 - DNA, 25 bp, Homo sapien
cagtcttagcccatgtctgatctat

SEQ ID NO: 1476734 - DNA, 25 bp, Homo sapien
acatacaggccccatagccatggag

SEQ ID NO: 1476735 - DNA, 25 bp, Homo sapien
tgagacataagataggaagtggact

SEQ ID NO: 1476736 - DNA, 25 bp, Homo sapien
aaacgaacaacaccccagagacctg

SEQ ID NO: 1476737 - DNA, 25 bp, Homo sapien
aagggagcatcagcagcaaacgaac

SEQ ID NO: 1476738 - DNA, 25 bp, Homo sapien
gaggcgagctctttttgtccacaga

SEQ ID NO: 1476739 - DNA, 25 bp, Homo sapien
gagtaaagtactgtggatgaatcct

SEQ ID NO: 1476740 - DNA, 25 bp, Homo sapien
ctacatctgcaagggtgttattttc

SEQ ID NO: 1476741 - DNA, 25 bp, Homo sapien
caaagtctacataggctacatctgc

SEQ ID NO: 1476742 - DNA, 25 bp, Homo sapien
tatttagggattcacattcaactgg

SEQ ID NO: 1476743 - DNA, 25 bp, Homo sapien
tctggcccaaaggagcatgacaact

SEQ ID NO: 1476744 - DNA, 25 bp, Homo sapien
ggagtcacagctacatgcaactgga

SEQ ID NO: 1476745 - DNA, 25 bp, Homo sapien
taggaacaacatgacgagacaatct

SEQ ID NO: 1476746 - DNA, 25 bp, Homo sapien
gacaactagactcgacttgctgcat

SEQ ID NO: 1476747 - DNA, 25 bp, Homo sapien
agcaactgggtaaaatctgtggccc

SEQ ID NO: 1476748 - DNA, 25 bp, Homo sapien
tacagtaagcatcatagaagccaaa

SEQ ID NO: 1476749 - DNA, 25 bp, Homo sapien
gcttttccggatcaagtgcttacac

SEQ ID NO: 1476750 - DNA, 25 bp, Homo sapien
tactaagctcaggtatcaaggaacc

SEQ ID NO: 1476751 - DNA, 25 bp, Homo sapien
cacgggaagacccggagaggcccag

SEQ ID NO: 1476752 - DNA, 25 bp, Homo sapien
cactgacacgggaagacccggagag

SEQ ID NO: 1476753 - DNA, 25 bp, Homo sapien
tgacacgggaagacccggagaggcc

SEQ ID NO: 1476754 - DNA, 25 bp, Homo sapien
tcactgacacgggaagacccggaga

SEQ ID NO: 1476755 - DNA, 25 bp, Homo sapien
ggcgcatctgcgtctacaagccgga

SEQ ID NO: 1476756 - DNA, 25 bp, Homo sapien
gagcgcgggcgcatctgcgtctaca

SEQ ID NO: 1476757 - DNA, 25 bp, Homo sapien
tcagccgatcgataacttggagaga

SEQ ID NO: 1476758 - DNA, 25 bp, Homo sapien
gcgggcgcatctgcgtctacaagcc

SEQ ID NO: 1476759 - DNA, 25 bp, Homo sapien
ccgacacgaaccttcgcaacgccgt

SEQ ID NO: 1476760 - DNA, 25 bp, Homo sapien
cgccgtccgccggaacctgctacag

SEQ ID NO: 1476761 - DNA, 25 bp, Homo sapien
acagtccccgcctggccgcaggcat

SEQ ID NO: 1476762 - DNA, 25 bp, Homo sapien
tgcccgtcggattccccgacacgaa

SEQ ID NO: 1476763 - DNA, 25 bp, Homo sapien
agagccgtcgccgtccttgtcgaga

SEQ ID NO: 1476764 - DNA, 25 bp, Homo sapien
tggaccccggcttctagagagccgt

SEQ ID NO: 1476765 - DNA, 25 bp, Homo sapien
cggcttctagagagccgtcgccgtc

SEQ ID NO: 1476766 - DNA, 25 bp, Homo sapien
gtccttgtcgagactcgctttcgcc

SEQ ID NO: 1476767 - DNA, 25 bp, Homo sapien
ccaggacgccacagaatcgccgagg

SEQ ID NO: 1476768 - DNA, 25 bp, Homo sapien
aggacgccacagaatcgccgaggcc

SEQ ID NO: 1476769 - DNA, 25 bp, Homo sapien
cccaaacggccgcaagtcgaagtga

SEQ ID NO: 1476770 - DNA, 25 bp, Homo sapien
cggccgcaagtcgaagtgatcccat

SEQ ID NO: 1476771 - DNA, 25 bp, Homo sapien
agccacaccgtagaatttcctgagc

SEQ ID NO: 1476772 - DNA, 25 bp, Homo sapien
gctgggttccctgagactggattgg

SEQ ID NO: 1476773 - DNA, 25 bp, Homo sapien
ccttctagagtcagacttcttcctg

SEQ ID NO: 1476774 - DNA, 25 bp, Homo sapien
ccagccacaccgtagaatttcctga

SEQ ID NO: 1476775 - DNA, 25 bp, Homo sapien
tgtgtactcaacaaaaccctgcagg

SEQ ID NO: 1476776 - DNA, 25 bp, Homo sapien
ttgtagatactctacaagaggtatc

SEQ ID NO: 1476777 - DNA, 25 bp, Homo sapien
cctgtgtactcaacaaaaccctgca

SEQ ID NO: 1476778 - DNA, 25 bp, Homo sapien
cctcatatgttgtagatactctaca

SEQ ID NO: 1476779 - DNA, 25 bp, Homo sapien
tcttcgatgacggtgttagccacaa

SEQ ID NO: 1476780 - DNA, 25 bp, Homo sapien
cactacaatccggagcagatccttg

SEQ ID NO: 1476781 - DNA, 25 bp, Homo sapien
tgaggtgggtcttaactgctgcagc

SEQ ID NO: 1476782 - DNA, 25 bp, Homo sapien
tcatatatggaaggaagtctgacca

SEQ ID NO: 1476783 - DNA, 25 bp, Homo sapien
tttcctcttagaagggaagtcctca

SEQ ID NO: 1476784 - DNA, 25 bp, Homo sapien
aaagcctagggaagaaggtgccaca

SEQ ID NO: 1476785 - DNA, 25 bp, Homo sapien
tatagaattccatgaaagcctaggg

SEQ ID NO: 1476786 - DNA, 25 bp, Homo sapien
gtgccacagaagtgtagggcattat

SEQ ID NO: 1476787 - DNA, 25 bp, Homo sapien
aaggtgccacagaagtgtagggcat

SEQ ID NO: 1476788 - DNA, 25 bp, Homo sapien
tgacaggcgaagctggagaaagcct

SEQ ID NO: 1476789 - DNA, 25 bp, Homo sapien
gtaggtgagtcacttgaaacctcag

SEQ ID NO: 1476790 - DNA, 25 bp, Homo sapien
gcccattgaggtaggtgagtcactt

SEQ ID NO: 1476791 - DNA, 25 bp, Homo sapien
gagtggctttgacaggcgaagctgg

SEQ ID NO: 1476792 - DNA, 25 bp, Homo sapien
tagttgcccattccttttgcactcc

SEQ ID NO: 1476793 - DNA, 25 bp, Homo sapien
gaattttcctgcaatatttctagca

SEQ ID NO: 1476794 - DNA, 25 bp, Homo sapien
ttctagcattagttgcccattcctt

SEQ ID NO: 1476795 - DNA, 25 bp, Homo sapien
gtccactgccactcagtcttcagct

SEQ ID NO: 1476796 - DNA, 25 bp, Homo sapien
gaagagtgctgtcttgtccactccc

SEQ ID NO: 1476797 - DNA, 25 bp, Homo sapien
tatcttgagggaattctagaggcaa

SEQ ID NO: 1476798 - DNA, 25 bp, Homo sapien
gcccatggtcattgtcgctccaggt

SEQ ID NO: 1476799 - DNA, 25 bp, Homo sapien
agccttgacaactgcctccctgaag

SEQ ID NO: 1476800 - DNA, 25 bp, Homo sapien
tatacaggattactagcaactctca

SEQ ID NO: 1476801 - DNA, 25 bp, Homo sapien
gctgcagcgagtggtgaatgactgc

SEQ ID NO: 1476802 - DNA, 25 bp, Homo sapien
tgcccatgggtaagcctctcagacc

SEQ ID NO: 1476803 - DNA, 25 bp, Homo sapien
tcttcccaggtcttctaaatataca

SEQ ID NO: 1476804 - DNA, 25 bp, Homo sapien
gagaaggtgtgtccacgcttgtgat

SEQ ID NO: 1476805 - DNA, 25 bp, Homo sapien
tgccgtgtgacttagtccatagaat

SEQ ID NO: 1476806 - DNA, 25 bp, Homo sapien
taagtagggacagccagattgcccc

SEQ ID NO: 1476807 - DNA, 25 bp, Homo sapien
gtgactttcttcaatgccgtgtgac

SEQ ID NO: 1476808 - DNA, 25 bp, Homo sapien
tatcagaggactcaggaagacctga

SEQ ID NO: 1476809 - DNA, 25 bp, Homo sapien
gatcagattgtgtcctggctactct

SEQ ID NO: 1476810 - DNA, 25 bp, Homo sapien
tgggcattgcccctatatcagagga

SEQ ID NO: 1476811 - DNA, 25 bp, Homo sapien
gcacacagcccatgttgccaccaga

SEQ ID NO: 1476812 - DNA, 25 bp, Homo sapien
tgtaagacaagtactttaatacttg

SEQ ID NO: 1476813 - DNA, 25 bp, Homo sapien
ctgtaagacaagtactttaatactt

SEQ ID NO: 1476814 - DNA, 25 bp, Homo sapien
gttgctcactttcagaccatcggcg

SEQ ID NO: 1476815 - DNA, 25 bp, Homo sapien
gctcactttcagaccatcggcgaac

SEQ ID NO: 1476816 - DNA, 25 bp, Homo sapien
ggatttcctcttcacgcctgcaggc

SEQ ID NO: 1476817 - DNA, 25 bp, Homo sapien
ctcttcacgcctgtgggatttcctc

SEQ ID NO: 1476818 - DNA, 25 bp, Homo sapien
gatttcctcttcacgcctgcaggct

SEQ ID NO: 1476819 - DNA, 25 bp, Homo sapien
ggatttcctcttcacgcctgtggga

SEQ ID NO: 1476820 - DNA, 25 bp, Homo sapien
gctgcaaacccagtcaatcctggct

SEQ ID NO: 1476821 - DNA, 25 bp, Homo sapien
aggaaagctgcaaacccagtcaatc

SEQ ID NO: 1476822 - DNA, 25 bp, Homo sapien
gcaaacccagtcaatcctggctgtg

SEQ ID NO: 1476823 - DNA, 25 bp, Homo sapien
gaaagctgcaaacccagtcaatcct

SEQ ID NO: 1476824 - DNA, 25 bp, Homo sapien
gcactttgaaatatagaaccacgcc

SEQ ID NO: 1476825 - DNA, 25 bp, Homo sapien
tacatactctccagaggcaagtgtg

SEQ ID NO: 1476826 - DNA, 25 bp, Homo sapien
gatcccgagacaagctgcctctgaa

SEQ ID NO: 1476827 - DNA, 25 bp, Homo sapien
gagctacccggtgcctgagtactga

SEQ ID NO: 1476828 - DNA, 25 bp, Homo sapien
cacttcatgtcttctagcgatctct

SEQ ID NO: 1476829 - DNA, 25 bp, Homo sapien
ctccgaagccttttcccacttcatg

SEQ ID NO: 1476830 - DNA, 25 bp, Homo sapien
tcatgtcttctagcgatctctccca

SEQ ID NO: 1476831 - DNA, 25 bp, Homo sapien
ctgctctccgaagccttttcccact

SEQ ID NO: 1476832 - DNA, 25 bp, Homo sapien
ctcctgcagctgtaccatctccatc

SEQ ID NO: 1476833 - DNA, 25 bp, Homo sapien
ctctcctgcagctgtaccatctcca

SEQ ID NO: 1476834 - DNA, 25 bp, Homo sapien
gcagctgtaccatctccatcactca

SEQ ID NO: 1476835 - DNA, 25 bp, Homo sapien
cctgcagctgtaccatctccatcac

SEQ ID NO: 1476836 - DNA, 25 bp, Homo sapien
ttagtgcggtgttacttgatgagga

SEQ ID NO: 1476837 - DNA, 25 bp, Homo sapien
tctgggttggtgacagaagatggtg

SEQ ID NO: 1476838 - DNA, 25 bp, Homo sapien
agtgcggtgttacttgatgaggatc

SEQ ID NO: 1476839 - DNA, 25 bp, Homo sapien
tgcggtgttacttgatgaggatcag

SEQ ID NO: 1476840 - DNA, 25 bp, Homo sapien
cagagcaccttcttgggcaaacaaa

SEQ ID NO: 1476841 - DNA, 25 bp, Homo sapien
ttcctggagccgcattcttttaccc

SEQ ID NO: 1476842 - DNA, 25 bp, Homo sapien
ccaagttctcatggtgttcccaaac

SEQ ID NO: 1476843 - DNA, 25 bp, Homo sapien
tctcatggtgttcccaaactacttc

SEQ ID NO: 1476844 - DNA, 25 bp, Homo sapien
tggcttagccatcacaggtcattct

SEQ ID NO: 1476845 - DNA, 25 bp, Homo sapien
aaaagttgtgcgcaggtttacctag

SEQ ID NO: 1476846 - DNA, 25 bp, Homo sapien
caaattctggccaaatgagtgtcct

SEQ ID NO: 1476847 - DNA, 25 bp, Homo sapien
ggctgatgcctaggttctctgtaaa

SEQ ID NO: 1476848 - DNA, 25 bp, Homo sapien
tgcatcttatatgacttctgaatcc

SEQ ID NO: 1476849 - DNA, 25 bp, Homo sapien
aagaagctgtttttccgcagaatgc

SEQ ID NO: 1476850 - DNA, 25 bp, Homo sapien
tgaatggacattcctgtgacctctt

SEQ ID NO: 1476851 - DNA, 25 bp, Homo sapien
gtttttccgcagaatgctcatttga

SEQ ID NO: 1476852 - DNA, 25 bp, Homo sapien
aaccccagatgggtccacgactagc

SEQ ID NO: 1476853 - DNA, 25 bp, Homo sapien
cagatgggtccacgactagcaggga

SEQ ID NO: 1476854 - DNA, 25 bp, Homo sapien
tccacgactagcagggattcttcaa

SEQ ID NO: 1476855 - DNA, 25 bp, Homo sapien
caaactccttaaagttgtctgaact

SEQ ID NO: 1476856 - DNA, 25 bp, Homo sapien
gtgctcatggtgtattcaaagaggt

SEQ ID NO: 1476857 - DNA, 25 bp, Homo sapien
acagtgctcatggtgtattcaaaga

SEQ ID NO: 1476858 - DNA, 25 bp, Homo sapien
ccagaggcgagaatccacagtgctc

SEQ ID NO: 1476859 - DNA, 25 bp, Homo sapien
ctccagaggcgagaatccacagtgc

SEQ ID NO: 1476860 - DNA, 25 bp, Homo sapien
tgtgcaaatgcctgatgatgtttct

SEQ ID NO: 1476861 - DNA, 25 bp, Homo sapien
ccttgtgcaaatgcctgatgatgtt

SEQ ID NO: 1476862 - DNA, 25 bp, Homo sapien
tttccaccttgtgcaaatgcctgat

SEQ ID NO: 1476863 - DNA, 25 bp, Homo sapien
gatgatgtttctttcccccgcccat

SEQ ID NO: 1476864 - DNA, 25 bp, Homo sapien
tgcattccagccacattggccttgc

SEQ ID NO: 1476865 - DNA, 25 bp, Homo sapien
gattagtgggaagatatcacagatc

SEQ ID NO: 1476866 - DNA, 25 bp, Homo sapien
gccttgcgggaccttcaacacgttc

SEQ ID NO: 1476867 - DNA, 25 bp, Homo sapien
cttcaacacgttcagtttgttcctc

SEQ ID NO: 1476868 - DNA, 25 bp, Homo sapien
tttttgatgaatgattgattgtggt

SEQ ID NO: 1476869 - DNA, 25 bp, Homo sapien
tttgatgaatgattgattgtggtgc

SEQ ID NO: 1476870 - DNA, 25 bp, Homo sapien
ttttgatgaatgattgattgtggtg

SEQ ID NO: 1476871 - DNA, 25 bp, Homo sapien
gagactcagcttcctaagccagaga

SEQ ID NO: 1476872 - DNA, 25 bp, Homo sapien
tatccatgggcttatgttttcagtc

SEQ ID NO: 1476873 - DNA, 25 bp, Homo sapien
tatgaatggcactacggagactcag

SEQ ID NO: 1476874 - DNA, 25 bp, Homo sapien
cacttcattgtggtaacattcgctt

SEQ ID NO: 1476875 - DNA, 25 bp, Homo sapien
gtctgcagaacgcagggctccgctg

SEQ ID NO: 1476876 - DNA, 25 bp, Homo sapien
gggtaattaaagagccgtctgcaga

SEQ ID NO: 1476877 - DNA, 25 bp, Homo sapien
tgatcagggtaattaaagagccgtc

SEQ ID NO: 1476878 - DNA, 25 bp, Homo sapien
taaagagccgtctgcagaacgcagg

SEQ ID NO: 1476879 - DNA, 25 bp, Homo sapien
tgttactccctctatacttgggtct

SEQ ID NO: 1476880 - DNA, 25 bp, Homo sapien
tctggatatgttactccctctatac

SEQ ID NO: 1476881 - DNA, 25 bp, Homo sapien
atctctggatatgttactccctcta

SEQ ID NO: 1476882 - DNA, 25 bp, Homo sapien
ggatatgttactccctctatacttg

SEQ ID NO: 1476883 - DNA, 25 bp, Homo sapien
agggatctcagacagcaaatttatg

SEQ ID NO: 1476884 - DNA, 25 bp, Homo sapien
tcctaaaccttctgtacgcatcaag

SEQ ID NO: 1476885 - DNA, 25 bp, Homo sapien
tagagccaagacgtacatcagggat

SEQ ID NO: 1476886 - DNA, 25 bp, Homo sapien
taatgacttgttgggaatgttcgta

SEQ ID NO: 1476887 - DNA, 25 bp, Homo sapien
ttgtattgccctttccgagaatgca

SEQ ID NO: 1476888 - DNA, 25 bp, Homo sapien
tttgtattgccctttccgagaatgc

SEQ ID NO: 1476889 - DNA, 25 bp, Homo sapien
tgcacatgcagcttggacccggtaa

SEQ ID NO: 1476890 - DNA, 25 bp, Homo sapien
atgcagcttggacccggtaatcagc

SEQ ID NO: 1476891 - DNA, 25 bp, Homo sapien
ttggacccggtaatcagctctgcac

SEQ ID NO: 1476892 - DNA, 25 bp, Homo sapien
gcttggacccggtaatcagctctgc

SEQ ID NO: 1476893 - DNA, 25 bp, Homo sapien
caaagccaactcttgtgaagctact

SEQ ID NO: 1476894 - DNA, 25 bp, Homo sapien
agtgtcagccagttcttctattgag

SEQ ID NO: 1476895 - DNA, 25 bp, Homo sapien
aagccaactcttgtgaagctactga

SEQ ID NO: 1476896 - DNA, 25 bp, Homo sapien
ttgagctcacgcaggcctgcaaagc

SEQ ID NO: 1476897 - DNA, 25 bp, Homo sapien
cagagaatgttcacttccggtgctt

SEQ ID NO: 1476898 - DNA, 25 bp, Homo sapien
gttgcaatagggatctcatgcctcc

SEQ ID NO: 1476899 - DNA, 25 bp, Homo sapien
gtgtcatttacaacctcagccgtgg

SEQ ID NO: 1476900 - DNA, 25 bp, Homo sapien
cagagcttccaattgcacggtgtca

SEQ ID NO: 1476901 - DNA, 25 bp, Homo sapien
ttatctttcagccctccctgctaac

SEQ ID NO: 1476902 - DNA, 25 bp, Homo sapien
tgtcttggcaggcagcgttctgctt

SEQ ID NO: 1476903 - DNA, 25 bp, Homo sapien
tctgtccaaggaacccatagtcagt

SEQ ID NO: 1476904 - DNA, 25 bp, Homo sapien
cctggtgcagaacagtggttttggt

SEQ ID NO: 1476905 - DNA, 25 bp, Homo sapien
ggcaggcagcgttctgcttataagg

SEQ ID NO: 1476906 - DNA, 25 bp, Homo sapien
ctgctacatcggcatctcttggcat

SEQ ID NO: 1476907 - DNA, 25 bp, Homo sapien
ttatgggaagctgtctctctcttaa

SEQ ID NO: 1476908 - DNA, 25 bp, Homo sapien
ctttatgggaagctgtctctctctt

SEQ ID NO: 1476909 - DNA, 25 bp, Homo sapien
gctgctacatcggcatctcttggca

SEQ ID NO: 1476910 - DNA, 25 bp, Homo sapien
ggcttttatctgaagtcctgaatga

SEQ ID NO: 1476911 - DNA, 25 bp, Homo sapien
tgtgtgaggtccatttgtaacccag

SEQ ID NO: 1476912 - DNA, 25 bp, Homo sapien
ccaataatgaaacacgtcaaggtga

SEQ ID NO: 1476913 - DNA, 25 bp, Homo sapien
gaatgactagaaataggcttctcct

SEQ ID NO: 1476914 - DNA, 25 bp, Homo sapien
gcataatcgagtgggcgagcggact

SEQ ID NO: 1476915 - DNA, 25 bp, Homo sapien
ccctgcataatcgagtgggcgagcg

SEQ ID NO: 1476916 - DNA, 25 bp, Homo sapien
tgcataatcgagtgggcgagcggac

SEQ ID NO: 1476917 - DNA, 25 bp, Homo sapien
cctgcataatcgagtgggcgagcgg

SEQ ID NO: 1476918 - DNA, 25 bp, Homo sapien
gatgagttatgcaaactgacttccc

SEQ ID NO: 1476919 - DNA, 25 bp, Homo sapien
gggtgatatcactgcccattcttga

SEQ ID NO: 1476920 - DNA, 25 bp, Homo sapien
ccagaaggatgcacttttgtagcgg

SEQ ID NO: 1476921 - DNA, 25 bp, Homo sapien
tggctgacaatggttccaacatatg

SEQ ID NO: 1476922 - DNA, 25 bp, Homo sapien
aaaccatctttgtgatcatggatca

SEQ ID NO: 1476923 - DNA, 25 bp, Homo sapien
tgctgccttaatgctccctctggaa

SEQ ID NO: 1476924 - DNA, 25 bp, Homo sapien
gtttacattgctgccttaatgctcc

SEQ ID NO: 1476925 - DNA, 25 bp, Homo sapien
tgccttaatgctccctctggaatca

SEQ ID NO: 1476926 - DNA, 25 bp, Homo sapien
tacattgctgccttaatgctccctc

SEQ ID NO: 1476927 - DNA, 25 bp, Homo sapien
aaatgggacgatgaccagatgtggc

SEQ ID NO: 1476928 - DNA, 25 bp, Homo sapien
gtctgagatccgggagccctgcaga

SEQ ID NO: 1476929 - DNA, 25 bp, Homo sapien
gaggagggtctgagatccgggagcc

SEQ ID NO: 1476930 - DNA, 25 bp, Homo sapien
catggcaaggccgtgcattgtgaag

SEQ ID NO: 1476931 - DNA, 25 bp, Homo sapien
caagacttctggtgtggattttcca

SEQ ID NO: 1476932 - DNA, 25 bp, Homo sapien
ttccacaccttctgtggtctcttca

SEQ ID NO: 1476933 - DNA, 25 bp, Homo sapien
tccaagacttctggtgtggattttc

SEQ ID NO: 1476934 - DNA, 25 bp, Homo sapien
ggattttccacaccttctgtggtct

SEQ ID NO: 1476935 - DNA, 25 bp, Homo sapien
cagcaaatatttcgcccttcccgtg

SEQ ID NO: 1476936 - DNA, 25 bp, Homo sapien
ttcccgtggtttctggcagtgttgc

SEQ ID NO: 1476937 - DNA, 25 bp, Homo sapien
tgcagctgttgcctcatctagtgaa

SEQ ID NO: 1476938 - DNA, 25 bp, Homo sapien
gcctcatctagtgaacatgccgggc

SEQ ID NO: 1476939 - DNA, 25 bp, Homo sapien
cacagactgaggggaccgctggtcc

SEQ ID NO: 1476940 - DNA, 25 bp, Homo sapien
cagactgaggggaccgctggtccat

SEQ ID NO: 1476941 - DNA, 25 bp, Homo sapien
acagactgaggggaccgctggtcca

SEQ ID NO: 1476942 - DNA, 25 bp, Homo sapien
tgtaccatacacctttcccgggtca

SEQ ID NO: 1476943 - DNA, 25 bp, Homo sapien
aataagtctggcacacaatgcaggc

SEQ ID NO: 1476944 - DNA, 25 bp, Homo sapien
cctctgatcttcatggcggtttggg

SEQ ID NO: 1476945 - DNA, 25 bp, Homo sapien
ggtcacttcggatgccttggtttca

SEQ ID NO: 1476946 - DNA, 25 bp, Homo sapien
caacttgttgagtctgtgtatggct

SEQ ID NO: 1476947 - DNA, 25 bp, Homo sapien
catggaggttaatcccagggatcag

SEQ ID NO: 1476948 - DNA, 25 bp, Homo sapien
actgcggtgttcgtgggtctcatca

SEQ ID NO: 1476949 - DNA, 25 bp, Homo sapien
catcacacacggtacttagagtttt

SEQ ID NO: 1476950 - DNA, 25 bp, Homo sapien
aaatgatgttttcacctggaggtcc

SEQ ID NO: 1476951 - DNA, 25 bp, Homo sapien
tggaccaagggcctgaaatgatgtt

SEQ ID NO: 1476952 - DNA, 25 bp, Homo sapien
tgaaatgatgttttcacctggaggt

SEQ ID NO: 1476953 - DNA, 25 bp, Homo sapien
aatgatgttttcacctggaggtcca

SEQ ID NO: 1476954 - DNA, 25 bp, Homo sapien
cagatttgcagggtatcttgttagg

SEQ ID NO: 1476955 - DNA, 25 bp, Homo sapien
tcttcccctggtcacctggtaattg

SEQ ID NO: 1476956 - DNA, 25 bp, Homo sapien
acctggtaattgcagctgatactta

SEQ ID NO: 1476957 - DNA, 25 bp, Homo sapien
gatacttatatgcttgagctccagg

SEQ ID NO: 1476958 - DNA, 25 bp, Homo sapien
tatccactagggtactgggacagag

SEQ ID NO: 1476959 - DNA, 25 bp, Homo sapien
tgccccatgtgatatccactagggt

SEQ ID NO: 1476960 - DNA, 25 bp, Homo sapien
ctagggtactgggacagagacgcat

SEQ ID NO: 1476961 - DNA, 25 bp, Homo sapien
tgactgtacgagttgaccaggcagt

SEQ ID NO: 1476962 - DNA, 25 bp, Homo sapien
tcctgtctggtacaacttgccagct

SEQ ID NO: 1476963 - DNA, 25 bp, Homo sapien
gtctggtacaacttgccagctccat

SEQ ID NO: 1476964 - DNA, 25 bp, Homo sapien
cctgtctggtacaacttgccagctc

SEQ ID NO: 1476965 - DNA, 25 bp, Homo sapien
tgtctggtacaacttgccagctcca

SEQ ID NO: 1476966 - DNA, 25 bp, Homo sapien
gagtcaccaggtgtcagaaaggcac

SEQ ID NO: 1476967 - DNA, 25 bp, Homo sapien
tggagtcaccaggtgtcagaaaggc

SEQ ID NO: 1476968 - DNA, 25 bp, Homo sapien
tcaccaggtgtcagaaaggcacccc

SEQ ID NO: 1476969 - DNA, 25 bp, Homo sapien
tctaatcgcctcaccccagtggctg

SEQ ID NO: 1476970 - DNA, 25 bp, Homo sapien
ttaatcatcctctgaaagtgggctg

SEQ ID NO: 1476971 - DNA, 25 bp, Homo sapien
gagttggtagctcacatccctgctg

SEQ ID NO: 1476972 - DNA, 25 bp, Homo sapien
gtgagtaaggacatgtcagcgctcc

SEQ ID NO: 1476973 - DNA, 25 bp, Homo sapien
caagggatactaggtgcagctgagt

SEQ ID NO: 1476974 - DNA, 25 bp, Homo sapien
tggcatttgttgtaacgaactgaaa

SEQ ID NO: 1476975 - DNA, 25 bp, Homo sapien
gccctgaagactcttcctgggtgtc

SEQ ID NO: 1476976 - DNA, 25 bp, Homo sapien
tgtctgtcaatgcaaggagtgggcc

SEQ ID NO: 1476977 - DNA, 25 bp, Homo sapien
cttgatctcatctataggccctgaa

SEQ ID NO: 1476978 - DNA, 25 bp, Homo sapien
tctgggttagcttcggccacaggaa

SEQ ID NO: 1476979 - DNA, 25 bp, Homo sapien
cagctgtgtgtttcgcccttggaga

SEQ ID NO: 1476980 - DNA, 25 bp, Homo sapien
tacgtgcagtgtatgcggaagccgc

SEQ ID NO: 1476981 - DNA, 25 bp, Homo sapien
gatggacctttagggacagcaggct

SEQ ID NO: 1476982 - DNA, 25 bp, Homo sapien
gagagcagtcttctcctcgtatctt

SEQ ID NO: 1476983 - DNA, 25 bp, Homo sapien
agggtgccaacacgactgggttctt

SEQ ID NO: 1476984 - DNA, 25 bp, Homo sapien
gcagtcttctcctcgtatcttcaca

SEQ ID NO: 1476985 - DNA, 25 bp, Homo sapien
gatagaaagcaagttttctcccgcc

SEQ ID NO: 1476986 - DNA, 25 bp, Homo sapien
aaacatccgtccattggatgttgat

SEQ ID NO: 1476987 - DNA, 25 bp, Homo sapien
gacacaaacatccgtccattggatg

SEQ ID NO: 1476988 - DNA, 25 bp, Homo sapien
caaacatccgtccattggatgttga

SEQ ID NO: 1476989 - DNA, 25 bp, Homo sapien
cacaaacatccgtccattggatgtt

SEQ ID NO: 1476990 - DNA, 25 bp, Homo sapien
caacttccggtgagccttgcaaatc

SEQ ID NO: 1476991 - DNA, 25 bp, Homo sapien
tgagctacttaaactgatgccagaa

SEQ ID NO: 1476992 - DNA, 25 bp, Homo sapien
gaagatatccgtggaactaccatcc

SEQ ID NO: 1476993 - DNA, 25 bp, Homo sapien
gaattccatgtatctttgagctact

SEQ ID NO: 1476994 - DNA, 25 bp, Homo sapien
ttctgagacaaggttagtctctgtg

SEQ ID NO: 1476995 - DNA, 25 bp, Homo sapien
gagacaaggttagtctctgtggccc

SEQ ID NO: 1476996 - DNA, 25 bp, Homo sapien
ctgttgcccagagtaatctgtgctg

SEQ ID NO: 1476997 - DNA, 25 bp, Homo sapien
gcccagagtaatctgtgctgggatt

SEQ ID NO: 1476998 - DNA, 25 bp, Homo sapien
ggacaagtcgggcatgtggcgggtg

SEQ ID NO: 1476999 - DNA, 25 bp, Homo sapien
cagcagtgtgccttctctctaactg

SEQ ID NO: 1477000 - DNA, 25 bp, Homo sapien
tgtggacaagtcgggcatgtggcgg

SEQ ID NO: 1477001 - DNA, 25 bp, Homo sapien
taagcagcagtgtgccttctctcta

SEQ ID NO: 1477002 - DNA, 25 bp, Homo sapien
cctttctgatacatagctgactaga

SEQ ID NO: 1477003 - DNA, 25 bp, Homo sapien
gaaggaccagattaacaagttcatg

SEQ ID NO: 1477004 - DNA, 25 bp, Homo sapien
taactctttagctatatactggcag

SEQ ID NO: 1477005 - DNA, 25 bp, Homo sapien
tatggctgcactgttgatggctggt

SEQ ID NO: 1477006 - DNA, 25 bp, Homo sapien
caagaggattacaggagctgccagc

SEQ ID NO: 1477007 - DNA, 25 bp, Homo sapien
cacaaaagatgccacgagaactcgt

SEQ ID NO: 1477008 - DNA, 25 bp, Homo sapien
tgaacctccccagagaaacgggatg

SEQ ID NO: 1477009 - DNA, 25 bp, Homo sapien
taatttggccaccttagagaactgc

SEQ ID NO: 1477010 - DNA, 25 bp, Homo sapien
gcattttgggacctctaccccagca

SEQ ID NO: 1477011 - DNA, 25 bp, Homo sapien
tcaccaggccagtgatactctatgg

SEQ ID NO: 1477012 - DNA, 25 bp, Homo sapien
taactcaaaacactggacgcagcaa

SEQ ID NO: 1477013 - DNA, 25 bp, Homo sapien
gaatttacccaaatgtcgttctcac

SEQ ID NO: 1477014 - DNA, 25 bp, Homo sapien
ttggagaacaagcacgcgtccctgt

SEQ ID NO: 1477015 - DNA, 25 bp, Homo sapien
gcatctgcccagctgatggtatcag

SEQ ID NO: 1477016 - DNA, 25 bp, Homo sapien
tgactccgcggtggatttccatgca

SEQ ID NO: 1477017 - DNA, 25 bp, Homo sapien
gaggagtccctcatggatcgcggta

SEQ ID NO: 1477018 - DNA, 25 bp, Homo sapien
tgacacactttgctgcgaggccgtg

SEQ ID NO: 1477019 - DNA, 25 bp, Homo sapien
gctgcccctgctcggtggcatcagg

SEQ ID NO: 1477020 - DNA, 25 bp, Homo sapien
catcagggggctcacatggctcgga

SEQ ID NO: 1477021 - DNA, 25 bp, Homo sapien
acagcctcagccagacatcggtcat

SEQ ID NO: 1477022 - DNA, 25 bp, Homo sapien
gcttgaccccagtagaacacagagg

SEQ ID NO: 1477023 - DNA, 25 bp, Homo sapien
tcaggtcaaatgatagagggccagc

SEQ ID NO: 1477024 - DNA, 25 bp, Homo sapien
tgactgcgctggaaagagcggccct

SEQ ID NO: 1477025 - DNA, 25 bp, Homo sapien
catccgtgctgtgggagctaaaggc

SEQ ID NO: 1477026 - DNA, 25 bp, Homo sapien
gccttgacaccatcgattttccctg

SEQ ID NO: 1477027 - DNA, 25 bp, Homo sapien
cctgtctaccaggtcacataggagc

SEQ ID NO: 1477028 - DNA, 25 bp, Homo sapien
cactgcaactctggtgcttgatgga

SEQ ID NO: 1477029 - DNA, 25 bp, Homo sapien
gcatgagccatggtaaggaaaacct

SEQ ID NO: 1477030 - DNA, 25 bp, Homo sapien
tctggacaagtaacagcttatttgg

SEQ ID NO: 1477031 - DNA, 25 bp, Homo sapien
tgaagtccttagaactctccttgtc

SEQ ID NO: 1477032 - DNA, 25 bp, Homo sapien
taacagcttatttgggtgaagtcct

SEQ ID NO: 1477033 - DNA, 25 bp, Homo sapien
ctcactgaagaagctcaagtattca

SEQ ID NO: 1477034 - DNA, 25 bp, Homo sapien
tctaactccagcattgacaggtgtc

SEQ ID NO: 1477035 - DNA, 25 bp, Homo sapien
tctccctcaggccagaatcatgtga

SEQ ID NO: 1477036 - DNA, 25 bp, Homo sapien
tcaagagcagctaagccacttcgtg

SEQ ID NO: 1477037 - DNA, 25 bp, Homo sapien
cattctccgtcatgccccggtgtag

SEQ ID NO: 1477038 - DNA, 25 bp, Homo sapien
aaggcaggtgccacgctcaggccag

SEQ ID NO: 1477039 - DNA, 25 bp, Homo sapien
cgcaaggcaggtgccacgctcaggc

SEQ ID NO: 1477040 - DNA, 25 bp, Homo sapien
gtgccacgctcaggccaggagcccg

SEQ ID NO: 1477041 - DNA, 25 bp, Homo sapien
acgcaaggcaggtgccacgctcagg

SEQ ID NO: 1477042 - DNA, 25 bp, Homo sapien
gcccatcacgatgttgacgctgctg

SEQ ID NO: 1477043 - DNA, 25 bp, Homo sapien
cagagagtccggaaatgacgagcgc

SEQ ID NO: 1477044 - DNA, 25 bp, Homo sapien
tgactgggtgtcactggtattgccc

SEQ ID NO: 1477045 - DNA, 25 bp, Homo sapien
tgacgagcgcgctggaaaagctcct

SEQ ID NO: 1477046 - DNA, 25 bp, Homo sapien
cagctcgtgcactgaggtggacgtc

SEQ ID NO: 1477047 - DNA, 25 bp, Homo sapien
aatgtttggcggctctctaagatgg

SEQ ID NO: 1477048 - DNA, 25 bp, Homo sapien
ccagctcgtgcactgaggtggacgt

SEQ ID NO: 1477049 - DNA, 25 bp, Homo sapien
tggacgtctggaggaatgtttggcg

SEQ ID NO: 1477050 - DNA, 25 bp, Homo sapien
agcgctgagtgtgcctgcacggact

SEQ ID NO: 1477051 - DNA, 25 bp, Homo sapien
cggcctttggcttagcgctgagtgt

SEQ ID NO: 1477052 - DNA, 25 bp, Homo sapien
gcctttggcttagcgctgagtgtgc

SEQ ID NO: 1477053 - DNA, 25 bp, Homo sapien
agtgtgcctgcacggactggctcct

SEQ ID NO: 1477054 - DNA, 25 bp, Homo sapien
ggcactggtgctcccatctcacttt

SEQ ID NO: 1477055 - DNA, 25 bp, Homo sapien
tgtgttgacagtaaggagcgctcgc

SEQ ID NO: 1477056 - DNA, 25 bp, Homo sapien
tcactttctcctgcccgtgtgttga

SEQ ID NO: 1477057 - DNA, 25 bp, Homo sapien
gatgctgtgatggtcgagtgcccat

SEQ ID NO: 1477058 - DNA, 25 bp, Homo sapien
aaggtcccggctgagtagttgaata

SEQ ID NO: 1477059 - DNA, 25 bp, Homo sapien
gggtgcattcgggccggcctgaaag

SEQ ID NO: 1477060 - DNA, 25 bp, Homo sapien
ccggcctgaaaggtcccggctgagt

SEQ ID NO: 1477061 - DNA, 25 bp, Homo sapien
gaaaggtcccggctgagtagttgaa

SEQ ID NO: 1477062 - DNA, 25 bp, Homo sapien
tttcaggagagccaacaagatcggc

SEQ ID NO: 1477063 - DNA, 25 bp, Homo sapien
gagagccttctggatagttgaatca

SEQ ID NO: 1477064 - DNA, 25 bp, Homo sapien
ctgggtctcaggtgcagtgtcttga

SEQ ID NO: 1477065 - DNA, 25 bp, Homo sapien
tcccggtcgcagtcagtgctagaga

SEQ ID NO: 1477066 - DNA, 25 bp, Homo sapien
cttggtggcccctgcagccgtctct

SEQ ID NO: 1477067 - DNA, 25 bp, Homo sapien
ttggtggcccctgcagccgtctctg

SEQ ID NO: 1477068 - DNA, 25 bp, Homo sapien
tggtggcccctgcagccgtctctgt

SEQ ID NO: 1477069 - DNA, 25 bp, Homo sapien
tgtggtcttcacatgtgctcctgtc

SEQ ID NO: 1477070 - DNA, 25 bp, Homo sapien
ggtcttcacatgtgctcctgtcaca

SEQ ID NO: 1477071 - DNA, 25 bp, Homo sapien
cccacctgagcgtccaccgtgggct

SEQ ID NO: 1477072 - DNA, 25 bp, Homo sapien
gcccacctgagcgtccaccgtgggc

SEQ ID NO: 1477073 - DNA, 25 bp, Homo sapien
ggcagtgagcagctcatgggaaatt

SEQ ID NO: 1477074 - DNA, 25 bp, Homo sapien
ccgggcagtgagcagctcatgggaa

SEQ ID NO: 1477075 - DNA, 25 bp, Homo sapien
ctaggtgccgggcagtgagcagctc

SEQ ID NO: 1477076 - DNA, 25 bp, Homo sapien
aggtgccgggcagtgagcagctcat

SEQ ID NO: 1477077 - DNA, 25 bp, Homo sapien
cagggcttcataaatctccccaacc

SEQ ID NO: 1477078 - DNA, 25 bp, Homo sapien
gcaaggatgctgtgaatacaccggg

SEQ ID NO: 1477079 - DNA, 25 bp, Homo sapien
ttggcccagggcttcataaatctcc

SEQ ID NO: 1477080 - DNA, 25 bp, Homo sapien
caaagcagctgatgcttggcccagg

SEQ ID NO: 1477081 - DNA, 25 bp, Homo sapien
gcctatggtgttcggactccaggga

SEQ ID NO: 1477082 - DNA, 25 bp, Homo sapien
tgcctatggtgttcggactccaggg

SEQ ID NO: 1477083 - DNA, 25 bp, Homo sapien
ctatggtgttcggactccagggagt

SEQ ID NO: 1477084 - DNA, 25 bp, Homo sapien
tatggtgttcggactccagggagtg

SEQ ID NO: 1477085 - DNA, 25 bp, Homo sapien
tccgtccacgtcttcaatgttgccg

SEQ ID NO: 1477086 - DNA, 25 bp, Homo sapien
caatgttgccgccactgtgctggcg

SEQ ID NO: 1477087 - DNA, 25 bp, Homo sapien
gcattgttgccacctgtcgtcgggg

SEQ ID NO: 1477088 - DNA, 25 bp, Homo sapien
tgtgctggcgggcattgcaatcctt

SEQ ID NO: 1477089 - DNA, 25 bp, Homo sapien
gagttaatcaagttccgcaggacct

SEQ ID NO: 1477090 - DNA, 25 bp, Homo sapien
tctgtccaaagtgatgggtccaccc

SEQ ID NO: 1477091 - DNA, 25 bp, Homo sapien
ttgttctggatactgccgcgctccg

SEQ ID NO: 1477092 - DNA, 25 bp, Homo sapien
tgcggttgcgaagaaatataagctc

SEQ ID NO: 1477093 - DNA, 25 bp, Homo sapien
tcagagagggaacgggaagaaaggc

SEQ ID NO: 1477094 - DNA, 25 bp, Homo sapien
ctgcaggtcagagagggaacgggaa

SEQ ID NO: 1477095 - DNA, 25 bp, Homo sapien
aagaaaggcagaaggcctgtgtttt

SEQ ID NO: 1477096 - DNA, 25 bp, Homo sapien
cctgtgttttccagtctattggttt

SEQ ID NO: 1477097 - DNA, 25 bp, Homo sapien
tcatactcgtcagggcaagtgaact

SEQ ID NO: 1477098 - DNA, 25 bp, Homo sapien
gatgaccttgtactcgtcggcaccc

SEQ ID NO: 1477099 - DNA, 25 bp, Homo sapien
gaagcttctgtggagcatgatgacc

SEQ ID NO: 1477100 - DNA, 25 bp, Homo sapien
ccttcttctcgaaggactggatggc

SEQ ID NO: 1477101 - DNA, 25 bp, Homo sapien
tgatagctggagctacaactttatg

SEQ ID NO: 1477102 - DNA, 25 bp, Homo sapien
aagtttcagggacatcctgatagct

SEQ ID NO: 1477103 - DNA, 25 bp, Homo sapien
ttcagggacatcctgatagctggag

SEQ ID NO: 1477104 - DNA, 25 bp, Homo sapien
gagctacaactttatgcagtaggtc

SEQ ID NO: 1477105 - DNA, 25 bp, Homo sapien
cccactcgtcacgtgctgttattct

SEQ ID NO: 1477106 - DNA, 25 bp, Homo sapien
actcgtcacgtgctgttattctgaa

SEQ ID NO: 1477107 - DNA, 25 bp, Homo sapien
tcacgtgctgttattctgaagtcac

SEQ ID NO: 1477108 - DNA, 25 bp, Homo sapien
cgtcacgtgctgttattctgaagtc

SEQ ID NO: 1477109 - DNA, 25 bp, Homo sapien
gaggacatggaggccatacaggaaa

SEQ ID NO: 1477110 - DNA, 25 bp, Homo sapien
gacatggaggccatacaggaaagaa

SEQ ID NO: 1477111 - DNA, 25 bp, Homo sapien
aggacatggaggccatacaggaaag

SEQ ID NO: 1477112 - DNA, 25 bp, Homo sapien
ggacatggaggccatacaggaaaga

SEQ ID NO: 1477113 - DNA, 25 bp, Homo sapien
ccttgagaaagaggccgctgaggct

SEQ ID NO: 1477114 - DNA, 25 bp, Homo sapien
ccagaaaaggatccaagaagctatc

SEQ ID NO: 1477115 - DNA, 25 bp, Homo sapien
caagaagctatcaaaagctttctgg

SEQ ID NO: 1477116 - DNA, 25 bp, Homo sapien
ctttctggggccgtgagctttagca

SEQ ID NO: 1477117 - DNA, 25 bp, Homo sapien
tctggggccgtgagctttagcaact

SEQ ID NO: 1477118 - DNA, 25 bp, Homo sapien
ccacttcatatgacatagctggtgg

SEQ ID NO: 1477119 - DNA, 25 bp, Homo sapien
cttcctctagagttcgggtgctaca

SEQ ID NO: 1477120 - DNA, 25 bp, Homo sapien
aacacgtgatgtcccccaaatagct

SEQ ID NO: 1477121 - DNA, 25 bp, Homo sapien
ctacactgagaagcggcatatggac

SEQ ID NO: 1477122 - DNA, 25 bp, Homo sapien
gaacactcggtaaagaacacgtgat

SEQ ID NO: 1477123 - DNA, 25 bp, Homo sapien
tgtcttcaatgacacagtggatgtg

SEQ ID NO: 1477124 - DNA, 25 bp, Homo sapien
agcctgtgtcttcaatgacacagtg

SEQ ID NO: 1477125 - DNA, 25 bp, Homo sapien
cttgtcctatgggatcaaagcctgt

SEQ ID NO: 1477126 - DNA, 25 bp, Homo sapien
gtcctatgggatcaaagcctgtgtc

SEQ ID NO: 1477127 - DNA, 25 bp, Homo sapien
aacttgccaccagtgtagactcaca

SEQ ID NO: 1477128 - DNA, 25 bp, Homo sapien
aacaacttgccaccagtgtagactc

SEQ ID NO: 1477129 - DNA, 25 bp, Homo sapien
gatgatacctcccaacaacttgcca

SEQ ID NO: 1477130 - DNA, 25 bp, Homo sapien
tcacaactcttacttgatgatacct

SEQ ID NO: 1477131 - DNA, 25 bp, Homo sapien
gggcttggttacctgacagcccaga

SEQ ID NO: 1477132 - DNA, 25 bp, Homo sapien
ggacatttggaaacacagtcaacaa

SEQ ID NO: 1477133 - DNA, 25 bp, Homo sapien
agaaggacatttggaaacacagtca

SEQ ID NO: 1477134 - DNA, 25 bp, Homo sapien
acacagtcaacaaggctccctgggc

SEQ ID NO: 1477135 - DNA, 25 bp, Homo sapien
ctgatggccatattgtgagcggctg

SEQ ID NO: 1477136 - DNA, 25 bp, Homo sapien
tattgtgagcggctgttcccagagc

SEQ ID NO: 1477137 - DNA, 25 bp, Homo sapien
cgtcactgtccagggtcgttgaagg

SEQ ID NO: 1477138 - DNA, 25 bp, Homo sapien
gccatattgtgagcggctgttccca

SEQ ID NO: 1477139 - DNA, 25 bp, Homo sapien
gctttttttctatcctctatgttaa

SEQ ID NO: 1477140 - DNA, 25 bp, Homo sapien
tagctcgtgtgatcccctggagaca

SEQ ID NO: 1477141 - DNA, 25 bp, Homo sapien
taaacattgcagaagctagctcgtg

SEQ ID NO: 1477142 - DNA, 25 bp, Homo sapien
gacacgggacgtagtcatcatcaat

SEQ ID NO: 1477143 - DNA, 25 bp, Homo sapien
caaggtcacgctcaatgtaatgcca

SEQ ID NO: 1477144 - DNA, 25 bp, Homo sapien
acagggatggcattaggggacagga

SEQ ID NO: 1477145 - DNA, 25 bp, Homo sapien
acaggagaaccgttgtgtctgtggt

SEQ ID NO: 1477146 - DNA, 25 bp, Homo sapien
gcaagcaggatgagcgtgggactca

SEQ ID NO: 1477147 - DNA, 25 bp, Homo sapien
agcaggatgagcgtgggactcagag

SEQ ID NO: 1477148 - DNA, 25 bp, Homo sapien
ggttgttcgcgcctcattctgcaag

SEQ ID NO: 1477149 - DNA, 25 bp, Homo sapien
caaggccagtgataagcgtgtctcc

SEQ ID NO: 1477150 - DNA, 25 bp, Homo sapien
tccttgactgctaagcgggttttaa

SEQ ID NO: 1477151 - DNA, 25 bp, Homo sapien
tgataagcgtgtctcctttctaaaa

SEQ ID NO: 1477152 - DNA, 25 bp, Homo sapien
cggcaggttctgggggagccttcct

SEQ ID NO: 1477153 - DNA, 25 bp, Homo sapien
ggcaggttctgggggagccttcctg

SEQ ID NO: 1477154 - DNA, 25 bp, Homo sapien
atggcaaattgtcatcttagaaatc

SEQ ID NO: 1477155 - DNA, 25 bp, Homo sapien
ctgctggccccatggtgacgagttg

SEQ ID NO: 1477156 - DNA, 25 bp, Homo sapien
agggatgtggctcagtattgaaccc

SEQ ID NO: 1477157 - DNA, 25 bp, Homo sapien
agtattgaaccccagtcccactact

SEQ ID NO: 1477158 - DNA, 25 bp, Homo sapien
gacgagttgggcctgtccacgtgtc

SEQ ID NO: 1477159 - DNA, 25 bp, Homo sapien
gaaataagcttctaacatgcatgcc

SEQ ID NO: 1477160 - DNA, 25 bp, Homo sapien
caactggtatattgaatttgcttag

SEQ ID NO: 1477161 - DNA, 25 bp, Homo sapien
tcactgccaaatctaacacaactgg

SEQ ID NO: 1477162 - DNA, 25 bp, Homo sapien
caaccatcatcaaagtccaagagaa

SEQ ID NO: 1477163 - DNA, 25 bp, Homo sapien
tggccgcgttgttgtccaggatgct

SEQ ID NO: 1477164 - DNA, 25 bp, Homo sapien
tgaaaggcagcgttgcaggacagca

SEQ ID NO: 1477165 - DNA, 25 bp, Homo sapien
cttgatgtagtagcggatgaggatc

SEQ ID NO: 1477166 - DNA, 25 bp, Homo sapien
gatgtactgggtctgcgtgatttcc

SEQ ID NO: 1477167 - DNA, 25 bp, Homo sapien
acctccctctgctggcagtaggttc

SEQ ID NO: 1477168 - DNA, 25 bp, Homo sapien
tctacctccctctgctggcagtagg

SEQ ID NO: 1477169 - DNA, 25 bp, Homo sapien
atggcttctacctccctctgctggc

SEQ ID NO: 1477170 - DNA, 25 bp, Homo sapien
gatggcttctacctccctctgctgg

SEQ ID NO: 1477171 - DNA, 25 bp, Homo sapien
agcctctatatagaacccaggagtg

SEQ ID NO: 1477172 - DNA, 25 bp, Homo sapien
agaaaggctatgtttagaccaagcc

SEQ ID NO: 1477173 - DNA, 25 bp, Homo sapien
tatggtggcagataaagaaaggcta

SEQ ID NO: 1477174 - DNA, 25 bp, Homo sapien
gagtgagatgaccataatatgccag

SEQ ID NO: 1477175 - DNA, 25 bp, Homo sapien
gagacagttaaagcctgatcccaaa

SEQ ID NO: 1477176 - DNA, 25 bp, Homo sapien
cagccggctgcattcataaaaaggg

SEQ ID NO: 1477177 - DNA, 25 bp, Homo sapien
cagacctccttgctttggctcttgg

SEQ ID NO: 1477178 - DNA, 25 bp, Homo sapien
cattcagagctattaggataacagt

SEQ ID NO: 1477179 - DNA, 25 bp, Homo sapien
tcaggtgagtcttgggtaatctgct

SEQ ID NO: 1477180 - DNA, 25 bp, Homo sapien
tctctaaactggtgaaagggcagtt

SEQ ID NO: 1477181 - DNA, 25 bp, Homo sapien
tggcttagacttgacagatacatcg

SEQ ID NO: 1477182 - DNA, 25 bp, Homo sapien
gatacatcgtagctgccaacagttg

SEQ ID NO: 1477183 - DNA, 25 bp, Homo sapien
aagctagagttagatcaaacgggaa

SEQ ID NO: 1477184 - DNA, 25 bp, Homo sapien
caggatccatgaagagtgtgagagt

SEQ ID NO: 1477185 - DNA, 25 bp, Homo sapien
acaggatccatgaagagtgtgagag

SEQ ID NO: 1477186 - DNA, 25 bp, Homo sapien
tagagttagatcaaacgggaaacat

SEQ ID NO: 1477187 - DNA, 25 bp, Homo sapien
cttccacgtcatggcggggaacttt

SEQ ID NO: 1477188 - DNA, 25 bp, Homo sapien
tctacccacactcattttccgggga

SEQ ID NO: 1477189 - DNA, 25 bp, Homo sapien
acccacactcattttccggggacag

SEQ ID NO: 1477190 - DNA, 25 bp, Homo sapien
gcagcttccacgtcatggcggggaa

SEQ ID NO: 1477191 - DNA, 25 bp, Homo sapien
tctctttgggagacactctccactg

SEQ ID NO: 1477192 - DNA, 25 bp, Homo sapien
aaaccatcagggccagacacagaaa

SEQ ID NO: 1477193 - DNA, 25 bp, Homo sapien
gagacactctccactgtaggagcca

SEQ ID NO: 1477194 - DNA, 25 bp, Homo sapien
tccctgaaaccatcagggccagaca

SEQ ID NO: 1477195 - DNA, 25 bp, Homo sapien
tgccgtatcacgtatcacaaggaaa

SEQ ID NO: 1477196 - DNA, 25 bp, Homo sapien
taagacctacctcctctaagacgat

SEQ ID NO: 1477197 - DNA, 25 bp, Homo sapien
gtttcagttgcctcaaagctttcca

SEQ ID NO: 1477198 - DNA, 25 bp, Homo sapien
catgacccagctttagattacagga

SEQ ID NO: 1477199 - DNA, 25 bp, Homo sapien
ctatgatacaaattccaaacaaata

SEQ ID NO: 1477200 - DNA, 25 bp, Homo sapien
tatgatacaaattccaaacaaatac

SEQ ID NO: 1477201 - DNA, 25 bp, Homo sapien
gctgctccttagcaggtaaggccct

SEQ ID NO: 1477202 - DNA, 25 bp, Homo sapien
ctacatcggatgacttggtgcttct

SEQ ID NO: 1477203 - DNA, 25 bp, Homo sapien
cttagcaggtaaggcccttcctctt

SEQ ID NO: 1477204 - DNA, 25 bp, Homo sapien
tgctccttagcaggtaaggcccttc

SEQ ID NO: 1477205 - DNA, 25 bp, Homo sapien
ttcttcctaaagttttgcttgataa

SEQ ID NO: 1477206 - DNA, 25 bp, Homo sapien
gcttgataattaactcaagcaacca

SEQ ID NO: 1477207 - DNA, 25 bp, Homo sapien
tcaagcaaccaactttcaacagttt

SEQ ID NO: 1477208 - DNA, 25 bp, Homo sapien
actttcaacagtttctacaatgaag

SEQ ID NO: 1477209 - DNA, 25 bp, Homo sapien
tgtagttgccccaacgtccaagaac

SEQ ID NO: 1477210 - DNA, 25 bp, Homo sapien
gaacaaaggcattgaggtcatctga

SEQ ID NO: 1477211 - DNA, 25 bp, Homo sapien
gaagccaaaataaagcaatcgccag

SEQ ID NO: 1477212 - DNA, 25 bp, Homo sapien
caagaactaagtctccacagaggga

SEQ ID NO: 1477213 - DNA, 25 bp, Homo sapien
gaattgagattgttgtcatcattcc

SEQ ID NO: 1477214 - DNA, 25 bp, Homo sapien
ccttgtcaagtgttcataaaaaatg

SEQ ID NO: 1477215 - DNA, 25 bp, Homo sapien
tggaattgagattgttgtcatcatt

SEQ ID NO: 1477216 - DNA, 25 bp, Homo sapien
ctggagggtccttgtcaagtgttca

SEQ ID NO: 1477217 - DNA, 25 bp, Homo sapien
gttggaattatccactcgccttgta

SEQ ID NO: 1477218 - DNA, 25 bp, Homo sapien
gtgttggaattatccactcgccttg

SEQ ID NO: 1477219 - DNA, 25 bp, Homo sapien
ttgtgttggaattatccactcgcct

SEQ ID NO: 1477220 - DNA, 25 bp, Homo sapien
agtcttgtgttggaattatccactc

SEQ ID NO: 1477221 - DNA, 25 bp, Homo sapien
accctttgtaagtgcagcgatctgc

SEQ ID NO: 1477222 - DNA, 25 bp, Homo sapien
tgaagtcaggagcttggtaccagtc

SEQ ID NO: 1477223 - DNA, 25 bp, Homo sapien
tgaaagctctcggatcatctgcagc

SEQ ID NO: 1477224 - DNA, 25 bp, Homo sapien
taacaagtggccactagaaccagct

SEQ ID NO: 1477225 - DNA, 25 bp, Homo sapien
ctttgctttctttgctccaagcctg

SEQ ID NO: 1477226 - DNA, 25 bp, Homo sapien
cttttctatcactccaccctttgct

SEQ ID NO: 1477227 - DNA, 25 bp, Homo sapien
gctttctttgctccaagcctgttgg

SEQ ID NO: 1477228 - DNA, 25 bp, Homo sapien
ttgctccaagcctgttggttttcct

SEQ ID NO: 1477229 - DNA, 25 bp, Homo sapien
tcagctgttccaagtcaccatattt

SEQ ID NO: 1477230 - DNA, 25 bp, Homo sapien
taggtaatcccctacaaagctgtaa

SEQ ID NO: 1477231 - DNA, 25 bp, Homo sapien
tatgtcttttcgctgggtgtccagg

SEQ ID NO: 1477232 - DNA, 25 bp, Homo sapien
taatcctaatggcttttgccccaaa

SEQ ID NO: 1477233 - DNA, 25 bp, Homo sapien
agtatcgttttgaactccaagcccg

SEQ ID NO: 1477234 - DNA, 25 bp, Homo sapien
tccaagcccgcatgtgacaaaagat

SEQ ID NO: 1477235 - DNA, 25 bp, Homo sapien
cattcacaatggagacttgtcccca

SEQ ID NO: 1477236 - DNA, 25 bp, Homo sapien
tctgcttctgtaggactaacgcttc

SEQ ID NO: 1477237 - DNA, 25 bp, Homo sapien
ctgcagtagagaaagctaagcacga

SEQ ID NO: 1477238 - DNA, 25 bp, Homo sapien
gcagattggttgtattcttccggaa

SEQ ID NO: 1477239 - DNA, 25 bp, Homo sapien
tctgggcatcatgggatccaaggaa

SEQ ID NO: 1477240 - DNA, 25 bp, Homo sapien
tgaggcctgcaatgaaagaataccc

SEQ ID NO: 1477241 - DNA, 25 bp, Homo sapien
tttgcctcacgtagcccagaaacac

SEQ ID NO: 1477242 - DNA, 25 bp, Homo sapien
tatttttgcctcacgtagcccagaa

SEQ ID NO: 1477243 - DNA, 25 bp, Homo sapien
ttatttttgcctcacgtagcccaga

SEQ ID NO: 1477244 - DNA, 25 bp, Homo sapien
tttttgcctcacgtagcccagaaac

SEQ ID NO: 1477245 - DNA, 25 bp, Homo sapien
ttgtgtatccatctggacaactctg

SEQ ID NO: 1477246 - DNA, 25 bp, Homo sapien
tccatctggacaactctgagttctg

SEQ ID NO: 1477247 - DNA, 25 bp, Homo sapien
ctttcatttgtgtatccatctggac

SEQ ID NO: 1477248 - DNA, 25 bp, Homo sapien
tatccatctggacaactctgagttc

SEQ ID NO: 1477249 - DNA, 25 bp, Homo sapien
ctgcagctgctttcctttccagaca

SEQ ID NO: 1477250 - DNA, 25 bp, Homo sapien
ctctgagctgcagctgctttccttt

SEQ ID NO: 1477251 - DNA, 25 bp, Homo sapien
gctgctttcctttccagacaggcct

SEQ ID NO: 1477252 - DNA, 25 bp, Homo sapien
tgctttcctttccagacaggcctct

SEQ ID NO: 1477253 - DNA, 25 bp, Homo sapien
tcctactctgagcaaatgcctcggg

SEQ ID NO: 1477254 - DNA, 25 bp, Homo sapien
ttccttttaaggctctcatgggcaa

SEQ ID NO: 1477255 - DNA, 25 bp, Homo sapien
cacagggctcttgtgatggtgcctt

SEQ ID NO: 1477256 - DNA, 25 bp, Homo sapien
ggctcttgtgatggtgccttccttt

SEQ ID NO: 1477257 - DNA, 25 bp, Homo sapien
tgtgatgctcgaagaacagaactgg

SEQ ID NO: 1477258 - DNA, 25 bp, Homo sapien
aaaggacttcaggtagattgcaggg

SEQ ID NO: 1477259 - DNA, 25 bp, Homo sapien
tattattccataaaggcagctgtga

SEQ ID NO: 1477260 - DNA, 25 bp, Homo sapien
ggtatcaaaataaacacggtgcctg

SEQ ID NO: 1477261 - DNA, 25 bp, Homo sapien
cctgacccatagaagccatgagata

SEQ ID NO: 1477262 - DNA, 25 bp, Homo sapien
cagcagttccgattccctatttcag

SEQ ID NO: 1477263 - DNA, 25 bp, Homo sapien
ccaactaggtgtggacaggaaatga

SEQ ID NO: 1477264 - DNA, 25 bp, Homo sapien
taaaattcagttccagccgggtgca

SEQ ID NO: 1477265 - DNA, 25 bp, Homo sapien
aaaggcaacaatagaccttcagcag

SEQ ID NO: 1477266 - DNA, 25 bp, Homo sapien
cagatgggccagaggacgctgcgtt

SEQ ID NO: 1477267 - DNA, 25 bp, Homo sapien
ttgcaccaagaactctctcctgcag

SEQ ID NO: 1477268 - DNA, 25 bp, Homo sapien
gaggacgctgcgttctgatgccttc

SEQ ID NO: 1477269 - DNA, 25 bp, Homo sapien
aactggagaaaagcaattgagcact

SEQ ID NO: 1477270 - DNA, 25 bp, Homo sapien
gagtcaatgaactgaggaggtcatc

SEQ ID NO: 1477271 - DNA, 25 bp, Homo sapien
cagaggagccttctgaagtgcaaac

SEQ ID NO: 1477272 - DNA, 25 bp, Homo sapien
agggacctcctaacagaggaaggca

SEQ ID NO: 1477273 - DNA, 25 bp, Homo sapien
aaaagattgatgtggcaatcgtctg

SEQ ID NO: 1477274 - DNA, 25 bp, Homo sapien
cactggcctgacatatgatgtgatg

SEQ ID NO: 1477275 - DNA, 25 bp, Homo sapien
caatcgtctgaaagaaaagcatggc

SEQ ID NO: 1477276 - DNA, 25 bp, Homo sapien
caagaaatgggctcaatggggtaga

SEQ ID NO: 1477277 - DNA, 25 bp, Homo sapien
catcattgtggtgcagaggttctgt

SEQ ID NO: 1477278 - DNA, 25 bp, Homo sapien
ccaggtcgtataatatcgacatcct

SEQ ID NO: 1477279 - DNA, 25 bp, Homo sapien
gactgcccaggtcgtataatatcga

SEQ ID NO: 1477280 - DNA, 25 bp, Homo sapien
ccagactgcccaggtcgtataatat

SEQ ID NO: 1477281 - DNA, 25 bp, Homo sapien
tgcccaggtcgtataatatcgacat

SEQ ID NO: 1477282 - DNA, 25 bp, Homo sapien
ggaggatcttatttctgtaacccat

SEQ ID NO: 1477283 - DNA, 25 bp, Homo sapien
taaggaggatcttatttctgtaacc

SEQ ID NO: 1477284 - DNA, 25 bp, Homo sapien
gaactaaggaggatcttatttctgt

SEQ ID NO: 1477285 - DNA, 25 bp, Homo sapien
ctgctgaactaaggaggatcttatt

SEQ ID NO: 1477286 - DNA, 25 bp, Homo sapien
cagaacaatatgctactgtgatatc

SEQ ID NO: 1477287 - DNA, 25 bp, Homo sapien
caaaaagatctctattgtgctgcaa

SEQ ID NO: 1477288 - DNA, 25 bp, Homo sapien
gacctaggttcaaatagagaactac

SEQ ID NO: 1477289 - DNA, 25 bp, Homo sapien
tacctaaatacttctgccacaaaac

SEQ ID NO: 1477290 - DNA, 25 bp, Homo sapien
gcatgggaaatggaaggaccagaaa

SEQ ID NO: 1477291 - DNA, 25 bp, Homo sapien
gcctaaagggatccaaagtgcctct

SEQ ID NO: 1477292 - DNA, 25 bp, Homo sapien
agggtaccttaatgcagatctgggc

SEQ ID NO: 1477293 - DNA, 25 bp, Homo sapien
caaggcaacccaatcatttaagcag

SEQ ID NO: 1477294 - DNA, 25 bp, Homo sapien
aaatgtgaatctcagctggagggtg

SEQ ID NO: 1477295 - DNA, 25 bp, Homo sapien
atgtgaatctcagctggagggtgaa

SEQ ID NO: 1477296 - DNA, 25 bp, Homo sapien
gcttgcttccgtaaaatgtgaatct

SEQ ID NO: 1477297 - DNA, 25 bp, Homo sapien
aaagcttgcttccgtaaaatgtgaa

SEQ ID NO: 1477298 - DNA, 25 bp, Homo sapien
aggaatggcaaagagctgagcaaac

SEQ ID NO: 1477299 - DNA, 25 bp, Homo sapien
gaggaatggcaaagagctgagcaaa

SEQ ID NO: 1477300 - DNA, 25 bp, Homo sapien
ggaatggcaaagagctgagcaaaca

SEQ ID NO: 1477301 - DNA, 25 bp, Homo sapien
gaatggcaaagagctgagcaaacac

SEQ ID NO: 1477302 - DNA, 25 bp, Homo sapien
tgaaacgaagaaccccaagccatct

SEQ ID NO: 1477303 - DNA, 25 bp, Homo sapien
agccatctgccaaggagccacatat

SEQ ID NO: 1477304 - DNA, 25 bp, Homo sapien
gtgaaacgaagaaccccaagccatc

SEQ ID NO: 1477305 - DNA, 25 bp, Homo sapien
ccaagccatctgccaaggagccaca

SEQ ID NO: 1477306 - DNA, 25 bp, Homo sapien
tgtaacttgtgaagcaggtccccga

SEQ ID NO: 1477307 - DNA, 25 bp, Homo sapien
gtaacttgtgaagcaggtccccgag

SEQ ID NO: 1477308 - DNA, 25 bp, Homo sapien
aactgtaacttgtgaagcaggtccc

SEQ ID NO: 1477309 - DNA, 25 bp, Homo sapien
ctgtaacttgtgaagcaggtccccg

SEQ ID NO: 1477310 - DNA, 25 bp, Homo sapien
atagagaaggatggactactctgtc

SEQ ID NO: 1477311 - DNA, 25 bp, Homo sapien
gatgatgactgtgtagggaaggata

SEQ ID NO: 1477312 - DNA, 25 bp, Homo sapien
gatagagaaggatggactactctgt

SEQ ID NO: 1477313 - DNA, 25 bp, Homo sapien
tggagatgatgactgtgtagggaag

SEQ ID NO: 1477314 - DNA, 25 bp, Homo sapien
tactagcgtgtatttcagcccctcc

SEQ ID NO: 1477315 - DNA, 25 bp, Homo sapien
gagatgaactgcagtaacttgcatg

SEQ ID NO: 1477316 - DNA, 25 bp, Homo sapien
tgctaggcttgatgtcccaaatggg

SEQ ID NO: 1477317 - DNA, 25 bp, Homo sapien
gctgactcttactttgaaggctgaa

SEQ ID NO: 1477318 - DNA, 25 bp, Homo sapien
gaggcatttccggtcttcctgggaa

SEQ ID NO: 1477319 - DNA, 25 bp, Homo sapien
actgaggcatttccggtcttcctgg

SEQ ID NO: 1477320 - DNA, 25 bp, Homo sapien
ggcatttccggtcttcctgggaaca

SEQ ID NO: 1477321 - DNA, 25 bp, Homo sapien
cactgaggcatttccggtcttcctg

SEQ ID NO: 1477322 - DNA, 25 bp, Homo sapien
catcacccaatataggaaaagcatt

SEQ ID NO: 1477323 - DNA, 25 bp, Homo sapien
aattacatcacccaatataggaaaa

SEQ ID NO: 1477324 - DNA, 25 bp, Homo sapien
attatagaccataaccaaatgggtt

SEQ ID NO: 1477325 - DNA, 25 bp, Homo sapien
aagaataattatagaccataaccaa

SEQ ID NO: 1477326 - DNA, 25 bp, Homo sapien
gagaatcgctggaagttggaaggca

SEQ ID NO: 1477327 - DNA, 25 bp, Homo sapien
cactccagcctgggtgacagggcaa

SEQ ID NO: 1477328 - DNA, 25 bp, Homo sapien
gaggttgcagtgagctgagatcacg

SEQ ID NO: 1477329 - DNA, 25 bp, Homo sapien
cctgggtgacagggcaagactccgt

SEQ ID NO: 1477330 - DNA, 25 bp, Homo sapien
gagaataagatcttgcttctcattc

SEQ ID NO: 1477331 - DNA, 25 bp, Homo sapien
gtcactaatatccactggctttttt

SEQ ID NO: 1477332 - DNA, 25 bp, Homo sapien
catcagagaataagatcttgcttct

SEQ ID NO: 1477333 - DNA, 25 bp, Homo sapien
tgtcactaatatccactggcttttt

SEQ ID NO: 1477334 - DNA, 25 bp, Homo sapien
tggtgggaattacttatgaggcctc

SEQ ID NO: 1477335 - DNA, 25 bp, Homo sapien
cctaagagaatccaagagaaaggca

SEQ ID NO: 1477336 - DNA, 25 bp, Homo sapien
tgaggcctctttagtacgatacaag

SEQ ID NO: 1477337 - DNA, 25 bp, Homo sapien
tgaacagaactgattaagaggtgaa

SEQ ID NO: 1477338 - DNA, 25 bp, Homo sapien
ttagcaaataacatggcatacttac

SEQ ID NO: 1477339 - DNA, 25 bp, Homo sapien
cattttaattagtgatttttagcaa

SEQ ID NO: 1477340 - DNA, 25 bp, Homo sapien
taattagtgatttttagcaaataac

SEQ ID NO: 1477341 - DNA, 25 bp, Homo sapien
aatggctaattcattttaattagtg

SEQ ID NO: 1477342 - DNA, 25 bp, Homo sapien
cccaaatggtagcaagagtttaaca

SEQ ID NO: 1477343 - DNA, 25 bp, Homo sapien
ttccccaaatggtagcaagagttta

SEQ ID NO: 1477344 - DNA, 25 bp, Homo sapien
taacatacatgtataattcaatttc

SEQ ID NO: 1477345 - DNA, 25 bp, Homo sapien
aatggtagcaagagtttaacataca

SEQ ID NO: 1477346 - DNA, 25 bp, Homo sapien
catttgataagaacagcccccttta

SEQ ID NO: 1477347 - DNA, 25 bp, Homo sapien
gatgtccgcaacagcttcatgccag

SEQ ID NO: 1477348 - DNA, 25 bp, Homo sapien
catgccagcaatgatcatcagaaaa

SEQ ID NO: 1477349 - DNA, 25 bp, Homo sapien
gatgacagtgaagctcaagttaata

SEQ ID NO: 1477350 - DNA, 25 bp, Homo sapien
taaaccgggttgcagaatgatgtcc

SEQ ID NO: 1477351 - DNA, 25 bp, Homo sapien
cccagaaatcctaatgccaaatgag

SEQ ID NO: 1477352 - DNA, 25 bp, Homo sapien
gagctcagtgtatgcctcttcatga

SEQ ID NO: 1477353 - DNA, 25 bp, Homo sapien
gaaaagaatccaattcgaacagtga

SEQ ID NO: 1477354 - DNA, 25 bp, Homo sapien
cgaacagtgacataacaggtaggaa

SEQ ID NO: 1477355 - DNA, 25 bp, Homo sapien
tctttcgaaccacattaaatgggca

SEQ ID NO: 1477356 - DNA, 25 bp, Homo sapien
tgggtaccaagtctccggtgattgc

SEQ ID NO: 1477357 - DNA, 25 bp, Homo sapien
ttaaaaatgcatcaatagtgagggc

SEQ ID NO: 1477358 - DNA, 25 bp, Homo sapien
gagggcattcaaaattagcgctggg

SEQ ID NO: 1477359 - DNA, 25 bp, Homo sapien
caaaggaagtaccacaaagattgaa

SEQ ID NO: 1477360 - DNA, 25 bp, Homo sapien
ccacaaagattgaagtctatttcca

SEQ ID NO: 1477361 - DNA, 25 bp, Homo sapien
tgcttacaacaaaggaagtaccaca

SEQ ID NO: 1477362 - DNA, 25 bp, Homo sapien
ttcttctgagtgcttacaacaaagg

SEQ ID NO: 1477363 - DNA, 25 bp, Homo sapien
gcaaatgaaccagctctgctgtggg

SEQ ID NO: 1477364 - DNA, 25 bp, Homo sapien
caaatgaaccagctctgctgtgggc

SEQ ID NO: 1477365 - DNA, 25 bp, Homo sapien
aatgaaccagctctgctgtgggctt

SEQ ID NO: 1477366 - DNA, 25 bp, Homo sapien
cagcaaatgaaccagctctgctgtg

SEQ ID NO: 1477367 - DNA, 25 bp, Homo sapien
ttagaatcctcctaccaatctcagc

SEQ ID NO: 1477368 - DNA, 25 bp, Homo sapien
cttcagtctctagatgaggaaaaca

SEQ ID NO: 1477369 - DNA, 25 bp, Homo sapien
catactgaatgtttatagttggaag

SEQ ID NO: 1477370 - DNA, 25 bp, Homo sapien
caatttattctaatgacacgcttca

SEQ ID NO: 1477371 - DNA, 25 bp, Homo sapien
cgactgcagctgagaactaacatca

SEQ ID NO: 1477372 - DNA, 25 bp, Homo sapien
gactgcagctgagaactaacatcat

SEQ ID NO: 1477373 - DNA, 25 bp, Homo sapien
gaagataagtttcccagtggaccag

SEQ ID NO: 1477374 - DNA, 25 bp, Homo sapien
cccgctgcagtgtaacttggcttca

SEQ ID NO: 1477375 - DNA, 25 bp, Homo sapien
gagatcagccagagtatgagagtgc

SEQ ID NO: 1477376 - DNA, 25 bp, Homo sapien
gcaagcagaggtaactgatttccac

SEQ ID NO: 1477377 - DNA, 25 bp, Homo sapien
cagggatgatgcttgcggagctgag

SEQ ID NO: 1477378 - DNA, 25 bp, Homo sapien
agctgagggagcacgtaatgtgtta

SEQ ID NO: 1477379 - DNA, 25 bp, Homo sapien
cacttcccgttgatgatactctttg

SEQ ID NO: 1477380 - DNA, 25 bp, Homo sapien
taatgtgttacaaaccccacggctc

SEQ ID NO: 1477381 - DNA, 25 bp, Homo sapien
caggaagagtacaaagttggtggat

SEQ ID NO: 1477382 - DNA, 25 bp, Homo sapien
gagtacaaagttggtggatacatac

SEQ ID NO: 1477383 - DNA, 25 bp, Homo sapien
ttgtcaataccctgtagctccatga

SEQ ID NO: 1477384 - DNA, 25 bp, Homo sapien
gtgtcttgtcaataccctgtagctc

SEQ ID NO: 1477385 - DNA, 25 bp, Homo sapien
ggcgctgactgcaaatgagaggaca

SEQ ID NO: 1477386 - DNA, 25 bp, Homo sapien
atgacaggaatacagtgctggcgct

SEQ ID NO: 1477387 - DNA, 25 bp, Homo sapien
acagcaaccactgcgcagacgatga

SEQ ID NO: 1477388 - DNA, 25 bp, Homo sapien
gcagacgatgagatcccattttaag

SEQ ID NO: 1477389 - DNA, 25 bp, Homo sapien
ccaggctctagctataatcattatg

SEQ ID NO: 1477390 - DNA, 25 bp, Homo sapien
catacaatgccatagtgatcactca

SEQ ID NO: 1477391 - DNA, 25 bp, Homo sapien
cattatagcctgacattaacagtat

SEQ ID NO: 1477392 - DNA, 25 bp, Homo sapien
tgcagcaccctagaacatagagaag

SEQ ID NO: 1477393 - DNA, 25 bp, Homo sapien
caattggcaccatcactaatttttc

SEQ ID NO: 1477394 - DNA, 25 bp, Homo sapien
atttcatcttgacacaattggcacc

SEQ ID NO: 1477395 - DNA, 25 bp, Homo sapien
ccagtgctaatgatgtgtacaaaaa

SEQ ID NO: 1477396 - DNA, 25 bp, Homo sapien
tttccagtgctaatgatgtgtacaa

SEQ ID NO: 1477397 - DNA, 25 bp, Homo sapien
tcccgtgctccacccagtgtggttg

SEQ ID NO: 1477398 - DNA, 25 bp, Homo sapien
tgtgacccagccataagtctaaagt

SEQ ID NO: 1477399 - DNA, 25 bp, Homo sapien
aagggccccaagcaatcgctatgca

SEQ ID NO: 1477400 - DNA, 25 bp, Homo sapien
tcaactttgaaagaatgctctgaac

SEQ ID NO: 1477401 - DNA, 25 bp, Homo sapien
ttggtgccagcaatacacaaaacgg

SEQ ID NO: 1477402 - DNA, 25 bp, Homo sapien
tgattcatgtgactatcctggcaaa

SEQ ID NO: 1477403 - DNA, 25 bp, Homo sapien
tcatttgtgcagagcccacctgctg

SEQ ID NO: 1477404 - DNA, 25 bp, Homo sapien
cacaaaacggactgaatgtgattca

SEQ ID NO: 1477405 - DNA, 25 bp, Homo sapien
gaggccctcctatgctacattacac

SEQ ID NO: 1477406 - DNA, 25 bp, Homo sapien
cattgagagcctgatctctgctgaa

SEQ ID NO: 1477407 - DNA, 25 bp, Homo sapien
tgtgccaggtaccaagcgaggtgta

SEQ ID NO: 1477408 - DNA, 25 bp, Homo sapien
ggtgtatctttctgtcctagtcctt

SEQ ID NO: 1477409 - DNA, 25 bp, Homo sapien
aaacagcctgcattggatgaaggac

SEQ ID NO: 1477410 - DNA, 25 bp, Homo sapien
taggaaacagcctgcattggatgaa

SEQ ID NO: 1477411 - DNA, 25 bp, Homo sapien
tgactctgccagattttgatgtaaa

SEQ ID NO: 1477412 - DNA, 25 bp, Homo sapien
gctgactctgccagattttgatgta

SEQ ID NO: 1477413 - DNA, 25 bp, Homo sapien
gccgaaaacagtgccgggatgtgtt

SEQ ID NO: 1477414 - DNA, 25 bp, Homo sapien
tcagatggtaagaaagggcgaccaa

SEQ ID NO: 1477415 - DNA, 25 bp, Homo sapien
ggtcactgctctgacggctcagatg

SEQ ID NO: 1477416 - DNA, 25 bp, Homo sapien
gaccaagaggccacagaaggccgaa

SEQ ID NO: 1477417 - DNA, 25 bp, Homo sapien
ccattgtggaagtctaaacgcccga

SEQ ID NO: 1477418 - DNA, 25 bp, Homo sapien
gcagtacctgtaaagcaaattgcag

SEQ ID NO: 1477419 - DNA, 25 bp, Homo sapien
gatacactggatagagcaagtgatt

SEQ ID NO: 1477420 - DNA, 25 bp, Homo sapien
tcaagtgtgcttagcagttgtccac

SEQ ID NO: 1477421 - DNA, 25 bp, Homo sapien
tgcctccagacgcactctccacaca

SEQ ID NO: 1477422 - DNA, 25 bp, Homo sapien
ctccccacaccaggacgccctgcat

SEQ ID NO: 1477423 - DNA, 25 bp, Homo sapien
acagctccccacaccaggacgccct

SEQ ID NO: 1477424 - DNA, 25 bp, Homo sapien
gcctccagacgcactctccacacag

SEQ ID NO: 1477425 - DNA, 25 bp, Homo sapien
tttccagcactctaaggtaccatgt

SEQ ID NO: 1477426 - DNA, 25 bp, Homo sapien
cttccccaccaattttgctgaaaag

SEQ ID NO: 1477427 - DNA, 25 bp, Homo sapien
caccaattttgctgaaaagctcaaa

SEQ ID NO: 1477428 - DNA, 25 bp, Homo sapien
tcagatcagcttccccgagggtggg

SEQ ID NO: 1477429 - DNA, 25 bp, Homo sapien
ccttgatccagttgcccttgaaagc

SEQ ID NO: 1477430 - DNA, 25 bp, Homo sapien
gctactgtactcttagtctgttcgg

SEQ ID NO: 1477431 - DNA, 25 bp, Homo sapien
accatacccggccagttgctgacat

SEQ ID NO: 1477432 - DNA, 25 bp, Homo sapien
gcccttgaaagctactgtactctta

SEQ ID NO: 1477433 - DNA, 25 bp, Homo sapien
ggaggtcctaccatgagctgtgtga

SEQ ID NO: 1477434 - DNA, 25 bp, Homo sapien
tgtgacactggctaagttactagac

SEQ ID NO: 1477435 - DNA, 25 bp, Homo sapien
ggtgcttttctgtaacccaggtgat

SEQ ID NO: 1477436 - DNA, 25 bp, Homo sapien
cagtagtctctgtcaagccgggtaa

SEQ ID NO: 1477437 - DNA, 25 bp, Homo sapien
cacaaggatccatcaatccatcatg

SEQ ID NO: 1477438 - DNA, 25 bp, Homo sapien
atgctgaaacggttcacaaggatcc

SEQ ID NO: 1477439 - DNA, 25 bp, Homo sapien
ctgaaacggttcacaaggatccatc

SEQ ID NO: 1477440 - DNA, 25 bp, Homo sapien
ggatccatcaatccatcatgatgca

SEQ ID NO: 1477441 - DNA, 25 bp, Homo sapien
cagatactggttcacacgagaatgg

SEQ ID NO: 1477442 - DNA, 25 bp, Homo sapien
cagcaagaacctagaacacttggaa

SEQ ID NO: 1477443 - DNA, 25 bp, Homo sapien
gaaaaacctgacagtactaactgtc

SEQ ID NO: 1477444 - DNA, 25 bp, Homo sapien
tatagaaactggacaacagtttggc

SEQ ID NO: 1477445 - DNA, 25 bp, Homo sapien
tgcactgaagcagactgcgtggagc

SEQ ID NO: 1477446 - DNA, 25 bp, Homo sapien
acgctccgggccacactgtaaacag

SEQ ID NO: 1477447 - DNA, 25 bp, Homo sapien
acagccgaggttatcccagacacag

SEQ ID NO: 1477448 - DNA, 25 bp, Homo sapien
cttcactgcactgaagcagactgcg

SEQ ID NO: 1477449 - DNA, 25 bp, Homo sapien
tgcagaaagtgttgatttgcgggaa

SEQ ID NO: 1477450 - DNA, 25 bp, Homo sapien
gaagagcccaaggagggaaatagca

SEQ ID NO: 1477451 - DNA, 25 bp, Homo sapien
ggaaatagcagggaagcaatataaa

SEQ ID NO: 1477452 - DNA, 25 bp, Homo sapien
aatttgctccaaaagataagtgcag

SEQ ID NO: 1477453 - DNA, 25 bp, Homo sapien
tacattagccagtgcaacaaaaccc

SEQ ID NO: 1477454 - DNA, 25 bp, Homo sapien
tatatctgccaattccggatcaggg

SEQ ID NO: 1477455 - DNA, 25 bp, Homo sapien
gaacagcagtcaacaaggaggtcca

SEQ ID NO: 1477456 - DNA, 25 bp, Homo sapien
taccagaaagtcatccctggagatg

SEQ ID NO: 1477457 - DNA, 25 bp, Homo sapien
cccagcccggatgggcattattata

SEQ ID NO: 1477458 - DNA, 25 bp, Homo sapien
tggatgctttgaggcttgggctccc

SEQ ID NO: 1477459 - DNA, 25 bp, Homo sapien
tatagtgctgcaacttcttggtcat

SEQ ID NO: 1477460 - DNA, 25 bp, Homo sapien
cagtcttcggtagatatgcaagcca

SEQ ID NO: 1477461 - DNA, 25 bp, Homo sapien
taagtagtccctagctgattgtaga

SEQ ID NO: 1477462 - DNA, 25 bp, Homo sapien
tacacaacgtaactgggagggtgcc

SEQ ID NO: 1477463 - DNA, 25 bp, Homo sapien
gaagcaaaataaggccacacagcac

SEQ ID NO: 1477464 - DNA, 25 bp, Homo sapien
tggctttggcccctgtatcaagaag

SEQ ID NO: 1477465 - DNA, 25 bp, Homo sapien
gaataccctgagaagcatatactat

SEQ ID NO: 1477466 - DNA, 25 bp, Homo sapien
gctaatgtttgtctggcctttcctg

SEQ ID NO: 1477467 - DNA, 25 bp, Homo sapien
tgtagcgaaccctcagaataccctg

SEQ ID NO: 1477468 - DNA, 25 bp, Homo sapien
cattttgataagagtaaactgagac

SEQ ID NO: 1477469 - DNA, 25 bp, Homo sapien
agaagtaagtttcccaagctctcac

SEQ ID NO: 1477470 - DNA, 25 bp, Homo sapien
ccctgtatgcatttggttactccaa

SEQ ID NO: 1477471 - DNA, 25 bp, Homo sapien
tgcttcagggccagatacggtgcta

SEQ ID NO: 1477472 - DNA, 25 bp, Homo sapien
gattgcctccaccataatgacttgg

SEQ ID NO: 1477473 - DNA, 25 bp, Homo sapien
tgtattggtgaggcggggtcaggct

SEQ ID NO: 1477474 - DNA, 25 bp, Homo sapien
gtgtattggtgaggcggggtcaggc

SEQ ID NO: 1477475 - DNA, 25 bp, Homo sapien
tggtaagaattagatgtggtcttgc

SEQ ID NO: 1477476 - DNA, 25 bp, Homo sapien
gctactggtaagaattagatgtggt

SEQ ID NO: 1477477 - DNA, 25 bp, Homo sapien
actggtaagaattagatgtggtctt

SEQ ID NO: 1477478 - DNA, 25 bp, Homo sapien
tactggtaagaattagatgtggtct

SEQ ID NO: 1477479 - DNA, 25 bp, Homo sapien
tggccatgacgaggcagaagaggag

SEQ ID NO: 1477480 - DNA, 25 bp, Homo sapien
agctggccatgacgaggcagaagag

SEQ ID NO: 1477481 - DNA, 25 bp, Homo sapien
ctggccatgacgaggcagaagagga

SEQ ID NO: 1477482 - DNA, 25 bp, Homo sapien
gcagctggccatgacgaggcagaag

SEQ ID NO: 1477483 - DNA, 25 bp, Homo sapien
aaaagccttggctcaaggtcagaaa

SEQ ID NO: 1477484 - DNA, 25 bp, Homo sapien
gccttggctcaaggtcagaaatcca

SEQ ID NO: 1477485 - DNA, 25 bp, Homo sapien
taaaatcgccagtacattctccttg

SEQ ID NO: 1477486 - DNA, 25 bp, Homo sapien
ggagggaaaccaggacaatgagtaa

SEQ ID NO: 1477487 - DNA, 25 bp, Homo sapien
tgaaatgtgtttcagataaagagct

SEQ ID NO: 1477488 - DNA, 25 bp, Homo sapien
aatccaacttaataccagatttttg

SEQ ID NO: 1477489 - DNA, 25 bp, Homo sapien
agcaaataaaatctcatcccattgg

SEQ ID NO: 1477490 - DNA, 25 bp, Homo sapien
gttaatgattccatccatgaccatg

SEQ ID NO: 1477491 - DNA, 25 bp, Homo sapien
tcaggtgggtatgcaaaggacaatg

SEQ ID NO: 1477492 - DNA, 25 bp, Homo sapien
ggtgactcttgtatggactccccat

SEQ ID NO: 1477493 - DNA, 25 bp, Homo sapien
gtcgggtccacactgtctcactggg

SEQ ID NO: 1477494 - DNA, 25 bp, Homo sapien
tccccatacaaggtatagggtagag

SEQ ID NO: 1477495 - DNA, 25 bp, Homo sapien
taccctaagccctggcaacaactga

SEQ ID NO: 1477496 - DNA, 25 bp, Homo sapien
aaccatacggtatgtagcctttgca

SEQ ID NO: 1477497 - DNA, 25 bp, Homo sapien
tccagaggaccatatagttggaacc

SEQ ID NO: 1477498 - DNA, 25 bp, Homo sapien
tgggtgggtcattcgcaaggattct

SEQ ID NO: 1477499 - DNA, 25 bp, Homo sapien
tgtgttgaggtccatgaaattcatg

SEQ ID NO: 1477500 - DNA, 25 bp, Homo sapien
ggtgtgttgaggtccatgaaattca

SEQ ID NO: 1477501 - DNA, 25 bp, Homo sapien
ttggtgtgttgaggtccatgaaatt

SEQ ID NO: 1477502 - DNA, 25 bp, Homo sapien
tggtgtgttgaggtccatgaaattc

SEQ ID NO: 1477503 - DNA, 25 bp, Homo sapien
ggcactgcaaacatctgggagacga

SEQ ID NO: 1477504 - DNA, 25 bp, Homo sapien
aaaagaatagaaccaggcgagagaa

SEQ ID NO: 1477505 - DNA, 25 bp, Homo sapien
tgttccatgcgcaggaactgccagt

SEQ ID NO: 1477506 - DNA, 25 bp, Homo sapien
aggtcttaagctggaggattgcctg

SEQ ID NO: 1477507 - DNA, 25 bp, Homo sapien
actgctctcggttaaattttccttg

SEQ ID NO: 1477508 - DNA, 25 bp, Homo sapien
cgatcaagtaatgccagcaaggtca

SEQ ID NO: 1477509 - DNA, 25 bp, Homo sapien
ggtcagtcgatcataccagacttta

SEQ ID NO: 1477510 - DNA, 25 bp, Homo sapien
cagactttaatccacttgccaggga

SEQ ID NO: 1477511 - DNA, 25 bp, Homo sapien
cctggagtgcatcaacaattaaggg

SEQ ID NO: 1477512 - DNA, 25 bp, Homo sapien
ggcttgcgtaagtgaggaccctcag

SEQ ID NO: 1477513 - DNA, 25 bp, Homo sapien
cacgagagagtgtaggactgacatc

SEQ ID NO: 1477514 - DNA, 25 bp, Homo sapien
ttgggcattccctggagtgcatcaa

SEQ ID NO: 1477515 - DNA, 25 bp, Homo sapien
gagcctgcagaattccatcctttac

SEQ ID NO: 1477516 - DNA, 25 bp, Homo sapien
gggaagcactcccagagctcgtgtg

SEQ ID NO: 1477517 - DNA, 25 bp, Homo sapien
cttgcagaacattgcgggggaagca

SEQ ID NO: 1477518 - DNA, 25 bp, Homo sapien
tgaccacccgcccattagagcctgc

SEQ ID NO: 1477519 - DNA, 25 bp, Homo sapien
gctatcctgatactttcatggaacc

SEQ ID NO: 1477520 - DNA, 25 bp, Homo sapien
gctcttctactcatgaaatcaatgg

SEQ ID NO: 1477521 - DNA, 25 bp, Homo sapien
cacatcttcccaagctatcctgata

SEQ ID NO: 1477522 - DNA, 25 bp, Homo sapien
ttcttgaaggttcaacactaatgtt

SEQ ID NO: 1477523 - DNA, 25 bp, Homo sapien
tacaacacacagtacacccggtgac

SEQ ID NO: 1477524 - DNA, 25 bp, Homo sapien
ggtacaacacacagtacacccggtg

SEQ ID NO: 1477525 - DNA, 25 bp, Homo sapien
acacacagtacacccggtgactgga

SEQ ID NO: 1477526 - DNA, 25 bp, Homo sapien
gcaggtacaacacacagtacacccg

SEQ ID NO: 1477527 - DNA, 25 bp, Homo sapien
tccacccacaggtttaggaatccta

SEQ ID NO: 1477528 - DNA, 25 bp, Homo sapien
gaatcctatccctaacacacagagg

SEQ ID NO: 1477529 - DNA, 25 bp, Homo sapien
agtgcccctctcaggtccacttcca

SEQ ID NO: 1477530 - DNA, 25 bp, Homo sapien
agaagtgcccctctcaggtccactt

SEQ ID NO: 1477531 - DNA, 25 bp, Homo sapien
ttatctctggctttgaatccttggc

SEQ ID NO: 1477532 - DNA, 25 bp, Homo sapien
tatctctggctttgaatccttggct

SEQ ID NO: 1477533 - DNA, 25 bp, Homo sapien
tgcgagccaccatcagtaacagctg

SEQ ID NO: 1477534 - DNA, 25 bp, Homo sapien
cccagaagacggatcttgactctca

SEQ ID NO: 1477535 - DNA, 25 bp, Homo sapien
gtttccgactgggtcctgcgagcca

SEQ ID NO: 1477536 - DNA, 25 bp, Homo sapien
ctgaagggcactgacggcagggtcc

SEQ ID NO: 1477537 - DNA, 25 bp, Homo sapien
aggatgggcaaaacaaaagctttgg

SEQ ID NO: 1477538 - DNA, 25 bp, Homo sapien
gaggatgggcaaaacaaaagctttg

SEQ ID NO: 1477539 - DNA, 25 bp, Homo sapien
tgaggatgggcaaaacaaaagcttt

SEQ ID NO: 1477540 - DNA, 25 bp, Homo sapien
ctgaggatgggcaaaacaaaagctt

SEQ ID NO: 1477541 - DNA, 25 bp, Homo sapien
ggagcgcaatctttgaataattcca

SEQ ID NO: 1477542 - DNA, 25 bp, Homo sapien
taccaaagagacgatgatgtccaca

SEQ ID NO: 1477543 - DNA, 25 bp, Homo sapien
aaaatcactgaaacggacaggtgga

SEQ ID NO: 1477544 - DNA, 25 bp, Homo sapien
tctttgctagcgtctcttctccaag

SEQ ID NO: 1477545 - DNA, 25 bp, Homo sapien
aagttatagactgtgagcagcataa

SEQ ID NO: 1477546 - DNA, 25 bp, Homo sapien
tatagactgtgagcagcataatcat

SEQ ID NO: 1477547 - DNA, 25 bp, Homo sapien
taagttatagactgtgagcagcata

SEQ ID NO: 1477548 - DNA, 25 bp, Homo sapien
gttatagactgtgagcagcataatc

SEQ ID NO: 1477549 - DNA, 25 bp, Homo sapien
aagaatcagccgtttaatggcccag

SEQ ID NO: 1477550 - DNA, 25 bp, Homo sapien
gcagtccacaagaaccgcactggtt

SEQ ID NO: 1477551 - DNA, 25 bp, Homo sapien
ttgtacaaccggaaaatgctgctta

SEQ ID NO: 1477552 - DNA, 25 bp, Homo sapien
taaaactgtcacacggtaacaaggc

SEQ ID NO: 1477553 - DNA, 25 bp, Homo sapien
tctgacggacataggactgactcgt

SEQ ID NO: 1477554 - DNA, 25 bp, Homo sapien
tgtcagacagcagtttaaatccaga

SEQ ID NO: 1477555 - DNA, 25 bp, Homo sapien
taaatccagaagatcgtctgacgga

SEQ ID NO: 1477556 - DNA, 25 bp, Homo sapien
ccatgaatgggtagcacagttttcc

SEQ ID NO: 1477557 - DNA, 25 bp, Homo sapien
caaaagccgtttcaccaaggctgaa

SEQ ID NO: 1477558 - DNA, 25 bp, Homo sapien
tgaatgcactgtggcaaacctatgt

SEQ ID NO: 1477559 - DNA, 25 bp, Homo sapien
tcaccaaggctgaatgcactgtggc

SEQ ID NO: 1477560 - DNA, 25 bp, Homo sapien
actgtggcaaacctatgtccaggca

SEQ ID NO: 1477561 - DNA, 25 bp, Homo sapien
catttgcatggggactttgcatgcc

SEQ ID NO: 1477562 - DNA, 25 bp, Homo sapien
gactttgcatgcctgttggctggag

SEQ ID NO: 1477563 - DNA, 25 bp, Homo sapien
tgatgtttggattggtccatggtac

SEQ ID NO: 1477564 - DNA, 25 bp, Homo sapien
tttgtgatgtttggattggtccatg

SEQ ID NO: 1477565 - DNA, 25 bp, Homo sapien
aaacagtagtggctttaaagagaga

SEQ ID NO: 1477566 - DNA, 25 bp, Homo sapien
tcctaagcaggtaagaaacagtagt

SEQ ID NO: 1477567 - DNA, 25 bp, Homo sapien
tgccctaagaagctggtacacgaca

SEQ ID NO: 1477568 - DNA, 25 bp, Homo sapien
tgaatggcactagcattcctaagca

SEQ ID NO: 1477569 - DNA, 25 bp, Homo sapien
ttatttgatggtagaggctgtaaag

SEQ ID NO: 1477570 - DNA, 25 bp, Homo sapien
tttgatggtagaggctgtaaagggc

SEQ ID NO: 1477571 - DNA, 25 bp, Homo sapien
tatttgatggtagaggctgtaaagg

SEQ ID NO: 1477572 - DNA, 25 bp, Homo sapien
tgatggtagaggctgtaaagggcct

SEQ ID NO: 1477573 - DNA, 25 bp, Homo sapien
tgcatagcatccacagatatctctt

SEQ ID NO: 1477574 - DNA, 25 bp, Homo sapien
acagatatctcttcttgtacagatg

SEQ ID NO: 1477575 - DNA, 25 bp, Homo sapien
cagatatctcttcttgtacagatgt

SEQ ID NO: 1477576 - DNA, 25 bp, Homo sapien
gacatgcatagcatccacagatatc

SEQ ID NO: 1477577 - DNA, 25 bp, Homo sapien
ggaagttaccctgtagattatctgt

SEQ ID NO: 1477578 - DNA, 25 bp, Homo sapien
gggaagttaccctgtagattatctg

SEQ ID NO: 1477579 - DNA, 25 bp, Homo sapien
tgaccaagtgaaactaaattaagta

SEQ ID NO: 1477580 - DNA, 25 bp, Homo sapien
gcagaagccagtaaatgaggctgtc

SEQ ID NO: 1477581 - DNA, 25 bp, Homo sapien
ttcctccttatccttgataaagcat

SEQ ID NO: 1477582 - DNA, 25 bp, Homo sapien
aatgaggctgtctcatgctttatga

SEQ ID NO: 1477583 - DNA, 25 bp, Homo sapien
gctagtatggtcttgactttgcaaa

SEQ ID NO: 1477584 - DNA, 25 bp, Homo sapien
gggccggtgctagtatggtcttgac

SEQ ID NO: 1477585 - DNA, 25 bp, Homo sapien
ggctgagtgcatgcggggccggtgc

SEQ ID NO: 1477586 - DNA, 25 bp, Homo sapien
gccggtgctagtatggtcttgactt

SEQ ID NO: 1477587 - DNA, 25 bp, Homo sapien
tacataagtcaacatatggacggtt

SEQ ID NO: 1477588 - DNA, 25 bp, Homo sapien
gctttagccagtaatcatgcctcat

SEQ ID NO: 1477589 - DNA, 25 bp, Homo sapien
gcagaaaggcatattgacacagctc

SEQ ID NO: 1477590 - DNA, 25 bp, Homo sapien
catcatgatattaccactggagcca

SEQ ID NO: 1477591 - DNA, 25 bp, Homo sapien
gccaagcaacaaacgattgcccaag

SEQ ID NO: 1477592 - DNA, 25 bp, Homo sapien
caagagttgtctcactatttgcaaa

SEQ ID NO: 1477593 - DNA, 25 bp, Homo sapien
cctggtagagtaggacaatatatgt

SEQ ID NO: 1477594 - DNA, 25 bp, Homo sapien
tcacagagcttagtatcggtacatt

SEQ ID NO: 1477595 - DNA, 25 bp, Homo sapien
tcatcagaacggaaatgacatggaa

SEQ ID NO: 1477596 - DNA, 25 bp, Homo sapien
aggtgtattgccttctatgtcatca

SEQ ID NO: 1477597 - DNA, 25 bp, Homo sapien
cttctatgtcatcatcagaacggaa

SEQ ID NO: 1477598 - DNA, 25 bp, Homo sapien
aaaaaggtgtattgccttctatgtc

SEQ ID NO: 1477599 - DNA, 25 bp, Homo sapien
acgatgggtcaaggttagtctggcc

SEQ ID NO: 1477600 - DNA, 25 bp, Homo sapien
tttcatggctggacttacaagacga

SEQ ID NO: 1477601 - DNA, 25 bp, Homo sapien
tattaatggattctaacagggagac

SEQ ID NO: 1477602 - DNA, 25 bp, Homo sapien
cattcagttgactggatgccgtcat

SEQ ID NO: 1477603 - DNA, 25 bp, Homo sapien
cctgtatcaggtgtaagccgggaca

SEQ ID NO: 1477604 - DNA, 25 bp, Homo sapien
cccagggttcccgtgatgaagaact

SEQ ID NO: 1477605 - DNA, 25 bp, Homo sapien
gataccctcgtcttcagtctctctg

SEQ ID NO: 1477606 - DNA, 25 bp, Homo sapien
gaacactgattggtggataccctcg

SEQ ID NO: 1477607 - DNA, 25 bp, Homo sapien
tctgctcggcatttggagaaccggc

SEQ ID NO: 1477608 - DNA, 25 bp, Homo sapien
cccctgggttagtgggctcagcgtc

SEQ ID NO: 1477609 - DNA, 25 bp, Homo sapien
tcagcgtcagactttacactggtct

SEQ ID NO: 1477610 - DNA, 25 bp, Homo sapien
gcaggtccagggtgattacaggaat

SEQ ID NO: 1477611 - DNA, 25 bp, Homo sapien
actcagtgggtctccgggttgagaa

SEQ ID NO: 1477612 - DNA, 25 bp, Homo sapien
agggagctttccaaatctgtcatgg

SEQ ID NO: 1477613 - DNA, 25 bp, Homo sapien
aatttttatgggctcatgtagactc

SEQ ID NO: 1477614 - DNA, 25 bp, Homo sapien
gggtactgctcatcgtgataacaat

SEQ ID NO: 1477615 - DNA, 25 bp, Homo sapien
cgatgagagtaacagctacctcact

SEQ ID NO: 1477616 - DNA, 25 bp, Homo sapien
tatcgatgagagtaacagctacctc

SEQ ID NO: 1477617 - DNA, 25 bp, Homo sapien
ctcactatctgaggagtccacttcc

SEQ ID NO: 1477618 - DNA, 25 bp, Homo sapien
acagctacctcactatctgaggagt

SEQ ID NO: 1477619 - DNA, 25 bp, Homo sapien
tgctttgtacccgttcccttatgga

SEQ ID NO: 1477620 - DNA, 25 bp, Homo sapien
ctgtcctgaggtgacttgctttgta

SEQ ID NO: 1477621 - DNA, 25 bp, Homo sapien
gccacgatggtgtcacattgagggc

SEQ ID NO: 1477622 - DNA, 25 bp, Homo sapien
atggtgtcacattgagggcagctgc

SEQ ID NO: 1477623 - DNA, 25 bp, Homo sapien
tactgacttggtcgtggtttccagc

SEQ ID NO: 1477624 - DNA, 25 bp, Homo sapien
atctgtggcgcaaaggaggctgccc

SEQ ID NO: 1477625 - DNA, 25 bp, Homo sapien
cactaagccaccctcggatctgtgg

SEQ ID NO: 1477626 - DNA, 25 bp, Homo sapien
caagggtcccttatccactaagcca

SEQ ID NO: 1477627 - DNA, 25 bp, Homo sapien
taccaggtgaggtagatgacactgg

SEQ ID NO: 1477628 - DNA, 25 bp, Homo sapien
tgaggtagatgacactggtgctatg

SEQ ID NO: 1477629 - DNA, 25 bp, Homo sapien
tagatgacactggtgctatgggatg

SEQ ID NO: 1477630 - DNA, 25 bp, Homo sapien
ctttgataccaggtgaggtagatga

SEQ ID NO: 1477631 - DNA, 25 bp, Homo sapien
tttgagatcttctacagtttcctgt

SEQ ID NO: 1477632 - DNA, 25 bp, Homo sapien
ctttgagatcttctacagtttcctg

SEQ ID NO: 1477633 - DNA, 25 bp, Homo sapien
ttgagatcttctacagtttcctgtg

SEQ ID NO: 1477634 - DNA, 25 bp, Homo sapien
gatgagaggttatgctttgccctct

SEQ ID NO: 1477635 - DNA, 25 bp, Homo sapien
tggagaggtttcgactggcctcttc

SEQ ID NO: 1477636 - DNA, 25 bp, Homo sapien
ggcgtggagaggtttcgactggcct

SEQ ID NO: 1477637 - DNA, 25 bp, Homo sapien
agtgatgagaggttatgctttgccc

SEQ ID NO: 1477638 - DNA, 25 bp, Homo sapien
tttctgtgattagttatgtgttcac

SEQ ID NO: 1477639 - DNA, 25 bp, Homo sapien
gatttctgtgattagttatgtgttc

SEQ ID NO: 1477640 - DNA, 25 bp, Homo sapien
ggatttctgtgattagttatgtgtt

SEQ ID NO: 1477641 - DNA, 25 bp, Homo sapien
atttctgtgattagttatgtgttca

SEQ ID NO: 1477642 - DNA, 25 bp, Homo sapien
tttggcctccttgtctttatttggc

SEQ ID NO: 1477643 - DNA, 25 bp, Homo sapien
ttggcctccttgtctttatttggct

SEQ ID NO: 1477644 - DNA, 25 bp, Homo sapien
ctgaattacttctcctttgtcaaac

SEQ ID NO: 1477645 - DNA, 25 bp, Homo sapien
ttctggagggcttttgctgaattac

SEQ ID NO: 1477646 - DNA, 25 bp, Homo sapien
caatgatcgcatttggaggaaaagc

SEQ ID NO: 1477647 - DNA, 25 bp, Homo sapien
tagtcactgcactgcagtagaaaaa

SEQ ID NO: 1477648 - DNA, 25 bp, Homo sapien
tgaagaatatagtcactgcactgca

SEQ ID NO: 1477649 - DNA, 25 bp, Homo sapien
ggtgtaggcgataactgaccagttt

SEQ ID NO: 1477650 - DNA, 25 bp, Homo sapien
actgcagacatcatcatactcagga

SEQ ID NO: 1477651 - DNA, 25 bp, Homo sapien
aaacactcctttcttacgccatgca

SEQ ID NO: 1477652 - DNA, 25 bp, Homo sapien
tcaggaaacagaagacctctagctt

SEQ ID NO: 1477653 - DNA, 25 bp, Homo sapien
ccatagaggtgtgaatgcaggcaga

SEQ ID NO: 1477654 - DNA, 25 bp, Homo sapien
cgcagtcaacactgggccctttctt

SEQ ID NO: 1477655 - DNA, 25 bp, Homo sapien
cacgcagtcaacactgggccctttc

SEQ ID NO: 1477656 - DNA, 25 bp, Homo sapien
acgcagtcaacactgggccctttct

SEQ ID NO: 1477657 - DNA, 25 bp, Homo sapien
gctgctgcttgataggcctctctgg

SEQ ID NO: 1477658 - DNA, 25 bp, Homo sapien
ctgctgcttgataggcctctctggg

SEQ ID NO: 1477659 - DNA, 25 bp, Homo sapien
ggctgctgcttgataggcctctctg

SEQ ID NO: 1477660 - DNA, 25 bp, Homo sapien
gctgcttgataggcctctctgggga

SEQ ID NO: 1477661 - DNA, 25 bp, Homo sapien
tgcacagctgtcagagtatggctcc

SEQ ID NO: 1477662 - DNA, 25 bp, Homo sapien
ctgtcagagtatggctcctgggatg

SEQ ID NO: 1477663 - DNA, 25 bp, Homo sapien
gccggctgccatctagtttcacgcg

SEQ ID NO: 1477664 - DNA, 25 bp, Homo sapien
cccacaattttgcttgtgaagacca

SEQ ID NO: 1477665 - DNA, 25 bp, Homo sapien
cttatattttgtacagcttttccaa

SEQ ID NO: 1477666 - DNA, 25 bp, Homo sapien
attttgtacagcttttccaagttgg

SEQ ID NO: 1477667 - DNA, 25 bp, Homo sapien
tattttgtacagcttttccaagttg

SEQ ID NO: 1477668 - DNA, 25 bp, Homo sapien
tatattttgtacagcttttccaagt

SEQ ID NO: 1477669 - DNA, 25 bp, Homo sapien
tcgtccggcttctcgccattaggct

SEQ ID NO: 1477670 - DNA, 25 bp, Homo sapien
cctgggagaacttgccgagcgccgg

SEQ ID NO: 1477671 - DNA, 25 bp, Homo sapien
gagatgcgggactcgaactcgtccg

SEQ ID NO: 1477672 - DNA, 25 bp, Homo sapien
tcttggcgctcgtactgaacatggc

SEQ ID NO: 1477673 - DNA, 25 bp, Homo sapien
agaaggatgccttttaagcaactcc

SEQ ID NO: 1477674 - DNA, 25 bp, Homo sapien
gagcagaaggatgccttttaagcaa

SEQ ID NO: 1477675 - DNA, 25 bp, Homo sapien
ttaggaagagcagaaggatgccttt

SEQ ID NO: 1477676 - DNA, 25 bp, Homo sapien
ggaagagcagaaggatgccttttaa

SEQ ID NO: 1477677 - DNA, 25 bp, Homo sapien
ttgtgctcctaatctcaagggatcc

SEQ ID NO: 1477678 - DNA, 25 bp, Homo sapien
tgtgctcctaatctcaagggatcca

SEQ ID NO: 1477679 - DNA, 25 bp, Homo sapien
tcatgcaaactcattgacgattttt

SEQ ID NO: 1477680 - DNA, 25 bp, Homo sapien
gtcatgcaaactcattgacgatttt

SEQ ID NO: 1477681 - DNA, 25 bp, Homo sapien
catgcaaactcattgacgatttttg

SEQ ID NO: 1477682 - DNA, 25 bp, Homo sapien
cccgagcccccgcagtcctgtctac

SEQ ID NO: 1477683 - DNA, 25 bp, Homo sapien
cgagcccccgcagtcctgtctactt

SEQ ID NO: 1477684 - DNA, 25 bp, Homo sapien
ccccgcagtcctgtctacttctttt

SEQ ID NO: 1477685 - DNA, 25 bp, Homo sapien
cgcagtcctgtctacttcttttctt

SEQ ID NO: 1477686 - DNA, 25 bp, Homo sapien
ctccctttccgtctcttaagaatct

SEQ ID NO: 1477687 - DNA, 25 bp, Homo sapien
tccatacccacagctccccgggacc

SEQ ID NO: 1477688 - DNA, 25 bp, Homo sapien
aacccgaaagcccgtgaggctgatg

SEQ ID NO: 1477689 - DNA, 25 bp, Homo sapien
ccatacccacagctccccgggaccg

SEQ ID NO: 1477690 - DNA, 25 bp, Homo sapien
acgaacccgaaagcccgtgaggctg

SEQ ID NO: 1477691 - DNA, 25 bp, Homo sapien
tctgctccgggtcgtggtaccagcc

SEQ ID NO: 1477692 - DNA, 25 bp, Homo sapien
aacttgctctgctccgggtcgtggt

SEQ ID NO: 1477693 - DNA, 25 bp, Homo sapien
gtggcagctgttggtgaacttgctc

SEQ ID NO: 1477694 - DNA, 25 bp, Homo sapien
tgttggtgaacttgctctgctccgg

SEQ ID NO: 1477695 - DNA, 25 bp, Homo sapien
ttccaccccacgtttgaagctggag

SEQ ID NO: 1477696 - DNA, 25 bp, Homo sapien
cttccaccccacgtttgaagctgga

SEQ ID NO: 1477697 - DNA, 25 bp, Homo sapien
ccttccaccccacgtttgaagctgg

SEQ ID NO: 1477698 - DNA, 25 bp, Homo sapien
tccaccccacgtttgaagctggagc

SEQ ID NO: 1477699 - DNA, 25 bp, Homo sapien
ggtgagcgccatgtccgagggagga

SEQ ID NO: 1477700 - DNA, 25 bp, Homo sapien
gccgggcaggtgagcgccatgtccg

SEQ ID NO: 1477701 - DNA, 25 bp, Homo sapien
gggcaggtgagcgccatgtccgagg

SEQ ID NO: 1477702 - DNA, 25 bp, Homo sapien
tgagcgccatgtccgagggaggaag

SEQ ID NO: 1477703 - DNA, 25 bp, Homo sapien
tgtaagaccctcgatggcaaggaca

SEQ ID NO: 1477704 - DNA, 25 bp, Homo sapien
tactggtttatcttgactctgtaag

SEQ ID NO: 1477705 - DNA, 25 bp, Homo sapien
tatcttgactctgtaagaccctcga

SEQ ID NO: 1477706 - DNA, 25 bp, Homo sapien
caaggacaactctggattaatgccc

SEQ ID NO: 1477707 - DNA, 25 bp, Homo sapien
gtaaacgtcagaggtttcttcacca

SEQ ID NO: 1477708 - DNA, 25 bp, Homo sapien
tttgtaaacgtcagaggtttcttca

SEQ ID NO: 1477709 - DNA, 25 bp, Homo sapien
tttgaactactgaagctgaatttgt

SEQ ID NO: 1477710 - DNA, 25 bp, Homo sapien
tcttcaccaccaattcccgtggcaa

SEQ ID NO: 1477711 - DNA, 25 bp, Homo sapien
tatgcctgggttaatagaagacagc

SEQ ID NO: 1477712 - DNA, 25 bp, Homo sapien
tcctggctgaagtatatggagaaat

SEQ ID NO: 1477713 - DNA, 25 bp, Homo sapien
ccagtcctacatacattcgtgtgtg

SEQ ID NO: 1477714 - DNA, 25 bp, Homo sapien
ccactaatcttttctaaggcagatg

SEQ ID NO: 1477715 - DNA, 25 bp, Homo sapien
atacgatttcctctacccttcttcg

SEQ ID NO: 1477716 - DNA, 25 bp, Homo sapien
ctctacccttcttcgtctttctgag

SEQ ID NO: 1477717 - DNA, 25 bp, Homo sapien
cccttcttcgtctttctgagttcct

SEQ ID NO: 1477718 - DNA, 25 bp, Homo sapien
tacccttcttcgtctttctgagttc

SEQ ID NO: 1477719 - DNA, 25 bp, Homo sapien
ttatagcggatgacggccgatcccg

SEQ ID NO: 1477720 - DNA, 25 bp, Homo sapien
cccgaaaatttatagcggatgacgg

SEQ ID NO: 1477721 - DNA, 25 bp, Homo sapien
actctcccgaaaatttatagcggat

SEQ ID NO: 1477722 - DNA, 25 bp, Homo sapien
aaatttatagcggatgacggccgat

SEQ ID NO: 1477723 - DNA, 25 bp, Homo sapien
agtgtgagttttatagagggcggaa

SEQ ID NO: 1477724 - DNA, 25 bp, Homo sapien
gagttttatagagggcggaagagga

SEQ ID NO: 1477725 - DNA, 25 bp, Homo sapien
gtgccctgattgagtgggaggtcca

SEQ ID NO: 1477726 - DNA, 25 bp, Homo sapien
ttatagagggcggaagaggaaggca

SEQ ID NO: 1477727 - DNA, 25 bp, Homo sapien
ttgtccaaaagatatggaattccag

SEQ ID NO: 1477728 - DNA, 25 bp, Homo sapien
tgtccaaaagatatggaattccagg

SEQ ID NO: 1477729 - DNA, 25 bp, Homo sapien
taaagggttgacatttggagtgtga

SEQ ID NO: 1477730 - DNA, 25 bp, Homo sapien
ttcatggtaccctaaagggttgaca

SEQ ID NO: 1477731 - DNA, 25 bp, Homo sapien
gaaactgtcagaaccaagtctgcta

SEQ ID NO: 1477732 - DNA, 25 bp, Homo sapien
ggaatgggggctggtgttctgaaac

SEQ ID NO: 1477733 - DNA, 25 bp, Homo sapien
ggctcctatggaaactctggacctg

SEQ ID NO: 1477734 - DNA, 25 bp, Homo sapien
cagtgtggaggtgcctggctcctat

SEQ ID NO: 1477735 - DNA, 25 bp, Homo sapien
tttgacctttgcatcgcaagggctg

SEQ ID NO: 1477736 - DNA, 25 bp, Homo sapien
tagagcagactttctttgacctttg

SEQ ID NO: 1477737 - DNA, 25 bp, Homo sapien
gcatcgcaagggctgccagccctta

SEQ ID NO: 1477738 - DNA, 25 bp, Homo sapien
atttagagcagactttctttgacct

SEQ ID NO: 1477739 - DNA, 25 bp, Homo sapien
gcctattttcatcagtcgtttctca

SEQ ID NO: 1477740 - DNA, 25 bp, Homo sapien
ctgcctgcctggaggtttgtaagaa

SEQ ID NO: 1477741 - DNA, 25 bp, Homo sapien
tcatcagtcgtttctcatgtctgcc

SEQ ID NO: 1477742 - DNA, 25 bp, Homo sapien
ggtctgggtgtggataaggaggcaa

SEQ ID NO: 1477743 - DNA, 25 bp, Homo sapien
catttgactgagaccacatggtgtg

SEQ ID NO: 1477744 - DNA, 25 bp, Homo sapien
catggtgtgccccttgagtgaggct

SEQ ID NO: 1477745 - DNA, 25 bp, Homo sapien
actacctaaccttggctgtgggccg

SEQ ID NO: 1477746 - DNA, 25 bp, Homo sapien
ctgtgggccgataatgcatatgtcc

SEQ ID NO: 1477747 - DNA, 25 bp, Homo sapien
gttcagtccttttggaacacgtagc

SEQ ID NO: 1477748 - DNA, 25 bp, Homo sapien
tcagttttacttctaccaaaacatc

SEQ ID NO: 1477749 - DNA, 25 bp, Homo sapien
actatgattgctttgtgttcagtcc

SEQ ID NO: 1477750 - DNA, 25 bp, Homo sapien
ccagcttaagggtagagaaatatat

SEQ ID NO: 1477751 - DNA, 25 bp, Homo sapien
gttttgtgcccctctaatgtaccac

SEQ ID NO: 1477752 - DNA, 25 bp, Homo sapien
gcaggtcttgttttgtgcccctcta

SEQ ID NO: 1477753 - DNA, 25 bp, Homo sapien
tgttttgtgcccctctaatgtacca

SEQ ID NO: 1477754 - DNA, 25 bp, Homo sapien
gtcttgttttgtgcccctctaatgt

SEQ ID NO: 1477755 - DNA, 25 bp, Homo sapien
cagctctagttttagaatccaccat

SEQ ID NO: 1477756 - DNA, 25 bp, Homo sapien
tacttctgcttggtttctattttgg

SEQ ID NO: 1477757 - DNA, 25 bp, Homo sapien
tctctgggtccacagctctagtttt

SEQ ID NO: 1477758 - DNA, 25 bp, Homo sapien
tctgcttggtttctattttggttgt

SEQ ID NO: 1477759 - DNA, 25 bp, Homo sapien
ggcaagcctgctcagttagcaataa

SEQ ID NO: 1477760 - DNA, 25 bp, Homo sapien
gcaagcctgctcagttagcaataat

SEQ ID NO: 1477761 - DNA, 25 bp, Homo sapien
aggcaagcctgctcagttagcaata

SEQ ID NO: 1477762 - DNA, 25 bp, Homo sapien
ttaaactgacagtggaacatagatg

SEQ ID NO: 1477763 - DNA, 25 bp, Homo sapien
taaggagaactttacccttatctgc

SEQ ID NO: 1477764 - DNA, 25 bp, Homo sapien
gagaactttacccttatctgcaatg

SEQ ID NO: 1477765 - DNA, 25 bp, Homo sapien
attttttcagccgataccagtggtt

SEQ ID NO: 1477766 - DNA, 25 bp, Homo sapien
cagccgataccagtggttgtctctg

SEQ ID NO: 1477767 - DNA, 25 bp, Homo sapien
ggagccgatgggagccatagaatgt

SEQ ID NO: 1477768 - DNA, 25 bp, Homo sapien
gagccgatgggagccatagaatgtt

SEQ ID NO: 1477769 - DNA, 25 bp, Homo sapien
gggagccgatgggagccatagaatg

SEQ ID NO: 1477770 - DNA, 25 bp, Homo sapien
cagggagccgatgggagccatagaa

SEQ ID NO: 1477771 - DNA, 25 bp, Homo sapien
cctccctcatgccaccatttcatat

SEQ ID NO: 1477772 - DNA, 25 bp, Homo sapien
gggtccacatttgccactgaagcct

SEQ ID NO: 1477773 - DNA, 25 bp, Homo sapien
atttgccactgaagcctgtcgccat

SEQ ID NO: 1477774 - DNA, 25 bp, Homo sapien
atttcatatccaccaggggtccaca

SEQ ID NO: 1477775 - DNA, 25 bp, Homo sapien
tcagcagcatgtgatgctgagattc

SEQ ID NO: 1477776 - DNA, 25 bp, Homo sapien
gctcagcgccgctccaggtcaaggg

SEQ ID NO: 1477777 - DNA, 25 bp, Homo sapien
aagtgggggcagatccgcttgaaac

SEQ ID NO: 1477778 - DNA, 25 bp, Homo sapien
cagatccgcttgaaactgggctttg

SEQ ID NO: 1477779 - DNA, 25 bp, Homo sapien
ggaaaatctgactgcaactgacaag

SEQ ID NO: 1477780 - DNA, 25 bp, Homo sapien
agtgcagaggtggtgcctagactca

SEQ ID NO: 1477781 - DNA, 25 bp, Homo sapien
caactgacaagctggtgtccaagga

SEQ ID NO: 1477782 - DNA, 25 bp, Homo sapien
gctggtgtccaaggactgctaaagg

SEQ ID NO: 1477783 - DNA, 25 bp, Homo sapien
ctccagagacattcagtgtaggcca

SEQ ID NO: 1477784 - DNA, 25 bp, Homo sapien
gaggtctccctcgtattcaacttgg

SEQ ID NO: 1477785 - DNA, 25 bp, Homo sapien
catgagacttagaagatgcaagtcc

SEQ ID NO: 1477786 - DNA, 25 bp, Homo sapien
ttcaacttgggcaactacatgagac

SEQ ID NO: 1477787 - DNA, 25 bp, Homo sapien
gaagaataagtctccacattgccgt

SEQ ID NO: 1477788 - DNA, 25 bp, Homo sapien
tgccgttgaagctgcaatagcctgg

SEQ ID NO: 1477789 - DNA, 25 bp, Homo sapien
tcaagtactttaaccggcaagtgtc

SEQ ID NO: 1477790 - DNA, 25 bp, Homo sapien
aaatctgactggctctattcctaag

SEQ ID NO: 1477791 - DNA, 25 bp, Homo sapien
tgaaaccaaggtgaggtctctttct

SEQ ID NO: 1477792 - DNA, 25 bp, Homo sapien
ttgaaaccaaggtgaggtctctttc

SEQ ID NO: 1477793 - DNA, 25 bp, Homo sapien
taggctgctcagcaaggtacttgtc

SEQ ID NO: 1477794 - DNA, 25 bp, Homo sapien
gaagaggtacttctgtctgactttt

SEQ ID NO: 1477795 - DNA, 25 bp, Homo sapien
gtatcgacttcgtgtgccctcaggt

SEQ ID NO: 1477796 - DNA, 25 bp, Homo sapien
cctgtgccgctgcttggagtcttcg

SEQ ID NO: 1477797 - DNA, 25 bp, Homo sapien
tgctcttcggattctctcgcttctg

SEQ ID NO: 1477798 - DNA, 25 bp, Homo sapien
gggaacatcttgctaactcttacat

SEQ ID NO: 1477799 - DNA, 25 bp, Homo sapien
cttacatacaccatccctgtaaaag

SEQ ID NO: 1477800 - DNA, 25 bp, Homo sapien
gtacccccaggatgctcttcggatt

SEQ ID NO: 1477801 - DNA, 25 bp, Homo sapien
gcttgtcaccgagaggcggagaggg

SEQ ID NO: 1477802 - DNA, 25 bp, Homo sapien
aatggcttgtcaccgagaggcggag

SEQ ID NO: 1477803 - DNA, 25 bp, Homo sapien
acctgtgcctggagaggggtaacct

SEQ ID NO: 1477804 - DNA, 25 bp, Homo sapien
tgaatggcttgtcaccgagaggcgg

SEQ ID NO: 1477805 - DNA, 25 bp, Homo sapien
tctggatgacaggtttcctctagga

SEQ ID NO: 1477806 - DNA, 25 bp, Homo sapien
ggatgacaggtttcctctaggaaat

SEQ ID NO: 1477807 - DNA, 25 bp, Homo sapien
ctctctggatgacaggtttcctcta

SEQ ID NO: 1477808 - DNA, 25 bp, Homo sapien
tggatgacaggtttcctctaggaaa

SEQ ID NO: 1477809 - DNA, 25 bp, Homo sapien
aaatgtaaactctccatgtatcctt

SEQ ID NO: 1477810 - DNA, 25 bp, Homo sapien
aaaatgtaaactctccatgtatcct

SEQ ID NO: 1477811 - DNA, 25 bp, Homo sapien
atgtaaactctccatgtatccttcc

SEQ ID NO: 1477812 - DNA, 25 bp, Homo sapien
agcaaacaagtgtgggcgagcccat

SEQ ID NO: 1477813 - DNA, 25 bp, Homo sapien
cattccaagcgctgacacatagggc

SEQ ID NO: 1477814 - DNA, 25 bp, Homo sapien
cacagataataactggcagccaggg

SEQ ID NO: 1477815 - DNA, 25 bp, Homo sapien
catggtctgaaatcgtgggagcaaa

SEQ ID NO: 1477816 - DNA, 25 bp, Homo sapien
ccaagcagaaggaatcaggtgagca

SEQ ID NO: 1477817 - DNA, 25 bp, Homo sapien
gaattctgagggtctgctacggccg

SEQ ID NO: 1477818 - DNA, 25 bp, Homo sapien
tgaaggatataaactgtgttacaga

SEQ ID NO: 1477819 - DNA, 25 bp, Homo sapien
agcagagacatagggagaaaaatga

SEQ ID NO: 1477820 - DNA, 25 bp, Homo sapien
tagagtttggctactggacccagga

SEQ ID NO: 1477821 - DNA, 25 bp, Homo sapien
ggccagcgcattgaccagaagcggc

SEQ ID NO: 1477822 - DNA, 25 bp, Homo sapien
tgactctcgggttacctgagccggc

SEQ ID NO: 1477823 - DNA, 25 bp, Homo sapien
aggaaagtacttcagcgcttgctgt

SEQ ID NO: 1477824 - DNA, 25 bp, Homo sapien
gcagcatattgcaaggtgatgcccc

SEQ ID NO: 1477825 - DNA, 25 bp, Homo sapien
ccactctctgtcagcagcatattgc

SEQ ID NO: 1477826 - DNA, 25 bp, Homo sapien
ttgcaaggtgatgcccccgatctga

SEQ ID NO: 1477827 - DNA, 25 bp, Homo sapien
tctgtcagcagcatattgcaaggtg

SEQ ID NO: 1477828 - DNA, 25 bp, Homo sapien
ttcaagttctgttgtcccagacacc

SEQ ID NO: 1477829 - DNA, 25 bp, Homo sapien
tcatttcgtctgaatagagtctgaa

SEQ ID NO: 1477830 - DNA, 25 bp, Homo sapien
tctttggtggaagtatgcactgagg

SEQ ID NO: 1477831 - DNA, 25 bp, Homo sapien
gcagaagtgccctatcccaggaaag

SEQ ID NO: 1477832 - DNA, 25 bp, Homo sapien
ttggaagtgtgaaagcgttgaactg

SEQ ID NO: 1477833 - DNA, 25 bp, Homo sapien
tgtgcggattggaagtgtgaaagcg

SEQ ID NO: 1477834 - DNA, 25 bp, Homo sapien
atagactgaagtgaatgtgcggatt

SEQ ID NO: 1477835 - DNA, 25 bp, Homo sapien
actgaagtgaatgtgcggattggaa

SEQ ID NO: 1477836 - DNA, 25 bp, Homo sapien
gatctggcacttgagtcagtagaaa

SEQ ID NO: 1477837 - DNA, 25 bp, Homo sapien
gcaggcgacaggcactgaaggtgga

SEQ ID NO: 1477838 - DNA, 25 bp, Homo sapien
ttagagagaccgtgagggtgccagc

SEQ ID NO: 1477839 - DNA, 25 bp, Homo sapien
gataaatagcctgtcctgcaacctg

SEQ ID NO: 1477840 - DNA, 25 bp, Homo sapien
gaccgccagggtgtgatgctccgta

SEQ ID NO: 1477841 - DNA, 25 bp, Homo sapien
ccatgggcggagcttgtcatggaca

SEQ ID NO: 1477842 - DNA, 25 bp, Homo sapien
gatgaaggaaaaccatgggcggagc

SEQ ID NO: 1477843 - DNA, 25 bp, Homo sapien
ctccgtagtcgcagggatgaaggaa

SEQ ID NO: 1477844 - DNA, 25 bp, Homo sapien
gaagtcagttggacagcagttgccc

SEQ ID NO: 1477845 - DNA, 25 bp, Homo sapien
gagtttcatccggaaatgtccctga

SEQ ID NO: 1477846 - DNA, 25 bp, Homo sapien
gttggtcctctttggctcgaacaga

SEQ ID NO: 1477847 - DNA, 25 bp, Homo sapien
gcagttgcccaagatgccatgacaa

SEQ ID NO: 1477848 - DNA, 25 bp, Homo sapien
agagaggtggagaggcattgaaggc

SEQ ID NO: 1477849 - DNA, 25 bp, Homo sapien
gggatcatggtttctacatgttgtc

SEQ ID NO: 1477850 - DNA, 25 bp, Homo sapien
gcagcagggggatcatggtttctac

SEQ ID NO: 1477851 - DNA, 25 bp, Homo sapien
gcagggggatcatggtttctacatg

SEQ ID NO: 1477852 - DNA, 25 bp, Homo sapien
ggatctgccctttagcctgtggcca

SEQ ID NO: 1477853 - DNA, 25 bp, Homo sapien
cactgcaaccttcccgggaggtgag

SEQ ID NO: 1477854 - DNA, 25 bp, Homo sapien
caggtgagcagatactggccctgag

SEQ ID NO: 1477855 - DNA, 25 bp, Homo sapien
accacgtcctggttctctgatgcag

SEQ ID NO: 1477856 - DNA, 25 bp, Homo sapien
tctcagacaactgttgcagttcaca

SEQ ID NO: 1477857 - DNA, 25 bp, Homo sapien
catttagatcatttagctgatggct

SEQ ID NO: 1477858 - DNA, 25 bp, Homo sapien
tgaccccagcaggatgtctaatatg

SEQ ID NO: 1477859 - DNA, 25 bp, Homo sapien
tgtgaggaaatgagatgtccaccta

SEQ ID NO: 1477860 - DNA, 25 bp, Homo sapien
aattatctcgaccttacataggagg

SEQ ID NO: 1477861 - DNA, 25 bp, Homo sapien
aattcacagggttaatcactcagtt

SEQ ID NO: 1477862 - DNA, 25 bp, Homo sapien
gtggtatggagagataatgggcgat

SEQ ID NO: 1477863 - DNA, 25 bp, Homo sapien
agaaggaaattcacagggttaatca

SEQ ID NO: 1477864 - DNA, 25 bp, Homo sapien
tgcttcaagtgggattaggggcggc

SEQ ID NO: 1477865 - DNA, 25 bp, Homo sapien
ttgggaggacctaggacatctaatt

SEQ ID NO: 1477866 - DNA, 25 bp, Homo sapien
aattgggaggacctaggacatctaa

SEQ ID NO: 1477867 - DNA, 25 bp, Homo sapien
gaattgggaggacctaggacatcta

SEQ ID NO: 1477868 - DNA, 25 bp, Homo sapien
ggaggacctaggacatctaattaga

SEQ ID NO: 1477869 - DNA, 25 bp, Homo sapien
aaaaagtaggtgtgatcataatcaa

SEQ ID NO: 1477870 - DNA, 25 bp, Homo sapien
gaaaggcaggattgtacagaaacgt

SEQ ID NO: 1477871 - DNA, 25 bp, Homo sapien
tgagatttggttgatgacacaaggc

SEQ ID NO: 1477872 - DNA, 25 bp, Homo sapien
taactatatcaggtggaaaggcagg

SEQ ID NO: 1477873 - DNA, 25 bp, Homo sapien
cctcagaggtctatgtaagggtcct

SEQ ID NO: 1477874 - DNA, 25 bp, Homo sapien
cacgcaggccggtgggagattctct

SEQ ID NO: 1477875 - DNA, 25 bp, Homo sapien
gtgcaaacagcgcaaatttcccgag

SEQ ID NO: 1477876 - DNA, 25 bp, Homo sapien
cctctgaagaagtacatgtcactgc

SEQ ID NO: 1477877 - DNA, 25 bp, Homo sapien
gattttataatccagctctcctttc

SEQ ID NO: 1477878 - DNA, 25 bp, Homo sapien
tattgatttagtgggagcagctttg

SEQ ID NO: 1477879 - DNA, 25 bp, Homo sapien
ggagcagctttgtcattagagaata

SEQ ID NO: 1477880 - DNA, 25 bp, Homo sapien
gactctgcgtgaatgcatactgatt

SEQ ID NO: 1477881 - DNA, 25 bp, Homo sapien
tgagaggggatcatttgaagcaacc

SEQ ID NO: 1477882 - DNA, 25 bp, Homo sapien
ttaggaaattccgagtggaaatcac

SEQ ID NO: 1477883 - DNA, 25 bp, Homo sapien
ggaaatcactagcttagaggcaaaa

SEQ ID NO: 1477884 - DNA, 25 bp, Homo sapien
gggatcatttgaagcaaccactgta

SEQ ID NO: 1477885 - DNA, 25 bp, Homo sapien
gccttctgtcacagcgtttctcagc

SEQ ID NO: 1477886 - DNA, 25 bp, Homo sapien
ttctgtcacagcgtttctcagccat

SEQ ID NO: 1477887 - DNA, 25 bp, Homo sapien
ctgggtcatctagccttctgtcaca

SEQ ID NO: 1477888 - DNA, 25 bp, Homo sapien
tagccttctgtcacagcgtttctca

SEQ ID NO: 1477889 - DNA, 25 bp, Homo sapien
tcagataatgccataggggatgaca

SEQ ID NO: 1477890 - DNA, 25 bp, Homo sapien
taggggatgacagctattccgcatc

SEQ ID NO: 1477891 - DNA, 25 bp, Homo sapien
tgttgagtctctgattggcaacttt

SEQ ID NO: 1477892 - DNA, 25 bp, Homo sapien
gagtctctgattggcaactttacca

SEQ ID NO: 1477893 - DNA, 25 bp, Homo sapien
ttgagtctctgattggcaactttac

SEQ ID NO: 1477894 - DNA, 25 bp, Homo sapien
tttgttgagtctctgattggcaact

SEQ ID NO: 1477895 - DNA, 25 bp, Homo sapien
ggcttcccagatgagctgccttcaa

SEQ ID NO: 1477896 - DNA, 25 bp, Homo sapien
cagttctctatcaccagcccattag

SEQ ID NO: 1477897 - DNA, 25 bp, Homo sapien
tcagctggaggatccacacggatgc

SEQ ID NO: 1477898 - DNA, 25 bp, Homo sapien
gctgcctttagaaatgtatgagtcc

SEQ ID NO: 1477899 - DNA, 25 bp, Homo sapien
tattccccaactgaccatagataga

SEQ ID NO: 1477900 - DNA, 25 bp, Homo sapien
catgaagtattggtgctaatgagtg

SEQ ID NO: 1477901 - DNA, 25 bp, Homo sapien
tacacataaattacctatatctgcc

SEQ ID NO: 1477902 - DNA, 25 bp, Homo sapien
aagccaatgagctgacttcctcatg

SEQ ID NO: 1477903 - DNA, 25 bp, Homo sapien
gactgtgagctcctacggaggggac

SEQ ID NO: 1477904 - DNA, 25 bp, Homo sapien
tcctacggaggggactactgtcaat

SEQ ID NO: 1477905 - DNA, 25 bp, Homo sapien
tgagctcctacggaggggactactg

SEQ ID NO: 1477906 - DNA, 25 bp, Homo sapien
tacggaggggactactgtcaatcca

SEQ ID NO: 1477907 - DNA, 25 bp, Homo sapien
tatttattcttctgccagacacaac

SEQ ID NO: 1477908 - DNA, 25 bp, Homo sapien
tttttatttattcttctgccagaca

SEQ ID NO: 1477909 - DNA, 25 bp, Homo sapien
tttatttattcttctgccagacaca

SEQ ID NO: 1477910 - DNA, 25 bp, Homo sapien
ttattcttctgccagacacaactga

SEQ ID NO: 1477911 - DNA, 25 bp, Homo sapien
tgattacacaccgactgagaaatgc

SEQ ID NO: 1477912 - DNA, 25 bp, Homo sapien
attacacaccgactgagaaatgcag

SEQ ID NO: 1477913 - DNA, 25 bp, Homo sapien
gattacacaccgactgagaaatgca

SEQ ID NO: 1477914 - DNA, 25 bp, Homo sapien
tcagtgggccttctccaagaacgct

SEQ ID NO: 1477915 - DNA, 25 bp, Homo sapien
cagtgggccttctccaagaacgctc

SEQ ID NO: 1477916 - DNA, 25 bp, Homo sapien
agtgggccttctccaagaacgctct

SEQ ID NO: 1477917 - DNA, 25 bp, Homo sapien
gtgggccttctccaagaacgctctg

SEQ ID NO: 1477918 - DNA, 25 bp, Homo sapien
atctctcagattgctatcatccata

SEQ ID NO: 1477919 - DNA, 25 bp, Homo sapien
tctctcagattgctatcatccatac

SEQ ID NO: 1477920 - DNA, 25 bp, Homo sapien
ctctcagattgctatcatccataca

SEQ ID NO: 1477921 - DNA, 25 bp, Homo sapien
ccgtgcctctccgtgaagctctgcc

SEQ ID NO: 1477922 - DNA, 25 bp, Homo sapien
atgccgtgcctctccgtgaagctct

SEQ ID NO: 1477923 - DNA, 25 bp, Homo sapien
gaatgccgtgcctctccgtgaagct

SEQ ID NO: 1477924 - DNA, 25 bp, Homo sapien
tgccgtgcctctccgtgaagctctg

SEQ ID NO: 1477925 - DNA, 25 bp, Homo sapien
gtaggtaaatatgccctggtgtact

SEQ ID NO: 1477926 - DNA, 25 bp, Homo sapien
cccagagaagtaggtaaatatgccc

SEQ ID NO: 1477927 - DNA, 25 bp, Homo sapien
ttcctcatgaggtctagccatgccc

SEQ ID NO: 1477928 - DNA, 25 bp, Homo sapien
tcatgaggtctagccatgcccagag

SEQ ID NO: 1477929 - DNA, 25 bp, Homo sapien
taagtgtcacagaggtctttaaggg

SEQ ID NO: 1477930 - DNA, 25 bp, Homo sapien
ctaagtgtcacagaggtctttaagg

SEQ ID NO: 1477931 - DNA, 25 bp, Homo sapien
gtgtcacagaggtctttaagggaca

SEQ ID NO: 1477932 - DNA, 25 bp, Homo sapien
aagtgtcacagaggtctttaaggga

SEQ ID NO: 1477933 - DNA, 25 bp, Homo sapien
tgattgccggccagtatctagtcca

SEQ ID NO: 1477934 - DNA, 25 bp, Homo sapien
gcttaagccaatcagcacgatgcat

SEQ ID NO: 1477935 - DNA, 25 bp, Homo sapien
cagactttcctgtgagtgaccatca

SEQ ID NO: 1477936 - DNA, 25 bp, Homo sapien
tgcagaaggctggatattactccca

SEQ ID NO: 1477937 - DNA, 25 bp, Homo sapien
ctgaccacagcagaagatttctttt

SEQ ID NO: 1477938 - DNA, 25 bp, Homo sapien
caccctgtacctctgaccacagcag

SEQ ID NO: 1477939 - DNA, 25 bp, Homo sapien
cacagcagaagatttcttttctcaa

SEQ ID NO: 1477940 - DNA, 25 bp, Homo sapien
acactccaccctgtacctctgacca

SEQ ID NO: 1477941 - DNA, 25 bp, Homo sapien
gacataatgcattgttcctgtagag

SEQ ID NO: 1477942 - DNA, 25 bp, Homo sapien
tatttgacataatgcattgttcctg

SEQ ID NO: 1477943 - DNA, 25 bp, Homo sapien
cttggggatctcagaaagcctatgt

SEQ ID NO: 1477944 - DNA, 25 bp, Homo sapien
tgtggcaatatcattaacttaatca

SEQ ID NO: 1477945 - DNA, 25 bp, Homo sapien
tggtccagcaaagttatgtaaaaac

SEQ ID NO: 1477946 - DNA, 25 bp, Homo sapien
ccagcaaagttatgtaaaaactgaa

SEQ ID NO: 1477947 - DNA, 25 bp, Homo sapien
gtccagcaaagttatgtaaaaactg

SEQ ID NO: 1477948 - DNA, 25 bp, Homo sapien
aaatggtccagcaaagttatgtaaa

SEQ ID NO: 1477949 - DNA, 25 bp, Homo sapien
gttcccctgcagtcttcggaggtcc

SEQ ID NO: 1477950 - DNA, 25 bp, Homo sapien
cctgcagtcttcggaggtcctggag

SEQ ID NO: 1477951 - DNA, 25 bp, Homo sapien
ctgcagtcttcggaggtcctggagg

SEQ ID NO: 1477952 - DNA, 25 bp, Homo sapien
tgagttcccctgcagtcttcggagg

SEQ ID NO: 1477953 - DNA, 25 bp, Homo sapien
aatgggaattcctccaaacagaagc

SEQ ID NO: 1477954 - DNA, 25 bp, Homo sapien
ctagaaatgggaattcctccaaaca

SEQ ID NO: 1477955 - DNA, 25 bp, Homo sapien
atgggaattcctccaaacagaagct

SEQ ID NO: 1477956 - DNA, 25 bp, Homo sapien
gatggagtggttgtaactctccagc

SEQ ID NO: 1477957 - DNA, 25 bp, Homo sapien
ctcagagtgatcatgatggagtggt

SEQ ID NO: 1477958 - DNA, 25 bp, Homo sapien
tgatcatgatggagtggttgtaact

SEQ ID NO: 1477959 - DNA, 25 bp, Homo sapien
gagggaaatggctcagagtgatcat

SEQ ID NO: 1477960 - DNA, 25 bp, Homo sapien
caaatggctttatcagtcctgcatg

SEQ ID NO: 1477961 - DNA, 25 bp, Homo sapien
cacagatgatagtagccaatatggt

SEQ ID NO: 1477962 - DNA, 25 bp, Homo sapien
gtcctgcatgactctgaatttctag

SEQ ID NO: 1477963 - DNA, 25 bp, Homo sapien
tacactgaggctagtaggactggga

SEQ ID NO: 1477964 - DNA, 25 bp, Homo sapien
tttgagctaacaaaacttcggtcat

SEQ ID NO: 1477965 - DNA, 25 bp, Homo sapien
caaggggaggattttgagctaacaa

SEQ ID NO: 1477966 - DNA, 25 bp, Homo sapien
gaggattttgagctaacaaaacttc

SEQ ID NO: 1477967 - DNA, 25 bp, Homo sapien
aaagcaaggggaggattttgagcta

SEQ ID NO: 1477968 - DNA, 25 bp, Homo sapien
tggcatgattccacaaccaatcatc

SEQ ID NO: 1477969 - DNA, 25 bp, Homo sapien
caggatggccagatcgagtaatcat

SEQ ID NO: 1477970 - DNA, 25 bp, Homo sapien
tggcagtgcaagtgtcttctgaaga

SEQ ID NO: 1477971 - DNA, 25 bp, Homo sapien
caaccaatcatcataaattgacacc

SEQ ID NO: 1477972 - DNA, 25 bp, Homo sapien
cttttgccccagtagaagagaaatg

SEQ ID NO: 1477973 - DNA, 25 bp, Homo sapien
atgactgattagaatatcttctgct

SEQ ID NO: 1477974 - DNA, 25 bp, Homo sapien
gactgattagaatatcttctgcttc

SEQ ID NO: 1477975 - DNA, 25 bp, Homo sapien
actgattagaatatcttctgcttcc

SEQ ID NO: 1477976 - DNA, 25 bp, Homo sapien
cctcctgggccgtgtagattagacc

SEQ ID NO: 1477977 - DNA, 25 bp, Homo sapien
tagattagaccaggggtagactcct

SEQ ID NO: 1477978 - DNA, 25 bp, Homo sapien
ttggaatggcttcccagctcaagac

SEQ ID NO: 1477979 - DNA, 25 bp, Homo sapien
acatcctccgtttgggcccttagca

SEQ ID NO: 1477980 - DNA, 25 bp, Homo sapien
ccaagacttagggtgaggtcacagg

SEQ ID NO: 1477981 - DNA, 25 bp, Homo sapien
gaggaagttgctgtatcactgctcc

SEQ ID NO: 1477982 - DNA, 25 bp, Homo sapien
cccggctaccaagacttagggtgag

SEQ ID NO: 1477983 - DNA, 25 bp, Homo sapien
tggggaagccgttttgagggctgct

SEQ ID NO: 1477984 - DNA, 25 bp, Homo sapien
aagaatcccttgactgactgctgca

SEQ ID NO: 1477985 - DNA, 25 bp, Homo sapien
catcgtgcttgcatttagtgtaggc

SEQ ID NO: 1477986 - DNA, 25 bp, Homo sapien
tataactaaggtgccgagtctctgt

SEQ ID NO: 1477987 - DNA, 25 bp, Homo sapien
tacttcctcatgtagtggataggcc

SEQ ID NO: 1477988 - DNA, 25 bp, Homo sapien
tagtagagggtgtgacaactgcagc

SEQ ID NO: 1477989 - DNA, 25 bp, Homo sapien
cagctcatatccatcgaaggtgcag

SEQ ID NO: 1477990 - DNA, 25 bp, Homo sapien
tgaggcagacatccaaagcctgttt

SEQ ID NO: 1477991 - DNA, 25 bp, Homo sapien
ggagttccggtacctctggattgac

SEQ ID NO: 1477992 - DNA, 25 bp, Homo sapien
acacaggataaatgtttctggtatg

SEQ ID NO: 1477993 - DNA, 25 bp, Homo sapien
cagtgcggaaaagagtgctggagca

SEQ ID NO: 1477994 - DNA, 25 bp, Homo sapien
tgctggagcagtcacggtgtacaac

SEQ ID NO: 1477995 - DNA, 25 bp, Homo sapien
aagctttagcacttgaagggcactg

SEQ ID NO: 1477996 - DNA, 25 bp, Homo sapien
gaaatacttgacagagcccagtgcg

SEQ ID NO: 1477997 - DNA, 25 bp, Homo sapien
cacacataatctcgtctgaaagttc

SEQ ID NO: 1477998 - DNA, 25 bp, Homo sapien
tccttccatcagtagttcacacata

SEQ ID NO: 1477999 - DNA, 25 bp, Homo sapien
cagagctccttccatcagtagttca

SEQ ID NO: 1478000 - DNA, 25 bp, Homo sapien
gtggtggaaccagcactagagcccc

SEQ ID NO: 1478001 - DNA, 25 bp, Homo sapien
catttaccattgacacgggtaggct

SEQ ID NO: 1478002 - DNA, 25 bp, Homo sapien
ccattgacacgggtaggctttccac

SEQ ID NO: 1478003 - DNA, 25 bp, Homo sapien
tgctgtccatttaccattgacacgg

SEQ ID NO: 1478004 - DNA, 25 bp, Homo sapien
ttgacacgggtaggctttccactca

SEQ ID NO: 1478005 - DNA, 25 bp, Homo sapien
tgcgctactcagttcatcagggtgt

SEQ ID NO: 1478006 - DNA, 25 bp, Homo sapien
gaatctgaaccataacaaaggtagg

SEQ ID NO: 1478007 - DNA, 25 bp, Homo sapien
tggctggaggaagcgatgccactcc

SEQ ID NO: 1478008 - DNA, 25 bp, Homo sapien
tccaggaccctaagaaacatgggta

SEQ ID NO: 1478009 - DNA, 25 bp, Homo sapien
ccgcgtgtgcggtcatgatgggcac

SEQ ID NO: 1478010 - DNA, 25 bp, Homo sapien
gagagttctgtgcagtggccgcgtg

SEQ ID NO: 1478011 - DNA, 25 bp, Homo sapien
tgacatggtgtgatcatcaggaggt

SEQ ID NO: 1478012 - DNA, 25 bp, Homo sapien
tgggcactgtcggtggagagctgac

SEQ ID NO: 1478013 - DNA, 25 bp, Homo sapien
aataacctgtgtcaatcacggcccc

SEQ ID NO: 1478014 - DNA, 25 bp, Homo sapien
ctgttagtgatagacatgatatcca

SEQ ID NO: 1478015 - DNA, 25 bp, Homo sapien
ccgtccttgccgactgttagtgata

SEQ ID NO: 1478016 - DNA, 25 bp, Homo sapien
gaagacaagttgctctttccccatt

SEQ ID NO: 1478017 - DNA, 25 bp, Homo sapien
cgtgatggcataagtcttgtcacca

SEQ ID NO: 1478018 - DNA, 25 bp, Homo sapien
agcccgtggtcgtgatggcataagt

SEQ ID NO: 1478019 - DNA, 25 bp, Homo sapien
cgtcgtttgataggtgagggagccc

SEQ ID NO: 1478020 - DNA, 25 bp, Homo sapien
tgggaactccatctggttccgtcgt

SEQ ID NO: 1478021 - DNA, 25 bp, Homo sapien
tcttgcaggtagtactccagaaagc

SEQ ID NO: 1478022 - DNA, 25 bp, Homo sapien
agcatcttgcaggtagtactccaga

SEQ ID NO: 1478023 - DNA, 25 bp, Homo sapien
ttgcaggtagtactccagaaagcca

SEQ ID NO: 1478024 - DNA, 25 bp, Homo sapien
gcaggtagtactccagaaagccaca

SEQ ID NO: 1478025 - DNA, 25 bp, Homo sapien
aaatctcggatcctggacctgagtc

SEQ ID NO: 1478026 - DNA, 25 bp, Homo sapien
tcagcatagagttcatctgcactgg

SEQ ID NO: 1478027 - DNA, 25 bp, Homo sapien
tgacctcctgaaatctcggatcctg

SEQ ID NO: 1478028 - DNA, 25 bp, Homo sapien
gcactggtgactctgtatctgttct

SEQ ID NO: 1478029 - DNA, 25 bp, Homo sapien
ttttaatccttctaggccttgtcac

SEQ ID NO: 1478030 - DNA, 25 bp, Homo sapien
tcctgtcccctccattcagcacgtc

SEQ ID NO: 1478031 - DNA, 25 bp, Homo sapien
ttccccaaagcaccactcttatcct

SEQ ID NO: 1478032 - DNA, 25 bp, Homo sapien
cattcagcacgtcacaagaacagtt

SEQ ID NO: 1478033 - DNA, 25 bp, Homo sapien
ttctctgccgctccatatcttccaa

SEQ ID NO: 1478034 - DNA, 25 bp, Homo sapien
ggattctgctttgccggactgtttg

SEQ ID NO: 1478035 - DNA, 25 bp, Homo sapien
gctgatctctgctgttccgtgtggg

SEQ ID NO: 1478036 - DNA, 25 bp, Homo sapien
agccaaagcctaggttcgatgccat

SEQ ID NO: 1478037 - DNA, 25 bp, Homo sapien
aaagcctaggttcgatgccatccag

SEQ ID NO: 1478038 - DNA, 25 bp, Homo sapien
ctggctgtagacaggactttcagca

SEQ ID NO: 1478039 - DNA, 25 bp, Homo sapien
tggctgtagacaggactttcagcat

SEQ ID NO: 1478040 - DNA, 25 bp, Homo sapien
gctggctgtagacaggactttcagc

SEQ ID NO: 1478041 - DNA, 25 bp, Homo sapien
gccaggaatacaggaaacagtaggg

SEQ ID NO: 1478042 - DNA, 25 bp, Homo sapien
gaggaatgtacagccaggaatacag

SEQ ID NO: 1478043 - DNA, 25 bp, Homo sapien
tctgaggaatgtacagccaggaata

SEQ ID NO: 1478044 - DNA, 25 bp, Homo sapien
ggctctgaggaatgtacagccagga

SEQ ID NO: 1478045 - DNA, 25 bp, Homo sapien
gacacgtactgtgactagcctgaga

SEQ ID NO: 1478046 - DNA, 25 bp, Homo sapien
gcatgattcccctgaaccgttgagt

SEQ ID NO: 1478047 - DNA, 25 bp, Homo sapien
cagtcccaagagtgtattgtgccca

SEQ ID NO: 1478048 - DNA, 25 bp, Homo sapien
gggtcactccctgtattagtctggg

SEQ ID NO: 1478049 - DNA, 25 bp, Homo sapien
gcccagatacactgattttccaagt

SEQ ID NO: 1478050 - DNA, 25 bp, Homo sapien
caaatgatgtgggactcccaaggga

SEQ ID NO: 1478051 - DNA, 25 bp, Homo sapien
agcaaattaagagcacgtctgtgtg

SEQ ID NO: 1478052 - DNA, 25 bp, Homo sapien
tgtataaccagtcaataggcaagtt

SEQ ID NO: 1478053 - DNA, 25 bp, Homo sapien
tgcttggttttctatgaccctatca

SEQ ID NO: 1478054 - DNA, 25 bp, Homo sapien
tgtgcccagcccatagatggctttt

SEQ ID NO: 1478055 - DNA, 25 bp, Homo sapien
tttactcaagaatttaggccacata

SEQ ID NO: 1478056 - DNA, 25 bp, Homo sapien
accttaaggtatgtcatgagtaacc

SEQ ID NO: 1478057 - DNA, 25 bp, Homo sapien
gagctcatggcaccatctttatgca

SEQ ID NO: 1478058 - DNA, 25 bp, Homo sapien
gctcatggcaccatctttatgcacg

SEQ ID NO: 1478059 - DNA, 25 bp, Homo sapien
tcatggcaccatctttatgcacgtg

SEQ ID NO: 1478060 - DNA, 25 bp, Homo sapien
tggcaccatctttatgcacgtgcat

SEQ ID NO: 1478061 - DNA, 25 bp, Homo sapien
taaacacggggtgacgttgtcgtga

SEQ ID NO: 1478062 - DNA, 25 bp, Homo sapien
aacacggggtgacgttgtcgtgagg

SEQ ID NO: 1478063 - DNA, 25 bp, Homo sapien
aaacacggggtgacgttgtcgtgag

SEQ ID NO: 1478064 - DNA, 25 bp, Homo sapien
ccacctggtggcacgattctgctct

SEQ ID NO: 1478065 - DNA, 25 bp, Homo sapien
ttccatcccggttgcatcttggcgc

SEQ ID NO: 1478066 - DNA, 25 bp, Homo sapien
acttgagggcccttcgctggtccgg

SEQ ID NO: 1478067 - DNA, 25 bp, Homo sapien
tggtccggaggcaagagccaaatcg

SEQ ID NO: 1478068 - DNA, 25 bp, Homo sapien
ccttgtgctctaatctcatacagag

SEQ ID NO: 1478069 - DNA, 25 bp, Homo sapien
tgctctaatctcatacagagctttc

SEQ ID NO: 1478070 - DNA, 25 bp, Homo sapien
caccttgtgctctaatctcatacag

SEQ ID NO: 1478071 - DNA, 25 bp, Homo sapien
tgtgctctaatctcatacagagctt

SEQ ID NO: 1478072 - DNA, 25 bp, Homo sapien
attcatgtgtttccaaatctttgcc

SEQ ID NO: 1478073 - DNA, 25 bp, Homo sapien
ccaaattcatgtgtttccaaatctt

SEQ ID NO: 1478074 - DNA, 25 bp, Homo sapien
gtgaccaaattcatgtgtttccaaa

SEQ ID NO: 1478075 - DNA, 25 bp, Homo sapien
catgtgtttccaaatctttgccatt

SEQ ID NO: 1478076 - DNA, 25 bp, Homo sapien
taacaatgattgaacactgggcact

SEQ ID NO: 1478077 - DNA, 25 bp, Homo sapien
acactgggcacttctaaaagcaatg

SEQ ID NO: 1478078 - DNA, 25 bp, Homo sapien
tgattgaacactgggcacttctaaa

SEQ ID NO: 1478079 - DNA, 25 bp, Homo sapien
cagttaacaatgattgaacactggg

SEQ ID NO: 1478080 - DNA, 25 bp, Homo sapien
aatgttctttcaccctcaccacact

SEQ ID NO: 1478081 - DNA, 25 bp, Homo sapien
aaatgttctttcaccctcaccacac

SEQ ID NO: 1478082 - DNA, 25 bp, Homo sapien
tgagtaccttctgcaccctcgatgt

SEQ ID NO: 1478083 - DNA, 25 bp, Homo sapien
gactgctttctgttgagttgttcca

SEQ ID NO: 1478084 - DNA, 25 bp, Homo sapien
cattggcattcgacctggactgctt

SEQ ID NO: 1478085 - DNA, 25 bp, Homo sapien
gaatcatacacatagggcttcaata

SEQ ID NO: 1478086 - DNA, 25 bp, Homo sapien
acttccttcttacacattgactcct

SEQ ID NO: 1478087 - DNA, 25 bp, Homo sapien
tgacttccttcttacacattgactc

SEQ ID NO: 1478088 - DNA, 25 bp, Homo sapien
ctgtttctctgtgcggttgacttcc

SEQ ID NO: 1478089 - DNA, 25 bp, Homo sapien
cttgaatgtttttaggagtctccct

SEQ ID NO: 1478090 - DNA, 25 bp, Homo sapien
ggaggacaaagaggtgacggccact

SEQ ID NO: 1478091 - DNA, 25 bp, Homo sapien
agagagggcgcagtggatgccacct

SEQ ID NO: 1478092 - DNA, 25 bp, Homo sapien
ggatctggcccacagtaatagggat

SEQ ID NO: 1478093 - DNA, 25 bp, Homo sapien
gagtggaccatgctctgggtgttcc

SEQ ID NO: 1478094 - DNA, 25 bp, Homo sapien
tggctctgcctctagtgttttgggt

SEQ ID NO: 1478095 - DNA, 25 bp, Homo sapien
cctgtacttgcttgtggctgccaaa

SEQ ID NO: 1478096 - DNA, 25 bp, Homo sapien
ggctgccaaagtgttcaggtaggtt

SEQ ID NO: 1478097 - DNA, 25 bp, Homo sapien
ttcctccaaggaagcgcattcatct

SEQ ID NO: 1478098 - DNA, 25 bp, Homo sapien
aagctttctctgccttttgagggac

SEQ ID NO: 1478099 - DNA, 25 bp, Homo sapien
aagctggatgtgcaagctttctctg

SEQ ID NO: 1478100 - DNA, 25 bp, Homo sapien
taacaaatagacttccatcacgcag

SEQ ID NO: 1478101 - DNA, 25 bp, Homo sapien
tgcactctgttttatctgtgccagc

SEQ ID NO: 1478102 - DNA, 25 bp, Homo sapien
aatgaacaggatagtcaaaacagct

SEQ ID NO: 1478103 - DNA, 25 bp, Homo sapien
tagatacttaactattgcactctgt

SEQ ID NO: 1478104 - DNA, 25 bp, Homo sapien
gtcagagcaccagccctgaactgag

SEQ ID NO: 1478105 - DNA, 25 bp, Homo sapien
tttctcccatggttgaagctgtttt

SEQ ID NO: 1478106 - DNA, 25 bp, Homo sapien
taacacttttctcccatggttgaag

SEQ ID NO: 1478107 - DNA, 25 bp, Homo sapien
gaagcccctttgtggcttcatggca

SEQ ID NO: 1478108 - DNA, 25 bp, Homo sapien
agaagggacagttcatgctttgcct

SEQ ID NO: 1478109 - DNA, 25 bp, Homo sapien
ggcaaggggaccactgccagaatga

SEQ ID NO: 1478110 - DNA, 25 bp, Homo sapien
gaatgacattaggtgacctctctgt

SEQ ID NO: 1478111 - DNA, 25 bp, Homo sapien
ggacagttcatgctttgcctcccag

SEQ ID NO: 1478112 - DNA, 25 bp, Homo sapien
ttatcactactgaatcgaagttggg

SEQ ID NO: 1478113 - DNA, 25 bp, Homo sapien
tcttaagttaaagtattgggagtca

SEQ ID NO: 1478114 - DNA, 25 bp, Homo sapien
taaaattgaggcatctcaaatggca

SEQ ID NO: 1478115 - DNA, 25 bp, Homo sapien
ggcataatttcactcggcttacatt

SEQ ID NO: 1478116 - DNA, 25 bp, Homo sapien
cagcaagagcgtgaagctcaagaca

SEQ ID NO: 1478117 - DNA, 25 bp, Homo sapien
gacctccttatatgagtcaccgcca

SEQ ID NO: 1478118 - DNA, 25 bp, Homo sapien
gcttgacagtcgttatcagcctcat

SEQ ID NO: 1478119 - DNA, 25 bp, Homo sapien
tatcagcctcattttgagcagcaag

SEQ ID NO: 1478120 - DNA, 25 bp, Homo sapien
tcattttcttcccctaggggctgaa

SEQ ID NO: 1478121 - DNA, 25 bp, Homo sapien
attatcatttagcaccatatatgta

SEQ ID NO: 1478122 - DNA, 25 bp, Homo sapien
aagattcaggcgctgaaagccacag

SEQ ID NO: 1478123 - DNA, 25 bp, Homo sapien
tctgaaagttagcatcttggacggt

SEQ ID NO: 1478124 - DNA, 25 bp, Homo sapien
gaaggtgctggccagttgcatgcct

SEQ ID NO: 1478125 - DNA, 25 bp, Homo sapien
ctggcgaaggacaatagaagattca

SEQ ID NO: 1478126 - DNA, 25 bp, Homo sapien
atagtagttccttggtgctatgatg

SEQ ID NO: 1478127 - DNA, 25 bp, Homo sapien
caggagcacatgtcgcagcaagtag

SEQ ID NO: 1478128 - DNA, 25 bp, Homo sapien
gagtaagaggcatcttcgtgtcgtt

SEQ ID NO: 1478129 - DNA, 25 bp, Homo sapien
aaagtatgcgttggaaagagacatc

SEQ ID NO: 1478130 - DNA, 25 bp, Homo sapien
tagttacatgctcagggaagacttg

SEQ ID NO: 1478131 - DNA, 25 bp, Homo sapien
tctccactgaagacagcagcaggag

SEQ ID NO: 1478132 - DNA, 25 bp, Homo sapien
tgcaaattagcaggagagacagggt

SEQ ID NO: 1478133 - DNA, 25 bp, Homo sapien
ctgcaaattagcaggagagacaggg

SEQ ID NO: 1478134 - DNA, 25 bp, Homo sapien
gagacagggtctccactgaagacag

SEQ ID NO: 1478135 - DNA, 25 bp, Homo sapien
gcttctcggtttccaccagcccatt

SEQ ID NO: 1478136 - DNA, 25 bp, Homo sapien
caatggatcttcagttaatactggg

SEQ ID NO: 1478137 - DNA, 25 bp, Homo sapien
ttccctttcaatggatcttcagtta

SEQ ID NO: 1478138 - DNA, 25 bp, Homo sapien
tactggggcttctcggtttccacca

SEQ ID NO: 1478139 - DNA, 25 bp, Homo sapien
gtcagacaggtatggagaggattct

SEQ ID NO: 1478140 - DNA, 25 bp, Homo sapien
gatcccatgtctgctatgctacagt

SEQ ID NO: 1478141 - DNA, 25 bp, Homo sapien
tcatcaaaatagatcccatgtctgc

SEQ ID NO: 1478142 - DNA, 25 bp, Homo sapien
tacagtctacctctggctgccgaaa

SEQ ID NO: 1478143 - DNA, 25 bp, Homo sapien
ggttgatcgttttgcccaccttcaa

SEQ ID NO: 1478144 - DNA, 25 bp, Homo sapien
gatcgttttgcccaccttcaatatt

SEQ ID NO: 1478145 - DNA, 25 bp, Homo sapien
tttctgtttgccgtatggttgatcg

SEQ ID NO: 1478146 - DNA, 25 bp, Homo sapien
tgccgtatggttgatcgttttgccc

SEQ ID NO: 1478147 - DNA, 25 bp, Homo sapien
cctttggtcaccctctttgtaatct

SEQ ID NO: 1478148 - DNA, 25 bp, Homo sapien
gtgtaatttgtaggcaagggattca

SEQ ID NO: 1478149 - DNA, 25 bp, Homo sapien
tctagagtgtaatttgtaggcaagg

SEQ ID NO: 1478150 - DNA, 25 bp, Homo sapien
caccctctttgtaatctcataatca

SEQ ID NO: 1478151 - DNA, 25 bp, Homo sapien
tcgtaagattttagacctgtatatg

SEQ ID NO: 1478152 - DNA, 25 bp, Homo sapien
ctggactaatttctcgtaagatttt

SEQ ID NO: 1478153 - DNA, 25 bp, Homo sapien
tagacctgtatatgttgcaggaatc

SEQ ID NO: 1478154 - DNA, 25 bp, Homo sapien
gccctttgtgtctggactaatttct

SEQ ID NO: 1478155 - DNA, 25 bp, Homo sapien
tgagcaagtaccatccaccaccttg

SEQ ID NO: 1478156 - DNA, 25 bp, Homo sapien
gcggccacgtggcttgcacagacag

SEQ ID NO: 1478157 - DNA, 25 bp, Homo sapien
cacgtggcttgcacagacagtgata

SEQ ID NO: 1478158 - DNA, 25 bp, Homo sapien
acagtcattggaagggcggccacgt

SEQ ID NO: 1478159 - DNA, 25 bp, Homo sapien
tagactctaggggtatgtttggcag

SEQ ID NO: 1478160 - DNA, 25 bp, Homo sapien
actctaggggtatgtttggcagaga

SEQ ID NO: 1478161 - DNA, 25 bp, Homo sapien
tctaggggtatgtttggcagagaca

SEQ ID NO: 1478162 - DNA, 25 bp, Homo sapien
ggcttagactctaggggtatgtttg

SEQ ID NO: 1478163 - DNA, 25 bp, Homo sapien
agaggaccaggtggcccaagggctg

SEQ ID NO: 1478164 - DNA, 25 bp, Homo sapien
ggaccaggtggcccaagggctgcat

SEQ ID NO: 1478165 - DNA, 25 bp, Homo sapien
gagaggaccaggtggcccaagggct

SEQ ID NO: 1478166 - DNA, 25 bp, Homo sapien
ctgaagagaggaccaggtggcccaa

SEQ ID NO: 1478167 - DNA, 25 bp, Homo sapien
agtgcagcattcacaacacagacca

SEQ ID NO: 1478168 - DNA, 25 bp, Homo sapien
gcctgagcttttcctaaggctccag

SEQ ID NO: 1478169 - DNA, 25 bp, Homo sapien
tttaactttataagtgcagcattca

SEQ ID NO: 1478170 - DNA, 25 bp, Homo sapien
taaggctccaggatttaactttata

SEQ ID NO: 1478171 - DNA, 25 bp, Homo sapien
tacaagcacgagctggacagctctg

SEQ ID NO: 1478172 - DNA, 25 bp, Homo sapien
tcctgatacaagcacgagctggaca

SEQ ID NO: 1478173 - DNA, 25 bp, Homo sapien
acgagctggacagctctgcgtggca

SEQ ID NO: 1478174 - DNA, 25 bp, Homo sapien
tgcatcctgatacaagcacgagctg

SEQ ID NO: 1478175 - DNA, 25 bp, Homo sapien
tcattacagctgttcaagagggcaa

SEQ ID NO: 1478176 - DNA, 25 bp, Homo sapien
tcactaggagtcttggaacgtttcc

SEQ ID NO: 1478177 - DNA, 25 bp, Homo sapien
gctgtagtggtgaggaagcaaccct

SEQ ID NO: 1478178 - DNA, 25 bp, Homo sapien
taactttgagacaggaaaccaggta

SEQ ID NO: 1478179 - DNA, 25 bp, Homo sapien
tctcaactgatccttgaggctggga

SEQ ID NO: 1478180 - DNA, 25 bp, Homo sapien
tgaatctcaactgatccttgaggct

SEQ ID NO: 1478181 - DNA, 25 bp, Homo sapien
cttgaatctcaactgatccttgagg

SEQ ID NO: 1478182 - DNA, 25 bp, Homo sapien
aatctcaactgatccttgaggctgg

SEQ ID NO: 1478183 - DNA, 25 bp, Homo sapien
tagactcaagaagtgaatggcagcc

SEQ ID NO: 1478184 - DNA, 25 bp, Homo sapien
ggagctttcctgctaccgaggtgag

SEQ ID NO: 1478185 - DNA, 25 bp, Homo sapien
tgtaaaggagatgaacacaaggccc

SEQ ID NO: 1478186 - DNA, 25 bp, Homo sapien
taatgagcaccatcggccagtagct

SEQ ID NO: 1478187 - DNA, 25 bp, Homo sapien
caggcgctggtccttttaaagggct

SEQ ID NO: 1478188 - DNA, 25 bp, Homo sapien
ggaagacagggatgagggctgcggg

SEQ ID NO: 1478189 - DNA, 25 bp, Homo sapien
gagggcggagcaggtgagctgcggg

SEQ ID NO: 1478190 - DNA, 25 bp, Homo sapien
gtgggagcagggagtgcacttgtac

SEQ ID NO: 1478191 - DNA, 25 bp, Homo sapien
gggaggagggcggagcaggtgagct

SEQ ID NO: 1478192 - DNA, 25 bp, Homo sapien
gtgtgtgtggagtggctgcgcggcc

SEQ ID NO: 1478193 - DNA, 25 bp, Homo sapien
gccgccgcagtgagcaacgcggcaa

SEQ ID NO: 1478194 - DNA, 25 bp, Homo sapien
agccggccccaggatgtaggcgatc

SEQ ID NO: 1478195 - DNA, 25 bp, Homo sapien
acgggcccgggagagacgcgctcca

SEQ ID NO: 1478196 - DNA, 25 bp, Homo sapien
ccgctcagcgcctgcaacagtccgg

SEQ ID NO: 1478197 - DNA, 25 bp, Homo sapien
agcgcctgcaacagtccggtcctga

SEQ ID NO: 1478198 - DNA, 25 bp, Homo sapien
gggtggccccgctcagcgcctgcaa

SEQ ID NO: 1478199 - DNA, 25 bp, Homo sapien
tggccccgctcagcgcctgcaacag

SEQ ID NO: 1478200 - DNA, 25 bp, Homo sapien
gcgtggggggatctggcagcttcag

SEQ ID NO: 1478201 - DNA, 25 bp, Homo sapien
tgcaccctagccggggaatgctgcc

SEQ ID NO: 1478202 - DNA, 25 bp, Homo sapien
tgctgcggcgagtgagcacccggct

SEQ ID NO: 1478203 - DNA, 25 bp, Homo sapien
tcctgggcagcacccagcgcatctg

SEQ ID NO: 1478204 - DNA, 25 bp, Homo sapien
gctgcagcgggctaaggagacgtct

SEQ ID NO: 1478205 - DNA, 25 bp, Homo sapien
tcctggggctcttgtctgttcggca

SEQ ID NO: 1478206 - DNA, 25 bp, Homo sapien
aggccgaccaaaggtgctgcccgca

SEQ ID NO: 1478207 - DNA, 25 bp, Homo sapien
gcccgcagttggtagaggcgggaga

SEQ ID NO: 1478208 - DNA, 25 bp, Homo sapien
gaggaagcaatagtgcccagaactc

SEQ ID NO: 1478209 - DNA, 25 bp, Homo sapien
aaggtggccacaaggatgttctgag

SEQ ID NO: 1478210 - DNA, 25 bp, Homo sapien
ttcagtcatgagacgcttgagggtg

SEQ ID NO: 1478211 - DNA, 25 bp, Homo sapien
agtcatgagacgcttgagggtgctt

SEQ ID NO: 1478212 - DNA, 25 bp, Homo sapien
ctttcttggcagagatgaactttga

SEQ ID NO: 1478213 - DNA, 25 bp, Homo sapien
caggtagctgatttggagcccacag

SEQ ID NO: 1478214 - DNA, 25 bp, Homo sapien
cattgttttaggctgttgcaggagg

SEQ ID NO: 1478215 - DNA, 25 bp, Homo sapien
gaactttgagacaagtcctgacagg

SEQ ID NO: 1478216 - DNA, 25 bp, Homo sapien
tgcacatgccatatttctttgggta

SEQ ID NO: 1478217 - DNA, 25 bp, Homo sapien
atccagtcttccttgatggcctttc

SEQ ID NO: 1478218 - DNA, 25 bp, Homo sapien
ccgagtggtgattattattgctgtt

SEQ ID NO: 1478219 - DNA, 25 bp, Homo sapien
attattgctgttcatcatccagtct

SEQ ID NO: 1478220 - DNA, 25 bp, Homo sapien
tgagccacagggtaaaggctttttg

SEQ ID NO: 1478221 - DNA, 25 bp, Homo sapien
attgagccacagggtaaaggctttt

SEQ ID NO: 1478222 - DNA, 25 bp, Homo sapien
aattgagccacagggtaaaggcttt

SEQ ID NO: 1478223 - DNA, 25 bp, Homo sapien
gccacagggtaaaggctttttggca

SEQ ID NO: 1478224 - DNA, 25 bp, Homo sapien
ttaagtcctgcttgtacttgggact

SEQ ID NO: 1478225 - DNA, 25 bp, Homo sapien
tttaagtcctgcttgtacttgggac

SEQ ID NO: 1478226 - DNA, 25 bp, Homo sapien
caggcactggtacagaatgcggttc

SEQ ID NO: 1478227 - DNA, 25 bp, Homo sapien
caggtaagctgcaagctgcaacagc

SEQ ID NO: 1478228 - DNA, 25 bp, Homo sapien
cttcaggcactggtacagaatgcgg

SEQ ID NO: 1478229 - DNA, 25 bp, Homo sapien
ctggtacagaatgcggttccggttg

SEQ ID NO: 1478230 - DNA, 25 bp, Homo sapien
catacggcagtgaaaatcagtggac

SEQ ID NO: 1478231 - DNA, 25 bp, Homo sapien
cacacgatggaatatcatacggcag

SEQ ID NO: 1478232 - DNA, 25 bp, Homo sapien
gattgttccacgtgccacacgatgg

SEQ ID NO: 1478233 - DNA, 25 bp, Homo sapien
tacccaagactgagacatcaacgtg

SEQ ID NO: 1478234 - DNA, 25 bp, Homo sapien
tatgagtcagtcgagtccattcggt

SEQ ID NO: 1478235 - DNA, 25 bp, Homo sapien
tgtcatgagggtccgagaaggcaca

SEQ ID NO: 1478236 - DNA, 25 bp, Homo sapien
tgtgatatgggaaaacatggcctct

SEQ ID NO: 1478237 - DNA, 25 bp, Homo sapien
aattgggatgatgcctgcctgacgc

SEQ ID NO: 1478238 - DNA, 25 bp, Homo sapien
tacatttgccgaaagcaagaacttc

SEQ ID NO: 1478239 - DNA, 25 bp, Homo sapien
ctggtaccatgatcccagtgaataa

SEQ ID NO: 1478240 - DNA, 25 bp, Homo sapien
ccttgaccttcaattaatgagtgca

SEQ ID NO: 1478241 - DNA, 25 bp, Homo sapien
tgaagagaacaaggccagatgcagt

SEQ ID NO: 1478242 - DNA, 25 bp, Homo sapien
gcgttctagaagtggagaaactcac

SEQ ID NO: 1478243 - DNA, 25 bp, Homo sapien
ctagaaccgtgtatactttccaggg

SEQ ID NO: 1478244 - DNA, 25 bp, Homo sapien
taggagtaatagaagggcagcacgt

SEQ ID NO: 1478245 - DNA, 25 bp, Homo sapien
tggccctcctaatggaatattctag

SEQ ID NO: 1478246 - DNA, 25 bp, Homo sapien
aatccagccgtcttcagatgagtca

SEQ ID NO: 1478247 - DNA, 25 bp, Homo sapien
gtacagacatagaccaatccagccg

SEQ ID NO: 1478248 - DNA, 25 bp, Homo sapien
tactaatgaggctacatgaactgcc

SEQ ID NO: 1478249 - DNA, 25 bp, Homo sapien
tagacttgctttccaaatggcgtgc

SEQ ID NO: 1478250 - DNA, 25 bp, Homo sapien
gagatgccccagcgaccaggtgtgt

SEQ ID NO: 1478251 - DNA, 25 bp, Homo sapien
gggagatgccccagcgaccaggtgt

SEQ ID NO: 1478252 - DNA, 25 bp, Homo sapien
atgccccagcgaccaggtgtgtctc

SEQ ID NO: 1478253 - DNA, 25 bp, Homo sapien
gatgccccagcgaccaggtgtgtct

SEQ ID NO: 1478254 - DNA, 25 bp, Homo sapien
ctgcacgtgtctgggtttggttgca

SEQ ID NO: 1478255 - DNA, 25 bp, Homo sapien
tgcaggactggtggtagcatgtgct

SEQ ID NO: 1478256 - DNA, 25 bp, Homo sapien
cctggactgcacgtgtctgggtttg

SEQ ID NO: 1478257 - DNA, 25 bp, Homo sapien
cacgcctggactgcacgtgtctggg

SEQ ID NO: 1478258 - DNA, 25 bp, Homo sapien
taatgactgggaggtctattcctgc

SEQ ID NO: 1478259 - DNA, 25 bp, Homo sapien
tctagaactcggtggtaatgactgg

SEQ ID NO: 1478260 - DNA, 25 bp, Homo sapien
gaacctctcagtgcttttccaacga

SEQ ID NO: 1478261 - DNA, 25 bp, Homo sapien
ggttgatcaagctgctcacccgact

SEQ ID NO: 1478262 - DNA, 25 bp, Homo sapien
tatggaaatctcataagcacagagg

SEQ ID NO: 1478263 - DNA, 25 bp, Homo sapien
tgtggaagctgaagggaacagaatc

SEQ ID NO: 1478264 - DNA, 25 bp, Homo sapien
agaatctccatttcggatcctccca

SEQ ID NO: 1478265 - DNA, 25 bp, Homo sapien
gatccctctttgaaatagcaccttg

SEQ ID NO: 1478266 - DNA, 25 bp, Homo sapien
cattgtaactgcaggaggggtagca

SEQ ID NO: 1478267 - DNA, 25 bp, Homo sapien
agtagcctgtgaggatatgacaggg

SEQ ID NO: 1478268 - DNA, 25 bp, Homo sapien
gacaggggggcgatccctctgagaa

SEQ ID NO: 1478269 - DNA, 25 bp, Homo sapien
tgtcattgtaactgcaggaggggta

SEQ ID NO: 1478270 - DNA, 25 bp, Homo sapien
gccgatgccggaccggcattgcttt

SEQ ID NO: 1478271 - DNA, 25 bp, Homo sapien
tggcgccgatgccggaccggcattg

SEQ ID NO: 1478272 - DNA, 25 bp, Homo sapien
gcgccgatgccggaccggcattgct

SEQ ID NO: 1478273 - DNA, 25 bp, Homo sapien
ggtggcgccgatgccggaccggcat

SEQ ID NO: 1478274 - DNA, 25 bp, Homo sapien
cacctcgggcaggatgatcacgtcc

SEQ ID NO: 1478275 - DNA, 25 bp, Homo sapien
caccacctcgggcaggatgatcacg

SEQ ID NO: 1478276 - DNA, 25 bp, Homo sapien
gtggccaatcatctcgggcttgacc

SEQ ID NO: 1478277 - DNA, 25 bp, Homo sapien
agtggccaatcatctcgggcttgac

SEQ ID NO: 1478278 - DNA, 25 bp, Homo sapien
gctgcatcagctgttcgtaggacat

SEQ ID NO: 1478279 - DNA, 25 bp, Homo sapien
tgcatcagctgttcgtaggacatgt

SEQ ID NO: 1478280 - DNA, 25 bp, Homo sapien
catcagctgttcgtaggacatgtcc

SEQ ID NO: 1478281 - DNA, 25 bp, Homo sapien
cagctgcatcagctgttcgtaggac

SEQ ID NO: 1478282 - DNA, 25 bp, Homo sapien
aaaatcttaggtagggctgggctca

SEQ ID NO: 1478283 - DNA, 25 bp, Homo sapien
ccatgcctaaatatgtctaaatagg

SEQ ID NO: 1478284 - DNA, 25 bp, Homo sapien
aaatcttaggtagggctgggctcac

SEQ ID NO: 1478285 - DNA, 25 bp, Homo sapien
tgcctaaatatgtctaaataggttt

SEQ ID NO: 1478286 - DNA, 25 bp, Homo sapien
ctaagatattcactcacatattaaa

SEQ ID NO: 1478287 - DNA, 25 bp, Homo sapien
aataacaacgtctcaaaacatttga

SEQ ID NO: 1478288 - DNA, 25 bp, Homo sapien
acaacgtctcaaaacatttgaagca

SEQ ID NO: 1478289 - DNA, 25 bp, Homo sapien
gtttctaagatattcactcacatat

SEQ ID NO: 1478290 - DNA, 25 bp, Homo sapien
tgccatgggttctgggacgtcaccg

SEQ ID NO: 1478291 - DNA, 25 bp, Homo sapien
tgtcccgcgggactagcatatcaag

SEQ ID NO: 1478292 - DNA, 25 bp, Homo sapien
aaaacgagaaggcatcgcggctctg

SEQ ID NO: 1478293 - DNA, 25 bp, Homo sapien
caagaagcgatggtgttgtgcgcct

SEQ ID NO: 1478294 - DNA, 25 bp, Homo sapien
tctacgcttctagagcttgagccag

SEQ ID NO: 1478295 - DNA, 25 bp, Homo sapien
tagctcggaagggtcaaaagagtcc

SEQ ID NO: 1478296 - DNA, 25 bp, Homo sapien
ccgcccctctatggaaagtaaatgg

SEQ ID NO: 1478297 - DNA, 25 bp, Homo sapien
aaagagtccgcggtttcgccgcgtg

SEQ ID NO: 1478298 - DNA, 25 bp, Homo sapien
ttatcacaataaatttcagaatctg

SEQ ID NO: 1478299 - DNA, 25 bp, Homo sapien
tatatagtaatatgtttaaggcaca

SEQ ID NO: 1478300 - DNA, 25 bp, Homo sapien
tttaaggcacatggcaaacttttgg

SEQ ID NO: 1478301 - DNA, 25 bp, Homo sapien
tcagaatctgtttctttagtccaaa

SEQ ID NO: 1478302 - DNA, 25 bp, Homo sapien
cacatggacattcagggagcggata

SEQ ID NO: 1478303 - DNA, 25 bp, Homo sapien
catggcttggtatctccgtgcgaga

SEQ ID NO: 1478304 - DNA, 25 bp, Homo sapien
aatgccctgttgaggaatttccaca

SEQ ID NO: 1478305 - DNA, 25 bp, Homo sapien
gatttgctggaattccctcacgttc

SEQ ID NO: 1478306 - DNA, 25 bp, Homo sapien
tccactccaatgatggtataacctt

SEQ ID NO: 1478307 - DNA, 25 bp, Homo sapien
tccaatgatggtataaccttctgtt

SEQ ID NO: 1478308 - DNA, 25 bp, Homo sapien
cactccaatgatggtataaccttct

SEQ ID NO: 1478309 - DNA, 25 bp, Homo sapien
tgttccactccaatgatggtataac

SEQ ID NO: 1478310 - DNA, 25 bp, Homo sapien
taaaaaagaactctcccaacatgac

SEQ ID NO: 1478311 - DNA, 25 bp, Homo sapien
cagttatagccctgcttggagtaaa

SEQ ID NO: 1478312 - DNA, 25 bp, Homo sapien
ataaaaaagaactctcccaacatga

SEQ ID NO: 1478313 - DNA, 25 bp, Homo sapien
ttcattcagttatagccctgcttgg

SEQ ID NO: 1478314 - DNA, 25 bp, Homo sapien
actgaagccccaaatacctcacagg

SEQ ID NO: 1478315 - DNA, 25 bp, Homo sapien
actgtttgtcgctgatacactgaag

SEQ ID NO: 1478316 - DNA, 25 bp, Homo sapien
actgaaggctgccaacaacgagcac

SEQ ID NO: 1478317 - DNA, 25 bp, Homo sapien
gctgaaactgtttgtcgctgataca

SEQ ID NO: 1478318 - DNA, 25 bp, Homo sapien
gcgaggccacaacgatgagtctact

SEQ ID NO: 1478319 - DNA, 25 bp, Homo sapien
tctggcagcacgatcctgaaacagg

SEQ ID NO: 1478320 - DNA, 25 bp, Homo sapien
tcggtttgtcgatgagcgaggccac

SEQ ID NO: 1478321 - DNA, 25 bp, Homo sapien
taatcttcttctgaacgtcggtcca

SEQ ID NO: 1478322 - DNA, 25 bp, Homo sapien
cttttccctaagtggaaaggcagag

SEQ ID NO: 1478323 - DNA, 25 bp, Homo sapien
cagaggtcaccatgtcaatgaaagt

SEQ ID NO: 1478324 - DNA, 25 bp, Homo sapien
aaaaatctaaccagatcaacaaggg

SEQ ID NO: 1478325 - DNA, 25 bp, Homo sapien
aaagttataccacactttttcactg

SEQ ID NO: 1478326 - DNA, 25 bp, Homo sapien
aggtaccactgaaatcccgcagcta

SEQ ID NO: 1478327 - DNA, 25 bp, Homo sapien
tatcaatggtgatccattcatcttc

SEQ ID NO: 1478328 - DNA, 25 bp, Homo sapien
ctggtaaatttatcaatggtgatcc

SEQ ID NO: 1478329 - DNA, 25 bp, Homo sapien
ggaacatcagtgaatctggtaaatt

SEQ ID NO: 1478330 - DNA, 25 bp, Homo sapien
tgaaaggcgtggaaggatgtaaaat

SEQ ID NO: 1478331 - DNA, 25 bp, Homo sapien
aaaggcgtggaaggatgtaaaatat

SEQ ID NO: 1478332 - DNA, 25 bp, Homo sapien
ctgaaaggcgtggaaggatgtaaaa

SEQ ID NO: 1478333 - DNA, 25 bp, Homo sapien
gaaaggcgtggaaggatgtaaaata

SEQ ID NO: 1478334 - DNA, 25 bp, Homo sapien
tgaacacggcatagtctgacaccac

SEQ ID NO: 1478335 - DNA, 25 bp, Homo sapien
gtaaacagtcatcgcataagcaatc

SEQ ID NO: 1478336 - DNA, 25 bp, Homo sapien
agtacataggaagcagaggtccaag

SEQ ID NO: 1478337 - DNA, 25 bp, Homo sapien
gaaacaatactcttagcagcaatgc

SEQ ID NO: 1478338 - DNA, 25 bp, Homo sapien
gagtgactagaggagtcctgcagaa

SEQ ID NO: 1478339 - DNA, 25 bp, Homo sapien
aagatgccggacaaagcattctggg

SEQ ID NO: 1478340 - DNA, 25 bp, Homo sapien
tagagtgactagaggagtcctgcag

SEQ ID NO: 1478341 - DNA, 25 bp, Homo sapien
gatgccggacaaagcattctgggcg

SEQ ID NO: 1478342 - DNA, 25 bp, Homo sapien
aatgtcagaacagatttctgtttag

SEQ ID NO: 1478343 - DNA, 25 bp, Homo sapien
tcagaacagatttctgtttagagtt

SEQ ID NO: 1478344 - DNA, 25 bp, Homo sapien
ttccattgtttacaagccagacact

SEQ ID NO: 1478345 - DNA, 25 bp, Homo sapien
tttaatgtcagaacagatttctgtt

SEQ ID NO: 1478346 - DNA, 25 bp, Homo sapien
gcgttgccaattcttcttggcattc

SEQ ID NO: 1478347 - DNA, 25 bp, Homo sapien
gctcctgaatgcgttgccaattctt

SEQ ID NO: 1478348 - DNA, 25 bp, Homo sapien
tcctgaatgcgttgccaattcttct

SEQ ID NO: 1478349 - DNA, 25 bp, Homo sapien
tgaatgcgttgccaattcttcttgg

SEQ ID NO: 1478350 - DNA, 25 bp, Homo sapien
tcaatcccctaattatgctatcgaa

SEQ ID NO: 1478351 - DNA, 25 bp, Homo sapien
tgtttaccttacctcaaagcctgtc

SEQ ID NO: 1478352 - DNA, 25 bp, Homo sapien
cagtcagtactttaggcccttgttt

SEQ ID NO: 1478353 - DNA, 25 bp, Homo sapien
gaatggctcttgataaatccagtca

SEQ ID NO: 1478354 - DNA, 25 bp, Homo sapien
ttcactcaacatcaacccaagcctg

SEQ ID NO: 1478355 - DNA, 25 bp, Homo sapien
gatctgctcttcacactttaatgca

SEQ ID NO: 1478356 - DNA, 25 bp, Homo sapien
ggatgacgtcattctcaagtttaac

SEQ ID NO: 1478357 - DNA, 25 bp, Homo sapien
actttttgctggcttccccattcac

SEQ ID NO: 1478358 - DNA, 25 bp, Homo sapien
tactgagcttccatgtatgattttg

SEQ ID NO: 1478359 - DNA, 25 bp, Homo sapien
ggcttcacagacactgggtcctgca

SEQ ID NO: 1478360 - DNA, 25 bp, Homo sapien
tcacttgcttgatactgagcttcca

SEQ ID NO: 1478361 - DNA, 25 bp, Homo sapien
ccatccacgtcacttgcttgatact

SEQ ID NO: 1478362 - DNA, 25 bp, Homo sapien
ctccaggacggcagcatgaggatgt

SEQ ID NO: 1478363 - DNA, 25 bp, Homo sapien
tggcccagtccaagccctcgatgct

SEQ ID NO: 1478364 - DNA, 25 bp, Homo sapien
ctcgatgctccaggacggcagcatg

SEQ ID NO: 1478365 - DNA, 25 bp, Homo sapien
ggagaagctgacacagtatgggcac

SEQ ID NO: 1478366 - DNA, 25 bp, Homo sapien
accactgcagcacaactataagggc

SEQ ID NO: 1478367 - DNA, 25 bp, Homo sapien
ggagtcagggcatcaaattcttcaa

SEQ ID NO: 1478368 - DNA, 25 bp, Homo sapien
tacacacagtccagagtttcttaag

SEQ ID NO: 1478369 - DNA, 25 bp, Homo sapien
ctataagggcttgcttcagaattag

SEQ ID NO: 1478370 - DNA, 25 bp, Homo sapien
ataaatcggctctgtgtaggcggcg

SEQ ID NO: 1478371 - DNA, 25 bp, Homo sapien
caacggctgccatagtgattaacca

SEQ ID NO: 1478372 - DNA, 25 bp, Homo sapien
aaactgctcctatgtcggtgctcga

SEQ ID NO: 1478373 - DNA, 25 bp, Homo sapien
cacatggaaatgcttaccggctgcg

SEQ ID NO: 1478374 - DNA, 25 bp, Homo sapien
ttgagtaataatgtctaaatgtgat

SEQ ID NO: 1478375 - DNA, 25 bp, Homo sapien
aaactgctaaaaacgtacaaatgct

SEQ ID NO: 1478376 - DNA, 25 bp, Homo sapien
gagtaataatgtctaaatgtgataa

SEQ ID NO: 1478377 - DNA, 25 bp, Homo sapien
aatgtgataaaactgctaaaaacgt

SEQ ID NO: 1478378 - DNA, 25 bp, Homo sapien
gaagactgttcaactggaatctgga

SEQ ID NO: 1478379 - DNA, 25 bp, Homo sapien
ccttcaggatgggaaggactggcct

SEQ ID NO: 1478380 - DNA, 25 bp, Homo sapien
tcctcaggttttggcatccgtaggg

SEQ ID NO: 1478381 - DNA, 25 bp, Homo sapien
caagggcatgctcacttcaggagag

SEQ ID NO: 1478382 - DNA, 25 bp, Homo sapien
ttttatggatgcttgattgttggtg

SEQ ID NO: 1478383 - DNA, 25 bp, Homo sapien
ggaagaaattgagggaatttatgaa

SEQ ID NO: 1478384 - DNA, 25 bp, Homo sapien
atggatgcttgattgttggtgaaac

SEQ ID NO: 1478385 - DNA, 25 bp, Homo sapien
aaaatattttatggatgcttgattg

SEQ ID NO: 1478386 - DNA, 25 bp, Homo sapien
cactctgtgctgtagagaattcaca

SEQ ID NO: 1478387 - DNA, 25 bp, Homo sapien
ttttggacttggacactaattcatc

SEQ ID NO: 1478388 - DNA, 25 bp, Homo sapien
cacatagtagcgttttttggacttg

SEQ ID NO: 1478389 - DNA, 25 bp, Homo sapien
cagcagagtctgccacactcggttt

SEQ ID NO: 1478390 - DNA, 25 bp, Homo sapien
tatctaatagcttgattgcaagatc

SEQ ID NO: 1478391 - DNA, 25 bp, Homo sapien
tgggacatattggagccatctaata

SEQ ID NO: 1478392 - DNA, 25 bp, Homo sapien
tcctcaataaacaacttgtgggaca

SEQ ID NO: 1478393 - DNA, 25 bp, Homo sapien
taataaacacaggaatttgacagca

SEQ ID NO: 1478394 - DNA, 25 bp, Homo sapien
tccaaggttttctatgaaggtctgt

SEQ ID NO: 1478395 - DNA, 25 bp, Homo sapien
tccataacaatatttgccgcacagt

SEQ ID NO: 1478396 - DNA, 25 bp, Homo sapien
tatgaaggtctgtacatcctgaaca

SEQ ID NO: 1478397 - DNA, 25 bp, Homo sapien
tatttgccgcacagtcatgtccaag

SEQ ID NO: 1478398 - DNA, 25 bp, Homo sapien
tatcagtgtattgaagactccagtc

SEQ ID NO: 1478399 - DNA, 25 bp, Homo sapien
tacaagcctcaaggataagttcgct

SEQ ID NO: 1478400 - DNA, 25 bp, Homo sapien
gcacttgataaagatccttgggaca

SEQ ID NO: 1478401 - DNA, 25 bp, Homo sapien
ccttgggacacatttgaagcagaca

SEQ ID NO: 1478402 - DNA, 25 bp, Homo sapien
cagctgagtgttgcttaaagaagat

SEQ ID NO: 1478403 - DNA, 25 bp, Homo sapien
gcaatggtaagaactttgttatcaa

SEQ ID NO: 1478404 - DNA, 25 bp, Homo sapien
aaattagcccagaatatcagctgag

SEQ ID NO: 1478405 - DNA, 25 bp, Homo sapien
gaagatataattttccacgccatgt

SEQ ID NO: 1478406 - DNA, 25 bp, Homo sapien
aaccaacactttcaagcaatggaac

SEQ ID NO: 1478407 - DNA, 25 bp, Homo sapien
cggcaggtagaaacggttccagaat

SEQ ID NO: 1478408 - DNA, 25 bp, Homo sapien
gactgcaaagtccttattggcatct

SEQ ID NO: 1478409 - DNA, 25 bp, Homo sapien
aatggaacactggtaaaacttgatc

SEQ ID NO: 1478410 - DNA, 25 bp, Homo sapien
cttgggaagatgacgattcttccaa

SEQ ID NO: 1478411 - DNA, 25 bp, Homo sapien
ggaagatgacgattcttccaaaaca

SEQ ID NO: 1478412 - DNA, 25 bp, Homo sapien
ccttgggaagatgacgattcttcca

SEQ ID NO: 1478413 - DNA, 25 bp, Homo sapien
tgggaagatgacgattcttccaaaa

SEQ ID NO: 1478414 - DNA, 25 bp, Homo sapien
tgaatctgacttccaactgttggct

SEQ ID NO: 1478415 - DNA, 25 bp, Homo sapien
cagccatgctcactactctctgaat

SEQ ID NO: 1478416 - DNA, 25 bp, Homo sapien
gggtgagcataactgctctgctcct

SEQ ID NO: 1478417 - DNA, 25 bp, Homo sapien
cgtctgattgagctgaagagaggaa

SEQ ID NO: 1478418 - DNA, 25 bp, Homo sapien
tataaatggcaacgatccagatctg

SEQ ID NO: 1478419 - DNA, 25 bp, Homo sapien
taacaccatcaggtataaatggcaa

SEQ ID NO: 1478420 - DNA, 25 bp, Homo sapien
tcaggtataaatggcaacgatccag

SEQ ID NO: 1478421 - DNA, 25 bp, Homo sapien
caccatcaggtataaatggcaacga

SEQ ID NO: 1478422 - DNA, 25 bp, Homo sapien
ctgtagtagacatgaaaaagttctg

SEQ ID NO: 1478423 - DNA, 25 bp, Homo sapien
tgtagtagacatgaaaaagttctga

SEQ ID NO: 1478424 - DNA, 25 bp, Homo sapien
tcataagcacatccagaagagggtc

SEQ ID NO: 1478425 - DNA, 25 bp, Homo sapien
gaagagggtctaagaatatccgcaa

SEQ ID NO: 1478426 - DNA, 25 bp, Homo sapien
caagggcatgtaggcattggtacta

SEQ ID NO: 1478427 - DNA, 25 bp, Homo sapien
gaggcatctgtcagtcttcagcaag

SEQ ID NO: 1478428 - DNA, 25 bp, Homo sapien
acagccagcaagaccatcagagaaa

SEQ ID NO: 1478429 - DNA, 25 bp, Homo sapien
caagcttggcttcaaaccaatcagg

SEQ ID NO: 1478430 - DNA, 25 bp, Homo sapien
accaatcaggcataaagcagttttc

SEQ ID NO: 1478431 - DNA, 25 bp, Homo sapien
ggcttcaaaccaatcaggcataaag

SEQ ID NO: 1478432 - DNA, 25 bp, Homo sapien
gctttcattaacacgtagccagtca

SEQ ID NO: 1478433 - DNA, 25 bp, Homo sapien
aagtccaatggagctacacgtaggg

SEQ ID NO: 1478434 - DNA, 25 bp, Homo sapien
catactcttgaacaatgctctttac

SEQ ID NO: 1478435 - DNA, 25 bp, Homo sapien
tcccaagcagatgacttaacatact

SEQ ID NO: 1478436 - DNA, 25 bp, Homo sapien
ccacaatgaagttcctcgtcctaag

SEQ ID NO: 1478437 - DNA, 25 bp, Homo sapien
gattcctcttgtctcagagacatga

SEQ ID NO: 1478438 - DNA, 25 bp, Homo sapien
gaaggtagcattgggctgcccctct

SEQ ID NO: 1478439 - DNA, 25 bp, Homo sapien
agctgtttgaagaaggtagcattgg

SEQ ID NO: 1478440 - DNA, 25 bp, Homo sapien
gtagcattgggctgcccctctcagg

SEQ ID NO: 1478441 - DNA, 25 bp, Homo sapien
ggtagcattgggctgcccctctcag

SEQ ID NO: 1478442 - DNA, 25 bp, Homo sapien
gcaagaagcccatctatacccaggg

SEQ ID NO: 1478443 - DNA, 25 bp, Homo sapien
gagcaagaagcccatctatacccag

SEQ ID NO: 1478444 - DNA, 25 bp, Homo sapien
agaagcccatctatacccagggcct

SEQ ID NO: 1478445 - DNA, 25 bp, Homo sapien
caagaagcccatctatacccagggc

SEQ ID NO: 1478446 - DNA, 25 bp, Homo sapien
tccgaataaacttcaataggaagct

SEQ ID NO: 1478447 - DNA, 25 bp, Homo sapien
catcttccgaataaacttcaatagg

SEQ ID NO: 1478448 - DNA, 25 bp, Homo sapien
caatgcctacttgtcatcttccgaa

SEQ ID NO: 1478449 - DNA, 25 bp, Homo sapien
aaatgggaacagcacaccaatgcct

SEQ ID NO: 1478450 - DNA, 25 bp, Homo sapien
gcaatgcggctgacaaattcatccc

SEQ ID NO: 1478451 - DNA, 25 bp, Homo sapien
gtgtgctactgacatgtaaggcagc

SEQ ID NO: 1478452 - DNA, 25 bp, Homo sapien
ggctgacaaattcatccccatatgg

SEQ ID NO: 1478453 - DNA, 25 bp, Homo sapien
tgacatgtaaggcagcaatgcggct

SEQ ID NO: 1478454 - DNA, 25 bp, Homo sapien
acagcttcctattggctggcctggg

SEQ ID NO: 1478455 - DNA, 25 bp, Homo sapien
tctgtaatttcagtcccaatggaga

SEQ ID NO: 1478456 - DNA, 25 bp, Homo sapien
tttcagtcccaatggagaacagctt

SEQ ID NO: 1478457 - DNA, 25 bp, Homo sapien
agagaaatataagtgactaaaaact

SEQ ID NO: 1478458 - DNA, 25 bp, Homo sapien
tctctgaaagcgcatccattaatgg

SEQ ID NO: 1478459 - DNA, 25 bp, Homo sapien
gcgcatccattaatggtccaataat

SEQ ID NO: 1478460 - DNA, 25 bp, Homo sapien
gagagctctctgaaagcgcatccat

SEQ ID NO: 1478461 - DNA, 25 bp, Homo sapien
tacagagagctctctgaaagcgcat

SEQ ID NO: 1478462 - DNA, 25 bp, Homo sapien
caggatgggtgaaagagccaacatc

SEQ ID NO: 1478463 - DNA, 25 bp, Homo sapien
ttgtttcatacagctccaaaaaatg

SEQ ID NO: 1478464 - DNA, 25 bp, Homo sapien
caaaaaatggataacaccttctttg

SEQ ID NO: 1478465 - DNA, 25 bp, Homo sapien
ccaggatgggtgaaagagccaacat

SEQ ID NO: 1478466 - DNA, 25 bp, Homo sapien
tcaactctttggcaatggtaatttt

SEQ ID NO: 1478467 - DNA, 25 bp, Homo sapien
caactctttggcaatggtaattttt

SEQ ID NO: 1478468 - DNA, 25 bp, Homo sapien
atcagtcactgctatttgatttggt

SEQ ID NO: 1478469 - DNA, 25 bp, Homo sapien
tttcctctgacaccgcatattcaaa

SEQ ID NO: 1478470 - DNA, 25 bp, Homo sapien
tgacaccgcatattcaaacagattg

SEQ ID NO: 1478471 - DNA, 25 bp, Homo sapien
gacaccgcatattcaaacagattgt

SEQ ID NO: 1478472 - DNA, 25 bp, Homo sapien
ctctgacaccgcatattcaaacaga

SEQ ID NO: 1478473 - DNA, 25 bp, Homo sapien
cccaaaactttagaagctcatcttt

SEQ ID NO: 1478474 - DNA, 25 bp, Homo sapien
gatttgcacatataaactctacttt

SEQ ID NO: 1478475 - DNA, 25 bp, Homo sapien
tttatgctgcaaaatcccccggaac

SEQ ID NO: 1478476 - DNA, 25 bp, Homo sapien
ggaaacaatttgatttatgctgcaa

SEQ ID NO: 1478477 - DNA, 25 bp, Homo sapien
aagaatctcactataacagtaaagg

SEQ ID NO: 1478478 - DNA, 25 bp, Homo sapien
tcagcgaacatgtgtgcaccctggg

SEQ ID NO: 1478479 - DNA, 25 bp, Homo sapien
gattccttaatgaaatggcttggcc

SEQ ID NO: 1478480 - DNA, 25 bp, Homo sapien
cactcatgggcttagagctttaaac

SEQ ID NO: 1478481 - DNA, 25 bp, Homo sapien
gttcagtcaacagcaccactcatgg

SEQ ID NO: 1478482 - DNA, 25 bp, Homo sapien
tggcacaggagcaagacatggtcac

SEQ ID NO: 1478483 - DNA, 25 bp, Homo sapien
gatttccagattgcacaggaggtcc

SEQ ID NO: 1478484 - DNA, 25 bp, Homo sapien
tcagaactgaggtcacaatgcaacc

SEQ ID NO: 1478485 - DNA, 25 bp, Homo sapien
tctaaaaggaaggaaggcgctccaa

SEQ ID NO: 1478486 - DNA, 25 bp, Homo sapien
aacagatgagcagatggggattttc

SEQ ID NO: 1478487 - DNA, 25 bp, Homo sapien
gatggcagacataaaggagcatttg

SEQ ID NO: 1478488 - DNA, 25 bp, Homo sapien
gaaactccaaaagcgtcaaatggaa

SEQ ID NO: 1478489 - DNA, 25 bp, Homo sapien
gaattatcagacaaacaagacctta

SEQ ID NO: 1478490 - DNA, 25 bp, Homo sapien
gcagccaagtaggtagcactaggct

SEQ ID NO: 1478491 - DNA, 25 bp, Homo sapien
ggcccgcaggtgcagtcggccccca

SEQ ID NO: 1478492 - DNA, 25 bp, Homo sapien
tgcagcaggtagcgcgctcgcttgc

SEQ ID NO: 1478493 - DNA, 25 bp, Homo sapien
aggtagcgcgctcgcttgcgcgtca

SEQ ID NO: 1478494 - DNA, 25 bp, Homo sapien
ctcgcttgcgcgtcagggcgtccgc

SEQ ID NO: 1478495 - DNA, 25 bp, Homo sapien
ctggcccagccccgcctgcaccgtc

SEQ ID NO: 1478496 - DNA, 25 bp, Homo sapien
ggctcgggcaacagcttctcggcca

SEQ ID NO: 1478497 - DNA, 25 bp, Homo sapien
tcgggcaacagcttctcggccaggg

SEQ ID NO: 1478498 - DNA, 25 bp, Homo sapien
gccgggctcgggcaacagcttctcg

SEQ ID NO: 1478499 - DNA, 25 bp, Homo sapien
gcgcgcgccgcgggcgcggtcgccg

SEQ ID NO: 1478500 - DNA, 25 bp, Homo sapien
acggctgctagcacttccacggcag

SEQ ID NO: 1478501 - DNA, 25 bp, Homo sapien
agcttctcctctacgcggccggacc

SEQ ID NO: 1478502 - DNA, 25 bp, Homo sapien
ccggcgagcagatcgcgcagcgcct

SEQ ID NO: 1478503 - DNA, 25 bp, Homo sapien
gggccgcaaacatggcccgacggct

SEQ ID NO: 1478504 - DNA, 25 bp, Homo sapien
gggcgtccgcgcaggctccgcagca

SEQ ID NO: 1478505 - DNA, 25 bp, Homo sapien
acgcgccggcggtggcgaggctgca

SEQ ID NO: 1478506 - DNA, 25 bp, Homo sapien
tgcagactggggtccgggccgcccg

SEQ ID NO: 1478507 - DNA, 25 bp, Homo sapien
agtggcacgaggtaccctgcagcca

SEQ ID NO: 1478508 - DNA, 25 bp, Homo sapien
gggtcccggctctgcgagagcagcg

SEQ ID NO: 1478509 - DNA, 25 bp, Homo sapien
tccgcggatgcctccccttggcaca

SEQ ID NO: 1478510 - DNA, 25 bp, Homo sapien
tcgtcctcgagccgctgcagaagga

SEQ ID NO: 1478511 - DNA, 25 bp, Homo sapien
gcgcagcgtctccacgcgctccgcg

SEQ ID NO: 1478512 - DNA, 25 bp, Homo sapien
gttgcccagacttgatcgtttagac

SEQ ID NO: 1478513 - DNA, 25 bp, Homo sapien
aaactgacattcactgttgcccaga

SEQ ID NO: 1478514 - DNA, 25 bp, Homo sapien
attgtaatagtctcccatgaaaatg

SEQ ID NO: 1478515 - DNA, 25 bp, Homo sapien
gaaattgtaatagtctcccatgaaa

SEQ ID NO: 1478516 - DNA, 25 bp, Homo sapien
tgtaatagtctcccatgaaaatgta

SEQ ID NO: 1478517 - DNA, 25 bp, Homo sapien
aaattgtaatagtctcccatgaaaa

SEQ ID NO: 1478518 - DNA, 25 bp, Homo sapien
tttgataaggcaatgtttgcttcag

SEQ ID NO: 1478519 - DNA, 25 bp, Homo sapien
tgataaggcaatgtttgcttcagca

SEQ ID NO: 1478520 - DNA, 25 bp, Homo sapien
ctttgataaggcaatgtttgcttca

SEQ ID NO: 1478521 - DNA, 25 bp, Homo sapien
ttgataaggcaatgtttgcttcagc

SEQ ID NO: 1478522 - DNA, 25 bp, Homo sapien
ccccttgagtggtagcaggacctta

SEQ ID NO: 1478523 - DNA, 25 bp, Homo sapien
gacgcttgagagatttttgacccag

SEQ ID NO: 1478524 - DNA, 25 bp, Homo sapien
ggtcacccagcttgtataggaggaa

SEQ ID NO: 1478525 - DNA, 25 bp, Homo sapien
aattctcacgtgaccgaagatggcc

SEQ ID NO: 1478526 - DNA, 25 bp, Homo sapien
ttgaaaaacagggacgatgatagca

SEQ ID NO: 1478527 - DNA, 25 bp, Homo sapien
aaaacagggacgatgatagcacctc

SEQ ID NO: 1478528 - DNA, 25 bp, Homo sapien
agcaagataatccacgaggcttcca

SEQ ID NO: 1478529 - DNA, 25 bp, Homo sapien
gctgtggtgaggattcagcaagata

SEQ ID NO: 1478530 - DNA, 25 bp, Homo sapien
gaaaaagccccttgaaccaatctga

SEQ ID NO: 1478531 - DNA, 25 bp, Homo sapien
acaacagtcatgatgcgggccagga

SEQ ID NO: 1478532 - DNA, 25 bp, Homo sapien
taaaagctccagacgtgttctcggc

SEQ ID NO: 1478533 - DNA, 25 bp, Homo sapien
taaaatccaaaagctatggccaccg

SEQ ID NO: 1478534 - DNA, 25 bp, Homo sapien
tctgggatacagttcactatgggaa

SEQ ID NO: 1478535 - DNA, 25 bp, Homo sapien
cccaaacctgtttaactgcttagtg

SEQ ID NO: 1478536 - DNA, 25 bp, Homo sapien
aatttaattagcactggcgacctca

SEQ ID NO: 1478537 - DNA, 25 bp, Homo sapien
actgcttagtgtgaactctagttct

SEQ ID NO: 1478538 - DNA, 25 bp, Homo sapien
cttcattcttaggtcaatacagtaa

SEQ ID NO: 1478539 - DNA, 25 bp, Homo sapien
tggcatatgaatagtgatttctacc

SEQ ID NO: 1478540 - DNA, 25 bp, Homo sapien
aatagtgatttctaccaattgattc

SEQ ID NO: 1478541 - DNA, 25 bp, Homo sapien
ggtcaatacagtaaactggcatatg

SEQ ID NO: 1478542 - DNA, 25 bp, Homo sapien
tctccctttgacctgcttggcacac

SEQ ID NO: 1478543 - DNA, 25 bp, Homo sapien
ttcctgcgtgctctccctttgacct

SEQ ID NO: 1478544 - DNA, 25 bp, Homo sapien
tggctgtctttcctgcgtgctctcc

SEQ ID NO: 1478545 - DNA, 25 bp, Homo sapien
ctttcctgcgtgctctccctttgac

SEQ ID NO: 1478546 - DNA, 25 bp, Homo sapien
caaaatggcccatgtggttgacagt

SEQ ID NO: 1478547 - DNA, 25 bp, Homo sapien
cctgcttccaaaatggcccatgtgg

SEQ ID NO: 1478548 - DNA, 25 bp, Homo sapien
cttccaaaatggcccatgtggttga

SEQ ID NO: 1478549 - DNA, 25 bp, Homo sapien
tccaaaatggcccatgtggttgaca

SEQ ID NO: 1478550 - DNA, 25 bp, Homo sapien
gtgcatctcgaagcagggccgcagt

SEQ ID NO: 1478551 - DNA, 25 bp, Homo sapien
tgtgaatagaaacccaagacgtcgg

SEQ ID NO: 1478552 - DNA, 25 bp, Homo sapien
ctgcagggatgtgaatagaaaccca

SEQ ID NO: 1478553 - DNA, 25 bp, Homo sapien
aagacgtcgggctcggtgcatctcg

SEQ ID NO: 1478554 - DNA, 25 bp, Homo sapien
ttgcaggaaccgctgaaatccttac

SEQ ID NO: 1478555 - DNA, 25 bp, Homo sapien
tttgctttgcaggaaccgctgaaat

SEQ ID NO: 1478556 - DNA, 25 bp, Homo sapien
tgctgacagactgccctatggggtg

SEQ ID NO: 1478557 - DNA, 25 bp, Homo sapien
gccctatggggtgtaaggctattct

SEQ ID NO: 1478558 - DNA, 25 bp, Homo sapien
cacgcacatgccgtttgatccagag

SEQ ID NO: 1478559 - DNA, 25 bp, Homo sapien
caggaatgggatgcacgcacatgcc

SEQ ID NO: 1478560 - DNA, 25 bp, Homo sapien
cacatgccgtttgatccagagctct

SEQ ID NO: 1478561 - DNA, 25 bp, Homo sapien
gccgtttgatccagagctcttgcta

SEQ ID NO: 1478562 - DNA, 25 bp, Homo sapien
cagcaacccagagctagtgctatgc

SEQ ID NO: 1478563 - DNA, 25 bp, Homo sapien
tgcatgtgcgtctgattcacgagca

SEQ ID NO: 1478564 - DNA, 25 bp, Homo sapien
tgattcacgagcactttggcagcct

SEQ ID NO: 1478565 - DNA, 25 bp, Homo sapien
tagtgctatgccgtcaataccgggc

SEQ ID NO: 1478566 - DNA, 25 bp, Homo sapien
ggagaaagcctacacagttgatcct

SEQ ID NO: 1478567 - DNA, 25 bp, Homo sapien
gaactgcacggtccacttatgcatg

SEQ ID NO: 1478568 - DNA, 25 bp, Homo sapien
tcttgaagtcccgtctagagaagga

SEQ ID NO: 1478569 - DNA, 25 bp, Homo sapien
cagagggtccattctatcttgaagt

SEQ ID NO: 1478570 - DNA, 25 bp, Homo sapien
gaatccatctgacaatcccacgagg

SEQ ID NO: 1478571 - DNA, 25 bp, Homo sapien
gagctttgaacaactcggtattgca

SEQ ID NO: 1478572 - DNA, 25 bp, Homo sapien
gagcgctgtgttccctcaggcatct

SEQ ID NO: 1478573 - DNA, 25 bp, Homo sapien
ctccggttcggctggctgtgcttga

SEQ ID NO: 1478574 - DNA, 25 bp, Homo sapien
gtaggaagtactttaggtcaggcat

SEQ ID NO: 1478575 - DNA, 25 bp, Homo sapien
tgctcacctgctctaattcacactg

SEQ ID NO: 1478576 - DNA, 25 bp, Homo sapien
attcacactgtagtaggaagtactt

SEQ ID NO: 1478577 - DNA, 25 bp, Homo sapien
tccaatgctcacctgctctaattca

SEQ ID NO: 1478578 - DNA, 25 bp, Homo sapien
caggaatgtgttccgttttcctctt

SEQ ID NO: 1478579 - DNA, 25 bp, Homo sapien
aatgtgttccgttttcctcttggct

SEQ ID NO: 1478580 - DNA, 25 bp, Homo sapien
ggcttttgaaaatgaggctgcttct

SEQ ID NO: 1478581 - DNA, 25 bp, Homo sapien
aatgaggctgcttctgctatattat

SEQ ID NO: 1478582 - DNA, 25 bp, Homo sapien
tctgtggagcgggacaacagggaca

SEQ ID NO: 1478583 - DNA, 25 bp, Homo sapien
tgcctgtgggtttggaaagtcctcc

SEQ ID NO: 1478584 - DNA, 25 bp, Homo sapien
tcacaggctaggtcacaaggacagt

SEQ ID NO: 1478585 - DNA, 25 bp, Homo sapien
catccggacccctcatctgtgggta

SEQ ID NO: 1478586 - DNA, 25 bp, Homo sapien
accattcagtgtcctatgtttaaat

SEQ ID NO: 1478587 - DNA, 25 bp, Homo sapien
ctggcaacaggtcccgggcactcgg

SEQ ID NO: 1478588 - DNA, 25 bp, Homo sapien
tcctggttctggcaacaggtcccgg

SEQ ID NO: 1478589 - DNA, 25 bp, Homo sapien
cagtgtcctatgtttaaattgtgag

SEQ ID NO: 1478590 - DNA, 25 bp, Homo sapien
catagtatggtgacagggaaactgg

SEQ ID NO: 1478591 - DNA, 25 bp, Homo sapien
cccaagatgaagtagcagagactca

SEQ ID NO: 1478592 - DNA, 25 bp, Homo sapien
gagactcaacaggaagccatagtat

SEQ ID NO: 1478593 - DNA, 25 bp, Homo sapien
cagaaagtggttggcatcatggagc

SEQ ID NO: 1478594 - DNA, 25 bp, Homo sapien
tctctctgactcctagaacatggcg

SEQ ID NO: 1478595 - DNA, 25 bp, Homo sapien
cagaggcacgcagacttgcaactga

SEQ ID NO: 1478596 - DNA, 25 bp, Homo sapien
tgcaactgaagacttagagcagagt

SEQ ID NO: 1478597 - DNA, 25 bp, Homo sapien
gggcttgtaggagcctgaacagagc

SEQ ID NO: 1478598 - DNA, 25 bp, Homo sapien
catcttgttcacgaagagtttcaac

SEQ ID NO: 1478599 - DNA, 25 bp, Homo sapien
tcttgttcacgaagagtttcaacct

SEQ ID NO: 1478600 - DNA, 25 bp, Homo sapien
aattcatcttgttcacgaagagttt

SEQ ID NO: 1478601 - DNA, 25 bp, Homo sapien
ttcacgaagagtttcaacctaattc

SEQ ID NO: 1478602 - DNA, 25 bp, Homo sapien
ctccagctgctaccagccacacata

SEQ ID NO: 1478603 - DNA, 25 bp, Homo sapien
ctgctaccagccacacatataccat

SEQ ID NO: 1478604 - DNA, 25 bp, Homo sapien
ccagctgctaccagccacacatata

SEQ ID NO: 1478605 - DNA, 25 bp, Homo sapien
gctgctaccagccacacatatacca

SEQ ID NO: 1478606 - DNA, 25 bp, Homo sapien
taaagtcataaatggagtgaggtag

SEQ ID NO: 1478607 - DNA, 25 bp, Homo sapien
aagtcataaatggagtgaggtagac

SEQ ID NO: 1478608 - DNA, 25 bp, Homo sapien
tcataaatggagtgaggtagaccat

SEQ ID NO: 1478609 - DNA, 25 bp, Homo sapien
tttaaagtcataaatggagtgaggt

SEQ ID NO: 1478610 - DNA, 25 bp, Homo sapien
taggaattcacaagcctgaagcaag

SEQ ID NO: 1478611 - DNA, 25 bp, Homo sapien
tacctgagatgactgcgcaagtccc

SEQ ID NO: 1478612 - DNA, 25 bp, Homo sapien
tctcagcatagttccctctcaaagg

SEQ ID NO: 1478613 - DNA, 25 bp, Homo sapien
ctaggaattgcatttcaacccggaa

SEQ ID NO: 1478614 - DNA, 25 bp, Homo sapien
tgtgggtatccctgacaaattatgg

SEQ ID NO: 1478615 - DNA, 25 bp, Homo sapien
ccagtggcactgaaggagttaaaac

SEQ ID NO: 1478616 - DNA, 25 bp, Homo sapien
gctgtcagaggcctaaccagtggca

SEQ ID NO: 1478617 - DNA, 25 bp, Homo sapien
gggagcagatgacacacctaatgag

SEQ ID NO: 1478618 - DNA, 25 bp, Homo sapien
tgacagaggaaaggcgtgtcttctc

SEQ ID NO: 1478619 - DNA, 25 bp, Homo sapien
tctgtgacagaggaaaggcgtgtct

SEQ ID NO: 1478620 - DNA, 25 bp, Homo sapien
cttggtctgtgacagaggaaaggcg

SEQ ID NO: 1478621 - DNA, 25 bp, Homo sapien
aggaaaggcgtgtcttctcatactg

SEQ ID NO: 1478622 - DNA, 25 bp, Homo sapien
aggcaagcaaatgagggtgactcag

SEQ ID NO: 1478623 - DNA, 25 bp, Homo sapien
ggcaagcaaatgagggtgactcagg

SEQ ID NO: 1478624 - DNA, 25 bp, Homo sapien
gcaagcaaatgagggtgactcagga

SEQ ID NO: 1478625 - DNA, 25 bp, Homo sapien
gccagtcagactcgtgcagatctta

SEQ ID NO: 1478626 - DNA, 25 bp, Homo sapien
tgtgaggccacatgaaagacagtac

SEQ ID NO: 1478627 - DNA, 25 bp, Homo sapien
gatagacttatccaaaacggcagga

SEQ ID NO: 1478628 - DNA, 25 bp, Homo sapien
tgcattcacataagagagaccagtc

SEQ ID NO: 1478629 - DNA, 25 bp, Homo sapien
caagtcacagcctacatagaacggt

SEQ ID NO: 1478630 - DNA, 25 bp, Homo sapien
taaaaagatgaagtggcgctgcaga

SEQ ID NO: 1478631 - DNA, 25 bp, Homo sapien
tctaaaaaagcagcgcaagtcacag

SEQ ID NO: 1478632 - DNA, 25 bp, Homo sapien
gctgtcactgatatgcccaagggca

SEQ ID NO: 1478633 - DNA, 25 bp, Homo sapien
cacaagagggcatttttccccactg

SEQ ID NO: 1478634 - DNA, 25 bp, Homo sapien
tgggacaatagacctctccactagc

SEQ ID NO: 1478635 - DNA, 25 bp, Homo sapien
cactgcacaaaatgggtgtcctcca

SEQ ID NO: 1478636 - DNA, 25 bp, Homo sapien
caagggaagcagaacttgtgcgaag

SEQ ID NO: 1478637 - DNA, 25 bp, Homo sapien
ccttctttggttcatagaggacgga

SEQ ID NO: 1478638 - DNA, 25 bp, Homo sapien
ctggttgccagagaggagtccggga

SEQ ID NO: 1478639 - DNA, 25 bp, Homo sapien
cctcctggtagtggagtgaacctgg

SEQ ID NO: 1478640 - DNA, 25 bp, Homo sapien
gagagggcggactgttgctattcct

SEQ ID NO: 1478641 - DNA, 25 bp, Homo sapien
tggagagggcttccttttccttgct

SEQ ID NO: 1478642 - DNA, 25 bp, Homo sapien
ggcccgacttcaccttctggttctg

SEQ ID NO: 1478643 - DNA, 25 bp, Homo sapien
cattctgggccgcttcaggcggtgt

SEQ ID NO: 1478644 - DNA, 25 bp, Homo sapien
ctgggcctctccgttgatcttaggg

SEQ ID NO: 1478645 - DNA, 25 bp, Homo sapien
ttcaggtgcacatgcaacttaaaac

SEQ ID NO: 1478646 - DNA, 25 bp, Homo sapien
aaaaggtaacataagtggcggtgca

SEQ ID NO: 1478647 - DNA, 25 bp, Homo sapien
tcattctcttcctaacccgaaacaa

SEQ ID NO: 1478648 - DNA, 25 bp, Homo sapien
tactcatatacgagtttcaggtgca

SEQ ID NO: 1478649 - DNA, 25 bp, Homo sapien
tgcacaaaagtaccctcgtttgcac

SEQ ID NO: 1478650 - DNA, 25 bp, Homo sapien
taactgcctgtttgtacacatgcac

SEQ ID NO: 1478651 - DNA, 25 bp, Homo sapien
tgcactcaacatgtgactgctaatg

SEQ ID NO: 1478652 - DNA, 25 bp, Homo sapien
aatggagccactgaaaatgacacgc

SEQ ID NO: 1478653 - DNA, 25 bp, Homo sapien
ttggcctcgaaacccaacaacctgc

SEQ ID NO: 1478654 - DNA, 25 bp, Homo sapien
cagggccggctccttcttaaacttg

SEQ ID NO: 1478655 - DNA, 25 bp, Homo sapien
caggcggcggcggttgtttctcctt

SEQ ID NO: 1478656 - DNA, 25 bp, Homo sapien
ctctggcgattcagctcgggcggct

SEQ ID NO: 1478657 - DNA, 25 bp, Homo sapien
tgtcgcgcacggtcttgggcctgtt

SEQ ID NO: 1478658 - DNA, 25 bp, Homo sapien
aacgggtagcgctccaaggcctgcg

SEQ ID NO: 1478659 - DNA, 25 bp, Homo sapien
ctgccgaagtcagagccgaggcgcg

SEQ ID NO: 1478660 - DNA, 25 bp, Homo sapien
ttgagctgccgcgccgtctcgatga

SEQ ID NO: 1478661 - DNA, 25 bp, Homo sapien
caaaaggatgtccttggcggagagc

SEQ ID NO: 1478662 - DNA, 25 bp, Homo sapien
cgacgcggtcggcgccctcgtagtt

SEQ ID NO: 1478663 - DNA, 25 bp, Homo sapien
cagacgggttcggtgaagtcccaga

SEQ ID NO: 1478664 - DNA, 25 bp, Homo sapien
acgcagccgcggcagacgggttcgg

SEQ ID NO: 1478665 - DNA, 25 bp, Homo sapien
gaactcgacgcggtcggcgccctcg

SEQ ID NO: 1478666 - DNA, 25 bp, Homo sapien
tgcggggcaggtcacacaggtagca

SEQ ID NO: 1478667 - DNA, 25 bp, Homo sapien
ggggcaggtcacacaggtagcacga

SEQ ID NO: 1478668 - DNA, 25 bp, Homo sapien
catgcggggcaggtcacacaggtag

SEQ ID NO: 1478669 - DNA, 25 bp, Homo sapien
ggcatgcggggcaggtcacacaggt

SEQ ID NO: 1478670 - DNA, 25 bp, Homo sapien
gcggccgccaccgccaccgccgcgg

SEQ ID NO: 1478671 - DNA, 25 bp, Homo sapien
ccgccaccgccaccgccgcggccat

SEQ ID NO: 1478672 - DNA, 25 bp, Homo sapien
ctgccgccgggacgcggccgccacc

SEQ ID NO: 1478673 - DNA, 25 bp, Homo sapien
ggccgccaccgccaccgccgcggcc

SEQ ID NO: 1478674 - DNA, 25 bp, Homo sapien
aggagcccgcgacgccggaggagga

SEQ ID NO: 1478675 - DNA, 25 bp, Homo sapien
tccgaggagcccgcgacgccggagg

SEQ ID NO: 1478676 - DNA, 25 bp, Homo sapien
gtccgaggagcccgcgacgccggag

SEQ ID NO: 1478677 - DNA, 25 bp, Homo sapien
cgaggagcccgcgacgccggaggag

SEQ ID NO: 1478678 - DNA, 25 bp, Homo sapien
tctctcacagctcctggcgtcgccg

SEQ ID NO: 1478679 - DNA, 25 bp, Homo sapien
ctcacagctcctggcgtcgccgctc

SEQ ID NO: 1478680 - DNA, 25 bp, Homo sapien
agctcctggcgtcgccgctctccag

SEQ ID NO: 1478681 - DNA, 25 bp, Homo sapien
acagctcctggcgtcgccgctctcc

SEQ ID NO: 1478682 - DNA, 25 bp, Homo sapien
catagcatgaaatccgtcactggtg

SEQ ID NO: 1478683 - DNA, 25 bp, Homo sapien
cttgaaagctcaatgtcggacacat

SEQ ID NO: 1478684 - DNA, 25 bp, Homo sapien
gaatttaggtctagcgtggttcaca

SEQ ID NO: 1478685 - DNA, 25 bp, Homo sapien
tgtcttggaaaggacatacgccccg

SEQ ID NO: 1478686 - DNA, 25 bp, Homo sapien
caggttggaatactgcacctccaac

SEQ ID NO: 1478687 - DNA, 25 bp, Homo sapien
gcacctccaactctttgtgatctat

SEQ ID NO: 1478688 - DNA, 25 bp, Homo sapien
acctccaactctttgtgatctattt

SEQ ID NO: 1478689 - DNA, 25 bp, Homo sapien
ctgcacctccaactctttgtgatct

SEQ ID NO: 1478690 - DNA, 25 bp, Homo sapien
gaggtaaatagtcaagcttcagagc

SEQ ID NO: 1478691 - DNA, 25 bp, Homo sapien
tagggaaaccaacaagcgagaaaga

SEQ ID NO: 1478692 - DNA, 25 bp, Homo sapien
gcttcagagcagttgcacaatcgtt

SEQ ID NO: 1478693 - DNA, 25 bp, Homo sapien
tattgctaccctagacagcagatgg

SEQ ID NO: 1478694 - DNA, 25 bp, Homo sapien
ggcagcaactaagcctggatcacaa

SEQ ID NO: 1478695 - DNA, 25 bp, Homo sapien
gaggaactgaatcctaaattcaccc

SEQ ID NO: 1478696 - DNA, 25 bp, Homo sapien
aagggtttaccatggagaatgtgtc

SEQ ID NO: 1478697 - DNA, 25 bp, Homo sapien
caacagggcagcaactaagcctgga

SEQ ID NO: 1478698 - DNA, 25 bp, Homo sapien
acagccagcaccgtatcctcaggca

SEQ ID NO: 1478699 - DNA, 25 bp, Homo sapien
accgtatcctcaggcaccccatggg

SEQ ID NO: 1478700 - DNA, 25 bp, Homo sapien
accccatgggacagtacatacagaa

SEQ ID NO: 1478701 - DNA, 25 bp, Homo sapien
ctcaggcaccccatgggacagtaca

SEQ ID NO: 1478702 - DNA, 25 bp, Homo sapien
gggaagagtcaattcttcttggagc

SEQ ID NO: 1478703 - DNA, 25 bp, Homo sapien
ggagcacatgagatggtagcttgct

SEQ ID NO: 1478704 - DNA, 25 bp, Homo sapien
cacatgagatggtagcttgctgtgt

SEQ ID NO: 1478705 - DNA, 25 bp, Homo sapien
gagtcaattcttcttggagcacatg

SEQ ID NO: 1478706 - DNA, 25 bp, Homo sapien
ttttttagacaataggccaatgatt

SEQ ID NO: 1478707 - DNA, 25 bp, Homo sapien
ttctagccttgaaaccaactctctg

SEQ ID NO: 1478708 - DNA, 25 bp, Homo sapien
aatgattgtagggtttgttctagcc

SEQ ID NO: 1478709 - DNA, 25 bp, Homo sapien
tccacaaagggtgcatcaggatgca

SEQ ID NO: 1478710 - DNA, 25 bp, Homo sapien
tgtagtctgagctattaggtttgct

SEQ ID NO: 1478711 - DNA, 25 bp, Homo sapien
ctcctagttcacagagatagaacat

SEQ ID NO: 1478712 - DNA, 25 bp, Homo sapien
agagatagaacatcagcagcttgct

SEQ ID NO: 1478713 - DNA, 25 bp, Homo sapien
tagttcacagagatagaacatcagc

SEQ ID NO: 1478714 - DNA, 25 bp, Homo sapien
catggtgttctgtaagatgcctgga

SEQ ID NO: 1478715 - DNA, 25 bp, Homo sapien
tgcctacagattgagcaaaccatgg

SEQ ID NO: 1478716 - DNA, 25 bp, Homo sapien
ttcctgggcgagctgtggcagggtc

SEQ ID NO: 1478717 - DNA, 25 bp, Homo sapien
tgttctgagcaccaggacgctggct

SEQ ID NO: 1478718 - DNA, 25 bp, Homo sapien
gatgccggagcgattcaggaggtgg

SEQ ID NO: 1478719 - DNA, 25 bp, Homo sapien
agcagccctctgacgagtggacagg

SEQ ID NO: 1478720 - DNA, 25 bp, Homo sapien
aagagatgtggaccagacgtggact

SEQ ID NO: 1478721 - DNA, 25 bp, Homo sapien
tcgttaattgaggtggatgagtcca

SEQ ID NO: 1478722 - DNA, 25 bp, Homo sapien
gaacacagattcagcagggcatcat

SEQ ID NO: 1478723 - DNA, 25 bp, Homo sapien
cagtgggtccaagtcagagctgctc

SEQ ID NO: 1478724 - DNA, 25 bp, Homo sapien
taatagacacctctctggatggaca

SEQ ID NO: 1478725 - DNA, 25 bp, Homo sapien
taattaggttataggtgccgagcag

SEQ ID NO: 1478726 - DNA, 25 bp, Homo sapien
tacagagctctggggctcctcttct

SEQ ID NO: 1478727 - DNA, 25 bp, Homo sapien
ctggagcctacagagctctggggct

SEQ ID NO: 1478728 - DNA, 25 bp, Homo sapien
cctacagagctctggggctcctctt

SEQ ID NO: 1478729 - DNA, 25 bp, Homo sapien
agcctacagagctctggggctcctc

SEQ ID NO: 1478730 - DNA, 25 bp, Homo sapien
aaaacgacagagcagaggagggctg

SEQ ID NO: 1478731 - DNA, 25 bp, Homo sapien
gggcgccccttcggagcgttcgcat

SEQ ID NO: 1478732 - DNA, 25 bp, Homo sapien
aatgtttggatgaaaacgacagagc

SEQ ID NO: 1478733 - DNA, 25 bp, Homo sapien
ccggccacagatctaaatgtttgga

SEQ ID NO: 1478734 - DNA, 25 bp, Homo sapien
gaatgtagaatgacaatacctgctg

SEQ ID NO: 1478735 - DNA, 25 bp, Homo sapien
ccattgtgagaagatagcctggcct

SEQ ID NO: 1478736 - DNA, 25 bp, Homo sapien
ttgtaacctgttggcctctgtgcag

SEQ ID NO: 1478737 - DNA, 25 bp, Homo sapien
caaaaagctttgtaatgctcccacc

SEQ ID NO: 1478738 - DNA, 25 bp, Homo sapien
aagtgccgtcctgaagcttccatga

SEQ ID NO: 1478739 - DNA, 25 bp, Homo sapien
acagcaggccgcttggagagtattg

SEQ ID NO: 1478740 - DNA, 25 bp, Homo sapien
tgagtcctgttctagatgccaagaa

SEQ ID NO: 1478741 - DNA, 25 bp, Homo sapien
gatggccaagagtagggacctgtaa

SEQ ID NO: 1478742 - DNA, 25 bp, Homo sapien
cagtgactctgtcagtgctgaatga

SEQ ID NO: 1478743 - DNA, 25 bp, Homo sapien
gcagaaggctgattaaacccacata

SEQ ID NO: 1478744 - DNA, 25 bp, Homo sapien
gtagctaagtactgctcagagacag

SEQ ID NO: 1478745 - DNA, 25 bp, Homo sapien
acctggttccttttagcagaaggct

SEQ ID NO: 1478746 - DNA, 25 bp, Homo sapien
tctgcttgagggtatgtcttgtttt

SEQ ID NO: 1478747 - DNA, 25 bp, Homo sapien
atctgcttgagggtatgtcttgttt

SEQ ID NO: 1478748 - DNA, 25 bp, Homo sapien
ctagaagagagctatgctcataatt

SEQ ID NO: 1478749 - DNA, 25 bp, Homo sapien
cacagattattcctccgtttttcta

SEQ ID NO: 1478750 - DNA, 25 bp, Homo sapien
gacagccaggttctgacctgcctgt

SEQ ID NO: 1478751 - DNA, 25 bp, Homo sapien
gtgaagaggaagcagacaccttctt

SEQ ID NO: 1478752 - DNA, 25 bp, Homo sapien
aggtgaagaggaagcagacaccttc

SEQ ID NO: 1478753 - DNA, 25 bp, Homo sapien
agaaggtgaagaggaagcagacacc

SEQ ID NO: 1478754 - DNA, 25 bp, Homo sapien
gaaggtgaagaggaagcagacacct

SEQ ID NO: 1478755 - DNA, 25 bp, Homo sapien
gggtaggataatcgatcgctgctta

SEQ ID NO: 1478756 - DNA, 25 bp, Homo sapien
gaaattagacattgggccttcccag

SEQ ID NO: 1478757 - DNA, 25 bp, Homo sapien
cccatgtcagatacagcaaaatcag

SEQ ID NO: 1478758 - DNA, 25 bp, Homo sapien
tcccagcaggtcaagaaacccatgt

SEQ ID NO: 1478759 - DNA, 25 bp, Homo sapien
tgtggccaggggacagaggcgtgtg

SEQ ID NO: 1478760 - DNA, 25 bp, Homo sapien
tggccaggggacagaggcgtgtggc

SEQ ID NO: 1478761 - DNA, 25 bp, Homo sapien
ctgtggccaggggacagaggcgtgt

SEQ ID NO: 1478762 - DNA, 25 bp, Homo sapien
gccaggggacagaggcgtgtggcgt

SEQ ID NO: 1478763 - DNA, 25 bp, Homo sapien
tggatacacgagctctgcgacagga

SEQ ID NO: 1478764 - DNA, 25 bp, Homo sapien
cattaaccaaagcaggagctctggg

SEQ ID NO: 1478765 - DNA, 25 bp, Homo sapien
aaagatatttgcaaggccgtctggc

SEQ ID NO: 1478766 - DNA, 25 bp, Homo sapien
tcaatactgagaatgaccgcacagg

SEQ ID NO: 1478767 - DNA, 25 bp, Homo sapien
cacttcaggcagaggatgtagcgtt

SEQ ID NO: 1478768 - DNA, 25 bp, Homo sapien
tcacttcaggcagaggatgtagcgt

SEQ ID NO: 1478769 - DNA, 25 bp, Homo sapien
ctggggctttggtgatggtcctcct

SEQ ID NO: 1478770 - DNA, 25 bp, Homo sapien
gtcctggggctttggtgatggtcct

SEQ ID NO: 1478771 - DNA, 25 bp, Homo sapien
tcctggggctttggtgatggtcctc

SEQ ID NO: 1478772 - DNA, 25 bp, Homo sapien
gggctttggtgatggtcctcctcac

SEQ ID NO: 1478773 - DNA, 25 bp, Homo sapien
ggacaagggctccttttgctttgaa

SEQ ID NO: 1478774 - DNA, 25 bp, Homo sapien
cttttgctttgaagtgatgcccacg

SEQ ID NO: 1478775 - DNA, 25 bp, Homo sapien
ctcaacagtgatggacaagggctcc

SEQ ID NO: 1478776 - DNA, 25 bp, Homo sapien
ttgctttgaagtgatgcccacgtgc

SEQ ID NO: 1478777 - DNA, 25 bp, Homo sapien
aacaaagggacatgccgttggaatc

SEQ ID NO: 1478778 - DNA, 25 bp, Homo sapien
gtgacgacacggaacaaagggacat

SEQ ID NO: 1478779 - DNA, 25 bp, Homo sapien
cacgccagcggggacaacgtgacga

SEQ ID NO: 1478780 - DNA, 25 bp, Homo sapien
gacaacgtgacgacacggaacaaag

SEQ ID NO: 1478781 - DNA, 25 bp, Homo sapien
tgggtcattcccagtttctccgggc

SEQ ID NO: 1478782 - DNA, 25 bp, Homo sapien
gggtcattcccagtttctccgggca

SEQ ID NO: 1478783 - DNA, 25 bp, Homo sapien
cttctttgggtcattcccagtttct

SEQ ID NO: 1478784 - DNA, 25 bp, Homo sapien
ctttgggtcattcccagtttctccg

SEQ ID NO: 1478785 - DNA, 25 bp, Homo sapien
ggagtaaggtcacttcgtcgaatcc

SEQ ID NO: 1478786 - DNA, 25 bp, Homo sapien
gggagtaaggtcacttcgtcgaatc

SEQ ID NO: 1478787 - DNA, 25 bp, Homo sapien
caggctcgggcgcccgcctgcagac

SEQ ID NO: 1478788 - DNA, 25 bp, Homo sapien
gcaggctcgggcgcccgcctgcaga

SEQ ID NO: 1478789 - DNA, 25 bp, Homo sapien
ccgcaggctcgggcgcccgcctgca

SEQ ID NO: 1478790 - DNA, 25 bp, Homo sapien
cgcaggctcgggcgcccgcctgcag

SEQ ID NO: 1478791 - DNA, 25 bp, Homo sapien
gcccatttcaattgaaatgagatca

SEQ ID NO: 1478792 - DNA, 25 bp, Homo sapien
tggccttaatgagcccatttcaatt

SEQ ID NO: 1478793 - DNA, 25 bp, Homo sapien
gtcttgtcgtgcaaggccgtccaca

SEQ ID NO: 1478794 - DNA, 25 bp, Homo sapien
tcggacgccggccagcgtcttgtcg

SEQ ID NO: 1478795 - DNA, 25 bp, Homo sapien
tgaaaactagttcatgaatcagagc

SEQ ID NO: 1478796 - DNA, 25 bp, Homo sapien
tcatgaatctgaaaactagttcatg

SEQ ID NO: 1478797 - DNA, 25 bp, Homo sapien
ttgctggctcccgagtgattcatga

SEQ ID NO: 1478798 - DNA, 25 bp, Homo sapien
ggctcccgagtgattcatgaatctg

SEQ ID NO: 1478799 - DNA, 25 bp, Homo sapien
gcattgtggagtgcgtaatgtgaaa

SEQ ID NO: 1478800 - DNA, 25 bp, Homo sapien
gaaacggaaaatgtcatgatttcca

SEQ ID NO: 1478801 - DNA, 25 bp, Homo sapien
acgtgtccacggttttgagaaagct

SEQ ID NO: 1478802 - DNA, 25 bp, Homo sapien
catgatttccactgggaacgtgtcc

SEQ ID NO: 1478803 - DNA, 25 bp, Homo sapien
tcgtcgtagggttgcaggctgttcg

SEQ ID NO: 1478804 - DNA, 25 bp, Homo sapien
atggccaggccgtcgtcgtagggtt

SEQ ID NO: 1478805 - DNA, 25 bp, Homo sapien
caaggtgaacccagcgagcaggagc

SEQ ID NO: 1478806 - DNA, 25 bp, Homo sapien
gagccagtacgtggctgtggcccaa

SEQ ID NO: 1478807 - DNA, 25 bp, Homo sapien
acacctgtgctgaggacatggccga

SEQ ID NO: 1478808 - DNA, 25 bp, Homo sapien
gtgctgaggacatggccgaggagag

SEQ ID NO: 1478809 - DNA, 25 bp, Homo sapien
ctgtgctgaggacatggccgaggag

SEQ ID NO: 1478810 - DNA, 25 bp, Homo sapien
ggctgacacctgtgctgaggacatg

SEQ ID NO: 1478811 - DNA, 25 bp, Homo sapien
tctggcggggatgtctgggcctgcc

SEQ ID NO: 1478812 - DNA, 25 bp, Homo sapien
tggcttagcttgtcttcccaggtac

SEQ ID NO: 1478813 - DNA, 25 bp, Homo sapien
cccaggtactgcctggaaaagcagc

SEQ ID NO: 1478814 - DNA, 25 bp, Homo sapien
aaaagcagcctctggcggggatgtc

SEQ ID NO: 1478815 - DNA, 25 bp, Homo sapien
ccgactccctgggccttgttttcag

SEQ ID NO: 1478816 - DNA, 25 bp, Homo sapien
tccgactccctgggccttgttttca

SEQ ID NO: 1478817 - DNA, 25 bp, Homo sapien
tggaaatccgactccctgggccttg

SEQ ID NO: 1478818 - DNA, 25 bp, Homo sapien
tctgatgtctcaccgagccatccac

SEQ ID NO: 1478819 - DNA, 25 bp, Homo sapien
ctctgatgtctcaccgagccatcca

SEQ ID NO: 1478820 - DNA, 25 bp, Homo sapien
tgatgtctcaccgagccatccacca

SEQ ID NO: 1478821 - DNA, 25 bp, Homo sapien
gatgtctcaccgagccatccaccat

SEQ ID NO: 1478822 - DNA, 25 bp, Homo sapien
tccccaccctggctagtcccgactg

SEQ ID NO: 1478823 - DNA, 25 bp, Homo sapien
cctggctagtcccgactgccatgtt

SEQ ID NO: 1478824 - DNA, 25 bp, Homo sapien
tggctagtcccgactgccatgttcc

SEQ ID NO: 1478825 - DNA, 25 bp, Homo sapien
caccctggctagtcccgactgccat

SEQ ID NO: 1478826 - DNA, 25 bp, Homo sapien
ctaagaaggcgccaaggagctcgat

SEQ ID NO: 1478827 - DNA, 25 bp, Homo sapien
tcatccgttgggaacataacagccg

SEQ ID NO: 1478828 - DNA, 25 bp, Homo sapien
cttctccgccgcaaggagtgcagct

SEQ ID NO: 1478829 - DNA, 25 bp, Homo sapien
tatgcctctgcccagtggatgcggc

SEQ ID NO: 1478830 - DNA, 25 bp, Homo sapien
attttcatgtaaaaacgtgtgtggg

SEQ ID NO: 1478831 - DNA, 25 bp, Homo sapien
cattaatcttggaggctcacagccc

SEQ ID NO: 1478832 - DNA, 25 bp, Homo sapien
gagctccagcggcttatcaatcacc

SEQ ID NO: 1478833 - DNA, 25 bp, Homo sapien
tcatgtaaaaacgtgtgtgggtgag

SEQ ID NO: 1478834 - DNA, 25 bp, Homo sapien
agcaaaatgaccacaaaggcgaact

SEQ ID NO: 1478835 - DNA, 25 bp, Homo sapien
tcctcttgaagtcctctttgttcac

SEQ ID NO: 1478836 - DNA, 25 bp, Homo sapien
tgaagcaaaatgaccacaaaggcga

SEQ ID NO: 1478837 - DNA, 25 bp, Homo sapien
ttgaagtcctctttgttcacagcaa

SEQ ID NO: 1478838 - DNA, 25 bp, Homo sapien
cttgacagaggccttttgaaagcag

SEQ ID NO: 1478839 - DNA, 25 bp, Homo sapien
tctaaaaggatactagtaacagtcg

SEQ ID NO: 1478840 - DNA, 25 bp, Homo sapien
tcactctgcttagtccagctgggct

SEQ ID NO: 1478841 - DNA, 25 bp, Homo sapien
ggaacagaacccatcagtaaggaaa

SEQ ID NO: 1478842 - DNA, 25 bp, Homo sapien
tgcagacgatgagcttcatgaagtc

SEQ ID NO: 1478843 - DNA, 25 bp, Homo sapien
agacgatgagcttcatgaagtcaag

SEQ ID NO: 1478844 - DNA, 25 bp, Homo sapien
atgcagacgatgagcttcatgaagt

SEQ ID NO: 1478845 - DNA, 25 bp, Homo sapien
gcagacgatgagcttcatgaagtca

SEQ ID NO: 1478846 - DNA, 25 bp, Homo sapien
tcctgtcagtttaggttttagccag

SEQ ID NO: 1478847 - DNA, 25 bp, Homo sapien
tgtggaatcgagcaccatgttgaat

SEQ ID NO: 1478848 - DNA, 25 bp, Homo sapien
ctgtcagtttaggttttagccagtg

SEQ ID NO: 1478849 - DNA, 25 bp, Homo sapien
aatcgagcaccatgttgaatgtttg

SEQ ID NO: 1478850 - DNA, 25 bp, Homo sapien
acagaaaatatgctcccaagttcaa

SEQ ID NO: 1478851 - DNA, 25 bp, Homo sapien
tggagttactcgaagcaacagaaaa

SEQ ID NO: 1478852 - DNA, 25 bp, Homo sapien
attataagccagacaattactggag

SEQ ID NO: 1478853 - DNA, 25 bp, Homo sapien
agttcaataagcaaaagcaatagat

SEQ ID NO: 1478854 - DNA, 25 bp, Homo sapien
gggaaaagtcatcacatgggccatg

SEQ ID NO: 1478855 - DNA, 25 bp, Homo sapien
gaaagtcaagtctcgaatgccccag

SEQ ID NO: 1478856 - DNA, 25 bp, Homo sapien
tgcgtgtctgctggaaaccggtctc

SEQ ID NO: 1478857 - DNA, 25 bp, Homo sapien
gaaggcgcctctacacagacttgaa

SEQ ID NO: 1478858 - DNA, 25 bp, Homo sapien
cccaggttgggaggacttatgcaga

SEQ ID NO: 1478859 - DNA, 25 bp, Homo sapien
ttatgcagactgaaaggagacctca

SEQ ID NO: 1478860 - DNA, 25 bp, Homo sapien
ccaaagttaccctggagagcccgtg

SEQ ID NO: 1478861 - DNA, 25 bp, Homo sapien
catttgcgcgccatactgggcaggg

SEQ ID NO: 1478862 - DNA, 25 bp, Homo sapien
tgggccacttttggtcctaacaagc

SEQ ID NO: 1478863 - DNA, 25 bp, Homo sapien
ggaagcctctggatcaacgatatcc

SEQ ID NO: 1478864 - DNA, 25 bp, Homo sapien
caagaacagggcaacggctaaaaga

SEQ ID NO: 1478865 - DNA, 25 bp, Homo sapien
tggtcctaacaagcagttcaccaag

SEQ ID NO: 1478866 - DNA, 25 bp, Homo sapien
cataggtgagaagcacgcagtggat

SEQ ID NO: 1478867 - DNA, 25 bp, Homo sapien
cagggagaacagtcataggtgagaa

SEQ ID NO: 1478868 - DNA, 25 bp, Homo sapien
gatgtagatctgaaatactcggcaa

SEQ ID NO: 1478869 - DNA, 25 bp, Homo sapien
ccagagagctcaggactgttcagca

SEQ ID NO: 1478870 - DNA, 25 bp, Homo sapien
gcaaagaagacggacacatcaaaga

SEQ ID NO: 1478871 - DNA, 25 bp, Homo sapien
ttaggcaactaagtgtatgcagaag

SEQ ID NO: 1478872 - DNA, 25 bp, Homo sapien
aaagaagacggacacatcaaagagg

SEQ ID NO: 1478873 - DNA, 25 bp, Homo sapien
caaagaagacggacacatcaaagag

SEQ ID NO: 1478874 - DNA, 25 bp, Homo sapien
atgatgcacgctgtggacccgagca

SEQ ID NO: 1478875 - DNA, 25 bp, Homo sapien
tcagatgatgcacgctgtggacccg

SEQ ID NO: 1478876 - DNA, 25 bp, Homo sapien
gcacgctgtggacccgagcaccgag

SEQ ID NO: 1478877 - DNA, 25 bp, Homo sapien
atgcacgctgtggacccgagcaccg

SEQ ID NO: 1478878 - DNA, 25 bp, Homo sapien
tgcataccctctccgaggagcagga

SEQ ID NO: 1478879 - DNA, 25 bp, Homo sapien
acattctgtgcataccctctccgag

SEQ ID NO: 1478880 - DNA, 25 bp, Homo sapien
tcgaaaaccaccgacggtgagtcac

SEQ ID NO: 1478881 - DNA, 25 bp, Homo sapien
tatgacagacacatcgaaaaccacc

SEQ ID NO: 1478882 - DNA, 25 bp, Homo sapien
tgccacaagatgtcctcgggcggct

SEQ ID NO: 1478883 - DNA, 25 bp, Homo sapien
tcactggggaccgagccttgtggct

SEQ ID NO: 1478884 - DNA, 25 bp, Homo sapien
caccaacaacaatcggagcctggca

SEQ ID NO: 1478885 - DNA, 25 bp, Homo sapien
gggcgaacagatggtgccacaagat

SEQ ID NO: 1478886 - DNA, 25 bp, Homo sapien
tcctgtgagtggagaggatcttctt

SEQ ID NO: 1478887 - DNA, 25 bp, Homo sapien
gtaacagtacaagcccagtgacagc

SEQ ID NO: 1478888 - DNA, 25 bp, Homo sapien
tggaaaccatcttgctgctgtttcc

SEQ ID NO: 1478889 - DNA, 25 bp, Homo sapien
tgtaacagtacaagcccagtgacag

SEQ ID NO: 1478890 - DNA, 25 bp, Homo sapien
attcagttattttcacgaggacagc

SEQ ID NO: 1478891 - DNA, 25 bp, Homo sapien
cactcgggtagattcagttattttc

SEQ ID NO: 1478892 - DNA, 25 bp, Homo sapien
cagttattttcacgaggacagcctc

SEQ ID NO: 1478893 - DNA, 25 bp, Homo sapien
cacaggccacacactcgggtagatt

SEQ ID NO: 1478894 - DNA, 25 bp, Homo sapien
ccgaaatgtgggctgtctttggaaa

SEQ ID NO: 1478895 - DNA, 25 bp, Homo sapien
ccccgaaatgtgggctgtctttgga

SEQ ID NO: 1478896 - DNA, 25 bp, Homo sapien
agagtagaacactccgcgtggggct

SEQ ID NO: 1478897 - DNA, 25 bp, Homo sapien
caatcccacatttgggggtgcagga

SEQ ID NO: 1478898 - DNA, 25 bp, Homo sapien
gtaagggctgagacaaccccaagat

SEQ ID NO: 1478899 - DNA, 25 bp, Homo sapien
aaggatgaggtatggtaagggctga

SEQ ID NO: 1478900 - DNA, 25 bp, Homo sapien
aggatgaggtatggtaagggctgag

SEQ ID NO: 1478901 - DNA, 25 bp, Homo sapien
taagggctgagacaaccccaagata

SEQ ID NO: 1478902 - DNA, 25 bp, Homo sapien
ttcctatacccctgagatggctcac

SEQ ID NO: 1478903 - DNA, 25 bp, Homo sapien
ggctgaaatctgaagacaatcaggt

SEQ ID NO: 1478904 - DNA, 25 bp, Homo sapien
gctgaaatctgaagacaatcaggtc

SEQ ID NO: 1478905 - DNA, 25 bp, Homo sapien
ctgaaatctgaagacaatcaggtct

SEQ ID NO: 1478906 - DNA, 25 bp, Homo sapien
tgaaatctgaagacaatcaggtctg

SEQ ID NO: 1478907 - DNA, 25 bp, Homo sapien
cacgttttctctagaggcggcatac

SEQ ID NO: 1478908 - DNA, 25 bp, Homo sapien
tggccagcgagacaccttgcatgtg

SEQ ID NO: 1478909 - DNA, 25 bp, Homo sapien
caaccctttgcatgaatcggaagac

SEQ ID NO: 1478910 - DNA, 25 bp, Homo sapien
ggcatacacatctggaacgcgtctc

SEQ ID NO: 1478911 - DNA, 25 bp, Homo sapien
tccagagttcttgatcatgtcgtgg

SEQ ID NO: 1478912 - DNA, 25 bp, Homo sapien
ccagagttcttgatcatgtcgtggg

SEQ ID NO: 1478913 - DNA, 25 bp, Homo sapien
cagagttcttgatcatgtcgtgggg

SEQ ID NO: 1478914 - DNA, 25 bp, Homo sapien
tttgggtttgacttgccagtgagca

SEQ ID NO: 1478915 - DNA, 25 bp, Homo sapien
ggcttccgtggtgtagctggcccat

SEQ ID NO: 1478916 - DNA, 25 bp, Homo sapien
cagtgggcccactgcatttcccaaa

SEQ ID NO: 1478917 - DNA, 25 bp, Homo sapien
tttggctgggtgtagggcttccgtg

SEQ ID NO: 1478918 - DNA, 25 bp, Homo sapien
ctcaattcgttgttctgtaaaatga

SEQ ID NO: 1478919 - DNA, 25 bp, Homo sapien
tcagtagtgccaacctattgccttg

SEQ ID NO: 1478920 - DNA, 25 bp, Homo sapien
ggccacaatgatgctaatgatgatg

SEQ ID NO: 1478921 - DNA, 25 bp, Homo sapien
atgttatttgtctcactggagcagc

SEQ ID NO: 1478922 - DNA, 25 bp, Homo sapien
ggcagtgttgatgctggatatgtta

SEQ ID NO: 1478923 - DNA, 25 bp, Homo sapien
gatgctggatatgttatttgtctca

SEQ ID NO: 1478924 - DNA, 25 bp, Homo sapien
tattgacggtatctcagaagctggg

SEQ ID NO: 1478925 - DNA, 25 bp, Homo sapien
ctgggcattcacagacttcgggtct

SEQ ID NO: 1478926 - DNA, 25 bp, Homo sapien
tccatccatgcagtcaacagtattg

SEQ ID NO: 1478927 - DNA, 25 bp, Homo sapien
gggtctcccctcacggagtccattg

SEQ ID NO: 1478928 - DNA, 25 bp, Homo sapien
ttcacccaaaggatgtgggagggcc

SEQ ID NO: 1478929 - DNA, 25 bp, Homo sapien
cctctccgttgccatttctcctggg

SEQ ID NO: 1478930 - DNA, 25 bp, Homo sapien
tttccctcaaatgggtgctcctgaa

SEQ ID NO: 1478931 - DNA, 25 bp, Homo sapien
cacccaaaggatgtgggagggcctt

SEQ ID NO: 1478932 - DNA, 25 bp, Homo sapien
tttcaagcagctttgaagtacggtt

SEQ ID NO: 1478933 - DNA, 25 bp, Homo sapien
gcagctttgaagtacggtttaccat

SEQ ID NO: 1478934 - DNA, 25 bp, Homo sapien
agcagctttgaagtacggtttacca

SEQ ID NO: 1478935 - DNA, 25 bp, Homo sapien
caagcagctttgaagtacggtttac

SEQ ID NO: 1478936 - DNA, 25 bp, Homo sapien
cctgggtgaccctaagaagctgtcc

SEQ ID NO: 1478937 - DNA, 25 bp, Homo sapien
ctcctgggtgaccctaagaagctgt

SEQ ID NO: 1478938 - DNA, 25 bp, Homo sapien
ctgggtgaccctaagaagctgtccc

SEQ ID NO: 1478939 - DNA, 25 bp, Homo sapien
tcctgggtgaccctaagaagctgtc

SEQ ID NO: 1478940 - DNA, 25 bp, Homo sapien
tccatgggacgttagcaaagtgcag

SEQ ID NO: 1478941 - DNA, 25 bp, Homo sapien
tgtcgagtcctaaagagaaccttgg

SEQ ID NO: 1478942 - DNA, 25 bp, Homo sapien
caaagtgcagagctcctagcagtgg

SEQ ID NO: 1478943 - DNA, 25 bp, Homo sapien
gcatccgtgccccacatgctgtggt

SEQ ID NO: 1478944 - DNA, 25 bp, Homo sapien
catccaagctggctaagaaccctgg

SEQ ID NO: 1478945 - DNA, 25 bp, Homo sapien
caatgtgatgtgatagtggcttgcc

SEQ ID NO: 1478946 - DNA, 25 bp, Homo sapien
gtggcttgccaaccgatattgttga

SEQ ID NO: 1478947 - DNA, 25 bp, Homo sapien
catcatggttacagtgccgggcagt

SEQ ID NO: 1478948 - DNA, 25 bp, Homo sapien
ttcaaatagagggacatcgtcgttc

SEQ ID NO: 1478949 - DNA, 25 bp, Homo sapien
taatcaaagtttgacgtgtatggga

SEQ ID NO: 1478950 - DNA, 25 bp, Homo sapien
taggtgtggaagaaaggtcttttca

SEQ ID NO: 1478951 - DNA, 25 bp, Homo sapien
ctctgtagttaagggacctgattcc

SEQ ID NO: 1478952 - DNA, 25 bp, Homo sapien
ctccctgaggccattggcggtgttc

SEQ ID NO: 1478953 - DNA, 25 bp, Homo sapien
tggcggtgttcgtggcatccttctt

SEQ ID NO: 1478954 - DNA, 25 bp, Homo sapien
gccattggcggtgttcgtggcatcc

SEQ ID NO: 1478955 - DNA, 25 bp, Homo sapien
cctgaggccattggcggtgttcgtg

SEQ ID NO: 1478956 - DNA, 25 bp, Homo sapien
tgttcatggcaataagccgcccaga

SEQ ID NO: 1478957 - DNA, 25 bp, Homo sapien
cacagggcggatctcaaacataaca

SEQ ID NO: 1478958 - DNA, 25 bp, Homo sapien
gcgctttgatgagtgtctggcccca

SEQ ID NO: 1478959 - DNA, 25 bp, Homo sapien
tctgatgggataggaggtgaacccc

SEQ ID NO: 1478960 - DNA, 25 bp, Homo sapien
gggttctgtcccacttgtgagctgc

SEQ ID NO: 1478961 - DNA, 25 bp, Homo sapien
ggttgtgctattacggatctcagag

SEQ ID NO: 1478962 - DNA, 25 bp, Homo sapien
catgacagcgtgttgcagtcttcag

SEQ ID NO: 1478963 - DNA, 25 bp, Homo sapien
ggagcagcctcataagcactataat

SEQ ID NO: 1478964 - DNA, 25 bp, Homo sapien
ggaaactcaacatcaaaagaccgga

SEQ ID NO: 1478965 - DNA, 25 bp, Homo sapien
ccagtctggatatcaagggcattcc

SEQ ID NO: 1478966 - DNA, 25 bp, Homo sapien
ccttgcattattcggaaccagcgag

SEQ ID NO: 1478967 - DNA, 25 bp, Homo sapien
cagcgagtatgtatggtgcaggcaa

SEQ ID NO: 1478968 - DNA, 25 bp, Homo sapien
gatatctgaatattggtacaaatca

SEQ ID NO: 1478969 - DNA, 25 bp, Homo sapien
ctgaatattggtacaaatcagacag

SEQ ID NO: 1478970 - DNA, 25 bp, Homo sapien
agtgatatctgaatattggtacaaa

SEQ ID NO: 1478971 - DNA, 25 bp, Homo sapien
catcagaagtatcagtgatatctga

SEQ ID NO: 1478972 - DNA, 25 bp, Homo sapien
caatcggttggagaggaccagagct

SEQ ID NO: 1478973 - DNA, 25 bp, Homo sapien
aagacactgctgagtaactggtacg

SEQ ID NO: 1478974 - DNA, 25 bp, Homo sapien
tgcagagccttccagcctgaagctg

SEQ ID NO: 1478975 - DNA, 25 bp, Homo sapien
ccccattgtagttcctgagagaaat

SEQ ID NO: 1478976 - DNA, 25 bp, Homo sapien
aaattgcccaagtacgacctagcct

SEQ ID NO: 1478977 - DNA, 25 bp, Homo sapien
cactgcattcctggttcgggctcca

SEQ ID NO: 1478978 - DNA, 25 bp, Homo sapien
cccacgattgggatctctggtctaa

SEQ ID NO: 1478979 - DNA, 25 bp, Homo sapien
cttttaggagcatgggaggcccaca

SEQ ID NO: 1478980 - DNA, 25 bp, Homo sapien
atctttttgataagggagttggagg

SEQ ID NO: 1478981 - DNA, 25 bp, Homo sapien
accatgccccgtatggtgggattac

SEQ ID NO: 1478982 - DNA, 25 bp, Homo sapien
catgccccgtatggtgggattacag

SEQ ID NO: 1478983 - DNA, 25 bp, Homo sapien
ccaccatgccccgtatggtgggatt

SEQ ID NO: 1478984 - DNA, 25 bp, Homo sapien
gggagtgcagggagccctcggctaa

SEQ ID NO: 1478985 - DNA, 25 bp, Homo sapien
agccctcggctaaggtcagcagcca

SEQ ID NO: 1478986 - DNA, 25 bp, Homo sapien
gggtgggcaccgactggatgaggga

SEQ ID NO: 1478987 - DNA, 25 bp, Homo sapien
caccgactggatgagggatagcagg

SEQ ID NO: 1478988 - DNA, 25 bp, Homo sapien
gcaagaacatcttgcatgatgtatc

SEQ ID NO: 1478989 - DNA, 25 bp, Homo sapien
aacatcttgcatgatgtatctgttc

SEQ ID NO: 1478990 - DNA, 25 bp, Homo sapien
cttgcatgatgtatctgttcttcat

SEQ ID NO: 1478991 - DNA, 25 bp, Homo sapien
atgcaagaacatcttgcatgatgta

SEQ ID NO: 1478992 - DNA, 25 bp, Homo sapien
ctgagaacacctggcgaatctcctc

SEQ ID NO: 1478993 - DNA, 25 bp, Homo sapien
gcctttcctcaatacagcaaaagcc

SEQ ID NO: 1478994 - DNA, 25 bp, Homo sapien
ggtgaaaagcttgcctttcctcaat

SEQ ID NO: 1478995 - DNA, 25 bp, Homo sapien
atctcctccatggtgaaaagcttgc

SEQ ID NO: 1478996 - DNA, 25 bp, Homo sapien
tgtccagcaccaggacggtggccac

SEQ ID NO: 1478997 - DNA, 25 bp, Homo sapien
gcaccaggacggtggccacgtacat

SEQ ID NO: 1478998 - DNA, 25 bp, Homo sapien
agcaccaggacggtggccacgtaca

SEQ ID NO: 1478999 - DNA, 25 bp, Homo sapien
tccagcaccaggacggtggccacgt

SEQ ID NO: 1479000 - DNA, 25 bp, Homo sapien
ggaaaagctgaagctgatcatcctc

SEQ ID NO: 1479001 - DNA, 25 bp, Homo sapien
aggaaaagctgaagctgatcatcct

SEQ ID NO: 1479002 - DNA, 25 bp, Homo sapien
ggcctccgatctcctcctgcccatt

SEQ ID NO: 1479003 - DNA, 25 bp, Homo sapien
cacaggaccggggggcctccgatct

SEQ ID NO: 1479004 - DNA, 25 bp, Homo sapien
cttggtgtgagaacacaggaccggg

SEQ ID NO: 1479005 - DNA, 25 bp, Homo sapien
ctccttggtgtgagaacacaggacc

SEQ ID NO: 1479006 - DNA, 25 bp, Homo sapien
caagtgctggatcgggtgtgggtgc

SEQ ID NO: 1479007 - DNA, 25 bp, Homo sapien
agtccaagtgctggatcgggtgtgg

SEQ ID NO: 1479008 - DNA, 25 bp, Homo sapien
ctggcttccatgcatcctcgtcttc

SEQ ID NO: 1479009 - DNA, 25 bp, Homo sapien
tgctggatcgggtgtgggtgcagct

SEQ ID NO: 1479010 - DNA, 25 bp, Homo sapien
tactgaacaagtgttatttaatggg

SEQ ID NO: 1479011 - DNA, 25 bp, Homo sapien
ctttgtactgaacaagtgttattta

SEQ ID NO: 1479012 - DNA, 25 bp, Homo sapien
gtgattcccatcatgctgtacttcc

SEQ ID NO: 1479013 - DNA, 25 bp, Homo sapien
ttggaagcggtgtgtgattcccatc

SEQ ID NO: 1479014 - DNA, 25 bp, Homo sapien
ctgggcagctctgcctcctctttcc

SEQ ID NO: 1479015 - DNA, 25 bp, Homo sapien
ggcagctctgcctcctctttcctca

SEQ ID NO: 1479016 - DNA, 25 bp, Homo sapien
gggcagctctgcctcctctttcctc

SEQ ID NO: 1479017 - DNA, 25 bp, Homo sapien
gcagctctgcctcctctttcctcac

SEQ ID NO: 1479018 - DNA, 25 bp, Homo sapien
cttcatgctccattggtctcgggca

SEQ ID NO: 1479019 - DNA, 25 bp, Homo sapien
aggcatcactcaggacgcacactgc

SEQ ID NO: 1479020 - DNA, 25 bp, Homo sapien
tttacccgggacgtagcctgagaga

SEQ ID NO: 1479021 - DNA, 25 bp, Homo sapien
gaattccccgaacagagtccttcgc

SEQ ID NO: 1479022 - DNA, 25 bp, Homo sapien
ctgttggaggtgtgttgctgcccat

SEQ ID NO: 1479023 - DNA, 25 bp, Homo sapien
gaggtgatgatgctgcccacgcttt

SEQ ID NO: 1479024 - DNA, 25 bp, Homo sapien
ggactttcccatcatgcccatgctg

SEQ ID NO: 1479025 - DNA, 25 bp, Homo sapien
ggtgatgatgctgcccacgctttcc

SEQ ID NO: 1479026 - DNA, 25 bp, Homo sapien
gttggaagtgacggtgctgcccaga

SEQ ID NO: 1479027 - DNA, 25 bp, Homo sapien
gcccagagttttctctcgccaaccc

SEQ ID NO: 1479028 - DNA, 25 bp, Homo sapien
ctgttggaagtgacggtgctgccca

SEQ ID NO: 1479029 - DNA, 25 bp, Homo sapien
caccttttccctgagagggtgcctc

SEQ ID NO: 1479030 - DNA, 25 bp, Homo sapien
tctcaagcccagaaacgcaactgct

SEQ ID NO: 1479031 - DNA, 25 bp, Homo sapien
gatttctgctggctgtcgggagctc

SEQ ID NO: 1479032 - DNA, 25 bp, Homo sapien
tccacgatggcagaaatccctggtg

SEQ ID NO: 1479033 - DNA, 25 bp, Homo sapien
ggagaatctccactcaggtgcgtca

SEQ ID NO: 1479034 - DNA, 25 bp, Homo sapien
tgtatgaggcacaatctcccggaga

SEQ ID NO: 1479035 - DNA, 25 bp, Homo sapien
gaaagctgaggcattagagcacatg

SEQ ID NO: 1479036 - DNA, 25 bp, Homo sapien
ggattgccgaataaactctactgag

SEQ ID NO: 1479037 - DNA, 25 bp, Homo sapien
gctataggtcaggaaaaggattgcc

SEQ ID NO: 1479038 - DNA, 25 bp, Homo sapien
tggacttttgtgaaccgcagcatgg

SEQ ID NO: 1479039 - DNA, 25 bp, Homo sapien
aaaaatcataagctgcatgcatagc

SEQ ID NO: 1479040 - DNA, 25 bp, Homo sapien
tttgtgaaccgcagcatggccggga

SEQ ID NO: 1479041 - DNA, 25 bp, Homo sapien
aagctgcatgcatagcattagtttg

SEQ ID NO: 1479042 - DNA, 25 bp, Homo sapien
cacataaataacagggacaggccgg

SEQ ID NO: 1479043 - DNA, 25 bp, Homo sapien
ggtggactccacgttagacatttcc

SEQ ID NO: 1479044 - DNA, 25 bp, Homo sapien
cacacgcatctagcactttggccaa

SEQ ID NO: 1479045 - DNA, 25 bp, Homo sapien
tcttcttgaaggtggagcctctctt

SEQ ID NO: 1479046 - DNA, 25 bp, Homo sapien
tgcatttaatgaggaagtgctgtca

SEQ ID NO: 1479047 - DNA, 25 bp, Homo sapien
ctctgcatttaatgaggaagtgctg

SEQ ID NO: 1479048 - DNA, 25 bp, Homo sapien
agcagaaaggagaggaagcttcacc

SEQ ID NO: 1479049 - DNA, 25 bp, Homo sapien
agcttcaccccgaccatccgcagga

SEQ ID NO: 1479050 - DNA, 25 bp, Homo sapien
tacctcatacaggtgacgtcctgga

SEQ ID NO: 1479051 - DNA, 25 bp, Homo sapien
gtgtgtcatcacactgtgtacctca

SEQ ID NO: 1479052 - DNA, 25 bp, Homo sapien
cagagtgtgtcatcacactgtgtac

SEQ ID NO: 1479053 - DNA, 25 bp, Homo sapien
tcacactgtgtacctcatacaggtg

SEQ ID NO: 1479054 - DNA, 25 bp, Homo sapien
tgtatgctatgttccacaccccagg

SEQ ID NO: 1479055 - DNA, 25 bp, Homo sapien
cgagccctctaacaaccttacaagg

SEQ ID NO: 1479056 - DNA, 25 bp, Homo sapien
tttatgacccacaattaaaatgatt

SEQ ID NO: 1479057 - DNA, 25 bp, Homo sapien
taaataaccctgatagcttgcccca

SEQ ID NO: 1479058 - DNA, 25 bp, Homo sapien
ttatttcataagtacaaactcatac

SEQ ID NO: 1479059 - DNA, 25 bp, Homo sapien
caatctgattcctcgtttcttttct

SEQ ID NO: 1479060 - DNA, 25 bp, Homo sapien
ccaatctgattcctcgtttcttttc

SEQ ID NO: 1479061 - DNA, 25 bp, Homo sapien
tcagcgcatgctgcttaagaggaaa

SEQ ID NO: 1479062 - DNA, 25 bp, Homo sapien
catggtagtgcatggtgaatccaca

SEQ ID NO: 1479063 - DNA, 25 bp, Homo sapien
tgcccatatataggctcagtgcaca

SEQ ID NO: 1479064 - DNA, 25 bp, Homo sapien
agtgcacaggtacgcacagtgctca

SEQ ID NO: 1479065 - DNA, 25 bp, Homo sapien
tggaaagatctcagcgtgttttttt

SEQ ID NO: 1479066 - DNA, 25 bp, Homo sapien
atggaaagatctcagcgtgtttttt

SEQ ID NO: 1479067 - DNA, 25 bp, Homo sapien
cagatgaatgaaacatagacccaca

SEQ ID NO: 1479068 - DNA, 25 bp, Homo sapien
ctgcttgttataaatccagcctgaa

SEQ ID NO: 1479069 - DNA, 25 bp, Homo sapien
tgcttgttataaatccagcctgaaa

SEQ ID NO: 1479070 - DNA, 25 bp, Homo sapien
tctgcttgttataaatccagcctga

SEQ ID NO: 1479071 - DNA, 25 bp, Homo sapien
tcagggtaaccgtcaggcctgcggt

SEQ ID NO: 1479072 - DNA, 25 bp, Homo sapien
catgttgctttagagggttttcaaa

SEQ ID NO: 1479073 - DNA, 25 bp, Homo sapien
gcgtcagcggccattatatcaataa

SEQ ID NO: 1479074 - DNA, 25 bp, Homo sapien
gctgtttcagaacccggtcagggta

SEQ ID NO: 1479075 - DNA, 25 bp, Homo sapien
cagaaacagttttgcggtcacagca

SEQ ID NO: 1479076 - DNA, 25 bp, Homo sapien
cagagccaggctatgtttcctgcag

SEQ ID NO: 1479077 - DNA, 25 bp, Homo sapien
ggtcacagcagtattccttcacaga

SEQ ID NO: 1479078 - DNA, 25 bp, Homo sapien
caggaaacatatttatcctaagatg

SEQ ID NO: 1479079 - DNA, 25 bp, Homo sapien
agcctgggtgacagagcaagacgcc

SEQ ID NO: 1479080 - DNA, 25 bp, Homo sapien
ccagcctgggtgacagagcaagacg

SEQ ID NO: 1479081 - DNA, 25 bp, Homo sapien
aattgcttgaaccagaagggcagag

SEQ ID NO: 1479082 - DNA, 25 bp, Homo sapien
cctgggtgacagagcaagacgccat

SEQ ID NO: 1479083 - DNA, 25 bp, Homo sapien
ttgaagaatcgcctttagccttcga

SEQ ID NO: 1479084 - DNA, 25 bp, Homo sapien
ttgtgttgaagaatcgcctttagcc

SEQ ID NO: 1479085 - DNA, 25 bp, Homo sapien
gaagaatcgcctttagccttcgaaa

SEQ ID NO: 1479086 - DNA, 25 bp, Homo sapien
gtgttgaagaatcgcctttagcctt

SEQ ID NO: 1479087 - DNA, 25 bp, Homo sapien
gcgggaccacgtgacagcgccagca

SEQ ID NO: 1479088 - DNA, 25 bp, Homo sapien
ctttgcaagcagctggatcaattta

SEQ ID NO: 1479089 - DNA, 25 bp, Homo sapien
aaggcgacgacctctcgaggaaccg

SEQ ID NO: 1479090 - DNA, 25 bp, Homo sapien
ggatcaatttactcgagccacagcg

SEQ ID NO: 1479091 - DNA, 25 bp, Homo sapien
aaatcagcttctgcatgggtagagg

SEQ ID NO: 1479092 - DNA, 25 bp, Homo sapien
tgacttgaacaaggagaaggagcct

SEQ ID NO: 1479093 - DNA, 25 bp, Homo sapien
gatagagctaacaagcccaaagtga

SEQ ID NO: 1479094 - DNA, 25 bp, Homo sapien
ccaggccactcttgttgagaagcca

SEQ ID NO: 1479095 - DNA, 25 bp, Homo sapien
gacctacctgagaaggcgtctgcgc

SEQ ID NO: 1479096 - DNA, 25 bp, Homo sapien
tacccttgagtgataggagcctgca

SEQ ID NO: 1479097 - DNA, 25 bp, Homo sapien
gcttaggatattcaggaggcactca

SEQ ID NO: 1479098 - DNA, 25 bp, Homo sapien
taaaacgcagctaacctcaggagta

SEQ ID NO: 1479099 - DNA, 25 bp, Homo sapien
tgtagcagttttgcagagggcttcc

SEQ ID NO: 1479100 - DNA, 25 bp, Homo sapien
gaagaacccctgtccaaggtgatgg

SEQ ID NO: 1479101 - DNA, 25 bp, Homo sapien
ggcacactagtgacagatccttgga

SEQ ID NO: 1479102 - DNA, 25 bp, Homo sapien
ggtggagcccctgagaactatgctg

SEQ ID NO: 1479103 - DNA, 25 bp, Homo sapien
attacttcacagtccaggaggacag

SEQ ID NO: 1479104 - DNA, 25 bp, Homo sapien
tccagaggctctagcggagctctct

SEQ ID NO: 1479105 - DNA, 25 bp, Homo sapien
ttattacttcacagtccaggaggac

SEQ ID NO: 1479106 - DNA, 25 bp, Homo sapien
aggctctagcggagctctctgtggc

SEQ ID NO: 1479107 - DNA, 25 bp, Homo sapien
gtgttgtcaccaatgggattcccca

SEQ ID NO: 1479108 - DNA, 25 bp, Homo sapien
gttgccgcgtcagctcaaaaggatg

SEQ ID NO: 1479109 - DNA, 25 bp, Homo sapien
cagagatgctgtcagacgcagagct

SEQ ID NO: 1479110 - DNA, 25 bp, Homo sapien
cctgcacacgcttcacagagatgct

SEQ ID NO: 1479111 - DNA, 25 bp, Homo sapien
tgggatagggactccacttacttcc

SEQ ID NO: 1479112 - DNA, 25 bp, Homo sapien
agttttctcactgacctgggatagg

SEQ ID NO: 1479113 - DNA, 25 bp, Homo sapien
cctgagaaatccgagtggctgtcat

SEQ ID NO: 1479114 - DNA, 25 bp, Homo sapien
aaatccacacactcatctgccagtt

SEQ ID NO: 1479115 - DNA, 25 bp, Homo sapien
taataacctgctttgtagctctcct

SEQ ID NO: 1479116 - DNA, 25 bp, Homo sapien
tgactaattggttaatcttgggaag

SEQ ID NO: 1479117 - DNA, 25 bp, Homo sapien
aagacaataataacctgctttgtag

SEQ ID NO: 1479118 - DNA, 25 bp, Homo sapien
gctctcctgggggtgactaattggt

SEQ ID NO: 1479119 - DNA, 25 bp, Homo sapien
gaacacactgggacaaatgccatcg

SEQ ID NO: 1479120 - DNA, 25 bp, Homo sapien
ggaacacactgggacaaatgccatc

SEQ ID NO: 1479121 - DNA, 25 bp, Homo sapien
acacactgggacaaatgccatcgtc

SEQ ID NO: 1479122 - DNA, 25 bp, Homo sapien
actggaacacactgggacaaatgcc

SEQ ID NO: 1479123 - DNA, 25 bp, Homo sapien
attttggaacgtctaagagatgccc

SEQ ID NO: 1479124 - DNA, 25 bp, Homo sapien
gttgcacagtcgtccacaattttgg

SEQ ID NO: 1479125 - DNA, 25 bp, Homo sapien
caggatctgggcatcggaagacaca

SEQ ID NO: 1479126 - DNA, 25 bp, Homo sapien
ggaggaggccacctgtaaccaggaa

SEQ ID NO: 1479127 - DNA, 25 bp, Homo sapien
gagtcccatggggaagcatgacggg

SEQ ID NO: 1479128 - DNA, 25 bp, Homo sapien
cgggaagcgctggtcgtccgaacgg

SEQ ID NO: 1479129 - DNA, 25 bp, Homo sapien
agccgggaagcgctggtcgtccgaa

SEQ ID NO: 1479130 - DNA, 25 bp, Homo sapien
tggacaacaggggtacgaggaccca

SEQ ID NO: 1479131 - DNA, 25 bp, Homo sapien
gcagcccaagtgtctcgcctggagc

SEQ ID NO: 1479132 - DNA, 25 bp, Homo sapien
tcaccttgatccccggcgggacgtc

SEQ ID NO: 1479133 - DNA, 25 bp, Homo sapien
caagtgtctcgcctggagcttccaa

SEQ ID NO: 1479134 - DNA, 25 bp, Homo sapien
gtgcagagcctgatttttgaagaac

SEQ ID NO: 1479135 - DNA, 25 bp, Homo sapien
gcaaggaagtcattctcggtgctgt

SEQ ID NO: 1479136 - DNA, 25 bp, Homo sapien
aggaagtcattctcggtgctgtggc

SEQ ID NO: 1479137 - DNA, 25 bp, Homo sapien
aaggaagtcattctcggtgctgtgg

SEQ ID NO: 1479138 - DNA, 25 bp, Homo sapien
caaggaagtcattctcggtgctgtg

SEQ ID NO: 1479139 - DNA, 25 bp, Homo sapien
gagcgcaatccgaatgcaagcaggg

SEQ ID NO: 1479140 - DNA, 25 bp, Homo sapien
tgacggtcacccctgtgtgtccaga

SEQ ID NO: 1479141 - DNA, 25 bp, Homo sapien
catcacgaactgtcctagagcgcaa

SEQ ID NO: 1479142 - DNA, 25 bp, Homo sapien
ggagtgacggtcacccctgtgtgtc

SEQ ID NO: 1479143 - DNA, 25 bp, Homo sapien
ctgctggtgtttctagcttggaaga

SEQ ID NO: 1479144 - DNA, 25 bp, Homo sapien
gcagcccagcattgggattgctgac

SEQ ID NO: 1479145 - DNA, 25 bp, Homo sapien
ccattcattttcttggcggggcagc

SEQ ID NO: 1479146 - DNA, 25 bp, Homo sapien
gggcagcccagcattgggattgctg

SEQ ID NO: 1479147 - DNA, 25 bp, Homo sapien
attcattttcttggcggggcagccc

SEQ ID NO: 1479148 - DNA, 25 bp, Homo sapien
caggaactggtctaactggtgccag

SEQ ID NO: 1479149 - DNA, 25 bp, Homo sapien
cacagtcagattcactgcccatcag

SEQ ID NO: 1479150 - DNA, 25 bp, Homo sapien
cccgaaacagcgttgcggttcttgg

SEQ ID NO: 1479151 - DNA, 25 bp, Homo sapien
acggcgagcggtccctgcacagtca

SEQ ID NO: 1479152 - DNA, 25 bp, Homo sapien
cacatattggctctagacagagaca

SEQ ID NO: 1479153 - DNA, 25 bp, Homo sapien
caaaccctggaagttctgatggctc

SEQ ID NO: 1479154 - DNA, 25 bp, Homo sapien
ggactcatctcagtgacatgagaaa

SEQ ID NO: 1479155 - DNA, 25 bp, Homo sapien
cagagacatgggataaggactcatc

SEQ ID NO: 1479156 - DNA, 25 bp, Homo sapien
ttatttataaacaaataatcggagc

SEQ ID NO: 1479157 - DNA, 25 bp, Homo sapien
tttataaacaaataatcggagcatt

SEQ ID NO: 1479158 - DNA, 25 bp, Homo sapien
ttataaacaaataatcggagcattt

SEQ ID NO: 1479159 - DNA, 25 bp, Homo sapien
tatttataaacaaataatcggagca

SEQ ID NO: 1479160 - DNA, 25 bp, Homo sapien
catttcgctatgatgatcgctgtaa

SEQ ID NO: 1479161 - DNA, 25 bp, Homo sapien
gcgctccttcgcgtctgctgctgcc

SEQ ID NO: 1479162 - DNA, 25 bp, Homo sapien
gcaccctaggatcgccgccagaggg

SEQ ID NO: 1479163 - DNA, 25 bp, Homo sapien
gatcgctgtaattggcagaatcaca

SEQ ID NO: 1479164 - DNA, 25 bp, Homo sapien
acgctcacagcgcacgcggtacaga

SEQ ID NO: 1479165 - DNA, 25 bp, Homo sapien
gctcacagcgcacgcggtacagacg

SEQ ID NO: 1479166 - DNA, 25 bp, Homo sapien
gcacgcggtacagacggagcaaatc

SEQ ID NO: 1479167 - DNA, 25 bp, Homo sapien
acagcgcacgcggtacagacggagc

SEQ ID NO: 1479168 - DNA, 25 bp, Homo sapien
ccccagctgacaaaggcgatcggac

SEQ ID NO: 1479169 - DNA, 25 bp, Homo sapien
gagcgcgcggtaccggctgtccact

SEQ ID NO: 1479170 - DNA, 25 bp, Homo sapien
ctccagcccagtttagaacaaggga

SEQ ID NO: 1479171 - DNA, 25 bp, Homo sapien
aaggcgatcggacgcacagccagga

SEQ ID NO: 1479172 - DNA, 25 bp, Homo sapien
cttgtcttgatgagtaggtcggagt

SEQ ID NO: 1479173 - DNA, 25 bp, Homo sapien
gagtaattatcatttgcactgggaa

SEQ ID NO: 1479174 - DNA, 25 bp, Homo sapien
taggtcggagtaattatcatttgca

SEQ ID NO: 1479175 - DNA, 25 bp, Homo sapien
tcttttgaaaattgatcagagatgc

SEQ ID NO: 1479176 - DNA, 25 bp, Homo sapien
tgagaaagaaactaattcactattg

SEQ ID NO: 1479177 - DNA, 25 bp, Homo sapien
tcacatacctcaagtctctctgaga

SEQ ID NO: 1479178 - DNA, 25 bp, Homo sapien
gtctttcatcacatacctcaagtct

SEQ ID NO: 1479179 - DNA, 25 bp, Homo sapien
cttggacttgtctttcatcacatac

SEQ ID NO: 1479180 - DNA, 25 bp, Homo sapien
taaattccaagtcgtcaaagttctg

SEQ ID NO: 1479181 - DNA, 25 bp, Homo sapien
tgaataagctgcctacctggactgc

SEQ ID NO: 1479182 - DNA, 25 bp, Homo sapien
ggactgctgatctgtagttcatcta

SEQ ID NO: 1479183 - DNA, 25 bp, Homo sapien
caaagttctgaataagctgcctacc

SEQ ID NO: 1479184 - DNA, 25 bp, Homo sapien
tagagtatagcagtgccatcacgcc

SEQ ID NO: 1479185 - DNA, 25 bp, Homo sapien
cgatgggacctgcaataactctggg

SEQ ID NO: 1479186 - DNA, 25 bp, Homo sapien
cctgggccggctacattaagactct

SEQ ID NO: 1479187 - DNA, 25 bp, Homo sapien
tggtaagcacagttgcccaaggcat

SEQ ID NO: 1479188 - DNA, 25 bp, Homo sapien
agctgtggaggctagggcatacccc

SEQ ID NO: 1479189 - DNA, 25 bp, Homo sapien
gatctgatactgatgacttgtacac

SEQ ID NO: 1479190 - DNA, 25 bp, Homo sapien
aatacaacgtattctcagctagcac

SEQ ID NO: 1479191 - DNA, 25 bp, Homo sapien
tggacacacctgctctagccaacgt

SEQ ID NO: 1479192 - DNA, 25 bp, Homo sapien
taaagatgcccaacagaacccaatg

SEQ ID NO: 1479193 - DNA, 25 bp, Homo sapien
gacacttcagtgatcagcagacgca

SEQ ID NO: 1479194 - DNA, 25 bp, Homo sapien
tcaaatgtgagtcgcctagtctaac

SEQ ID NO: 1479195 - DNA, 25 bp, Homo sapien
ttagcacatggaaacgctcaagctg

SEQ ID NO: 1479196 - DNA, 25 bp, Homo sapien
tatgtacagtttaactatgtaacta

SEQ ID NO: 1479197 - DNA, 25 bp, Homo sapien
tttaactatgtaactatgtttcagg

SEQ ID NO: 1479198 - DNA, 25 bp, Homo sapien
gtacagtttaactatgtaactatgt

SEQ ID NO: 1479199 - DNA, 25 bp, Homo sapien
cagtttaactatgtaactatgtttc

SEQ ID NO: 1479200 - DNA, 25 bp, Homo sapien
aactgagattttattatgttgacat

SEQ ID NO: 1479201 - DNA, 25 bp, Homo sapien
tgagattttattatgttgacatttg

SEQ ID NO: 1479202 - DNA, 25 bp, Homo sapien
ttaactgagattttattatgttgac

SEQ ID NO: 1479203 - DNA, 25 bp, Homo sapien
ttttaactgagattttattatgttg

SEQ ID NO: 1479204 - DNA, 25 bp, Homo sapien
ccaagctctgagcacttacaattct

SEQ ID NO: 1479205 - DNA, 25 bp, Homo sapien
atcatcttcagccaagctctgagca

SEQ ID NO: 1479206 - DNA, 25 bp, Homo sapien
tcagccaagctctgagcacttacaa

SEQ ID NO: 1479207 - DNA, 25 bp, Homo sapien
ccacatcatcttcagccaagctctg

SEQ ID NO: 1479208 - DNA, 25 bp, Homo sapien
gacagttgactactaagacctgaga

SEQ ID NO: 1479209 - DNA, 25 bp, Homo sapien
tcaagttaacaaaggaggcagatca

SEQ ID NO: 1479210 - DNA, 25 bp, Homo sapien
cacaatcactagatctgggcagtca

SEQ ID NO: 1479211 - DNA, 25 bp, Homo sapien
tacacaagtgagtcagagggaatcc

SEQ ID NO: 1479212 - DNA, 25 bp, Homo sapien
gctgtaagacctgcagtaactgctg

SEQ ID NO: 1479213 - DNA, 25 bp, Homo sapien
tgtccacacacagcaattgcatttg

SEQ ID NO: 1479214 - DNA, 25 bp, Homo sapien
tgcatttgtcagatggtctacgccc

SEQ ID NO: 1479215 - DNA, 25 bp, Homo sapien
aagcatctggaacactggtggtgga

SEQ ID NO: 1479216 - DNA, 25 bp, Homo sapien
gctactaacaagaatgagtcagatt

SEQ ID NO: 1479217 - DNA, 25 bp, Homo sapien
tccaaatgatgctgaccaaaaacac

SEQ ID NO: 1479218 - DNA, 25 bp, Homo sapien
tgaaagactacatgagacaattgct

SEQ ID NO: 1479219 - DNA, 25 bp, Homo sapien
aatactggaaatgacctataatgca

SEQ ID NO: 1479220 - DNA, 25 bp, Homo sapien
gcactcggccctaatcccactttaa

SEQ ID NO: 1479221 - DNA, 25 bp, Homo sapien
tttcaaagttcacttaattcaataa

SEQ ID NO: 1479222 - DNA, 25 bp, Homo sapien
cattagccattccttcctataaata

SEQ ID NO: 1479223 - DNA, 25 bp, Homo sapien
tctctgggaccttacattagccatt

SEQ ID NO: 1479224 - DNA, 25 bp, Homo sapien
ctgggaccttacattagccattcct

SEQ ID NO: 1479225 - DNA, 25 bp, Homo sapien
cttctctgggaccttacattagcca

SEQ ID NO: 1479226 - DNA, 25 bp, Homo sapien
gctagtaactcttcaccaagctgta

SEQ ID NO: 1479227 - DNA, 25 bp, Homo sapien
gcttcagcatctttaaggtcaggta

SEQ ID NO: 1479228 - DNA, 25 bp, Homo sapien
cttcaaggaagaacttctgaacagc

SEQ ID NO: 1479229 - DNA, 25 bp, Homo sapien
taactcttcaccaagctgtatttct

SEQ ID NO: 1479230 - DNA, 25 bp, Homo sapien
ttcagaaaggtagtctgatcctact

SEQ ID NO: 1479231 - DNA, 25 bp, Homo sapien
gatcctactagaacgaagtagtttc

SEQ ID NO: 1479232 - DNA, 25 bp, Homo sapien
tagtctgatcctactagaacgaagt

SEQ ID NO: 1479233 - DNA, 25 bp, Homo sapien
ctagaacgaagtagtttcctcccat

SEQ ID NO: 1479234 - DNA, 25 bp, Homo sapien
tctccttggcaagcttctgtttctt

SEQ ID NO: 1479235 - DNA, 25 bp, Homo sapien
agcccagctctctccttggcaagct

SEQ ID NO: 1479236 - DNA, 25 bp, Homo sapien
gctctctccttggcaagcttctgtt

SEQ ID NO: 1479237 - DNA, 25 bp, Homo sapien
cagctctctccttggcaagcttctg

SEQ ID NO: 1479238 - DNA, 25 bp, Homo sapien
caaagttatatttacattttgtcat

SEQ ID NO: 1479239 - DNA, 25 bp, Homo sapien
gcaaagttatatttacattttgtca

SEQ ID NO: 1479240 - DNA, 25 bp, Homo sapien
caagaaatgcaaagttatatttaca

SEQ ID NO: 1479241 - DNA, 25 bp, Homo sapien
ctgcaagaaatgcaaagttatattt

SEQ ID NO: 1479242 - DNA, 25 bp, Homo sapien
cttagaacgaagctaccaagagggt

SEQ ID NO: 1479243 - DNA, 25 bp, Homo sapien
gcacttagaacgaagctaccaagag

SEQ ID NO: 1479244 - DNA, 25 bp, Homo sapien
ggaagcacttagaacgaagctacca

SEQ ID NO: 1479245 - DNA, 25 bp, Homo sapien
aagcacttagaacgaagctaccaag

SEQ ID NO: 1479246 - DNA, 25 bp, Homo sapien
ccaatgaaaagggccccgcatacac

SEQ ID NO: 1479247 - DNA, 25 bp, Homo sapien
cccaatgaaaagggccccgcataca

SEQ ID NO: 1479248 - DNA, 25 bp, Homo sapien
tgaaaagggccccgcatacaccggc

SEQ ID NO: 1479249 - DNA, 25 bp, Homo sapien
aatgaaaagggccccgcatacaccg

SEQ ID NO: 1479250 - DNA, 25 bp, Homo sapien
gggccacgaaccctcagagcggtcg

SEQ ID NO: 1479251 - DNA, 25 bp, Homo sapien
cacttccggtcccagtcaactaagg

SEQ ID NO: 1479252 - DNA, 25 bp, Homo sapien
ccaggaacacagaaaggccgagcac

SEQ ID NO: 1479253 - DNA, 25 bp, Homo sapien
ccagtcaactaagggcctcgaggtc

SEQ ID NO: 1479254 - DNA, 25 bp, Homo sapien
tcaacacatgaatagcagacgatgc

SEQ ID NO: 1479255 - DNA, 25 bp, Homo sapien
tcacatacaccatccataaagaagt

SEQ ID NO: 1479256 - DNA, 25 bp, Homo sapien
aatgtggaagtctccacatttcaca

SEQ ID NO: 1479257 - DNA, 25 bp, Homo sapien
tcaaaggtagtatcacaatgtgaat

SEQ ID NO: 1479258 - DNA, 25 bp, Homo sapien
ttttattagcagtactcagcaggaa

SEQ ID NO: 1479259 - DNA, 25 bp, Homo sapien
tattagcagtactcagcaggaaaag

SEQ ID NO: 1479260 - DNA, 25 bp, Homo sapien
ttattagcagtactcagcaggaaaa

SEQ ID NO: 1479261 - DNA, 25 bp, Homo sapien
tttattagcagtactcagcaggaaa

SEQ ID NO: 1479262 - DNA, 25 bp, Homo sapien
tcttcttcgttttaaggagaacagc

SEQ ID NO: 1479263 - DNA, 25 bp, Homo sapien
tttattaacagaacgcatgactctg

SEQ ID NO: 1479264 - DNA, 25 bp, Homo sapien
aagtccctgcttaggtttactgaca

SEQ ID NO: 1479265 - DNA, 25 bp, Homo sapien
ttctctgtttcttagggcgtccact

SEQ ID NO: 1479266 - DNA, 25 bp, Homo sapien
agataagccccatccaatcccaggt

SEQ ID NO: 1479267 - DNA, 25 bp, Homo sapien
gaacgactttcaagcttgcacagat

SEQ ID NO: 1479268 - DNA, 25 bp, Homo sapien
taccagaaacccatctgcaaagaaa

SEQ ID NO: 1479269 - DNA, 25 bp, Homo sapien
gctgctgcactcgaagtctcctcat

SEQ ID NO: 1479270 - DNA, 25 bp, Homo sapien
ggcagggaacgctccattacgagat

SEQ ID NO: 1479271 - DNA, 25 bp, Homo sapien
cattgtattagctgaccagagggca

SEQ ID NO: 1479272 - DNA, 25 bp, Homo sapien
taacaatggcaacaaacgctgtgac

SEQ ID NO: 1479273 - DNA, 25 bp, Homo sapien
tgttggactagacaccctctagggt

SEQ ID NO: 1479274 - DNA, 25 bp, Homo sapien
cgtgccaaagcactccagcctgagc

SEQ ID NO: 1479275 - DNA, 25 bp, Homo sapien
ggcagaggctgcagtgagctgagat

SEQ ID NO: 1479276 - DNA, 25 bp, Homo sapien
tccagcctgagcaacagagtgagac

SEQ ID NO: 1479277 - DNA, 25 bp, Homo sapien
gagatgggaggatcgctagagcctg

SEQ ID NO: 1479278 - DNA, 25 bp, Homo sapien
atccaggttgggtggctcactgcag

SEQ ID NO: 1479279 - DNA, 25 bp, Homo sapien
tctgccatccaggttgggtggctca

SEQ ID NO: 1479280 - DNA, 25 bp, Homo sapien
ctcctgataggaccacaggcgctgg

SEQ ID NO: 1479281 - DNA, 25 bp, Homo sapien
tcctgataggaccacaggcgctggc

SEQ ID NO: 1479282 - DNA, 25 bp, Homo sapien
tcccagggcacttcgaaggacagtg

SEQ ID NO: 1479283 - DNA, 25 bp, Homo sapien
gacagtgacaatgcattagtctccc

SEQ ID NO: 1479284 - DNA, 25 bp, Homo sapien
tgcacctagcccagttttcttaaga

SEQ ID NO: 1479285 - DNA, 25 bp, Homo sapien
tctcaatgatgacatgcaacagtgt

SEQ ID NO: 1479286 - DNA, 25 bp, Homo sapien
tctcacaatcctcacggccatgata

SEQ ID NO: 1479287 - DNA, 25 bp, Homo sapien
ggccatgatacttccacagtccaga

SEQ ID NO: 1479288 - DNA, 25 bp, Homo sapien
tgccgatgcctgtcattttgtctct

SEQ ID NO: 1479289 - DNA, 25 bp, Homo sapien
tagccaaaccctttgccgatgcctg

SEQ ID NO: 1479290 - DNA, 25 bp, Homo sapien
attccccacaaaaaccgatctcttg

SEQ ID NO: 1479291 - DNA, 25 bp, Homo sapien
gatgcgagatcaactctaatacgaa

SEQ ID NO: 1479292 - DNA, 25 bp, Homo sapien
tacgaaatccatctgcaatctgggc

SEQ ID NO: 1479293 - DNA, 25 bp, Homo sapien
atgaggtctcagatgcgagatcaac

SEQ ID NO: 1479294 - DNA, 25 bp, Homo sapien
caactctaatacgaaatccatctgc

SEQ ID NO: 1479295 - DNA, 25 bp, Homo sapien
cttttcaatgcttgcgtggcagcac

SEQ ID NO: 1479296 - DNA, 25 bp, Homo sapien
caatgcttgcgtggcagcactctcc

SEQ ID NO: 1479297 - DNA, 25 bp, Homo sapien
ttcaatgcttgcgtggcagcactct

SEQ ID NO: 1479298 - DNA, 25 bp, Homo sapien
atgcttgcgtggcagcactctcctc

SEQ ID NO: 1479299 - DNA, 25 bp, Homo sapien
ttttctgatcaggatgaattttacg

SEQ ID NO: 1479300 - DNA, 25 bp, Homo sapien
tttttctgatcaggatgaattttac

SEQ ID NO: 1479301 - DNA, 25 bp, Homo sapien
cttaaacacaacataggcattaata

SEQ ID NO: 1479302 - DNA, 25 bp, Homo sapien
tttctgatcaggatgaattttacgt

SEQ ID NO: 1479303 - DNA, 25 bp, Homo sapien
tttattgctgccaactttttggata

SEQ ID NO: 1479304 - DNA, 25 bp, Homo sapien
ttgctgccaactttttggatagcgt

SEQ ID NO: 1479305 - DNA, 25 bp, Homo sapien
aactttttggatagcgttccctctg

SEQ ID NO: 1479306 - DNA, 25 bp, Homo sapien
caactttttggatagcgttccctct

SEQ ID NO: 1479307 - DNA, 25 bp, Homo sapien
cagcagtagatagtaagagcaactc

SEQ ID NO: 1479308 - DNA, 25 bp, Homo sapien
ggttaaagtgcttcaccatctcact

SEQ ID NO: 1479309 - DNA, 25 bp, Homo sapien
ggttaaatttgaacctattgattca

SEQ ID NO: 1479310 - DNA, 25 bp, Homo sapien
aaaaagttcaagagtcagcagtaga

SEQ ID NO: 1479311 - DNA, 25 bp, Homo sapien
gtacagattctatttgtccatactc

SEQ ID NO: 1479312 - DNA, 25 bp, Homo sapien
gaaatcgtacagattctatttgtcc

SEQ ID NO: 1479313 - DNA, 25 bp, Homo sapien
gattctatttgtccatactctttaa

SEQ ID NO: 1479314 - DNA, 25 bp, Homo sapien
cagagaacgaaatcgtacagattct

SEQ ID NO: 1479315 - DNA, 25 bp, Homo sapien
cttcttattacatgtaacaggcaaa

SEQ ID NO: 1479316 - DNA, 25 bp, Homo sapien
tgtaacaggcaaattcccaacaaac

SEQ ID NO: 1479317 - DNA, 25 bp, Homo sapien
tctaaatcagcactcgctagagcgc

SEQ ID NO: 1479318 - DNA, 25 bp, Homo sapien
atcagcactcgctagagcgctttcc

SEQ ID NO: 1479319 - DNA, 25 bp, Homo sapien
tgctggatatggataagcaaggtct

SEQ ID NO: 1479320 - DNA, 25 bp, Homo sapien
caatataaagtattgctggatatgg

SEQ ID NO: 1479321 - DNA, 25 bp, Homo sapien
ggataagcaaggtctgagcatcaat

SEQ ID NO: 1479322 - DNA, 25 bp, Homo sapien
tgtgaaacggtaaatacaatataaa

SEQ ID NO: 1479323 - DNA, 25 bp, Homo sapien
gatcactgcactctactgcagcctg

SEQ ID NO: 1479324 - DNA, 25 bp, Homo sapien
actgcagcctgggcgtggcatcaag

SEQ ID NO: 1479325 - DNA, 25 bp, Homo sapien
tcccacctactcagggccgaggcag

SEQ ID NO: 1479326 - DNA, 25 bp, Homo sapien
cagcctgggcgtggcatcaagactc

SEQ ID NO: 1479327 - DNA, 25 bp, Homo sapien
gatgctgagtacacggggtttctta

SEQ ID NO: 1479328 - DNA, 25 bp, Homo sapien
tccaagtataggaatgttaatttac

SEQ ID NO: 1479329 - DNA, 25 bp, Homo sapien
ctgacgaatattccaagtataggaa

SEQ ID NO: 1479330 - DNA, 25 bp, Homo sapien
aatattagtaattgctgatgctgag

SEQ ID NO: 1479331 - DNA, 25 bp, Homo sapien
tttttggcaggttcttgcgaaagtg

SEQ ID NO: 1479332 - DNA, 25 bp, Homo sapien
cgaaagtggtctttcaatctgggat

SEQ ID NO: 1479333 - DNA, 25 bp, Homo sapien
agtgtgtttcttcttcgctttcact

SEQ ID NO: 1479334 - DNA, 25 bp, Homo sapien
caggttcttgcgaaagtggtctttc

SEQ ID NO: 1479335 - DNA, 25 bp, Homo sapien
ttcacgcggtaggtaagaagattgc

SEQ ID NO: 1479336 - DNA, 25 bp, Homo sapien
tattcgggaagaaagcccagtgact

SEQ ID NO: 1479337 - DNA, 25 bp, Homo sapien
ttgagaccccatacttctagaattc

SEQ ID NO: 1479338 - DNA, 25 bp, Homo sapien
cctttagaaatcacgcttcacgcgg

SEQ ID NO: 1479339 - DNA, 25 bp, Homo sapien
tgttcgccgcgaaataagctactgg

SEQ ID NO: 1479340 - DNA, 25 bp, Homo sapien
tactggcgacctgtccaagcctgta

SEQ ID NO: 1479341 - DNA, 25 bp, Homo sapien
tccagagaactgaagagggacgcca

SEQ ID NO: 1479342 - DNA, 25 bp, Homo sapien
caagcctgtagtcttccggcggact

SEQ ID NO: 1479343 - DNA, 25 bp, Homo sapien
tccctccccaggtactcgtgccgcg

SEQ ID NO: 1479344 - DNA, 25 bp, Homo sapien
ttcgccagcacgagggaacgtacaa

SEQ ID NO: 1479345 - DNA, 25 bp, Homo sapien
gcacgagggaacgtacaacatccct

SEQ ID NO: 1479346 - DNA, 25 bp, Homo sapien
accgcttcgccagcacgagggaacg

SEQ ID NO: 1479347 - DNA, 25 bp, Homo sapien
ttctctttctcttccgtttgctcat

SEQ ID NO: 1479348 - DNA, 25 bp, Homo sapien
acacttctctttctcttccgtttgc

SEQ ID NO: 1479349 - DNA, 25 bp, Homo sapien
ccctcctggacacttctctttctct

SEQ ID NO: 1479350 - DNA, 25 bp, Homo sapien
cttctctttctcttccgtttgctca

SEQ ID NO: 1479351 - DNA, 25 bp, Homo sapien
ccagactgcagctgcgcgccagctc

SEQ ID NO: 1479352 - DNA, 25 bp, Homo sapien
cagactgcagctgcgcgccagctcg

SEQ ID NO: 1479353 - DNA, 25 bp, Homo sapien
cccagactgcagctgcgcgccagct

SEQ ID NO: 1479354 - DNA, 25 bp, Homo sapien
ggttccgggcacttccgctctctgg

SEQ ID NO: 1479355 - DNA, 25 bp, Homo sapien
cctcccctccggcagtcggccgccg

SEQ ID NO: 1479356 - DNA, 25 bp, Homo sapien
ctcccctccggcagtcggccgccgg

SEQ ID NO: 1479357 - DNA, 25 bp, Homo sapien
cgggttccgggcacttccgctctct

SEQ ID NO: 1479358 - DNA, 25 bp, Homo sapien
ttgtcgccgtcggttggtggtcctc

SEQ ID NO: 1479359 - DNA, 25 bp, Homo sapien
tcggttggtggtcctcgccgtttca

SEQ ID NO: 1479360 - DNA, 25 bp, Homo sapien
ggagcaggtttgtcgccgtcggttg

SEQ ID NO: 1479361 - DNA, 25 bp, Homo sapien
tggtcctcgccgtttcagaaaagcc

SEQ ID NO: 1479362 - DNA, 25 bp, Homo sapien
aagatcaacatccaggtactacccc

SEQ ID NO: 1479363 - DNA, 25 bp, Homo sapien
aatgtccagatgattgcaatgtgca

SEQ ID NO: 1479364 - DNA, 25 bp, Homo sapien
agtttgcggcaaagcagtgtttctc

SEQ ID NO: 1479365 - DNA, 25 bp, Homo sapien
tgtgcaatagaacacactgaagtat

SEQ ID NO: 1479366 - DNA, 25 bp, Homo sapien
cttttaattttcataggtagaatct

SEQ ID NO: 1479367 - DNA, 25 bp, Homo sapien
tttaattttcataggtagaatcttc

SEQ ID NO: 1479368 - DNA, 25 bp, Homo sapien
ttaattttcataggtagaatcttcc

SEQ ID NO: 1479369 - DNA, 25 bp, Homo sapien
attaatcccctgtgataatacgtgc

SEQ ID NO: 1479370 - DNA, 25 bp, Homo sapien
cgtgctggatatgtatgttccagtc

SEQ ID NO: 1479371 - DNA, 25 bp, Homo sapien
catcacatacagaaatgaactaaaa

SEQ ID NO: 1479372 - DNA, 25 bp, Homo sapien
cctgtgataatacgtgctggatatg

SEQ ID NO: 1479373 - DNA, 25 bp, Homo sapien
ccattccaatttgaagggccatgaa

SEQ ID NO: 1479374 - DNA, 25 bp, Homo sapien
tacaattaaagccaccctaaggtga

SEQ ID NO: 1479375 - DNA, 25 bp, Homo sapien
gaaattcccacgtcgtattgccagg

SEQ ID NO: 1479376 - DNA, 25 bp, Homo sapien
taaaggattctgacacgttagcatc

SEQ ID NO: 1479377 - DNA, 25 bp, Homo sapien
tccattttgtgatgcgctggacatt

SEQ ID NO: 1479378 - DNA, 25 bp, Homo sapien
ccattttgtgatgcgctggacattg

SEQ ID NO: 1479379 - DNA, 25 bp, Homo sapien
tcagctaaagttaacataacagcag

SEQ ID NO: 1479380 - DNA, 25 bp, Homo sapien
gctaaagttaacataacagcagctg

SEQ ID NO: 1479381 - DNA, 25 bp, Homo sapien
ataacagcagctgttatggaactgg

SEQ ID NO: 1479382 - DNA, 25 bp, Homo sapien
tgttatggaactggatgaaggtgaa

SEQ ID NO: 1479383 - DNA, 25 bp, Homo sapien
gaagctagacagtgcccaactacag

SEQ ID NO: 1479384 - DNA, 25 bp, Homo sapien
aactgttgcattctccgccactagg

SEQ ID NO: 1479385 - DNA, 25 bp, Homo sapien
catttagcttacaacaacagtggtc

SEQ ID NO: 1479386 - DNA, 25 bp, Homo sapien
ggtcaattctcacagttctacgatg

SEQ ID NO: 1479387 - DNA, 25 bp, Homo sapien
taaacgctttctcctccgatcaatg

SEQ ID NO: 1479388 - DNA, 25 bp, Homo sapien
gttcggcacttgtcatattttccag

SEQ ID NO: 1479389 - DNA, 25 bp, Homo sapien
gaagaattgtgatgcgttcggcact

SEQ ID NO: 1479390 - DNA, 25 bp, Homo sapien
gaagctacttcagattttaatgaca

SEQ ID NO: 1479391 - DNA, 25 bp, Homo sapien
atttaaagctttcattaacagacat

SEQ ID NO: 1479392 - DNA, 25 bp, Homo sapien
aatttaaagctttcattaacagaca

SEQ ID NO: 1479393 - DNA, 25 bp, Homo sapien
tataaatttaaagctttcattaaca

SEQ ID NO: 1479394 - DNA, 25 bp, Homo sapien
taaatttaaagctttcattaacaga

SEQ ID NO: 1479395 - DNA, 25 bp, Homo sapien
aggtctatacattgtacattagtac

SEQ ID NO: 1479396 - DNA, 25 bp, Homo sapien
tacattagtacatctattaagtttg

SEQ ID NO: 1479397 - DNA, 25 bp, Homo sapien
catctattaagtttggtaaagcctc

SEQ ID NO: 1479398 - DNA, 25 bp, Homo sapien
caaataaggtctatacattgtacat

SEQ ID NO: 1479399 - DNA, 25 bp, Homo sapien
gcttgtcaatttaacatgtcactta

SEQ ID NO: 1479400 - DNA, 25 bp, Homo sapien
ctaggatgaagtttgtatgcttgtc

SEQ ID NO: 1479401 - DNA, 25 bp, Homo sapien
ttgtatgcttgtcaatttaacatgt

SEQ ID NO: 1479402 - DNA, 25 bp, Homo sapien
tatgcttgtcaatttaacatgtcac

SEQ ID NO: 1479403 - DNA, 25 bp, Homo sapien
tccttgagatcaggatccttatcac

SEQ ID NO: 1479404 - DNA, 25 bp, Homo sapien
gtaatcgattactgggttccttgag

SEQ ID NO: 1479405 - DNA, 25 bp, Homo sapien
tccagtggaaactgatttgactggc

SEQ ID NO: 1479406 - DNA, 25 bp, Homo sapien
gagatttggtactatgagacttcat

SEQ ID NO: 1479407 - DNA, 25 bp, Homo sapien
tgcctagaaacctggaaaatcatat

SEQ ID NO: 1479408 - DNA, 25 bp, Homo sapien
ttagtcctacagaaaacaacctgcc

SEQ ID NO: 1479409 - DNA, 25 bp, Homo sapien
aaaattcttcttacctgaactgcca

SEQ ID NO: 1479410 - DNA, 25 bp, Homo sapien
tattcaataaagaactcctcgggaa

SEQ ID NO: 1479411 - DNA, 25 bp, Homo sapien
aataactcctatgctgtgggttgac

SEQ ID NO: 1479412 - DNA, 25 bp, Homo sapien
cttaaataactcctatgctgtgggt

SEQ ID NO: 1479413 - DNA, 25 bp, Homo sapien
actcctatgctgtgggttgactaaa

SEQ ID NO: 1479414 - DNA, 25 bp, Homo sapien
cctatgctgtgggttgactaaaata

SEQ ID NO: 1479415 - DNA, 25 bp, Homo sapien
taaataactcattgaagatgcgctc

SEQ ID NO: 1479416 - DNA, 25 bp, Homo sapien
ttgacagcttaccatgtgaacaggt

SEQ ID NO: 1479417 - DNA, 25 bp, Homo sapien
agatgcgctctcttaggaaatgtca

SEQ ID NO: 1479418 - DNA, 25 bp, Homo sapien
tggaaatacttgaccttgacagctt

SEQ ID NO: 1479419 - DNA, 25 bp, Homo sapien
gagctggccgaataacccttttctg

SEQ ID NO: 1479420 - DNA, 25 bp, Homo sapien
cacggagtcgttgctaaagttggag

SEQ ID NO: 1479421 - DNA, 25 bp, Homo sapien
ggacgccatattcaccgcctggaag

SEQ ID NO: 1479422 - DNA, 25 bp, Homo sapien
ccaagccggctgctagcaaaggtca

SEQ ID NO: 1479423 - DNA, 25 bp, Homo sapien
gattgttatacttctatgctgattt

SEQ ID NO: 1479424 - DNA, 25 bp, Homo sapien
caagtgaaaagaactgtggaataca

SEQ ID NO: 1479425 - DNA, 25 bp, Homo sapien
caaaggtaacaaatatgttgatgtt

SEQ ID NO: 1479426 - DNA, 25 bp, Homo sapien
gaactgtggaatacaaaggtaacaa

SEQ ID NO: 1479427 - DNA, 25 bp, Homo sapien
tgtgtgatacattttatagcaagtg

SEQ ID NO: 1479428 - DNA, 25 bp, Homo sapien
tcatcagcaatcaataccaccgctg

SEQ ID NO: 1479429 - DNA, 25 bp, Homo sapien
atttttcatcagcaatcaataccac

SEQ ID NO: 1479430 - DNA, 25 bp, Homo sapien
gcaatcaataccaccgctgaataac

SEQ ID NO: 1479431 - DNA, 25 bp, Homo sapien
taccaccgctgaataacaccaactt

SEQ ID NO: 1479432 - DNA, 25 bp, Homo sapien
aagcaagtagccttacagaatttgt

SEQ ID NO: 1479433 - DNA, 25 bp, Homo sapien
aaaatagtgtactatcccataccct

SEQ ID NO: 1479434 - DNA, 25 bp, Homo sapien
tatcccataccctgaataccatttt

SEQ ID NO: 1479435 - DNA, 25 bp, Homo sapien
tgggggtaaaattatcagctattat

SEQ ID NO: 1479436 - DNA, 25 bp, Homo sapien
tctttttgttgtttaccactgttgc

SEQ ID NO: 1479437 - DNA, 25 bp, Homo sapien
tttgttgtttaccactgttgcttta

SEQ ID NO: 1479438 - DNA, 25 bp, Homo sapien
tgttgtttaccactgttgctttatg

SEQ ID NO: 1479439 - DNA, 25 bp, Homo sapien
gtttaccactgttgctttatggctt

SEQ ID NO: 1479440 - DNA, 25 bp, Homo sapien
actgcagcctttccgggatcaagtg

SEQ ID NO: 1479441 - DNA, 25 bp, Homo sapien
tatggcaccatcgaaaggcactaat

SEQ ID NO: 1479442 - DNA, 25 bp, Homo sapien
cagtgctctgtctttacgatggaaa

SEQ ID NO: 1479443 - DNA, 25 bp, Homo sapien
tgacagaagtatggctatggcacca

SEQ ID NO: 1479444 - DNA, 25 bp, Homo sapien
aaatcagtttgacacggttgtctga

SEQ ID NO: 1479445 - DNA, 25 bp, Homo sapien
cagtgcctggacagttggttgctcc

SEQ ID NO: 1479446 - DNA, 25 bp, Homo sapien
gttggttgctccaaacccctacata

SEQ ID NO: 1479447 - DNA, 25 bp, Homo sapien
acaagttagtcaggcttgaaaatca

SEQ ID NO: 1479448 - DNA, 25 bp, Homo sapien
caaaatgttcgtgagaaactgcaca

SEQ ID NO: 1479449 - DNA, 25 bp, Homo sapien
gctcatgccatatagtcaaccactg

SEQ ID NO: 1479450 - DNA, 25 bp, Homo sapien
taatcgcctcaggttataacaagag

SEQ ID NO: 1479451 - DNA, 25 bp, Homo sapien
ggcctgggtgcaatttctagcatgt

SEQ ID NO: 1479452 - DNA, 25 bp, Homo sapien
taagtcaacatacacattttccttc

SEQ ID NO: 1479453 - DNA, 25 bp, Homo sapien
tcaacatacacattttccttctcac

SEQ ID NO: 1479454 - DNA, 25 bp, Homo sapien
gtcaacatacacattttccttctca

SEQ ID NO: 1479455 - DNA, 25 bp, Homo sapien
ctaaaataagtcaacatacacattt

SEQ ID NO: 1479456 - DNA, 25 bp, Homo sapien
tactatcgacattgactggaggtgg

SEQ ID NO: 1479457 - DNA, 25 bp, Homo sapien
tcaaaacctgctggcgagctattcc

SEQ ID NO: 1479458 - DNA, 25 bp, Homo sapien
tacactgggtgaacaactctcctct

SEQ ID NO: 1479459 - DNA, 25 bp, Homo sapien
tagaaaccagttgtccgtagagatt

SEQ ID NO: 1479460 - DNA, 25 bp, Homo sapien
tcatagttcccccttcctagattaa

SEQ ID NO: 1479461 - DNA, 25 bp, Homo sapien
tacattatgtaacctatcttttctc

SEQ ID NO: 1479462 - DNA, 25 bp, Homo sapien
gattaatacattatgtaacctatct

SEQ ID NO: 1479463 - DNA, 25 bp, Homo sapien
ttcttaatgctctactgaatttgct

SEQ ID NO: 1479464 - DNA, 25 bp, Homo sapien
gacccctaggtttatcagaactggc

SEQ ID NO: 1479465 - DNA, 25 bp, Homo sapien
tattctaactgtagtggacccctag

SEQ ID NO: 1479466 - DNA, 25 bp, Homo sapien
tgcccagccaaatgtgtcagatatt

SEQ ID NO: 1479467 - DNA, 25 bp, Homo sapien
cagaactggcttatgacctgtccaa

SEQ ID NO: 1479468 - DNA, 25 bp, Homo sapien
cacaaaagtccagactataattact

SEQ ID NO: 1479469 - DNA, 25 bp, Homo sapien
cacttgagtcgtgatagcaccactg

SEQ ID NO: 1479470 - DNA, 25 bp, Homo sapien
agcccaggaggtcacttgagtcgtg

SEQ ID NO: 1479471 - DNA, 25 bp, Homo sapien
taaagcaaggattacacaaaagtcc

SEQ ID NO: 1479472 - DNA, 25 bp, Homo sapien
taccatttcaggagatggatttgtc

SEQ ID NO: 1479473 - DNA, 25 bp, Homo sapien
tgaagtccattaaggatcgaagtaa

SEQ ID NO: 1479474 - DNA, 25 bp, Homo sapien
tggacttaatatgagcagtatcaga

SEQ ID NO: 1479475 - DNA, 25 bp, Homo sapien
tggtttggacaagcgccgaagttta

SEQ ID NO: 1479476 - DNA, 25 bp, Homo sapien
ttccgatgttttatctttggcacat

SEQ ID NO: 1479477 - DNA, 25 bp, Homo sapien
tatctgctttaatccattcatcgta

SEQ ID NO: 1479478 - DNA, 25 bp, Homo sapien
tcagcaggtcttactattttatctg

SEQ ID NO: 1479479 - DNA, 25 bp, Homo sapien
ttatcagcaggtcttactattttat

SEQ ID NO: 1479480 - DNA, 25 bp, Homo sapien
gaaaagctgaggattcatccccatg

SEQ ID NO: 1479481 - DNA, 25 bp, Homo sapien
gaaagtatctgtagcaaactcctgg

SEQ ID NO: 1479482 - DNA, 25 bp, Homo sapien
tctagcataggcctggaaagtatct

SEQ ID NO: 1479483 - DNA, 25 bp, Homo sapien
tctgctggtacaaactactggcttg

SEQ ID NO: 1479484 - DNA, 25 bp, Homo sapien
tttaaaatgcttccagaccagcctg

SEQ ID NO: 1479485 - DNA, 25 bp, Homo sapien
tctggcggaatacaataatcttagt

SEQ ID NO: 1479486 - DNA, 25 bp, Homo sapien
gccaccgcatctggcggaatacaat

SEQ ID NO: 1479487 - DNA, 25 bp, Homo sapien
tgacctcccagtatcaattgtccca

SEQ ID NO: 1479488 - DNA, 25 bp, Homo sapien
gagatgagctctttatgtaacccaa

SEQ ID NO: 1479489 - DNA, 25 bp, Homo sapien
tgaagggacgttcctctaaagaaga

SEQ ID NO: 1479490 - DNA, 25 bp, Homo sapien
tcgactccattttgtttgctaagag

SEQ ID NO: 1479491 - DNA, 25 bp, Homo sapien
cccaaagaggtcacatatatcatat

SEQ ID NO: 1479492 - DNA, 25 bp, Homo sapien
tattttcatgaacctccacgcataa

SEQ ID NO: 1479493 - DNA, 25 bp, Homo sapien
gaacctccacgcataaatcttcatt

SEQ ID NO: 1479494 - DNA, 25 bp, Homo sapien
aaactattttcatgaacctccacgc

SEQ ID NO: 1479495 - DNA, 25 bp, Homo sapien
atgaatgactaccactgaagataaa

SEQ ID NO: 1479496 - DNA, 25 bp, Homo sapien
tcacatctaagctctgacgataggt

SEQ ID NO: 1479497 - DNA, 25 bp, Homo sapien
tgagcttcctattacacaacaggac

SEQ ID NO: 1479498 - DNA, 25 bp, Homo sapien
tggatcggactggtacttttctcaa

SEQ ID NO: 1479499 - DNA, 25 bp, Homo sapien
gaaaatcacataccagaaaggcagc

SEQ ID NO: 1479500 - DNA, 25 bp, Homo sapien
tctccaccttcgacatcagaatctt

SEQ ID NO: 1479501 - DNA, 25 bp, Homo sapien
tgatttttccctcgtccataccgca

SEQ ID NO: 1479502 - DNA, 25 bp, Homo sapien
attccatccgcagtaatgcaccaag

SEQ ID NO: 1479503 - DNA, 25 bp, Homo sapien
gtaatgcaccaagtaaaggacctct

SEQ ID NO: 1479504 - DNA, 25 bp, Homo sapien
gcctggtggatagcactcaaactcc

SEQ ID NO: 1479505 - DNA, 25 bp, Homo sapien
cctggtggatagcactcaaactcct

SEQ ID NO: 1479506 - DNA, 25 bp, Homo sapien
ggtggatagcactcaaactcctctt

SEQ ID NO: 1479507 - DNA, 25 bp, Homo sapien
ggatagcactcaaactcctcttcct

SEQ ID NO: 1479508 - DNA, 25 bp, Homo sapien
tttctactctcattaccacagattt

SEQ ID NO: 1479509 - DNA, 25 bp, Homo sapien
tctactctcattaccacagatttat

SEQ ID NO: 1479510 - DNA, 25 bp, Homo sapien
tctaataatgtactaccaatatctt

SEQ ID NO: 1479511 - DNA, 25 bp, Homo sapien
aatttctactctcattaccacagat

SEQ ID NO: 1479512 - DNA, 25 bp, Homo sapien
cataattactggcaatcaaccaaag

SEQ ID NO: 1479513 - DNA, 25 bp, Homo sapien
ttgaaatgacgacaaactccaagct

SEQ ID NO: 1479514 - DNA, 25 bp, Homo sapien
taagactctatctttgcatagtggg

SEQ ID NO: 1479515 - DNA, 25 bp, Homo sapien
gtagcccaggcaaattttcattcaa

SEQ ID NO: 1479516 - DNA, 25 bp, Homo sapien
acatgtcaccacgcctgacttcttt

SEQ ID NO: 1479517 - DNA, 25 bp, Homo sapien
tcccccaagctggcctacagtggta

SEQ ID NO: 1479518 - DNA, 25 bp, Homo sapien
atgtcaccacgcctgacttctttgt

SEQ ID NO: 1479519 - DNA, 25 bp, Homo sapien
cccaagctggcctacagtggtacga

SEQ ID NO: 1479520 - DNA, 25 bp, Homo sapien
taccctagttgtgtcatcatctttg

SEQ ID NO: 1479521 - DNA, 25 bp, Homo sapien
cagaatgtgtaggtatagattctaa

SEQ ID NO: 1479522 - DNA, 25 bp, Homo sapien
agggattcatctaccctagttgtgt

SEQ ID NO: 1479523 - DNA, 25 bp, Homo sapien
catctaccctagttgtgtcatcatc

SEQ ID NO: 1479524 - DNA, 25 bp, Homo sapien
caatgttggctgatctacagtactc

SEQ ID NO: 1479525 - DNA, 25 bp, Homo sapien
aatgccatctgaaattcaatgttgg

SEQ ID NO: 1479526 - DNA, 25 bp, Homo sapien
cactccttacattgcttgttaacaa

SEQ ID NO: 1479527 - DNA, 25 bp, Homo sapien
tcttggtattatattcctctcctcc

SEQ ID NO: 1479528 - DNA, 25 bp, Homo sapien
agggattccaagatcttggtagact

SEQ ID NO: 1479529 - DNA, 25 bp, Homo sapien
cagctgaatttaagacagggattcc

SEQ ID NO: 1479530 - DNA, 25 bp, Homo sapien
ttccaagatcttggtagacttgttt

SEQ ID NO: 1479531 - DNA, 25 bp, Homo sapien
agctgaatttaagacagggattcca

SEQ ID NO: 1479532 - DNA, 25 bp, Homo sapien
gatgtttcagtttgactacaacact

SEQ ID NO: 1479533 - DNA, 25 bp, Homo sapien
tttcagagatggcagatacctgaga

SEQ ID NO: 1479534 - DNA, 25 bp, Homo sapien
gtttcagtttgactacaacactcac

SEQ ID NO: 1479535 - DNA, 25 bp, Homo sapien
tgtttcagtttgactacaacactca

SEQ ID NO: 1479536 - DNA, 25 bp, Homo sapien
taaagagattcaaatttcgatatcc

SEQ ID NO: 1479537 - DNA, 25 bp, Homo sapien
tttgtgtacaagtctgaataactta

SEQ ID NO: 1479538 - DNA, 25 bp, Homo sapien
caagtacaggtcgtttgttaatagg

SEQ ID NO: 1479539 - DNA, 25 bp, Homo sapien
tcaaatttcgatatccaagtacagg

SEQ ID NO: 1479540 - DNA, 25 bp, Homo sapien
tactcatcagcattacaatcaggga

SEQ ID NO: 1479541 - DNA, 25 bp, Homo sapien
gggtacaatgcctcatatggccatt

SEQ ID NO: 1479542 - DNA, 25 bp, Homo sapien
gccaaccctccattcatgtaaagaa

SEQ ID NO: 1479543 - DNA, 25 bp, Homo sapien
taacacaagaaaacgcaaggcaagg

SEQ ID NO: 1479544 - DNA, 25 bp, Homo sapien
tttaagatactaattatctgtccaa

SEQ ID NO: 1479545 - DNA, 25 bp, Homo sapien
cataattactgatgacataaagttc

SEQ ID NO: 1479546 - DNA, 25 bp, Homo sapien
tgtccaaaacttaccacgttaatga

SEQ ID NO: 1479547 - DNA, 25 bp, Homo sapien
aagacagccataattactgatgaca

SEQ ID NO: 1479548 - DNA, 25 bp, Homo sapien
aattgctgaagaaagttctcccttt

SEQ ID NO: 1479549 - DNA, 25 bp, Homo sapien
aaatttgtacaattgctgaagaaag

SEQ ID NO: 1479550 - DNA, 25 bp, Homo sapien
aatttgtacaattgctgaagaaagt

SEQ ID NO: 1479551 - DNA, 25 bp, Homo sapien
tgctgaagaaagttctccctttctt

SEQ ID NO: 1479552 - DNA, 25 bp, Homo sapien
taccaatagcaaagactagtgttca

SEQ ID NO: 1479553 - DNA, 25 bp, Homo sapien
tcccaatagttagaatccccacagt

SEQ ID NO: 1479554 - DNA, 25 bp, Homo sapien
aaagggactagcaagactgttcgtg

SEQ ID NO: 1479555 - DNA, 25 bp, Homo sapien
taagctgttcaaaaccaggtaagtc

SEQ ID NO: 1479556 - DNA, 25 bp, Homo sapien
cgattatggtcgtgagtcaccgtgc

SEQ ID NO: 1479557 - DNA, 25 bp, Homo sapien
tgtagggcagtggtaaattcacggc

SEQ ID NO: 1479558 - DNA, 25 bp, Homo sapien
tgccaaatcctaacccacaagggaa

SEQ ID NO: 1479559 - DNA, 25 bp, Homo sapien
tgagttcaagttagccacctgcctt

SEQ ID NO: 1479560 - DNA, 25 bp, Homo sapien
tcagtcttccagttagcaggaatag

SEQ ID NO: 1479561 - DNA, 25 bp, Homo sapien
cactgctagagctatcttctttcaa

SEQ ID NO: 1479562 - DNA, 25 bp, Homo sapien
gtgaaattcaagtgcctgttcaaag

SEQ ID NO: 1479563 - DNA, 25 bp, Homo sapien
tctgcttcactgctagagctatctt

SEQ ID NO: 1479564 - DNA, 25 bp, Homo sapien
tcaggctttggtgcagtgtcactag

SEQ ID NO: 1479565 - DNA, 25 bp, Homo sapien
aaaacagcatcaggctttggtgcag

SEQ ID NO: 1479566 - DNA, 25 bp, Homo sapien
gcagtgtcactagtaatttcatgga

SEQ ID NO: 1479567 - DNA, 25 bp, Homo sapien
gctttaaaacagcatcaggctttgg

SEQ ID NO: 1479568 - DNA, 25 bp, Homo sapien
aatggcattatttctgctcacggca

SEQ ID NO: 1479569 - DNA, 25 bp, Homo sapien
tggcattatttctgctcacggcacc

SEQ ID NO: 1479570 - DNA, 25 bp, Homo sapien
gcattatttctgctcacggcaccct

SEQ ID NO: 1479571 - DNA, 25 bp, Homo sapien
atggaatcttgttgttgtcacccag

SEQ ID NO: 1479572 - DNA, 25 bp, Homo sapien
aggataacctgagcccaaagggtca

SEQ ID NO: 1479573 - DNA, 25 bp, Homo sapien
gaaattgaggtgaaaggataacctg

SEQ ID NO: 1479574 - DNA, 25 bp, Homo sapien
tgaaaggataacctgagcccaaagg

SEQ ID NO: 1479575 - DNA, 25 bp, Homo sapien
cagctactcaagagaaattgaggtg

SEQ ID NO: 1479576 - DNA, 25 bp, Homo sapien
agatcgaacaagaatattgtccttt

SEQ ID NO: 1479577 - DNA, 25 bp, Homo sapien
ttttccatctttgaaagatcgaaca

SEQ ID NO: 1479578 - DNA, 25 bp, Homo sapien
ctttgaaagatcgaacaagaatatt

SEQ ID NO: 1479579 - DNA, 25 bp, Homo sapien
ccatctttgaaagatcgaacaagaa

SEQ ID NO: 1479580 - DNA, 25 bp, Homo sapien
caaagcgtagaggtctggactcaag

SEQ ID NO: 1479581 - DNA, 25 bp, Homo sapien
agaaaatggaccacgcagaggcaac

SEQ ID NO: 1479582 - DNA, 25 bp, Homo sapien
gaaactaagctactgtgatcacctg

SEQ ID NO: 1479583 - DNA, 25 bp, Homo sapien
tgagagcccacagcctaaatattag

SEQ ID NO: 1479584 - DNA, 25 bp, Homo sapien
gctttggccagtgatgacactggtg

SEQ ID NO: 1479585 - DNA, 25 bp, Homo sapien
gatgagcgaaggatttcgaaaactg

SEQ ID NO: 1479586 - DNA, 25 bp, Homo sapien
gatgacactggtgtatgagtaagtg

SEQ ID NO: 1479587 - DNA, 25 bp, Homo sapien
tccctgatgagcgaaggatttcgaa

SEQ ID NO: 1479588 - DNA, 25 bp, Homo sapien
tgccacagaacgacaatatgcattt

SEQ ID NO: 1479589 - DNA, 25 bp, Homo sapien
ttttatcccattcacccatgtatgt

SEQ ID NO: 1479590 - DNA, 25 bp, Homo sapien
agatcaccgtaaagaaaatacagcg

SEQ ID NO: 1479591 - DNA, 25 bp, Homo sapien
ctctgcaaggtgaagctttaaaagg

SEQ ID NO: 1479592 - DNA, 25 bp, Homo sapien
cagtcatgattatatagggagtacc

SEQ ID NO: 1479593 - DNA, 25 bp, Homo sapien
tctagacctacatggacttaggagc

SEQ ID NO: 1479594 - DNA, 25 bp, Homo sapien
ggaaaaggtctagttatccctgtca

SEQ ID NO: 1479595 - DNA, 25 bp, Homo sapien
gatggaaacaccctgattcactaag

SEQ ID NO: 1479596 - DNA, 25 bp, Homo sapien
tcaatctgtttcctatcatcctcat

SEQ ID NO: 1479597 - DNA, 25 bp, Homo sapien
tctttttatccaaactaatgtaatc

SEQ ID NO: 1479598 - DNA, 25 bp, Homo sapien
ctttgcctagtagctcatcaatctg

SEQ ID NO: 1479599 - DNA, 25 bp, Homo sapien
tcatcaatctgtttcctatcatcct

SEQ ID NO: 1479600 - DNA, 25 bp, Homo sapien
tttatcctcacaaagaataagcatg

SEQ ID NO: 1479601 - DNA, 25 bp, Homo sapien
tattacatttcctaagacctgtaaa

SEQ ID NO: 1479602 - DNA, 25 bp, Homo sapien
tcctaagacctgtaaaatggctaat

SEQ ID NO: 1479603 - DNA, 25 bp, Homo sapien
gcatgccaatgatgaatataggtat

SEQ ID NO: 1479604 - DNA, 25 bp, Homo sapien
gtttaattcgctatctcctcccctg

SEQ ID NO: 1479605 - DNA, 25 bp, Homo sapien
tccttttagaggagcttagccagaa

SEQ ID NO: 1479606 - DNA, 25 bp, Homo sapien
tgcttggcacagtatagatgctaaa

SEQ ID NO: 1479607 - DNA, 25 bp, Homo sapien
tgtagagccacaacaaaataatgcg

SEQ ID NO: 1479608 - DNA, 25 bp, Homo sapien
ggtaaatcttagcactgttactggg

SEQ ID NO: 1479609 - DNA, 25 bp, Homo sapien
taaaaatgtgttcagatctgcaggc

SEQ ID NO: 1479610 - DNA, 25 bp, Homo sapien
aagggtgaagtattggatacaaatc

SEQ ID NO: 1479611 - DNA, 25 bp, Homo sapien
gcaagtataaaccaggtattgggta

SEQ ID NO: 1479612 - DNA, 25 bp, Homo sapien
tcctatgactggagtgccaaaatgc

SEQ ID NO: 1479613 - DNA, 25 bp, Homo sapien
tgccaaaatgctcagggttggtgag

SEQ ID NO: 1479614 - DNA, 25 bp, Homo sapien
ttctttcctatgactggagtgccaa

SEQ ID NO: 1479615 - DNA, 25 bp, Homo sapien
tggtgagtgggagctggtctaatgt

SEQ ID NO: 1479616 - DNA, 25 bp, Homo sapien
tttcagcaaaatgcctctctccttt

SEQ ID NO: 1479617 - DNA, 25 bp, Homo sapien
agtgtcttctcatctccgtcatcaa

SEQ ID NO: 1479618 - DNA, 25 bp, Homo sapien
ttcactttcagcaaaatgcctctct

SEQ ID NO: 1479619 - DNA, 25 bp, Homo sapien
gcacagtgaagatcgtctcagtgtc

SEQ ID NO: 1479620 - DNA, 25 bp, Homo sapien
tgatatgcaccatcaagattcttca

SEQ ID NO: 1479621 - DNA, 25 bp, Homo sapien
tagtttattgataacagcttcctga

SEQ ID NO: 1479622 - DNA, 25 bp, Homo sapien
ctacagtgtaccaactcgcatctgt

SEQ ID NO: 1479623 - DNA, 25 bp, Homo sapien
gcttcctgatatgcaccatcaagat

SEQ ID NO: 1479624 - DNA, 25 bp, Homo sapien
ttgaagaatcatgtctaaatgtcac

SEQ ID NO: 1479625 - DNA, 25 bp, Homo sapien
tgggccctttatgtggtcatcctga

SEQ ID NO: 1479626 - DNA, 25 bp, Homo sapien
gggccctttatgtggtcatcctgaa

SEQ ID NO: 1479627 - DNA, 25 bp, Homo sapien
tcatcctgaacttccactgttgaag

SEQ ID NO: 1479628 - DNA, 25 bp, Homo sapien
actcacatcagtgcccactgtcaaa

SEQ ID NO: 1479629 - DNA, 25 bp, Homo sapien
caaaaggctcctctgtatttagcac

SEQ ID NO: 1479630 - DNA, 25 bp, Homo sapien
cactgtcaaatagggaggctcatca

SEQ ID NO: 1479631 - DNA, 25 bp, Homo sapien
tgatcttggcttcacaaaaggctcc

SEQ ID NO: 1479632 - DNA, 25 bp, Homo sapien
catctccgttgttttataatcaaac

SEQ ID NO: 1479633 - DNA, 25 bp, Homo sapien
caggtggccaggatcgccgaaagca

SEQ ID NO: 1479634 - DNA, 25 bp, Homo sapien
caggatcgccgaaagcacaccagtg

SEQ ID NO: 1479635 - DNA, 25 bp, Homo sapien
agtgcccaggcgaagaacagccagg

SEQ ID NO: 1479636 - DNA, 25 bp, Homo sapien
tcgccacgcaaacggctcctgccag

SEQ ID NO: 1479637 - DNA, 25 bp, Homo sapien
agcttgccatcaaggtggcttctca

SEQ ID NO: 1479638 - DNA, 25 bp, Homo sapien
gcttgccatcaaggtggcttctcac

SEQ ID NO: 1479639 - DNA, 25 bp, Homo sapien
aattctagcatgtagaatccaacaa

SEQ ID NO: 1479640 - DNA, 25 bp, Homo sapien
gcatgtagaatccaacaatatgttc

SEQ ID NO: 1479641 - DNA, 25 bp, Homo sapien
tgtagaaatggaggattgttctaaa

SEQ ID NO: 1479642 - DNA, 25 bp, Homo sapien
ctggacttaagccaacccaaagtgc

SEQ ID NO: 1479643 - DNA, 25 bp, Homo sapien
gtaaatctatcttaggatctcagag

SEQ ID NO: 1479644 - DNA, 25 bp, Homo sapien
ggagcacgaagaaggacgtaaatct

SEQ ID NO: 1479645 - DNA, 25 bp, Homo sapien
taactactatggtcagattctgcac

SEQ ID NO: 1479646 - DNA, 25 bp, Homo sapien
tgtatcaggtgctggttaggaacca

SEQ ID NO: 1479647 - DNA, 25 bp, Homo sapien
agctgagattgcaccactgcactcc

SEQ ID NO: 1479648 - DNA, 25 bp, Homo sapien
actcaggagacggagattgcagtaa

SEQ ID NO: 1479649 - DNA, 25 bp, Homo sapien
tgagattgcaccactgcactccagc

SEQ ID NO: 1479650 - DNA, 25 bp, Homo sapien
aactcaggagacggagattgcagta

SEQ ID NO: 1479651 - DNA, 25 bp, Homo sapien
tgaacccaggggttcaagcctcctg

SEQ ID NO: 1479652 - DNA, 25 bp, Homo sapien
aagcaattctcccgcttgaacccag

SEQ ID NO: 1479653 - DNA, 25 bp, Homo sapien
agcaattctcccgcttgaacccagg

SEQ ID NO: 1479654 - DNA, 25 bp, Homo sapien
gcaattctcccgcttgaacccaggg

SEQ ID NO: 1479655 - DNA, 25 bp, Homo sapien
gtggcactgacatggccaatatcaa

SEQ ID NO: 1479656 - DNA, 25 bp, Homo sapien
agatcaaacaggctaagaaaaagct

SEQ ID NO: 1479657 - DNA, 25 bp, Homo sapien
ggcactgacatggccaatatcaaca

SEQ ID NO: 1479658 - DNA, 25 bp, Homo sapien
tcaaacaggctaagaaaaagctctg

SEQ ID NO: 1479659 - DNA, 25 bp, Homo sapien
gccttgccctggcccaggctagggt

SEQ ID NO: 1479660 - DNA, 25 bp, Homo sapien
gacagggtggccttgccctggccca

SEQ ID NO: 1479661 - DNA, 25 bp, Homo sapien
cccaccaccttgcctaactaattct

SEQ ID NO: 1479662 - DNA, 25 bp, Homo sapien
caccaccttgcctaactaattcttt

SEQ ID NO: 1479663 - DNA, 25 bp, Homo sapien
cagaaaaactacaattggaaagctt

SEQ ID NO: 1479664 - DNA, 25 bp, Homo sapien
tgaacctccccttcactacctccat

SEQ ID NO: 1479665 - DNA, 25 bp, Homo sapien
caatgcagaaaaactacaattggaa

SEQ ID NO: 1479666 - DNA, 25 bp, Homo sapien
tgcagaaaaactacaattggaaagc

SEQ ID NO: 1479667 - DNA, 25 bp, Homo sapien
tctggagtagagactcgggtttagc

SEQ ID NO: 1479668 - DNA, 25 bp, Homo sapien
tgcccatgctagatcagcttcaggt

SEQ ID NO: 1479669 - DNA, 25 bp, Homo sapien
gcttcaggtggctgactacaccaca

SEQ ID NO: 1479670 - DNA, 25 bp, Homo sapien
cttaactttgacagcaatagtggct

SEQ ID NO: 1479671 - DNA, 25 bp, Homo sapien
ggtgaaatagtgagactctatatca

SEQ ID NO: 1479672 - DNA, 25 bp, Homo sapien
caaaatttaggcctaatacactcaa

SEQ ID NO: 1479673 - DNA, 25 bp, Homo sapien
acagatcgtgccagccagggtgaaa

SEQ ID NO: 1479674 - DNA, 25 bp, Homo sapien
aggaggcagcagttacagatcgtgc

SEQ ID NO: 1479675 - DNA, 25 bp, Homo sapien
gacacattacatttactccaaacta

SEQ ID NO: 1479676 - DNA, 25 bp, Homo sapien
ttgcatttggctagtattaccaaga

SEQ ID NO: 1479677 - DNA, 25 bp, Homo sapien
tgcagtagaatgtaatgctgagcac

SEQ ID NO: 1479678 - DNA, 25 bp, Homo sapien
tgacaagcactacaacactgggaaa

SEQ ID NO: 1479679 - DNA, 25 bp, Homo sapien
taaccccagagattcgttttccgca

SEQ ID NO: 1479680 - DNA, 25 bp, Homo sapien
tacttcctgaattcgataaccccag

SEQ ID NO: 1479681 - DNA, 25 bp, Homo sapien
tgcaaaactcggaagccccacacga

SEQ ID NO: 1479682 - DNA, 25 bp, Homo sapien
ctcgtcgaaacctcctacttcctga

SEQ ID NO: 1479683 - DNA, 25 bp, Homo sapien
tatcctctaaaacaccaggttcagc

SEQ ID NO: 1479684 - DNA, 25 bp, Homo sapien
ggtatcctctaaaacaccaggttca

SEQ ID NO: 1479685 - DNA, 25 bp, Homo sapien
gaccaaggtatcctctaaaacacca

SEQ ID NO: 1479686 - DNA, 25 bp, Homo sapien
caaggtatcctctaaaacaccaggt

SEQ ID NO: 1479687 - DNA, 25 bp, Homo sapien
gccagggggcggctcggacacagcg

SEQ ID NO: 1479688 - DNA, 25 bp, Homo sapien
agccagggggcggctcggacacagc

SEQ ID NO: 1479689 - DNA, 25 bp, Homo sapien
ctaaaccgctgagtgtgcggccgcc

SEQ ID NO: 1479690 - DNA, 25 bp, Homo sapien
aaaccgctgagtgtgcggccgccca

SEQ ID NO: 1479691 - DNA, 25 bp, Homo sapien
accaccaccgcgatcttcctctgct

SEQ ID NO: 1479692 - DNA, 25 bp, Homo sapien
aggccccgaattcgggcgccgcagg

SEQ ID NO: 1479693 - DNA, 25 bp, Homo sapien
ccttaggagaccacgaaagccccag

SEQ ID NO: 1479694 - DNA, 25 bp, Homo sapien
taggagaccacgaaagccccagaaa

SEQ ID NO: 1479695 - DNA, 25 bp, Homo sapien
gagatctgaccctggcacgtccaga

SEQ ID NO: 1479696 - DNA, 25 bp, Homo sapien
cgcggcggcgactggtacctttgtt

SEQ ID NO: 1479697 - DNA, 25 bp, Homo sapien
gatgaagctcaagagtctccctccg

SEQ ID NO: 1479698 - DNA, 25 bp, Homo sapien
ttcctcggaggcgagatctgaccct

SEQ ID NO: 1479699 - DNA, 25 bp, Homo sapien
tgacgggcaaacatcgcttcccccc

SEQ ID NO: 1479700 - DNA, 25 bp, Homo sapien
gcaaacatcgcttcccccccaccga

SEQ ID NO: 1479701 - DNA, 25 bp, Homo sapien
ctgacgggcaaacatcgcttccccc

SEQ ID NO: 1479702 - DNA, 25 bp, Homo sapien
atcgcttcccccccaccgactctag

SEQ ID NO: 1479703 - DNA, 25 bp, Homo sapien
tcaaggctttctgggaaataaagtc

SEQ ID NO: 1479704 - DNA, 25 bp, Homo sapien
gctttctgggaaataaagtccatac

SEQ ID NO: 1479705 - DNA, 25 bp, Homo sapien
aggctttctgggaaataaagtccat

SEQ ID NO: 1479706 - DNA, 25 bp, Homo sapien
gcctcaaggctttctgggaaataaa

SEQ ID NO: 1479707 - DNA, 25 bp, Homo sapien
aacaaagcagtagggaggcggcaac

SEQ ID NO: 1479708 - DNA, 25 bp, Homo sapien
tgtgaccgggatggcgcattttctt

SEQ ID NO: 1479709 - DNA, 25 bp, Homo sapien
ggcaacgacgcctgcgcagtgtgac

SEQ ID NO: 1479710 - DNA, 25 bp, Homo sapien
gcgcaaatcctcgtccgcgagaact

SEQ ID NO: 1479711 - DNA, 25 bp, Homo sapien
agttctgtggtgaaatagtgggaag

SEQ ID NO: 1479712 - DNA, 25 bp, Homo sapien
agagttctgtggtgaaatagtggga

SEQ ID NO: 1479713 - DNA, 25 bp, Homo sapien
tctgtggtgaaatagtgggaaggat

SEQ ID NO: 1479714 - DNA, 25 bp, Homo sapien
ttctgtggtgaaatagtgggaagga

SEQ ID NO: 1479715 - DNA, 25 bp, Homo sapien
gagtaggcatctttaatcgccctga

SEQ ID NO: 1479716 - DNA, 25 bp, Homo sapien
cccgacttgaagacagtaggtgctt

SEQ ID NO: 1479717 - DNA, 25 bp, Homo sapien
gtttctacacccaagccactgaagt

SEQ ID NO: 1479718 - DNA, 25 bp, Homo sapien
cctgagagggcctgactgaaaagta

SEQ ID NO: 1479719 - DNA, 25 bp, Homo sapien
tttcagatagtttgacaggtacggg

SEQ ID NO: 1479720 - DNA, 25 bp, Homo sapien
ttaattgacgcgaggctggccatgc

SEQ ID NO: 1479721 - DNA, 25 bp, Homo sapien
gcactgagttggttcgtggatcccc

SEQ ID NO: 1479722 - DNA, 25 bp, Homo sapien
tactcaaatccatctcaccaaaggc

SEQ ID NO: 1479723 - DNA, 25 bp, Homo sapien
ccaggtttcagcactcggaaatcgc

SEQ ID NO: 1479724 - DNA, 25 bp, Homo sapien
tggaacacgcgctttccctgggctg

SEQ ID NO: 1479725 - DNA, 25 bp, Homo sapien
tctgtggtatctagtaaactggaac

SEQ ID NO: 1479726 - DNA, 25 bp, Homo sapien
agcactcggaaatcgcttgggcccc

SEQ ID NO: 1479727 - DNA, 25 bp, Homo sapien
caaatctgagggtacttccagggga

SEQ ID NO: 1479728 - DNA, 25 bp, Homo sapien
cagctgttgttcgtggttgatttca

SEQ ID NO: 1479729 - DNA, 25 bp, Homo sapien
tgtgctctgtacagaccttagaaac

SEQ ID NO: 1479730 - DNA, 25 bp, Homo sapien
gggcgaccacatattgacagctgtt

SEQ ID NO: 1479731 - DNA, 25 bp, Homo sapien
gggtagctggcgaccgggtatggag

SEQ ID NO: 1479732 - DNA, 25 bp, Homo sapien
attcgggcatgggtagctggcgacc

SEQ ID NO: 1479733 - DNA, 25 bp, Homo sapien
gagggtagaccccattgttagctct

SEQ ID NO: 1479734 - DNA, 25 bp, Homo sapien
gcagctggcaggattcgggcatggg

SEQ ID NO: 1479735 - DNA, 25 bp, Homo sapien
ggtaatttgcccctaaatgcctgat

SEQ ID NO: 1479736 - DNA, 25 bp, Homo sapien
taaactccgggcagtagaccgtgtc

SEQ ID NO: 1479737 - DNA, 25 bp, Homo sapien
cctggtgataatgcggaaagtcttc

SEQ ID NO: 1479738 - DNA, 25 bp, Homo sapien
tccatacaggccaacagatgttctc

SEQ ID NO: 1479739 - DNA, 25 bp, Homo sapien
gagtatgtcactccccactggtgtg

SEQ ID NO: 1479740 - DNA, 25 bp, Homo sapien
ggcgtacatcgctatgcttggctaa

SEQ ID NO: 1479741 - DNA, 25 bp, Homo sapien
ggtgtgcagcaggtaaccccttctc

SEQ ID NO: 1479742 - DNA, 25 bp, Homo sapien
tcaaacaatgaaagccagtccgtct

SEQ ID NO: 1479743 - DNA, 25 bp, Homo sapien
cgatggcactaaaaccctgagaggt

SEQ ID NO: 1479744 - DNA, 25 bp, Homo sapien
ctaaggccagagttgagagatgtcc

SEQ ID NO: 1479745 - DNA, 25 bp, Homo sapien
tagaagccgggcagagaaatcgagc

SEQ ID NO: 1479746 - DNA, 25 bp, Homo sapien
gatgtaattacagaatggcggcgct

SEQ ID NO: 1479747 - DNA, 25 bp, Homo sapien
aaggatcaccgcaccgttccttcag

SEQ ID NO: 1479748 - DNA, 25 bp, Homo sapien
ctgtctcacaggtcttctcacacag

SEQ ID NO: 1479749 - DNA, 25 bp, Homo sapien
cacggagaatactgaggagaagaca

SEQ ID NO: 1479750 - DNA, 25 bp, Homo sapien
gtttccacagttccgtcagttccca

SEQ ID NO: 1479751 - DNA, 25 bp, Homo sapien
tcttttaggtcctatggcagccatc

SEQ ID NO: 1479752 - DNA, 25 bp, Homo sapien
agatgcccatgcttacatcttcacc

SEQ ID NO: 1479753 - DNA, 25 bp, Homo sapien
atccagatgcccatgcttacatctt

SEQ ID NO: 1479754 - DNA, 25 bp, Homo sapien
cttttaggtcctatggcagccatcc

SEQ ID NO: 1479755 - DNA, 25 bp, Homo sapien
taaagacaaaaccatagccactccc

SEQ ID NO: 1479756 - DNA, 25 bp, Homo sapien
atacatggcccataaagtttaaatg

SEQ ID NO: 1479757 - DNA, 25 bp, Homo sapien
tttgtaaagacaaaaccatagccac

SEQ ID NO: 1479758 - DNA, 25 bp, Homo sapien
tacatggcccataaagtttaaatgt

SEQ ID NO: 1479759 - DNA, 25 bp, Homo sapien
atgaagtcaaagctagtggtcttta

SEQ ID NO: 1479760 - DNA, 25 bp, Homo sapien
tagtggtctttaatatgaagcaccc

SEQ ID NO: 1479761 - DNA, 25 bp, Homo sapien
gctagtggtctttaatatgaagcac

SEQ ID NO: 1479762 - DNA, 25 bp, Homo sapien
tcacatgaagtcaaagctagtggtc

SEQ ID NO: 1479763 - DNA, 25 bp, Homo sapien
ctagctgaaaacataataagtaggc

SEQ ID NO: 1479764 - DNA, 25 bp, Homo sapien
agggatgacacctgtaaatactagc

SEQ ID NO: 1479765 - DNA, 25 bp, Homo sapien
cctgtaaatactagctgaaaacata

SEQ ID NO: 1479766 - DNA, 25 bp, Homo sapien
gacacctgtaaatactagctgaaaa

SEQ ID NO: 1479767 - DNA, 25 bp, Homo sapien
ggttcggtcaactgcccaattcagt

SEQ ID NO: 1479768 - DNA, 25 bp, Homo sapien
tatcctgacccacatgcaaaggcag

SEQ ID NO: 1479769 - DNA, 25 bp, Homo sapien
ttaacctccccgagttgcttgccag

SEQ ID NO: 1479770 - DNA, 25 bp, Homo sapien
gcttgccagccacttgacgatgtcc

SEQ ID NO: 1479771 - DNA, 25 bp, Homo sapien
aaattgaagctcgttgtttccacag

SEQ ID NO: 1479772 - DNA, 25 bp, Homo sapien
ggtctatgtaacagtcatcatctgt

SEQ ID NO: 1479773 - DNA, 25 bp, Homo sapien
ctattaaatacagcttcgaggtcta

SEQ ID NO: 1479774 - DNA, 25 bp, Homo sapien
tctgtcttcagcaacaaattgaagc

SEQ ID NO: 1479775 - DNA, 25 bp, Homo sapien
gataagtgtcgacaacatccacaaa

SEQ ID NO: 1479776 - DNA, 25 bp, Homo sapien
gaaggttgtgtaagagagcatcacc

SEQ ID NO: 1479777 - DNA, 25 bp, Homo sapien
tatcatcatagatgctgctttcctc

SEQ ID NO: 1479778 - DNA, 25 bp, Homo sapien
tcctccttcagtaaggcatcttcct

SEQ ID NO: 1479779 - DNA, 25 bp, Homo sapien
cccagaatagccaatcaagcttgaa

SEQ ID NO: 1479780 - DNA, 25 bp, Homo sapien
tgagagtcctcaagtaaatccttac

SEQ ID NO: 1479781 - DNA, 25 bp, Homo sapien
ggttaaagacgcagacacatagatc

SEQ ID NO: 1479782 - DNA, 25 bp, Homo sapien
gatccaagacctacgtataagtgct

SEQ ID NO: 1479783 - DNA, 25 bp, Homo sapien
ggtggagccggttgtagaactctaa

SEQ ID NO: 1479784 - DNA, 25 bp, Homo sapien
aaacaacctggcagtgcctcaagtg

SEQ ID NO: 1479785 - DNA, 25 bp, Homo sapien
cagtgtgcagcctcagcaatatgac

SEQ ID NO: 1479786 - DNA, 25 bp, Homo sapien
cacacaattatatgacccaggtctt

SEQ ID NO: 1479787 - DNA, 25 bp, Homo sapien
tatatataaaaccacctgcaactcc

SEQ ID NO: 1479788 - DNA, 25 bp, Homo sapien
tccaagaattcatgaggcaatgcac

SEQ ID NO: 1479789 - DNA, 25 bp, Homo sapien
cacaccttccaagaattcatgaggc

SEQ ID NO: 1479790 - DNA, 25 bp, Homo sapien
atagtatatataaaaccacctgcaa

SEQ ID NO: 1479791 - DNA, 25 bp, Homo sapien
gaatgtactcagtgattcattacta

SEQ ID NO: 1479792 - DNA, 25 bp, Homo sapien
gggcaggctatagattccaacgttg

SEQ ID NO: 1479793 - DNA, 25 bp, Homo sapien
gtagttccataaaagactgtatatg

SEQ ID NO: 1479794 - DNA, 25 bp, Homo sapien
taaaagttcgtagccaaatgtgaaa

SEQ ID NO: 1479795 - DNA, 25 bp, Homo sapien
tgaaaattactaaaggggcaggcta

SEQ ID NO: 1479796 - DNA, 25 bp, Homo sapien
cagcacaccccgccttattttccaa

SEQ ID NO: 1479797 - DNA, 25 bp, Homo sapien
gcacaccccgccttattttccaata

SEQ ID NO: 1479798 - DNA, 25 bp, Homo sapien
gccagcacaccccgccttattttcc

SEQ ID NO: 1479799 - DNA, 25 bp, Homo sapien
cacaccccgccttattttccaatat

SEQ ID NO: 1479800 - DNA, 25 bp, Homo sapien
tgtggagatttcttgacacaaggcc

SEQ ID NO: 1479801 - DNA, 25 bp, Homo sapien
tggctctcccacacgattgtacctt

SEQ ID NO: 1479802 - DNA, 25 bp, Homo sapien
gaggtcttggctctcccacacgatt

SEQ ID NO: 1479803 - DNA, 25 bp, Homo sapien
cacaaggccgtggaggtcttggctc

SEQ ID NO: 1479804 - DNA, 25 bp, Homo sapien
ccaggtatagccactattaaataat

SEQ ID NO: 1479805 - DNA, 25 bp, Homo sapien
agcctgaagggagataaaaagcaca

SEQ ID NO: 1479806 - DNA, 25 bp, Homo sapien
taataactagacctggtggccaggc

SEQ ID NO: 1479807 - DNA, 25 bp, Homo sapien
aggctatagtcattaaaactcttaa

SEQ ID NO: 1479808 - DNA, 25 bp, Homo sapien
caattcatcctaagaaaataaccag

SEQ ID NO: 1479809 - DNA, 25 bp, Homo sapien
agttatacacataaaacagaggtgc

SEQ ID NO: 1479810 - DNA, 25 bp, Homo sapien
taaccagttatacacataaaacaga

SEQ ID NO: 1479811 - DNA, 25 bp, Homo sapien
aataaccagttatacacataaaaca

SEQ ID NO: 1479812 - DNA, 25 bp, Homo sapien
tctaggaaactgaccccgattgtgg

SEQ ID NO: 1479813 - DNA, 25 bp, Homo sapien
ttatgactggacctagagggaccca

SEQ ID NO: 1479814 - DNA, 25 bp, Homo sapien
taactccaggactaatgagggcacc

SEQ ID NO: 1479815 - DNA, 25 bp, Homo sapien
tcttggttagtcaccagggccggtc

SEQ ID NO: 1479816 - DNA, 25 bp, Homo sapien
ggttttggaacctctgaggcctcat

SEQ ID NO: 1479817 - DNA, 25 bp, Homo sapien
tacaagaaaatatcaagtgcctgcc

SEQ ID NO: 1479818 - DNA, 25 bp, Homo sapien
tggtaccttcatctatcactctgga

SEQ ID NO: 1479819 - DNA, 25 bp, Homo sapien
gagtgctatgttttagcccatccac

SEQ ID NO: 1479820 - DNA, 25 bp, Homo sapien
ccacagcttggaggactgaagcgag

SEQ ID NO: 1479821 - DNA, 25 bp, Homo sapien
cttggaggactgaagcgagcaatga

SEQ ID NO: 1479822 - DNA, 25 bp, Homo sapien
tccacgggcttgtaccacagcttgt

SEQ ID NO: 1479823 - DNA, 25 bp, Homo sapien
gaattgttccacgggcttgtaccac

SEQ ID NO: 1479824 - DNA, 25 bp, Homo sapien
tagagaactcggaaactcacgctga

SEQ ID NO: 1479825 - DNA, 25 bp, Homo sapien
aggcagccccgatgaagtgtcttcg

SEQ ID NO: 1479826 - DNA, 25 bp, Homo sapien
tttgacagtgatgttcctctggaaa

SEQ ID NO: 1479827 - DNA, 25 bp, Homo sapien
cgctgacaactcgatcctcaggcag

SEQ ID NO: 1479828 - DNA, 25 bp, Homo sapien
taatgccaaaacctaggtaatcatt

SEQ ID NO: 1479829 - DNA, 25 bp, Homo sapien
tgccaaaacctaggtaatcatttgc

SEQ ID NO: 1479830 - DNA, 25 bp, Homo sapien
gcttaatgccaaaacctaggtaatc

SEQ ID NO: 1479831 - DNA, 25 bp, Homo sapien
ttactagtaagaagtagtgaagtgg

SEQ ID NO: 1479832 - DNA, 25 bp, Homo sapien
ggagcagctttctttatcctcacca

SEQ ID NO: 1479833 - DNA, 25 bp, Homo sapien
agtgcagtagcggaagcagatcata

SEQ ID NO: 1479834 - DNA, 25 bp, Homo sapien
tttcagacatgggagctcactatgt

SEQ ID NO: 1479835 - DNA, 25 bp, Homo sapien
cacagagaacctagttaggatcagc

SEQ ID NO: 1479836 - DNA, 25 bp, Homo sapien
gagtagtttacaggaataaggatct

SEQ ID NO: 1479837 - DNA, 25 bp, Homo sapien
gtgatgttgagtagtttacaggaat

SEQ ID NO: 1479838 - DNA, 25 bp, Homo sapien
caggaataaggatcttccctgtctt

SEQ ID NO: 1479839 - DNA, 25 bp, Homo sapien
tttacaggaataaggatcttccctg

SEQ ID NO: 1479840 - DNA, 25 bp, Homo sapien
cattacaaacatgataaagtcctga

SEQ ID NO: 1479841 - DNA, 25 bp, Homo sapien
tctcatgcccatacctaaaaacata

SEQ ID NO: 1479842 - DNA, 25 bp, Homo sapien
tagaccttgcttcactggttacccc

SEQ ID NO: 1479843 - DNA, 25 bp, Homo sapien
gattaggtctttccatccaagagga

SEQ ID NO: 1479844 - DNA, 25 bp, Homo sapien
cactaatgtaaccaatgagctgctg

SEQ ID NO: 1479845 - DNA, 25 bp, Homo sapien
cttcaaatagcatgggaatgattcc

SEQ ID NO: 1479846 - DNA, 25 bp, Homo sapien
tctctacggcttaatactgcccagc

SEQ ID NO: 1479847 - DNA, 25 bp, Homo sapien
tgagctgctgctaaatcaatagaca

SEQ ID NO: 1479848 - DNA, 25 bp, Homo sapien
acgcctggctaggtttttcagaact

SEQ ID NO: 1479849 - DNA, 25 bp, Homo sapien
gcctggctaggtttttcagaactct

SEQ ID NO: 1479850 - DNA, 25 bp, Homo sapien
ttcaataaaccaggcaaggcaacaa

SEQ ID NO: 1479851 - DNA, 25 bp, Homo sapien
gcaaggcaacaactcagaaaaccta

SEQ ID NO: 1479852 - DNA, 25 bp, Homo sapien
caggtgcttcttatcacgtttcgaa

SEQ ID NO: 1479853 - DNA, 25 bp, Homo sapien
cgttgacttaatgtgggatgctgta

SEQ ID NO: 1479854 - DNA, 25 bp, Homo sapien
tgtagcaaatgtctcatccaggtgc

SEQ ID NO: 1479855 - DNA, 25 bp, Homo sapien
gttattgcgagctgacaacacgcca

SEQ ID NO: 1479856 - DNA, 25 bp, Homo sapien
ctgggcaacaagagtgagactccac

SEQ ID NO: 1479857 - DNA, 25 bp, Homo sapien
ttggggtgagccgagaccgcgccat

SEQ ID NO: 1479858 - DNA, 25 bp, Homo sapien
gaggttggggtgagccgagaccgcg

SEQ ID NO: 1479859 - DNA, 25 bp, Homo sapien
accgcgccattgcactccagcctgg

SEQ ID NO: 1479860 - DNA, 25 bp, Homo sapien
tcaacaaagtggctactctccgccg

SEQ ID NO: 1479861 - DNA, 25 bp, Homo sapien
gaacagggtacctagttgactccag

SEQ ID NO: 1479862 - DNA, 25 bp, Homo sapien
gaagtaaacatgatacagaaggaca

SEQ ID NO: 1479863 - DNA, 25 bp, Homo sapien
gacaccagttttctcctacattcaa

SEQ ID NO: 1479864 - DNA, 25 bp, Homo sapien
gataaacaggcgataggaactatgt

SEQ ID NO: 1479865 - DNA, 25 bp, Homo sapien
gaaaatacatcaaactgcgccagtt

SEQ ID NO: 1479866 - DNA, 25 bp, Homo sapien
tacaaaagtagccaaatttctgcca

SEQ ID NO: 1479867 - DNA, 25 bp, Homo sapien
ttctgccactggttactatccctgg

SEQ ID NO: 1479868 - DNA, 25 bp, Homo sapien
tgaccgagaaagaccaacaacttgg

SEQ ID NO: 1479869 - DNA, 25 bp, Homo sapien
gctgaagggcacacgaggttccgct

SEQ ID NO: 1479870 - DNA, 25 bp, Homo sapien
attatccacggcactaaaaccccag

SEQ ID NO: 1479871 - DNA, 25 bp, Homo sapien
ccaaagcagaaagcgctggcggctg

SEQ ID NO: 1479872 - DNA, 25 bp, Homo sapien
gcgcggccccgagcacacacgggca

SEQ ID NO: 1479873 - DNA, 25 bp, Homo sapien
gagccgggctctcccgcgtcccggc

SEQ ID NO: 1479874 - DNA, 25 bp, Homo sapien
ggctgacgagcgaccactccgagca

SEQ ID NO: 1479875 - DNA, 25 bp, Homo sapien
caagtgcggagactgaggggcggcg

SEQ ID NO: 1479876 - DNA, 25 bp, Homo sapien
cctccggtccctcagaccgcgggtg

SEQ ID NO: 1479877 - DNA, 25 bp, Homo sapien
gctcggcgacgtctggagggctcct

SEQ ID NO: 1479878 - DNA, 25 bp, Homo sapien
gaaggaaatccgagtggctcttgtg

SEQ ID NO: 1479879 - DNA, 25 bp, Homo sapien
tgtccgcgcctggagcggtgactca

SEQ ID NO: 1479880 - DNA, 25 bp, Homo sapien
gcagagctcctctgttccgcgtgct

SEQ ID NO: 1479881 - DNA, 25 bp, Homo sapien
gctctcttgctcgactgctgtggga

SEQ ID NO: 1479882 - DNA, 25 bp, Homo sapien
attagctctggtgccgtgggttccc

SEQ ID NO: 1479883 - DNA, 25 bp, Homo sapien
tcagggattagctctggtgccgtgg

SEQ ID NO: 1479884 - DNA, 25 bp, Homo sapien
tcccggctctttgcccggttctgtg

SEQ ID NO: 1479885 - DNA, 25 bp, Homo sapien
gtgccgtgggttcccggctctttgc

SEQ ID NO: 1479886 - DNA, 25 bp, Homo sapien
cacgtgctccgggttcatactggag

SEQ ID NO: 1479887 - DNA, 25 bp, Homo sapien
ggactaggctgtggaacacgatgat

SEQ ID NO: 1479888 - DNA, 25 bp, Homo sapien
gatgacgagccaatcagggtagaac

SEQ ID NO: 1479889 - DNA, 25 bp, Homo sapien
tgggaacgcagggtgacagacagcg

SEQ ID NO: 1479890 - DNA, 25 bp, Homo sapien
tgctctagtgttctctatcaaccac

SEQ ID NO: 1479891 - DNA, 25 bp, Homo sapien
ctcttgttccagactgctctagtgt

SEQ ID NO: 1479892 - DNA, 25 bp, Homo sapien
cagactgctctagtgttctctatca

SEQ ID NO: 1479893 - DNA, 25 bp, Homo sapien
ttccagactgctctagtgttctcta

SEQ ID NO: 1479894 - DNA, 25 bp, Homo sapien
tcataaccacttctcgaggccacag

SEQ ID NO: 1479895 - DNA, 25 bp, Homo sapien
ctgctttgacccgaaacacagacat

SEQ ID NO: 1479896 - DNA, 25 bp, Homo sapien
ccagattcttctgctttgacccgaa

SEQ ID NO: 1479897 - DNA, 25 bp, Homo sapien
tcttctgctttgacccgaaacacag

SEQ ID NO: 1479898 - DNA, 25 bp, Homo sapien
cacagagctcttgcatacctaacag

SEQ ID NO: 1479899 - DNA, 25 bp, Homo sapien
gcccctggtgccttaatgcatctga

SEQ ID NO: 1479900 - DNA, 25 bp, Homo sapien
tacctaacaggagacttggtgacag

SEQ ID NO: 1479901 - DNA, 25 bp, Homo sapien
tccccacaggctgattacagtaaag

SEQ ID NO: 1479902 - DNA, 25 bp, Homo sapien
aatctattgtcagctgttccataca

SEQ ID NO: 1479903 - DNA, 25 bp, Homo sapien
acaaatctattgtcagctgttccat

SEQ ID NO: 1479904 - DNA, 25 bp, Homo sapien
catgaggacaagtatctttttgagg

SEQ ID NO: 1479905 - DNA, 25 bp, Homo sapien
gaggggcaacagtaattacaaatct

SEQ ID NO: 1479906 - DNA, 25 bp, Homo sapien
ttgatattccctttccgaagctagg

SEQ ID NO: 1479907 - DNA, 25 bp, Homo sapien
gggatagcacccacctcattgacta

SEQ ID NO: 1479908 - DNA, 25 bp, Homo sapien
gaaagcaatttggtgcaccatgccc

SEQ ID NO: 1479909 - DNA, 25 bp, Homo sapien
tgaaagaaaccaactgtgctgccct

SEQ ID NO: 1479910 - DNA, 25 bp, Homo sapien
gcaggttcaataatgaggtctttgg

SEQ ID NO: 1479911 - DNA, 25 bp, Homo sapien
cctgtaagttgtgaggctgctgata

SEQ ID NO: 1479912 - DNA, 25 bp, Homo sapien
gaaggaatgctagatgcagctgatt

SEQ ID NO: 1479913 - DNA, 25 bp, Homo sapien
ggatgagggacgctgaacatataaa

SEQ ID NO: 1479914 - DNA, 25 bp, Homo sapien
aatgcttttggctcctaagaccaac

SEQ ID NO: 1479915 - DNA, 25 bp, Homo sapien
caccaatgcttttggctcctaagac

SEQ ID NO: 1479916 - DNA, 25 bp, Homo sapien
accaatgcttttggctcctaagacc

SEQ ID NO: 1479917 - DNA, 25 bp, Homo sapien
gcttttggctcctaagaccaacgga

SEQ ID NO: 1479918 - DNA, 25 bp, Homo sapien
cacgagttagcagttcttgcatact

SEQ ID NO: 1479919 - DNA, 25 bp, Homo sapien
catgttgttaggcatgggggcacga

SEQ ID NO: 1479920 - DNA, 25 bp, Homo sapien
gttgttaggcatgggggcacgagtt

SEQ ID NO: 1479921 - DNA, 25 bp, Homo sapien
taggcatgggggcacgagttagcag

SEQ ID NO: 1479922 - DNA, 25 bp, Homo sapien
caggcttctatgattagatctgcaa

SEQ ID NO: 1479923 - DNA, 25 bp, Homo sapien
ctatgattagatctgcaatctaatg

SEQ ID NO: 1479924 - DNA, 25 bp, Homo sapien
tatgattagatctgcaatctaatgt

SEQ ID NO: 1479925 - DNA, 25 bp, Homo sapien
gcttctatgattagatctgcaatct

SEQ ID NO: 1479926 - DNA, 25 bp, Homo sapien
tttggtaaacatggtctatcataat

SEQ ID NO: 1479927 - DNA, 25 bp, Homo sapien
atcatttattttggcttaaactatt

SEQ ID NO: 1479928 - DNA, 25 bp, Homo sapien
gtaaacatggtctatcataatctaa

SEQ ID NO: 1479929 - DNA, 25 bp, Homo sapien
tcataatctaatgagtaaaaatcat

SEQ ID NO: 1479930 - DNA, 25 bp, Homo sapien
gattgccctggaactcaacatgtca

SEQ ID NO: 1479931 - DNA, 25 bp, Homo sapien
attgccctggaactcaacatgtcag

SEQ ID NO: 1479932 - DNA, 25 bp, Homo sapien
tcgtggggtcccagcgtgaagctgc

SEQ ID NO: 1479933 - DNA, 25 bp, Homo sapien
tgattgccctggaactcaacatgtc

SEQ ID NO: 1479934 - DNA, 25 bp, Homo sapien
tattccggccccagtgtattaatac

SEQ ID NO: 1479935 - DNA, 25 bp, Homo sapien
cagtattccggccccagtgtattaa

SEQ ID NO: 1479936 - DNA, 25 bp, Homo sapien
tcagtattccggccccagtgtatta

SEQ ID NO: 1479937 - DNA, 25 bp, Homo sapien
gtattccggccccagtgtattaata

SEQ ID NO: 1479938 - DNA, 25 bp, Homo sapien
ggttttgcagcaggctatctcctcc

SEQ ID NO: 1479939 - DNA, 25 bp, Homo sapien
ttgcattcagaggtgtcataggaga

SEQ ID NO: 1479940 - DNA, 25 bp, Homo sapien
gctgggcgacctgggcatctgagct

SEQ ID NO: 1479941 - DNA, 25 bp, Homo sapien
tccccaacggtggtgtctgatgata

SEQ ID NO: 1479942 - DNA, 25 bp, Homo sapien
tcttcccaaaagacacaatttccac

SEQ ID NO: 1479943 - DNA, 25 bp, Homo sapien
tgtcttcccaaaagacacaatttcc

SEQ ID NO: 1479944 - DNA, 25 bp, Homo sapien
ttcccaaaagacacaatttccacag

SEQ ID NO: 1479945 - DNA, 25 bp, Homo sapien
cccaaaagacacaatttccacagca

SEQ ID NO: 1479946 - DNA, 25 bp, Homo sapien
tgttcacaaacggaaagcacccagg

SEQ ID NO: 1479947 - DNA, 25 bp, Homo sapien
cagaaatgacattcccaggacgctg

SEQ ID NO: 1479948 - DNA, 25 bp, Homo sapien
tgtgcttatccagccaacatgggca

SEQ ID NO: 1479949 - DNA, 25 bp, Homo sapien
tgcccagatcaaaagtgtacagctc

SEQ ID NO: 1479950 - DNA, 25 bp, Homo sapien
gctcatagccccaagcaagggtcca

SEQ ID NO: 1479951 - DNA, 25 bp, Homo sapien
tatatctaaggcatgatgtccctgc

SEQ ID NO: 1479952 - DNA, 25 bp, Homo sapien
gaccacggtggcttccttgaaatga

SEQ ID NO: 1479953 - DNA, 25 bp, Homo sapien
ttgctgtatgactaccaaccccgga

SEQ ID NO: 1479954 - DNA, 25 bp, Homo sapien
taaatccatttacgagggcagcaag

SEQ ID NO: 1479955 - DNA, 25 bp, Homo sapien
tcactctaggaagggtgacccgtcc

SEQ ID NO: 1479956 - DNA, 25 bp, Homo sapien
ttttatgcctccaacggaaccatgg

SEQ ID NO: 1479957 - DNA, 25 bp, Homo sapien
caaaggatctgaggtcctagcgtca

SEQ ID NO: 1479958 - DNA, 25 bp, Homo sapien
taaactaccagaatacggcttcctc

SEQ ID NO: 1479959 - DNA, 25 bp, Homo sapien
ggttgatcttagacaatccaagagc

SEQ ID NO: 1479960 - DNA, 25 bp, Homo sapien
tctcctctttcatcgggatcatatg

SEQ ID NO: 1479961 - DNA, 25 bp, Homo sapien
catcgatgtctagcctttccttggg

SEQ ID NO: 1479962 - DNA, 25 bp, Homo sapien
gtgggtctccctacctgcaaacagg

SEQ ID NO: 1479963 - DNA, 25 bp, Homo sapien
tgaagtgtgccacgggttactgcaa

SEQ ID NO: 1479964 - DNA, 25 bp, Homo sapien
aaaggtgtttgcttcacggtgtgca

SEQ ID NO: 1479965 - DNA, 25 bp, Homo sapien
ccttgggcaaactacataaacgctt

SEQ ID NO: 1479966 - DNA, 25 bp, Homo sapien
gttggtctcactccctaaggcttag

SEQ ID NO: 1479967 - DNA, 25 bp, Homo sapien
gatggaaacataagacaagccccgg

SEQ ID NO: 1479968 - DNA, 25 bp, Homo sapien
ggccccaggaggatatgctaagaaa

SEQ ID NO: 1479969 - DNA, 25 bp, Homo sapien
tcaagttgacttcggtgtccgccca

SEQ ID NO: 1479970 - DNA, 25 bp, Homo sapien
atgagaggatcttcccgcacgtgag

SEQ ID NO: 1479971 - DNA, 25 bp, Homo sapien
tcttctcgcgaaaggggttttctga

SEQ ID NO: 1479972 - DNA, 25 bp, Homo sapien
tgatgcaggcactggaatgatgaga

SEQ ID NO: 1479973 - DNA, 25 bp, Homo sapien
ccgcacgtgagcttcacagtaggcc

SEQ ID NO: 1479974 - DNA, 25 bp, Homo sapien
ttctttccaggcttatctgaagcct

SEQ ID NO: 1479975 - DNA, 25 bp, Homo sapien
cactgtggtctccaagacacccctt

SEQ ID NO: 1479976 - DNA, 25 bp, Homo sapien
cccggccctgagaagtacaggatgg

SEQ ID NO: 1479977 - DNA, 25 bp, Homo sapien
ctctaggctgtgacccgccaatccc

SEQ ID NO: 1479978 - DNA, 25 bp, Homo sapien
ctgagaagtacaggatggacacagc

SEQ ID NO: 1479979 - DNA, 25 bp, Homo sapien
catgggccagttcgactcttttaat

SEQ ID NO: 1479980 - DNA, 25 bp, Homo sapien
tccatcatgggccagttcgactctt

SEQ ID NO: 1479981 - DNA, 25 bp, Homo sapien
tcttttaattctctaggagcaacct

SEQ ID NO: 1479982 - DNA, 25 bp, Homo sapien
aattctctaggagcaacctcaaggg

SEQ ID NO: 1479983 - DNA, 25 bp, Homo sapien
ggcccatgttccactccatagcaga

SEQ ID NO: 1479984 - DNA, 25 bp, Homo sapien
caagcattaaaggagtgggctcaaa

SEQ ID NO: 1479985 - DNA, 25 bp, Homo sapien
gacagctcagtcgaggagaagtcag

SEQ ID NO: 1479986 - DNA, 25 bp, Homo sapien
gggaagctgcactatcaaccagtac

SEQ ID NO: 1479987 - DNA, 25 bp, Homo sapien
agctgcatctaatacagcataagtc

SEQ ID NO: 1479988 - DNA, 25 bp, Homo sapien
gctgcatctaatacagcataagtca

SEQ ID NO: 1479989 - DNA, 25 bp, Homo sapien
ctgcatctaatacagcataagtcat

SEQ ID NO: 1479990 - DNA, 25 bp, Homo sapien
ccctgacgtacgatggtctggctga

SEQ ID NO: 1479991 - DNA, 25 bp, Homo sapien
cagcccttgtaggaattgtgagcac

SEQ ID NO: 1479992 - DNA, 25 bp, Homo sapien
cagtagtctatagaacgcaggccca

SEQ ID NO: 1479993 - DNA, 25 bp, Homo sapien
gagactgggcagaatgttccttggc

SEQ ID NO: 1479994 - DNA, 25 bp, Homo sapien
ggcacagatgcggttcctaggttca

SEQ ID NO: 1479995 - DNA, 25 bp, Homo sapien
ttggcacagatgcggttcctaggtt

SEQ ID NO: 1479996 - DNA, 25 bp, Homo sapien
tggcacagatgcggttcctaggttc

SEQ ID NO: 1479997 - DNA, 25 bp, Homo sapien
gcacagatgcggttcctaggttcag

SEQ ID NO: 1479998 - DNA, 25 bp, Homo sapien
aattaccacaggatctgaattagcc

SEQ ID NO: 1479999 - DNA, 25 bp, Homo sapien
ttaccacaggatctgaattagcctc

SEQ ID NO: 1480000 - DNA, 25 bp, Homo sapien
ctggaattaccacaggatctgaatt

SEQ ID NO: 1480001 - DNA, 25 bp, Homo sapien
accacaggatctgaattagcctctg

SEQ ID NO: 1480002 - DNA, 25 bp, Homo sapien
gagtattggtgctttctagccatac

SEQ ID NO: 1480003 - DNA, 25 bp, Homo sapien
ttggagaggttgtacccccagagct

SEQ ID NO: 1480004 - DNA, 25 bp, Homo sapien
taactttccgtgcatattttctgcc

SEQ ID NO: 1480005 - DNA, 25 bp, Homo sapien
acagaggtgagtattggtgctttct

SEQ ID NO: 1480006 - DNA, 25 bp, Homo sapien
tcaactctattacagtcaacgagcg

SEQ ID NO: 1480007 - DNA, 25 bp, Homo sapien
gcccaggtgagacctctgatttgtg

SEQ ID NO: 1480008 - DNA, 25 bp, Homo sapien
tcaggttcccgacaccagagttggg

SEQ ID NO: 1480009 - DNA, 25 bp, Homo sapien
tagaaggcttcaggagtcgcccgtt

SEQ ID NO: 1480010 - DNA, 25 bp, Homo sapien
gtgaaatgaatacaacgggaggtgt

SEQ ID NO: 1480011 - DNA, 25 bp, Homo sapien
tgaatacaacgggaggtgtctggaa

SEQ ID NO: 1480012 - DNA, 25 bp, Homo sapien
aaatgaatacaacgggaggtgtctg

SEQ ID NO: 1480013 - DNA, 25 bp, Homo sapien
ctgcagtcctcccagcgtggagaga

SEQ ID NO: 1480014 - DNA, 25 bp, Homo sapien
gccgaggcccaggtacgccgacgcc

SEQ ID NO: 1480015 - DNA, 25 bp, Homo sapien
ggcgtcggcgtacctgggcctcggc

SEQ ID NO: 1480016 - DNA, 25 bp, Homo sapien
gtccatacaggcttccatctttagc

SEQ ID NO: 1480017 - DNA, 25 bp, Homo sapien
ctagtggtgctgttattagacatgc

SEQ ID NO: 1480018 - DNA, 25 bp, Homo sapien
ggcttgggagatgctagtggtgctg

SEQ ID NO: 1480019 - DNA, 25 bp, Homo sapien
tccatacaggcttccatctttagct

SEQ ID NO: 1480020 - DNA, 25 bp, Homo sapien
ggaaggtcccaccagcgcactgtgc

SEQ ID NO: 1480021 - DNA, 25 bp, Homo sapien
tctccgcagaggagagttctggctg

SEQ ID NO: 1480022 - DNA, 25 bp, Homo sapien
caccagcgcactgtgctttccttgt

SEQ ID NO: 1480023 - DNA, 25 bp, Homo sapien
cctctccgcagaggagagttctggc

SEQ ID NO: 1480024 - DNA, 25 bp, Homo sapien
acagcagagcctgtaggacaccacc

SEQ ID NO: 1480025 - DNA, 25 bp, Homo sapien
gagcctgtaggacaccacccacagc

SEQ ID NO: 1480026 - DNA, 25 bp, Homo sapien
gcctgtaggacaccacccacagctg

SEQ ID NO: 1480027 - DNA, 25 bp, Homo sapien
agcagagcctgtaggacaccaccca

SEQ ID NO: 1480028 - DNA, 25 bp, Homo sapien
gctgagaggcagccgtgtgacaggc

SEQ ID NO: 1480029 - DNA, 25 bp, Homo sapien
ctgctgagaggcagccgtgtgacag

SEQ ID NO: 1480030 - DNA, 25 bp, Homo sapien
tgctgagaggcagccgtgtgacagg

SEQ ID NO: 1480031 - DNA, 25 bp, Homo sapien
ctgtcagtcgtcagatgagaggtga

SEQ ID NO: 1480032 - DNA, 25 bp, Homo sapien
cagtcgtcagatgagaggtgaattc

SEQ ID NO: 1480033 - DNA, 25 bp, Homo sapien
agcagctgtcagtcgtcagatgaga

SEQ ID NO: 1480034 - DNA, 25 bp, Homo sapien
tcgtcagatgagaggtgaattcaga

SEQ ID NO: 1480035 - DNA, 25 bp, Homo sapien
gaggcatcctaatgaacttggagca

SEQ ID NO: 1480036 - DNA, 25 bp, Homo sapien
ttgcagccatcctccgtaactgtga

SEQ ID NO: 1480037 - DNA, 25 bp, Homo sapien
ccccaagggttttccgaatgctctg

SEQ ID NO: 1480038 - DNA, 25 bp, Homo sapien
tcaagactcatagccctgttcgcct

SEQ ID NO: 1480039 - DNA, 25 bp, Homo sapien
ctgaagccgtaagatggaatgagac

SEQ ID NO: 1480040 - DNA, 25 bp, Homo sapien
gatccatgaatattcttatgaggga

SEQ ID NO: 1480041 - DNA, 25 bp, Homo sapien
ggaatgagacttgcccgccctcaaa

SEQ ID NO: 1480042 - DNA, 25 bp, Homo sapien
gcgcccggctctcagtgtataacca

SEQ ID NO: 1480043 - DNA, 25 bp, Homo sapien
atgtcataatcgctgtggcagcaaa

SEQ ID NO: 1480044 - DNA, 25 bp, Homo sapien
ggatgtcataatcgctgtggcagca

SEQ ID NO: 1480045 - DNA, 25 bp, Homo sapien
tgtcataatcgctgtggcagcaaag

SEQ ID NO: 1480046 - DNA, 25 bp, Homo sapien
ctggatgtcataatcgctgtggcag

SEQ ID NO: 1480047 - DNA, 25 bp, Homo sapien
tcctgtgggataaactcagcagctg

SEQ ID NO: 1480048 - DNA, 25 bp, Homo sapien
gcagctgaatctggatgtggcagtg

SEQ ID NO: 1480049 - DNA, 25 bp, Homo sapien
agcagctgaatctggatgtggcagt

SEQ ID NO: 1480050 - DNA, 25 bp, Homo sapien
tttcctgtgggataaactcagcagc

SEQ ID NO: 1480051 - DNA, 25 bp, Homo sapien
gtcatctccctctgctccctcatgg

SEQ ID NO: 1480052 - DNA, 25 bp, Homo sapien
ctatgtgactgtcatctccctctgc

SEQ ID NO: 1480053 - DNA, 25 bp, Homo sapien
atctccctctgctccctcatgggca

SEQ ID NO: 1480054 - DNA, 25 bp, Homo sapien
tctccctctgctccctcatgggcac

SEQ ID NO: 1480055 - DNA, 25 bp, Homo sapien
tgctgctccacgtcatagctctggc

SEQ ID NO: 1480056 - DNA, 25 bp, Homo sapien
catagctctggcgattggaatcctc

SEQ ID NO: 1480057 - DNA, 25 bp, Homo sapien
gaatcctctagtccaatgtgctctc

SEQ ID NO: 1480058 - DNA, 25 bp, Homo sapien
tggaatcctctagtccaatgtgctc

SEQ ID NO: 1480059 - DNA, 25 bp, Homo sapien
gatatgttccctgagacgaatgagg

SEQ ID NO: 1480060 - DNA, 25 bp, Homo sapien
tctgccaactgaatttttgtgctgg

SEQ ID NO: 1480061 - DNA, 25 bp, Homo sapien
tcttccatgaggagttcccacatga

SEQ ID NO: 1480062 - DNA, 25 bp, Homo sapien
tagcgctaggaggaccattcagcac

SEQ ID NO: 1480063 - DNA, 25 bp, Homo sapien
aagggcagcatctccatcccctttg

SEQ ID NO: 1480064 - DNA, 25 bp, Homo sapien
ggaggaagggcagcatctccatccc

SEQ ID NO: 1480065 - DNA, 25 bp, Homo sapien
atcccctttgtcattcagaacctgg

SEQ ID NO: 1480066 - DNA, 25 bp, Homo sapien
atgggaggaagggcagcatctccat

SEQ ID NO: 1480067 - DNA, 25 bp, Homo sapien
ctgacaatgcaaaaatacagccagt

SEQ ID NO: 1480068 - DNA, 25 bp, Homo sapien
ttagaaatatcaagaggtgaatcca

SEQ ID NO: 1480069 - DNA, 25 bp, Homo sapien
tagaaatatcaagaggtgaatccat

SEQ ID NO: 1480070 - DNA, 25 bp, Homo sapien
cagccagtggttttaacttggttag

SEQ ID NO: 1480071 - DNA, 25 bp, Homo sapien
gagatttttttagcgctaagacaga

SEQ ID NO: 1480072 - DNA, 25 bp, Homo sapien
ttttttagcgctaagacagatcaaa

SEQ ID NO: 1480073 - DNA, 25 bp, Homo sapien
ctatgagatttttttagcgctaaga

SEQ ID NO: 1480074 - DNA, 25 bp, Homo sapien
ttttagcgctaagacagatcaaaga

SEQ ID NO: 1480075 - DNA, 25 bp, Homo sapien
gaatgtctgcaacacacagctgact

SEQ ID NO: 1480076 - DNA, 25 bp, Homo sapien
gcttggccagtagtgctatttgcaa

SEQ ID NO: 1480077 - DNA, 25 bp, Homo sapien
cttgccctgggacagtacttttctt

SEQ ID NO: 1480078 - DNA, 25 bp, Homo sapien
tgacctcaaacgtaggttcaaggag

SEQ ID NO: 1480079 - DNA, 25 bp, Homo sapien
tcacatgcagtcttcgatgaacaca

SEQ ID NO: 1480080 - DNA, 25 bp, Homo sapien
tgaacacatcgatcgcatccagcag

SEQ ID NO: 1480081 - DNA, 25 bp, Homo sapien
tctgtattggaaaagtccttccata

SEQ ID NO: 1480082 - DNA, 25 bp, Homo sapien
tccatagcacccagtaatgaaaagg

SEQ ID NO: 1480083 - DNA, 25 bp, Homo sapien
acaccaggaagatcacagtgagatc

SEQ ID NO: 1480084 - DNA, 25 bp, Homo sapien
ccaggaagatcacagtgagatcagc

SEQ ID NO: 1480085 - DNA, 25 bp, Homo sapien
aacaccaggaagatcacagtgagat

SEQ ID NO: 1480086 - DNA, 25 bp, Homo sapien
agatggctcctcagatcgggctgga

SEQ ID NO: 1480087 - DNA, 25 bp, Homo sapien
catgctcgtttagtcggccacaggc

SEQ ID NO: 1480088 - DNA, 25 bp, Homo sapien
gggtgtagctggaccttcctataga

SEQ ID NO: 1480089 - DNA, 25 bp, Homo sapien
gaccttcctatagacagggagccat

SEQ ID NO: 1480090 - DNA, 25 bp, Homo sapien
ggggcaccaggaggaggtccaggca

SEQ ID NO: 1480091 - DNA, 25 bp, Homo sapien
aggggcaccaggaggaggtccaggc

SEQ ID NO: 1480092 - DNA, 25 bp, Homo sapien
ttaggcaggggcaccaggaggaggt

SEQ ID NO: 1480093 - DNA, 25 bp, Homo sapien
ggcaggggcaccaggaggaggtcca

SEQ ID NO: 1480094 - DNA, 25 bp, Homo sapien
ccagctcatatgatccatcgtggct

SEQ ID NO: 1480095 - DNA, 25 bp, Homo sapien
tatgatccatcgtggctgttgtccc

SEQ ID NO: 1480096 - DNA, 25 bp, Homo sapien
ctgttgtcccgcctcatgcacaggg

SEQ ID NO: 1480097 - DNA, 25 bp, Homo sapien
ggcacagttaatgccagctcatatg

SEQ ID NO: 1480098 - DNA, 25 bp, Homo sapien
ccatggagacgaacagttcctccat

SEQ ID NO: 1480099 - DNA, 25 bp, Homo sapien
gccctatccgatcctcggagactgg

SEQ ID NO: 1480100 - DNA, 25 bp, Homo sapien
tttggtgacccacaaacctcacggc

SEQ ID NO: 1480101 - DNA, 25 bp, Homo sapien
cggagactgggcctttggtgaccca

SEQ ID NO: 1480102 - DNA, 25 bp, Homo sapien
cacgttttaatggagcacacgggcg

SEQ ID NO: 1480103 - DNA, 25 bp, Homo sapien
gacaggactggcacgttttaatgga

SEQ ID NO: 1480104 - DNA, 25 bp, Homo sapien
gttttaatggagcacacgggcgcag

SEQ ID NO: 1480105 - DNA, 25 bp, Homo sapien
atgagcagacgacaggactggcacg

SEQ ID NO: 1480106 - DNA, 25 bp, Homo sapien
aggcggccttttgctccggctgaga

SEQ ID NO: 1480107 - DNA, 25 bp, Homo sapien
aggcacgggcccggtgccagcattt

SEQ ID NO: 1480108 - DNA, 25 bp, Homo sapien
ctaggcggccttttgctccggctga

SEQ ID NO: 1480109 - DNA, 25 bp, Homo sapien
cacgggcccggtgccagcatttgac

SEQ ID NO: 1480110 - DNA, 25 bp, Homo sapien
cagcctcggggacagacgccatcaa

SEQ ID NO: 1480111 - DNA, 25 bp, Homo sapien
ctcggggacagacgccatcaaggag

SEQ ID NO: 1480112 - DNA, 25 bp, Homo sapien
agacgccatcaaggaggtgaggaaa

SEQ ID NO: 1480113 - DNA, 25 bp, Homo sapien
gggacagacgccatcaaggaggtga

SEQ ID NO: 1480114 - DNA, 25 bp, Homo sapien
tcagctgcggtggctccagcgtcac

SEQ ID NO: 1480115 - DNA, 25 bp, Homo sapien
cctcagctgcggtggctccagcgtc

SEQ ID NO: 1480116 - DNA, 25 bp, Homo sapien
ctcagctgcggtggctccagcgtca

SEQ ID NO: 1480117 - DNA, 25 bp, Homo sapien
tcaggcactcgccagaaacatttcc

SEQ ID NO: 1480118 - DNA, 25 bp, Homo sapien
tcccgaggcggcgtctgggctgctg

SEQ ID NO: 1480119 - DNA, 25 bp, Homo sapien
agaaaacgcccaaccagccacgcca

SEQ ID NO: 1480120 - DNA, 25 bp, Homo sapien
gggaaaacagcaaacgctctgtgac

SEQ ID NO: 1480121 - DNA, 25 bp, Homo sapien
gcgggcttcgtctgcagcgcggtgc

SEQ ID NO: 1480122 - DNA, 25 bp, Homo sapien
gggcttcgtctgcagcgcggtgctc

SEQ ID NO: 1480123 - DNA, 25 bp, Homo sapien
tcacgcgcgggcttcgtctgcagcg

SEQ ID NO: 1480124 - DNA, 25 bp, Homo sapien
gcttcgtctgcagcgcggtgctcgc

SEQ ID NO: 1480125 - DNA, 25 bp, Homo sapien
ctcgggtgcaaacgcgcgcctcgtg

SEQ ID NO: 1480126 - DNA, 25 bp, Homo sapien
tgggggcttctgctcggccccctgt

SEQ ID NO: 1480127 - DNA, 25 bp, Homo sapien
accacgcgggcctgggggcgcaggc

SEQ ID NO: 1480128 - DNA, 25 bp, Homo sapien
ctgcagggcccgaccacgcgggcct

SEQ ID NO: 1480129 - DNA, 25 bp, Homo sapien
cctgcaccaagggacgcctcggaag

SEQ ID NO: 1480130 - DNA, 25 bp, Homo sapien
caagggacgcctcggaagcctccgg

SEQ ID NO: 1480131 - DNA, 25 bp, Homo sapien
cctcggaagcctccggccaaggcgg

SEQ ID NO: 1480132 - DNA, 25 bp, Homo sapien
gcctcggaagcctccggccaaggcg

SEQ ID NO: 1480133 - DNA, 25 bp, Homo sapien
tcgccactaacccggcgaaggctga

SEQ ID NO: 1480134 - DNA, 25 bp, Homo sapien
ggccgcgtcgccactaacccggcga

SEQ ID NO: 1480135 - DNA, 25 bp, Homo sapien
cccggcgaaggctgacccgacgttg

SEQ ID NO: 1480136 - DNA, 25 bp, Homo sapien
ctgtgcgaattcgcgcggccgcgtc

SEQ ID NO: 1480137 - DNA, 25 bp, Homo sapien
tgagtgacggggaccaggggccggc

SEQ ID NO: 1480138 - DNA, 25 bp, Homo sapien
ctgagtgacggggaccaggggccgg

SEQ ID NO: 1480139 - DNA, 25 bp, Homo sapien
ccttgggaatagagaagcaacgaaa

SEQ ID NO: 1480140 - DNA, 25 bp, Homo sapien
ccccggttctaggagcgactgctct

SEQ ID NO: 1480141 - DNA, 25 bp, Homo sapien
cgaaaacatttcacgcagtgttggc

SEQ ID NO: 1480142 - DNA, 25 bp, Homo sapien
taagcgccgtccattttccgacttg

SEQ ID NO: 1480143 - DNA, 25 bp, Homo sapien
caagggccagattggatgcgaacgc

SEQ ID NO: 1480144 - DNA, 25 bp, Homo sapien
ggagatcacaaaggcccgtaaacac

SEQ ID NO: 1480145 - DNA, 25 bp, Homo sapien
gggccagcaaacacatcggttttta

SEQ ID NO: 1480146 - DNA, 25 bp, Homo sapien
caaagctctcaagtgcccatttaag

SEQ ID NO: 1480147 - DNA, 25 bp, Homo sapien
agagcctccattggacccacaggca

SEQ ID NO: 1480148 - DNA, 25 bp, Homo sapien
ctccattggacccacaggcattacc

SEQ ID NO: 1480149 - DNA, 25 bp, Homo sapien
tagtattcagccagagcctccattg

SEQ ID NO: 1480150 - DNA, 25 bp, Homo sapien
gccagagcctccattggacccacag

SEQ ID NO: 1480151 - DNA, 25 bp, Homo sapien
gatgttcacaagagaaagattgtcc

SEQ ID NO: 1480152 - DNA, 25 bp, Homo sapien
gatttttgttttcgaaactcataga

SEQ ID NO: 1480153 - DNA, 25 bp, Homo sapien
aacagttctatttctcagattcagc

SEQ ID NO: 1480154 - DNA, 25 bp, Homo sapien
tgtaacttgtttgtgacgaaaacag

SEQ ID NO: 1480155 - DNA, 25 bp, Homo sapien
ttgaacatgtattatctggaacaca

SEQ ID NO: 1480156 - DNA, 25 bp, Homo sapien
aacatgtattatctggaacacatct

SEQ ID NO: 1480157 - DNA, 25 bp, Homo sapien
tgaacatgtattatctggaacacat

SEQ ID NO: 1480158 - DNA, 25 bp, Homo sapien
gaacatgtattatctggaacacatc

SEQ ID NO: 1480159 - DNA, 25 bp, Homo sapien
cacacggtgatctaaatgcagccta

SEQ ID NO: 1480160 - DNA, 25 bp, Homo sapien
taaggttaaagcatacatggccacg

SEQ ID NO: 1480161 - DNA, 25 bp, Homo sapien
atcatatgggagagacagacggctc

SEQ ID NO: 1480162 - DNA, 25 bp, Homo sapien
cagacggctccaagatgtttaggaa

SEQ ID NO: 1480163 - DNA, 25 bp, Homo sapien
gtttgctgtggaatacacgagattt

SEQ ID NO: 1480164 - DNA, 25 bp, Homo sapien
gtaagtttgctgtggaatacacgag

SEQ ID NO: 1480165 - DNA, 25 bp, Homo sapien
tgctgtggaatacacgagattttat

SEQ ID NO: 1480166 - DNA, 25 bp, Homo sapien
aagtttgctgtggaatacacgagat

SEQ ID NO: 1480167 - DNA, 25 bp, Homo sapien
caacctcctaaaactggtgaagtca

SEQ ID NO: 1480168 - DNA, 25 bp, Homo sapien
tcctttgagctaagaaagcaactgg

SEQ ID NO: 1480169 - DNA, 25 bp, Homo sapien
tgtaccatgcgaggcttaaaacttg

SEQ ID NO: 1480170 - DNA, 25 bp, Homo sapien
taggctgtgttcttaatacccatgc

SEQ ID NO: 1480171 - DNA, 25 bp, Homo sapien
cactgtttgctgtgtacaaatggtg

SEQ ID NO: 1480172 - DNA, 25 bp, Homo sapien
tggtggccatcacaagaaaatgtaa

SEQ ID NO: 1480173 - DNA, 25 bp, Homo sapien
aggcaatcacggtcccatcactgtt

SEQ ID NO: 1480174 - DNA, 25 bp, Homo sapien
tagaacattggctgtttcaagcgct

SEQ ID NO: 1480175 - DNA, 25 bp, Homo sapien
ggtcacggacaacccgctgtgtgtt

SEQ ID NO: 1480176 - DNA, 25 bp, Homo sapien
tattctgaagcataagagggggaga

SEQ ID NO: 1480177 - DNA, 25 bp, Homo sapien
gacaacccgctgtgtgttaagtggt

SEQ ID NO: 1480178 - DNA, 25 bp, Homo sapien
ttgctgctgggtcacggacaacccg

SEQ ID NO: 1480179 - DNA, 25 bp, Homo sapien
ttctctcacaggctttaagtcccat

SEQ ID NO: 1480180 - DNA, 25 bp, Homo sapien
caggctttaagtcccatgtgctcca

SEQ ID NO: 1480181 - DNA, 25 bp, Homo sapien
tgatgggcttatttgatttgggaaa

SEQ ID NO: 1480182 - DNA, 25 bp, Homo sapien
tcacaggctttaagtcccatgtgct

SEQ ID NO: 1480183 - DNA, 25 bp, Homo sapien
tgtatacttccatactgttaatctt

SEQ ID NO: 1480184 - DNA, 25 bp, Homo sapien
tgtaacaaacaattaacagtagttc

SEQ ID NO: 1480185 - DNA, 25 bp, Homo sapien
ctctccctaaaaagccctctatatt

SEQ ID NO: 1480186 - DNA, 25 bp, Homo sapien
caccccaaggtgagtttaaatctct

SEQ ID NO: 1480187 - DNA, 25 bp, Homo sapien
ttctaatcccccagcgattacattg

SEQ ID NO: 1480188 - DNA, 25 bp, Homo sapien
aattccattttctaatcccccagcg

SEQ ID NO: 1480189 - DNA, 25 bp, Homo sapien
taatcccccagcgattacattgata

SEQ ID NO: 1480190 - DNA, 25 bp, Homo sapien
cccccagcgattacattgatagata

SEQ ID NO: 1480191 - DNA, 25 bp, Homo sapien
ccgttcaccgtccagagtctgaggt

SEQ ID NO: 1480192 - DNA, 25 bp, Homo sapien
agccacggaacagatgatctccctg

SEQ ID NO: 1480193 - DNA, 25 bp, Homo sapien
tggacatgtccaacgagatccccgt

SEQ ID NO: 1480194 - DNA, 25 bp, Homo sapien
tccctgcagtggacatgtccaacga

SEQ ID NO: 1480195 - DNA, 25 bp, Homo sapien
cccaaatcatccggcgggttaccag

SEQ ID NO: 1480196 - DNA, 25 bp, Homo sapien
atcatccggcgggttaccagaatgt

SEQ ID NO: 1480197 - DNA, 25 bp, Homo sapien
tccggcgggttaccagaatgtggct

SEQ ID NO: 1480198 - DNA, 25 bp, Homo sapien
catccggcgggttaccagaatgtgg

SEQ ID NO: 1480199 - DNA, 25 bp, Homo sapien
tcagtgggcaggactacatagcttc

SEQ ID NO: 1480200 - DNA, 25 bp, Homo sapien
gaagattctatatccaggcccttga

SEQ ID NO: 1480201 - DNA, 25 bp, Homo sapien
tattatattgtgtgctacccaggga

SEQ ID NO: 1480202 - DNA, 25 bp, Homo sapien
gaggttgaaccccatacagtcagga

SEQ ID NO: 1480203 - DNA, 25 bp, Homo sapien
gagtctgaactgctcactagaaaga

SEQ ID NO: 1480204 - DNA, 25 bp, Homo sapien
catttgagacaaaggatcagtttct

SEQ ID NO: 1480205 - DNA, 25 bp, Homo sapien
gaaagatatcggcttatccccgtat

SEQ ID NO: 1480206 - DNA, 25 bp, Homo sapien
tctagaaactcgattaccatggact

SEQ ID NO: 1480207 - DNA, 25 bp, Homo sapien
ctaggagtaaccactggccgaatgc

SEQ ID NO: 1480208 - DNA, 25 bp, Homo sapien
aatgcgctgttagagcaccagccag

SEQ ID NO: 1480209 - DNA, 25 bp, Homo sapien
taaccactggccgaatgcgctgtta

SEQ ID NO: 1480210 - DNA, 25 bp, Homo sapien
cactggccgaatgcgctgttagagc

SEQ ID NO: 1480211 - DNA, 25 bp, Homo sapien
acacacagtagcaatatcacctgag

SEQ ID NO: 1480212 - DNA, 25 bp, Homo sapien
cagagacagctgtgacagggctttt

SEQ ID NO: 1480213 - DNA, 25 bp, Homo sapien
tgtcccgccagactttgtacatagc

SEQ ID NO: 1480214 - DNA, 25 bp, Homo sapien
caatatcacctgaggtttcactggc

SEQ ID NO: 1480215 - DNA, 25 bp, Homo sapien
ccatagagatgtatttgagtctcca

SEQ ID NO: 1480216 - DNA, 25 bp, Homo sapien
tgcaaacaaataagctggttatctc

SEQ ID NO: 1480217 - DNA, 25 bp, Homo sapien
tcacacttatcagtatactgtatgg

SEQ ID NO: 1480218 - DNA, 25 bp, Homo sapien
tgtttaaatcccatatgatgcaggt

SEQ ID NO: 1480219 - DNA, 25 bp, Homo sapien
gcaagagtagtaagcctggatccct

SEQ ID NO: 1480220 - DNA, 25 bp, Homo sapien
ttagctagggcgtgtgaccttcacc

SEQ ID NO: 1480221 - DNA, 25 bp, Homo sapien
gcttgagctgtgtagcaactgcctg

SEQ ID NO: 1480222 - DNA, 25 bp, Homo sapien
ggaattccctgctctaaaggacctg

SEQ ID NO: 1480223 - DNA, 25 bp, Homo sapien
gctgtcacttagtttacccagaggt

SEQ ID NO: 1480224 - DNA, 25 bp, Homo sapien
tatgattcaactccaaaatcctggg

SEQ ID NO: 1480225 - DNA, 25 bp, Homo sapien
taagtggtacaaatccagacagact

SEQ ID NO: 1480226 - DNA, 25 bp, Homo sapien
cccagaggttatcggaatgttggac

SEQ ID NO: 1480227 - DNA, 25 bp, Homo sapien
tgacaccgcatttgcttccagtaaa

SEQ ID NO: 1480228 - DNA, 25 bp, Homo sapien
taggctgtgatgacaccgcatttgc

SEQ ID NO: 1480229 - DNA, 25 bp, Homo sapien
gtgatgacaccgcatttgcttccag

SEQ ID NO: 1480230 - DNA, 25 bp, Homo sapien
gtaaatctgtttgtgtaggctgtga

SEQ ID NO: 1480231 - DNA, 25 bp, Homo sapien
gtcaggcacccaagcacaactagtc

SEQ ID NO: 1480232 - DNA, 25 bp, Homo sapien
tgtcaggcacccaagcacaactagt

SEQ ID NO: 1480233 - DNA, 25 bp, Homo sapien
ctgtcaggcacccaagcacaactag

SEQ ID NO: 1480234 - DNA, 25 bp, Homo sapien
caggcacccaagcacaactagtcac

SEQ ID NO: 1480235 - DNA, 25 bp, Homo sapien
tctatacgtgcctgtgtgtggatat

SEQ ID NO: 1480236 - DNA, 25 bp, Homo sapien
taatattccgtaactttgagccaaa

SEQ ID NO: 1480237 - DNA, 25 bp, Homo sapien
gattgattaaatccaaggttgagtg

SEQ ID NO: 1480238 - DNA, 25 bp, Homo sapien
ggaaacaggtacatgtaaacagagg

SEQ ID NO: 1480239 - DNA, 25 bp, Homo sapien
ctgaccactgaatgtccgtactgtt

SEQ ID NO: 1480240 - DNA, 25 bp, Homo sapien
attatcagcatatccccagctcagg

SEQ ID NO: 1480241 - DNA, 25 bp, Homo sapien
tactggaggctcactttgtttactc

SEQ ID NO: 1480242 - DNA, 25 bp, Homo sapien
ctcttcaaccttaaaatattatcag

SEQ ID NO: 1480243 - DNA, 25 bp, Homo sapien
gttcctaaaggagagacaatgtgct

SEQ ID NO: 1480244 - DNA, 25 bp, Homo sapien
ggtactgcccttgaaacttgcaatg

SEQ ID NO: 1480245 - DNA, 25 bp, Homo sapien
tacccagaagtagatgagtataaca

SEQ ID NO: 1480246 - DNA, 25 bp, Homo sapien
ttccagtacctagcagaatacccag

SEQ ID NO: 1480247 - DNA, 25 bp, Homo sapien
aaatctcacgaaagatatatccaga

SEQ ID NO: 1480248 - DNA, 25 bp, Homo sapien
tctcacgaaagatatatccagaatg

SEQ ID NO: 1480249 - DNA, 25 bp, Homo sapien
cacgaaagatatatccagaatgatc

SEQ ID NO: 1480250 - DNA, 25 bp, Homo sapien
tccagaatgatcttcgttacatttt

SEQ ID NO: 1480251 - DNA, 25 bp, Homo sapien
tgttccttgctatatgtcatcagaa

SEQ ID NO: 1480252 - DNA, 25 bp, Homo sapien
ctgaagcagaccacaggtactggag

SEQ ID NO: 1480253 - DNA, 25 bp, Homo sapien
ttgctatatgtcatcagaagacaga

SEQ ID NO: 1480254 - DNA, 25 bp, Homo sapien
gaagcagaccacaggtactggagca

SEQ ID NO: 1480255 - DNA, 25 bp, Homo sapien
cacgtattccccccatttcaagcct

SEQ ID NO: 1480256 - DNA, 25 bp, Homo sapien
tttcaagccttttatccatgacaaa

SEQ ID NO: 1480257 - DNA, 25 bp, Homo sapien
aagccttttatccatgacaaaggac

SEQ ID NO: 1480258 - DNA, 25 bp, Homo sapien
tcaagccttttatccatgacaaagg

SEQ ID NO: 1480259 - DNA, 25 bp, Homo sapien
tcaggttttgctgcactcgattgaa

SEQ ID NO: 1480260 - DNA, 25 bp, Homo sapien
tcacaagagtctaatcaggttttgc

SEQ ID NO: 1480261 - DNA, 25 bp, Homo sapien
ctcgattgaaatccaaatgacatac

SEQ ID NO: 1480262 - DNA, 25 bp, Homo sapien
gctgcactcgattgaaatccaaatg

SEQ ID NO: 1480263 - DNA, 25 bp, Homo sapien
tagcgctcgtctctgaactggatct

SEQ ID NO: 1480264 - DNA, 25 bp, Homo sapien
tctccctgaaagcaaactgcactag

SEQ ID NO: 1480265 - DNA, 25 bp, Homo sapien
ggagtctgcccgtaggtttttatca

SEQ ID NO: 1480266 - DNA, 25 bp, Homo sapien
actagcaaccccacagcagctggaa

SEQ ID NO: 1480267 - DNA, 25 bp, Homo sapien
aaagacgaggatcattacgcgccca

SEQ ID NO: 1480268 - DNA, 25 bp, Homo sapien
gattaacccgttcaccattctgacg

SEQ ID NO: 1480269 - DNA, 25 bp, Homo sapien
tcagactctagagcctgccgatgga

SEQ ID NO: 1480270 - DNA, 25 bp, Homo sapien
cagatgttctgcgacacgtagtcag

SEQ ID NO: 1480271 - DNA, 25 bp, Homo sapien
tctgtctggaatgtcaaaactttga

SEQ ID NO: 1480272 - DNA, 25 bp, Homo sapien
gaagatagaaaaactctgggataag

SEQ ID NO: 1480273 - DNA, 25 bp, Homo sapien
cttcacggttaactaggaactctgg

SEQ ID NO: 1480274 - DNA, 25 bp, Homo sapien
caaaagatgagagtcgccaagttgt

SEQ ID NO: 1480275 - DNA, 25 bp, Homo sapien
cagccttagttgctctgctgagcaa

SEQ ID NO: 1480276 - DNA, 25 bp, Homo sapien
caaaagctagcctctgaaaacagta

SEQ ID NO: 1480277 - DNA, 25 bp, Homo sapien
cacatcgcagcatcaggtttcttct

SEQ ID NO: 1480278 - DNA, 25 bp, Homo sapien
gagtcaattggcattggctggccac

SEQ ID NO: 1480279 - DNA, 25 bp, Homo sapien
cagtgccgctattggaatagtggga

SEQ ID NO: 1480280 - DNA, 25 bp, Homo sapien
tcctttgcggtactcttcctccaag

SEQ ID NO: 1480281 - DNA, 25 bp, Homo sapien
tgatagggctgcacgggaggcatgg

SEQ ID NO: 1480282 - DNA, 25 bp, Homo sapien
aagtgaagcacagtgccgctattgg

SEQ ID NO: 1480283 - DNA, 25 bp, Homo sapien
tgaacagctataggtttagagagat

SEQ ID NO: 1480284 - DNA, 25 bp, Homo sapien
tgtgtccacataacgatcttctttt

SEQ ID NO: 1480285 - DNA, 25 bp, Homo sapien
tttctttatactgaacagctatagg

SEQ ID NO: 1480286 - DNA, 25 bp, Homo sapien
cttgtatgtgtccacataacgatct

SEQ ID NO: 1480287 - DNA, 25 bp, Homo sapien
ggagtaataccattgcgcacagtgt

SEQ ID NO: 1480288 - DNA, 25 bp, Homo sapien
gagcagattcctagaccaagccctg

SEQ ID NO: 1480289 - DNA, 25 bp, Homo sapien
ccaagccctgaaagttagtgtccca

SEQ ID NO: 1480290 - DNA, 25 bp, Homo sapien
gactctacatccagttaggcggtgt

SEQ ID NO: 1480291 - DNA, 25 bp, Homo sapien
caacagatcattgaggtcaagtgtc

SEQ ID NO: 1480292 - DNA, 25 bp, Homo sapien
gatcattgaggtcaagtgtctcact

SEQ ID NO: 1480293 - DNA, 25 bp, Homo sapien
cattgaggtcaagtgtctcactaac

SEQ ID NO: 1480294 - DNA, 25 bp, Homo sapien
tgtatatcaacagatcattgaggtc

SEQ ID NO: 1480295 - DNA, 25 bp, Homo sapien
ccatattccagaagattagggaggt

SEQ ID NO: 1480296 - DNA, 25 bp, Homo sapien
gaaggatcggccagcatgtttgttt

SEQ ID NO: 1480297 - DNA, 25 bp, Homo sapien
gcccagtataccataaatttgtcag

SEQ ID NO: 1480298 - DNA, 25 bp, Homo sapien
cagagcggtgatgttaccatattcc

SEQ ID NO: 1480299 - DNA, 25 bp, Homo sapien
tacagcattatctctcaattgccac

SEQ ID NO: 1480300 - DNA, 25 bp, Homo sapien
tatcaaatgccaacaggagtgttct

SEQ ID NO: 1480301 - DNA, 25 bp, Homo sapien
tgctggttccaactctccctgaagg

SEQ ID NO: 1480302 - DNA, 25 bp, Homo sapien
caccaacgcttgtgaacttctttaa

SEQ ID NO: 1480303 - DNA, 25 bp, Homo sapien
gcactaagcagggagtgatactctg

SEQ ID NO: 1480304 - DNA, 25 bp, Homo sapien
gggaaatgacatccccagaagtcaa

SEQ ID NO: 1480305 - DNA, 25 bp, Homo sapien
cgtaggttcacagcaacttgaggac

SEQ ID NO: 1480306 - DNA, 25 bp, Homo sapien
cctgggcccctagaatcagggtatg

SEQ ID NO: 1480307 - DNA, 25 bp, Homo sapien
aagcttatttctcctattacaggaa

SEQ ID NO: 1480308 - DNA, 25 bp, Homo sapien
tagtatatccttaggaattcccggc

SEQ ID NO: 1480309 - DNA, 25 bp, Homo sapien
taacaattatcattattaagctatg

SEQ ID NO: 1480310 - DNA, 25 bp, Homo sapien
tctgattaatatcagtctgtctaga

SEQ ID NO: 1480311 - DNA, 25 bp, Homo sapien
tcttccacaaaatacattccacatt

SEQ ID NO: 1480312 - DNA, 25 bp, Homo sapien
ttccacaaaatacattccacattta

SEQ ID NO: 1480313 - DNA, 25 bp, Homo sapien
cttccacaaaatacattccacattt

SEQ ID NO: 1480314 - DNA, 25 bp, Homo sapien
aacactgatgcatcttcgattcact

SEQ ID NO: 1480315 - DNA, 25 bp, Homo sapien
ttcaccagctgtctctctagatggt

SEQ ID NO: 1480316 - DNA, 25 bp, Homo sapien
tctagatggtgcaacactgatgcat

SEQ ID NO: 1480317 - DNA, 25 bp, Homo sapien
gtctctctagatggtgcaacactga

SEQ ID NO: 1480318 - DNA, 25 bp, Homo sapien
tcacttgcagctttgtctttgacag

SEQ ID NO: 1480319 - DNA, 25 bp, Homo sapien
gaatgagttttgtcttcaaacaggt

SEQ ID NO: 1480320 - DNA, 25 bp, Homo sapien
gtaagagagtggtggtttgacaaca

SEQ ID NO: 1480321 - DNA, 25 bp, Homo sapien
taagagagtggtggtttgacaacat

SEQ ID NO: 1480322 - DNA, 25 bp, Homo sapien
aaataacatctctgtaaacgtctcc

SEQ ID NO: 1480323 - DNA, 25 bp, Homo sapien
ttctgtctatccctaaggagatact

SEQ ID NO: 1480324 - DNA, 25 bp, Homo sapien
tcctctctcgatttggcccttctgt

SEQ ID NO: 1480325 - DNA, 25 bp, Homo sapien
gcccttctgttggatccaactgcca

SEQ ID NO: 1480326 - DNA, 25 bp, Homo sapien
ctgccaatgtctgctggcactcaaa

SEQ ID NO: 1480327 - DNA, 25 bp, Homo sapien
ggcactcaaatctactttatacatt

SEQ ID NO: 1480328 - DNA, 25 bp, Homo sapien
actgcctgggtgatatctgcagcta

SEQ ID NO: 1480329 - DNA, 25 bp, Homo sapien
tcctctaatatgctggatcaccttt

SEQ ID NO: 1480330 - DNA, 25 bp, Homo sapien
ttgttgattattgttaactgttttc

SEQ ID NO: 1480331 - DNA, 25 bp, Homo sapien
aagcattcataagcagttctgctgt

SEQ ID NO: 1480332 - DNA, 25 bp, Homo sapien
ctgggagggatgcacttgtgaccac

SEQ ID NO: 1480333 - DNA, 25 bp, Homo sapien
tctgctgtgcctagctcttcttcag

SEQ ID NO: 1480334 - DNA, 25 bp, Homo sapien
caccttggtgattatgtatcaactc

SEQ ID NO: 1480335 - DNA, 25 bp, Homo sapien
gacaattggcctttgcagcacagac

SEQ ID NO: 1480336 - DNA, 25 bp, Homo sapien
aattggttgaagttggcagcctgac

SEQ ID NO: 1480337 - DNA, 25 bp, Homo sapien
gacagctgctacctgaccaaaagag

SEQ ID NO: 1480338 - DNA, 25 bp, Homo sapien
aagtcagttacctacacagagaggg

SEQ ID NO: 1480339 - DNA, 25 bp, Homo sapien
tactctcaagtatacgctcaaggat

SEQ ID NO: 1480340 - DNA, 25 bp, Homo sapien
tgccgacgagtctggatctcactgc

SEQ ID NO: 1480341 - DNA, 25 bp, Homo sapien
tcactatcacggctgaggcacatcg

SEQ ID NO: 1480342 - DNA, 25 bp, Homo sapien
gacttggcaggcgaacttgctcttg

SEQ ID NO: 1480343 - DNA, 25 bp, Homo sapien
tcctgggccattggactctctgtgg

SEQ ID NO: 1480344 - DNA, 25 bp, Homo sapien
gtggcagatttggcagaaagtataa

SEQ ID NO: 1480345 - DNA, 25 bp, Homo sapien
ctgtggcagatttggcagaaagtat

SEQ ID NO: 1480346 - DNA, 25 bp, Homo sapien
catcctgggccattggactctctgt

SEQ ID NO: 1480347 - DNA, 25 bp, Homo sapien
ctcttatcaaagctgagatacttac

SEQ ID NO: 1480348 - DNA, 25 bp, Homo sapien
cagactttgtatttcaccaaacgtt

SEQ ID NO: 1480349 - DNA, 25 bp, Homo sapien
tagtagtctcccaagctgcattcgg

SEQ ID NO: 1480350 - DNA, 25 bp, Homo sapien
cgtgggctggcgacaaaatatgcac

SEQ ID NO: 1480351 - DNA, 25 bp, Homo sapien
gagacagtctcgtagtatttcctga

SEQ ID NO: 1480352 - DNA, 25 bp, Homo sapien
tggaaccactggctttacttgaacc

SEQ ID NO: 1480353 - DNA, 25 bp, Homo sapien
acagaagactgttcatgatgaatat

SEQ ID NO: 1480354 - DNA, 25 bp, Homo sapien
gaatccttctaccagatatgtaaaa

SEQ ID NO: 1480355 - DNA, 25 bp, Homo sapien
ttcctcagaaatttcggtctggaaa

SEQ ID NO: 1480356 - DNA, 25 bp, Homo sapien
agaaatttcggtctggaaaactgag

SEQ ID NO: 1480357 - DNA, 25 bp, Homo sapien
tcatttgccactgaacgcattttca

SEQ ID NO: 1480358 - DNA, 25 bp, Homo sapien
gcttggctagggttctcttggctca

SEQ ID NO: 1480359 - DNA, 25 bp, Homo sapien
tctgtagtctctgcgcaagttccgt

SEQ ID NO: 1480360 - DNA, 25 bp, Homo sapien
tcttggctcattctccgttgcatca

SEQ ID NO: 1480361 - DNA, 25 bp, Homo sapien
gcggtggtccttataaattccatag

SEQ ID NO: 1480362 - DNA, 25 bp, Homo sapien
tcagagtcatgatttgcggtggtcc

SEQ ID NO: 1480363 - DNA, 25 bp, Homo sapien
tagcagcctggagaactctaagctg

SEQ ID NO: 1480364 - DNA, 25 bp, Homo sapien
cgcttttgaactactgcatgatggg

SEQ ID NO: 1480365 - DNA, 25 bp, Homo sapien
gcaaaagtttaaccggcaattatca

SEQ ID NO: 1480366 - DNA, 25 bp, Homo sapien
taaaaactgatagatactattacaa

SEQ ID NO: 1480367 - DNA, 25 bp, Homo sapien
gggtattactatgcaacatacactt

SEQ ID NO: 1480368 - DNA, 25 bp, Homo sapien
tattgccaactactaactacatggg

SEQ ID NO: 1480369 - DNA, 25 bp, Homo sapien
tgagcctgaggaactgcaagcatga

SEQ ID NO: 1480370 - DNA, 25 bp, Homo sapien
aaccctaaaatattgtgagcctgag

SEQ ID NO: 1480371 - DNA, 25 bp, Homo sapien
gaaaagttgctgtatatcacaagca

SEQ ID NO: 1480372 - DNA, 25 bp, Homo sapien
tacaataaggtcttcaataacccta

SEQ ID NO: 1480373 - DNA, 25 bp, Homo sapien
tctaatccattcagggctgctactg

SEQ ID NO: 1480374 - DNA, 25 bp, Homo sapien
tattacataacacatagagtagacc

SEQ ID NO: 1480375 - DNA, 25 bp, Homo sapien
tagagtagaccattatccagcaaca

SEQ ID NO: 1480376 - DNA, 25 bp, Homo sapien
gagaggtctctattagtcccagaat

SEQ ID NO: 1480377 - DNA, 25 bp, Homo sapien
tcctcgatgaagatacaactggttg

SEQ ID NO: 1480378 - DNA, 25 bp, Homo sapien
caactggttggctagcaaggaaaat

SEQ ID NO: 1480379 - DNA, 25 bp, Homo sapien
tcaaggccaatatgtcgaccaaaga

SEQ ID NO: 1480380 - DNA, 25 bp, Homo sapien
cgaccaaagaacatttcgatgaagc

SEQ ID NO: 1480381 - DNA, 25 bp, Homo sapien
taggagttcatataatccacagcat

SEQ ID NO: 1480382 - DNA, 25 bp, Homo sapien
aacatcaggcaggataagaagaacc

SEQ ID NO: 1480383 - DNA, 25 bp, Homo sapien
taacgaggaccaaaagtgtatctgc

SEQ ID NO: 1480384 - DNA, 25 bp, Homo sapien
cacagcatataggtaccaaacagtc

SEQ ID NO: 1480385 - DNA, 25 bp, Homo sapien
tctgtgaaggaaaagctagcccaag

SEQ ID NO: 1480386 - DNA, 25 bp, Homo sapien
ttttcagtgtgtcggaactccccaa

SEQ ID NO: 1480387 - DNA, 25 bp, Homo sapien
ccctttaggtaatcaggtcggcgtg

SEQ ID NO: 1480388 - DNA, 25 bp, Homo sapien
cttcgctggaaggaggccaatccct

SEQ ID NO: 1480389 - DNA, 25 bp, Homo sapien
gttgtggaataatattagaggaatt

SEQ ID NO: 1480390 - DNA, 25 bp, Homo sapien
tgttgtggaataatattagaggaat

SEQ ID NO: 1480391 - DNA, 25 bp, Homo sapien
ttgtggaataatattagaggaattc

SEQ ID NO: 1480392 - DNA, 25 bp, Homo sapien
ctgttgtggaataatattagaggaa

SEQ ID NO: 1480393 - DNA, 25 bp, Homo sapien
tcctccactgctggaatgcctcagg

SEQ ID NO: 1480394 - DNA, 25 bp, Homo sapien
gctcataagggaccttcctccactg

SEQ ID NO: 1480395 - DNA, 25 bp, Homo sapien
taccataaatccagggctcataagg

SEQ ID NO: 1480396 - DNA, 25 bp, Homo sapien
gaagcagtaaaaccagatgggctta

SEQ ID NO: 1480397 - DNA, 25 bp, Homo sapien
ggtgaactgctaaaaggaaattgaa

SEQ ID NO: 1480398 - DNA, 25 bp, Homo sapien
ttgaagataattgtcaataattcca

SEQ ID NO: 1480399 - DNA, 25 bp, Homo sapien
ggattgtgacaaacgtaagtattag

SEQ ID NO: 1480400 - DNA, 25 bp, Homo sapien
caaggacttctgctataattttcac

SEQ ID NO: 1480401 - DNA, 25 bp, Homo sapien
gtgtgagttgcccctctttgtattc

SEQ ID NO: 1480402 - DNA, 25 bp, Homo sapien
tgggtgtgagttgcccctctttgta

SEQ ID NO: 1480403 - DNA, 25 bp, Homo sapien
ctctcggggcatgggtgtgagttgc

SEQ ID NO: 1480404 - DNA, 25 bp, Homo sapien
catgggtgtgagttgcccctctttg

SEQ ID NO: 1480405 - DNA, 25 bp, Homo sapien
tcgactacctcagatttaagaaggg

SEQ ID NO: 1480406 - DNA, 25 bp, Homo sapien
gctggcctccagattaagggtatgg

SEQ ID NO: 1480407 - DNA, 25 bp, Homo sapien
taagacaggaacatagatctcccga

SEQ ID NO: 1480408 - DNA, 25 bp, Homo sapien
caagttctcatagctgtcaagtggc

SEQ ID NO: 1480409 - DNA, 25 bp, Homo sapien
ctggtggtgatctgctctgatgagg

SEQ ID NO: 1480410 - DNA, 25 bp, Homo sapien
aaacctgacaagtcagtagaaagtg

SEQ ID NO: 1480411 - DNA, 25 bp, Homo sapien
gaaccacttgagctttcaataactg

SEQ ID NO: 1480412 - DNA, 25 bp, Homo sapien
tctgatgaggacttctagagctgct

SEQ ID NO: 1480413 - DNA, 25 bp, Homo sapien
ccaataagcacatacttactgaaaa

SEQ ID NO: 1480414 - DNA, 25 bp, Homo sapien
cacacaccaataagcacatacttac

SEQ ID NO: 1480415 - DNA, 25 bp, Homo sapien
tacttactgaaaaatatgcagcatg

SEQ ID NO: 1480416 - DNA, 25 bp, Homo sapien
gagataaacacacaccaataagcac

SEQ ID NO: 1480417 - DNA, 25 bp, Homo sapien
tgtacttacgatgaagccttgccct

SEQ ID NO: 1480418 - DNA, 25 bp, Homo sapien
caggtgctgagatgtagtgcctaca

SEQ ID NO: 1480419 - DNA, 25 bp, Homo sapien
gccagcatggctcccctagttagaa

SEQ ID NO: 1480420 - DNA, 25 bp, Homo sapien
gataagcccatatgctcctgcctga

SEQ ID NO: 1480421 - DNA, 25 bp, Homo sapien
gcattagagtctacatccaacttaa

SEQ ID NO: 1480422 - DNA, 25 bp, Homo sapien
ccatatcttccagtcaagcaatagt

SEQ ID NO: 1480423 - DNA, 25 bp, Homo sapien
tataaataatatcttcaccacagca

SEQ ID NO: 1480424 - DNA, 25 bp, Homo sapien
cctctaacagcttaacatcttggat

SEQ ID NO: 1480425 - DNA, 25 bp, Homo sapien
tgcattagtaattggttaatcagga

SEQ ID NO: 1480426 - DNA, 25 bp, Homo sapien
tatttttaagtgagtactcaggttc

SEQ ID NO: 1480427 - DNA, 25 bp, Homo sapien
gtgagtactcaggttcaaacaaggg

SEQ ID NO: 1480428 - DNA, 25 bp, Homo sapien
agaaaattagcattaatataagatg

SEQ ID NO: 1480429 - DNA, 25 bp, Homo sapien
gagcaatcgtcttttgccttagtac

SEQ ID NO: 1480430 - DNA, 25 bp, Homo sapien
gaggcaagggtagagcaatcgtctt

SEQ ID NO: 1480431 - DNA, 25 bp, Homo sapien
cttgcagtttaaagaagtaggggtg

SEQ ID NO: 1480432 - DNA, 25 bp, Homo sapien
gccacaaatgtatggatcttgcagt

SEQ ID NO: 1480433 - DNA, 25 bp, Homo sapien
gggtgggagctaaagcaaagatctc

SEQ ID NO: 1480434 - DNA, 25 bp, Homo sapien
gaactgggttctctgccataagggt

SEQ ID NO: 1480435 - DNA, 25 bp, Homo sapien
aactgggttctctgccataagggtg

SEQ ID NO: 1480436 - DNA, 25 bp, Homo sapien
ctgccataagggtgggagctaaagc

SEQ ID NO: 1480437 - DNA, 25 bp, Homo sapien
tgaatcatagaaagtccattacaat

SEQ ID NO: 1480438 - DNA, 25 bp, Homo sapien
ttgtttgatcaacacctgatgaatc

SEQ ID NO: 1480439 - DNA, 25 bp, Homo sapien
tataactcgcagtgctaatgcttga

SEQ ID NO: 1480440 - DNA, 25 bp, Homo sapien
tttaattaatgagagtataactcgc

SEQ ID NO: 1480441 - DNA, 25 bp, Homo sapien
aaagtttaatatagtcgagtgtagc

SEQ ID NO: 1480442 - DNA, 25 bp, Homo sapien
tagacaaaactataagcagtgattc

SEQ ID NO: 1480443 - DNA, 25 bp, Homo sapien
tctctttagacaaaactataagcag

SEQ ID NO: 1480444 - DNA, 25 bp, Homo sapien
tatagtcgagtgtagctttttcgtg

SEQ ID NO: 1480445 - DNA, 25 bp, Homo sapien
ccaatttcgtgcagaatgccttgaa

SEQ ID NO: 1480446 - DNA, 25 bp, Homo sapien
cttttgagctgaagggtctttgaga

SEQ ID NO: 1480447 - DNA, 25 bp, Homo sapien
cctttaagtctaatcactggttcat

SEQ ID NO: 1480448 - DNA, 25 bp, Homo sapien
catagatggtatactgagcaggaca

SEQ ID NO: 1480449 - DNA, 25 bp, Homo sapien
aaaatgcaagctatgaactagcaag

SEQ ID NO: 1480450 - DNA, 25 bp, Homo sapien
aaacaacagctactacactaaacag

SEQ ID NO: 1480451 - DNA, 25 bp, Homo sapien
cattcagtaatgacaacaagtttaa

SEQ ID NO: 1480452 - DNA, 25 bp, Homo sapien
gtgaaaacacactcaactgatcctt

SEQ ID NO: 1480453 - DNA, 25 bp, Homo sapien
agttctctgatttgttcacatcgca

SEQ ID NO: 1480454 - DNA, 25 bp, Homo sapien
ggcctcttgtgaaccaaccttagct

SEQ ID NO: 1480455 - DNA, 25 bp, Homo sapien
tatatttggagtagtcattgactgg

SEQ ID NO: 1480456 - DNA, 25 bp, Homo sapien
tacagatgtatggttgggtccacaa

SEQ ID NO: 1480457 - DNA, 25 bp, Homo sapien
tccagccaactgcaaaaactcttct

SEQ ID NO: 1480458 - DNA, 25 bp, Homo sapien
ttccagccaactgcaaaaactcttc

SEQ ID NO: 1480459 - DNA, 25 bp, Homo sapien
cgttgaagagaagcaaatttcccag

SEQ ID NO: 1480460 - DNA, 25 bp, Homo sapien
ttgaagagaagcaaatttcccaggt

SEQ ID NO: 1480461 - DNA, 25 bp, Homo sapien
taaaatccaaagtaacatcaggctt

SEQ ID NO: 1480462 - DNA, 25 bp, Homo sapien
aaaatccaaagtaacatcaggcttc

SEQ ID NO: 1480463 - DNA, 25 bp, Homo sapien
caatgactttaggaagtctagtact

SEQ ID NO: 1480464 - DNA, 25 bp, Homo sapien
aaagcaatgactttaggaagtctag

SEQ ID NO: 1480465 - DNA, 25 bp, Homo sapien
ctttaggaagtctagtactaagtat

SEQ ID NO: 1480466 - DNA, 25 bp, Homo sapien
tgactttaggaagtctagtactaag

SEQ ID NO: 1480467 - DNA, 25 bp, Homo sapien
cttaattttgccaagaagtctccca

SEQ ID NO: 1480468 - DNA, 25 bp, Homo sapien
ttacagatataaaccaaccacctcc

SEQ ID NO: 1480469 - DNA, 25 bp, Homo sapien
tcctggtttacagatataaaccaac

SEQ ID NO: 1480470 - DNA, 25 bp, Homo sapien
cagatataaaccaaccacctcccct

SEQ ID NO: 1480471 - DNA, 25 bp, Homo sapien
cattgtaactgagattgagatgcat

SEQ ID NO: 1480472 - DNA, 25 bp, Homo sapien
aacattgtaactgagattgagatgc

SEQ ID NO: 1480473 - DNA, 25 bp, Homo sapien
gctataattgactaatgaaacataa

SEQ ID NO: 1480474 - DNA, 25 bp, Homo sapien
aaacctagaagtttctgtattctgt

SEQ ID NO: 1480475 - DNA, 25 bp, Homo sapien
ttcatgtcatcatttgaatccatgc

SEQ ID NO: 1480476 - DNA, 25 bp, Homo sapien
gtgagtactaaatgttgccatttgc

SEQ ID NO: 1480477 - DNA, 25 bp, Homo sapien
tgtccagagacccatatggagattt

SEQ ID NO: 1480478 - DNA, 25 bp, Homo sapien
ggctgctgtaagtaggtgagtacta

SEQ ID NO: 1480479 - DNA, 25 bp, Homo sapien
tcaacgctttggatcccagtgaaat

SEQ ID NO: 1480480 - DNA, 25 bp, Homo sapien
tgaatacatccttcttctatgagtc

SEQ ID NO: 1480481 - DNA, 25 bp, Homo sapien
tctatgagtctttcaccaggattta

SEQ ID NO: 1480482 - DNA, 25 bp, Homo sapien
gggatcagcccacacttggatcatc

SEQ ID NO: 1480483 - DNA, 25 bp, Homo sapien
taataactgaggacaattgtgggcg

SEQ ID NO: 1480484 - DNA, 25 bp, Homo sapien
taaatgcttacaggcttgggctatc

SEQ ID NO: 1480485 - DNA, 25 bp, Homo sapien
gaacactactgcttattagactgca

SEQ ID NO: 1480486 - DNA, 25 bp, Homo sapien
taaccagaccgctatgtgacaacct

SEQ ID NO: 1480487 - DNA, 25 bp, Homo sapien
agggccactgaggtaagacatggca

SEQ ID NO: 1480488 - DNA, 25 bp, Homo sapien
aaacattctgtgacaggaactaggg

SEQ ID NO: 1480489 - DNA, 25 bp, Homo sapien
tgcagtataatagcaattcttcagt

SEQ ID NO: 1480490 - DNA, 25 bp, Homo sapien
gggagggccactgaggtaagacatg

SEQ ID NO: 1480491 - DNA, 25 bp, Homo sapien
gagccaccctaatccagtaatggga

SEQ ID NO: 1480492 - DNA, 25 bp, Homo sapien
taccacatttttacggctcaaggaa

SEQ ID NO: 1480493 - DNA, 25 bp, Homo sapien
aaaagttgtatatgtggtgtcccct

SEQ ID NO: 1480494 - DNA, 25 bp, Homo sapien
ggacctaccaccactaagtaaggca

SEQ ID NO: 1480495 - DNA, 25 bp, Homo sapien
tgaaaacaatctttgtgtacaaatc

SEQ ID NO: 1480496 - DNA, 25 bp, Homo sapien
tacaaatcagataatcctgtcatca

SEQ ID NO: 1480497 - DNA, 25 bp, Homo sapien
aacaatctttgtgtacaaatcagat

SEQ ID NO: 1480498 - DNA, 25 bp, Homo sapien
tctttgtgtacaaatcagataatcc

SEQ ID NO: 1480499 - DNA, 25 bp, Homo sapien
cacattaaaccacagggaaacactg

SEQ ID NO: 1480500 - DNA, 25 bp, Homo sapien
aaccttctgataggtgtggccagca

SEQ ID NO: 1480501 - DNA, 25 bp, Homo sapien
ctgctatctggtaaaattaatgatt

SEQ ID NO: 1480502 - DNA, 25 bp, Homo sapien
tcagcttcatggatacactccacat

SEQ ID NO: 1480503 - DNA, 25 bp, Homo sapien
tatgtgccaagatgaaagcagccga

SEQ ID NO: 1480504 - DNA, 25 bp, Homo sapien
taaatttggagcgtgcagtaaaggg

SEQ ID NO: 1480505 - DNA, 25 bp, Homo sapien
cgtgctcttctcaataaacccatgg

SEQ ID NO: 1480506 - DNA, 25 bp, Homo sapien
tcttgctccgtgaaactcgtgctct

SEQ ID NO: 1480507 - DNA, 25 bp, Homo sapien
aagggttagctcttctgaacatgtt

SEQ ID NO: 1480508 - DNA, 25 bp, Homo sapien
tattctcaaaagaagggttagctct

SEQ ID NO: 1480509 - DNA, 25 bp, Homo sapien
agatccaccaatactctctggcatg

SEQ ID NO: 1480510 - DNA, 25 bp, Homo sapien
tgaactcatcaaagataccaaaaga

SEQ ID NO: 1480511 - DNA, 25 bp, Homo sapien
tcagagcagtaagaagccgagctgt

SEQ ID NO: 1480512 - DNA, 25 bp, Homo sapien
tcagtacagagcacagatagttcag

SEQ ID NO: 1480513 - DNA, 25 bp, Homo sapien
cagtgcggccgacaatacagggatt

SEQ ID NO: 1480514 - DNA, 25 bp, Homo sapien
cgagctgtccatctaaggtctggag

SEQ ID NO: 1480515 - DNA, 25 bp, Homo sapien
taggtcccaaacctgataactcttc

SEQ ID NO: 1480516 - DNA, 25 bp, Homo sapien
aggtcccaaacctgataactcttct

SEQ ID NO: 1480517 - DNA, 25 bp, Homo sapien
tcagaatcatcctgtgttaaaatac

SEQ ID NO: 1480518 - DNA, 25 bp, Homo sapien
tcctgtgttaaaatactcaagaacc

SEQ ID NO: 1480519 - DNA, 25 bp, Homo sapien
tgtgttaaaatactcaagaaccctc

SEQ ID NO: 1480520 - DNA, 25 bp, Homo sapien
atactcaagaaccctcctaaaagat

SEQ ID NO: 1480521 - DNA, 25 bp, Homo sapien
catttggactgcttgatgcactgaa

SEQ ID NO: 1480522 - DNA, 25 bp, Homo sapien
aactctcaaatacatgggcaagcac

SEQ ID NO: 1480523 - DNA, 25 bp, Homo sapien
gaggttttcgagtaagtcatttgga

SEQ ID NO: 1480524 - DNA, 25 bp, Homo sapien
gcacatcaagtttggctttactagc

SEQ ID NO: 1480525 - DNA, 25 bp, Homo sapien
tgcttcgtaaccttcttcttcaact

SEQ ID NO: 1480526 - DNA, 25 bp, Homo sapien
gattgctttcactatctgcttcgta

SEQ ID NO: 1480527 - DNA, 25 bp, Homo sapien
cttcaggattgctttcactatctgc

SEQ ID NO: 1480528 - DNA, 25 bp, Homo sapien
cactatctgcttcgtaaccttcttc

SEQ ID NO: 1480529 - DNA, 25 bp, Homo sapien
gatgacaattcttctgcagattgat

SEQ ID NO: 1480530 - DNA, 25 bp, Homo sapien
gggatgacaattcttctgcagattg

SEQ ID NO: 1480531 - DNA, 25 bp, Homo sapien
ctgggatgacaattcttctgcagat

SEQ ID NO: 1480532 - DNA, 25 bp, Homo sapien
acaattcttctgcagattgatgact

SEQ ID NO: 1480533 - DNA, 25 bp, Homo sapien
agatggtccctcatttcaaataata

SEQ ID NO: 1480534 - DNA, 25 bp, Homo sapien
gcaactcgaagcagggcatcaaata

SEQ ID NO: 1480535 - DNA, 25 bp, Homo sapien
tgaataattcccgagggcaactcga

SEQ ID NO: 1480536 - DNA, 25 bp, Homo sapien
ctttgctagttgtgtttcaatcacc

SEQ ID NO: 1480537 - DNA, 25 bp, Homo sapien
taggtaactccaattccatcttctg

SEQ ID NO: 1480538 - DNA, 25 bp, Homo sapien
catcttctgttgactagttctggca

SEQ ID NO: 1480539 - DNA, 25 bp, Homo sapien
tgttgactagttctggcaccatgaa

SEQ ID NO: 1480540 - DNA, 25 bp, Homo sapien
ggcttccaaaagtcgtatactttga

SEQ ID NO: 1480541 - DNA, 25 bp, Homo sapien
aatagctttgcttcctcgggagcgg

SEQ ID NO: 1480542 - DNA, 25 bp, Homo sapien
tgctgtaactctaatttacctaaac

SEQ ID NO: 1480543 - DNA, 25 bp, Homo sapien
ggcttcagtagctgaaacttcttcc

SEQ ID NO: 1480544 - DNA, 25 bp, Homo sapien
gactacctagttctgatggtatggg

SEQ ID NO: 1480545 - DNA, 25 bp, Homo sapien
gctgtgctgtcatagccagaagtat

SEQ ID NO: 1480546 - DNA, 25 bp, Homo sapien
aagtatcttctgagtcattggccga

SEQ ID NO: 1480547 - DNA, 25 bp, Homo sapien
aacttatggcatactcggaaaccac

SEQ ID NO: 1480548 - DNA, 25 bp, Homo sapien
gacttaaaggctcgctggctgtgct

SEQ ID NO: 1480549 - DNA, 25 bp, Homo sapien
tgaagcacgtcctgaggcaagcact

SEQ ID NO: 1480550 - DNA, 25 bp, Homo sapien
taattgggctagttggtcagagtca

SEQ ID NO: 1480551 - DNA, 25 bp, Homo sapien
gcaagcactggttatgatggctaca

SEQ ID NO: 1480552 - DNA, 25 bp, Homo sapien
ggcaggatcccttgaaatctgtaag

SEQ ID NO: 1480553 - DNA, 25 bp, Homo sapien
tatgaacacccgataggatctggac

SEQ ID NO: 1480554 - DNA, 25 bp, Homo sapien
tttcaaatgctctgaggcctcggga

SEQ ID NO: 1480555 - DNA, 25 bp, Homo sapien
gacacaagtgctgctcaaggaagcc

SEQ ID NO: 1480556 - DNA, 25 bp, Homo sapien
tagtaagcgcaagcactgatgggca

SEQ ID NO: 1480557 - DNA, 25 bp, Homo sapien
tgaatcaaagccaccggttcttcgg

SEQ ID NO: 1480558 - DNA, 25 bp, Homo sapien
tcaaagccaccggttcttcggtcca

SEQ ID NO: 1480559 - DNA, 25 bp, Homo sapien
caaagccatagcatctggaggagtc

SEQ ID NO: 1480560 - DNA, 25 bp, Homo sapien
ggcagctggctcacttaaaatgtca

SEQ ID NO: 1480561 - DNA, 25 bp, Homo sapien
tgggcactacactggctgctaaagg

SEQ ID NO: 1480562 - DNA, 25 bp, Homo sapien
tccccaaagcctgctaggaattcag

SEQ ID NO: 1480563 - DNA, 25 bp, Homo sapien
caggagttcttctctacatgtcaat

SEQ ID NO: 1480564 - DNA, 25 bp, Homo sapien
gtcaggagttcttctctacatgtca

SEQ ID NO: 1480565 - DNA, 25 bp, Homo sapien
ggagttcttctctacatgtcaatgc

SEQ ID NO: 1480566 - DNA, 25 bp, Homo sapien
acagaagaagagtcaggagttcttc

SEQ ID NO: 1480567 - DNA, 25 bp, Homo sapien
tctaatgatagaagaatctaagagt

SEQ ID NO: 1480568 - DNA, 25 bp, Homo sapien
ctatcttcaatccagttaaagctgt

SEQ ID NO: 1480569 - DNA, 25 bp, Homo sapien
tgctgatatttccaaaaatagctgt

SEQ ID NO: 1480570 - DNA, 25 bp, Homo sapien
ttaagtttataagcctttctaatga

SEQ ID NO: 1480571 - DNA, 25 bp, Homo sapien
tcgccttacaccaatcagtgggaga

SEQ ID NO: 1480572 - DNA, 25 bp, Homo sapien
tagtaaaggatttaacgacaaatca

SEQ ID NO: 1480573 - DNA, 25 bp, Homo sapien
gacaaatcaagtttgagttctcgcc

SEQ ID NO: 1480574 - DNA, 25 bp, Homo sapien
ctgggacatgggtagtaaaggattt

SEQ ID NO: 1480575 - DNA, 25 bp, Homo sapien
gacccagcaacacctcttctgtgga

SEQ ID NO: 1480576 - DNA, 25 bp, Homo sapien
gaacattcctgttgcccccatttca

SEQ ID NO: 1480577 - DNA, 25 bp, Homo sapien
gctgttctccccctcaagagaaagg

SEQ ID NO: 1480578 - DNA, 25 bp, Homo sapien
cccacacgaacccaagattgctgtt

SEQ ID NO: 1480579 - DNA, 25 bp, Homo sapien
tatacaaggcttgccatgtcatggc

SEQ ID NO: 1480580 - DNA, 25 bp, Homo sapien
ttcctgtcagaccaatcatgcatag

SEQ ID NO: 1480581 - DNA, 25 bp, Homo sapien
cagccttcgctgtaacttcactaaa

SEQ ID NO: 1480582 - DNA, 25 bp, Homo sapien
gacttcttaacatggtatacaaggc

SEQ ID NO: 1480583 - DNA, 25 bp, Homo sapien
gtagtgaactactgaattatgcaac

SEQ ID NO: 1480584 - DNA, 25 bp, Homo sapien
tgacaaaactttctaaggtggcgga

SEQ ID NO: 1480585 - DNA, 25 bp, Homo sapien
cataatagccaaatgcatacagctc

SEQ ID NO: 1480586 - DNA, 25 bp, Homo sapien
gtatttgtcactattcatctaactg

SEQ ID NO: 1480587 - DNA, 25 bp, Homo sapien
taaaaactcaaacattcattctcca

SEQ ID NO: 1480588 - DNA, 25 bp, Homo sapien
aatgttgataaaggcctatgtttta

SEQ ID NO: 1480589 - DNA, 25 bp, Homo sapien
taaatgttgataaaggcctatgttt

SEQ ID NO: 1480590 - DNA, 25 bp, Homo sapien
ccttaaaaactcaaacattcattct

SEQ ID NO: 1480591 - DNA, 25 bp, Homo sapien
cctactattattgctacagatattc

SEQ ID NO: 1480592 - DNA, 25 bp, Homo sapien
tattattgctacagatattccaaaa

SEQ ID NO: 1480593 - DNA, 25 bp, Homo sapien
tactattattgctacagatattcca

SEQ ID NO: 1480594 - DNA, 25 bp, Homo sapien
tattgctacagatattccaaaaagt

SEQ ID NO: 1480595 - DNA, 25 bp, Homo sapien
aaataccgtatttggaatccaatag

SEQ ID NO: 1480596 - DNA, 25 bp, Homo sapien
aaagtattctatttaccatatatac

SEQ ID NO: 1480597 - DNA, 25 bp, Homo sapien
ataccgtatttggaatccaatagac

SEQ ID NO: 1480598 - DNA, 25 bp, Homo sapien
tattctatttaccatatatacaaag

SEQ ID NO: 1480599 - DNA, 25 bp, Homo sapien
ttaacaaatcacattcatgaaaaag

SEQ ID NO: 1480600 - DNA, 25 bp, Homo sapien
catttaacaaatcacattcatgaaa

SEQ ID NO: 1480601 - DNA, 25 bp, Homo sapien
taacaaatcacattcatgaaaaaga

SEQ ID NO: 1480602 - DNA, 25 bp, Homo sapien
atttaacaaatcacattcatgaaaa

SEQ ID NO: 1480603 - DNA, 25 bp, Homo sapien
cccggctacttaggtggctgagaca

SEQ ID NO: 1480604 - DNA, 25 bp, Homo sapien
gtcccggctacttaggtggctgaga

SEQ ID NO: 1480605 - DNA, 25 bp, Homo sapien
cggctacttaggtggctgagacaca

SEQ ID NO: 1480606 - DNA, 25 bp, Homo sapien
ggctacttaggtggctgagacacaa

SEQ ID NO: 1480607 - DNA, 25 bp, Homo sapien
taagaaccatagttatctcactgat

SEQ ID NO: 1480608 - DNA, 25 bp, Homo sapien
tggaataatgtgaaagactggactt

SEQ ID NO: 1480609 - DNA, 25 bp, Homo sapien
tctcactgatattacgataaaaagc

SEQ ID NO: 1480610 - DNA, 25 bp, Homo sapien
tcaaggaggcttcagaaactatgta

SEQ ID NO: 1480611 - DNA, 25 bp, Homo sapien
gccagtgagttactgtcggtgctca

SEQ ID NO: 1480612 - DNA, 25 bp, Homo sapien
taagtaatagaaatcctcgaccatg

SEQ ID NO: 1480613 - DNA, 25 bp, Homo sapien
caaggtactgtccaagggttgccat

SEQ ID NO: 1480614 - DNA, 25 bp, Homo sapien
tcggtcagaaattcacgtgccagtg

SEQ ID NO: 1480615 - DNA, 25 bp, Homo sapien
tatagtaggcacataggaagtggat

SEQ ID NO: 1480616 - DNA, 25 bp, Homo sapien
tcaactgaagagatgattgcacggt

SEQ ID NO: 1480617 - DNA, 25 bp, Homo sapien
taacatgaggttatagccaacaacc

SEQ ID NO: 1480618 - DNA, 25 bp, Homo sapien
tgcactaacagaacaacatcagttg

SEQ ID NO: 1480619 - DNA, 25 bp, Homo sapien
gacatttacagtctatatcatttgg

SEQ ID NO: 1480620 - DNA, 25 bp, Homo sapien
ctgctgtgacatttacagtctatat

SEQ ID NO: 1480621 - DNA, 25 bp, Homo sapien
tatatcatttggactcataaactag

SEQ ID NO: 1480622 - DNA, 25 bp, Homo sapien
cagtctatatcatttggactcataa

SEQ ID NO: 1480623 - DNA, 25 bp, Homo sapien
ttaggaactctgtactccaattctc

SEQ ID NO: 1480624 - DNA, 25 bp, Homo sapien
ccaattctctatattccggctttgt

SEQ ID NO: 1480625 - DNA, 25 bp, Homo sapien
tatattccggctttgttccatattc

SEQ ID NO: 1480626 - DNA, 25 bp, Homo sapien
ctcttcctgcttattagtctgccag

SEQ ID NO: 1480627 - DNA, 25 bp, Homo sapien
catttacaaaacaaccactttgtat

SEQ ID NO: 1480628 - DNA, 25 bp, Homo sapien
caaaacaaccactttgtatcagaca

SEQ ID NO: 1480629 - DNA, 25 bp, Homo sapien
tacaaaacaaccactttgtatcaga

SEQ ID NO: 1480630 - DNA, 25 bp, Homo sapien
atcatttacaaaacaaccactttgt

SEQ ID NO: 1480631 - DNA, 25 bp, Homo sapien
cattccggctgccttgaaacctggg

SEQ ID NO: 1480632 - DNA, 25 bp, Homo sapien
gaaatctaagacagcaatggcccag

SEQ ID NO: 1480633 - DNA, 25 bp, Homo sapien
aaaggaaactcaggcatagggcagc

SEQ ID NO: 1480634 - DNA, 25 bp, Homo sapien
taacagcagtaaggcagtagttctg

SEQ ID NO: 1480635 - DNA, 25 bp, Homo sapien
catgagtggagattactagcctaag

SEQ ID NO: 1480636 - DNA, 25 bp, Homo sapien
gaattgagccctcaactagatgggc

SEQ ID NO: 1480637 - DNA, 25 bp, Homo sapien
gcataaaccagagccatcttaggca

SEQ ID NO: 1480638 - DNA, 25 bp, Homo sapien
taaccagagaagctatcaccttaga

SEQ ID NO: 1480639 - DNA, 25 bp, Homo sapien
tacgagtaattatctgcatccccat

SEQ ID NO: 1480640 - DNA, 25 bp, Homo sapien
gacaatctagaatccttaaagcctg

SEQ ID NO: 1480641 - DNA, 25 bp, Homo sapien
taaagcctgctttgattcctccctc

SEQ ID NO: 1480642 - DNA, 25 bp, Homo sapien
aagaagtcacatgcccctagttaag

SEQ ID NO: 1480643 - DNA, 25 bp, Homo sapien
cgaaagatttatacaatttgaagag

SEQ ID NO: 1480644 - DNA, 25 bp, Homo sapien
gactctgtctccacggaaatcttta

SEQ ID NO: 1480645 - DNA, 25 bp, Homo sapien
aggcgaaagatttatacaatttgaa

SEQ ID NO: 1480646 - DNA, 25 bp, Homo sapien
ctgtctccacggaaatctttagtaa

SEQ ID NO: 1480647 - DNA, 25 bp, Homo sapien
ggagaaccccgagccgacgccgctg

SEQ ID NO: 1480648 - DNA, 25 bp, Homo sapien
ccgcgcactccccctctcccggaga

SEQ ID NO: 1480649 - DNA, 25 bp, Homo sapien
cggagaaccccgagccgacgccgct

SEQ ID NO: 1480650 - DNA, 25 bp, Homo sapien
ggccgccgcgcactccccctctccc

SEQ ID NO: 1480651 - DNA, 25 bp, Homo sapien
cagagttttacgtaacatggggcca

SEQ ID NO: 1480652 - DNA, 25 bp, Homo sapien
gttttacgtaacatggggccaagca

SEQ ID NO: 1480653 - DNA, 25 bp, Homo sapien
ttttacgtaacatggggccaagcac

SEQ ID NO: 1480654 - DNA, 25 bp, Homo sapien
aatcagagttttacgtaacatgggg

SEQ ID NO: 1480655 - DNA, 25 bp, Homo sapien
tgaagaatggacagcactgtagaca

SEQ ID NO: 1480656 - DNA, 25 bp, Homo sapien
ggcaggatgcctctggaatgaaggt

SEQ ID NO: 1480657 - DNA, 25 bp, Homo sapien
gcattccttcttcccggatacaggg

SEQ ID NO: 1480658 - DNA, 25 bp, Homo sapien
tgatctcgtggtaatagaccgaggg

SEQ ID NO: 1480659 - DNA, 25 bp, Homo sapien
cagctctttgagaggtgggcagttc

SEQ ID NO: 1480660 - DNA, 25 bp, Homo sapien
ccagctctttgagaggtgggcagtt

SEQ ID NO: 1480661 - DNA, 25 bp, Homo sapien
tcccagctctttgagaggtgggcag

SEQ ID NO: 1480662 - DNA, 25 bp, Homo sapien
aatcccagctctttgagaggtgggc

SEQ ID NO: 1480663 - DNA, 25 bp, Homo sapien
tggttgaagtcagcactgacatgct

SEQ ID NO: 1480664 - DNA, 25 bp, Homo sapien
gaagtcagcactgacatgctatcca

SEQ ID NO: 1480665 - DNA, 25 bp, Homo sapien
tctagatatttctatgtccagtcct

SEQ ID NO: 1480666 - DNA, 25 bp, Homo sapien
tccagtcctggacaaaagcatctga

SEQ ID NO: 1480667 - DNA, 25 bp, Homo sapien
ttccgccattgtggttcctactgcc

SEQ ID NO: 1480668 - DNA, 25 bp, Homo sapien
tgcttccgccattgtggttcctact

SEQ ID NO: 1480669 - DNA, 25 bp, Homo sapien
tcagatactagcaacctgaagtaaa

SEQ ID NO: 1480670 - DNA, 25 bp, Homo sapien
gtaaaaataatgacggccgccctgc

SEQ ID NO: 1480671 - DNA, 25 bp, Homo sapien
aacccatagcaccatttttggaact

SEQ ID NO: 1480672 - DNA, 25 bp, Homo sapien
ccatttttggaactcagctgctgac

SEQ ID NO: 1480673 - DNA, 25 bp, Homo sapien
gtttcctgccaaacccatagcacca

SEQ ID NO: 1480674 - DNA, 25 bp, Homo sapien
ctgccaaacccatagcaccattttt

SEQ ID NO: 1480675 - DNA, 25 bp, Homo sapien
ttaacccatgcttgccacccaccat

SEQ ID NO: 1480676 - DNA, 25 bp, Homo sapien
gtgcctttgctaattgttggaaacc

SEQ ID NO: 1480677 - DNA, 25 bp, Homo sapien
ggcttttaacccatgcttgccaccc

SEQ ID NO: 1480678 - DNA, 25 bp, Homo sapien
tgtgcctttgctaattgttggaaac

SEQ ID NO: 1480679 - DNA, 25 bp, Homo sapien
tggcattgaggaacacacacggttg

SEQ ID NO: 1480680 - DNA, 25 bp, Homo sapien
gctaattagcaaccgtcttcccagg

SEQ ID NO: 1480681 - DNA, 25 bp, Homo sapien
ggtagctgcaacgaaactggtctct

SEQ ID NO: 1480682 - DNA, 25 bp, Homo sapien
tgatgtcacccgaggaagacacggg

SEQ ID NO: 1480683 - DNA, 25 bp, Homo sapien
tatttgaagcatggaaaccgcagca

SEQ ID NO: 1480684 - DNA, 25 bp, Homo sapien
taccggtgctgctgatgttacccag

SEQ ID NO: 1480685 - DNA, 25 bp, Homo sapien
gttacccagattggttccttgacat

SEQ ID NO: 1480686 - DNA, 25 bp, Homo sapien
tctgtgctcgttctaggtataattc

SEQ ID NO: 1480687 - DNA, 25 bp, Homo sapien
gggtattagtcacacacaagagatg

SEQ ID NO: 1480688 - DNA, 25 bp, Homo sapien
tccagatccagactcgaaaaggctg

SEQ ID NO: 1480689 - DNA, 25 bp, Homo sapien
tctgcggcagaatggaacagccctg

SEQ ID NO: 1480690 - DNA, 25 bp, Homo sapien
tgtggcccctgagtaattgtaaaac

SEQ ID NO: 1480691 - DNA, 25 bp, Homo sapien
tatagcgggataaagtcacaccagg

SEQ ID NO: 1480692 - DNA, 25 bp, Homo sapien
acactgtctgggtgattggcgtcaa

SEQ ID NO: 1480693 - DNA, 25 bp, Homo sapien
cagcaacgtcaagggtcttagacct

SEQ ID NO: 1480694 - DNA, 25 bp, Homo sapien
cagttagctcattagggtcctgcag

SEQ ID NO: 1480695 - DNA, 25 bp, Homo sapien
tgttcagtcagccatttactatcta

SEQ ID NO: 1480696 - DNA, 25 bp, Homo sapien
gccatttactatctattcagcactt

SEQ ID NO: 1480697 - DNA, 25 bp, Homo sapien
gtcagccatttactatctattcagc

SEQ ID NO: 1480698 - DNA, 25 bp, Homo sapien
tgcatttgttcagtcagccatttac

SEQ ID NO: 1480699 - DNA, 25 bp, Homo sapien
cgtggccctaggctcgagaagtgca

SEQ ID NO: 1480700 - DNA, 25 bp, Homo sapien
ccaaagatggaaagacgtggcccta

SEQ ID NO: 1480701 - DNA, 25 bp, Homo sapien
atggaaagacgtggccctaggctcg

SEQ ID NO: 1480702 - DNA, 25 bp, Homo sapien
cgagaagtgcacaccaatagaggac

SEQ ID NO: 1480703 - DNA, 25 bp, Homo sapien
cagagccatccatggtgccttcctg

SEQ ID NO: 1480704 - DNA, 25 bp, Homo sapien
aaaggagctgtgggcgctatatgct

SEQ ID NO: 1480705 - DNA, 25 bp, Homo sapien
gagccatccatggtgccttcctggt

SEQ ID NO: 1480706 - DNA, 25 bp, Homo sapien
ctgtgggcgctatatgctgcatgca

SEQ ID NO: 1480707 - DNA, 25 bp, Homo sapien
cgtataccatgagctgtgtagggcc

SEQ ID NO: 1480708 - DNA, 25 bp, Homo sapien
tgtttcggcacagctcaagtctctg

SEQ ID NO: 1480709 - DNA, 25 bp, Homo sapien
ccctcgtgtggtgggttcaaattca

SEQ ID NO: 1480710 - DNA, 25 bp, Homo sapien
gtctctgtcgacttcttttccctcg

SEQ ID NO: 1480711 - DNA, 25 bp, Homo sapien
gacaacccgggaattggattcaggc

SEQ ID NO: 1480712 - DNA, 25 bp, Homo sapien
gattcaggctttgatattgcaacac

SEQ ID NO: 1480713 - DNA, 25 bp, Homo sapien
gaaaacatgaagagtgacaacccgg

SEQ ID NO: 1480714 - DNA, 25 bp, Homo sapien
tcttggcaccaaagctcacaggcca

SEQ ID NO: 1480715 - DNA, 25 bp, Homo sapien
ctcaacaaccctccctcattagcct

SEQ ID NO: 1480716 - DNA, 25 bp, Homo sapien
gtttattacgtctgactgtgcaaag

SEQ ID NO: 1480717 - DNA, 25 bp, Homo sapien
ctcattagcctccaccaagtagctg

SEQ ID NO: 1480718 - DNA, 25 bp, Homo sapien
ccagcctagtttattacgtctgact

SEQ ID NO: 1480719 - DNA, 25 bp, Homo sapien
tcatggttctttcgttgtgaatccc

SEQ ID NO: 1480720 - DNA, 25 bp, Homo sapien
tatacaacagcatagcctctgcctg

SEQ ID NO: 1480721 - DNA, 25 bp, Homo sapien
catggttctttcgttgtgaatcccc

SEQ ID NO: 1480722 - DNA, 25 bp, Homo sapien
ggcatcactatatacaacagcatag

SEQ ID NO: 1480723 - DNA, 25 bp, Homo sapien
ttaaggcagataggtccgatgcgct

SEQ ID NO: 1480724 - DNA, 25 bp, Homo sapien
tccgatgcgctatcttggaccccag

SEQ ID NO: 1480725 - DNA, 25 bp, Homo sapien
cgctatcttggaccccagttgttcc

SEQ ID NO: 1480726 - DNA, 25 bp, Homo sapien
gataggtccgatgcgctatcttgga

SEQ ID NO: 1480727 - DNA, 25 bp, Homo sapien
ctgaagttggaaattgtaaatgcag

SEQ ID NO: 1480728 - DNA, 25 bp, Homo sapien
gacttcttttatttgcctcccactg

SEQ ID NO: 1480729 - DNA, 25 bp, Homo sapien
gactgaggcgtctcctgatgaaaag

SEQ ID NO: 1480730 - DNA, 25 bp, Homo sapien
catgtggttgctgcaatgagccttc

SEQ ID NO: 1480731 - DNA, 25 bp, Homo sapien
cacataactttaggcagactgaggc

SEQ ID NO: 1480732 - DNA, 25 bp, Homo sapien
tgaacagagttatgccagagatggc

SEQ ID NO: 1480733 - DNA, 25 bp, Homo sapien
tgctctcggagggaagccaagtttt

SEQ ID NO: 1480734 - DNA, 25 bp, Homo sapien
caaaatgctgcgttgacttaggagg

SEQ ID NO: 1480735 - DNA, 25 bp, Homo sapien
cccaggatgaggctagaagaaagtc

SEQ ID NO: 1480736 - DNA, 25 bp, Homo sapien
taagccacgctgtgtgtgacgcatc

SEQ ID NO: 1480737 - DNA, 25 bp, Homo sapien
acacaagctcacatattcacacacg

SEQ ID NO: 1480738 - DNA, 25 bp, Homo sapien
caataccatgatcttggccttccag

SEQ ID NO: 1480739 - DNA, 25 bp, Homo sapien
gtgacgcatcgtgatgatacccaag

SEQ ID NO: 1480740 - DNA, 25 bp, Homo sapien
tcttccggagcacagcaatggtttg

SEQ ID NO: 1480741 - DNA, 25 bp, Homo sapien
cattcctctcgctggaaccttgggt

SEQ ID NO: 1480742 - DNA, 25 bp, Homo sapien
tcctgaatgctgtactttgttttcc

SEQ ID NO: 1480743 - DNA, 25 bp, Homo sapien
caatggtttgctgtctgctaagatc

SEQ ID NO: 1480744 - DNA, 25 bp, Homo sapien
tcgacagtaatttccagctctcttc

SEQ ID NO: 1480745 - DNA, 25 bp, Homo sapien
ctgatcgacagtaatttccagctct

SEQ ID NO: 1480746 - DNA, 25 bp, Homo sapien
gacagtaatttccagctctcttcct

SEQ ID NO: 1480747 - DNA, 25 bp, Homo sapien
gatcgacagtaatttccagctctct

SEQ ID NO: 1480748 - DNA, 25 bp, Homo sapien
gcgttccacggtagtgaacagagac

SEQ ID NO: 1480749 - DNA, 25 bp, Homo sapien
ttccgtggatctacagtgactgttc

SEQ ID NO: 1480750 - DNA, 25 bp, Homo sapien
cccctgcgttccacggtagtgaaca

SEQ ID NO: 1480751 - DNA, 25 bp, Homo sapien
aacagagacacacgacagccattcc

SEQ ID NO: 1480752 - DNA, 25 bp, Homo sapien
cgcccagaggcatacaagctggcct

SEQ ID NO: 1480753 - DNA, 25 bp, Homo sapien
ccttgctggtatcctagagttgtct

SEQ ID NO: 1480754 - DNA, 25 bp, Homo sapien
aggcggcccttgctggtatcctaga

SEQ ID NO: 1480755 - DNA, 25 bp, Homo sapien
gacagcaccgcccagaggcatacaa

SEQ ID NO: 1480756 - DNA, 25 bp, Homo sapien
tactgttgtatctccccacatagta

SEQ ID NO: 1480757 - DNA, 25 bp, Homo sapien
cagagtctctgtctatcaccccagc

SEQ ID NO: 1480758 - DNA, 25 bp, Homo sapien
agagtctctgtctatcaccccagct

SEQ ID NO: 1480759 - DNA, 25 bp, Homo sapien
tctttttactgttgtatctccccac

SEQ ID NO: 1480760 - DNA, 25 bp, Homo sapien
gaagggtgctggtaggacaagagca

SEQ ID NO: 1480761 - DNA, 25 bp, Homo sapien
gagcaaagcgcagagggactgaggg

SEQ ID NO: 1480762 - DNA, 25 bp, Homo sapien
gtggtgagaacggatcttctcacag

SEQ ID NO: 1480763 - DNA, 25 bp, Homo sapien
gtgagaacggatcttctcacagttg

SEQ ID NO: 1480764 - DNA, 25 bp, Homo sapien
tgaccaggtgaagagtgagtctcct

SEQ ID NO: 1480765 - DNA, 25 bp, Homo sapien
tcattaccccatgaccaggctaggg

SEQ ID NO: 1480766 - DNA, 25 bp, Homo sapien
taatttcgtgacctgcaatcggcag

SEQ ID NO: 1480767 - DNA, 25 bp, Homo sapien
gattgcagctcccagaaaggaaccc

SEQ ID NO: 1480768 - DNA, 25 bp, Homo sapien
gccacactggccgattgtccagctg

SEQ ID NO: 1480769 - DNA, 25 bp, Homo sapien
agagctgcccctgccgtctgtcggg

SEQ ID NO: 1480770 - DNA, 25 bp, Homo sapien
ctgctgcgtgttgcctgctgtggcc

SEQ ID NO: 1480771 - DNA, 25 bp, Homo sapien
gagcagccacgctttgttccgtaac

SEQ ID NO: 1480772 - DNA, 25 bp, Homo sapien
ccaaggaggtaagacttggggcaga

SEQ ID NO: 1480773 - DNA, 25 bp, Homo sapien
caaggaggtaagacttggggcagaa

SEQ ID NO: 1480774 - DNA, 25 bp, Homo sapien
gaggtaagacttggggcagaaacca

SEQ ID NO: 1480775 - DNA, 25 bp, Homo sapien
cacaccatgctctcactgttgcagc

SEQ ID NO: 1480776 - DNA, 25 bp, Homo sapien
caggagaatcccattactagagggc

SEQ ID NO: 1480777 - DNA, 25 bp, Homo sapien
ccatggtctccactagggagcgttc

SEQ ID NO: 1480778 - DNA, 25 bp, Homo sapien
ccactagggagcgttccgtctcctg

SEQ ID NO: 1480779 - DNA, 25 bp, Homo sapien
gctgcaaggcccgcagcagccatgg

SEQ ID NO: 1480780 - DNA, 25 bp, Homo sapien
tgctgcaaggcccgcagcagccatg

SEQ ID NO: 1480781 - DNA, 25 bp, Homo sapien
ctgctgcaaggcccgcagcagccat

SEQ ID NO: 1480782 - DNA, 25 bp, Homo sapien
ctgcaaggcccgcagcagccatggg

SEQ ID NO: 1480783 - DNA, 25 bp, Homo sapien
cagatacaggtgtgttccctcaggt

SEQ ID NO: 1480784 - DNA, 25 bp, Homo sapien
ggcagcctagtcttcgggcagcagc

SEQ ID NO: 1480785 - DNA, 25 bp, Homo sapien
cagcctagtcttcgggcagcagctc

SEQ ID NO: 1480786 - DNA, 25 bp, Homo sapien
gggaatgacagatacaggtgtgttc

SEQ ID NO: 1480787 - DNA, 25 bp, Homo sapien
ctgagatcttgttactggtggcgaa

SEQ ID NO: 1480788 - DNA, 25 bp, Homo sapien
gcatcgatttttccagtgttctgag

SEQ ID NO: 1480789 - DNA, 25 bp, Homo sapien
tggtggcgaatccatacaggtctgc

SEQ ID NO: 1480790 - DNA, 25 bp, Homo sapien
ttgtgcatcgatttttccagtgttc

SEQ ID NO: 1480791 - DNA, 25 bp, Homo sapien
tgctaatgaggttgatgaacatttc

SEQ ID NO: 1480792 - DNA, 25 bp, Homo sapien
tatgatcgtgactgagttttctgga

SEQ ID NO: 1480793 - DNA, 25 bp, Homo sapien
gttccttctgttttatgatcgtgac

SEQ ID NO: 1480794 - DNA, 25 bp, Homo sapien
gctaatgaggttgatgaacatttca

SEQ ID NO: 1480795 - DNA, 25 bp, Homo sapien
aggtaggagctaggccacacatctg

SEQ ID NO: 1480796 - DNA, 25 bp, Homo sapien
acacatctggggctcggcaccagaa

SEQ ID NO: 1480797 - DNA, 25 bp, Homo sapien
ctggggctcggcaccagaaaaggta

SEQ ID NO: 1480798 - DNA, 25 bp, Homo sapien
tcaggtaggagctaggccacacatc

SEQ ID NO: 1480799 - DNA, 25 bp, Homo sapien
tgagcgctgtgcctgggtaccagtc

SEQ ID NO: 1480800 - DNA, 25 bp, Homo sapien
caggagaagctactggttctttgct

SEQ ID NO: 1480801 - DNA, 25 bp, Homo sapien
ctggaattgcaggaagacaggagaa

SEQ ID NO: 1480802 - DNA, 25 bp, Homo sapien
ttctctccgggttagagagcacagg

SEQ ID NO: 1480803 - DNA, 25 bp, Homo sapien
tctgtgttttcgtacctcggtgtaa

SEQ ID NO: 1480804 - DNA, 25 bp, Homo sapien
gtgtaagatgctgagcccacggctg

SEQ ID NO: 1480805 - DNA, 25 bp, Homo sapien
tcagaacctggtccataaggagacg

SEQ ID NO: 1480806 - DNA, 25 bp, Homo sapien
gactagacgcccacttatttgcaaa

SEQ ID NO: 1480807 - DNA, 25 bp, Homo sapien
aaatgtttgagtaaggagatgactt

SEQ ID NO: 1480808 - DNA, 25 bp, Homo sapien
atgtttgagtaaggagatgacttgg

SEQ ID NO: 1480809 - DNA, 25 bp, Homo sapien
aaggagatgacttggggaggaaaag

SEQ ID NO: 1480810 - DNA, 25 bp, Homo sapien
aagggctgggctatttggtggaaat

SEQ ID NO: 1480811 - DNA, 25 bp, Homo sapien
gaaagctcttgagtgggacgatggg

SEQ ID NO: 1480812 - DNA, 25 bp, Homo sapien
tcttgagtgggacgatgggaaggcc

SEQ ID NO: 1480813 - DNA, 25 bp, Homo sapien
aagctcttgagtgggacgatgggaa

SEQ ID NO: 1480814 - DNA, 25 bp, Homo sapien
tgagtgggacgatgggaaggcccga

SEQ ID NO: 1480815 - DNA, 25 bp, Homo sapien
aaatcctttcggctgcagctttcag

SEQ ID NO: 1480816 - DNA, 25 bp, Homo sapien
tctccgttgtaaggaattctaaatc

SEQ ID NO: 1480817 - DNA, 25 bp, Homo sapien
caggaagccgctcttcgagcctgtt

SEQ ID NO: 1480818 - DNA, 25 bp, Homo sapien
ggcccttccgtctcttaagtccatg

SEQ ID NO: 1480819 - DNA, 25 bp, Homo sapien
tccacactatttgtacagctgtaaa

SEQ ID NO: 1480820 - DNA, 25 bp, Homo sapien
tgtaaactcaaggaatcatccaata

SEQ ID NO: 1480821 - DNA, 25 bp, Homo sapien
cagtggtttccacagtttaagaatt

SEQ ID NO: 1480822 - DNA, 25 bp, Homo sapien
tacttgtacaaatctgggagaacag

SEQ ID NO: 1480823 - DNA, 25 bp, Homo sapien
ttttccccaaagagagtatcaggca

SEQ ID NO: 1480824 - DNA, 25 bp, Homo sapien
gataacacgagctactgatatggtc

SEQ ID NO: 1480825 - DNA, 25 bp, Homo sapien
cctacatggtcctcgaatcttgtga

SEQ ID NO: 1480826 - DNA, 25 bp, Homo sapien
tgggctacgtaaaagacctacatgg

SEQ ID NO: 1480827 - DNA, 25 bp, Homo sapien
ccacagggaagggtgcaactcaaat

SEQ ID NO: 1480828 - DNA, 25 bp, Homo sapien
cagagactagaaccttggatgcaag

SEQ ID NO: 1480829 - DNA, 25 bp, Homo sapien
cacagatcgagggagaaaccaagga

SEQ ID NO: 1480830 - DNA, 25 bp, Homo sapien
gctgagctcataaggccacagggaa

SEQ ID NO: 1480831 - DNA, 25 bp, Homo sapien
gccaagcataggtgggtgcagccgc

SEQ ID NO: 1480832 - DNA, 25 bp, Homo sapien
cagtcaactcccaaggtgttgtcag

SEQ ID NO: 1480833 - DNA, 25 bp, Homo sapien
cgccattgttcactgagcagtagtt

SEQ ID NO: 1480834 - DNA, 25 bp, Homo sapien
tcatttctgttcgatacagtcaact

SEQ ID NO: 1480835 - DNA, 25 bp, Homo sapien
tagtttccttgaagccatgctagga

SEQ ID NO: 1480836 - DNA, 25 bp, Homo sapien
cacaaacactgattcccaacttggg

SEQ ID NO: 1480837 - DNA, 25 bp, Homo sapien
agaggcagcatagcatagactccag

SEQ ID NO: 1480838 - DNA, 25 bp, Homo sapien
gcagaaatcagttcaatagccctct

SEQ ID NO: 1480839 - DNA, 25 bp, Homo sapien
ctagtggccatacgggtagcagcca

SEQ ID NO: 1480840 - DNA, 25 bp, Homo sapien
ccatacgggtagcagccagagtgtg

SEQ ID NO: 1480841 - DNA, 25 bp, Homo sapien
cagtatgccaacagtaacagcacag

SEQ ID NO: 1480842 - DNA, 25 bp, Homo sapien
gtgcccccagtatgccaacagtaac

SEQ ID NO: 1480843 - DNA, 25 bp, Homo sapien
tgatgccatacagccgggtctgctt

SEQ ID NO: 1480844 - DNA, 25 bp, Homo sapien
gcaagatcgagagcaaccacggaat

SEQ ID NO: 1480845 - DNA, 25 bp, Homo sapien
cttgcggacactgagacagggccgt

SEQ ID NO: 1480846 - DNA, 25 bp, Homo sapien
ggttggaaagcatccgtctccttgg

SEQ ID NO: 1480847 - DNA, 25 bp, Homo sapien
gatactggagcccttcgagagcctt

SEQ ID NO: 1480848 - DNA, 25 bp, Homo sapien
ggttcaggcattccgcccgattggt

SEQ ID NO: 1480849 - DNA, 25 bp, Homo sapien
gagccttgcgtctgctgggctgact

SEQ ID NO: 1480850 - DNA, 25 bp, Homo sapien
tagctcgtcacagcaaaaggatact

SEQ ID NO: 1480851 - DNA, 25 bp, Homo sapien
gcagtgccacttacaacacgagggt

SEQ ID NO: 1480852 - DNA, 25 bp, Homo sapien
aaccaaggacagtatgcaggtatct

SEQ ID NO: 1480853 - DNA, 25 bp, Homo sapien
cacgagccagggcagactaatgtaa

SEQ ID NO: 1480854 - DNA, 25 bp, Homo sapien
cggtatcagggtgactccaggctct

SEQ ID NO: 1480855 - DNA, 25 bp, Homo sapien
tcgtgccgtccatgtaggaagtttc

SEQ ID NO: 1480856 - DNA, 25 bp, Homo sapien
tgcacaaggatcctccggttcgtgc

SEQ ID NO: 1480857 - DNA, 25 bp, Homo sapien
cagtccattgggcaagcccaggtca

SEQ ID NO: 1480858 - DNA, 25 bp, Homo sapien
gaacgcatcgaaggtcagtccattg

SEQ ID NO: 1480859 - DNA, 25 bp, Homo sapien
tgttgatccacattgaagccatatg

SEQ ID NO: 1480860 - DNA, 25 bp, Homo sapien
gaccaatgctggagttaaagcctca

SEQ ID NO: 1480861 - DNA, 25 bp, Homo sapien
catgttctggcattgtaccgtggat

SEQ ID NO: 1480862 - DNA, 25 bp, Homo sapien
taccgtggatatctacaagtcacca

SEQ ID NO: 1480863 - DNA, 25 bp, Homo sapien
tgcggccaaggtgatcaacagcgat

SEQ ID NO: 1480864 - DNA, 25 bp, Homo sapien
agtcagtctcaaagagcacccggcg

SEQ ID NO: 1480865 - DNA, 25 bp, Homo sapien
gatccaggttagagtctgtccagaa

SEQ ID NO: 1480866 - DNA, 25 bp, Homo sapien
cggaatccgttacaatgcctctggg

SEQ ID NO: 1480867 - DNA, 25 bp, Homo sapien
cacaggcacaggaaatcttctagaa

SEQ ID NO: 1480868 - DNA, 25 bp, Homo sapien
gaaaagggttcagggtctatgtcca

SEQ ID NO: 1480869 - DNA, 25 bp, Homo sapien
tcctgccgcatcatctttactgaag

SEQ ID NO: 1480870 - DNA, 25 bp, Homo sapien
ttttgcagagaacgcaaggtgactc

SEQ ID NO: 1480871 - DNA, 25 bp, Homo sapien
tctaatgatggtggttggctctcca

SEQ ID NO: 1480872 - DNA, 25 bp, Homo sapien
tcttgtccacgcagtcaaaggccag

SEQ ID NO: 1480873 - DNA, 25 bp, Homo sapien
aaggctcagtgatgtccgtccagta

SEQ ID NO: 1480874 - DNA, 25 bp, Homo sapien
tgtagactagctctcccaatggaag

SEQ ID NO: 1480875 - DNA, 25 bp, Homo sapien
caattcttgtgcctcaggctcccaa

SEQ ID NO: 1480876 - DNA, 25 bp, Homo sapien
ggttcaagcaattcttgtgcctcag

SEQ ID NO: 1480877 - DNA, 25 bp, Homo sapien
agctcactgcaacctctgcctccca

SEQ ID NO: 1480878 - DNA, 25 bp, Homo sapien
attctgttgcccaggatctcagctc

SEQ ID NO: 1480879 - DNA, 25 bp, Homo sapien
caagagcgctgatgaaatacaaagc

SEQ ID NO: 1480880 - DNA, 25 bp, Homo sapien
gggtatttaatgcatcacatagtgc

SEQ ID NO: 1480881 - DNA, 25 bp, Homo sapien
gcagcataaagagctagagagcagt

SEQ ID NO: 1480882 - DNA, 25 bp, Homo sapien
ggaagatacatgtcagatacacaac

SEQ ID NO: 1480883 - DNA, 25 bp, Homo sapien
cgggacatgaaggaacgcctttgct

SEQ ID NO: 1480884 - DNA, 25 bp, Homo sapien
acggcggtaggcaccgcaggtcctt

SEQ ID NO: 1480885 - DNA, 25 bp, Homo sapien
gtgaatcgggggagccactgtactc

SEQ ID NO: 1480886 - DNA, 25 bp, Homo sapien
ttcctcatggtatttccctccaggg

SEQ ID NO: 1480887 - DNA, 25 bp, Homo sapien
taatagaaaagctttggctacccat

SEQ ID NO: 1480888 - DNA, 25 bp, Homo sapien
aggaaggaaccaaataagagcagca

SEQ ID NO: 1480889 - DNA, 25 bp, Homo sapien
gaaggaaccaaataagagcagcacc

SEQ ID NO: 1480890 - DNA, 25 bp, Homo sapien
tttggctacccatgctctgctttag

SEQ ID NO: 1480891 - DNA, 25 bp, Homo sapien
tgtgttctcgctcgtgctggcaccg

SEQ ID NO: 1480892 - DNA, 25 bp, Homo sapien
gcatcgcactcaggaacgaacagcc

SEQ ID NO: 1480893 - DNA, 25 bp, Homo sapien
aacagccccggaggaatgggtcgct

SEQ ID NO: 1480894 - DNA, 25 bp, Homo sapien
atccacgcaccagcagtagccggtg

SEQ ID NO: 1480895 - DNA, 25 bp, Homo sapien
agaaacaggcaacaagaaagctgtc

SEQ ID NO: 1480896 - DNA, 25 bp, Homo sapien
ggcaacaagaaagctgtcaggtgcg

SEQ ID NO: 1480897 - DNA, 25 bp, Homo sapien
acaagaaagctgtcaggtgcgtcat

SEQ ID NO: 1480898 - DNA, 25 bp, Homo sapien
aacaggcaacaagaaagctgtcagg

SEQ ID NO: 1480899 - DNA, 25 bp, Homo sapien
tccataagtgtgttgccagtgaata

SEQ ID NO: 1480900 - DNA, 25 bp, Homo sapien
tggatcctcgcaaagcagacacagt

SEQ ID NO: 1480901 - DNA, 25 bp, Homo sapien
acagtgacattccataagtgtgttg

SEQ ID NO: 1480902 - DNA, 25 bp, Homo sapien
cagatgttcatttgcgactggatcc

SEQ ID NO: 1480903 - DNA, 25 bp, Homo sapien
ctttgtctgtgttgccagttctcat

SEQ ID NO: 1480904 - DNA, 25 bp, Homo sapien
ttaacgtggttgctcccttggtgag

SEQ ID NO: 1480905 - DNA, 25 bp, Homo sapien
gttggtttgcttaacgtggttgctc

SEQ ID NO: 1480906 - DNA, 25 bp, Homo sapien
tgcttaacgtggttgctcccttggt

SEQ ID NO: 1480907 - DNA, 25 bp, Homo sapien
tggtttgcttaacgtggttgctccc

SEQ ID NO: 1480908 - DNA, 25 bp, Homo sapien
tggagcctcctactttcccgcctca

SEQ ID NO: 1480909 - DNA, 25 bp, Homo sapien
cccagggccatgtgctctggattca

SEQ ID NO: 1480910 - DNA, 25 bp, Homo sapien
caatgggccatgtgctctggattca

SEQ ID NO: 1480911 - DNA, 25 bp, Homo sapien
ctggattcatggacagggcaggcaa

SEQ ID NO: 1480912 - DNA, 25 bp, Homo sapien
ctggattcatggacagggcaacggg

SEQ ID NO: 1480913 - DNA, 25 bp, Homo sapien
tcatggacagggcaacgggccatgt

SEQ ID NO: 1480914 - DNA, 25 bp, Homo sapien
gattcatggacagggcaacgggcca

SEQ ID NO: 1480915 - DNA, 25 bp, Homo sapien
tggattcatggacagggcaacgggc

SEQ ID NO: 1480916 - DNA, 25 bp, Homo sapien
tccgggcacgcaacggaagccgtct

SEQ ID NO: 1480917 - DNA, 25 bp, Homo sapien
tccctgataaccaggtttgcactgg

SEQ ID NO: 1480918 - DNA, 25 bp, Homo sapien
cactggcacgtgaaagagcctggag

SEQ ID NO: 1480919 - DNA, 25 bp, Homo sapien
ggtgacatcggcttggctggcattc

SEQ ID NO: 1480920 - DNA, 25 bp, Homo sapien
gttgatggggcgctggtccacgaca

SEQ ID NO: 1480921 - DNA, 25 bp, Homo sapien
gagcctcctgtgtagatacactggg

SEQ ID NO: 1480922 - DNA, 25 bp, Homo sapien
cccgctggggtatgtcgcagttatg

SEQ ID NO: 1480923 - DNA, 25 bp, Homo sapien
gcaagcaggaacaggtgtaggagga

SEQ ID NO: 1480924 - DNA, 25 bp, Homo sapien
cttcagaacaaaaggttgatgcaca

SEQ ID NO: 1480925 - DNA, 25 bp, Homo sapien
ttcagaacaaaaggttgatgcacag

SEQ ID NO: 1480926 - DNA, 25 bp, Homo sapien
tcagaacaaaaggttgatgcacagt

SEQ ID NO: 1480927 - DNA, 25 bp, Homo sapien
gaaggttcctgggtgattattgcag

SEQ ID NO: 1480928 - DNA, 25 bp, Homo sapien
acactcgcagcggaaggttcctggg

SEQ ID NO: 1480929 - DNA, 25 bp, Homo sapien
tcatctgaaaactggtagccctcca

SEQ ID NO: 1480930 - DNA, 25 bp, Homo sapien
tattgcagattgtgtggctcccaca

SEQ ID NO: 1480931 - DNA, 25 bp, Homo sapien
atgatggagggaatggttccctagc

SEQ ID NO: 1480932 - DNA, 25 bp, Homo sapien
ctgaaaagctattgacaaataggac

SEQ ID NO: 1480933 - DNA, 25 bp, Homo sapien
aaagctattgacaaataggacctca

SEQ ID NO: 1480934 - DNA, 25 bp, Homo sapien
gaatggttccctagcacaacctcca

SEQ ID NO: 1480935 - DNA, 25 bp, Homo sapien
ttacagaacgtggatgcctcctcct

SEQ ID NO: 1480936 - DNA, 25 bp, Homo sapien
ctcctcgcctgatttcccagcccca

SEQ ID NO: 1480937 - DNA, 25 bp, Homo sapien
tccgtgcttccttgctgcacccagt

SEQ ID NO: 1480938 - DNA, 25 bp, Homo sapien
tggtttacagaacgtggatgcctcc

SEQ ID NO: 1480939 - DNA, 25 bp, Homo sapien
ggtgtcacacccatgagtgccgatg

SEQ ID NO: 1480940 - DNA, 25 bp, Homo sapien
gcgacaggccgcgttggtgtcacac

SEQ ID NO: 1480941 - DNA, 25 bp, Homo sapien
tcctcggaagccgatggagcactcg

SEQ ID NO: 1480942 - DNA, 25 bp, Homo sapien
gagcactcgcaggtgaactgtgtcc

SEQ ID NO: 1480943 - DNA, 25 bp, Homo sapien
cattggaaccaagtgagtcttcagg

SEQ ID NO: 1480944 - DNA, 25 bp, Homo sapien
agacagagacattggaaccaagtga

SEQ ID NO: 1480945 - DNA, 25 bp, Homo sapien
cagagacattggaaccaagtgagtc

SEQ ID NO: 1480946 - DNA, 25 bp, Homo sapien
cctccttccacagaaagtcaaccac

SEQ ID NO: 1480947 - DNA, 25 bp, Homo sapien
ttaaaaatgcatgagcacctgtgcc

SEQ ID NO: 1480948 - DNA, 25 bp, Homo sapien
ttttcttctacagactgagagtaag

SEQ ID NO: 1480949 - DNA, 25 bp, Homo sapien
cagactgagagtaagagaccaaaaa

SEQ ID NO: 1480950 - DNA, 25 bp, Homo sapien
taaaaatgcatgagcacctgtgccc

SEQ ID NO: 1480951 - DNA, 25 bp, Homo sapien
tgtagatgcgtgaaggagatgcccc

SEQ ID NO: 1480952 - DNA, 25 bp, Homo sapien
ggttgtacaggacgaacacgctgtc

SEQ ID NO: 1480953 - DNA, 25 bp, Homo sapien
tgctgagagcatagcgcaagatctt

SEQ ID NO: 1480954 - DNA, 25 bp, Homo sapien
gccgggagtcatcgtggacgcattc

SEQ ID NO: 1480955 - DNA, 25 bp, Homo sapien
cattggtattattcgtattatgtgt

SEQ ID NO: 1480956 - DNA, 25 bp, Homo sapien
tctctgtaagttttgaagacgccca

SEQ ID NO: 1480957 - DNA, 25 bp, Homo sapien
cccatatgatcattggtattattcg

SEQ ID NO: 1480958 - DNA, 25 bp, Homo sapien
ctgtaagttttgaagacgcccagaa

SEQ ID NO: 1480959 - DNA, 25 bp, Homo sapien
cagctccgtgtagggctcaatgtgc

SEQ ID NO: 1480960 - DNA, 25 bp, Homo sapien
ggtcaggtgcccatgctcatcgatg

SEQ ID NO: 1480961 - DNA, 25 bp, Homo sapien
gatgccgctgaaccgctgcttaatg

SEQ ID NO: 1480962 - DNA, 25 bp, Homo sapien
ttaatgaccagattgcccgggtgcc

SEQ ID NO: 1480963 - DNA, 25 bp, Homo sapien
tggggttggtgcgaacgcttctgca

SEQ ID NO: 1480964 - DNA, 25 bp, Homo sapien
gagtggggttggtgcgaacgcttct

SEQ ID NO: 1480965 - DNA, 25 bp, Homo sapien
tggtgcgaacgcttctgcaggtgct

SEQ ID NO: 1480966 - DNA, 25 bp, Homo sapien
ggttggtgcgaacgcttctgcaggt

SEQ ID NO: 1480967 - DNA, 25 bp, Homo sapien
tccaacccagctgttctcgggaatg

SEQ ID NO: 1480968 - DNA, 25 bp, Homo sapien
agctgttctcgggaatgggtctcca

SEQ ID NO: 1480969 - DNA, 25 bp, Homo sapien
tcgggaatgggtctccagcatgcaa

SEQ ID NO: 1480970 - DNA, 25 bp, Homo sapien
tgggtctccagcatgcaaaggttgg

SEQ ID NO: 1480971 - DNA, 25 bp, Homo sapien
ggccagtggaagcagagaatatcca

SEQ ID NO: 1480972 - DNA, 25 bp, Homo sapien
tatccaacggtctcgggaatggtgc

SEQ ID NO: 1480973 - DNA, 25 bp, Homo sapien
ttgaatccgtcctgctccactgcaa

SEQ ID NO: 1480974 - DNA, 25 bp, Homo sapien
tgcaaacatccatccaatgatgcct

SEQ ID NO: 1480975 - DNA, 25 bp, Homo sapien
ttcaccttgccattgactcgctggg

SEQ ID NO: 1480976 - DNA, 25 bp, Homo sapien
ctttcaccttgccattgactcgctg

SEQ ID NO: 1480977 - DNA, 25 bp, Homo sapien
ttgccattgactcgctggggggaac

SEQ ID NO: 1480978 - DNA, 25 bp, Homo sapien
gtcagtgttctcaaagacaatgggg

SEQ ID NO: 1480979 - DNA, 25 bp, Homo sapien
caaacacgagtaatatgtaggacct

SEQ ID NO: 1480980 - DNA, 25 bp, Homo sapien
tccaagccagtctttcaaacacgag

SEQ ID NO: 1480981 - DNA, 25 bp, Homo sapien
tgtaggacctgtacctattggtgaa

SEQ ID NO: 1480982 - DNA, 25 bp, Homo sapien
tggctttgggtaagcaaaagcagct

SEQ ID NO: 1480983 - DNA, 25 bp, Homo sapien
ggccttcaaaattccaatgcccctg

SEQ ID NO: 1480984 - DNA, 25 bp, Homo sapien
tctcttcctgtgactgaaaatggat

SEQ ID NO: 1480985 - DNA, 25 bp, Homo sapien
gaaaatggatagcacgaaagctgtc

SEQ ID NO: 1480986 - DNA, 25 bp, Homo sapien
ccacaactgtatgctgcgggccttc

SEQ ID NO: 1480987 - DNA, 25 bp, Homo sapien
tgaggaactgcaggagttaaaaaca

SEQ ID NO: 1480988 - DNA, 25 bp, Homo sapien
aggaactgcaggagttaaaaacaga

SEQ ID NO: 1480989 - DNA, 25 bp, Homo sapien
gaggaactgcaggagttaaaaacag

SEQ ID NO: 1480990 - DNA, 25 bp, Homo sapien
cacagtcatgccctctgaaccagaa

SEQ ID NO: 1480991 - DNA, 25 bp, Homo sapien
tctgaaccagaaccagcttggcgtg

SEQ ID NO: 1480992 - DNA, 25 bp, Homo sapien
agacaagtacagagtcaccgcccag

SEQ ID NO: 1480993 - DNA, 25 bp, Homo sapien
aaccagcttggcgtgtctggtgctg

SEQ ID NO: 1480994 - DNA, 25 bp, Homo sapien
tgactaagaccgcatctgaagggag

SEQ ID NO: 1480995 - DNA, 25 bp, Homo sapien
aaaccagttgatccttttgagggca

SEQ ID NO: 1480996 - DNA, 25 bp, Homo sapien
tcccagatggtgcaccgagtgaaca

SEQ ID NO: 1480997 - DNA, 25 bp, Homo sapien
tagaatggacattggcccatagccg

SEQ ID NO: 1480998 - DNA, 25 bp, Homo sapien
tggagaaatagcacaggaaaggaag

SEQ ID NO: 1480999 - DNA, 25 bp, Homo sapien
atggagaaatagcacaggaaaggaa

SEQ ID NO: 1481000 - DNA, 25 bp, Homo sapien
cgcatgaaacgaacatagaaaagca

SEQ ID NO: 1481001 - DNA, 25 bp, Homo sapien
aagcaacatggaaaacgagcaccaa

SEQ ID NO: 1481002 - DNA, 25 bp, Homo sapien
tctcccgcatgaaacgaacatagaa

SEQ ID NO: 1481003 - DNA, 25 bp, Homo sapien
catggaaaacgagcaccaaaacaaa

SEQ ID NO: 1481004 - DNA, 25 bp, Homo sapien
tctgttgttagcacacgtctggcgg

SEQ ID NO: 1481005 - DNA, 25 bp, Homo sapien
aacacattgcctgccattgcccgta

SEQ ID NO: 1481006 - DNA, 25 bp, Homo sapien
attgcccgtatagccagcgacacag

SEQ ID NO: 1481007 - DNA, 25 bp, Homo sapien
agcagaagcccgtggcgtagtccct

SEQ ID NO: 1481008 - DNA, 25 bp, Homo sapien
tcattcaaatgtgatggcttcacaa

SEQ ID NO: 1481009 - DNA, 25 bp, Homo sapien
ttcaaatgtgatggcttcacaaatg

SEQ ID NO: 1481010 - DNA, 25 bp, Homo sapien
caaatgtgatggcttcacaaatgag

SEQ ID NO: 1481011 - DNA, 25 bp, Homo sapien
tgtgatggcttcacaaatgagaatt

SEQ ID NO: 1481012 - DNA, 25 bp, Homo sapien
caatctcttgagcttgtgatccacc

SEQ ID NO: 1481013 - DNA, 25 bp, Homo sapien
aatctcttgagcttgtgatccacct

SEQ ID NO: 1481014 - DNA, 25 bp, Homo sapien
ccaactggaaagacctggttctctc

SEQ ID NO: 1481015 - DNA, 25 bp, Homo sapien
gcctttcggtagctgcccggcgcgg

SEQ ID NO: 1481016 - DNA, 25 bp, Homo sapien
ctctgtgggaggtccaaggggcctt

SEQ ID NO: 1481017 - DNA, 25 bp, Homo sapien
aactggaaagacctggttctctctg

SEQ ID NO: 1481018 - DNA, 25 bp, Homo sapien
cagacgagtggtcgccaggtcataa

SEQ ID NO: 1481019 - DNA, 25 bp, Homo sapien
tgggcacactgtatgtgtcagcacc

SEQ ID NO: 1481020 - DNA, 25 bp, Homo sapien
ttccgaggatcacgtctgcaggcac

SEQ ID NO: 1481021 - DNA, 25 bp, Homo sapien
cccatcttcagttccgaggatcacg

SEQ ID NO: 1481022 - DNA, 25 bp, Homo sapien
gccaccactacccaagcagagggag

SEQ ID NO: 1481023 - DNA, 25 bp, Homo sapien
agccaccactacccaagcagaggga

SEQ ID NO: 1481024 - DNA, 25 bp, Homo sapien
aaattttcaactgattccctgtcat

SEQ ID NO: 1481025 - DNA, 25 bp, Homo sapien
atatgttataagctccgttgctctt

SEQ ID NO: 1481026 - DNA, 25 bp, Homo sapien
ccaaattttcaactgattccctgtc

SEQ ID NO: 1481027 - DNA, 25 bp, Homo sapien
aatatgttataagctccgttgctct

SEQ ID NO: 1481028 - DNA, 25 bp, Homo sapien
tgcaaccacggcaggaacttggttg

SEQ ID NO: 1481029 - DNA, 25 bp, Homo sapien
tctttgagaatgtcgtatggaactg

SEQ ID NO: 1481030 - DNA, 25 bp, Homo sapien
tgcagaccatcctcaggataaagga

SEQ ID NO: 1481031 - DNA, 25 bp, Homo sapien
gaatgtcgtatggaactgcagacca

SEQ ID NO: 1481032 - DNA, 25 bp, Homo sapien
tagttccactgaaatatccctaagg

SEQ ID NO: 1481033 - DNA, 25 bp, Homo sapien
gaacctaggattctgggatagttcc

SEQ ID NO: 1481034 - DNA, 25 bp, Homo sapien
tatccctaaggctatgtcaacatga

SEQ ID NO: 1481035 - DNA, 25 bp, Homo sapien
acatgacattttctgattaattcat

SEQ ID NO: 1481036 - DNA, 25 bp, Homo sapien
ggtcagggagaggacgtcccaaaca

SEQ ID NO: 1481037 - DNA, 25 bp, Homo sapien
gggagggcccagtctgaatgaacaa

SEQ ID NO: 1481038 - DNA, 25 bp, Homo sapien
ggcccagtctgaatgaacaagcagg

SEQ ID NO: 1481039 - DNA, 25 bp, Homo sapien
tgaatgaacaagcaggaggaagctg

SEQ ID NO: 1481040 - DNA, 25 bp, Homo sapien
gccacggattcccaagtgacaacca

SEQ ID NO: 1481041 - DNA, 25 bp, Homo sapien
tactaggctggaaagagatctccgg

SEQ ID NO: 1481042 - DNA, 25 bp, Homo sapien
gtcgtgtccaagtccgccaggaaag

SEQ ID NO: 1481043 - DNA, 25 bp, Homo sapien
gggttcactcgtagcaatgatgcca

SEQ ID NO: 1481044 - DNA, 25 bp, Homo sapien
ctgtgtggaaagagaacaggagtca

SEQ ID NO: 1481045 - DNA, 25 bp, Homo sapien
tgtgtggaaagagaacaggagtcat

SEQ ID NO: 1481046 - DNA, 25 bp, Homo sapien
gagatgatgacacaatatagcatca

SEQ ID NO: 1481047 - DNA, 25 bp, Homo sapien
atagcatcaagaagcaaatctgtat

SEQ ID NO: 1481048 - DNA, 25 bp, Homo sapien
tatagcatcaagaagcaaatctgta

SEQ ID NO: 1481049 - DNA, 25 bp, Homo sapien
atgatgacacaatatagcatcaaga

SEQ ID NO: 1481050 - DNA, 25 bp, Homo sapien
ccaaccagggtttatcacatgtttc

SEQ ID NO: 1481051 - DNA, 25 bp, Homo sapien
agggtttatcacatgtttctttctg

SEQ ID NO: 1481052 - DNA, 25 bp, Homo sapien
cctctctctaagtttgcaattggca

SEQ ID NO: 1481053 - DNA, 25 bp, Homo sapien
ccagggtttatcacatgtttctttc

SEQ ID NO: 1481054 - DNA, 25 bp, Homo sapien
gcagcggcacgaaaggacttcaaca

SEQ ID NO: 1481055 - DNA, 25 bp, Homo sapien
ccacgtgagtgttgtctaaggcgca

SEQ ID NO: 1481056 - DNA, 25 bp, Homo sapien
ttcaacaagttgacagcgaccccag

SEQ ID NO: 1481057 - DNA, 25 bp, Homo sapien
gaagggctcattcgttttaggcaaa

SEQ ID NO: 1481058 - DNA, 25 bp, Homo sapien
agctgtaggtcatctggtcccgctc

SEQ ID NO: 1481059 - DNA, 25 bp, Homo sapien
gactctgaaacgagcccaactggaa

SEQ ID NO: 1481060 - DNA, 25 bp, Homo sapien
tcactgccaagacacatccggagtc

SEQ ID NO: 1481061 - DNA, 25 bp, Homo sapien
tgtttcccgctctggactctggact

SEQ ID NO: 1481062 - DNA, 25 bp, Homo sapien
ctcttcggatagcagggaccgggtc

SEQ ID NO: 1481063 - DNA, 25 bp, Homo sapien
tcgggaagaccttcgcggaccctgc

SEQ ID NO: 1481064 - DNA, 25 bp, Homo sapien
cgcgacccgctcttcggatagcagg

SEQ ID NO: 1481065 - DNA, 25 bp, Homo sapien
aagctccgcggggtccatgggtgcc

SEQ ID NO: 1481066 - DNA, 25 bp, Homo sapien
caagtccgtccggctccacgggcgc

SEQ ID NO: 1481067 - DNA, 25 bp, Homo sapien
ctacgcccaagtccgtccggctcca

SEQ ID NO: 1481068 - DNA, 25 bp, Homo sapien
cgcccaagtccgtccggctccacgg

SEQ ID NO: 1481069 - DNA, 25 bp, Homo sapien
ccaagtccgtccggctccacgggcg

SEQ ID NO: 1481070 - DNA, 25 bp, Homo sapien
tcgtagaagcggagcgccccactca

SEQ ID NO: 1481071 - DNA, 25 bp, Homo sapien
ggagagacgaagtcatccccgtcct

SEQ ID NO: 1481072 - DNA, 25 bp, Homo sapien
ctgcgtcgatgtcggatctgtcgta

SEQ ID NO: 1481073 - DNA, 25 bp, Homo sapien
gcaggagagacgaagtcatccccgt

SEQ ID NO: 1481074 - DNA, 25 bp, Homo sapien
tgcgattctcgaaaccagcccgact

SEQ ID NO: 1481075 - DNA, 25 bp, Homo sapien
gcccgactcccagcgaacggcgcct

SEQ ID NO: 1481076 - DNA, 25 bp, Homo sapien
gcgccggtgcctgcgattctcgaaa

SEQ ID NO: 1481077 - DNA, 25 bp, Homo sapien
gggatgtaaccggacgcccctggca

SEQ ID NO: 1481078 - DNA, 25 bp, Homo sapien
aacgctccggattcaggaacggcgc

SEQ ID NO: 1481079 - DNA, 25 bp, Homo sapien
gattagggttgggtcgtggagagcc

SEQ ID NO: 1481080 - DNA, 25 bp, Homo sapien
cggcgacgtggaaacgctccggatt

SEQ ID NO: 1481081 - DNA, 25 bp, Homo sapien
gcgtccggggtccaattcgcttgac

SEQ ID NO: 1481082 - DNA, 25 bp, Homo sapien
tctatcttcacccgcacgtgacacg

SEQ ID NO: 1481083 - DNA, 25 bp, Homo sapien
cagctgctacaggatctctgtatgg

SEQ ID NO: 1481084 - DNA, 25 bp, Homo sapien
acacgggccccacgacttccccatg

SEQ ID NO: 1481085 - DNA, 25 bp, Homo sapien
tatcttcacccgcacgtgacacggg

SEQ ID NO: 1481086 - DNA, 25 bp, Homo sapien
agtatatacggtaaattctctgtca

SEQ ID NO: 1481087 - DNA, 25 bp, Homo sapien
ggcctgagtaagtccagtatatacg

SEQ ID NO: 1481088 - DNA, 25 bp, Homo sapien
gtgcatgcttgtgctcctttatttc

SEQ ID NO: 1481089 - DNA, 25 bp, Homo sapien
tatttcatcagtatctcttggcctg

SEQ ID NO: 1481090 - DNA, 25 bp, Homo sapien
gcctccgaaggtgaagctggaatga

SEQ ID NO: 1481091 - DNA, 25 bp, Homo sapien
tggacttgcgcagcctttgttttgg

SEQ ID NO: 1481092 - DNA, 25 bp, Homo sapien
tagaagttgctggaggtacctgtcc

SEQ ID NO: 1481093 - DNA, 25 bp, Homo sapien
aacaccaggtgtctgaggctctggc

SEQ ID NO: 1481094 - DNA, 25 bp, Homo sapien
cctatacctaggtgaggatggcggt

SEQ ID NO: 1481095 - DNA, 25 bp, Homo sapien
gaccctatacctaggtgaggatggc

SEQ ID NO: 1481096 - DNA, 25 bp, Homo sapien
gaggaccctatacctaggtgaggat

SEQ ID NO: 1481097 - DNA, 25 bp, Homo sapien
cctaggtgaggatggcggtgctgct

SEQ ID NO: 1481098 - DNA, 25 bp, Homo sapien
tctgtcttgagtttcctactactaa

SEQ ID NO: 1481099 - DNA, 25 bp, Homo sapien
cttttgcccgtggctgtcctggaac

SEQ ID NO: 1481100 - DNA, 25 bp, Homo sapien
ctcttagaaattatctcctccccag

SEQ ID NO: 1481101 - DNA, 25 bp, Homo sapien
gtttccataatactctctgtcttga

SEQ ID NO: 1481102 - DNA, 25 bp, Homo sapien
tggtgggctgtcatcagacggccat

SEQ ID NO: 1481103 - DNA, 25 bp, Homo sapien
agacggccatagaggatcgccctga

SEQ ID NO: 1481104 - DNA, 25 bp, Homo sapien
tagaggatcgccctgaggcttggtt

SEQ ID NO: 1481105 - DNA, 25 bp, Homo sapien
tgtggaggttgtcaaagcagaaggc

SEQ ID NO: 1481106 - DNA, 25 bp, Homo sapien
ccttcggcatgggttggatcggaca

SEQ ID NO: 1481107 - DNA, 25 bp, Homo sapien
ggacagaccctccttcggcatgggt

SEQ ID NO: 1481108 - DNA, 25 bp, Homo sapien
gggccgtgtgccgtcagctgcccca

SEQ ID NO: 1481109 - DNA, 25 bp, Homo sapien
taagtcgctgtacagcctcgaggag

SEQ ID NO: 1481110 - DNA, 25 bp, Homo sapien
tacttcaaagacttcgtggcggcca

SEQ ID NO: 1481111 - DNA, 25 bp, Homo sapien
tgcagtttttcaccctcacgctgat

SEQ ID NO: 1481112 - DNA, 25 bp, Homo sapien
tctacaccgtgttctacgcgctgct

SEQ ID NO: 1481113 - DNA, 25 bp, Homo sapien
gttcatctacgtgcagctctggctg

SEQ ID NO: 1481114 - DNA, 25 bp, Homo sapien
gcaggtgagtttcagagaggctcct

SEQ ID NO: 1481115 - DNA, 25 bp, Homo sapien
cacgcaggtgagtttcagagaggct

SEQ ID NO: 1481116 - DNA, 25 bp, Homo sapien
cttcacgcaggtgagtttcagagag

SEQ ID NO: 1481117 - DNA, 25 bp, Homo sapien
cgcaggtgagtttcagagaggctcc

SEQ ID NO: 1481118 - DNA, 25 bp, Homo sapien
cggctctggggtcgtccgaaccctg

SEQ ID NO: 1481119 - DNA, 25 bp, Homo sapien
ggccctagggctgagagtgtaggga

SEQ ID NO: 1481120 - DNA, 25 bp, Homo sapien
gtgtagggagaaggcgccggctctg

SEQ ID NO: 1481121 - DNA, 25 bp, Homo sapien
gctctggggtcgtccgaaccctgtc

SEQ ID NO: 1481122 - DNA, 25 bp, Homo sapien
tgaaagtgcagtaattgttgagcac

SEQ ID NO: 1481123 - DNA, 25 bp, Homo sapien
cttaatgaaagtgcagtaattgttg

SEQ ID NO: 1481124 - DNA, 25 bp, Homo sapien
gttgacttaatgaaagtgcagtaat

SEQ ID NO: 1481125 - DNA, 25 bp, Homo sapien
gtgcagtaattgttgagcactttgc

SEQ ID NO: 1481126 - DNA, 25 bp, Homo sapien
taataacgcggtgccgccgtcatca

SEQ ID NO: 1481127 - DNA, 25 bp, Homo sapien
cattagctttccaagcactaagatg

SEQ ID NO: 1481128 - DNA, 25 bp, Homo sapien
tgtatagcgttgcacaaaggtttaa

SEQ ID NO: 1481129 - DNA, 25 bp, Homo sapien
catcatctctgattcccattagctt

SEQ ID NO: 1481130 - DNA, 25 bp, Homo sapien
aaaaaatagcatatgtgatattttg

SEQ ID NO: 1481131 - DNA, 25 bp, Homo sapien
gtgatattttgtagatagtataatc

SEQ ID NO: 1481132 - DNA, 25 bp, Homo sapien
agcatatgtgatattttgtagatag

SEQ ID NO: 1481133 - DNA, 25 bp, Homo sapien
aatagcatatgtgatattttgtaga

SEQ ID NO: 1481134 - DNA, 25 bp, Homo sapien
tcttgtaagtccagcgcatcagcat

SEQ ID NO: 1481135 - DNA, 25 bp, Homo sapien
ccggtcggagagtaatgcgtattgc

SEQ ID NO: 1481136 - DNA, 25 bp, Homo sapien
gcatcagcatattttccggtcggag

SEQ ID NO: 1481137 - DNA, 25 bp, Homo sapien
ggctgcattgcacagacacttgggt

SEQ ID NO: 1481138 - DNA, 25 bp, Homo sapien
cacagttaaggcacgatttgcggca

SEQ ID NO: 1481139 - DNA, 25 bp, Homo sapien
caaaatcaggttgcagagaatcaaa

SEQ ID NO: 1481140 - DNA, 25 bp, Homo sapien
tgttctcctggagcgcaaaatcagg

SEQ ID NO: 1481141 - DNA, 25 bp, Homo sapien
aatggttattgaagcgtcaggagac

SEQ ID NO: 1481142 - DNA, 25 bp, Homo sapien
tgagaagaagcaggtgtctggaggc

SEQ ID NO: 1481143 - DNA, 25 bp, Homo sapien
agaagcaggtgtctggaggctgaag

SEQ ID NO: 1481144 - DNA, 25 bp, Homo sapien
gagaagaagcaggtgtctggaggct

SEQ ID NO: 1481145 - DNA, 25 bp, Homo sapien
gaagaagcaggtgtctggaggctga

SEQ ID NO: 1481146 - DNA, 25 bp, Homo sapien
tccctggtgacccagagggtactgt

SEQ ID NO: 1481147 - DNA, 25 bp, Homo sapien
acgatgctgcagtacgcagccccgg

SEQ ID NO: 1481148 - DNA, 25 bp, Homo sapien
gccccggctgcccttgggtacacat

SEQ ID NO: 1481149 - DNA, 25 bp, Homo sapien
tccgagcctccgtgcaatgcacacg

SEQ ID NO: 1481150 - DNA, 25 bp, Homo sapien
ccagcgtgtcggcctctggtcttgc

SEQ ID NO: 1481151 - DNA, 25 bp, Homo sapien
tccaaggccagccaggcttcgagct

SEQ ID NO: 1481152 - DNA, 25 bp, Homo sapien
tctgtgggtaactgccacgtggcca

SEQ ID NO: 1481153 - DNA, 25 bp, Homo sapien
tctcgtgactgccagcgtgtcggcc

SEQ ID NO: 1481154 - DNA, 25 bp, Homo sapien
tggggtgaggtgccctgctggtagc

SEQ ID NO: 1481155 - DNA, 25 bp, Homo sapien
gggtgaggtgccctgctggtagcag

SEQ ID NO: 1481156 - DNA, 25 bp, Homo sapien
ggggtgaggtgccctgctggtagca

SEQ ID NO: 1481157 - DNA, 25 bp, Homo sapien
ctggggtgaggtgccctgctggtag

SEQ ID NO: 1481158 - DNA, 25 bp, Homo sapien
aagcaaaggcggtagcttctgtgcc

SEQ ID NO: 1481159 - DNA, 25 bp, Homo sapien
agcaaaggcggtagcttctgtgccc

SEQ ID NO: 1481160 - DNA, 25 bp, Homo sapien
gcaaaggcggtagcttctgtgccca

SEQ ID NO: 1481161 - DNA, 25 bp, Homo sapien
agaagcaaaggcggtagcttctgtg

SEQ ID NO: 1481162 - DNA, 25 bp, Homo sapien
tgggctcggtgacacctcggcagcc

SEQ ID NO: 1481163 - DNA, 25 bp, Homo sapien
cagattcccgagtttggcaggatgg

SEQ ID NO: 1481164 - DNA, 25 bp, Homo sapien
tggttcagctttgtcttgggcccta

SEQ ID NO: 1481165 - DNA, 25 bp, Homo sapien
ttcctcggaattcccagcctggaac

SEQ ID NO: 1481166 - DNA, 25 bp, Homo sapien
ccctagtctaggagttgtgaagagg

SEQ ID NO: 1481167 - DNA, 25 bp, Homo sapien
tcaagacgtgtttatcaaatacctg

SEQ ID NO: 1481168 - DNA, 25 bp, Homo sapien
tggcggtcagtttagtcaagacgtg

SEQ ID NO: 1481169 - DNA, 25 bp, Homo sapien
tcaaatacctgtcgtgtggcaggcc

SEQ ID NO: 1481170 - DNA, 25 bp, Homo sapien
tgtgaccgcatcagtgcctcggtga

SEQ ID NO: 1481171 - DNA, 25 bp, Homo sapien
tctcctcgagccatggcagcgtgct

SEQ ID NO: 1481172 - DNA, 25 bp, Homo sapien
gccctctcctcgagccatggcagcg

SEQ ID NO: 1481173 - DNA, 25 bp, Homo sapien
aaacatacagcccagtttcccgagc

SEQ ID NO: 1481174 - DNA, 25 bp, Homo sapien
ctgggctgaggctgctgccgggtca

SEQ ID NO: 1481175 - DNA, 25 bp, Homo sapien
tgggctgaggctgctgccgggtcac

SEQ ID NO: 1481176 - DNA, 25 bp, Homo sapien
catgcaggaagcctggacttcccca

SEQ ID NO: 1481177 - DNA, 25 bp, Homo sapien
ctggacttccccacagcagaggctg

SEQ ID NO: 1481178 - DNA, 25 bp, Homo sapien
ggcacctgcaggctttgctacggct

SEQ ID NO: 1481179 - DNA, 25 bp, Homo sapien
ctgtcggctccgaacactgtggcac

SEQ ID NO: 1481180 - DNA, 25 bp, Homo sapien
atcaggagcgccctactgtcggctc

SEQ ID NO: 1481181 - DNA, 25 bp, Homo sapien
ttcttgctcacctgcctttccgtag

SEQ ID NO: 1481182 - DNA, 25 bp, Homo sapien
tgccacagcttctttgtagctgtca

SEQ ID NO: 1481183 - DNA, 25 bp, Homo sapien
cttggactctgctgccacagcttct

SEQ ID NO: 1481184 - DNA, 25 bp, Homo sapien
cttctttgtagctgtcagaggtcat

SEQ ID NO: 1481185 - DNA, 25 bp, Homo sapien
acagcttctttgtagctgtcagagg

SEQ ID NO: 1481186 - DNA, 25 bp, Homo sapien
aagctcagtttatgaggctcaggga

SEQ ID NO: 1481187 - DNA, 25 bp, Homo sapien
ctcagggaggctctcgtgagccgat

SEQ ID NO: 1481188 - DNA, 25 bp, Homo sapien
cgccgttggatggagtgaagctcag

SEQ ID NO: 1481189 - DNA, 25 bp, Homo sapien
gggagaggtgcttgctgcccggaga

SEQ ID NO: 1481190 - DNA, 25 bp, Homo sapien
ttatggcatggacagcgtgcttgct

SEQ ID NO: 1481191 - DNA, 25 bp, Homo sapien
ggcatggacagcgtgcttgcttgcc

SEQ ID NO: 1481192 - DNA, 25 bp, Homo sapien
tggacagcgtgcttgcttgcctttt

SEQ ID NO: 1481193 - DNA, 25 bp, Homo sapien
tatggcatggacagcgtgcttgctt

SEQ ID NO: 1481194 - DNA, 25 bp, Homo sapien
gcagagccgccttgtgtgtcttccg

SEQ ID NO: 1481195 - DNA, 25 bp, Homo sapien
cactgtcttggagactgagcctcaa

SEQ ID NO: 1481196 - DNA, 25 bp, Homo sapien
tgtcttccgggaaccctgcagaaag

SEQ ID NO: 1481197 - DNA, 25 bp, Homo sapien
gaagaaaagaacatcctaacgcagg

SEQ ID NO: 1481198 - DNA, 25 bp, Homo sapien
aggatgctcagcatgtgggaacaga

SEQ ID NO: 1481199 - DNA, 25 bp, Homo sapien
cagcatgtgggaacagactgaagca

SEQ ID NO: 1481200 - DNA, 25 bp, Homo sapien
tgctcagcatgtgggaacagactga

SEQ ID NO: 1481201 - DNA, 25 bp, Homo sapien
catgtgggaacagactgaagcagct

SEQ ID NO: 1481202 - DNA, 25 bp, Homo sapien
ggcctttatgcttctgtcgaaacaa

SEQ ID NO: 1481203 - DNA, 25 bp, Homo sapien
caaaggcctttatgcttctgtcgaa

SEQ ID NO: 1481204 - DNA, 25 bp, Homo sapien
tcaaaggcctttatgcttctgtcga

SEQ ID NO: 1481205 - DNA, 25 bp, Homo sapien
aaggcctttatgcttctgtcgaaac

SEQ ID NO: 1481206 - DNA, 25 bp, Homo sapien
ccaagggggcacaagtcgcccacag

SEQ ID NO: 1481207 - DNA, 25 bp, Homo sapien
gggggcacaagtcgcccacaggtcc

SEQ ID NO: 1481208 - DNA, 25 bp, Homo sapien
ttcctgtgtcatccgaaaggatggg

SEQ ID NO: 1481209 - DNA, 25 bp, Homo sapien
tcacatgcagagctctaggccttcc

SEQ ID NO: 1481210 - DNA, 25 bp, Homo sapien
ttccccagcgcctgacagcggccag

SEQ ID NO: 1481211 - DNA, 25 bp, Homo sapien
tgagggctctcgaacattccccagc

SEQ ID NO: 1481212 - DNA, 25 bp, Homo sapien
ctgtgggagcgggtggtgcggaaag

SEQ ID NO: 1481213 - DNA, 25 bp, Homo sapien
gtggtgcggaaagcccatgagggct

SEQ ID NO: 1481214 - DNA, 25 bp, Homo sapien
tcactgctcctaagtccacatgcag

SEQ ID NO: 1481215 - DNA, 25 bp, Homo sapien
cggcctcttcctggctggtccacac

SEQ ID NO: 1481216 - DNA, 25 bp, Homo sapien
cacatgcaggttcacacctcctcat

SEQ ID NO: 1481217 - DNA, 25 bp, Homo sapien
tccgcacccttaccctggacagcgg

SEQ ID NO: 1481218 - DNA, 25 bp, Homo sapien
cataggggtcacacctccctctttt

SEQ ID NO: 1481219 - DNA, 25 bp, Homo sapien
ttagcctctcataggggtcacacct

SEQ ID NO: 1481220 - DNA, 25 bp, Homo sapien
tagcctctcataggggtcacacctc

SEQ ID NO: 1481221 - DNA, 25 bp, Homo sapien
tctcataggggtcacacctccctct

SEQ ID NO: 1481222 - DNA, 25 bp, Homo sapien
cagggctagaatggtgaactccagg

SEQ ID NO: 1481223 - DNA, 25 bp, Homo sapien
tcttggctggcgtaagtcatccttc

SEQ ID NO: 1481224 - DNA, 25 bp, Homo sapien
tccctttcagggctagaatggtgaa

SEQ ID NO: 1481225 - DNA, 25 bp, Homo sapien
ttatccgcatcttggctggcgtaag

SEQ ID NO: 1481226 - DNA, 25 bp, Homo sapien
tgtgtgtgggcaatccagcaattgt

SEQ ID NO: 1481227 - DNA, 25 bp, Homo sapien
gtgggcaatccagcaattgtgaaga

SEQ ID NO: 1481228 - DNA, 25 bp, Homo sapien
tgtgtgggcaatccagcaattgtga

SEQ ID NO: 1481229 - DNA, 25 bp, Homo sapien
agtgtgtgtgggcaatccagcaatt

SEQ ID NO: 1481230 - DNA, 25 bp, Homo sapien
gggtttgcacacatcgctgttctgt

SEQ ID NO: 1481231 - DNA, 25 bp, Homo sapien
gaaagtgccgacacatgaatctcat

SEQ ID NO: 1481232 - DNA, 25 bp, Homo sapien
caaataccggtaagtactgcagggc

SEQ ID NO: 1481233 - DNA, 25 bp, Homo sapien
gctgttctgtgagccgccggaaaca

SEQ ID NO: 1481234 - DNA, 25 bp, Homo sapien
tcaacctctgagcacggggactggg

SEQ ID NO: 1481235 - DNA, 25 bp, Homo sapien
aaagctttcaacctctgagcacggg

SEQ ID NO: 1481236 - DNA, 25 bp, Homo sapien
aaaaagctttcaacctctgagcacg

SEQ ID NO: 1481237 - DNA, 25 bp, Homo sapien
ttaaaaagctttcaacctctgagca

SEQ ID NO: 1481238 - DNA, 25 bp, Homo sapien
tgcttctgtcctctcacagtaggag

SEQ ID NO: 1481239 - DNA, 25 bp, Homo sapien
gctgggtcacactgattgttttatt

SEQ ID NO: 1481240 - DNA, 25 bp, Homo sapien
ggctgccttgaagactcgcctcatc

SEQ ID NO: 1481241 - DNA, 25 bp, Homo sapien
cacaagcaatgtggtcttcccagat

SEQ ID NO: 1481242 - DNA, 25 bp, Homo sapien
cttctttatagtgttgacgggcttt

SEQ ID NO: 1481243 - DNA, 25 bp, Homo sapien
tctttatagtgttgacgggctttac

SEQ ID NO: 1481244 - DNA, 25 bp, Homo sapien
ttctttatagtgttgacgggcttta

SEQ ID NO: 1481245 - DNA, 25 bp, Homo sapien
gacagctgctctttgtctgatgggc

SEQ ID NO: 1481246 - DNA, 25 bp, Homo sapien
gtggtaccccattctgtatatgttc

SEQ ID NO: 1481247 - DNA, 25 bp, Homo sapien
tggctgagtggtaccccattctgta

SEQ ID NO: 1481248 - DNA, 25 bp, Homo sapien
tatggctgagtggtaccccattctg

SEQ ID NO: 1481249 - DNA, 25 bp, Homo sapien
tgagttcaattgtttgagtttagat

SEQ ID NO: 1481250 - DNA, 25 bp, Homo sapien
gcgtggccaagaattaatattattt

SEQ ID NO: 1481251 - DNA, 25 bp, Homo sapien
aaagttgtttagtggtgactgctga

SEQ ID NO: 1481252 - DNA, 25 bp, Homo sapien
ggtgcacccattaccttagcattgt

SEQ ID NO: 1481253 - DNA, 25 bp, Homo sapien
tattgctcttatccctttgcatctt

SEQ ID NO: 1481254 - DNA, 25 bp, Homo sapien
tacccagtaagtgggattcccacca

SEQ ID NO: 1481255 - DNA, 25 bp, Homo sapien
ggagtaaggtatggggcatctcatt

SEQ ID NO: 1481256 - DNA, 25 bp, Homo sapien
tactctatgacttgtctgtttactc

SEQ ID NO: 1481257 - DNA, 25 bp, Homo sapien
ttttctcctactctatgacttgtct

SEQ ID NO: 1481258 - DNA, 25 bp, Homo sapien
tgcctgcctattcttatacgagtac

SEQ ID NO: 1481259 - DNA, 25 bp, Homo sapien
gcctattcttatacgagtactatgc

SEQ ID NO: 1481260 - DNA, 25 bp, Homo sapien
cctgcctattcttatacgagtacta

SEQ ID NO: 1481261 - DNA, 25 bp, Homo sapien
tattcttatacgagtactatgctgt

SEQ ID NO: 1481262 - DNA, 25 bp, Homo sapien
ctcagaatttgcagtggcctgccgc

SEQ ID NO: 1481263 - DNA, 25 bp, Homo sapien
ggcagtgcccatagggacactctca

SEQ ID NO: 1481264 - DNA, 25 bp, Homo sapien
gaaatccattccctgcctgttgaac

SEQ ID NO: 1481265 - DNA, 25 bp, Homo sapien
caagtgggagctgcatgtaagccct

SEQ ID NO: 1481266 - DNA, 25 bp, Homo sapien
tcagtagggcgctaatgtatacaca

SEQ ID NO: 1481267 - DNA, 25 bp, Homo sapien
tcaggccgtaggttcctcaaggaat

SEQ ID NO: 1481268 - DNA, 25 bp, Homo sapien
cactgatggtcactccgattctgag

SEQ ID NO: 1481269 - DNA, 25 bp, Homo sapien
tttagtactaaagagggagccttgc

SEQ ID NO: 1481270 - DNA, 25 bp, Homo sapien
ctttgagtgctatctccttggtgaa

SEQ ID NO: 1481271 - DNA, 25 bp, Homo sapien
tgagtgctatctccttggtgaattc

SEQ ID NO: 1481272 - DNA, 25 bp, Homo sapien
gcaggtttaagctcattaaagggaa

SEQ ID NO: 1481273 - DNA, 25 bp, Homo sapien
gaattcactagccaagagtctgggc

SEQ ID NO: 1481274 - DNA, 25 bp, Homo sapien
gacagatatccaacttttgggcaaa

SEQ ID NO: 1481275 - DNA, 25 bp, Homo sapien
tgggcactgccaaatagaacactgt

SEQ ID NO: 1481276 - DNA, 25 bp, Homo sapien
gattttacatgagaacagtccttaa

SEQ ID NO: 1481277 - DNA, 25 bp, Homo sapien
ttaaaagtgcaacccttgggagaga

SEQ ID NO: 1481278 - DNA, 25 bp, Homo sapien
caacctagaatttgtgactatggac

SEQ ID NO: 1481279 - DNA, 25 bp, Homo sapien
tgccagccaatgcttgccattatga

SEQ ID NO: 1481280 - DNA, 25 bp, Homo sapien
tgttcccactttgtagctgaatgga

SEQ ID NO: 1481281 - DNA, 25 bp, Homo sapien
gctgaatggaaataggccaacttac

SEQ ID NO: 1481282 - DNA, 25 bp, Homo sapien
tggtatgaatcacagaaagtcctct

SEQ ID NO: 1481283 - DNA, 25 bp, Homo sapien
taatagcctttaactgagggagtgg

SEQ ID NO: 1481284 - DNA, 25 bp, Homo sapien
cacactgagttcgaggattgcatag

SEQ ID NO: 1481285 - DNA, 25 bp, Homo sapien
tacagtggcacataggcaaagttga

SEQ ID NO: 1481286 - DNA, 25 bp, Homo sapien
cattcatcatggtgacagttccaga

SEQ ID NO: 1481287 - DNA, 25 bp, Homo sapien
gccctgagcaacatttgttccctag

SEQ ID NO: 1481288 - DNA, 25 bp, Homo sapien
tctgtaactatgcattgaaagggcc

SEQ ID NO: 1481289 - DNA, 25 bp, Homo sapien
gaggtcctttagactggaaacagca

SEQ ID NO: 1481290 - DNA, 25 bp, Homo sapien
ctttccacagtcactttatgtctct

SEQ ID NO: 1481291 - DNA, 25 bp, Homo sapien
tgaatgtccataattaaaaggcttt

SEQ ID NO: 1481292 - DNA, 25 bp, Homo sapien
ttaatagttcagaattcttgaagtc

SEQ ID NO: 1481293 - DNA, 25 bp, Homo sapien
aggctttccacagtcactttatgtc

SEQ ID NO: 1481294 - DNA, 25 bp, Homo sapien
tactgtgttgtaataagactttaaa

SEQ ID NO: 1481295 - DNA, 25 bp, Homo sapien
cattaaggcctctctaagttagtac

SEQ ID NO: 1481296 - DNA, 25 bp, Homo sapien
ctgaaaaacactggcaattggaaac

SEQ ID NO: 1481297 - DNA, 25 bp, Homo sapien
ccactggtgatataaacaagcaagc

SEQ ID NO: 1481298 - DNA, 25 bp, Homo sapien
cctatgacctgtagagaaactgact

SEQ ID NO: 1481299 - DNA, 25 bp, Homo sapien
agagaataatatcttcagggcagtt

SEQ ID NO: 1481300 - DNA, 25 bp, Homo sapien
agagcaactatttcctgtcgggtga

SEQ ID NO: 1481301 - DNA, 25 bp, Homo sapien
agcctttagatggactattctctgg

SEQ ID NO: 1481302 - DNA, 25 bp, Homo sapien
gaataatatcttcagggcagttcct

SEQ ID NO: 1481303 - DNA, 25 bp, Homo sapien
ttgtatcaatagaaacatagacaca

SEQ ID NO: 1481304 - DNA, 25 bp, Homo sapien
tcggttcgtaatgaccaccaacttc

SEQ ID NO: 1481305 - DNA, 25 bp, Homo sapien
catatgtaaaatacggatatactcg

SEQ ID NO: 1481306 - DNA, 25 bp, Homo sapien
caaatgaatctggtattgtatcaat

SEQ ID NO: 1481307 - DNA, 25 bp, Homo sapien
caacacagtccattatacgggagat

SEQ ID NO: 1481308 - DNA, 25 bp, Homo sapien
cagtccattatacgggagatattct

SEQ ID NO: 1481309 - DNA, 25 bp, Homo sapien
ccattatacgggagatattcttgaa

SEQ ID NO: 1481310 - DNA, 25 bp, Homo sapien
tatacgggagatattcttgaaatgt

SEQ ID NO: 1481311 - DNA, 25 bp, Homo sapien
cttggccccttttttgtcacctgca

SEQ ID NO: 1481312 - DNA, 25 bp, Homo sapien
cctgcaaacatggatttctcatcaa

SEQ ID NO: 1481313 - DNA, 25 bp, Homo sapien
tctcatcaaagtgcatgggaaagga

SEQ ID NO: 1481314 - DNA, 25 bp, Homo sapien
ctcatcaaagtgcatgggaaaggac

SEQ ID NO: 1481315 - DNA, 25 bp, Homo sapien
gtagaagagtttttgtgtcagcatc

SEQ ID NO: 1481316 - DNA, 25 bp, Homo sapien
aatatggagccacctttgacaaagc

SEQ ID NO: 1481317 - DNA, 25 bp, Homo sapien
tgtaaagatcgacaattgagcgctc

SEQ ID NO: 1481318 - DNA, 25 bp, Homo sapien
agctcgaagctcaatcaagtataaa

SEQ ID NO: 1481319 - DNA, 25 bp, Homo sapien
atttgcgcatagatgtaaattgatg

SEQ ID NO: 1481320 - DNA, 25 bp, Homo sapien
ccaaaagataatttgcgcatagatg

SEQ ID NO: 1481321 - DNA, 25 bp, Homo sapien
aagcttatagaagactcttttctcc

SEQ ID NO: 1481322 - DNA, 25 bp, Homo sapien
taaattgatgctagcatgaagtccc

SEQ ID NO: 1481323 - DNA, 25 bp, Homo sapien
gaagcacgtggcctctaactagaaa

SEQ ID NO: 1481324 - DNA, 25 bp, Homo sapien
ttgagttctcgttccctaattggga

SEQ ID NO: 1481325 - DNA, 25 bp, Homo sapien
gcttcctccctaaaagtatatgaca

SEQ ID NO: 1481326 - DNA, 25 bp, Homo sapien
gaatattcaaattgtcatggatggg

SEQ ID NO: 1481327 - DNA, 25 bp, Homo sapien
aatcctagaccttacaaaaatatgc

SEQ ID NO: 1481328 - DNA, 25 bp, Homo sapien
atcctagaccttacaaaaatatgct

SEQ ID NO: 1481329 - DNA, 25 bp, Homo sapien
aaatcctagaccttacaaaaatatg

SEQ ID NO: 1481330 - DNA, 25 bp, Homo sapien
ttctagccatgtgtagaatgattct

SEQ ID NO: 1481331 - DNA, 25 bp, Homo sapien
cttctagccatgtgtagaatgattc

SEQ ID NO: 1481332 - DNA, 25 bp, Homo sapien
tctagccatgtgtagaatgattctc

SEQ ID NO: 1481333 - DNA, 25 bp, Homo sapien
ctgagtaaggagtctagggataaac

SEQ ID NO: 1481334 - DNA, 25 bp, Homo sapien
caacgtactaaaaaatatggcctct

SEQ ID NO: 1481335 - DNA, 25 bp, Homo sapien
gaaaaaccgaacactcagatgagct

SEQ ID NO: 1481336 - DNA, 25 bp, Homo sapien
cacctcaagtgccaacaggaaaagt

SEQ ID NO: 1481337 - DNA, 25 bp, Homo sapien
ttgaattccataaaggaaaaatcaa

SEQ ID NO: 1481338 - DNA, 25 bp, Homo sapien
caggaatactttcttttgaattcca

SEQ ID NO: 1481339 - DNA, 25 bp, Homo sapien
atcaaattctgattgttacaaaaaa

SEQ ID NO: 1481340 - DNA, 25 bp, Homo sapien
ttcctccacacttgaaacaaacaaa

SEQ ID NO: 1481341 - DNA, 25 bp, Homo sapien
tgagtcctcttaatcagaatacagg

SEQ ID NO: 1481342 - DNA, 25 bp, Homo sapien
ataagatttgcacattttggccagg

SEQ ID NO: 1481343 - DNA, 25 bp, Homo sapien
aaatgtcttacatagctcagatccc

SEQ ID NO: 1481344 - DNA, 25 bp, Homo sapien
gagtagacgccctgcaaatgagtcc

SEQ ID NO: 1481345 - DNA, 25 bp, Homo sapien
taaaggacgataaacagatcgaggc

SEQ ID NO: 1481346 - DNA, 25 bp, Homo sapien
atttaaaggacgataaacagatcga

SEQ ID NO: 1481347 - DNA, 25 bp, Homo sapien
gctaggcgccagaggatttaaagga

SEQ ID NO: 1481348 - DNA, 25 bp, Homo sapien
tcggctaggcgccagaggatttaaa

SEQ ID NO: 1481349 - DNA, 25 bp, Homo sapien
aaagaaagcataatacccaaacata

SEQ ID NO: 1481350 - DNA, 25 bp, Homo sapien
gaccctctatcagtcgttccttctt

SEQ ID NO: 1481351 - DNA, 25 bp, Homo sapien
gcataatacccaaacatagaatgtt

SEQ ID NO: 1481352 - DNA, 25 bp, Homo sapien
tctcccgaccctctatcagtcgttc

SEQ ID NO: 1481353 - DNA, 25 bp, Homo sapien
cagtgtaacgctctgggttcagcaa

SEQ ID NO: 1481354 - DNA, 25 bp, Homo sapien
gcaataggtctacatactgagcagc

SEQ ID NO: 1481355 - DNA, 25 bp, Homo sapien
tctccatgcagaggtccctttatag

SEQ ID NO: 1481356 - DNA, 25 bp, Homo sapien
ttcatagatgctgttccacactctc

SEQ ID NO: 1481357 - DNA, 25 bp, Homo sapien
tcagatattaaaccatgatgattta

SEQ ID NO: 1481358 - DNA, 25 bp, Homo sapien
aagtggtcttactttgttgtgcagg

SEQ ID NO: 1481359 - DNA, 25 bp, Homo sapien
tagaatcctctacaaacgtgcaaat

SEQ ID NO: 1481360 - DNA, 25 bp, Homo sapien
gcaaattggactagtaccaacctct

SEQ ID NO: 1481361 - DNA, 25 bp, Homo sapien
tggaaaaagggctgtggagaagtcg

SEQ ID NO: 1481362 - DNA, 25 bp, Homo sapien
gaagtcgaattagagtcctccccag

SEQ ID NO: 1481363 - DNA, 25 bp, Homo sapien
gtggagaagtcgaattagagtcctc

SEQ ID NO: 1481364 - DNA, 25 bp, Homo sapien
aaagggctgtggagaagtcgaatta

SEQ ID NO: 1481365 - DNA, 25 bp, Homo sapien
tgcccagtcaatgaaagcttctttg

SEQ ID NO: 1481366 - DNA, 25 bp, Homo sapien
gaatcatcatatcttgcccagtcaa

SEQ ID NO: 1481367 - DNA, 25 bp, Homo sapien
gatcccgtgaatcatcatatcttgc

SEQ ID NO: 1481368 - DNA, 25 bp, Homo sapien
agttcacaaaagtgatcccgtgaat

SEQ ID NO: 1481369 - DNA, 25 bp, Homo sapien
gataactgatacactactagtagca

SEQ ID NO: 1481370 - DNA, 25 bp, Homo sapien
cacccaacctatggtatcttaattg

SEQ ID NO: 1481371 - DNA, 25 bp, Homo sapien
taaaaatcatagtaccaatcactgg

SEQ ID NO: 1481372 - DNA, 25 bp, Homo sapien
tgttatatgggtggacacatgtcaa

SEQ ID NO: 1481373 - DNA, 25 bp, Homo sapien
gacttaagcctagtccctagatcat

SEQ ID NO: 1481374 - DNA, 25 bp, Homo sapien
gaaatggccccaaagcataagctat

SEQ ID NO: 1481375 - DNA, 25 bp, Homo sapien
tgtcagtatctcaaaatcacggtta

SEQ ID NO: 1481376 - DNA, 25 bp, Homo sapien
tacacatggtaatctggacagcaag

SEQ ID NO: 1481377 - DNA, 25 bp, Homo sapien
attgctcccagtttattagcttgct

SEQ ID NO: 1481378 - DNA, 25 bp, Homo sapien
ttgctcccagtttattagcttgctc

SEQ ID NO: 1481379 - DNA, 25 bp, Homo sapien
ttagaatgcccagcttttattccaa

SEQ ID NO: 1481380 - DNA, 25 bp, Homo sapien
cttattagaatgcccagcttttatt

SEQ ID NO: 1481381 - DNA, 25 bp, Homo sapien
tgcccagcttttattccaaccggaa

SEQ ID NO: 1481382 - DNA, 25 bp, Homo sapien
aatgcccagcttttattccaaccgg

SEQ ID NO: 1481383 - DNA, 25 bp, Homo sapien
ggagaagtgcatgtagctggaacat

SEQ ID NO: 1481384 - DNA, 25 bp, Homo sapien
cttctgctctaacaaagtgtaggca

SEQ ID NO: 1481385 - DNA, 25 bp, Homo sapien
tctaatctagggtttaccaatggga

SEQ ID NO: 1481386 - DNA, 25 bp, Homo sapien
gcccacacgattaacctagagttta

SEQ ID NO: 1481387 - DNA, 25 bp, Homo sapien
catcttctgcccagaaaggacaagg

SEQ ID NO: 1481388 - DNA, 25 bp, Homo sapien
ttttattgaacagtggccatcttct

SEQ ID NO: 1481389 - DNA, 25 bp, Homo sapien
gaaaggacaaggtcgcttcagatta

SEQ ID NO: 1481390 - DNA, 25 bp, Homo sapien
tggacagggctccacatgacagtct

SEQ ID NO: 1481391 - DNA, 25 bp, Homo sapien
tcctggccaggcttgctaaagtagt

SEQ ID NO: 1481392 - DNA, 25 bp, Homo sapien
ctaaagtagtgctcagtatgcaacc

SEQ ID NO: 1481393 - DNA, 25 bp, Homo sapien
tcctccagatcttatgacggctcac

SEQ ID NO: 1481394 - DNA, 25 bp, Homo sapien
catatcacacctaagcagagagacc

SEQ ID NO: 1481395 - DNA, 25 bp, Homo sapien
gaatggaagggacagcacttctcat

SEQ ID NO: 1481396 - DNA, 25 bp, Homo sapien
caccacgaatggaagggacagcact

SEQ ID NO: 1481397 - DNA, 25 bp, Homo sapien
ccacgaatggaagggacagcacttc

SEQ ID NO: 1481398 - DNA, 25 bp, Homo sapien
ctgccaccacgaatggaagggacag

SEQ ID NO: 1481399 - DNA, 25 bp, Homo sapien
gaattccccacaggcttacctgagg

SEQ ID NO: 1481400 - DNA, 25 bp, Homo sapien
gaaatacatggtgcaacgagtggac

SEQ ID NO: 1481401 - DNA, 25 bp, Homo sapien
tacctgaggtttccactgaggctgc

SEQ ID NO: 1481402 - DNA, 25 bp, Homo sapien
tataaaggcctatacctctcgtgcc

SEQ ID NO: 1481403 - DNA, 25 bp, Homo sapien
tccttacatggtcaatacggtccta

SEQ ID NO: 1481404 - DNA, 25 bp, Homo sapien
cagttaatgcagatagtgggtatcc

SEQ ID NO: 1481405 - DNA, 25 bp, Homo sapien
tagtgtttccccatatgcaagacgt

SEQ ID NO: 1481406 - DNA, 25 bp, Homo sapien
catggctctttcacattaggtagga

SEQ ID NO: 1481407 - DNA, 25 bp, Homo sapien
aatgagactgtcaaccaaggtgtcc

SEQ ID NO: 1481408 - DNA, 25 bp, Homo sapien
gattgttgagtagccaagaaccaca

SEQ ID NO: 1481409 - DNA, 25 bp, Homo sapien
tttgatacaaaatcccagtggttcc

SEQ ID NO: 1481410 - DNA, 25 bp, Homo sapien
ggtcatatgaccgtacctggacaga

SEQ ID NO: 1481411 - DNA, 25 bp, Homo sapien
tggtattgcagtacttcaggaacgg

SEQ ID NO: 1481412 - DNA, 25 bp, Homo sapien
tacctgatatgtcctctacccgaga

SEQ ID NO: 1481413 - DNA, 25 bp, Homo sapien
tacattgagcaatatgaaactggca

SEQ ID NO: 1481414 - DNA, 25 bp, Homo sapien
tgtgaactggaccacttgtgaagag

SEQ ID NO: 1481415 - DNA, 25 bp, Homo sapien
ttatcgatgctgtcaatatcacaca

SEQ ID NO: 1481416 - DNA, 25 bp, Homo sapien
ttgtaggtattgaagttatcgatgc

SEQ ID NO: 1481417 - DNA, 25 bp, Homo sapien
cttgtaataacgaaaatagtctctc

SEQ ID NO: 1481418 - DNA, 25 bp, Homo sapien
tatcacacaagcaatcatccagaac

SEQ ID NO: 1481419 - DNA, 25 bp, Homo sapien
gcgatgccacttggcagacacagct

SEQ ID NO: 1481420 - DNA, 25 bp, Homo sapien
ctggcgatgccacttggcagacaca

SEQ ID NO: 1481421 - DNA, 25 bp, Homo sapien
atgccacttggcagacacagctcag

SEQ ID NO: 1481422 - DNA, 25 bp, Homo sapien
gatgccacttggcagacacagctca

SEQ ID NO: 1481423 - DNA, 25 bp, Homo sapien
cagccgcttaacacatccgagagga

SEQ ID NO: 1481424 - DNA, 25 bp, Homo sapien
aaggacgtcaccgtttctctgggcg

SEQ ID NO: 1481425 - DNA, 25 bp, Homo sapien
ttgactgccattacccggagtgtcg

SEQ ID NO: 1481426 - DNA, 25 bp, Homo sapien
gatgtttcccgcactggacggtcag

SEQ ID NO: 1481427 - DNA, 25 bp, Homo sapien
ctgcccggcggaccccttggctcat

SEQ ID NO: 1481428 - DNA, 25 bp, Homo sapien
gcctgcccggcggaccccttggctc

SEQ ID NO: 1481429 - DNA, 25 bp, Homo sapien
tcgacgacgctccgcaggaagctca

SEQ ID NO: 1481430 - DNA, 25 bp, Homo sapien
ctgcgcctcgacgacgctccgcagg

SEQ ID NO: 1481431 - DNA, 25 bp, Homo sapien
ccggaggcaggcgactctttcccca

SEQ ID NO: 1481432 - DNA, 25 bp, Homo sapien
gcaggaaaggcgagcgcccccactt

SEQ ID NO: 1481433 - DNA, 25 bp, Homo sapien
gggacggttcccagcggccgagcga

SEQ ID NO: 1481434 - DNA, 25 bp, Homo sapien
cagcggccgagcgactccagggtca

SEQ ID NO: 1481435 - DNA, 25 bp, Homo sapien
agtattgatacccttgaaacactca

SEQ ID NO: 1481436 - DNA, 25 bp, Homo sapien
ttgttagctgtcttgcctgcatttt

SEQ ID NO: 1481437 - DNA, 25 bp, Homo sapien
ggtgaaggccccaaagctcaatgcc

SEQ ID NO: 1481438 - DNA, 25 bp, Homo sapien
aaagcacatgaaaaatccccctcca

SEQ ID NO: 1481439 - DNA, 25 bp, Homo sapien
ctccaactgctagtagccctcggtg

SEQ ID NO: 1481440 - DNA, 25 bp, Homo sapien
ttagtcgattactccaaagcacatg

SEQ ID NO: 1481441 - DNA, 25 bp, Homo sapien
ctccaggtcacccagtggagtatgc

SEQ ID NO: 1481442 - DNA, 25 bp, Homo sapien
ggtgtttggagtcttgtcttgggtc

SEQ ID NO: 1481443 - DNA, 25 bp, Homo sapien
ccagtggagtatgcaatgtagcaac

SEQ ID NO: 1481444 - DNA, 25 bp, Homo sapien
ggtcacccagtggagtatgcaatgt

SEQ ID NO: 1481445 - DNA, 25 bp, Homo sapien
tgttggtgacacacaatgctgccaa

SEQ ID NO: 1481446 - DNA, 25 bp, Homo sapien
taggacaactcatagttttgtttac

SEQ ID NO: 1481447 - DNA, 25 bp, Homo sapien
aacaaaatctgcaccctctcttatc

SEQ ID NO: 1481448 - DNA, 25 bp, Homo sapien
ctgccattcaacatcagtaggcttt

SEQ ID NO: 1481449 - DNA, 25 bp, Homo sapien
ggtctggatcgagatccctctcctg

SEQ ID NO: 1481450 - DNA, 25 bp, Homo sapien
cctggcaagagaaagacctttttat

SEQ ID NO: 1481451 - DNA, 25 bp, Homo sapien
agacctttttataacaaccgacatg

SEQ ID NO: 1481452 - DNA, 25 bp, Homo sapien
tttataacaaccgacatggctgggc

SEQ ID NO: 1481453 - DNA, 25 bp, Homo sapien
gcacaactgtaagccccgctacttg

SEQ ID NO: 1481454 - DNA, 25 bp, Homo sapien
gaggctctaatattcaaaacatggg

SEQ ID NO: 1481455 - DNA, 25 bp, Homo sapien
aaagtcatgccataattctgcacca

SEQ ID NO: 1481456 - DNA, 25 bp, Homo sapien
gactacagtttaatgtgctagacat

SEQ ID NO: 1481457 - DNA, 25 bp, Homo sapien
cattaccacctgagctccgcctcct

SEQ ID NO: 1481458 - DNA, 25 bp, Homo sapien
attaccacctgagctccgcctcctg

SEQ ID NO: 1481459 - DNA, 25 bp, Homo sapien
gcattaccacctgagctccgcctcc

SEQ ID NO: 1481460 - DNA, 25 bp, Homo sapien
cgcattaccacctgagctccgcctc

SEQ ID NO: 1481461 - DNA, 25 bp, Homo sapien
catgcacaaaggccccaaagggcat

SEQ ID NO: 1481462 - DNA, 25 bp, Homo sapien
agagcaccatgcacaaaggccccaa

SEQ ID NO: 1481463 - DNA, 25 bp, Homo sapien
ttactgctacaggttgcacagcaag

SEQ ID NO: 1481464 - DNA, 25 bp, Homo sapien
ctgctgaagtggcaagtcagtgggc

SEQ ID NO: 1481465 - DNA, 25 bp, Homo sapien
gaaatctggtaccttgctcggtccg

SEQ ID NO: 1481466 - DNA, 25 bp, Homo sapien
cacgtgaacctctgtggaaggcgcc

SEQ ID NO: 1481467 - DNA, 25 bp, Homo sapien
ggaaactcgtgaacagcaactgcgg

SEQ ID NO: 1481468 - DNA, 25 bp, Homo sapien
gcccaatgaagctgcaacacgtgaa

SEQ ID NO: 1481469 - DNA, 25 bp, Homo sapien
atggaagaatccctgaatgaaccca

SEQ ID NO: 1481470 - DNA, 25 bp, Homo sapien
aatggaagaatccctgaatgaaccc

SEQ ID NO: 1481471 - DNA, 25 bp, Homo sapien
tggaagaatccctgaatgaacccat

SEQ ID NO: 1481472 - DNA, 25 bp, Homo sapien
ggtgcagtggtgtgtgcatgtagtg

SEQ ID NO: 1481473 - DNA, 25 bp, Homo sapien
tgcagtggtgtgtgcatgtagtgcc

SEQ ID NO: 1481474 - DNA, 25 bp, Homo sapien
caggtgcagtggtgtgtgcatgtag

SEQ ID NO: 1481475 - DNA, 25 bp, Homo sapien
ccaggtgcagtggtgtgtgcatgta

SEQ ID NO: 1481476 - DNA, 25 bp, Homo sapien
tctgctttgtgagtttccttctctc

SEQ ID NO: 1481477 - DNA, 25 bp, Homo sapien
tacaacgcctctgctttgtgagttt

SEQ ID NO: 1481478 - DNA, 25 bp, Homo sapien
ttacaacgcctctgctttgtgagtt

SEQ ID NO: 1481479 - DNA, 25 bp, Homo sapien
gctttgtgagtttccttctctctac

SEQ ID NO: 1481480 - DNA, 25 bp, Homo sapien
cctccagagaggttgctgtagggat

SEQ ID NO: 1481481 - DNA, 25 bp, Homo sapien
gtttgatcccccgtcagtagcctgg

SEQ ID NO: 1481482 - DNA, 25 bp, Homo sapien
ctggctgacacacttaatgctcggc

SEQ ID NO: 1481483 - DNA, 25 bp, Homo sapien
gatgtacttctgtgatccttgcccc

SEQ ID NO: 1481484 - DNA, 25 bp, Homo sapien
ggccctggcgaaaccactggccttg

SEQ ID NO: 1481485 - DNA, 25 bp, Homo sapien
gcagccatgagcagaggacagatcc

SEQ ID NO: 1481486 - DNA, 25 bp, Homo sapien
ccatgagcagaggacagatcccgca

SEQ ID NO: 1481487 - DNA, 25 bp, Homo sapien
acagatcccgcaccggccctggcga

SEQ ID NO: 1481488 - DNA, 25 bp, Homo sapien
atgctattaacaagccacactcctg

SEQ ID NO: 1481489 - DNA, 25 bp, Homo sapien
atggcatttttaagccgtatcctcc

SEQ ID NO: 1481490 - DNA, 25 bp, Homo sapien
ttcactgtgttgatgctattaacaa

SEQ ID NO: 1481491 - DNA, 25 bp, Homo sapien
catttttaagccgtatcctccaggt

SEQ ID NO: 1481492 - DNA, 25 bp, Homo sapien
cagtgactggaggctgcataaaaca

SEQ ID NO: 1481493 - DNA, 25 bp, Homo sapien
gagatgttgccttctcgaaacttct

SEQ ID NO: 1481494 - DNA, 25 bp, Homo sapien
aacaaagagatgttgccttctcgaa

SEQ ID NO: 1481495 - DNA, 25 bp, Homo sapien
tgctctgcagatgtctgtatcctgc

SEQ ID NO: 1481496 - DNA, 25 bp, Homo sapien
cccagcagttctcatggtagtggat

SEQ ID NO: 1481497 - DNA, 25 bp, Homo sapien
aatcgtagagagatccccagggcca

SEQ ID NO: 1481498 - DNA, 25 bp, Homo sapien
cagttctcatggtagtggataatcg

SEQ ID NO: 1481499 - DNA, 25 bp, Homo sapien
tagtggataatcgtagagagatccc

SEQ ID NO: 1481500 - DNA, 25 bp, Homo sapien
gacaactttcagctatcgtgggtgg

SEQ ID NO: 1481501 - DNA, 25 bp, Homo sapien
gagagttctttaccacaaagggtgc

SEQ ID NO: 1481502 - DNA, 25 bp, Homo sapien
tcaaggaggccttggtaaccatgcg

SEQ ID NO: 1481503 - DNA, 25 bp, Homo sapien
tatttccaagagagcccagtatgca

SEQ ID NO: 1481504 - DNA, 25 bp, Homo sapien
gttggaagcagcagcgctaagcaca

SEQ ID NO: 1481505 - DNA, 25 bp, Homo sapien
ggacattaaacccactatggcaaga

SEQ ID NO: 1481506 - DNA, 25 bp, Homo sapien
tctgtgccgagagagcagttgagta

SEQ ID NO: 1481507 - DNA, 25 bp, Homo sapien
aagcacagctgggtgcgctcgccag

SEQ ID NO: 1481508 - DNA, 25 bp, Homo sapien
ttgctccatggtcatgatgatgtca

SEQ ID NO: 1481509 - DNA, 25 bp, Homo sapien
tccagtttgctccatgattttgcca

SEQ ID NO: 1481510 - DNA, 25 bp, Homo sapien
gatgtcatggtcaatggcagcacgg

SEQ ID NO: 1481511 - DNA, 25 bp, Homo sapien
tgatgatgtcatggtcaatggcagc

SEQ ID NO: 1481512 - DNA, 25 bp, Homo sapien
cctgtaaacactactttgggaagag

SEQ ID NO: 1481513 - DNA, 25 bp, Homo sapien
tgaacttgatgtcccacaccctgga

SEQ ID NO: 1481514 - DNA, 25 bp, Homo sapien
agtgtgaacttgatgtcccacaccc

SEQ ID NO: 1481515 - DNA, 25 bp, Homo sapien
gttaaatgtcccctgcatctcatgt

SEQ ID NO: 1481516 - DNA, 25 bp, Homo sapien
ataataataacagcgcattttgagg

SEQ ID NO: 1481517 - DNA, 25 bp, Homo sapien
ataacagcgcattttgagggagaga

SEQ ID NO: 1481518 - DNA, 25 bp, Homo sapien
aataataataacagcgcattttgag

SEQ ID NO: 1481519 - DNA, 25 bp, Homo sapien
ataataacagcgcattttgagggag

SEQ ID NO: 1481520 - DNA, 25 bp, Homo sapien
gaatgcagacacgttcactgctgaa

SEQ ID NO: 1481521 - DNA, 25 bp, Homo sapien
tgaagttgaattgggcagcctggga

SEQ ID NO: 1481522 - DNA, 25 bp, Homo sapien
tagagtcagccccaccatggcggtc

SEQ ID NO: 1481523 - DNA, 25 bp, Homo sapien
ttagaccacgcatccacagggcaga

SEQ ID NO: 1481524 - DNA, 25 bp, Homo sapien
ctggtgcatgtgacccatggaaaac

SEQ ID NO: 1481525 - DNA, 25 bp, Homo sapien
gaggcctgcgtgctttccagaaggc

SEQ ID NO: 1481526 - DNA, 25 bp, Homo sapien
cctgcgtgctttccagaaggcactg

SEQ ID NO: 1481527 - DNA, 25 bp, Homo sapien
tggtgcatgtgacccatggaaaaca

SEQ ID NO: 1481528 - DNA, 25 bp, Homo sapien
caggttctcaaaacaagcggtgaaa

SEQ ID NO: 1481529 - DNA, 25 bp, Homo sapien
accaacggcaggttctcaaaacaag

SEQ ID NO: 1481530 - DNA, 25 bp, Homo sapien
tccaaaccaacggcaggttctcaaa

SEQ ID NO: 1481531 - DNA, 25 bp, Homo sapien
caagcggtgaaagggttcctgttgc

SEQ ID NO: 1481532 - DNA, 25 bp, Homo sapien
gggtcctgtgttggaataactcact

SEQ ID NO: 1481533 - DNA, 25 bp, Homo sapien
cactcacctctagtaaggggatgga

SEQ ID NO: 1481534 - DNA, 25 bp, Homo sapien
ccgctcactcacctctagtaagggg

SEQ ID NO: 1481535 - DNA, 25 bp, Homo sapien
atggagggtcctgtgttggaataac

SEQ ID NO: 1481536 - DNA, 25 bp, Homo sapien
ccagactgtgaccttgccatgacct

SEQ ID NO: 1481537 - DNA, 25 bp, Homo sapien
tcggcctgtgacatctcactttctc

SEQ ID NO: 1481538 - DNA, 25 bp, Homo sapien
cactttctctagactgaactttatc

SEQ ID NO: 1481539 - DNA, 25 bp, Homo sapien
ttcctcggcctgtgacatctcactt

SEQ ID NO: 1481540 - DNA, 25 bp, Homo sapien
tgtgtgtgagcctgcccttgttgtc

SEQ ID NO: 1481541 - DNA, 25 bp, Homo sapien
ttccccagtgatcgcatctctacag

SEQ ID NO: 1481542 - DNA, 25 bp, Homo sapien
ttgttgtcttctccgtcacctcttc

SEQ ID NO: 1481543 - DNA, 25 bp, Homo sapien
tcacttccagtcatttctttcataa

SEQ ID NO: 1481544 - DNA, 25 bp, Homo sapien
cttcaggcgagagcccctcagtgac

SEQ ID NO: 1481545 - DNA, 25 bp, Homo sapien
ctcagtgactccctgttgtccggaa

SEQ ID NO: 1481546 - DNA, 25 bp, Homo sapien
gaatgacgtccagctccttggacag

SEQ ID NO: 1481547 - DNA, 25 bp, Homo sapien
ggccccagtgtattcacctgtctca

SEQ ID NO: 1481548 - DNA, 25 bp, Homo sapien
aataaaactattgcacctgtcctgg

SEQ ID NO: 1481549 - DNA, 25 bp, Homo sapien
tattctcaagatccatgccagggag

SEQ ID NO: 1481550 - DNA, 25 bp, Homo sapien
gctctttgactctcgtgggaatccc

SEQ ID NO: 1481551 - DNA, 25 bp, Homo sapien
caaagtcatcttgccagtcccggtg

SEQ ID NO: 1481552 - DNA, 25 bp, Homo sapien
ggcccaggccaatggttggtgtgtc

SEQ ID NO: 1481553 - DNA, 25 bp, Homo sapien
atcattctggggagactgaaaatac

SEQ ID NO: 1481554 - DNA, 25 bp, Homo sapien
catggtgcctcatcattctggggag

SEQ ID NO: 1481555 - DNA, 25 bp, Homo sapien
ccaggccaatggttggtgtgtcatg

SEQ ID NO: 1481556 - DNA, 25 bp, Homo sapien
ctttccacttctgctctccttgttt

SEQ ID NO: 1481557 - DNA, 25 bp, Homo sapien
gcttgttttcgagccatgcactcat

SEQ ID NO: 1481558 - DNA, 25 bp, Homo sapien
ccgtgtcattatttcgtgtcgcttg

SEQ ID NO: 1481559 - DNA, 25 bp, Homo sapien
gatttcctccgtatgccgacggcct

SEQ ID NO: 1481560 - DNA, 25 bp, Homo sapien
gacttggttgtaaatggatgagggc

SEQ ID NO: 1481561 - DNA, 25 bp, Homo sapien
cttctgaaccctgtggacttggttg

SEQ ID NO: 1481562 - DNA, 25 bp, Homo sapien
cctgtgtttacagaggatcgtggct

SEQ ID NO: 1481563 - DNA, 25 bp, Homo sapien
cccctgtgtttacagaggatcgtgg

SEQ ID NO: 1481564 - DNA, 25 bp, Homo sapien
actcaacctgagctttgcaatggcc

SEQ ID NO: 1481565 - DNA, 25 bp, Homo sapien
tgtaaacactcaacctgagctttgc

SEQ ID NO: 1481566 - DNA, 25 bp, Homo sapien
taaacactcaacctgagctttgcaa

SEQ ID NO: 1481567 - DNA, 25 bp, Homo sapien
aacactcaacctgagctttgcaatg

SEQ ID NO: 1481568 - DNA, 25 bp, Homo sapien
cgattagcagttacataagcataaa

SEQ ID NO: 1481569 - DNA, 25 bp, Homo sapien
gtatgtatggtacagccaggcttca

SEQ ID NO: 1481570 - DNA, 25 bp, Homo sapien
tcagttccctgtcttaaacacaaag

SEQ ID NO: 1481571 - DNA, 25 bp, Homo sapien
tagtttttcaaaattcgattagcag

SEQ ID NO: 1481572 - DNA, 25 bp, Homo sapien
tttttagacacagtttcactctgtt

SEQ ID NO: 1481573 - DNA, 25 bp, Homo sapien
ttttagacacagtttcactctgttg

SEQ ID NO: 1481574 - DNA, 25 bp, Homo sapien
cccaggctggagtacagtggtacaa

SEQ ID NO: 1481575 - DNA, 25 bp, Homo sapien
aatctcagctcactgcaacctcggc

SEQ ID NO: 1481576 - DNA, 25 bp, Homo sapien
ctgagaagtcgggtatttaagagca

SEQ ID NO: 1481577 - DNA, 25 bp, Homo sapien
caataggtcaaactatcagtcagtg

SEQ ID NO: 1481578 - DNA, 25 bp, Homo sapien
tatcagtcagtgtagggccctgaga

SEQ ID NO: 1481579 - DNA, 25 bp, Homo sapien
tgtgtttacagccaataggtcaaac

SEQ ID NO: 1481580 - DNA, 25 bp, Homo sapien
gaagctgagaaaaccctggcgttga

SEQ ID NO: 1481581 - DNA, 25 bp, Homo sapien
tgttccctaagtgtccaatttggag

SEQ ID NO: 1481582 - DNA, 25 bp, Homo sapien
ggctgcgagtccaagttatcactaa

SEQ ID NO: 1481583 - DNA, 25 bp, Homo sapien
cccacacgcaggataactggcgagt

SEQ ID NO: 1481584 - DNA, 25 bp, Homo sapien
aggcggggcctgtgcggtgaccacc

SEQ ID NO: 1481585 - DNA, 25 bp, Homo sapien
tccctcctagacctggaggcctgga

SEQ ID NO: 1481586 - DNA, 25 bp, Homo sapien
aggccagcgcttggtccaggcaggc

SEQ ID NO: 1481587 - DNA, 25 bp, Homo sapien
ctgaaaagtcccagccccgagcgcc

SEQ ID NO: 1481588 - DNA, 25 bp, Homo sapien
gccagtcgcggtccaaggctccaga

SEQ ID NO: 1481589 - DNA, 25 bp, Homo sapien
cacagcaagccagtcgcggtccaag

SEQ ID NO: 1481590 - DNA, 25 bp, Homo sapien
acattctttgtccttatccctctgt

SEQ ID NO: 1481591 - DNA, 25 bp, Homo sapien
aagccagtcgcggtccaaggctcca

SEQ ID NO: 1481592 - DNA, 25 bp, Homo sapien
ggagcgcctgaaacaccagtctttg

SEQ ID NO: 1481593 - DNA, 25 bp, Homo sapien
ccgggaagtgaacgaggactgactc

SEQ ID NO: 1481594 - DNA, 25 bp, Homo sapien
cagtctttgggtgagtcgcgcgacc

SEQ ID NO: 1481595 - DNA, 25 bp, Homo sapien
gaaccctgacggcacttagctgctg

SEQ ID NO: 1481596 - DNA, 25 bp, Homo sapien
tctcgccagtggaggatggcattcg

SEQ ID NO: 1481597 - DNA, 25 bp, Homo sapien
tcaccatttgatgggtgggacagtg

SEQ ID NO: 1481598 - DNA, 25 bp, Homo sapien
gtcacggctcctaaatcaccatttg

SEQ ID NO: 1481599 - DNA, 25 bp, Homo sapien
taagggattatcaggagtcgcggcc

SEQ ID NO: 1481600 - DNA, 25 bp, Homo sapien
tgatttaatgcaagcagatggctta

SEQ ID NO: 1481601 - DNA, 25 bp, Homo sapien
tcatgctggcgggacctgtccctgg

SEQ ID NO: 1481602 - DNA, 25 bp, Homo sapien
gatggctgcttgtgatgcatacgaa

SEQ ID NO: 1481603 - DNA, 25 bp, Homo sapien
atacatgtgtatggcaactcggcat

SEQ ID NO: 1481604 - DNA, 25 bp, Homo sapien
tgtaggacggttcccatgaagaggc

SEQ ID NO: 1481605 - DNA, 25 bp, Homo sapien
tctctagcaggatgaagaaccaggc

SEQ ID NO: 1481606 - DNA, 25 bp, Homo sapien
gatacacaagcatactgtaggacgg

SEQ ID NO: 1481607 - DNA, 25 bp, Homo sapien
caggcttggagaataggtagccaca

SEQ ID NO: 1481608 - DNA, 25 bp, Homo sapien
gtctctgaccccagatgtagctccc

SEQ ID NO: 1481609 - DNA, 25 bp, Homo sapien
tgaccctggatgcagctccctctga

SEQ ID NO: 1481610 - DNA, 25 bp, Homo sapien
tgaccccagatgtagctccctctga

SEQ ID NO: 1481611 - DNA, 25 bp, Homo sapien
ccctctgaccctggatgcagctccc

SEQ ID NO: 1481612 - DNA, 25 bp, Homo sapien
tccaaacccagatatagcggctgcc

SEQ ID NO: 1481613 - DNA, 25 bp, Homo sapien
cctgaccccggatgtagctgccttt

SEQ ID NO: 1481614 - DNA, 25 bp, Homo sapien
gcggctgcccccttgccagagtgaa

SEQ ID NO: 1481615 - DNA, 25 bp, Homo sapien
cctttgaccccagatgtagctttct

SEQ ID NO: 1481616 - DNA, 25 bp, Homo sapien
tctcacttatattactaacttgtgt

SEQ ID NO: 1481617 - DNA, 25 bp, Homo sapien
tacagtgtgtattagcaaggttttc

SEQ ID NO: 1481618 - DNA, 25 bp, Homo sapien
gatcatactatatatggctctatag

SEQ ID NO: 1481619 - DNA, 25 bp, Homo sapien
tatggctctatagattactttctca

SEQ ID NO: 1481620 - DNA, 25 bp, Homo sapien
tactctgatgtgcagctgtagcccc

SEQ ID NO: 1481621 - DNA, 25 bp, Homo sapien
tgttttctggtgtcatgtgcctccc

SEQ ID NO: 1481622 - DNA, 25 bp, Homo sapien
tcaatgtagggatgtaggtccttcc

SEQ ID NO: 1481623 - DNA, 25 bp, Homo sapien
gattaacgctatgaaacctgctgct

SEQ ID NO: 1481624 - DNA, 25 bp, Homo sapien
ctgtggcccgtcttattttatttct

SEQ ID NO: 1481625 - DNA, 25 bp, Homo sapien
tttcttatttcttgacaatcagaag

SEQ ID NO: 1481626 - DNA, 25 bp, Homo sapien
cttatttcttgacaatcagaagtac

SEQ ID NO: 1481627 - DNA, 25 bp, Homo sapien
tctgtggcccgtcttattttatttc

SEQ ID NO: 1481628 - DNA, 25 bp, Homo sapien
ggtaggttttaccatgcacatcgta

SEQ ID NO: 1481629 - DNA, 25 bp, Homo sapien
tgagacctgaatactgggtggagcc

SEQ ID NO: 1481630 - DNA, 25 bp, Homo sapien
tgggaagacagtgtagtcatctctg

SEQ ID NO: 1481631 - DNA, 25 bp, Homo sapien
tgtcagagtccacgcctgcagactg

SEQ ID NO: 1481632 - DNA, 25 bp, Homo sapien
cctcatgatcatgcagttctctggt

SEQ ID NO: 1481633 - DNA, 25 bp, Homo sapien
catcctcatgatcatgcagttctct

SEQ ID NO: 1481634 - DNA, 25 bp, Homo sapien
tcctcatgatcatgcagttctctgg

SEQ ID NO: 1481635 - DNA, 25 bp, Homo sapien
atcctcatgatcatgcagttctctg

SEQ ID NO: 1481636 - DNA, 25 bp, Homo sapien
tcacatgtatgcagaggcgcacaca

SEQ ID NO: 1481637 - DNA, 25 bp, Homo sapien
accatttggtcatgtgtgtggagac

SEQ ID NO: 1481638 - DNA, 25 bp, Homo sapien
aggcgaccttcgaacccagatgtct

SEQ ID NO: 1481639 - DNA, 25 bp, Homo sapien
ttttgagtgtctgccacatgggtgg

SEQ ID NO: 1481640 - DNA, 25 bp, Homo sapien
gcttcagctcggtgagtgaccttcc

SEQ ID NO: 1481641 - DNA, 25 bp, Homo sapien
ctctctaggtggctgtaaatggaaa

SEQ ID NO: 1481642 - DNA, 25 bp, Homo sapien
taaaaaggacgtatctccctgactg

SEQ ID NO: 1481643 - DNA, 25 bp, Homo sapien
gatcggcccagagaaaatagacact

SEQ ID NO: 1481644 - DNA, 25 bp, Homo sapien
gaaagtgaggtcttaccgactggca

SEQ ID NO: 1481645 - DNA, 25 bp, Homo sapien
catgtgtatcttcaacccctgggag

SEQ ID NO: 1481646 - DNA, 25 bp, Homo sapien
agatacatacttgtggtgccaggca

SEQ ID NO: 1481647 - DNA, 25 bp, Homo sapien
tattgaacatcagccagtgcactgg

SEQ ID NO: 1481648 - DNA, 25 bp, Homo sapien
gcctctgagccattcctgtgtattt

SEQ ID NO: 1481649 - DNA, 25 bp, Homo sapien
tcatacagagggcatcgggtcccac

SEQ ID NO: 1481650 - DNA, 25 bp, Homo sapien
cggattcgagagtcaaccaggcctg

SEQ ID NO: 1481651 - DNA, 25 bp, Homo sapien
ttcctggcgtgtttcactcatacag

SEQ ID NO: 1481652 - DNA, 25 bp, Homo sapien
tgcagtgtcacaatcccagcacacc

SEQ ID NO: 1481653 - DNA, 25 bp, Homo sapien
cccacttcgccctcccagtgctggg

SEQ ID NO: 1481654 - DNA, 25 bp, Homo sapien
cgcccacttcgccctcccagtgctg

SEQ ID NO: 1481655 - DNA, 25 bp, Homo sapien
gtgtcacaatcccagcacaccacaa

SEQ ID NO: 1481656 - DNA, 25 bp, Homo sapien
cttggaactaaaaggcatgcagtcc

SEQ ID NO: 1481657 - DNA, 25 bp, Homo sapien
gacagcaataagaatcctgggagca

SEQ ID NO: 1481658 - DNA, 25 bp, Homo sapien
tggagaccctaaaactgcttgcttg

SEQ ID NO: 1481659 - DNA, 25 bp, Homo sapien
cccatcagggtagacggtttcaggt

SEQ ID NO: 1481660 - DNA, 25 bp, Homo sapien
ttcaggagcagtaattatccttgtg

SEQ ID NO: 1481661 - DNA, 25 bp, Homo sapien
tctatactgataggtcctttccggg

SEQ ID NO: 1481662 - DNA, 25 bp, Homo sapien
cattgagattatctcaggtctttcc

SEQ ID NO: 1481663 - DNA, 25 bp, Homo sapien
gttgatcactgctgacgattttcta

SEQ ID NO: 1481664 - DNA, 25 bp, Homo sapien
tcctctggatgaaatccgtgttcca

SEQ ID NO: 1481665 - DNA, 25 bp, Homo sapien
cagcatcagatggttgtgagggatt

SEQ ID NO: 1481666 - DNA, 25 bp, Homo sapien
tccgtgttccagctgttcggcagca

SEQ ID NO: 1481667 - DNA, 25 bp, Homo sapien
tgtaatttcatctgtgggctcttcc

SEQ ID NO: 1481668 - DNA, 25 bp, Homo sapien
ctaggcaaaggatgtgccttctttt

SEQ ID NO: 1481669 - DNA, 25 bp, Homo sapien
ttgcagtagtctgctcacccggaag

SEQ ID NO: 1481670 - DNA, 25 bp, Homo sapien
cttcttttcatttgcagtagtctgc

SEQ ID NO: 1481671 - DNA, 25 bp, Homo sapien
ggcaaaggatgtgccttcttttcat

SEQ ID NO: 1481672 - DNA, 25 bp, Homo sapien
cagctttgacggctttggacaaaca

SEQ ID NO: 1481673 - DNA, 25 bp, Homo sapien
cccagctttgacggctttggacaaa

SEQ ID NO: 1481674 - DNA, 25 bp, Homo sapien
acccagctttgacggctttggacaa

SEQ ID NO: 1481675 - DNA, 25 bp, Homo sapien
gctttgacggctttggacaaacaca

SEQ ID NO: 1481676 - DNA, 25 bp, Homo sapien
caaccatattaggagtgagttttcc

SEQ ID NO: 1481677 - DNA, 25 bp, Homo sapien
taggagagtccccagcatcggcgag

SEQ ID NO: 1481678 - DNA, 25 bp, Homo sapien
tggaaacagcatctcggtgaactaa

SEQ ID NO: 1481679 - DNA, 25 bp, Homo sapien
ggatccaagtcccttggttccaggc

SEQ ID NO: 1481680 - DNA, 25 bp, Homo sapien
tcagaaagtgtacgccaactaaggg

SEQ ID NO: 1481681 - DNA, 25 bp, Homo sapien
tactggaagtaaggagctggtagcc

SEQ ID NO: 1481682 - DNA, 25 bp, Homo sapien
ttcaggcattcataaggcaggcact

SEQ ID NO: 1481683 - DNA, 25 bp, Homo sapien
cactgaggactgatgttgactgaca

SEQ ID NO: 1481684 - DNA, 25 bp, Homo sapien
ctatacgataggcaggagaggctta

SEQ ID NO: 1481685 - DNA, 25 bp, Homo sapien
tatgggcacaacaaagaaacgaagg

SEQ ID NO: 1481686 - DNA, 25 bp, Homo sapien
gctgaagttcgcctacccaaaatga

SEQ ID NO: 1481687 - DNA, 25 bp, Homo sapien
ttacagtgcaaatgaggcgtcagct

SEQ ID NO: 1481688 - DNA, 25 bp, Homo sapien
ggcactgatgttctacttcttcaca

SEQ ID NO: 1481689 - DNA, 25 bp, Homo sapien
ttagaaatagctctggagtggctct

SEQ ID NO: 1481690 - DNA, 25 bp, Homo sapien
cagttgctgaatagtcttttggcac

SEQ ID NO: 1481691 - DNA, 25 bp, Homo sapien
tagtcttttggcactgatgttctac

SEQ ID NO: 1481692 - DNA, 25 bp, Homo sapien
attaacaaagcaggaggcgccacgg

SEQ ID NO: 1481693 - DNA, 25 bp, Homo sapien
gcactttccggcaatcattcaatca

SEQ ID NO: 1481694 - DNA, 25 bp, Homo sapien
agtttaattcttaatgccttgcact

SEQ ID NO: 1481695 - DNA, 25 bp, Homo sapien
tcaaaagagtgaaatgaagcacatt

SEQ ID NO: 1481696 - DNA, 25 bp, Homo sapien
gtaaacggactctcaaatgatcagg

SEQ ID NO: 1481697 - DNA, 25 bp, Homo sapien
ggaggtggtcacttcgcaacttgct

SEQ ID NO: 1481698 - DNA, 25 bp, Homo sapien
catcggttgctactaaaagtggaca

SEQ ID NO: 1481699 - DNA, 25 bp, Homo sapien
tcaaaacaggagctcgagcctgcct

SEQ ID NO: 1481700 - DNA, 25 bp, Homo sapien
aagaaaggaatggattctggtagca

SEQ ID NO: 1481701 - DNA, 25 bp, Homo sapien
cagtaatcaaagcagcaaatcgaac

SEQ ID NO: 1481702 - DNA, 25 bp, Homo sapien
cttccatcaactctgctaagaaagg

SEQ ID NO: 1481703 - DNA, 25 bp, Homo sapien
aaaggaatggattctggtagcaaga

SEQ ID NO: 1481704 - DNA, 25 bp, Homo sapien
gagctgtttgtaatatgtgcaacct

SEQ ID NO: 1481705 - DNA, 25 bp, Homo sapien
cttaagagctgtactgacttgagac

SEQ ID NO: 1481706 - DNA, 25 bp, Homo sapien
cattagttcacatgcgtttattcac

SEQ ID NO: 1481707 - DNA, 25 bp, Homo sapien
gaataccagtttcaccatttgggag

SEQ ID NO: 1481708 - DNA, 25 bp, Homo sapien
gtttcagtacttgtcacgcagttcc

SEQ ID NO: 1481709 - DNA, 25 bp, Homo sapien
cagtacttgtcacgcagttcctaac

SEQ ID NO: 1481710 - DNA, 25 bp, Homo sapien
gcagtttcagtacttgtcacgcagt

SEQ ID NO: 1481711 - DNA, 25 bp, Homo sapien
gatgcagtttcagtacttgtcacgc

SEQ ID NO: 1481712 - DNA, 25 bp, Homo sapien
gaatctggtagttcagtggtttcca

SEQ ID NO: 1481713 - DNA, 25 bp, Homo sapien
tttccaaagagagtcatccgccatg

SEQ ID NO: 1481714 - DNA, 25 bp, Homo sapien
ctgtgcgatgcatggtatcaggtgc

SEQ ID NO: 1481715 - DNA, 25 bp, Homo sapien
gccatggccaccgaaaactgtgcga

SEQ ID NO: 1481716 - DNA, 25 bp, Homo sapien
gcaagcagcacttttcagggtcatt

SEQ ID NO: 1481717 - DNA, 25 bp, Homo sapien
cagcaagcagcacttttcagggtca

SEQ ID NO: 1481718 - DNA, 25 bp, Homo sapien
caagcagcacttttcagggtcattt

SEQ ID NO: 1481719 - DNA, 25 bp, Homo sapien
aagcagcacttttcagggtcatttt

SEQ ID NO: 1481720 - DNA, 25 bp, Homo sapien
cagctgaactgaagcgaccacccac

SEQ ID NO: 1481721 - DNA, 25 bp, Homo sapien
gacagctgaactgaagcgaccaccc

SEQ ID NO: 1481722 - DNA, 25 bp, Homo sapien
acagctgaactgaagcgaccaccca

SEQ ID NO: 1481723 - DNA, 25 bp, Homo sapien
gcatcttctgttttagcccaatcaa

SEQ ID NO: 1481724 - DNA, 25 bp, Homo sapien
taagtggccggcaaacagagtaaaa

SEQ ID NO: 1481725 - DNA, 25 bp, Homo sapien
cagcttttcagcaatgcaatctgcc

SEQ ID NO: 1481726 - DNA, 25 bp, Homo sapien
gcaatctgccaagttgtaaaatgtc

SEQ ID NO: 1481727 - DNA, 25 bp, Homo sapien
cttgaagaacaggggcctgaatgtg

SEQ ID NO: 1481728 - DNA, 25 bp, Homo sapien
tgaagaacaggggcctgaatgtgac

SEQ ID NO: 1481729 - DNA, 25 bp, Homo sapien
ttgaagaacaggggcctgaatgtga

SEQ ID NO: 1481730 - DNA, 25 bp, Homo sapien
ctcggaaagtttgacaaccatggct

SEQ ID NO: 1481731 - DNA, 25 bp, Homo sapien
tttgacaaccatggctactagacag

SEQ ID NO: 1481732 - DNA, 25 bp, Homo sapien
aaccatggctactagacagtcaatg

SEQ ID NO: 1481733 - DNA, 25 bp, Homo sapien
aaagtttgacaaccatggctactag

SEQ ID NO: 1481734 - DNA, 25 bp, Homo sapien
gatgctcataaacggacccatgtga

SEQ ID NO: 1481735 - DNA, 25 bp, Homo sapien
gactgatgggaggtgagctcttcct

SEQ ID NO: 1481736 - DNA, 25 bp, Homo sapien
aaaaggcggttagctgagactgatg

SEQ ID NO: 1481737 - DNA, 25 bp, Homo sapien
ccaatatgctcttgcaagatgctca

SEQ ID NO: 1481738 - DNA, 25 bp, Homo sapien
tattagcctgtgacgcagaacccat

SEQ ID NO: 1481739 - DNA, 25 bp, Homo sapien
ttttgatggcgggcaacaggactcg

SEQ ID NO: 1481740 - DNA, 25 bp, Homo sapien
tgcaagtgtggtagccagtgtcttt

SEQ ID NO: 1481741 - DNA, 25 bp, Homo sapien
aagagatgtgagacggatattagcc

SEQ ID NO: 1481742 - DNA, 25 bp, Homo sapien
cactagtgattttctccagatgaat

SEQ ID NO: 1481743 - DNA, 25 bp, Homo sapien
ttcactagtgattttctccagatga

SEQ ID NO: 1481744 - DNA, 25 bp, Homo sapien
actagtgattttctccagatgaatc

SEQ ID NO: 1481745 - DNA, 25 bp, Homo sapien
tagtgattttctccagatgaatcac

SEQ ID NO: 1481746 - DNA, 25 bp, Homo sapien
gcactgagcaggtagacctcgctgg

SEQ ID NO: 1481747 - DNA, 25 bp, Homo sapien
gcgggagagtctccacaaccttctg

SEQ ID NO: 1481748 - DNA, 25 bp, Homo sapien
cagctcgctggtgttcttcattgtt

SEQ ID NO: 1481749 - DNA, 25 bp, Homo sapien
tgttgtcagcaacgatggcatcagg

SEQ ID NO: 1481750 - DNA, 25 bp, Homo sapien
tctgctatgcacagcagcgcgcttc

SEQ ID NO: 1481751 - DNA, 25 bp, Homo sapien
taaggtatacaatgctgtctgtctg

SEQ ID NO: 1481752 - DNA, 25 bp, Homo sapien
tttttcttacgctgcacaatggcca

SEQ ID NO: 1481753 - DNA, 25 bp, Homo sapien
cactgggacaaaaggatctggattt

SEQ ID NO: 1481754 - DNA, 25 bp, Homo sapien
cgaacagatggcaggggattgccca

SEQ ID NO: 1481755 - DNA, 25 bp, Homo sapien
gtccagcgctttgcggcgaacagat

SEQ ID NO: 1481756 - DNA, 25 bp, Homo sapien
ttcaaaaggtccagcgctttgcggc

SEQ ID NO: 1481757 - DNA, 25 bp, Homo sapien
tggcaggggattgcccaccagccct

SEQ ID NO: 1481758 - DNA, 25 bp, Homo sapien
cgcgcgccagaacttcacggtgagt

SEQ ID NO: 1481759 - DNA, 25 bp, Homo sapien
taagctttactaaggagcgcgcgcc

SEQ ID NO: 1481760 - DNA, 25 bp, Homo sapien
tgtctgcgttcctttccatggactg

SEQ ID NO: 1481761 - DNA, 25 bp, Homo sapien
ttatctaacaggtcgtaagctttac

SEQ ID NO: 1481762 - DNA, 25 bp, Homo sapien
tgccactggagatccccccactgct

SEQ ID NO: 1481763 - DNA, 25 bp, Homo sapien
gccactggagatccccccactgctg

SEQ ID NO: 1481764 - DNA, 25 bp, Homo sapien
ccactggagatccccccactgctgc

SEQ ID NO: 1481765 - DNA, 25 bp, Homo sapien
ctgccactggagatccccccactgc

SEQ ID NO: 1481766 - DNA, 25 bp, Homo sapien
caggcactttccagtggaaggggca

SEQ ID NO: 1481767 - DNA, 25 bp, Homo sapien
tgcagggcaggcactttccagtgga

SEQ ID NO: 1481768 - DNA, 25 bp, Homo sapien
cagtggccctgggaatgccatgcat

SEQ ID NO: 1481769 - DNA, 25 bp, Homo sapien
aggacagtggccctgggaatgccat

SEQ ID NO: 1481770 - DNA, 25 bp, Homo sapien
tctcttcaaggccttttaaaatctc

SEQ ID NO: 1481771 - DNA, 25 bp, Homo sapien
aaatctcaggaccaccactctcaac

SEQ ID NO: 1481772 - DNA, 25 bp, Homo sapien
tttaaaatctcaggaccaccactct

SEQ ID NO: 1481773 - DNA, 25 bp, Homo sapien
tcttcaaggccttttaaaatctcag

SEQ ID NO: 1481774 - DNA, 25 bp, Homo sapien
cagggccagcacttggaccattctc

SEQ ID NO: 1481775 - DNA, 25 bp, Homo sapien
gcacactgagtttctagaccaatct

SEQ ID NO: 1481776 - DNA, 25 bp, Homo sapien
cttcatgcgtaaacacagtgtctct

SEQ ID NO: 1481777 - DNA, 25 bp, Homo sapien
ggcagatctgccacctttaaatagt

SEQ ID NO: 1481778 - DNA, 25 bp, Homo sapien
taaacacatttaaagaacacattac

SEQ ID NO: 1481779 - DNA, 25 bp, Homo sapien
tataaacacatttaaagaacacatt

SEQ ID NO: 1481780 - DNA, 25 bp, Homo sapien
tttataaacacatttaaagaacaca

SEQ ID NO: 1481781 - DNA, 25 bp, Homo sapien
ttataaacacatttaaagaacacat

SEQ ID NO: 1481782 - DNA, 25 bp, Homo sapien
aaaatttaaaatgccgcagttgctt

SEQ ID NO: 1481783 - DNA, 25 bp, Homo sapien
gttgcttgctagtgtgagtctctac

SEQ ID NO: 1481784 - DNA, 25 bp, Homo sapien
catgaaggacactgacaaaaattta

SEQ ID NO: 1481785 - DNA, 25 bp, Homo sapien
agacatgaaggacactgacaaaaat

SEQ ID NO: 1481786 - DNA, 25 bp, Homo sapien
ttcttcttgtgattcactcttatta

SEQ ID NO: 1481787 - DNA, 25 bp, Homo sapien
tgtgattcactcttattaaatgaca

SEQ ID NO: 1481788 - DNA, 25 bp, Homo sapien
cttgtgattcactcttattaaatga

SEQ ID NO: 1481789 - DNA, 25 bp, Homo sapien
ttcactcttattaaatgacactgct

SEQ ID NO: 1481790 - DNA, 25 bp, Homo sapien
gaagatgtactaaggataacctgca

SEQ ID NO: 1481791 - DNA, 25 bp, Homo sapien
cagtaagtgacacccgatctacgct

SEQ ID NO: 1481792 - DNA, 25 bp, Homo sapien
gctgagagacagctaatgaggtcct

SEQ ID NO: 1481793 - DNA, 25 bp, Homo sapien
cagcgcagagcacagaggtataaaa

SEQ ID NO: 1481794 - DNA, 25 bp, Homo sapien
ctggcagctttagtaagtactggag

SEQ ID NO: 1481795 - DNA, 25 bp, Homo sapien
tttagtaagtactggaggatattca

SEQ ID NO: 1481796 - DNA, 25 bp, Homo sapien
aaccaaaattcagtgtctgcttcta

SEQ ID NO: 1481797 - DNA, 25 bp, Homo sapien
tcaagctttgtatctgatgctggac

SEQ ID NO: 1481798 - DNA, 25 bp, Homo sapien
ggctttatccaaacaatcacctgtg

SEQ ID NO: 1481799 - DNA, 25 bp, Homo sapien
atggtcctcgacttatccaaacagg

SEQ ID NO: 1481800 - DNA, 25 bp, Homo sapien
gagtgggtcgagatctactcccaga

SEQ ID NO: 1481801 - DNA, 25 bp, Homo sapien
ccagatcccatgtctaagaagtcat

SEQ ID NO: 1481802 - DNA, 25 bp, Homo sapien
caaaaccgctttgaagagacactgt

SEQ ID NO: 1481803 - DNA, 25 bp, Homo sapien
cacaaactgccttcaaaaccgcttt

SEQ ID NO: 1481804 - DNA, 25 bp, Homo sapien
tgacttcagggacacggacgctcct

SEQ ID NO: 1481805 - DNA, 25 bp, Homo sapien
gagacactgtttcattactcttcag

SEQ ID NO: 1481806 - DNA, 25 bp, Homo sapien
tcagccccatgtttaaactggacaa

SEQ ID NO: 1481807 - DNA, 25 bp, Homo sapien
gaaaagttaattcgccttcagatgt

SEQ ID NO: 1481808 - DNA, 25 bp, Homo sapien
cttaaaagagaaccacttgcgtggc

SEQ ID NO: 1481809 - DNA, 25 bp, Homo sapien
tgaggatattcagagtgctatgggc

SEQ ID NO: 1481810 - DNA, 25 bp, Homo sapien
acaagttgaacaaggatgggcaggc

SEQ ID NO: 1481811 - DNA, 25 bp, Homo sapien
tcttgaaacttctatagaatctcca

SEQ ID NO: 1481812 - DNA, 25 bp, Homo sapien
tcaaaaagcaagatgaggagaatcc

SEQ ID NO: 1481813 - DNA, 25 bp, Homo sapien
ggcagcgcatccacaaatacactaa

SEQ ID NO: 1481814 - DNA, 25 bp, Homo sapien
gagtaggtgcaagtaatcttccaca

SEQ ID NO: 1481815 - DNA, 25 bp, Homo sapien
tgcaaaacagcaagcagagacaatg

SEQ ID NO: 1481816 - DNA, 25 bp, Homo sapien
taggtgaacaagataaggcttttag

SEQ ID NO: 1481817 - DNA, 25 bp, Homo sapien
tcttccacaaaacaagtttaggtga

SEQ ID NO: 1481818 - DNA, 25 bp, Homo sapien
tgatcatatctcaccgcagcctgga

SEQ ID NO: 1481819 - DNA, 25 bp, Homo sapien
atgtgatcatatctcaccgcagcct

SEQ ID NO: 1481820 - DNA, 25 bp, Homo sapien
tgtgatcatatctcaccgcagcctg

SEQ ID NO: 1481821 - DNA, 25 bp, Homo sapien
gtgatcatatctcaccgcagcctgg

SEQ ID NO: 1481822 - DNA, 25 bp, Homo sapien
ataagtgcgggaataaccattttca

SEQ ID NO: 1481823 - DNA, 25 bp, Homo sapien
ctgtaagtatcatctaggcgcatga

SEQ ID NO: 1481824 - DNA, 25 bp, Homo sapien
taagtgcgggaataaccattttcac

SEQ ID NO: 1481825 - DNA, 25 bp, Homo sapien
catctaggcgcatgacattggctcc

SEQ ID NO: 1481826 - DNA, 25 bp, Homo sapien
tccgaaaggcggatgcactgaacta

SEQ ID NO: 1481827 - DNA, 25 bp, Homo sapien
catggtgatgggtctgcggcatctc

SEQ ID NO: 1481828 - DNA, 25 bp, Homo sapien
aactccacgttgaacttctcctcat

SEQ ID NO: 1481829 - DNA, 25 bp, Homo sapien
gcactgaactatcaactccacgttg

SEQ ID NO: 1481830 - DNA, 25 bp, Homo sapien
gcagacaactaagaattaattgttt

SEQ ID NO: 1481831 - DNA, 25 bp, Homo sapien
tggcagatgttgagcagacaactaa

SEQ ID NO: 1481832 - DNA, 25 bp, Homo sapien
ggagatagtttttggcagatgttga

SEQ ID NO: 1481833 - DNA, 25 bp, Homo sapien
gaattaattgtttggtgtattccat

SEQ ID NO: 1481834 - DNA, 25 bp, Homo sapien
tttccctgctcttgtggcaagggtt

SEQ ID NO: 1481835 - DNA, 25 bp, Homo sapien
atttccctgctcttgtggcaagggt

SEQ ID NO: 1481836 - DNA, 25 bp, Homo sapien
tctttttgtgctgcagtaattccag

SEQ ID NO: 1481837 - DNA, 25 bp, Homo sapien
tccaggatgagagttactctttgcc

SEQ ID NO: 1481838 - DNA, 25 bp, Homo sapien
gccagtaagaacctccaacttcctg

SEQ ID NO: 1481839 - DNA, 25 bp, Homo sapien
cctgaacagattctagatcttgtga

SEQ ID NO: 1481840 - DNA, 25 bp, Homo sapien
ctgtgcccaagggtttagctttatc

SEQ ID NO: 1481841 - DNA, 25 bp, Homo sapien
tggtggctccagttctattcggact

SEQ ID NO: 1481842 - DNA, 25 bp, Homo sapien
ttcggacttgttcagcattaacgga

SEQ ID NO: 1481843 - DNA, 25 bp, Homo sapien
gtttagctttatctggtggctccag

SEQ ID NO: 1481844 - DNA, 25 bp, Homo sapien
tacagagggatgaaagtgcatgaca

SEQ ID NO: 1481845 - DNA, 25 bp, Homo sapien
caaaagatgcacactgaagtacaga

SEQ ID NO: 1481846 - DNA, 25 bp, Homo sapien
taaacatggtgtcccttggaagaga

SEQ ID NO: 1481847 - DNA, 25 bp, Homo sapien
ccgtctaatatgagaaagatcacac

SEQ ID NO: 1481848 - DNA, 25 bp, Homo sapien
ctgatatggctgcaaaaaatggttt

SEQ ID NO: 1481849 - DNA, 25 bp, Homo sapien
tacagttcaccaataaatcaaacaa

SEQ ID NO: 1481850 - DNA, 25 bp, Homo sapien
gaactttttcatctgatatggctgc

SEQ ID NO: 1481851 - DNA, 25 bp, Homo sapien
acagtctgagcacaatgtgagtttt

SEQ ID NO: 1481852 - DNA, 25 bp, Homo sapien
ccttctacctttaaatgcttgaaca

SEQ ID NO: 1481853 - DNA, 25 bp, Homo sapien
catgctatgccttagtttctgaaag

SEQ ID NO: 1481854 - DNA, 25 bp, Homo sapien
cttgaacatgctatgccttagtttc

SEQ ID NO: 1481855 - DNA, 25 bp, Homo sapien
tacctttaaatgcttgaacatgcta

SEQ ID NO: 1481856 - DNA, 25 bp, Homo sapien
tagcagttgttcagccataggcaat

SEQ ID NO: 1481857 - DNA, 25 bp, Homo sapien
tcaagggctgtgatctgaatggttg

SEQ ID NO: 1481858 - DNA, 25 bp, Homo sapien
tatatctagactcttcggatcctca

SEQ ID NO: 1481859 - DNA, 25 bp, Homo sapien
aatggttggcattcccgcgtaaagt

SEQ ID NO: 1481860 - DNA, 25 bp, Homo sapien
aaggcactcaggtcctttctgacag

SEQ ID NO: 1481861 - DNA, 25 bp, Homo sapien
gacatggagacagctattaattcac

SEQ ID NO: 1481862 - DNA, 25 bp, Homo sapien
gctaaacccttcagagatgagcaga

SEQ ID NO: 1481863 - DNA, 25 bp, Homo sapien
gaaagataatctgtgagcattcctc

SEQ ID NO: 1481864 - DNA, 25 bp, Homo sapien
aaagtttcagacaacttctgatgag

SEQ ID NO: 1481865 - DNA, 25 bp, Homo sapien
tcaccgttgactccctgaagtactt

SEQ ID NO: 1481866 - DNA, 25 bp, Homo sapien
tgctatataagatgggcaactatac

SEQ ID NO: 1481867 - DNA, 25 bp, Homo sapien
gggcaactatacacacaactaagta

SEQ ID NO: 1481868 - DNA, 25 bp, Homo sapien
ctgaagtgatctcctctgctttaga

SEQ ID NO: 1481869 - DNA, 25 bp, Homo sapien
ctgaataacataggcagcatctgaa

SEQ ID NO: 1481870 - DNA, 25 bp, Homo sapien
taaaacggggatgccactccactga

SEQ ID NO: 1481871 - DNA, 25 bp, Homo sapien
gacactgaatggcagccctacgaac

SEQ ID NO: 1481872 - DNA, 25 bp, Homo sapien
taaagagcttgagtctgcagcactg

SEQ ID NO: 1481873 - DNA, 25 bp, Homo sapien
cacactgcagtttagtggatttgaa

SEQ ID NO: 1481874 - DNA, 25 bp, Homo sapien
cattgcacagcccacataaagagct

SEQ ID NO: 1481875 - DNA, 25 bp, Homo sapien
ttgaaaggctagaaccataggtcca

SEQ ID NO: 1481876 - DNA, 25 bp, Homo sapien
tctgaaatgaacagcatcggcacca

SEQ ID NO: 1481877 - DNA, 25 bp, Homo sapien
gagcatcatctcaaacagcccaatg

SEQ ID NO: 1481878 - DNA, 25 bp, Homo sapien
agcccaatgagcaagtgcagatagt

SEQ ID NO: 1481879 - DNA, 25 bp, Homo sapien
gagcaagtgcagatagtccctgctg

SEQ ID NO: 1481880 - DNA, 25 bp, Homo sapien
tgggatccctctgtctaacatcagt

SEQ ID NO: 1481881 - DNA, 25 bp, Homo sapien
gagctcttctacataatgtgcccac

SEQ ID NO: 1481882 - DNA, 25 bp, Homo sapien
aagatttaggagctttcagtgcata

SEQ ID NO: 1481883 - DNA, 25 bp, Homo sapien
acggccaccctctgagtgctgttga

SEQ ID NO: 1481884 - DNA, 25 bp, Homo sapien
atgacaaatatgactctgtacaagc

SEQ ID NO: 1481885 - DNA, 25 bp, Homo sapien
tatgactctgtacaagcagtacaga

SEQ ID NO: 1481886 - DNA, 25 bp, Homo sapien
tagaaattatactgtaagtgccaaa

SEQ ID NO: 1481887 - DNA, 25 bp, Homo sapien
agaacaggtgtaagaaaatgacaaa

SEQ ID NO: 1481888 - DNA, 25 bp, Homo sapien
ttttctgcaacaaactgaagactct

SEQ ID NO: 1481889 - DNA, 25 bp, Homo sapien
gactcttatcgcaaatggaaagtgg

SEQ ID NO: 1481890 - DNA, 25 bp, Homo sapien
taaagatgaacaacaagagacgagc

SEQ ID NO: 1481891 - DNA, 25 bp, Homo sapien
gacaggatcacatgaaacgttactt

SEQ ID NO: 1481892 - DNA, 25 bp, Homo sapien
aatttatattatcagccaacaactc

SEQ ID NO: 1481893 - DNA, 25 bp, Homo sapien
gctacaccgattagttttcctggct

SEQ ID NO: 1481894 - DNA, 25 bp, Homo sapien
gccaacaactcaatcatcttctgat

SEQ ID NO: 1481895 - DNA, 25 bp, Homo sapien
gaagaaggatctcctaaatttatat

SEQ ID NO: 1481896 - DNA, 25 bp, Homo sapien
cagcggctatcttaagtacctcgta

SEQ ID NO: 1481897 - DNA, 25 bp, Homo sapien
catctcagcagattccgtatcatca

SEQ ID NO: 1481898 - DNA, 25 bp, Homo sapien
ggcagcaaacatacaaccacctgat

SEQ ID NO: 1481899 - DNA, 25 bp, Homo sapien
cagcctcttaatagagggtgcaggg

SEQ ID NO: 1481900 - DNA, 25 bp, Homo sapien
tttgaaatcgtcacttctgaactga

SEQ ID NO: 1481901 - DNA, 25 bp, Homo sapien
cctaatcgggctaaaacagcttctt

SEQ ID NO: 1481902 - DNA, 25 bp, Homo sapien
tatattatcatcacctaatcgggct

SEQ ID NO: 1481903 - DNA, 25 bp, Homo sapien
tcaaaagcacttatagccgacaaaa

SEQ ID NO: 1481904 - DNA, 25 bp, Homo sapien
tagccgacaaaacaacatctatatt

SEQ ID NO: 1481905 - DNA, 25 bp, Homo sapien
tcaaagaagtatcagaatctgctaa

SEQ ID NO: 1481906 - DNA, 25 bp, Homo sapien
aagtggatgattcaggctgagcatc

SEQ ID NO: 1481907 - DNA, 25 bp, Homo sapien
gaattctcacaggagcaagtggatg

SEQ ID NO: 1481908 - DNA, 25 bp, Homo sapien
gattcatggccagaattctcacagg

SEQ ID NO: 1481909 - DNA, 25 bp, Homo sapien
tcctttaagtgttcctctaatacaa

SEQ ID NO: 1481910 - DNA, 25 bp, Homo sapien
ctctaatacaacatctaatgttctg

SEQ ID NO: 1481911 - DNA, 25 bp, Homo sapien
ttcctctaatacaacatctaatgtt

SEQ ID NO: 1481912 - DNA, 25 bp, Homo sapien
ttcctttaagtgttcctctaataca

SEQ ID NO: 1481913 - DNA, 25 bp, Homo sapien
tgctttctaaaagcctaatgagtgg

SEQ ID NO: 1481914 - DNA, 25 bp, Homo sapien
gttcattaagcaaagacactttatt

SEQ ID NO: 1481915 - DNA, 25 bp, Homo sapien
aactatatgaaatatactcttcaaa

SEQ ID NO: 1481916 - DNA, 25 bp, Homo sapien
tctaaaagcctaatgagtggaagaa

SEQ ID NO: 1481917 - DNA, 25 bp, Homo sapien
tctcttgtagatttgaccatccatt

SEQ ID NO: 1481918 - DNA, 25 bp, Homo sapien
tatagcttctaagtgtctcttgtag

SEQ ID NO: 1481919 - DNA, 25 bp, Homo sapien
gatttgaccatccattccttcagtt

SEQ ID NO: 1481920 - DNA, 25 bp, Homo sapien
tgttcttcagtgatatttttgtaag

SEQ ID NO: 1481921 - DNA, 25 bp, Homo sapien
aacatgatgaatgatggagacgacc

SEQ ID NO: 1481922 - DNA, 25 bp, Homo sapien
gcagaagaggactgacatcgtaagt

SEQ ID NO: 1481923 - DNA, 25 bp, Homo sapien
cccatgaagtattgtaataagatca

SEQ ID NO: 1481924 - DNA, 25 bp, Homo sapien
taagatcaggaacattacataagtg

SEQ ID NO: 1481925 - DNA, 25 bp, Homo sapien
gcaccatttctcaattcaattgtac

SEQ ID NO: 1481926 - DNA, 25 bp, Homo sapien
ctctgactagcaccatttctcaatt

SEQ ID NO: 1481927 - DNA, 25 bp, Homo sapien
tgactagcaccatttctcaattcaa

SEQ ID NO: 1481928 - DNA, 25 bp, Homo sapien
ctagcaccatttctcaattcaattg

SEQ ID NO: 1481929 - DNA, 25 bp, Homo sapien
gagggaatcttggtcaatgttttga

SEQ ID NO: 1481930 - DNA, 25 bp, Homo sapien
taacccatccttgatcaaagaggga

SEQ ID NO: 1481931 - DNA, 25 bp, Homo sapien
tgtctctgcaggagcactatcaagc

SEQ ID NO: 1481932 - DNA, 25 bp, Homo sapien
tatcaagcaacttaacccatccttg

SEQ ID NO: 1481933 - DNA, 25 bp, Homo sapien
gtattttccatggtcactttcacag

SEQ ID NO: 1481934 - DNA, 25 bp, Homo sapien
tgtgatgccaatgaattcacaaagg

SEQ ID NO: 1481935 - DNA, 25 bp, Homo sapien
gaattcacaaaggtattttccatgg

SEQ ID NO: 1481936 - DNA, 25 bp, Homo sapien
tgccaatgaattcacaaaggtattt

SEQ ID NO: 1481937 - DNA, 25 bp, Homo sapien
gacatattatcatgtatgttgcagc

SEQ ID NO: 1481938 - DNA, 25 bp, Homo sapien
ctgacatattatcatgtatgttgca

SEQ ID NO: 1481939 - DNA, 25 bp, Homo sapien
acatattatcatgtatgttgcagct

SEQ ID NO: 1481940 - DNA, 25 bp, Homo sapien
tgacatattatcatgtatgttgcag

SEQ ID NO: 1481941 - DNA, 25 bp, Homo sapien
ctccacagggcacctgggaaggcag

SEQ ID NO: 1481942 - DNA, 25 bp, Homo sapien
cagcaggcaagaaggcacttgggaa

SEQ ID NO: 1481943 - DNA, 25 bp, Homo sapien
aaggcagcaggcaagaaggcacttg

SEQ ID NO: 1481944 - DNA, 25 bp, Homo sapien
caggcaagaaggcacttgggaagga

SEQ ID NO: 1481945 - DNA, 25 bp, Homo sapien
gtcctccttccagtgaggtacaaag

SEQ ID NO: 1481946 - DNA, 25 bp, Homo sapien
aaagagactgtctgctccgtcctcc

SEQ ID NO: 1481947 - DNA, 25 bp, Homo sapien
ggttgcttacgcctcaaagagactg

SEQ ID NO: 1481948 - DNA, 25 bp, Homo sapien
agaatactgagaggttgcttacgcc

SEQ ID NO: 1481949 - DNA, 25 bp, Homo sapien
cagcgccgacactatggtagaagca

SEQ ID NO: 1481950 - DNA, 25 bp, Homo sapien
tctgatacgtcctctgcagctacca

SEQ ID NO: 1481951 - DNA, 25 bp, Homo sapien
tttggcgatgatattgtctgatacg

SEQ ID NO: 1481952 - DNA, 25 bp, Homo sapien
gatatagggaaatagtttggcgatg

SEQ ID NO: 1481953 - DNA, 25 bp, Homo sapien
tcaaagttcctttagctaacggcac

SEQ ID NO: 1481954 - DNA, 25 bp, Homo sapien
gaatccaagatctttgtagcagtgg

SEQ ID NO: 1481955 - DNA, 25 bp, Homo sapien
gaaatccatgaatccaagatctttg

SEQ ID NO: 1481956 - DNA, 25 bp, Homo sapien
ttgtcaccaaactgcaaatgaaatc

SEQ ID NO: 1481957 - DNA, 25 bp, Homo sapien
gaacacaagcaatgaggctatcttg

SEQ ID NO: 1481958 - DNA, 25 bp, Homo sapien
taactggcaacaaccagaaccatct

SEQ ID NO: 1481959 - DNA, 25 bp, Homo sapien
aatttttagaagctgtatgactcgc

SEQ ID NO: 1481960 - DNA, 25 bp, Homo sapien
aatattcttgtctcgtggtatggca

SEQ ID NO: 1481961 - DNA, 25 bp, Homo sapien
cctccaagtttaaaagattctcctg

SEQ ID NO: 1481962 - DNA, 25 bp, Homo sapien
ctgggactacaaactcataccacca

SEQ ID NO: 1481963 - DNA, 25 bp, Homo sapien
actacaaactcataccaccatgccc

SEQ ID NO: 1481964 - DNA, 25 bp, Homo sapien
ctccaagtttaaaagattctcctgc

SEQ ID NO: 1481965 - DNA, 25 bp, Homo sapien
tgaacccagcctcttagtttgacat

SEQ ID NO: 1481966 - DNA, 25 bp, Homo sapien
cttagtttgacatacggttttagcg

SEQ ID NO: 1481967 - DNA, 25 bp, Homo sapien
actgaacccagcctcttagtttgac

SEQ ID NO: 1481968 - DNA, 25 bp, Homo sapien
tcttagtttgacatacggttttagc

SEQ ID NO: 1481969 - DNA, 25 bp, Homo sapien
ttacaagaccaaagtgattaaccca

SEQ ID NO: 1481970 - DNA, 25 bp, Homo sapien
gaagagcatgcttatctcacacaat

SEQ ID NO: 1481971 - DNA, 25 bp, Homo sapien
tactcaaaatcaccagtagttctac

SEQ ID NO: 1481972 - DNA, 25 bp, Homo sapien
cctgagtgcccagcaagactctatc

SEQ ID NO: 1481973 - DNA, 25 bp, Homo sapien
gaagtaaggcgacaagtgaataagg

SEQ ID NO: 1481974 - DNA, 25 bp, Homo sapien
gcaggaagtaaggcgacaagtgaat

SEQ ID NO: 1481975 - DNA, 25 bp, Homo sapien
gtaaggcgacaagtgaataaggaat

SEQ ID NO: 1481976 - DNA, 25 bp, Homo sapien
tgaatcaaccactccagacacttct

SEQ ID NO: 1481977 - DNA, 25 bp, Homo sapien
tggtctgaacacttcgctccaaggt

SEQ ID NO: 1481978 - DNA, 25 bp, Homo sapien
actgctcaaaggaaggatcaattcc

SEQ ID NO: 1481979 - DNA, 25 bp, Homo sapien
gctccaaggtttttgctagctgact

SEQ ID NO: 1481980 - DNA, 25 bp, Homo sapien
ctgaacaacggtgcttcaaactgct

SEQ ID NO: 1481981 - DNA, 25 bp, Homo sapien
aactgctaaggaagaggacgggaca

SEQ ID NO: 1481982 - DNA, 25 bp, Homo sapien
tatcccctacaataactaggccagt

SEQ ID NO: 1481983 - DNA, 25 bp, Homo sapien
tcctctgagaggacttctccgtcac

SEQ ID NO: 1481984 - DNA, 25 bp, Homo sapien
tccagaaaacaaacgcttccaagag

SEQ ID NO: 1481985 - DNA, 25 bp, Homo sapien
gattgtggccgcttccttagggtca

SEQ ID NO: 1481986 - DNA, 25 bp, Homo sapien
aagaggctggcatcactttgaggga

SEQ ID NO: 1481987 - DNA, 25 bp, Homo sapien
agaagcaacttcatctctagataag

SEQ ID NO: 1481988 - DNA, 25 bp, Homo sapien
tagggtcaaataacaaagaagcaac

SEQ ID NO: 1481989 - DNA, 25 bp, Homo sapien
ctttcacgccagcggagttttaatg

SEQ ID NO: 1481990 - DNA, 25 bp, Homo sapien
cacgccagcggagttttaatgacac

SEQ ID NO: 1481991 - DNA, 25 bp, Homo sapien
gccagcggagttttaatgacacggg

SEQ ID NO: 1481992 - DNA, 25 bp, Homo sapien
ttcacgccagcggagttttaatgac

SEQ ID NO: 1481993 - DNA, 25 bp, Homo sapien
ctggaactgggaatttgggtatatc

SEQ ID NO: 1481994 - DNA, 25 bp, Homo sapien
tatatcttggaaggcaacaactctt

SEQ ID NO: 1481995 - DNA, 25 bp, Homo sapien
aggcaacaactcttcacagcgcttc

SEQ ID NO: 1481996 - DNA, 25 bp, Homo sapien
gcgcttcccacatggtaccaaggag

SEQ ID NO: 1481997 - DNA, 25 bp, Homo sapien
tgctctgcggcttgtgtctgaagct

SEQ ID NO: 1481998 - DNA, 25 bp, Homo sapien
gcctctgtagctccggtttagcggt

SEQ ID NO: 1481999 - DNA, 25 bp, Homo sapien
tcaagtctgagcttcgcctctgtag

SEQ ID NO: 1482000 - DNA, 25 bp, Homo sapien
gaagctttcggtctctggatgggcc

SEQ ID NO: 1482001 - DNA, 25 bp, Homo sapien
gcacagttttcagcacgtgtcagcc

SEQ ID NO: 1482002 - DNA, 25 bp, Homo sapien
ttttcagcacgtgtcagcctctcca

SEQ ID NO: 1482003 - DNA, 25 bp, Homo sapien
acagttttcagcacgtgtcagcctc

SEQ ID NO: 1482004 - DNA, 25 bp, Homo sapien
agttttcagcacgtgtcagcctctc

SEQ ID NO: 1482005 - DNA, 25 bp, Homo sapien
gtactggccgccaacatcatctgag

SEQ ID NO: 1482006 - DNA, 25 bp, Homo sapien
caatattgttcaggcgtctcacgtc

SEQ ID NO: 1482007 - DNA, 25 bp, Homo sapien
tctgaggttacaatattgttcaggc

SEQ ID NO: 1482008 - DNA, 25 bp, Homo sapien
tcaggcgtctcacgtcatcactttc

SEQ ID NO: 1482009 - DNA, 25 bp, Homo sapien
tagggctggatggtcaactcagtca

SEQ ID NO: 1482010 - DNA, 25 bp, Homo sapien
gggctggatggtcaactcagtcagt

SEQ ID NO: 1482011 - DNA, 25 bp, Homo sapien
ttagggctggatggtcaactcagtc

SEQ ID NO: 1482012 - DNA, 25 bp, Homo sapien
ctggatggtcaactcagtcagtgat

SEQ ID NO: 1482013 - DNA, 25 bp, Homo sapien
tttccattccaagctgtctgacagc

SEQ ID NO: 1482014 - DNA, 25 bp, Homo sapien
ccatcttgttgacagcttgtagaga

SEQ ID NO: 1482015 - DNA, 25 bp, Homo sapien
gttacctacagtctgtttgctcaga

SEQ ID NO: 1482016 - DNA, 25 bp, Homo sapien
tatctgagtccttaatgatcaggaa

SEQ ID NO: 1482017 - DNA, 25 bp, Homo sapien
taggtaagacttggacatctgcagt

SEQ ID NO: 1482018 - DNA, 25 bp, Homo sapien
gagtctcaagctgtgaaggtctagg

SEQ ID NO: 1482019 - DNA, 25 bp, Homo sapien
tcaagagtctaaaacggccaagcgt

SEQ ID NO: 1482020 - DNA, 25 bp, Homo sapien
catgagaacccgtggattagaggca

SEQ ID NO: 1482021 - DNA, 25 bp, Homo sapien
ttcgctgctgcagaatattcctggt

SEQ ID NO: 1482022 - DNA, 25 bp, Homo sapien
tattcctggtctcagactgtacagc

SEQ ID NO: 1482023 - DNA, 25 bp, Homo sapien
aactgaccacaagagttaaggctac

SEQ ID NO: 1482024 - DNA, 25 bp, Homo sapien
tttagcctgccaaggaacagcccct

SEQ ID NO: 1482025 - DNA, 25 bp, Homo sapien
tctgttcctaaccagtactcatttc

SEQ ID NO: 1482026 - DNA, 25 bp, Homo sapien
aagcacaaggttaaagatcccatca

SEQ ID NO: 1482027 - DNA, 25 bp, Homo sapien
tttccactccactcattttctgagg

SEQ ID NO: 1482028 - DNA, 25 bp, Homo sapien
tctgagggactcagtgtttctttac

SEQ ID NO: 1482029 - DNA, 25 bp, Homo sapien
tttcaccaaattacagtcaacttga

SEQ ID NO: 1482030 - DNA, 25 bp, Homo sapien
ttcaccaaattacagtcaacttgac

SEQ ID NO: 1482031 - DNA, 25 bp, Homo sapien
ctttcaccaaattacagtcaacttg

SEQ ID NO: 1482032 - DNA, 25 bp, Homo sapien
gccagaaaacaatactggctagttc

SEQ ID NO: 1482033 - DNA, 25 bp, Homo sapien
ccagaaaacaatactggctagttcc

SEQ ID NO: 1482034 - DNA, 25 bp, Homo sapien
cagaaaacaatactggctagttccc

SEQ ID NO: 1482035 - DNA, 25 bp, Homo sapien
ggtcaccccagtagactccagaagt

SEQ ID NO: 1482036 - DNA, 25 bp, Homo sapien
ctccagaagtagtacatccttgttc

SEQ ID NO: 1482037 - DNA, 25 bp, Homo sapien
agactccagaagtagtacatccttg

SEQ ID NO: 1482038 - DNA, 25 bp, Homo sapien
cagaagtagtacatccttgttccag

SEQ ID NO: 1482039 - DNA, 25 bp, Homo sapien
ttcatagcgcggtcaaacgatctca

SEQ ID NO: 1482040 - DNA, 25 bp, Homo sapien
tgggcacacagagacgcgaaaagct

SEQ ID NO: 1482041 - DNA, 25 bp, Homo sapien
gaggttaactgtcttgcccagcgca

SEQ ID NO: 1482042 - DNA, 25 bp, Homo sapien
tcgagatcagcacgaacttggcgct

SEQ ID NO: 1482043 - DNA, 25 bp, Homo sapien
gatattgacagccaatgcggctgcg

SEQ ID NO: 1482044 - DNA, 25 bp, Homo sapien
ctcagagccggatgtcacgtcgtcc

SEQ ID NO: 1482045 - DNA, 25 bp, Homo sapien
acccgggaagaaagcacgtgctcca

SEQ ID NO: 1482046 - DNA, 25 bp, Homo sapien
tagattgagcgcagaactaaccgcg

SEQ ID NO: 1482047 - DNA, 25 bp, Homo sapien
tccaagacctgtcgcaacccggtaa

SEQ ID NO: 1482048 - DNA, 25 bp, Homo sapien
ctgcgcaaggaggagactcgacaac

SEQ ID NO: 1482049 - DNA, 25 bp, Homo sapien
tgtcgcaacccggtaacgctgcgac

SEQ ID NO: 1482050 - DNA, 25 bp, Homo sapien
gagactcgacaacatgtcacccgcg

SEQ ID NO: 1482051 - DNA, 25 bp, Homo sapien
gtgttttgctccactctttgtccga

SEQ ID NO: 1482052 - DNA, 25 bp, Homo sapien
tgttttgctccactctttgtccgac

SEQ ID NO: 1482053 - DNA, 25 bp, Homo sapien
cgtcacagtaactaaactttccagt

SEQ ID NO: 1482054 - DNA, 25 bp, Homo sapien
tcaaaacctgcaaaaagcgtcctcc

SEQ ID NO: 1482055 - DNA, 25 bp, Homo sapien
tccagttccacgcagcataaaccag

SEQ ID NO: 1482056 - DNA, 25 bp, Homo sapien
cgaaacacattcttaacgtcacagt

SEQ ID NO: 1482057 - DNA, 25 bp, Homo sapien
cacccagcccaagtaatggattttt

SEQ ID NO: 1482058 - DNA, 25 bp, Homo sapien
taggagttttttattcaggctgcaa

SEQ ID NO: 1482059 - DNA, 25 bp, Homo sapien
gttgtaaactctagtctataggtat

SEQ ID NO: 1482060 - DNA, 25 bp, Homo sapien
catagaccgcctttttcacatatat

SEQ ID NO: 1482061 - DNA, 25 bp, Homo sapien
tttttacagtggaatctaggaggcc

SEQ ID NO: 1482062 - DNA, 25 bp, Homo sapien
ttttgggaccttgcgtgaagagcag

SEQ ID NO: 1482063 - DNA, 25 bp, Homo sapien
tgtgcatctggctgacacttacctg

SEQ ID NO: 1482064 - DNA, 25 bp, Homo sapien
gactatttagtggaaccttgtagag

SEQ ID NO: 1482065 - DNA, 25 bp, Homo sapien
aaaaggcatgcgctcactgcttgct

SEQ ID NO: 1482066 - DNA, 25 bp, Homo sapien
gcattttcgtcctcccataatttca

SEQ ID NO: 1482067 - DNA, 25 bp, Homo sapien
tctaaaggctggactaaatggctgc

SEQ ID NO: 1482068 - DNA, 25 bp, Homo sapien
tctcttcggaagacctcgttttcta

SEQ ID NO: 1482069 - DNA, 25 bp, Homo sapien
tcagctgggctctgatatcccgtgc

SEQ ID NO: 1482070 - DNA, 25 bp, Homo sapien
tgtttccaggattgagcaggttctc

SEQ ID NO: 1482071 - DNA, 25 bp, Homo sapien
tatcccgtgcggagttggacaagtg

SEQ ID NO: 1482072 - DNA, 25 bp, Homo sapien
gagcctggccggttaacatctttta

SEQ ID NO: 1482073 - DNA, 25 bp, Homo sapien
tggcaatagtcaggagaaggtaaca

SEQ ID NO: 1482074 - DNA, 25 bp, Homo sapien
caagcaggtgtttatatggagtagc

SEQ ID NO: 1482075 - DNA, 25 bp, Homo sapien
cattggagtcctggtttgattcgaa

SEQ ID NO: 1482076 - DNA, 25 bp, Homo sapien
catcctacttcaagatggtggtggc

SEQ ID NO: 1482077 - DNA, 25 bp, Homo sapien
aggatatatcccagccccttagagg

SEQ ID NO: 1482078 - DNA, 25 bp, Homo sapien
aaggaggtacctgctcacattggcc

SEQ ID NO: 1482079 - DNA, 25 bp, Homo sapien
agacttaacattccctaagggcagg

SEQ ID NO: 1482080 - DNA, 25 bp, Homo sapien
caaagctaagtgaagtgacccctct

SEQ ID NO: 1482081 - DNA, 25 bp, Homo sapien
gctcaggatacccagagcctagctc

SEQ ID NO: 1482082 - DNA, 25 bp, Homo sapien
aggatacccagagcctagctcagtg

SEQ ID NO: 1482083 - DNA, 25 bp, Homo sapien
ttcctgagctcaggatacccagagc

SEQ ID NO: 1482084 - DNA, 25 bp, Homo sapien
tcttcctgagctcaggatacccaga

SEQ ID NO: 1482085 - DNA, 25 bp, Homo sapien
gacaatctctgccatccataaggta

SEQ ID NO: 1482086 - DNA, 25 bp, Homo sapien
tgtaatacatctggcgacctgctga

SEQ ID NO: 1482087 - DNA, 25 bp, Homo sapien
gagactcacgaaacaagcaatccct

SEQ ID NO: 1482088 - DNA, 25 bp, Homo sapien
tgaagtaacccctaaactcagccag

SEQ ID NO: 1482089 - DNA, 25 bp, Homo sapien
gattctgccgcatgaggtgcagcag

SEQ ID NO: 1482090 - DNA, 25 bp, Homo sapien
tacactgagggcagcgtatgcctga

SEQ ID NO: 1482091 - DNA, 25 bp, Homo sapien
gaggtagtgtctctagtgtactgat

SEQ ID NO: 1482092 - DNA, 25 bp, Homo sapien
aaatgtatctagctggattctgccg

SEQ ID NO: 1482093 - DNA, 25 bp, Homo sapien
gtccttccgctactactgctaacat

SEQ ID NO: 1482094 - DNA, 25 bp, Homo sapien
actgtccttccgctactactgctaa

SEQ ID NO: 1482095 - DNA, 25 bp, Homo sapien
tccagactgtccttccgctactact

SEQ ID NO: 1482096 - DNA, 25 bp, Homo sapien
cagactgtccttccgctactactgc

SEQ ID NO: 1482097 - DNA, 25 bp, Homo sapien
tcatgagcagcaacttgggagtccc

SEQ ID NO: 1482098 - DNA, 25 bp, Homo sapien
acttggaatgcgatggtcatgagca

SEQ ID NO: 1482099 - DNA, 25 bp, Homo sapien
cttgtggaattctgagaggacctgt

SEQ ID NO: 1482100 - DNA, 25 bp, Homo sapien
cttatgcaaggatgatgattctggc

SEQ ID NO: 1482101 - DNA, 25 bp, Homo sapien
catagcagggcatagccctgaaacg

SEQ ID NO: 1482102 - DNA, 25 bp, Homo sapien
ttctccgagccatgaagtcagtctc

SEQ ID NO: 1482103 - DNA, 25 bp, Homo sapien
catagccctgaaacggctgccactt

SEQ ID NO: 1482104 - DNA, 25 bp, Homo sapien
acttctccgagccatgaagtcagtc

SEQ ID NO: 1482105 - DNA, 25 bp, Homo sapien
aggccaaacgtcagagcagaacctg

SEQ ID NO: 1482106 - DNA, 25 bp, Homo sapien
tgcgtcctggcctgcggtcctgctg

SEQ ID NO: 1482107 - DNA, 25 bp, Homo sapien
acactggcaggccaaacgtcagagc

SEQ ID NO: 1482108 - DNA, 25 bp, Homo sapien
ctggtgattgttctgaacccaggca

SEQ ID NO: 1482109 - DNA, 25 bp, Homo sapien
aggattatgccactaataggcattg

SEQ ID NO: 1482110 - DNA, 25 bp, Homo sapien
caggattatgccactaataggcatt

SEQ ID NO: 1482111 - DNA, 25 bp, Homo sapien
ctgcaggattatgccactaataggc

SEQ ID NO: 1482112 - DNA, 25 bp, Homo sapien
gcaggattatgccactaataggcat

SEQ ID NO: 1482113 - DNA, 25 bp, Homo sapien
tgtaagaagtcaacagcatcagacc

SEQ ID NO: 1482114 - DNA, 25 bp, Homo sapien
acagctctgggctccggtaatagcg

SEQ ID NO: 1482115 - DNA, 25 bp, Homo sapien
caggaaggatctcaacactgagctc

SEQ ID NO: 1482116 - DNA, 25 bp, Homo sapien
actgagctctttgacaagggaattc

SEQ ID NO: 1482117 - DNA, 25 bp, Homo sapien
tctgtttagtattccccacttctct

SEQ ID NO: 1482118 - DNA, 25 bp, Homo sapien
tcagcaatctcggtacaaaatcact

SEQ ID NO: 1482119 - DNA, 25 bp, Homo sapien
tcccgttgtcaacaccctctcctgt

SEQ ID NO: 1482120 - DNA, 25 bp, Homo sapien
caatctcggtacaaaatcacttgcc

SEQ ID NO: 1482121 - DNA, 25 bp, Homo sapien
cgaaaattccagacggtgagaagca

SEQ ID NO: 1482122 - DNA, 25 bp, Homo sapien
cccttgaatggagatgcgggttgct

SEQ ID NO: 1482123 - DNA, 25 bp, Homo sapien
tgtctgctgacaggactgtgctcac

SEQ ID NO: 1482124 - DNA, 25 bp, Homo sapien
ggcatggccaaatcagtcacacacg

SEQ ID NO: 1482125 - DNA, 25 bp, Homo sapien
cttctcgtcacctgctgtagaggca

SEQ ID NO: 1482126 - DNA, 25 bp, Homo sapien
accaaagaggggagaacagcttctc

SEQ ID NO: 1482127 - DNA, 25 bp, Homo sapien
gggagaacagcttctcgtcacctgc

SEQ ID NO: 1482128 - DNA, 25 bp, Homo sapien
gaacagcttctcgtcacctgctgta

SEQ ID NO: 1482129 - DNA, 25 bp, Homo sapien
gcacagttgcaacgtgaacttctgt

SEQ ID NO: 1482130 - DNA, 25 bp, Homo sapien
gctgctgctgccgtgagttaaggca

SEQ ID NO: 1482131 - DNA, 25 bp, Homo sapien
ccaggtggcccgatggcttcctcgg

SEQ ID NO: 1482132 - DNA, 25 bp, Homo sapien
tcctcggggtcataaacagcacagt

SEQ ID NO: 1482133 - DNA, 25 bp, Homo sapien
catccgagagcagggcagtcccgac

SEQ ID NO: 1482134 - DNA, 25 bp, Homo sapien
gttttcatccgagagcagggcagtc

SEQ ID NO: 1482135 - DNA, 25 bp, Homo sapien
ttcatccgagagcagggcagtcccg

SEQ ID NO: 1482136 - DNA, 25 bp, Homo sapien
ttttcatccgagagcagggcagtcc

SEQ ID NO: 1482137 - DNA, 25 bp, Homo sapien
tgcacttttccgaagcccctttgcg

SEQ ID NO: 1482138 - DNA, 25 bp, Homo sapien
cacagcagctgcacttttccgaagc

SEQ ID NO: 1482139 - DNA, 25 bp, Homo sapien
agctgcacttttccgaagccccttt

SEQ ID NO: 1482140 - DNA, 25 bp, Homo sapien
ttccgaagcccctttgcggatgcag

SEQ ID NO: 1482141 - DNA, 25 bp, Homo sapien
cacagcccagggggcaacaggagca

SEQ ID NO: 1482142 - DNA, 25 bp, Homo sapien
tttttgcacttgcaggagccggcgc

SEQ ID NO: 1482143 - DNA, 25 bp, Homo sapien
gcactttttgcacttgcaggagccg

SEQ ID NO: 1482144 - DNA, 25 bp, Homo sapien
caggagccggcgcaggcgtaggagc

SEQ ID NO: 1482145 - DNA, 25 bp, Homo sapien
cggcgcaggagcagttggggtccat

SEQ ID NO: 1482146 - DNA, 25 bp, Homo sapien
ccagcggcgcaggagcagttggggt

SEQ ID NO: 1482147 - DNA, 25 bp, Homo sapien
ctccagcggcgcaggagcagttggg

SEQ ID NO: 1482148 - DNA, 25 bp, Homo sapien
cagcggcgcaggagcagttggggtc

SEQ ID NO: 1482149 - DNA, 25 bp, Homo sapien
gtgagaccggcgttcccaagcgaga

SEQ ID NO: 1482150 - DNA, 25 bp, Homo sapien
tgcaagccgaggtgagaccggcgtt

SEQ ID NO: 1482151 - DNA, 25 bp, Homo sapien
tgagaccggcgttcccaagcgagaa

SEQ ID NO: 1482152 - DNA, 25 bp, Homo sapien
gccgaggtgagaccggcgttcccaa

SEQ ID NO: 1482153 - DNA, 25 bp, Homo sapien
gtctccactccacggagacctgaga

SEQ ID NO: 1482154 - DNA, 25 bp, Homo sapien
ggacagccatactcaggtctccact

SEQ ID NO: 1482155 - DNA, 25 bp, Homo sapien
ggtctccactccacggagacctgag

SEQ ID NO: 1482156 - DNA, 25 bp, Homo sapien
tccactccacggagacctgagactt

SEQ ID NO: 1482157 - DNA, 25 bp, Homo sapien
ttagtagtaggaactaagtggttga

SEQ ID NO: 1482158 - DNA, 25 bp, Homo sapien
taggaactaagtggttgagccagat

SEQ ID NO: 1482159 - DNA, 25 bp, Homo sapien
tagtaggaactaagtggttgagcca

SEQ ID NO: 1482160 - DNA, 25 bp, Homo sapien
ggaactaagtggttgagccagatac

SEQ ID NO: 1482161 - DNA, 25 bp, Homo sapien
tctggtgtccctcggatgctgcact

SEQ ID NO: 1482162 - DNA, 25 bp, Homo sapien
gatggctgagcgtttaggtagttcc

SEQ ID NO: 1482163 - DNA, 25 bp, Homo sapien
gccattgtacttcctctggttcgga

SEQ ID NO: 1482164 - DNA, 25 bp, Homo sapien
tccatagcctctcggtgctctcaat

SEQ ID NO: 1482165 - DNA, 25 bp, Homo sapien
gtcccaagctatgcccagggtgaga

SEQ ID NO: 1482166 - DNA, 25 bp, Homo sapien
tgtcccaagctatgcccagggtgag

SEQ ID NO: 1482167 - DNA, 25 bp, Homo sapien
ctgtcccaagctatgcccagggtga

SEQ ID NO: 1482168 - DNA, 25 bp, Homo sapien
gtttctgctacttccctatttccca

SEQ ID NO: 1482169 - DNA, 25 bp, Homo sapien
taggatcaatatcatagaattgtgc

SEQ ID NO: 1482170 - DNA, 25 bp, Homo sapien
tgcaaattgaatcttacacaccagc

SEQ ID NO: 1482171 - DNA, 25 bp, Homo sapien
gcagctagtgatatacctaggatca

SEQ ID NO: 1482172 - DNA, 25 bp, Homo sapien
tgcaatcgttacattgaaagaccag

SEQ ID NO: 1482173 - DNA, 25 bp, Homo sapien
ccagagttcaacagggatgctgaaa

SEQ ID NO: 1482174 - DNA, 25 bp, Homo sapien
tctgtccctttacaaccatttagag

SEQ ID NO: 1482175 - DNA, 25 bp, Homo sapien
cctttacaaccatttagaggcttgt

SEQ ID NO: 1482176 - DNA, 25 bp, Homo sapien
tctgtgtagtctccttgcagcctgt

SEQ ID NO: 1482177 - DNA, 25 bp, Homo sapien
atttctcaggcatgagtcagataga

SEQ ID NO: 1482178 - DNA, 25 bp, Homo sapien
ggggacccatatcaagctttctgtg

SEQ ID NO: 1482179 - DNA, 25 bp, Homo sapien
ctgtcttcctggcttgaggcgagtg

SEQ ID NO: 1482180 - DNA, 25 bp, Homo sapien
ttcacaggagggagatacaatctct

SEQ ID NO: 1482181 - DNA, 25 bp, Homo sapien
gggctttgaactagtccttgaagca

SEQ ID NO: 1482182 - DNA, 25 bp, Homo sapien
aagcatggagtggatttcagcagga

SEQ ID NO: 1482183 - DNA, 25 bp, Homo sapien
gatacaatctctggccagagtaatc

SEQ ID NO: 1482184 - DNA, 25 bp, Homo sapien
tgaaaccagggacagatctcccggg

SEQ ID NO: 1482185 - DNA, 25 bp, Homo sapien
tagcaggacctgctttggcctgaaa

SEQ ID NO: 1482186 - DNA, 25 bp, Homo sapien
ggcattccaagagctagcaggacct

SEQ ID NO: 1482187 - DNA, 25 bp, Homo sapien
ttggcctgaaaccagggacagatct

SEQ ID NO: 1482188 - DNA, 25 bp, Homo sapien
tgcctgttcggttccctaagcgact

SEQ ID NO: 1482189 - DNA, 25 bp, Homo sapien
ttagacttccctcttgcctctcgga

SEQ ID NO: 1482190 - DNA, 25 bp, Homo sapien
actgccgtttgtggctgtggctcca

SEQ ID NO: 1482191 - DNA, 25 bp, Homo sapien
gatcctaaccttcagaagacctgag

SEQ ID NO: 1482192 - DNA, 25 bp, Homo sapien
cctggtttctattgcaaaagttctg

SEQ ID NO: 1482193 - DNA, 25 bp, Homo sapien
ggtgaagaagtggcccatgtttctg

SEQ ID NO: 1482194 - DNA, 25 bp, Homo sapien
tattgcaaaagttctgtagtggtgt

SEQ ID NO: 1482195 - DNA, 25 bp, Homo sapien
aatgttacagtcagcctcaaagccc

SEQ ID NO: 1482196 - DNA, 25 bp, Homo sapien
cacccaccaaccgatgatgagtatc

SEQ ID NO: 1482197 - DNA, 25 bp, Homo sapien
caccaaccgatgatgagtatctgcc

SEQ ID NO: 1482198 - DNA, 25 bp, Homo sapien
gagtatctgccaatttactggaaga

SEQ ID NO: 1482199 - DNA, 25 bp, Homo sapien
caaccgatgatgagtatctgccaat

SEQ ID NO: 1482200 - DNA, 25 bp, Homo sapien
tagtgccctcctaacaagaagggat

SEQ ID NO: 1482201 - DNA, 25 bp, Homo sapien
gtgccctcctaacaagaagggatta

SEQ ID NO: 1482202 - DNA, 25 bp, Homo sapien
aagggattaggacgcaggtccacac

SEQ ID NO: 1482203 - DNA, 25 bp, Homo sapien
acaagaagggattaggacgcaggtc

SEQ ID NO: 1482204 - DNA, 25 bp, Homo sapien
gtgaggactggagcattgcatctgt

SEQ ID NO: 1482205 - DNA, 25 bp, Homo sapien
tgtgaggactggagcattgcatctg

SEQ ID NO: 1482206 - DNA, 25 bp, Homo sapien
attgcatctgtgagccaaggagcac

SEQ ID NO: 1482207 - DNA, 25 bp, Homo sapien
cattgcatctgtgagccaaggagca

SEQ ID NO: 1482208 - DNA, 25 bp, Homo sapien
ttgcatctgtgagccaaggagcact

SEQ ID NO: 1482209 - DNA, 25 bp, Homo sapien
agaggcatggaacaggttccccctc

SEQ ID NO: 1482210 - DNA, 25 bp, Homo sapien
agctgttctgctaggtgtgtagtga

SEQ ID NO: 1482211 - DNA, 25 bp, Homo sapien
caatgtttgggagatccagtttctc

SEQ ID NO: 1482212 - DNA, 25 bp, Homo sapien
acaccctcgtcagcatttggtattg

SEQ ID NO: 1482213 - DNA, 25 bp, Homo sapien
caggcatttatgcagaaatcagttt

SEQ ID NO: 1482214 - DNA, 25 bp, Homo sapien
tcaccgattttgaagctggtgtatg

SEQ ID NO: 1482215 - DNA, 25 bp, Homo sapien
gaagctggtgtatgtctaggtagaa

SEQ ID NO: 1482216 - DNA, 25 bp, Homo sapien
attttgaagctggtgtatgtctagg

SEQ ID NO: 1482217 - DNA, 25 bp, Homo sapien
cgattttgaagctggtgtatgtcta

SEQ ID NO: 1482218 - DNA, 25 bp, Homo sapien
gaactgatgaggcaagtatgtctgt

SEQ ID NO: 1482219 - DNA, 25 bp, Homo sapien
gactgagaatgtgaactgatgaggc

SEQ ID NO: 1482220 - DNA, 25 bp, Homo sapien
gaatgtgaactgatgaggcaagtat

SEQ ID NO: 1482221 - DNA, 25 bp, Homo sapien
ctgcttgtgttggtgtatgagcttg

SEQ ID NO: 1482222 - DNA, 25 bp, Homo sapien
gagtttggtcctcggtcctccatca

SEQ ID NO: 1482223 - DNA, 25 bp, Homo sapien
gaatgcctccagagtttggtcctcg

SEQ ID NO: 1482224 - DNA, 25 bp, Homo sapien
cactgtccaagtgtgaatgcctcca

SEQ ID NO: 1482225 - DNA, 25 bp, Homo sapien
tcttggttctctcactgtccaagtg

SEQ ID NO: 1482226 - DNA, 25 bp, Homo sapien
aattcacaaccacaacaggagctca

SEQ ID NO: 1482227 - DNA, 25 bp, Homo sapien
taattcacaaccacaacaggagctc

SEQ ID NO: 1482228 - DNA, 25 bp, Homo sapien
ctaattcacaaccacaacaggagct

SEQ ID NO: 1482229 - DNA, 25 bp, Homo sapien
attcacaaccacaacaggagctcac

SEQ ID NO: 1482230 - DNA, 25 bp, Homo sapien
ggaaaggacattaccccagtgcctc

SEQ ID NO: 1482231 - DNA, 25 bp, Homo sapien
aggacattaccccagtgcctcatac

SEQ ID NO: 1482232 - DNA, 25 bp, Homo sapien
cgtggaaaggacattaccccagtgc

SEQ ID NO: 1482233 - DNA, 25 bp, Homo sapien
gaaaggacattaccccagtgcctca

SEQ ID NO: 1482234 - DNA, 25 bp, Homo sapien
tgatttttgaatgcaaaacaacttc

SEQ ID NO: 1482235 - DNA, 25 bp, Homo sapien
attcacgagactcttttactgggcc

SEQ ID NO: 1482236 - DNA, 25 bp, Homo sapien
ttttgaatgcaaaacaacttcagtt

SEQ ID NO: 1482237 - DNA, 25 bp, Homo sapien
tactgggccaagggtttcaagagga

SEQ ID NO: 1482238 - DNA, 25 bp, Homo sapien
ggcctgtgctgcctaatgtggcagc

SEQ ID NO: 1482239 - DNA, 25 bp, Homo sapien
ctgtgctgcctaatgtggcagccac

SEQ ID NO: 1482240 - DNA, 25 bp, Homo sapien
tgtgctgcctaatgtggcagccacc

SEQ ID NO: 1482241 - DNA, 25 bp, Homo sapien
tatccttgccctttaaattccaggc

SEQ ID NO: 1482242 - DNA, 25 bp, Homo sapien
aaagcacagcttttgataccagggt

SEQ ID NO: 1482243 - DNA, 25 bp, Homo sapien
aagcacagcttttgataccagggtt

SEQ ID NO: 1482244 - DNA, 25 bp, Homo sapien
cctgggtatttggacgatggatgcc

SEQ ID NO: 1482245 - DNA, 25 bp, Homo sapien
tggcaaaccagagtggtgcagcgca

SEQ ID NO: 1482246 - DNA, 25 bp, Homo sapien
ttgaacagctgactgaacgtggcaa

SEQ ID NO: 1482247 - DNA, 25 bp, Homo sapien
gctgctgtgaattaggccaccttga

SEQ ID NO: 1482248 - DNA, 25 bp, Homo sapien
ggcaggcgagctggcctgactccct

SEQ ID NO: 1482249 - DNA, 25 bp, Homo sapien
gagtcctccatttcgacctctgtgc

SEQ ID NO: 1482250 - DNA, 25 bp, Homo sapien
ctaggcagtggcgacaggaagagag

SEQ ID NO: 1482251 - DNA, 25 bp, Homo sapien
catctggctttacagatagaggtgt

SEQ ID NO: 1482252 - DNA, 25 bp, Homo sapien
caagccaccttctcccgataaatga

SEQ ID NO: 1482253 - DNA, 25 bp, Homo sapien
ctgcggggacaacaagccaccttct

SEQ ID NO: 1482254 - DNA, 25 bp, Homo sapien
aacaagccaccttctcccgataaat

SEQ ID NO: 1482255 - DNA, 25 bp, Homo sapien
accttctcccgataaatgaatgggc

SEQ ID NO: 1482256 - DNA, 25 bp, Homo sapien
gcaaatgcatcggttcctcatcatt

SEQ ID NO: 1482257 - DNA, 25 bp, Homo sapien
cactgcaaatgcatcggttcctcat

SEQ ID NO: 1482258 - DNA, 25 bp, Homo sapien
ctgcaaatgcatcggttcctcatca

SEQ ID NO: 1482259 - DNA, 25 bp, Homo sapien
aaatgcatcggttcctcatcatttc

SEQ ID NO: 1482260 - DNA, 25 bp, Homo sapien
tcatccatggaacgtgcctgtctgt

SEQ ID NO: 1482261 - DNA, 25 bp, Homo sapien
tcagtagggacaaggctccagctgt

SEQ ID NO: 1482262 - DNA, 25 bp, Homo sapien
gatttggccggcgttccctttgcat

SEQ ID NO: 1482263 - DNA, 25 bp, Homo sapien
ggaagcaagcatccctcagtaggga

SEQ ID NO: 1482264 - DNA, 25 bp, Homo sapien
ctgccaaggacgtttcctttgttca

SEQ ID NO: 1482265 - DNA, 25 bp, Homo sapien
gtttcctttgttcagcacctcctcc

SEQ ID NO: 1482266 - DNA, 25 bp, Homo sapien
acgtttcctttgttcagcacctcct

SEQ ID NO: 1482267 - DNA, 25 bp, Homo sapien
ttcctttgttcagcacctcctcctg

SEQ ID NO: 1482268 - DNA, 25 bp, Homo sapien
tctccctacggataggaaaggagtc

SEQ ID NO: 1482269 - DNA, 25 bp, Homo sapien
tgtaccgagtttgcaagcacagtgc

SEQ ID NO: 1482270 - DNA, 25 bp, Homo sapien
tacctgttgactatcgtgcagtgga

SEQ ID NO: 1482271 - DNA, 25 bp, Homo sapien
gattcaagctggctgatctgtgcct

SEQ ID NO: 1482272 - DNA, 25 bp, Homo sapien
gcttccgattcctggctcagagttg

SEQ ID NO: 1482273 - DNA, 25 bp, Homo sapien
tgtggtcacaaaggtgtaggaaacg

SEQ ID NO: 1482274 - DNA, 25 bp, Homo sapien
taatagatgtgaagcttccgattcc

SEQ ID NO: 1482275 - DNA, 25 bp, Homo sapien
tctcccgtggaagatgcctctgagt

SEQ ID NO: 1482276 - DNA, 25 bp, Homo sapien
aaggttccggtcctgagctcacggt

SEQ ID NO: 1482277 - DNA, 25 bp, Homo sapien
aaaaggttccggtcctgagctcacg

SEQ ID NO: 1482278 - DNA, 25 bp, Homo sapien
gagctcacggtttctctcatgtccc

SEQ ID NO: 1482279 - DNA, 25 bp, Homo sapien
ctgagctcacggtttctctcatgtc

SEQ ID NO: 1482280 - DNA, 25 bp, Homo sapien
aattagagctaaccttcctggtggt

SEQ ID NO: 1482281 - DNA, 25 bp, Homo sapien
agagctaaccttcctggtggtgctg

SEQ ID NO: 1482282 - DNA, 25 bp, Homo sapien
ttagagctaaccttcctggtggtgc

SEQ ID NO: 1482283 - DNA, 25 bp, Homo sapien
tagagctaaccttcctggtggtgct

SEQ ID NO: 1482284 - DNA, 25 bp, Homo sapien
ggtctcaggcttggagcctctggta

SEQ ID NO: 1482285 - DNA, 25 bp, Homo sapien
gtctcaggcttggagcctctggtac

SEQ ID NO: 1482286 - DNA, 25 bp, Homo sapien
tcgaggttggaccaagtaaatgaat

SEQ ID NO: 1482287 - DNA, 25 bp, Homo sapien
ttctgaagagcaattgggtcctttg

SEQ ID NO: 1482288 - DNA, 25 bp, Homo sapien
tgaggatgcttcgaggttggaccaa

SEQ ID NO: 1482289 - DNA, 25 bp, Homo sapien
caattgggtcctttgtgaggatgct

SEQ ID NO: 1482290 - DNA, 25 bp, Homo sapien
gtgtctggactctggagaccacgcc

SEQ ID NO: 1482291 - DNA, 25 bp, Homo sapien
tgtctggactctggagaccacgcct

SEQ ID NO: 1482292 - DNA, 25 bp, Homo sapien
tcttccctctccggatccataagga

SEQ ID NO: 1482293 - DNA, 25 bp, Homo sapien
acaagaagcacggtctttgataggc

SEQ ID NO: 1482294 - DNA, 25 bp, Homo sapien
tagaggccacgccttcgtggaaacc

SEQ ID NO: 1482295 - DNA, 25 bp, Homo sapien
gagaccatccattgtacaagaagca

SEQ ID NO: 1482296 - DNA, 25 bp, Homo sapien
tgtccagagacagatatccaggtgc

SEQ ID NO: 1482297 - DNA, 25 bp, Homo sapien
tctctcctacgatggccagtttgtt

SEQ ID NO: 1482298 - DNA, 25 bp, Homo sapien
tcagatgggccgttcaggttccttg

SEQ ID NO: 1482299 - DNA, 25 bp, Homo sapien
cagtttgtttggaggatcacatcgg

SEQ ID NO: 1482300 - DNA, 25 bp, Homo sapien
tgggaaggtcttggtattgatacca

SEQ ID NO: 1482301 - DNA, 25 bp, Homo sapien
ggaaggtcttggtattgataccaca

SEQ ID NO: 1482302 - DNA, 25 bp, Homo sapien
gggaaggtcttggtattgataccac

SEQ ID NO: 1482303 - DNA, 25 bp, Homo sapien
gaaggtcttggtattgataccacat

SEQ ID NO: 1482304 - DNA, 25 bp, Homo sapien
acatcgaccgcttgctgatttgaag

SEQ ID NO: 1482305 - DNA, 25 bp, Homo sapien
cagacttaacagaagtacaatgttt

SEQ ID NO: 1482306 - DNA, 25 bp, Homo sapien
gtaaggacagacttaacagaagtac

SEQ ID NO: 1482307 - DNA, 25 bp, Homo sapien
aaagagggttcctcagtaaggacag

SEQ ID NO: 1482308 - DNA, 25 bp, Homo sapien
ttgcaaaagatgagtgttaaaaggg

SEQ ID NO: 1482309 - DNA, 25 bp, Homo sapien
gcaaaagatgagtgttaaaagggaa

SEQ ID NO: 1482310 - DNA, 25 bp, Homo sapien
ctttgcaaaagatgagtgttaaaag

SEQ ID NO: 1482311 - DNA, 25 bp, Homo sapien
aaagatgagtgttaaaagggaacat

SEQ ID NO: 1482312 - DNA, 25 bp, Homo sapien
tgcaggtaatttcgggggcctctcg

SEQ ID NO: 1482313 - DNA, 25 bp, Homo sapien
aaaccagcattgcaggtaatttcgg

SEQ ID NO: 1482314 - DNA, 25 bp, Homo sapien
gcattgcaggtaatttcgggggcct

SEQ ID NO: 1482315 - DNA, 25 bp, Homo sapien
gggcctctcggtagcaccggctccc

SEQ ID NO: 1482316 - DNA, 25 bp, Homo sapien
ttgtctttccaatgtagaccctgta

SEQ ID NO: 1482317 - DNA, 25 bp, Homo sapien
ctttccaatgtagaccctgtaactc

SEQ ID NO: 1482318 - DNA, 25 bp, Homo sapien
caactttggagagctttgtctttcc

SEQ ID NO: 1482319 - DNA, 25 bp, Homo sapien
agattcctccaaatgctgtagctgc

SEQ ID NO: 1482320 - DNA, 25 bp, Homo sapien
ctggcacattatccttgtgccttga

SEQ ID NO: 1482321 - DNA, 25 bp, Homo sapien
tgttgaactgaatcctttgcgatcc

SEQ ID NO: 1482322 - DNA, 25 bp, Homo sapien
tgcgatcccgcaacactgtggctat

SEQ ID NO: 1482323 - DNA, 25 bp, Homo sapien
cactgtggctatcagagagtcacaa

SEQ ID NO: 1482324 - DNA, 25 bp, Homo sapien
tccttcaatcgtggcttgggctctg

SEQ ID NO: 1482325 - DNA, 25 bp, Homo sapien
cctggtccttcaatcgtggcttggg

SEQ ID NO: 1482326 - DNA, 25 bp, Homo sapien
ggtccttcaatcgtggcttgggctc

SEQ ID NO: 1482327 - DNA, 25 bp, Homo sapien
tggtccttcaatcgtggcttgggct

SEQ ID NO: 1482328 - DNA, 25 bp, Homo sapien
tcctgtccatactccgtatacctat

SEQ ID NO: 1482329 - DNA, 25 bp, Homo sapien
gtctagctcctgtccatactccgta

SEQ ID NO: 1482330 - DNA, 25 bp, Homo sapien
tgtctagctcctgtccatactccgt

SEQ ID NO: 1482331 - DNA, 25 bp, Homo sapien
tagctcctgtccatactccgtatac

SEQ ID NO: 1482332 - DNA, 25 bp, Homo sapien
gaatatttgatgaaaccgactgcag

SEQ ID NO: 1482333 - DNA, 25 bp, Homo sapien
tgttcttggtgaatccctgttggca

SEQ ID NO: 1482334 - DNA, 25 bp, Homo sapien
atttgattttgaaagccgtgctttg

SEQ ID NO: 1482335 - DNA, 25 bp, Homo sapien
tgttggcagctttaggagtctgtcc

SEQ ID NO: 1482336 - DNA, 25 bp, Homo sapien
tctctgtatccagaatgtacattct

SEQ ID NO: 1482337 - DNA, 25 bp, Homo sapien
ctctctgtatccagaatgtacattc

SEQ ID NO: 1482338 - DNA, 25 bp, Homo sapien
ctctgtatccagaatgtacattctt

SEQ ID NO: 1482339 - DNA, 25 bp, Homo sapien
tctgtatccagaatgtacattctta

SEQ ID NO: 1482340 - DNA, 25 bp, Homo sapien
gtgctctggggctagccaagaggaa

SEQ ID NO: 1482341 - DNA, 25 bp, Homo sapien
gctgcccaccagctgcgttgctgat

SEQ ID NO: 1482342 - DNA, 25 bp, Homo sapien
ggaaatgctgcatttggtccccagg

SEQ ID NO: 1482343 - DNA, 25 bp, Homo sapien
tgagccatgtccgtgtcgtcctgtt

SEQ ID NO: 1482344 - DNA, 25 bp, Homo sapien
ccgtgtcgtcctgttggtaagggct

SEQ ID NO: 1482345 - DNA, 25 bp, Homo sapien
gctgcatttggtccccaggtcagga

SEQ ID NO: 1482346 - DNA, 25 bp, Homo sapien
ccccatcactgtgccgaaaagcaca

SEQ ID NO: 1482347 - DNA, 25 bp, Homo sapien
agtccccatcactgtgccgaaaagc

SEQ ID NO: 1482348 - DNA, 25 bp, Homo sapien
gtccccatcactgtgccgaaaagca

SEQ ID NO: 1482349 - DNA, 25 bp, Homo sapien
gagtccccatcactgtgccgaaaag

SEQ ID NO: 1482350 - DNA, 25 bp, Homo sapien
gcccagatcactaaagcggcatgac

SEQ ID NO: 1482351 - DNA, 25 bp, Homo sapien
cagatcactaaagcggcatgactca

SEQ ID NO: 1482352 - DNA, 25 bp, Homo sapien
actaaagcggcatgactcagccagc

SEQ ID NO: 1482353 - DNA, 25 bp, Homo sapien
ctccttgcccagatcactaaagcgg

SEQ ID NO: 1482354 - DNA, 25 bp, Homo sapien
ggcttggagagacccggattagaaa

SEQ ID NO: 1482355 - DNA, 25 bp, Homo sapien
ctggcttggagagacccggattaga

SEQ ID NO: 1482356 - DNA, 25 bp, Homo sapien
gttgctggcagagtacagcaaggaa

SEQ ID NO: 1482357 - DNA, 25 bp, Homo sapien
gaactctatgaattttgagttcctt

SEQ ID NO: 1482358 - DNA, 25 bp, Homo sapien
gtgggtgtgataataggagcatatc

SEQ ID NO: 1482359 - DNA, 25 bp, Homo sapien
taataggagcatatcatagttgatg

SEQ ID NO: 1482360 - DNA, 25 bp, Homo sapien
tcatagttgatgagatccgaagtga

SEQ ID NO: 1482361 - DNA, 25 bp, Homo sapien
ttgatgagatccgaagtgatgtcat

SEQ ID NO: 1482362 - DNA, 25 bp, Homo sapien
gcttagtacatcatcagagtcctta

SEQ ID NO: 1482363 - DNA, 25 bp, Homo sapien
tcaaaccaatttagagagctcagaa

SEQ ID NO: 1482364 - DNA, 25 bp, Homo sapien
tttaagcatgggtcacactggactg

SEQ ID NO: 1482365 - DNA, 25 bp, Homo sapien
cacttccgagagatagcttagtaca

SEQ ID NO: 1482366 - DNA, 25 bp, Homo sapien
tgactgattgttgaaggagtaagtt

SEQ ID NO: 1482367 - DNA, 25 bp, Homo sapien
ttctccacacttctgactgattgtt

SEQ ID NO: 1482368 - DNA, 25 bp, Homo sapien
ctgactgattgttgaaggagtaagt

SEQ ID NO: 1482369 - DNA, 25 bp, Homo sapien
gactgattgttgaaggagtaagttt

SEQ ID NO: 1482370 - DNA, 25 bp, Homo sapien
caccgtcaggcagactggtcgtact

SEQ ID NO: 1482371 - DNA, 25 bp, Homo sapien
agactggtcgtactggagttctctt

SEQ ID NO: 1482372 - DNA, 25 bp, Homo sapien
tccaccatgaagagccgtgatgagg

SEQ ID NO: 1482373 - DNA, 25 bp, Homo sapien
atgaggactgtagcaccgtcaggca

SEQ ID NO: 1482374 - DNA, 25 bp, Homo sapien
ctttgcagttagtggcttgactttg

SEQ ID NO: 1482375 - DNA, 25 bp, Homo sapien
taagagatttgccatggacctttgc

SEQ ID NO: 1482376 - DNA, 25 bp, Homo sapien
cctgtgggtcaccttagatctgtaa

SEQ ID NO: 1482377 - DNA, 25 bp, Homo sapien
ggtcaataatagacctgtgggtcac

SEQ ID NO: 1482378 - DNA, 25 bp, Homo sapien
tatagccacactgcacatgaattta

SEQ ID NO: 1482379 - DNA, 25 bp, Homo sapien
tattcagatatacccatcctatggg

SEQ ID NO: 1482380 - DNA, 25 bp, Homo sapien
tttattacaccacaatatagctttg

SEQ ID NO: 1482381 - DNA, 25 bp, Homo sapien
gatcttgcagattatataagctcca

SEQ ID NO: 1482382 - DNA, 25 bp, Homo sapien
ccagttgacatgcaggtatacgtaa

SEQ ID NO: 1482383 - DNA, 25 bp, Homo sapien
ccttttgcaacccagttgacatgca

SEQ ID NO: 1482384 - DNA, 25 bp, Homo sapien
aaatgggagaggaccaaacactact

SEQ ID NO: 1482385 - DNA, 25 bp, Homo sapien
tacgtaaatttggtatttgcctgct

SEQ ID NO: 1482386 - DNA, 25 bp, Homo sapien
ctctgctccagtgataaacttttca

SEQ ID NO: 1482387 - DNA, 25 bp, Homo sapien
gtgatcctgtatacttgctgacttt

SEQ ID NO: 1482388 - DNA, 25 bp, Homo sapien
caaatactgagtaaagctctgctcc

SEQ ID NO: 1482389 - DNA, 25 bp, Homo sapien
ctgctccagtgataaacttttcagt

SEQ ID NO: 1482390 - DNA, 25 bp, Homo sapien
agatcaggagccctagacttgcctg

SEQ ID NO: 1482391 - DNA, 25 bp, Homo sapien
tgaggaaagcctgctggctagagat

SEQ ID NO: 1482392 - DNA, 25 bp, Homo sapien
tggctagagatcaggagccctagac

SEQ ID NO: 1482393 - DNA, 25 bp, Homo sapien
aagcctgctggctagagatcaggag

SEQ ID NO: 1482394 - DNA, 25 bp, Homo sapien
taaacgatccctttgaatgtctcct

SEQ ID NO: 1482395 - DNA, 25 bp, Homo sapien
tgtatgcagattgctctcctctgtg

SEQ ID NO: 1482396 - DNA, 25 bp, Homo sapien
cagacctcggtcacttggctgacca

SEQ ID NO: 1482397 - DNA, 25 bp, Homo sapien
tagcaatgccgaatagcagacctcg

SEQ ID NO: 1482398 - DNA, 25 bp, Homo sapien
tggacctgttcactaccagtgcgaa

SEQ ID NO: 1482399 - DNA, 25 bp, Homo sapien
aattcggcgttttggatgggatgac

SEQ ID NO: 1482400 - DNA, 25 bp, Homo sapien
taccagtgcgaattcggcgttttgg

SEQ ID NO: 1482401 - DNA, 25 bp, Homo sapien
cgttttggatgggatgacagaacag

SEQ ID NO: 1482402 - DNA, 25 bp, Homo sapien
ggctttttcctaccttccatatcca

SEQ ID NO: 1482403 - DNA, 25 bp, Homo sapien
ctttttcctaccttccatatccatt

SEQ ID NO: 1482404 - DNA, 25 bp, Homo sapien
gctttttcctaccttccatatccat

SEQ ID NO: 1482405 - DNA, 25 bp, Homo sapien
tatggcatcctatggagaacgttaa

SEQ ID NO: 1482406 - DNA, 25 bp, Homo sapien
caatcacagtatcaagagatcctgg

SEQ ID NO: 1482407 - DNA, 25 bp, Homo sapien
aaagcatggcattattgagtaggac

SEQ ID NO: 1482408 - DNA, 25 bp, Homo sapien
gagaacgttaatgttcaatcacagt

SEQ ID NO: 1482409 - DNA, 25 bp, Homo sapien
agcaggaatccatcccagcggcgtg

SEQ ID NO: 1482410 - DNA, 25 bp, Homo sapien
catccagtactctgggccagtatcc

SEQ ID NO: 1482411 - DNA, 25 bp, Homo sapien
catttcataagcaccacatccagta

SEQ ID NO: 1482412 - DNA, 25 bp, Homo sapien
cagcggcgtgctttgtttccacaaa

SEQ ID NO: 1482413 - DNA, 25 bp, Homo sapien
ttcccatcctgccactgatcagcca

SEQ ID NO: 1482414 - DNA, 25 bp, Homo sapien
gccaagccactttcatggtattcca

SEQ ID NO: 1482415 - DNA, 25 bp, Homo sapien
gatcagccaagccactttcatggta

SEQ ID NO: 1482416 - DNA, 25 bp, Homo sapien
tgccactgatcagccaagccacttt

SEQ ID NO: 1482417 - DNA, 25 bp, Homo sapien
cggacagccatgcagggtgggcact

SEQ ID NO: 1482418 - DNA, 25 bp, Homo sapien
gaagaaaatgtgaaccctttgctct

SEQ ID NO: 1482419 - DNA, 25 bp, Homo sapien
catccgattttataaactgccgaag

SEQ ID NO: 1482420 - DNA, 25 bp, Homo sapien
cactttcctgcatccgattttataa

SEQ ID NO: 1482421 - DNA, 25 bp, Homo sapien
gcctggctgccccttgacttattgt

SEQ ID NO: 1482422 - DNA, 25 bp, Homo sapien
tggctgccccttgacttattgttct

SEQ ID NO: 1482423 - DNA, 25 bp, Homo sapien
ccacgcctggctgccccttgactta

SEQ ID NO: 1482424 - DNA, 25 bp, Homo sapien
ggctgccccttgacttattgttctt

SEQ ID NO: 1482425 - DNA, 25 bp, Homo sapien
ggagtgggccttccaaatcataatc

SEQ ID NO: 1482426 - DNA, 25 bp, Homo sapien
catagtagctggagtgggccttcca

SEQ ID NO: 1482427 - DNA, 25 bp, Homo sapien
atcctctaatagcttcccatcccac

SEQ ID NO: 1482428 - DNA, 25 bp, Homo sapien
atcataatccaactgcaccaagtcc

SEQ ID NO: 1482429 - DNA, 25 bp, Homo sapien
caggtgtcttcatttgcgtcctcac

SEQ ID NO: 1482430 - DNA, 25 bp, Homo sapien
gtggaatagctgcaagcagtctgga

SEQ ID NO: 1482431 - DNA, 25 bp, Homo sapien
ggaatagctgcaagcagtctggaag

SEQ ID NO: 1482432 - DNA, 25 bp, Homo sapien
gtgtcttcatttgcgtcctcactgg

SEQ ID NO: 1482433 - DNA, 25 bp, Homo sapien
tgtgtctcaggacaaaaggaggctc

SEQ ID NO: 1482434 - DNA, 25 bp, Homo sapien
cttaattgtatatctggagccagtg

SEQ ID NO: 1482435 - DNA, 25 bp, Homo sapien
tcatagtaataaagtgtcgtgggct

SEQ ID NO: 1482436 - DNA, 25 bp, Homo sapien
cagggatttcatcagttgcatcaca

SEQ ID NO: 1482437 - DNA, 25 bp, Homo sapien
tcggaaatactgctcgggcagcgag

SEQ ID NO: 1482438 - DNA, 25 bp, Homo sapien
tcttccagatgccttacacaaatgg

SEQ ID NO: 1482439 - DNA, 25 bp, Homo sapien
tgtatacaaatttggtaagagctct

SEQ ID NO: 1482440 - DNA, 25 bp, Homo sapien
taaaggaagctctcatatcttccag

SEQ ID NO: 1482441 - DNA, 25 bp, Homo sapien
aagccacgtggatttgtcatcagag

SEQ ID NO: 1482442 - DNA, 25 bp, Homo sapien
gagtgcctggtgaaagctgctcctt

SEQ ID NO: 1482443 - DNA, 25 bp, Homo sapien
tcatcagagcgttcaagtgacacgg

SEQ ID NO: 1482444 - DNA, 25 bp, Homo sapien
tgcttccagccataaggttcagaca

SEQ ID NO: 1482445 - DNA, 25 bp, Homo sapien
gtctggattcgctttcctggtgccc

SEQ ID NO: 1482446 - DNA, 25 bp, Homo sapien
gatattccgcattggctacgtgaag

SEQ ID NO: 1482447 - DNA, 25 bp, Homo sapien
ggttcacctttagacagcactccag

SEQ ID NO: 1482448 - DNA, 25 bp, Homo sapien
ttgagattccatcccaaaatccagg

SEQ ID NO: 1482449 - DNA, 25 bp, Homo sapien
cctcctgtggacctatcctgtgcga

SEQ ID NO: 1482450 - DNA, 25 bp, Homo sapien
ctgtggacctatcctgtgcgaggac

SEQ ID NO: 1482451 - DNA, 25 bp, Homo sapien
tcctgtggacctatcctgtgcgagg

SEQ ID NO: 1482452 - DNA, 25 bp, Homo sapien
tcctcctgtggacctatcctgtgcg

SEQ ID NO: 1482453 - DNA, 25 bp, Homo sapien
caacagcaaatgccaggaacagcat

SEQ ID NO: 1482454 - DNA, 25 bp, Homo sapien
tcctgggcaacagcaaatgccagga

SEQ ID NO: 1482455 - DNA, 25 bp, Homo sapien
ctgggcaacagcaaatgccaggaac

SEQ ID NO: 1482456 - DNA, 25 bp, Homo sapien
ctctctgtagcttcctgggcaacag

SEQ ID NO: 1482457 - DNA, 25 bp, Homo sapien
ctgatctaatggcaaaatgcagcat

SEQ ID NO: 1482458 - DNA, 25 bp, Homo sapien
cctggagcctgatctaatggcaaaa

SEQ ID NO: 1482459 - DNA, 25 bp, Homo sapien
cacagagcacgatcaagaccctgga

SEQ ID NO: 1482460 - DNA, 25 bp, Homo sapien
gacagcacacagagcacgatcaaga

SEQ ID NO: 1482461 - DNA, 25 bp, Homo sapien
catgggagtagagtttccaaaggac

SEQ ID NO: 1482462 - DNA, 25 bp, Homo sapien
tgaaaaccgagcaagaaatcatggg

SEQ ID NO: 1482463 - DNA, 25 bp, Homo sapien
gcatattgtccgttcacagcatgaa

SEQ ID NO: 1482464 - DNA, 25 bp, Homo sapien
gcccttagagggcagaaacgtgctg

SEQ ID NO: 1482465 - DNA, 25 bp, Homo sapien
gaaaggtcaatttagcagttattcc

SEQ ID NO: 1482466 - DNA, 25 bp, Homo sapien
cagaactttcgagtctacaggaaca

SEQ ID NO: 1482467 - DNA, 25 bp, Homo sapien
cagccaagtaggatactaacaaggc

SEQ ID NO: 1482468 - DNA, 25 bp, Homo sapien
ttattgacacatttggtctgggcaa

SEQ ID NO: 1482469 - DNA, 25 bp, Homo sapien
ggctccaaggattaaggtcccagaa

SEQ ID NO: 1482470 - DNA, 25 bp, Homo sapien
tctgagaactgttgtcaaaatttct

SEQ ID NO: 1482471 - DNA, 25 bp, Homo sapien
gagcttttctggagggtccttagtg

SEQ ID NO: 1482472 - DNA, 25 bp, Homo sapien
gcttggagtagaatcatggggcctt

SEQ ID NO: 1482473 - DNA, 25 bp, Homo sapien
gggcctttgctagaaacactagcag

SEQ ID NO: 1482474 - DNA, 25 bp, Homo sapien
tcaggacaggtcaccacacaggatg

SEQ ID NO: 1482475 - DNA, 25 bp, Homo sapien
atcaggacaggtcaccacacaggat

SEQ ID NO: 1482476 - DNA, 25 bp, Homo sapien
gactgagatcaggacaggtcaccac

SEQ ID NO: 1482477 - DNA, 25 bp, Homo sapien
aggacaggtcaccacacaggatggt

SEQ ID NO: 1482478 - DNA, 25 bp, Homo sapien
ccactgtagggttcacaaagctgaa

SEQ ID NO: 1482479 - DNA, 25 bp, Homo sapien
gatcagctgggtctgatagttgtct

SEQ ID NO: 1482480 - DNA, 25 bp, Homo sapien
tctgatagttgtctccaatgtaggg

SEQ ID NO: 1482481 - DNA, 25 bp, Homo sapien
cactgtagggttcacaaagctgaag

SEQ ID NO: 1482482 - DNA, 25 bp, Homo sapien
actgttgtaggagcagccccaggta

SEQ ID NO: 1482483 - DNA, 25 bp, Homo sapien
aaatgggatcccgaagcaacttcac

SEQ ID NO: 1482484 - DNA, 25 bp, Homo sapien
tggagacctccacgtaaatgggatc

SEQ ID NO: 1482485 - DNA, 25 bp, Homo sapien
accactgggtagtcaccaacaccgt

SEQ ID NO: 1482486 - DNA, 25 bp, Homo sapien
ctttggcaatctgaagttccagagt

SEQ ID NO: 1482487 - DNA, 25 bp, Homo sapien
aaacctggacattgattgggagaga

SEQ ID NO: 1482488 - DNA, 25 bp, Homo sapien
tgggagagagttgctacttactgag

SEQ ID NO: 1482489 - DNA, 25 bp, Homo sapien
cctggacattgattgggagagagtt

SEQ ID NO: 1482490 - DNA, 25 bp, Homo sapien
gttgctacttactgagtagctgcag

SEQ ID NO: 1482491 - DNA, 25 bp, Homo sapien
tcatatactgctcggtctccagtga

SEQ ID NO: 1482492 - DNA, 25 bp, Homo sapien
ccctagttgccaccagttcattttc

SEQ ID NO: 1482493 - DNA, 25 bp, Homo sapien
aagatgctgtcacgagtgacagagc

SEQ ID NO: 1482494 - DNA, 25 bp, Homo sapien
agagccacggctcccatttttcaca

SEQ ID NO: 1482495 - DNA, 25 bp, Homo sapien
tgtcattcctaagggccaagcgcac

SEQ ID NO: 1482496 - DNA, 25 bp, Homo sapien
gcaatagagaaatggccctctcggg

SEQ ID NO: 1482497 - DNA, 25 bp, Homo sapien
cacgttccgagacacagcaatagag

SEQ ID NO: 1482498 - DNA, 25 bp, Homo sapien
tgttgccatcacagggttacacgca

SEQ ID NO: 1482499 - DNA, 25 bp, Homo sapien
cagtgtttccatagtagcaggaatt

SEQ ID NO: 1482500 - DNA, 25 bp, Homo sapien
gaaggtgcacatggcagtctgtccc

SEQ ID NO: 1482501 - DNA, 25 bp, Homo sapien
cagtctcctcgagagatgggtgaag

SEQ ID NO: 1482502 - DNA, 25 bp, Homo sapien
taacaacagcctagcccttcacagt

SEQ ID NO: 1482503 - DNA, 25 bp, Homo sapien
cacaccagtcagtatctggagcatc

SEQ ID NO: 1482504 - DNA, 25 bp, Homo sapien
caccagtcagtatctggagcatctc

SEQ ID NO: 1482505 - DNA, 25 bp, Homo sapien
ccagtcagtatctggagcatctcgg

SEQ ID NO: 1482506 - DNA, 25 bp, Homo sapien
accagtcagtatctggagcatctcg

SEQ ID NO: 1482507 - DNA, 25 bp, Homo sapien
tttagaggcgtttctcaagccttag

SEQ ID NO: 1482508 - DNA, 25 bp, Homo sapien
tatgtagatgattgaaataggtgtc

SEQ ID NO: 1482509 - DNA, 25 bp, Homo sapien
ctttggattcctgtagatatgtaga

SEQ ID NO: 1482510 - DNA, 25 bp, Homo sapien
catgttgtagattaagtcttgggag

SEQ ID NO: 1482511 - DNA, 25 bp, Homo sapien
tccagcttgtgggatggaagacctg

SEQ ID NO: 1482512 - DNA, 25 bp, Homo sapien
tagtctcagtgcacatctagctctg

SEQ ID NO: 1482513 - DNA, 25 bp, Homo sapien
tctgttctgactttgaggacgggct

SEQ ID NO: 1482514 - DNA, 25 bp, Homo sapien
gacgggctctcagtcaggcgagact

SEQ ID NO: 1482515 - DNA, 25 bp, Homo sapien
gatccataggacacttgagcagctt

SEQ ID NO: 1482516 - DNA, 25 bp, Homo sapien
accttgtgttcagccgcgcctgctc

SEQ ID NO: 1482517 - DNA, 25 bp, Homo sapien
ctccaactggcatgatgtagtggga

SEQ ID NO: 1482518 - DNA, 25 bp, Homo sapien
gctccttcaactccaactggcatga

SEQ ID NO: 1482519 - DNA, 25 bp, Homo sapien
ataggttgcctccaacaccacggag

SEQ ID NO: 1482520 - DNA, 25 bp, Homo sapien
gagctgcctggaccttttcttatcc

SEQ ID NO: 1482521 - DNA, 25 bp, Homo sapien
ccaggtgccacagtcggagtcattc

SEQ ID NO: 1482522 - DNA, 25 bp, Homo sapien
cagtgacatagcagctgctataggt

SEQ ID NO: 1482523 - DNA, 25 bp, Homo sapien
tattagtacaggaggagacgttgcc

SEQ ID NO: 1482524 - DNA, 25 bp, Homo sapien
ctcaggcttatgctggccactcaca

SEQ ID NO: 1482525 - DNA, 25 bp, Homo sapien
tacagcaaactggaagctccacggc

SEQ ID NO: 1482526 - DNA, 25 bp, Homo sapien
gagcacactggaataatctggtgcc

SEQ ID NO: 1482527 - DNA, 25 bp, Homo sapien
gctaccaggagttcctgccggctgc

SEQ ID NO: 1482528 - DNA, 25 bp, Homo sapien
ccaggagttcctgccggctgcagac

SEQ ID NO: 1482529 - DNA, 25 bp, Homo sapien
aatgctaccaggagttcctgccggc

SEQ ID NO: 1482530 - DNA, 25 bp, Homo sapien
aggagttcctgccggctgcagactc

SEQ ID NO: 1482531 - DNA, 25 bp, Homo sapien
tgtgtccaaggtacaagacctgtct

SEQ ID NO: 1482532 - DNA, 25 bp, Homo sapien
gaagtgtctcctgtgctgactgcac

SEQ ID NO: 1482533 - DNA, 25 bp, Homo sapien
tgcgatggcttccattactgggtct

SEQ ID NO: 1482534 - DNA, 25 bp, Homo sapien
gtaattcagagtcagttgcgatggc

SEQ ID NO: 1482535 - DNA, 25 bp, Homo sapien
ggctattactcacaagtctccagaa

SEQ ID NO: 1482536 - DNA, 25 bp, Homo sapien
aaaaggcctctcactaggagtctgc

SEQ ID NO: 1482537 - DNA, 25 bp, Homo sapien
gaagcctgccaaccactatcttgta

SEQ ID NO: 1482538 - DNA, 25 bp, Homo sapien
caaaatataaagtagggtgcctcca

SEQ ID NO: 1482539 - DNA, 25 bp, Homo sapien
cccccaagtgatcaggcccattgct

SEQ ID NO: 1482540 - DNA, 25 bp, Homo sapien
cccaagtgatcaggcccattgctca

SEQ ID NO: 1482541 - DNA, 25 bp, Homo sapien
ttccccccaagtgatcaggcccatt

SEQ ID NO: 1482542 - DNA, 25 bp, Homo sapien
tccccccaagtgatcaggcccattg

SEQ ID NO: 1482543 - DNA, 25 bp, Homo sapien
tgctgccaatcactgaagaaaccat

SEQ ID NO: 1482544 - DNA, 25 bp, Homo sapien
acctgtgctgccaatcactgaagaa

SEQ ID NO: 1482545 - DNA, 25 bp, Homo sapien
gagatgtgtatgacacacctgtgct

SEQ ID NO: 1482546 - DNA, 25 bp, Homo sapien
tctcaaacagcgaaactttgcagct

SEQ ID NO: 1482547 - DNA, 25 bp, Homo sapien
atgtacttactaagggctttgaagg

SEQ ID NO: 1482548 - DNA, 25 bp, Homo sapien
aatgtacttactaagggctttgaag

SEQ ID NO: 1482549 - DNA, 25 bp, Homo sapien
aacagttttggggtatgggcctgat

SEQ ID NO: 1482550 - DNA, 25 bp, Homo sapien
ccaacagttttggggtatgggcctg

SEQ ID NO: 1482551 - DNA, 25 bp, Homo sapien
tagtacgggaaggatataaccaaca

SEQ ID NO: 1482552 - DNA, 25 bp, Homo sapien
tgggcctgatagcttatttagctga

SEQ ID NO: 1482553 - DNA, 25 bp, Homo sapien
ctaccaagtaattgttttgtcagac

SEQ ID NO: 1482554 - DNA, 25 bp, Homo sapien
tactctaccaagtaattgttttgtc

SEQ ID NO: 1482555 - DNA, 25 bp, Homo sapien
tctgttgtttactctaccaagtaat

SEQ ID NO: 1482556 - DNA, 25 bp, Homo sapien
ctctaccaagtaattgttttgtcag

SEQ ID NO: 1482557 - DNA, 25 bp, Homo sapien
agttttatgcaattgctgggctctg

SEQ ID NO: 1482558 - DNA, 25 bp, Homo sapien
tttaagttttatgcaattgctgggc

SEQ ID NO: 1482559 - DNA, 25 bp, Homo sapien
gagttgaacctctgattgtaaagtt

SEQ ID NO: 1482560 - DNA, 25 bp, Homo sapien
gaagaggagttgaacctctgattgt

SEQ ID NO: 1482561 - DNA, 25 bp, Homo sapien
cgggagacttggctatggttctctg

SEQ ID NO: 1482562 - DNA, 25 bp, Homo sapien
ccactattttgccacacaggtgggt

SEQ ID NO: 1482563 - DNA, 25 bp, Homo sapien
ctattttgccacacaggtgggtgtg

SEQ ID NO: 1482564 - DNA, 25 bp, Homo sapien
cactattttgccacacaggtgggtg

SEQ ID NO: 1482565 - DNA, 25 bp, Homo sapien
tccaggtttaagccggatgctttag

SEQ ID NO: 1482566 - DNA, 25 bp, Homo sapien
caggtttaagccggatgctttaggt

SEQ ID NO: 1482567 - DNA, 25 bp, Homo sapien
cttccaggtttaagccggatgcttt

SEQ ID NO: 1482568 - DNA, 25 bp, Homo sapien
tgtgatcaggtcgtgatgaaatctt

SEQ ID NO: 1482569 - DNA, 25 bp, Homo sapien
tattgctaacaatttatcactgctg

SEQ ID NO: 1482570 - DNA, 25 bp, Homo sapien
ggtgtggttgagtaaagcgttttga

SEQ ID NO: 1482571 - DNA, 25 bp, Homo sapien
aatatcagtatagcttaaactttcg

SEQ ID NO: 1482572 - DNA, 25 bp, Homo sapien
tcgtttattgctaacaatttatcac

SEQ ID NO: 1482573 - DNA, 25 bp, Homo sapien
gttatgcagacgcatccagacattt

SEQ ID NO: 1482574 - DNA, 25 bp, Homo sapien
tggggttatgcagacgcatccagac

SEQ ID NO: 1482575 - DNA, 25 bp, Homo sapien
gggttatgcagacgcatccagacat

SEQ ID NO: 1482576 - DNA, 25 bp, Homo sapien
tatgcagacgcatccagacattttc

SEQ ID NO: 1482577 - DNA, 25 bp, Homo sapien
ggttcctaaggccaacggatgacta

SEQ ID NO: 1482578 - DNA, 25 bp, Homo sapien
ctaaggccaacggatgactaatcct

SEQ ID NO: 1482579 - DNA, 25 bp, Homo sapien
tcctaaggccaacggatgactaatc

SEQ ID NO: 1482580 - DNA, 25 bp, Homo sapien
gttcctaaggccaacggatgactaa

SEQ ID NO: 1482581 - DNA, 25 bp, Homo sapien
cgttgttaggcgtaggggcacgagt

SEQ ID NO: 1482582 - DNA, 25 bp, Homo sapien
agaaagccacgttgttaggcgtagg

SEQ ID NO: 1482583 - DNA, 25 bp, Homo sapien
tgagaaagccacgttgttaggcgta

SEQ ID NO: 1482584 - DNA, 25 bp, Homo sapien
cacgttgttaggcgtaggggcacga

SEQ ID NO: 1482585 - DNA, 25 bp, Homo sapien
tggcagcgctacagattttagctct

SEQ ID NO: 1482586 - DNA, 25 bp, Homo sapien
cctggaagatacgtgcttcggatca

SEQ ID NO: 1482587 - DNA, 25 bp, Homo sapien
aactcccctggaagatacgtgcttc

SEQ ID NO: 1482588 - DNA, 25 bp, Homo sapien
ctttggcagcgctacagattttagc

SEQ ID NO: 1482589 - DNA, 25 bp, Homo sapien
tctttaggatctatcgctatagagg

SEQ ID NO: 1482590 - DNA, 25 bp, Homo sapien
tctgataggtatagaggttcttgcc

SEQ ID NO: 1482591 - DNA, 25 bp, Homo sapien
tctatataaaagaacctctgatagg

SEQ ID NO: 1482592 - DNA, 25 bp, Homo sapien
gatctatcgctatagaggttctata

SEQ ID NO: 1482593 - DNA, 25 bp, Homo sapien
tccagaggtatctaatgataggaaa

SEQ ID NO: 1482594 - DNA, 25 bp, Homo sapien
gtcagagtcctcattgttcaggctt

SEQ ID NO: 1482595 - DNA, 25 bp, Homo sapien
ccaacatggttattctatggctgtc

SEQ ID NO: 1482596 - DNA, 25 bp, Homo sapien
taatgataggaaattgtcagagtcc

SEQ ID NO: 1482597 - DNA, 25 bp, Homo sapien
ttgcttgacactgcatgcatgtggc

SEQ ID NO: 1482598 - DNA, 25 bp, Homo sapien
gagtcattccctttgccaatggctg

SEQ ID NO: 1482599 - DNA, 25 bp, Homo sapien
cattaaacccagctcatggttgatg

SEQ ID NO: 1482600 - DNA, 25 bp, Homo sapien
tggttgatgcacagctgagtcattc

SEQ ID NO: 1482601 - DNA, 25 bp, Homo sapien
ctaggcatccaagtatggatgttgt

SEQ ID NO: 1482602 - DNA, 25 bp, Homo sapien
taggcatccaagtatggatgttgtg

SEQ ID NO: 1482603 - DNA, 25 bp, Homo sapien
aggcatccaagtatggatgttgtgg

SEQ ID NO: 1482604 - DNA, 25 bp, Homo sapien
tggtcatagacttggctcttgtgcg

SEQ ID NO: 1482605 - DNA, 25 bp, Homo sapien
gatctgactgtaggagatgcacacg

SEQ ID NO: 1482606 - DNA, 25 bp, Homo sapien
cactgaggaggtaaccacatggtgg

SEQ ID NO: 1482607 - DNA, 25 bp, Homo sapien
gatgcacacgtttctatacctctgg

SEQ ID NO: 1482608 - DNA, 25 bp, Homo sapien
gacaaatgcggttcctctctttcat

SEQ ID NO: 1482609 - DNA, 25 bp, Homo sapien
ttccagacaaatgcggttcctctct

SEQ ID NO: 1482610 - DNA, 25 bp, Homo sapien
cttccagacaaatgcggttcctctc

SEQ ID NO: 1482611 - DNA, 25 bp, Homo sapien
ccagacaaatgcggttcctctcttt

SEQ ID NO: 1482612 - DNA, 25 bp, Homo sapien
tgcttgatgctcttgatgccctaca

SEQ ID NO: 1482613 - DNA, 25 bp, Homo sapien
tggcaccaccttcgccttggggcaa

SEQ ID NO: 1482614 - DNA, 25 bp, Homo sapien
gatggcctgctgcattgttttctct

SEQ ID NO: 1482615 - DNA, 25 bp, Homo sapien
tacaggtggacctgcggcaatggca

SEQ ID NO: 1482616 - DNA, 25 bp, Homo sapien
caggactccttgaagcctcagaata

SEQ ID NO: 1482617 - DNA, 25 bp, Homo sapien
ttgaagcctcagaatacctgccaga

SEQ ID NO: 1482618 - DNA, 25 bp, Homo sapien
tccttgaagcctcagaatacctgcc

SEQ ID NO: 1482619 - DNA, 25 bp, Homo sapien
actccttgaagcctcagaatacctg

SEQ ID NO: 1482620 - DNA, 25 bp, Homo sapien
cattcgtgcagttctagagcttctt

SEQ ID NO: 1482621 - DNA, 25 bp, Homo sapien
gcttcacattcgtgcagttctagag

SEQ ID NO: 1482622 - DNA, 25 bp, Homo sapien
cacattcgtgcagttctagagcttc

SEQ ID NO: 1482623 - DNA, 25 bp, Homo sapien
ctgagcttcacattcgtgcagttct

SEQ ID NO: 1482624 - DNA, 25 bp, Homo sapien
aagagggcatcatctatccttgtaa

SEQ ID NO: 1482625 - DNA, 25 bp, Homo sapien
tgtgggaacatgctcaacagtgcag

SEQ ID NO: 1482626 - DNA, 25 bp, Homo sapien
ttgtaattgatgtctttgcaccatt

SEQ ID NO: 1482627 - DNA, 25 bp, Homo sapien
tcttttcccatcaatactttgtgtg

SEQ ID NO: 1482628 - DNA, 25 bp, Homo sapien
taattaactgtcatgtattggtgga

SEQ ID NO: 1482629 - DNA, 25 bp, Homo sapien
ttaactgtcatgtattggtggaaac

SEQ ID NO: 1482630 - DNA, 25 bp, Homo sapien
aattaactgtcatgtattggtggaa

SEQ ID NO: 1482631 - DNA, 25 bp, Homo sapien
tgtaattaactgtcatgtattggtg

SEQ ID NO: 1482632 - DNA, 25 bp, Homo sapien
cttcccttgtctttacttagcattt

SEQ ID NO: 1482633 - DNA, 25 bp, Homo sapien
tcttcccttgtctttacttagcatt

SEQ ID NO: 1482634 - DNA, 25 bp, Homo sapien
cttgtcttcggagaggacattcagt

SEQ ID NO: 1482635 - DNA, 25 bp, Homo sapien
tcttcggagaggacattcagtcact

SEQ ID NO: 1482636 - DNA, 25 bp, Homo sapien
gtcttcggagaggacattcagtcac

SEQ ID NO: 1482637 - DNA, 25 bp, Homo sapien
tgtcttcggagaggacattcagtca

SEQ ID NO: 1482638 - DNA, 25 bp, Homo sapien
tactgattaagagcccttagtgccc

SEQ ID NO: 1482639 - DNA, 25 bp, Homo sapien
ctatggtcagaaacagatacctgtc

SEQ ID NO: 1482640 - DNA, 25 bp, Homo sapien
caattgcaggcctgactgaaataca

SEQ ID NO: 1482641 - DNA, 25 bp, Homo sapien
caacactatgaggagcaacccatga

SEQ ID NO: 1482642 - DNA, 25 bp, Homo sapien
ttgccaggacagcagcaaccaccat

SEQ ID NO: 1482643 - DNA, 25 bp, Homo sapien
ctgtgtttgccaggacagcagcaac

SEQ ID NO: 1482644 - DNA, 25 bp, Homo sapien
tgtgctgcttctcctagaggggctg

SEQ ID NO: 1482645 - DNA, 25 bp, Homo sapien
cttgtgctgcttctcctagaggggc

SEQ ID NO: 1482646 - DNA, 25 bp, Homo sapien
tcttggagcctatccaaaatctggg

SEQ ID NO: 1482647 - DNA, 25 bp, Homo sapien
ggagcctatccaaaatctgggtctc

SEQ ID NO: 1482648 - DNA, 25 bp, Homo sapien
tggagcctatccaaaatctgggtct

SEQ ID NO: 1482649 - DNA, 25 bp, Homo sapien
cttcttggagcctatccaaaatctg

SEQ ID NO: 1482650 - DNA, 25 bp, Homo sapien
gggagcaaacctgctccttggacag

SEQ ID NO: 1482651 - DNA, 25 bp, Homo sapien
ccagttttggtcctgccggggtcat

SEQ ID NO: 1482652 - DNA, 25 bp, Homo sapien
agaggaattgggagctgggagcaaa

SEQ ID NO: 1482653 - DNA, 25 bp, Homo sapien
ccttggacagcactcacagctggtc

SEQ ID NO: 1482654 - DNA, 25 bp, Homo sapien
aatctacttctcctaaatcagacac

SEQ ID NO: 1482655 - DNA, 25 bp, Homo sapien
tttttgccctgagtatggatcacac

SEQ ID NO: 1482656 - DNA, 25 bp, Homo sapien
actggacatttttgattatgcattg

SEQ ID NO: 1482657 - DNA, 25 bp, Homo sapien
tttaatgattcattgttgtcatact

SEQ ID NO: 1482658 - DNA, 25 bp, Homo sapien
catcagtttcacttgccctaacact

SEQ ID NO: 1482659 - DNA, 25 bp, Homo sapien
tatgccactctaaattgagtgtgtc

SEQ ID NO: 1482660 - DNA, 25 bp, Homo sapien
taggcatgggtattttatgccactc

SEQ ID NO: 1482661 - DNA, 25 bp, Homo sapien
gccctaacactaggcatgggtattt

SEQ ID NO: 1482662 - DNA, 25 bp, Homo sapien
tctgtagacgtttatccttgtttat

SEQ ID NO: 1482663 - DNA, 25 bp, Homo sapien
gaaatgtgcgttcagttctttgctg

SEQ ID NO: 1482664 - DNA, 25 bp, Homo sapien
ctttgctgataactgctgagtcaga

SEQ ID NO: 1482665 - DNA, 25 bp, Homo sapien
gagccaatagcatcctggtggagat

SEQ ID NO: 1482666 - DNA, 25 bp, Homo sapien
caactttgcgttggagttcataaat

SEQ ID NO: 1482667 - DNA, 25 bp, Homo sapien
ttagctttccaactttgcgttggag

SEQ ID NO: 1482668 - DNA, 25 bp, Homo sapien
agcactattccttagctttccaact

SEQ ID NO: 1482669 - DNA, 25 bp, Homo sapien
tattccttagctttccaactttgcg

SEQ ID NO: 1482670 - DNA, 25 bp, Homo sapien
gtatttccgcagattccacacttta

SEQ ID NO: 1482671 - DNA, 25 bp, Homo sapien
tcaggcaataattccagagtaaatc

SEQ ID NO: 1482672 - DNA, 25 bp, Homo sapien
tttccccgttccatagaaacacaga

SEQ ID NO: 1482673 - DNA, 25 bp, Homo sapien
gaaacacagacacgtatttccgcag

SEQ ID NO: 1482674 - DNA, 25 bp, Homo sapien
ttctagccatgatcgttatctcttg

SEQ ID NO: 1482675 - DNA, 25 bp, Homo sapien
tctgcatgtcttttactgtctttct

SEQ ID NO: 1482676 - DNA, 25 bp, Homo sapien
tgtctttctagccatgatcgttatc

SEQ ID NO: 1482677 - DNA, 25 bp, Homo sapien
tattcccttccacatattcaaccat

SEQ ID NO: 1482678 - DNA, 25 bp, Homo sapien
gaacaggctttgttgagtttttctg

SEQ ID NO: 1482679 - DNA, 25 bp, Homo sapien
tgggttctgctcagctagagtgatc

SEQ ID NO: 1482680 - DNA, 25 bp, Homo sapien
ctagagtgatcttcaggtggcaggt

SEQ ID NO: 1482681 - DNA, 25 bp, Homo sapien
ggtggcaggtgatgtgttccatatt

SEQ ID NO: 1482682 - DNA, 25 bp, Homo sapien
caattttcagtagttatgccttgag

SEQ ID NO: 1482683 - DNA, 25 bp, Homo sapien
tagaaatagccattacctttgcagc

SEQ ID NO: 1482684 - DNA, 25 bp, Homo sapien
tgccatgacacctagattaaattct

SEQ ID NO: 1482685 - DNA, 25 bp, Homo sapien
gccttgagtgacagaataactaaca

SEQ ID NO: 1482686 - DNA, 25 bp, Homo sapien
tactatctatttggattctgactgc

SEQ ID NO: 1482687 - DNA, 25 bp, Homo sapien
aaagtcttgccagagtggcagagta

SEQ ID NO: 1482688 - DNA, 25 bp, Homo sapien
ggcagagtatatgggagtgtgtgca

SEQ ID NO: 1482689 - DNA, 25 bp, Homo sapien
tgctggcaggaggagaaccaagcca

SEQ ID NO: 1482690 - DNA, 25 bp, Homo sapien
ttcatgaatttgcacttctccttgc

SEQ ID NO: 1482691 - DNA, 25 bp, Homo sapien
tgaatttgcacttctccttgcaggg

SEQ ID NO: 1482692 - DNA, 25 bp, Homo sapien
ctccatcatttccactttaggatat

SEQ ID NO: 1482693 - DNA, 25 bp, Homo sapien
cttctccatcatttccactttagga

SEQ ID NO: 1482694 - DNA, 25 bp, Homo sapien
tacagtgagggtgatgaaaagtctg

SEQ ID NO: 1482695 - DNA, 25 bp, Homo sapien
tggagcaccaaacaaccagacagaa

SEQ ID NO: 1482696 - DNA, 25 bp, Homo sapien
gatggagcaccaccaattccaggct

SEQ ID NO: 1482697 - DNA, 25 bp, Homo sapien
aaagagagttggagattggcagcca

SEQ ID NO: 1482698 - DNA, 25 bp, Homo sapien
ctaaggtgggaggttctggctgtat

SEQ ID NO: 1482699 - DNA, 25 bp, Homo sapien
taaggtgggaggttctggctgtatg

SEQ ID NO: 1482700 - DNA, 25 bp, Homo sapien
gctgcatgacaatccaacttccttc

SEQ ID NO: 1482701 - DNA, 25 bp, Homo sapien
tcttgcaaaggttttggagggtcat

SEQ ID NO: 1482702 - DNA, 25 bp, Homo sapien
tgactgatcatcgtaaaatcgatgc

SEQ ID NO: 1482703 - DNA, 25 bp, Homo sapien
ctcctaaggatgaagtaccatttct

SEQ ID NO: 1482704 - DNA, 25 bp, Homo sapien
tatcactggttttgattacctccct

SEQ ID NO: 1482705 - DNA, 25 bp, Homo sapien
tagagtgcagatgaatagtgagtgc

SEQ ID NO: 1482706 - DNA, 25 bp, Homo sapien
gctaacatctagtacacgcaacagg

SEQ ID NO: 1482707 - DNA, 25 bp, Homo sapien
cctgcctgacagaagaagactcggt

SEQ ID NO: 1482708 - DNA, 25 bp, Homo sapien
tccttgtgggaaataatccaatatt

SEQ ID NO: 1482709 - DNA, 25 bp, Homo sapien
taaagagtccttgtgggaaataatc

SEQ ID NO: 1482710 - DNA, 25 bp, Homo sapien
gagtccttgtgggaaataatccaat

SEQ ID NO: 1482711 - DNA, 25 bp, Homo sapien
aagagtccttgtgggaaataatcca

SEQ ID NO: 1482712 - DNA, 25 bp, Homo sapien
gaccgtttcacgctgtactgtacag

SEQ ID NO: 1482713 - DNA, 25 bp, Homo sapien
cttcggattagtcatgaccgtttca

SEQ ID NO: 1482714 - DNA, 25 bp, Homo sapien
tagtcatgaccgtttcacgctgtac

SEQ ID NO: 1482715 - DNA, 25 bp, Homo sapien
gctgtactgtacagttgagccacat

SEQ ID NO: 1482716 - DNA, 25 bp, Homo sapien
aacagttgaagaataatctcagaaa

SEQ ID NO: 1482717 - DNA, 25 bp, Homo sapien
gatgaaatgcgttgtcaatcctttt

SEQ ID NO: 1482718 - DNA, 25 bp, Homo sapien
ttgaagaataatctcagaaactgac

SEQ ID NO: 1482719 - DNA, 25 bp, Homo sapien
gaaactgacaggacatgatgaaatg

SEQ ID NO: 1482720 - DNA, 25 bp, Homo sapien
catccttcatctgtagctgatgatt

SEQ ID NO: 1482721 - DNA, 25 bp, Homo sapien
tcatccttcatctgtagctgatgat

SEQ ID NO: 1482722 - DNA, 25 bp, Homo sapien
gagcagcaacaagtcccccatagta

SEQ ID NO: 1482723 - DNA, 25 bp, Homo sapien
gcagcaacaagtcccccatagtaac

SEQ ID NO: 1482724 - DNA, 25 bp, Homo sapien
caaacactgcagccataaatggcct

SEQ ID NO: 1482725 - DNA, 25 bp, Homo sapien
ctgcagccataaatggccttgccag

SEQ ID NO: 1482726 - DNA, 25 bp, Homo sapien
ctctttggaagtgcaatggtattct

SEQ ID NO: 1482727 - DNA, 25 bp, Homo sapien
tctctttggaagtgcaatggtattc

SEQ ID NO: 1482728 - DNA, 25 bp, Homo sapien
tctttggaagtgcaatggtattctt

SEQ ID NO: 1482729 - DNA, 25 bp, Homo sapien
tttggaagtgcaatggtattcttgc

SEQ ID NO: 1482730 - DNA, 25 bp, Homo sapien
atactgatatttgccagcaaatacg

SEQ ID NO: 1482731 - DNA, 25 bp, Homo sapien
taaataccagggttgctgaattgtt

SEQ ID NO: 1482732 - DNA, 25 bp, Homo sapien
tatttgccagcaaatacgtgagtaa

SEQ ID NO: 1482733 - DNA, 25 bp, Homo sapien
aatacgtgagtaaataccagggttg

SEQ ID NO: 1482734 - DNA, 25 bp, Homo sapien
catttcttgaccagaacagccatgg

SEQ ID NO: 1482735 - DNA, 25 bp, Homo sapien
actctccggttagctgaacatctgg

SEQ ID NO: 1482736 - DNA, 25 bp, Homo sapien
tactcgaaaatgcttgatagtgcca

SEQ ID NO: 1482737 - DNA, 25 bp, Homo sapien
tggtcaactgtttcacatactcgaa

SEQ ID NO: 1482738 - DNA, 25 bp, Homo sapien
tcttgttgcccagtactgtcagcca

SEQ ID NO: 1482739 - DNA, 25 bp, Homo sapien
cttgttgcccagtactgtcagccat

SEQ ID NO: 1482740 - DNA, 25 bp, Homo sapien
gattgctaacaatctagaggatgtg

SEQ ID NO: 1482741 - DNA, 25 bp, Homo sapien
ttatgctcacttagagtcaggttgc

SEQ ID NO: 1482742 - DNA, 25 bp, Homo sapien
tattattattagtagcagacagagc

SEQ ID NO: 1482743 - DNA, 25 bp, Homo sapien
tccagtgcgcacgtttattattagc

SEQ ID NO: 1482744 - DNA, 25 bp, Homo sapien
tcttccacagaatcaagggtggcca

SEQ ID NO: 1482745 - DNA, 25 bp, Homo sapien
ccaagagctttgtagtggtagcacg

SEQ ID NO: 1482746 - DNA, 25 bp, Homo sapien
gcagtgctcagccatctgtgaaaag

SEQ ID NO: 1482747 - DNA, 25 bp, Homo sapien
gaagtagatcctttccacatacggg

SEQ ID NO: 1482748 - DNA, 25 bp, Homo sapien
tattcagatggactgcttgttcaca

SEQ ID NO: 1482749 - DNA, 25 bp, Homo sapien
ctgattctctctactataagtggaa

SEQ ID NO: 1482750 - DNA, 25 bp, Homo sapien
tggatatccgcaagtctgattctct

SEQ ID NO: 1482751 - DNA, 25 bp, Homo sapien
aaaggaaaccctctatgtattgatc

SEQ ID NO: 1482752 - DNA, 25 bp, Homo sapien
tgctggtaccttttttgggtcaata

SEQ ID NO: 1482753 - DNA, 25 bp, Homo sapien
tcaataaacaagtgccgtctccagt

SEQ ID NO: 1482754 - DNA, 25 bp, Homo sapien
caagtgccgtctccagtaaggaagg

SEQ ID NO: 1482755 - DNA, 25 bp, Homo sapien
tccagtgcctgctggtacctttttt

SEQ ID NO: 1482756 - DNA, 25 bp, Homo sapien
cctaaggctgtccacttccttagtt

SEQ ID NO: 1482757 - DNA, 25 bp, Homo sapien
taagagaaacgtctcttccagcaaa

SEQ ID NO: 1482758 - DNA, 25 bp, Homo sapien
acttccttagttcaggcatctgtgg

SEQ ID NO: 1482759 - DNA, 25 bp, Homo sapien
taaattaagagaaacgtctcttcca

SEQ ID NO: 1482760 - DNA, 25 bp, Homo sapien
aatacatgcatcaggacattacttg

SEQ ID NO: 1482761 - DNA, 25 bp, Homo sapien
ggtacaaccggctagaagcatttca

SEQ ID NO: 1482762 - DNA, 25 bp, Homo sapien
ggattctattactaccacatattgt

SEQ ID NO: 1482763 - DNA, 25 bp, Homo sapien
atttcattagcctgtgtagaccagg

SEQ ID NO: 1482764 - DNA, 25 bp, Homo sapien
aaagtgatatgcattgagatgctcc

SEQ ID NO: 1482765 - DNA, 25 bp, Homo sapien
ccagtgggattatggaagagtaacc

SEQ ID NO: 1482766 - DNA, 25 bp, Homo sapien
ggatattttcaacttccagtgggat

SEQ ID NO: 1482767 - DNA, 25 bp, Homo sapien
ggttatgtcaggataaacccatgat

SEQ ID NO: 1482768 - DNA, 25 bp, Homo sapien
ggccagagcgagtctaccctggtaa

SEQ ID NO: 1482769 - DNA, 25 bp, Homo sapien
gacatcattacatacggccagagcg

SEQ ID NO: 1482770 - DNA, 25 bp, Homo sapien
cctggtaatctccaccttagacaaa

SEQ ID NO: 1482771 - DNA, 25 bp, Homo sapien
taagcaatctatgttgcaacagtag

SEQ ID NO: 1482772 - DNA, 25 bp, Homo sapien
ggataagcgtaagaatgaagaccag

SEQ ID NO: 1482773 - DNA, 25 bp, Homo sapien
gcttcctgccaagccggtggaattt

SEQ ID NO: 1482774 - DNA, 25 bp, Homo sapien
ggctgctcccagctacaaatgtcat

SEQ ID NO: 1482775 - DNA, 25 bp, Homo sapien
gcccatgtaagggttccccgcagaa

SEQ ID NO: 1482776 - DNA, 25 bp, Homo sapien
tttcagctctttatgagccccataa

SEQ ID NO: 1482777 - DNA, 25 bp, Homo sapien
tagcaaaatgcccagggtagtgaca

SEQ ID NO: 1482778 - DNA, 25 bp, Homo sapien
gtatttgagagcaccacctaaagtt

SEQ ID NO: 1482779 - DNA, 25 bp, Homo sapien
caatgttacaatctcaaaagctttc

SEQ ID NO: 1482780 - DNA, 25 bp, Homo sapien
aaggaggtgattagttccatatgtc

SEQ ID NO: 1482781 - DNA, 25 bp, Homo sapien
tgtgctaactgtagccaaggtttgc

SEQ ID NO: 1482782 - DNA, 25 bp, Homo sapien
gtttgtaaccttgaaacacttagca

SEQ ID NO: 1482783 - DNA, 25 bp, Homo sapien
ccaggccctaccagccgtgaagcag

SEQ ID NO: 1482784 - DNA, 25 bp, Homo sapien
ggagccgctgctcacccgttccttc

SEQ ID NO: 1482785 - DNA, 25 bp, Homo sapien
gaagccggaggatgagagggctcag

SEQ ID NO: 1482786 - DNA, 25 bp, Homo sapien
tcctctaccctcagaagccggagga

SEQ ID NO: 1482787 - DNA, 25 bp, Homo sapien
aattattggcatgcatttcactcac

SEQ ID NO: 1482788 - DNA, 25 bp, Homo sapien
tgtttgtagagcctccacagtgcgt

SEQ ID NO: 1482789 - DNA, 25 bp, Homo sapien
gtttgtagagcctccacagtgcgta

SEQ ID NO: 1482790 - DNA, 25 bp, Homo sapien
tttgtagagcctccacagtgcgtac

SEQ ID NO: 1482791 - DNA, 25 bp, Homo sapien
atgggggaaacagcgatcctccata

SEQ ID NO: 1482792 - DNA, 25 bp, Homo sapien
gagagcttctcacccacagcttgaa

SEQ ID NO: 1482793 - DNA, 25 bp, Homo sapien
gggaaacagcgatcctccataaggt

SEQ ID NO: 1482794 - DNA, 25 bp, Homo sapien
aatttaggctcacaggctgtttgaa

SEQ ID NO: 1482795 - DNA, 25 bp, Homo sapien
ggaccttcagcttttcttctgttac

SEQ ID NO: 1482796 - DNA, 25 bp, Homo sapien
ccttcagcttttcttctgttactac

SEQ ID NO: 1482797 - DNA, 25 bp, Homo sapien
ctattctgggaccttcagcttttct

SEQ ID NO: 1482798 - DNA, 25 bp, Homo sapien
tattctgggaccttcagcttttctt

SEQ ID NO: 1482799 - DNA, 25 bp, Homo sapien
caaaggcccatctattctttttaat

SEQ ID NO: 1482800 - DNA, 25 bp, Homo sapien
tttccttcttagtgtggttgatcaa

SEQ ID NO: 1482801 - DNA, 25 bp, Homo sapien
tggttgatcaaaggcccatctattc

SEQ ID NO: 1482802 - DNA, 25 bp, Homo sapien
tagtgtggttgatcaaaggcccatc

SEQ ID NO: 1482803 - DNA, 25 bp, Homo sapien
tggagatagaaagaccgagtatagc

SEQ ID NO: 1482804 - DNA, 25 bp, Homo sapien
tctttgactcaagctcaagccctcg

SEQ ID NO: 1482805 - DNA, 25 bp, Homo sapien
ttgactcaagctcaagccctcgctg

SEQ ID NO: 1482806 - DNA, 25 bp, Homo sapien
cgagtatagcttggcccaaagggta

SEQ ID NO: 1482807 - DNA, 25 bp, Homo sapien
ggtggcttggccttcttgaactgct

SEQ ID NO: 1482808 - DNA, 25 bp, Homo sapien
tgaccctgtgaacagtagccacgtt

SEQ ID NO: 1482809 - DNA, 25 bp, Homo sapien
ttagttgtgaatacagttgccctgc

SEQ ID NO: 1482810 - DNA, 25 bp, Homo sapien
tccagagacagccttcagtgaccct

SEQ ID NO: 1482811 - DNA, 25 bp, Homo sapien
caaacttactagaagggaccaagca

SEQ ID NO: 1482812 - DNA, 25 bp, Homo sapien
ggctcccagctggaactctaagaga

SEQ ID NO: 1482813 - DNA, 25 bp, Homo sapien
tgtgccttccaatgatacggcgtgg

SEQ ID NO: 1482814 - DNA, 25 bp, Homo sapien
ggaccaagcaactcacagggaatta

SEQ ID NO: 1482815 - DNA, 25 bp, Homo sapien
caactttcatcgtttgtcattgtga

SEQ ID NO: 1482816 - DNA, 25 bp, Homo sapien
tctcctttcagtctccagattcatt

SEQ ID NO: 1482817 - DNA, 25 bp, Homo sapien
ttcatcttcctggtgttggttgaag

SEQ ID NO: 1482818 - DNA, 25 bp, Homo sapien
tcattgtgaactccacttcatcttc

SEQ ID NO: 1482819 - DNA, 25 bp, Homo sapien
tgaaatcatttgtctgtcgtgccat

SEQ ID NO: 1482820 - DNA, 25 bp, Homo sapien
gactgactgacgtgaaagtctttga

SEQ ID NO: 1482821 - DNA, 25 bp, Homo sapien
tcctgtcactcgacacagagcagac

SEQ ID NO: 1482822 - DNA, 25 bp, Homo sapien
cagttgatgctgacacacgctttcc

SEQ ID NO: 1482823 - DNA, 25 bp, Homo sapien
cagggtcatagacttttgaattcat

SEQ ID NO: 1482824 - DNA, 25 bp, Homo sapien
tgaagtaccaaagcttgttttctga

SEQ ID NO: 1482825 - DNA, 25 bp, Homo sapien
atgagaatcctgaggattggtctga

SEQ ID NO: 1482826 - DNA, 25 bp, Homo sapien
gagaatcctgaggattggtctgaag

SEQ ID NO: 1482827 - DNA, 25 bp, Homo sapien
gagcaatggtggctgtagccacaag

SEQ ID NO: 1482828 - DNA, 25 bp, Homo sapien
gatcttgctcccttcagagacagag

SEQ ID NO: 1482829 - DNA, 25 bp, Homo sapien
tgatcttgctcccttcagagacaga

SEQ ID NO: 1482830 - DNA, 25 bp, Homo sapien
caatggtggctgtagccacaaggct

SEQ ID NO: 1482831 - DNA, 25 bp, Homo sapien
tgcacagaggagtttccctgtgagg

SEQ ID NO: 1482832 - DNA, 25 bp, Homo sapien
gcacagaggagtttccctgtgaggc

SEQ ID NO: 1482833 - DNA, 25 bp, Homo sapien
tggattctatatgtctttgtgattt

SEQ ID NO: 1482834 - DNA, 25 bp, Homo sapien
gccaacgtctgattaaaatctggag

SEQ ID NO: 1482835 - DNA, 25 bp, Homo sapien
ggccaactgccaacgtctgattaaa

SEQ ID NO: 1482836 - DNA, 25 bp, Homo sapien
ctaagggccaactgccaacgtctga

SEQ ID NO: 1482837 - DNA, 25 bp, Homo sapien
ctgattaaaatctggagaagttggc

SEQ ID NO: 1482838 - DNA, 25 bp, Homo sapien
ctggaagcattctttattacaacat

SEQ ID NO: 1482839 - DNA, 25 bp, Homo sapien
ccagctcttgctggcctgagatgaa

SEQ ID NO: 1482840 - DNA, 25 bp, Homo sapien
gatgaaggaggtaatactcctacca

SEQ ID NO: 1482841 - DNA, 25 bp, Homo sapien
tttgaaggtcttgcagccagctctt

SEQ ID NO: 1482842 - DNA, 25 bp, Homo sapien
ctgagatgaaggaggtaatactcct

SEQ ID NO: 1482843 - DNA, 25 bp, Homo sapien
tcttcctgattacaccgagttcttc

SEQ ID NO: 1482844 - DNA, 25 bp, Homo sapien
aattcttcctgattacaccgagttc

SEQ ID NO: 1482845 - DNA, 25 bp, Homo sapien
ttcctgattacaccgagttcttcac

SEQ ID NO: 1482846 - DNA, 25 bp, Homo sapien
aaattcttcctgattacaccgagtt

SEQ ID NO: 1482847 - DNA, 25 bp, Homo sapien
ctgccaggcagtaattagaatacat

SEQ ID NO: 1482848 - DNA, 25 bp, Homo sapien
cgtgaagacaattctcctgaagctg

SEQ ID NO: 1482849 - DNA, 25 bp, Homo sapien
tgtactctatgcattccccgtgaag

SEQ ID NO: 1482850 - DNA, 25 bp, Homo sapien
gaacatagtgccagattatggccca

SEQ ID NO: 1482851 - DNA, 25 bp, Homo sapien
taaaactacctccaatgtcatgtgg

SEQ ID NO: 1482852 - DNA, 25 bp, Homo sapien
taataacttctagcagaaccagctg

SEQ ID NO: 1482853 - DNA, 25 bp, Homo sapien
gttatgatgtaagaaccgcaagttc

SEQ ID NO: 1482854 - DNA, 25 bp, Homo sapien
tgcaggccctggtttataatcgagg

SEQ ID NO: 1482855 - DNA, 25 bp, Homo sapien
tgaaccaagaactaggccctttgag

SEQ ID NO: 1482856 - DNA, 25 bp, Homo sapien
caggtcctctaagaatagatgtttc

SEQ ID NO: 1482857 - DNA, 25 bp, Homo sapien
ccaggtcctctaagaatagatgttt

SEQ ID NO: 1482858 - DNA, 25 bp, Homo sapien
cccaggtcctctaagaatagatgtt

SEQ ID NO: 1482859 - DNA, 25 bp, Homo sapien
ggtcctctaagaatagatgtttcac

SEQ ID NO: 1482860 - DNA, 25 bp, Homo sapien
ggataccagttaggggaaggcagag

SEQ ID NO: 1482861 - DNA, 25 bp, Homo sapien
gtgactcatttcaaacttgacatta

SEQ ID NO: 1482862 - DNA, 25 bp, Homo sapien
tctccagtgactcttctctgtgtta

SEQ ID NO: 1482863 - DNA, 25 bp, Homo sapien
ctctgtgttaactcacagggcagca

SEQ ID NO: 1482864 - DNA, 25 bp, Homo sapien
gcttcaagcctaaacttaactctct

SEQ ID NO: 1482865 - DNA, 25 bp, Homo sapien
tttggattgcaagcttcaagcctaa

SEQ ID NO: 1482866 - DNA, 25 bp, Homo sapien
gcacgggttttggattgcaagcttc

SEQ ID NO: 1482867 - DNA, 25 bp, Homo sapien
gccagtgtttccaccgattctcttc

SEQ ID NO: 1482868 - DNA, 25 bp, Homo sapien
tctaagaccatctccaggtcgttgc

SEQ ID NO: 1482869 - DNA, 25 bp, Homo sapien
caaaaccggtattcagtgcccttgg

SEQ ID NO: 1482870 - DNA, 25 bp, Homo sapien
tccaggtcgttgcaaaatccacaaa

SEQ ID NO: 1482871 - DNA, 25 bp, Homo sapien
aaatccacaaaaccggtattcagtg

SEQ ID NO: 1482872 - DNA, 25 bp, Homo sapien
tgtttagagtcttccatccttggat

SEQ ID NO: 1482873 - DNA, 25 bp, Homo sapien
aactgtttagaagcaaccacacaca

SEQ ID NO: 1482874 - DNA, 25 bp, Homo sapien
aatagcgtttcgaaacacccacaca

SEQ ID NO: 1482875 - DNA, 25 bp, Homo sapien
ccttggattatgaacagacgtgaac

SEQ ID NO: 1482876 - DNA, 25 bp, Homo sapien
gtggactttagcatgaacagaatta

SEQ ID NO: 1482877 - DNA, 25 bp, Homo sapien
tcactgctcgagttgagacatctgt

SEQ ID NO: 1482878 - DNA, 25 bp, Homo sapien
gactctacagtaaggcacatcaact

SEQ ID NO: 1482879 - DNA, 25 bp, Homo sapien
tcctcctaggagtgcacacagactg

SEQ ID NO: 1482880 - DNA, 25 bp, Homo sapien
gagaagttcattagtcctggaatta

SEQ ID NO: 1482881 - DNA, 25 bp, Homo sapien
ttcattagtcctggaattatgcaat

SEQ ID NO: 1482882 - DNA, 25 bp, Homo sapien
gaagttcattagtcctggaattatg

SEQ ID NO: 1482883 - DNA, 25 bp, Homo sapien
taccactgagaagttcattagtcct

SEQ ID NO: 1482884 - DNA, 25 bp, Homo sapien
tatctctgcagtagagccccaggaa

SEQ ID NO: 1482885 - DNA, 25 bp, Homo sapien
catgaactctacagggatcttagaa

SEQ ID NO: 1482886 - DNA, 25 bp, Homo sapien
tcccatgaactctacagggatctta

SEQ ID NO: 1482887 - DNA, 25 bp, Homo sapien
agggttaagtggtggatcaagtatc

SEQ ID NO: 1482888 - DNA, 25 bp, Homo sapien
catttctgacatctacagccggcca

SEQ ID NO: 1482889 - DNA, 25 bp, Homo sapien
tgacgttgcgagttttgcttcccat

SEQ ID NO: 1482890 - DNA, 25 bp, Homo sapien
actgaggaactggcgctcacaccct

SEQ ID NO: 1482891 - DNA, 25 bp, Homo sapien
ttgtcagatcggaacccaaagtgat

SEQ ID NO: 1482892 - DNA, 25 bp, Homo sapien
ctagaaccggaatgaatatttgaat

SEQ ID NO: 1482893 - DNA, 25 bp, Homo sapien
tttgaatgtgccatagaatctacgt

SEQ ID NO: 1482894 - DNA, 25 bp, Homo sapien
tttcctataagaggagcaaattgaa

SEQ ID NO: 1482895 - DNA, 25 bp, Homo sapien
agacctcatcatggcggcaacagga

SEQ ID NO: 1482896 - DNA, 25 bp, Homo sapien
tggggcctacagaaagtgcaagctc

SEQ ID NO: 1482897 - DNA, 25 bp, Homo sapien
ctggggcctacagaaagtgcaagct

SEQ ID NO: 1482898 - DNA, 25 bp, Homo sapien
tcatcatgtaatgcacagttctgca

SEQ ID NO: 1482899 - DNA, 25 bp, Homo sapien
ggggcctacagaaagtgcaagctct

SEQ ID NO: 1482900 - DNA, 25 bp, Homo sapien
ttctccaatgtctccttttggagtt

SEQ ID NO: 1482901 - DNA, 25 bp, Homo sapien
ttatagacccagcttggttcttctc

SEQ ID NO: 1482902 - DNA, 25 bp, Homo sapien
tcttctccaatgtctccttttggag

SEQ ID NO: 1482903 - DNA, 25 bp, Homo sapien
tagacccagcttggttcttctccaa

SEQ ID NO: 1482904 - DNA, 25 bp, Homo sapien
ggccaggaatcgcttaatcctgaag

SEQ ID NO: 1482905 - DNA, 25 bp, Homo sapien
gccaggaatcgcttaatcctgaagg

SEQ ID NO: 1482906 - DNA, 25 bp, Homo sapien
caggaatcgcttaatcctgaaggtc

SEQ ID NO: 1482907 - DNA, 25 bp, Homo sapien
ggaatcgcttaatcctgaaggtctt

SEQ ID NO: 1482908 - DNA, 25 bp, Homo sapien
tcatcatcgccttttagatatttat

SEQ ID NO: 1482909 - DNA, 25 bp, Homo sapien
tttcatcatcgccttttagatattt

SEQ ID NO: 1482910 - DNA, 25 bp, Homo sapien
cttttcatcatcgccttttagatat

SEQ ID NO: 1482911 - DNA, 25 bp, Homo sapien
tggaatcatcggcaccaaatgcttt

SEQ ID NO: 1482912 - DNA, 25 bp, Homo sapien
catttccagaagagcttctcaaatc

SEQ ID NO: 1482913 - DNA, 25 bp, Homo sapien
gcatttccagaagagcttctcaaat

SEQ ID NO: 1482914 - DNA, 25 bp, Homo sapien
atttccagaagagcttctcaaatct

SEQ ID NO: 1482915 - DNA, 25 bp, Homo sapien
tgcatttccagaagagcttctcaaa

SEQ ID NO: 1482916 - DNA, 25 bp, Homo sapien
tcatgtccagcctcttctgtcctgc

SEQ ID NO: 1482917 - DNA, 25 bp, Homo sapien
cctcttctgtcctgccctttatcct

SEQ ID NO: 1482918 - DNA, 25 bp, Homo sapien
cttctgtcctgccctttatcctcac

SEQ ID NO: 1482919 - DNA, 25 bp, Homo sapien
catgtccagcctcttctgtcctgcc

SEQ ID NO: 1482920 - DNA, 25 bp, Homo sapien
ttctagtgtagctgtgaaatggtac

SEQ ID NO: 1482921 - DNA, 25 bp, Homo sapien
tgtagtagactgtattaagggatgg

SEQ ID NO: 1482922 - DNA, 25 bp, Homo sapien
ccgacttgacttacaaggagttctc

SEQ ID NO: 1482923 - DNA, 25 bp, Homo sapien
tggctgttgtactccccgacttgac

SEQ ID NO: 1482924 - DNA, 25 bp, Homo sapien
ctgacattgtcactgtgtagtagac

SEQ ID NO: 1482925 - DNA, 25 bp, Homo sapien
ttgctcacagattctatatgccagt

SEQ ID NO: 1482926 - DNA, 25 bp, Homo sapien
tatgccagtagatctgctcctgaat

SEQ ID NO: 1482927 - DNA, 25 bp, Homo sapien
ttaatcagtacatcagcaatgctac

SEQ ID NO: 1482928 - DNA, 25 bp, Homo sapien
cagcaatgctacatttccgttcaca

SEQ ID NO: 1482929 - DNA, 25 bp, Homo sapien
ggagtctgctatagagtcctcagct

SEQ ID NO: 1482930 - DNA, 25 bp, Homo sapien
gataatctgacactcagaagttccc

SEQ ID NO: 1482931 - DNA, 25 bp, Homo sapien
taaataagtatcaggtatcacagcc

SEQ ID NO: 1482932 - DNA, 25 bp, Homo sapien
catcagtgggttcaggctctctggg

SEQ ID NO: 1482933 - DNA, 25 bp, Homo sapien
tgggactagctagaagacagctctc

SEQ ID NO: 1482934 - DNA, 25 bp, Homo sapien
aagcatctacgtccacctggcaagg

SEQ ID NO: 1482935 - DNA, 25 bp, Homo sapien
cacttaaaatgtattgaggccggga

SEQ ID NO: 1482936 - DNA, 25 bp, Homo sapien
cttagaatcccctgacacgctgtat

SEQ ID NO: 1482937 - DNA, 25 bp, Homo sapien
tactcagaaatataatggatcagca

SEQ ID NO: 1482938 - DNA, 25 bp, Homo sapien
taattacagatagcatatagccaat

SEQ ID NO: 1482939 - DNA, 25 bp, Homo sapien
ggctgaacaacaagtgtactcagaa

SEQ ID NO: 1482940 - DNA, 25 bp, Homo sapien
tatagctgtcaacttaacattcaca

SEQ ID NO: 1482941 - DNA, 25 bp, Homo sapien
cagctgagtctatgttctgctttat

SEQ ID NO: 1482942 - DNA, 25 bp, Homo sapien
ctggtggagcagctgagtctatgtt

SEQ ID NO: 1482943 - DNA, 25 bp, Homo sapien
tggagcagctgagtctatgttctgc

SEQ ID NO: 1482944 - DNA, 25 bp, Homo sapien
ctgagtctatgttctgctttatttc

SEQ ID NO: 1482945 - DNA, 25 bp, Homo sapien
catgcttgtgggtattccttgtggc

SEQ ID NO: 1482946 - DNA, 25 bp, Homo sapien
cataggttaagacgtggagactagc

SEQ ID NO: 1482947 - DNA, 25 bp, Homo sapien
ggcaaacagctaatccatctcttgg

SEQ ID NO: 1482948 - DNA, 25 bp, Homo sapien
catctcttggtctgggagtgcccta

SEQ ID NO: 1482949 - DNA, 25 bp, Homo sapien
gaatggctacgatgaaaacttcttt

SEQ ID NO: 1482950 - DNA, 25 bp, Homo sapien
actgaatggctacgatgaaaacttc

SEQ ID NO: 1482951 - DNA, 25 bp, Homo sapien
tactttaactgaatggctacgatga

SEQ ID NO: 1482952 - DNA, 25 bp, Homo sapien
ttaactgaatggctacgatgaaaac

SEQ ID NO: 1482953 - DNA, 25 bp, Homo sapien
tctctggaagccgtgtgataaagcc

SEQ ID NO: 1482954 - DNA, 25 bp, Homo sapien
ttgtgagactcccatgccacgagga

SEQ ID NO: 1482955 - DNA, 25 bp, Homo sapien
aaatcttgttggtcattcagtgccc

SEQ ID NO: 1482956 - DNA, 25 bp, Homo sapien
gcacgattcccaaagctaggtcata

SEQ ID NO: 1482957 - DNA, 25 bp, Homo sapien
caaattactcacaactggaaaggct

SEQ ID NO: 1482958 - DNA, 25 bp, Homo sapien
taagcagcacacgaattttcccttt

SEQ ID NO: 1482959 - DNA, 25 bp, Homo sapien
atcagcaaattactcacaactggaa

SEQ ID NO: 1482960 - DNA, 25 bp, Homo sapien
gtttaagcagcacacgaattttccc

SEQ ID NO: 1482961 - DNA, 25 bp, Homo sapien
aatatgacagacgactggattggct

SEQ ID NO: 1482962 - DNA, 25 bp, Homo sapien
acagacgactggattggctgctgga

SEQ ID NO: 1482963 - DNA, 25 bp, Homo sapien
ggcaatatgacagacgactggattg

SEQ ID NO: 1482964 - DNA, 25 bp, Homo sapien
tgacagacgactggattggctgctg

SEQ ID NO: 1482965 - DNA, 25 bp, Homo sapien
tcatatgtacaaatcctaatggaaa

SEQ ID NO: 1482966 - DNA, 25 bp, Homo sapien
tctcaagtgttcttcgtactctagg

SEQ ID NO: 1482967 - DNA, 25 bp, Homo sapien
ggaaagcatccattataactttcat

SEQ ID NO: 1482968 - DNA, 25 bp, Homo sapien
ggataaggctacatattaacttctg

SEQ ID NO: 1482969 - DNA, 25 bp, Homo sapien
ttctctatggatccaacggtccttt

SEQ ID NO: 1482970 - DNA, 25 bp, Homo sapien
ctactttacacgagtttgaggagca

SEQ ID NO: 1482971 - DNA, 25 bp, Homo sapien
tttctctatggatccaacggtcctt

SEQ ID NO: 1482972 - DNA, 25 bp, Homo sapien
acacgagtttgaggagcaatttctc

SEQ ID NO: 1482973 - DNA, 25 bp, Homo sapien
tccactcgttccagttaaaagtcag

SEQ ID NO: 1482974 - DNA, 25 bp, Homo sapien
taaaagtcagtctgatcgactttcc

SEQ ID NO: 1482975 - DNA, 25 bp, Homo sapien
cactcgttccagttaaaagtcagtc

SEQ ID NO: 1482976 - DNA, 25 bp, Homo sapien
tcgactttccttggaggtcactctc

SEQ ID NO: 1482977 - DNA, 25 bp, Homo sapien
atgagacacgatgcgttgacctgaa

SEQ ID NO: 1482978 - DNA, 25 bp, Homo sapien
gaaccaagtacagaagacggatcat

SEQ ID NO: 1482979 - DNA, 25 bp, Homo sapien
gacacgatgcgttgacctgaaccaa

SEQ ID NO: 1482980 - DNA, 25 bp, Homo sapien
gatgcgttgacctgaaccaagtaca

SEQ ID NO: 1482981 - DNA, 25 bp, Homo sapien
ttttgccacctctctccccttttca

SEQ ID NO: 1482982 - DNA, 25 bp, Homo sapien
tctctccccttttcagacagtccat

SEQ ID NO: 1482983 - DNA, 25 bp, Homo sapien
acctctctccccttttcagacagtc

SEQ ID NO: 1482984 - DNA, 25 bp, Homo sapien
tttgccacctctctccccttttcag

SEQ ID NO: 1482985 - DNA, 25 bp, Homo sapien
atcttttcatagtgtattatcttgg

SEQ ID NO: 1482986 - DNA, 25 bp, Homo sapien
ttttcatagtgtattatcttggtat

SEQ ID NO: 1482987 - DNA, 25 bp, Homo sapien
cttttcatagtgtattatcttggta

SEQ ID NO: 1482988 - DNA, 25 bp, Homo sapien
ttcatagtgtattatcttggtattc

SEQ ID NO: 1482989 - DNA, 25 bp, Homo sapien
tgttgggtctgatacaggatgcctt

SEQ ID NO: 1482990 - DNA, 25 bp, Homo sapien
ttcatctgcttaggacaccagtggg

SEQ ID NO: 1482991 - DNA, 25 bp, Homo sapien
tgcctgttgggtctgatacaggatg

SEQ ID NO: 1482992 - DNA, 25 bp, Homo sapien
tgacataatacacaccattcatctg

SEQ ID NO: 1482993 - DNA, 25 bp, Homo sapien
ggtggcttgggttaggcgagagtgt

SEQ ID NO: 1482994 - DNA, 25 bp, Homo sapien
tcacggggtgatgtctctttgtagg

SEQ ID NO: 1482995 - DNA, 25 bp, Homo sapien
tttgtccccatttcacggggtgatg

SEQ ID NO: 1482996 - DNA, 25 bp, Homo sapien
ttaggcgagagtgtatttggagcaa

SEQ ID NO: 1482997 - DNA, 25 bp, Homo sapien
ttttctttctggcacgcactctggg

SEQ ID NO: 1482998 - DNA, 25 bp, Homo sapien
tccttggagggttgattttctacac

SEQ ID NO: 1482999 - DNA, 25 bp, Homo sapien
gtctgtttctacacctaactgcaaa

SEQ ID NO: 1483000 - DNA, 25 bp, Homo sapien
cctgcttgattagtgagttgtctgt

SEQ ID NO: 1483001 - DNA, 25 bp, Homo sapien
ttgaaggaaagagtgatgcctcatg

SEQ ID NO: 1483002 - DNA, 25 bp, Homo sapien
ttcttcaactggatccaggtgccat

SEQ ID NO: 1483003 - DNA, 25 bp, Homo sapien
tattttcttcaactggatccaggtg

SEQ ID NO: 1483004 - DNA, 25 bp, Homo sapien
aaggaaagagtgatgcctcatgctg

SEQ ID NO: 1483005 - DNA, 25 bp, Homo sapien
gatatttatgctatttccatgaaca

SEQ ID NO: 1483006 - DNA, 25 bp, Homo sapien
taacgggatatttatgctatttcca

SEQ ID NO: 1483007 - DNA, 25 bp, Homo sapien
cttttaacgggatatttatgctatt

SEQ ID NO: 1483008 - DNA, 25 bp, Homo sapien
tatgctatttccatgaacacactca

SEQ ID NO: 1483009 - DNA, 25 bp, Homo sapien
caaattatccaagtaacaatacata

SEQ ID NO: 1483010 - DNA, 25 bp, Homo sapien
aatacataagagacccgcatggagg

SEQ ID NO: 1483011 - DNA, 25 bp, Homo sapien
caagtaacaatacataagagacccg

SEQ ID NO: 1483012 - DNA, 25 bp, Homo sapien
ataagagacccgcatggaggtctgg

SEQ ID NO: 1483013 - DNA, 25 bp, Homo sapien
taagcccagctgttttcagcacacg

SEQ ID NO: 1483014 - DNA, 25 bp, Homo sapien
gcacacgactcgtgggcaattccac

SEQ ID NO: 1483015 - DNA, 25 bp, Homo sapien
acgtgcatagccagtgcccatacca

SEQ ID NO: 1483016 - DNA, 25 bp, Homo sapien
cctgtctgctgttcaaggccttctc

SEQ ID NO: 1483017 - DNA, 25 bp, Homo sapien
cttgtattgttcctcaagggtgagg

SEQ ID NO: 1483018 - DNA, 25 bp, Homo sapien
cagtggtaggtggaactttgtgctc

SEQ ID NO: 1483019 - DNA, 25 bp, Homo sapien
ccctcttaggtaacacacatgaatg

SEQ ID NO: 1483020 - DNA, 25 bp, Homo sapien
tcacataacaggttgccaattcagc

SEQ ID NO: 1483021 - DNA, 25 bp, Homo sapien
ttccagtccttctaagcagtccagg

SEQ ID NO: 1483022 - DNA, 25 bp, Homo sapien
gaaaggtttgccatggagtcgtata

SEQ ID NO: 1483023 - DNA, 25 bp, Homo sapien
agttgtgcccaaggaatcgaattcc

SEQ ID NO: 1483024 - DNA, 25 bp, Homo sapien
agttcactcatcgataagttgtgcc

SEQ ID NO: 1483025 - DNA, 25 bp, Homo sapien
gggaatacacgataaagaaggagac

SEQ ID NO: 1483026 - DNA, 25 bp, Homo sapien
tacacgataaagaaggagacggaaa

SEQ ID NO: 1483027 - DNA, 25 bp, Homo sapien
ggcgtgaacagaaagggccggagcg

SEQ ID NO: 1483028 - DNA, 25 bp, Homo sapien
ttggagaaagggaatacacgataaa

SEQ ID NO: 1483029 - DNA, 25 bp, Homo sapien
cttctgggaagacgggcgatgaact

SEQ ID NO: 1483030 - DNA, 25 bp, Homo sapien
gcgatgaactgaagggcggctccgg

SEQ ID NO: 1483031 - DNA, 25 bp, Homo sapien
gcacgatcttaaggacagtcgctcc

SEQ ID NO: 1483032 - DNA, 25 bp, Homo sapien
ggccatcggtgccatcgcggatctc

SEQ ID NO: 1483033 - DNA, 25 bp, Homo sapien
cggagccggaggagacgaagggaag

SEQ ID NO: 1483034 - DNA, 25 bp, Homo sapien
tgccaggtagggacggcgcccgcca

SEQ ID NO: 1483035 - DNA, 25 bp, Homo sapien
cgaagggaaggtggagcggacgcca

SEQ ID NO: 1483036 - DNA, 25 bp, Homo sapien
tgggacagccacctggagcgcagct

SEQ ID NO: 1483037 - DNA, 25 bp, Homo sapien
gcagagcgggtggcggtagcggctg

SEQ ID NO: 1483038 - DNA, 25 bp, Homo sapien
cagagcgggtggcggtagcggctga

SEQ ID NO: 1483039 - DNA, 25 bp, Homo sapien
agagcgggtggcggtagcggctgac

SEQ ID NO: 1483040 - DNA, 25 bp, Homo sapien
ggcagagcgggtggcggtagcggct

SEQ ID NO: 1483041 - DNA, 25 bp, Homo sapien
tatctcgttgcgaaaggaggaaaaa

SEQ ID NO: 1483042 - DNA, 25 bp, Homo sapien
tcttgccttatctcgttgcgaaagg

SEQ ID NO: 1483043 - DNA, 25 bp, Homo sapien
tggtttcttgccttatctcgttgcg

SEQ ID NO: 1483044 - DNA, 25 bp, Homo sapien
ttcggcgcgggtaggagaggtcttg

SEQ ID NO: 1483045 - DNA, 25 bp, Homo sapien
ggagagtctgcactcgcgaggcagc

SEQ ID NO: 1483046 - DNA, 25 bp, Homo sapien
agtctgcactcgcgaggcagcggcc

SEQ ID NO: 1483047 - DNA, 25 bp, Homo sapien
gcggccgctggactgcaccggttct

SEQ ID NO: 1483048 - DNA, 25 bp, Homo sapien
ggcagcggccgctggactgcaccgg

SEQ ID NO: 1483049 - DNA, 25 bp, Homo sapien
ggctgcaaggatatgtcccctcgat

SEQ ID NO: 1483050 - DNA, 25 bp, Homo sapien
tgtttgcaatgtgaaagggcggccc

SEQ ID NO: 1483051 - DNA, 25 bp, Homo sapien
gcatgcttgtgcgtgtgtccgactc

SEQ ID NO: 1483052 - DNA, 25 bp, Homo sapien
tactggaacctgtccaaaggctgca

SEQ ID NO: 1483053 - DNA, 25 bp, Homo sapien
ctcttttaggctggcgatctgcatt

SEQ ID NO: 1483054 - DNA, 25 bp, Homo sapien
ctctcttttaggctggcgatctgca

SEQ ID NO: 1483055 - DNA, 25 bp, Homo sapien
gctctctcttttaggctggcgatct

SEQ ID NO: 1483056 - DNA, 25 bp, Homo sapien
ctctctcttttaggctggcgatctg

SEQ ID NO: 1483057 - DNA, 25 bp, Homo sapien
cctgaaggccaaggactctggctga

SEQ ID NO: 1483058 - DNA, 25 bp, Homo sapien
tgcagcttgccacattgacacagac

SEQ ID NO: 1483059 - DNA, 25 bp, Homo sapien
gctgcagcttgccacattgacacag

SEQ ID NO: 1483060 - DNA, 25 bp, Homo sapien
ctgacgtgcaccttcttagcttcct

SEQ ID NO: 1483061 - DNA, 25 bp, Homo sapien
gaagtggtgctaatgtagacatcct

SEQ ID NO: 1483062 - DNA, 25 bp, Homo sapien
cacaggaagtggtgctaatgtagac

SEQ ID NO: 1483063 - DNA, 25 bp, Homo sapien
caggcaggatatccgccgactactg

SEQ ID NO: 1483064 - DNA, 25 bp, Homo sapien
tgtagacatcctggttcaggcagga

SEQ ID NO: 1483065 - DNA, 25 bp, Homo sapien
cagataaaattcaggtgagtttaaa

SEQ ID NO: 1483066 - DNA, 25 bp, Homo sapien
ttcagataaaattcaggtgagttta

SEQ ID NO: 1483067 - DNA, 25 bp, Homo sapien
attcaggtgagtttaaaccaaggtg

SEQ ID NO: 1483068 - DNA, 25 bp, Homo sapien
tcaggtgagtttaaaccaaggtgaa

SEQ ID NO: 1483069 - DNA, 25 bp, Homo sapien
tgcagagtgtagggctttccagcaa

SEQ ID NO: 1483070 - DNA, 25 bp, Homo sapien
gttgcctctccttttgtacctgcct

SEQ ID NO: 1483071 - DNA, 25 bp, Homo sapien
gcctctgtcttcacgatttcaaata

SEQ ID NO: 1483072 - DNA, 25 bp, Homo sapien
ctggttgactcccatactcttccgt

SEQ ID NO: 1483073 - DNA, 25 bp, Homo sapien
tagaatagatgggtgtagtaggaca

SEQ ID NO: 1483074 - DNA, 25 bp, Homo sapien
gaggtcttctctaggcttcactgtt

SEQ ID NO: 1483075 - DNA, 25 bp, Homo sapien
ctgtttccccacctcttaaagctgg

SEQ ID NO: 1483076 - DNA, 25 bp, Homo sapien
cagtttggccaattagacttgaggt

SEQ ID NO: 1483077 - DNA, 25 bp, Homo sapien
gttaagatccgctgacccctctgga

SEQ ID NO: 1483078 - DNA, 25 bp, Homo sapien
ctcccgtatggattcctctctggag

SEQ ID NO: 1483079 - DNA, 25 bp, Homo sapien
gcattgactcatccgctttctctaa

SEQ ID NO: 1483080 - DNA, 25 bp, Homo sapien
cctctggacctagctcctgcattga

SEQ ID NO: 1483081 - DNA, 25 bp, Homo sapien
gatctgtgctcttaaagcattgtgc

SEQ ID NO: 1483082 - DNA, 25 bp, Homo sapien
cataagtaagttagatacagtttct

SEQ ID NO: 1483083 - DNA, 25 bp, Homo sapien
tagatacagtttctaactggcagac

SEQ ID NO: 1483084 - DNA, 25 bp, Homo sapien
acatgtagcttatttgggcagcaaa

SEQ ID NO: 1483085 - DNA, 25 bp, Homo sapien
ttcacttgccgcagtagcagggcag

SEQ ID NO: 1483086 - DNA, 25 bp, Homo sapien
agcaaatctttagccctggacaaat

SEQ ID NO: 1483087 - DNA, 25 bp, Homo sapien
tggacaaatgcaagcaacgaaagaa

SEQ ID NO: 1483088 - DNA, 25 bp, Homo sapien
gatcgcttagactgtagtgccgggt

SEQ ID NO: 1483089 - DNA, 25 bp, Homo sapien
atagcatgtggccttctgaagaccc

SEQ ID NO: 1483090 - DNA, 25 bp, Homo sapien
ctgctaaaactgagcctgtcttaaa

SEQ ID NO: 1483091 - DNA, 25 bp, Homo sapien
taaaactgagcctgtcttaaaaata

SEQ ID NO: 1483092 - DNA, 25 bp, Homo sapien
ctgaagacccagcactgctaaaact

SEQ ID NO: 1483093 - DNA, 25 bp, Homo sapien
tcatttgtggatggtgactgtcaag

SEQ ID NO: 1483094 - DNA, 25 bp, Homo sapien
atttgtggatggtgactgtcaaggg

SEQ ID NO: 1483095 - DNA, 25 bp, Homo sapien
ttgtggatggtgactgtcaagggga

SEQ ID NO: 1483096 - DNA, 25 bp, Homo sapien
tgtggatggtgactgtcaaggggat

SEQ ID NO: 1483097 - DNA, 25 bp, Homo sapien
gaacatcgaggctttctgataagtg

SEQ ID NO: 1483098 - DNA, 25 bp, Homo sapien
tcccttgtaaagaacatcgaggctt

SEQ ID NO: 1483099 - DNA, 25 bp, Homo sapien
tgtgaatcccttgtaaagaacatcg

SEQ ID NO: 1483100 - DNA, 25 bp, Homo sapien
tttatgaaggtgtgaatcccttgta

SEQ ID NO: 1483101 - DNA, 25 bp, Homo sapien
tcttagcaccctcatgattttcttt

SEQ ID NO: 1483102 - DNA, 25 bp, Homo sapien
cttcttagcaccctcatgattttct

SEQ ID NO: 1483103 - DNA, 25 bp, Homo sapien
ttcttagcaccctcatgattttctt

SEQ ID NO: 1483104 - DNA, 25 bp, Homo sapien
gcttagtgtgataatgtaagaccca

SEQ ID NO: 1483105 - DNA, 25 bp, Homo sapien
gatttcaccaaggtgtaagcttagt

SEQ ID NO: 1483106 - DNA, 25 bp, Homo sapien
taatgtaagacccatcagaatctgt

SEQ ID NO: 1483107 - DNA, 25 bp, Homo sapien
tcactgtaaccaatagatttcacca

SEQ ID NO: 1483108 - DNA, 25 bp, Homo sapien
gacagcttatctacctctaacatct

SEQ ID NO: 1483109 - DNA, 25 bp, Homo sapien
ccagttctgagggaaagccatagat

SEQ ID NO: 1483110 - DNA, 25 bp, Homo sapien
gcttgttgctgtcattccccggaaa

SEQ ID NO: 1483111 - DNA, 25 bp, Homo sapien
cttgaagatgtacatgtccactttg

SEQ ID NO: 1483112 - DNA, 25 bp, Homo sapien
ttaactgctcttctcccacaagtgg

SEQ ID NO: 1483113 - DNA, 25 bp, Homo sapien
attaactgctcttctcccacaagtg

SEQ ID NO: 1483114 - DNA, 25 bp, Homo sapien
ctggggacatgttggttggttacat

SEQ ID NO: 1483115 - DNA, 25 bp, Homo sapien
tggttggttacattctgccctcctt

SEQ ID NO: 1483116 - DNA, 25 bp, Homo sapien
caccgaggaacgtggacatcaggac

SEQ ID NO: 1483117 - DNA, 25 bp, Homo sapien
gaacgtggacatcaggacgtcagca

SEQ ID NO: 1483118 - DNA, 25 bp, Homo sapien
gctcagatgagtgaagtaacttggc

SEQ ID NO: 1483119 - DNA, 25 bp, Homo sapien
tacagccactaacttgcagagtgag

SEQ ID NO: 1483120 - DNA, 25 bp, Homo sapien
aatattataacaaaccaaggctcag

SEQ ID NO: 1483121 - DNA, 25 bp, Homo sapien
gatgacctggaacaatattcatgac

SEQ ID NO: 1483122 - DNA, 25 bp, Homo sapien
ttcctgtgtacggtcctggaagagg

SEQ ID NO: 1483123 - DNA, 25 bp, Homo sapien
ctccatttcctgtgtacggtcctgg

SEQ ID NO: 1483124 - DNA, 25 bp, Homo sapien
aagaggctcttcactattggacttc

SEQ ID NO: 1483125 - DNA, 25 bp, Homo sapien
agaggctcttcactattggacttcc

SEQ ID NO: 1483126 - DNA, 25 bp, Homo sapien
cacagagtacacaccgtgtacatct

SEQ ID NO: 1483127 - DNA, 25 bp, Homo sapien
tcttctatccttgggcagctgtgct

SEQ ID NO: 1483128 - DNA, 25 bp, Homo sapien
tgtcagagccagtggcacagagtac

SEQ ID NO: 1483129 - DNA, 25 bp, Homo sapien
tcccacactgacatatgtcagagcc

SEQ ID NO: 1483130 - DNA, 25 bp, Homo sapien
tactgctgcgtacggtaatgggaag

SEQ ID NO: 1483131 - DNA, 25 bp, Homo sapien
actgccctctactgctgcgtacggt

SEQ ID NO: 1483132 - DNA, 25 bp, Homo sapien
ccctctactgctgcgtacggtaatg

SEQ ID NO: 1483133 - DNA, 25 bp, Homo sapien
tctactgctgcgtacggtaatggga

SEQ ID NO: 1483134 - DNA, 25 bp, Homo sapien
tcatctaaacactggtcctccttcc

SEQ ID NO: 1483135 - DNA, 25 bp, Homo sapien
catctaaacactggtcctccttcct

SEQ ID NO: 1483136 - DNA, 25 bp, Homo sapien
actcatctaaacactggtcctcctt

SEQ ID NO: 1483137 - DNA, 25 bp, Homo sapien
ccactcatctaaacactggtcctcc

SEQ ID NO: 1483138 - DNA, 25 bp, Homo sapien
atgtgagcagaataaccttgcatgc

SEQ ID NO: 1483139 - DNA, 25 bp, Homo sapien
tcccacacactcagctgaggacgaa

SEQ ID NO: 1483140 - DNA, 25 bp, Homo sapien
tggatatggcgggaaacagaggaaa

SEQ ID NO: 1483141 - DNA, 25 bp, Homo sapien
gacgaactcagctgataagaaatgt

SEQ ID NO: 1483142 - DNA, 25 bp, Homo sapien
tagaattgaggtcattgaaatccat

SEQ ID NO: 1483143 - DNA, 25 bp, Homo sapien
tcacatattgagtacagggttcaag

SEQ ID NO: 1483144 - DNA, 25 bp, Homo sapien
cagggttcaagtgtttggttgcttc

SEQ ID NO: 1483145 - DNA, 25 bp, Homo sapien
aaaaggagggtcacaccaatatcct

SEQ ID NO: 1483146 - DNA, 25 bp, Homo sapien
tcactcttggatagccagactgtaa

SEQ ID NO: 1483147 - DNA, 25 bp, Homo sapien
taaaaattggactgtcaagtcctgg

SEQ ID NO: 1483148 - DNA, 25 bp, Homo sapien
ttcaagctgcaggtcgagttcaggg

SEQ ID NO: 1483149 - DNA, 25 bp, Homo sapien
ggatagccagactgtaatgtaaaaa

SEQ ID NO: 1483150 - DNA, 25 bp, Homo sapien
ggaaagtttgtgggcggtagttgca

SEQ ID NO: 1483151 - DNA, 25 bp, Homo sapien
agtttgtgggcggtagttgcacgtg

SEQ ID NO: 1483152 - DNA, 25 bp, Homo sapien
tttgtgggcggtagttgcacgtgaa

SEQ ID NO: 1483153 - DNA, 25 bp, Homo sapien
tgtgggcggtagttgcacgtgaaat

SEQ ID NO: 1483154 - DNA, 25 bp, Homo sapien
ttagtaccctgcagcaccaattcct

SEQ ID NO: 1483155 - DNA, 25 bp, Homo sapien
aatcttgctgacatgtctcttctga

SEQ ID NO: 1483156 - DNA, 25 bp, Homo sapien
tgacaagaggataaatgctttccat

SEQ ID NO: 1483157 - DNA, 25 bp, Homo sapien
ctgaagtgttgatcagcaagagact

SEQ ID NO: 1483158 - DNA, 25 bp, Homo sapien
gacatgtctcttctgacaagaggat

SEQ ID NO: 1483159 - DNA, 25 bp, Homo sapien
gcgtacctggtaatctttgttacaa

SEQ ID NO: 1483160 - DNA, 25 bp, Homo sapien
gtaaatttcagtaatccaactacag

SEQ ID NO: 1483161 - DNA, 25 bp, Homo sapien
cattccaaagcatgactgaacagcg

SEQ ID NO: 1483162 - DNA, 25 bp, Homo sapien
tgacaataaataaggtgctcttctg

SEQ ID NO: 1483163 - DNA, 25 bp, Homo sapien
tcgtccattgtacgggagggccaag

SEQ ID NO: 1483164 - DNA, 25 bp, Homo sapien
gagggccaaggttgctgcacctgct

SEQ ID NO: 1483165 - DNA, 25 bp, Homo sapien
gctggccaaccttgcatacgtaaat

SEQ ID NO: 1483166 - DNA, 25 bp, Homo sapien
taagacatctttctcgacagcaacc

SEQ ID NO: 1483167 - DNA, 25 bp, Homo sapien
ctcccactcagttgcccaatctgga

SEQ ID NO: 1483168 - DNA, 25 bp, Homo sapien
tgcaagagcagaccaagctatagat

SEQ ID NO: 1483169 - DNA, 25 bp, Homo sapien
cgccctctctcctagcgtgctggga

SEQ ID NO: 1483170 - DNA, 25 bp, Homo sapien
agagcagaccaagctatagatatta

SEQ ID NO: 1483171 - DNA, 25 bp, Homo sapien
cctgaatgtcccagctatggaggct

SEQ ID NO: 1483172 - DNA, 25 bp, Homo sapien
ttaaaactggtaagctggtgcggtg

SEQ ID NO: 1483173 - DNA, 25 bp, Homo sapien
aaaccatcattgtgtttgaaggatt

SEQ ID NO: 1483174 - DNA, 25 bp, Homo sapien
taacctatctagaacctcattaaaa

SEQ ID NO: 1483175 - DNA, 25 bp, Homo sapien
acatagagactgctctgtttgggca

SEQ ID NO: 1483176 - DNA, 25 bp, Homo sapien
cctgaagcatggagagcacattatt

SEQ ID NO: 1483177 - DNA, 25 bp, Homo sapien
tttgtgttgaagactgagacctggc

SEQ ID NO: 1483178 - DNA, 25 bp, Homo sapien
cacattattgggcaagagggccttc

SEQ ID NO: 1483179 - DNA, 25 bp, Homo sapien
catttagtgccaacttttttgcaac

SEQ ID NO: 1483180 - DNA, 25 bp, Homo sapien
ggctgcctagttcctcgcattcttt

SEQ ID NO: 1483181 - DNA, 25 bp, Homo sapien
tgcttctaccttttcagtgctatac

SEQ ID NO: 1483182 - DNA, 25 bp, Homo sapien
gcaactttggctgtcactttccctt

SEQ ID NO: 1483183 - DNA, 25 bp, Homo sapien
gaatcctgcataaaattagtcacat

SEQ ID NO: 1483184 - DNA, 25 bp, Homo sapien
tatagaatcctgcataaaattagtc

SEQ ID NO: 1483185 - DNA, 25 bp, Homo sapien
tgttccattatagaatcctgcataa

SEQ ID NO: 1483186 - DNA, 25 bp, Homo sapien
ctgttccattatagaatcctgcata

SEQ ID NO: 1483187 - DNA, 25 bp, Homo sapien
cctccgcatggttctgttgactgtg

SEQ ID NO: 1483188 - DNA, 25 bp, Homo sapien
tgctagctagaataccaacccctgc

SEQ ID NO: 1483189 - DNA, 25 bp, Homo sapien
tagaatattgatcagcctccgcatg

SEQ ID NO: 1483190 - DNA, 25 bp, Homo sapien
cattcgatcagaccaatagatgagc

SEQ ID NO: 1483191 - DNA, 25 bp, Homo sapien
gccccaggacgtagcacagtgtatg

SEQ ID NO: 1483192 - DNA, 25 bp, Homo sapien
gtggactcactgaatgctcattaat

SEQ ID NO: 1483193 - DNA, 25 bp, Homo sapien
agtgtatggcatgcaggagaccctc

SEQ ID NO: 1483194 - DNA, 25 bp, Homo sapien
tgtatggccataatcaagctcttca

SEQ ID NO: 1483195 - DNA, 25 bp, Homo sapien
ttttatcccaattcttcatgaggca

SEQ ID NO: 1483196 - DNA, 25 bp, Homo sapien
tttatcccaattcttcatgaggcat

SEQ ID NO: 1483197 - DNA, 25 bp, Homo sapien
ttatcccaattcttcatgaggcatt

SEQ ID NO: 1483198 - DNA, 25 bp, Homo sapien
tattttatcccaattcttcatgagg

SEQ ID NO: 1483199 - DNA, 25 bp, Homo sapien
gaagcattgtttgtatccatacgac

SEQ ID NO: 1483200 - DNA, 25 bp, Homo sapien
tgatgttcaaatccaccgataagca

SEQ ID NO: 1483201 - DNA, 25 bp, Homo sapien
gctaaaagtggcagcaacaaagctt

SEQ ID NO: 1483202 - DNA, 25 bp, Homo sapien
taagcacgattgtactacttggcag

SEQ ID NO: 1483203 - DNA, 25 bp, Homo sapien
aaattcatccaattgaacttcacta

SEQ ID NO: 1483204 - DNA, 25 bp, Homo sapien
tcatccaattgaacttcactatcct

SEQ ID NO: 1483205 - DNA, 25 bp, Homo sapien
tttatccctaaattcatccaattga

SEQ ID NO: 1483206 - DNA, 25 bp, Homo sapien
cctaaattcatccaattgaacttca

SEQ ID NO: 1483207 - DNA, 25 bp, Homo sapien
ctcttcctctcaccatccgtgaccc

SEQ ID NO: 1483208 - DNA, 25 bp, Homo sapien
catccgtgaccccatttatccaatt

SEQ ID NO: 1483209 - DNA, 25 bp, Homo sapien
caccatccgtgaccccatttatcca

SEQ ID NO: 1483210 - DNA, 25 bp, Homo sapien
gaccccatttatccaattcaattcc

SEQ ID NO: 1483211 - DNA, 25 bp, Homo sapien
gcagctctgatgttagggctgagga

SEQ ID NO: 1483212 - DNA, 25 bp, Homo sapien
tacctcagctaacttaagagctttt

SEQ ID NO: 1483213 - DNA, 25 bp, Homo sapien
tgtcttctcaggtaactcaaaagag

SEQ ID NO: 1483214 - DNA, 25 bp, Homo sapien
gcagagctttagcttttacctcagc

SEQ ID NO: 1483215 - DNA, 25 bp, Homo sapien
ccggtgccctcagagtcgatgggat

SEQ ID NO: 1483216 - DNA, 25 bp, Homo sapien
ttcctgtgacaaccaacggaaggaa

SEQ ID NO: 1483217 - DNA, 25 bp, Homo sapien
aaggaaatctggtcccatgccggtg

SEQ ID NO: 1483218 - DNA, 25 bp, Homo sapien
cagccatatgtctttcgattgtgcc

SEQ ID NO: 1483219 - DNA, 25 bp, Homo sapien
tccacgactatattcacttttctcc

SEQ ID NO: 1483220 - DNA, 25 bp, Homo sapien
ggtcccttccacgactatattcact

SEQ ID NO: 1483221 - DNA, 25 bp, Homo sapien
aatggtcccttccacgactatattc

SEQ ID NO: 1483222 - DNA, 25 bp, Homo sapien
ccttccacgactatattcacttttc

SEQ ID NO: 1483223 - DNA, 25 bp, Homo sapien
ccggggctggaataggctgtgcact

SEQ ID NO: 1483224 - DNA, 25 bp, Homo sapien
cgaaaattccctgaggcactgtcag

SEQ ID NO: 1483225 - DNA, 25 bp, Homo sapien
gcatggtgtggagcctgttgatcct

SEQ ID NO: 1483226 - DNA, 25 bp, Homo sapien
tgagcttccatctccccgaaaattc

SEQ ID NO: 1483227 - DNA, 25 bp, Homo sapien
ttagcttggagccagcgttccccga

SEQ ID NO: 1483228 - DNA, 25 bp, Homo sapien
cgaagttaggcgagatttctaatgc

SEQ ID NO: 1483229 - DNA, 25 bp, Homo sapien
ttggagccagcgttccccgaagtta

SEQ ID NO: 1483230 - DNA, 25 bp, Homo sapien
cagcgttccccgaagttaggcgaga

SEQ ID NO: 1483231 - DNA, 25 bp, Homo sapien
gaagcagcacccccaaattagcttc

SEQ ID NO: 1483232 - DNA, 25 bp, Homo sapien
agcagcacccccaaattagcttcgg

SEQ ID NO: 1483233 - DNA, 25 bp, Homo sapien
cagcacccccaaattagcttcggtt

SEQ ID NO: 1483234 - DNA, 25 bp, Homo sapien
caaattagcttcggtttcttcaaat

SEQ ID NO: 1483235 - DNA, 25 bp, Homo sapien
ggattatccattcgagttcttttga

SEQ ID NO: 1483236 - DNA, 25 bp, Homo sapien
ctggtgtgttcgtggccatacagga

SEQ ID NO: 1483237 - DNA, 25 bp, Homo sapien
tgatacaaggttttctagactccat

SEQ ID NO: 1483238 - DNA, 25 bp, Homo sapien
gacttcttcttgcatggattatcca

SEQ ID NO: 1483239 - DNA, 25 bp, Homo sapien
tgtctgccccatgcttgcatttatg

SEQ ID NO: 1483240 - DNA, 25 bp, Homo sapien
gaagggtgagattggaaacagtcca

SEQ ID NO: 1483241 - DNA, 25 bp, Homo sapien
gcccactctgcagcatgtaacagca

SEQ ID NO: 1483242 - DNA, 25 bp, Homo sapien
tgaaaaaatgtggacctgatcatag

SEQ ID NO: 1483243 - DNA, 25 bp, Homo sapien
gtttcctcgagactcctttccagaa

SEQ ID NO: 1483244 - DNA, 25 bp, Homo sapien
atcagtttcctcgagactcctttcc

SEQ ID NO: 1483245 - DNA, 25 bp, Homo sapien
agtttcctcgagactcctttccaga

SEQ ID NO: 1483246 - DNA, 25 bp, Homo sapien
cagtttcctcgagactcctttccag

SEQ ID NO: 1483247 - DNA, 25 bp, Homo sapien
actccgatcgccgtaggtatgtttg

SEQ ID NO: 1483248 - DNA, 25 bp, Homo sapien
cgatcgccgtaggtatgtttgctcc

SEQ ID NO: 1483249 - DNA, 25 bp, Homo sapien
taggtatgtttgctccttctcaccc

SEQ ID NO: 1483250 - DNA, 25 bp, Homo sapien
tctatgcagcctggactccgatcgc

SEQ ID NO: 1483251 - DNA, 25 bp, Homo sapien
gatacagtgttaaagtgggcccgca

SEQ ID NO: 1483252 - DNA, 25 bp, Homo sapien
caaaatgtctgggtgcgatgggttc

SEQ ID NO: 1483253 - DNA, 25 bp, Homo sapien
tttttatgcaggtcacaaagcggct

SEQ ID NO: 1483254 - DNA, 25 bp, Homo sapien
tctgcacgtaggaatcaaccactga

SEQ ID NO: 1483255 - DNA, 25 bp, Homo sapien
atttccccaatccacatcatgcaag

SEQ ID NO: 1483256 - DNA, 25 bp, Homo sapien
caatccacatcatgcaagtagctga

SEQ ID NO: 1483257 - DNA, 25 bp, Homo sapien
gggacatcccatggctaggaggaca

SEQ ID NO: 1483258 - DNA, 25 bp, Homo sapien
gggttggattggctgtctccatttc

SEQ ID NO: 1483259 - DNA, 25 bp, Homo sapien
aatgaacgaaccttacagactttgg

SEQ ID NO: 1483260 - DNA, 25 bp, Homo sapien
cgttgtgggcccgtgataattctca

SEQ ID NO: 1483261 - DNA, 25 bp, Homo sapien
tatgcttatgcacagactgacttgc

SEQ ID NO: 1483262 - DNA, 25 bp, Homo sapien
tggagtctggcagtcagccttgtac

SEQ ID NO: 1483263 - DNA, 25 bp, Homo sapien
aagatgcgcgatattgggcctgcag

SEQ ID NO: 1483264 - DNA, 25 bp, Homo sapien
gcctgcagagacatacaatagcaag

SEQ ID NO: 1483265 - DNA, 25 bp, Homo sapien
tctaaacttcttatgaagatgcgcg

SEQ ID NO: 1483266 - DNA, 25 bp, Homo sapien
tctgggcaagagagtttgtcagcaa

SEQ ID NO: 1483267 - DNA, 25 bp, Homo sapien
taaatgatagcaacaagcttgtggt

SEQ ID NO: 1483268 - DNA, 25 bp, Homo sapien
tgcaacatgggagaagacgtggcct

SEQ ID NO: 1483269 - DNA, 25 bp, Homo sapien
ccatttaactcctcataggcaggaa

SEQ ID NO: 1483270 - DNA, 25 bp, Homo sapien
cagtgctcatcagctgtatctagaa

SEQ ID NO: 1483271 - DNA, 25 bp, Homo sapien
tgtgcccaccagtagaataaagttc

SEQ ID NO: 1483272 - DNA, 25 bp, Homo sapien
gagcacttgaagcttgtttgccacc

SEQ ID NO: 1483273 - DNA, 25 bp, Homo sapien
tgtttccagctaggacagtgctgcc

SEQ ID NO: 1483274 - DNA, 25 bp, Homo sapien
gaccgccgtgtctaaaatagtcata

SEQ ID NO: 1483275 - DNA, 25 bp, Homo sapien
taaccagtgaagatctaaattctca

SEQ ID NO: 1483276 - DNA, 25 bp, Homo sapien
tgctgacatcgaccttgaaagctag

SEQ ID NO: 1483277 - DNA, 25 bp, Homo sapien
gaaggacactgattgtgatgcttct

SEQ ID NO: 1483278 - DNA, 25 bp, Homo sapien
tactaaaggtaactctgcagtcctc

SEQ ID NO: 1483279 - DNA, 25 bp, Homo sapien
caccatactctgctaactttaagac

SEQ ID NO: 1483280 - DNA, 25 bp, Homo sapien
gctatagctagatccataccagggc

SEQ ID NO: 1483281 - DNA, 25 bp, Homo sapien
tgcctctagtaagcccattcagaaa

SEQ ID NO: 1483282 - DNA, 25 bp, Homo sapien
taagataaactgtcagactacccaa

SEQ ID NO: 1483283 - DNA, 25 bp, Homo sapien
agaactagcacagccagcatgccat

SEQ ID NO: 1483284 - DNA, 25 bp, Homo sapien
ccagcatgccatgagctcctgagtg

SEQ ID NO: 1483285 - DNA, 25 bp, Homo sapien
gaacaagaatggagagccttggccc

SEQ ID NO: 1483286 - DNA, 25 bp, Homo sapien
ccttggccctcatggagctcgtcat

SEQ ID NO: 1483287 - DNA, 25 bp, Homo sapien
gaagatgcaagatgctagactccaa

SEQ ID NO: 1483288 - DNA, 25 bp, Homo sapien
gagagaggtccagtgtagaataaca

SEQ ID NO: 1483289 - DNA, 25 bp, Homo sapien
aaaataagagagaggtccagtgtag

SEQ ID NO: 1483290 - DNA, 25 bp, Homo sapien
tcttagaagcttagaagttatgagt

SEQ ID NO: 1483291 - DNA, 25 bp, Homo sapien
caaagtaagctgattttatcaagcc

SEQ ID NO: 1483292 - DNA, 25 bp, Homo sapien
caagccaccgggtaattctgaccat

SEQ ID NO: 1483293 - DNA, 25 bp, Homo sapien
ttagtacggtattgttgcagctgac

SEQ ID NO: 1483294 - DNA, 25 bp, Homo sapien
tctgaccatttcatctggcgatttt

SEQ ID NO: 1483295 - DNA, 25 bp, Homo sapien
ctttcagcaccgaatgatgcaggct

SEQ ID NO: 1483296 - DNA, 25 bp, Homo sapien
tgcaaacctgctccactgacggata

SEQ ID NO: 1483297 - DNA, 25 bp, Homo sapien
attaaggccagtggcgagtctcgtg

SEQ ID NO: 1483298 - DNA, 25 bp, Homo sapien
tgacggataccttcccacatgtgtt

SEQ ID NO: 1483299 - DNA, 25 bp, Homo sapien
tactggagcttaacagtcgggtcat

SEQ ID NO: 1483300 - DNA, 25 bp, Homo sapien
tgtaggatgcacctctgtagagaat

SEQ ID NO: 1483301 - DNA, 25 bp, Homo sapien
tctgaagtcatctataattgtagga

SEQ ID NO: 1483302 - DNA, 25 bp, Homo sapien
tgagagaagctacattgctcagctc

SEQ ID NO: 1483303 - DNA, 25 bp, Homo sapien
tcaacatgtattcattgaaccaccg

SEQ ID NO: 1483304 - DNA, 25 bp, Homo sapien
ccgtgtgtcttaggaactattaata

SEQ ID NO: 1483305 - DNA, 25 bp, Homo sapien
aactacttcattcaacatgtattca

SEQ ID NO: 1483306 - DNA, 25 bp, Homo sapien
tgtgtccagccagtgacttccattt

SEQ ID NO: 1483307 - DNA, 25 bp, Homo sapien
aactggctagctttactgaaggaaa

SEQ ID NO: 1483308 - DNA, 25 bp, Homo sapien
tgcaaatgggtgctgcgtgagtatc

SEQ ID NO: 1483309 - DNA, 25 bp, Homo sapien
gaaatgctcaggaaagacggcttct

SEQ ID NO: 1483310 - DNA, 25 bp, Homo sapien
gtctgagccgtacggtcaccaggac

SEQ ID NO: 1483311 - DNA, 25 bp, Homo sapien
caactttgaagtaatgattgtaaat

SEQ ID NO: 1483312 - DNA, 25 bp, Homo sapien
agactgactttgttcgggccactat

SEQ ID NO: 1483313 - DNA, 25 bp, Homo sapien
gaagtaatgattgtaaatgagatct

SEQ ID NO: 1483314 - DNA, 25 bp, Homo sapien
tttgttcgggccactatgcttgggt

SEQ ID NO: 1483315 - DNA, 25 bp, Homo sapien
aaaaccatcagggatgttgtgatca

SEQ ID NO: 1483316 - DNA, 25 bp, Homo sapien
tgtccaaaaccatcagggatgttgt

SEQ ID NO: 1483317 - DNA, 25 bp, Homo sapien
ccatcagggatgttgtgatcaacat

SEQ ID NO: 1483318 - DNA, 25 bp, Homo sapien
tctgtccaaaaccatcagggatgtt

SEQ ID NO: 1483319 - DNA, 25 bp, Homo sapien
ataactaaattttgatgcccagagt

SEQ ID NO: 1483320 - DNA, 25 bp, Homo sapien
gttttgattatagaaccatcgagtt

SEQ ID NO: 1483321 - DNA, 25 bp, Homo sapien
gcccagagttgacagcataggtaaa

SEQ ID NO: 1483322 - DNA, 25 bp, Homo sapien
cataggtaaactgttcacttttctc

SEQ ID NO: 1483323 - DNA, 25 bp, Homo sapien
tgttaatgcattctgtttgcccatc

SEQ ID NO: 1483324 - DNA, 25 bp, Homo sapien
gaacgttgaatgttaatgcattctg

SEQ ID NO: 1483325 - DNA, 25 bp, Homo sapien
atttggtaaatgaacgttgaatgtt

SEQ ID NO: 1483326 - DNA, 25 bp, Homo sapien
taaatgaacgttgaatgttaatgca

SEQ ID NO: 1483327 - DNA, 25 bp, Homo sapien
caaacaaggtgctatgtaatcattg

SEQ ID NO: 1483328 - DNA, 25 bp, Homo sapien
gaagcgcgcaagttggtctcataga

SEQ ID NO: 1483329 - DNA, 25 bp, Homo sapien
gttctgcttcaaatcgcctggacta

SEQ ID NO: 1483330 - DNA, 25 bp, Homo sapien
tattgatgaatttcagaagcgcgca

SEQ ID NO: 1483331 - DNA, 25 bp, Homo sapien
caaagtttgtgaatccctcttcttc

SEQ ID NO: 1483332 - DNA, 25 bp, Homo sapien
tcatctcctttaatactagttcaat

SEQ ID NO: 1483333 - DNA, 25 bp, Homo sapien
tcttcccgagagaattgattgtgac

SEQ ID NO: 1483334 - DNA, 25 bp, Homo sapien
taatcacatccctaaccaaagtttg

SEQ ID NO: 1483335 - DNA, 25 bp, Homo sapien
caaaatacaaacgaagttcacagga

SEQ ID NO: 1483336 - DNA, 25 bp, Homo sapien
tatctggccattcaaagcttttgtg

SEQ ID NO: 1483337 - DNA, 25 bp, Homo sapien
caggatatctgtctatagatagaca

SEQ ID NO: 1483338 - DNA, 25 bp, Homo sapien
aaattagatgttatctggccattca

SEQ ID NO: 1483339 - DNA, 25 bp, Homo sapien
gactttgtcgctgtagctcttctcc

SEQ ID NO: 1483340 - DNA, 25 bp, Homo sapien
tgtagaacagttgtataagcactgt

SEQ ID NO: 1483341 - DNA, 25 bp, Homo sapien
tgtgttcccaaaagagtcgtgacat

SEQ ID NO: 1483342 - DNA, 25 bp, Homo sapien
tttgccattgactttgtcgctgtag

SEQ ID NO: 1483343 - DNA, 25 bp, Homo sapien
ttgccataggagagtgaatcaaact

SEQ ID NO: 1483344 - DNA, 25 bp, Homo sapien
tctccttgccataggagagtgaatc

SEQ ID NO: 1483345 - DNA, 25 bp, Homo sapien
ccttgccataggagagtgaatcaaa

SEQ ID NO: 1483346 - DNA, 25 bp, Homo sapien
aatctccttgccataggagagtgaa

SEQ ID NO: 1483347 - DNA, 25 bp, Homo sapien
ttataggattctcttagggcagtca

SEQ ID NO: 1483348 - DNA, 25 bp, Homo sapien
gtggatgattgtgaacccgttggtt

SEQ ID NO: 1483349 - DNA, 25 bp, Homo sapien
cttctccagcaacattataggattc

SEQ ID NO: 1483350 - DNA, 25 bp, Homo sapien
ggcagtcacaaagactgcatatcct

SEQ ID NO: 1483351 - DNA, 25 bp, Homo sapien
tatttccactatccatgtgccagct

SEQ ID NO: 1483352 - DNA, 25 bp, Homo sapien
gcagctccttctgcacgatttgagg

SEQ ID NO: 1483353 - DNA, 25 bp, Homo sapien
tatcctatagttgtctagaatgttc

SEQ ID NO: 1483354 - DNA, 25 bp, Homo sapien
agctttgcaacctctcagcaaggct

SEQ ID NO: 1483355 - DNA, 25 bp, Homo sapien
tctggtggtacagctcgtaaatctg

SEQ ID NO: 1483356 - DNA, 25 bp, Homo sapien
cattgttataacagagaggtgctca

SEQ ID NO: 1483357 - DNA, 25 bp, Homo sapien
taaacggcttctgtactagtctgag

SEQ ID NO: 1483358 - DNA, 25 bp, Homo sapien
tagtctgagatgagccttacctaag

SEQ ID NO: 1483359 - DNA, 25 bp, Homo sapien
cactggggcatcaaggctagtcctc

SEQ ID NO: 1483360 - DNA, 25 bp, Homo sapien
ctgagcaccttggccactggggcat

SEQ ID NO: 1483361 - DNA, 25 bp, Homo sapien
ggcatcaaggctagtcctcttcctt

SEQ ID NO: 1483362 - DNA, 25 bp, Homo sapien
gccactggggcatcaaggctagtcc

SEQ ID NO: 1483363 - DNA, 25 bp, Homo sapien
tcatcaaacttctcaacactgtact

SEQ ID NO: 1483364 - DNA, 25 bp, Homo sapien
tgtgctaaatgaccttgcagatatg

SEQ ID NO: 1483365 - DNA, 25 bp, Homo sapien
caaggtggaaataatgcaaggtaga

SEQ ID NO: 1483366 - DNA, 25 bp, Homo sapien
ggtagaaaagtcactctgcacatca

SEQ ID NO: 1483367 - DNA, 25 bp, Homo sapien
tgtgagtgctttgcgaatgatccca

SEQ ID NO: 1483368 - DNA, 25 bp, Homo sapien
agtgctttgcgaatgatcccatcaa

SEQ ID NO: 1483369 - DNA, 25 bp, Homo sapien
tcaaaacaccactacccctgtgagt

SEQ ID NO: 1483370 - DNA, 25 bp, Homo sapien
tacccctgtgagtgctttgcgaatg

SEQ ID NO: 1483371 - DNA, 25 bp, Homo sapien
ggaggatttatagcctccagcagca

SEQ ID NO: 1483372 - DNA, 25 bp, Homo sapien
tggagatcccggtaactgcagtaag

SEQ ID NO: 1483373 - DNA, 25 bp, Homo sapien
cacttaaactctgactcttggagga

SEQ ID NO: 1483374 - DNA, 25 bp, Homo sapien
ttaactctgcggaggtagccctggg

SEQ ID NO: 1483375 - DNA, 25 bp, Homo sapien
tgttgatctgcgtgtgccaagccac

SEQ ID NO: 1483376 - DNA, 25 bp, Homo sapien
catataatgactcttcttccacgca

SEQ ID NO: 1483377 - DNA, 25 bp, Homo sapien
tcattgcactcaaaggaggccgcgt

SEQ ID NO: 1483378 - DNA, 25 bp, Homo sapien
gatctgtgtgttgcagctgccagca

SEQ ID NO: 1483379 - DNA, 25 bp, Homo sapien
tgttgtgccctggtaacatttctga

SEQ ID NO: 1483380 - DNA, 25 bp, Homo sapien
accctttgaggccaagagcagtagt

SEQ ID NO: 1483381 - DNA, 25 bp, Homo sapien
tgtcctcatttgaccattcacatcc

SEQ ID NO: 1483382 - DNA, 25 bp, Homo sapien
ggccaagagcagtagttgtcctcat

SEQ ID NO: 1483383 - DNA, 25 bp, Homo sapien
tttaatgctgattaagtcttccctg

SEQ ID NO: 1483384 - DNA, 25 bp, Homo sapien
gagttgagacaagtgattagtgact

SEQ ID NO: 1483385 - DNA, 25 bp, Homo sapien
gagacaagtgattagtgactatgca

SEQ ID NO: 1483386 - DNA, 25 bp, Homo sapien
attgcctttaatgctgattaagtct

SEQ ID NO: 1483387 - DNA, 25 bp, Homo sapien
cagtttgctgccatctaggtggcct

SEQ ID NO: 1483388 - DNA, 25 bp, Homo sapien
aaggcggtgctttgcgattgatggc

SEQ ID NO: 1483389 - DNA, 25 bp, Homo sapien
tgccatctaggtggcctagtagctg

SEQ ID NO: 1483390 - DNA, 25 bp, Homo sapien
aagcatccagaatgcagagaaggcg

SEQ ID NO: 1483391 - DNA, 25 bp, Homo sapien
gacctccagataacaagctcagaat

SEQ ID NO: 1483392 - DNA, 25 bp, Homo sapien
agcataatctagtagactgcctggg

SEQ ID NO: 1483393 - DNA, 25 bp, Homo sapien
tccccacagagcatctatatgtaag

SEQ ID NO: 1483394 - DNA, 25 bp, Homo sapien
ggtccaggaagtaccaagcaaggtg

SEQ ID NO: 1483395 - DNA, 25 bp, Homo sapien
ccttggtgtccagtctttaaagcat

SEQ ID NO: 1483396 - DNA, 25 bp, Homo sapien
gcctcatcttggagtcctgctctca

SEQ ID NO: 1483397 - DNA, 25 bp, Homo sapien
taaagcatatggatgcgtctgcctc

SEQ ID NO: 1483398 - DNA, 25 bp, Homo sapien
cagtccatggactaagagcaccgta

SEQ ID NO: 1483399 - DNA, 25 bp, Homo sapien
gcatgtgcgtgaccatctgctacgg

SEQ ID NO: 1483400 - DNA, 25 bp, Homo sapien
taataactgtcgaaaggagcctgca

SEQ ID NO: 1483401 - DNA, 25 bp, Homo sapien
tctgctacgggcacagaatgccagg

SEQ ID NO: 1483402 - DNA, 25 bp, Homo sapien
gcggtgccctctgtctcgttggtga

SEQ ID NO: 1483403 - DNA, 25 bp, Homo sapien
gcacgcatacacttttactctagaa

SEQ ID NO: 1483404 - DNA, 25 bp, Homo sapien
tgtgtaaattagagcgttaacccca

SEQ ID NO: 1483405 - DNA, 25 bp, Homo sapien
tgcagcactcaaatacttcacacgg

SEQ ID NO: 1483406 - DNA, 25 bp, Homo sapien
taaaagctcatcagtggcctgcagc

SEQ ID NO: 1483407 - DNA, 25 bp, Homo sapien
tcggaaaattgagtaccgtcactgt

SEQ ID NO: 1483408 - DNA, 25 bp, Homo sapien
taccaaagcagattgctcagaggcc

SEQ ID NO: 1483409 - DNA, 25 bp, Homo sapien
cttgattcatggtgcacgtgtgggc

SEQ ID NO: 1483410 - DNA, 25 bp, Homo sapien
tacacaccattgatggatggcagga

SEQ ID NO: 1483411 - DNA, 25 bp, Homo sapien
tcacctcagctaggtccagaaagag

SEQ ID NO: 1483412 - DNA, 25 bp, Homo sapien
tatcactcggtgtctttgtttcacc

SEQ ID NO: 1483413 - DNA, 25 bp, Homo sapien
tattctgattatttagcgatgccag

SEQ ID NO: 1483414 - DNA, 25 bp, Homo sapien
tgccagaggctctcttagagtaatt

SEQ ID NO: 1483415 - DNA, 25 bp, Homo sapien
aggcaccagatttctcctgatgatc

SEQ ID NO: 1483416 - DNA, 25 bp, Homo sapien
tcctgatgatcagtatcagtgttgt

SEQ ID NO: 1483417 - DNA, 25 bp, Homo sapien
ccttggactgagtatgtaactggca

SEQ ID NO: 1483418 - DNA, 25 bp, Homo sapien
cagtgttgtttcacatacgcttcgg

SEQ ID NO: 1483419 - DNA, 25 bp, Homo sapien
cagaagagcaactgagcaaaattat

SEQ ID NO: 1483420 - DNA, 25 bp, Homo sapien
caacccgaaatcagcaccacagaag

SEQ ID NO: 1483421 - DNA, 25 bp, Homo sapien
acagaagagcaactgagcaaaatta

SEQ ID NO: 1483422 - DNA, 25 bp, Homo sapien
ggacggccccaacccgaaatcagca

SEQ ID NO: 1483423 - DNA, 25 bp, Homo sapien
tgaaaccagacactgcctggtttgc

SEQ ID NO: 1483424 - DNA, 25 bp, Homo sapien
caaaactctgaaaccagacactgcc

SEQ ID NO: 1483425 - DNA, 25 bp, Homo sapien
gtcaaaactctgaaaccagacactg

SEQ ID NO: 1483426 - DNA, 25 bp, Homo sapien
tctgaaaccagacactgcctggttt

SEQ ID NO: 1483427 - DNA, 25 bp, Homo sapien
agagtctctgcagcccctaaggcag

SEQ ID NO: 1483428 - DNA, 25 bp, Homo sapien
gagtctctgcagcccctaaggcagg

SEQ ID NO: 1483429 - DNA, 25 bp, Homo sapien
ggccctgagctgctagaaagcagag

SEQ ID NO: 1483430 - DNA, 25 bp, Homo sapien
ctgactgcctgtttagaatctggga

SEQ ID NO: 1483431 - DNA, 25 bp, Homo sapien
cgacatgagtcatgccgctggcctt

SEQ ID NO: 1483432 - DNA, 25 bp, Homo sapien
accagcaaagaccttacaacaatct

SEQ ID NO: 1483433 - DNA, 25 bp, Homo sapien
agatggacgacatgagtcatgccgc

SEQ ID NO: 1483434 - DNA, 25 bp, Homo sapien
ggttgaagcagttccacgacaactg

SEQ ID NO: 1483435 - DNA, 25 bp, Homo sapien
ctctgcagcagtagaggttgaagca

SEQ ID NO: 1483436 - DNA, 25 bp, Homo sapien
gacaactgcccacgtatgtagggat

SEQ ID NO: 1483437 - DNA, 25 bp, Homo sapien
tggctgtacttcctttctatgctga

SEQ ID NO: 1483438 - DNA, 25 bp, Homo sapien
gaaagcccgaatttgtttctcagcc

SEQ ID NO: 1483439 - DNA, 25 bp, Homo sapien
tcccgagtgccactgggagagtttg

SEQ ID NO: 1483440 - DNA, 25 bp, Homo sapien
gcccgaatttgtttctcagccctcc

SEQ ID NO: 1483441 - DNA, 25 bp, Homo sapien
cccgagtgccactgggagagtttgg

SEQ ID NO: 1483442 - DNA, 25 bp, Homo sapien
taagagccattgctccatattaggt

SEQ ID NO: 1483443 - DNA, 25 bp, Homo sapien
ttattccggttttggtgttcagaga

SEQ ID NO: 1483444 - DNA, 25 bp, Homo sapien
gagatgttttgttcacaataagagc

SEQ ID NO: 1483445 - DNA, 25 bp, Homo sapien
tgctccatattaggtaacatctttt

SEQ ID NO: 1483446 - DNA, 25 bp, Homo sapien
tctgtttgatatcctccgcgaactg

SEQ ID NO: 1483447 - DNA, 25 bp, Homo sapien
gaacgggtagctgcttcagcgcctg

SEQ ID NO: 1483448 - DNA, 25 bp, Homo sapien
gactgagctaagctgaagttcctgg

SEQ ID NO: 1483449 - DNA, 25 bp, Homo sapien
ccctttaaagacacgtttgattgca

SEQ ID NO: 1483450 - DNA, 25 bp, Homo sapien
tgtggtattgccattcaccaggtag

SEQ ID NO: 1483451 - DNA, 25 bp, Homo sapien
ggtattgccattcaccaggtagttt

SEQ ID NO: 1483452 - DNA, 25 bp, Homo sapien
gtggtttgatgtggtattgccattc

SEQ ID NO: 1483453 - DNA, 25 bp, Homo sapien
tgatgtggtattgccattcaccagg

SEQ ID NO: 1483454 - DNA, 25 bp, Homo sapien
ctggaacacttcagtaaccattccc

SEQ ID NO: 1483455 - DNA, 25 bp, Homo sapien
gtgcaggatcttgcgcagttttcca

SEQ ID NO: 1483456 - DNA, 25 bp, Homo sapien
aaccattccctgaatgttgcaccca

SEQ ID NO: 1483457 - DNA, 25 bp, Homo sapien
aggatcttgcgcagttttccacttc

SEQ ID NO: 1483458 - DNA, 25 bp, Homo sapien
ctgtcgagaaaagacagtgtgctca

SEQ ID NO: 1483459 - DNA, 25 bp, Homo sapien
tgaatattcccttggagggacgaag

SEQ ID NO: 1483460 - DNA, 25 bp, Homo sapien
ctgaatattcccttggagggacgaa

SEQ ID NO: 1483461 - DNA, 25 bp, Homo sapien
ctgggctgtcgagaaaagacagtgt

SEQ ID NO: 1483462 - DNA, 25 bp, Homo sapien
tgagtttatgaaatgcagaggctgt

SEQ ID NO: 1483463 - DNA, 25 bp, Homo sapien
ctgggggtgagtttatgaaatgcag

SEQ ID NO: 1483464 - DNA, 25 bp, Homo sapien
tatgaaatgcagaggctgtggaatc

SEQ ID NO: 1483465 - DNA, 25 bp, Homo sapien
atgcagaggctgtggaatccctgaa

SEQ ID NO: 1483466 - DNA, 25 bp, Homo sapien
ctgctgtagctgttggggtttcttt

SEQ ID NO: 1483467 - DNA, 25 bp, Homo sapien
gctgtagctgttggggtttcttttc

SEQ ID NO: 1483468 - DNA, 25 bp, Homo sapien
gctgctgtagctgttggggtttctt

SEQ ID NO: 1483469 - DNA, 25 bp, Homo sapien
gttgctgctgtagctgttggggttt

SEQ ID NO: 1483470 - DNA, 25 bp, Homo sapien
gaaactttactggattggtcaacaa

SEQ ID NO: 1483471 - DNA, 25 bp, Homo sapien
cgtggaaagttattaggagacaatc

SEQ ID NO: 1483472 - DNA, 25 bp, Homo sapien
tggagggcctggagagttcataaac

SEQ ID NO: 1483473 - DNA, 25 bp, Homo sapien
ggaacaggcttctcggttacttgcc

SEQ ID NO: 1483474 - DNA, 25 bp, Homo sapien
tacttcctgagtatatacaggtgta

SEQ ID NO: 1483475 - DNA, 25 bp, Homo sapien
taacccagggcctataatacagcca

SEQ ID NO: 1483476 - DNA, 25 bp, Homo sapien
tacaggtgtaaactatagctacgca

SEQ ID NO: 1483477 - DNA, 25 bp, Homo sapien
tctgtagacacataacatggaaggg

SEQ ID NO: 1483478 - DNA, 25 bp, Homo sapien
agtcatgaagaggatgcagccagct

SEQ ID NO: 1483479 - DNA, 25 bp, Homo sapien
agagtcatgaagaggatgcagccag

SEQ ID NO: 1483480 - DNA, 25 bp, Homo sapien
atgaagaggatgcagccagctacgg

SEQ ID NO: 1483481 - DNA, 25 bp, Homo sapien
tcatgaagaggatgcagccagctac

SEQ ID NO: 1483482 - DNA, 25 bp, Homo sapien
tgtgattcccatatgctgagcatgc

SEQ ID NO: 1483483 - DNA, 25 bp, Homo sapien
tgcacctgaagaccacacgtgagct

SEQ ID NO: 1483484 - DNA, 25 bp, Homo sapien
aataatccaggtgctttcatcgggc

SEQ ID NO: 1483485 - DNA, 25 bp, Homo sapien
tgcaaacctcagtagaccaaagatg

SEQ ID NO: 1483486 - DNA, 25 bp, Homo sapien
gctggcagtgcccagtagagcacac

SEQ ID NO: 1483487 - DNA, 25 bp, Homo sapien
gcacaccaacaagtcccataaagga

SEQ ID NO: 1483488 - DNA, 25 bp, Homo sapien
ggctttgaagatccttactcctgaa

SEQ ID NO: 1483489 - DNA, 25 bp, Homo sapien
tccttactcctgaatggtgtcccac

SEQ ID NO: 1483490 - DNA, 25 bp, Homo sapien
agttagctttgaaaatagggatgca

SEQ ID NO: 1483491 - DNA, 25 bp, Homo sapien
tgcaatgtgccgaatcgacctcacc

SEQ ID NO: 1483492 - DNA, 25 bp, Homo sapien
aaatagggatgcaatgtgccgaatc

SEQ ID NO: 1483493 - DNA, 25 bp, Homo sapien
tgcccttaagttagctttgaaaata

SEQ ID NO: 1483494 - DNA, 25 bp, Homo sapien
gaaagcccatgtgcgctgaagtttt

SEQ ID NO: 1483495 - DNA, 25 bp, Homo sapien
gccattgtgactgtctaggtctgga

SEQ ID NO: 1483496 - DNA, 25 bp, Homo sapien
ctggattttccagccgtgttcggac

SEQ ID NO: 1483497 - DNA, 25 bp, Homo sapien
tgttcggactccatgcattcggttc

SEQ ID NO: 1483498 - DNA, 25 bp, Homo sapien
gataattccgggcctctgttccagc

SEQ ID NO: 1483499 - DNA, 25 bp, Homo sapien
tgatttttattccctgcacgttctc

SEQ ID NO: 1483500 - DNA, 25 bp, Homo sapien
ggtgataattccgggcctctgttcc

SEQ ID NO: 1483501 - DNA, 25 bp, Homo sapien
ttggtgataattccgggcctctgtt

SEQ ID NO: 1483502 - DNA, 25 bp, Homo sapien
agtgaagcaagatcaagcagttcct

SEQ ID NO: 1483503 - DNA, 25 bp, Homo sapien
gtgaagcaagatcaagcagttcctt

SEQ ID NO: 1483504 - DNA, 25 bp, Homo sapien
gcttagcatggacagtgttattccc

SEQ ID NO: 1483505 - DNA, 25 bp, Homo sapien
gactcaggttcccaaatgtccaatg

SEQ ID NO: 1483506 - DNA, 25 bp, Homo sapien
gactggaactgtgtagataggagct

SEQ ID NO: 1483507 - DNA, 25 bp, Homo sapien
ccaaatgtccaatggcgggtggact

SEQ ID NO: 1483508 - DNA, 25 bp, Homo sapien
catgttcatggtgggcacgcccact

SEQ ID NO: 1483509 - DNA, 25 bp, Homo sapien
caggtggaccaagcgcagggccact

SEQ ID NO: 1483510 - DNA, 25 bp, Homo sapien
acacaggtggaccaagcgcagggcc

SEQ ID NO: 1483511 - DNA, 25 bp, Homo sapien
ctcatgttcatggtgggcacgccca

SEQ ID NO: 1483512 - DNA, 25 bp, Homo sapien
gagtctctttatcagggtggatgct

SEQ ID NO: 1483513 - DNA, 25 bp, Homo sapien
cttctgctgttggacattgggccat

SEQ ID NO: 1483514 - DNA, 25 bp, Homo sapien
tgaagggaacacctgcatccataaa

SEQ ID NO: 1483515 - DNA, 25 bp, Homo sapien
tttaagatggtaccctagaagtgaa

SEQ ID NO: 1483516 - DNA, 25 bp, Homo sapien
gcacctggaatgaaccggggagccc

SEQ ID NO: 1483517 - DNA, 25 bp, Homo sapien
acaaagggaggtagacaagccagca

SEQ ID NO: 1483518 - DNA, 25 bp, Homo sapien
tgagggaacaaagggaggtagacaa

SEQ ID NO: 1483519 - DNA, 25 bp, Homo sapien
cctgctccataactcagcttctgag

SEQ ID NO: 1483520 - DNA, 25 bp, Homo sapien
cagagacccaatatgctctctgcct

SEQ ID NO: 1483521 - DNA, 25 bp, Homo sapien
gacccaatatgctctctgcctacat

SEQ ID NO: 1483522 - DNA, 25 bp, Homo sapien
tatgctctctgcctacatggagctc

SEQ ID NO: 1483523 - DNA, 25 bp, Homo sapien
tctgcctacatggagctcctggatt

SEQ ID NO: 1483524 - DNA, 25 bp, Homo sapien
tttaagtgttgaggccacagtctct

SEQ ID NO: 1483525 - DNA, 25 bp, Homo sapien
ggagcagtcatcctaatgtcaaagc

SEQ ID NO: 1483526 - DNA, 25 bp, Homo sapien
gcaggacagcgacggcatcagtttc

SEQ ID NO: 1483527 - DNA, 25 bp, Homo sapien
ctgtgacactgaccatatatgatgg

SEQ ID NO: 1483528 - DNA, 25 bp, Homo sapien
gggcaggcagagatcgaaggaagct

SEQ ID NO: 1483529 - DNA, 25 bp, Homo sapien
cagagatcgaaggaagcttcagcat

SEQ ID NO: 1483530 - DNA, 25 bp, Homo sapien
ctggcttcattcttagcagctcagg

SEQ ID NO: 1483531 - DNA, 25 bp, Homo sapien
caggcagagatcgaaggaagcttca

SEQ ID NO: 1483532 - DNA, 25 bp, Homo sapien
tgtagacatctgaactcccatgcca

SEQ ID NO: 1483533 - DNA, 25 bp, Homo sapien
tttgtagacatctgaactcccatgc

SEQ ID NO: 1483534 - DNA, 25 bp, Homo sapien
acatttgtagacatctgaactccca

SEQ ID NO: 1483535 - DNA, 25 bp, Homo sapien
agacatctgaactcccatgccaaga

SEQ ID NO: 1483536 - DNA, 25 bp, Homo sapien
gattcattagggtatccaagggtgt

SEQ ID NO: 1483537 - DNA, 25 bp, Homo sapien
gcaggtcggccagaaatgggagatt

SEQ ID NO: 1483538 - DNA, 25 bp, Homo sapien
ggagacgtagagtgaagaaccaccc

SEQ ID NO: 1483539 - DNA, 25 bp, Homo sapien
tgtcagaggtgtcctcggagacgta

SEQ ID NO: 1483540 - DNA, 25 bp, Homo sapien
gcttccattcggctacggagcaaga

SEQ ID NO: 1483541 - DNA, 25 bp, Homo sapien
gcggctcccgcgaagatgtactgga

SEQ ID NO: 1483542 - DNA, 25 bp, Homo sapien
tttcagacatccagcaggcgatccg

SEQ ID NO: 1483543 - DNA, 25 bp, Homo sapien
caatgcattcgattcgcacggtgga

SEQ ID NO: 1483544 - DNA, 25 bp, Homo sapien
tccctgagccgagggtccagaactg

SEQ ID NO: 1483545 - DNA, 25 bp, Homo sapien
cgggtctcaagtcgcctgtcagtca

SEQ ID NO: 1483546 - DNA, 25 bp, Homo sapien
gcggatggcttccagaacgtgttca

SEQ ID NO: 1483547 - DNA, 25 bp, Homo sapien
aacgtgttcacaggtgagcgcgccc

SEQ ID NO: 1483548 - DNA, 25 bp, Homo sapien
agagaagaatttggcgatgtaagcg

SEQ ID NO: 1483549 - DNA, 25 bp, Homo sapien
gatgggtctgaaacatcctttctca

SEQ ID NO: 1483550 - DNA, 25 bp, Homo sapien
aatttggcgatgtaagcggggacca

SEQ ID NO: 1483551 - DNA, 25 bp, Homo sapien
gaccagaacactgatcttcaatcat

SEQ ID NO: 1483552 - DNA, 25 bp, Homo sapien
caaggcattgccgtctagctttgcc

SEQ ID NO: 1483553 - DNA, 25 bp, Homo sapien
caaacaaggcattgccgtctagctt

SEQ ID NO: 1483554 - DNA, 25 bp, Homo sapien
tcccaaacaaggcattgccgtctag

SEQ ID NO: 1483555 - DNA, 25 bp, Homo sapien
cattgccgtctagctttgccatatt

SEQ ID NO: 1483556 - DNA, 25 bp, Homo sapien
tggtccaaatccctttattagccat

SEQ ID NO: 1483557 - DNA, 25 bp, Homo sapien
tatgttggtccaaatccctttatta

SEQ ID NO: 1483558 - DNA, 25 bp, Homo sapien
tcagtgaattttgattcctccaggg

SEQ ID NO: 1483559 - DNA, 25 bp, Homo sapien
tgttggtccaaatccctttattagc

SEQ ID NO: 1483560 - DNA, 25 bp, Homo sapien
atgcatggcccactgatacatcagc

SEQ ID NO: 1483561 - DNA, 25 bp, Homo sapien
aggatgcatggcccactgatacatc

SEQ ID NO: 1483562 - DNA, 25 bp, Homo sapien
tgcatggcccactgatacatcagct

SEQ ID NO: 1483563 - DNA, 25 bp, Homo sapien
gatgcatggcccactgatacatcag

SEQ ID NO: 1483564 - DNA, 25 bp, Homo sapien
ttagagatcataattggggttcttc

SEQ ID NO: 1483565 - DNA, 25 bp, Homo sapien
cataattggggttcttccgaaggat

SEQ ID NO: 1483566 - DNA, 25 bp, Homo sapien
tggccaattctgcccgttccccgtg

SEQ ID NO: 1483567 - DNA, 25 bp, Homo sapien
gagatcataattggggttcttccga

SEQ ID NO: 1483568 - DNA, 25 bp, Homo sapien
ctggaaccctgtgatggtcttaggc

SEQ ID NO: 1483569 - DNA, 25 bp, Homo sapien
cctgtgatggtcttaggcttgccag

SEQ ID NO: 1483570 - DNA, 25 bp, Homo sapien
tgtgatggtcttaggcttgccagcc

SEQ ID NO: 1483571 - DNA, 25 bp, Homo sapien
accctgtgatggtcttaggcttgcc

SEQ ID NO: 1483572 - DNA, 25 bp, Homo sapien
agctcctcatcaaacgtaaccagca

SEQ ID NO: 1483573 - DNA, 25 bp, Homo sapien
tcatcaaacgtaaccagcattcggg

SEQ ID NO: 1483574 - DNA, 25 bp, Homo sapien
cccatacaatacatagtgtgatttg

SEQ ID NO: 1483575 - DNA, 25 bp, Homo sapien
ccatacaatacatagtgtgatttgc

SEQ ID NO: 1483576 - DNA, 25 bp, Homo sapien
aagagagaggcacggtgagcagccc

SEQ ID NO: 1483577 - DNA, 25 bp, Homo sapien
agagaggcacggtgagcagcccagc

SEQ ID NO: 1483578 - DNA, 25 bp, Homo sapien
cactggactcataagctgccagtca

SEQ ID NO: 1483579 - DNA, 25 bp, Homo sapien
atggccactggactcataagctgcc

SEQ ID NO: 1483580 - DNA, 25 bp, Homo sapien
gtgtcaggccctgtgccaagtgcac

SEQ ID NO: 1483581 - DNA, 25 bp, Homo sapien
ctaaatgtgtcaggccctgtgccaa

SEQ ID NO: 1483582 - DNA, 25 bp, Homo sapien
tgtgtcaggccctgtgccaagtgca

SEQ ID NO: 1483583 - DNA, 25 bp, Homo sapien
aatgtgtcaggccctgtgccaagtg

SEQ ID NO: 1483584 - DNA, 25 bp, Homo sapien
ggtccttggcatgatattgagctaa

SEQ ID NO: 1483585 - DNA, 25 bp, Homo sapien
gggtccttggcatgatattgagcta

SEQ ID NO: 1483586 - DNA, 25 bp, Homo sapien
caccatgcccatggcaaaaatggag

SEQ ID NO: 1483587 - DNA, 25 bp, Homo sapien
ttgcttagggtatccaggatgttga

SEQ ID NO: 1483588 - DNA, 25 bp, Homo sapien
aatttgcttagggtatccaggatgt

SEQ ID NO: 1483589 - DNA, 25 bp, Homo sapien
catggcaaaaatggagttataggaa

SEQ ID NO: 1483590 - DNA, 25 bp, Homo sapien
caaaggttcatagtgccgtctctgc

SEQ ID NO: 1483591 - DNA, 25 bp, Homo sapien
catagtgccgtctctgcaccaatct

SEQ ID NO: 1483592 - DNA, 25 bp, Homo sapien
tcatagtgccgtctctgcaccaatc

SEQ ID NO: 1483593 - DNA, 25 bp, Homo sapien
agtggccaaaggttcatagtgccgt

SEQ ID NO: 1483594 - DNA, 25 bp, Homo sapien
tgttggcaaaactgcggaatggctc

SEQ ID NO: 1483595 - DNA, 25 bp, Homo sapien
gttggcaaaactgcggaatggctct

SEQ ID NO: 1483596 - DNA, 25 bp, Homo sapien
ttgagctcagtacttctccctgatg

SEQ ID NO: 1483597 - DNA, 25 bp, Homo sapien
tgagctcagtacttctccctgatgg

SEQ ID NO: 1483598 - DNA, 25 bp, Homo sapien
catgatttgagccagcgtaggccaa

SEQ ID NO: 1483599 - DNA, 25 bp, Homo sapien
tgatttgagccagcgtaggccaagc

SEQ ID NO: 1483600 - DNA, 25 bp, Homo sapien
ttcatgatttgagccagcgtaggcc

SEQ ID NO: 1483601 - DNA, 25 bp, Homo sapien
tcttcatgatttgagccagcgtagg

SEQ ID NO: 1483602 - DNA, 25 bp, Homo sapien
gcagcagcatcccaacagatgcagc

SEQ ID NO: 1483603 - DNA, 25 bp, Homo sapien
tctgaatgaggccaccatccacatc

SEQ ID NO: 1483604 - DNA, 25 bp, Homo sapien
ttctcaatctgaatgaggccaccat

SEQ ID NO: 1483605 - DNA, 25 bp, Homo sapien
caacagatgcagctgcactcaacat

SEQ ID NO: 1483606 - DNA, 25 bp, Homo sapien
tccttgttcttgtaaagccatttgt

SEQ ID NO: 1483607 - DNA, 25 bp, Homo sapien
ccttgttcttgtaaagccatttgtt

SEQ ID NO: 1483608 - DNA, 25 bp, Homo sapien
gcagagtccacctgagagccactgc

SEQ ID NO: 1483609 - DNA, 25 bp, Homo sapien
aggttcatgcgggcagagtccacct

SEQ ID NO: 1483610 - DNA, 25 bp, Homo sapien
aggccaggttcatgcgggcagagtc

SEQ ID NO: 1483611 - DNA, 25 bp, Homo sapien
ggcagagtccacctgagagccactg

SEQ ID NO: 1483612 - DNA, 25 bp, Homo sapien
ttgtagatgtcatcaggcaccttgg

SEQ ID NO: 1483613 - DNA, 25 bp, Homo sapien
tgtagatgtcatcaggcaccttggg

SEQ ID NO: 1483614 - DNA, 25 bp, Homo sapien
gtagatgtcatcaggcaccttgggc

SEQ ID NO: 1483615 - DNA, 25 bp, Homo sapien
gagctaaggccaagaagttgctgtt

SEQ ID NO: 1483616 - DNA, 25 bp, Homo sapien
ccgagctaaggccaagaagttgctg

SEQ ID NO: 1483617 - DNA, 25 bp, Homo sapien
tcccgagctaaggccaagaagttgc

SEQ ID NO: 1483618 - DNA, 25 bp, Homo sapien
ctcccgagctaaggccaagaagttg

SEQ ID NO: 1483619 - DNA, 25 bp, Homo sapien
tcaggtgctcatactccttgacatc

SEQ ID NO: 1483620 - DNA, 25 bp, Homo sapien
catgatctctgtcaggtgctcatac

SEQ ID NO: 1483621 - DNA, 25 bp, Homo sapien
ccatgccagcctagcatgaatgcca

SEQ ID NO: 1483622 - DNA, 25 bp, Homo sapien
atgccagcctagcatgaatgccatc

SEQ ID NO: 1483623 - DNA, 25 bp, Homo sapien
tactaccacatcctcgcaggatgtg

SEQ ID NO: 1483624 - DNA, 25 bp, Homo sapien
ccacatcctcgcaggatgtgaagat

SEQ ID NO: 1483625 - DNA, 25 bp, Homo sapien
ccagctccatgtcattgcgcatcag

SEQ ID NO: 1483626 - DNA, 25 bp, Homo sapien
gctccatgtcattgcgcatcagtgc

SEQ ID NO: 1483627 - DNA, 25 bp, Homo sapien
cacaactggtgagataaaggcagac

SEQ ID NO: 1483628 - DNA, 25 bp, Homo sapien
acaacgcagtaggactgagttctca

SEQ ID NO: 1483629 - DNA, 25 bp, Homo sapien
gttctcaggctcagacacataattc

SEQ ID NO: 1483630 - DNA, 25 bp, Homo sapien
cagggcacaacgcagtaggactgag

SEQ ID NO: 1483631 - DNA, 25 bp, Homo sapien
tcatgctctgcgtcgtggaccatgt

SEQ ID NO: 1483632 - DNA, 25 bp, Homo sapien
tctgcgtcgtggaccatgttgtagg

SEQ ID NO: 1483633 - DNA, 25 bp, Homo sapien
tcctgctggaccttctttgcatcat

SEQ ID NO: 1483634 - DNA, 25 bp, Homo sapien
cacaggcctcatgctctgcgtcgtg

SEQ ID NO: 1483635 - DNA, 25 bp, Homo sapien
gccaggtgcctgatatactcatgac

SEQ ID NO: 1483636 - DNA, 25 bp, Homo sapien
ccaggtgcctgatatactcatgact

SEQ ID NO: 1483637 - DNA, 25 bp, Homo sapien
ctgccaggtgcctgatatactcatg

SEQ ID NO: 1483638 - DNA, 25 bp, Homo sapien
tgccaggtgcctgatatactcatga

SEQ ID NO: 1483639 - DNA, 25 bp, Homo sapien
cccactcatggtcatggccaaaaca

SEQ ID NO: 1483640 - DNA, 25 bp, Homo sapien
aattccttctgggagcctactagcc

SEQ ID NO: 1483641 - DNA, 25 bp, Homo sapien
cagcaaaatgctcattctccccagg

SEQ ID NO: 1483642 - DNA, 25 bp, Homo sapien
cctactagccgatacttgaggcact

SEQ ID NO: 1483643 - DNA, 25 bp, Homo sapien
ttcagtttgccatagtgtggacgca

SEQ ID NO: 1483644 - DNA, 25 bp, Homo sapien
tccttcagtttgccatagtgtggac

SEQ ID NO: 1483645 - DNA, 25 bp, Homo sapien
cagtttgccatagtgtggacgcaga

SEQ ID NO: 1483646 - DNA, 25 bp, Homo sapien
ccttcagtttgccatagtgtggacg

SEQ ID NO: 1483647 - DNA, 25 bp, Homo sapien
ccagcgctggtcgatacagggatgt

SEQ ID NO: 1483648 - DNA, 25 bp, Homo sapien
ttcctccagcgctggtcgatacagg

SEQ ID NO: 1483649 - DNA, 25 bp, Homo sapien
aagtcatggaagttgtagaagaacg

SEQ ID NO: 1483650 - DNA, 25 bp, Homo sapien
gtagaagaacgaatctgccttcgca

SEQ ID NO: 1483651 - DNA, 25 bp, Homo sapien
ccttgccgcttggcttctcatccat

SEQ ID NO: 1483652 - DNA, 25 bp, Homo sapien
tgcaccagcgtcttgtcccatcctc

SEQ ID NO: 1483653 - DNA, 25 bp, Homo sapien
atccatgccgctgagggccgccgct

SEQ ID NO: 1483654 - DNA, 25 bp, Homo sapien
gcttctcatccatgccgctgagggc

SEQ ID NO: 1483655 - DNA, 25 bp, Homo sapien
caatcaattgaaatcaattgaaata

SEQ ID NO: 1483656 - DNA, 25 bp, Homo sapien
caagatcaactttatacctgggctg

SEQ ID NO: 1483657 - DNA, 25 bp, Homo sapien
gttagtcaacccacacactcattgg

SEQ ID NO: 1483658 - DNA, 25 bp, Homo sapien
ggcagtttcctaggcgagttccatc

SEQ ID NO: 1483659 - DNA, 25 bp, Homo sapien
cactcattggactattcagaagggc

SEQ ID NO: 1483660 - DNA, 25 bp, Homo sapien
gaggaatgaatttgcgccttttttc

SEQ ID NO: 1483661 - DNA, 25 bp, Homo sapien
cacacttgaccttgaatctcccttt

SEQ ID NO: 1483662 - DNA, 25 bp, Homo sapien
ctggaggaatgaatttgcgcctttt

SEQ ID NO: 1483663 - DNA, 25 bp, Homo sapien
tttttctttccactgatgcactgaa

SEQ ID NO: 1483664 - DNA, 25 bp, Homo sapien
ttcctttaagcaaagatcttcagag

SEQ ID NO: 1483665 - DNA, 25 bp, Homo sapien
gcagtttctcaaaggccaaggcaga

SEQ ID NO: 1483666 - DNA, 25 bp, Homo sapien
ccaaggcagacttcctttaagcaaa

SEQ ID NO: 1483667 - DNA, 25 bp, Homo sapien
gagcagtttctcaaaggccaaggca

SEQ ID NO: 1483668 - DNA, 25 bp, Homo sapien
gagagccctctttagtttcactgga

SEQ ID NO: 1483669 - DNA, 25 bp, Homo sapien
tggagccactattgcggagagccct

SEQ ID NO: 1483670 - DNA, 25 bp, Homo sapien
tcagcacagccaatttagagtggag

SEQ ID NO: 1483671 - DNA, 25 bp, Homo sapien
ttttttgatccgatgacagcacagt

SEQ ID NO: 1483672 - DNA, 25 bp, Homo sapien
gacactagtcagattattcacaacc

SEQ ID NO: 1483673 - DNA, 25 bp, Homo sapien
cttttgtctaccagaagggatgctg

SEQ ID NO: 1483674 - DNA, 25 bp, Homo sapien
tagtcagattattcacaaccaaact

SEQ ID NO: 1483675 - DNA, 25 bp, Homo sapien
tgctggtgatgacactagtcagatt

SEQ ID NO: 1483676 - DNA, 25 bp, Homo sapien
gcaagagcaatcagagcaagatgtg

SEQ ID NO: 1483677 - DNA, 25 bp, Homo sapien
agagcaagatgtggtgtccccagga

SEQ ID NO: 1483678 - DNA, 25 bp, Homo sapien
ccaggaaagcattcgctaacctcat

SEQ ID NO: 1483679 - DNA, 25 bp, Homo sapien
tgtccccaggaaagcattcgctaac

SEQ ID NO: 1483680 - DNA, 25 bp, Homo sapien
cagacttcccttgagctcatagtgc

SEQ ID NO: 1483681 - DNA, 25 bp, Homo sapien
tcagacttcccttgagctcatagtg

SEQ ID NO: 1483682 - DNA, 25 bp, Homo sapien
gattgttcaaggatctgtattcttt

SEQ ID NO: 1483683 - DNA, 25 bp, Homo sapien
ttgttcaaggatctgtattcttttc

SEQ ID NO: 1483684 - DNA, 25 bp, Homo sapien
ttcagattgttcaaggatctgtatt

SEQ ID NO: 1483685 - DNA, 25 bp, Homo sapien
cagattgttcaaggatctgtattct

SEQ ID NO: 1483686 - DNA, 25 bp, Homo sapien
tctgcagactttcaaggctgggcta

SEQ ID NO: 1483687 - DNA, 25 bp, Homo sapien
tggaggaactgtcaccttgatataa

SEQ ID NO: 1483688 - DNA, 25 bp, Homo sapien
gttctttcctccgaaacaaggctga

SEQ ID NO: 1483689 - DNA, 25 bp, Homo sapien
tctctgtgcattaccagttgtctgc

SEQ ID NO: 1483690 - DNA, 25 bp, Homo sapien
tgatctcattcaagagggctctgct

SEQ ID NO: 1483691 - DNA, 25 bp, Homo sapien
tttcaacctatggaactgagggtgg

SEQ ID NO: 1483692 - DNA, 25 bp, Homo sapien
tccaggttcacagactgcggtgttc

SEQ ID NO: 1483693 - DNA, 25 bp, Homo sapien
tcatggcctaattgcttccaaaagg

SEQ ID NO: 1483694 - DNA, 25 bp, Homo sapien
tcaggttaagcggttgggtctcttc

SEQ ID NO: 1483695 - DNA, 25 bp, Homo sapien
ggcagaggtcactgaacagtttcag

SEQ ID NO: 1483696 - DNA, 25 bp, Homo sapien
catggtgtaggctttgcaattcttc

SEQ ID NO: 1483697 - DNA, 25 bp, Homo sapien
cctgtattcagggtgtagctgagag

SEQ ID NO: 1483698 - DNA, 25 bp, Homo sapien
gctccggtttcttgctattaccaaa

SEQ ID NO: 1483699 - DNA, 25 bp, Homo sapien
ggctccggtttcttgctattaccaa

SEQ ID NO: 1483700 - DNA, 25 bp, Homo sapien
tggctccggtttcttgctattacca

SEQ ID NO: 1483701 - DNA, 25 bp, Homo sapien
tcgcatctctctatatacgtcaggg

SEQ ID NO: 1483702 - DNA, 25 bp, Homo sapien
tcttctcgcatctctctatatacgt

SEQ ID NO: 1483703 - DNA, 25 bp, Homo sapien
ttctcttcttctcgcatctctctat

SEQ ID NO: 1483704 - DNA, 25 bp, Homo sapien
gcatctctctatatacgtcagggtt

SEQ ID NO: 1483705 - DNA, 25 bp, Homo sapien
aatatctccgaggttttcgtgtgtg

SEQ ID NO: 1483706 - DNA, 25 bp, Homo sapien
aaccagaaaattcgtgtaactctat

SEQ ID NO: 1483707 - DNA, 25 bp, Homo sapien
tcgtgtaactctattacaatattca

SEQ ID NO: 1483708 - DNA, 25 bp, Homo sapien
cacaatatctccgaggttttcgtgt

SEQ ID NO: 1483709 - DNA, 25 bp, Homo sapien
tggagcatagattttggaatcagct

SEQ ID NO: 1483710 - DNA, 25 bp, Homo sapien
gcatagattttggaatcagctctgt

SEQ ID NO: 1483711 - DNA, 25 bp, Homo sapien
ttatggagcatagattttggaatca

SEQ ID NO: 1483712 - DNA, 25 bp, Homo sapien
catagattttggaatcagctctgta

SEQ ID NO: 1483713 - DNA, 25 bp, Homo sapien
caaactgctggcaccatggctccga

SEQ ID NO: 1483714 - DNA, 25 bp, Homo sapien
ggcaccatggctccgaggatttatc

SEQ ID NO: 1483715 - DNA, 25 bp, Homo sapien
tgctggcaccatggctccgaggatt

SEQ ID NO: 1483716 - DNA, 25 bp, Homo sapien
ccatggctccgaggatttatctcag

SEQ ID NO: 1483717 - DNA, 25 bp, Homo sapien
aactgtatagctttcgaataaatgg

SEQ ID NO: 1483718 - DNA, 25 bp, Homo sapien
tcgaataaatggtttaactgaactc

SEQ ID NO: 1483719 - DNA, 25 bp, Homo sapien
ttcacatgagcaaaactgtatagct

SEQ ID NO: 1483720 - DNA, 25 bp, Homo sapien
ctttttcacatgagcaaaactgtat

SEQ ID NO: 1483721 - DNA, 25 bp, Homo sapien
cttgttagtcagttgaaggtgacat

SEQ ID NO: 1483722 - DNA, 25 bp, Homo sapien
ccttgttagtcagttgaaggtgaca

SEQ ID NO: 1483723 - DNA, 25 bp, Homo sapien
ttgttagtcagttgaaggtgacatt

SEQ ID NO: 1483724 - DNA, 25 bp, Homo sapien
gtttttgcagctgaatatccaaagt

SEQ ID NO: 1483725 - DNA, 25 bp, Homo sapien
aggtttttgcagctgaatatccaaa

SEQ ID NO: 1483726 - DNA, 25 bp, Homo sapien
tttttgcagctgaatatccaaagta

SEQ ID NO: 1483727 - DNA, 25 bp, Homo sapien
ggtttttgcagctgaatatccaaag

SEQ ID NO: 1483728 - DNA, 25 bp, Homo sapien
cttccagggatgtctccttaattgt

SEQ ID NO: 1483729 - DNA, 25 bp, Homo sapien
ggtcttccagggatgtctccttaat

SEQ ID NO: 1483730 - DNA, 25 bp, Homo sapien
tcttccagggatgtctccttaattg

SEQ ID NO: 1483731 - DNA, 25 bp, Homo sapien
tgggtcttccagggatgtctcctta

SEQ ID NO: 1483732 - DNA, 25 bp, Homo sapien
acaccaggacatttttactaaagat

SEQ ID NO: 1483733 - DNA, 25 bp, Homo sapien
tcacaccaggacatttttactaaag

SEQ ID NO: 1483734 - DNA, 25 bp, Homo sapien
ccaggacatttttactaaagatatc

SEQ ID NO: 1483735 - DNA, 25 bp, Homo sapien
aggacatttttactaaagatatcac

SEQ ID NO: 1483736 - DNA, 25 bp, Homo sapien
cttcagcaatcacatagccaccgtg

SEQ ID NO: 1483737 - DNA, 25 bp, Homo sapien
atcacatagccaccgtgtgccagag

SEQ ID NO: 1483738 - DNA, 25 bp, Homo sapien
ggccggtaagagaacctgtcccaga

SEQ ID NO: 1483739 - DNA, 25 bp, Homo sapien
gattagctctagtgatgtcttcagc

SEQ ID NO: 1483740 - DNA, 25 bp, Homo sapien
aggatgggcaggagacaccaggtca

SEQ ID NO: 1483741 - DNA, 25 bp, Homo sapien
accaggatgggcaggagacaccagg

SEQ ID NO: 1483742 - DNA, 25 bp, Homo sapien
ggatgggcaggagacaccaggtcat

SEQ ID NO: 1483743 - DNA, 25 bp, Homo sapien
ctgggaccaggatgggcaggagaca

SEQ ID NO: 1483744 - DNA, 25 bp, Homo sapien
tgaccttctctgctatcttcttgga

SEQ ID NO: 1483745 - DNA, 25 bp, Homo sapien
ttttcctcgagacctggattgagcc

SEQ ID NO: 1483746 - DNA, 25 bp, Homo sapien
gcatccttaagtgttgcaactgcag

SEQ ID NO: 1483747 - DNA, 25 bp, Homo sapien
ggcagctctggatctttaatacatt

SEQ ID NO: 1483748 - DNA, 25 bp, Homo sapien
ggccagcttggctttcggtctgaaa

SEQ ID NO: 1483749 - DNA, 25 bp, Homo sapien
tgatgaaagcatgtctgtttccctg

SEQ ID NO: 1483750 - DNA, 25 bp, Homo sapien
caagctattaatgtttagtggcaga

SEQ ID NO: 1483751 - DNA, 25 bp, Homo sapien
aaaagtggctccctttctcattcga

SEQ ID NO: 1483752 - DNA, 25 bp, Homo sapien
tagaccactacagagagctatgtgt

SEQ ID NO: 1483753 - DNA, 25 bp, Homo sapien
gacacccagctggtcaattctgtta

SEQ ID NO: 1483754 - DNA, 25 bp, Homo sapien
agctatgtgtaaggctggcaagcca

SEQ ID NO: 1483755 - DNA, 25 bp, Homo sapien
ccaaggacgatcaggacaattctca

SEQ ID NO: 1483756 - DNA, 25 bp, Homo sapien
acttttatggcacgtcacaccggga

SEQ ID NO: 1483757 - DNA, 25 bp, Homo sapien
cctttgaagcctacacagtggatca

SEQ ID NO: 1483758 - DNA, 25 bp, Homo sapien
ccctggtgctaacggagagactaac

SEQ ID NO: 1483759 - DNA, 25 bp, Homo sapien
gaccccaaaggagatcatgtgacat

SEQ ID NO: 1483760 - DNA, 25 bp, Homo sapien
tctcacatactagggaagtggcccc

SEQ ID NO: 1483761 - DNA, 25 bp, Homo sapien
tgtacatacgataaccccagaagga

SEQ ID NO: 1483762 - DNA, 25 bp, Homo sapien
cataagcattactcacagggaagcc

SEQ ID NO: 1483763 - DNA, 25 bp, Homo sapien
tagtatcaggaagctaagtccccac

SEQ ID NO: 1483764 - DNA, 25 bp, Homo sapien
tggtatcaggtttattaggagacgc

SEQ ID NO: 1483765 - DNA, 25 bp, Homo sapien
gccccgtccaccgacatatttatgg

SEQ ID NO: 1483766 - DNA, 25 bp, Homo sapien
gaggttgcacatatcctcatcacag

SEQ ID NO: 1483767 - DNA, 25 bp, Homo sapien
atttatggaggttgcacatatcctc

SEQ ID NO: 1483768 - DNA, 25 bp, Homo sapien
gctcagaaaagtgacgcatccttca

SEQ ID NO: 1483769 - DNA, 25 bp, Homo sapien
gtcacaagaatgagcgctcccagcc

SEQ ID NO: 1483770 - DNA, 25 bp, Homo sapien
aagaatgagcgctcccagccagagg

SEQ ID NO: 1483771 - DNA, 25 bp, Homo sapien
gggccgctcagaaaagtgacgcatc

SEQ ID NO: 1483772 - DNA, 25 bp, Homo sapien
acatcaatgccggatttacagtgca

SEQ ID NO: 1483773 - DNA, 25 bp, Homo sapien
gaaatccttgcttttccacatggtg

SEQ ID NO: 1483774 - DNA, 25 bp, Homo sapien
gtggaaacatcaatgccggatttac

SEQ ID NO: 1483775 - DNA, 25 bp, Homo sapien
caatgccggatttacagtgcatcac

SEQ ID NO: 1483776 - DNA, 25 bp, Homo sapien
gtcagccctaagagaagtgcttgct

SEQ ID NO: 1483777 - DNA, 25 bp, Homo sapien
aaaagctccacttgcgatccacgtc

SEQ ID NO: 1483778 - DNA, 25 bp, Homo sapien
agcattttccttcgggcctgatcca

SEQ ID NO: 1483779 - DNA, 25 bp, Homo sapien
gggtcggtcaggaacacatcagcaa

SEQ ID NO: 1483780 - DNA, 25 bp, Homo sapien
accaggcagcgtgacagtgggctcg

SEQ ID NO: 1483781 - DNA, 25 bp, Homo sapien
cagcgtgacagtgggctcggagggc

SEQ ID NO: 1483782 - DNA, 25 bp, Homo sapien
ggcagcgtgacagtgggctcggagg

SEQ ID NO: 1483783 - DNA, 25 bp, Homo sapien
caggcagcgtgacagtgggctcgga

SEQ ID NO: 1483784 - DNA, 25 bp, Homo sapien
tcaggttcacggacatgcaccggca

SEQ ID NO: 1483785 - DNA, 25 bp, Homo sapien
tccgagtcgctcaggttcacggaca

SEQ ID NO: 1483786 - DNA, 25 bp, Homo sapien
tcacggacatgcaccggcactgctt

SEQ ID NO: 1483787 - DNA, 25 bp, Homo sapien
tcgctcaggttcacggacatgcacc

SEQ ID NO: 1483788 - DNA, 25 bp, Homo sapien
tgctgctgccgtccttgtaaggcga

SEQ ID NO: 1483789 - DNA, 25 bp, Homo sapien
cttgaggtacttgcgctcggtgacc

SEQ ID NO: 1483790 - DNA, 25 bp, Homo sapien
tctggattttcttgagtcggaaggg

SEQ ID NO: 1483791 - DNA, 25 bp, Homo sapien
cctccttgatctggtgctgccatct

SEQ ID NO: 1483792 - DNA, 25 bp, Homo sapien
gtgggtcccttgaaatctgaacagg

SEQ ID NO: 1483793 - DNA, 25 bp, Homo sapien
tgaacaggattcctcagggcgatga

SEQ ID NO: 1483794 - DNA, 25 bp, Homo sapien
gtcacaagtaagtgggtcccttgaa

SEQ ID NO: 1483795 - DNA, 25 bp, Homo sapien
gcaggaggagcttaggaagtcacaa

SEQ ID NO: 1483796 - DNA, 25 bp, Homo sapien
ttaaccatctttctggcctgaccat

SEQ ID NO: 1483797 - DNA, 25 bp, Homo sapien
tcttgtatttggcttgtatcagaag

SEQ ID NO: 1483798 - DNA, 25 bp, Homo sapien
atcctgttggttttattaaccatct

SEQ ID NO: 1483799 - DNA, 25 bp, Homo sapien
gaagaaactcataaataaatcctgt

SEQ ID NO: 1483800 - DNA, 25 bp, Homo sapien
gcagcaggcccaaaggatggatctt

SEQ ID NO: 1483801 - DNA, 25 bp, Homo sapien
gcaggcccaaaggatggatcttaag

SEQ ID NO: 1483802 - DNA, 25 bp, Homo sapien
gatggatcttaaggctctcctggct

SEQ ID NO: 1483803 - DNA, 25 bp, Homo sapien
caaaggatggatcttaaggctctcc

SEQ ID NO: 1483804 - DNA, 25 bp, Homo sapien
gttggccaggttcatcttgaacttg

SEQ ID NO: 1483805 - DNA, 25 bp, Homo sapien
ccgggttcaagcgactttggtgcct

SEQ ID NO: 1483806 - DNA, 25 bp, Homo sapien
gtggcaaccaatcttgtctcactgc

SEQ ID NO: 1483807 - DNA, 25 bp, Homo sapien
cgggttcaagcgactttggtgcctc

SEQ ID NO: 1483808 - DNA, 25 bp, Homo sapien
tatatccgagtagagcttcagattt

SEQ ID NO: 1483809 - DNA, 25 bp, Homo sapien
gccacatcaaggagactcgcttaac

SEQ ID NO: 1483810 - DNA, 25 bp, Homo sapien
gactttctagccttagaacagtcct

SEQ ID NO: 1483811 - DNA, 25 bp, Homo sapien
cagtcctttatatccgagtagagct

SEQ ID NO: 1483812 - DNA, 25 bp, Homo sapien
aaggagcacttgatgagtccctgtg

SEQ ID NO: 1483813 - DNA, 25 bp, Homo sapien
tcctacatccccgagaaagggctct

SEQ ID NO: 1483814 - DNA, 25 bp, Homo sapien
gaaaggagcacttgatgagtccctg

SEQ ID NO: 1483815 - DNA, 25 bp, Homo sapien
tgtctcctacatccccgagaaaggg

SEQ ID NO: 1483816 - DNA, 25 bp, Homo sapien
gaataacctatgtgggcatctacct

SEQ ID NO: 1483817 - DNA, 25 bp, Homo sapien
catattagtgctataagttgcccta

SEQ ID NO: 1483818 - DNA, 25 bp, Homo sapien
tcatgaccccagctaaagaaccatc

SEQ ID NO: 1483819 - DNA, 25 bp, Homo sapien
caacttaagtttgctcagaaccctc

SEQ ID NO: 1483820 - DNA, 25 bp, Homo sapien
cctgctccctgacgtggactcagct

SEQ ID NO: 1483821 - DNA, 25 bp, Homo sapien
gcctgctccctgacgtggactcagc

SEQ ID NO: 1483822 - DNA, 25 bp, Homo sapien
tgcctgctccctgacgtggactcag

SEQ ID NO: 1483823 - DNA, 25 bp, Homo sapien
tgctccctgacgtggactcagctct

SEQ ID NO: 1483824 - DNA, 25 bp, Homo sapien
agacctgagaaaccagcagggaaga

SEQ ID NO: 1483825 - DNA, 25 bp, Homo sapien
tgtttaggcgctgaagaattcacca

SEQ ID NO: 1483826 - DNA, 25 bp, Homo sapien
actaattttcagtagtgtggtcaag

SEQ ID NO: 1483827 - DNA, 25 bp, Homo sapien
aacgaatcacgggaagagagacctg

SEQ ID NO: 1483828 - DNA, 25 bp, Homo sapien
cacggtgtttccgtgtgcagcagaa

SEQ ID NO: 1483829 - DNA, 25 bp, Homo sapien
cagtcacggtgtttccgtgtgcagc

SEQ ID NO: 1483830 - DNA, 25 bp, Homo sapien
tgtttccgtgtgcagcagaagtgct

SEQ ID NO: 1483831 - DNA, 25 bp, Homo sapien
tgcagtgagtcacaggaagtatcaa

SEQ ID NO: 1483832 - DNA, 25 bp, Homo sapien
tggcaccttttgatccaagacgtaa

SEQ ID NO: 1483833 - DNA, 25 bp, Homo sapien
catttcggagacattctgactgcca

SEQ ID NO: 1483834 - DNA, 25 bp, Homo sapien
ttccagcagggagtttgattacacc

SEQ ID NO: 1483835 - DNA, 25 bp, Homo sapien
ataaagaagccaaacgccagagctg

SEQ ID NO: 1483836 - DNA, 25 bp, Homo sapien
agtgtgatggatttcaactggtaaa

SEQ ID NO: 1483837 - DNA, 25 bp, Homo sapien
cttgaaggcgtagcatttgggcttt

SEQ ID NO: 1483838 - DNA, 25 bp, Homo sapien
gatggatttcaactggtaaagctaa

SEQ ID NO: 1483839 - DNA, 25 bp, Homo sapien
tcagagcttgaaggcgtagcatttg

SEQ ID NO: 1483840 - DNA, 25 bp, Homo sapien
gcttctgtgcttagtgaatactcca

SEQ ID NO: 1483841 - DNA, 25 bp, Homo sapien
tgtccaggactaagcttattagcag

SEQ ID NO: 1483842 - DNA, 25 bp, Homo sapien
cttaaaggaatagttctccctcttg

SEQ ID NO: 1483843 - DNA, 25 bp, Homo sapien
gaagagaaccagttcctgatgctgg

SEQ ID NO: 1483844 - DNA, 25 bp, Homo sapien
aacaaacatttggttatctccttgt

SEQ ID NO: 1483845 - DNA, 25 bp, Homo sapien
gctctgatagaaaaacaaacatttg

SEQ ID NO: 1483846 - DNA, 25 bp, Homo sapien
caaacatttggttatctccttgtgc

SEQ ID NO: 1483847 - DNA, 25 bp, Homo sapien
aacatttggttatctccttgtgcat

SEQ ID NO: 1483848 - DNA, 25 bp, Homo sapien
gctgctttatccatcacaccagctg

SEQ ID NO: 1483849 - DNA, 25 bp, Homo sapien
agctgctgctttatccatcacacca

SEQ ID NO: 1483850 - DNA, 25 bp, Homo sapien
cacaacacttgaaaacctgggaagg

SEQ ID NO: 1483851 - DNA, 25 bp, Homo sapien
agggtagtcactggccagagctgct

SEQ ID NO: 1483852 - DNA, 25 bp, Homo sapien
tcagagccacatgaataccagccag

SEQ ID NO: 1483853 - DNA, 25 bp, Homo sapien
tatgatcgactaagactccactggg

SEQ ID NO: 1483854 - DNA, 25 bp, Homo sapien
gctaccttgaaagctaagcacggct

SEQ ID NO: 1483855 - DNA, 25 bp, Homo sapien
cacatgtcttgggacaaaggctacc

SEQ ID NO: 1483856 - DNA, 25 bp, Homo sapien
ctttcagttcgaccgcagccagact

SEQ ID NO: 1483857 - DNA, 25 bp, Homo sapien
tctgagttctctagtccacagcggg

SEQ ID NO: 1483858 - DNA, 25 bp, Homo sapien
cctgcagatgtgaaaggagcccgga

SEQ ID NO: 1483859 - DNA, 25 bp, Homo sapien
cagcagacgcccataagagaagcgc

SEQ ID NO: 1483860 - DNA, 25 bp, Homo sapien
cgccccataaggactgcacggctgt

SEQ ID NO: 1483861 - DNA, 25 bp, Homo sapien
agctggccggcctcagaacgagctc

SEQ ID NO: 1483862 - DNA, 25 bp, Homo sapien
tcctgttagaaaagcaacggtgagg

SEQ ID NO: 1483863 - DNA, 25 bp, Homo sapien
gaaagcgacatatctccctgcagga

SEQ ID NO: 1483864 - DNA, 25 bp, Homo sapien
aatttatttcgttgtggggagcagg

SEQ ID NO: 1483865 - DNA, 25 bp, Homo sapien
aaatttatttcgttgtggggagcag

SEQ ID NO: 1483866 - DNA, 25 bp, Homo sapien
taaatttatttcgttgtggggagca

SEQ ID NO: 1483867 - DNA, 25 bp, Homo sapien
cttgagcacatcgaagcgcaccgtc

SEQ ID NO: 1483868 - DNA, 25 bp, Homo sapien
ttgagcacatcgaagcgcaccgtct

SEQ ID NO: 1483869 - DNA, 25 bp, Homo sapien
accttgagcacatcgaagcgcaccg

SEQ ID NO: 1483870 - DNA, 25 bp, Homo sapien
gagcacatcgaagcgcaccgtcttg

SEQ ID NO: 1483871 - DNA, 25 bp, Homo sapien
gtgacgatgtcactgatctggacgt

SEQ ID NO: 1483872 - DNA, 25 bp, Homo sapien
gacgatgtcactgatctggacgtcc

SEQ ID NO: 1483873 - DNA, 25 bp, Homo sapien
tggcactcgcccactgtgacgatgt

SEQ ID NO: 1483874 - DNA, 25 bp, Homo sapien
ctgtgacgatgtcactgatctggac

SEQ ID NO: 1483875 - DNA, 25 bp, Homo sapien
tacttgcagatgtagtgcagtctcg

SEQ ID NO: 1483876 - DNA, 25 bp, Homo sapien
acttgcagatgtagtgcagtctcgg

SEQ ID NO: 1483877 - DNA, 25 bp, Homo sapien
ggagacattcccagtgaaggggcat

SEQ ID NO: 1483878 - DNA, 25 bp, Homo sapien
ctcgaatggagacattcccagtgaa

SEQ ID NO: 1483879 - DNA, 25 bp, Homo sapien
tggagacattcccagtgaaggggca

SEQ ID NO: 1483880 - DNA, 25 bp, Homo sapien
gaatggagacattcccagtgaaggg

SEQ ID NO: 1483881 - DNA, 25 bp, Homo sapien
tctgtctgagtgaccgccgtcttcc

SEQ ID NO: 1483882 - DNA, 25 bp, Homo sapien
cggctgcttttagtaggcaccgtct

SEQ ID NO: 1483883 - DNA, 25 bp, Homo sapien
tagtacaacggggacttctcctgcc

SEQ ID NO: 1483884 - DNA, 25 bp, Homo sapien
tgtgggcgccctcaatagcctcttg

SEQ ID NO: 1483885 - DNA, 25 bp, Homo sapien
acaaaacttcaaaatggtagttctg

SEQ ID NO: 1483886 - DNA, 25 bp, Homo sapien
caaaacttcaaaatggtagttctgt

SEQ ID NO: 1483887 - DNA, 25 bp, Homo sapien
catttggacaaaacttcaaaatggt

SEQ ID NO: 1483888 - DNA, 25 bp, Homo sapien
ttccacaggcaaattcccgcttatt

SEQ ID NO: 1483889 - DNA, 25 bp, Homo sapien
aattcccgcttatttctaagatccg

SEQ ID NO: 1483890 - DNA, 25 bp, Homo sapien
ggcaaattcccgcttatttctaaga

SEQ ID NO: 1483891 - DNA, 25 bp, Homo sapien
cgcttatttctaagatccggttcat

SEQ ID NO: 1483892 - DNA, 25 bp, Homo sapien
actagattcctttgaggaatactgg

SEQ ID NO: 1483893 - DNA, 25 bp, Homo sapien
ctgtgggcctgttttgtatttgaaa

SEQ ID NO: 1483894 - DNA, 25 bp, Homo sapien
gctttggcaaaagcactagattcct

SEQ ID NO: 1483895 - DNA, 25 bp, Homo sapien
gtatttgaaatctcgtgctttggca

SEQ ID NO: 1483896 - DNA, 25 bp, Homo sapien
gacattctgagctcaggcccactac

SEQ ID NO: 1483897 - DNA, 25 bp, Homo sapien
ttaattgcctgacattctgagctca

SEQ ID NO: 1483898 - DNA, 25 bp, Homo sapien
aattgcctgacattctgagctcagg

SEQ ID NO: 1483899 - DNA, 25 bp, Homo sapien
ctgacattctgagctcaggcccact

SEQ ID NO: 1483900 - DNA, 25 bp, Homo sapien
tctgaggttttgactgatctatata

SEQ ID NO: 1483901 - DNA, 25 bp, Homo sapien
ctgaggttttgactgatctatatat

SEQ ID NO: 1483902 - DNA, 25 bp, Homo sapien
agtgactggcactcattggcttcag

SEQ ID NO: 1483903 - DNA, 25 bp, Homo sapien
cgtctgtgacgtgcacctcttcctt

SEQ ID NO: 1483904 - DNA, 25 bp, Homo sapien
ctctgaaggacagtagtaagtcaca

SEQ ID NO: 1483905 - DNA, 25 bp, Homo sapien
ggaatgtgaccagacaagatcattc

SEQ ID NO: 1483906 - DNA, 25 bp, Homo sapien
tgtgctggcttgaaaacagttgctg

SEQ ID NO: 1483907 - DNA, 25 bp, Homo sapien
ctgccttgtgctggcttgaaaacag

SEQ ID NO: 1483908 - DNA, 25 bp, Homo sapien
cttgtgctggcttgaaaacagttgc

SEQ ID NO: 1483909 - DNA, 25 bp, Homo sapien
gccttgtgctggcttgaaaacagtt

SEQ ID NO: 1483910 - DNA, 25 bp, Homo sapien
ctgttgctagcaagcatgggaccat

SEQ ID NO: 1483911 - DNA, 25 bp, Homo sapien
ctttctgttgctagcaagcatggga

SEQ ID NO: 1483912 - DNA, 25 bp, Homo sapien
ttctgttgctagcaagcatgggacc

SEQ ID NO: 1483913 - DNA, 25 bp, Homo sapien
gtactttctgttgctagcaagcatg

SEQ ID NO: 1483914 - DNA, 25 bp, Homo sapien
gaaagaaatgccacctgttgagtgt

SEQ ID NO: 1483915 - DNA, 25 bp, Homo sapien
gccacctgttgagtgtgccctttac

SEQ ID NO: 1483916 - DNA, 25 bp, Homo sapien
tcctcttccacttcaccagggttgg

SEQ ID NO: 1483917 - DNA, 25 bp, Homo sapien
tgtcactagatcctgaaagaaatgc

SEQ ID NO: 1483918 - DNA, 25 bp, Homo sapien
tctgctgtgcacagcgctctttgct

SEQ ID NO: 1483919 - DNA, 25 bp, Homo sapien
tctgacccctcgcactgtaagggca

SEQ ID NO: 1483920 - DNA, 25 bp, Homo sapien
ctcgcactgtaagggcaggcacaag

SEQ ID NO: 1483921 - DNA, 25 bp, Homo sapien
aggtttctgctgtgcacagcgctct

SEQ ID NO: 1483922 - DNA, 25 bp, Homo sapien
atggcgagctgtgcgtccctggtca

SEQ ID NO: 1483923 - DNA, 25 bp, Homo sapien
gaacgacaaaggagaagtgcggcac

SEQ ID NO: 1483924 - DNA, 25 bp, Homo sapien
tggccacagagcgatagagaacgac

SEQ ID NO: 1483925 - DNA, 25 bp, Homo sapien
agaagtgcggcacgcctggcatgct

SEQ ID NO: 1483926 - DNA, 25 bp, Homo sapien
ccttgccagaagtaggtaaacagag

SEQ ID NO: 1483927 - DNA, 25 bp, Homo sapien
gaagtaggtaaacagagtccataaa

SEQ ID NO: 1483928 - DNA, 25 bp, Homo sapien
tttatgttgccaaacctccagaaac

SEQ ID NO: 1483929 - DNA, 25 bp, Homo sapien
ctgttaccatagcaactgcatatat

SEQ ID NO: 1483930 - DNA, 25 bp, Homo sapien
gttgcccatcttattggagcaatgt

SEQ ID NO: 1483931 - DNA, 25 bp, Homo sapien
aagggtcagccctgggcgttgccca

SEQ ID NO: 1483932 - DNA, 25 bp, Homo sapien
ctgttgttgccatgcagtcctgctg

SEQ ID NO: 1483933 - DNA, 25 bp, Homo sapien
gtcctgctgttgaaaccatccctgg

SEQ ID NO: 1483934 - DNA, 25 bp, Homo sapien
catggtgcatgatataatggttgat

SEQ ID NO: 1483935 - DNA, 25 bp, Homo sapien
agctctttcaataaggctaagataa

SEQ ID NO: 1483936 - DNA, 25 bp, Homo sapien
cctttttaatgagtatgcaagaatg

SEQ ID NO: 1483937 - DNA, 25 bp, Homo sapien
tctgaataatacaaaggcactgtgt

SEQ ID NO: 1483938 - DNA, 25 bp, Homo sapien
gtattaccaacccatgaacaagtga

SEQ ID NO: 1483939 - DNA, 25 bp, Homo sapien
gattcaaatgcagctcgggattact

SEQ ID NO: 1483940 - DNA, 25 bp, Homo sapien
acttattagctagggccaggtttca

SEQ ID NO: 1483941 - DNA, 25 bp, Homo sapien
caggaagcatgatcatactctcgag

SEQ ID NO: 1483942 - DNA, 25 bp, Homo sapien
aatacaatgtaaactcaagctatca

SEQ ID NO: 1483943 - DNA, 25 bp, Homo sapien
gatggttaagatgctcttaggcaga

SEQ ID NO: 1483944 - DNA, 25 bp, Homo sapien
gggatccttccaaataggatataat

SEQ ID NO: 1483945 - DNA, 25 bp, Homo sapien
caactataacaggagagcataggtg

SEQ ID NO: 1483946 - DNA, 25 bp, Homo sapien
acaccaaatacactacgagaatcta

SEQ ID NO: 1483947 - DNA, 25 bp, Homo sapien
gccaagagtataactacaccaaata

SEQ ID NO: 1483948 - DNA, 25 bp, Homo sapien
atacactacgagaatctaaacttga

SEQ ID NO: 1483949 - DNA, 25 bp, Homo sapien
ccaaatacactacgagaatctaaac

SEQ ID NO: 1483950 - DNA, 25 bp, Homo sapien
gacccatgcgagttgcttctttctc

SEQ ID NO: 1483951 - DNA, 25 bp, Homo sapien
ttctccctggagatgttggcaggat

SEQ ID NO: 1483952 - DNA, 25 bp, Homo sapien
tgaaactcagccctcagcttgaaaa

SEQ ID NO: 1483953 - DNA, 25 bp, Homo sapien
cacctaagcacctgtttcaaatgaa

SEQ ID NO: 1483954 - DNA, 25 bp, Homo sapien
tcaagcatagggaaagtaacttggt

SEQ ID NO: 1483955 - DNA, 25 bp, Homo sapien
caagcatagggaaagtaacttggta

SEQ ID NO: 1483956 - DNA, 25 bp, Homo sapien
ttcaagcatagggaaagtaacttgg

SEQ ID NO: 1483957 - DNA, 25 bp, Homo sapien
atttcaagcatagggaaagtaactt

SEQ ID NO: 1483958 - DNA, 25 bp, Homo sapien
catgtacaggggatcataccagaaa

SEQ ID NO: 1483959 - DNA, 25 bp, Homo sapien
tgtacaggggatcataccagaaacc

SEQ ID NO: 1483960 - DNA, 25 bp, Homo sapien
cttcatgtacaggggatcataccag

SEQ ID NO: 1483961 - DNA, 25 bp, Homo sapien
tcatgtacaggggatcataccagaa

SEQ ID NO: 1483962 - DNA, 25 bp, Homo sapien
taaacaattgcagagtgccacccac

SEQ ID NO: 1483963 - DNA, 25 bp, Homo sapien
tggtaactcaacacccaaggagcag

SEQ ID NO: 1483964 - DNA, 25 bp, Homo sapien
tgtttggcaagctcacaagcgtctc

SEQ ID NO: 1483965 - DNA, 25 bp, Homo sapien
aaagcatgcgggttcaaacgggcca

SEQ ID NO: 1483966 - DNA, 25 bp, Homo sapien
acacaggacctttggcaataggtca

SEQ ID NO: 1483967 - DNA, 25 bp, Homo sapien
aaatacacaggacctttggcaatag

SEQ ID NO: 1483968 - DNA, 25 bp, Homo sapien
aatacacaggacctttggcaatagg

SEQ ID NO: 1483969 - DNA, 25 bp, Homo sapien
tacacaggacctttggcaataggtc

SEQ ID NO: 1483970 - DNA, 25 bp, Homo sapien
ggaggtgctgttctgcgattatatc

SEQ ID NO: 1483971 - DNA, 25 bp, Homo sapien
tggaggtgctgttctgcgattatat

SEQ ID NO: 1483972 - DNA, 25 bp, Homo sapien
tcaagtttggttgccaaatttgtgg

SEQ ID NO: 1483973 - DNA, 25 bp, Homo sapien
gcaatatttcccagggagtttcatt

SEQ ID NO: 1483974 - DNA, 25 bp, Homo sapien
ttgaatatcaagtttggttgccaaa

SEQ ID NO: 1483975 - DNA, 25 bp, Homo sapien
ctgcaatatttcccagggagtttca

SEQ ID NO: 1483976 - DNA, 25 bp, Homo sapien
tgataaacttcaatattctccgtca

SEQ ID NO: 1483977 - DNA, 25 bp, Homo sapien
tcctgataaacttcaatattctccg

SEQ ID NO: 1483978 - DNA, 25 bp, Homo sapien
caaaattcctgataaacttcaatat

SEQ ID NO: 1483979 - DNA, 25 bp, Homo sapien
gataaacttcaatattctccgtcac

SEQ ID NO: 1483980 - DNA, 25 bp, Homo sapien
aacgcagtgctgcagtcaagctact

SEQ ID NO: 1483981 - DNA, 25 bp, Homo sapien
ctgagtgaacgcagtgctgcagtca

SEQ ID NO: 1483982 - DNA, 25 bp, Homo sapien
ttcactgagtgaacgcagtgctgca

SEQ ID NO: 1483983 - DNA, 25 bp, Homo sapien
cgcagtgctgcagtcaagctactgg

SEQ ID NO: 1483984 - DNA, 25 bp, Homo sapien
caaatgcttgcagaagttccactac

SEQ ID NO: 1483985 - DNA, 25 bp, Homo sapien
agagttccttcagttctttgtccct

SEQ ID NO: 1483986 - DNA, 25 bp, Homo sapien
atgcttgcagaagttccactacaat

SEQ ID NO: 1483987 - DNA, 25 bp, Homo sapien
caaaaacatcatgcctgcctgtcca

SEQ ID NO: 1483988 - DNA, 25 bp, Homo sapien
gttcctgatgcaacagatactccca

SEQ ID NO: 1483989 - DNA, 25 bp, Homo sapien
ctgatgcaacagatactcccataac

SEQ ID NO: 1483990 - DNA, 25 bp, Homo sapien
tccgtcaattgttcctgatgcaaca

SEQ ID NO: 1483991 - DNA, 25 bp, Homo sapien
gtcaattgttcctgatgcaacagat

SEQ ID NO: 1483992 - DNA, 25 bp, Homo sapien
ccagtagacaaaatgtaagcttggt

SEQ ID NO: 1483993 - DNA, 25 bp, Homo sapien
gtaagcttggtcatgacagtactcc

SEQ ID NO: 1483994 - DNA, 25 bp, Homo sapien
aaatccagtagacaaaatgtaagct

SEQ ID NO: 1483995 - DNA, 25 bp, Homo sapien
gcttggtcatgacagtactccatat

SEQ ID NO: 1483996 - DNA, 25 bp, Homo sapien
tcataaggcaggaagcctacaaatt

SEQ ID NO: 1483997 - DNA, 25 bp, Homo sapien
cttcataaggcaggaagcctacaaa

SEQ ID NO: 1483998 - DNA, 25 bp, Homo sapien
taaggcaggaagcctacaaattccc

SEQ ID NO: 1483999 - DNA, 25 bp, Homo sapien
cataaggcaggaagcctacaaattc

SEQ ID NO: 1484000 - DNA, 25 bp, Homo sapien
tgcattcttcccgaatgcagctctc

SEQ ID NO: 1484001 - DNA, 25 bp, Homo sapien
attcttcccgaatgcagctctcaca

SEQ ID NO: 1484002 - DNA, 25 bp, Homo sapien
tgccatgtccgctacatcgtcagtt

SEQ ID NO: 1484003 - DNA, 25 bp, Homo sapien
catgtccgctacatcgtcagttata

SEQ ID NO: 1484004 - DNA, 25 bp, Homo sapien
ttgtctcaaactgctttctcaggac

SEQ ID NO: 1484005 - DNA, 25 bp, Homo sapien
gctgttgtctcaaactgctttctca

SEQ ID NO: 1484006 - DNA, 25 bp, Homo sapien
tgctgttgtctcaaactgctttctc

SEQ ID NO: 1484007 - DNA, 25 bp, Homo sapien
tgttgtctcaaactgctttctcagg

SEQ ID NO: 1484008 - DNA, 25 bp, Homo sapien
tccagcactccagcacggcttgcac

SEQ ID NO: 1484009 - DNA, 25 bp, Homo sapien
gaatttatccagcactccagcacgg

SEQ ID NO: 1484010 - DNA, 25 bp, Homo sapien
atttatccagcactccagcacggct

SEQ ID NO: 1484011 - DNA, 25 bp, Homo sapien
ttatccagcactccagcacggcttg

SEQ ID NO: 1484012 - DNA, 25 bp, Homo sapien
cagagattttaggtatcctttgttt

SEQ ID NO: 1484013 - DNA, 25 bp, Homo sapien
cctcctgtccatcaagaggtatgtt

SEQ ID NO: 1484014 - DNA, 25 bp, Homo sapien
gcctcctgtccatcaagaggtatgt

SEQ ID NO: 1484015 - DNA, 25 bp, Homo sapien
tcaagatttcaaacagagattttag

SEQ ID NO: 1484016 - DNA, 25 bp, Homo sapien
ccttctttactggggttcggagcat

SEQ ID NO: 1484017 - DNA, 25 bp, Homo sapien
tttactggggttcggagcattgctg

SEQ ID NO: 1484018 - DNA, 25 bp, Homo sapien
tctttactggggttcggagcattgc

SEQ ID NO: 1484019 - DNA, 25 bp, Homo sapien
tactggggttcggagcattgctgtt

SEQ ID NO: 1484020 - DNA, 25 bp, Homo sapien
tcagaagtttcatcaacaattcttt

SEQ ID NO: 1484021 - DNA, 25 bp, Homo sapien
ctgttcagaagtttcatcaacaatt

SEQ ID NO: 1484022 - DNA, 25 bp, Homo sapien
agaagtttcatcaacaattctttta

SEQ ID NO: 1484023 - DNA, 25 bp, Homo sapien
gttcagaagtttcatcaacaattct

SEQ ID NO: 1484024 - DNA, 25 bp, Homo sapien
ctactaggtgggttgttcaaatgac

SEQ ID NO: 1484025 - DNA, 25 bp, Homo sapien
tacagaccccagatgtctcaaaatg

SEQ ID NO: 1484026 - DNA, 25 bp, Homo sapien
agaccccagatgtctcaaaatgttt

SEQ ID NO: 1484027 - DNA, 25 bp, Homo sapien
acagaccccagatgtctcaaaatgt

SEQ ID NO: 1484028 - DNA, 25 bp, Homo sapien
cagaccccagatgtctcaaaatgtt

SEQ ID NO: 1484029 - DNA, 25 bp, Homo sapien
ttgatcatgtttagctgatcatccc

SEQ ID NO: 1484030 - DNA, 25 bp, Homo sapien
gatcatgtttagctgatcatccctg

SEQ ID NO: 1484031 - DNA, 25 bp, Homo sapien
tcatgtttagctgatcatccctggg

SEQ ID NO: 1484032 - DNA, 25 bp, Homo sapien
ctcattgatcatgtttagctgatca

SEQ ID NO: 1484033 - DNA, 25 bp, Homo sapien
gcagccaggccagccagcgcgcagg

SEQ ID NO: 1484034 - DNA, 25 bp, Homo sapien
gggagggcagccaggccagccagcg

SEQ ID NO: 1484035 - DNA, 25 bp, Homo sapien
gggcagccaggccagccagcgcgca

SEQ ID NO: 1484036 - DNA, 25 bp, Homo sapien
gagggcagccaggccagccagcgcg

SEQ ID NO: 1484037 - DNA, 25 bp, Homo sapien
cgccaccaccgctgcctctggggca

SEQ ID NO: 1484038 - DNA, 25 bp, Homo sapien
gccaccaccgctgcctctggggcat

SEQ ID NO: 1484039 - DNA, 25 bp, Homo sapien
aggaaggatggacttctaaggactg

SEQ ID NO: 1484040 - DNA, 25 bp, Homo sapien
aataaccaatcgtatttgtgcaagg

SEQ ID NO: 1484041 - DNA, 25 bp, Homo sapien
ctgaaataaccaatcgtatttgtgc

SEQ ID NO: 1484042 - DNA, 25 bp, Homo sapien
aggactgatagcttgtgaaagataa

SEQ ID NO: 1484043 - DNA, 25 bp, Homo sapien
tgtacagacaacagacgaagacatg

SEQ ID NO: 1484044 - DNA, 25 bp, Homo sapien
gtgaactgtgtgtctaactgaagct

SEQ ID NO: 1484045 - DNA, 25 bp, Homo sapien
gacacagatccagcatagtagaagg

SEQ ID NO: 1484046 - DNA, 25 bp, Homo sapien
ccattggagatggaatgtacacaca

SEQ ID NO: 1484047 - DNA, 25 bp, Homo sapien
gtaagactgagcaaggcttgttaac

SEQ ID NO: 1484048 - DNA, 25 bp, Homo sapien
ggcttgttaacctcttggacgtgag

SEQ ID NO: 1484049 - DNA, 25 bp, Homo sapien
gactgagcaaggcttgttaacctct

SEQ ID NO: 1484050 - DNA, 25 bp, Homo sapien
gagcaaggcttgttaacctcttgga

SEQ ID NO: 1484051 - DNA, 25 bp, Homo sapien
cgtggtacggtatttgcatgtcagc

SEQ ID NO: 1484052 - DNA, 25 bp, Homo sapien
aagtacacgtggtacggtatttgca

SEQ ID NO: 1484053 - DNA, 25 bp, Homo sapien
cagggaagtacacgtggtacggtat

SEQ ID NO: 1484054 - DNA, 25 bp, Homo sapien
cacttccagggaagtacacgtggta

SEQ ID NO: 1484055 - DNA, 25 bp, Homo sapien
attcctgcttgtttgtctccagcca

SEQ ID NO: 1484056 - DNA, 25 bp, Homo sapien
gatattcttgagtgccttgtaggct

SEQ ID NO: 1484057 - DNA, 25 bp, Homo sapien
taggctgcagagactatggagaggc

SEQ ID NO: 1484058 - DNA, 25 bp, Homo sapien
cccatatgttgctgtagactgggat

SEQ ID NO: 1484059 - DNA, 25 bp, Homo sapien
ttgcctggatttccaaatccttcac

SEQ ID NO: 1484060 - DNA, 25 bp, Homo sapien
tctccgctggtcacctgtttgtgca

SEQ ID NO: 1484061 - DNA, 25 bp, Homo sapien
ttcagactctttactgttacccacg

SEQ ID NO: 1484062 - DNA, 25 bp, Homo sapien
acccacgaagtggttctttggctgg

SEQ ID NO: 1484063 - DNA, 25 bp, Homo sapien
tgggttccgtggcctttcagactct

SEQ ID NO: 1484064 - DNA, 25 bp, Homo sapien
cttcggctacgtaaggcacgcagca

SEQ ID NO: 1484065 - DNA, 25 bp, Homo sapien
taaggcacgcagcaggatttgcagt

SEQ ID NO: 1484066 - DNA, 25 bp, Homo sapien
aagaccttcggctacgtaaggcacg

SEQ ID NO: 1484067 - DNA, 25 bp, Homo sapien
gctacgtaaggcacgcagcaggatt

SEQ ID NO: 1484068 - DNA, 25 bp, Homo sapien
ttctcaggcaagttatcatcaccgc

SEQ ID NO: 1484069 - DNA, 25 bp, Homo sapien
catcatgctgcagggaaactaaaat

SEQ ID NO: 1484070 - DNA, 25 bp, Homo sapien
caatcgatttacatcatgctgcagg

SEQ ID NO: 1484071 - DNA, 25 bp, Homo sapien
caataaaataagatggatagccata

SEQ ID NO: 1484072 - DNA, 25 bp, Homo sapien
gccctcagtgttggtgtacagtttt

SEQ ID NO: 1484073 - DNA, 25 bp, Homo sapien
ctggccctcagtgttggtgtacagt

SEQ ID NO: 1484074 - DNA, 25 bp, Homo sapien
ggccctcagtgttggtgtacagttt

SEQ ID NO: 1484075 - DNA, 25 bp, Homo sapien
tggccctcagtgttggtgtacagtt

SEQ ID NO: 1484076 - DNA, 25 bp, Homo sapien
caaaagatgttctgcgatccattga

SEQ ID NO: 1484077 - DNA, 25 bp, Homo sapien
ttcaaaagatgttctgcgatccatt

SEQ ID NO: 1484078 - DNA, 25 bp, Homo sapien
tgttctgcgatccattgagtttcca

SEQ ID NO: 1484079 - DNA, 25 bp, Homo sapien
aagatgttctgcgatccattgagtt

SEQ ID NO: 1484080 - DNA, 25 bp, Homo sapien
aggcatacagaagactaacatgaaa

SEQ ID NO: 1484081 - DNA, 25 bp, Homo sapien
gaaaacagcttctaataaattttgc

SEQ ID NO: 1484082 - DNA, 25 bp, Homo sapien
catacagaagactaacatgaaacat

SEQ ID NO: 1484083 - DNA, 25 bp, Homo sapien
ggcatacagaagactaacatgaaac

SEQ ID NO: 1484084 - DNA, 25 bp, Homo sapien
gcactggatcttataaaacgtgggt

SEQ ID NO: 1484085 - DNA, 25 bp, Homo sapien
ggatcttataaaacgtgggtatgaa

SEQ ID NO: 1484086 - DNA, 25 bp, Homo sapien
tcacttttcatcagtttgtaaatgt

SEQ ID NO: 1484087 - DNA, 25 bp, Homo sapien
cttataaaacgtgggtatgaatcac

SEQ ID NO: 1484088 - DNA, 25 bp, Homo sapien
ctagaaagatgctcggcattttatc

SEQ ID NO: 1484089 - DNA, 25 bp, Homo sapien
gaaagatgctcggcattttatcttg

SEQ ID NO: 1484090 - DNA, 25 bp, Homo sapien
aagatgctcggcattttatcttgga

SEQ ID NO: 1484091 - DNA, 25 bp, Homo sapien
tagaaagatgctcggcattttatct

SEQ ID NO: 1484092 - DNA, 25 bp, Homo sapien
ttcctgaactcttgagggtacttct

SEQ ID NO: 1484093 - DNA, 25 bp, Homo sapien
tcaaatgtgtatcgtccaggttcct

SEQ ID NO: 1484094 - DNA, 25 bp, Homo sapien
aatccaagttaatagcactgggggc

SEQ ID NO: 1484095 - DNA, 25 bp, Homo sapien
tttgtcataactcttggaatccaag

SEQ ID NO: 1484096 - DNA, 25 bp, Homo sapien
aaccccatcgttttaccctctgctg

SEQ ID NO: 1484097 - DNA, 25 bp, Homo sapien
tagaaatttaaggaactgttctctc

SEQ ID NO: 1484098 - DNA, 25 bp, Homo sapien
ttcaatgcctcgtccatgccaaaac

SEQ ID NO: 1484099 - DNA, 25 bp, Homo sapien
gttctctcccaactgggtctttcaa

SEQ ID NO: 1484100 - DNA, 25 bp, Homo sapien
gtcgtattctaaatactgttccgtg

SEQ ID NO: 1484101 - DNA, 25 bp, Homo sapien
tgtcatcggacagccatgggttaga

SEQ ID NO: 1484102 - DNA, 25 bp, Homo sapien
aatactgttccgtgtaacttagtag

SEQ ID NO: 1484103 - DNA, 25 bp, Homo sapien
tagaagggtcaggtggcaaaagaaa

SEQ ID NO: 1484104 - DNA, 25 bp, Homo sapien
tttaaccgatgtctatctaactgta

SEQ ID NO: 1484105 - DNA, 25 bp, Homo sapien
ttaaccgatgtctatctaactgtat

SEQ ID NO: 1484106 - DNA, 25 bp, Homo sapien
ctgttggaggtttagtttctggtgt

SEQ ID NO: 1484107 - DNA, 25 bp, Homo sapien
tgtgggtaggactgtgacttctaat

SEQ ID NO: 1484108 - DNA, 25 bp, Homo sapien
tgtgtgggtaggactgtgacttcta

SEQ ID NO: 1484109 - DNA, 25 bp, Homo sapien
ggtaggactgtgacttctaatatca

SEQ ID NO: 1484110 - DNA, 25 bp, Homo sapien
tagtcgtttcttagcctcctcaatg

SEQ ID NO: 1484111 - DNA, 25 bp, Homo sapien
tggtaaatctagtcgtttcttagcc

SEQ ID NO: 1484112 - DNA, 25 bp, Homo sapien
ggaagaaattgtcttgagtttcaaa

SEQ ID NO: 1484113 - DNA, 25 bp, Homo sapien
cgtttcttagcctcctcaatgtcac

SEQ ID NO: 1484114 - DNA, 25 bp, Homo sapien
aaggtatgcaggataagcgtgtcca

SEQ ID NO: 1484115 - DNA, 25 bp, Homo sapien
tatgcaggataagcgtgtccatgga

SEQ ID NO: 1484116 - DNA, 25 bp, Homo sapien
ggataagcgtgtccatggacttctt

SEQ ID NO: 1484117 - DNA, 25 bp, Homo sapien
ctttgaaggtatgcaggataagcgt

SEQ ID NO: 1484118 - DNA, 25 bp, Homo sapien
gtggtagagggtccatcctatgctc

SEQ ID NO: 1484119 - DNA, 25 bp, Homo sapien
tggtagagggtccatcctatgctca

SEQ ID NO: 1484120 - DNA, 25 bp, Homo sapien
tgtggtagagggtccatcctatgct

SEQ ID NO: 1484121 - DNA, 25 bp, Homo sapien
gttatagtccagtccgctcaggaca

SEQ ID NO: 1484122 - DNA, 25 bp, Homo sapien
gcgcgttctacggagccgccatcga

SEQ ID NO: 1484123 - DNA, 25 bp, Homo sapien
gctgcggccgggtccgcgcgttcta

SEQ ID NO: 1484124 - DNA, 25 bp, Homo sapien
gtgcccggaccctggatcagcaagg

SEQ ID NO: 1484125 - DNA, 25 bp, Homo sapien
agaaaaggtacttggaccatattgg

SEQ ID NO: 1484126 - DNA, 25 bp, Homo sapien
ttcctacgggcagaagcatttgagc

SEQ ID NO: 1484127 - DNA, 25 bp, Homo sapien
tctcttggagagttcctacgggcag

SEQ ID NO: 1484128 - DNA, 25 bp, Homo sapien
ccgaattggttttgtggtgctttgc

SEQ ID NO: 1484129 - DNA, 25 bp, Homo sapien
tgttttgtgggggtttctcattctg

SEQ ID NO: 1484130 - DNA, 25 bp, Homo sapien
gtccacttcagttgtatttacacat

SEQ ID NO: 1484131 - DNA, 25 bp, Homo sapien
aatgtccacttcagttgtatttaca

SEQ ID NO: 1484132 - DNA, 25 bp, Homo sapien
cttcagttgtatttacacatccagg

SEQ ID NO: 1484133 - DNA, 25 bp, Homo sapien
cagaaatcgacaaggatctggaaga

SEQ ID NO: 1484134 - DNA, 25 bp, Homo sapien
aacatgcaaacctgtctatagcaga

SEQ ID NO: 1484135 - DNA, 25 bp, Homo sapien
gcaaacctgtctatagcagaaatcg

SEQ ID NO: 1484136 - DNA, 25 bp, Homo sapien
tctatagcagaaatcgacaaggatc

SEQ ID NO: 1484137 - DNA, 25 bp, Homo sapien
cagcccgactttggcttaattctaa

SEQ ID NO: 1484138 - DNA, 25 bp, Homo sapien
cgactttggcttaattctaaacata

SEQ ID NO: 1484139 - DNA, 25 bp, Homo sapien
ccgactttggcttaattctaaacat

SEQ ID NO: 1484140 - DNA, 25 bp, Homo sapien
ccagcccgactttggcttaattcta

SEQ ID NO: 1484141 - DNA, 25 bp, Homo sapien
gtgagccactgcgcctggctgtttg

SEQ ID NO: 1484142 - DNA, 25 bp, Homo sapien
ttagtagagaccaccatgttggtca

SEQ ID NO: 1484143 - DNA, 25 bp, Homo sapien
agccactgcgcctggctgtttgtca

SEQ ID NO: 1484144 - DNA, 25 bp, Homo sapien
tcaggttggtctcaaactcctgacc

SEQ ID NO: 1484145 - DNA, 25 bp, Homo sapien
aataataggacactgtatctacaaa

SEQ ID NO: 1484146 - DNA, 25 bp, Homo sapien
tacataataataggacactgtatct

SEQ ID NO: 1484147 - DNA, 25 bp, Homo sapien
tattacataataataggacactgta

SEQ ID NO: 1484148 - DNA, 25 bp, Homo sapien
cataataataggacactgtatctac

SEQ ID NO: 1484149 - DNA, 25 bp, Homo sapien
aaagagataggtgaatggagctgcc

SEQ ID NO: 1484150 - DNA, 25 bp, Homo sapien
aataacacgacatgaccaagtaggg

SEQ ID NO: 1484151 - DNA, 25 bp, Homo sapien
taaagatcggaagccatcactgcct

SEQ ID NO: 1484152 - DNA, 25 bp, Homo sapien
tcaataagaagcctagtacacgcca

SEQ ID NO: 1484153 - DNA, 25 bp, Homo sapien
ttttttattgaaaggtgtaatagca

SEQ ID NO: 1484154 - DNA, 25 bp, Homo sapien
ttttattgaaaggtgtaatagcaga

SEQ ID NO: 1484155 - DNA, 25 bp, Homo sapien
tttttattgaaaggtgtaatagcag

SEQ ID NO: 1484156 - DNA, 25 bp, Homo sapien
tttattgaaaggtgtaatagcagaa

SEQ ID NO: 1484157 - DNA, 25 bp, Homo sapien
ccaccgctagctctgaacctgagta

SEQ ID NO: 1484158 - DNA, 25 bp, Homo sapien
gctagctctgaacctgagtacgtcc

SEQ ID NO: 1484159 - DNA, 25 bp, Homo sapien
gaacctgagtacgtcctataaacaa

SEQ ID NO: 1484160 - DNA, 25 bp, Homo sapien
tacgtcctataaacaacatgagcat

SEQ ID NO: 1484161 - DNA, 25 bp, Homo sapien
tggagactttctattttggtctgac

SEQ ID NO: 1484162 - DNA, 25 bp, Homo sapien
ttggagactttctattttggtctga

SEQ ID NO: 1484163 - DNA, 25 bp, Homo sapien
ggagactttctattttggtctgact

SEQ ID NO: 1484164 - DNA, 25 bp, Homo sapien
ctttggagactttctattttggtct

SEQ ID NO: 1484165 - DNA, 25 bp, Homo sapien
agacgagagtgcgacgcttgcttac

SEQ ID NO: 1484166 - DNA, 25 bp, Homo sapien
ctcacttcccacagacggagaagat

SEQ ID NO: 1484167 - DNA, 25 bp, Homo sapien
gatggattcaagacgagagtgcgac

SEQ ID NO: 1484168 - DNA, 25 bp, Homo sapien
cacagacggagaagatggattcaag

SEQ ID NO: 1484169 - DNA, 25 bp, Homo sapien
tctcttggctgtcaaggatcttcct

SEQ ID NO: 1484170 - DNA, 25 bp, Homo sapien
gtcccagaacgctctctcttggctg

SEQ ID NO: 1484171 - DNA, 25 bp, Homo sapien
acgggcctgtgcacgtcccagaacg

SEQ ID NO: 1484172 - DNA, 25 bp, Homo sapien
tctctcttggctgtcaaggatcttc

SEQ ID NO: 1484173 - DNA, 25 bp, Homo sapien
tgaaaatgaactcccacttccgggc

SEQ ID NO: 1484174 - DNA, 25 bp, Homo sapien
atgaactcccacttccgggcaaatg

SEQ ID NO: 1484175 - DNA, 25 bp, Homo sapien
tcccacttccgggcaaatgctctct

SEQ ID NO: 1484176 - DNA, 25 bp, Homo sapien
gaactcccacttccgggcaaatgct

SEQ ID NO: 1484177 - DNA, 25 bp, Homo sapien
acataccccaggtgaagacatttgg

SEQ ID NO: 1484178 - DNA, 25 bp, Homo sapien
cataccccaggtgaagacatttggt

SEQ ID NO: 1484179 - DNA, 25 bp, Homo sapien
aacataccccaggtgaagacatttg

SEQ ID NO: 1484180 - DNA, 25 bp, Homo sapien
ataccccaggtgaagacatttggtg

SEQ ID NO: 1484181 - DNA, 25 bp, Homo sapien
tatgactatctttgccagaaggtcc

SEQ ID NO: 1484182 - DNA, 25 bp, Homo sapien
ttctatgactatctttgccagaagg

SEQ ID NO: 1484183 - DNA, 25 bp, Homo sapien
gactatctttgccagaaggtccttg

SEQ ID NO: 1484184 - DNA, 25 bp, Homo sapien
tctatgactatctttgccagaaggt

SEQ ID NO: 1484185 - DNA, 25 bp, Homo sapien
gcctcatagtctgcgagctccagtc

SEQ ID NO: 1484186 - DNA, 25 bp, Homo sapien
atagtctgcgagctccagtcgtgcc

SEQ ID NO: 1484187 - DNA, 25 bp, Homo sapien
gagctccagtcgtgccttgttttgc

SEQ ID NO: 1484188 - DNA, 25 bp, Homo sapien
tctgcgagctccagtcgtgccttgt

SEQ ID NO: 1484189 - DNA, 25 bp, Homo sapien
agttttggataacgacgtccagctg

SEQ ID NO: 1484190 - DNA, 25 bp, Homo sapien
ccaagttttggataacgacgtccag

SEQ ID NO: 1484191 - DNA, 25 bp, Homo sapien
caagttttggataacgacgtccagc

SEQ ID NO: 1484192 - DNA, 25 bp, Homo sapien
aagttttggataacgacgtccagct

SEQ ID NO: 1484193 - DNA, 25 bp, Homo sapien
cagcagccccttgaagtctcttatc

SEQ ID NO: 1484194 - DNA, 25 bp, Homo sapien
tcaggagtgagataaggcgcggtca

SEQ ID NO: 1484195 - DNA, 25 bp, Homo sapien
agataaggcgcggtcacccctggct

SEQ ID NO: 1484196 - DNA, 25 bp, Homo sapien
gcagccccttgaagtctcttatcag

SEQ ID NO: 1484197 - DNA, 25 bp, Homo sapien
tctataaactgaggtcacggacaaa

SEQ ID NO: 1484198 - DNA, 25 bp, Homo sapien
gagcctgtgctgctctataaactga

SEQ ID NO: 1484199 - DNA, 25 bp, Homo sapien
ctttctcctctggtgccacgctcat

SEQ ID NO: 1484200 - DNA, 25 bp, Homo sapien
tcacggacaaagctttctcctctgg

SEQ ID NO: 1484201 - DNA, 25 bp, Homo sapien
atcggtacagcaagggggactgccc

SEQ ID NO: 1484202 - DNA, 25 bp, Homo sapien
caactccaggaatatctagaggcag

SEQ ID NO: 1484203 - DNA, 25 bp, Homo sapien
agaggcagagagcaccatcggtaca

SEQ ID NO: 1484204 - DNA, 25 bp, Homo sapien
ccaggaatatctagaggcagagagc

SEQ ID NO: 1484205 - DNA, 25 bp, Homo sapien
aagtccaggaatgggacaccagcag

SEQ ID NO: 1484206 - DNA, 25 bp, Homo sapien
tcagaaaaagtccaggaatgggaca

SEQ ID NO: 1484207 - DNA, 25 bp, Homo sapien
gaaaaagtccaggaatgggacacca

SEQ ID NO: 1484208 - DNA, 25 bp, Homo sapien
tccaggaatgggacaccagcagcag

SEQ ID NO: 1484209 - DNA, 25 bp, Homo sapien
tggccctgttcttgtagtgtcccct

SEQ ID NO: 1484210 - DNA, 25 bp, Homo sapien
cctggccctgttcttgtagtgtccc

SEQ ID NO: 1484211 - DNA, 25 bp, Homo sapien
atccctgagatgacggtgatctgaa

SEQ ID NO: 1484212 - DNA, 25 bp, Homo sapien
gatgacggtgatctgaaaagagccc

SEQ ID NO: 1484213 - DNA, 25 bp, Homo sapien
gtaggtgaagttctcctggaaaata

SEQ ID NO: 1484214 - DNA, 25 bp, Homo sapien
ctaggtaggtgaagttctcctggaa

SEQ ID NO: 1484215 - DNA, 25 bp, Homo sapien
aatttcagatacaccaatcagatga

SEQ ID NO: 1484216 - DNA, 25 bp, Homo sapien
tttgaaatgggtttgaacatcctcc

SEQ ID NO: 1484217 - DNA, 25 bp, Homo sapien
gccttaaccgctagacttgagagaa

SEQ ID NO: 1484218 - DNA, 25 bp, Homo sapien
gcaatgacaagataagtcctctcct

SEQ ID NO: 1484219 - DNA, 25 bp, Homo sapien
tttcatgaaataagagtgccgatcc

SEQ ID NO: 1484220 - DNA, 25 bp, Homo sapien
catggcgtcttgtcggccttaaccg

SEQ ID NO: 1484221 - DNA, 25 bp, Homo sapien
caatgagttggttctcactgtcgta

SEQ ID NO: 1484222 - DNA, 25 bp, Homo sapien
cagtacatttatatgcacgagcatt

SEQ ID NO: 1484223 - DNA, 25 bp, Homo sapien
cactgtcgtattaggtaaatgggtt

SEQ ID NO: 1484224 - DNA, 25 bp, Homo sapien
aagccagaccttttaatgacttaca

SEQ ID NO: 1484225 - DNA, 25 bp, Homo sapien
cagtttggaaaaattgaagggattg

SEQ ID NO: 1484226 - DNA, 25 bp, Homo sapien
gactgattgaggcaatggcaagaaa

SEQ ID NO: 1484227 - DNA, 25 bp, Homo sapien
ttgaagggattgaaatcatgactga

SEQ ID NO: 1484228 - DNA, 25 bp, Homo sapien
tctttgatgactatgactccgtgga

SEQ ID NO: 1484229 - DNA, 25 bp, Homo sapien
actgtataaagttagtctgctctga

SEQ ID NO: 1484230 - DNA, 25 bp, Homo sapien
tactgtataaagttagtctgctctg

SEQ ID NO: 1484231 - DNA, 25 bp, Homo sapien
tcaaagttgggtaattcatattgct

SEQ ID NO: 1484232 - DNA, 25 bp, Homo sapien
aattcatattgctgctataatttgt

SEQ ID NO: 1484233 - DNA, 25 bp, Homo sapien
aattcaaagttgggtaattcatatt

SEQ ID NO: 1484234 - DNA, 25 bp, Homo sapien
taattcatattgctgctataatttg

SEQ ID NO: 1484235 - DNA, 25 bp, Homo sapien
gatccagctcaaatggtaccagttc

SEQ ID NO: 1484236 - DNA, 25 bp, Homo sapien
aacgcttgccctgccttctcatctg

SEQ ID NO: 1484237 - DNA, 25 bp, Homo sapien
tacctcaaacgcttgccctgccttc

SEQ ID NO: 1484238 - DNA, 25 bp, Homo sapien
ggtaccagttctctcgcaaaatcat

SEQ ID NO: 1484239 - DNA, 25 bp, Homo sapien
aacagtgagaaaagcggacccttgg

SEQ ID NO: 1484240 - DNA, 25 bp, Homo sapien
tattctttctagtaggccaggttgc

SEQ ID NO: 1484241 - DNA, 25 bp, Homo sapien
cacacagctaagtgggagagttgaa

SEQ ID NO: 1484242 - DNA, 25 bp, Homo sapien
tcaagggacttactaaaaagcacac

SEQ ID NO: 1484243 - DNA, 25 bp, Homo sapien
tgttttccggctcccaacaatttga

SEQ ID NO: 1484244 - DNA, 25 bp, Homo sapien
taatctgtgttttccggctcccaac

SEQ ID NO: 1484245 - DNA, 25 bp, Homo sapien
caacaatttgatggccaaaaatagg

SEQ ID NO: 1484246 - DNA, 25 bp, Homo sapien
ggctcccaacaatttgatggccaaa

SEQ ID NO: 1484247 - DNA, 25 bp, Homo sapien
atgtgcaataagcatatttggagtc

SEQ ID NO: 1484248 - DNA, 25 bp, Homo sapien
tgcaataagcatatttggagtcatc

SEQ ID NO: 1484249 - DNA, 25 bp, Homo sapien
caataagcatatttggagtcatctc

SEQ ID NO: 1484250 - DNA, 25 bp, Homo sapien
catctctgattatctgatcattttc

SEQ ID NO: 1484251 - DNA, 25 bp, Homo sapien
ccaaaactgtcctacgattatttgc

SEQ ID NO: 1484252 - DNA, 25 bp, Homo sapien
atttcctcctagctcttaagtccaa

SEQ ID NO: 1484253 - DNA, 25 bp, Homo sapien
tccaaaactgtcctacgattatttg

SEQ ID NO: 1484254 - DNA, 25 bp, Homo sapien
cctagctcttaagtccaaaactgtc

SEQ ID NO: 1484255 - DNA, 25 bp, Homo sapien
taacaaacgaaatgcgggcttctag

SEQ ID NO: 1484256 - DNA, 25 bp, Homo sapien
ctaactaacaaacgaaatgcgggct

SEQ ID NO: 1484257 - DNA, 25 bp, Homo sapien
acgaaatgcgggcttctagtttact

SEQ ID NO: 1484258 - DNA, 25 bp, Homo sapien
cgaaatgcgggcttctagtttactg

SEQ ID NO: 1484259 - DNA, 25 bp, Homo sapien
ttgaaaccggtaaaaggtgccatca

SEQ ID NO: 1484260 - DNA, 25 bp, Homo sapien
aatgttcccaaatggagcgcctcca

SEQ ID NO: 1484261 - DNA, 25 bp, Homo sapien
tagccgtgggcagccattaatgttc

SEQ ID NO: 1484262 - DNA, 25 bp, Homo sapien
ccttgagtgtgaggacatgatctga

SEQ ID NO: 1484263 - DNA, 25 bp, Homo sapien
tcagcccttccttcccggcagcagt

SEQ ID NO: 1484264 - DNA, 25 bp, Homo sapien
cccttccttcccggcagcagtgtgg

SEQ ID NO: 1484265 - DNA, 25 bp, Homo sapien
tccttcccggcagcagtgtggaggg

SEQ ID NO: 1484266 - DNA, 25 bp, Homo sapien
cttccttcccggcagcagtgtggag

SEQ ID NO: 1484267 - DNA, 25 bp, Homo sapien
ttctcttgtaaagggctgggtggga

SEQ ID NO: 1484268 - DNA, 25 bp, Homo sapien
gattcccagtgacagaaatcttggc

SEQ ID NO: 1484269 - DNA, 25 bp, Homo sapien
gctgccagacacttcacactccact

SEQ ID NO: 1484270 - DNA, 25 bp, Homo sapien
cagctgccagacacttcacactcca

SEQ ID NO: 1484271 - DNA, 25 bp, Homo sapien
acaactatctatggccgcttctggg

SEQ ID NO: 1484272 - DNA, 25 bp, Homo sapien
tatctatggccgcttctgggtaaca

SEQ ID NO: 1484273 - DNA, 25 bp, Homo sapien
tctgggtaacagatataatcgtaca

SEQ ID NO: 1484274 - DNA, 25 bp, Homo sapien
ggccgcttctgggtaacagatataa

SEQ ID NO: 1484275 - DNA, 25 bp, Homo sapien
gacacaccaggtatgaatcccagct

SEQ ID NO: 1484276 - DNA, 25 bp, Homo sapien
aaacgtactgtgttggcatgatgcc

SEQ ID NO: 1484277 - DNA, 25 bp, Homo sapien
gacatccctcgcctggagcagtgtt

SEQ ID NO: 1484278 - DNA, 25 bp, Homo sapien
ctggtctctaacaaacgtactgtgt

SEQ ID NO: 1484279 - DNA, 25 bp, Homo sapien
gatggcactgatcactttgaatggc

SEQ ID NO: 1484280 - DNA, 25 bp, Homo sapien
tgacgggactgcactggatggcact

SEQ ID NO: 1484281 - DNA, 25 bp, Homo sapien
ccaacaggttggatgtgacgggact

SEQ ID NO: 1484282 - DNA, 25 bp, Homo sapien
catggcaggtggattactcgagatc

SEQ ID NO: 1484283 - DNA, 25 bp, Homo sapien
gatggtgtgtaagcaaaacatctgg

SEQ ID NO: 1484284 - DNA, 25 bp, Homo sapien
tccagttgtttgatggtgtgtaagc

SEQ ID NO: 1484285 - DNA, 25 bp, Homo sapien
agcaaaacatctggttgatttgcct

SEQ ID NO: 1484286 - DNA, 25 bp, Homo sapien
tcactggtatttttacaacagatat

SEQ ID NO: 1484287 - DNA, 25 bp, Homo sapien
tttatcaaccattgaacaatgtctg

SEQ ID NO: 1484288 - DNA, 25 bp, Homo sapien
ttatcaaccattgaacaatgtctga

SEQ ID NO: 1484289 - DNA, 25 bp, Homo sapien
tctttatcaaccattgaacaatgtc

SEQ ID NO: 1484290 - DNA, 25 bp, Homo sapien
atcaaccattgaacaatgtctgaac

SEQ ID NO: 1484291 - DNA, 25 bp, Homo sapien
gaggaggctccccatgttgactttg

SEQ ID NO: 1484292 - DNA, 25 bp, Homo sapien
aggaggctccccatgttgactttgg

SEQ ID NO: 1484293 - DNA, 25 bp, Homo sapien
ggaggctccccatgttgactttggc

SEQ ID NO: 1484294 - DNA, 25 bp, Homo sapien
tgcaggcgagctgggagacgaaggc

SEQ ID NO: 1484295 - DNA, 25 bp, Homo sapien
ggtcacctcatcatcgtgcggaatg

SEQ ID NO: 1484296 - DNA, 25 bp, Homo sapien
gtgacggtcacctcatcatcgtgcg

SEQ ID NO: 1484297 - DNA, 25 bp, Homo sapien
catcatcgtgcggaatgagggccag

SEQ ID NO: 1484298 - DNA, 25 bp, Homo sapien
taaaaccgatgcgacgatgactacc

SEQ ID NO: 1484299 - DNA, 25 bp, Homo sapien
gggcttcaaaagatactgtgttcct

SEQ ID NO: 1484300 - DNA, 25 bp, Homo sapien
aagacccaaagggaatgcgaactgg

SEQ ID NO: 1484301 - DNA, 25 bp, Homo sapien
gatgactaccaaggccacctgttga

SEQ ID NO: 1484302 - DNA, 25 bp, Homo sapien
ggcacagataacaggcacctccatt

SEQ ID NO: 1484303 - DNA, 25 bp, Homo sapien
cattacaccaatgacggttctgcag

SEQ ID NO: 1484304 - DNA, 25 bp, Homo sapien
gcggagaggcacagataacaggcac

SEQ ID NO: 1484305 - DNA, 25 bp, Homo sapien
cagttgtggcaatacgtgaagcgga

SEQ ID NO: 1484306 - DNA, 25 bp, Homo sapien
tgcatccgtagtgccatatccatcc

SEQ ID NO: 1484307 - DNA, 25 bp, Homo sapien
gatgttctttgtgcatccgtagtgc

SEQ ID NO: 1484308 - DNA, 25 bp, Homo sapien
tttgtgcatccgtagtgccatatcc

SEQ ID NO: 1484309 - DNA, 25 bp, Homo sapien
ttagcagtactctggatgttctttg

SEQ ID NO: 1484310 - DNA, 25 bp, Homo sapien
cactgacatatttccgaaacatcag

SEQ ID NO: 1484311 - DNA, 25 bp, Homo sapien
gaagaaaaacaatcggagtctctat

SEQ ID NO: 1484312 - DNA, 25 bp, Homo sapien
caaaaccgctgttgattggaacagg

SEQ ID NO: 1484313 - DNA, 25 bp, Homo sapien
aggagaagcacacccctagtccttc

SEQ ID NO: 1484314 - DNA, 25 bp, Homo sapien
tggtggctgctctctgctaaataag

SEQ ID NO: 1484315 - DNA, 25 bp, Homo sapien
gctaaataagcatgccacttgttca

SEQ ID NO: 1484316 - DNA, 25 bp, Homo sapien
cagggaccagcgatagtcacacttc

SEQ ID NO: 1484317 - DNA, 25 bp, Homo sapien
aaaagggatcgtggtccagtgtacg

SEQ ID NO: 1484318 - DNA, 25 bp, Homo sapien
tgaaaaagacgttgcttgtaaaata

SEQ ID NO: 1484319 - DNA, 25 bp, Homo sapien
gtgtcacccctaccctgagaagtct

SEQ ID NO: 1484320 - DNA, 25 bp, Homo sapien
gtctggatcactatccgtgtcaccc

SEQ ID NO: 1484321 - DNA, 25 bp, Homo sapien
aagaaaaagaaagcgtctggatcac

SEQ ID NO: 1484322 - DNA, 25 bp, Homo sapien
gaaagcgtctggatcactatccgtg

SEQ ID NO: 1484323 - DNA, 25 bp, Homo sapien
atgagaatatccaatcttctaaaaa

SEQ ID NO: 1484324 - DNA, 25 bp, Homo sapien
aatgagaatatccaatcttctaaaa

SEQ ID NO: 1484325 - DNA, 25 bp, Homo sapien
gagaatatccaatcttctaaaaatt

SEQ ID NO: 1484326 - DNA, 25 bp, Homo sapien
tgagaatatccaatcttctaaaaat

SEQ ID NO: 1484327 - DNA, 25 bp, Homo sapien
gttccgcagctcgattggctatgta

SEQ ID NO: 1484328 - DNA, 25 bp, Homo sapien
cgcagctcgattggctatgtagtta

SEQ ID NO: 1484329 - DNA, 25 bp, Homo sapien
tccgcagctcgattggctatgtagt

SEQ ID NO: 1484330 - DNA, 25 bp, Homo sapien
ttgttccgcagctcgattggctatg

SEQ ID NO: 1484331 - DNA, 25 bp, Homo sapien
taacagcaagcacacaggaactgtg

SEQ ID NO: 1484332 - DNA, 25 bp, Homo sapien
tccaagtgaactaaggccagaaact

SEQ ID NO: 1484333 - DNA, 25 bp, Homo sapien
tctgtgctcccctcggtgtttctgt

SEQ ID NO: 1484334 - DNA, 25 bp, Homo sapien
gtttctgttccatagaggcccatca

SEQ ID NO: 1484335 - DNA, 25 bp, Homo sapien
aaatttagcagtgaacttcttggca

SEQ ID NO: 1484336 - DNA, 25 bp, Homo sapien
agaaagaatggaacattaaatttag

SEQ ID NO: 1484337 - DNA, 25 bp, Homo sapien
aatttagcagtgaacttcttggcaa

SEQ ID NO: 1484338 - DNA, 25 bp, Homo sapien
aagaatggaacattaaatttagcag

SEQ ID NO: 1484339 - DNA, 25 bp, Homo sapien
taagacaaagtggagcgtacaagag

SEQ ID NO: 1484340 - DNA, 25 bp, Homo sapien
gatggaatttaacaagcagaatggc

SEQ ID NO: 1484341 - DNA, 25 bp, Homo sapien
ggagcgtacaagagatgcaaaaacc

SEQ ID NO: 1484342 - DNA, 25 bp, Homo sapien
ctctgaactgactactgaagaatgg

SEQ ID NO: 1484343 - DNA, 25 bp, Homo sapien
tgaatgccaatttatcccgagcact

SEQ ID NO: 1484344 - DNA, 25 bp, Homo sapien
ccttgtcacagtgctattgccctta

SEQ ID NO: 1484345 - DNA, 25 bp, Homo sapien
cacagtgctattgcccttactgaat

SEQ ID NO: 1484346 - DNA, 25 bp, Homo sapien
tcccgagcactttcatcacaatatc

SEQ ID NO: 1484347 - DNA, 25 bp, Homo sapien
tttgaccgtacgaataggaattcca

SEQ ID NO: 1484348 - DNA, 25 bp, Homo sapien
agaaagcttttgaccgtacgaatag

SEQ ID NO: 1484349 - DNA, 25 bp, Homo sapien
cagagaagacgctaggtatcttgga

SEQ ID NO: 1484350 - DNA, 25 bp, Homo sapien
gcatccgtgctatgacgtcttccat

SEQ ID NO: 1484351 - DNA, 25 bp, Homo sapien
catggtccatgaggaattatcaccc

SEQ ID NO: 1484352 - DNA, 25 bp, Homo sapien
tgttcaccaacaggacgtattactt

SEQ ID NO: 1484353 - DNA, 25 bp, Homo sapien
ggatcgccttagttcaggaatttga

SEQ ID NO: 1484354 - DNA, 25 bp, Homo sapien
ggtaatttgcattagttttgctatc

SEQ ID NO: 1484355 - DNA, 25 bp, Homo sapien
ttcatacaaaatcccaaggcaaagt

SEQ ID NO: 1484356 - DNA, 25 bp, Homo sapien
tataacttctagtccaataactggc

SEQ ID NO: 1484357 - DNA, 25 bp, Homo sapien
gccttcttcctgacaacgattctca

SEQ ID NO: 1484358 - DNA, 25 bp, Homo sapien
ccacgagtgccaagaaaatcagaat

SEQ ID NO: 1484359 - DNA, 25 bp, Homo sapien
caaggcggttctattaaaactgtgg

SEQ ID NO: 1484360 - DNA, 25 bp, Homo sapien
acaaggcggttctattaaaactgtg

SEQ ID NO: 1484361 - DNA, 25 bp, Homo sapien
agccagcagtaatgctttagaacca

SEQ ID NO: 1484362 - DNA, 25 bp, Homo sapien
gccagcagtaatgctttagaaccat

SEQ ID NO: 1484363 - DNA, 25 bp, Homo sapien
cctgaatcgtggcaggagatgccca

SEQ ID NO: 1484364 - DNA, 25 bp, Homo sapien
tgtgagacatatctcgggacctccc

SEQ ID NO: 1484365 - DNA, 25 bp, Homo sapien
gacctcccaggagagctatggaagt

SEQ ID NO: 1484366 - DNA, 25 bp, Homo sapien
gagctgagccaattgtgtggacatg

SEQ ID NO: 1484367 - DNA, 25 bp, Homo sapien
tcccagccacgacattatcacattt

SEQ ID NO: 1484368 - DNA, 25 bp, Homo sapien
cccgaggcaggatgatttcagattt

SEQ ID NO: 1484369 - DNA, 25 bp, Homo sapien
cattcatcagcatgggaccttccca

SEQ ID NO: 1484370 - DNA, 25 bp, Homo sapien
caaaatgaagtaaagtcccgaggca

SEQ ID NO: 1484371 - DNA, 25 bp, Homo sapien
tttttgagggaataatggcactggg

SEQ ID NO: 1484372 - DNA, 25 bp, Homo sapien
tcttttttgagggaataatggcact

SEQ ID NO: 1484373 - DNA, 25 bp, Homo sapien
gcctcccctatctttttgcaactct

SEQ ID NO: 1484374 - DNA, 25 bp, Homo sapien
tgagggaataatggcactgggttta

SEQ ID NO: 1484375 - DNA, 25 bp, Homo sapien
gtaaagagggcaacacgaatgccac

SEQ ID NO: 1484376 - DNA, 25 bp, Homo sapien
aacttggttactggaagtaccacat

SEQ ID NO: 1484377 - DNA, 25 bp, Homo sapien
tactggaagtaccacatctgttgtc

SEQ ID NO: 1484378 - DNA, 25 bp, Homo sapien
gggagtccactgcacacacgcctgg

SEQ ID NO: 1484379 - DNA, 25 bp, Homo sapien
atgtgctggcgcatatgttgtttat

SEQ ID NO: 1484380 - DNA, 25 bp, Homo sapien
tgctggcgcatatgttgtttatttc

SEQ ID NO: 1484381 - DNA, 25 bp, Homo sapien
tgtgctggcgcatatgttgtttatt

SEQ ID NO: 1484382 - DNA, 25 bp, Homo sapien
ctggcgcatatgttgtttatttctc

SEQ ID NO: 1484383 - DNA, 25 bp, Homo sapien
ccagaatattgtgcaggcgtaggtc

SEQ ID NO: 1484384 - DNA, 25 bp, Homo sapien
cacttactgaatatgcctggactgc

SEQ ID NO: 1484385 - DNA, 25 bp, Homo sapien
catttgccagagtcagccatgtagt

SEQ ID NO: 1484386 - DNA, 25 bp, Homo sapien
gacccctgtgttcaatggagcaatg

SEQ ID NO: 1484387 - DNA, 25 bp, Homo sapien
aagtgctggccattgtcagctcctg

SEQ ID NO: 1484388 - DNA, 25 bp, Homo sapien
ggccattgtcagctcctgaaaaggc

SEQ ID NO: 1484389 - DNA, 25 bp, Homo sapien
gctggccattgtcagctcctgaaaa

SEQ ID NO: 1484390 - DNA, 25 bp, Homo sapien
ctccagaagtgctggccattgtcag

SEQ ID NO: 1484391 - DNA, 25 bp, Homo sapien
aaaagtcgttcactgctggtgtgag

SEQ ID NO: 1484392 - DNA, 25 bp, Homo sapien
tccctccatgactcatagtgtgttc

SEQ ID NO: 1484393 - DNA, 25 bp, Homo sapien
tccttggttcgctccctgtggtcaa

SEQ ID NO: 1484394 - DNA, 25 bp, Homo sapien
caaccacctgctgcaaaaagtcgtt

SEQ ID NO: 1484395 - DNA, 25 bp, Homo sapien
ttactcctcctaatcgccatgtttt

SEQ ID NO: 1484396 - DNA, 25 bp, Homo sapien
tgtcttcctacacactaaagccctt

SEQ ID NO: 1484397 - DNA, 25 bp, Homo sapien
gtcttcctacacactaaagccctta

SEQ ID NO: 1484398 - DNA, 25 bp, Homo sapien
cctaatcgccatgttttcattatct

SEQ ID NO: 1484399 - DNA, 25 bp, Homo sapien
ctcggacaaagagccaggtctgtac

SEQ ID NO: 1484400 - DNA, 25 bp, Homo sapien
gacaaagagccaggtctgtactcct

SEQ ID NO: 1484401 - DNA, 25 bp, Homo sapien
gaaaacatcttggagcaaagccttc

SEQ ID NO: 1484402 - DNA, 25 bp, Homo sapien
tgaaaacatcttggagcaaagcctt

SEQ ID NO: 1484403 - DNA, 25 bp, Homo sapien
ggtacttcagccatcacagatttgg

SEQ ID NO: 1484404 - DNA, 25 bp, Homo sapien
cagcttccttggtcaaggctccatg

SEQ ID NO: 1484405 - DNA, 25 bp, Homo sapien
aatggtctcccaggactccacacat

SEQ ID NO: 1484406 - DNA, 25 bp, Homo sapien
atttggatgggacttgtctggttct

SEQ ID NO: 1484407 - DNA, 25 bp, Homo sapien
gaatgcactgtagggccacatggga

SEQ ID NO: 1484408 - DNA, 25 bp, Homo sapien
gagaacctggcatctcttaggcatt

SEQ ID NO: 1484409 - DNA, 25 bp, Homo sapien
cacattggtggcattatcgtcagga

SEQ ID NO: 1484410 - DNA, 25 bp, Homo sapien
tctgtaccgccttggcacacgaagg

SEQ ID NO: 1484411 - DNA, 25 bp, Homo sapien
cacctcatgatagtcttggaacact

SEQ ID NO: 1484412 - DNA, 25 bp, Homo sapien
gcttgagattataaaccacgacaga

SEQ ID NO: 1484413 - DNA, 25 bp, Homo sapien
gaaggcttcgaaattcagcagaact

SEQ ID NO: 1484414 - DNA, 25 bp, Homo sapien
accaaacaatatacgagtgctccag

SEQ ID NO: 1484415 - DNA, 25 bp, Homo sapien
gaattacaccactatgcacaccacg

SEQ ID NO: 1484416 - DNA, 25 bp, Homo sapien
tagctggaattacaccactatgcac

SEQ ID NO: 1484417 - DNA, 25 bp, Homo sapien
gctggaattacaccactatgcacac

SEQ ID NO: 1484418 - DNA, 25 bp, Homo sapien
tggaattacaccactatgcacacca

SEQ ID NO: 1484419 - DNA, 25 bp, Homo sapien
tcttccacacgtttggaagcagttg

SEQ ID NO: 1484420 - DNA, 25 bp, Homo sapien
cacacgtttggaagcagttgtccat

SEQ ID NO: 1484421 - DNA, 25 bp, Homo sapien
ccataaactaccttcgaatgaaaca

SEQ ID NO: 1484422 - DNA, 25 bp, Homo sapien
taccttcgaatgaaacatccactaa

SEQ ID NO: 1484423 - DNA, 25 bp, Homo sapien
gtcagagggacggacagaaacctat

SEQ ID NO: 1484424 - DNA, 25 bp, Homo sapien
aagagatgtcagagggacggacaga

SEQ ID NO: 1484425 - DNA, 25 bp, Homo sapien
ggacggacagaaacctatcagcgct

SEQ ID NO: 1484426 - DNA, 25 bp, Homo sapien
agaaacctatcagcgctcaggcaga

SEQ ID NO: 1484427 - DNA, 25 bp, Homo sapien
gccacagctccggttagatgataac

SEQ ID NO: 1484428 - DNA, 25 bp, Homo sapien
tggaacataagtagggcttccgcgt

SEQ ID NO: 1484429 - DNA, 25 bp, Homo sapien
gcttccgcgttgttgtaggacagct

SEQ ID NO: 1484430 - DNA, 25 bp, Homo sapien
tgaatgaatggcctgccctggaaca

SEQ ID NO: 1484431 - DNA, 25 bp, Homo sapien
tttgagccaggaaagctgtcagtgc

SEQ ID NO: 1484432 - DNA, 25 bp, Homo sapien
gaaacaaaccgtctctcagcgtgag

SEQ ID NO: 1484433 - DNA, 25 bp, Homo sapien
gaattccgactgaggcaaaaccaga

SEQ ID NO: 1484434 - DNA, 25 bp, Homo sapien
caccgttcgagtataatttgagcca

SEQ ID NO: 1484435 - DNA, 25 bp, Homo sapien
tatttaggaacaagctacactgtgc

SEQ ID NO: 1484436 - DNA, 25 bp, Homo sapien
cctgctaaccgaggaccaactattt

SEQ ID NO: 1484437 - DNA, 25 bp, Homo sapien
tatgacactaaagagcctgatgaac

SEQ ID NO: 1484438 - DNA, 25 bp, Homo sapien
ccaggcccggctactaagctactaa

SEQ ID NO: 1484439 - DNA, 25 bp, Homo sapien
tattcagaggacctttaacatggcc

SEQ ID NO: 1484440 - DNA, 25 bp, Homo sapien
tattttttcctcttcgctcactgga

SEQ ID NO: 1484441 - DNA, 25 bp, Homo sapien
gctcaagcttatcattcgacgaact

SEQ ID NO: 1484442 - DNA, 25 bp, Homo sapien
cattcgacgaacttgctaccagtat

SEQ ID NO: 1484443 - DNA, 25 bp, Homo sapien
tctgtgacatgaagcttctttggag

SEQ ID NO: 1484444 - DNA, 25 bp, Homo sapien
gtagtttgctgtaaacgtgtgccca

SEQ ID NO: 1484445 - DNA, 25 bp, Homo sapien
gggctcccaggtggccatagatctc

SEQ ID NO: 1484446 - DNA, 25 bp, Homo sapien
tcccaggtggccatagatctctgtg

SEQ ID NO: 1484447 - DNA, 25 bp, Homo sapien
caaatggcgtcttcttgtggtgccc

SEQ ID NO: 1484448 - DNA, 25 bp, Homo sapien
gtggtgccctcacatgctggacaga

SEQ ID NO: 1484449 - DNA, 25 bp, Homo sapien
tggagaaacataggcctcatggaga

SEQ ID NO: 1484450 - DNA, 25 bp, Homo sapien
tcagattgggatgctagaataccac

SEQ ID NO: 1484451 - DNA, 25 bp, Homo sapien
caaggctcccttttgtggaaacgtg

SEQ ID NO: 1484452 - DNA, 25 bp, Homo sapien
tggcataagctctagtccaaggctc

SEQ ID NO: 1484453 - DNA, 25 bp, Homo sapien
tttgtaaccagcctagacgccttgg

SEQ ID NO: 1484454 - DNA, 25 bp, Homo sapien
cttggctgaacacgataggagggct

SEQ ID NO: 1484455 - DNA, 25 bp, Homo sapien
gctgacacaaaaactgaagcggttt

SEQ ID NO: 1484456 - DNA, 25 bp, Homo sapien
tcccatggctgacacaaaaactgaa

SEQ ID NO: 1484457 - DNA, 25 bp, Homo sapien
aatttaagccatattcccatggctg

SEQ ID NO: 1484458 - DNA, 25 bp, Homo sapien
gccatattcccatggctgacacaaa

SEQ ID NO: 1484459 - DNA, 25 bp, Homo sapien
caaaactaatggtgaatttccagcc

SEQ ID NO: 1484460 - DNA, 25 bp, Homo sapien
aattctcttgaaagaccaaaggctg

SEQ ID NO: 1484461 - DNA, 25 bp, Homo sapien
gtatccttcgtacctctgcccagag

SEQ ID NO: 1484462 - DNA, 25 bp, Homo sapien
gatcactcctgttagcgttgctaca

SEQ ID NO: 1484463 - DNA, 25 bp, Homo sapien
tccagaagtctctggttatgccaca

SEQ ID NO: 1484464 - DNA, 25 bp, Homo sapien
gctgccagcccaactatagtaattt

SEQ ID NO: 1484465 - DNA, 25 bp, Homo sapien
tttctgaacaagtgccagcaccctg

SEQ ID NO: 1484466 - DNA, 25 bp, Homo sapien
tgccagcccaactatagtaattttc

SEQ ID NO: 1484467 - DNA, 25 bp, Homo sapien
caggaactaagccttcctggaacat

SEQ ID NO: 1484468 - DNA, 25 bp, Homo sapien
ctggaacatgattatcacaaggatc

SEQ ID NO: 1484469 - DNA, 25 bp, Homo sapien
ggaactaagccttcctggaacatga

SEQ ID NO: 1484470 - DNA, 25 bp, Homo sapien
aagccttcctggaacatgattatca

SEQ ID NO: 1484471 - DNA, 25 bp, Homo sapien
aagtggtacgagggaagatggaggg

SEQ ID NO: 1484472 - DNA, 25 bp, Homo sapien
tcaaacaattggtgcttgaagagag

SEQ ID NO: 1484473 - DNA, 25 bp, Homo sapien
ttaatgtcgtcggtcacccatgccc

SEQ ID NO: 1484474 - DNA, 25 bp, Homo sapien
catcagcgacgccactgttgctaat

SEQ ID NO: 1484475 - DNA, 25 bp, Homo sapien
gtgggttcaggcatcagcgacgcca

SEQ ID NO: 1484476 - DNA, 25 bp, Homo sapien
tctccagtttctagatggagtttaa

SEQ ID NO: 1484477 - DNA, 25 bp, Homo sapien
cacagcacaccgctctatgggacaa

SEQ ID NO: 1484478 - DNA, 25 bp, Homo sapien
tgggagagcttgagcaactccacag

SEQ ID NO: 1484479 - DNA, 25 bp, Homo sapien
gagcttgagcaactccacagcacac

SEQ ID NO: 1484480 - DNA, 25 bp, Homo sapien
cacaccgctctatgggacaaagcca

SEQ ID NO: 1484481 - DNA, 25 bp, Homo sapien
tcttgcgcgattttggtgtttgctg

SEQ ID NO: 1484482 - DNA, 25 bp, Homo sapien
ctctcggggcatgtcttgcgcgatt

SEQ ID NO: 1484483 - DNA, 25 bp, Homo sapien
tggtgtttgctgaggcgcccgcttg

SEQ ID NO: 1484484 - DNA, 25 bp, Homo sapien
tgaggcgcccgcttggctgtgcctt

SEQ ID NO: 1484485 - DNA, 25 bp, Homo sapien
cacggccatggggtagtgcaggacc

SEQ ID NO: 1484486 - DNA, 25 bp, Homo sapien
ccacggccatggggtagtgcaggac

SEQ ID NO: 1484487 - DNA, 25 bp, Homo sapien
cggccatggggtagtgcaggaccat

SEQ ID NO: 1484488 - DNA, 25 bp, Homo sapien
gcccacggccatggggtagtgcagg

SEQ ID NO: 1484489 - DNA, 25 bp, Homo sapien
ctaaaatactatgagtgggccctga

SEQ ID NO: 1484490 - DNA, 25 bp, Homo sapien
gagttcaatgtaaccactgtcatgg

SEQ ID NO: 1484491 - DNA, 25 bp, Homo sapien
catttacagagaggatcctgagacc

SEQ ID NO: 1484492 - DNA, 25 bp, Homo sapien
caaaatgctcttgttcccgcccaat

SEQ ID NO: 1484493 - DNA, 25 bp, Homo sapien
aggcaatgatgccaggctttgctgt

SEQ ID NO: 1484494 - DNA, 25 bp, Homo sapien
gcaatgatgccaggctttgctgttg

SEQ ID NO: 1484495 - DNA, 25 bp, Homo sapien
tcaggcaatgatgccaggctttgct

SEQ ID NO: 1484496 - DNA, 25 bp, Homo sapien
ggcaatgatgccaggctttgctgtt

SEQ ID NO: 1484497 - DNA, 25 bp, Homo sapien
tgctgagtgttcttcgcagtttctg

SEQ ID NO: 1484498 - DNA, 25 bp, Homo sapien
ttcagcaggcttgggctagacagct

SEQ ID NO: 1484499 - DNA, 25 bp, Homo sapien
tgagagacccagagaagactgtgcc

SEQ ID NO: 1484500 - DNA, 25 bp, Homo sapien
tgtgcccagctgtgtgaatacttca

SEQ ID NO: 1484501 - DNA, 25 bp, Homo sapien
cagccaagttgcaaacgcaaaggaa

SEQ ID NO: 1484502 - DNA, 25 bp, Homo sapien
taatgctaccatggcctctaagtgt

SEQ ID NO: 1484503 - DNA, 25 bp, Homo sapien
acgaatgataagagagtgaaacggc

SEQ ID NO: 1484504 - DNA, 25 bp, Homo sapien
catgaagcttcatgagagaggcatg

SEQ ID NO: 1484505 - DNA, 25 bp, Homo sapien
taacagccaaagatcaacctaagaa

SEQ ID NO: 1484506 - DNA, 25 bp, Homo sapien
tgctctcctgtcaacaactgtctga

SEQ ID NO: 1484507 - DNA, 25 bp, Homo sapien
gatagtgataaccaagccactttct

SEQ ID NO: 1484508 - DNA, 25 bp, Homo sapien
taaagtggacctcctacaccttgca

SEQ ID NO: 1484509 - DNA, 25 bp, Homo sapien
gtgttattaagtgcagtgttgaagc

SEQ ID NO: 1484510 - DNA, 25 bp, Homo sapien
agttgcagtagtgttattaagtgca

SEQ ID NO: 1484511 - DNA, 25 bp, Homo sapien
tagtgttattaagtgcagtgttgaa

SEQ ID NO: 1484512 - DNA, 25 bp, Homo sapien
cagtagtgttattaagtgcagtgtt

SEQ ID NO: 1484513 - DNA, 25 bp, Homo sapien
ttattgaactggaagtaaccacaag

SEQ ID NO: 1484514 - DNA, 25 bp, Homo sapien
cacaaggtctgcaaaacctctgaac

SEQ ID NO: 1484515 - DNA, 25 bp, Homo sapien
taaccacaaggtctgcaaaacctct

SEQ ID NO: 1484516 - DNA, 25 bp, Homo sapien
tgaactggaagtaaccacaaggtct

SEQ ID NO: 1484517 - DNA, 25 bp, Homo sapien
gcttcaccttctttggcgagtttag

SEQ ID NO: 1484518 - DNA, 25 bp, Homo sapien
gagtccatgaagtatctaacacaac

SEQ ID NO: 1484519 - DNA, 25 bp, Homo sapien
cttcaaaagcagatcaatagagagc

SEQ ID NO: 1484520 - DNA, 25 bp, Homo sapien
cagacccaggtgctccttaaaggca

SEQ ID NO: 1484521 - DNA, 25 bp, Homo sapien
cataatcccacaagtagcactgaca

SEQ ID NO: 1484522 - DNA, 25 bp, Homo sapien
cactcactagaaccacagaggctat

SEQ ID NO: 1484523 - DNA, 25 bp, Homo sapien
taataaaatccctcgagggcttctc

SEQ ID NO: 1484524 - DNA, 25 bp, Homo sapien
acaacaactggcaaggaaagagctc

SEQ ID NO: 1484525 - DNA, 25 bp, Homo sapien
tgatctgggaaatccacaaggccac

SEQ ID NO: 1484526 - DNA, 25 bp, Homo sapien
tatagtacataatcactgatgatct

SEQ ID NO: 1484527 - DNA, 25 bp, Homo sapien
tacataatcactgatgatctgggaa

SEQ ID NO: 1484528 - DNA, 25 bp, Homo sapien
caaggccacaaagttgatacatact

SEQ ID NO: 1484529 - DNA, 25 bp, Homo sapien
cccgttgctggtctgcccataatta

SEQ ID NO: 1484530 - DNA, 25 bp, Homo sapien
caccagcatgttgggtgattcatcg

SEQ ID NO: 1484531 - DNA, 25 bp, Homo sapien
ggtctgcccataattattcccctgg

SEQ ID NO: 1484532 - DNA, 25 bp, Homo sapien
attcatcggccaccccgttgctggt

SEQ ID NO: 1484533 - DNA, 25 bp, Homo sapien
acccaaaacttggtccactctcaag

SEQ ID NO: 1484534 - DNA, 25 bp, Homo sapien
caaaacttggtccactctcaagata

SEQ ID NO: 1484535 - DNA, 25 bp, Homo sapien
aagatacaagaattatcagtgtgcc

SEQ ID NO: 1484536 - DNA, 25 bp, Homo sapien
ggtccactctcaagatacaagaatt

SEQ ID NO: 1484537 - DNA, 25 bp, Homo sapien
gcatctgaacttggtgatgttttcc

SEQ ID NO: 1484538 - DNA, 25 bp, Homo sapien
atctgaacttggtgatgttttcccc

SEQ ID NO: 1484539 - DNA, 25 bp, Homo sapien
ttgcatctgaacttggtgatgtttt

SEQ ID NO: 1484540 - DNA, 25 bp, Homo sapien
tctgaacttggtgatgttttcccca

SEQ ID NO: 1484541 - DNA, 25 bp, Homo sapien
tttctcctaggtatctgtctagtgt

SEQ ID NO: 1484542 - DNA, 25 bp, Homo sapien
tcctaggtatctgtctagtgtcccc

SEQ ID NO: 1484543 - DNA, 25 bp, Homo sapien
tctcctaggtatctgtctagtgtcc

SEQ ID NO: 1484544 - DNA, 25 bp, Homo sapien
ctaggtatctgtctagtgtccccac

SEQ ID NO: 1484545 - DNA, 25 bp, Homo sapien
gggtctcccacacagagccggagta

SEQ ID NO: 1484546 - DNA, 25 bp, Homo sapien
ttcggaagtccggaggtaatcctgc

SEQ ID NO: 1484547 - DNA, 25 bp, Homo sapien
gtgtcattctccagcgcacgggctt

SEQ ID NO: 1484548 - DNA, 25 bp, Homo sapien
tatatgcttcgcctactttcacctg

SEQ ID NO: 1484549 - DNA, 25 bp, Homo sapien
gacaccagaatatgtcccggcaaca

SEQ ID NO: 1484550 - DNA, 25 bp, Homo sapien
gaagacaccagaatatgtcccggca

SEQ ID NO: 1484551 - DNA, 25 bp, Homo sapien
agaagacaccagaatatgtcccggc

SEQ ID NO: 1484552 - DNA, 25 bp, Homo sapien
accagaatatgtcccggcaacaaga

SEQ ID NO: 1484553 - DNA, 25 bp, Homo sapien
tgggtgcaggcggtgtcagctggcg

SEQ ID NO: 1484554 - DNA, 25 bp, Homo sapien
ctccgccaaggtcacggccccgcgg

SEQ ID NO: 1484555 - DNA, 25 bp, Homo sapien
agcgaggcagggtagcttcatcaca

SEQ ID NO: 1484556 - DNA, 25 bp, Homo sapien
gcggtgtcagctggcggcaagcgga

SEQ ID NO: 1484557 - DNA, 25 bp, Homo sapien
tcgccgccgcccgtgcacaggcggc

SEQ ID NO: 1484558 - DNA, 25 bp, Homo sapien
tctagctgctcaggcgaccgccacc

SEQ ID NO: 1484559 - DNA, 25 bp, Homo sapien
cactcgcgcccgctcccctgggccg

SEQ ID NO: 1484560 - DNA, 25 bp, Homo sapien
cggatgcggattccgcgccgccccg

SEQ ID NO: 1484561 - DNA, 25 bp, Homo sapien
ctcccggggactgggaccagccgag

SEQ ID NO: 1484562 - DNA, 25 bp, Homo sapien
gagcgcgcgcgggagtcgagacgcc

SEQ ID NO: 1484563 - DNA, 25 bp, Homo sapien
tgggaccagccgagcgcgcgcggga

SEQ ID NO: 1484564 - DNA, 25 bp, Homo sapien
gcgcgcgggagtcgagacgcccggc

SEQ ID NO: 1484565 - DNA, 25 bp, Homo sapien
caggcagcttatgggagcagagctc

SEQ ID NO: 1484566 - DNA, 25 bp, Homo sapien
agcttatgggagcagagctccagca

SEQ ID NO: 1484567 - DNA, 25 bp, Homo sapien
gcagcttatgggagcagagctccag

SEQ ID NO: 1484568 - DNA, 25 bp, Homo sapien
ggcagcttatgggagcagagctcca

SEQ ID NO: 1484569 - DNA, 25 bp, Homo sapien
ttcccctgacgtgaaaaaccgcaga

SEQ ID NO: 1484570 - DNA, 25 bp, Homo sapien
tgacgtgaaaaaccgcagaggaact

SEQ ID NO: 1484571 - DNA, 25 bp, Homo sapien
gcagaggaactaatctcctatttgg

SEQ ID NO: 1484572 - DNA, 25 bp, Homo sapien
gaaaaaccgcagaggaactaatctc

SEQ ID NO: 1484573 - DNA, 25 bp, Homo sapien
ggtcagcaccttgaagttcctcaga

SEQ ID NO: 1484574 - DNA, 25 bp, Homo sapien
tatcacgaggtaggtctttgtcaca

SEQ ID NO: 1484575 - DNA, 25 bp, Homo sapien
gtcttaaatgtatctgctggtcagc

SEQ ID NO: 1484576 - DNA, 25 bp, Homo sapien
ctatcacgaggtaggtctttgtcac

SEQ ID NO: 1484577 - DNA, 25 bp, Homo sapien
caggaaacctaagtgagctctccta

SEQ ID NO: 1484578 - DNA, 25 bp, Homo sapien
gccacttctctgaagtaacattcta

SEQ ID NO: 1484579 - DNA, 25 bp, Homo sapien
taatgggaggcttctccagttggat

SEQ ID NO: 1484580 - DNA, 25 bp, Homo sapien
tgaagtaacattctactgctacccc

SEQ ID NO: 1484581 - DNA, 25 bp, Homo sapien
aatttaggtccacttgaggctggga

SEQ ID NO: 1484582 - DNA, 25 bp, Homo sapien
gctgggatgactgctatgtctgaga

SEQ ID NO: 1484583 - DNA, 25 bp, Homo sapien
atttgagcaaatccattatcggagc

SEQ ID NO: 1484584 - DNA, 25 bp, Homo sapien
gaccatttttattcgtgccaggagg

SEQ ID NO: 1484585 - DNA, 25 bp, Homo sapien
tgtacaatacagaagatcctgcttc

SEQ ID NO: 1484586 - DNA, 25 bp, Homo sapien
gtgagtagtctttagcaccatgtac

SEQ ID NO: 1484587 - DNA, 25 bp, Homo sapien
atgtacaatacagaagatcctgctt

SEQ ID NO: 1484588 - DNA, 25 bp, Homo sapien
ctagtgagtagtctttagcaccatg

SEQ ID NO: 1484589 - DNA, 25 bp, Homo sapien
gagctgtccaataagagtctttctc

SEQ ID NO: 1484590 - DNA, 25 bp, Homo sapien
aaaccttgctcaaaaaggagagctg

SEQ ID NO: 1484591 - DNA, 25 bp, Homo sapien
agagggacagggtacttcatccact

SEQ ID NO: 1484592 - DNA, 25 bp, Homo sapien
actggcagccagtttatagattgaa

SEQ ID NO: 1484593 - DNA, 25 bp, Homo sapien
tgaggattttggcctataccgagaa

SEQ ID NO: 1484594 - DNA, 25 bp, Homo sapien
gaagtttttgagtcgattaggagct

SEQ ID NO: 1484595 - DNA, 25 bp, Homo sapien
agaagtttttgagtcgattaggagc

SEQ ID NO: 1484596 - DNA, 25 bp, Homo sapien
tggcctataccgagaagtttttgag

SEQ ID NO: 1484597 - DNA, 25 bp, Homo sapien
agcagctgtccacagactgtccagc

SEQ ID NO: 1484598 - DNA, 25 bp, Homo sapien
cttcagagataactggcttgtggag

SEQ ID NO: 1484599 - DNA, 25 bp, Homo sapien
ttcagagataactggcttgtggagt

SEQ ID NO: 1484600 - DNA, 25 bp, Homo sapien
tcaagattgacaagctgctcagcca

SEQ ID NO: 1484601 - DNA, 25 bp, Homo sapien
caagattgacaagctgctcagccat

SEQ ID NO: 1484602 - DNA, 25 bp, Homo sapien
taggcaaccaccacaatagtaactg

SEQ ID NO: 1484603 - DNA, 25 bp, Homo sapien
tgtcacagacagataaggtactctc

SEQ ID NO: 1484604 - DNA, 25 bp, Homo sapien
taaaaaaccataatcgccattaggc

SEQ ID NO: 1484605 - DNA, 25 bp, Homo sapien
caaccccttagtatgatgccctgag

SEQ ID NO: 1484606 - DNA, 25 bp, Homo sapien
caactgtagagagactaattgccca

SEQ ID NO: 1484607 - DNA, 25 bp, Homo sapien
tgaggttttccggtacatcagcaac

SEQ ID NO: 1484608 - DNA, 25 bp, Homo sapien
tattgtagtctacagaggagttcac

SEQ ID NO: 1484609 - DNA, 25 bp, Homo sapien
ccctactggagagaaaactggtgtt

SEQ ID NO: 1484610 - DNA, 25 bp, Homo sapien
tttataggcctaaagtggtgcccca

SEQ ID NO: 1484611 - DNA, 25 bp, Homo sapien
gcaattttgcccactgtctccaggg

SEQ ID NO: 1484612 - DNA, 25 bp, Homo sapien
ccaaatcataactagtaggcagcag

SEQ ID NO: 1484613 - DNA, 25 bp, Homo sapien
gaatttaagtccactgggtctacca

SEQ ID NO: 1484614 - DNA, 25 bp, Homo sapien
tctatctcttaaccgtaaggaccca

SEQ ID NO: 1484615 - DNA, 25 bp, Homo sapien
gcttctcatgctctggttccgtaag

SEQ ID NO: 1484616 - DNA, 25 bp, Homo sapien
ctcttctatctcttaaccgtaagga

SEQ ID NO: 1484617 - DNA, 25 bp, Homo sapien
tcatgctctggttccgtaagcttac

SEQ ID NO: 1484618 - DNA, 25 bp, Homo sapien
tgctgaaacaacagcggggatggaa

SEQ ID NO: 1484619 - DNA, 25 bp, Homo sapien
gctgggagcctaatgttagtctttt

SEQ ID NO: 1484620 - DNA, 25 bp, Homo sapien
ctgtggctgggagcctaatgttagt

SEQ ID NO: 1484621 - DNA, 25 bp, Homo sapien
ggatggaacgagctgttgtggtacc

SEQ ID NO: 1484622 - DNA, 25 bp, Homo sapien
taatctcgtctttataataccaccc

SEQ ID NO: 1484623 - DNA, 25 bp, Homo sapien
ttaatctcgtctttataataccacc

SEQ ID NO: 1484624 - DNA, 25 bp, Homo sapien
atctcgtctttataataccaccctt

SEQ ID NO: 1484625 - DNA, 25 bp, Homo sapien
ttttaatctcgtctttataatacca

SEQ ID NO: 1484626 - DNA, 25 bp, Homo sapien
cctagggttttatatactgatcaaa

SEQ ID NO: 1484627 - DNA, 25 bp, Homo sapien
gctctgctagagatgcttaagttca

SEQ ID NO: 1484628 - DNA, 25 bp, Homo sapien
gcttaagttcaatagcagtttcctt

SEQ ID NO: 1484629 - DNA, 25 bp, Homo sapien
tcttagacctagcacatcctagggt

SEQ ID NO: 1484630 - DNA, 25 bp, Homo sapien
ggacccagcatgtccttaggtttta

SEQ ID NO: 1484631 - DNA, 25 bp, Homo sapien
tttggacccagcatgtccttaggtt

SEQ ID NO: 1484632 - DNA, 25 bp, Homo sapien
gacccagcatgtccttaggttttac

SEQ ID NO: 1484633 - DNA, 25 bp, Homo sapien
tggacccagcatgtccttaggtttt

SEQ ID NO: 1484634 - DNA, 25 bp, Homo sapien
tgtgtgctgtcttagcaatctttgc

SEQ ID NO: 1484635 - DNA, 25 bp, Homo sapien
gtgtgctgtcttagcaatctttgct

SEQ ID NO: 1484636 - DNA, 25 bp, Homo sapien
tgtgctgtcttagcaatctttgctg

SEQ ID NO: 1484637 - DNA, 25 bp, Homo sapien
ataaaaagacgacatatgggttagc

SEQ ID NO: 1484638 - DNA, 25 bp, Homo sapien
aagtagaaattatagcaccacgaca

SEQ ID NO: 1484639 - DNA, 25 bp, Homo sapien
gtttcctaaagcaaaaggtgacata

SEQ ID NO: 1484640 - DNA, 25 bp, Homo sapien
tgatattgatgctatatgggcctct

SEQ ID NO: 1484641 - DNA, 25 bp, Homo sapien
tgttgatcctttctgtattggcctg

SEQ ID NO: 1484642 - DNA, 25 bp, Homo sapien
ttgatcctttctgtattggcctgga

SEQ ID NO: 1484643 - DNA, 25 bp, Homo sapien
gttgatcctttctgtattggcctgg

SEQ ID NO: 1484644 - DNA, 25 bp, Homo sapien
cagcagcctggctgagtgtaacaca

SEQ ID NO: 1484645 - DNA, 25 bp, Homo sapien
ctgtaaaggaaactgaagcatcccc

SEQ ID NO: 1484646 - DNA, 25 bp, Homo sapien
agcctggctgagtgtaacacatttt

SEQ ID NO: 1484647 - DNA, 25 bp, Homo sapien
aggaaactgaagcatcccccagcag

SEQ ID NO: 1484648 - DNA, 25 bp, Homo sapien
cagtgacagcaacatggttccccat

SEQ ID NO: 1484649 - DNA, 25 bp, Homo sapien
acagtgacagcaacatggttcccca

SEQ ID NO: 1484650 - DNA, 25 bp, Homo sapien
tggcatgatactgcttcctggttca

SEQ ID NO: 1484651 - DNA, 25 bp, Homo sapien
tcctggttcattttcaggcaagatc

SEQ ID NO: 1484652 - DNA, 25 bp, Homo sapien
ctggcatgatactgcttcctggttc

SEQ ID NO: 1484653 - DNA, 25 bp, Homo sapien
attttcaggcaagatcaattctccc

SEQ ID NO: 1484654 - DNA, 25 bp, Homo sapien
aatcgaatatcatttgctatcttca

SEQ ID NO: 1484655 - DNA, 25 bp, Homo sapien
cagaacccaaaaatcgaatatcatt

SEQ ID NO: 1484656 - DNA, 25 bp, Homo sapien
acaagaattcaagacaggaacactc

SEQ ID NO: 1484657 - DNA, 25 bp, Homo sapien
tagtaaacaaagctaacactggtag

SEQ ID NO: 1484658 - DNA, 25 bp, Homo sapien
tgtacagaccacgtataatgagaaa

SEQ ID NO: 1484659 - DNA, 25 bp, Homo sapien
taatggcatgctgtataaactccta

SEQ ID NO: 1484660 - DNA, 25 bp, Homo sapien
tcatagattcttggcatggcagctt

SEQ ID NO: 1484661 - DNA, 25 bp, Homo sapien
tctgcaaagccaattctagtattta

SEQ ID NO: 1484662 - DNA, 25 bp, Homo sapien
tatttaaacctgtaccaacagcagt

SEQ ID NO: 1484663 - DNA, 25 bp, Homo sapien
gcctccagctgcgagctcatagatt

SEQ ID NO: 1484664 - DNA, 25 bp, Homo sapien
tgatgatctgtgcaaactctttgga

SEQ ID NO: 1484665 - DNA, 25 bp, Homo sapien
agcatcctgagtatgagtacgtcca

SEQ ID NO: 1484666 - DNA, 25 bp, Homo sapien
aagagtaagtggaacagcatcctga

SEQ ID NO: 1484667 - DNA, 25 bp, Homo sapien
gcattgctgtgggaaaagtatcatt

SEQ ID NO: 1484668 - DNA, 25 bp, Homo sapien
tataaaatgttaaatcagaggcaac

SEQ ID NO: 1484669 - DNA, 25 bp, Homo sapien
aaaacccagctcagttacatgtatg

SEQ ID NO: 1484670 - DNA, 25 bp, Homo sapien
tatgtgtggcatgtcataggtgagt

SEQ ID NO: 1484671 - DNA, 25 bp, Homo sapien
tatagaatcaaataagcagcatcct

SEQ ID NO: 1484672 - DNA, 25 bp, Homo sapien
acagagtgaagcacaatctctaaac

SEQ ID NO: 1484673 - DNA, 25 bp, Homo sapien
gtgaagcacaatctctaaacacaca

SEQ ID NO: 1484674 - DNA, 25 bp, Homo sapien
ggtgacagagtgaagcacaatctct

SEQ ID NO: 1484675 - DNA, 25 bp, Homo sapien
gagtgaagcacaatctctaaacaca

SEQ ID NO: 1484676 - DNA, 25 bp, Homo sapien
tttacaagaacaatctcaggtatgc

SEQ ID NO: 1484677 - DNA, 25 bp, Homo sapien
tacaagaacaatctcaggtatgctt

SEQ ID NO: 1484678 - DNA, 25 bp, Homo sapien
ttttacaagaacaatctcaggtatg

SEQ ID NO: 1484679 - DNA, 25 bp, Homo sapien
ttacaagaacaatctcaggtatgct

SEQ ID NO: 1484680 - DNA, 25 bp, Homo sapien
aacatttcaattgctctattgctaa

SEQ ID NO: 1484681 - DNA, 25 bp, Homo sapien
ccagtctgccataccacgagaggaa

SEQ ID NO: 1484682 - DNA, 25 bp, Homo sapien
taacatgatcgttgggatgcacagg

SEQ ID NO: 1484683 - DNA, 25 bp, Homo sapien
gatgcacaggtatcttgctgccaag

SEQ ID NO: 1484684 - DNA, 25 bp, Homo sapien
gatgccaaaagctttaataactggg

SEQ ID NO: 1484685 - DNA, 25 bp, Homo sapien
aatcctggtttacttcagcggccgc

SEQ ID NO: 1484686 - DNA, 25 bp, Homo sapien
ttggatcaagaccataatcctggtt

SEQ ID NO: 1484687 - DNA, 25 bp, Homo sapien
gcattagcaatctttggatcaagac

SEQ ID NO: 1484688 - DNA, 25 bp, Homo sapien
cactatagctctaaaatgtttcggt

SEQ ID NO: 1484689 - DNA, 25 bp, Homo sapien
tattcacacgaatacaatcctatgc

SEQ ID NO: 1484690 - DNA, 25 bp, Homo sapien
tgtgtgtacgtctcccacatacata

SEQ ID NO: 1484691 - DNA, 25 bp, Homo sapien
ggcagatgcaaaagctatacataaa

SEQ ID NO: 1484692 - DNA, 25 bp, Homo sapien
cagctgcctgttgtaaagttctata

SEQ ID NO: 1484693 - DNA, 25 bp, Homo sapien
acaaagatattctcatcaaagattc

SEQ ID NO: 1484694 - DNA, 25 bp, Homo sapien
aaagattcagctgcctgttgtaaag

SEQ ID NO: 1484695 - DNA, 25 bp, Homo sapien
gatattctcatcaaagattcagctg

SEQ ID NO: 1484696 - DNA, 25 bp, Homo sapien
caccaaaggtatcatattctatccg

SEQ ID NO: 1484697 - DNA, 25 bp, Homo sapien
catcgtagatctcacggtctgggcg

SEQ ID NO: 1484698 - DNA, 25 bp, Homo sapien
ggtctgggcgccataatacttatca

SEQ ID NO: 1484699 - DNA, 25 bp, Homo sapien
ctatccggaaggaattttggcttgc

SEQ ID NO: 1484700 - DNA, 25 bp, Homo sapien
gtgccccttggcgaaacaaaccaca

SEQ ID NO: 1484701 - DNA, 25 bp, Homo sapien
agaaaccactagatgcacaggcggc

SEQ ID NO: 1484702 - DNA, 25 bp, Homo sapien
ctgaaagcagtgcagtgccccttgg

SEQ ID NO: 1484703 - DNA, 25 bp, Homo sapien
acgccggcactgtccttgagggcag

SEQ ID NO: 1484704 - DNA, 25 bp, Homo sapien
cacggccgcgccacccaagccggga

SEQ ID NO: 1484705 - DNA, 25 bp, Homo sapien
caagccgggagccgaagctaaggct

SEQ ID NO: 1484706 - DNA, 25 bp, Homo sapien
gctgcggctggagcccgcacgaggg

SEQ ID NO: 1484707 - DNA, 25 bp, Homo sapien
tcggaggccaaaacgagggcacggc

SEQ ID NO: 1484708 - DNA, 25 bp, Homo sapien
agggagcttgggtagaatttctggg

SEQ ID NO: 1484709 - DNA, 25 bp, Homo sapien
tgctgagggagcttgggtagaattt

SEQ ID NO: 1484710 - DNA, 25 bp, Homo sapien
ctgagggagcttgggtagaatttct

SEQ ID NO: 1484711 - DNA, 25 bp, Homo sapien
gagggagcttgggtagaatttctgg

SEQ ID NO: 1484712 - DNA, 25 bp, Homo sapien
ttgggtaagaacacctagttcctga

SEQ ID NO: 1484713 - DNA, 25 bp, Homo sapien
ccaggagtcaatgggcaaggtagaa

SEQ ID NO: 1484714 - DNA, 25 bp, Homo sapien
tagtgacatacatgccagagacgtt

SEQ ID NO: 1484715 - DNA, 25 bp, Homo sapien
cgttgtctataaggaagctagtgac

SEQ ID NO: 1484716 - DNA, 25 bp, Homo sapien
aaattcgaaatttggcaagagggtg

SEQ ID NO: 1484717 - DNA, 25 bp, Homo sapien
attggacactcgaggcacccgagga

SEQ ID NO: 1484718 - DNA, 25 bp, Homo sapien
aggaggaccctgcaaccggatgatt

SEQ ID NO: 1484719 - DNA, 25 bp, Homo sapien
tgatattgggttctcaacaggatgg

SEQ ID NO: 1484720 - DNA, 25 bp, Homo sapien
tatcccaaggtattcccatgagagc

SEQ ID NO: 1484721 - DNA, 25 bp, Homo sapien
ggtttaccccggagatcattgtgca

SEQ ID NO: 1484722 - DNA, 25 bp, Homo sapien
cattgcttggctcagtctagacccc

SEQ ID NO: 1484723 - DNA, 25 bp, Homo sapien
aaaaagtctgcaattccctatggga

SEQ ID NO: 1484724 - DNA, 25 bp, Homo sapien
ctctcacctggtattggccgtgtac

SEQ ID NO: 1484725 - DNA, 25 bp, Homo sapien
ctggtcagttccacagcctgtggga

SEQ ID NO: 1484726 - DNA, 25 bp, Homo sapien
caaagccattcccatgactccggga

SEQ ID NO: 1484727 - DNA, 25 bp, Homo sapien
tcctttgcctcttggtaccccactc

SEQ ID NO: 1484728 - DNA, 25 bp, Homo sapien
caagagattgggtaaatggctttct

SEQ ID NO: 1484729 - DNA, 25 bp, Homo sapien
catatgtattcctcttgcctattgg

SEQ ID NO: 1484730 - DNA, 25 bp, Homo sapien
cactagtattactgttaaagcgaag

SEQ ID NO: 1484731 - DNA, 25 bp, Homo sapien
tgcctattggactgcactgtaaggt

SEQ ID NO: 1484732 - DNA, 25 bp, Homo sapien
caagagtttatgtgtggtggtgcct

SEQ ID NO: 1484733 - DNA, 25 bp, Homo sapien
gctttgaaactttgggattactgag

SEQ ID NO: 1484734 - DNA, 25 bp, Homo sapien
ggtctgtagtacattggaatacgca

SEQ ID NO: 1484735 - DNA, 25 bp, Homo sapien
tatctatcaggaagtgattcagcct

SEQ ID NO: 1484736 - DNA, 25 bp, Homo sapien
ttcctttgaaggaaactcctagtgc

SEQ ID NO: 1484737 - DNA, 25 bp, Homo sapien
taatgtgattaacattgttgcagac

SEQ ID NO: 1484738 - DNA, 25 bp, Homo sapien
tgttgcagaccaagaaggtaattag

SEQ ID NO: 1484739 - DNA, 25 bp, Homo sapien
gatgcagctcatgctatagtgccgt

SEQ ID NO: 1484740 - DNA, 25 bp, Homo sapien
ctttaggagtcttagccatgaattc

SEQ ID NO: 1484741 - DNA, 25 bp, Homo sapien
tgtgtaaagtgagagacagggattc

SEQ ID NO: 1484742 - DNA, 25 bp, Homo sapien
ggccaatgtccagaggagtttctcc

SEQ ID NO: 1484743 - DNA, 25 bp, Homo sapien
caggctggtttcgacctgctgtgct

SEQ ID NO: 1484744 - DNA, 25 bp, Homo sapien
ggagccagaggcattttgttcccgc

SEQ ID NO: 1484745 - DNA, 25 bp, Homo sapien
tctgtcaaatactgaggagccagag

SEQ ID NO: 1484746 - DNA, 25 bp, Homo sapien
tagagaactggccttaaacttacac

SEQ ID NO: 1484747 - DNA, 25 bp, Homo sapien
cagcatcacgtgctttcaaaggcca

SEQ ID NO: 1484748 - DNA, 25 bp, Homo sapien
gattgagaatcccagatgatcacgc

SEQ ID NO: 1484749 - DNA, 25 bp, Homo sapien
cataagaacacactgtcaacgctgg

SEQ ID NO: 1484750 - DNA, 25 bp, Homo sapien
cgagagcattggtagtgaacgtacc

SEQ ID NO: 1484751 - DNA, 25 bp, Homo sapien
gactggtttacacatgacgttggag

SEQ ID NO: 1484752 - DNA, 25 bp, Homo sapien
gctcacttccggaatacaacatgtt

SEQ ID NO: 1484753 - DNA, 25 bp, Homo sapien
catgtttccccgcaaaggccgtgga

SEQ ID NO: 1484754 - DNA, 25 bp, Homo sapien
cacgatctttcctccgcttgagaag

SEQ ID NO: 1484755 - DNA, 25 bp, Homo sapien
gagaagaccatggaactggatagct

SEQ ID NO: 1484756 - DNA, 25 bp, Homo sapien
atatcatactaagtgaaggacagga

SEQ ID NO: 1484757 - DNA, 25 bp, Homo sapien
ccagcccagagttaccctctaaaga

SEQ ID NO: 1484758 - DNA, 25 bp, Homo sapien
gaaaaaggctattaatatcatacta

SEQ ID NO: 1484759 - DNA, 25 bp, Homo sapien
gtctacatgtgccagaatggaaagg

SEQ ID NO: 1484760 - DNA, 25 bp, Homo sapien
tattgtcaatgaaaaccttgagttc

SEQ ID NO: 1484761 - DNA, 25 bp, Homo sapien
cagcagaaccagcaatacacttgat

SEQ ID NO: 1484762 - DNA, 25 bp, Homo sapien
ccttctttaacaggctgctgagtca

SEQ ID NO: 1484763 - DNA, 25 bp, Homo sapien
tattcttcgactacatactgcagca

SEQ ID NO: 1484764 - DNA, 25 bp, Homo sapien
tacatagaacgggtattccagacac

SEQ ID NO: 1484765 - DNA, 25 bp, Homo sapien
tagatgcccatcgtgtgccacaagt

SEQ ID NO: 1484766 - DNA, 25 bp, Homo sapien
tggcgtcttagaactccctggctta

SEQ ID NO: 1484767 - DNA, 25 bp, Homo sapien
gagcatatgggcaattcggatttcc

SEQ ID NO: 1484768 - DNA, 25 bp, Homo sapien
cccattggttttgtcgctgtcgtca

SEQ ID NO: 1484769 - DNA, 25 bp, Homo sapien
tgacatcacaatgggtctgatctgc

SEQ ID NO: 1484770 - DNA, 25 bp, Homo sapien
gctggtaggtctttagcaggcctct

SEQ ID NO: 1484771 - DNA, 25 bp, Homo sapien
ctcagcagtcggaggcacagaagct

SEQ ID NO: 1484772 - DNA, 25 bp, Homo sapien
ggcagagaaaaaataaagtggaata

SEQ ID NO: 1484773 - DNA, 25 bp, Homo sapien
ctgggcagagaaaaaataaagtgga

SEQ ID NO: 1484774 - DNA, 25 bp, Homo sapien
cagagaaaaaataaagtggaatatt

SEQ ID NO: 1484775 - DNA, 25 bp, Homo sapien
tggaatattaagtaaaagttgggca

SEQ ID NO: 1484776 - DNA, 25 bp, Homo sapien
tccgtgtcctgggtacaacatcgaa

SEQ ID NO: 1484777 - DNA, 25 bp, Homo sapien
gacagccactgtgctataattagag

SEQ ID NO: 1484778 - DNA, 25 bp, Homo sapien
taaatgactgcataggacagatccc

SEQ ID NO: 1484779 - DNA, 25 bp, Homo sapien
gcttgttatagtagtcggtccatca

SEQ ID NO: 1484780 - DNA, 25 bp, Homo sapien
gaggagttataagcactggatttgg

SEQ ID NO: 1484781 - DNA, 25 bp, Homo sapien
caacccaggccaattgctacaagta

SEQ ID NO: 1484782 - DNA, 25 bp, Homo sapien
ttaggctagacatttgctgtggcat

SEQ ID NO: 1484783 - DNA, 25 bp, Homo sapien
tatctataaccccaagtgaggagtt

SEQ ID NO: 1484784 - DNA, 25 bp, Homo sapien
tacagtgttcgatttagcaaagagg

SEQ ID NO: 1484785 - DNA, 25 bp, Homo sapien
caagaagcagatcacgatataaggc

SEQ ID NO: 1484786 - DNA, 25 bp, Homo sapien
gatataaggcatccaacagaccagg

SEQ ID NO: 1484787 - DNA, 25 bp, Homo sapien
tattgttggagtgaccaggtgacca

SEQ ID NO: 1484788 - DNA, 25 bp, Homo sapien
tcacttgaattgtctgaagatcttc

SEQ ID NO: 1484789 - DNA, 25 bp, Homo sapien
tctgaagatcttccacacaacgaag

SEQ ID NO: 1484790 - DNA, 25 bp, Homo sapien
attgtctgaagatcttccacacaac

SEQ ID NO: 1484791 - DNA, 25 bp, Homo sapien
tgtctgaagatcttccacacaacga

SEQ ID NO: 1484792 - DNA, 25 bp, Homo sapien
gtttgtgattggcttcattagggga

SEQ ID NO: 1484793 - DNA, 25 bp, Homo sapien
aatttcaggagaaatttgtttgtga

SEQ ID NO: 1484794 - DNA, 25 bp, Homo sapien
ttggcttcattaggggatcacttgc

SEQ ID NO: 1484795 - DNA, 25 bp, Homo sapien
ttcaggagaaatttgtttgtgattg

SEQ ID NO: 1484796 - DNA, 25 bp, Homo sapien
gaaagtgtgctaagacaagaggcaa

SEQ ID NO: 1484797 - DNA, 25 bp, Homo sapien
gatgcacactgagcgggtagaagcc

SEQ ID NO: 1484798 - DNA, 25 bp, Homo sapien
aatcgtgctgttagccttgtgaggg

SEQ ID NO: 1484799 - DNA, 25 bp, Homo sapien
cattggccgcatcatgaggtggcaa

SEQ ID NO: 1484800 - DNA, 25 bp, Homo sapien
tagtccgtgtacgtccaggatgtac

SEQ ID NO: 1484801 - DNA, 25 bp, Homo sapien
aatcgttggcatccttggatttcca

SEQ ID NO: 1484802 - DNA, 25 bp, Homo sapien
tagcaatgggctatgacacccaggg

SEQ ID NO: 1484803 - DNA, 25 bp, Homo sapien
gcagcctagtccgtgtacgtccagg

SEQ ID NO: 1484804 - DNA, 25 bp, Homo sapien
gaatgtaacgttcataggccagcac

SEQ ID NO: 1484805 - DNA, 25 bp, Homo sapien
tggcatggaccacgcgaatgtaacg

SEQ ID NO: 1484806 - DNA, 25 bp, Homo sapien
gaaaaattgatcactctggcatgga

SEQ ID NO: 1484807 - DNA, 25 bp, Homo sapien
gatgtaggtaatggccctccaggcc

SEQ ID NO: 1484808 - DNA, 25 bp, Homo sapien
ttttgcaacaagtccgctttaatga

SEQ ID NO: 1484809 - DNA, 25 bp, Homo sapien
ggtcttcacgtgtaccgctattttg

SEQ ID NO: 1484810 - DNA, 25 bp, Homo sapien
gtccgctttaatgatactgtttgta

SEQ ID NO: 1484811 - DNA, 25 bp, Homo sapien
cgtgtaccgctattttgcaacaagt

SEQ ID NO: 1484812 - DNA, 25 bp, Homo sapien
caatgtgtgaatgctcccactgcca

SEQ ID NO: 1484813 - DNA, 25 bp, Homo sapien
gagtgaagaaatatgtaccagagca

SEQ ID NO: 1484814 - DNA, 25 bp, Homo sapien
gggaagcatttgcacacaaggcaga

SEQ ID NO: 1484815 - DNA, 25 bp, Homo sapien
gagcatggagacgtaaaaggacacc

SEQ ID NO: 1484816 - DNA, 25 bp, Homo sapien
ggtatgtgcctatcactgtgctgag

SEQ ID NO: 1484817 - DNA, 25 bp, Homo sapien
tggatcaggtatgtgcctatcactg

SEQ ID NO: 1484818 - DNA, 25 bp, Homo sapien
ctgcagatggatcaggtatgtgcct

SEQ ID NO: 1484819 - DNA, 25 bp, Homo sapien
tcaggtatgtgcctatcactgtgct

SEQ ID NO: 1484820 - DNA, 25 bp, Homo sapien
gttcttttaatatcagctccccttg

SEQ ID NO: 1484821 - DNA, 25 bp, Homo sapien
ctcccctctgttatctttggttctt

SEQ ID NO: 1484822 - DNA, 25 bp, Homo sapien
tcttttaatatcagctccccttgtt

SEQ ID NO: 1484823 - DNA, 25 bp, Homo sapien
tttggttcttttaatatcagctccc

SEQ ID NO: 1484824 - DNA, 25 bp, Homo sapien
tgcactggacccatggaggctctgg

SEQ ID NO: 1484825 - DNA, 25 bp, Homo sapien
tgccttgctgcactggacccatgga

SEQ ID NO: 1484826 - DNA, 25 bp, Homo sapien
catgcagatagtgccttgctgcact

SEQ ID NO: 1484827 - DNA, 25 bp, Homo sapien
ctgcatgcagatagtgccttgctgc

SEQ ID NO: 1484828 - DNA, 25 bp, Homo sapien
cctgctgctgatgcaaatggagagc

SEQ ID NO: 1484829 - DNA, 25 bp, Homo sapien
gagtgcgactcttctctcaagaatg

SEQ ID NO: 1484830 - DNA, 25 bp, Homo sapien
tcaagaatgaatatcacacgctcca

SEQ ID NO: 1484831 - DNA, 25 bp, Homo sapien
aaatggagagcacggaaacacagag

SEQ ID NO: 1484832 - DNA, 25 bp, Homo sapien
tgtctctgatggattccgcagccag

SEQ ID NO: 1484833 - DNA, 25 bp, Homo sapien
catttctggtccgtgctgacctcca

SEQ ID NO: 1484834 - DNA, 25 bp, Homo sapien
gacctccatcgttttcagcagagca

SEQ ID NO: 1484835 - DNA, 25 bp, Homo sapien
gagcaacaccgccatcgttctgtgt

SEQ ID NO: 1484836 - DNA, 25 bp, Homo sapien
tacccaactggtatggactggatgt

SEQ ID NO: 1484837 - DNA, 25 bp, Homo sapien
atctgaaaatttgcccagcatgtac

SEQ ID NO: 1484838 - DNA, 25 bp, Homo sapien
ctcagagtgatggtatgaggtgaca

SEQ ID NO: 1484839 - DNA, 25 bp, Homo sapien
tttaattataaaccctagagcagca

SEQ ID NO: 1484840 - DNA, 25 bp, Homo sapien
ccaagatctggccttcgcacaggtc

SEQ ID NO: 1484841 - DNA, 25 bp, Homo sapien
aagaaagggtctgtcgcatcctcag

SEQ ID NO: 1484842 - DNA, 25 bp, Homo sapien
ggttcggtcacatctatgaatccaa

SEQ ID NO: 1484843 - DNA, 25 bp, Homo sapien
tctctctgcaaaccaggttcggtca

SEQ ID NO: 1484844 - DNA, 25 bp, Homo sapien
taagtacttaacagactccgagaag

SEQ ID NO: 1484845 - DNA, 25 bp, Homo sapien
gatctaccttgccaattgccatgaa

SEQ ID NO: 1484846 - DNA, 25 bp, Homo sapien
tagggtcaaagtccaacctgtcaga

SEQ ID NO: 1484847 - DNA, 25 bp, Homo sapien
gacatctagctagtctttccaccag

SEQ ID NO: 1484848 - DNA, 25 bp, Homo sapien
caaaaggctgggtccccatgttggc

SEQ ID NO: 1484849 - DNA, 25 bp, Homo sapien
taagtgggacacaaccgaaagggca

SEQ ID NO: 1484850 - DNA, 25 bp, Homo sapien
tacagagggtacatgcgaatttgcc

SEQ ID NO: 1484851 - DNA, 25 bp, Homo sapien
ccagttttatgacgttgggtggctc

SEQ ID NO: 1484852 - DNA, 25 bp, Homo sapien
gaatactgtggtggcatcattgcct

SEQ ID NO: 1484853 - DNA, 25 bp, Homo sapien
tcatcagttacaagggtcaagtgag

SEQ ID NO: 1484854 - DNA, 25 bp, Homo sapien
taaacttcagaccttcacagtgcat

SEQ ID NO: 1484855 - DNA, 25 bp, Homo sapien
gaagctattttaagtgccagggcag

SEQ ID NO: 1484856 - DNA, 25 bp, Homo sapien
gtttcactattcgaacaggccgcag

SEQ ID NO: 1484857 - DNA, 25 bp, Homo sapien
taagctgagttgctaatatggaacc

SEQ ID NO: 1484858 - DNA, 25 bp, Homo sapien
ggaggtccaaaacagcatttcgaga

SEQ ID NO: 1484859 - DNA, 25 bp, Homo sapien
gagttaaagacaacatctgcatagc

SEQ ID NO: 1484860 - DNA, 25 bp, Homo sapien
cctcagaggattctagtttggccat

SEQ ID NO: 1484861 - DNA, 25 bp, Homo sapien
ttggccattactacattattggttc

SEQ ID NO: 1484862 - DNA, 25 bp, Homo sapien
agtttggccattactacattattgg

SEQ ID NO: 1484863 - DNA, 25 bp, Homo sapien
ggattctagtttggccattactaca

SEQ ID NO: 1484864 - DNA, 25 bp, Homo sapien
aggtggagggcagaattcttcagtt

SEQ ID NO: 1484865 - DNA, 25 bp, Homo sapien
ggtggagggcagaattcttcagttg

SEQ ID NO: 1484866 - DNA, 25 bp, Homo sapien
tggagggcagaattcttcagttgga

SEQ ID NO: 1484867 - DNA, 25 bp, Homo sapien
gtggagggcagaattcttcagttgg

SEQ ID NO: 1484868 - DNA, 25 bp, Homo sapien
tgtaatgagtactgccctagagatc

SEQ ID NO: 1484869 - DNA, 25 bp, Homo sapien
tgtcaaatgtaccagataggtgtcc

SEQ ID NO: 1484870 - DNA, 25 bp, Homo sapien
tgttgccaaaccgtccgagacactg

SEQ ID NO: 1484871 - DNA, 25 bp, Homo sapien
aataaagagcccacaagagtcttgg

SEQ ID NO: 1484872 - DNA, 25 bp, Homo sapien
tgcaggcatttcgtcgctattaaaa

SEQ ID NO: 1484873 - DNA, 25 bp, Homo sapien
acttcagtgaaggtattagacaccc

SEQ ID NO: 1484874 - DNA, 25 bp, Homo sapien
ggttcatcggccttatcttctactg

SEQ ID NO: 1484875 - DNA, 25 bp, Homo sapien
tcaacgttgtcctccatatcctgac

SEQ ID NO: 1484876 - DNA, 25 bp, Homo sapien
ggatcaggtcctgccatacaacagt

SEQ ID NO: 1484877 - DNA, 25 bp, Homo sapien
ttgaatcaatatgcagaaccctctg

SEQ ID NO: 1484878 - DNA, 25 bp, Homo sapien
gaatagtttcatccttcttgcgaag

SEQ ID NO: 1484879 - DNA, 25 bp, Homo sapien
gctgatactccttcaaccaggatag

SEQ ID NO: 1484880 - DNA, 25 bp, Homo sapien
cagcgtctggtgacaactgctgatg

SEQ ID NO: 1484881 - DNA, 25 bp, Homo sapien
ccttctgatgttccagttatcccag

SEQ ID NO: 1484882 - DNA, 25 bp, Homo sapien
gcaggtcctagctgtttaacggtta

SEQ ID NO: 1484883 - DNA, 25 bp, Homo sapien
gaagcactgaagttgcaggtcctag

SEQ ID NO: 1484884 - DNA, 25 bp, Homo sapien
atactaaaatggatgtgtggtttca

SEQ ID NO: 1484885 - DNA, 25 bp, Homo sapien
tactaaaatggatgtgtggtttcat

SEQ ID NO: 1484886 - DNA, 25 bp, Homo sapien
tacatctaatcacatctgagaatac

SEQ ID NO: 1484887 - DNA, 25 bp, Homo sapien
aatactaaaatggatgtgtggtttc

SEQ ID NO: 1484888 - DNA, 25 bp, Homo sapien
tcacctgagatggtattggctgagc

SEQ ID NO: 1484889 - DNA, 25 bp, Homo sapien
gccatttgtaatctcacccaagatt

SEQ ID NO: 1484890 - DNA, 25 bp, Homo sapien
tcacccaagattctggtgtgctgga

SEQ ID NO: 1484891 - DNA, 25 bp, Homo sapien
ggtattggctgagccatttgtaatc

SEQ ID NO: 1484892 - DNA, 25 bp, Homo sapien
gagcaccagcaggttgttgccgacg

SEQ ID NO: 1484893 - DNA, 25 bp, Homo sapien
tgcggagccgctggaacttgtagta

SEQ ID NO: 1484894 - DNA, 25 bp, Homo sapien
cttgtagtagaggacgagcaccagc

SEQ ID NO: 1484895 - DNA, 25 bp, Homo sapien
tcaggcaggacacgaaggtaaaggt

SEQ ID NO: 1484896 - DNA, 25 bp, Homo sapien
cgccgctgcggttccccgagtacat

SEQ ID NO: 1484897 - DNA, 25 bp, Homo sapien
gccgccgctgcggttccccgagtac

SEQ ID NO: 1484898 - DNA, 25 bp, Homo sapien
ccgccgtcccagtagccgtggccgc

SEQ ID NO: 1484899 - DNA, 25 bp, Homo sapien
cgccgccgtcccagtagccgtggcc

SEQ ID NO: 1484900 - DNA, 25 bp, Homo sapien
gcgctcagcttgcggcggggctcgc

SEQ ID NO: 1484901 - DNA, 25 bp, Homo sapien
gccataggaagttaactaattgttg

SEQ ID NO: 1484902 - DNA, 25 bp, Homo sapien
taggaagttaactaattgttgagaa

SEQ ID NO: 1484903 - DNA, 25 bp, Homo sapien
ctaagccataggaagttaactaatt

SEQ ID NO: 1484904 - DNA, 25 bp, Homo sapien
gaagttaactaattgttgagaaaca

SEQ ID NO: 1484905 - DNA, 25 bp, Homo sapien
ttcttacagcgatgtattttttcca

SEQ ID NO: 1484906 - DNA, 25 bp, Homo sapien
attaaccagtgcaatctgatctttg

SEQ ID NO: 1484907 - DNA, 25 bp, Homo sapien
taaccagtgcaatctgatctttgct

SEQ ID NO: 1484908 - DNA, 25 bp, Homo sapien
ccagtgcaatctgatctttgctctg

SEQ ID NO: 1484909 - DNA, 25 bp, Homo sapien
tctgattaaccagtgcaatctgatc

SEQ ID NO: 1484910 - DNA, 25 bp, Homo sapien
tcaggagtttgtctttgagcccagt

SEQ ID NO: 1484911 - DNA, 25 bp, Homo sapien
caggagtttgtctttgagcccagtt

SEQ ID NO: 1484912 - DNA, 25 bp, Homo sapien
atgcagggttattttgtctgccttc

SEQ ID NO: 1484913 - DNA, 25 bp, Homo sapien
tgacaggtccaggaagatctactcc

SEQ ID NO: 1484914 - DNA, 25 bp, Homo sapien
gggcgagagcttctggtgctacaaa

SEQ ID NO: 1484915 - DNA, 25 bp, Homo sapien
gcttctggtgctacaaagcaagtgc

SEQ ID NO: 1484916 - DNA, 25 bp, Homo sapien
catgtgacacatgtacgcgatgacc

SEQ ID NO: 1484917 - DNA, 25 bp, Homo sapien
acatgtacgcgatgaccactactcg

SEQ ID NO: 1484918 - DNA, 25 bp, Homo sapien
gtgacacatgtacgcgatgaccact

SEQ ID NO: 1484919 - DNA, 25 bp, Homo sapien
tgtacgcgatgaccactactcgctt

SEQ ID NO: 1484920 - DNA, 25 bp, Homo sapien
cctgttctgattttggttcttcctc

SEQ ID NO: 1484921 - DNA, 25 bp, Homo sapien
cagcctgttctgattttggttcttc

SEQ ID NO: 1484922 - DNA, 25 bp, Homo sapien
gttcttcctcctcatctaggtgcat

SEQ ID NO: 1484923 - DNA, 25 bp, Homo sapien
ggttcttcctcctcatctaggtgca

SEQ ID NO: 1484924 - DNA, 25 bp, Homo sapien
caaccagggaccactgcgataggct

SEQ ID NO: 1484925 - DNA, 25 bp, Homo sapien
accactgcgataggctgtgcaggct

SEQ ID NO: 1484926 - DNA, 25 bp, Homo sapien
caaaggctgcacagttgccctgcat

SEQ ID NO: 1484927 - DNA, 25 bp, Homo sapien
cacagctctgggacgccatccacaa

SEQ ID NO: 1484928 - DNA, 25 bp, Homo sapien
aggctggtctggaattcccaggctc

SEQ ID NO: 1484929 - DNA, 25 bp, Homo sapien
gcccaggctggtctggaattcccag

SEQ ID NO: 1484930 - DNA, 25 bp, Homo sapien
caggctggtctggaattcccaggct

SEQ ID NO: 1484931 - DNA, 25 bp, Homo sapien
tggtctggaattcccaggctcaagc

SEQ ID NO: 1484932 - DNA, 25 bp, Homo sapien
tcttgcccgaggtctagggtaataa

SEQ ID NO: 1484933 - DNA, 25 bp, Homo sapien
cattgattttgtgactgtgctctga

SEQ ID NO: 1484934 - DNA, 25 bp, Homo sapien
gctctgagcactctatgggcttttg

SEQ ID NO: 1484935 - DNA, 25 bp, Homo sapien
tgaaagttcaatagttgggcagctg

SEQ ID NO: 1484936 - DNA, 25 bp, Homo sapien
tccggttgtggcaccccaatatcag

SEQ ID NO: 1484937 - DNA, 25 bp, Homo sapien
caatatcagcaccaagccagtaggg

SEQ ID NO: 1484938 - DNA, 25 bp, Homo sapien
gaaaaagatcaacatgtcgtcagcc

SEQ ID NO: 1484939 - DNA, 25 bp, Homo sapien
gacacatgttcagtatcgccgagat

SEQ ID NO: 1484940 - DNA, 25 bp, Homo sapien
taggtgcacagttagggacattaag

SEQ ID NO: 1484941 - DNA, 25 bp, Homo sapien
tgctattaatagaatgctgccatga

SEQ ID NO: 1484942 - DNA, 25 bp, Homo sapien
tctacgaacttacactgaggatctc

SEQ ID NO: 1484943 - DNA, 25 bp, Homo sapien
tctatgtgtagcgtatgtcacagcg

SEQ ID NO: 1484944 - DNA, 25 bp, Homo sapien
gatgttaatatccataacgttcatg

SEQ ID NO: 1484945 - DNA, 25 bp, Homo sapien
caggcaagcgtgatcactgtccatt

SEQ ID NO: 1484946 - DNA, 25 bp, Homo sapien
gcctggaagttcaatgtaggtgcca

SEQ ID NO: 1484947 - DNA, 25 bp, Homo sapien
tatgtatttgactcttaactaggtt

SEQ ID NO: 1484948 - DNA, 25 bp, Homo sapien
gtcttggagatttttcaagaacgcc

SEQ ID NO: 1484949 - DNA, 25 bp, Homo sapien
attgcagcagttccgaagaaagagc

SEQ ID NO: 1484950 - DNA, 25 bp, Homo sapien
agcattgcagcagttccgaagaaag

SEQ ID NO: 1484951 - DNA, 25 bp, Homo sapien
gagatttttcaagaacgccgagccc

SEQ ID NO: 1484952 - DNA, 25 bp, Homo sapien
caaaaggtaagaaaagtggcatggc

SEQ ID NO: 1484953 - DNA, 25 bp, Homo sapien
tgataagcctattacatgaatgtag

SEQ ID NO: 1484954 - DNA, 25 bp, Homo sapien
tctggcttaatagagctcagccgga

SEQ ID NO: 1484955 - DNA, 25 bp, Homo sapien
cagtgatagtgtagaatatgaaacc

SEQ ID NO: 1484956 - DNA, 25 bp, Homo sapien
cgctcaaggtgtcagatgccgtggt

SEQ ID NO: 1484957 - DNA, 25 bp, Homo sapien
cctcgctcaaggtgtcagatgccgt

SEQ ID NO: 1484958 - DNA, 25 bp, Homo sapien
tcgctcaaggtgtcagatgccgtgg

SEQ ID NO: 1484959 - DNA, 25 bp, Homo sapien
ccctcgctcaaggtgtcagatgccg

SEQ ID NO: 1484960 - DNA, 25 bp, Homo sapien
aggaatcaagcccactgtgtactca

SEQ ID NO: 1484961 - DNA, 25 bp, Homo sapien
ggaatcaagcccactgtgtactcac

SEQ ID NO: 1484962 - DNA, 25 bp, Homo sapien
caggaatcaagcccactgtgtactc

SEQ ID NO: 1484963 - DNA, 25 bp, Homo sapien
aaaggcacaggtgggttttctgagc

SEQ ID NO: 1484964 - DNA, 25 bp, Homo sapien
tgtttggggcagtctctctccaaag

SEQ ID NO: 1484965 - DNA, 25 bp, Homo sapien
gatgcggttgctggggctgtgtgtt

SEQ ID NO: 1484966 - DNA, 25 bp, Homo sapien
catgtagaaggggattaagccctgg

SEQ ID NO: 1484967 - DNA, 25 bp, Homo sapien
ggtgctgggcgccatcaggacagtg

SEQ ID NO: 1484968 - DNA, 25 bp, Homo sapien
ctgggcgccatcaggacagtgctct

SEQ ID NO: 1484969 - DNA, 25 bp, Homo sapien
tgctgggcgccatcaggacagtgct

SEQ ID NO: 1484970 - DNA, 25 bp, Homo sapien
gggcgccatcaggacagtgctcttc

SEQ ID NO: 1484971 - DNA, 25 bp, Homo sapien
gatgtgtaggttctaccccaggaac

SEQ ID NO: 1484972 - DNA, 25 bp, Homo sapien
gatgggcagatgtgtaggttctacc

SEQ ID NO: 1484973 - DNA, 25 bp, Homo sapien
gaaccctgagcgattccatctgcct

SEQ ID NO: 1484974 - DNA, 25 bp, Homo sapien
tgtagaactcgtccatggcctctgt

SEQ ID NO: 1484975 - DNA, 25 bp, Homo sapien
taactattggaaccttcccatgcct

SEQ ID NO: 1484976 - DNA, 25 bp, Homo sapien
agttgggaaggttcacctgcagtaa

SEQ ID NO: 1484977 - DNA, 25 bp, Homo sapien
tgagatggcattgcatggatccagt

SEQ ID NO: 1484978 - DNA, 25 bp, Homo sapien
tctcacatggggtccgatgctcctt

SEQ ID NO: 1484979 - DNA, 25 bp, Homo sapien
ggagtgcagctatgggtagaagctg

SEQ ID NO: 1484980 - DNA, 25 bp, Homo sapien
tggagtgcagctatgggtagaagct

SEQ ID NO: 1484981 - DNA, 25 bp, Homo sapien
agtgcagctatgggtagaagctggc

SEQ ID NO: 1484982 - DNA, 25 bp, Homo sapien
gagtgcagctatgggtagaagctgg

SEQ ID NO: 1484983 - DNA, 25 bp, Homo sapien
ggataactagtgaggcagcctgcca

SEQ ID NO: 1484984 - DNA, 25 bp, Homo sapien
tctttgaagtgtggagccctgtatg

SEQ ID NO: 1484985 - DNA, 25 bp, Homo sapien
tgggcatccggtacttcctagctgg

SEQ ID NO: 1484986 - DNA, 25 bp, Homo sapien
gtgatattcagtggccttgttcgca

SEQ ID NO: 1484987 - DNA, 25 bp, Homo sapien
ctcaagttgatgtgatgttttccac

SEQ ID NO: 1484988 - DNA, 25 bp, Homo sapien
ctgctgcggggcttgtaaggtgcca

SEQ ID NO: 1484989 - DNA, 25 bp, Homo sapien
tgctgcggggcttgtaaggtgccat

SEQ ID NO: 1484990 - DNA, 25 bp, Homo sapien
ccctgctgcggggcttgtaaggtgc

SEQ ID NO: 1484991 - DNA, 25 bp, Homo sapien
cctgctgcggggcttgtaaggtgcc

SEQ ID NO: 1484992 - DNA, 25 bp, Homo sapien
tgattagcgggttggaagggtggtc

SEQ ID NO: 1484993 - DNA, 25 bp, Homo sapien
tttctggtgtgggtgattagcgggt

SEQ ID NO: 1484994 - DNA, 25 bp, Homo sapien
tgtgggtgattagcgggttggaagg

SEQ ID NO: 1484995 - DNA, 25 bp, Homo sapien
tggtgtgggtgattagcgggttgga

SEQ ID NO: 1484996 - DNA, 25 bp, Homo sapien
gagtctctttgggtcgggtactgaa

SEQ ID NO: 1484997 - DNA, 25 bp, Homo sapien
tgttctcagagtcaccattacggtg

SEQ ID NO: 1484998 - DNA, 25 bp, Homo sapien
caaagtccagactcattgttcagga

SEQ ID NO: 1484999 - DNA, 25 bp, Homo sapien
tgaaccttggtacaatcagctgtgg

SEQ ID NO: 1485000 - DNA, 25 bp, Homo sapien
taattggactccttgtacatgactg

SEQ ID NO: 1485001 - DNA, 25 bp, Homo sapien
tgactgtcatcgcactgttagccca

SEQ ID NO: 1485002 - DNA, 25 bp, Homo sapien
gactattgcagactcaaagttcact

SEQ ID NO: 1485003 - DNA, 25 bp, Homo sapien
catgctgtgcatatcctttcagaga

SEQ ID NO: 1485004 - DNA, 25 bp, Homo sapien
tgggcccattggaccagtcgcatct

SEQ ID NO: 1485005 - DNA, 25 bp, Homo sapien
ctgagcatctggttatacgaaaggt

SEQ ID NO: 1485006 - DNA, 25 bp, Homo sapien
tgtgaatatacaaaacagtgggccc

SEQ ID NO: 1485007 - DNA, 25 bp, Homo sapien
ggtttgctgagcagacactaggttc

SEQ ID NO: 1485008 - DNA, 25 bp, Homo sapien
cattccgtaatggatgacattctct

SEQ ID NO: 1485009 - DNA, 25 bp, Homo sapien
cgtagcacatacagcagatagtgac

SEQ ID NO: 1485010 - DNA, 25 bp, Homo sapien
caccaagcctatgagtgtcccatgg

SEQ ID NO: 1485011 - DNA, 25 bp, Homo sapien
gaaatggcaatgatggtcattccgt

SEQ ID NO: 1485012 - DNA, 25 bp, Homo sapien
aacattggaactggacatcccggcc

SEQ ID NO: 1485013 - DNA, 25 bp, Homo sapien
gctaagcttcctaacaactgaccgg

SEQ ID NO: 1485014 - DNA, 25 bp, Homo sapien
tctccctagtgtagcaatggtctcc

SEQ ID NO: 1485015 - DNA, 25 bp, Homo sapien
cacagagtcgggaacaacattggaa

SEQ ID NO: 1485016 - DNA, 25 bp, Homo sapien
cctggttgataacaaggcccgtgcc

SEQ ID NO: 1485017 - DNA, 25 bp, Homo sapien
tggcatacggtgaataccagtccct

SEQ ID NO: 1485018 - DNA, 25 bp, Homo sapien
gatcctttccgcctgtgtcgtctgt

SEQ ID NO: 1485019 - DNA, 25 bp, Homo sapien
ttgagtttgaacaggcttgagcagt

SEQ ID NO: 1485020 - DNA, 25 bp, Homo sapien
cagcccttgggtctctgtttaacct

SEQ ID NO: 1485021 - DNA, 25 bp, Homo sapien
ctttctgccttaagactgctgcttc

SEQ ID NO: 1485022 - DNA, 25 bp, Homo sapien
gatagatcgttttaactgcctgtga

SEQ ID NO: 1485023 - DNA, 25 bp, Homo sapien
ctgcctgtgatggtactagttaaaa

SEQ ID NO: 1485024 - DNA, 25 bp, Homo sapien
gctggactaccactccctgggtgac

SEQ ID NO: 1485025 - DNA, 25 bp, Homo sapien
gcacagctggactaccactccctgg

SEQ ID NO: 1485026 - DNA, 25 bp, Homo sapien
caggggataccgtggagcacagctg

SEQ ID NO: 1485027 - DNA, 25 bp, Homo sapien
ccaaggagcttcacagccctgacac

SEQ ID NO: 1485028 - DNA, 25 bp, Homo sapien
tgtacttgttgcgatttaacctagg

SEQ ID NO: 1485029 - DNA, 25 bp, Homo sapien
tacttgttgcgatttaacctaggaa

SEQ ID NO: 1485030 - DNA, 25 bp, Homo sapien
cttgttgcgatttaacctaggaaag

SEQ ID NO: 1485031 - DNA, 25 bp, Homo sapien
accatgtacttgttgcgatttaacc

SEQ ID NO: 1485032 - DNA, 25 bp, Homo sapien
cagagggggattagtacgtggccca

SEQ ID NO: 1485033 - DNA, 25 bp, Homo sapien
caaggtctccagagggggattagta

SEQ ID NO: 1485034 - DNA, 25 bp, Homo sapien
tccagagggggattagtacgtggcc

SEQ ID NO: 1485035 - DNA, 25 bp, Homo sapien
gtctccagagggggattagtacgtg

SEQ ID NO: 1485036 - DNA, 25 bp, Homo sapien
gacgacgaggcatctgggcgggggg

SEQ ID NO: 1485037 - DNA, 25 bp, Homo sapien
gcatgctccagtgctctgttggtca

SEQ ID NO: 1485038 - DNA, 25 bp, Homo sapien
atgctccagtgctctgttggtcaca

SEQ ID NO: 1485039 - DNA, 25 bp, Homo sapien
cagacgacgaggcatctgggcgggg

SEQ ID NO: 1485040 - DNA, 25 bp, Homo sapien
aaaggagtcgaactctaacgcttcg

SEQ ID NO: 1485041 - DNA, 25 bp, Homo sapien
tgcatccaagtctggccagtaagtc

SEQ ID NO: 1485042 - DNA, 25 bp, Homo sapien
ccttccagaagcttaaaaggagtcg

SEQ ID NO: 1485043 - DNA, 25 bp, Homo sapien
tttcagtgcaaatcgctttaagaga

SEQ ID NO: 1485044 - DNA, 25 bp, Homo sapien
caccgcagtgatccatctaaagcag

SEQ ID NO: 1485045 - DNA, 25 bp, Homo sapien
tctaaagcagacctggtgatgctac

SEQ ID NO: 1485046 - DNA, 25 bp, Homo sapien
tagatcctggatccacgctacagtt

SEQ ID NO: 1485047 - DNA, 25 bp, Homo sapien
tacttcatcgatgaccaccgcagtg

SEQ ID NO: 1485048 - DNA, 25 bp, Homo sapien
tggagataggcaggtagtccatgac

SEQ ID NO: 1485049 - DNA, 25 bp, Homo sapien
tgcttggcatcatctatcacactgt

SEQ ID NO: 1485050 - DNA, 25 bp, Homo sapien
agcgatgtacacatactgcttggca

SEQ ID NO: 1485051 - DNA, 25 bp, Homo sapien
atcacactgtagatggcatctatgt

SEQ ID NO: 1485052 - DNA, 25 bp, Homo sapien
tcaacttagtcttgagacaatcagc

SEQ ID NO: 1485053 - DNA, 25 bp, Homo sapien
catcttggcatttgtctggcatata

SEQ ID NO: 1485054 - DNA, 25 bp, Homo sapien
gctgcttttagctagcactaagtga

SEQ ID NO: 1485055 - DNA, 25 bp, Homo sapien
taagtgcctatttgtgttccatgaa

SEQ ID NO: 1485056 - DNA, 25 bp, Homo sapien
gactccatagagtcttttggaccag

SEQ ID NO: 1485057 - DNA, 25 bp, Homo sapien
tagaagatgacaccgagttctttca

SEQ ID NO: 1485058 - DNA, 25 bp, Homo sapien
tttggaccaggtttgaggcactctg

SEQ ID NO: 1485059 - DNA, 25 bp, Homo sapien
ttgtaaatctaggaccaggcagctg

SEQ ID NO: 1485060 - DNA, 25 bp, Homo sapien
ctgctgcctgactcaaacagatttc

SEQ ID NO: 1485061 - DNA, 25 bp, Homo sapien
tctccaggaaaagggtcacggacat

SEQ ID NO: 1485062 - DNA, 25 bp, Homo sapien
gcctgactcaaacagatttcccttc

SEQ ID NO: 1485063 - DNA, 25 bp, Homo sapien
ccaggaaaagggtcacggacatgca

SEQ ID NO: 1485064 - DNA, 25 bp, Homo sapien
gttttccatttttcagcattggatg

SEQ ID NO: 1485065 - DNA, 25 bp, Homo sapien
tgttttccatttttcagcattggat

SEQ ID NO: 1485066 - DNA, 25 bp, Homo sapien
ctgttttccatttttcagcattgga

SEQ ID NO: 1485067 - DNA, 25 bp, Homo sapien
ctcctgtggcaggaagattgacctc

SEQ ID NO: 1485068 - DNA, 25 bp, Homo sapien
cctcctgtggcaggaagattgacct

SEQ ID NO: 1485069 - DNA, 25 bp, Homo sapien
tcctgtggcaggaagattgacctcc

SEQ ID NO: 1485070 - DNA, 25 bp, Homo sapien
gcctcctgtggcaggaagattgacc

SEQ ID NO: 1485071 - DNA, 25 bp, Homo sapien
gaatgaatttagcatgcagagcatt

SEQ ID NO: 1485072 - DNA, 25 bp, Homo sapien
ctagcgagacgaaggaatgaattta

SEQ ID NO: 1485073 - DNA, 25 bp, Homo sapien
tccttctttagagcagcctgtttcc

SEQ ID NO: 1485074 - DNA, 25 bp, Homo sapien
catgcagagcattggctctccttct

SEQ ID NO: 1485075 - DNA, 25 bp, Homo sapien
ttggtctccctatctcaaatttcct

SEQ ID NO: 1485076 - DNA, 25 bp, Homo sapien
tagggtaggcagtcttaggacctac

SEQ ID NO: 1485077 - DNA, 25 bp, Homo sapien
gtcaaatctgactcaagcatgctgt

SEQ ID NO: 1485078 - DNA, 25 bp, Homo sapien
tattatgagcaaagtttggtctccc

SEQ ID NO: 1485079 - DNA, 25 bp, Homo sapien
tcgagggagaccctatactggtgac

SEQ ID NO: 1485080 - DNA, 25 bp, Homo sapien
tggtgacacagtagctcaggatcct

SEQ ID NO: 1485081 - DNA, 25 bp, Homo sapien
cacagtagctcaggatccttctcac

SEQ ID NO: 1485082 - DNA, 25 bp, Homo sapien
gggagaccctatactggtgacacag

SEQ ID NO: 1485083 - DNA, 25 bp, Homo sapien
ccttttgcgccttgcagtggtgaga

SEQ ID NO: 1485084 - DNA, 25 bp, Homo sapien
gctgcttagcaatatcggtcatgtg

SEQ ID NO: 1485085 - DNA, 25 bp, Homo sapien
gccacatctgacttcctgcacacgg

SEQ ID NO: 1485086 - DNA, 25 bp, Homo sapien
tcctcttgaggttcttgtcaggaca

SEQ ID NO: 1485087 - DNA, 25 bp, Homo sapien
gagagaagcacaattccaagtccct

SEQ ID NO: 1485088 - DNA, 25 bp, Homo sapien
tgtgaacattccactaaggccttgg

SEQ ID NO: 1485089 - DNA, 25 bp, Homo sapien
tccaccagaattgaaggtcagctgt

SEQ ID NO: 1485090 - DNA, 25 bp, Homo sapien
tgggctgcatagacctgatcactgg

SEQ ID NO: 1485091 - DNA, 25 bp, Homo sapien
caagcaagctctcagtagcaacatc

SEQ ID NO: 1485092 - DNA, 25 bp, Homo sapien
gcaagctctcagtagcaacatctct

SEQ ID NO: 1485093 - DNA, 25 bp, Homo sapien
aagctctcagtagcaacatctctcc

SEQ ID NO: 1485094 - DNA, 25 bp, Homo sapien
gctctcagtagcaacatctctcctt

SEQ ID NO: 1485095 - DNA, 25 bp, Homo sapien
tgtgagttcctcaataatcttgcat

SEQ ID NO: 1485096 - DNA, 25 bp, Homo sapien
cattgacagctcatccactcatata

SEQ ID NO: 1485097 - DNA, 25 bp, Homo sapien
gctcactgtcctcaagtctgaccag

SEQ ID NO: 1485098 - DNA, 25 bp, Homo sapien
tatgtagtttacagaaatccacctg

SEQ ID NO: 1485099 - DNA, 25 bp, Homo sapien
tgaaaacaggttaggtgcgtggctc

SEQ ID NO: 1485100 - DNA, 25 bp, Homo sapien
caaaccacagacacacgaggtaatt

SEQ ID NO: 1485101 - DNA, 25 bp, Homo sapien
gagaatgaaaacaggttaggtgcgt

SEQ ID NO: 1485102 - DNA, 25 bp, Homo sapien
cagacacacgaggtaattgtggtag

SEQ ID NO: 1485103 - DNA, 25 bp, Homo sapien
agactgttcttaaagttgagcaggg

SEQ ID NO: 1485104 - DNA, 25 bp, Homo sapien
ctgtgtttctaagagactgttctta

SEQ ID NO: 1485105 - DNA, 25 bp, Homo sapien
cattatcagtgttgcttaccaagct

SEQ ID NO: 1485106 - DNA, 25 bp, Homo sapien
aagtggggagtcccagaggaattca

SEQ ID NO: 1485107 - DNA, 25 bp, Homo sapien
cttttgtcctgttactggtttcatt

SEQ ID NO: 1485108 - DNA, 25 bp, Homo sapien
actggccttcccaaaaaatgttgag

SEQ ID NO: 1485109 - DNA, 25 bp, Homo sapien
agaaatgagaaactatgcagttaaa

SEQ ID NO: 1485110 - DNA, 25 bp, Homo sapien
gacaagctattagtctcttctatat

SEQ ID NO: 1485111 - DNA, 25 bp, Homo sapien
tgtaatcttcacaaaagccccataa

SEQ ID NO: 1485112 - DNA, 25 bp, Homo sapien
ttgagtcatcatagcagtcctgagc

SEQ ID NO: 1485113 - DNA, 25 bp, Homo sapien
ggtccttggtcgtttccttgagtca

SEQ ID NO: 1485114 - DNA, 25 bp, Homo sapien
tccatgtaaagagaggagtatgtgc

SEQ ID NO: 1485115 - DNA, 25 bp, Homo sapien
aatctctgagcacgtaatgggtaga

SEQ ID NO: 1485116 - DNA, 25 bp, Homo sapien
atgaagaacggtccttctccgttgc

SEQ ID NO: 1485117 - DNA, 25 bp, Homo sapien
tctccgttgcagaaggttgtcctct

SEQ ID NO: 1485118 - DNA, 25 bp, Homo sapien
tgaagaacggtccttctccgttgca

SEQ ID NO: 1485119 - DNA, 25 bp, Homo sapien
ccttctccgttgcagaaggttgtcc

SEQ ID NO: 1485120 - DNA, 25 bp, Homo sapien
tgccccttcggcctactgtattggt

SEQ ID NO: 1485121 - DNA, 25 bp, Homo sapien
atgctggaaaagctctccgggcctt

SEQ ID NO: 1485122 - DNA, 25 bp, Homo sapien
cactgcagttgaaattgatccctac

SEQ ID NO: 1485123 - DNA, 25 bp, Homo sapien
taggtcccagtaccacatcctcaga

SEQ ID NO: 1485124 - DNA, 25 bp, Homo sapien
tacttgttggtacaggaatacctga

SEQ ID NO: 1485125 - DNA, 25 bp, Homo sapien
taggccgttttgatgaaccattctc

SEQ ID NO: 1485126 - DNA, 25 bp, Homo sapien
tgtggacagctctcacttgtctggg

SEQ ID NO: 1485127 - DNA, 25 bp, Homo sapien
agccatagtcatgctgaaggccggg

SEQ ID NO: 1485128 - DNA, 25 bp, Homo sapien
caataaggccctaggagtctgctcc

SEQ ID NO: 1485129 - DNA, 25 bp, Homo sapien
ggcagtagctttgagacgtcttgga

SEQ ID NO: 1485130 - DNA, 25 bp, Homo sapien
gagtctaagactaaaaagatcttca

SEQ ID NO: 1485131 - DNA, 25 bp, Homo sapien
ctccgatgagtaaaaggcagtagct

SEQ ID NO: 1485132 - DNA, 25 bp, Homo sapien
cattttggttctggtatccagttac

SEQ ID NO: 1485133 - DNA, 25 bp, Homo sapien
tatccagttacctgcattaccaatg

SEQ ID NO: 1485134 - DNA, 25 bp, Homo sapien
tggttctggtatccagttacctgca

SEQ ID NO: 1485135 - DNA, 25 bp, Homo sapien
tacctgcattaccaatgaaatactt

SEQ ID NO: 1485136 - DNA, 25 bp, Homo sapien
aagcctgcggtggtgttctccgtct

SEQ ID NO: 1485137 - DNA, 25 bp, Homo sapien
tggaaagcctgcggtggtgttctcc

SEQ ID NO: 1485138 - DNA, 25 bp, Homo sapien
gtgtggaaagcctgcggtggtgttc

SEQ ID NO: 1485139 - DNA, 25 bp, Homo sapien
tccttcgtggtgtttttaggagctc

SEQ ID NO: 1485140 - DNA, 25 bp, Homo sapien
cagggattgccagtccaaaccggca

SEQ ID NO: 1485141 - DNA, 25 bp, Homo sapien
tgcagccggcccttgttgtaagcgg

SEQ ID NO: 1485142 - DNA, 25 bp, Homo sapien
tcatgttcatgtacgtcacctcggc

SEQ ID NO: 1485143 - DNA, 25 bp, Homo sapien
gtttgtccacgatccagaaggagga

SEQ ID NO: 1485144 - DNA, 25 bp, Homo sapien
tggccatcagatctcaacactcttg

SEQ ID NO: 1485145 - DNA, 25 bp, Homo sapien
aagaaaaatccagccaaccgtgcat

SEQ ID NO: 1485146 - DNA, 25 bp, Homo sapien
taaggagccccacatcttatgaact

SEQ ID NO: 1485147 - DNA, 25 bp, Homo sapien
tagcactgctccagtcttaaggagc

SEQ ID NO: 1485148 - DNA, 25 bp, Homo sapien
taagagttaaaccatatatgagacc

SEQ ID NO: 1485149 - DNA, 25 bp, Homo sapien
gagttaaaccatatatgagaccagg

SEQ ID NO: 1485150 - DNA, 25 bp, Homo sapien
aatgggtaagagttaaaccatatat

SEQ ID NO: 1485151 - DNA, 25 bp, Homo sapien
ttaaaccatatatgagaccaggaca

SEQ ID NO: 1485152 - DNA, 25 bp, Homo sapien
ttcttggtggtacaagagtggcacg

SEQ ID NO: 1485153 - DNA, 25 bp, Homo sapien
tggtacaagagtggcacgtgctcac

SEQ ID NO: 1485154 - DNA, 25 bp, Homo sapien
tgggtggtccaacttaacacctgga

SEQ ID NO: 1485155 - DNA, 25 bp, Homo sapien
gctggtggaacagtagagtgaactc

SEQ ID NO: 1485156 - DNA, 25 bp, Homo sapien
tccctggacgtgtgggcaccagaca

SEQ ID NO: 1485157 - DNA, 25 bp, Homo sapien
gggcaccagacatgctctgatcttt

SEQ ID NO: 1485158 - DNA, 25 bp, Homo sapien
tgtgggcaccagacatgctctgatc

SEQ ID NO: 1485159 - DNA, 25 bp, Homo sapien
gacgtgtgggcaccagacatgctct

SEQ ID NO: 1485160 - DNA, 25 bp, Homo sapien
gacactttagaagaatcaggttctc

SEQ ID NO: 1485161 - DNA, 25 bp, Homo sapien
ttcaaatgggaaatgctcctgggcc

SEQ ID NO: 1485162 - DNA, 25 bp, Homo sapien
aaggagggaaagcatgtgtctgtat

SEQ ID NO: 1485163 - DNA, 25 bp, Homo sapien
taagaagaatatgagagtatcagga

SEQ ID NO: 1485164 - DNA, 25 bp, Homo sapien
tccttgccgttcttgaagctgttgg

SEQ ID NO: 1485165 - DNA, 25 bp, Homo sapien
tcaggcaatgatcacatcgcaagct

SEQ ID NO: 1485166 - DNA, 25 bp, Homo sapien
gctgtgctccttgccgttcttgaag

SEQ ID NO: 1485167 - DNA, 25 bp, Homo sapien
gatcacatcgcaagctggagtagga

SEQ ID NO: 1485168 - DNA, 25 bp, Homo sapien
ctttcaaggaagggctatgctggcc

SEQ ID NO: 1485169 - DNA, 25 bp, Homo sapien
tatgctggcccagagatcctcatca

SEQ ID NO: 1485170 - DNA, 25 bp, Homo sapien
aagggctatgctggcccagagatcc

SEQ ID NO: 1485171 - DNA, 25 bp, Homo sapien
tcaaggaagggctatgctggcccag

SEQ ID NO: 1485172 - DNA, 25 bp, Homo sapien
tttagtgtagttctcgtgtcttcca

SEQ ID NO: 1485173 - DNA, 25 bp, Homo sapien
tattttagtgtagttctcgtgtctt

SEQ ID NO: 1485174 - DNA, 25 bp, Homo sapien
cacagagaggcatgttgttaacaga

SEQ ID NO: 1485175 - DNA, 25 bp, Homo sapien
ctcacagagaggcatgttgttaaca

SEQ ID NO: 1485176 - DNA, 25 bp, Homo sapien
tgcatgcagcttctcctggtgtttt

SEQ ID NO: 1485177 - DNA, 25 bp, Homo sapien
gcagcttctcctggtgttttgttcg

SEQ ID NO: 1485178 - DNA, 25 bp, Homo sapien
tagctgcatgcagcttctcctggtg

SEQ ID NO: 1485179 - DNA, 25 bp, Homo sapien
gcttctcctggtgttttgttcgtgg

SEQ ID NO: 1485180 - DNA, 25 bp, Homo sapien
cattaccttggaatatcgatcttct

SEQ ID NO: 1485181 - DNA, 25 bp, Homo sapien
tctcttggcatagagtcagcctcca

SEQ ID NO: 1485182 - DNA, 25 bp, Homo sapien
tccccagacacgcattaccttggaa

SEQ ID NO: 1485183 - DNA, 25 bp, Homo sapien
ggcatagagtcagcctccaaatccc

SEQ ID NO: 1485184 - DNA, 25 bp, Homo sapien
gaatcgacataaatgtgacaaaatg

SEQ ID NO: 1485185 - DNA, 25 bp, Homo sapien
tgaaaaactcattccccatatcttt

SEQ ID NO: 1485186 - DNA, 25 bp, Homo sapien
cttccagtaaggaatcgacataaat

SEQ ID NO: 1485187 - DNA, 25 bp, Homo sapien
cagtaaggaatcgacataaatgtga

SEQ ID NO: 1485188 - DNA, 25 bp, Homo sapien
ttcatctgaggaactaaacagagtc

SEQ ID NO: 1485189 - DNA, 25 bp, Homo sapien
tatgccagggcctgctgtgtcttac

SEQ ID NO: 1485190 - DNA, 25 bp, Homo sapien
ttaacacatatgccagggcctgctg

SEQ ID NO: 1485191 - DNA, 25 bp, Homo sapien
acacatatgccagggcctgctgtgt

SEQ ID NO: 1485192 - DNA, 25 bp, Homo sapien
atatgccagggcctgctgtgtctta

SEQ ID NO: 1485193 - DNA, 25 bp, Homo sapien
ggtgaatatgacattctcagtttct

SEQ ID NO: 1485194 - DNA, 25 bp, Homo sapien
ccttcttggaactcagaggtgaata

SEQ ID NO: 1485195 - DNA, 25 bp, Homo sapien
gaagagatctagagtgtgtacaact

SEQ ID NO: 1485196 - DNA, 25 bp, Homo sapien
cgagcgtaaaggctgagctgacgag

SEQ ID NO: 1485197 - DNA, 25 bp, Homo sapien
ctgcagttaaatacgatgatgtatt

SEQ ID NO: 1485198 - DNA, 25 bp, Homo sapien
taaatacgatgatgtattcttgcag

SEQ ID NO: 1485199 - DNA, 25 bp, Homo sapien
tgatgtattcttgcagaggagcctc

SEQ ID NO: 1485200 - DNA, 25 bp, Homo sapien
tacgatgatgtattcttgcagagga

SEQ ID NO: 1485201 - DNA, 25 bp, Homo sapien
caaagtactcatgatgaggaagagg

SEQ ID NO: 1485202 - DNA, 25 bp, Homo sapien
ggggacaaagaggagacaacacaaa

SEQ ID NO: 1485203 - DNA, 25 bp, Homo sapien
caaagaggagacaacacaaagtagt

SEQ ID NO: 1485204 - DNA, 25 bp, Homo sapien
gacaaagaggagacaacacaaagta

SEQ ID NO: 1485205 - DNA, 25 bp, Homo sapien
aagaggagacaacacaaagtagtat

SEQ ID NO: 1485206 - DNA, 25 bp, Homo sapien
gagcagacccaatacaaagcagctt

SEQ ID NO: 1485207 - DNA, 25 bp, Homo sapien
tcaagtggcattcgctttgagaagg

SEQ ID NO: 1485208 - DNA, 25 bp, Homo sapien
gcacatattggaaaagcatgccggg

SEQ ID NO: 1485209 - DNA, 25 bp, Homo sapien
ggcaatcaagcatgagcctctcaag

SEQ ID NO: 1485210 - DNA, 25 bp, Homo sapien
ggcttcctaatatccccaagcttta

SEQ ID NO: 1485211 - DNA, 25 bp, Homo sapien
caaagaaaatctgttaggcttccta

SEQ ID NO: 1485212 - DNA, 25 bp, Homo sapien
cagtagcaaatattcagcaactcca

SEQ ID NO: 1485213 - DNA, 25 bp, Homo sapien
gtaaaccaggcctttattcgtgcat

SEQ ID NO: 1485214 - DNA, 25 bp, Homo sapien
aatttcaaggcttctaatacctttg

SEQ ID NO: 1485215 - DNA, 25 bp, Homo sapien
gcttctaatacctttgaatcagctg

SEQ ID NO: 1485216 - DNA, 25 bp, Homo sapien
ctttgaatcagctgttacatcactc

SEQ ID NO: 1485217 - DNA, 25 bp, Homo sapien
gctgttacatcactcactagcttga

SEQ ID NO: 1485218 - DNA, 25 bp, Homo sapien
gctgccagtgctgaggtcacagctg

SEQ ID NO: 1485219 - DNA, 25 bp, Homo sapien
aagctgccagtgctgaggtcacagc

SEQ ID NO: 1485220 - DNA, 25 bp, Homo sapien
ttaggagaaagaagctgccagtgct

SEQ ID NO: 1485221 - DNA, 25 bp, Homo sapien
agaagctgccagtgctgaggtcaca

SEQ ID NO: 1485222 - DNA, 25 bp, Homo sapien
gcacatccagctgtgctctagcctg

SEQ ID NO: 1485223 - DNA, 25 bp, Homo sapien
acagagtggaagttgcaccattgca

SEQ ID NO: 1485224 - DNA, 25 bp, Homo sapien
aacagagtggaagttgcaccattgc

SEQ ID NO: 1485225 - DNA, 25 bp, Homo sapien
cacgttcacgtaagttgtttgtatt

SEQ ID NO: 1485226 - DNA, 25 bp, Homo sapien
catctcacgttcacgtaagttgttt

SEQ ID NO: 1485227 - DNA, 25 bp, Homo sapien
tcatctcacgttcacgtaagttgtt

SEQ ID NO: 1485228 - DNA, 25 bp, Homo sapien
ctcacgttcacgtaagttgtttgta

SEQ ID NO: 1485229 - DNA, 25 bp, Homo sapien
gaatatctgcttgaaaccagtggag

SEQ ID NO: 1485230 - DNA, 25 bp, Homo sapien
atgatggttatctcaatgatgcacc

SEQ ID NO: 1485231 - DNA, 25 bp, Homo sapien
ggctccacctcattagaggatttaa

SEQ ID NO: 1485232 - DNA, 25 bp, Homo sapien
cagacccagcaccttgattgacagt

SEQ ID NO: 1485233 - DNA, 25 bp, Homo sapien
acaacattatcttggtactgccttt

SEQ ID NO: 1485234 - DNA, 25 bp, Homo sapien
caacattatcttggtactgcctttc

SEQ ID NO: 1485235 - DNA, 25 bp, Homo sapien
aacattatcttggtactgcctttca

SEQ ID NO: 1485236 - DNA, 25 bp, Homo sapien
gacaacattatcttggtactgcctt

SEQ ID NO: 1485237 - DNA, 25 bp, Homo sapien
aagagcacagcatccacagcctggc

SEQ ID NO: 1485238 - DNA, 25 bp, Homo sapien
ggaagagcacagcatccacagcctg

SEQ ID NO: 1485239 - DNA, 25 bp, Homo sapien
gagcacagcatccacagcctggcat

SEQ ID NO: 1485240 - DNA, 25 bp, Homo sapien
ctggaagagcacagcatccacagcc

SEQ ID NO: 1485241 - DNA, 25 bp, Homo sapien
tcacatgaatgttgccaggtcatat

SEQ ID NO: 1485242 - DNA, 25 bp, Homo sapien
gagtcacacatggatacagctgcct

SEQ ID NO: 1485243 - DNA, 25 bp, Homo sapien
gcgcctggagacctgagtcacacat

SEQ ID NO: 1485244 - DNA, 25 bp, Homo sapien
ctgaatcacaatggcagggtcacat

SEQ ID NO: 1485245 - DNA, 25 bp, Homo sapien
taatgctaacctgttgtgcataccg

SEQ ID NO: 1485246 - DNA, 25 bp, Homo sapien
tttaatgctaacctgttgtgcatac

SEQ ID NO: 1485247 - DNA, 25 bp, Homo sapien
atgctaacctgttgtgcataccgct

SEQ ID NO: 1485248 - DNA, 25 bp, Homo sapien
cttttaatgctaacctgttgtgcat

SEQ ID NO: 1485249 - DNA, 25 bp, Homo sapien
caacagactttttggccatgttgag

SEQ ID NO: 1485250 - DNA, 25 bp, Homo sapien
tgagtaaattcatccagccttggaa

SEQ ID NO: 1485251 - DNA, 25 bp, Homo sapien
tgggaagacactatgtcaacagact

SEQ ID NO: 1485252 - DNA, 25 bp, Homo sapien
gatgagtgtggttgagatcccaatg

SEQ ID NO: 1485253 - DNA, 25 bp, Homo sapien
gatgtcacgcgagcttgcctttcat

SEQ ID NO: 1485254 - DNA, 25 bp, Homo sapien
gatgcttgtgtgatgtcacgcgagc

SEQ ID NO: 1485255 - DNA, 25 bp, Homo sapien
tgtgtgatgtcacgcgagcttgcct

SEQ ID NO: 1485256 - DNA, 25 bp, Homo sapien
aggatgcttgtgtgatgtcacgcga

SEQ ID NO: 1485257 - DNA, 25 bp, Homo sapien
tcttttttccagcaaaaagtcatcc

SEQ ID NO: 1485258 - DNA, 25 bp, Homo sapien
ggctccataccaaaagcatccttgc

SEQ ID NO: 1485259 - DNA, 25 bp, Homo sapien
caggatcaacaggaccaatttttct

SEQ ID NO: 1485260 - DNA, 25 bp, Homo sapien
agcaaaaagtcatcctcaccagggg

SEQ ID NO: 1485261 - DNA, 25 bp, Homo sapien
ttgcctggggaagagtcttcaacat

SEQ ID NO: 1485262 - DNA, 25 bp, Homo sapien
cttgcctggggaagagtcttcaaca

SEQ ID NO: 1485263 - DNA, 25 bp, Homo sapien
tattccacaggatttatgtaaggag

SEQ ID NO: 1485264 - DNA, 25 bp, Homo sapien
gcacaaagcacgcataaaatgagtg

SEQ ID NO: 1485265 - DNA, 25 bp, Homo sapien
attttgagacgccattttgtaccca

SEQ ID NO: 1485266 - DNA, 25 bp, Homo sapien
ctctatacctgtttcctcgtgtgga

SEQ ID NO: 1485267 - DNA, 25 bp, Homo sapien
gctctgttactggagcacattctct

SEQ ID NO: 1485268 - DNA, 25 bp, Homo sapien
tgctctgttactggagcacattctc

SEQ ID NO: 1485269 - DNA, 25 bp, Homo sapien
tctgttactggagcacattctctcc

SEQ ID NO: 1485270 - DNA, 25 bp, Homo sapien
gtgctctgttactggagcacattct

SEQ ID NO: 1485271 - DNA, 25 bp, Homo sapien
tatgccttgtaatcatctctggtta

SEQ ID NO: 1485272 - DNA, 25 bp, Homo sapien
gggagatggttatacgagatatttt

SEQ ID NO: 1485273 - DNA, 25 bp, Homo sapien
tcattttatgccttgtaatcatctc

SEQ ID NO: 1485274 - DNA, 25 bp, Homo sapien
ttatacgagatatttttgaaacctc

SEQ ID NO: 1485275 - DNA, 25 bp, Homo sapien
tgggcactaccagaacctggacact

SEQ ID NO: 1485276 - DNA, 25 bp, Homo sapien
gggcactaccagaacctggacactc

SEQ ID NO: 1485277 - DNA, 25 bp, Homo sapien
aagcctcgacacttcgttaggccaa

SEQ ID NO: 1485278 - DNA, 25 bp, Homo sapien
agcaagcctcgacacttcgttaggc

SEQ ID NO: 1485279 - DNA, 25 bp, Homo sapien
tcgacacttcgttaggccaactggt

SEQ ID NO: 1485280 - DNA, 25 bp, Homo sapien
ggccaactggtttcttagtttgcat

SEQ ID NO: 1485281 - DNA, 25 bp, Homo sapien
ctcgtaccttgtgaatcccgacgtg

SEQ ID NO: 1485282 - DNA, 25 bp, Homo sapien
taccttgtgaatcccgacgtgggat

SEQ ID NO: 1485283 - DNA, 25 bp, Homo sapien
cttgtgaatcccgacgtgggatgtg

SEQ ID NO: 1485284 - DNA, 25 bp, Homo sapien
cgtaccttgtgaatcccgacgtggg

SEQ ID NO: 1485285 - DNA, 25 bp, Homo sapien
atgaaattacacctagtgttgggat

SEQ ID NO: 1485286 - DNA, 25 bp, Homo sapien
cagcctaacttacagttcccagggt

SEQ ID NO: 1485287 - DNA, 25 bp, Homo sapien
cactgagggacttggactatgagca

SEQ ID NO: 1485288 - DNA, 25 bp, Homo sapien
gtaggagaggctaaatcatgaaatt

SEQ ID NO: 1485289 - DNA, 25 bp, Homo sapien
tgttcttttgtcctaggcatgtcct

SEQ ID NO: 1485290 - DNA, 25 bp, Homo sapien
cagagaatgctgatccaagactaaa

SEQ ID NO: 1485291 - DNA, 25 bp, Homo sapien
aaaataattgtgacttgccacggtc

SEQ ID NO: 1485292 - DNA, 25 bp, Homo sapien
gactaaaaaggatgcaacctcttgc

SEQ ID NO: 1485293 - DNA, 25 bp, Homo sapien
taaatatacttagcatcaacctcgg

SEQ ID NO: 1485294 - DNA, 25 bp, Homo sapien
caactgagaaggctgctgcacacag

SEQ ID NO: 1485295 - DNA, 25 bp, Homo sapien
aaaatctaatagcaggtcccactcc

SEQ ID NO: 1485296 - DNA, 25 bp, Homo sapien
tcaacctcggtgaccagtgggagtt

SEQ ID NO: 1485297 - DNA, 25 bp, Homo sapien
ttcacagctttggagcgttgactcc

SEQ ID NO: 1485298 - DNA, 25 bp, Homo sapien
cttgggaagtgtctgcatgtgtgat

SEQ ID NO: 1485299 - DNA, 25 bp, Homo sapien
gctttggagcgttgactccgcacca

SEQ ID NO: 1485300 - DNA, 25 bp, Homo sapien
ttggagcgttgactccgcaccaggc

SEQ ID NO: 1485301 - DNA, 25 bp, Homo sapien
ggtgatccacgggacactaccatat

SEQ ID NO: 1485302 - DNA, 25 bp, Homo sapien
tatgtgaaggtgagtcctgaagcct

SEQ ID NO: 1485303 - DNA, 25 bp, Homo sapien
tccactatgcagtaccagcttctgg

SEQ ID NO: 1485304 - DNA, 25 bp, Homo sapien
gagtcctctacaccttatgcacaga

SEQ ID NO: 1485305 - DNA, 25 bp, Homo sapien
tgtcagcaccagtatattcaatggt

SEQ ID NO: 1485306 - DNA, 25 bp, Homo sapien
tattcaatggtgcttctccaaaaag

SEQ ID NO: 1485307 - DNA, 25 bp, Homo sapien
ccagtatattcaatggtgcttctcc

SEQ ID NO: 1485308 - DNA, 25 bp, Homo sapien
tgtgtcagcaccagtatattcaatg

SEQ ID NO: 1485309 - DNA, 25 bp, Homo sapien
gcctggaccaatggctgaggctgcc

SEQ ID NO: 1485310 - DNA, 25 bp, Homo sapien
ggcctggaccaatggctgaggctgc

SEQ ID NO: 1485311 - DNA, 25 bp, Homo sapien
tgaggacaaggatgggtaaaaccag

SEQ ID NO: 1485312 - DNA, 25 bp, Homo sapien
ggtatgctagtcatgatctggcaaa

SEQ ID NO: 1485313 - DNA, 25 bp, Homo sapien
tcaagtgagacttcaagatgctgca

SEQ ID NO: 1485314 - DNA, 25 bp, Homo sapien
gaattggctgccagatcgaggcaaa

SEQ ID NO: 1485315 - DNA, 25 bp, Homo sapien
tttttttctgagagtccatcctcat

SEQ ID NO: 1485316 - DNA, 25 bp, Homo sapien
aatttttttctgagagtccatcctc

SEQ ID NO: 1485317 - DNA, 25 bp, Homo sapien
ggcaatttttttctgagagtccatc

SEQ ID NO: 1485318 - DNA, 25 bp, Homo sapien
gcaatttttttctgagagtccatcc

SEQ ID NO: 1485319 - DNA, 25 bp, Homo sapien
gatcagtgcaaccagaatggcaaag

SEQ ID NO: 1485320 - DNA, 25 bp, Homo sapien
catgatgtccacggctgaaaagatc

SEQ ID NO: 1485321 - DNA, 25 bp, Homo sapien
gtgcaaccagaatggcaaagcagca

SEQ ID NO: 1485322 - DNA, 25 bp, Homo sapien
ggctgaaaagatcagtgcaaccaga

SEQ ID NO: 1485323 - DNA, 25 bp, Homo sapien
gctgaatgtccaggtggtcaaagtc

SEQ ID NO: 1485324 - DNA, 25 bp, Homo sapien
tgtccaggtggtcaaagtcactcac

SEQ ID NO: 1485325 - DNA, 25 bp, Homo sapien
aatgtccaggtggtcaaagtcactc

SEQ ID NO: 1485326 - DNA, 25 bp, Homo sapien
tgaatgtccaggtggtcaaagtcac

SEQ ID NO: 1485327 - DNA, 25 bp, Homo sapien
ccagtatgataatctgagccatctc

SEQ ID NO: 1485328 - DNA, 25 bp, Homo sapien
tctctaggggctcatggctaaaagt

SEQ ID NO: 1485329 - DNA, 25 bp, Homo sapien
attaggccccagtatgataatctga

SEQ ID NO: 1485330 - DNA, 25 bp, Homo sapien
gctaaaagtggcagaagacagggcc

SEQ ID NO: 1485331 - DNA, 25 bp, Homo sapien
gagctgtgaccactgtgacaaatca

SEQ ID NO: 1485332 - DNA, 25 bp, Homo sapien
agctgtgaccactgtgacaaatcat

SEQ ID NO: 1485333 - DNA, 25 bp, Homo sapien
gaatggaccaaacgctatactcagt

SEQ ID NO: 1485334 - DNA, 25 bp, Homo sapien
gacaaagttgcagaagggaccctaa

SEQ ID NO: 1485335 - DNA, 25 bp, Homo sapien
tgctttgtttcgttgtgaccccagg

SEQ ID NO: 1485336 - DNA, 25 bp, Homo sapien
tatctctgatcacggtactgctggc

SEQ ID NO: 1485337 - DNA, 25 bp, Homo sapien
gacgagtgcaagtgccccaagtttt

SEQ ID NO: 1485338 - DNA, 25 bp, Homo sapien
ttttggagactggagttgcagataa

SEQ ID NO: 1485339 - DNA, 25 bp, Homo sapien
catggggacgagtgcaagtgcccca

SEQ ID NO: 1485340 - DNA, 25 bp, Homo sapien
tgcagataagtttgatgaactatga

SEQ ID NO: 1485341 - DNA, 25 bp, Homo sapien
atgaaacctggagacgaacccctat

SEQ ID NO: 1485342 - DNA, 25 bp, Homo sapien
tcagcagcatactcagtctctccta

SEQ ID NO: 1485343 - DNA, 25 bp, Homo sapien
tactcagtctctcctatgaaacctg

SEQ ID NO: 1485344 - DNA, 25 bp, Homo sapien
tcctatgaaacctggagacgaaccc

SEQ ID NO: 1485345 - DNA, 25 bp, Homo sapien
taattctattatcccactgcaaact

SEQ ID NO: 1485346 - DNA, 25 bp, Homo sapien
ttaattctattatcccactgcaaac

SEQ ID NO: 1485347 - DNA, 25 bp, Homo sapien
aattctattatcccactgcaaactt

SEQ ID NO: 1485348 - DNA, 25 bp, Homo sapien
tccgcatgtgagtatttgaggcagc

SEQ ID NO: 1485349 - DNA, 25 bp, Homo sapien
ctgacacggtgccatcaggggagtc

SEQ ID NO: 1485350 - DNA, 25 bp, Homo sapien
aaggccatgccgtgtatccgcatgt

SEQ ID NO: 1485351 - DNA, 25 bp, Homo sapien
atcaggggagtcatcctcgtggctg

SEQ ID NO: 1485352 - DNA, 25 bp, Homo sapien
gcactggtaggaagaaccatccgat

SEQ ID NO: 1485353 - DNA, 25 bp, Homo sapien
tttcagtggtgaagccacacacggc

SEQ ID NO: 1485354 - DNA, 25 bp, Homo sapien
cactcccggcactggtaggaagaac

SEQ ID NO: 1485355 - DNA, 25 bp, Homo sapien
ctggagagagagacgtgagacgtgt

SEQ ID NO: 1485356 - DNA, 25 bp, Homo sapien
ctttttcagtggttgagtgattgct

SEQ ID NO: 1485357 - DNA, 25 bp, Homo sapien
tttttcagtggttgagtgattgctc

SEQ ID NO: 1485358 - DNA, 25 bp, Homo sapien
tctaacttccgcttgggactgggga

SEQ ID NO: 1485359 - DNA, 25 bp, Homo sapien
tggttcttctaacttccgcttggga

SEQ ID NO: 1485360 - DNA, 25 bp, Homo sapien
cttctaacttccgcttgggactggg

SEQ ID NO: 1485361 - DNA, 25 bp, Homo sapien
ttcttctaacttccgcttgggactg

SEQ ID NO: 1485362 - DNA, 25 bp, Homo sapien
ttcttttgtttcctcctcactggtg

SEQ ID NO: 1485363 - DNA, 25 bp, Homo sapien
ggtgtcttcttttgtttcctcctca

SEQ ID NO: 1485364 - DNA, 25 bp, Homo sapien
cctcctcactggtggcatctgtcat

SEQ ID NO: 1485365 - DNA, 25 bp, Homo sapien
cttttgtttcctcctcactggtggc

SEQ ID NO: 1485366 - DNA, 25 bp, Homo sapien
tataaatttgggaatgggggcacca

SEQ ID NO: 1485367 - DNA, 25 bp, Homo sapien
tctcatttgtttggatagccagttc

SEQ ID NO: 1485368 - DNA, 25 bp, Homo sapien
tagccagttctcttggtgtgattgg

SEQ ID NO: 1485369 - DNA, 25 bp, Homo sapien
ttgtgaaatgtgatacgatctcatt

SEQ ID NO: 1485370 - DNA, 25 bp, Homo sapien
gcaaactgtagcaagcgttttgtga

SEQ ID NO: 1485371 - DNA, 25 bp, Homo sapien
cagcttcctgatggtgccgactgtg

SEQ ID NO: 1485372 - DNA, 25 bp, Homo sapien
tgtaagctttcaagtgtgtgacagc

SEQ ID NO: 1485373 - DNA, 25 bp, Homo sapien
tccggtttcccatcttgtccatggc

SEQ ID NO: 1485374 - DNA, 25 bp, Homo sapien
gtctgcagtgagaatccggtttccc

SEQ ID NO: 1485375 - DNA, 25 bp, Homo sapien
gaacttccagcgttgcaaaaatgct

SEQ ID NO: 1485376 - DNA, 25 bp, Homo sapien
gaaagatcgggtgaaaggcactgaa

SEQ ID NO: 1485377 - DNA, 25 bp, Homo sapien
aaaacgtcagacttgagagatctcc

SEQ ID NO: 1485378 - DNA, 25 bp, Homo sapien
tgatcttaccagtacaacgaggaga

SEQ ID NO: 1485379 - DNA, 25 bp, Homo sapien
tctatgtcttgggaatgcttccaag

SEQ ID NO: 1485380 - DNA, 25 bp, Homo sapien
atgtcttgggaatgcttccaagtaa

SEQ ID NO: 1485381 - DNA, 25 bp, Homo sapien
tttctatgtcttgggaatgcttcca

SEQ ID NO: 1485382 - DNA, 25 bp, Homo sapien
tatgtcttgggaatgcttccaagta

SEQ ID NO: 1485383 - DNA, 25 bp, Homo sapien
ggccaggtctgcatgaactttgact

SEQ ID NO: 1485384 - DNA, 25 bp, Homo sapien
ggttttggctgtgtttattgaggcc

SEQ ID NO: 1485385 - DNA, 25 bp, Homo sapien
tgtcttttgctttctccccagagaa

SEQ ID NO: 1485386 - DNA, 25 bp, Homo sapien
ctgttgacagcatctccccaggtgt

SEQ ID NO: 1485387 - DNA, 25 bp, Homo sapien
atacactcacacacacactctccca

SEQ ID NO: 1485388 - DNA, 25 bp, Homo sapien
catacactcacacacacactctccc

SEQ ID NO: 1485389 - DNA, 25 bp, Homo sapien
tacactcacacacacactctcccat

SEQ ID NO: 1485390 - DNA, 25 bp, Homo sapien
ctgctatttcatcccagacaccttt

SEQ ID NO: 1485391 - DNA, 25 bp, Homo sapien
tctctgctatttcatcccagacacc

SEQ ID NO: 1485392 - DNA, 25 bp, Homo sapien
cccagacacctttttctccagtcat

SEQ ID NO: 1485393 - DNA, 25 bp, Homo sapien
tcatcccagacacctttttctccag

SEQ ID NO: 1485394 - DNA, 25 bp, Homo sapien
gaatgacatacaaacctgtcctctg

SEQ ID NO: 1485395 - DNA, 25 bp, Homo sapien
ccatgagttgcaagaatgacataca

SEQ ID NO: 1485396 - DNA, 25 bp, Homo sapien
acagccctaccatgagttgcaagaa

SEQ ID NO: 1485397 - DNA, 25 bp, Homo sapien
tccaaacagccctaccatgagttgc

SEQ ID NO: 1485398 - DNA, 25 bp, Homo sapien
aagcagtttggagccttggatgacc

SEQ ID NO: 1485399 - DNA, 25 bp, Homo sapien
ccaataagtggtataggattgctaa

SEQ ID NO: 1485400 - DNA, 25 bp, Homo sapien
cagcagaggtttgaagcaatctgaa

SEQ ID NO: 1485401 - DNA, 25 bp, Homo sapien
gccttggatgaccaataagtggtat

SEQ ID NO: 1485402 - DNA, 25 bp, Homo sapien
tattgttggtggcagtattggctac

SEQ ID NO: 1485403 - DNA, 25 bp, Homo sapien
tatgcaaatataacccttccagaag

SEQ ID NO: 1485404 - DNA, 25 bp, Homo sapien
gaaaggattaccactagtgtaggaa

SEQ ID NO: 1485405 - DNA, 25 bp, Homo sapien
tggtcaagaatggaagctagacttc

SEQ ID NO: 1485406 - DNA, 25 bp, Homo sapien
tcaagctgttccatgaatacagcca

SEQ ID NO: 1485407 - DNA, 25 bp, Homo sapien
aaaagtcatggcaaagactcgtcgc

SEQ ID NO: 1485408 - DNA, 25 bp, Homo sapien
gacgtttctcatgccatcagggaag

SEQ ID NO: 1485409 - DNA, 25 bp, Homo sapien
cgtcgcatgacttgtagtttcaagc

SEQ ID NO: 1485410 - DNA, 25 bp, Homo sapien
aaaacaggtatttgattagggagct

SEQ ID NO: 1485411 - DNA, 25 bp, Homo sapien
ggtctagggctacccaagaatgaag

SEQ ID NO: 1485412 - DNA, 25 bp, Homo sapien
gctagcttccaactactttaaggga

SEQ ID NO: 1485413 - DNA, 25 bp, Homo sapien
tatcagccagcttttaatccaaggc

SEQ ID NO: 1485414 - DNA, 25 bp, Homo sapien
catcccatatggaaagctaattgct

SEQ ID NO: 1485415 - DNA, 25 bp, Homo sapien
gaaacggatgtgtgcttgcaaagac

SEQ ID NO: 1485416 - DNA, 25 bp, Homo sapien
aagatgactttaactgccactgcac

SEQ ID NO: 1485417 - DNA, 25 bp, Homo sapien
tgaatcagcaggtcttaaactcttg

SEQ ID NO: 1485418 - DNA, 25 bp, Homo sapien
tctggccatccaattttccgtgaag

SEQ ID NO: 1485419 - DNA, 25 bp, Homo sapien
gctctatctggccatccaattttcc

SEQ ID NO: 1485420 - DNA, 25 bp, Homo sapien
gccatccaattttccgtgaagcaca

SEQ ID NO: 1485421 - DNA, 25 bp, Homo sapien
aattttccgtgaagcacactacgga

SEQ ID NO: 1485422 - DNA, 25 bp, Homo sapien
ctttcatcagattgtacttcaatga

SEQ ID NO: 1485423 - DNA, 25 bp, Homo sapien
ttcaatgatctcagcccctgacctg

SEQ ID NO: 1485424 - DNA, 25 bp, Homo sapien
actccaaaggaaagttcactctctt

SEQ ID NO: 1485425 - DNA, 25 bp, Homo sapien
cactctcttcggaggtctgtacact

SEQ ID NO: 1485426 - DNA, 25 bp, Homo sapien
ctccctgcggagtccagcagccagg

SEQ ID NO: 1485427 - DNA, 25 bp, Homo sapien
cctccctgcggagtccagcagccag

SEQ ID NO: 1485428 - DNA, 25 bp, Homo sapien
gggactcaggcgctcccctttgagg

SEQ ID NO: 1485429 - DNA, 25 bp, Homo sapien
agaagcccagctccgcttgcttgta

SEQ ID NO: 1485430 - DNA, 25 bp, Homo sapien
gcttgtatcctgcagcgctaatgcg

SEQ ID NO: 1485431 - DNA, 25 bp, Homo sapien
gtgggctcctcaaacaccagtcctt

SEQ ID NO: 1485432 - DNA, 25 bp, Homo sapien
aaaacactgtagatccccttccagg

SEQ ID NO: 1485433 - DNA, 25 bp, Homo sapien
aaacactgtagatccccttccaggc

SEQ ID NO: 1485434 - DNA, 25 bp, Homo sapien
tcggttcctgtcctaaacctgcaaa

SEQ ID NO: 1485435 - DNA, 25 bp, Homo sapien
cctctcggttcctgtcctaaacctg

SEQ ID NO: 1485436 - DNA, 25 bp, Homo sapien
tctcggttcctgtcctaaacctgca

SEQ ID NO: 1485437 - DNA, 25 bp, Homo sapien
cggttcctgtcctaaacctgcaaat

SEQ ID NO: 1485438 - DNA, 25 bp, Homo sapien
gacatgggtgaggaatcctcgttca

SEQ ID NO: 1485439 - DNA, 25 bp, Homo sapien
aagcataccattataaaaagaaagg

SEQ ID NO: 1485440 - DNA, 25 bp, Homo sapien
cagaaagtattcagggcagttggta

SEQ ID NO: 1485441 - DNA, 25 bp, Homo sapien
ggaatcctcgttcattgtggcagtt

SEQ ID NO: 1485442 - DNA, 25 bp, Homo sapien
gaaaggttccattcacatcaggcat

SEQ ID NO: 1485443 - DNA, 25 bp, Homo sapien
caccagattcttgactgaagcagag

SEQ ID NO: 1485444 - DNA, 25 bp, Homo sapien
tttcccgcagaaggaacaactgcag

SEQ ID NO: 1485445 - DNA, 25 bp, Homo sapien
ccaagcctcgacaaaaggagagatc

SEQ ID NO: 1485446 - DNA, 25 bp, Homo sapien
tcctctccacacaggaactgtgata

SEQ ID NO: 1485447 - DNA, 25 bp, Homo sapien
tgggaatggcagtcccgtctgtgca

SEQ ID NO: 1485448 - DNA, 25 bp, Homo sapien
tctgtgcaagagcaccatctgaagc

SEQ ID NO: 1485449 - DNA, 25 bp, Homo sapien
catgagttctgatgcctcaatgccc

SEQ ID NO: 1485450 - DNA, 25 bp, Homo sapien
ttagacctttcgagtccacattcac

SEQ ID NO: 1485451 - DNA, 25 bp, Homo sapien
tctctgtcttagacctttcgagtcc

SEQ ID NO: 1485452 - DNA, 25 bp, Homo sapien
tctttctctgtcttagacctttcga

SEQ ID NO: 1485453 - DNA, 25 bp, Homo sapien
acattcactaatctctttcaagttg

SEQ ID NO: 1485454 - DNA, 25 bp, Homo sapien
tattcacctccaaggcaaggaactc

SEQ ID NO: 1485455 - DNA, 25 bp, Homo sapien
ggatcagtttagtgcctattcacct

SEQ ID NO: 1485456 - DNA, 25 bp, Homo sapien
tacagaggctttccctaatgttcct

SEQ ID NO: 1485457 - DNA, 25 bp, Homo sapien
aaaactaacactgctgtaatgtcac

SEQ ID NO: 1485458 - DNA, 25 bp, Homo sapien
cctgccgataaatgaaatgttgctt

SEQ ID NO: 1485459 - DNA, 25 bp, Homo sapien
catcctgccgataaatgaaatgttg

SEQ ID NO: 1485460 - DNA, 25 bp, Homo sapien
gacatcctgccgataaatgaaatgt

SEQ ID NO: 1485461 - DNA, 25 bp, Homo sapien
tgagacatcctgccgataaatgaaa

SEQ ID NO: 1485462 - DNA, 25 bp, Homo sapien
tcttaaccacactttgacaggagct

SEQ ID NO: 1485463 - DNA, 25 bp, Homo sapien
aggaaacctccgtacagtgcagctg

SEQ ID NO: 1485464 - DNA, 25 bp, Homo sapien
ccaggcaacaaagtagagtgggctt

SEQ ID NO: 1485465 - DNA, 25 bp, Homo sapien
caggagctaattgaataagtaggag

SEQ ID NO: 1485466 - DNA, 25 bp, Homo sapien
ccaggttgctcggagccacgctggt

SEQ ID NO: 1485467 - DNA, 25 bp, Homo sapien
cactaccatgcaacgccaggttgct

SEQ ID NO: 1485468 - DNA, 25 bp, Homo sapien
agacgcgggcaaacgccgctctaaa

SEQ ID NO: 1485469 - DNA, 25 bp, Homo sapien
tagtttttggactgagtaaaacagc

SEQ ID NO: 1485470 - DNA, 25 bp, Homo sapien
cccgcagcccggtcattaaggcaag

SEQ ID NO: 1485471 - DNA, 25 bp, Homo sapien
ccaagagcctgaaagggaacctgcc

SEQ ID NO: 1485472 - DNA, 25 bp, Homo sapien
gcagcccggtcattaaggcaagaaa

SEQ ID NO: 1485473 - DNA, 25 bp, Homo sapien
aggtcgggtcggcagggaccaagag

SEQ ID NO: 1485474 - DNA, 25 bp, Homo sapien
gacgctgctgtagaagttcgcgccc

SEQ ID NO: 1485475 - DNA, 25 bp, Homo sapien
gagagccactcgtgctgccggatct

SEQ ID NO: 1485476 - DNA, 25 bp, Homo sapien
ctcatctgctcgaagccctcatggg

SEQ ID NO: 1485477 - DNA, 25 bp, Homo sapien
agacgctggcgctgtagtcctgctg

SEQ ID NO: 1485478 - DNA, 25 bp, Homo sapien
ggccgccggcgagcagcggactcgg

SEQ ID NO: 1485479 - DNA, 25 bp, Homo sapien
cggcgagcagcggactcgggacggg

SEQ ID NO: 1485480 - DNA, 25 bp, Homo sapien
ggcccagcgggagccggaggtggag

SEQ ID NO: 1485481 - DNA, 25 bp, Homo sapien
gagcagcggactcgggacgggcgcg

SEQ ID NO: 1485482 - DNA, 25 bp, Homo sapien
gtgcggcggcgacgtcgcccggcgg

SEQ ID NO: 1485483 - DNA, 25 bp, Homo sapien
gcggctgcggtcccgagcgggcgct

SEQ ID NO: 1485484 - DNA, 25 bp, Homo sapien
gctcgccggctccttgcggcaccta

SEQ ID NO: 1485485 - DNA, 25 bp, Homo sapien
agaagtgcccggtgcggcggcgacg

SEQ ID NO: 1485486 - DNA, 25 bp, Homo sapien
catgggaatttactgggttgagctt

SEQ ID NO: 1485487 - DNA, 25 bp, Homo sapien
tgggttgagcttttgccaaagcctg

SEQ ID NO: 1485488 - DNA, 25 bp, Homo sapien
atgggaatttactgggttgagcttt

SEQ ID NO: 1485489 - DNA, 25 bp, Homo sapien
ggttgagcttttgccaaagcctgaa

SEQ ID NO: 1485490 - DNA, 25 bp, Homo sapien
tcctatttggatcccattctcaaca

SEQ ID NO: 1485491 - DNA, 25 bp, Homo sapien
tattccacaatcctatttggatccc

SEQ ID NO: 1485492 - DNA, 25 bp, Homo sapien
tccacaatcctatttggatcccatt

SEQ ID NO: 1485493 - DNA, 25 bp, Homo sapien
caatcctatttggatcccattctca

SEQ ID NO: 1485494 - DNA, 25 bp, Homo sapien
gctttgtacttaacctcatactctt

SEQ ID NO: 1485495 - DNA, 25 bp, Homo sapien
tgcggtgaaatctcatcatgctttg

SEQ ID NO: 1485496 - DNA, 25 bp, Homo sapien
tcatcatgctttgtacttaacctca

SEQ ID NO: 1485497 - DNA, 25 bp, Homo sapien
ctggatacaaacgttgcggtgaaat

SEQ ID NO: 1485498 - DNA, 25 bp, Homo sapien
tcatacatccccataacctgaattt

SEQ ID NO: 1485499 - DNA, 25 bp, Homo sapien
gtgctgcaaagcgtatcctgtgatg

SEQ ID NO: 1485500 - DNA, 25 bp, Homo sapien
aagcgtatcctgtgatgcaatgcag

SEQ ID NO: 1485501 - DNA, 25 bp, Homo sapien
tctgccttatcatccacatcataca

SEQ ID NO: 1485502 - DNA, 25 bp, Homo sapien
gaagagatactctttgagaacctac

SEQ ID NO: 1485503 - DNA, 25 bp, Homo sapien
ggttttggtcatggctaataatcaa

SEQ ID NO: 1485504 - DNA, 25 bp, Homo sapien
actgaagagatactctttgagaacc

SEQ ID NO: 1485505 - DNA, 25 bp, Homo sapien
catggctaataatcaactgaagaga

SEQ ID NO: 1485506 - DNA, 25 bp, Homo sapien
aagaatcaaagtatgcagcacaagc

SEQ ID NO: 1485507 - DNA, 25 bp, Homo sapien
tcaaagtatgcagcacaagcatcaa

SEQ ID NO: 1485508 - DNA, 25 bp, Homo sapien
tcagtcaatttaccctttggtccca

SEQ ID NO: 1485509 - DNA, 25 bp, Homo sapien
agcacaagcatcaatacatttggca

SEQ ID NO: 1485510 - DNA, 25 bp, Homo sapien
aagggcagcggagtcatagaatgac

SEQ ID NO: 1485511 - DNA, 25 bp, Homo sapien
gctgttcacgggaagctgtcggcaa

SEQ ID NO: 1485512 - DNA, 25 bp, Homo sapien
taccacagacgtagagatgggaagt

SEQ ID NO: 1485513 - DNA, 25 bp, Homo sapien
caaaaagaagggcagcggagtcata

SEQ ID NO: 1485514 - DNA, 25 bp, Homo sapien
cattgatgtctgggtggcagcaagg

SEQ ID NO: 1485515 - DNA, 25 bp, Homo sapien
tacacattgatgtctgggtggcagc

SEQ ID NO: 1485516 - DNA, 25 bp, Homo sapien
cacattgatgtctgggtggcagcaa

SEQ ID NO: 1485517 - DNA, 25 bp, Homo sapien
ttacacattgatgtctgggtggcag

SEQ ID NO: 1485518 - DNA, 25 bp, Homo sapien
agaatgcccaatgtgccccaagcag

SEQ ID NO: 1485519 - DNA, 25 bp, Homo sapien
gtcgccggtgtgatgagaatgccca

SEQ ID NO: 1485520 - DNA, 25 bp, Homo sapien
cgtcttggccttgtacagcgttcag

SEQ ID NO: 1485521 - DNA, 25 bp, Homo sapien
ttcagaaggcgacctgtggccggca

SEQ ID NO: 1485522 - DNA, 25 bp, Homo sapien
tttcccgggtaaagctggaagctga

SEQ ID NO: 1485523 - DNA, 25 bp, Homo sapien
ggagtccacgctactgtccctcttt

SEQ ID NO: 1485524 - DNA, 25 bp, Homo sapien
catcaagatgcagaatgtgaacgat

SEQ ID NO: 1485525 - DNA, 25 bp, Homo sapien
acaatgcataatgagcgggcagcgg

SEQ ID NO: 1485526 - DNA, 25 bp, Homo sapien
ttacaatccaatgagccacggctga

SEQ ID NO: 1485527 - DNA, 25 bp, Homo sapien
tatataacgtggctgcttaagatcc

SEQ ID NO: 1485528 - DNA, 25 bp, Homo sapien
aatgagccacggctgatgaggacat

SEQ ID NO: 1485529 - DNA, 25 bp, Homo sapien
cttgagtcagatgcgtgcttacaat

SEQ ID NO: 1485530 - DNA, 25 bp, Homo sapien
aataagggggcactgtgagacaacc

SEQ ID NO: 1485531 - DNA, 25 bp, Homo sapien
cactgtgagacaacctaagggttga

SEQ ID NO: 1485532 - DNA, 25 bp, Homo sapien
tgtgagacaacctaagggttgatac

SEQ ID NO: 1485533 - DNA, 25 bp, Homo sapien
gggcactgtgagacaacctaagggt

SEQ ID NO: 1485534 - DNA, 25 bp, Homo sapien
catctggtgatgaggaggtaatgac

SEQ ID NO: 1485535 - DNA, 25 bp, Homo sapien
taccacagtaaaccatgagcaatgt

SEQ ID NO: 1485536 - DNA, 25 bp, Homo sapien
tgtctggccaagtgtagccccgaag

SEQ ID NO: 1485537 - DNA, 25 bp, Homo sapien
caatgtgggaacaacttccctggtt

SEQ ID NO: 1485538 - DNA, 25 bp, Homo sapien
gctgactttggctgtagaagagtca

SEQ ID NO: 1485539 - DNA, 25 bp, Homo sapien
ctgtagaagagtcaagctgatgctt

SEQ ID NO: 1485540 - DNA, 25 bp, Homo sapien
gaagagtcaagctgatgcttgaaag

SEQ ID NO: 1485541 - DNA, 25 bp, Homo sapien
agtcaagctgatgcttgaaagccac

SEQ ID NO: 1485542 - DNA, 25 bp, Homo sapien
gctgagcctccctccacattgtcca

SEQ ID NO: 1485543 - DNA, 25 bp, Homo sapien
ctgagcctccctccacattgtccat

SEQ ID NO: 1485544 - DNA, 25 bp, Homo sapien
tgctgagcctccctccacattgtcc

SEQ ID NO: 1485545 - DNA, 25 bp, Homo sapien
tcttctttctgacagatgcacaatt

SEQ ID NO: 1485546 - DNA, 25 bp, Homo sapien
tgcctcacagttggaagatgcttct

SEQ ID NO: 1485547 - DNA, 25 bp, Homo sapien
acgtctacagtctaaacaaaatggg

SEQ ID NO: 1485548 - DNA, 25 bp, Homo sapien
ctgtgcctcacagttggaagatgct

SEQ ID NO: 1485549 - DNA, 25 bp, Homo sapien
agagatgtagagctcactaagatag

SEQ ID NO: 1485550 - DNA, 25 bp, Homo sapien
tagagctcactaagatagttgaggc

SEQ ID NO: 1485551 - DNA, 25 bp, Homo sapien
cagggaagtgagctggcctctccag

SEQ ID NO: 1485552 - DNA, 25 bp, Homo sapien
taagatagttgaggcaatgtgattc

SEQ ID NO: 1485553 - DNA, 25 bp, Homo sapien
ctaagcatggaccatcaagaaaggg

SEQ ID NO: 1485554 - DNA, 25 bp, Homo sapien
gatttgtcaaccttaaggcatgatg

SEQ ID NO: 1485555 - DNA, 25 bp, Homo sapien
gaagacctttgaactaagcatggac

SEQ ID NO: 1485556 - DNA, 25 bp, Homo sapien
gggaagcttccccatatcaccatca

SEQ ID NO: 1485557 - DNA, 25 bp, Homo sapien
ggatcttcatttgatctcctacttc

SEQ ID NO: 1485558 - DNA, 25 bp, Homo sapien
ctggatcttcatttgatctcctact

SEQ ID NO: 1485559 - DNA, 25 bp, Homo sapien
tggatcttcatttgatctcctactt

SEQ ID NO: 1485560 - DNA, 25 bp, Homo sapien
gcagctttggtgctccaatagtctg

SEQ ID NO: 1485561 - DNA, 25 bp, Homo sapien
catcttcggtgagccctgggccttg

SEQ ID NO: 1485562 - DNA, 25 bp, Homo sapien
cagcaaatgaattcagggcatatgc

SEQ ID NO: 1485563 - DNA, 25 bp, Homo sapien
tgaattcagggcatatgcagctttg

SEQ ID NO: 1485564 - DNA, 25 bp, Homo sapien
cctggatacaatgtgagcagttctt

SEQ ID NO: 1485565 - DNA, 25 bp, Homo sapien
tcctcctataaagattctcttaatg

SEQ ID NO: 1485566 - DNA, 25 bp, Homo sapien
tgggggctgtcttgttcggttcttc

SEQ ID NO: 1485567 - DNA, 25 bp, Homo sapien
atacaatgtgagcagttcttcctcc

SEQ ID NO: 1485568 - DNA, 25 bp, Homo sapien
aaagaccttgtcttagagttctgaa

SEQ ID NO: 1485569 - DNA, 25 bp, Homo sapien
aactagtgtgattctgcgggggtgt

SEQ ID NO: 1485570 - DNA, 25 bp, Homo sapien
ttctaaaagtgtgtctgaagtttcc

SEQ ID NO: 1485571 - DNA, 25 bp, Homo sapien
taaaagtgtgtctgaagtttcctga

SEQ ID NO: 1485572 - DNA, 25 bp, Homo sapien
tctgactgtcctgtacagtcccatt

SEQ ID NO: 1485573 - DNA, 25 bp, Homo sapien
tttctctgactgtcctgtacagtcc

SEQ ID NO: 1485574 - DNA, 25 bp, Homo sapien
tctctgactgtcctgtacagtccca

SEQ ID NO: 1485575 - DNA, 25 bp, Homo sapien
ttctctgactgtcctgtacagtccc

SEQ ID NO: 1485576 - DNA, 25 bp, Homo sapien
tcacacagctgtgggccaagtggta

SEQ ID NO: 1485577 - DNA, 25 bp, Homo sapien
ggacatgcattctaggatcacacag

SEQ ID NO: 1485578 - DNA, 25 bp, Homo sapien
ctcaaggacatgcattctaggatca

SEQ ID NO: 1485579 - DNA, 25 bp, Homo sapien
atcacacagctgtgggccaagtggt

SEQ ID NO: 1485580 - DNA, 25 bp, Homo sapien
atcttggatttgacagtgcatcagg

SEQ ID NO: 1485581 - DNA, 25 bp, Homo sapien
ctctccttggtatactgtagcttac

SEQ ID NO: 1485582 - DNA, 25 bp, Homo sapien
gcttacaatgggtctgtccttgcca

SEQ ID NO: 1485583 - DNA, 25 bp, Homo sapien
gatttgacagtgcatcaggatagcc

SEQ ID NO: 1485584 - DNA, 25 bp, Homo sapien
caagctgcaagacacttcataacgt

SEQ ID NO: 1485585 - DNA, 25 bp, Homo sapien
gctagactcaacactctctgcaaag

SEQ ID NO: 1485586 - DNA, 25 bp, Homo sapien
gcaaagccatacatagtccattcag

SEQ ID NO: 1485587 - DNA, 25 bp, Homo sapien
gccctcagtctgtagtagaaacgcg

SEQ ID NO: 1485588 - DNA, 25 bp, Homo sapien
atagcccaagactttgttctgagtt

SEQ ID NO: 1485589 - DNA, 25 bp, Homo sapien
tagcccaagactttgttctgagttc

SEQ ID NO: 1485590 - DNA, 25 bp, Homo sapien
aatagcccaagactttgttctgagt

SEQ ID NO: 1485591 - DNA, 25 bp, Homo sapien
acagaaaagtatttgtagcatttat

SEQ ID NO: 1485592 - DNA, 25 bp, Homo sapien
ctgagctcccttgtcttagcatctg

SEQ ID NO: 1485593 - DNA, 25 bp, Homo sapien
aatgccaagcttaggggttcatcag

SEQ ID NO: 1485594 - DNA, 25 bp, Homo sapien
aaaaatgccaagcttaggggttcat

SEQ ID NO: 1485595 - DNA, 25 bp, Homo sapien
agctcccttgtcttagcatctgaca

SEQ ID NO: 1485596 - DNA, 25 bp, Homo sapien
taaacaccttagctgggcaaagagt

SEQ ID NO: 1485597 - DNA, 25 bp, Homo sapien
tatttggcacgaacctggtagctac

SEQ ID NO: 1485598 - DNA, 25 bp, Homo sapien
tggaccacagcaataggacatcttc

SEQ ID NO: 1485599 - DNA, 25 bp, Homo sapien
taggacatcttcaggcgcaatccac

SEQ ID NO: 1485600 - DNA, 25 bp, Homo sapien
caaggggtaacgtgaaagtgaatag

SEQ ID NO: 1485601 - DNA, 25 bp, Homo sapien
tgcaaggggtaacgtgaaagtgaat

SEQ ID NO: 1485602 - DNA, 25 bp, Homo sapien
ctgcaaggggtaacgtgaaagtgaa

SEQ ID NO: 1485603 - DNA, 25 bp, Homo sapien
gcaaggggtaacgtgaaagtgaata

SEQ ID NO: 1485604 - DNA, 25 bp, Homo sapien
tgaatgctataggcctgctcatttc

SEQ ID NO: 1485605 - DNA, 25 bp, Homo sapien
gctcatttccccaccggcaagtcat

SEQ ID NO: 1485606 - DNA, 25 bp, Homo sapien
gctgaatgctataggcctgctcatt

SEQ ID NO: 1485607 - DNA, 25 bp, Homo sapien
tgctgaatgctataggcctgctcat

SEQ ID NO: 1485608 - DNA, 25 bp, Homo sapien
cctactgggtactttgggcatggac

SEQ ID NO: 1485609 - DNA, 25 bp, Homo sapien
agttcccgctgtgtgcctctgagag

SEQ ID NO: 1485610 - DNA, 25 bp, Homo sapien
caatgaagttaatggtcctactggg

SEQ ID NO: 1485611 - DNA, 25 bp, Homo sapien
cataacctcctttgatcatcgtaag

SEQ ID NO: 1485612 - DNA, 25 bp, Homo sapien
tgttagcactgtgaagactctcaag

SEQ ID NO: 1485613 - DNA, 25 bp, Homo sapien
ggcaacaatgtacaaagttccctgc

SEQ ID NO: 1485614 - DNA, 25 bp, Homo sapien
tactgtgtgactggcaaactgttag

SEQ ID NO: 1485615 - DNA, 25 bp, Homo sapien
ttccctgctgagtgctgtaactgca

SEQ ID NO: 1485616 - DNA, 25 bp, Homo sapien
tgagcacatgtctgtgggtaacttt

SEQ ID NO: 1485617 - DNA, 25 bp, Homo sapien
aaccagcagtcaccgtcaaaacgag

SEQ ID NO: 1485618 - DNA, 25 bp, Homo sapien
gtgactgctgctgacaaatggaatg

SEQ ID NO: 1485619 - DNA, 25 bp, Homo sapien
ttctgcaaaacaccctgagcacatg

SEQ ID NO: 1485620 - DNA, 25 bp, Homo sapien
tcacaggtatcgttgtctactacag

SEQ ID NO: 1485621 - DNA, 25 bp, Homo sapien
cacaggtatcgttgtctactacagc

SEQ ID NO: 1485622 - DNA, 25 bp, Homo sapien
tgctgatgatgtgaggattgcctgt

SEQ ID NO: 1485623 - DNA, 25 bp, Homo sapien
cagtgctgatgatgtgaggattgcc

SEQ ID NO: 1485624 - DNA, 25 bp, Homo sapien
gctgatgatgtgaggattgcctgtc

SEQ ID NO: 1485625 - DNA, 25 bp, Homo sapien
agtgctgatgatgtgaggattgcct

SEQ ID NO: 1485626 - DNA, 25 bp, Homo sapien
ttggatcatgaatatcatagctccc

SEQ ID NO: 1485627 - DNA, 25 bp, Homo sapien
ggatcatgaatatcatagctcccat

SEQ ID NO: 1485628 - DNA, 25 bp, Homo sapien
tggatcatgaatatcatagctccca

SEQ ID NO: 1485629 - DNA, 25 bp, Homo sapien
cttttaagttagcgtcttcacagac

SEQ ID NO: 1485630 - DNA, 25 bp, Homo sapien
ttaactgatacagtgcctgctaaat

SEQ ID NO: 1485631 - DNA, 25 bp, Homo sapien
taactgatacagtgcctgctaaata

SEQ ID NO: 1485632 - DNA, 25 bp, Homo sapien
ttccttttaagttagcgtcttcaca

SEQ ID NO: 1485633 - DNA, 25 bp, Homo sapien
ataaaacaagcatattattcatgcc

SEQ ID NO: 1485634 - DNA, 25 bp, Homo sapien
taaaacaagcatattattcatgccc

SEQ ID NO: 1485635 - DNA, 25 bp, Homo sapien
aaaacaagcatattattcatgccca

SEQ ID NO: 1485636 - DNA, 25 bp, Homo sapien
aataaaacaagcatattattcatgc

SEQ ID NO: 1485637 - DNA, 25 bp, Homo sapien
gaaagtcacaggctgaccgatgtgg

SEQ ID NO: 1485638 - DNA, 25 bp, Homo sapien
tcactggaggttatgcaatgtacag

SEQ ID NO: 1485639 - DNA, 25 bp, Homo sapien
gaaaaataggccgtaactcgagcac

SEQ ID NO: 1485640 - DNA, 25 bp, Homo sapien
cactctgacagccaacaagatgcga

SEQ ID NO: 1485641 - DNA, 25 bp, Homo sapien
caattcctatccagtaggacacgag

SEQ ID NO: 1485642 - DNA, 25 bp, Homo sapien
taggacacgagattcagagtctggg

SEQ ID NO: 1485643 - DNA, 25 bp, Homo sapien
ggccaccatcaattcctatccagta

SEQ ID NO: 1485644 - DNA, 25 bp, Homo sapien
gattcagagtctgggaacctgtgac

SEQ ID NO: 1485645 - DNA, 25 bp, Homo sapien
taaccaggcggctttcgtcaaggac

SEQ ID NO: 1485646 - DNA, 25 bp, Homo sapien
tgtcagaatcaccagacgaagccag

SEQ ID NO: 1485647 - DNA, 25 bp, Homo sapien
caccatgggcatccgctgtcagaat

SEQ ID NO: 1485648 - DNA, 25 bp, Homo sapien
aacctcacactgtctaagccatgct

SEQ ID NO: 1485649 - DNA, 25 bp, Homo sapien
tctttgcaattgtctggatctccag

SEQ ID NO: 1485650 - DNA, 25 bp, Homo sapien
ttctttgcaattgtctggatctcca

SEQ ID NO: 1485651 - DNA, 25 bp, Homo sapien
tttgcaattgtctggatctccagct

SEQ ID NO: 1485652 - DNA, 25 bp, Homo sapien
ctttgcaattgtctggatctccagc

SEQ ID NO: 1485653 - DNA, 25 bp, Homo sapien
caagattccgttgttactgtgcaga

SEQ ID NO: 1485654 - DNA, 25 bp, Homo sapien
tgcttttatgctcttccgtttgtct

SEQ ID NO: 1485655 - DNA, 25 bp, Homo sapien
gctattgacgtttcagattttgccg

SEQ ID NO: 1485656 - DNA, 25 bp, Homo sapien
gcagaacacctctagcaatctattt

SEQ ID NO: 1485657 - DNA, 25 bp, Homo sapien
atcaaaacctggtggcagattaact

SEQ ID NO: 1485658 - DNA, 25 bp, Homo sapien
cgaagaggctcgatgcaattgttac

SEQ ID NO: 1485659 - DNA, 25 bp, Homo sapien
catgtgcctggaaagcctggattct

SEQ ID NO: 1485660 - DNA, 25 bp, Homo sapien
gaagagaatacccaccagtgtgcac

SEQ ID NO: 1485661 - DNA, 25 bp, Homo sapien
tgtaaagacgccactgtaagccctg

SEQ ID NO: 1485662 - DNA, 25 bp, Homo sapien
tccaacatcgacatgttgtccttca

SEQ ID NO: 1485663 - DNA, 25 bp, Homo sapien
tatcctcagtagatagactccatgg

SEQ ID NO: 1485664 - DNA, 25 bp, Homo sapien
tctttacacgattctgtatcctcag

SEQ ID NO: 1485665 - DNA, 25 bp, Homo sapien
agtttgaaccagtgctctttacacg

SEQ ID NO: 1485666 - DNA, 25 bp, Homo sapien
gaggactctatagttccggtctcca

SEQ ID NO: 1485667 - DNA, 25 bp, Homo sapien
atagttccggtctccacaaacttag

SEQ ID NO: 1485668 - DNA, 25 bp, Homo sapien
tttccagtgctccactggaggactc

SEQ ID NO: 1485669 - DNA, 25 bp, Homo sapien
tctgatggtccaaagagccttatcc

SEQ ID NO: 1485670 - DNA, 25 bp, Homo sapien
ctgtaccagtggacacagtagaagt

SEQ ID NO: 1485671 - DNA, 25 bp, Homo sapien
accagtggacacagtagaagtctct

SEQ ID NO: 1485672 - DNA, 25 bp, Homo sapien
taccagtggacacagtagaagtctc

SEQ ID NO: 1485673 - DNA, 25 bp, Homo sapien
tgtaccagtggacacagtagaagtc

SEQ ID NO: 1485674 - DNA, 25 bp, Homo sapien
tatggttactgtctggccatttcag

SEQ ID NO: 1485675 - DNA, 25 bp, Homo sapien
aaagttatggttactgtctggccat

SEQ ID NO: 1485676 - DNA, 25 bp, Homo sapien
tactgtctggccatttcagggtttg

SEQ ID NO: 1485677 - DNA, 25 bp, Homo sapien
tgtctggccatttcagggtttgtat

SEQ ID NO: 1485678 - DNA, 25 bp, Homo sapien
tttattgtctctgatccgatggtcc

SEQ ID NO: 1485679 - DNA, 25 bp, Homo sapien
tctgatccgatggtccctgaagcag

SEQ ID NO: 1485680 - DNA, 25 bp, Homo sapien
tgatccgatggtccctgaagcagct

SEQ ID NO: 1485681 - DNA, 25 bp, Homo sapien
ctctgatccgatggtccctgaagca

SEQ ID NO: 1485682 - DNA, 25 bp, Homo sapien
gaaagtggactttgccgatcaaacc

SEQ ID NO: 1485683 - DNA, 25 bp, Homo sapien
ggttgaatcagagctgaaagtggac

SEQ ID NO: 1485684 - DNA, 25 bp, Homo sapien
gacctcagagtcaaaggttgaatca

SEQ ID NO: 1485685 - DNA, 25 bp, Homo sapien
atttctgaggtgtgaaaaacagctc

SEQ ID NO: 1485686 - DNA, 25 bp, Homo sapien
atgttactacatccaaaaagttgtt

SEQ ID NO: 1485687 - DNA, 25 bp, Homo sapien
catgttactacatccaaaaagttgt

SEQ ID NO: 1485688 - DNA, 25 bp, Homo sapien
ttctgggtatcactttcatctctca

SEQ ID NO: 1485689 - DNA, 25 bp, Homo sapien
acagctgccgtgagacatggaattg

SEQ ID NO: 1485690 - DNA, 25 bp, Homo sapien
cagtttctgggtatcactttcatct

SEQ ID NO: 1485691 - DNA, 25 bp, Homo sapien
agggtaggggtttgtactctggcag

SEQ ID NO: 1485692 - DNA, 25 bp, Homo sapien
caaggagcgggagtaacccatggca

SEQ ID NO: 1485693 - DNA, 25 bp, Homo sapien
gagcgggagtaacccatggcagcct

SEQ ID NO: 1485694 - DNA, 25 bp, Homo sapien
aaggagcgggagtaacccatggcag

SEQ ID NO: 1485695 - DNA, 25 bp, Homo sapien
aggagcgggagtaacccatggcagc

SEQ ID NO: 1485696 - DNA, 25 bp, Homo sapien
cttcgtgtcttgggccacagtggga

SEQ ID NO: 1485697 - DNA, 25 bp, Homo sapien
cacagtgggagatgtgggcttgtga

SEQ ID NO: 1485698 - DNA, 25 bp, Homo sapien
gtgggagatgtgggcttgtgagtcc

SEQ ID NO: 1485699 - DNA, 25 bp, Homo sapien
ggagatgtgggcttgtgagtcccct

SEQ ID NO: 1485700 - DNA, 25 bp, Homo sapien
gccaccatgatgctcttcccatgag

SEQ ID NO: 1485701 - DNA, 25 bp, Homo sapien
gctttcaggtacatgatagactcat

SEQ ID NO: 1485702 - DNA, 25 bp, Homo sapien
tgatagactcatgggaagtgttggt

SEQ ID NO: 1485703 - DNA, 25 bp, Homo sapien
ccacggatgttcagcactgctttca

SEQ ID NO: 1485704 - DNA, 25 bp, Homo sapien
caaaggaccaggcataaccggcata

SEQ ID NO: 1485705 - DNA, 25 bp, Homo sapien
gacagcaaaggaccaggcataaccg

SEQ ID NO: 1485706 - DNA, 25 bp, Homo sapien
agcaaaggaccaggcataaccggca

SEQ ID NO: 1485707 - DNA, 25 bp, Homo sapien
aggaccaggcataaccggcatagat

SEQ ID NO: 1485708 - DNA, 25 bp, Homo sapien
acatggtccagccagcaatagccac

SEQ ID NO: 1485709 - DNA, 25 bp, Homo sapien
cccattccaggaaagccaaaccgct

SEQ ID NO: 1485710 - DNA, 25 bp, Homo sapien
ccattccaggaaagccaaaccgctt

SEQ ID NO: 1485711 - DNA, 25 bp, Homo sapien
tgaattcagtcccatgggccatttt

SEQ ID NO: 1485712 - DNA, 25 bp, Homo sapien
gccattttggcgaatggctgtcctc

SEQ ID NO: 1485713 - DNA, 25 bp, Homo sapien
tcccatgggccattttggcgaatgg

SEQ ID NO: 1485714 - DNA, 25 bp, Homo sapien
ttggcgaatggctgtcctcgtatac

SEQ ID NO: 1485715 - DNA, 25 bp, Homo sapien
ttctgcgcagggctaggaactgcat

SEQ ID NO: 1485716 - DNA, 25 bp, Homo sapien
cagggctaggaactgcatctgtctg

SEQ ID NO: 1485717 - DNA, 25 bp, Homo sapien
taggaactgcatctgtctgacgacc

SEQ ID NO: 1485718 - DNA, 25 bp, Homo sapien
gaactgcatctgtctgacgaccaag

SEQ ID NO: 1485719 - DNA, 25 bp, Homo sapien
cagtcactccagtactgggaccctc

SEQ ID NO: 1485720 - DNA, 25 bp, Homo sapien
ctgggaccctctgtcagtttggggg

SEQ ID NO: 1485721 - DNA, 25 bp, Homo sapien
acagtcactccagtactgggaccct

SEQ ID NO: 1485722 - DNA, 25 bp, Homo sapien
agtactgggaccctctgtcagtttg

SEQ ID NO: 1485723 - DNA, 25 bp, Homo sapien
cttggtgtcaccatgtttcagctgc

SEQ ID NO: 1485724 - DNA, 25 bp, Homo sapien
tggtgtcaccatgtttcagctgccc

SEQ ID NO: 1485725 - DNA, 25 bp, Homo sapien
ttggtgtcaccatgtttcagctgcc

SEQ ID NO: 1485726 - DNA, 25 bp, Homo sapien
catggtaagcatcctgttatgtaag

SEQ ID NO: 1485727 - DNA, 25 bp, Homo sapien
cacttctatgggacacccacaaatt

SEQ ID NO: 1485728 - DNA, 25 bp, Homo sapien
cagccagttgctctcaaaatcaagg

SEQ ID NO: 1485729 - DNA, 25 bp, Homo sapien
cactccttggtgtgtttggctccat

SEQ ID NO: 1485730 - DNA, 25 bp, Homo sapien
gagacacaggcaattccagtgctgg

SEQ ID NO: 1485731 - DNA, 25 bp, Homo sapien
ctgacatcgtggtgtctgttgcccc

SEQ ID NO: 1485732 - DNA, 25 bp, Homo sapien
aaccagcccggcgaggcgttgcctg

SEQ ID NO: 1485733 - DNA, 25 bp, Homo sapien
ccggtcctgggactgcgaagaacca

SEQ ID NO: 1485734 - DNA, 25 bp, Homo sapien
ggccccagcacgacctgaacaacgt

SEQ ID NO: 1485735 - DNA, 25 bp, Homo sapien
ccccagcacgacctgaacaacgtct

SEQ ID NO: 1485736 - DNA, 25 bp, Homo sapien
cccagcacgacctgaacaacgtctg

SEQ ID NO: 1485737 - DNA, 25 bp, Homo sapien
ctcggccccagcacgacctgaacaa

SEQ ID NO: 1485738 - DNA, 25 bp, Homo sapien
ttgccaatatgtctccaaatgtgtg

SEQ ID NO: 1485739 - DNA, 25 bp, Homo sapien
gccaatatgtctccaaatgtgtgct

SEQ ID NO: 1485740 - DNA, 25 bp, Homo sapien
ttcctgtaagtcctgtttggctccc

SEQ ID NO: 1485741 - DNA, 25 bp, Homo sapien
gctccccttagtcagagttggtttc

SEQ ID NO: 1485742 - DNA, 25 bp, Homo sapien
tttgagacaaaacagtaggcacttg

SEQ ID NO: 1485743 - DNA, 25 bp, Homo sapien
ttgagacaaaacagtaggcacttgc

SEQ ID NO: 1485744 - DNA, 25 bp, Homo sapien
tgagacaaaacagtaggcacttgca

SEQ ID NO: 1485745 - DNA, 25 bp, Homo sapien
ttttgagacaaaacagtaggcactt

SEQ ID NO: 1485746 - DNA, 25 bp, Homo sapien
gtctgtgaggatctgaccaacatca

SEQ ID NO: 1485747 - DNA, 25 bp, Homo sapien
tgtctgtgaggatctgaccaacatc

SEQ ID NO: 1485748 - DNA, 25 bp, Homo sapien
ctgtgaggatctgaccaacatcagc

SEQ ID NO: 1485749 - DNA, 25 bp, Homo sapien
tctgtgaggatctgaccaacatcag

SEQ ID NO: 1485750 - DNA, 25 bp, Homo sapien
cctctgatcgccgatcacctctgag

SEQ ID NO: 1485751 - DNA, 25 bp, Homo sapien
catcgccctctgatcgccgatcacc

SEQ ID NO: 1485752 - DNA, 25 bp, Homo sapien
tcgccctctgatcgccgatcacctc

SEQ ID NO: 1485753 - DNA, 25 bp, Homo sapien
cttcatcgccctctgatcgccgatc

SEQ ID NO: 1485754 - DNA, 25 bp, Homo sapien
tgtgcccagggtagcatatcaggta

SEQ ID NO: 1485755 - DNA, 25 bp, Homo sapien
ttccctgctattggtagaatagctt

SEQ ID NO: 1485756 - DNA, 25 bp, Homo sapien
tggtagaatagcttttccaagaagg

SEQ ID NO: 1485757 - DNA, 25 bp, Homo sapien
tcaggtgtctatccctggtccgatc

SEQ ID NO: 1485758 - DNA, 25 bp, Homo sapien
gaattttccttggagggactcaaga

SEQ ID NO: 1485759 - DNA, 25 bp, Homo sapien
gatttttcgtattggagcagacctt

SEQ ID NO: 1485760 - DNA, 25 bp, Homo sapien
cttcttacttatcagggtgctcatc

SEQ ID NO: 1485761 - DNA, 25 bp, Homo sapien
catctacttcttgaggctagccagg

SEQ ID NO: 1485762 - DNA, 25 bp, Homo sapien
cgtgcccccgattttgcctgcccca

SEQ ID NO: 1485763 - DNA, 25 bp, Homo sapien
caagcgtgcccccgattttgcctgc

SEQ ID NO: 1485764 - DNA, 25 bp, Homo sapien
gcctgccccagccaattcggagtca

SEQ ID NO: 1485765 - DNA, 25 bp, Homo sapien
cctgccccagccaattcggagtcaa

SEQ ID NO: 1485766 - DNA, 25 bp, Homo sapien
gcagacctagtgcatggctccacac

SEQ ID NO: 1485767 - DNA, 25 bp, Homo sapien
cagacctagtgcatggctccacact

SEQ ID NO: 1485768 - DNA, 25 bp, Homo sapien
agctgaacaccaaactgcggacttc

SEQ ID NO: 1485769 - DNA, 25 bp, Homo sapien
gacttcgggagtaagtgaactgact

SEQ ID NO: 1485770 - DNA, 25 bp, Homo sapien
caccaaactgcggacttcgggagta

SEQ ID NO: 1485771 - DNA, 25 bp, Homo sapien
tgaacaccaaactgcggacttcggg

SEQ ID NO: 1485772 - DNA, 25 bp, Homo sapien
actgttacaggttccagcaggctaa

SEQ ID NO: 1485773 - DNA, 25 bp, Homo sapien
taactgttacaggttccagcaggct

SEQ ID NO: 1485774 - DNA, 25 bp, Homo sapien
cagtaactgttacaggttccagcag

SEQ ID NO: 1485775 - DNA, 25 bp, Homo sapien
tacagtaactgttacaggttccagc

SEQ ID NO: 1485776 - DNA, 25 bp, Homo sapien
gggattggcaccgaggctccccaac

SEQ ID NO: 1485777 - DNA, 25 bp, Homo sapien
cgagggattggcaccgaggctcccc

SEQ ID NO: 1485778 - DNA, 25 bp, Homo sapien
gattggcaccgaggctccccaacag

SEQ ID NO: 1485779 - DNA, 25 bp, Homo sapien
accgaggctccccaacaggaactga

SEQ ID NO: 1485780 - DNA, 25 bp, Homo sapien
ggatagggtctctagatagaaaagc

SEQ ID NO: 1485781 - DNA, 25 bp, Homo sapien
aaggatagggtctctagatagaaaa

SEQ ID NO: 1485782 - DNA, 25 bp, Homo sapien
aaaggatagggtctctagatagaaa

SEQ ID NO: 1485783 - DNA, 25 bp, Homo sapien
gaaaggatagggtctctagatagaa

SEQ ID NO: 1485784 - DNA, 25 bp, Homo sapien
cctaaccatatcagtaggcatgtgt

SEQ ID NO: 1485785 - DNA, 25 bp, Homo sapien
aaggcagcatgaagaagtgccgagc

SEQ ID NO: 1485786 - DNA, 25 bp, Homo sapien
gagaagcaagccagcttcttcgcaa

SEQ ID NO: 1485787 - DNA, 25 bp, Homo sapien
tcttcgcaaggcagcatgaagaagt

SEQ ID NO: 1485788 - DNA, 25 bp, Homo sapien
attcatatggatcagctagaaaaaa

SEQ ID NO: 1485789 - DNA, 25 bp, Homo sapien
tataacattgtatatctattacata

SEQ ID NO: 1485790 - DNA, 25 bp, Homo sapien
atcttagaaaccacctcagctttct

SEQ ID NO: 1485791 - DNA, 25 bp, Homo sapien
ttctccatcttagaaaccacctcag

SEQ ID NO: 1485792 - DNA, 25 bp, Homo sapien
tcttagaaaccacctcagctttctc

SEQ ID NO: 1485793 - DNA, 25 bp, Homo sapien
cttattctccatcttagaaaccacc

SEQ ID NO: 1485794 - DNA, 25 bp, Homo sapien
gaatgttgaaaactcagagagaaga

SEQ ID NO: 1485795 - DNA, 25 bp, Homo sapien
agcaactctcacagatagggatcca

SEQ ID NO: 1485796 - DNA, 25 bp, Homo sapien
agagcaactctcacagatagggatc

SEQ ID NO: 1485797 - DNA, 25 bp, Homo sapien
agataatgggagaatgttgaaaact

SEQ ID NO: 1485798 - DNA, 25 bp, Homo sapien
caaagcccaacacccccaagtgtgc

SEQ ID NO: 1485799 - DNA, 25 bp, Homo sapien
ccaaagcccaacacccccaagtgtg

SEQ ID NO: 1485800 - DNA, 25 bp, Homo sapien
gaaaggccgttgtgaggaatgagct

SEQ ID NO: 1485801 - DNA, 25 bp, Homo sapien
gttctgcgcctgaagaggctgccaa

SEQ ID NO: 1485802 - DNA, 25 bp, Homo sapien
aggccgactggagatcaagttctgc

SEQ ID NO: 1485803 - DNA, 25 bp, Homo sapien
aaaggccgttgtgaggaatgagctg

SEQ ID NO: 1485804 - DNA, 25 bp, Homo sapien
tggagaggccgccgagaggacagag

SEQ ID NO: 1485805 - DNA, 25 bp, Homo sapien
ctggagaggccgccgagaggacaga

SEQ ID NO: 1485806 - DNA, 25 bp, Homo sapien
ggaggccaacttgctgctcttccag

SEQ ID NO: 1485807 - DNA, 25 bp, Homo sapien
cggggaggccaacttgctgctcttc

SEQ ID NO: 1485808 - DNA, 25 bp, Homo sapien
gcccggggaggccaacttgctgctc

SEQ ID NO: 1485809 - DNA, 25 bp, Homo sapien
aggccaacttgctgctcttccaggc

SEQ ID NO: 1485810 - DNA, 25 bp, Homo sapien
tgcagatgccatcggagggcaggag

SEQ ID NO: 1485811 - DNA, 25 bp, Homo sapien
ctgcagatgccatcggagggcagga

SEQ ID NO: 1485812 - DNA, 25 bp, Homo sapien
ctgagcctggagaggccaccgtgag

SEQ ID NO: 1485813 - DNA, 25 bp, Homo sapien
agcctggagaggccaccgtgaggcc

SEQ ID NO: 1485814 - DNA, 25 bp, Homo sapien
ctggagaggccaccgtgaggcctga

SEQ ID NO: 1485815 - DNA, 25 bp, Homo sapien
tggagaggccaccgtgaggcctgag

SEQ ID NO: 1485816 - DNA, 25 bp, Homo sapien
aagacgttgttgggacctggagtcg

SEQ ID NO: 1485817 - DNA, 25 bp, Homo sapien
tgggcctgcagcagtcgctgggatg

SEQ ID NO: 1485818 - DNA, 25 bp, Homo sapien
gatggaggcccaagcagtggcatgc

SEQ ID NO: 1485819 - DNA, 25 bp, Homo sapien
ctgcagcagtcgctgggatggaggc

SEQ ID NO: 1485820 - DNA, 25 bp, Homo sapien
ggcccaagcagtggcatgcagcagt

SEQ ID NO: 1485821 - DNA, 25 bp, Homo sapien
ggagatgccatcggagggcagcagc

SEQ ID NO: 1485822 - DNA, 25 bp, Homo sapien
agatgccatcggagggcagcagctc

SEQ ID NO: 1485823 - DNA, 25 bp, Homo sapien
tgccatcggagggcagcagctcatc

SEQ ID NO: 1485824 - DNA, 25 bp, Homo sapien
ctggagatgccatcggagggcagca

SEQ ID NO: 1485825 - DNA, 25 bp, Homo sapien
gtcgggcctggaaacgcaaccagga

SEQ ID NO: 1485826 - DNA, 25 bp, Homo sapien
gcaggagtcgggcctggaaacgcaa

SEQ ID NO: 1485827 - DNA, 25 bp, Homo sapien
agtcgggcctggaaacgcaaccagg

SEQ ID NO: 1485828 - DNA, 25 bp, Homo sapien
ggagtcgggcctggaaacgcaacca

SEQ ID NO: 1485829 - DNA, 25 bp, Homo sapien
ctgaagaggccactggcaggcggga

SEQ ID NO: 1485830 - DNA, 25 bp, Homo sapien
agaggccactggcaggcgggagctg

SEQ ID NO: 1485831 - DNA, 25 bp, Homo sapien
gaagaggccactggcaggcgggagc

SEQ ID NO: 1485832 - DNA, 25 bp, Homo sapien
aggccactggcaggcgggagctggg

SEQ ID NO: 1485833 - DNA, 25 bp, Homo sapien
gagaggcaggaactttggactcggg

SEQ ID NO: 1485834 - DNA, 25 bp, Homo sapien
gaagcggccgagaggcaggaacttt

SEQ ID NO: 1485835 - DNA, 25 bp, Homo sapien
gaggcaggaactttggactcgggag

SEQ ID NO: 1485836 - DNA, 25 bp, Homo sapien
gccgagaggcaggaactttggactc

SEQ ID NO: 1485837 - DNA, 25 bp, Homo sapien
cgacagtagacagaagttgggcaaa

SEQ ID NO: 1485838 - DNA, 25 bp, Homo sapien
ggctggcctgtagagtccgacagta

SEQ ID NO: 1485839 - DNA, 25 bp, Homo sapien
tgtagagtccgacagtagacagaag

SEQ ID NO: 1485840 - DNA, 25 bp, Homo sapien
gagtccgacagtagacagaagttgg

SEQ ID NO: 1485841 - DNA, 25 bp, Homo sapien
actaggcctggaaatggcctgacag

SEQ ID NO: 1485842 - DNA, 25 bp, Homo sapien
tttgggcttcaagagtcagccacga

SEQ ID NO: 1485843 - DNA, 25 bp, Homo sapien
cacgaggcaggcactaggcctggaa

SEQ ID NO: 1485844 - DNA, 25 bp, Homo sapien
gcttcaagagtcagccacgaggcag

SEQ ID NO: 1485845 - DNA, 25 bp, Homo sapien
tgggcctggagagtttgacttgagg

SEQ ID NO: 1485846 - DNA, 25 bp, Homo sapien
ggcctggagagtttgacttgaggaa

SEQ ID NO: 1485847 - DNA, 25 bp, Homo sapien
tgacttgaggaagttttgggcctac

SEQ ID NO: 1485848 - DNA, 25 bp, Homo sapien
ggtgggcctggagagtttgacttga

SEQ ID NO: 1485849 - DNA, 25 bp, Homo sapien
actgggccaaaaaaggctgttgtga

SEQ ID NO: 1485850 - DNA, 25 bp, Homo sapien
aactgggccaaaaaaggctgttgtg

SEQ ID NO: 1485851 - DNA, 25 bp, Homo sapien
agcttggcctaaagaagccactggg

SEQ ID NO: 1485852 - DNA, 25 bp, Homo sapien
tggaaaggcccttgtgaagcatgag

SEQ ID NO: 1485853 - DNA, 25 bp, Homo sapien
gaggttgggcctctagacgctgaca

SEQ ID NO: 1485854 - DNA, 25 bp, Homo sapien
ggcctctagacgctgacaggaggca

SEQ ID NO: 1485855 - DNA, 25 bp, Homo sapien
gtagggtatgggcctaaataggcca

SEQ ID NO: 1485856 - DNA, 25 bp, Homo sapien
agggtatgggcctaaataggccatt

SEQ ID NO: 1485857 - DNA, 25 bp, Homo sapien
tagggtatgggcctaaataggccat

SEQ ID NO: 1485858 - DNA, 25 bp, Homo sapien
gggtatgggcctaaataggccattg

SEQ ID NO: 1485859 - DNA, 25 bp, Homo sapien
gagcttggtctgtagaggctgactg

SEQ ID NO: 1485860 - DNA, 25 bp, Homo sapien
ctggagaggctgccaggaggtagga

SEQ ID NO: 1485861 - DNA, 25 bp, Homo sapien
tggagaggctgccaggaggtaggag

SEQ ID NO: 1485862 - DNA, 25 bp, Homo sapien
tctgtagaggctgactggagaaagt

SEQ ID NO: 1485863 - DNA, 25 bp, Homo sapien
ttttcctgcaactggatggtcccac

SEQ ID NO: 1485864 - DNA, 25 bp, Homo sapien
gaatcagtgggcgtgttaagcttgt

SEQ ID NO: 1485865 - DNA, 25 bp, Homo sapien
tagaatcagtgggcgtgttaagctt

SEQ ID NO: 1485866 - DNA, 25 bp, Homo sapien
tgtagaatcagtgggcgtgttaagc

SEQ ID NO: 1485867 - DNA, 25 bp, Homo sapien
ccatttcccactggcaaagagctca

SEQ ID NO: 1485868 - DNA, 25 bp, Homo sapien
cttgagtcactgtgaggtcacctac

SEQ ID NO: 1485869 - DNA, 25 bp, Homo sapien
tcactgtgaggtcacctactggaaa

SEQ ID NO: 1485870 - DNA, 25 bp, Homo sapien
gagtcactgtgaggtcacctactgg

SEQ ID NO: 1485871 - DNA, 25 bp, Homo sapien
agagtccaatcaggaagcataaacc

SEQ ID NO: 1485872 - DNA, 25 bp, Homo sapien
acatattagtcagagtccaatcagg

SEQ ID NO: 1485873 - DNA, 25 bp, Homo sapien
tagtcagagtccaatcaggaagcat

SEQ ID NO: 1485874 - DNA, 25 bp, Homo sapien
tattagtcagagtccaatcaggaag

SEQ ID NO: 1485875 - DNA, 25 bp, Homo sapien
cacccctctggaatccacgtataca

SEQ ID NO: 1485876 - DNA, 25 bp, Homo sapien
cctctggaatccacgtatacaaaaa

SEQ ID NO: 1485877 - DNA, 25 bp, Homo sapien
tctggaatccacgtatacaaaaatt

SEQ ID NO: 1485878 - DNA, 25 bp, Homo sapien
cccctctggaatccacgtatacaaa

SEQ ID NO: 1485879 - DNA, 25 bp, Homo sapien
gcacatgcctcgaggatgggaggca

SEQ ID NO: 1485880 - DNA, 25 bp, Homo sapien
tggcacatgcctcgaggatgggagg

SEQ ID NO: 1485881 - DNA, 25 bp, Homo sapien
ggcacatgcctcgaggatgggaggc

SEQ ID NO: 1485882 - DNA, 25 bp, Homo sapien
gctcaggtaggaggatccttagccc

SEQ ID NO: 1485883 - DNA, 25 bp, Homo sapien
tgtgatagcactactgtactcaagc

SEQ ID NO: 1485884 - DNA, 25 bp, Homo sapien
tcaggtaggaggatccttagcccag

SEQ ID NO: 1485885 - DNA, 25 bp, Homo sapien
aggctcaggtaggaggatccttagc

SEQ ID NO: 1485886 - DNA, 25 bp, Homo sapien
atttgtattgtgagacaggtcctgc

SEQ ID NO: 1485887 - DNA, 25 bp, Homo sapien
cgcgcccaccccgattaatatatgt

SEQ ID NO: 1485888 - DNA, 25 bp, Homo sapien
ttaatcaggcaacaacaccgggcag

SEQ ID NO: 1485889 - DNA, 25 bp, Homo sapien
aaggctctgacttgagatattattt

SEQ ID NO: 1485890 - DNA, 25 bp, Homo sapien
gctggtagtacagttgagtgtcacc

SEQ ID NO: 1485891 - DNA, 25 bp, Homo sapien
ggtagtacagttgagtgtcaccatg

SEQ ID NO: 1485892 - DNA, 25 bp, Homo sapien
gtagtacagttgagtgtcaccatgc

SEQ ID NO: 1485893 - DNA, 25 bp, Homo sapien
ctggtagtacagttgagtgtcacca

SEQ ID NO: 1485894 - DNA, 25 bp, Homo sapien
cccattgcacttgatgcatgcacta

SEQ ID NO: 1485895 - DNA, 25 bp, Homo sapien
catttttaagttacagtccaaatct

SEQ ID NO: 1485896 - DNA, 25 bp, Homo sapien
gcatgcactattatttgatcatttt

SEQ ID NO: 1485897 - DNA, 25 bp, Homo sapien
caaatctttttgttcctgaataaca

SEQ ID NO: 1485898 - DNA, 25 bp, Homo sapien
tcaaatgcattcgaaaggatccatc

SEQ ID NO: 1485899 - DNA, 25 bp, Homo sapien
gcttgagtcattgtgcggtcacttc

SEQ ID NO: 1485900 - DNA, 25 bp, Homo sapien
ctgctcaaatgcattcgaaaggatc

SEQ ID NO: 1485901 - DNA, 25 bp, Homo sapien
gctcaaatgcattcgaaaggatcca

SEQ ID NO: 1485902 - DNA, 25 bp, Homo sapien
tcaccagcatcccatatcccattag

SEQ ID NO: 1485903 - DNA, 25 bp, Homo sapien
ggaaatcaccagcatcccatatccc

SEQ ID NO: 1485904 - DNA, 25 bp, Homo sapien
aaatcaccagcatcccatatcccat

SEQ ID NO: 1485905 - DNA, 25 bp, Homo sapien
ctggaaatcaccagcatcccatatc

SEQ ID NO: 1485906 - DNA, 25 bp, Homo sapien
gcagtgagcagaggttgtgccactg

SEQ ID NO: 1485907 - DNA, 25 bp, Homo sapien
ctgcagtgagcagaggttgtgccac

SEQ ID NO: 1485908 - DNA, 25 bp, Homo sapien
agtgagcagaggttgtgccactgta

SEQ ID NO: 1485909 - DNA, 25 bp, Homo sapien
gctgcagtgagcagaggttgtgcca

SEQ ID NO: 1485910 - DNA, 25 bp, Homo sapien
ccattgagccatctgctctccctgg

SEQ ID NO: 1485911 - DNA, 25 bp, Homo sapien
tccctggtgccttctctacagcagc

SEQ ID NO: 1485912 - DNA, 25 bp, Homo sapien
tgccttctctacagcagcctgagcc

SEQ ID NO: 1485913 - DNA, 25 bp, Homo sapien
cattgagccatctgctctccctggt

SEQ ID NO: 1485914 - DNA, 25 bp, Homo sapien
taatgagccatgataggaccactga

SEQ ID NO: 1485915 - DNA, 25 bp, Homo sapien
gctataatgagccatgataggacca

SEQ ID NO: 1485916 - DNA, 25 bp, Homo sapien
tgggaaggctgacatggtaggattg

SEQ ID NO: 1485917 - DNA, 25 bp, Homo sapien
tgaggctataatgagccatgatagg

SEQ ID NO: 1485918 - DNA, 25 bp, Homo sapien
agaaaaataaggtagccagatgcgc

SEQ ID NO: 1485919 - DNA, 25 bp, Homo sapien
gtaatagaaaaataaggtagccaga

SEQ ID NO: 1485920 - DNA, 25 bp, Homo sapien
aatagaaaaataaggtagccagatg

SEQ ID NO: 1485921 - DNA, 25 bp, Homo sapien
cagtaatagaaaaataaggtagcca

SEQ ID NO: 1485922 - DNA, 25 bp, Homo sapien
cagaagtctttcatggtaggtccag

SEQ ID NO: 1485923 - DNA, 25 bp, Homo sapien
tttctcttcctggattcagaagtct

SEQ ID NO: 1485924 - DNA, 25 bp, Homo sapien
gtcagtttctcttcctggattcaga

SEQ ID NO: 1485925 - DNA, 25 bp, Homo sapien
tcagaagtctttcatggtaggtcca

SEQ ID NO: 1485926 - DNA, 25 bp, Homo sapien
aagtatgtgtgctactgaggcaagc

SEQ ID NO: 1485927 - DNA, 25 bp, Homo sapien
caacttaagtatgtgtgctactgag

SEQ ID NO: 1485928 - DNA, 25 bp, Homo sapien
cttaagtatgtgtgctactgaggca

SEQ ID NO: 1485929 - DNA, 25 bp, Homo sapien
taagtatgtgtgctactgaggcaag

SEQ ID NO: 1485930 - DNA, 25 bp, Homo sapien
ggacagtacttgttctcaagggaat

SEQ ID NO: 1485931 - DNA, 25 bp, Homo sapien
ttccattagtagaaagccttcctga

SEQ ID NO: 1485932 - DNA, 25 bp, Homo sapien
gaccagcaaggttgcgccattgccc

SEQ ID NO: 1485933 - DNA, 25 bp, Homo sapien
tcgaaagtaacatcctctcaaggcc

SEQ ID NO: 1485934 - DNA, 25 bp, Homo sapien
gttgcagtgaccagcaaggttgcgc

SEQ ID NO: 1485935 - DNA, 25 bp, Homo sapien
gactggaaaaaagggtatgggatca

SEQ ID NO: 1485936 - DNA, 25 bp, Homo sapien
aaaagggtatgggatcatcaccgga

SEQ ID NO: 1485937 - DNA, 25 bp, Homo sapien
aagggtatgggatcatcaccggacc

SEQ ID NO: 1485938 - DNA, 25 bp, Homo sapien
aaaaaagggtatgggatcatcaccg

SEQ ID NO: 1485939 - DNA, 25 bp, Homo sapien
tcttcacctgttgaattcataagtt

SEQ ID NO: 1485940 - DNA, 25 bp, Homo sapien
acaaagctgatttatcaagttgtaa

SEQ ID NO: 1485941 - DNA, 25 bp, Homo sapien
tcacaaagctgatttatcaagttgt

SEQ ID NO: 1485942 - DNA, 25 bp, Homo sapien
cacctgttgaattcataagttcatg

SEQ ID NO: 1485943 - DNA, 25 bp, Homo sapien
cgtgtaaggatggcatgactcgccg

SEQ ID NO: 1485944 - DNA, 25 bp, Homo sapien
gtaaggatggcatgactcgccggca

SEQ ID NO: 1485945 - DNA, 25 bp, Homo sapien
gatggcatgactcgccggcagccct

SEQ ID NO: 1485946 - DNA, 25 bp, Homo sapien
caaggagaaacgtgtaaggatggca

SEQ ID NO: 1485947 - DNA, 25 bp, Homo sapien
ttacatagatcagcgatacgattat

SEQ ID NO: 1485948 - DNA, 25 bp, Homo sapien
atagatcagcgatacgattattcca

SEQ ID NO: 1485949 - DNA, 25 bp, Homo sapien
tgtttacatagatcagcgatacgat

SEQ ID NO: 1485950 - DNA, 25 bp, Homo sapien
acatagatcagcgatacgattattc

SEQ ID NO: 1485951 - DNA, 25 bp, Homo sapien
aatacaaaacagcagggcatggtgg

SEQ ID NO: 1485952 - DNA, 25 bp, Homo sapien
cgggcgcctgcagtcccagctactc

SEQ ID NO: 1485953 - DNA, 25 bp, Homo sapien
aacccaggaggcagacattgcagcg

SEQ ID NO: 1485954 - DNA, 25 bp, Homo sapien
aggaggcagacattgcagcgagcca

SEQ ID NO: 1485955 - DNA, 25 bp, Homo sapien
cacctctaccgccaggaaacggatt

SEQ ID NO: 1485956 - DNA, 25 bp, Homo sapien
ctgaggagtgcaggccacctctacc

SEQ ID NO: 1485957 - DNA, 25 bp, Homo sapien
ggaaactccagtcattcgagacggg

SEQ ID NO: 1485958 - DNA, 25 bp, Homo sapien
ttcgagacgggcagcacaagctgag

SEQ ID NO: 1485959 - DNA, 25 bp, Homo sapien
tgccatgttactctgatcgcctcca

SEQ ID NO: 1485960 - DNA, 25 bp, Homo sapien
catgttactctgatcgcctccaggt

SEQ ID NO: 1485961 - DNA, 25 bp, Homo sapien
ctctgatcgcctccaggtgagcctg

SEQ ID NO: 1485962 - DNA, 25 bp, Homo sapien
tgttactctgatcgcctccaggtga

SEQ ID NO: 1485963 - DNA, 25 bp, Homo sapien
gaggtaaccagtaggcattcccaga

SEQ ID NO: 1485964 - DNA, 25 bp, Homo sapien
cattcccagatacagtgaaggtcct

SEQ ID NO: 1485965 - DNA, 25 bp, Homo sapien
cgaggtaaccagtaggcattcccag

SEQ ID NO: 1485966 - DNA, 25 bp, Homo sapien
agtgaaggtcctcacaccaagatat

SEQ ID NO: 1485967 - DNA, 25 bp, Homo sapien
caggagcgtggcccctgtccacaga

SEQ ID NO: 1485968 - DNA, 25 bp, Homo sapien
ggagcgtggcccctgtccacagatg

SEQ ID NO: 1485969 - DNA, 25 bp, Homo sapien
aactttggaagcccaggagcgtggc

SEQ ID NO: 1485970 - DNA, 25 bp, Homo sapien
ttggaagcccaggagcgtggcccct

SEQ ID NO: 1485971 - DNA, 25 bp, Homo sapien
attttccgttccccagcattggcgg

SEQ ID NO: 1485972 - DNA, 25 bp, Homo sapien
ctcattttccgttccccagcattgg

SEQ ID NO: 1485973 - DNA, 25 bp, Homo sapien
ctccctcattttccgttccccagca

SEQ ID NO: 1485974 - DNA, 25 bp, Homo sapien
cagagttgaactccctcattttccg

SEQ ID NO: 1485975 - DNA, 25 bp, Homo sapien
ttagaaggtggggaataatcatcat

SEQ ID NO: 1485976 - DNA, 25 bp, Homo sapien
tcttagaaggtggggaataatcatc

SEQ ID NO: 1485977 - DNA, 25 bp, Homo sapien
ctttgtctcttagaaggtggggaat

SEQ ID NO: 1485978 - DNA, 25 bp, Homo sapien
ttgtctcttagaaggtggggaataa

SEQ ID NO: 1485979 - DNA, 25 bp, Homo sapien
tatgttcatcaagggaaaccttaag

SEQ ID NO: 1485980 - DNA, 25 bp, Homo sapien
accagcgcctttgcttgttgccttt

SEQ ID NO: 1485981 - DNA, 25 bp, Homo sapien
ctatgttcatcaagggaaaccttaa

SEQ ID NO: 1485982 - DNA, 25 bp, Homo sapien
agaaggcgactggacaccagcgcct

SEQ ID NO: 1485983 - DNA, 25 bp, Homo sapien
ttctatttttgaccaacataaacac

SEQ ID NO: 1485984 - DNA, 25 bp, Homo sapien
acccgcgcctctgacgtcgccaaag

SEQ ID NO: 1485985 - DNA, 25 bp, Homo sapien
ctctgacgtcgccaaaggcccaccg

SEQ ID NO: 1485986 - DNA, 25 bp, Homo sapien
tagcgccccagtgacgtaggcgaac

SEQ ID NO: 1485987 - DNA, 25 bp, Homo sapien
agtccccactctgacgagaagaccg

SEQ ID NO: 1485988 - DNA, 25 bp, Homo sapien
ccgggagcctgacccgtgagtccta

SEQ ID NO: 1485989 - DNA, 25 bp, Homo sapien
tcgggacgttgtctccccagtggct

SEQ ID NO: 1485990 - DNA, 25 bp, Homo sapien
cagtggctctgcggtgacctctctg

SEQ ID NO: 1485991 - DNA, 25 bp, Homo sapien
ttggagagcctgttgtcccgggagc

SEQ ID NO: 1485992 - DNA, 25 bp, Homo sapien
caaatggattgaccctgttttaaca

SEQ ID NO: 1485993 - DNA, 25 bp, Homo sapien
taattgaaccaaactgtgtaaacac

SEQ ID NO: 1485994 - DNA, 25 bp, Homo sapien
gatacaccccaattatagtgttctg

SEQ ID NO: 1485995 - DNA, 25 bp, Homo sapien
tccatgtggatataatcagtaccca

SEQ ID NO: 1485996 - DNA, 25 bp, Homo sapien
gtgcatcaagtggttatctaaatag

SEQ ID NO: 1485997 - DNA, 25 bp, Homo sapien
gattccaagattgtagctgaccaag

SEQ ID NO: 1485998 - DNA, 25 bp, Homo sapien
gcgacactgccacaatctgcttttt

SEQ ID NO: 1485999 - DNA, 25 bp, Homo sapien
ggaaagggtgtaatcattaaattca

SEQ ID NO: 1486000 - DNA, 25 bp, Homo sapien
aggtaatgatttttcaacaatcaag

SEQ ID NO: 1486001 - DNA, 25 bp, Homo sapien
caacactatgctgcttccaatattc

SEQ ID NO: 1486002 - DNA, 25 bp, Homo sapien
caggtaatgatttttcaacaatcaa

SEQ ID NO: 1486003 - DNA, 25 bp, Homo sapien
tcaacactatgctgcttccaatatt

SEQ ID NO: 1486004 - DNA, 25 bp, Homo sapien
tcattcttgtactgtaacatcttcc

SEQ ID NO: 1486005 - DNA, 25 bp, Homo sapien
acatcttcctcttccccatcggggt

SEQ ID NO: 1486006 - DNA, 25 bp, Homo sapien
tcttcctcttccccatcggggttga

SEQ ID NO: 1486007 - DNA, 25 bp, Homo sapien
cattcttgtactgtaacatcttcct

SEQ ID NO: 1486008 - DNA, 25 bp, Homo sapien
cagcaggatgaagagccctagcttc

SEQ ID NO: 1486009 - DNA, 25 bp, Homo sapien
gcattctcaaattcagctgcggctg

SEQ ID NO: 1486010 - DNA, 25 bp, Homo sapien
agcaggatgaagagccctagcttct

SEQ ID NO: 1486011 - DNA, 25 bp, Homo sapien
cattctcaaattcagctgcggctga

SEQ ID NO: 1486012 - DNA, 25 bp, Homo sapien
tggagatggcaacatagcactggga

SEQ ID NO: 1486013 - DNA, 25 bp, Homo sapien
ttcacagggctggacttctgtttcg

SEQ ID NO: 1486014 - DNA, 25 bp, Homo sapien
tccatcaggatcaatcatagcattg

SEQ ID NO: 1486015 - DNA, 25 bp, Homo sapien
tttcggtggagatggcaacatagca

SEQ ID NO: 1486016 - DNA, 25 bp, Homo sapien
tgcagctgcttttctactcttttca

SEQ ID NO: 1486017 - DNA, 25 bp, Homo sapien
cagctgcttttctactcttttcagt

SEQ ID NO: 1486018 - DNA, 25 bp, Homo sapien
gctgcttttctactcttttcagttc

SEQ ID NO: 1486019 - DNA, 25 bp, Homo sapien
cttgcagctgcttttctactctttt

SEQ ID NO: 1486020 - DNA, 25 bp, Homo sapien
cttcactttcggctcttaatttgct

SEQ ID NO: 1486021 - DNA, 25 bp, Homo sapien
tcccaattccgatctttgtctttaa

SEQ ID NO: 1486022 - DNA, 25 bp, Homo sapien
tttgctttctatgtcatcccaattc

SEQ ID NO: 1486023 - DNA, 25 bp, Homo sapien
gaggttttcacaatagggacttcac

SEQ ID NO: 1486024 - DNA, 25 bp, Homo sapien
tgtcaggcatccagtgggtatcttg

SEQ ID NO: 1486025 - DNA, 25 bp, Homo sapien
catgtatcacctgggtataaggaga

SEQ ID NO: 1486026 - DNA, 25 bp, Homo sapien
taagcaccttatcgatcaagaaaag

SEQ ID NO: 1486027 - DNA, 25 bp, Homo sapien
cctattaggaattaggatgctaccc

SEQ ID NO: 1486028 - DNA, 25 bp, Homo sapien
ggactcatttataagccctatcagg

SEQ ID NO: 1486029 - DNA, 25 bp, Homo sapien
ttttaatctcgctttgtggctcagg

SEQ ID NO: 1486030 - DNA, 25 bp, Homo sapien
gagaaagtctggtacaccttcaaga

SEQ ID NO: 1486031 - DNA, 25 bp, Homo sapien
tagaaaaatgggacaagacggtgca

SEQ ID NO: 1486032 - DNA, 25 bp, Homo sapien
taattataggaatcagaaataagca

SEQ ID NO: 1486033 - DNA, 25 bp, Homo sapien
ggatagatatttactttgggacaaa

SEQ ID NO: 1486034 - DNA, 25 bp, Homo sapien
gcaaaaagcaaagtgaggtgatatt

SEQ ID NO: 1486035 - DNA, 25 bp, Homo sapien
gcaatagcagcatggatttctgaag

SEQ ID NO: 1486036 - DNA, 25 bp, Homo sapien
gaaagacggatgacagcagcagatt

SEQ ID NO: 1486037 - DNA, 25 bp, Homo sapien
tagattgtcttatcttcttagagaa

SEQ ID NO: 1486038 - DNA, 25 bp, Homo sapien
actgaaagacggatgacagcagcag

SEQ ID NO: 1486039 - DNA, 25 bp, Homo sapien
ccagctgtcttatctatagattgtc

SEQ ID NO: 1486040 - DNA, 25 bp, Homo sapien
taattgttaagtgatcgggaggctc

SEQ ID NO: 1486041 - DNA, 25 bp, Homo sapien
tgctccaggttctccgccttgtaat

SEQ ID NO: 1486042 - DNA, 25 bp, Homo sapien
gttgaggctttcatcaaaaacacga

SEQ ID NO: 1486043 - DNA, 25 bp, Homo sapien
tcttggatcaccagatcgaccgttg

SEQ ID NO: 1486044 - DNA, 25 bp, Homo sapien
tataagcacttcaaatgtatttcct

SEQ ID NO: 1486045 - DNA, 25 bp, Homo sapien
tcaagtagtaacagaggcacaacat

SEQ ID NO: 1486046 - DNA, 25 bp, Homo sapien
cgagattcatctacacaggttttat

SEQ ID NO: 1486047 - DNA, 25 bp, Homo sapien
agcaaacctttatgagaacacagta

SEQ ID NO: 1486048 - DNA, 25 bp, Homo sapien
tcgggtttactgaagagggactcaa

SEQ ID NO: 1486049 - DNA, 25 bp, Homo sapien
ggactcaacctagtacaatattctg

SEQ ID NO: 1486050 - DNA, 25 bp, Homo sapien
tgccatctatagtgcaaatcacaga

SEQ ID NO: 1486051 - DNA, 25 bp, Homo sapien
aagtaattttactgggtctgagtga

SEQ ID NO: 1486052 - DNA, 25 bp, Homo sapien
tatgcatttctccatgaagatctcc

SEQ ID NO: 1486053 - DNA, 25 bp, Homo sapien
gcatttctccatgaagatctcctac

SEQ ID NO: 1486054 - DNA, 25 bp, Homo sapien
tgcatttctccatgaagatctccta

SEQ ID NO: 1486055 - DNA, 25 bp, Homo sapien
cttatgcatttctccatgaagatct

SEQ ID NO: 1486056 - DNA, 25 bp, Homo sapien
tctctagtgtctatggcagagccag

SEQ ID NO: 1486057 - DNA, 25 bp, Homo sapien
ctcttctctagtgtctatggcagag

SEQ ID NO: 1486058 - DNA, 25 bp, Homo sapien
tcttctctagtgtctatggcagagc

SEQ ID NO: 1486059 - DNA, 25 bp, Homo sapien
ttctctagtgtctatggcagagcca

SEQ ID NO: 1486060 - DNA, 25 bp, Homo sapien
gaatctatctctcctgctacatcgt

SEQ ID NO: 1486061 - DNA, 25 bp, Homo sapien
cctgctacatcgttgatctcccgag

SEQ ID NO: 1486062 - DNA, 25 bp, Homo sapien
acatcgttgatctcccgagcaatga

SEQ ID NO: 1486063 - DNA, 25 bp, Homo sapien
taggggcagtgcctgatgaagtcac

SEQ ID NO: 1486064 - DNA, 25 bp, Homo sapien
tgaggcttaaggaacgaaaccatcc

SEQ ID NO: 1486065 - DNA, 25 bp, Homo sapien
cccctaacatgaaagtgcacagaga

SEQ ID NO: 1486066 - DNA, 25 bp, Homo sapien
tagctaagataattgattaagatgg

SEQ ID NO: 1486067 - DNA, 25 bp, Homo sapien
gatatggacaaggtctgagtggtct

SEQ ID NO: 1486068 - DNA, 25 bp, Homo sapien
ggaagagtcaatcaacgtggcagac

SEQ ID NO: 1486069 - DNA, 25 bp, Homo sapien
tagaagtgaagcctgaatatgggac

SEQ ID NO: 1486070 - DNA, 25 bp, Homo sapien
caatagaatctactggtgaagctgt

SEQ ID NO: 1486071 - DNA, 25 bp, Homo sapien
taaactcagtcgataagccagcggc

SEQ ID NO: 1486072 - DNA, 25 bp, Homo sapien
tactaaacggttgaactgcccatac

SEQ ID NO: 1486073 - DNA, 25 bp, Homo sapien
gcagtagccacatctctaaaaggta

SEQ ID NO: 1486074 - DNA, 25 bp, Homo sapien
ggaaagtaatccataaattgcctgc

SEQ ID NO: 1486075 - DNA, 25 bp, Homo sapien
tgcttaccctaattctctccagaga

SEQ ID NO: 1486076 - DNA, 25 bp, Homo sapien
aaagctggatagagagtaatactac

SEQ ID NO: 1486077 - DNA, 25 bp, Homo sapien
tctacaatatgttagtggtataggc

SEQ ID NO: 1486078 - DNA, 25 bp, Homo sapien
atttcagttcttagactattagtaa

SEQ ID NO: 1486079 - DNA, 25 bp, Homo sapien
taaacggagttcacagttatctgtg

SEQ ID NO: 1486080 - DNA, 25 bp, Homo sapien
tctcgatgagcagtccaatctcgga

SEQ ID NO: 1486081 - DNA, 25 bp, Homo sapien
tgatccagcgctctgcaagcgagtg

SEQ ID NO: 1486082 - DNA, 25 bp, Homo sapien
caatctcggatgtagtcttcctgct

SEQ ID NO: 1486083 - DNA, 25 bp, Homo sapien
taatccggtgtttgaatgaagaact

SEQ ID NO: 1486084 - DNA, 25 bp, Homo sapien
ttacggtttgatccaaattcatctt

SEQ ID NO: 1486085 - DNA, 25 bp, Homo sapien
aattacggtttgatccaaattcatc

SEQ ID NO: 1486086 - DNA, 25 bp, Homo sapien
ggaattacggtttgatccaaattca

SEQ ID NO: 1486087 - DNA, 25 bp, Homo sapien
ctggagaagtacgtagacgggtatg

SEQ ID NO: 1486088 - DNA, 25 bp, Homo sapien
cataatcagtaggaaagcgcctcca

SEQ ID NO: 1486089 - DNA, 25 bp, Homo sapien
gaggtggaagcataatcagtaggaa

SEQ ID NO: 1486090 - DNA, 25 bp, Homo sapien
ctgaggtggaagcataatcagtagg

SEQ ID NO: 1486091 - DNA, 25 bp, Homo sapien
agcataatcagtaggaaagcgcctc

SEQ ID NO: 1486092 - DNA, 25 bp, Homo sapien
actaagcaagctctatccatcgatg

SEQ ID NO: 1486093 - DNA, 25 bp, Homo sapien
caataactgacgtacacatacctca

SEQ ID NO: 1486094 - DNA, 25 bp, Homo sapien
aaaacaccatgagagcgcacacacg

SEQ ID NO: 1486095 - DNA, 25 bp, Homo sapien
ccatcgatgtttaactggagtactt

SEQ ID NO: 1486096 - DNA, 25 bp, Homo sapien
tcttctaaagaaaattccctatcac

SEQ ID NO: 1486097 - DNA, 25 bp, Homo sapien
ttcttctaaagaaaattccctatca

SEQ ID NO: 1486098 - DNA, 25 bp, Homo sapien
ctgacacgggaggaccgaccagcct

SEQ ID NO: 1486099 - DNA, 25 bp, Homo sapien
cacgggaggaccgaccagcctgccc

SEQ ID NO: 1486100 - DNA, 25 bp, Homo sapien
cgggaggaccgaccagcctgcccaa

SEQ ID NO: 1486101 - DNA, 25 bp, Homo sapien
gacacgggaggaccgaccagcctgc

SEQ ID NO: 1486102 - DNA, 25 bp, Homo sapien
ttcccctccactcttaactcaagac

SEQ ID NO: 1486103 - DNA, 25 bp, Homo sapien
tcccctccactcttaactcaagact

SEQ ID NO: 1486104 - DNA, 25 bp, Homo sapien
aaaataatcacacatcttcatgtcc

SEQ ID NO: 1486105 - DNA, 25 bp, Homo sapien
ttagatgtctgcctactgaaaataa

SEQ ID NO: 1486106 - DNA, 25 bp, Homo sapien
agatgtctgcctactgaaaataatc

SEQ ID NO: 1486107 - DNA, 25 bp, Homo sapien
ctgaaaataatcacacatcttcatg

SEQ ID NO: 1486108 - DNA, 25 bp, Homo sapien
tatctgatggtactagtctggctcc

SEQ ID NO: 1486109 - DNA, 25 bp, Homo sapien
tcagctgaggtaagtggagtccgtc

SEQ ID NO: 1486110 - DNA, 25 bp, Homo sapien
tactagatgaaccagataccaccgg

SEQ ID NO: 1486111 - DNA, 25 bp, Homo sapien
gagatgttacgccttcctgtgggag

SEQ ID NO: 1486112 - DNA, 25 bp, Homo sapien
ttactatatagatttggcttgtttt

SEQ ID NO: 1486113 - DNA, 25 bp, Homo sapien
tgatatatgattcacaaaaaagcag

SEQ ID NO: 1486114 - DNA, 25 bp, Homo sapien
caactgatatatgattcacaaaaaa

SEQ ID NO: 1486115 - DNA, 25 bp, Homo sapien
taataacaactgatatatgattcac

SEQ ID NO: 1486116 - DNA, 25 bp, Homo sapien
catgccttgtatgattggcagccaa

SEQ ID NO: 1486117 - DNA, 25 bp, Homo sapien
tgccttgtatgattggcagccaaac

SEQ ID NO: 1486118 - DNA, 25 bp, Homo sapien
tcatgccttgtatgattggcagcca

SEQ ID NO: 1486119 - DNA, 25 bp, Homo sapien
gccttgtatgattggcagccaaact

SEQ ID NO: 1486120 - DNA, 25 bp, Homo sapien
ttctgagcagtgaaggtggtaccag

SEQ ID NO: 1486121 - DNA, 25 bp, Homo sapien
tggtaccagagccatgtggaccatg

SEQ ID NO: 1486122 - DNA, 25 bp, Homo sapien
tgcccacatttctgagcagtgaagg

SEQ ID NO: 1486123 - DNA, 25 bp, Homo sapien
catttctgagcagtgaaggtggtac

SEQ ID NO: 1486124 - DNA, 25 bp, Homo sapien
cagatgtagtcagtggttttctttc

SEQ ID NO: 1486125 - DNA, 25 bp, Homo sapien
gtgaaatccagatgtagtcagtggt

SEQ ID NO: 1486126 - DNA, 25 bp, Homo sapien
aggcctattataatcctgattgtca

SEQ ID NO: 1486127 - DNA, 25 bp, Homo sapien
ttgataacaggcctattataatcct

SEQ ID NO: 1486128 - DNA, 25 bp, Homo sapien
aaacatgtggctgattttatctgtt

SEQ ID NO: 1486129 - DNA, 25 bp, Homo sapien
taaacatgtggctgattttatctgt

SEQ ID NO: 1486130 - DNA, 25 bp, Homo sapien
gattacaaaatctgtatgacagtct

SEQ ID NO: 1486131 - DNA, 25 bp, Homo sapien
ttgcttttgaggaggttacgtctga

SEQ ID NO: 1486132 - DNA, 25 bp, Homo sapien
gccactgcaggggattacaaaatct

SEQ ID NO: 1486133 - DNA, 25 bp, Homo sapien
tctccacaggctacttggctagcca

SEQ ID NO: 1486134 - DNA, 25 bp, Homo sapien
tgacaacactcatccaggcaacttg

SEQ ID NO: 1486135 - DNA, 25 bp, Homo sapien
cagagcctgactttaattagcccga

SEQ ID NO: 1486136 - DNA, 25 bp, Homo sapien
tgggtttctctatccacagtgtgac

SEQ ID NO: 1486137 - DNA, 25 bp, Homo sapien
tcttcccagcaatatggtctcagct

SEQ ID NO: 1486138 - DNA, 25 bp, Homo sapien
ggaagggtattgacaccgatggctc

SEQ ID NO: 1486139 - DNA, 25 bp, Homo sapien
gtcactttggtcatcatcattatcc

SEQ ID NO: 1486140 - DNA, 25 bp, Homo sapien
cactgttgggattctctaactcaat

SEQ ID NO: 1486141 - DNA, 25 bp, Homo sapien
tcaatggtataagtacccttgtcac

SEQ ID NO: 1486142 - DNA, 25 bp, Homo sapien
aagaatgcaatcataaaagcagttt

SEQ ID NO: 1486143 - DNA, 25 bp, Homo sapien
ctgacacaagattcccgcactttga

SEQ ID NO: 1486144 - DNA, 25 bp, Homo sapien
gaatgcaatcataaaagcagtttga

SEQ ID NO: 1486145 - DNA, 25 bp, Homo sapien
tgacacaagattcccgcactttgag

SEQ ID NO: 1486146 - DNA, 25 bp, Homo sapien
ttctctgaatcactttgcgtaccat

SEQ ID NO: 1486147 - DNA, 25 bp, Homo sapien
aatcactttgcgtaccatcatcatg

SEQ ID NO: 1486148 - DNA, 25 bp, Homo sapien
gtcttaagtgttcctcaagagttgc

SEQ ID NO: 1486149 - DNA, 25 bp, Homo sapien
ttgctacagcgcctgtgagccccag

SEQ ID NO: 1486150 - DNA, 25 bp, Homo sapien
ggttgttttgtgctagccagtcagc

SEQ ID NO: 1486151 - DNA, 25 bp, Homo sapien
tcttggacttgtggcgctgatcaga

SEQ ID NO: 1486152 - DNA, 25 bp, Homo sapien
gtttgaatccccagcaagtcttgag

SEQ ID NO: 1486153 - DNA, 25 bp, Homo sapien
tggtaaatgaagcatgccctgcacc

SEQ ID NO: 1486154 - DNA, 25 bp, Homo sapien
tacattcggaaacattactttcaga

SEQ ID NO: 1486155 - DNA, 25 bp, Homo sapien
aaagagcaggcaggaattagcataa

SEQ ID NO: 1486156 - DNA, 25 bp, Homo sapien
taaggctgaccatggaaactgggac

SEQ ID NO: 1486157 - DNA, 25 bp, Homo sapien
gatgcattgggagagaccactcaaa

SEQ ID NO: 1486158 - DNA, 25 bp, Homo sapien
cactcaaacaactggtaatgggacg

SEQ ID NO: 1486159 - DNA, 25 bp, Homo sapien
gaaaccaggttggtagcccaatcat

SEQ ID NO: 1486160 - DNA, 25 bp, Homo sapien
gaagctagctagctgatgacgacat

SEQ ID NO: 1486161 - DNA, 25 bp, Homo sapien
tgtgatcaaagtagcatgtacccct

SEQ ID NO: 1486162 - DNA, 25 bp, Homo sapien
taagatgaagttgataacgctcgct

SEQ ID NO: 1486163 - DNA, 25 bp, Homo sapien
gacttagtcttccatactgagccca

SEQ ID NO: 1486164 - DNA, 25 bp, Homo sapien
tgcaaggtccttatgtggcaactga

SEQ ID NO: 1486165 - DNA, 25 bp, Homo sapien
actgacacctccattcatttcctgg

SEQ ID NO: 1486166 - DNA, 25 bp, Homo sapien
tctgctgttatctcaaaaactggct

SEQ ID NO: 1486167 - DNA, 25 bp, Homo sapien
tgactattaatctgagaatctgacc

SEQ ID NO: 1486168 - DNA, 25 bp, Homo sapien
aactcaactaatcttgttgctgcca

SEQ ID NO: 1486169 - DNA, 25 bp, Homo sapien
tggtttacggactgaaccactccat

SEQ ID NO: 1486170 - DNA, 25 bp, Homo sapien
tgtgttccttgactattaatctgag

SEQ ID NO: 1486171 - DNA, 25 bp, Homo sapien
taaaaacgcaaaattaatgcctaca

SEQ ID NO: 1486172 - DNA, 25 bp, Homo sapien
ccacttaatgtcacagtgactgaga

SEQ ID NO: 1486173 - DNA, 25 bp, Homo sapien
tacttcccaaaatatccacttaatg

SEQ ID NO: 1486174 - DNA, 25 bp, Homo sapien
tcatggtagacagctgtttgcttag

SEQ ID NO: 1486175 - DNA, 25 bp, Homo sapien
gacggctgcccatataatggagtac

SEQ ID NO: 1486176 - DNA, 25 bp, Homo sapien
atgacggctgcccatataatggagt

SEQ ID NO: 1486177 - DNA, 25 bp, Homo sapien
tgcccatataatggagtaccacggg

SEQ ID NO: 1486178 - DNA, 25 bp, Homo sapien
gtaccacggggcatagcagaaatat

SEQ ID NO: 1486179 - DNA, 25 bp, Homo sapien
gcagcgtctgctacctttgaatcta

SEQ ID NO: 1486180 - DNA, 25 bp, Homo sapien
ttcagtagttttgtgctgcacttca

SEQ ID NO: 1486181 - DNA, 25 bp, Homo sapien
tgggacaactgaagctgaatggtaa

SEQ ID NO: 1486182 - DNA, 25 bp, Homo sapien
gaagctgaatggtaaacttctcatg

SEQ ID NO: 1486183 - DNA, 25 bp, Homo sapien
ttaagagcttcttcagggaccctca

SEQ ID NO: 1486184 - DNA, 25 bp, Homo sapien
cttaagagcttcttcagggaccctc

SEQ ID NO: 1486185 - DNA, 25 bp, Homo sapien
taagagcttcttcagggaccctcat

SEQ ID NO: 1486186 - DNA, 25 bp, Homo sapien
tctccttgtactacagtgaaaagat

SEQ ID NO: 1486187 - DNA, 25 bp, Homo sapien
tccttgtactacagtgaaaagattt

SEQ ID NO: 1486188 - DNA, 25 bp, Homo sapien
ctccttgtactacagtgaaaagatt

SEQ ID NO: 1486189 - DNA, 25 bp, Homo sapien
agcactcatgacttcgagggtagaa

SEQ ID NO: 1486190 - DNA, 25 bp, Homo sapien
acttcgagggtagaaagctgtaact

SEQ ID NO: 1486191 - DNA, 25 bp, Homo sapien
tcatgacttcgagggtagaaagctg

SEQ ID NO: 1486192 - DNA, 25 bp, Homo sapien
cactcatgacttcgagggtagaaag

SEQ ID NO: 1486193 - DNA, 25 bp, Homo sapien
tacttcacccctggattcaacttta

SEQ ID NO: 1486194 - DNA, 25 bp, Homo sapien
cacccctggattcaactttacattc

SEQ ID NO: 1486195 - DNA, 25 bp, Homo sapien
tcacccctggattcaactttacatt

SEQ ID NO: 1486196 - DNA, 25 bp, Homo sapien
cttcacccctggattcaactttaca

SEQ ID NO: 1486197 - DNA, 25 bp, Homo sapien
cacatagggccaggaatagtaccta

SEQ ID NO: 1486198 - DNA, 25 bp, Homo sapien
tacaagacaattggcatcaggcaac

SEQ ID NO: 1486199 - DNA, 25 bp, Homo sapien
tcatgagtcactgggtagagcacaa

SEQ ID NO: 1486200 - DNA, 25 bp, Homo sapien
tggaattcccaggactgagtactga

SEQ ID NO: 1486201 - DNA, 25 bp, Homo sapien
tctgggcatccagacagtagttatg

SEQ ID NO: 1486202 - DNA, 25 bp, Homo sapien
caactctgagaaagtctttgggaca

SEQ ID NO: 1486203 - DNA, 25 bp, Homo sapien
taaaattatatgtgcctcctctggg

SEQ ID NO: 1486204 - DNA, 25 bp, Homo sapien
agttatggctcaacactaagtgcac

SEQ ID NO: 1486205 - DNA, 25 bp, Homo sapien
tctcgtaaatgtcaaggaacaattt

SEQ ID NO: 1486206 - DNA, 25 bp, Homo sapien
tatttagctgagactatgctttttc

SEQ ID NO: 1486207 - DNA, 25 bp, Homo sapien
agcatctactctatttagctgagac

SEQ ID NO: 1486208 - DNA, 25 bp, Homo sapien
cagcacctggactatttctcgtaaa

SEQ ID NO: 1486209 - DNA, 25 bp, Homo sapien
cttcaagtttcaaggtgatataagt

SEQ ID NO: 1486210 - DNA, 25 bp, Homo sapien
tgttccggaatccttacatcattca

SEQ ID NO: 1486211 - DNA, 25 bp, Homo sapien
gtgatataagtctgttccggaatcc

SEQ ID NO: 1486212 - DNA, 25 bp, Homo sapien
atcatatccaaatctcagcttatct

SEQ ID NO: 1486213 - DNA, 25 bp, Homo sapien
gacatacagtacttgagatctggaa

SEQ ID NO: 1486214 - DNA, 25 bp, Homo sapien
gcaagaacaagaagcaccagaaata

SEQ ID NO: 1486215 - DNA, 25 bp, Homo sapien
tatgttccaggtgaatacatgtcaa

SEQ ID NO: 1486216 - DNA, 25 bp, Homo sapien
cactgtgttttgaccatgcaagaac

SEQ ID NO: 1486217 - DNA, 25 bp, Homo sapien
cgttcctagtgggaggtctctgaaa

SEQ ID NO: 1486218 - DNA, 25 bp, Homo sapien
gttcctagtgggaggtctctgaaat

SEQ ID NO: 1486219 - DNA, 25 bp, Homo sapien
tgcgttcctagtgggaggtctctga

SEQ ID NO: 1486220 - DNA, 25 bp, Homo sapien
tactctataccacacaggtctgatg

SEQ ID NO: 1486221 - DNA, 25 bp, Homo sapien
tggcaggaactctagtgtgcaaagg

SEQ ID NO: 1486222 - DNA, 25 bp, Homo sapien
ccagtaacaaatggcaggcttgcaa

SEQ ID NO: 1486223 - DNA, 25 bp, Homo sapien
acaaatggcaggcttgcaatggcac

SEQ ID NO: 1486224 - DNA, 25 bp, Homo sapien
tcatagttgatgacagcgtgttgct

SEQ ID NO: 1486225 - DNA, 25 bp, Homo sapien
ccgtagacgcatcatagttgatgac

SEQ ID NO: 1486226 - DNA, 25 bp, Homo sapien
gatgacagcgtgttgcttatccaca

SEQ ID NO: 1486227 - DNA, 25 bp, Homo sapien
cttcactaaatgctcatccgtagac

SEQ ID NO: 1486228 - DNA, 25 bp, Homo sapien
acaaaaatcatttctcgtggcagcc

SEQ ID NO: 1486229 - DNA, 25 bp, Homo sapien
aatcatttctcgtggcagcctgtgg

SEQ ID NO: 1486230 - DNA, 25 bp, Homo sapien
gcaacatgagctcacagtcatctct

SEQ ID NO: 1486231 - DNA, 25 bp, Homo sapien
ctgcaacatgagctcacagtcatct

SEQ ID NO: 1486232 - DNA, 25 bp, Homo sapien
aagtctttggcaaagctacgtcatc

SEQ ID NO: 1486233 - DNA, 25 bp, Homo sapien
tgcttagcttctaagtctttggcaa

SEQ ID NO: 1486234 - DNA, 25 bp, Homo sapien
ctaagtctttggcaaagctacgtca

SEQ ID NO: 1486235 - DNA, 25 bp, Homo sapien
cttagcttctaagtctttggcaaag

SEQ ID NO: 1486236 - DNA, 25 bp, Homo sapien
taggctagctatttatcccatgtcc

SEQ ID NO: 1486237 - DNA, 25 bp, Homo sapien
caaactcaggagtatacagcaatga

SEQ ID NO: 1486238 - DNA, 25 bp, Homo sapien
cctggagtcatatagacagatgtga

SEQ ID NO: 1486239 - DNA, 25 bp, Homo sapien
tggtgccactactttgatctatgct

SEQ ID NO: 1486240 - DNA, 25 bp, Homo sapien
caaaactgtccagattgggtggctc

SEQ ID NO: 1486241 - DNA, 25 bp, Homo sapien
gcaaaactgtccagattgggtggct

SEQ ID NO: 1486242 - DNA, 25 bp, Homo sapien
aactgtccagattgggtggctcatg

SEQ ID NO: 1486243 - DNA, 25 bp, Homo sapien
aaaactgtccagattgggtggctca

SEQ ID NO: 1486244 - DNA, 25 bp, Homo sapien
tatgagtaaaactttgttcagggct

SEQ ID NO: 1486245 - DNA, 25 bp, Homo sapien
cacgtaggaaacagcattggcctct

SEQ ID NO: 1486246 - DNA, 25 bp, Homo sapien
tactcatccacgtaggaaacagcat

SEQ ID NO: 1486247 - DNA, 25 bp, Homo sapien
agcagctgccatactcatccacgta

SEQ ID NO: 1486248 - DNA, 25 bp, Homo sapien
taagaatcaacataaggctgccaac

SEQ ID NO: 1486249 - DNA, 25 bp, Homo sapien
tatgttgactacatcagtggtttcc

SEQ ID NO: 1486250 - DNA, 25 bp, Homo sapien
cacaatgggagaaatctagctaagt

SEQ ID NO: 1486251 - DNA, 25 bp, Homo sapien
ttaactatagctacgttcacggaga

SEQ ID NO: 1486252 - DNA, 25 bp, Homo sapien
ctcagctccgctgggcaataacgtt

SEQ ID NO: 1486253 - DNA, 25 bp, Homo sapien
agaccgactgcctagtgcgcaggcg

SEQ ID NO: 1486254 - DNA, 25 bp, Homo sapien
cgtcgtcgccgctgttgtcgtcgct

SEQ ID NO: 1486255 - DNA, 25 bp, Homo sapien
ccacacatagcggtaacggcaaaga

SEQ ID NO: 1486256 - DNA, 25 bp, Homo sapien
taaaaaatctcgcaactgaagcagg

SEQ ID NO: 1486257 - DNA, 25 bp, Homo sapien
gtgggaccgcaaccaacaaggacta

SEQ ID NO: 1486258 - DNA, 25 bp, Homo sapien
tatctgcgtccttgagtagcctggg

SEQ ID NO: 1486259 - DNA, 25 bp, Homo sapien
catgctaggagttgtagtgtcggcc

SEQ ID NO: 1486260 - DNA, 25 bp, Homo sapien
tagagtgcgtgcatggcgaagtccc

SEQ ID NO: 1486261 - DNA, 25 bp, Homo sapien
tgtagtgtaactggaaggccctgag

SEQ ID NO: 1486262 - DNA, 25 bp, Homo sapien
ccggagaactctaccctggaggaga

SEQ ID NO: 1486263 - DNA, 25 bp, Homo sapien
caggttctgaacgtgaggactacaa

SEQ ID NO: 1486264 - DNA, 25 bp, Homo sapien
gttcatgtgatctgtaggactcagg

SEQ ID NO: 1486265 - DNA, 25 bp, Homo sapien
aggactcaggggtcctgtttgtgtc

SEQ ID NO: 1486266 - DNA, 25 bp, Homo sapien
ttcatgtgatctgtaggactcaggg

SEQ ID NO: 1486267 - DNA, 25 bp, Homo sapien
gggtcctgtttgtgtctgtagtcat

SEQ ID NO: 1486268 - DNA, 25 bp, Homo sapien
tatacaagggatacacttgacatgc

SEQ ID NO: 1486269 - DNA, 25 bp, Homo sapien
caagggatacacttgacatgcagac

SEQ ID NO: 1486270 - DNA, 25 bp, Homo sapien
gggatacacttgacatgcagacagc

SEQ ID NO: 1486271 - DNA, 25 bp, Homo sapien
gatacacttgacatgcagacagccc

SEQ ID NO: 1486272 - DNA, 25 bp, Homo sapien
gagactaagcgtttgcttcatggtt

SEQ ID NO: 1486273 - DNA, 25 bp, Homo sapien
ttgcttcatggttgtatagttcctc

SEQ ID NO: 1486274 - DNA, 25 bp, Homo sapien
tggttgtatagttcctcattttctt

SEQ ID NO: 1486275 - DNA, 25 bp, Homo sapien
cctttaacgcgctgggatccttctt

SEQ ID NO: 1486276 - DNA, 25 bp, Homo sapien
ggtgttcggtgagcttcctagatct

SEQ ID NO: 1486277 - DNA, 25 bp, Homo sapien
taccccgctgttcttgcatatagtc

SEQ ID NO: 1486278 - DNA, 25 bp, Homo sapien
aaggcactcttcatgtctgttaata

SEQ ID NO: 1486279 - DNA, 25 bp, Homo sapien
aaagtttactaatgcattcctcagc

SEQ ID NO: 1486280 - DNA, 25 bp, Homo sapien
taggcagacaagtgaatcagagggc

SEQ ID NO: 1486281 - DNA, 25 bp, Homo sapien
aaagataattgaggtggccaggcgc

SEQ ID NO: 1486282 - DNA, 25 bp, Homo sapien
caaacacgtggtcacttagcaagca

SEQ ID NO: 1486283 - DNA, 25 bp, Homo sapien
tatttcaaggccagatacagtgtct

SEQ ID NO: 1486284 - DNA, 25 bp, Homo sapien
agaggcatttggtatggaggagaat

SEQ ID NO: 1486285 - DNA, 25 bp, Homo sapien
catcaactcctttgtatctcttcag

SEQ ID NO: 1486286 - DNA, 25 bp, Homo sapien
agaatgtgaaatatgctctttgatt

SEQ ID NO: 1486287 - DNA, 25 bp, Homo sapien
gcttagagaattcctgtcagcctca

SEQ ID NO: 1486288 - DNA, 25 bp, Homo sapien
tgttgctccttattcttcatagtga

SEQ ID NO: 1486289 - DNA, 25 bp, Homo sapien
tcatagtgatcactttactgtggcc

SEQ ID NO: 1486290 - DNA, 25 bp, Homo sapien
gatcactttactgtggccatttaca

SEQ ID NO: 1486291 - DNA, 25 bp, Homo sapien
ttttctgtgttgctccttattcttc

SEQ ID NO: 1486292 - DNA, 25 bp, Homo sapien
gaacctgaagtttgaagtatctcaa

SEQ ID NO: 1486293 - DNA, 25 bp, Homo sapien
gctgaatttgacataccatagactt

SEQ ID NO: 1486294 - DNA, 25 bp, Homo sapien
tgaagtttgaagtatctcaatgctg

SEQ ID NO: 1486295 - DNA, 25 bp, Homo sapien
gacataccatagacttacttcaatg

SEQ ID NO: 1486296 - DNA, 25 bp, Homo sapien
tcaaggctgcaataaattgtgttca

SEQ ID NO: 1486297 - DNA, 25 bp, Homo sapien
tccagggggagagtaatgaagccct

SEQ ID NO: 1486298 - DNA, 25 bp, Homo sapien
cagggaccccagttagaatataagc

SEQ ID NO: 1486299 - DNA, 25 bp, Homo sapien
aaaaatggatgggttgagaagagat

SEQ ID NO: 1486300 - DNA, 25 bp, Homo sapien
agaagagatgactggcagggacccc

SEQ ID NO: 1486301 - DNA, 25 bp, Homo sapien
aattgtctcaacacccttccagtct

SEQ ID NO: 1486302 - DNA, 25 bp, Homo sapien
agtctcttttgctgaccattgcccg

SEQ ID NO: 1486303 - DNA, 25 bp, Homo sapien
cggtgaatattcataagcctctgcc

SEQ ID NO: 1486304 - DNA, 25 bp, Homo sapien
tgactctgttgctatactctgaaaa

SEQ ID NO: 1486305 - DNA, 25 bp, Homo sapien
ccttgaccaagccatggagggtaga

SEQ ID NO: 1486306 - DNA, 25 bp, Homo sapien
gttagagccaccaagcaaaggatgc

SEQ ID NO: 1486307 - DNA, 25 bp, Homo sapien
caagaagcctattcctgaccaggag

SEQ ID NO: 1486308 - DNA, 25 bp, Homo sapien
tcgggagatgagagtaggcaccaaa

SEQ ID NO: 1486309 - DNA, 25 bp, Homo sapien
gagcttgacagtcgtcctagttcta

SEQ ID NO: 1486310 - DNA, 25 bp, Homo sapien
tgcctggtagctcatctgaagtgtg

SEQ ID NO: 1486311 - DNA, 25 bp, Homo sapien
ggctcaccaggctggacgttgcttg

SEQ ID NO: 1486312 - DNA, 25 bp, Homo sapien
gcctttgcctggtagctcatctgaa

SEQ ID NO: 1486313 - DNA, 25 bp, Homo sapien
aaacaatatctaatggaagcagctc

SEQ ID NO: 1486314 - DNA, 25 bp, Homo sapien
tagagcaattaagggcatgaccacc

SEQ ID NO: 1486315 - DNA, 25 bp, Homo sapien
ttcttagcctatttccgaagtcagg

SEQ ID NO: 1486316 - DNA, 25 bp, Homo sapien
gctctttatggcaaggctatttggg

SEQ ID NO: 1486317 - DNA, 25 bp, Homo sapien
cagatgcagtaacatgccagaggga

SEQ ID NO: 1486318 - DNA, 25 bp, Homo sapien
aatgaaatgggcagaaacagagtgt

SEQ ID NO: 1486319 - DNA, 25 bp, Homo sapien
tctttggcatgctttcatacttatc

SEQ ID NO: 1486320 - DNA, 25 bp, Homo sapien
tgtagattacctcctttttgtcaaa

SEQ ID NO: 1486321 - DNA, 25 bp, Homo sapien
aaacaaccctgcacttgtcaaagta

SEQ ID NO: 1486322 - DNA, 25 bp, Homo sapien
ccctgcacttgtcaaagtagtagta

SEQ ID NO: 1486323 - DNA, 25 bp, Homo sapien
cacttgtcaaagtagtagtaatgaa

SEQ ID NO: 1486324 - DNA, 25 bp, Homo sapien
aaccctgcacttgtcaaagtagtag

SEQ ID NO: 1486325 - DNA, 25 bp, Homo sapien
ccatgatgtttgcagtggtgtgccc

SEQ ID NO: 1486326 - DNA, 25 bp, Homo sapien
tagaacagatggcaccgaaagctgg

SEQ ID NO: 1486327 - DNA, 25 bp, Homo sapien
cagtaacagatagggcagctgggaa

SEQ ID NO: 1486328 - DNA, 25 bp, Homo sapien
gggctccttagcagaactaatcaga

SEQ ID NO: 1486329 - DNA, 25 bp, Homo sapien
gggatccaggtgaccaaagtactgt

SEQ ID NO: 1486330 - DNA, 25 bp, Homo sapien
caggattgtttcactgctattcaga

SEQ ID NO: 1486331 - DNA, 25 bp, Homo sapien
gattgtttcactgctattcagaagc

SEQ ID NO: 1486332 - DNA, 25 bp, Homo sapien
gatccaggtgaccaaagtactgtca

SEQ ID NO: 1486333 - DNA, 25 bp, Homo sapien
gagtcattggtttgcccttttccta

SEQ ID NO: 1486334 - DNA, 25 bp, Homo sapien
ccttttcctaaagaatatgatatct

SEQ ID NO: 1486335 - DNA, 25 bp, Homo sapien
taaaataccagtaaataattcaaca

SEQ ID NO: 1486336 - DNA, 25 bp, Homo sapien
aataccagtaaataattcaacatag

SEQ ID NO: 1486337 - DNA, 25 bp, Homo sapien
cttccagtggacacggttcgcgtgg

SEQ ID NO: 1486338 - DNA, 25 bp, Homo sapien
atgcacgatgatagcagccaccctt

SEQ ID NO: 1486339 - DNA, 25 bp, Homo sapien
ttggacttccacatgacaaccgcat

SEQ ID NO: 1486340 - DNA, 25 bp, Homo sapien
taggtttctgtagacttggacttcc

SEQ ID NO: 1486341 - DNA, 25 bp, Homo sapien
taacactatttactattttcagaaa

SEQ ID NO: 1486342 - DNA, 25 bp, Homo sapien
cactatttactattttcagaaaagt

SEQ ID NO: 1486343 - DNA, 25 bp, Homo sapien
taatattgatttctatctaatttga

SEQ ID NO: 1486344 - DNA, 25 bp, Homo sapien
acactatttactattttcagaaaag

SEQ ID NO: 1486345 - DNA, 25 bp, Homo sapien
ccccgggagcttgaggcgtttgctt

SEQ ID NO: 1486346 - DNA, 25 bp, Homo sapien
ggatcagggcaacaggtttccaccc

SEQ ID NO: 1486347 - DNA, 25 bp, Homo sapien
cacaccactaatggattttgctttt

SEQ ID NO: 1486348 - DNA, 25 bp, Homo sapien
ggagcttgaggcgtttgcttcatat

SEQ ID NO: 1486349 - DNA, 25 bp, Homo sapien
cacatcattggagctattctgtaga

SEQ ID NO: 1486350 - DNA, 25 bp, Homo sapien
cttggactacaagtgacagtgtttg

SEQ ID NO: 1486351 - DNA, 25 bp, Homo sapien
taactacctgagtttccccagcaag

SEQ ID NO: 1486352 - DNA, 25 bp, Homo sapien
cattgttagtctaggaatgcagggc

SEQ ID NO: 1486353 - DNA, 25 bp, Homo sapien
tcctgctctcttttcacggtcctgt

SEQ ID NO: 1486354 - DNA, 25 bp, Homo sapien
ctttgtctgatactcccctcaattt

SEQ ID NO: 1486355 - DNA, 25 bp, Homo sapien
tgctctcttttcacggtcctgttgc

SEQ ID NO: 1486356 - DNA, 25 bp, Homo sapien
cagcccatggtacttctctgctatt

SEQ ID NO: 1486357 - DNA, 25 bp, Homo sapien
cagccaggctttctcggatggggac

SEQ ID NO: 1486358 - DNA, 25 bp, Homo sapien
tcggatggggacctgattgactcct

SEQ ID NO: 1486359 - DNA, 25 bp, Homo sapien
acctgattgactccttgcataaaag

SEQ ID NO: 1486360 - DNA, 25 bp, Homo sapien
ggctttctcggatggggacctgatt

SEQ ID NO: 1486361 - DNA, 25 bp, Homo sapien
tgaaatgcatagatgggctgtgaac

SEQ ID NO: 1486362 - DNA, 25 bp, Homo sapien
tagctgagactgttaagtgtgcact

SEQ ID NO: 1486363 - DNA, 25 bp, Homo sapien
gttaagtgtgcactatcacacctgg

SEQ ID NO: 1486364 - DNA, 25 bp, Homo sapien
aaatgcatagatgggctgtgaacct

SEQ ID NO: 1486365 - DNA, 25 bp, Homo sapien
tcaatgcaacataaaagtccaggtc

SEQ ID NO: 1486366 - DNA, 25 bp, Homo sapien
tatggcagcactcctgagcttgact

SEQ ID NO: 1486367 - DNA, 25 bp, Homo sapien
gactcggagtacagactatggcagc

SEQ ID NO: 1486368 - DNA, 25 bp, Homo sapien
atcccaccggctgtactctgcagtg

SEQ ID NO: 1486369 - DNA, 25 bp, Homo sapien
aatttcagctggcactctccaatcc

SEQ ID NO: 1486370 - DNA, 25 bp, Homo sapien
gcaaatttcagctggcactctccaa

SEQ ID NO: 1486371 - DNA, 25 bp, Homo sapien
ttgcaaatttcagctggcactctcc

SEQ ID NO: 1486372 - DNA, 25 bp, Homo sapien
tcaagcgtactttgcaaatttcagc

SEQ ID NO: 1486373 - DNA, 25 bp, Homo sapien
tatttcggtaatgttgtggccacac

SEQ ID NO: 1486374 - DNA, 25 bp, Homo sapien
actggagatgggcattgacttaact

SEQ ID NO: 1486375 - DNA, 25 bp, Homo sapien
agcgtgttcggcttgttccctttct

SEQ ID NO: 1486376 - DNA, 25 bp, Homo sapien
tctgtggcctcttagcctgtgcctc

SEQ ID NO: 1486377 - DNA, 25 bp, Homo sapien
gatagcaaaacttttgcttgtctct

SEQ ID NO: 1486378 - DNA, 25 bp, Homo sapien
gcagttcagcgctattttggataaa

SEQ ID NO: 1486379 - DNA, 25 bp, Homo sapien
catctgtcttcccttccgtaaagct

SEQ ID NO: 1486380 - DNA, 25 bp, Homo sapien
cgtaaagctgtaggcagtatagcag

SEQ ID NO: 1486381 - DNA, 25 bp, Homo sapien
gaatctttgccatttgcgatgcaca

SEQ ID NO: 1486382 - DNA, 25 bp, Homo sapien
tctttgccatttgcgatgcacacat

SEQ ID NO: 1486383 - DNA, 25 bp, Homo sapien
aatctttgccatttgcgatgcacac

SEQ ID NO: 1486384 - DNA, 25 bp, Homo sapien
atctttgccatttgcgatgcacaca

SEQ ID NO: 1486385 - DNA, 25 bp, Homo sapien
cccaaaattgttaacatggttggat

SEQ ID NO: 1486386 - DNA, 25 bp, Homo sapien
tgacccaaaattgttaacatggttg

SEQ ID NO: 1486387 - DNA, 25 bp, Homo sapien
gtgtagaaagttgggttgctgtgct

SEQ ID NO: 1486388 - DNA, 25 bp, Homo sapien
agccttgtgtagaaagttgggttgc

SEQ ID NO: 1486389 - DNA, 25 bp, Homo sapien
tatgttatgaaccttaacctttgca

SEQ ID NO: 1486390 - DNA, 25 bp, Homo sapien
aacctttgcatatacctctgtttta

SEQ ID NO: 1486391 - DNA, 25 bp, Homo sapien
gaaccttaacctttgcatatacctc

SEQ ID NO: 1486392 - DNA, 25 bp, Homo sapien
agttgctatgttatgaaccttaacc

SEQ ID NO: 1486393 - DNA, 25 bp, Homo sapien
gattgaagtcagcagtgaaatcagg

SEQ ID NO: 1486394 - DNA, 25 bp, Homo sapien
tgaagtcagcagtgaaatcaggagt

SEQ ID NO: 1486395 - DNA, 25 bp, Homo sapien
gaactggattgaagtcagcagtgaa

SEQ ID NO: 1486396 - DNA, 25 bp, Homo sapien
actttgaactggattgaagtcagca

SEQ ID NO: 1486397 - DNA, 25 bp, Homo sapien
gattggcatattggaccctgggcat

SEQ ID NO: 1486398 - DNA, 25 bp, Homo sapien
tgatctgctcagattggcatattgg

SEQ ID NO: 1486399 - DNA, 25 bp, Homo sapien
ggtaatgtatctgcctgcgagtgca

SEQ ID NO: 1486400 - DNA, 25 bp, Homo sapien
gaggtaatgtatctgcctgcgagtg

SEQ ID NO: 1486401 - DNA, 25 bp, Homo sapien
tttgtgcagggttggaggcttttcc

SEQ ID NO: 1486402 - DNA, 25 bp, Homo sapien
tgaaatagccattaacagagggtag

SEQ ID NO: 1486403 - DNA, 25 bp, Homo sapien
gagcttatgtgtctaggacacccca

SEQ ID NO: 1486404 - DNA, 25 bp, Homo sapien
ccacaaatatgacagagcagtaacc

SEQ ID NO: 1486405 - DNA, 25 bp, Homo sapien
tatgctgtgagagcggctttggccc

SEQ ID NO: 1486406 - DNA, 25 bp, Homo sapien
tgaccggtgtttatgctgtgagagc

SEQ ID NO: 1486407 - DNA, 25 bp, Homo sapien
tgtttatgctgtgagagcggctttg

SEQ ID NO: 1486408 - DNA, 25 bp, Homo sapien
cggccgtgaccggtgtttatgctgt

SEQ ID NO: 1486409 - DNA, 25 bp, Homo sapien
tcacttgtcacgtttcctggcacct

SEQ ID NO: 1486410 - DNA, 25 bp, Homo sapien
agccatgtcatggtgtcacttgtca

SEQ ID NO: 1486411 - DNA, 25 bp, Homo sapien
gggaccacatggacaatggctgctc

SEQ ID NO: 1486412 - DNA, 25 bp, Homo sapien
tgagcccatcggtccaaaggaccat

SEQ ID NO: 1486413 - DNA, 25 bp, Homo sapien
tccacatttaatccaaagccaacag

SEQ ID NO: 1486414 - DNA, 25 bp, Homo sapien
gagtttgaaatgcaccttgagcttt

SEQ ID NO: 1486415 - DNA, 25 bp, Homo sapien
cagaacacttctgggtagtcgttca

SEQ ID NO: 1486416 - DNA, 25 bp, Homo sapien
tcgagttaacgtgcctgctggtgct

SEQ ID NO: 1486417 - DNA, 25 bp, Homo sapien
gagatgctgtcttacggaacgtccc

SEQ ID NO: 1486418 - DNA, 25 bp, Homo sapien
acttcatgtctgcaaggcggccttc

SEQ ID NO: 1486419 - DNA, 25 bp, Homo sapien
cactttcaaacatgaggcagccaga

SEQ ID NO: 1486420 - DNA, 25 bp, Homo sapien
gttcctttctcggagcccagaagca

SEQ ID NO: 1486421 - DNA, 25 bp, Homo sapien
ggaaggagggctttgaactctgact

SEQ ID NO: 1486422 - DNA, 25 bp, Homo sapien
gagggctttgaactctgactgcggt

SEQ ID NO: 1486423 - DNA, 25 bp, Homo sapien
ggctttgaactctgactgcggtgtg

SEQ ID NO: 1486424 - DNA, 25 bp, Homo sapien
aaggagggctttgaactctgactgc

SEQ ID NO: 1486425 - DNA, 25 bp, Homo sapien
ctcagtgagaacttcagtcgctgtg

SEQ ID NO: 1486426 - DNA, 25 bp, Homo sapien
cctcagtgagaacttcagtcgctgt

SEQ ID NO: 1486427 - DNA, 25 bp, Homo sapien
tgccttcccaatttggcagcttaat

SEQ ID NO: 1486428 - DNA, 25 bp, Homo sapien
gcttaattccgtagatatcaaactg

SEQ ID NO: 1486429 - DNA, 25 bp, Homo sapien
ccaggttgccttcccaatttggcag

SEQ ID NO: 1486430 - DNA, 25 bp, Homo sapien
ttggcagcttaattccgtagatatc

SEQ ID NO: 1486431 - DNA, 25 bp, Homo sapien
gcgttgagcagtgaacggtaagttc

SEQ ID NO: 1486432 - DNA, 25 bp, Homo sapien
aggcacggctgtaggcacgggtggg

SEQ ID NO: 1486433 - DNA, 25 bp, Homo sapien
gaacggtaagttcaacagtgtgaaa

SEQ ID NO: 1486434 - DNA, 25 bp, Homo sapien
catgggtcaggcacggctgtaggca

SEQ ID NO: 1486435 - DNA, 25 bp, Homo sapien
gaaggaatcaggctgacttttgatt

SEQ ID NO: 1486436 - DNA, 25 bp, Homo sapien
tgatctgccgcaggaaggaatcagg

SEQ ID NO: 1486437 - DNA, 25 bp, Homo sapien
ttcctggtgaggcccgtacatctgt

SEQ ID NO: 1486438 - DNA, 25 bp, Homo sapien
tgaggcccgtacatctgtgtcaccc

SEQ ID NO: 1486439 - DNA, 25 bp, Homo sapien
gaatcaggaggtcacccgtttctgg

SEQ ID NO: 1486440 - DNA, 25 bp, Homo sapien
ttctggaacagctccgatagtgata

SEQ ID NO: 1486441 - DNA, 25 bp, Homo sapien
gaacagctccgatagtgataaattg

SEQ ID NO: 1486442 - DNA, 25 bp, Homo sapien
gcaggcccacggaatcaggaggtca

SEQ ID NO: 1486443 - DNA, 25 bp, Homo sapien
agcatgccacaatctgattgctgac

SEQ ID NO: 1486444 - DNA, 25 bp, Homo sapien
cagttacccagcatgccacaatctg

SEQ ID NO: 1486445 - DNA, 25 bp, Homo sapien
cccagcatgccacaatctgattgct

SEQ ID NO: 1486446 - DNA, 25 bp, Homo sapien
gttacccagcatgccacaatctgat

SEQ ID NO: 1486447 - DNA, 25 bp, Homo sapien
gattcaacgtgaagtcagactgcag

SEQ ID NO: 1486448 - DNA, 25 bp, Homo sapien
gaggcggtggcatgatctacacaca

SEQ ID NO: 1486449 - DNA, 25 bp, Homo sapien
tgacaaacactaaaggcaaggctgc

SEQ ID NO: 1486450 - DNA, 25 bp, Homo sapien
gatgattcgggtctgaatgtcccca

SEQ ID NO: 1486451 - DNA, 25 bp, Homo sapien
tactctaggagaagcaagtggcccc

SEQ ID NO: 1486452 - DNA, 25 bp, Homo sapien
gaaggtgcccctgctatgtgtaaga

SEQ ID NO: 1486453 - DNA, 25 bp, Homo sapien
gatatatgcctacttcacgcacgga

SEQ ID NO: 1486454 - DNA, 25 bp, Homo sapien
catgattgcccgtgaagtctcgaca

SEQ ID NO: 1486455 - DNA, 25 bp, Homo sapien
tcattgtccatgcagtccataccat

SEQ ID NO: 1486456 - DNA, 25 bp, Homo sapien
ttattctcgtccacttgcagagtag

SEQ ID NO: 1486457 - DNA, 25 bp, Homo sapien
tcgtccacttgcagagtaggaaaat

SEQ ID NO: 1486458 - DNA, 25 bp, Homo sapien
ggaaatgcggccgcctctcattgtc

SEQ ID NO: 1486459 - DNA, 25 bp, Homo sapien
ctctgaacataggaaagatgaacag

SEQ ID NO: 1486460 - DNA, 25 bp, Homo sapien
taagaaggagcagtcttcagtaacc

SEQ ID NO: 1486461 - DNA, 25 bp, Homo sapien
gaattcatcatcgaatgtcttcaag

SEQ ID NO: 1486462 - DNA, 25 bp, Homo sapien
gatgaacagaggcaatagctcccat

SEQ ID NO: 1486463 - DNA, 25 bp, Homo sapien
cccggcgaggttcagcacccaggtt

SEQ ID NO: 1486464 - DNA, 25 bp, Homo sapien
caggttagccagatgctcaacaggg

SEQ ID NO: 1486465 - DNA, 25 bp, Homo sapien
gggccatggccaggactcattccag

SEQ ID NO: 1486466 - DNA, 25 bp, Homo sapien
atggccaggactcattccagcccgg

SEQ ID NO: 1486467 - DNA, 25 bp, Homo sapien
cgggtgtcgagtaaggaataaagca

SEQ ID NO: 1486468 - DNA, 25 bp, Homo sapien
aattctcatcaggacaagtgccccg

SEQ ID NO: 1486469 - DNA, 25 bp, Homo sapien
tgaatttcgaagagattctggtcct

SEQ ID NO: 1486470 - DNA, 25 bp, Homo sapien
tagcctaagagtcatatacaacagt

SEQ ID NO: 1486471 - DNA, 25 bp, Homo sapien
tctcggtgcctctcctaaagagacg

SEQ ID NO: 1486472 - DNA, 25 bp, Homo sapien
gactagccaatctggtgcttgagca

SEQ ID NO: 1486473 - DNA, 25 bp, Homo sapien
gattcaaattggcagaactctcggt

SEQ ID NO: 1486474 - DNA, 25 bp, Homo sapien
acacgggaggacaaaaacgccactg

SEQ ID NO: 1486475 - DNA, 25 bp, Homo sapien
ctatggctgacccaacttcaggacc

SEQ ID NO: 1486476 - DNA, 25 bp, Homo sapien
tcatcaaaatatctagtatctgtct

SEQ ID NO: 1486477 - DNA, 25 bp, Homo sapien
tagtctgagctgtaaattcttcatc

SEQ ID NO: 1486478 - DNA, 25 bp, Homo sapien
caaaatatctagtatctgtctcaga

SEQ ID NO: 1486479 - DNA, 25 bp, Homo sapien
ttcaggtggtgttattgtaatagtc

SEQ ID NO: 1486480 - DNA, 25 bp, Homo sapien
cagaaggatcttaaccacaactata

SEQ ID NO: 1486481 - DNA, 25 bp, Homo sapien
cttcgttggtgaaaatatgtgggtc

SEQ ID NO: 1486482 - DNA, 25 bp, Homo sapien
ctagaacagaccacactggtagtga

SEQ ID NO: 1486483 - DNA, 25 bp, Homo sapien
gatatcaagttaatacctgcctcac

SEQ ID NO: 1486484 - DNA, 25 bp, Homo sapien
gaacaaggctttagcagtcagcata

SEQ ID NO: 1486485 - DNA, 25 bp, Homo sapien
tccagcaatcggtacctctttatag

SEQ ID NO: 1486486 - DNA, 25 bp, Homo sapien
cctctgagcctatccctacatgtga

SEQ ID NO: 1486487 - DNA, 25 bp, Homo sapien
tctctgaaagataagtaggaatgca

SEQ ID NO: 1486488 - DNA, 25 bp, Homo sapien
agagcctcgcgggtcacacaggaca

SEQ ID NO: 1486489 - DNA, 25 bp, Homo sapien
aggacaccgtgagtaagcctgtaga

SEQ ID NO: 1486490 - DNA, 25 bp, Homo sapien
tagatggcaccaatccacgaccaat

SEQ ID NO: 1486491 - DNA, 25 bp, Homo sapien
taataaagttgctccttcaagtata

SEQ ID NO: 1486492 - DNA, 25 bp, Homo sapien
gagctgagataggacaggccttgct

SEQ ID NO: 1486493 - DNA, 25 bp, Homo sapien
tggagctgagataggacaggccttg

SEQ ID NO: 1486494 - DNA, 25 bp, Homo sapien
agtggagctgagataggacaggcct

SEQ ID NO: 1486495 - DNA, 25 bp, Homo sapien
agctgagataggacaggccttgctt

SEQ ID NO: 1486496 - DNA, 25 bp, Homo sapien
tacacactatgccataaagaaatct

SEQ ID NO: 1486497 - DNA, 25 bp, Homo sapien
aattcattttagcagtgcagccaaa

SEQ ID NO: 1486498 - DNA, 25 bp, Homo sapien
aatgtcggtaaaatggaaagtatca

SEQ ID NO: 1486499 - DNA, 25 bp, Homo sapien
agttcaataatcacttaaatgtcgg

SEQ ID NO: 1486500 - DNA, 25 bp, Homo sapien
catatacatcttgccagtttactcc

SEQ ID NO: 1486501 - DNA, 25 bp, Homo sapien
tttttatcatatacatcttgccagt

SEQ ID NO: 1486502 - DNA, 25 bp, Homo sapien
gccagtttactccagagaagaaact

SEQ ID NO: 1486503 - DNA, 25 bp, Homo sapien
gaagaaactgtgtctcataatttct

SEQ ID NO: 1486504 - DNA, 25 bp, Homo sapien
aagcttttgctataagatctatttt

SEQ ID NO: 1486505 - DNA, 25 bp, Homo sapien
catttacataagctcaaagcataac

SEQ ID NO: 1486506 - DNA, 25 bp, Homo sapien
cagttcttgggataaatagctctaa

SEQ ID NO: 1486507 - DNA, 25 bp, Homo sapien
tgcttgtaagaactagcttcagaac

SEQ ID NO: 1486508 - DNA, 25 bp, Homo sapien
aaccttgcctgacctagccaccacc

SEQ ID NO: 1486509 - DNA, 25 bp, Homo sapien
ttgcctgacctagccaccaccacac

SEQ ID NO: 1486510 - DNA, 25 bp, Homo sapien
tgctgggaccaaaccttgcctgacc

SEQ ID NO: 1486511 - DNA, 25 bp, Homo sapien
ctgctgggaccaaaccttgcctgac

SEQ ID NO: 1486512 - DNA, 25 bp, Homo sapien
tgctgtacgccaaagccactaatgg

SEQ ID NO: 1486513 - DNA, 25 bp, Homo sapien
gaaacttacgattagttccaacatg

SEQ ID NO: 1486514 - DNA, 25 bp, Homo sapien
gccactaatggatgaaacttacgat

SEQ ID NO: 1486515 - DNA, 25 bp, Homo sapien
gttaatttctgctgtacgccaaagc

SEQ ID NO: 1486516 - DNA, 25 bp, Homo sapien
aacaaaacagtaagtgcagccccaa

SEQ ID NO: 1486517 - DNA, 25 bp, Homo sapien
taagaaacacatgactgggaaggac

SEQ ID NO: 1486518 - DNA, 25 bp, Homo sapien
ggccagtttcgagctaccaataaga

SEQ ID NO: 1486519 - DNA, 25 bp, Homo sapien
aaattgtcaagccatcgtaggtcag

SEQ ID NO: 1486520 - DNA, 25 bp, Homo sapien
tcaagcatgcgtcaacatagtctgc

SEQ ID NO: 1486521 - DNA, 25 bp, Homo sapien
aaatgaactataccccagagatggc

SEQ ID NO: 1486522 - DNA, 25 bp, Homo sapien
gcaaaagcaccaaaacacgtttctg

SEQ ID NO: 1486523 - DNA, 25 bp, Homo sapien
tcctttgaaggcaagatcagtgctg

SEQ ID NO: 1486524 - DNA, 25 bp, Homo sapien
gaactaacagcaattcaataagaaa

SEQ ID NO: 1486525 - DNA, 25 bp, Homo sapien
aaatgatagttgacccttggataga

SEQ ID NO: 1486526 - DNA, 25 bp, Homo sapien
tgcttttcctatcaactccgcatag

SEQ ID NO: 1486527 - DNA, 25 bp, Homo sapien
tcaactccgcataggaagataaagg

SEQ ID NO: 1486528 - DNA, 25 bp, Homo sapien
ccagtctactgctcggccatagtca

SEQ ID NO: 1486529 - DNA, 25 bp, Homo sapien
tcaagagccctgaaagcaatgattt

SEQ ID NO: 1486530 - DNA, 25 bp, Homo sapien
tttcatacatgacaacccctaggcc

SEQ ID NO: 1486531 - DNA, 25 bp, Homo sapien
tatttggatcctttatcaagagccc

SEQ ID NO: 1486532 - DNA, 25 bp, Homo sapien
gtgaactgccaaaacgcacttaaca

SEQ ID NO: 1486533 - DNA, 25 bp, Homo sapien
gattatctgctggtacatttgagga

SEQ ID NO: 1486534 - DNA, 25 bp, Homo sapien
ttgtgtgatcacataagcatgtgaa

SEQ ID NO: 1486535 - DNA, 25 bp, Homo sapien
catttgaggactgggcataataaaa

SEQ ID NO: 1486536 - DNA, 25 bp, Homo sapien
ctgtgatcccttctttgcaaagtcc

SEQ ID NO: 1486537 - DNA, 25 bp, Homo sapien
tctggtgccagatattctggagtgc

SEQ ID NO: 1486538 - DNA, 25 bp, Homo sapien
tggtgccagatattctggagtgcca

SEQ ID NO: 1486539 - DNA, 25 bp, Homo sapien
ggctgcatctgtgatcccttctttg

SEQ ID NO: 1486540 - DNA, 25 bp, Homo sapien
tgtagatagtccaaggcagagacaa

SEQ ID NO: 1486541 - DNA, 25 bp, Homo sapien
aaacgtgtgcggtcctcagagaaca

SEQ ID NO: 1486542 - DNA, 25 bp, Homo sapien
gagatcacggtacacaatctttccg

SEQ ID NO: 1486543 - DNA, 25 bp, Homo sapien
aacacccgctctctcgacaaatgga

SEQ ID NO: 1486544 - DNA, 25 bp, Homo sapien
tgatagatagtgtactctcagtgga

SEQ ID NO: 1486545 - DNA, 25 bp, Homo sapien
tgagcactcttagacagcagctggc

SEQ ID NO: 1486546 - DNA, 25 bp, Homo sapien
cacaaacataaaacacctctcatca

SEQ ID NO: 1486547 - DNA, 25 bp, Homo sapien
cagggacaggattgtaataattact

SEQ ID NO: 1486548 - DNA, 25 bp, Homo sapien
cccatttaaccttcagttaccagag

SEQ ID NO: 1486549 - DNA, 25 bp, Homo sapien
aatcagcgttttaatcaatatacca

SEQ ID NO: 1486550 - DNA, 25 bp, Homo sapien
ttgctacccatttaaccttcagtta

SEQ ID NO: 1486551 - DNA, 25 bp, Homo sapien
caatataccaatcttgtttaaggca

SEQ ID NO: 1486552 - DNA, 25 bp, Homo sapien
taccagcctaacaaggatagaaagt

SEQ ID NO: 1486553 - DNA, 25 bp, Homo sapien
tatattatcaatgtattaccagcct

SEQ ID NO: 1486554 - DNA, 25 bp, Homo sapien
gctacgaattgggactgcatcatca

SEQ ID NO: 1486555 - DNA, 25 bp, Homo sapien
cacatgatctattctaaaaggcatt

SEQ ID NO: 1486556 - DNA, 25 bp, Homo sapien
ctgccctaaacatttgatgggcata

SEQ ID NO: 1486557 - DNA, 25 bp, Homo sapien
tgccctaaacatttgatgggcatat

SEQ ID NO: 1486558 - DNA, 25 bp, Homo sapien
cacatagtacagtgcctgccttgaa

SEQ ID NO: 1486559 - DNA, 25 bp, Homo sapien
ttaaatgcagagaccatctgtcttg

SEQ ID NO: 1486560 - DNA, 25 bp, Homo sapien
tcatgtagtatactaagcacatagt

SEQ ID NO: 1486561 - DNA, 25 bp, Homo sapien
ttgctcatgtagtatactaagcaca

SEQ ID NO: 1486562 - DNA, 25 bp, Homo sapien
cctagcgaacgcagtaagcatttaa

SEQ ID NO: 1486563 - DNA, 25 bp, Homo sapien
aatacatacttttgattgaatgagc

SEQ ID NO: 1486564 - DNA, 25 bp, Homo sapien
tacttttgattgaatgagctaatct

SEQ ID NO: 1486565 - DNA, 25 bp, Homo sapien
gttttattcatcctagcgaacgcag

SEQ ID NO: 1486566 - DNA, 25 bp, Homo sapien
ttagttcaaatgcacctttcctcct

SEQ ID NO: 1486567 - DNA, 25 bp, Homo sapien
tagttcaaatgcacctttcctccta

SEQ ID NO: 1486568 - DNA, 25 bp, Homo sapien
gatgttatttttatcgtggtgatga

SEQ ID NO: 1486569 - DNA, 25 bp, Homo sapien
ctatcagacctgcactacaaaaaca

SEQ ID NO: 1486570 - DNA, 25 bp, Homo sapien
gatttcatgggtcaaaagttatcag

SEQ ID NO: 1486571 - DNA, 25 bp, Homo sapien
aagctaacaaaagttacggctatca

SEQ ID NO: 1486572 - DNA, 25 bp, Homo sapien
gtttgactaccttgaaatggccatg

SEQ ID NO: 1486573 - DNA, 25 bp, Homo sapien
aaagactaccatgccaagtgtggtg

SEQ ID NO: 1486574 - DNA, 25 bp, Homo sapien
atcatgtaaatacccagatgcctgg

SEQ ID NO: 1486575 - DNA, 25 bp, Homo sapien
cactctgtggtaagccagcctttgt

SEQ ID NO: 1486576 - DNA, 25 bp, Homo sapien
tgttacatgttgaggcttgtaataa

SEQ ID NO: 1486577 - DNA, 25 bp, Homo sapien
ggcttgtaataacatctcctaataa

SEQ ID NO: 1486578 - DNA, 25 bp, Homo sapien
tacatgttgaggcttgtaataacat

SEQ ID NO: 1486579 - DNA, 25 bp, Homo sapien
tgttgaggcttgtaataacatctcc

SEQ ID NO: 1486580 - DNA, 25 bp, Homo sapien
cagtgagatactggtttaaccattc

SEQ ID NO: 1486581 - DNA, 25 bp, Homo sapien
ttgtaatgcatccttcttgacttgg

SEQ ID NO: 1486582 - DNA, 25 bp, Homo sapien
ttcccgactttacattgcctttaga

SEQ ID NO: 1486583 - DNA, 25 bp, Homo sapien
atatactaaaaatgcttcccgactt

SEQ ID NO: 1486584 - DNA, 25 bp, Homo sapien
gaactagaatactgactactggtgc

SEQ ID NO: 1486585 - DNA, 25 bp, Homo sapien
aagaacctgaaagccgtattgcaaa

SEQ ID NO: 1486586 - DNA, 25 bp, Homo sapien
cagacacctgacaataaagatgttt

SEQ ID NO: 1486587 - DNA, 25 bp, Homo sapien
tctgaataagcatgagaatctcaag

SEQ ID NO: 1486588 - DNA, 25 bp, Homo sapien
tgcagaggtccaacaaataagcctg

SEQ ID NO: 1486589 - DNA, 25 bp, Homo sapien
ttggaaacaagtcctaagtagagac

SEQ ID NO: 1486590 - DNA, 25 bp, Homo sapien
gagagctgcctggatatattagcag

SEQ ID NO: 1486591 - DNA, 25 bp, Homo sapien
tcagacttgagagagatttgcagag

SEQ ID NO: 1486592 - DNA, 25 bp, Homo sapien
cagctgtgtctacagcatgccttac

SEQ ID NO: 1486593 - DNA, 25 bp, Homo sapien
agctgtgtctacagcatgccttact

SEQ ID NO: 1486594 - DNA, 25 bp, Homo sapien
gctgtgtctacagcatgccttactc

SEQ ID NO: 1486595 - DNA, 25 bp, Homo sapien
ctgtgtctacagcatgccttactct

SEQ ID NO: 1486596 - DNA, 25 bp, Homo sapien
atctctcgacatagttaaacccagg

SEQ ID NO: 1486597 - DNA, 25 bp, Homo sapien
tgcacagtaaccagtattatcagag

SEQ ID NO: 1486598 - DNA, 25 bp, Homo sapien
taagaagagtttcctactctggcac

SEQ ID NO: 1486599 - DNA, 25 bp, Homo sapien
tagaacggtattacactggagacca

SEQ ID NO: 1486600 - DNA, 25 bp, Homo sapien
tgaacacctgcagttacaatgcact

SEQ ID NO: 1486601 - DNA, 25 bp, Homo sapien
caccagagtttatattccatgaagc

SEQ ID NO: 1486602 - DNA, 25 bp, Homo sapien
tcagctgcccaaagcaccagaatta

SEQ ID NO: 1486603 - DNA, 25 bp, Homo sapien
gcagttacaatgcactcaatgacat

SEQ ID NO: 1486604 - DNA, 25 bp, Homo sapien
tccattgtaccaatacgaccgtaag

SEQ ID NO: 1486605 - DNA, 25 bp, Homo sapien
tacgaccgtaagaagttagggctga

SEQ ID NO: 1486606 - DNA, 25 bp, Homo sapien
ggttatctccatgctgttctgctga

SEQ ID NO: 1486607 - DNA, 25 bp, Homo sapien
tacttaacaactgggatatggcctg

SEQ ID NO: 1486608 - DNA, 25 bp, Homo sapien
tattgggctgtctcattctttcaga

SEQ ID NO: 1486609 - DNA, 25 bp, Homo sapien
tgctttatactcgtctgcacctagt

SEQ ID NO: 1486610 - DNA, 25 bp, Homo sapien
taagcagactccttacgaatgctca

SEQ ID NO: 1486611 - DNA, 25 bp, Homo sapien
taatacccagtgcataatttcagag

SEQ ID NO: 1486612 - DNA, 25 bp, Homo sapien
aggtggtagtaagcttagattgtgc

SEQ ID NO: 1486613 - DNA, 25 bp, Homo sapien
cagaaagcccacaataaaaatattt

SEQ ID NO: 1486614 - DNA, 25 bp, Homo sapien
taagttcatgagacacaaacaagac

SEQ ID NO: 1486615 - DNA, 25 bp, Homo sapien
acattgactgtgatcaaaaccaagg

SEQ ID NO: 1486616 - DNA, 25 bp, Homo sapien
caaaacacaaacggtcttttgtctg

SEQ ID NO: 1486617 - DNA, 25 bp, Homo sapien
acacaaacggtcttttgtctggaag

SEQ ID NO: 1486618 - DNA, 25 bp, Homo sapien
ctgctttcagttagagtgtgtgcca

SEQ ID NO: 1486619 - DNA, 25 bp, Homo sapien
tttaatactctgctttcagttagag

SEQ ID NO: 1486620 - DNA, 25 bp, Homo sapien
cagttagagtgtgtgccacttcatc

SEQ ID NO: 1486621 - DNA, 25 bp, Homo sapien
taatactctgctttcagttagagtg

SEQ ID NO: 1486622 - DNA, 25 bp, Homo sapien
caattgctatttccccttgctggaa

SEQ ID NO: 1486623 - DNA, 25 bp, Homo sapien
tcagtgaggccttccatagtcatgc

SEQ ID NO: 1486624 - DNA, 25 bp, Homo sapien
tagaatgtgctaagtaagctccctc

SEQ ID NO: 1486625 - DNA, 25 bp, Homo sapien
gttccacaccatgctagactcctag

SEQ ID NO: 1486626 - DNA, 25 bp, Homo sapien
tcaccaaaagtaagtcataaccatt

SEQ ID NO: 1486627 - DNA, 25 bp, Homo sapien
caccaaaagtaagtcataaccattt

SEQ ID NO: 1486628 - DNA, 25 bp, Homo sapien
caaaagtaagtcataaccatttcac

SEQ ID NO: 1486629 - DNA, 25 bp, Homo sapien
ccaaaagtaagtcataaccatttca

SEQ ID NO: 1486630 - DNA, 25 bp, Homo sapien
tgaatgagtttgtctctgtccagac

SEQ ID NO: 1486631 - DNA, 25 bp, Homo sapien
gtctctgtccagactaacaacaaac

SEQ ID NO: 1486632 - DNA, 25 bp, Homo sapien
ttcttgactgataatcactcttggt

SEQ ID NO: 1486633 - DNA, 25 bp, Homo sapien
tcttgactgataatcactcttggtt

SEQ ID NO: 1486634 - DNA, 25 bp, Homo sapien
gacgcatgccaccaagccaagctaa

SEQ ID NO: 1486635 - DNA, 25 bp, Homo sapien
ttacagacgcatgccaccaagccaa

SEQ ID NO: 1486636 - DNA, 25 bp, Homo sapien
tacagacgcatgccaccaagccaag

SEQ ID NO: 1486637 - DNA, 25 bp, Homo sapien
cagacgcatgccaccaagccaagct

SEQ ID NO: 1486638 - DNA, 25 bp, Homo sapien
aactggtattcatcgggttcctgaa

SEQ ID NO: 1486639 - DNA, 25 bp, Homo sapien
ttagcttgagctatggctgttagcc

SEQ ID NO: 1486640 - DNA, 25 bp, Homo sapien
gctgttagcctccaggataaaccca

SEQ ID NO: 1486641 - DNA, 25 bp, Homo sapien
aacattgtccaaatggtgggtgaca

SEQ ID NO: 1486642 - DNA, 25 bp, Homo sapien
aatgacatgttcgacactggagtgc

SEQ ID NO: 1486643 - DNA, 25 bp, Homo sapien
gatagtcaacgaagtcccaagcagg

SEQ ID NO: 1486644 - DNA, 25 bp, Homo sapien
catggtggaccaaaagagatttagc

SEQ ID NO: 1486645 - DNA, 25 bp, Homo sapien
tgaaggccatatgcacacctgtagg

SEQ ID NO: 1486646 - DNA, 25 bp, Homo sapien
tcttgggtaatgtcagagaaacact

SEQ ID NO: 1486647 - DNA, 25 bp, Homo sapien
tgcaactgtctttatgactgaagga

SEQ ID NO: 1486648 - DNA, 25 bp, Homo sapien
acgattattggtttgctcccgggca

SEQ ID NO: 1486649 - DNA, 25 bp, Homo sapien
gactgaaggacataacataatccta

SEQ ID NO: 1486650 - DNA, 25 bp, Homo sapien
ccaaaaaaggctaagggtcatctga

SEQ ID NO: 1486651 - DNA, 25 bp, Homo sapien
caaaagtattgcaataaaacgagtc

SEQ ID NO: 1486652 - DNA, 25 bp, Homo sapien
gagtcacactaactttgtggtgtcc

SEQ ID NO: 1486653 - DNA, 25 bp, Homo sapien
tctgagccctcagcaagttgttatc

SEQ ID NO: 1486654 - DNA, 25 bp, Homo sapien
tgccttctctcgaaccaaaataact

SEQ ID NO: 1486655 - DNA, 25 bp, Homo sapien
catagtattttccacttgccttctc

SEQ ID NO: 1486656 - DNA, 25 bp, Homo sapien
tacctagtagtttcaaatagtcaaa

SEQ ID NO: 1486657 - DNA, 25 bp, Homo sapien
tcttcagaatcttcatagcatagta

SEQ ID NO: 1486658 - DNA, 25 bp, Homo sapien
caagattaggcacttctgggttctc

SEQ ID NO: 1486659 - DNA, 25 bp, Homo sapien
caagaatggtagcttggctgaccaa

SEQ ID NO: 1486660 - DNA, 25 bp, Homo sapien
taggtgatacaatcccaagaactgg

SEQ ID NO: 1486661 - DNA, 25 bp, Homo sapien
cagttgatcccagagaagcttatgc

SEQ ID NO: 1486662 - DNA, 25 bp, Homo sapien
gaaaagagggattcagttcaacaaa

SEQ ID NO: 1486663 - DNA, 25 bp, Homo sapien
cacatgtacaaaagaagctttctta

SEQ ID NO: 1486664 - DNA, 25 bp, Homo sapien
gaggaacaaggcagattaaattgac

SEQ ID NO: 1486665 - DNA, 25 bp, Homo sapien
taggtgggtgtagctagactttgtt

SEQ ID NO: 1486666 - DNA, 25 bp, Homo sapien
gactttactatgactgagggcacca

SEQ ID NO: 1486667 - DNA, 25 bp, Homo sapien
tttactatgactgagggcaccaatc

SEQ ID NO: 1486668 - DNA, 25 bp, Homo sapien
tatgactgagggcaccaatcaggaa

SEQ ID NO: 1486669 - DNA, 25 bp, Homo sapien
ctgactttactatgactgagggcac

SEQ ID NO: 1486670 - DNA, 25 bp, Homo sapien
cctatattatcaatttgtgaagttg

SEQ ID NO: 1486671 - DNA, 25 bp, Homo sapien
tatcaatttgtgaagttggactaca

SEQ ID NO: 1486672 - DNA, 25 bp, Homo sapien
tgtgaagttggactacaattcattc

SEQ ID NO: 1486673 - DNA, 25 bp, Homo sapien
gttggactacaattcattctctcct

SEQ ID NO: 1486674 - DNA, 25 bp, Homo sapien
cacatgcctaaagtctgtagtagca

SEQ ID NO: 1486675 - DNA, 25 bp, Homo sapien
tcccattaatagaagatggtaaatg

SEQ ID NO: 1486676 - DNA, 25 bp, Homo sapien
gataagcatacactctcaccatcac

SEQ ID NO: 1486677 - DNA, 25 bp, Homo sapien
aaacacactcaacacagataagcat

SEQ ID NO: 1486678 - DNA, 25 bp, Homo sapien
ggacacaacacatgaaaactgaggt

SEQ ID NO: 1486679 - DNA, 25 bp, Homo sapien
tactctttcttacagggtacagtcc

SEQ ID NO: 1486680 - DNA, 25 bp, Homo sapien
tttagcaagctcctagaaaactagc

SEQ ID NO: 1486681 - DNA, 25 bp, Homo sapien
gaaaactagcaaagttgaatcacct

SEQ ID NO: 1486682 - DNA, 25 bp, Homo sapien
cctacagcatttttgcggaaacaga

SEQ ID NO: 1486683 - DNA, 25 bp, Homo sapien
caccacaaagtaagctacagattca

SEQ ID NO: 1486684 - DNA, 25 bp, Homo sapien
agggcttcatacctcctgacttcaa

SEQ ID NO: 1486685 - DNA, 25 bp, Homo sapien
gttaagatgtcaacaccacaaagta

SEQ ID NO: 1486686 - DNA, 25 bp, Homo sapien
ctaaccctctctaagtcttcaatga

SEQ ID NO: 1486687 - DNA, 25 bp, Homo sapien
tatacagatttagtttatgacaggt

SEQ ID NO: 1486688 - DNA, 25 bp, Homo sapien
taaagtcatatagattcagtttgcc

SEQ ID NO: 1486689 - DNA, 25 bp, Homo sapien
tcttcaatgatattacactaaagtc

SEQ ID NO: 1486690 - DNA, 25 bp, Homo sapien
ctataacagtagtccactggagaca

SEQ ID NO: 1486691 - DNA, 25 bp, Homo sapien
tctctataacagtagtccactggag

SEQ ID NO: 1486692 - DNA, 25 bp, Homo sapien
gttctctctataacagtagtccact

SEQ ID NO: 1486693 - DNA, 25 bp, Homo sapien
agtatctacatgaaatgttctctct

SEQ ID NO: 1486694 - DNA, 25 bp, Homo sapien
gggttatcccctagcaggatgctga

SEQ ID NO: 1486695 - DNA, 25 bp, Homo sapien
tctccacagtatagggatggacagg

SEQ ID NO: 1486696 - DNA, 25 bp, Homo sapien
ggagagggctccaatgtgtttgcct

SEQ ID NO: 1486697 - DNA, 25 bp, Homo sapien
cttgacatctcgtttctccaggtag

SEQ ID NO: 1486698 - DNA, 25 bp, Homo sapien
tctgtcttgtttgcccaccgaatcc

SEQ ID NO: 1486699 - DNA, 25 bp, Homo sapien
tagtggactcaaggaattaggcatg

SEQ ID NO: 1486700 - DNA, 25 bp, Homo sapien
gaggcatgcaaacatctagtggact

SEQ ID NO: 1486701 - DNA, 25 bp, Homo sapien
aaacgtactgtggtcattttgagac

SEQ ID NO: 1486702 - DNA, 25 bp, Homo sapien
tttatatttgaaacatgatgaaact

SEQ ID NO: 1486703 - DNA, 25 bp, Homo sapien
taagaaaagctatttatatttgaaa

SEQ ID NO: 1486704 - DNA, 25 bp, Homo sapien
gctatttatatttgaaacatgatga

SEQ ID NO: 1486705 - DNA, 25 bp, Homo sapien
atatttgaaacatgatgaaactggg

SEQ ID NO: 1486706 - DNA, 25 bp, Homo sapien
aggctcagacctttctgttatgctt

SEQ ID NO: 1486707 - DNA, 25 bp, Homo sapien
ccaaaggctcagacctttctgttat

SEQ ID NO: 1486708 - DNA, 25 bp, Homo sapien
aaaggctcagacctttctgttatgc

SEQ ID NO: 1486709 - DNA, 25 bp, Homo sapien
cttccaaaggctcagacctttctgt

SEQ ID NO: 1486710 - DNA, 25 bp, Homo sapien
gaaagctgcaggtttatctcccagc

SEQ ID NO: 1486711 - DNA, 25 bp, Homo sapien
tagcatgtatcaactcagaggaagc

SEQ ID NO: 1486712 - DNA, 25 bp, Homo sapien
cagacagacagactagtctagaggc

SEQ ID NO: 1486713 - DNA, 25 bp, Homo sapien
tcaaggccctactgtaaggtagtca

SEQ ID NO: 1486714 - DNA, 25 bp, Homo sapien
cactgggtgatacgtggcatagcac

SEQ ID NO: 1486715 - DNA, 25 bp, Homo sapien
tgctctagcagaaagaagtctcgct

SEQ ID NO: 1486716 - DNA, 25 bp, Homo sapien
cgaaagttctatgggtgctgacgac

SEQ ID NO: 1486717 - DNA, 25 bp, Homo sapien
gagagtccactattaacccactggg

SEQ ID NO: 1486718 - DNA, 25 bp, Homo sapien
gatgcagagggttgctttcacccct

SEQ ID NO: 1486719 - DNA, 25 bp, Homo sapien
ctgggagatcgtggaagctactaaa

SEQ ID NO: 1486720 - DNA, 25 bp, Homo sapien
gtccaatgatgttccagtataccag

SEQ ID NO: 1486721 - DNA, 25 bp, Homo sapien
tagtaaagcagtagaacctagtccc

SEQ ID NO: 1486722 - DNA, 25 bp, Homo sapien
tcagggtgggacaatatttgcagca

SEQ ID NO: 1486723 - DNA, 25 bp, Homo sapien
aatgttagcaagaccatgactcctg

SEQ ID NO: 1486724 - DNA, 25 bp, Homo sapien
tcagaagtaggataagcccaagaca

SEQ ID NO: 1486725 - DNA, 25 bp, Homo sapien
caaggtgtggatcacttgatgagcc

SEQ ID NO: 1486726 - DNA, 25 bp, Homo sapien
ggtaaatccacatcttgaggtttct

SEQ ID NO: 1486727 - DNA, 25 bp, Homo sapien
taaatccacatcttgaggtttctct

SEQ ID NO: 1486728 - DNA, 25 bp, Homo sapien
caaaaggaagtatcttggcctccag

SEQ ID NO: 1486729 - DNA, 25 bp, Homo sapien
ccactgaaaagttgttgaggggata

SEQ ID NO: 1486730 - DNA, 25 bp, Homo sapien
cacacaaatgtacagtaccataaaa

SEQ ID NO: 1486731 - DNA, 25 bp, Homo sapien
tttcaaagagcagctttaaaccaga

SEQ ID NO: 1486732 - DNA, 25 bp, Homo sapien
gcttcaagaaactatctttggcaat

SEQ ID NO: 1486733 - DNA, 25 bp, Homo sapien
tcaagaaactatctttggcaatact

SEQ ID NO: 1486734 - DNA, 25 bp, Homo sapien
tgcattgaataccaaccacaagatg

SEQ ID NO: 1486735 - DNA, 25 bp, Homo sapien
gagaattactcaatctgtacgcagc

SEQ ID NO: 1486736 - DNA, 25 bp, Homo sapien
tccacacggactagccaacagaaag

SEQ ID NO: 1486737 - DNA, 25 bp, Homo sapien
acagagaacaaagcatccacacgga

SEQ ID NO: 1486738 - DNA, 25 bp, Homo sapien
gaaaagtctagtagtatggacccta

SEQ ID NO: 1486739 - DNA, 25 bp, Homo sapien
agaaaagtctagtagtatggaccct

SEQ ID NO: 1486740 - DNA, 25 bp, Homo sapien
taagaaaagtctagtagtatggacc

SEQ ID NO: 1486741 - DNA, 25 bp, Homo sapien
ctctaagaaaagtctagtagtatgg

SEQ ID NO: 1486742 - DNA, 25 bp, Homo sapien
gactgacaataccaactgtcacaga

SEQ ID NO: 1486743 - DNA, 25 bp, Homo sapien
atctcagagtaaggctaaggaaacc

SEQ ID NO: 1486744 - DNA, 25 bp, Homo sapien
cacattagctgagcaaaggaggtat

SEQ ID NO: 1486745 - DNA, 25 bp, Homo sapien
gctcactgcaagcattatgtaagca

SEQ ID NO: 1486746 - DNA, 25 bp, Homo sapien
cttggccctctgagggcagtattac

SEQ ID NO: 1486747 - DNA, 25 bp, Homo sapien
catgggataagtcattccctaaggg

SEQ ID NO: 1486748 - DNA, 25 bp, Homo sapien
tcccctaagggaatgactcattagg

SEQ ID NO: 1486749 - DNA, 25 bp, Homo sapien
gtaatgaatctaactcccagcaaac

SEQ ID NO: 1486750 - DNA, 25 bp, Homo sapien
gcaagctgcatgtggaatgtggcaa

SEQ ID NO: 1486751 - DNA, 25 bp, Homo sapien
tactggcaaatagggctaatgctgg

SEQ ID NO: 1486752 - DNA, 25 bp, Homo sapien
cactggaaggtatcagaagcagcct

SEQ ID NO: 1486753 - DNA, 25 bp, Homo sapien
gatggtccaactattccgaaaagct

SEQ ID NO: 1486754 - DNA, 25 bp, Homo sapien
ggaactggcctagacagaaattctg

SEQ ID NO: 1486755 - DNA, 25 bp, Homo sapien
atggcacttaatacaaatgcatcca

SEQ ID NO: 1486756 - DNA, 25 bp, Homo sapien
tggcacttaatacaaatgcatccat

SEQ ID NO: 1486757 - DNA, 25 bp, Homo sapien
catggcacttaatacaaatgcatcc

SEQ ID NO: 1486758 - DNA, 25 bp, Homo sapien
gaatttcctttacgcctttcagcca

SEQ ID NO: 1486759 - DNA, 25 bp, Homo sapien
aattcctaggcagattgggacaggt

SEQ ID NO: 1486760 - DNA, 25 bp, Homo sapien
catgaagcctgaaaacctggctgct

SEQ ID NO: 1486761 - DNA, 25 bp, Homo sapien
tgctccttctagctggaatccacaa

SEQ ID NO: 1486762 - DNA, 25 bp, Homo sapien
caacgccttcttctgtaacacctcc

SEQ ID NO: 1486763 - DNA, 25 bp, Homo sapien
gcaataatgtgcatggggctgccat

SEQ ID NO: 1486764 - DNA, 25 bp, Homo sapien
tcttgtcccagtggagggcttttgg

SEQ ID NO: 1486765 - DNA, 25 bp, Homo sapien
gggctgccatctccaataacaacgc

SEQ ID NO: 1486766 - DNA, 25 bp, Homo sapien
gcaacaaacgttagcatgagtagcc

SEQ ID NO: 1486767 - DNA, 25 bp, Homo sapien
tagctgcaaaagtgggtgcatgctc

SEQ ID NO: 1486768 - DNA, 25 bp, Homo sapien
gagtagccagctcttactatcagtc

SEQ ID NO: 1486769 - DNA, 25 bp, Homo sapien
catcaccagtcattctcatagttga

SEQ ID NO: 1486770 - DNA, 25 bp, Homo sapien
tggctactttgttgaacagtacaaa

SEQ ID NO: 1486771 - DNA, 25 bp, Homo sapien
tcaacagccactttggcccatggct

SEQ ID NO: 1486772 - DNA, 25 bp, Homo sapien
ggctactttgttgaacagtacaaat

SEQ ID NO: 1486773 - DNA, 25 bp, Homo sapien
caggtcatttggctctcaaactcag

SEQ ID NO: 1486774 - DNA, 25 bp, Homo sapien
ggtcatttggctctcaaactcagac

SEQ ID NO: 1486775 - DNA, 25 bp, Homo sapien
atttggctctcaaactcagacctcc

SEQ ID NO: 1486776 - DNA, 25 bp, Homo sapien
ctgaagagtgcttgaaaaagttggc

SEQ ID NO: 1486777 - DNA, 25 bp, Homo sapien
tactggccaaggttgatgctacacc

SEQ ID NO: 1486778 - DNA, 25 bp, Homo sapien
tatgcacgttctatgatccagcagc

SEQ ID NO: 1486779 - DNA, 25 bp, Homo sapien
tcagcaaccataggaagaggcccat

SEQ ID NO: 1486780 - DNA, 25 bp, Homo sapien
taggtacatagccaacagaaatgtg

SEQ ID NO: 1486781 - DNA, 25 bp, Homo sapien
ggcaacacaaagaatgcgaactgct

SEQ ID NO: 1486782 - DNA, 25 bp, Homo sapien
aacactttgcaggtagtcccttggt

SEQ ID NO: 1486783 - DNA, 25 bp, Homo sapien
caagcagacatctgaagtgggcaaa

SEQ ID NO: 1486784 - DNA, 25 bp, Homo sapien
aggcacagacttcgtcccaagcaga

SEQ ID NO: 1486785 - DNA, 25 bp, Homo sapien
aagctttggtgggatatgggaatcc

SEQ ID NO: 1486786 - DNA, 25 bp, Homo sapien
gcaattccacctaaagatcaaagca

SEQ ID NO: 1486787 - DNA, 25 bp, Homo sapien
catatgtgcaaacccacctgaagca

SEQ ID NO: 1486788 - DNA, 25 bp, Homo sapien
agaaaactctcaagattccccaaag

SEQ ID NO: 1486789 - DNA, 25 bp, Homo sapien
caaactctaattatgggatgctcta

SEQ ID NO: 1486790 - DNA, 25 bp, Homo sapien
tcaacagtaaaggagcatctcactc

SEQ ID NO: 1486791 - DNA, 25 bp, Homo sapien
tatgaagccattccacatgaagaga

SEQ ID NO: 1486792 - DNA, 25 bp, Homo sapien
taaagagccctgacaatcaaatgca

SEQ ID NO: 1486793 - DNA, 25 bp, Homo sapien
tgttctcacatgaggctgaacaagg

SEQ ID NO: 1486794 - DNA, 25 bp, Homo sapien
aaatttgaataaactgatgcccatg

SEQ ID NO: 1486795 - DNA, 25 bp, Homo sapien
tgaacaaggtgtcactcagccttct

SEQ ID NO: 1486796 - DNA, 25 bp, Homo sapien
taattttcaaatactatgcccagct

SEQ ID NO: 1486797 - DNA, 25 bp, Homo sapien
tcagctgatgaagacgtgaccagag

SEQ ID NO: 1486798 - DNA, 25 bp, Homo sapien
tatttcacctagagcaatgggtcag

SEQ ID NO: 1486799 - DNA, 25 bp, Homo sapien
tgggtgaaccctaaagacattaagc

SEQ ID NO: 1486800 - DNA, 25 bp, Homo sapien
catgaataataaccagcacagccag

SEQ ID NO: 1486801 - DNA, 25 bp, Homo sapien
agcagaatactgagactacgaagtt

SEQ ID NO: 1486802 - DNA, 25 bp, Homo sapien
gaagttaacatgaacaccctccagt

SEQ ID NO: 1486803 - DNA, 25 bp, Homo sapien
ctgagactacgaagttaacatgaac

SEQ ID NO: 1486804 - DNA, 25 bp, Homo sapien
gactacgaagttaacatgaacaccc

SEQ ID NO: 1486805 - DNA, 25 bp, Homo sapien
cctgaactcggatttcactgccgat

SEQ ID NO: 1486806 - DNA, 25 bp, Homo sapien
cacaatagttgtaggaatcaccttg

SEQ ID NO: 1486807 - DNA, 25 bp, Homo sapien
ggcttttccctactctgatgctgta

SEQ ID NO: 1486808 - DNA, 25 bp, Homo sapien
tgttgatactattcaaatcgtttgc

SEQ ID NO: 1486809 - DNA, 25 bp, Homo sapien
tccagcctcatgcagatatgaatag

SEQ ID NO: 1486810 - DNA, 25 bp, Homo sapien
aggcaccacaatctccctcacgctg

SEQ ID NO: 1486811 - DNA, 25 bp, Homo sapien
ctcacgctggacactgctctctggg

SEQ ID NO: 1486812 - DNA, 25 bp, Homo sapien
tgggcaccaccatagccctcatgct

SEQ ID NO: 1486813 - DNA, 25 bp, Homo sapien
ccctcatgccgggtgatactgccag

SEQ ID NO: 1486814 - DNA, 25 bp, Homo sapien
cttggtccacgcacagtagccacag

SEQ ID NO: 1486815 - DNA, 25 bp, Homo sapien
gcagggctggccttcacggcctcct

SEQ ID NO: 1486816 - DNA, 25 bp, Homo sapien
ttggtccacgcacagtagccacagc

SEQ ID NO: 1486817 - DNA, 25 bp, Homo sapien
gctggccttcacggcctcctgtgct

SEQ ID NO: 1486818 - DNA, 25 bp, Homo sapien
tattgttgttcctagctgtgcagcc

SEQ ID NO: 1486819 - DNA, 25 bp, Homo sapien
gggaaatgcactgacctaaggttat

SEQ ID NO: 1486820 - DNA, 25 bp, Homo sapien
tgtgcagccccaatcttaatagcct

SEQ ID NO: 1486821 - DNA, 25 bp, Homo sapien
ggtattcaagcacaaagcagaacaa

SEQ ID NO: 1486822 - DNA, 25 bp, Homo sapien
caggtctcttgttctgcccttccat

SEQ ID NO: 1486823 - DNA, 25 bp, Homo sapien
ggtctcttgttctgcccttccatcc

SEQ ID NO: 1486824 - DNA, 25 bp, Homo sapien
ccacaggtctcttgttctgcccttc

SEQ ID NO: 1486825 - DNA, 25 bp, Homo sapien
acaggtctcttgttctgcccttcca

SEQ ID NO: 1486826 - DNA, 25 bp, Homo sapien
tacatagggtattcagagctgaacc

SEQ ID NO: 1486827 - DNA, 25 bp, Homo sapien
tgagtataccaatttgcctcaggtt

SEQ ID NO: 1486828 - DNA, 25 bp, Homo sapien
catctggactgaggaacctaggcca

SEQ ID NO: 1486829 - DNA, 25 bp, Homo sapien
tgttatgaaaaactagtcccagctc

SEQ ID NO: 1486830 - DNA, 25 bp, Homo sapien
atcgcctgaagcgaggagttcgaaa

SEQ ID NO: 1486831 - DNA, 25 bp, Homo sapien
taatgttttatcataatactgcaac

SEQ ID NO: 1486832 - DNA, 25 bp, Homo sapien
taatactgcaacaattcagttccat

SEQ ID NO: 1486833 - DNA, 25 bp, Homo sapien
gcctgaagcgaggagttcgaaaaca

SEQ ID NO: 1486834 - DNA, 25 bp, Homo sapien
aagcttcattcagtagctctggacc

SEQ ID NO: 1486835 - DNA, 25 bp, Homo sapien
ccctgggcggcataaagaacaaact

SEQ ID NO: 1486836 - DNA, 25 bp, Homo sapien
gtagctctggaccaaatgaatcaac

SEQ ID NO: 1486837 - DNA, 25 bp, Homo sapien
tgtttatctgctaatacagctgagc

SEQ ID NO: 1486838 - DNA, 25 bp, Homo sapien
tttcaactgacccacacatgctgca

SEQ ID NO: 1486839 - DNA, 25 bp, Homo sapien
catgctgcaggctctagaaaacaaa

SEQ ID NO: 1486840 - DNA, 25 bp, Homo sapien
cacaagccaccgtgcgtaactcaaa

SEQ ID NO: 1486841 - DNA, 25 bp, Homo sapien
aaatgctccctcttaccacatacca

SEQ ID NO: 1486842 - DNA, 25 bp, Homo sapien
gactcaagctattcatctaccttgg

SEQ ID NO: 1486843 - DNA, 25 bp, Homo sapien
ggactcaagctattcatctaccttg

SEQ ID NO: 1486844 - DNA, 25 bp, Homo sapien
tgggagcttcggacaaacacagtac

SEQ ID NO: 1486845 - DNA, 25 bp, Homo sapien
tttaaaccaagcaacaatccacggc

SEQ ID NO: 1486846 - DNA, 25 bp, Homo sapien
ggtactgtgtgattcctctgcaaag

SEQ ID NO: 1486847 - DNA, 25 bp, Homo sapien
aattcacttaaggtactctcagcag

SEQ ID NO: 1486848 - DNA, 25 bp, Homo sapien
taatcaaatagatcactaaacttct

SEQ ID NO: 1486849 - DNA, 25 bp, Homo sapien
tctaacattttcataaaggaatgcc

SEQ ID NO: 1486850 - DNA, 25 bp, Homo sapien
cctgataacatgacaatatagttcc

SEQ ID NO: 1486851 - DNA, 25 bp, Homo sapien
gaaggtatagatgaaagaggagttt

SEQ ID NO: 1486852 - DNA, 25 bp, Homo sapien
taagggataactgaactagggcagg

SEQ ID NO: 1486853 - DNA, 25 bp, Homo sapien
tagggcaggcactagatcctcattt

SEQ ID NO: 1486854 - DNA, 25 bp, Homo sapien
cacactggcgaatatggtcatcaac

SEQ ID NO: 1486855 - DNA, 25 bp, Homo sapien
catgagactttgtgccaggccttct

SEQ ID NO: 1486856 - DNA, 25 bp, Homo sapien
tactacttgctaggtgtacaacctt

SEQ ID NO: 1486857 - DNA, 25 bp, Homo sapien
ggataaagcagtgccaaccttacag

SEQ ID NO: 1486858 - DNA, 25 bp, Homo sapien
taagagtgttagctataagagggcc

SEQ ID NO: 1486859 - DNA, 25 bp, Homo sapien
tcaaatgcttacaatgctgcctggc

SEQ ID NO: 1486860 - DNA, 25 bp, Homo sapien
cagttccagttaatgaaaacctagc

SEQ ID NO: 1486861 - DNA, 25 bp, Homo sapien
aaaactcactggtgtgctaattgac

SEQ ID NO: 1486862 - DNA, 25 bp, Homo sapien
gacagtatcacccaactagttagga

SEQ ID NO: 1486863 - DNA, 25 bp, Homo sapien
tatctatgttattcctcagggccta

SEQ ID NO: 1486864 - DNA, 25 bp, Homo sapien
ccgtgatgacgttgccctgaggcta

SEQ ID NO: 1486865 - DNA, 25 bp, Homo sapien
ctggctaccgtgatacattaaggga

SEQ ID NO: 1486866 - DNA, 25 bp, Homo sapien
ccaggatccagacaatcaagtttgc

SEQ ID NO: 1486867 - DNA, 25 bp, Homo sapien
ggttctagatccacgcatgcctgag

SEQ ID NO: 1486868 - DNA, 25 bp, Homo sapien
tggaaggaggatgactttgacgagt

SEQ ID NO: 1486869 - DNA, 25 bp, Homo sapien
aggcttcagacaatcaaacttctca

SEQ ID NO: 1486870 - DNA, 25 bp, Homo sapien
cttcagacaatcaaacttctcagag

SEQ ID NO: 1486871 - DNA, 25 bp, Homo sapien
ttgagagcagaaggcttcagacaat

SEQ ID NO: 1486872 - DNA, 25 bp, Homo sapien
tgatcctaacaattcatgacctttg

SEQ ID NO: 1486873 - DNA, 25 bp, Homo sapien
tgacctttggaatcacaaatcttat

SEQ ID NO: 1486874 - DNA, 25 bp, Homo sapien
taacaattcatgacctttggaatca

SEQ ID NO: 1486875 - DNA, 25 bp, Homo sapien
tacacagtcatcccatgatcctaac

SEQ ID NO: 1486876 - DNA, 25 bp, Homo sapien
aactggatcactcccctaactttct

SEQ ID NO: 1486877 - DNA, 25 bp, Homo sapien
taggattgagagcagattaaaactg

SEQ ID NO: 1486878 - DNA, 25 bp, Homo sapien
ggatcactcccctaactttctagaa

SEQ ID NO: 1486879 - DNA, 25 bp, Homo sapien
tgcacaaggaaactacgaagtagga

SEQ ID NO: 1486880 - DNA, 25 bp, Homo sapien
cagattaaggattgtgcccacagac

SEQ ID NO: 1486881 - DNA, 25 bp, Homo sapien
gacatatataggtacagctgaccct

SEQ ID NO: 1486882 - DNA, 25 bp, Homo sapien
taaaagggcaagtatcccgactgtc

SEQ ID NO: 1486883 - DNA, 25 bp, Homo sapien
tttgagttccggtcagcatcagtga

SEQ ID NO: 1486884 - DNA, 25 bp, Homo sapien
tgttctcacgtgtaaatgggaggta

SEQ ID NO: 1486885 - DNA, 25 bp, Homo sapien
tgtttcaagaacacgctgagggtgt

SEQ ID NO: 1486886 - DNA, 25 bp, Homo sapien
gacaatgtatactcgatgtttcaag

SEQ ID NO: 1486887 - DNA, 25 bp, Homo sapien
tattacccggatgacgaaataatct

SEQ ID NO: 1486888 - DNA, 25 bp, Homo sapien
acagtcctcatcctactcgacgtgg

SEQ ID NO: 1486889 - DNA, 25 bp, Homo sapien
caggaactaaaaggttctgagaatg

SEQ ID NO: 1486890 - DNA, 25 bp, Homo sapien
ggccatgtgggtaaacagtagttgc

SEQ ID NO: 1486891 - DNA, 25 bp, Homo sapien
ccataaagtagatatacaggaacta

SEQ ID NO: 1486892 - DNA, 25 bp, Homo sapien
tatttttggtttgcggagcacttac

SEQ ID NO: 1486893 - DNA, 25 bp, Homo sapien
tatctctccagattacagaacctgt

SEQ ID NO: 1486894 - DNA, 25 bp, Homo sapien
taacacgctacacacaacataccag

SEQ ID NO: 1486895 - DNA, 25 bp, Homo sapien
gacatagcatgacacagtttaacag

SEQ ID NO: 1486896 - DNA, 25 bp, Homo sapien
aaccttctttcacaatggtaacatc

SEQ ID NO: 1486897 - DNA, 25 bp, Homo sapien
ttctttcacaatggtaacatcgctc

SEQ ID NO: 1486898 - DNA, 25 bp, Homo sapien
ctcttctgaacccaaccttctttca

SEQ ID NO: 1486899 - DNA, 25 bp, Homo sapien
ctttcacaatggtaacatcgctcat

SEQ ID NO: 1486900 - DNA, 25 bp, Homo sapien
gatatcagctttagggtttggattc

SEQ ID NO: 1486901 - DNA, 25 bp, Homo sapien
cccaacttggagaaatggtactttg

SEQ ID NO: 1486902 - DNA, 25 bp, Homo sapien
gtgatatcagctttagggtttggat

SEQ ID NO: 1486903 - DNA, 25 bp, Homo sapien
gagaaatggtactttgtgatatcag

SEQ ID NO: 1486904 - DNA, 25 bp, Homo sapien
ccaaataatagagaaaatttgtttg

SEQ ID NO: 1486905 - DNA, 25 bp, Homo sapien
aataatagagaaaatttgtttggtg

SEQ ID NO: 1486906 - DNA, 25 bp, Homo sapien
caaataatagagaaaatttgtttgg

SEQ ID NO: 1486907 - DNA, 25 bp, Homo sapien
aatagagaaaatttgtttggtgatg

SEQ ID NO: 1486908 - DNA, 25 bp, Homo sapien
tatttagtactcaagatgtgccaag

SEQ ID NO: 1486909 - DNA, 25 bp, Homo sapien
catacttgggaaagatacgtcacaa

SEQ ID NO: 1486910 - DNA, 25 bp, Homo sapien
aacacacctagtaaatgtggagcca

SEQ ID NO: 1486911 - DNA, 25 bp, Homo sapien
tgccaagaactgttacgggtactta

SEQ ID NO: 1486912 - DNA, 25 bp, Homo sapien
gacagcatcactggatcagccaaac

SEQ ID NO: 1486913 - DNA, 25 bp, Homo sapien
cagcagcgacagcatcactggatca

SEQ ID NO: 1486914 - DNA, 25 bp, Homo sapien
atcactggatcagccaaacccagca

SEQ ID NO: 1486915 - DNA, 25 bp, Homo sapien
gccagcagcgacagcatcactggat

SEQ ID NO: 1486916 - DNA, 25 bp, Homo sapien
tgtcttgacaactctcttatggtag

SEQ ID NO: 1486917 - DNA, 25 bp, Homo sapien
taacacagtccgtctgagagaaagt

SEQ ID NO: 1486918 - DNA, 25 bp, Homo sapien
tgaccaccctggagcaaaatttgcc

SEQ ID NO: 1486919 - DNA, 25 bp, Homo sapien
tattttaccatgcagcgcacttcag

SEQ ID NO: 1486920 - DNA, 25 bp, Homo sapien
gatactgctcacatcctgtaggtga

SEQ ID NO: 1486921 - DNA, 25 bp, Homo sapien
tattgtgagagatcactcatgagtc

SEQ ID NO: 1486922 - DNA, 25 bp, Homo sapien
tccaatgcaaatactgatactgctc

SEQ ID NO: 1486923 - DNA, 25 bp, Homo sapien
gattatactgtcttggatgcctcct

SEQ ID NO: 1486924 - DNA, 25 bp, Homo sapien
tagtcaccagtactgcgggtttggg

SEQ ID NO: 1486925 - DNA, 25 bp, Homo sapien
gatctggaccgctggtagagatgac

SEQ ID NO: 1486926 - DNA, 25 bp, Homo sapien
tcaaatgagttgtttctggtctgct

SEQ ID NO: 1486927 - DNA, 25 bp, Homo sapien
ggtgaggatctggaccgctggtaga

SEQ ID NO: 1486928 - DNA, 25 bp, Homo sapien
gatcaataagagattcccttctaac

SEQ ID NO: 1486929 - DNA, 25 bp, Homo sapien
gagattcccttctaacatcagcagc

SEQ ID NO: 1486930 - DNA, 25 bp, Homo sapien
tcaagggcttcgatcaataagagat

SEQ ID NO: 1486931 - DNA, 25 bp, Homo sapien
gcttcgatcaataagagattccctt

SEQ ID NO: 1486932 - DNA, 25 bp, Homo sapien
cattggccaagcatgggataacagc

SEQ ID NO: 1486933 - DNA, 25 bp, Homo sapien
cagtgtgaacctaagacccgtggac

SEQ ID NO: 1486934 - DNA, 25 bp, Homo sapien
tgcagtaaagacgtgctaagcacac

SEQ ID NO: 1486935 - DNA, 25 bp, Homo sapien
gtggtcagcaaaccgcctggactgt

SEQ ID NO: 1486936 - DNA, 25 bp, Homo sapien
gctaacattttacacgctcttccag

SEQ ID NO: 1486937 - DNA, 25 bp, Homo sapien
cattcacagcctttaagcacagcta

SEQ ID NO: 1486938 - DNA, 25 bp, Homo sapien
taagaacagcacattgacccttctt

SEQ ID NO: 1486939 - DNA, 25 bp, Homo sapien
ctttctgttaccaatatgtcgccaa

SEQ ID NO: 1486940 - DNA, 25 bp, Homo sapien
catttgactggcgtgtgaactcgtt

SEQ ID NO: 1486941 - DNA, 25 bp, Homo sapien
aaatgctctgataaacgaaaccgtc

SEQ ID NO: 1486942 - DNA, 25 bp, Homo sapien
tttgactggcgtgtgaactcgttgc

SEQ ID NO: 1486943 - DNA, 25 bp, Homo sapien
tgataaacgaaaccgtctcttccac

SEQ ID NO: 1486944 - DNA, 25 bp, Homo sapien
cgcttctgcaccgagaacctcgagg

SEQ ID NO: 1486945 - DNA, 25 bp, Homo sapien
ttctgcaccgagaacctcgaggcgc

SEQ ID NO: 1486946 - DNA, 25 bp, Homo sapien
tgcaccgagaacctcgaggcgcgca

SEQ ID NO: 1486947 - DNA, 25 bp, Homo sapien
gcttctgcaccgagaacctcgaggc

SEQ ID NO: 1486948 - DNA, 25 bp, Homo sapien
ccaagcccagcggcgaggtcggggc

SEQ ID NO: 1486949 - DNA, 25 bp, Homo sapien
aagcccagcggcgaggtcggggctg

SEQ ID NO: 1486950 - DNA, 25 bp, Homo sapien
gacgccaagcccagcggcgaggtcg

SEQ ID NO: 1486951 - DNA, 25 bp, Homo sapien
cgccaagcccagcggcgaggtcggg

SEQ ID NO: 1486952 - DNA, 25 bp, Homo sapien
gaagctaaattgaagtcgtttctgt

SEQ ID NO: 1486953 - DNA, 25 bp, Homo sapien
tgtggtagatggcttctgatatacg

SEQ ID NO: 1486954 - DNA, 25 bp, Homo sapien
tttatgtgttgcaacctcgccttag

SEQ ID NO: 1486955 - DNA, 25 bp, Homo sapien
gatatacgggagctacagccaggct

SEQ ID NO: 1486956 - DNA, 25 bp, Homo sapien
ccttggctgtggggcggttgataat

SEQ ID NO: 1486957 - DNA, 25 bp, Homo sapien
gtgagccttcgcagagaacaataac

SEQ ID NO: 1486958 - DNA, 25 bp, Homo sapien
ctgtggggcggttgataattagtga

SEQ ID NO: 1486959 - DNA, 25 bp, Homo sapien
gaacaataacctgggcttccaaatc

SEQ ID NO: 1486960 - DNA, 25 bp, Homo sapien
gacgctgtgggtcgaggaacttgct

SEQ ID NO: 1486961 - DNA, 25 bp, Homo sapien
cgaggaacttgctggaatctctgcc

SEQ ID NO: 1486962 - DNA, 25 bp, Homo sapien
catgacagagaaggacttaacgagt

SEQ ID NO: 1486963 - DNA, 25 bp, Homo sapien
gggcccagagctaccccgtgcatga

SEQ ID NO: 1486964 - DNA, 25 bp, Homo sapien
ttccccgcagctcggtccatgttag

SEQ ID NO: 1486965 - DNA, 25 bp, Homo sapien
aggggcctgtgattccccgcagctc

SEQ ID NO: 1486966 - DNA, 25 bp, Homo sapien
gagcgcggtgcccattccttgtttc

SEQ ID NO: 1486967 - DNA, 25 bp, Homo sapien
cgtgattccaaatagaggggagcgc

SEQ ID NO: 1486968 - DNA, 25 bp, Homo sapien
cgcccgggccagttgcacagcatgc

SEQ ID NO: 1486969 - DNA, 25 bp, Homo sapien
cccgggccagttgcacagcatgcgg

SEQ ID NO: 1486970 - DNA, 25 bp, Homo sapien
cgggccagttgcacagcatgcggcc

SEQ ID NO: 1486971 - DNA, 25 bp, Homo sapien
gccagttgcacagcatgcggccgaa

SEQ ID NO: 1486972 - DNA, 25 bp, Homo sapien
caaaagtaggtgagttgaagcctgg

SEQ ID NO: 1486973 - DNA, 25 bp, Homo sapien
tgtgcctccgtccatgtagcctttg

SEQ ID NO: 1486974 - DNA, 25 bp, Homo sapien
tgttggagtgggtactgaacccgga

SEQ ID NO: 1486975 - DNA, 25 bp, Homo sapien
aagcctggtcactctgagccacagg

SEQ ID NO: 1486976 - DNA, 25 bp, Homo sapien
gctccaagctcatagataggcagaa

SEQ ID NO: 1486977 - DNA, 25 bp, Homo sapien
cagaagcacactgccactaaaaacc

SEQ ID NO: 1486978 - DNA, 25 bp, Homo sapien
agctcatagataggcagaagcacac

SEQ ID NO: 1486979 - DNA, 25 bp, Homo sapien
ctggccctccgctctcaaacatctc

SEQ ID NO: 1486980 - DNA, 25 bp, Homo sapien
gaacacccgtgcttatttctgagct

SEQ ID NO: 1486981 - DNA, 25 bp, Homo sapien
acttcttgtcttgtgggacacacag

SEQ ID NO: 1486982 - DNA, 25 bp, Homo sapien
ctgagctaggcatgttggatcttac

SEQ ID NO: 1486983 - DNA, 25 bp, Homo sapien
catttattgtggcagacctaggaaa

SEQ ID NO: 1486984 - DNA, 25 bp, Homo sapien
ggccgcagtcttgcctctgagagga

SEQ ID NO: 1486985 - DNA, 25 bp, Homo sapien
tcgtattccgtcctcatcagcaagg

SEQ ID NO: 1486986 - DNA, 25 bp, Homo sapien
tatgatacttaggtgagctctgtcc

SEQ ID NO: 1486987 - DNA, 25 bp, Homo sapien
ggccatggaatgcaccttacaggat

SEQ ID NO: 1486988 - DNA, 25 bp, Homo sapien
tggttttagtaacgctccccagaca

SEQ ID NO: 1486989 - DNA, 25 bp, Homo sapien
aaatgctggtgtcagatggcttcgc

SEQ ID NO: 1486990 - DNA, 25 bp, Homo sapien
tcctggatgcttgttcctctgcaaa

SEQ ID NO: 1486991 - DNA, 25 bp, Homo sapien
ttaagtggaactgctcatctgtcag

SEQ ID NO: 1486992 - DNA, 25 bp, Homo sapien
tagggacaactcagcactggcagac

SEQ ID NO: 1486993 - DNA, 25 bp, Homo sapien
tcatctggctgatgtagactctggg

SEQ ID NO: 1486994 - DNA, 25 bp, Homo sapien
gccatcatctggctgatgtagactc

SEQ ID NO: 1486995 - DNA, 25 bp, Homo sapien
tcagtgtagggacaactcagcactg

SEQ ID NO: 1486996 - DNA, 25 bp, Homo sapien
tattcacgaggttgtgaaaccatca

SEQ ID NO: 1486997 - DNA, 25 bp, Homo sapien
aatatattcacgaggttgtgaaacc

SEQ ID NO: 1486998 - DNA, 25 bp, Homo sapien
aaattattttcaaagtatacagctc

SEQ ID NO: 1486999 - DNA, 25 bp, Homo sapien
tattttcaaagtatacagctcagtg

SEQ ID NO: 1487000 - DNA, 25 bp, Homo sapien
atttgaagctgttggtgatgccata

SEQ ID NO: 1487001 - DNA, 25 bp, Homo sapien
tatttgaagctgttggtgatgccat

SEQ ID NO: 1487002 - DNA, 25 bp, Homo sapien
tttgaagctgttggtgatgccatac

SEQ ID NO: 1487003 - DNA, 25 bp, Homo sapien
ctatttgaagctgttggtgatgcca

SEQ ID NO: 1487004 - DNA, 25 bp, Homo sapien
tgtacacttggtgagaagcaggtag

SEQ ID NO: 1487005 - DNA, 25 bp, Homo sapien
ccaaagatggtaagctggagagaag

SEQ ID NO: 1487006 - DNA, 25 bp, Homo sapien
tggagagaagactccgaacggaccc

SEQ ID NO: 1487007 - DNA, 25 bp, Homo sapien
gcagctgtccaagggtgatctgaac

SEQ ID NO: 1487008 - DNA, 25 bp, Homo sapien
aagaggctgaataagcagtttcttg

SEQ ID NO: 1487009 - DNA, 25 bp, Homo sapien
cttgctgatttcactgtgagcctct

SEQ ID NO: 1487010 - DNA, 25 bp, Homo sapien
ttgctgatttcactgtgagcctctc

SEQ ID NO: 1487011 - DNA, 25 bp, Homo sapien
tcttgctgatttcactgtgagcctc

SEQ ID NO: 1487012 - DNA, 25 bp, Homo sapien
tatctaatgacgagggtcctgcttc

SEQ ID NO: 1487013 - DNA, 25 bp, Homo sapien
tcttcctaggaaagagtgaattggg

SEQ ID NO: 1487014 - DNA, 25 bp, Homo sapien
tacaagttgcagtagtaacctggta

SEQ ID NO: 1487015 - DNA, 25 bp, Homo sapien
tgggaccaatttctcttggtggagc

SEQ ID NO: 1487016 - DNA, 25 bp, Homo sapien
aagagaaaaagagaatcctgaaggc

SEQ ID NO: 1487017 - DNA, 25 bp, Homo sapien
caagagaaaaagagaatcctgaagg

SEQ ID NO: 1487018 - DNA, 25 bp, Homo sapien
ttttgaagtttctccaggacaagag

SEQ ID NO: 1487019 - DNA, 25 bp, Homo sapien
ttccttttgaagtttctccaggaca

SEQ ID NO: 1487020 - DNA, 25 bp, Homo sapien
gcataagcactaattagatctaaaa

SEQ ID NO: 1487021 - DNA, 25 bp, Homo sapien
tacagtgccgattgttcgcctcggc

SEQ ID NO: 1487022 - DNA, 25 bp, Homo sapien
gttcgcctcggcttgcattccacat

SEQ ID NO: 1487023 - DNA, 25 bp, Homo sapien
gttactgggcaaattacagtgccga

SEQ ID NO: 1487024 - DNA, 25 bp, Homo sapien
atttgggcttctgtgtcagaaaggc

SEQ ID NO: 1487025 - DNA, 25 bp, Homo sapien
ggcttctgtgtcagaaaggctaaca

SEQ ID NO: 1487026 - DNA, 25 bp, Homo sapien
tgggcttctgtgtcagaaaggctaa

SEQ ID NO: 1487027 - DNA, 25 bp, Homo sapien
tttgggcttctgtgtcagaaaggct

SEQ ID NO: 1487028 - DNA, 25 bp, Homo sapien
tgatttctcaggacagtggagtgtg

SEQ ID NO: 1487029 - DNA, 25 bp, Homo sapien
tgtttgatttctcaggacagtggag

SEQ ID NO: 1487030 - DNA, 25 bp, Homo sapien
tttgatttctcaggacagtggagtg

SEQ ID NO: 1487031 - DNA, 25 bp, Homo sapien
atttctcaggacagtggagtgtggt

SEQ ID NO: 1487032 - DNA, 25 bp, Homo sapien
cgaaggcatcggggtgtccagagaa

SEQ ID NO: 1487033 - DNA, 25 bp, Homo sapien
agctgggcttgagggaggcagcagc

SEQ ID NO: 1487034 - DNA, 25 bp, Homo sapien
gggtgtccagagaagctgggcttga

SEQ ID NO: 1487035 - DNA, 25 bp, Homo sapien
agaagctgggcttgagggaggcagc

SEQ ID NO: 1487036 - DNA, 25 bp, Homo sapien
cacagcgggagaagttgatctcttt

SEQ ID NO: 1487037 - DNA, 25 bp, Homo sapien
tgcactaggtaagtctattaatcca

SEQ ID NO: 1487038 - DNA, 25 bp, Homo sapien
tctctttccactgggagattgatct

SEQ ID NO: 1487039 - DNA, 25 bp, Homo sapien
aaagcacagcgggagaagttgatct

SEQ ID NO: 1487040 - DNA, 25 bp, Homo sapien
ctctagagtctgtgatttcttgtct

SEQ ID NO: 1487041 - DNA, 25 bp, Homo sapien
tctagagtctgtgatttcttgtctt

SEQ ID NO: 1487042 - DNA, 25 bp, Homo sapien
tgctctgctcggagacacaatccct

SEQ ID NO: 1487043 - DNA, 25 bp, Homo sapien
gccgctttgccaaacaacgcacgtt

SEQ ID NO: 1487044 - DNA, 25 bp, Homo sapien
tcagcatggccctgatgatcggtat

SEQ ID NO: 1487045 - DNA, 25 bp, Homo sapien
gggagcaccgctttatacagcgtgc

SEQ ID NO: 1487046 - DNA, 25 bp, Homo sapien
ttttacaattaaagtgctctcgggc

SEQ ID NO: 1487047 - DNA, 25 bp, Homo sapien
tgaacactgttcataagtcggctgg

SEQ ID NO: 1487048 - DNA, 25 bp, Homo sapien
tctgctttatacaaaagtcgggtgc

SEQ ID NO: 1487049 - DNA, 25 bp, Homo sapien
gtcgggtgcaattgtatagaaatgc

SEQ ID NO: 1487050 - DNA, 25 bp, Homo sapien
ccagcaagagggaaaagccacacac

SEQ ID NO: 1487051 - DNA, 25 bp, Homo sapien
ggcccagcaagagggaaaagccaca

SEQ ID NO: 1487052 - DNA, 25 bp, Homo sapien
cccagcaagagggaaaagccacaca

SEQ ID NO: 1487053 - DNA, 25 bp, Homo sapien
cagggcccagcaagagggaaaagcc

SEQ ID NO: 1487054 - DNA, 25 bp, Homo sapien
taataggcgattctgaaagcgatgc

SEQ ID NO: 1487055 - DNA, 25 bp, Homo sapien
cccaaaaaatgatcgcggtagcagt

SEQ ID NO: 1487056 - DNA, 25 bp, Homo sapien
gacttcttcgtggagggacagccag

SEQ ID NO: 1487057 - DNA, 25 bp, Homo sapien
catagcattggccatagtcccctgt

SEQ ID NO: 1487058 - DNA, 25 bp, Homo sapien
ccaccaccaactctgccagcaccat

SEQ ID NO: 1487059 - DNA, 25 bp, Homo sapien
accaactctgccagcaccattgcca

SEQ ID NO: 1487060 - DNA, 25 bp, Homo sapien
caactctgccagcaccattgccacc

SEQ ID NO: 1487061 - DNA, 25 bp, Homo sapien
accaccaactctgccagcaccattg

SEQ ID NO: 1487062 - DNA, 25 bp, Homo sapien
tggtaaacaccctactttgaggtgc

SEQ ID NO: 1487063 - DNA, 25 bp, Homo sapien
taactagaactatacaggactggat

SEQ ID NO: 1487064 - DNA, 25 bp, Homo sapien
caaactcgacaggtgtcaagtagct

SEQ ID NO: 1487065 - DNA, 25 bp, Homo sapien
tacttgaggcggatattcagacttt

SEQ ID NO: 1487066 - DNA, 25 bp, Homo sapien
gacctagaattcatcgacagcacag

SEQ ID NO: 1487067 - DNA, 25 bp, Homo sapien
catttattccttaccttgaaacagg

SEQ ID NO: 1487068 - DNA, 25 bp, Homo sapien
gggccttctaccactagactgaaaa

SEQ ID NO: 1487069 - DNA, 25 bp, Homo sapien
caggtcagactgaaattgggccttc

SEQ ID NO: 1487070 - DNA, 25 bp, Homo sapien
taaagttgtggctagatacgtatca

SEQ ID NO: 1487071 - DNA, 25 bp, Homo sapien
tacgtatcaattaaggaatcaagct

SEQ ID NO: 1487072 - DNA, 25 bp, Homo sapien
gctgaggcatctgcaagtaccaatt

SEQ ID NO: 1487073 - DNA, 25 bp, Homo sapien
gcagtcttacatcgtccctcggtag

SEQ ID NO: 1487074 - DNA, 25 bp, Homo sapien
aagtcggcctcgagtcatccgtgtc

SEQ ID NO: 1487075 - DNA, 25 bp, Homo sapien
gttctgcccgtgacatgatgacgta

SEQ ID NO: 1487076 - DNA, 25 bp, Homo sapien
cagtgtaagtacacaagggacagga

SEQ ID NO: 1487077 - DNA, 25 bp, Homo sapien
tgatgacgtaagaacgactcccaga

SEQ ID NO: 1487078 - DNA, 25 bp, Homo sapien
atccgcggtagcgagacgtgaaggg

SEQ ID NO: 1487079 - DNA, 25 bp, Homo sapien
aaaacctctatggatccgcggtagc

SEQ ID NO: 1487080 - DNA, 25 bp, Homo sapien
tggatccgcggtagcgagacgtgaa

SEQ ID NO: 1487081 - DNA, 25 bp, Homo sapien
acctctatggatccgcggtagcgag

SEQ ID NO: 1487082 - DNA, 25 bp, Homo sapien
gaagctagtgggaaaacagaaatat

SEQ ID NO: 1487083 - DNA, 25 bp, Homo sapien
ccaaaatgcacttgctgagatgggt

SEQ ID NO: 1487084 - DNA, 25 bp, Homo sapien
tattaaattaagtgtatctattccc

SEQ ID NO: 1487085 - DNA, 25 bp, Homo sapien
caggagtttacccactgcagttgaa

SEQ ID NO: 1487086 - DNA, 25 bp, Homo sapien
gatggagatgcgtcggaagctcttt

SEQ ID NO: 1487087 - DNA, 25 bp, Homo sapien
ctccccaggttatgaagacagtatg

SEQ ID NO: 1487088 - DNA, 25 bp, Homo sapien
aattcagggacatgtaccacggcgg

SEQ ID NO: 1487089 - DNA, 25 bp, Homo sapien
aaaagttgttcctgaccaggctcta

SEQ ID NO: 1487090 - DNA, 25 bp, Homo sapien
cattgaagacgtgctagcagctgcc

SEQ ID NO: 1487091 - DNA, 25 bp, Homo sapien
tgaacagcgacattgttacagcccc

SEQ ID NO: 1487092 - DNA, 25 bp, Homo sapien
caccgagctgtactggcttcatgca

SEQ ID NO: 1487093 - DNA, 25 bp, Homo sapien
catgtatgaagggaaactccagttc

SEQ ID NO: 1487094 - DNA, 25 bp, Homo sapien
tgtggtacggtctaaaagcagtctt

SEQ ID NO: 1487095 - DNA, 25 bp, Homo sapien
taacagggtacagtatgagccggcc

SEQ ID NO: 1487096 - DNA, 25 bp, Homo sapien
ccttgtcggtcaaaagcgaagcact

SEQ ID NO: 1487097 - DNA, 25 bp, Homo sapien
cacgtgctcgctgtgtgggaagact

SEQ ID NO: 1487098 - DNA, 25 bp, Homo sapien
ttaaaactttctgtggcaacttctg

SEQ ID NO: 1487099 - DNA, 25 bp, Homo sapien
gaaaaaggatattgcagcttcagca

SEQ ID NO: 1487100 - DNA, 25 bp, Homo sapien
gagaaatgctgaaagtacactggga

SEQ ID NO: 1487101 - DNA, 25 bp, Homo sapien
tattaacgctacagaaatgcatgag

SEQ ID NO: 1487102 - DNA, 25 bp, Homo sapien
tactgcacaagttgacaataggtcg

SEQ ID NO: 1487103 - DNA, 25 bp, Homo sapien
tacacatttacccagttgagcgttc

SEQ ID NO: 1487104 - DNA, 25 bp, Homo sapien
gttttaatgaccagcacgcaaggca

SEQ ID NO: 1487105 - DNA, 25 bp, Homo sapien
tagactatgtggattgcggcagcag

SEQ ID NO: 1487106 - DNA, 25 bp, Homo sapien
tggaaaattgaaggagaccggatgt

SEQ ID NO: 1487107 - DNA, 25 bp, Homo sapien
tttggaagactgcttggctaatgac

SEQ ID NO: 1487108 - DNA, 25 bp, Homo sapien
taattttatcctaagttgatcggtc

SEQ ID NO: 1487109 - DNA, 25 bp, Homo sapien
ccgtaagtcacttttcgtgtgtaat

SEQ ID NO: 1487110 - DNA, 25 bp, Homo sapien
tttcacgtaacagggccgcgtattg

SEQ ID NO: 1487111 - DNA, 25 bp, Homo sapien
gccgcgtattggatgccttcagaat

SEQ ID NO: 1487112 - DNA, 25 bp, Homo sapien
tcccattcagcgtgtccactttgct

SEQ ID NO: 1487113 - DNA, 25 bp, Homo sapien
gccttcagaattcccattcagcgtg

SEQ ID NO: 1487114 - DNA, 25 bp, Homo sapien
tgattcctccctgctgacttgggga

SEQ ID NO: 1487115 - DNA, 25 bp, Homo sapien
cacctgtgcttctctcctggctcac

SEQ ID NO: 1487116 - DNA, 25 bp, Homo sapien
gagtgggcacctgtgcttctctcct

SEQ ID NO: 1487117 - DNA, 25 bp, Homo sapien
ctgattcctccctgctgacttgggg

SEQ ID NO: 1487118 - DNA, 25 bp, Homo sapien
gatcgttcatgtagagccgtggtta

SEQ ID NO: 1487119 - DNA, 25 bp, Homo sapien
ccagggatgaatcatgtagtaggca

SEQ ID NO: 1487120 - DNA, 25 bp, Homo sapien
gggcctgtcttcacgccagggatga

SEQ ID NO: 1487121 - DNA, 25 bp, Homo sapien
ctttggatacggctgatcgttcatg

SEQ ID NO: 1487122 - DNA, 25 bp, Homo sapien
ctggaaggggctacgcgagtcagct

SEQ ID NO: 1487123 - DNA, 25 bp, Homo sapien
aaggggctacgcgagtcagctcctc

SEQ ID NO: 1487124 - DNA, 25 bp, Homo sapien
tggaaggggctacgcgagtcagctc

SEQ ID NO: 1487125 - DNA, 25 bp, Homo sapien
gaaggggctacgcgagtcagctcct

SEQ ID NO: 1487126 - DNA, 25 bp, Homo sapien
tgaacacagcttggattattccact

SEQ ID NO: 1487127 - DNA, 25 bp, Homo sapien
ttcttgaacacagcttggattattc

SEQ ID NO: 1487128 - DNA, 25 bp, Homo sapien
tcttgaacacagcttggattattcc

SEQ ID NO: 1487129 - DNA, 25 bp, Homo sapien
ttgaacacagcttggattattccac

SEQ ID NO: 1487130 - DNA, 25 bp, Homo sapien
tgacttcaggcgagggatcctaaag

SEQ ID NO: 1487131 - DNA, 25 bp, Homo sapien
gattctagccaaaaccatgcactct

SEQ ID NO: 1487132 - DNA, 25 bp, Homo sapien
tgctcaggtagcaaccgacacatgc

SEQ ID NO: 1487133 - DNA, 25 bp, Homo sapien
gagaagccatcattctgctcaggtg

SEQ ID NO: 1487134 - DNA, 25 bp, Homo sapien
taaaagtgaagtgcaccgaaagagg

SEQ ID NO: 1487135 - DNA, 25 bp, Homo sapien
ggtcgcgctgtaagtggagtccaac

SEQ ID NO: 1487136 - DNA, 25 bp, Homo sapien
catgagtgttataaaagtgaagtgc

SEQ ID NO: 1487137 - DNA, 25 bp, Homo sapien
aaatgaccataaagtatcatgagtg

SEQ ID NO: 1487138 - DNA, 25 bp, Homo sapien
cacatttccgtcttcactggtgatg

SEQ ID NO: 1487139 - DNA, 25 bp, Homo sapien
ctccaccccgtttcttgccacttgc

SEQ ID NO: 1487140 - DNA, 25 bp, Homo sapien
ctcagacacatttccgtcttcactg

SEQ ID NO: 1487141 - DNA, 25 bp, Homo sapien
caccccgtttcttgccacttgccat

SEQ ID NO: 1487142 - DNA, 25 bp, Homo sapien
gctgtgaacacggggatgtggagaa

SEQ ID NO: 1487143 - DNA, 25 bp, Homo sapien
ttgctgtgaacacggggatgtggag

SEQ ID NO: 1487144 - DNA, 25 bp, Homo sapien
ctttgctgtgaacacggggatgtgg

SEQ ID NO: 1487145 - DNA, 25 bp, Homo sapien
gctttgctgtgaacacggggatgtg

SEQ ID NO: 1487146 - DNA, 25 bp, Homo sapien
gaatggctcttctcgtgtgctgcct

SEQ ID NO: 1487147 - DNA, 25 bp, Homo sapien
gattggtacttgcaacttgaatggc

SEQ ID NO: 1487148 - DNA, 25 bp, Homo sapien
cctgtttctgcaccgccactgggat

SEQ ID NO: 1487149 - DNA, 25 bp, Homo sapien
ccgccactgggattggtacttgcaa

SEQ ID NO: 1487150 - DNA, 25 bp, Homo sapien
ctgcttgtccggcaggagtaagtgc

SEQ ID NO: 1487151 - DNA, 25 bp, Homo sapien
gcttcagaaatactgagctcagtga

SEQ ID NO: 1487152 - DNA, 25 bp, Homo sapien
tcagtaactgcttgtccggcaggag

SEQ ID NO: 1487153 - DNA, 25 bp, Homo sapien
aagtgcttcagaaatactgagctca

SEQ ID NO: 1487154 - DNA, 25 bp, Homo sapien
ccagggataagggggtgcgggcagt

SEQ ID NO: 1487155 - DNA, 25 bp, Homo sapien
tgcgggcagttcaatatagccatcg

SEQ ID NO: 1487156 - DNA, 25 bp, Homo sapien
gcgggcagttcaatatagccatcgc

SEQ ID NO: 1487157 - DNA, 25 bp, Homo sapien
gggtgcgggcagttcaatatagcca

SEQ ID NO: 1487158 - DNA, 25 bp, Homo sapien
gccgaggctcaccatcaagaacttg

SEQ ID NO: 1487159 - DNA, 25 bp, Homo sapien
taatgcttacctgagagacagaccc

SEQ ID NO: 1487160 - DNA, 25 bp, Homo sapien
agaccccagtaccagacaagacaga

SEQ ID NO: 1487161 - DNA, 25 bp, Homo sapien
ccctgtgtcgcaaaggcagtctgag

SEQ ID NO: 1487162 - DNA, 25 bp, Homo sapien
tcaggccgtacatgagggaatccat

SEQ ID NO: 1487163 - DNA, 25 bp, Homo sapien
aaattgaaggccaacatttcactca

SEQ ID NO: 1487164 - DNA, 25 bp, Homo sapien
tatcttatctctcataccattcagg

SEQ ID NO: 1487165 - DNA, 25 bp, Homo sapien
tgctgagaggcgctgaaacagcgct

SEQ ID NO: 1487166 - DNA, 25 bp, Homo sapien
tgtcttggtgcttgatacaactcta

SEQ ID NO: 1487167 - DNA, 25 bp, Homo sapien
agagctaggctcgtatccagtaaga

SEQ ID NO: 1487168 - DNA, 25 bp, Homo sapien
tccagtaagattgggcctggaagcc

SEQ ID NO: 1487169 - DNA, 25 bp, Homo sapien
tcttggaccacttcaaatctgtttg

SEQ ID NO: 1487170 - DNA, 25 bp, Homo sapien
gcagagcagcatttgaagactcgcg

SEQ ID NO: 1487171 - DNA, 25 bp, Homo sapien
gagcagcatttgaagactcgcgcac

SEQ ID NO: 1487172 - DNA, 25 bp, Homo sapien
ggagcagagcagcatttgaagactc

SEQ ID NO: 1487173 - DNA, 25 bp, Homo sapien
ctccccttggtatggggcaggagga

SEQ ID NO: 1487174 - DNA, 25 bp, Homo sapien
gaggctctttggatccaagagagga

SEQ ID NO: 1487175 - DNA, 25 bp, Homo sapien
gtcttgcagccagtgtgctgaggcc

SEQ ID NO: 1487176 - DNA, 25 bp, Homo sapien
tctctgtcttgcagccagtgtgctg

SEQ ID NO: 1487177 - DNA, 25 bp, Homo sapien
gagaggagccttttcttgctttctg

SEQ ID NO: 1487178 - DNA, 25 bp, Homo sapien
tgcagcagacgtgaggggacggagg

SEQ ID NO: 1487179 - DNA, 25 bp, Homo sapien
gcaaggtcctttctcttccatgttg

SEQ ID NO: 1487180 - DNA, 25 bp, Homo sapien
ctgcagcagacgtgaggggacggag

SEQ ID NO: 1487181 - DNA, 25 bp, Homo sapien
gggcaaggtcctttctcttccatgt

SEQ ID NO: 1487182 - DNA, 25 bp, Homo sapien
gctctctgcatcacgtgacaagtct

SEQ ID NO: 1487183 - DNA, 25 bp, Homo sapien
gtctctgggctattaaatgtcattt

SEQ ID NO: 1487184 - DNA, 25 bp, Homo sapien
gacaagtctctgggctattaaatgt

SEQ ID NO: 1487185 - DNA, 25 bp, Homo sapien
atgctctctgcatcacgtgacaagt

SEQ ID NO: 1487186 - DNA, 25 bp, Homo sapien
ttccaggtaaacctggaattatcca

SEQ ID NO: 1487187 - DNA, 25 bp, Homo sapien
aactttggcaggttgaagcctgctc

SEQ ID NO: 1487188 - DNA, 25 bp, Homo sapien
ggaactttggcaggttgaagcctgc

SEQ ID NO: 1487189 - DNA, 25 bp, Homo sapien
gaactttggcaggttgaagcctgct

SEQ ID NO: 1487190 - DNA, 25 bp, Homo sapien
ctttggcaggttgaagcctgctcac

SEQ ID NO: 1487191 - DNA, 25 bp, Homo sapien
gaacgctcccgctaatggaattctt

SEQ ID NO: 1487192 - DNA, 25 bp, Homo sapien
gttatctttaggcaccgagtcaagc

SEQ ID NO: 1487193 - DNA, 25 bp, Homo sapien
cccgaggatgaacgctcccgctaat

SEQ ID NO: 1487194 - DNA, 25 bp, Homo sapien
ctttaggcaccgagtcaagcggcat

SEQ ID NO: 1487195 - DNA, 25 bp, Homo sapien
tgagctctctctcagtacccaggaa

SEQ ID NO: 1487196 - DNA, 25 bp, Homo sapien
tgggctctaactaaatgactgctct

SEQ ID NO: 1487197 - DNA, 25 bp, Homo sapien
tctcagtgaactggacaggtagacc

SEQ ID NO: 1487198 - DNA, 25 bp, Homo sapien
cctcgctggagggtgagagtcacaa

SEQ ID NO: 1487199 - DNA, 25 bp, Homo sapien
tccttccaggcaataacgtaatggg

SEQ ID NO: 1487200 - DNA, 25 bp, Homo sapien
ccttccaggcaataacgtaatggga

SEQ ID NO: 1487201 - DNA, 25 bp, Homo sapien
tttccttccaggcaataacgtaatg

SEQ ID NO: 1487202 - DNA, 25 bp, Homo sapien
tccaggcaataacgtaatgggaact

SEQ ID NO: 1487203 - DNA, 25 bp, Homo sapien
aaagattggtgcctctgctatttcc

SEQ ID NO: 1487204 - DNA, 25 bp, Homo sapien
gcagaaagattggtgcctctgctat

SEQ ID NO: 1487205 - DNA, 25 bp, Homo sapien
ttggtgcctctgctatttccagcag

SEQ ID NO: 1487206 - DNA, 25 bp, Homo sapien
aacagcagaaagattggtgcctctg

SEQ ID NO: 1487207 - DNA, 25 bp, Homo sapien
ctgacggcagatgcgctgcccgcca

SEQ ID NO: 1487208 - DNA, 25 bp, Homo sapien
ctcttgtgcctgatggcaacataat

SEQ ID NO: 1487209 - DNA, 25 bp, Homo sapien
agctcttgtgcctgatggcaacata

SEQ ID NO: 1487210 - DNA, 25 bp, Homo sapien
tgcccgccacttccatccggaagcc

SEQ ID NO: 1487211 - DNA, 25 bp, Homo sapien
tctcagtccatcttgcaagctgcat

SEQ ID NO: 1487212 - DNA, 25 bp, Homo sapien
ggtagtgggctcgacatgctggagt

SEQ ID NO: 1487213 - DNA, 25 bp, Homo sapien
gctggagttctgcacatgaccagct

SEQ ID NO: 1487214 - DNA, 25 bp, Homo sapien
tgaccagcttgagtttgtatccaca

SEQ ID NO: 1487215 - DNA, 25 bp, Homo sapien
aaacatttggctgtgccgaggggta

SEQ ID NO: 1487216 - DNA, 25 bp, Homo sapien
ttgcagcgcaacgtcagcagcagtc

SEQ ID NO: 1487217 - DNA, 25 bp, Homo sapien
aggcagttctctgtggagggaccca

SEQ ID NO: 1487218 - DNA, 25 bp, Homo sapien
cattcaagaatgtaagaaaggccct

SEQ ID NO: 1487219 - DNA, 25 bp, Homo sapien
tcttctctgcgagaggcagcaggca

SEQ ID NO: 1487220 - DNA, 25 bp, Homo sapien
cattattgcatcttgatatcttatc

SEQ ID NO: 1487221 - DNA, 25 bp, Homo sapien
ggctcgtctgtttctcttgtgttct

SEQ ID NO: 1487222 - DNA, 25 bp, Homo sapien
gaaggtcgacattctcattattgca

SEQ ID NO: 1487223 - DNA, 25 bp, Homo sapien
tgaaatcaatgagtaggttttttaa

SEQ ID NO: 1487224 - DNA, 25 bp, Homo sapien
tcttgtattctgtgatgcacgtgga

SEQ ID NO: 1487225 - DNA, 25 bp, Homo sapien
tattctgtgatgcacgtggatttct

SEQ ID NO: 1487226 - DNA, 25 bp, Homo sapien
tctgtgatgcacgtggatttcttta

SEQ ID NO: 1487227 - DNA, 25 bp, Homo sapien
gtgatgcacgtggatttctttatta

SEQ ID NO: 1487228 - DNA, 25 bp, Homo sapien
agatatttagccctgtggcaagcac

SEQ ID NO: 1487229 - DNA, 25 bp, Homo sapien
gcacagcatgggaaccttgatcata

SEQ ID NO: 1487230 - DNA, 25 bp, Homo sapien
agtggagggtgagatatttagccct

SEQ ID NO: 1487231 - DNA, 25 bp, Homo sapien
gagagagggacaaaatgccctaccc

SEQ ID NO: 1487232 - DNA, 25 bp, Homo sapien
aactgaagtgaatgaagggcgtgga

SEQ ID NO: 1487233 - DNA, 25 bp, Homo sapien
atgagtctccactacccacgagatc

SEQ ID NO: 1487234 - DNA, 25 bp, Homo sapien
tccactacccacgagatcttggcag

SEQ ID NO: 1487235 - DNA, 25 bp, Homo sapien
ccacgagatcttggcagtaactgaa

SEQ ID NO: 1487236 - DNA, 25 bp, Homo sapien
cagatgtgttattaaggctgagaaa

SEQ ID NO: 1487237 - DNA, 25 bp, Homo sapien
cagacactttcagacagctattatc

SEQ ID NO: 1487238 - DNA, 25 bp, Homo sapien
agaaatgttatgaggacttcgtgat

SEQ ID NO: 1487239 - DNA, 25 bp, Homo sapien
ccacattctaagagcagatgtgtta

SEQ ID NO: 1487240 - DNA, 25 bp, Homo sapien
atgaaatcaactgaaaagtcttcag

SEQ ID NO: 1487241 - DNA, 25 bp, Homo sapien
tcaacaatgatttagctcctactgt

SEQ ID NO: 1487242 - DNA, 25 bp, Homo sapien
atcaactgaaaagtcttcagaaggc

SEQ ID NO: 1487243 - DNA, 25 bp, Homo sapien
tcattcaacaatgatttagctccta

SEQ ID NO: 1487244 - DNA, 25 bp, Homo sapien
ggagttgagtgccttagccttcccg

SEQ ID NO: 1487245 - DNA, 25 bp, Homo sapien
ctgactttgccctaatgaggcccac

SEQ ID NO: 1487246 - DNA, 25 bp, Homo sapien
ttgacttggagttgagtgccttagc

SEQ ID NO: 1487247 - DNA, 25 bp, Homo sapien
gagtgccttagccttcccgtaatcc

SEQ ID NO: 1487248 - DNA, 25 bp, Homo sapien
cttcctctgtatccccagctctgac

SEQ ID NO: 1487249 - DNA, 25 bp, Homo sapien
ttcctctgtatccccagctctgact

SEQ ID NO: 1487250 - DNA, 25 bp, Homo sapien
tatccccagctctgactcccaaaag

SEQ ID NO: 1487251 - DNA, 25 bp, Homo sapien
ccagctctgactcccaaaagccttc

SEQ ID NO: 1487252 - DNA, 25 bp, Homo sapien
ctgcagggagtgaataggtggcgag

SEQ ID NO: 1487253 - DNA, 25 bp, Homo sapien
aataggtggcgaggatgtcactgaa

SEQ ID NO: 1487254 - DNA, 25 bp, Homo sapien
gatgtcactgaaaaggtcgcttctc

SEQ ID NO: 1487255 - DNA, 25 bp, Homo sapien
tctggttaactgctggccatctagc

SEQ ID NO: 1487256 - DNA, 25 bp, Homo sapien
ccctgatcataagtgagcagccacc

SEQ ID NO: 1487257 - DNA, 25 bp, Homo sapien
gactctcccggactctgaaagattt

SEQ ID NO: 1487258 - DNA, 25 bp, Homo sapien
agcagccacctcttgactctcccgg

SEQ ID NO: 1487259 - DNA, 25 bp, Homo sapien
agtgccctgatcataagtgagcagc

SEQ ID NO: 1487260 - DNA, 25 bp, Homo sapien
gtccacatcgctccaaaaggctcct

SEQ ID NO: 1487261 - DNA, 25 bp, Homo sapien
gtttgcagacacttctcaagccacc

SEQ ID NO: 1487262 - DNA, 25 bp, Homo sapien
tgtccacatcgctccaaaaggctcc

SEQ ID NO: 1487263 - DNA, 25 bp, Homo sapien
ccacatcgctccaaaaggctcctgg

SEQ ID NO: 1487264 - DNA, 25 bp, Homo sapien
cttcttttcatgctcagatcatcag

SEQ ID NO: 1487265 - DNA, 25 bp, Homo sapien
cctctctagatagggctgcttcatg

SEQ ID NO: 1487266 - DNA, 25 bp, Homo sapien
tagcaacaatagcactgggagatgc

SEQ ID NO: 1487267 - DNA, 25 bp, Homo sapien
tgttgcgaagaaagcgcagacccct

SEQ ID NO: 1487268 - DNA, 25 bp, Homo sapien
agggaactcccgtgatactctgtca

SEQ ID NO: 1487269 - DNA, 25 bp, Homo sapien
cctgcgagtgggtgccagatatgcc

SEQ ID NO: 1487270 - DNA, 25 bp, Homo sapien
tatgccactgggagctatagggctc

SEQ ID NO: 1487271 - DNA, 25 bp, Homo sapien
tgtcactaggcagagttgttgcagc

SEQ ID NO: 1487272 - DNA, 25 bp, Homo sapien
cattttgagcgtttttagaagcctt

SEQ ID NO: 1487273 - DNA, 25 bp, Homo sapien
ttagaaggcttttgaattcccagta

SEQ ID NO: 1487274 - DNA, 25 bp, Homo sapien
gtgcactcaggaccatagcaaatgg

SEQ ID NO: 1487275 - DNA, 25 bp, Homo sapien
cactcaggaccatagcaaatgggtt

SEQ ID NO: 1487276 - DNA, 25 bp, Homo sapien
tcttcccaaggtctctccgctctct

SEQ ID NO: 1487277 - DNA, 25 bp, Homo sapien
gccgtctcttcccaaggtctctccg

SEQ ID NO: 1487278 - DNA, 25 bp, Homo sapien
cgtctcttcccaaggtctctccgct

SEQ ID NO: 1487279 - DNA, 25 bp, Homo sapien
ccagccgtctcttcccaaggtctct

SEQ ID NO: 1487280 - DNA, 25 bp, Homo sapien
tccacgccgctcacgacctcttccc

SEQ ID NO: 1487281 - DNA, 25 bp, Homo sapien
tcctccacgccgctcacgacctctt

SEQ ID NO: 1487282 - DNA, 25 bp, Homo sapien
ctccacgccgctcacgacctcttcc

SEQ ID NO: 1487283 - DNA, 25 bp, Homo sapien
cctcctccacgccgctcacgacctc

SEQ ID NO: 1487284 - DNA, 25 bp, Homo sapien
ttttgatgtcttctgcccatgaagc

SEQ ID NO: 1487285 - DNA, 25 bp, Homo sapien
tttgatgtcttctgcccatgaagcc

SEQ ID NO: 1487286 - DNA, 25 bp, Homo sapien
ggagcagtttgtgtgctgaagccta

SEQ ID NO: 1487287 - DNA, 25 bp, Homo sapien
tgcctggcacaatcccatgggagca

SEQ ID NO: 1487288 - DNA, 25 bp, Homo sapien
tagcagacatagagtccacggacat

SEQ ID NO: 1487289 - DNA, 25 bp, Homo sapien
gaagcctatagcagacatagagtcc

SEQ ID NO: 1487290 - DNA, 25 bp, Homo sapien
tggacgtcagacttgcctcgtgacc

SEQ ID NO: 1487291 - DNA, 25 bp, Homo sapien
tggacataacacacgatccacagcc

SEQ ID NO: 1487292 - DNA, 25 bp, Homo sapien
actgccagagccgagctggacataa

SEQ ID NO: 1487293 - DNA, 25 bp, Homo sapien
tcaggttatgcttaacaactggcag

SEQ ID NO: 1487294 - DNA, 25 bp, Homo sapien
cttggtaagaaaccgggcagtgttg

SEQ ID NO: 1487295 - DNA, 25 bp, Homo sapien
ctaggacaagtttctcttggtaaga

SEQ ID NO: 1487296 - DNA, 25 bp, Homo sapien
ggcccattgcgggtatatggacctt

SEQ ID NO: 1487297 - DNA, 25 bp, Homo sapien
cattgcgggtatatggaccttggtt

SEQ ID NO: 1487298 - DNA, 25 bp, Homo sapien
tgcgggtatatggaccttggttgaa

SEQ ID NO: 1487299 - DNA, 25 bp, Homo sapien
gtatatggaccttggttgaaatgca

SEQ ID NO: 1487300 - DNA, 25 bp, Homo sapien
ctgttttgcagacaacacacaattg

SEQ ID NO: 1487301 - DNA, 25 bp, Homo sapien
ttcttgaacatagaggttcctcgtt

SEQ ID NO: 1487302 - DNA, 25 bp, Homo sapien
tcagccctcactccctccagtgtct

SEQ ID NO: 1487303 - DNA, 25 bp, Homo sapien
agaggttcctcgttctagaagccac

SEQ ID NO: 1487304 - DNA, 25 bp, Homo sapien
gaacatagaggttcctcgttctaga

SEQ ID NO: 1487305 - DNA, 25 bp, Homo sapien
ttgacttcaaagtccttttcctcgc

SEQ ID NO: 1487306 - DNA, 25 bp, Homo sapien
ttcaaagtccttttcctcgctctgc

SEQ ID NO: 1487307 - DNA, 25 bp, Homo sapien
cttcaaagtccttttcctcgctctg

SEQ ID NO: 1487308 - DNA, 25 bp, Homo sapien
gacttcaaagtccttttcctcgctc

SEQ ID NO: 1487309 - DNA, 25 bp, Homo sapien
ctgagagaccgaaatggacggtgta

SEQ ID NO: 1487310 - DNA, 25 bp, Homo sapien
cggtgtagtcgtcatactcagtctt

SEQ ID NO: 1487311 - DNA, 25 bp, Homo sapien
aaatggacggtgtagtcgtcatact

SEQ ID NO: 1487312 - DNA, 25 bp, Homo sapien
tagtcgtcatactcagtcttcctgc

SEQ ID NO: 1487313 - DNA, 25 bp, Homo sapien
taaatagtctggctttggtttaaca

SEQ ID NO: 1487314 - DNA, 25 bp, Homo sapien
tcacagctttagcatgtgctaaaaa

SEQ ID NO: 1487315 - DNA, 25 bp, Homo sapien
tggtttaacagagacaattcctttc

SEQ ID NO: 1487316 - DNA, 25 bp, Homo sapien
agggatgtccataaatagtctggct

SEQ ID NO: 1487317 - DNA, 25 bp, Homo sapien
ttatatcctaacaagacgggataag

SEQ ID NO: 1487318 - DNA, 25 bp, Homo sapien
tatccagcatcggttttatatccta

SEQ ID NO: 1487319 - DNA, 25 bp, Homo sapien
tagcactgtccggagcatttgtcct

SEQ ID NO: 1487320 - DNA, 25 bp, Homo sapien
aaaggcactgggtacatcggaaatg

SEQ ID NO: 1487321 - DNA, 25 bp, Homo sapien
ggttgtctcatgtctagggtgctcc

SEQ ID NO: 1487322 - DNA, 25 bp, Homo sapien
actgggcatggatatggttgtctca

SEQ ID NO: 1487323 - DNA, 25 bp, Homo sapien
gtgtcactgggcatggatatggttg

SEQ ID NO: 1487324 - DNA, 25 bp, Homo sapien
cactgggcatggatatggttgtctc

SEQ ID NO: 1487325 - DNA, 25 bp, Homo sapien
tgtctttccaggtaaccacacagcc

SEQ ID NO: 1487326 - DNA, 25 bp, Homo sapien
tctgtctttccaggtaaccacacag

SEQ ID NO: 1487327 - DNA, 25 bp, Homo sapien
ctgtctttccaggtaaccacacagc

SEQ ID NO: 1487328 - DNA, 25 bp, Homo sapien
gtctttccaggtaaccacacagcct

SEQ ID NO: 1487329 - DNA, 25 bp, Homo sapien
tttgatccattaatgttccccagtg

SEQ ID NO: 1487330 - DNA, 25 bp, Homo sapien
cctgattgccatccaacaaagagga

SEQ ID NO: 1487331 - DNA, 25 bp, Homo sapien
cataaagcgtttggatgggcccttc

SEQ ID NO: 1487332 - DNA, 25 bp, Homo sapien
agcttagaggctggcaacaagtctg

SEQ ID NO: 1487333 - DNA, 25 bp, Homo sapien
tatgttgctttaacggaatttctcc

SEQ ID NO: 1487334 - DNA, 25 bp, Homo sapien
cctggatggcgaataagttctttat

SEQ ID NO: 1487335 - DNA, 25 bp, Homo sapien
cagaatttgcccttgctgcatgctg

SEQ ID NO: 1487336 - DNA, 25 bp, Homo sapien
tgcctggatggcgaataagttcttt

SEQ ID NO: 1487337 - DNA, 25 bp, Homo sapien
acagcacgggctgtggttagtgctt

SEQ ID NO: 1487338 - DNA, 25 bp, Homo sapien
tggttagtgcttcgccttctgcccc

SEQ ID NO: 1487339 - DNA, 25 bp, Homo sapien
cccactcacggtgccctgaaagtga

SEQ ID NO: 1487340 - DNA, 25 bp, Homo sapien
ctggcttcccataaccagaggctga

SEQ ID NO: 1487341 - DNA, 25 bp, Homo sapien
ctgcctttcccaggtcccctccaca

SEQ ID NO: 1487342 - DNA, 25 bp, Homo sapien
gcctgcctttcccaggtcccctcca

SEQ ID NO: 1487343 - DNA, 25 bp, Homo sapien
ctaagttcttccctgcctgcctttc

SEQ ID NO: 1487344 - DNA, 25 bp, Homo sapien
cctgcctgcctttcccaggtcccct

SEQ ID NO: 1487345 - DNA, 25 bp, Homo sapien
tgagtccacgttttgtggcccgagc

SEQ ID NO: 1487346 - DNA, 25 bp, Homo sapien
cccgagctctttcagggcgagtgtg

SEQ ID NO: 1487347 - DNA, 25 bp, Homo sapien
ctggtccagccgcaaaacatttata

SEQ ID NO: 1487348 - DNA, 25 bp, Homo sapien
cactggcagcaggtcttaggacccc

SEQ ID NO: 1487349 - DNA, 25 bp, Homo sapien
aagagctggcacagtaagactcccc

SEQ ID NO: 1487350 - DNA, 25 bp, Homo sapien
tgggtgtgagatgtttcctctcctc

SEQ ID NO: 1487351 - DNA, 25 bp, Homo sapien
agggacatcggcttcccgctgggcc

SEQ ID NO: 1487352 - DNA, 25 bp, Homo sapien
aagactcccctttgtttatggcgtg

SEQ ID NO: 1487353 - DNA, 25 bp, Homo sapien
actgattgtcattaggtaactcgct

SEQ ID NO: 1487354 - DNA, 25 bp, Homo sapien
cctttggcctatcccaagtgccttc

SEQ ID NO: 1487355 - DNA, 25 bp, Homo sapien
taggtaactcgctgtcaggactggg

SEQ ID NO: 1487356 - DNA, 25 bp, Homo sapien
ctgggtgacggtggtctgggagaag

SEQ ID NO: 1487357 - DNA, 25 bp, Homo sapien
agagtttgacttcccaggacccaag

SEQ ID NO: 1487358 - DNA, 25 bp, Homo sapien
agcacagagtttgacttcccaggac

SEQ ID NO: 1487359 - DNA, 25 bp, Homo sapien
cagagtttgacttcccaggacccaa

SEQ ID NO: 1487360 - DNA, 25 bp, Homo sapien
cacagagtttgacttcccaggaccc

SEQ ID NO: 1487361 - DNA, 25 bp, Homo sapien
gaatatgagcatgaatggcagattg

SEQ ID NO: 1487362 - DNA, 25 bp, Homo sapien
caaagagggaaagcagatgaatatg

SEQ ID NO: 1487363 - DNA, 25 bp, Homo sapien
gcatgaatggcagattggtgaggaa

SEQ ID NO: 1487364 - DNA, 25 bp, Homo sapien
tatgagcatgaatggcagattggtg

SEQ ID NO: 1487365 - DNA, 25 bp, Homo sapien
gcacacacatatgaggatgctcggg

SEQ ID NO: 1487366 - DNA, 25 bp, Homo sapien
tgcacgtgggacatgccccactgct

SEQ ID NO: 1487367 - DNA, 25 bp, Homo sapien
tgtggccactttcctagcagcacac

SEQ ID NO: 1487368 - DNA, 25 bp, Homo sapien
ggcccagctcggaagactccttatg

SEQ ID NO: 1487369 - DNA, 25 bp, Homo sapien
tcccttaggtgagccccaggatatt

SEQ ID NO: 1487370 - DNA, 25 bp, Homo sapien
gaagcaccgattctctgtagcaggc

SEQ ID NO: 1487371 - DNA, 25 bp, Homo sapien
tctttattcgtaaggctggcatcac

SEQ ID NO: 1487372 - DNA, 25 bp, Homo sapien
gaagtgttcaccaaatccaagcggg

SEQ ID NO: 1487373 - DNA, 25 bp, Homo sapien
catgtcatggttctgggcaatggga

SEQ ID NO: 1487374 - DNA, 25 bp, Homo sapien
tcattgggtgttcggccacatttta

SEQ ID NO: 1487375 - DNA, 25 bp, Homo sapien
ttttaattccatgtcatggttctgg

SEQ ID NO: 1487376 - DNA, 25 bp, Homo sapien
tcaaatcataatagcttcattgggt

SEQ ID NO: 1487377 - DNA, 25 bp, Homo sapien
acagggacgccttgcagggcagaca

SEQ ID NO: 1487378 - DNA, 25 bp, Homo sapien
tcctggaacagtagctgagccagag

SEQ ID NO: 1487379 - DNA, 25 bp, Homo sapien
aacatgtttgttgatcctggaacag

SEQ ID NO: 1487380 - DNA, 25 bp, Homo sapien
gctctattctcaggcggacagaccc

SEQ ID NO: 1487381 - DNA, 25 bp, Homo sapien
gccttaaacgatctgccaaagccca

SEQ ID NO: 1487382 - DNA, 25 bp, Homo sapien
ttcataagcatgaaagaggccctca

SEQ ID NO: 1487383 - DNA, 25 bp, Homo sapien
gaggccttaggattggaacaaattc

SEQ ID NO: 1487384 - DNA, 25 bp, Homo sapien
ctggccaggaaccaaagactccatc

SEQ ID NO: 1487385 - DNA, 25 bp, Homo sapien
aaggcctttgttattcacgcagcag

SEQ ID NO: 1487386 - DNA, 25 bp, Homo sapien
gggctaagattgcagccttcggcac

SEQ ID NO: 1487387 - DNA, 25 bp, Homo sapien
agctgagccgggctaagattgcagc

SEQ ID NO: 1487388 - DNA, 25 bp, Homo sapien
ctgctgaggttcctttgctttgctg

SEQ ID NO: 1487389 - DNA, 25 bp, Homo sapien
taaagagctttctcttcgaggcctg

SEQ ID NO: 1487390 - DNA, 25 bp, Homo sapien
agagctttctcttcgaggcctgccg

SEQ ID NO: 1487391 - DNA, 25 bp, Homo sapien
ctttctcttcgaggcctgccgtggt

SEQ ID NO: 1487392 - DNA, 25 bp, Homo sapien
agctttctcttcgaggcctgccgtg

SEQ ID NO: 1487393 - DNA, 25 bp, Homo sapien
ctcagggtagaagaaaggatcaggc

SEQ ID NO: 1487394 - DNA, 25 bp, Homo sapien
gaatgccaccatggcagatgcctgc

SEQ ID NO: 1487395 - DNA, 25 bp, Homo sapien
cctcaggagggaagaagcgtaaatc

SEQ ID NO: 1487396 - DNA, 25 bp, Homo sapien
gagaggaggtgtctgcgtgcaggcc

SEQ ID NO: 1487397 - DNA, 25 bp, Homo sapien
aatgtaaaagtctatgccatccagc

SEQ ID NO: 1487398 - DNA, 25 bp, Homo sapien
catgggcacattagcagggagccaa

SEQ ID NO: 1487399 - DNA, 25 bp, Homo sapien
gttttagctagagaggcggcccttc

SEQ ID NO: 1487400 - DNA, 25 bp, Homo sapien
tataggtcacgcatgagccaggcct

SEQ ID NO: 1487401 - DNA, 25 bp, Homo sapien
tgtgacctgggtagttccaactccc

SEQ ID NO: 1487402 - DNA, 25 bp, Homo sapien
agctgggccaggcttcaatgacagg

SEQ ID NO: 1487403 - DNA, 25 bp, Homo sapien
gaatgatgggcaaagcagacagtcc

SEQ ID NO: 1487404 - DNA, 25 bp, Homo sapien
cacggcgggagaaaaccctccatat

SEQ ID NO: 1487405 - DNA, 25 bp, Homo sapien
gctccatccggcaggtgctaagaag

SEQ ID NO: 1487406 - DNA, 25 bp, Homo sapien
tcttcacctgcttcgcagagacatg

SEQ ID NO: 1487407 - DNA, 25 bp, Homo sapien
gagacatgttcgttttctgccagaa

SEQ ID NO: 1487408 - DNA, 25 bp, Homo sapien
tctgccagaatcactttcagggctt

SEQ ID NO: 1487409 - DNA, 25 bp, Homo sapien
tattccaaagtctcgggctcttcac

SEQ ID NO: 1487410 - DNA, 25 bp, Homo sapien
gcaccacccgacatgctcaaaggag

SEQ ID NO: 1487411 - DNA, 25 bp, Homo sapien
aacactaggcttgggtgacgtcagc

SEQ ID NO: 1487412 - DNA, 25 bp, Homo sapien
gaccccaaagtgaatgaatgcacca

SEQ ID NO: 1487413 - DNA, 25 bp, Homo sapien
gggccaaacgcagattgacgcacca

SEQ ID NO: 1487414 - DNA, 25 bp, Homo sapien
ttcctgcacgtcatcaccaccgtca

SEQ ID NO: 1487415 - DNA, 25 bp, Homo sapien
cacaaaaggtggcactttcttggtc

SEQ ID NO: 1487416 - DNA, 25 bp, Homo sapien
accgtcagccctgttgccacaaaag

SEQ ID NO: 1487417 - DNA, 25 bp, Homo sapien
tggtcctgtacagaatgtaattttc

SEQ ID NO: 1487418 - DNA, 25 bp, Homo sapien
tgaaacaatctacaggaaggcaccc

SEQ ID NO: 1487419 - DNA, 25 bp, Homo sapien
tctgatttcgtcaacccaaaggagg

SEQ ID NO: 1487420 - DNA, 25 bp, Homo sapien
tcagcgttgacatgaggagtccatg

SEQ ID NO: 1487421 - DNA, 25 bp, Homo sapien
tagacattcaatagggtgcatttcc

SEQ ID NO: 1487422 - DNA, 25 bp, Homo sapien
ctctctgttgaatacggctcagtct

SEQ ID NO: 1487423 - DNA, 25 bp, Homo sapien
tctctctgttgaatacggctcagtc

SEQ ID NO: 1487424 - DNA, 25 bp, Homo sapien
cttgcacagtcactctcagaacaaa

SEQ ID NO: 1487425 - DNA, 25 bp, Homo sapien
gtcactctcagaacaaagcttttgc

SEQ ID NO: 1487426 - DNA, 25 bp, Homo sapien
aagcttttgctcaaagaagcccaca

SEQ ID NO: 1487427 - DNA, 25 bp, Homo sapien
gcttttgctcaaagaagcccacacc

SEQ ID NO: 1487428 - DNA, 25 bp, Homo sapien
ccagcatcgttcttacaatgaagga

SEQ ID NO: 1487429 - DNA, 25 bp, Homo sapien
acggccaaggacatccctctgggag

SEQ ID NO: 1487430 - DNA, 25 bp, Homo sapien
agatgtcctggcgatacggccaagg

SEQ ID NO: 1487431 - DNA, 25 bp, Homo sapien
tatttttgcccagcgccggcatcaa

SEQ ID NO: 1487432 - DNA, 25 bp, Homo sapien
ctgaaacataacagtgcacaattca

SEQ ID NO: 1487433 - DNA, 25 bp, Homo sapien
attttcattgcaggcagggactcgg

SEQ ID NO: 1487434 - DNA, 25 bp, Homo sapien
aagaaatcgaaaaagtaagctgctg

SEQ ID NO: 1487435 - DNA, 25 bp, Homo sapien
tagtgctccatatgacaggggaagt

SEQ ID NO: 1487436 - DNA, 25 bp, Homo sapien
gactcggatgggtgatgaaagaaat

SEQ ID NO: 1487437 - DNA, 25 bp, Homo sapien
aagttcaggaaatgcatcccctggc

SEQ ID NO: 1487438 - DNA, 25 bp, Homo sapien
gttcaggaaatgcatcccctggcat

SEQ ID NO: 1487439 - DNA, 25 bp, Homo sapien
agttcaggaaatgcatcccctggca

SEQ ID NO: 1487440 - DNA, 25 bp, Homo sapien
atttttatctcaaatgatttcacta

SEQ ID NO: 1487441 - DNA, 25 bp, Homo sapien
tttttatctcaaatgatttcactac

SEQ ID NO: 1487442 - DNA, 25 bp, Homo sapien
ttccagcctcgcagggagaacccgt

SEQ ID NO: 1487443 - DNA, 25 bp, Homo sapien
aacccgtggcgtgtcgccggctgct

SEQ ID NO: 1487444 - DNA, 25 bp, Homo sapien
gcgtgtcgccggctgctctctcttc

SEQ ID NO: 1487445 - DNA, 25 bp, Homo sapien
agggagaacccgtggcgtgtcgccg

SEQ ID NO: 1487446 - DNA, 25 bp, Homo sapien
gagaccttacagcaaataaatcccc

SEQ ID NO: 1487447 - DNA, 25 bp, Homo sapien
cagtcttgggataattgagacctta

SEQ ID NO: 1487448 - DNA, 25 bp, Homo sapien
gcaaagggatctccaaggtgctgcc

SEQ ID NO: 1487449 - DNA, 25 bp, Homo sapien
cagacacagcgaggatggctttatc

SEQ ID NO: 1487450 - DNA, 25 bp, Homo sapien
gcaccagcgctgcagagtgcctgga

SEQ ID NO: 1487451 - DNA, 25 bp, Homo sapien
tttgccattgggaatactggcacca

SEQ ID NO: 1487452 - DNA, 25 bp, Homo sapien
aactttgtcggatttatatatagcc

SEQ ID NO: 1487453 - DNA, 25 bp, Homo sapien
gggctcgtaatcagtcactgggctg

SEQ ID NO: 1487454 - DNA, 25 bp, Homo sapien
ctctgaactcggcagggctcgtaat

SEQ ID NO: 1487455 - DNA, 25 bp, Homo sapien
tttatatatagcctccatcttgtcc

SEQ ID NO: 1487456 - DNA, 25 bp, Homo sapien
atcattagaaggatgcgaggccagg

SEQ ID NO: 1487457 - DNA, 25 bp, Homo sapien
ctgtggggattatcattagaaggat

SEQ ID NO: 1487458 - DNA, 25 bp, Homo sapien
cattagaaggatgcgaggccaggtg

SEQ ID NO: 1487459 - DNA, 25 bp, Homo sapien
tcattagaaggatgcgaggccaggt

SEQ ID NO: 1487460 - DNA, 25 bp, Homo sapien
aattgggcccccattgctcaccttg

SEQ ID NO: 1487461 - DNA, 25 bp, Homo sapien
gggtcatggagcgattgtagcaaca

SEQ ID NO: 1487462 - DNA, 25 bp, Homo sapien
caatgggttttgcacaattgggccc

SEQ ID NO: 1487463 - DNA, 25 bp, Homo sapien
accttgcaagagtttgccaggctgg

SEQ ID NO: 1487464 - DNA, 25 bp, Homo sapien
gctaggactgttgactctggagaaa

SEQ ID NO: 1487465 - DNA, 25 bp, Homo sapien
tggtcgtgaccatgagaggctttgt

SEQ ID NO: 1487466 - DNA, 25 bp, Homo sapien
tggataagatacctctgcagaggga

SEQ ID NO: 1487467 - DNA, 25 bp, Homo sapien
catagttctgaggactgcccattgc

SEQ ID NO: 1487468 - DNA, 25 bp, Homo sapien
tgaaccagtgagactcgccaaactt

SEQ ID NO: 1487469 - DNA, 25 bp, Homo sapien
gactctcctgcagactatctggtga

SEQ ID NO: 1487470 - DNA, 25 bp, Homo sapien
gcctcacatagtgcgagtatactct

SEQ ID NO: 1487471 - DNA, 25 bp, Homo sapien
gcacactgacttggtttagcacgaa

SEQ ID NO: 1487472 - DNA, 25 bp, Homo sapien
agttggactgatgttcccagggtgc

SEQ ID NO: 1487473 - DNA, 25 bp, Homo sapien
gtctacagcgattccagtgcctgca

SEQ ID NO: 1487474 - DNA, 25 bp, Homo sapien
cgtgaggctgcacggggccattttc

SEQ ID NO: 1487475 - DNA, 25 bp, Homo sapien
cattgtccgtcatggtctacagcga

SEQ ID NO: 1487476 - DNA, 25 bp, Homo sapien
tgcctgcccatgacaatctgaaaag

SEQ ID NO: 1487477 - DNA, 25 bp, Homo sapien
ggtagtgagctccaagaactgtgat

SEQ ID NO: 1487478 - DNA, 25 bp, Homo sapien
agagtgtgttccagatcttgcaggg

SEQ ID NO: 1487479 - DNA, 25 bp, Homo sapien
caaatactgcatggcatcgtgcaga

SEQ ID NO: 1487480 - DNA, 25 bp, Homo sapien
ttctctttgccgaagagacaatgcg

SEQ ID NO: 1487481 - DNA, 25 bp, Homo sapien
ctagtccatgaaaagggtacgattt

SEQ ID NO: 1487482 - DNA, 25 bp, Homo sapien
tttgccgaagagacaatgcgggaac

SEQ ID NO: 1487483 - DNA, 25 bp, Homo sapien
tgaaaagggtacgatttctctttgc

SEQ ID NO: 1487484 - DNA, 25 bp, Homo sapien
tgtgcgagtggagctctactaccaa

SEQ ID NO: 1487485 - DNA, 25 bp, Homo sapien
ttttgaggcctcgtatatttggacg

SEQ ID NO: 1487486 - DNA, 25 bp, Homo sapien
tatttggacgttgaaggcgtccctc

SEQ ID NO: 1487487 - DNA, 25 bp, Homo sapien
ccacctggaatggtttgtgcgagtg

SEQ ID NO: 1487488 - DNA, 25 bp, Homo sapien
caggctgacgattgtcttcaggctc

SEQ ID NO: 1487489 - DNA, 25 bp, Homo sapien
gacacacattaacgtaaagtctcct

SEQ ID NO: 1487490 - DNA, 25 bp, Homo sapien
cacattaacgtaaagtctcctccca

SEQ ID NO: 1487491 - DNA, 25 bp, Homo sapien
gctccatcgatgttttccgttgttt

SEQ ID NO: 1487492 - DNA, 25 bp, Homo sapien
caccaaggaagagacgttcaaggct

SEQ ID NO: 1487493 - DNA, 25 bp, Homo sapien
tagtatattcatcgctcaccaagga

SEQ ID NO: 1487494 - DNA, 25 bp, Homo sapien
aatcccaatgtccaagaatgtcacg

SEQ ID NO: 1487495 - DNA, 25 bp, Homo sapien
aaggctattaccctgggcagctggc

SEQ ID NO: 1487496 - DNA, 25 bp, Homo sapien
tagatgttcctaaatctcagccaac

SEQ ID NO: 1487497 - DNA, 25 bp, Homo sapien
tcgtttagatttagatgttcctaaa

SEQ ID NO: 1487498 - DNA, 25 bp, Homo sapien
gatttagatgttcctaaatctcagc

SEQ ID NO: 1487499 - DNA, 25 bp, Homo sapien
ttagatttagatgttcctaaatctc

SEQ ID NO: 1487500 - DNA, 25 bp, Homo sapien
tacctgccattgacagatctgctgg

SEQ ID NO: 1487501 - DNA, 25 bp, Homo sapien
ccaaagttctaaaggctggaggtgt

SEQ ID NO: 1487502 - DNA, 25 bp, Homo sapien
tgcagagacagtggtgagccatctc

SEQ ID NO: 1487503 - DNA, 25 bp, Homo sapien
gcaaggccctatccttcacttggtg

SEQ ID NO: 1487504 - DNA, 25 bp, Homo sapien
tataatgtttccaagcaatgctcac

SEQ ID NO: 1487505 - DNA, 25 bp, Homo sapien
tagagatcagccgaaggtgagagct

SEQ ID NO: 1487506 - DNA, 25 bp, Homo sapien
tccatcctaggtgaattctgagtta

SEQ ID NO: 1487507 - DNA, 25 bp, Homo sapien
caagattgccattgacctggaaagg

SEQ ID NO: 1487508 - DNA, 25 bp, Homo sapien
tattttcaactaacggtgcgaggac

SEQ ID NO: 1487509 - DNA, 25 bp, Homo sapien
ttatatcaaacgcaaaagacccaga

SEQ ID NO: 1487510 - DNA, 25 bp, Homo sapien
ggtgtttggagctaaaactctgcca

SEQ ID NO: 1487511 - DNA, 25 bp, Homo sapien
gagggcttgtactcctgaatttcaa

SEQ ID NO: 1487512 - DNA, 25 bp, Homo sapien
caaatgggcaggaggaatctttagg

SEQ ID NO: 1487513 - DNA, 25 bp, Homo sapien
gaatgaagcacatggtattgtctca

SEQ ID NO: 1487514 - DNA, 25 bp, Homo sapien
gaaaggcaactctattgagacaaaa

SEQ ID NO: 1487515 - DNA, 25 bp, Homo sapien
tacacagtagtgacagttgcataat

SEQ ID NO: 1487516 - DNA, 25 bp, Homo sapien
catctaggctaatggttgttggtgt

SEQ ID NO: 1487517 - DNA, 25 bp, Homo sapien
aaaacatctaggctaatggttgttg

SEQ ID NO: 1487518 - DNA, 25 bp, Homo sapien
gatggacgctattctacaaaaacat

SEQ ID NO: 1487519 - DNA, 25 bp, Homo sapien
ggtagattctagaaagatggacgct

SEQ ID NO: 1487520 - DNA, 25 bp, Homo sapien
tgacaccaagccattacacagacgg

SEQ ID NO: 1487521 - DNA, 25 bp, Homo sapien
tcatcgcggaggcactgtagcatct

SEQ ID NO: 1487522 - DNA, 25 bp, Homo sapien
tattaacggcaatgtgtcactccag

SEQ ID NO: 1487523 - DNA, 25 bp, Homo sapien
caattcaggtgtgccaaagggaagc

SEQ ID NO: 1487524 - DNA, 25 bp, Homo sapien
aatctacaaaacaatgttatgccta

SEQ ID NO: 1487525 - DNA, 25 bp, Homo sapien
taatcagctattcatggtgtaataa

SEQ ID NO: 1487526 - DNA, 25 bp, Homo sapien
atttaagtggcacctaatttaacat

SEQ ID NO: 1487527 - DNA, 25 bp, Homo sapien
tcaaaattatggctaacaacgtggg

SEQ ID NO: 1487528 - DNA, 25 bp, Homo sapien
agatgattctgtaggcatatcggca

SEQ ID NO: 1487529 - DNA, 25 bp, Homo sapien
gatgattctgtaggcatatcggcag

SEQ ID NO: 1487530 - DNA, 25 bp, Homo sapien
atgattctgtaggcatatcggcagg

SEQ ID NO: 1487531 - DNA, 25 bp, Homo sapien
tacacatttcagaggtaatgtttga

SEQ ID NO: 1487532 - DNA, 25 bp, Homo sapien
ctagatttaaaattaatggtaagat

SEQ ID NO: 1487533 - DNA, 25 bp, Homo sapien
cacatttcagaggtaatgtttgaaa

SEQ ID NO: 1487534 - DNA, 25 bp, Homo sapien
aagatacacatttcagaggtaatgt

SEQ ID NO: 1487535 - DNA, 25 bp, Homo sapien
taagttctgtgttctgtacaaatta

SEQ ID NO: 1487536 - DNA, 25 bp, Homo sapien
ccaccaaagctcaattttgcatggt

SEQ ID NO: 1487537 - DNA, 25 bp, Homo sapien
tcagcagaaaatagacagcccaaaa

SEQ ID NO: 1487538 - DNA, 25 bp, Homo sapien
taaaggtcccatgaatacataaccc

SEQ ID NO: 1487539 - DNA, 25 bp, Homo sapien
ttaagaacacgcaatgacaataatg

SEQ ID NO: 1487540 - DNA, 25 bp, Homo sapien
tacagaacccctatgttttcatcat

SEQ ID NO: 1487541 - DNA, 25 bp, Homo sapien
gaatatgccaaagttaatctccaca

SEQ ID NO: 1487542 - DNA, 25 bp, Homo sapien
aaaacgtggcaccatgagagcagca

SEQ ID NO: 1487543 - DNA, 25 bp, Homo sapien
tttgcaggtcataaatgaaatattt

SEQ ID NO: 1487544 - DNA, 25 bp, Homo sapien
ctctggatttaccaacaccaatcca

SEQ ID NO: 1487545 - DNA, 25 bp, Homo sapien
tctattctgttagcagactgtgccg

SEQ ID NO: 1487546 - DNA, 25 bp, Homo sapien
acaggtagtcccctacttttctcag

SEQ ID NO: 1487547 - DNA, 25 bp, Homo sapien
tgttcactcgttgggattaaaacag

SEQ ID NO: 1487548 - DNA, 25 bp, Homo sapien
gaatcaattcatctctaatgttcac

SEQ ID NO: 1487549 - DNA, 25 bp, Homo sapien
gaacatagttttgtgcattaacagg

SEQ ID NO: 1487550 - DNA, 25 bp, Homo sapien
cttcaataaatcgaacatagttttg

SEQ ID NO: 1487551 - DNA, 25 bp, Homo sapien
taaatcgaacatagttttgtgcatt

SEQ ID NO: 1487552 - DNA, 25 bp, Homo sapien
gagtcttatattgaacttcaacttt

SEQ ID NO: 1487553 - DNA, 25 bp, Homo sapien
gtaaaacagcgcaaataccatctgg

SEQ ID NO: 1487554 - DNA, 25 bp, Homo sapien
cagaaagaaggcctgcatacctgct

SEQ ID NO: 1487555 - DNA, 25 bp, Homo sapien
cagtggatgctatggtactctgccc

SEQ ID NO: 1487556 - DNA, 25 bp, Homo sapien
tatcccctaatggaaactgaacatg

SEQ ID NO: 1487557 - DNA, 25 bp, Homo sapien
agatcctggaaactgactcatacca

SEQ ID NO: 1487558 - DNA, 25 bp, Homo sapien
tcataccagcttaaagtttgaaaaa

SEQ ID NO: 1487559 - DNA, 25 bp, Homo sapien
tgggttttccacgtaactacacaca

SEQ ID NO: 1487560 - DNA, 25 bp, Homo sapien
tccacgtaactacacacaaagcata

SEQ ID NO: 1487561 - DNA, 25 bp, Homo sapien
gggcatatcaaacctgtcgctatct

SEQ ID NO: 1487562 - DNA, 25 bp, Homo sapien
gactcaagagctgtatggctaggct

SEQ ID NO: 1487563 - DNA, 25 bp, Homo sapien
gaagaaacacctccatggaaattgc

SEQ ID NO: 1487564 - DNA, 25 bp, Homo sapien
tcaagagtggcatacttccccaagg

SEQ ID NO: 1487565 - DNA, 25 bp, Homo sapien
tccaaaatatccaacttggtaagtg

SEQ ID NO: 1487566 - DNA, 25 bp, Homo sapien
gcatatttgagcaaaacgaggtcca

SEQ ID NO: 1487567 - DNA, 25 bp, Homo sapien
accaatcttgcaaattaagtgaaag

SEQ ID NO: 1487568 - DNA, 25 bp, Homo sapien
ctgaccaatcttgcaaattaagtga

SEQ ID NO: 1487569 - DNA, 25 bp, Homo sapien
gaaaatgttgttctgaccaatcttg

SEQ ID NO: 1487570 - DNA, 25 bp, Homo sapien
agaaaatgttgttctgaccaatctt

SEQ ID NO: 1487571 - DNA, 25 bp, Homo sapien
ccaacattttgaggtggcataccca

SEQ ID NO: 1487572 - DNA, 25 bp, Homo sapien
tcttgctctgtaggaaaggcaccaa

SEQ ID NO: 1487573 - DNA, 25 bp, Homo sapien
aaggcaccaataccaactctagttg

SEQ ID NO: 1487574 - DNA, 25 bp, Homo sapien
caacagtacaatttgaagaggttac

SEQ ID NO: 1487575 - DNA, 25 bp, Homo sapien
gctactcacttactggattatgaag

SEQ ID NO: 1487576 - DNA, 25 bp, Homo sapien
gaggtcagagctttaacgcaagtgc

SEQ ID NO: 1487577 - DNA, 25 bp, Homo sapien
gtgcttatacagagaggctccttga

SEQ ID NO: 1487578 - DNA, 25 bp, Homo sapien
tccttgaatgcatgtacagttactg

SEQ ID NO: 1487579 - DNA, 25 bp, Homo sapien
gcaccttctaccaagattttctttg

SEQ ID NO: 1487580 - DNA, 25 bp, Homo sapien
ttttctttggtggtccatgtagggc

SEQ ID NO: 1487581 - DNA, 25 bp, Homo sapien
tttgcaccttctaccaagattttct

SEQ ID NO: 1487582 - DNA, 25 bp, Homo sapien
catgtagggcctcatatagaaaata

SEQ ID NO: 1487583 - DNA, 25 bp, Homo sapien
aaaagggctggtgacggtgctcact

SEQ ID NO: 1487584 - DNA, 25 bp, Homo sapien
cctgactttatgacatgaaaactga

SEQ ID NO: 1487585 - DNA, 25 bp, Homo sapien
tccatgtatactaataaacgtttaa

SEQ ID NO: 1487586 - DNA, 25 bp, Homo sapien
aaaccaatttccatgtatactaata

SEQ ID NO: 1487587 - DNA, 25 bp, Homo sapien
tttgaaacttgcatcagtgattctc

SEQ ID NO: 1487588 - DNA, 25 bp, Homo sapien
actgtgtttggccaaccatgaattt

SEQ ID NO: 1487589 - DNA, 25 bp, Homo sapien
tgtttggccaaccatgaattttgaa

SEQ ID NO: 1487590 - DNA, 25 bp, Homo sapien
tgaattttgaaacttgcatcagtga

SEQ ID NO: 1487591 - DNA, 25 bp, Homo sapien
cacgagttacactgccaagtatgca

SEQ ID NO: 1487592 - DNA, 25 bp, Homo sapien
tttatgcctgaaatgaccacactag

SEQ ID NO: 1487593 - DNA, 25 bp, Homo sapien
gcataactgcatgaaacctaggttc

SEQ ID NO: 1487594 - DNA, 25 bp, Homo sapien
gaatctactcatgaacccacctgag

SEQ ID NO: 1487595 - DNA, 25 bp, Homo sapien
cacatgagacatatgatctggactc

SEQ ID NO: 1487596 - DNA, 25 bp, Homo sapien
tcctaaatgggttggttagcctcaa

SEQ ID NO: 1487597 - DNA, 25 bp, Homo sapien
taagatctaaactccctgtcactgc

SEQ ID NO: 1487598 - DNA, 25 bp, Homo sapien
tttgccagttcttacccaaagcctg

SEQ ID NO: 1487599 - DNA, 25 bp, Homo sapien
atatagatttgtattggttagctag

SEQ ID NO: 1487600 - DNA, 25 bp, Homo sapien
tactaggtttcccaaggagatctgg

SEQ ID NO: 1487601 - DNA, 25 bp, Homo sapien
gagtctctaggcctgaaaatgcaag

SEQ ID NO: 1487602 - DNA, 25 bp, Homo sapien
caagaccttagaatgtaaccaccca

SEQ ID NO: 1487603 - DNA, 25 bp, Homo sapien
ttcagtaaaggtgcactgccagtgc

SEQ ID NO: 1487604 - DNA, 25 bp, Homo sapien
gaagccatcaaagtcagaaacaagg

SEQ ID NO: 1487605 - DNA, 25 bp, Homo sapien
cctgagtccactccgagcagctttg

SEQ ID NO: 1487606 - DNA, 25 bp, Homo sapien
gaaacaaggtcgcacatcctgagtc

SEQ ID NO: 1487607 - DNA, 25 bp, Homo sapien
tggacgaataaactgggccaatgcc

SEQ ID NO: 1487608 - DNA, 25 bp, Homo sapien
tgttgttcctggataccatcagctg

SEQ ID NO: 1487609 - DNA, 25 bp, Homo sapien
tgttcctggataccatcagctgctt

SEQ ID NO: 1487610 - DNA, 25 bp, Homo sapien
gtctctgttgttcctggataccatc

SEQ ID NO: 1487611 - DNA, 25 bp, Homo sapien
tcagctgcttgatgaaaatcaaata

SEQ ID NO: 1487612 - DNA, 25 bp, Homo sapien
actgcagtctcctaatgtgtgtacc

SEQ ID NO: 1487613 - DNA, 25 bp, Homo sapien
tcttcaagttctggactccaagaat

SEQ ID NO: 1487614 - DNA, 25 bp, Homo sapien
tttcctcactagtctcgagcttcca

SEQ ID NO: 1487615 - DNA, 25 bp, Homo sapien
tccaagaatctagggctcatgttga

SEQ ID NO: 1487616 - DNA, 25 bp, Homo sapien
cgaagggcagacataaatccaacca

SEQ ID NO: 1487617 - DNA, 25 bp, Homo sapien
gaacagccacctaactaatctggat

SEQ ID NO: 1487618 - DNA, 25 bp, Homo sapien
gaataaaatgcaagacccacctaca

SEQ ID NO: 1487619 - DNA, 25 bp, Homo sapien
aagatgcatattacagcccctagag

SEQ ID NO: 1487620 - DNA, 25 bp, Homo sapien
tctgtggctgttatctggagggacc

SEQ ID NO: 1487621 - DNA, 25 bp, Homo sapien
caggacacacgcatacttaaataca

SEQ ID NO: 1487622 - DNA, 25 bp, Homo sapien
caaacaatgtaatgaagaggccagt

SEQ ID NO: 1487623 - DNA, 25 bp, Homo sapien
tagagcagctactgccacaggacac

SEQ ID NO: 1487624 - DNA, 25 bp, Homo sapien
tgagctctgtcagatataataagcc

SEQ ID NO: 1487625 - DNA, 25 bp, Homo sapien
tatgagctctgtcagatataataag

SEQ ID NO: 1487626 - DNA, 25 bp, Homo sapien
caatatgagctctgtcagatataat

SEQ ID NO: 1487627 - DNA, 25 bp, Homo sapien
gagctctgtcagatataataagcct

SEQ ID NO: 1487628 - DNA, 25 bp, Homo sapien
tacactccagtgtatgtggcggagc

SEQ ID NO: 1487629 - DNA, 25 bp, Homo sapien
tgccagaagggagttaattttagga

SEQ ID NO: 1487630 - DNA, 25 bp, Homo sapien
caagagttttctcacatgtcattca

SEQ ID NO: 1487631 - DNA, 25 bp, Homo sapien
gctctaaaagctccaaattcaaacc

SEQ ID NO: 1487632 - DNA, 25 bp, Homo sapien
tccaggtagatgaattaccacacca

SEQ ID NO: 1487633 - DNA, 25 bp, Homo sapien
caggtagatgaattaccacaccatt

SEQ ID NO: 1487634 - DNA, 25 bp, Homo sapien
ggtagatgaattaccacaccatttc

SEQ ID NO: 1487635 - DNA, 25 bp, Homo sapien
aggtagatgaattaccacaccattt

SEQ ID NO: 1487636 - DNA, 25 bp, Homo sapien
atgaatgcagtgacatttggattaa

SEQ ID NO: 1487637 - DNA, 25 bp, Homo sapien
aatgaatgcagtgacatttggatta

SEQ ID NO: 1487638 - DNA, 25 bp, Homo sapien
caatgaatgcagtgacatttggatt

SEQ ID NO: 1487639 - DNA, 25 bp, Homo sapien
tgtcaccctgcctaactacaaccag

SEQ ID NO: 1487640 - DNA, 25 bp, Homo sapien
tgagtccctgagaccgcatgtgcat

SEQ ID NO: 1487641 - DNA, 25 bp, Homo sapien
gagaccgcatgtgcatgtcaccctg

SEQ ID NO: 1487642 - DNA, 25 bp, Homo sapien
tcactatagcccaagcaggccttga

SEQ ID NO: 1487643 - DNA, 25 bp, Homo sapien
gctgtcgacagcaagaaagctcggt

SEQ ID NO: 1487644 - DNA, 25 bp, Homo sapien
caacccatagtgtagctcaacctga

SEQ ID NO: 1487645 - DNA, 25 bp, Homo sapien
tattcggatacgtcttccccacagc

SEQ ID NO: 1487646 - DNA, 25 bp, Homo sapien
cctgagctatttccatattaacgag

SEQ ID NO: 1487647 - DNA, 25 bp, Homo sapien
gagaagggattccttcctctgggac

SEQ ID NO: 1487648 - DNA, 25 bp, Homo sapien
gtgatggggggttctgccgtcgcgc

SEQ ID NO: 1487649 - DNA, 25 bp, Homo sapien
tgatggggggttctgccgtcgcgcc

SEQ ID NO: 1487650 - DNA, 25 bp, Homo sapien
gatggggggttctgccgtcgcgccg

SEQ ID NO: 1487651 - DNA, 25 bp, Homo sapien
atggggggttctgccgtcgcgccgg

SEQ ID NO: 1487652 - DNA, 25 bp, Homo sapien
ggcacacgatgtcggcgtcctgcgc

SEQ ID NO: 1487653 - DNA, 25 bp, Homo sapien
cagcggcacacgatgtcggcgtcct

SEQ ID NO: 1487654 - DNA, 25 bp, Homo sapien
ccgggtaggtctcggcgaacgccat

SEQ ID NO: 1487655 - DNA, 25 bp, Homo sapien
gatgccgccgggtaggtctcggcga

SEQ ID NO: 1487656 - DNA, 25 bp, Homo sapien
gaggagtgagcgaactgaactgctc

SEQ ID NO: 1487657 - DNA, 25 bp, Homo sapien
ctctccgccacagcccgctcaaggg

SEQ ID NO: 1487658 - DNA, 25 bp, Homo sapien
cggcgaggagtgagcgaactgaact

SEQ ID NO: 1487659 - DNA, 25 bp, Homo sapien
tggcggcaacggccgccaccccgga

SEQ ID NO: 1487660 - DNA, 25 bp, Homo sapien
agaataggtttccacgggcagccaa

SEQ ID NO: 1487661 - DNA, 25 bp, Homo sapien
tcctgtcctggttgtgcatatctaa

SEQ ID NO: 1487662 - DNA, 25 bp, Homo sapien
cagccaagatgcagggatagacagg

SEQ ID NO: 1487663 - DNA, 25 bp, Homo sapien
ccctggcttgttaactcctggtact

SEQ ID NO: 1487664 - DNA, 25 bp, Homo sapien
gggaaaatgatgcttgagttgatga

SEQ ID NO: 1487665 - DNA, 25 bp, Homo sapien
gaagggaaaatgatgcttgagttga

SEQ ID NO: 1487666 - DNA, 25 bp, Homo sapien
agggaaaatgatgcttgagttgatg

SEQ ID NO: 1487667 - DNA, 25 bp, Homo sapien
gagaagggaaaatgatgcttgagtt

SEQ ID NO: 1487668 - DNA, 25 bp, Homo sapien
tcatgataacaatcttaaaggttcc

SEQ ID NO: 1487669 - DNA, 25 bp, Homo sapien
tggcactcatgataacaatcttaaa

SEQ ID NO: 1487670 - DNA, 25 bp, Homo sapien
atcttaaaggttcctttgtgagtgg

SEQ ID NO: 1487671 - DNA, 25 bp, Homo sapien
aggttcctttgtgagtggatgccat

SEQ ID NO: 1487672 - DNA, 25 bp, Homo sapien
tctcatcatttttcattttgtcaca

SEQ ID NO: 1487673 - DNA, 25 bp, Homo sapien
tcatcatttttcattttgtcacagg

SEQ ID NO: 1487674 - DNA, 25 bp, Homo sapien
tttctcatcatttttcattttgtca

SEQ ID NO: 1487675 - DNA, 25 bp, Homo sapien
ctaaaatcgaagatctttctcatca

SEQ ID NO: 1487676 - DNA, 25 bp, Homo sapien
accagtctccagtaggtttggggat

SEQ ID NO: 1487677 - DNA, 25 bp, Homo sapien
tggacgtttctcatcaagctcaatc

SEQ ID NO: 1487678 - DNA, 25 bp, Homo sapien
gggatggcattctcgtctttgtgaa

SEQ ID NO: 1487679 - DNA, 25 bp, Homo sapien
aagttggacgtttctcatcaagctc

SEQ ID NO: 1487680 - DNA, 25 bp, Homo sapien
aagcccaatgggacctgtgtctcca

SEQ ID NO: 1487681 - DNA, 25 bp, Homo sapien
ctccagctgtagcatcaaggcaggg

SEQ ID NO: 1487682 - DNA, 25 bp, Homo sapien
catcttgcactccccttgctggtgt

SEQ ID NO: 1487683 - DNA, 25 bp, Homo sapien
tgagtttgcggtaaataagcccaat

SEQ ID NO: 1487684 - DNA, 25 bp, Homo sapien
gcatctccgttctcatcatagtaat

SEQ ID NO: 1487685 - DNA, 25 bp, Homo sapien
ctcatcatagtaattctgtggtttc

SEQ ID NO: 1487686 - DNA, 25 bp, Homo sapien
tcctcctagggggatctgcagcatc

SEQ ID NO: 1487687 - DNA, 25 bp, Homo sapien
atctgcagcatctccgttctcatca

SEQ ID NO: 1487688 - DNA, 25 bp, Homo sapien
caaaaggcacctaaatattctaaga

SEQ ID NO: 1487689 - DNA, 25 bp, Homo sapien
taccctcctgatttttcattgaagg

SEQ ID NO: 1487690 - DNA, 25 bp, Homo sapien
cattgaaggacatccaagggtctgg

SEQ ID NO: 1487691 - DNA, 25 bp, Homo sapien
aatgataggtgaggatgatatcccc

SEQ ID NO: 1487692 - DNA, 25 bp, Homo sapien
accaccctgcacgtgagtcaagctg

SEQ ID NO: 1487693 - DNA, 25 bp, Homo sapien
cacgtgagtcaagctgttgagtctc

SEQ ID NO: 1487694 - DNA, 25 bp, Homo sapien
gtcaagctgttgagtctctcccctc

SEQ ID NO: 1487695 - DNA, 25 bp, Homo sapien
ccctgcacgtgagtcaagctgttga

SEQ ID NO: 1487696 - DNA, 25 bp, Homo sapien
tcaacgtgtacgacatggtgagtgc

SEQ ID NO: 1487697 - DNA, 25 bp, Homo sapien
tcagcccgagggttttggccaaagc

SEQ ID NO: 1487698 - DNA, 25 bp, Homo sapien
tattttttaatcctcgcactcgtcg

SEQ ID NO: 1487699 - DNA, 25 bp, Homo sapien
caaagctcgggtgggcttgaacctc

SEQ ID NO: 1487700 - DNA, 25 bp, Homo sapien
taaaaccccttcagacttgcagtgg

SEQ ID NO: 1487701 - DNA, 25 bp, Homo sapien
gcttcaagtgtcatgcagtcctcca

SEQ ID NO: 1487702 - DNA, 25 bp, Homo sapien
ccggcaatggtgtgtggaatcctta

SEQ ID NO: 1487703 - DNA, 25 bp, Homo sapien
caactcagatgccagtagggtccaa

SEQ ID NO: 1487704 - DNA, 25 bp, Homo sapien
aatcccctattaagcttggtaagtg

SEQ ID NO: 1487705 - DNA, 25 bp, Homo sapien
gggtggtagtgggaccttatctcta

SEQ ID NO: 1487706 - DNA, 25 bp, Homo sapien
tataagtgtcctttgccttacagaa

SEQ ID NO: 1487707 - DNA, 25 bp, Homo sapien
ttctatgtggtcaaaactgttggtc

SEQ ID NO: 1487708 - DNA, 25 bp, Homo sapien
aagcaagctcagagtcacgccatag

SEQ ID NO: 1487709 - DNA, 25 bp, Homo sapien
ctgaggcctagttgaaaagcaagct

SEQ ID NO: 1487710 - DNA, 25 bp, Homo sapien
cacgccatagtggtagagcacagtc

SEQ ID NO: 1487711 - DNA, 25 bp, Homo sapien
tctgcgctcctaactgtcatgctgt

SEQ ID NO: 1487712 - DNA, 25 bp, Homo sapien
aggcctccagaggtgaccagccagt

SEQ ID NO: 1487713 - DNA, 25 bp, Homo sapien
gagatccattaggatagcagagaga

SEQ ID NO: 1487714 - DNA, 25 bp, Homo sapien
gctagggagatccattaggatagca

SEQ ID NO: 1487715 - DNA, 25 bp, Homo sapien
tagggagatccattaggatagcaga

SEQ ID NO: 1487716 - DNA, 25 bp, Homo sapien
ctggtgctgaagcgtagtcactcat

SEQ ID NO: 1487717 - DNA, 25 bp, Homo sapien
tgctggtgctgaagcgtagtcactc

SEQ ID NO: 1487718 - DNA, 25 bp, Homo sapien
gctggtgctgaagcgtagtcactca

SEQ ID NO: 1487719 - DNA, 25 bp, Homo sapien
aaaactgcaatcatttttcttcagc

SEQ ID NO: 1487720 - DNA, 25 bp, Homo sapien
gcaatcatttttcttcagctttatc

SEQ ID NO: 1487721 - DNA, 25 bp, Homo sapien
aatcatttttcttcagctttatcag

SEQ ID NO: 1487722 - DNA, 25 bp, Homo sapien
ctgcaatcatttttcttcagcttta

SEQ ID NO: 1487723 - DNA, 25 bp, Homo sapien
ggttacctagcctgttggtggcagt

SEQ ID NO: 1487724 - DNA, 25 bp, Homo sapien
atgcttttccccatatgagtgctga

SEQ ID NO: 1487725 - DNA, 25 bp, Homo sapien
ggcgcccagcctaacgctgaattgt

SEQ ID NO: 1487726 - DNA, 25 bp, Homo sapien
ctgaattgttaagctggaagaccca

SEQ ID NO: 1487727 - DNA, 25 bp, Homo sapien
caaactactatagcctggcctttga

SEQ ID NO: 1487728 - DNA, 25 bp, Homo sapien
ggcctttgaaccaacaccagcgtgt

SEQ ID NO: 1487729 - DNA, 25 bp, Homo sapien
atcagttccgatgcttcctctacag

SEQ ID NO: 1487730 - DNA, 25 bp, Homo sapien
tacagcagggattagcaaactacta

SEQ ID NO: 1487731 - DNA, 25 bp, Homo sapien
cagcagtggcacgtgtgcgtcttat

SEQ ID NO: 1487732 - DNA, 25 bp, Homo sapien
cgatgatgttgccttcgtcaccttg

SEQ ID NO: 1487733 - DNA, 25 bp, Homo sapien
aaacgatgatgttgccttcgtcacc

SEQ ID NO: 1487734 - DNA, 25 bp, Homo sapien
tgatgttgccttcgtcaccttgctt

SEQ ID NO: 1487735 - DNA, 25 bp, Homo sapien
tgagcagagatggtgctgttgcact

SEQ ID NO: 1487736 - DNA, 25 bp, Homo sapien
gcagtgagcagagatggtgctgttg

SEQ ID NO: 1487737 - DNA, 25 bp, Homo sapien
gagcagagatggtgctgttgcactc

SEQ ID NO: 1487738 - DNA, 25 bp, Homo sapien
agtgagcagagatggtgctgttgca

SEQ ID NO: 1487739 - DNA, 25 bp, Homo sapien
tacagagttgcctcccgaaggagtg

SEQ ID NO: 1487740 - DNA, 25 bp, Homo sapien
agtgtcagccaagaactccaggatg

SEQ ID NO: 1487741 - DNA, 25 bp, Homo sapien
ggatcaatcgacttgcctacttcag

SEQ ID NO: 1487742 - DNA, 25 bp, Homo sapien
gaaagagattcctcgctggatcaat

SEQ ID NO: 1487743 - DNA, 25 bp, Homo sapien
gaatccagcaagtcagcacacaagt

SEQ ID NO: 1487744 - DNA, 25 bp, Homo sapien
gagtcctgtccccagacggttagta

SEQ ID NO: 1487745 - DNA, 25 bp, Homo sapien
tgatttaaacctgggctactgacac

SEQ ID NO: 1487746 - DNA, 25 bp, Homo sapien
gcagtgtaacactatccaaggcagt

SEQ ID NO: 1487747 - DNA, 25 bp, Homo sapien
gaggagattcaacaccacagacagc

SEQ ID NO: 1487748 - DNA, 25 bp, Homo sapien
tcaccagcatttgtacagagcaggg

SEQ ID NO: 1487749 - DNA, 25 bp, Homo sapien
catacttctcatggtgggttggaca

SEQ ID NO: 1487750 - DNA, 25 bp, Homo sapien
tttagagcccagatcagttagtagg

SEQ ID NO: 1487751 - DNA, 25 bp, Homo sapien
cccagagcattgctgaggcctctca

SEQ ID NO: 1487752 - DNA, 25 bp, Homo sapien
gcccagagcattgctgaggcctctc

SEQ ID NO: 1487753 - DNA, 25 bp, Homo sapien
agcccagagcattgctgaggcctct

SEQ ID NO: 1487754 - DNA, 25 bp, Homo sapien
ctgtcaaagccaagaggggaaggag

SEQ ID NO: 1487755 - DNA, 25 bp, Homo sapien
ggaaggagagaagagcctcctctca

SEQ ID NO: 1487756 - DNA, 25 bp, Homo sapien
tgtcaaagccaagaggggaaggaga

SEQ ID NO: 1487757 - DNA, 25 bp, Homo sapien
aggggaaggagagaagagcctcctc

SEQ ID NO: 1487758 - DNA, 25 bp, Homo sapien
gtagatgagcccatctgtattctgg

SEQ ID NO: 1487759 - DNA, 25 bp, Homo sapien
tctcctgagagtagatgagcccatc

SEQ ID NO: 1487760 - DNA, 25 bp, Homo sapien
tgagagtagatgagcccatctgtat

SEQ ID NO: 1487761 - DNA, 25 bp, Homo sapien
tagatgagcccatctgtattctggg

SEQ ID NO: 1487762 - DNA, 25 bp, Homo sapien
gatactggtctgctagaggctgaca

SEQ ID NO: 1487763 - DNA, 25 bp, Homo sapien
tcattcccacatgagtgaccccctc

SEQ ID NO: 1487764 - DNA, 25 bp, Homo sapien
tactggtctgctagaggctgacatc

SEQ ID NO: 1487765 - DNA, 25 bp, Homo sapien
cttaggatactggtctgctagaggc

SEQ ID NO: 1487766 - DNA, 25 bp, Homo sapien
gcggcctcgtggccgccctgcgcgc

SEQ ID NO: 1487767 - DNA, 25 bp, Homo sapien
cgcggcctcgtggccgccctgcgcg

SEQ ID NO: 1487768 - DNA, 25 bp, Homo sapien
gctccttgcgccgcaggtagcgccg

SEQ ID NO: 1487769 - DNA, 25 bp, Homo sapien
gcctccacgtcgccagcctctgaag

SEQ ID NO: 1487770 - DNA, 25 bp, Homo sapien
agccggtccggccgctccttgcgcc

SEQ ID NO: 1487771 - DNA, 25 bp, Homo sapien
cctccacgtcgccagcctctgaagc

SEQ ID NO: 1487772 - DNA, 25 bp, Homo sapien
cttgcctgcgcgcgcgtgagcttgc

SEQ ID NO: 1487773 - DNA, 25 bp, Homo sapien
cctgcgcgcgcgtgagcttgcctga

SEQ ID NO: 1487774 - DNA, 25 bp, Homo sapien
cgcgcgcgtgagcttgcctgagctt

SEQ ID NO: 1487775 - DNA, 25 bp, Homo sapien
gcctccttgcctgcgcgcgcgtgag

SEQ ID NO: 1487776 - DNA, 25 bp, Homo sapien
tacgcgcttgggttgcccaggaaac

SEQ ID NO: 1487777 - DNA, 25 bp, Homo sapien
cagaatccagcgacccaaggaatcc

SEQ ID NO: 1487778 - DNA, 25 bp, Homo sapien
aataagtcggccaaatttcgctgcg

SEQ ID NO: 1487779 - DNA, 25 bp, Homo sapien
atctcgggaaccgtcgggctggaca

SEQ ID NO: 1487780 - DNA, 25 bp, Homo sapien
tcatgcaaagatgcccttctatgat

SEQ ID NO: 1487781 - DNA, 25 bp, Homo sapien
ttgggcagccgcagacagatcctca

SEQ ID NO: 1487782 - DNA, 25 bp, Homo sapien
ttctatgattgtctctgtgcagctc

SEQ ID NO: 1487783 - DNA, 25 bp, Homo sapien
caaaggtttgggcagccgcagacag

SEQ ID NO: 1487784 - DNA, 25 bp, Homo sapien
aattagatgctgtcttgtgttggga

SEQ ID NO: 1487785 - DNA, 25 bp, Homo sapien
gctgtcttgtgttgggaaataggaa

SEQ ID NO: 1487786 - DNA, 25 bp, Homo sapien
ggagacagggcgctggaaaggaagg

SEQ ID NO: 1487787 - DNA, 25 bp, Homo sapien
gggcccagacgaagctgcaccaggt

SEQ ID NO: 1487788 - DNA, 25 bp, Homo sapien
taagatttcgttttccttgacatcc

SEQ ID NO: 1487789 - DNA, 25 bp, Homo sapien
cagcattcgcatttccatgtgacgt

SEQ ID NO: 1487790 - DNA, 25 bp, Homo sapien
cccaggctgaatttgttgtcttcca

SEQ ID NO: 1487791 - DNA, 25 bp, Homo sapien
catgtgacgtgacggcatccatctc

SEQ ID NO: 1487792 - DNA, 25 bp, Homo sapien
cagccgggcacttcacctgagactt

SEQ ID NO: 1487793 - DNA, 25 bp, Homo sapien
tgttaccgttacatctgaccctggg

SEQ ID NO: 1487794 - DNA, 25 bp, Homo sapien
tctcagggggctaactagggaagcc

SEQ ID NO: 1487795 - DNA, 25 bp, Homo sapien
tccacaaggtgttccaatttgccag

SEQ ID NO: 1487796 - DNA, 25 bp, Homo sapien
aatttgccagatgtcgattgttacc

SEQ ID NO: 1487797 - DNA, 25 bp, Homo sapien
taccgggtgtaattcttgcgctcac

SEQ ID NO: 1487798 - DNA, 25 bp, Homo sapien
ttagagtcgtcttccataccgggtg

SEQ ID NO: 1487799 - DNA, 25 bp, Homo sapien
tccataccgggtgtaattcttgcgc

SEQ ID NO: 1487800 - DNA, 25 bp, Homo sapien
taattcttgcgctcacggtctctct

SEQ ID NO: 1487801 - DNA, 25 bp, Homo sapien
atgtttgtaccatgcaggagacagc

SEQ ID NO: 1487802 - DNA, 25 bp, Homo sapien
gagatgtttgtaccatgcaggagac

SEQ ID NO: 1487803 - DNA, 25 bp, Homo sapien
agagatgtttgtaccatgcaggaga

SEQ ID NO: 1487804 - DNA, 25 bp, Homo sapien
gatgtttgtaccatgcaggagacag

SEQ ID NO: 1487805 - DNA, 25 bp, Homo sapien
ctcccaggtggagttaggagctgcc

SEQ ID NO: 1487806 - DNA, 25 bp, Homo sapien
cccaggtggagttaggagctgccca

SEQ ID NO: 1487807 - DNA, 25 bp, Homo sapien
gctgactcccaggtggagttaggag

SEQ ID NO: 1487808 - DNA, 25 bp, Homo sapien
ggtggagttaggagctgcccaggtc

SEQ ID NO: 1487809 - DNA, 25 bp, Homo sapien
cgtggacagcaaggaaccaagtgca

SEQ ID NO: 1487810 - DNA, 25 bp, Homo sapien
tgcgagtggctcagaaatgccggct

SEQ ID NO: 1487811 - DNA, 25 bp, Homo sapien
gcgtcggcacttggagacctcgatt

SEQ ID NO: 1487812 - DNA, 25 bp, Homo sapien
gatgagacctgctgcctacacatgt

SEQ ID NO: 1487813 - DNA, 25 bp, Homo sapien
tgactgacgtggaacggagctgctc

SEQ ID NO: 1487814 - DNA, 25 bp, Homo sapien
ttcctgtgagttcaaaatgagaata

SEQ ID NO: 1487815 - DNA, 25 bp, Homo sapien
tttcctgtgagttcaaaatgagaat

SEQ ID NO: 1487816 - DNA, 25 bp, Homo sapien
ctttcctgtgagttcaaaatgagaa

SEQ ID NO: 1487817 - DNA, 25 bp, Homo sapien
tctttcctgtgagttcaaaatgaga

SEQ ID NO: 1487818 - DNA, 25 bp, Homo sapien
caaagacgatggatgcgctgagttt

SEQ ID NO: 1487819 - DNA, 25 bp, Homo sapien
ttttgacgaacggaaatgaggccag

SEQ ID NO: 1487820 - DNA, 25 bp, Homo sapien
gaaagatgtcaagtcgaagcgcctg

SEQ ID NO: 1487821 - DNA, 25 bp, Homo sapien
gcagcagcgtctggcgttcaggaaa

SEQ ID NO: 1487822 - DNA, 25 bp, Homo sapien
aagcacaatataaggcgtcagactg

SEQ ID NO: 1487823 - DNA, 25 bp, Homo sapien
gactggagaggccacggccatgatt

SEQ ID NO: 1487824 - DNA, 25 bp, Homo sapien
gcagggaatcctgaagagccactca

SEQ ID NO: 1487825 - DNA, 25 bp, Homo sapien
ggccacggccatgattcctagcagg

SEQ ID NO: 1487826 - DNA, 25 bp, Homo sapien
tgtgtatacccctttaaatcagtta

SEQ ID NO: 1487827 - DNA, 25 bp, Homo sapien
cagttattccacttccagatattta

SEQ ID NO: 1487828 - DNA, 25 bp, Homo sapien
ggtaactctcccatacagttggtgg

SEQ ID NO: 1487829 - DNA, 25 bp, Homo sapien
catatgcagtgttgaaaaggtgagg

SEQ ID NO: 1487830 - DNA, 25 bp, Homo sapien
gggacgccggaagacttcgccacac

SEQ ID NO: 1487831 - DNA, 25 bp, Homo sapien
cagtctcctttaggcgaactgcgcg

SEQ ID NO: 1487832 - DNA, 25 bp, Homo sapien
gcggacaccaacgtgctgacgcatg

SEQ ID NO: 1487833 - DNA, 25 bp, Homo sapien
aactgcgcggttctatgttaaagcc

SEQ ID NO: 1487834 - DNA, 25 bp, Homo sapien
cactgcggagcgttaggaacattcc

SEQ ID NO: 1487835 - DNA, 25 bp, Homo sapien
gagtcgcggagtagtcctcatggcc

SEQ ID NO: 1487836 - DNA, 25 bp, Homo sapien
acattccctaaaatggcggccggcg

SEQ ID NO: 1487837 - DNA, 25 bp, Homo sapien
cctcgccaggaatctaggagtcggt

SEQ ID NO: 1487838 - DNA, 25 bp, Homo sapien
tataagcctcaaaccgagcacagtc

SEQ ID NO: 1487839 - DNA, 25 bp, Homo sapien
gacctatttaactggcccatcagta

SEQ ID NO: 1487840 - DNA, 25 bp, Homo sapien
gtagtacctatcagagcccatcaaa

SEQ ID NO: 1487841 - DNA, 25 bp, Homo sapien
gacttttggtaggagataactgctg

SEQ ID NO: 1487842 - DNA, 25 bp, Homo sapien
taaggagctgacattctactggagg

SEQ ID NO: 1487843 - DNA, 25 bp, Homo sapien
tgggagttaccaagctggcatacct

SEQ ID NO: 1487844 - DNA, 25 bp, Homo sapien
cactgaacgaggtactagactgatc

SEQ ID NO: 1487845 - DNA, 25 bp, Homo sapien
tgatcattccagcacaacccaggga

SEQ ID NO: 1487846 - DNA, 25 bp, Homo sapien
ttagaggtagtcctggactggagcg

SEQ ID NO: 1487847 - DNA, 25 bp, Homo sapien
ggactggagcgctaagtccagcatt

SEQ ID NO: 1487848 - DNA, 25 bp, Homo sapien
tggagcgctaagtccagcattcctc

SEQ ID NO: 1487849 - DNA, 25 bp, Homo sapien
tagtcctggactggagcgctaagtc

SEQ ID NO: 1487850 - DNA, 25 bp, Homo sapien
catgatcatatgtcccctgggctct

SEQ ID NO: 1487851 - DNA, 25 bp, Homo sapien
gaagaactgtactgcaaagctttga

SEQ ID NO: 1487852 - DNA, 25 bp, Homo sapien
tcaagctgataggaaaaagtcgtct

SEQ ID NO: 1487853 - DNA, 25 bp, Homo sapien
ccaacctcttggtaatgtgaagaac

SEQ ID NO: 1487854 - DNA, 25 bp, Homo sapien
aaatccagctctttggatccccgcg

SEQ ID NO: 1487855 - DNA, 25 bp, Homo sapien
gccctagagtgacagacatcccagt

SEQ ID NO: 1487856 - DNA, 25 bp, Homo sapien
caaatataatcaagtgcagcctcac

SEQ ID NO: 1487857 - DNA, 25 bp, Homo sapien
aaatgtctgtcttgccgccctagag

SEQ ID NO: 1487858 - DNA, 25 bp, Homo sapien
gctgatttaggttgtcacgtggcac

SEQ ID NO: 1487859 - DNA, 25 bp, Homo sapien
ttcattaggatctgttgtggctggc

SEQ ID NO: 1487860 - DNA, 25 bp, Homo sapien
ttcagtctcagggtagtagtcatct

SEQ ID NO: 1487861 - DNA, 25 bp, Homo sapien
tgcgcccggcattcaatattgtatg

SEQ ID NO: 1487862 - DNA, 25 bp, Homo sapien
tataaaacaggtcccttccagcgct

SEQ ID NO: 1487863 - DNA, 25 bp, Homo sapien
cacttgtgtggaatgaaaacttgcc

SEQ ID NO: 1487864 - DNA, 25 bp, Homo sapien
cgaaggtaacagcagtcaacaggat

SEQ ID NO: 1487865 - DNA, 25 bp, Homo sapien
tctaaagaaaagtggagcttgcctc

SEQ ID NO: 1487866 - DNA, 25 bp, Homo sapien
gtcttcaccaataacaaagctcatt

SEQ ID NO: 1487867 - DNA, 25 bp, Homo sapien
caatgtcttcaccaataacaaagct

SEQ ID NO: 1487868 - DNA, 25 bp, Homo sapien
tcaccaataacaaagctcattttca

SEQ ID NO: 1487869 - DNA, 25 bp, Homo sapien
tttccaatgtcttcaccaataacaa

SEQ ID NO: 1487870 - DNA, 25 bp, Homo sapien
agttgtaacatatttggttggatta

SEQ ID NO: 1487871 - DNA, 25 bp, Homo sapien
tattcttatgctattaagattttac

SEQ ID NO: 1487872 - DNA, 25 bp, Homo sapien
aaagttgtaacatatttggttggat

SEQ ID NO: 1487873 - DNA, 25 bp, Homo sapien
tgtaacatatttggttggattattt

SEQ ID NO: 1487874 - DNA, 25 bp, Homo sapien
gatatagcagtaggtaccagctaaa

SEQ ID NO: 1487875 - DNA, 25 bp, Homo sapien
aatgtcacactaggtgatatagcag

SEQ ID NO: 1487876 - DNA, 25 bp, Homo sapien
tgttccattaattccgaaatgtcac

SEQ ID NO: 1487877 - DNA, 25 bp, Homo sapien
ggaacctccagtgtacagcttcctt

SEQ ID NO: 1487878 - DNA, 25 bp, Homo sapien
cctaggtaccatcatttgcaagcat

SEQ ID NO: 1487879 - DNA, 25 bp, Homo sapien
tgcacttttcagcaaagagctaggg

SEQ ID NO: 1487880 - DNA, 25 bp, Homo sapien
gaaaatgtgactatccctaggtacc

SEQ ID NO: 1487881 - DNA, 25 bp, Homo sapien
tagtccagtagtcatcaacccaggt

SEQ ID NO: 1487882 - DNA, 25 bp, Homo sapien
gaggactgccaattgctaagagcac

SEQ ID NO: 1487883 - DNA, 25 bp, Homo sapien
gcaaactctgatagctacgtctaga

SEQ ID NO: 1487884 - DNA, 25 bp, Homo sapien
tcagatatgcaagagaaaacaccct

SEQ ID NO: 1487885 - DNA, 25 bp, Homo sapien
tgtaaacctaagcaagaggactgcc

SEQ ID NO: 1487886 - DNA, 25 bp, Homo sapien
ctattggaatcactggaacatttag

SEQ ID NO: 1487887 - DNA, 25 bp, Homo sapien
cactggaacatttagttgggccctt

SEQ ID NO: 1487888 - DNA, 25 bp, Homo sapien
tggaatcactggaacatttagttgg

SEQ ID NO: 1487889 - DNA, 25 bp, Homo sapien
atcactggaacatttagttgggccc

SEQ ID NO: 1487890 - DNA, 25 bp, Homo sapien
tacattagtagtatagctcacttcc

SEQ ID NO: 1487891 - DNA, 25 bp, Homo sapien
taagtgtgacgccaaataaactagc

SEQ ID NO: 1487892 - DNA, 25 bp, Homo sapien
tgtgctatttctgcatgacttgaga

SEQ ID NO: 1487893 - DNA, 25 bp, Homo sapien
ggatgtgaaagcatagtcctgctca

SEQ ID NO: 1487894 - DNA, 25 bp, Homo sapien
aaaacaggacgattcaagagcagcc

SEQ ID NO: 1487895 - DNA, 25 bp, Homo sapien
aaagttatggagtagctgtgcccac

SEQ ID NO: 1487896 - DNA, 25 bp, Homo sapien
tacctgtggtgctaatactaggcaa

SEQ ID NO: 1487897 - DNA, 25 bp, Homo sapien
taaaggcactgcagcgttaactaag

SEQ ID NO: 1487898 - DNA, 25 bp, Homo sapien
catttattatatccaatgctaaaca

SEQ ID NO: 1487899 - DNA, 25 bp, Homo sapien
tattatatccaatgctaaacactac

SEQ ID NO: 1487900 - DNA, 25 bp, Homo sapien
taaacactaccacttggactctaag

SEQ ID NO: 1487901 - DNA, 25 bp, Homo sapien
tatatccaatgctaaacactaccac

SEQ ID NO: 1487902 - DNA, 25 bp, Homo sapien
ccaaggaaacgctagactgaagtca

SEQ ID NO: 1487903 - DNA, 25 bp, Homo sapien
tcaatgactggcttgcatgatggct

SEQ ID NO: 1487904 - DNA, 25 bp, Homo sapien
aattctctgggctaaacaggcatga

SEQ ID NO: 1487905 - DNA, 25 bp, Homo sapien
tctatcctaggcaaatgagagcttg

SEQ ID NO: 1487906 - DNA, 25 bp, Homo sapien
taaactcagtgttaacttctcccag

SEQ ID NO: 1487907 - DNA, 25 bp, Homo sapien
actcagtgttaacttctcccagcca

SEQ ID NO: 1487908 - DNA, 25 bp, Homo sapien
gataaactcagtgttaacttctccc

SEQ ID NO: 1487909 - DNA, 25 bp, Homo sapien
aaactcagtgttaacttctcccagc

SEQ ID NO: 1487910 - DNA, 25 bp, Homo sapien
cctaaatgttctatgcagagtaaag

SEQ ID NO: 1487911 - DNA, 25 bp, Homo sapien
aagcacacacttaataaatttctcc

SEQ ID NO: 1487912 - DNA, 25 bp, Homo sapien
attttgaaccttgatggcgagaatc

SEQ ID NO: 1487913 - DNA, 25 bp, Homo sapien
cagagtaaagaataagctgtccaga

SEQ ID NO: 1487914 - DNA, 25 bp, Homo sapien
tgaattctttttattgcaaacaaac

SEQ ID NO: 1487915 - DNA, 25 bp, Homo sapien
aatgaattctttttattgcaaacaa

SEQ ID NO: 1487916 - DNA, 25 bp, Homo sapien
aaatgaattctttttattgcaaaca

SEQ ID NO: 1487917 - DNA, 25 bp, Homo sapien
atgaattctttttattgcaaacaaa

SEQ ID NO: 1487918 - DNA, 25 bp, Homo sapien
ggagaagggcatacagacatggcta

SEQ ID NO: 1487919 - DNA, 25 bp, Homo sapien
tcagcaggctaaggagatacccatt

SEQ ID NO: 1487920 - DNA, 25 bp, Homo sapien
gatacccattcaagaactgacatga

SEQ ID NO: 1487921 - DNA, 25 bp, Homo sapien
tacaaagatggtggagttaactact

SEQ ID NO: 1487922 - DNA, 25 bp, Homo sapien
ctttcttttcagaatcaaaatgcag

SEQ ID NO: 1487923 - DNA, 25 bp, Homo sapien
taagaaatgggcaaagccagctttc

SEQ ID NO: 1487924 - DNA, 25 bp, Homo sapien
ttttaataagaaatgggcaaagcca

SEQ ID NO: 1487925 - DNA, 25 bp, Homo sapien
tttcttttcagaatcaaaatgcaga

SEQ ID NO: 1487926 - DNA, 25 bp, Homo sapien
tacccagcaaactacagagaggatg

SEQ ID NO: 1487927 - DNA, 25 bp, Homo sapien
ccttacatgaatctggttgctaaca

SEQ ID NO: 1487928 - DNA, 25 bp, Homo sapien
tgcaattcatgaggaccacttagtc

SEQ ID NO: 1487929 - DNA, 25 bp, Homo sapien
gtttgagcctccacaaataatgcaa

SEQ ID NO: 1487930 - DNA, 25 bp, Homo sapien
tgtagaaccctgaaatactgacaca

SEQ ID NO: 1487931 - DNA, 25 bp, Homo sapien
tcttacgattcacttttaaactgca

SEQ ID NO: 1487932 - DNA, 25 bp, Homo sapien
cgattcacttttaaactgcaattaa

SEQ ID NO: 1487933 - DNA, 25 bp, Homo sapien
ctgaggttctcttacgattcacttt

SEQ ID NO: 1487934 - DNA, 25 bp, Homo sapien
ctaaagaaaacagtcgacttcttgt

SEQ ID NO: 1487935 - DNA, 25 bp, Homo sapien
taaagaaaacagtcgacttcttgtg

SEQ ID NO: 1487936 - DNA, 25 bp, Homo sapien
gaaaacagtcgacttcttgtgaagg

SEQ ID NO: 1487937 - DNA, 25 bp, Homo sapien
aagaaaacagtcgacttcttgtgaa

SEQ ID NO: 1487938 - DNA, 25 bp, Homo sapien
tatgtatcagttcgttttatttggg

SEQ ID NO: 1487939 - DNA, 25 bp, Homo sapien
gagaaatatgtatcagttcgtttta

SEQ ID NO: 1487940 - DNA, 25 bp, Homo sapien
ttttggagaaatatgtatcagttcg

SEQ ID NO: 1487941 - DNA, 25 bp, Homo sapien
aatatgtatcagttcgttttatttg

SEQ ID NO: 1487942 - DNA, 25 bp, Homo sapien
tcaataatatccttggtgataatgc

SEQ ID NO: 1487943 - DNA, 25 bp, Homo sapien
tccttggtgataatgctgactccat

SEQ ID NO: 1487944 - DNA, 25 bp, Homo sapien
taatatccttggtgataatgctgac

SEQ ID NO: 1487945 - DNA, 25 bp, Homo sapien
tggtgataatgctgactccatggct

SEQ ID NO: 1487946 - DNA, 25 bp, Homo sapien
agaaaaaacatcaataagccactca

SEQ ID NO: 1487947 - DNA, 25 bp, Homo sapien
gaaaaaacatcaataagccactcaa

SEQ ID NO: 1487948 - DNA, 25 bp, Homo sapien
aaatcttaggaactcaaaatacaat

SEQ ID NO: 1487949 - DNA, 25 bp, Homo sapien
ataaatcttaggaactcaaaataca

SEQ ID NO: 1487950 - DNA, 25 bp, Homo sapien
taaatcttaggaactcaaaatacaa

SEQ ID NO: 1487951 - DNA, 25 bp, Homo sapien
gctgccactggttgtagccctgaga

SEQ ID NO: 1487952 - DNA, 25 bp, Homo sapien
tgtagccacgattgtttcctcgtcc

SEQ ID NO: 1487953 - DNA, 25 bp, Homo sapien
gttgtagccctgagattgatttttg

SEQ ID NO: 1487954 - DNA, 25 bp, Homo sapien
ttgatttttgtagccacgattgttt

SEQ ID NO: 1487955 - DNA, 25 bp, Homo sapien
catctgacttgtttagtacacctga

SEQ ID NO: 1487956 - DNA, 25 bp, Homo sapien
taatcttaggtagcaagcaatacac

SEQ ID NO: 1487957 - DNA, 25 bp, Homo sapien
gagctctgagcccaattgcttgtta

SEQ ID NO: 1487958 - DNA, 25 bp, Homo sapien
gaaatggacaggttgctagccccta

SEQ ID NO: 1487959 - DNA, 25 bp, Homo sapien
tgtagttccctctgttgggcattcc

SEQ ID NO: 1487960 - DNA, 25 bp, Homo sapien
cacgagggtatggatagccgattcc

SEQ ID NO: 1487961 - DNA, 25 bp, Homo sapien
ttccacctctgttgtagttccctct

SEQ ID NO: 1487962 - DNA, 25 bp, Homo sapien
tatggatagccgattccaccacttc

SEQ ID NO: 1487963 - DNA, 25 bp, Homo sapien
attatatccgccacgattcccaggg

SEQ ID NO: 1487964 - DNA, 25 bp, Homo sapien
ttatatccgccacgattcccagggg

SEQ ID NO: 1487965 - DNA, 25 bp, Homo sapien
tattatatccgccacgattcccagg

SEQ ID NO: 1487966 - DNA, 25 bp, Homo sapien
ctattatatccgccacgattcccag

SEQ ID NO: 1487967 - DNA, 25 bp, Homo sapien
ttcgatcctgaactaaatacagaac

SEQ ID NO: 1487968 - DNA, 25 bp, Homo sapien
tcacttgtttcgatcctgaactaaa

SEQ ID NO: 1487969 - DNA, 25 bp, Homo sapien
taaatacagaacactcaaaattaac

SEQ ID NO: 1487970 - DNA, 25 bp, Homo sapien
cttgtttcgatcctgaactaaatac

SEQ ID NO: 1487971 - DNA, 25 bp, Homo sapien
tttcttccttatattgctccaagag

SEQ ID NO: 1487972 - DNA, 25 bp, Homo sapien
tcttccttatattgctccaagagtt

SEQ ID NO: 1487973 - DNA, 25 bp, Homo sapien
ttgaatcctccacgtcctctatggc

SEQ ID NO: 1487974 - DNA, 25 bp, Homo sapien
tattgaatcctccacgtcctctatg

SEQ ID NO: 1487975 - DNA, 25 bp, Homo sapien
gaagttcaacataggttatttcatc

SEQ ID NO: 1487976 - DNA, 25 bp, Homo sapien
ctgaagttcaacataggttatttca

SEQ ID NO: 1487977 - DNA, 25 bp, Homo sapien
cataggttatttcatcaaagcactc

SEQ ID NO: 1487978 - DNA, 25 bp, Homo sapien
ttcaacataggttatttcatcaaag

SEQ ID NO: 1487979 - DNA, 25 bp, Homo sapien
aattcttgaggtttagtaacatatt

SEQ ID NO: 1487980 - DNA, 25 bp, Homo sapien
tgaagcagtattgctggaaaaaatg

SEQ ID NO: 1487981 - DNA, 25 bp, Homo sapien
ctgaagcagtattgctggaaaaaat

SEQ ID NO: 1487982 - DNA, 25 bp, Homo sapien
aacaactgcaattttaattcctgaa

SEQ ID NO: 1487983 - DNA, 25 bp, Homo sapien
tatgtaacaactgcaattttaattc

SEQ ID NO: 1487984 - DNA, 25 bp, Homo sapien
tagttacacaagcagaatatgtagg

SEQ ID NO: 1487985 - DNA, 25 bp, Homo sapien
taaaaagaagatttcacacagtaac

SEQ ID NO: 1487986 - DNA, 25 bp, Homo sapien
ctaatagatttaacatagttacaca

SEQ ID NO: 1487987 - DNA, 25 bp, Homo sapien
aaagaagatttcacacagtaacaga

SEQ ID NO: 1487988 - DNA, 25 bp, Homo sapien
gcatgttctggtaggtctttcccct

SEQ ID NO: 1487989 - DNA, 25 bp, Homo sapien
catgttctggtaggtctttcccctc

SEQ ID NO: 1487990 - DNA, 25 bp, Homo sapien
tgttctggtaggtctttcccctcta

SEQ ID NO: 1487991 - DNA, 25 bp, Homo sapien
cgcatgttctggtaggtctttcccc

SEQ ID NO: 1487992 - DNA, 25 bp, Homo sapien
tcttctgtgttctttgcttatagtc

SEQ ID NO: 1487993 - DNA, 25 bp, Homo sapien
tcttttgggcaaactacaacagctt

SEQ ID NO: 1487994 - DNA, 25 bp, Homo sapien
gttctttgcttatagtcttcatctt

SEQ ID NO: 1487995 - DNA, 25 bp, Homo sapien
agcttttcgctggaagcctgcaaac

SEQ ID NO: 1487996 - DNA, 25 bp, Homo sapien
gcttctttcgggcagcaatctcaat

SEQ ID NO: 1487997 - DNA, 25 bp, Homo sapien
ataaaatttcgcttctttcgggcag

SEQ ID NO: 1487998 - DNA, 25 bp, Homo sapien
cagttttccagtatctgccatttgc

SEQ ID NO: 1487999 - DNA, 25 bp, Homo sapien
ttcgggcagcaatctcaataaattt

SEQ ID NO: 1488000 - DNA, 25 bp, Homo sapien
tggaaggcagtttaccctcagagtt

SEQ ID NO: 1488001 - DNA, 25 bp, Homo sapien
aaacagaagcctagccagtggaagg

SEQ ID NO: 1488002 - DNA, 25 bp, Homo sapien
tgttaagagctcaaaaacactacgg

SEQ ID NO: 1488003 - DNA, 25 bp, Homo sapien
catatctatatgtaaagcaggcaac

SEQ ID NO: 1488004 - DNA, 25 bp, Homo sapien
gagatcaggccctaaacattttact

SEQ ID NO: 1488005 - DNA, 25 bp, Homo sapien
tgagatcaggccctaaacattttac

SEQ ID NO: 1488006 - DNA, 25 bp, Homo sapien
agatcaggccctaaacattttactt

SEQ ID NO: 1488007 - DNA, 25 bp, Homo sapien
tgcatgtttagtaacccaggtagtt

SEQ ID NO: 1488008 - DNA, 25 bp, Homo sapien
tcttatccataatagtatttgtgcc

SEQ ID NO: 1488009 - DNA, 25 bp, Homo sapien
gctgcatgtttagtaacccaggtag

SEQ ID NO: 1488010 - DNA, 25 bp, Homo sapien
ttgtgccaagaatgttatatttccc

SEQ ID NO: 1488011 - DNA, 25 bp, Homo sapien
ttcatagcccttacactaacggaca

SEQ ID NO: 1488012 - DNA, 25 bp, Homo sapien
gccaggcaagcaatattcaaatgcc

SEQ ID NO: 1488013 - DNA, 25 bp, Homo sapien
tacttaagagcaatatgcacagcac

SEQ ID NO: 1488014 - DNA, 25 bp, Homo sapien
gtagacaccacctaataattcttta

SEQ ID NO: 1488015 - DNA, 25 bp, Homo sapien
agaacatgcgggaacagtggccgtc

SEQ ID NO: 1488016 - DNA, 25 bp, Homo sapien
ttttgaaggcaacgccaagatcttg

SEQ ID NO: 1488017 - DNA, 25 bp, Homo sapien
tggtcctctaactcgatcctctaag

SEQ ID NO: 1488018 - DNA, 25 bp, Homo sapien
gatcttgtccattcttagcatacga

SEQ ID NO: 1488019 - DNA, 25 bp, Homo sapien
ttttcatcaaacttttctccataat

SEQ ID NO: 1488020 - DNA, 25 bp, Homo sapien
atcttcagtctcacagttgcatgtt

SEQ ID NO: 1488021 - DNA, 25 bp, Homo sapien
aatcttcagtctcacagttgcatgt

SEQ ID NO: 1488022 - DNA, 25 bp, Homo sapien
ttagagaatacccataagaaaattc

SEQ ID NO: 1488023 - DNA, 25 bp, Homo sapien
taagcatataacctaatcacctgtc

SEQ ID NO: 1488024 - DNA, 25 bp, Homo sapien
gacgatttgcatatcacgggtaaga

SEQ ID NO: 1488025 - DNA, 25 bp, Homo sapien
taggagggatatatacgcagagacc

SEQ ID NO: 1488026 - DNA, 25 bp, Homo sapien
tcagaccctcctgaacattcatgag

SEQ ID NO: 1488027 - DNA, 25 bp, Homo sapien
aaatgccttactgggatcttctctg

SEQ ID NO: 1488028 - DNA, 25 bp, Homo sapien
gtatataaatgccttactgggatct

SEQ ID NO: 1488029 - DNA, 25 bp, Homo sapien
tccacttgtagttagtgaccagcca

SEQ ID NO: 1488030 - DNA, 25 bp, Homo sapien
tacgaacttcatgtatgtcaatatc

SEQ ID NO: 1488031 - DNA, 25 bp, Homo sapien
caaccgtgattaactgtcacaacaa

SEQ ID NO: 1488032 - DNA, 25 bp, Homo sapien
ggcaagttctaacataacaaccgtg

SEQ ID NO: 1488033 - DNA, 25 bp, Homo sapien
tagcagtatgaagcacctgtaattc

SEQ ID NO: 1488034 - DNA, 25 bp, Homo sapien
taaaaaatcgcctagctctgcatgg

SEQ ID NO: 1488035 - DNA, 25 bp, Homo sapien
acacactttgccttttgacacacca

SEQ ID NO: 1488036 - DNA, 25 bp, Homo sapien
tgccttttgacacaccataggatgc

SEQ ID NO: 1488037 - DNA, 25 bp, Homo sapien
tgacacaccataggatgctcttcct

SEQ ID NO: 1488038 - DNA, 25 bp, Homo sapien
gaagcactgagacgatctcttgata

SEQ ID NO: 1488039 - DNA, 25 bp, Homo sapien
tacttttgacatccaatgtaaacat

SEQ ID NO: 1488040 - DNA, 25 bp, Homo sapien
cctggccgtctaatgctgttaatag

SEQ ID NO: 1488041 - DNA, 25 bp, Homo sapien
tgaagcatgccagaaccaggtagat

SEQ ID NO: 1488042 - DNA, 25 bp, Homo sapien
ccaggtagatttaccagtgccacat

SEQ ID NO: 1488043 - DNA, 25 bp, Homo sapien
actatgaagtacaaacctggccgtc

SEQ ID NO: 1488044 - DNA, 25 bp, Homo sapien
tccgttagctagtcaaaaactggca

SEQ ID NO: 1488045 - DNA, 25 bp, Homo sapien
cttccatctaacacagcaggctgac

SEQ ID NO: 1488046 - DNA, 25 bp, Homo sapien
aagctagtggcccagtgatagccca

SEQ ID NO: 1488047 - DNA, 25 bp, Homo sapien
gccattgataccattcgctgctgaa

SEQ ID NO: 1488048 - DNA, 25 bp, Homo sapien
gtatcaagacaaaccactgtgtcat

SEQ ID NO: 1488049 - DNA, 25 bp, Homo sapien
ctgtgtcatcgaagtgttcatcttc

SEQ ID NO: 1488050 - DNA, 25 bp, Homo sapien
aagtatcaagacaaaccactgtgtc

SEQ ID NO: 1488051 - DNA, 25 bp, Homo sapien
agtatcaagacaaaccactgtgtca

SEQ ID NO: 1488052 - DNA, 25 bp, Homo sapien
ctgatacagctttccgatcaacgaa

SEQ ID NO: 1488053 - DNA, 25 bp, Homo sapien
tccgatcaacgaacgaataagggat

SEQ ID NO: 1488054 - DNA, 25 bp, Homo sapien
gagtaaaactaggtgagcatcctat

SEQ ID NO: 1488055 - DNA, 25 bp, Homo sapien
cgaataagggatgagtaaaactagg

SEQ ID NO: 1488056 - DNA, 25 bp, Homo sapien
gatcttctcgtggtcttttaacacc

SEQ ID NO: 1488057 - DNA, 25 bp, Homo sapien
ccctctttttatctccgcctttctg

SEQ ID NO: 1488058 - DNA, 25 bp, Homo sapien
cttcaatgtactcaaaatatccacg

SEQ ID NO: 1488059 - DNA, 25 bp, Homo sapien
aatatccacggccatgatcttctcg

SEQ ID NO: 1488060 - DNA, 25 bp, Homo sapien
tacgaattcgattggcgctagtgac

SEQ ID NO: 1488061 - DNA, 25 bp, Homo sapien
aagcccacgtgtatcccgaagagag

SEQ ID NO: 1488062 - DNA, 25 bp, Homo sapien
tttccgttccgagaaccaaagcagc

SEQ ID NO: 1488063 - DNA, 25 bp, Homo sapien
agccaaagaaaaactgcgcggccca

SEQ ID NO: 1488064 - DNA, 25 bp, Homo sapien
gctccttgcacaatacagcggcgag

SEQ ID NO: 1488065 - DNA, 25 bp, Homo sapien
tctcggctaatctgggattccccgc

SEQ ID NO: 1488066 - DNA, 25 bp, Homo sapien
ggctctcgagccacataatggaggc

SEQ ID NO: 1488067 - DNA, 25 bp, Homo sapien
gaagtgacgtcacgccgagcccctg

SEQ ID NO: 1488068 - DNA, 25 bp, Homo sapien
ctccgccgccttccgccttcttctt

SEQ ID NO: 1488069 - DNA, 25 bp, Homo sapien
tccgccgccttccgccttcttctta

SEQ ID NO: 1488070 - DNA, 25 bp, Homo sapien
tgcccgttctcgtcgcccgcgcctt

SEQ ID NO: 1488071 - DNA, 25 bp, Homo sapien
tgttgctgctgcgtcgccggcggtt

SEQ ID NO: 1488072 - DNA, 25 bp, Homo sapien
gcgccttcctcttcgtccccgagct

SEQ ID NO: 1488073 - DNA, 25 bp, Homo sapien
accgtcaccgcgaacagcgaggtgg

SEQ ID NO: 1488074 - DNA, 25 bp, Homo sapien
cgttctcgtcttccgaggcggcctc

SEQ ID NO: 1488075 - DNA, 25 bp, Homo sapien
gttctcgtcttccgaggcggcctcc

SEQ ID NO: 1488076 - DNA, 25 bp, Homo sapien
ccccgttctcctctcctagctccat

SEQ ID NO: 1488077 - DNA, 25 bp, Homo sapien
ccgcggccccgttctcctctcctag

SEQ ID NO: 1488078 - DNA, 25 bp, Homo sapien
gcggccccgttctcctctcctagct

SEQ ID NO: 1488079 - DNA, 25 bp, Homo sapien
ggccccgttctcctctcctagctcc

SEQ ID NO: 1488080 - DNA, 25 bp, Homo sapien
tccagagcggagattccttcctcct

SEQ ID NO: 1488081 - DNA, 25 bp, Homo sapien
agcggaatccccgcccaggtctagg

SEQ ID NO: 1488082 - DNA, 25 bp, Homo sapien
ctggtcgccgtccagagcggagatt

SEQ ID NO: 1488083 - DNA, 25 bp, Homo sapien
tcgccgtccagagcggagattcctt

SEQ ID NO: 1488084 - DNA, 25 bp, Homo sapien
gagctcggccttgagacccttgtca

SEQ ID NO: 1488085 - DNA, 25 bp, Homo sapien
gcgcagcctggagtcgctccatgag

SEQ ID NO: 1488086 - DNA, 25 bp, Homo sapien
gacaccttcagcttttttacattaa

SEQ ID NO: 1488087 - DNA, 25 bp, Homo sapien
gaaaggcgtcgcttcttgagctcct

SEQ ID NO: 1488088 - DNA, 25 bp, Homo sapien
accgctaggcgctgcctcaaactcg

SEQ ID NO: 1488089 - DNA, 25 bp, Homo sapien
cccgattcaccgctaggcgctgcct

SEQ ID NO: 1488090 - DNA, 25 bp, Homo sapien
gctaggcgctgcctcaaactcggct

SEQ ID NO: 1488091 - DNA, 25 bp, Homo sapien
gattcaccgctaggcgctgcctcaa

SEQ ID NO: 1488092 - DNA, 25 bp, Homo sapien
agatgggttcgtgctgcagagcgga

SEQ ID NO: 1488093 - DNA, 25 bp, Homo sapien
tggagatgggttcgtgctgcagagc

SEQ ID NO: 1488094 - DNA, 25 bp, Homo sapien
ggttcgtgctgcagagcggatccgc

SEQ ID NO: 1488095 - DNA, 25 bp, Homo sapien
ggctggagatgggttcgtgctgcag

SEQ ID NO: 1488096 - DNA, 25 bp, Homo sapien
gtcgaacggcgccaattcctttcac

SEQ ID NO: 1488097 - DNA, 25 bp, Homo sapien
ctggtgtcgaacggcgccaattcct

SEQ ID NO: 1488098 - DNA, 25 bp, Homo sapien
ttcctttcaccgagttcgcgaggga

SEQ ID NO: 1488099 - DNA, 25 bp, Homo sapien
ctttcaccgagttcgcgagggagac

SEQ ID NO: 1488100 - DNA, 25 bp, Homo sapien
gcggcgccgcgcacgtaatataggc

SEQ ID NO: 1488101 - DNA, 25 bp, Homo sapien
ggcgcgagcgagcacgcaacgtcct

SEQ ID NO: 1488102 - DNA, 25 bp, Homo sapien
gcggagactcgcctggcgcgagcga

SEQ ID NO: 1488103 - DNA, 25 bp, Homo sapien
aggagcggcgccgcgcacgtaatat

SEQ ID NO: 1488104 - DNA, 25 bp, Homo sapien
cgggagcactgcgcaggaggaaagc

SEQ ID NO: 1488105 - DNA, 25 bp, Homo sapien
gaggaaagccggagcgcgcccgcgc

SEQ ID NO: 1488106 - DNA, 25 bp, Homo sapien
ggaggaaagccggagcgcgcccgcg

SEQ ID NO: 1488107 - DNA, 25 bp, Homo sapien
aggaggaaagccggagcgcgcccgc

SEQ ID NO: 1488108 - DNA, 25 bp, Homo sapien
agcctctctagtaggtggggttaca

SEQ ID NO: 1488109 - DNA, 25 bp, Homo sapien
tctctagtaggtggggttacaggcg

SEQ ID NO: 1488110 - DNA, 25 bp, Homo sapien
ctagtaggtggggttacaggcgttg

SEQ ID NO: 1488111 - DNA, 25 bp, Homo sapien
taggtggggttacaggcgttggcca

SEQ ID NO: 1488112 - DNA, 25 bp, Homo sapien
tctggttagaagtgcaaactttcaa

SEQ ID NO: 1488113 - DNA, 25 bp, Homo sapien
agctcaaaaaatagtagtcttcatc

SEQ ID NO: 1488114 - DNA, 25 bp, Homo sapien
tagtcgctgcgtgattttgcacaag

SEQ ID NO: 1488115 - DNA, 25 bp, Homo sapien
agaaagtcgaagctgtaccacatag

SEQ ID NO: 1488116 - DNA, 25 bp, Homo sapien
cacagcagagtggtgtcaagcacac

SEQ ID NO: 1488117 - DNA, 25 bp, Homo sapien
tttaaacaggatactatgcatgggc

SEQ ID NO: 1488118 - DNA, 25 bp, Homo sapien
gacaaaccggagaggcaggattgcc

SEQ ID NO: 1488119 - DNA, 25 bp, Homo sapien
caaaggttctcagggtagctggaca

SEQ ID NO: 1488120 - DNA, 25 bp, Homo sapien
tgccttgagctatcacaggcccaag

SEQ ID NO: 1488121 - DNA, 25 bp, Homo sapien
cagagtgatgcgatgtgctggcaat

SEQ ID NO: 1488122 - DNA, 25 bp, Homo sapien
gaatctgtgtcctagtcctcggctg

SEQ ID NO: 1488123 - DNA, 25 bp, Homo sapien
catggaccaggttcaaacttgacca

SEQ ID NO: 1488124 - DNA, 25 bp, Homo sapien
ttcagggccccagttcctttctgga

SEQ ID NO: 1488125 - DNA, 25 bp, Homo sapien
gattttctacgtggtcaaacacaca

SEQ ID NO: 1488126 - DNA, 25 bp, Homo sapien
gaaataatgtagctatcagtgtcca

SEQ ID NO: 1488127 - DNA, 25 bp, Homo sapien
tctctgggtgtagctgccgtctgga

SEQ ID NO: 1488128 - DNA, 25 bp, Homo sapien
aatagccctttgagatgttccttaa

SEQ ID NO: 1488129 - DNA, 25 bp, Homo sapien
taacccgcgaggatgaccctcttgt

SEQ ID NO: 1488130 - DNA, 25 bp, Homo sapien
tgagccatgaagaccacggtattaa

SEQ ID NO: 1488131 - DNA, 25 bp, Homo sapien
tcaacatcatgtgtccaaaatagcc

SEQ ID NO: 1488132 - DNA, 25 bp, Homo sapien
cagagtcagctccaacgtctattgg

SEQ ID NO: 1488133 - DNA, 25 bp, Homo sapien
tcagctccaacgtctattggatccc

SEQ ID NO: 1488134 - DNA, 25 bp, Homo sapien
tccaacgtctattggatcccactct

SEQ ID NO: 1488135 - DNA, 25 bp, Homo sapien
gagtcagctccaacgtctattggat

SEQ ID NO: 1488136 - DNA, 25 bp, Homo sapien
agcttgcctctgtcacaccgttttc

SEQ ID NO: 1488137 - DNA, 25 bp, Homo sapien
agatgccagcttgcctctgtcacac

SEQ ID NO: 1488138 - DNA, 25 bp, Homo sapien
cacgtcgccagggattcttgacgga

SEQ ID NO: 1488139 - DNA, 25 bp, Homo sapien
ggatgattccgctgtcagatgccag

SEQ ID NO: 1488140 - DNA, 25 bp, Homo sapien
cgtgtcatgtgtgaaacgagtttac

SEQ ID NO: 1488141 - DNA, 25 bp, Homo sapien
ctgaacgcagtagccatgtatttga

SEQ ID NO: 1488142 - DNA, 25 bp, Homo sapien
catgtatttgaaagccgtgtcatgt

SEQ ID NO: 1488143 - DNA, 25 bp, Homo sapien
gaaagccgtgtcatgtgtgaaacga

SEQ ID NO: 1488144 - DNA, 25 bp, Homo sapien
gattaggataaacaaagattctccg

SEQ ID NO: 1488145 - DNA, 25 bp, Homo sapien
ccacttgttatatgcagaactattc

SEQ ID NO: 1488146 - DNA, 25 bp, Homo sapien
ttctccgtgctcatccaaaagtcca

SEQ ID NO: 1488147 - DNA, 25 bp, Homo sapien
tctcacctcgggaatgtgatggttt

SEQ ID NO: 1488148 - DNA, 25 bp, Homo sapien
agacttcctactgtgtcacatccag

SEQ ID NO: 1488149 - DNA, 25 bp, Homo sapien
tgcagacttcctactgtgtcacatc

SEQ ID NO: 1488150 - DNA, 25 bp, Homo sapien
tatgtctgtttcataggctgcagac

SEQ ID NO: 1488151 - DNA, 25 bp, Homo sapien
ctgcagacttcctactgtgtcacat

SEQ ID NO: 1488152 - DNA, 25 bp, Homo sapien
tcactcctcaggtaacaaggaacac

SEQ ID NO: 1488153 - DNA, 25 bp, Homo sapien
gctgaatccaccttggttacatgct

SEQ ID NO: 1488154 - DNA, 25 bp, Homo sapien
gggcaactgatctccagtgtagctg

SEQ ID NO: 1488155 - DNA, 25 bp, Homo sapien
tattcttaacttgggcacaatcaac

SEQ ID NO: 1488156 - DNA, 25 bp, Homo sapien
caggtggatcagttggtgttcccca

SEQ ID NO: 1488157 - DNA, 25 bp, Homo sapien
aagatgtccttgtcagtggagagga

SEQ ID NO: 1488158 - DNA, 25 bp, Homo sapien
gcagtcactaagaaatccagacaag

SEQ ID NO: 1488159 - DNA, 25 bp, Homo sapien
gaccaccaggtttgcacttgtgcat

SEQ ID NO: 1488160 - DNA, 25 bp, Homo sapien
agagtggtcatgatggtcttgtgcc

SEQ ID NO: 1488161 - DNA, 25 bp, Homo sapien
gctaactagagtggtcatgatggtc

SEQ ID NO: 1488162 - DNA, 25 bp, Homo sapien
tgtgttttgcatgctaactagagtg

SEQ ID NO: 1488163 - DNA, 25 bp, Homo sapien
tcatgatggtcttgtgcctagtaaa

SEQ ID NO: 1488164 - DNA, 25 bp, Homo sapien
gaatggcctatactggtggccaaga

SEQ ID NO: 1488165 - DNA, 25 bp, Homo sapien
ggagtccgataataggttccactga

SEQ ID NO: 1488166 - DNA, 25 bp, Homo sapien
tccactgcgccagaacactcaggaa

SEQ ID NO: 1488167 - DNA, 25 bp, Homo sapien
tccactgatagtcaatagcaatcga

SEQ ID NO: 1488168 - DNA, 25 bp, Homo sapien
tgaagggttttctgccaagtgtaag

SEQ ID NO: 1488169 - DNA, 25 bp, Homo sapien
tcagatttgtgatatcagggccctc

SEQ ID NO: 1488170 - DNA, 25 bp, Homo sapien
caactctggatcaagccaagctcaa

SEQ ID NO: 1488171 - DNA, 25 bp, Homo sapien
agttcctcagaacattgccattatg

SEQ ID NO: 1488172 - DNA, 25 bp, Homo sapien
tatgaaggcgagagcccactactag

SEQ ID NO: 1488173 - DNA, 25 bp, Homo sapien
tcatggtagaggagtaaatttcgcc

SEQ ID NO: 1488174 - DNA, 25 bp, Homo sapien
gtaagtgttactcgcaagctgccca

SEQ ID NO: 1488175 - DNA, 25 bp, Homo sapien
tgaaacctaaagctgcagaaaggcg

SEQ ID NO: 1488176 - DNA, 25 bp, Homo sapien
catacaggcagcagattacagcagt

SEQ ID NO: 1488177 - DNA, 25 bp, Homo sapien
taaaccagatcgcatgtcatacagg

SEQ ID NO: 1488178 - DNA, 25 bp, Homo sapien
aaagagattacatgactcgcccagg

SEQ ID NO: 1488179 - DNA, 25 bp, Homo sapien
gatcattcagggaaggcatgtaccc

SEQ ID NO: 1488180 - DNA, 25 bp, Homo sapien
tcaggagatgcggaagttaattaac

SEQ ID NO: 1488181 - DNA, 25 bp, Homo sapien
taatcatcggtcatgtttctacaac

SEQ ID NO: 1488182 - DNA, 25 bp, Homo sapien
ggaggctcctattcaaaccttagtg

SEQ ID NO: 1488183 - DNA, 25 bp, Homo sapien
taatatgtgccccaattaggctagg

SEQ ID NO: 1488184 - DNA, 25 bp, Homo sapien
gttatcgttaggcatctcccaggcg

SEQ ID NO: 1488185 - DNA, 25 bp, Homo sapien
tgatgaagcaacatgctaggcccgg

SEQ ID NO: 1488186 - DNA, 25 bp, Homo sapien
tgtaatactgagcacaacatgggca

SEQ ID NO: 1488187 - DNA, 25 bp, Homo sapien
gacaccgcggccgaggttatcgtta

SEQ ID NO: 1488188 - DNA, 25 bp, Homo sapien
gacgggatcctctgtttgcgccgaa

SEQ ID NO: 1488189 - DNA, 25 bp, Homo sapien
aatggcgtcgttgttcacggtcgcg

SEQ ID NO: 1488190 - DNA, 25 bp, Homo sapien
cctgatggcgttcgcggccaccatt

SEQ ID NO: 1488191 - DNA, 25 bp, Homo sapien
tctggccgcctgaatctgacgggat

SEQ ID NO: 1488192 - DNA, 25 bp, Homo sapien
cataatagccaaagtgatcagcaga

SEQ ID NO: 1488193 - DNA, 25 bp, Homo sapien
tctcacctggagtattgcagaggcc

SEQ ID NO: 1488194 - DNA, 25 bp, Homo sapien
taatagccaaagtgatcagcagacc

SEQ ID NO: 1488195 - DNA, 25 bp, Homo sapien
gagtattgcagaggcctcctgactg

SEQ ID NO: 1488196 - DNA, 25 bp, Homo sapien
cagtaatgcttatgcgatgacacac

SEQ ID NO: 1488197 - DNA, 25 bp, Homo sapien
tacaagtcataagatacaagagagc

SEQ ID NO: 1488198 - DNA, 25 bp, Homo sapien
aatggaggacacagcttgggactga

SEQ ID NO: 1488199 - DNA, 25 bp, Homo sapien
gggtttgtgccacacacatcaaaga

SEQ ID NO: 1488200 - DNA, 25 bp, Homo sapien
cattctgtgggaatgacattgtgga

SEQ ID NO: 1488201 - DNA, 25 bp, Homo sapien
taaaccagtgccatcagagctgcag

SEQ ID NO: 1488202 - DNA, 25 bp, Homo sapien
tgacattgtggaacaccaggccttc

SEQ ID NO: 1488203 - DNA, 25 bp, Homo sapien
ttataaaccagtgccatcagagctg

SEQ ID NO: 1488204 - DNA, 25 bp, Homo sapien
caattggcaggaaccttgagtgtac

SEQ ID NO: 1488205 - DNA, 25 bp, Homo sapien
ctctgaggctcttggtatccaatat

SEQ ID NO: 1488206 - DNA, 25 bp, Homo sapien
agggagacttcagcttcgttagcaa

SEQ ID NO: 1488207 - DNA, 25 bp, Homo sapien
tcaactcagtataagtctctgaggc

SEQ ID NO: 1488208 - DNA, 25 bp, Homo sapien
ttatggcttttctgtagcgttcggg

SEQ ID NO: 1488209 - DNA, 25 bp, Homo sapien
catactatggtatgattcccatgga

SEQ ID NO: 1488210 - DNA, 25 bp, Homo sapien
catggagtggggtcatatctgtgat

SEQ ID NO: 1488211 - DNA, 25 bp, Homo sapien
ggatctggaatggaggtagctctcc

SEQ ID NO: 1488212 - DNA, 25 bp, Homo sapien
ttaatgtattggaggacatcacaaa

SEQ ID NO: 1488213 - DNA, 25 bp, Homo sapien
aagggttaatgtattggaggacatc

SEQ ID NO: 1488214 - DNA, 25 bp, Homo sapien
ctaagtggcataaatgccataaggg

SEQ ID NO: 1488215 - DNA, 25 bp, Homo sapien
gcataaatgccataagggttaatgt

SEQ ID NO: 1488216 - DNA, 25 bp, Homo sapien
tctttggcaccagaaatacgatgcg

SEQ ID NO: 1488217 - DNA, 25 bp, Homo sapien
tagccccgtatttcagaacatggga

SEQ ID NO: 1488218 - DNA, 25 bp, Homo sapien
cagaacatgggaggacaagagaagc

SEQ ID NO: 1488219 - DNA, 25 bp, Homo sapien
gcgaggatagtgcataggatcattc

SEQ ID NO: 1488220 - DNA, 25 bp, Homo sapien
ggtcagtgtgatccttcagctggga

SEQ ID NO: 1488221 - DNA, 25 bp, Homo sapien
tcaacgagtccatctgaaaagccat

SEQ ID NO: 1488222 - DNA, 25 bp, Homo sapien
cgagccattgctaccgctgatgagc

SEQ ID NO: 1488223 - DNA, 25 bp, Homo sapien
ctccgttttagagggcgagccattg

SEQ ID NO: 1488224 - DNA, 25 bp, Homo sapien
gatatcagcatttacgggaaggcag

SEQ ID NO: 1488225 - DNA, 25 bp, Homo sapien
agacagtctagaacaaaaccatggg

SEQ ID NO: 1488226 - DNA, 25 bp, Homo sapien
cattcagataagaagtccaaggagc

SEQ ID NO: 1488227 - DNA, 25 bp, Homo sapien
tctggctcggacgatgggtaaaagt

SEQ ID NO: 1488228 - DNA, 25 bp, Homo sapien
gataattccagcagtggtaagaatg

SEQ ID NO: 1488229 - DNA, 25 bp, Homo sapien
ggaaggcttcctgacagataattcc

SEQ ID NO: 1488230 - DNA, 25 bp, Homo sapien
cagcagtggtaagaatggaaggcat

SEQ ID NO: 1488231 - DNA, 25 bp, Homo sapien
aaggcttcctgacagataattccag

SEQ ID NO: 1488232 - DNA, 25 bp, Homo sapien
tgatgtgccactggctcggccgtgc

SEQ ID NO: 1488233 - DNA, 25 bp, Homo sapien
tgtgccactggctcggccgtgcatg

SEQ ID NO: 1488234 - DNA, 25 bp, Homo sapien
gacctgatgtgccactggctcggcc

SEQ ID NO: 1488235 - DNA, 25 bp, Homo sapien
tagagacctgatgtgccactggctc

SEQ ID NO: 1488236 - DNA, 25 bp, Homo sapien
agccagagatgaggatgaaccgcgt

SEQ ID NO: 1488237 - DNA, 25 bp, Homo sapien
cagccagagatgaggatgaaccgcg

SEQ ID NO: 1488238 - DNA, 25 bp, Homo sapien
gccagagatgaggatgaaccgcgtg

SEQ ID NO: 1488239 - DNA, 25 bp, Homo sapien
ccagagatgaggatgaaccgcgtgc

SEQ ID NO: 1488240 - DNA, 25 bp, Homo sapien
agtgcgtcgacccaggcacggactt

SEQ ID NO: 1488241 - DNA, 25 bp, Homo sapien
cttgtttggagcatacaggacagct

SEQ ID NO: 1488242 - DNA, 25 bp, Homo sapien
gcactgaggcgtgtgctagcgccca

SEQ ID NO: 1488243 - DNA, 25 bp, Homo sapien
gcacggacatgcagcactgaggcgt

SEQ ID NO: 1488244 - DNA, 25 bp, Homo sapien
ccatttcccgactaggagagtgctt

SEQ ID NO: 1488245 - DNA, 25 bp, Homo sapien
tggcctcttgtgcaggaagtttgct

SEQ ID NO: 1488246 - DNA, 25 bp, Homo sapien
tcaccatatgccatttcccgactag

SEQ ID NO: 1488247 - DNA, 25 bp, Homo sapien
cctcttgtgcaggaagtttgcttac

SEQ ID NO: 1488248 - DNA, 25 bp, Homo sapien
cagagcctgccataccccacagctt

SEQ ID NO: 1488249 - DNA, 25 bp, Homo sapien
cacagcttggccgggccctgtggaa

SEQ ID NO: 1488250 - DNA, 25 bp, Homo sapien
cttccgcagagcctgccatacccca

SEQ ID NO: 1488251 - DNA, 25 bp, Homo sapien
ctgccataccccacagcttggccgg

SEQ ID NO: 1488252 - DNA, 25 bp, Homo sapien
gaataaggtaggaatccaggtggtc

SEQ ID NO: 1488253 - DNA, 25 bp, Homo sapien
taggtaccacgttgtctgtcccatc

SEQ ID NO: 1488254 - DNA, 25 bp, Homo sapien
tggccacccatgtgacatgaagttg

SEQ ID NO: 1488255 - DNA, 25 bp, Homo sapien
tcccctgagggtcttctgacaggct

SEQ ID NO: 1488256 - DNA, 25 bp, Homo sapien
ctgacagtggcaacgttctcaagct

SEQ ID NO: 1488257 - DNA, 25 bp, Homo sapien
gacagtggcaacgttctcaagcttc

SEQ ID NO: 1488258 - DNA, 25 bp, Homo sapien
cagtggcaacgttctcaagcttcac

SEQ ID NO: 1488259 - DNA, 25 bp, Homo sapien
gtggcaacgttctcaagcttcacag

SEQ ID NO: 1488260 - DNA, 25 bp, Homo sapien
ctctgcttagcaagggaccacccat

SEQ ID NO: 1488261 - DNA, 25 bp, Homo sapien
ctcctgctgcggcatttccaaagcc

SEQ ID NO: 1488262 - DNA, 25 bp, Homo sapien
cctctgcttagcaagggaccaccca

SEQ ID NO: 1488263 - DNA, 25 bp, Homo sapien
tcctgctgcggcatttccaaagcct

SEQ ID NO: 1488264 - DNA, 25 bp, Homo sapien
cagggctggcgtgcacattctccag

SEQ ID NO: 1488265 - DNA, 25 bp, Homo sapien
agggctggcgtgcacattctccagg

SEQ ID NO: 1488266 - DNA, 25 bp, Homo sapien
tgggtatcagaggacacgatgacct

SEQ ID NO: 1488267 - DNA, 25 bp, Homo sapien
ccactgctgagggtcggtacaaagg

SEQ ID NO: 1488268 - DNA, 25 bp, Homo sapien
caggctccggaaagacgatgtgccc

SEQ ID NO: 1488269 - DNA, 25 bp, Homo sapien
tgcactgctaggacacctcgttctt

SEQ ID NO: 1488270 - DNA, 25 bp, Homo sapien
gaaggccacgcagagttgatgccgc

SEQ ID NO: 1488271 - DNA, 25 bp, Homo sapien
tgggagagaaggtccagctcacaga

SEQ ID NO: 1488272 - DNA, 25 bp, Homo sapien
ttgatgccgcagacccatgattccg

SEQ ID NO: 1488273 - DNA, 25 bp, Homo sapien
tggagatagtcggagagagctcctc

SEQ ID NO: 1488274 - DNA, 25 bp, Homo sapien
gcgtggacaaagtcccccactacca

SEQ ID NO: 1488275 - DNA, 25 bp, Homo sapien
gaagcgtggacaaagtcccccacta

SEQ ID NO: 1488276 - DNA, 25 bp, Homo sapien
ggagaagcgtggacaaagtccccca

SEQ ID NO: 1488277 - DNA, 25 bp, Homo sapien
caggagaagcgtggacaaagtcccc

SEQ ID NO: 1488278 - DNA, 25 bp, Homo sapien
gagcaggtcctcaggttgcttccgt

SEQ ID NO: 1488279 - DNA, 25 bp, Homo sapien
ggttgcttccgtgtctccaccacgg

SEQ ID NO: 1488280 - DNA, 25 bp, Homo sapien
tccaccacggtctttgaagcccttc

SEQ ID NO: 1488281 - DNA, 25 bp, Homo sapien
tacggctgactctggtggccatcgc

SEQ ID NO: 1488282 - DNA, 25 bp, Homo sapien
taggtggagacagcccgtgccttac

SEQ ID NO: 1488283 - DNA, 25 bp, Homo sapien
cttaggtggagacagcccgtgcctt

SEQ ID NO: 1488284 - DNA, 25 bp, Homo sapien
ttaggtggagacagcccgtgcctta

SEQ ID NO: 1488285 - DNA, 25 bp, Homo sapien
ggtggagacagcccgtgccttactc

SEQ ID NO: 1488286 - DNA, 25 bp, Homo sapien
tcccaacagcaatcagccagtgtct

SEQ ID NO: 1488287 - DNA, 25 bp, Homo sapien
gacgacatgaagctagaccccatgg

SEQ ID NO: 1488288 - DNA, 25 bp, Homo sapien
cttttgatgatcttcccagtgctgg

SEQ ID NO: 1488289 - DNA, 25 bp, Homo sapien
taatggctcttctattcccaacagc

SEQ ID NO: 1488290 - DNA, 25 bp, Homo sapien
tcagatcctaagctgtgtgtggttc

SEQ ID NO: 1488291 - DNA, 25 bp, Homo sapien
gaattcattggaacagtcaccaatc

SEQ ID NO: 1488292 - DNA, 25 bp, Homo sapien
gttgtaccgataatcttgtcaccca

SEQ ID NO: 1488293 - DNA, 25 bp, Homo sapien
tcaccaatcatataggtagtgggtt

SEQ ID NO: 1488294 - DNA, 25 bp, Homo sapien
caatggcgatgatgtgtttcgcggc

SEQ ID NO: 1488295 - DNA, 25 bp, Homo sapien
tcgccggctcgtttcaccacacgct

SEQ ID NO: 1488296 - DNA, 25 bp, Homo sapien
taagcggctcgtggccaatggcgat

SEQ ID NO: 1488297 - DNA, 25 bp, Homo sapien
gctttttggctgataagcggctcgt

SEQ ID NO: 1488298 - DNA, 25 bp, Homo sapien
agttctgtggatgtggccgtgacaa

SEQ ID NO: 1488299 - DNA, 25 bp, Homo sapien
gattgtatccctcgctttcctcgtg

SEQ ID NO: 1488300 - DNA, 25 bp, Homo sapien
tgtggccgtgacaagaggacgtgcg

SEQ ID NO: 1488301 - DNA, 25 bp, Homo sapien
ggccgcgagccctgattgtatccct

SEQ ID NO: 1488302 - DNA, 25 bp, Homo sapien
tacttgtgggatccatttgctttca

SEQ ID NO: 1488303 - DNA, 25 bp, Homo sapien
aattggtgctattacttgtgggatc

SEQ ID NO: 1488304 - DNA, 25 bp, Homo sapien
gcaaattggtgctattacttgtggg

SEQ ID NO: 1488305 - DNA, 25 bp, Homo sapien
ggcagaaggggacgaggaaaagcat

SEQ ID NO: 1488306 - DNA, 25 bp, Homo sapien
ttaccagacccatctcggcggaggt

SEQ ID NO: 1488307 - DNA, 25 bp, Homo sapien
ccgctgaagaaaccttgccctgagg

SEQ ID NO: 1488308 - DNA, 25 bp, Homo sapien
gccaccatgaattcggtagctggga

SEQ ID NO: 1488309 - DNA, 25 bp, Homo sapien
ccttctggatgtagcgtcggtggaa

SEQ ID NO: 1488310 - DNA, 25 bp, Homo sapien
ccgtaacttttgccgcattcctgca

SEQ ID NO: 1488311 - DNA, 25 bp, Homo sapien
ccgcattcctgcacttctaggcaga

SEQ ID NO: 1488312 - DNA, 25 bp, Homo sapien
gctggagccgtgagagcctctcgtt

SEQ ID NO: 1488313 - DNA, 25 bp, Homo sapien
tcggatcgtttagctggagccgtga

SEQ ID NO: 1488314 - DNA, 25 bp, Homo sapien
cggatcgtttagctggagccgtgag

SEQ ID NO: 1488315 - DNA, 25 bp, Homo sapien
ctcggatcgtttagctggagccgtg

SEQ ID NO: 1488316 - DNA, 25 bp, Homo sapien
gtgtcttccccgcaggtgaatgaag

SEQ ID NO: 1488317 - DNA, 25 bp, Homo sapien
accggcgtgtcttccccgcaggtga

SEQ ID NO: 1488318 - DNA, 25 bp, Homo sapien
cttgcagcccctgacaccggcgtgt

SEQ ID NO: 1488319 - DNA, 25 bp, Homo sapien
gtcttccccgcaggtgaatgaagtc

SEQ ID NO: 1488320 - DNA, 25 bp, Homo sapien
ggctctccgggcttcggcacaggct

SEQ ID NO: 1488321 - DNA, 25 bp, Homo sapien
tcggcactagttcgccgggctcctt

SEQ ID NO: 1488322 - DNA, 25 bp, Homo sapien
ccggaaagctggtaccggaaagcat

SEQ ID NO: 1488323 - DNA, 25 bp, Homo sapien
aaagcatacgaggagtcgcgcgccg

SEQ ID NO: 1488324 - DNA, 25 bp, Homo sapien
gctgcaggctgcgctttcgatgttt

SEQ ID NO: 1488325 - DNA, 25 bp, Homo sapien
tgcaggctgcgctttcgatgtttct

SEQ ID NO: 1488326 - DNA, 25 bp, Homo sapien
cggctgcaggctgcgctttcgatgt

SEQ ID NO: 1488327 - DNA, 25 bp, Homo sapien
gcaggctgcgctttcgatgtttctc

SEQ ID NO: 1488328 - DNA, 25 bp, Homo sapien
ttacaaaaatgtcagcgggagctgt

SEQ ID NO: 1488329 - DNA, 25 bp, Homo sapien
aagcaagctgatgctcggagctggc

SEQ ID NO: 1488330 - DNA, 25 bp, Homo sapien
acagaaacatactcgaaagccagca

SEQ ID NO: 1488331 - DNA, 25 bp, Homo sapien
ggtccatcctttccgcggttgcaga

SEQ ID NO: 1488332 - DNA, 25 bp, Homo sapien
atttcagtgccccatcggcagggcg

SEQ ID NO: 1488333 - DNA, 25 bp, Homo sapien
gttcttcagccggccatttcagtgc

SEQ ID NO: 1488334 - DNA, 25 bp, Homo sapien
ctgttttgtcctcaaaaagattgca

SEQ ID NO: 1488335 - DNA, 25 bp, Homo sapien
tgcaaattggctggtgtctgggagg

SEQ ID NO: 1488336 - DNA, 25 bp, Homo sapien
caagggaatttcgaagcaagatctc

SEQ ID NO: 1488337 - DNA, 25 bp, Homo sapien
tgtgtgcctggataatcgctggcag

SEQ ID NO: 1488338 - DNA, 25 bp, Homo sapien
ccctgcatcctgatgaagaactgta

SEQ ID NO: 1488339 - DNA, 25 bp, Homo sapien
gaagaactgtaagaggaccatgtct

SEQ ID NO: 1488340 - DNA, 25 bp, Homo sapien
gcaggattcctattctcttttgtgg

SEQ ID NO: 1488341 - DNA, 25 bp, Homo sapien
ggttgtgccagagaggaatttgcca

SEQ ID NO: 1488342 - DNA, 25 bp, Homo sapien
gtgaaacgatcacagtccactgtaa

SEQ ID NO: 1488343 - DNA, 25 bp, Homo sapien
ccctggctagagtgctgtgaaacga

SEQ ID NO: 1488344 - DNA, 25 bp, Homo sapien
ggttatcgattagcacggatgccaa

SEQ ID NO: 1488345 - DNA, 25 bp, Homo sapien
ggctgttgccaatgcctcttgatct

SEQ ID NO: 1488346 - DNA, 25 bp, Homo sapien
gccaatttactacagaggctgttgc

SEQ ID NO: 1488347 - DNA, 25 bp, Homo sapien
gatggattgggtctgcgtcttttca

SEQ ID NO: 1488348 - DNA, 25 bp, Homo sapien
cagtcgatggctatgtgggctattt

SEQ ID NO: 1488349 - DNA, 25 bp, Homo sapien
tgttttaaatgtccagctcggtgca

SEQ ID NO: 1488350 - DNA, 25 bp, Homo sapien
gaaatggcccattatcagtcagtct

SEQ ID NO: 1488351 - DNA, 25 bp, Homo sapien
tgtatatccattcaccagtcgatgg

SEQ ID NO: 1488352 - DNA, 25 bp, Homo sapien
gaatttggcacatgagcaagctgga

SEQ ID NO: 1488353 - DNA, 25 bp, Homo sapien
ggccgtcacatgctgggtagaatca

SEQ ID NO: 1488354 - DNA, 25 bp, Homo sapien
aatagacttagaatgaccactgtgg

SEQ ID NO: 1488355 - DNA, 25 bp, Homo sapien
caaagcatatgtagtggccgtcaca

SEQ ID NO: 1488356 - DNA, 25 bp, Homo sapien
tcccatatagccagaagaataagaa

SEQ ID NO: 1488357 - DNA, 25 bp, Homo sapien
taaccatgtttaactgactcaaatg

SEQ ID NO: 1488358 - DNA, 25 bp, Homo sapien
taatcaggtattggcgtttcttcaa

SEQ ID NO: 1488359 - DNA, 25 bp, Homo sapien
ctcaaatgaaatgctggccctggct

SEQ ID NO: 1488360 - DNA, 25 bp, Homo sapien
caccgaaagagctatgttttgttcc

SEQ ID NO: 1488361 - DNA, 25 bp, Homo sapien
ccaaacaccgaaagagctatgtttt

SEQ ID NO: 1488362 - DNA, 25 bp, Homo sapien
cctggggctccgcttcagggccggg

SEQ ID NO: 1488363 - DNA, 25 bp, Homo sapien
tttccgccaaacaccgaaagagcta

SEQ ID NO: 1488364 - DNA, 25 bp, Homo sapien
tcttcccattcctaatagctctgaa

SEQ ID NO: 1488365 - DNA, 25 bp, Homo sapien
cattcctaatagctctgaaaacaac

SEQ ID NO: 1488366 - DNA, 25 bp, Homo sapien
ccattcctaatagctctgaaaacaa

SEQ ID NO: 1488367 - DNA, 25 bp, Homo sapien
tcccattcctaatagctctgaaaac

SEQ ID NO: 1488368 - DNA, 25 bp, Homo sapien
ctagtaagggcttgtgactgcgttc

SEQ ID NO: 1488369 - DNA, 25 bp, Homo sapien
taagggcttgtgactgcgttctgaa

SEQ ID NO: 1488370 - DNA, 25 bp, Homo sapien
gtgactgcgttctgaatgcttagta

SEQ ID NO: 1488371 - DNA, 25 bp, Homo sapien
ttttagattcctccaatcgcttcta

SEQ ID NO: 1488372 - DNA, 25 bp, Homo sapien
aattcagaaaggttgttagccacct

SEQ ID NO: 1488373 - DNA, 25 bp, Homo sapien
gaaaggttgttagccacctggataa

SEQ ID NO: 1488374 - DNA, 25 bp, Homo sapien
ctggataattgcacctttgtaactt

SEQ ID NO: 1488375 - DNA, 25 bp, Homo sapien
ttcagaaaggttgttagccacctgg

SEQ ID NO: 1488376 - DNA, 25 bp, Homo sapien
gctttccacttccttaggttcacca

SEQ ID NO: 1488377 - DNA, 25 bp, Homo sapien
ttagatctctgctttcacataaaac

SEQ ID NO: 1488378 - DNA, 25 bp, Homo sapien
acataaaaccagctttccacttcct

SEQ ID NO: 1488379 - DNA, 25 bp, Homo sapien
agatctctgctttcacataaaacca

SEQ ID NO: 1488380 - DNA, 25 bp, Homo sapien
gacttttacatggtgcatgcagttt

SEQ ID NO: 1488381 - DNA, 25 bp, Homo sapien
catgcagtttttgatgcgcttcctc

SEQ ID NO: 1488382 - DNA, 25 bp, Homo sapien
ctccctggaggtgccgcatgaaagc

SEQ ID NO: 1488383 - DNA, 25 bp, Homo sapien
gtcttccttgttgaatcaggaagtg

SEQ ID NO: 1488384 - DNA, 25 bp, Homo sapien
gttgcacatagctatgcaggcagtt

SEQ ID NO: 1488385 - DNA, 25 bp, Homo sapien
gaatgtgttcttgacattaagagaa

SEQ ID NO: 1488386 - DNA, 25 bp, Homo sapien
gagtagcctaagacacagttgcaca

SEQ ID NO: 1488387 - DNA, 25 bp, Homo sapien
caataatcatgcaagaatgtgttct

SEQ ID NO: 1488388 - DNA, 25 bp, Homo sapien
tactggagagtggtctccaaccctg

SEQ ID NO: 1488389 - DNA, 25 bp, Homo sapien
tgctttgaggaataagatgcatcac

SEQ ID NO: 1488390 - DNA, 25 bp, Homo sapien
gaataagatgcatcactattgaagg

SEQ ID NO: 1488391 - DNA, 25 bp, Homo sapien
gcatcactattgaaggaggccggga

SEQ ID NO: 1488392 - DNA, 25 bp, Homo sapien
atgaactctctgaccgtaggccacc

SEQ ID NO: 1488393 - DNA, 25 bp, Homo sapien
tctctgaccgtaggccacctctgtt

SEQ ID NO: 1488394 - DNA, 25 bp, Homo sapien
ccatgaactctctgaccgtaggcca

SEQ ID NO: 1488395 - DNA, 25 bp, Homo sapien
aatttccatgaactctctgaccgta

SEQ ID NO: 1488396 - DNA, 25 bp, Homo sapien
ttccctcctccgtgctaagttggta

SEQ ID NO: 1488397 - DNA, 25 bp, Homo sapien
tgctaagttggtagtttccactttc

SEQ ID NO: 1488398 - DNA, 25 bp, Homo sapien
tccgtgctaagttggtagtttccac

SEQ ID NO: 1488399 - DNA, 25 bp, Homo sapien
cctcctccgtgctaagttggtagtt

SEQ ID NO: 1488400 - DNA, 25 bp, Homo sapien
ttcccacagctccccccaaacacac

SEQ ID NO: 1488401 - DNA, 25 bp, Homo sapien
ttagtgagttccttaccaggtgcaa

SEQ ID NO: 1488402 - DNA, 25 bp, Homo sapien
gttccttaccaggtgcaaacactgt

SEQ ID NO: 1488403 - DNA, 25 bp, Homo sapien
ccttaccaggtgcaaacactgttag

SEQ ID NO: 1488404 - DNA, 25 bp, Homo sapien
tgagttccttaccaggtgcaaacac

SEQ ID NO: 1488405 - DNA, 25 bp, Homo sapien
tgtgttctgtaattgacacaagttg

SEQ ID NO: 1488406 - DNA, 25 bp, Homo sapien
attgataacaccaggcccttgtgtt

SEQ ID NO: 1488407 - DNA, 25 bp, Homo sapien
gcgagtgggattgagttagcctcat

SEQ ID NO: 1488408 - DNA, 25 bp, Homo sapien
aataaacaggcttgctggcgagtgg

SEQ ID NO: 1488409 - DNA, 25 bp, Homo sapien
aatatatccctcaggagtatggcgg

SEQ ID NO: 1488410 - DNA, 25 bp, Homo sapien
tgaacgggagagactagccaactgt

SEQ ID NO: 1488411 - DNA, 25 bp, Homo sapien
tgattccagccaaaccgggatctgg

SEQ ID NO: 1488412 - DNA, 25 bp, Homo sapien
tgttcttcttgggacaccacagcgt

SEQ ID NO: 1488413 - DNA, 25 bp, Homo sapien
tgatgggcgcaaacccctgagaggt

SEQ ID NO: 1488414 - DNA, 25 bp, Homo sapien
acaagagatgtgatgcctccgggca

SEQ ID NO: 1488415 - DNA, 25 bp, Homo sapien
ggtgaaaagcgaatgcaggttttct

SEQ ID NO: 1488416 - DNA, 25 bp, Homo sapien
tcctacgggtgaatgaggcttgcat

SEQ ID NO: 1488417 - DNA, 25 bp, Homo sapien
caaagcctgagcacttggtgtaact

SEQ ID NO: 1488418 - DNA, 25 bp, Homo sapien
cccttggttttagagccaaagcctg

SEQ ID NO: 1488419 - DNA, 25 bp, Homo sapien
ttccgtttgcctgccggcatgagtt

SEQ ID NO: 1488420 - DNA, 25 bp, Homo sapien
tgagttcagcgagtttccccttggt

SEQ ID NO: 1488421 - DNA, 25 bp, Homo sapien
tgtggtgccccaactttaagttcca

SEQ ID NO: 1488422 - DNA, 25 bp, Homo sapien
tttaggtgatgaaagatgtggtgcc

SEQ ID NO: 1488423 - DNA, 25 bp, Homo sapien
ttcctgattgaggatggagcctggg

SEQ ID NO: 1488424 - DNA, 25 bp, Homo sapien
tccacttgacgcagaatttcctgat

SEQ ID NO: 1488425 - DNA, 25 bp, Homo sapien
ttcaaaagggaccagccgctgagat

SEQ ID NO: 1488426 - DNA, 25 bp, Homo sapien
ggatagtcgttgtacctggaacgta

SEQ ID NO: 1488427 - DNA, 25 bp, Homo sapien
tgccacacagtaagactcccacagt

SEQ ID NO: 1488428 - DNA, 25 bp, Homo sapien
cttgaggtaattacgggatagtcgt

SEQ ID NO: 1488429 - DNA, 25 bp, Homo sapien
catcgaagtttataatttggtgaaa

SEQ ID NO: 1488430 - DNA, 25 bp, Homo sapien
gaaggagggatgtgtagatgggacc

SEQ ID NO: 1488431 - DNA, 25 bp, Homo sapien
gatgggacctaaacatcgaagttta

SEQ ID NO: 1488432 - DNA, 25 bp, Homo sapien
tcacaggaaggagggatgtgtagat

SEQ ID NO: 1488433 - DNA, 25 bp, Homo sapien
tgggcaacatcgcaagaccccatct

SEQ ID NO: 1488434 - DNA, 25 bp, Homo sapien
ctcagtgaccagaaattggagacca

SEQ ID NO: 1488435 - DNA, 25 bp, Homo sapien
agtgaccagaaattggagaccagcc

SEQ ID NO: 1488436 - DNA, 25 bp, Homo sapien
ctgggcaacatcgcaagaccccatc

SEQ ID NO: 1488437 - DNA, 25 bp, Homo sapien
tgacatgacgataaacttccatttc

SEQ ID NO: 1488438 - DNA, 25 bp, Homo sapien
gatacagcattgacatgacgataaa

SEQ ID NO: 1488439 - DNA, 25 bp, Homo sapien
tcaaagatacagcattgacatgacg

SEQ ID NO: 1488440 - DNA, 25 bp, Homo sapien
tatttctttaagagatatcccttct

SEQ ID NO: 1488441 - DNA, 25 bp, Homo sapien
tgatgtattgtagcctttcggaaag

SEQ ID NO: 1488442 - DNA, 25 bp, Homo sapien
aaattgatgtattgtagcctttcgg

SEQ ID NO: 1488443 - DNA, 25 bp, Homo sapien
ggaaagtatgctttatgttccctgg

SEQ ID NO: 1488444 - DNA, 25 bp, Homo sapien
gcctttcggaaagtatgctttatgt

SEQ ID NO: 1488445 - DNA, 25 bp, Homo sapien
agagcagtgacattcgggccctcgg

SEQ ID NO: 1488446 - DNA, 25 bp, Homo sapien
tctcagtggggtgccttagggtccc

SEQ ID NO: 1488447 - DNA, 25 bp, Homo sapien
gataaacagggatagtagcagcagt

SEQ ID NO: 1488448 - DNA, 25 bp, Homo sapien
ggatcccatctcctggtctggttag

SEQ ID NO: 1488449 - DNA, 25 bp, Homo sapien
ttgacttctccgaacagcccaaact

SEQ ID NO: 1488450 - DNA, 25 bp, Homo sapien
ggtgtttccaggagagcttcggcct

SEQ ID NO: 1488451 - DNA, 25 bp, Homo sapien
tgccttcataggagacttgatgcag

SEQ ID NO: 1488452 - DNA, 25 bp, Homo sapien
cttatttgacttctccgaacagccc

SEQ ID NO: 1488453 - DNA, 25 bp, Homo sapien
caacaaaacttgtgaggtcaaccca

SEQ ID NO: 1488454 - DNA, 25 bp, Homo sapien
tggtggcccttcagtcagaagtggc

SEQ ID NO: 1488455 - DNA, 25 bp, Homo sapien
gcatcaacagtaacggcaaacaggg

SEQ ID NO: 1488456 - DNA, 25 bp, Homo sapien
tatttctaacaagcgtggtggccct

SEQ ID NO: 1488457 - DNA, 25 bp, Homo sapien
tgtgtaacccagactcctgtcagga

SEQ ID NO: 1488458 - DNA, 25 bp, Homo sapien
tagcagcaccacagcaaaaccttga

SEQ ID NO: 1488459 - DNA, 25 bp, Homo sapien
tgaagctgagaacccctgctggaat

SEQ ID NO: 1488460 - DNA, 25 bp, Homo sapien
tcagctagccccagattgcagcagt

SEQ ID NO: 1488461 - DNA, 25 bp, Homo sapien
ttcacaacgatccatgcagtcagca

SEQ ID NO: 1488462 - DNA, 25 bp, Homo sapien
gatgtccatgatctcgcttcatctt

SEQ ID NO: 1488463 - DNA, 25 bp, Homo sapien
tgcaggaaattgtgcttagtgattg

SEQ ID NO: 1488464 - DNA, 25 bp, Homo sapien
ttgtgcttagtgattgatgtccatg

SEQ ID NO: 1488465 - DNA, 25 bp, Homo sapien
gtgagcctgagtgctgtgcttgcct

SEQ ID NO: 1488466 - DNA, 25 bp, Homo sapien
tgcttgcctcgtggggtgctccatg

SEQ ID NO: 1488467 - DNA, 25 bp, Homo sapien
gagcctgagtgctgtgcttgcctcg

SEQ ID NO: 1488468 - DNA, 25 bp, Homo sapien
cctgagtgctgtgcttgcctcgtgg

SEQ ID NO: 1488469 - DNA, 25 bp, Homo sapien
tggagctgagagtgtcaactgacac

SEQ ID NO: 1488470 - DNA, 25 bp, Homo sapien
gcaacaccggcctgctattaagtgt

SEQ ID NO: 1488471 - DNA, 25 bp, Homo sapien
tgttaaaaggacttgccctccgcca

SEQ ID NO: 1488472 - DNA, 25 bp, Homo sapien
tagccaatccgttggacacccggtg

SEQ ID NO: 1488473 - DNA, 25 bp, Homo sapien
ccggggcccagggggtctatgagca

SEQ ID NO: 1488474 - DNA, 25 bp, Homo sapien
cggggcccagggggtctatgagcat

SEQ ID NO: 1488475 - DNA, 25 bp, Homo sapien
gccggggcccagggggtctatgagc

SEQ ID NO: 1488476 - DNA, 25 bp, Homo sapien
tatgggatggcactctaagcttcag

SEQ ID NO: 1488477 - DNA, 25 bp, Homo sapien
tcttgggaaatatggaatgacgtct

SEQ ID NO: 1488478 - DNA, 25 bp, Homo sapien
gggaaagacttttgctgtagaccaa

SEQ ID NO: 1488479 - DNA, 25 bp, Homo sapien
caatccaagatacgtcagagtctct

SEQ ID NO: 1488480 - DNA, 25 bp, Homo sapien
tagctggtacacatacaggtggcca

SEQ ID NO: 1488481 - DNA, 25 bp, Homo sapien
gggatgagcaatgctgttgtcttca

SEQ ID NO: 1488482 - DNA, 25 bp, Homo sapien
gcagcatcaacagcaaggtgaatat

SEQ ID NO: 1488483 - DNA, 25 bp, Homo sapien
cattgatctgtctggggatgagcaa

SEQ ID NO: 1488484 - DNA, 25 bp, Homo sapien
cagagcccgtgttagccctggttcc

SEQ ID NO: 1488485 - DNA, 25 bp, Homo sapien
gcagatgccctcagctcaccagagc

SEQ ID NO: 1488486 - DNA, 25 bp, Homo sapien
gcagggaagtgttgcagcagatgcc

SEQ ID NO: 1488487 - DNA, 25 bp, Homo sapien
gccctggttccggtcctcagtctca

SEQ ID NO: 1488488 - DNA, 25 bp, Homo sapien
ctggaacgctgtctggacagtggaa

SEQ ID NO: 1488489 - DNA, 25 bp, Homo sapien
ttgggaacttcagcagtattagctg

SEQ ID NO: 1488490 - DNA, 25 bp, Homo sapien
agcagtattagctggaacgctgtct

SEQ ID NO: 1488491 - DNA, 25 bp, Homo sapien
tattagctggaacgctgtctggaca

SEQ ID NO: 1488492 - DNA, 25 bp, Homo sapien
gatttctcacactcctccagagttg

SEQ ID NO: 1488493 - DNA, 25 bp, Homo sapien
ttctagatttctcacactcctccag

SEQ ID NO: 1488494 - DNA, 25 bp, Homo sapien
tctgcttccgtaactgtcctagaac

SEQ ID NO: 1488495 - DNA, 25 bp, Homo sapien
cctccagagttgcattctgcttccg

SEQ ID NO: 1488496 - DNA, 25 bp, Homo sapien
ctgaacttgggaacaatcctcacca

SEQ ID NO: 1488497 - DNA, 25 bp, Homo sapien
atacacaggtttggccagagactga

SEQ ID NO: 1488498 - DNA, 25 bp, Homo sapien
actgaactctggttacttcctgaac

SEQ ID NO: 1488499 - DNA, 25 bp, Homo sapien
caggtttggccagagactgaactct

SEQ ID NO: 1488500 - DNA, 25 bp, Homo sapien
tcacagcaggctccgataacacttt

SEQ ID NO: 1488501 - DNA, 25 bp, Homo sapien
gataacactttgtcgcttttatggt

SEQ ID NO: 1488502 - DNA, 25 bp, Homo sapien
gctgtgatgaagattgttgacgcca

SEQ ID NO: 1488503 - DNA, 25 bp, Homo sapien
taaatcgtaatgagcccacgtgctc

SEQ ID NO: 1488504 - DNA, 25 bp, Homo sapien
tgtcttgtgtattgaaggagccttc

SEQ ID NO: 1488505 - DNA, 25 bp, Homo sapien
ccgagtggaaaccagtcagtgggat

SEQ ID NO: 1488506 - DNA, 25 bp, Homo sapien
acttaatatgttctgttgtcttgtg

SEQ ID NO: 1488507 - DNA, 25 bp, Homo sapien
tcttgtgtattgaaggagccttcat

SEQ ID NO: 1488508 - DNA, 25 bp, Homo sapien
ttttatatctctggagaaactcctg

SEQ ID NO: 1488509 - DNA, 25 bp, Homo sapien
gattttatatctctggagaaactcc

SEQ ID NO: 1488510 - DNA, 25 bp, Homo sapien
tttatatctctggagaaactcctgc

SEQ ID NO: 1488511 - DNA, 25 bp, Homo sapien
ggagattttatatctctggagaaac

SEQ ID NO: 1488512 - DNA, 25 bp, Homo sapien
tgaggcccgtgtcctttgctgccag

SEQ ID NO: 1488513 - DNA, 25 bp, Homo sapien
ggagctgttctgatgccccacatga

SEQ ID NO: 1488514 - DNA, 25 bp, Homo sapien
tgcaggcagctattcttgtgtgggc

SEQ ID NO: 1488515 - DNA, 25 bp, Homo sapien
tgccagtgcattccaagagggctgt

SEQ ID NO: 1488516 - DNA, 25 bp, Homo sapien
gaagccccagcgtccagaggtgtaa

SEQ ID NO: 1488517 - DNA, 25 bp, Homo sapien
gagttcgctgtacatgaagccccag

SEQ ID NO: 1488518 - DNA, 25 bp, Homo sapien
cagaggtgtaagacagagccccttc

SEQ ID NO: 1488519 - DNA, 25 bp, Homo sapien
ggtgtttatggagttcgctgtacat

SEQ ID NO: 1488520 - DNA, 25 bp, Homo sapien
tgccaggttgcttaacccatctccg

SEQ ID NO: 1488521 - DNA, 25 bp, Homo sapien
tccgctccggttttcccatgcgtga

SEQ ID NO: 1488522 - DNA, 25 bp, Homo sapien
tttcccatgcgtgagccctctgcag

SEQ ID NO: 1488523 - DNA, 25 bp, Homo sapien
cagtgtgtggcatgctgatcggcct

SEQ ID NO: 1488524 - DNA, 25 bp, Homo sapien
tttcccataggcttcggtagaagcg

SEQ ID NO: 1488525 - DNA, 25 bp, Homo sapien
agttgatggtgagaagctggactct

SEQ ID NO: 1488526 - DNA, 25 bp, Homo sapien
tcagtgggctgtttgcctgcccctc

SEQ ID NO: 1488527 - DNA, 25 bp, Homo sapien
ccataggcttcggtagaagcgtggc

SEQ ID NO: 1488528 - DNA, 25 bp, Homo sapien
gagaagtgagtgtgttggactccct

SEQ ID NO: 1488529 - DNA, 25 bp, Homo sapien
ggattcaggtacctgtaagaagaga

SEQ ID NO: 1488530 - DNA, 25 bp, Homo sapien
ttctgggattcaggtacctgtaaga

SEQ ID NO: 1488531 - DNA, 25 bp, Homo sapien
gggaactggaaggaataagcaataa

SEQ ID NO: 1488532 - DNA, 25 bp, Homo sapien
taccggtttgcggtcagtgctcaca

SEQ ID NO: 1488533 - DNA, 25 bp, Homo sapien
taatacatgcatttcaacgaggcct

SEQ ID NO: 1488534 - DNA, 25 bp, Homo sapien
caagtgtaaatgtcatgctggcatc

SEQ ID NO: 1488535 - DNA, 25 bp, Homo sapien
caactttggaggcatgtgtaccggt

SEQ ID NO: 1488536 - DNA, 25 bp, Homo sapien
ctgtgattttgctttgcatacaatt

SEQ ID NO: 1488537 - DNA, 25 bp, Homo sapien
tgtgattttgctttgcatacaattt

SEQ ID NO: 1488538 - DNA, 25 bp, Homo sapien
gtgggtccctcgttagccctgaaga

SEQ ID NO: 1488539 - DNA, 25 bp, Homo sapien
gattgcttgttccactcggaaggga

SEQ ID NO: 1488540 - DNA, 25 bp, Homo sapien
ccctgaagagtggattgctgatgcc

SEQ ID NO: 1488541 - DNA, 25 bp, Homo sapien
cccagtacggtaggagaaacatcca

SEQ ID NO: 1488542 - DNA, 25 bp, Homo sapien
ttcttggcacttcggtgcttccctt

SEQ ID NO: 1488543 - DNA, 25 bp, Homo sapien
tgtatcgagctctaggtttgggttc

SEQ ID NO: 1488544 - DNA, 25 bp, Homo sapien
gtttgggttcttggcacttcggtgc

SEQ ID NO: 1488545 - DNA, 25 bp, Homo sapien
tcatcagtgctgtatcgagctctag

SEQ ID NO: 1488546 - DNA, 25 bp, Homo sapien
tattggtcaatagccttatctatgt

SEQ ID NO: 1488547 - DNA, 25 bp, Homo sapien
ttattggtcaatagccttatctatg

SEQ ID NO: 1488548 - DNA, 25 bp, Homo sapien
attggtcaatagccttatctatgtc

SEQ ID NO: 1488549 - DNA, 25 bp, Homo sapien
cataggtgttttgactagggatttc

SEQ ID NO: 1488550 - DNA, 25 bp, Homo sapien
ttcctgaaggtgctcttggtgcccc

SEQ ID NO: 1488551 - DNA, 25 bp, Homo sapien
tgttcagtgaggtccaaactgcctt

SEQ ID NO: 1488552 - DNA, 25 bp, Homo sapien
tatctacggctgttatccacatagg

SEQ ID NO: 1488553 - DNA, 25 bp, Homo sapien
tgtagtagccaccaccgaaggcaga

SEQ ID NO: 1488554 - DNA, 25 bp, Homo sapien
acttgttctgcttgaggctccatgt

SEQ ID NO: 1488555 - DNA, 25 bp, Homo sapien
ctctgtagtagccaccaccgaaggc

SEQ ID NO: 1488556 - DNA, 25 bp, Homo sapien
aaaaacttgttctgcttgaggctcc

SEQ ID NO: 1488557 - DNA, 25 bp, Homo sapien
tagcagggtccataaactctaccac

SEQ ID NO: 1488558 - DNA, 25 bp, Homo sapien
ccacttgattgtcaggaatgaagaa

SEQ ID NO: 1488559 - DNA, 25 bp, Homo sapien
ctaagtaggatcaaccccccagttg

SEQ ID NO: 1488560 - DNA, 25 bp, Homo sapien
gtcataacattcgtgagtacatctg

SEQ ID NO: 1488561 - DNA, 25 bp, Homo sapien
ttggcagcccaaaaatgacagagaa

SEQ ID NO: 1488562 - DNA, 25 bp, Homo sapien
tgtgggctggctctaattgtgcagc

SEQ ID NO: 1488563 - DNA, 25 bp, Homo sapien
tccatgtcagcaggacttagggtgc

SEQ ID NO: 1488564 - DNA, 25 bp, Homo sapien
tggtttatgcaaagtcccctgtggg

SEQ ID NO: 1488565 - DNA, 25 bp, Homo sapien
cacgggcggttgtgaaactgtgtct

SEQ ID NO: 1488566 - DNA, 25 bp, Homo sapien
gaagacccggaaatactggtgacca

SEQ ID NO: 1488567 - DNA, 25 bp, Homo sapien
tgtgtcttccgagtgtgtaagaagg

SEQ ID NO: 1488568 - DNA, 25 bp, Homo sapien
cccgatgcacgggcggttgtgaaac

SEQ ID NO: 1488569 - DNA, 25 bp, Homo sapien
tgtcacagatcccgcggcaagcatt

SEQ ID NO: 1488570 - DNA, 25 bp, Homo sapien
gtggagcaggctcccctttaaccat

SEQ ID NO: 1488571 - DNA, 25 bp, Homo sapien
tctgcaggtctgagcggtcaaaaga

SEQ ID NO: 1488572 - DNA, 25 bp, Homo sapien
ctttaaccatgtccctgtcacagat

SEQ ID NO: 1488573 - DNA, 25 bp, Homo sapien
tgcaagctgtagtcaggatggtcat

SEQ ID NO: 1488574 - DNA, 25 bp, Homo sapien
gctgcaagctgtagtcaggatggtc

SEQ ID NO: 1488575 - DNA, 25 bp, Homo sapien
tgtgctgcaagctgtagtcaggatg

SEQ ID NO: 1488576 - DNA, 25 bp, Homo sapien
ctgtgctgcaagctgtagtcaggat

SEQ ID NO: 1488577 - DNA, 25 bp, Homo sapien
ggcttggccgccaaagagaattggt

SEQ ID NO: 1488578 - DNA, 25 bp, Homo sapien
ggtttctgtaagtgtcggagaggga

SEQ ID NO: 1488579 - DNA, 25 bp, Homo sapien
gctgcatgccgctgaatgatgatga

SEQ ID NO: 1488580 - DNA, 25 bp, Homo sapien
cacaaagctactgaatgcctctggc

SEQ ID NO: 1488581 - DNA, 25 bp, Homo sapien
cctcagcaagacgagggaagaagaa

SEQ ID NO: 1488582 - DNA, 25 bp, Homo sapien
gcaagacgagggaagaagaagattc

SEQ ID NO: 1488583 - DNA, 25 bp, Homo sapien
caagacgagggaagaagaagattct

SEQ ID NO: 1488584 - DNA, 25 bp, Homo sapien
tttgcctttcttcacgcacgtggaa

SEQ ID NO: 1488585 - DNA, 25 bp, Homo sapien
gactggcaggaaaaggttctctctg

SEQ ID NO: 1488586 - DNA, 25 bp, Homo sapien
cacgtggaatcaggactagctggac

SEQ ID NO: 1488587 - DNA, 25 bp, Homo sapien
cacttggtgaaggtcgcagtgacct

SEQ ID NO: 1488588 - DNA, 25 bp, Homo sapien
ctggaaggtatgaggagtcgtcttt

SEQ ID NO: 1488589 - DNA, 25 bp, Homo sapien
cccaatactggctggaaggtatgag

SEQ ID NO: 1488590 - DNA, 25 bp, Homo sapien
atgaggagtcgtctttcttactgtc

SEQ ID NO: 1488591 - DNA, 25 bp, Homo sapien
ccccaatactggctggaaggtatga

SEQ ID NO: 1488592 - DNA, 25 bp, Homo sapien
aattcatgaagctgcaaccttccac

SEQ ID NO: 1488593 - DNA, 25 bp, Homo sapien
tataattcatgaagctgcaaccttc

SEQ ID NO: 1488594 - DNA, 25 bp, Homo sapien
ttataattcatgaagctgcaacctt

SEQ ID NO: 1488595 - DNA, 25 bp, Homo sapien
taattcatgaagctgcaaccttcca

SEQ ID NO: 1488596 - DNA, 25 bp, Homo sapien
catttttcggactgatctacgttga

SEQ ID NO: 1488597 - DNA, 25 bp, Homo sapien
tgagtggtatcaggctggacgtatc

SEQ ID NO: 1488598 - DNA, 25 bp, Homo sapien
tggaaaaacaggtgataccgcttct

SEQ ID NO: 1488599 - DNA, 25 bp, Homo sapien
tggacgtatcccttgacaacttgac

SEQ ID NO: 1488600 - DNA, 25 bp, Homo sapien
tccccagcagcaagggtaaattttc

SEQ ID NO: 1488601 - DNA, 25 bp, Homo sapien
cacactgtagctaattctgcaggag

SEQ ID NO: 1488602 - DNA, 25 bp, Homo sapien
gagggttccatggtatcttcacacg

SEQ ID NO: 1488603 - DNA, 25 bp, Homo sapien
cgtattctgagctattccccagcag

SEQ ID NO: 1488604 - DNA, 25 bp, Homo sapien
cataggcgcaagtgaggagatgctc

SEQ ID NO: 1488605 - DNA, 25 bp, Homo sapien
gtgaggagatgctcacgctggttac

SEQ ID NO: 1488606 - DNA, 25 bp, Homo sapien
tcacgctggttaccttgcaggtgtt

SEQ ID NO: 1488607 - DNA, 25 bp, Homo sapien
gtttgggccataggcgcaagtgagg

SEQ ID NO: 1488608 - DNA, 25 bp, Homo sapien
caccccacccctgccctacccgcag

SEQ ID NO: 1488609 - DNA, 25 bp, Homo sapien
ctataatgaagagcccacaagccct

SEQ ID NO: 1488610 - DNA, 25 bp, Homo sapien
taatgaagagcccacaagccctcac

SEQ ID NO: 1488611 - DNA, 25 bp, Homo sapien
tcaccccacccctgccctacccgca

SEQ ID NO: 1488612 - DNA, 25 bp, Homo sapien
ccccctaaacggatagcaggcgtga

SEQ ID NO: 1488613 - DNA, 25 bp, Homo sapien
gagcgtagtggcgtaaccacagctc

SEQ ID NO: 1488614 - DNA, 25 bp, Homo sapien
ctcactgtagccctgtagccttgaa

SEQ ID NO: 1488615 - DNA, 25 bp, Homo sapien
ctgtctccccctaaacggatagcag

SEQ ID NO: 1488616 - DNA, 25 bp, Homo sapien
tcacttgcttaagccctaaggcggg

SEQ ID NO: 1488617 - DNA, 25 bp, Homo sapien
tcattttacttgatctatctgcagc

SEQ ID NO: 1488618 - DNA, 25 bp, Homo sapien
ggtataaaatggtcagttctcagtc

SEQ ID NO: 1488619 - DNA, 25 bp, Homo sapien
gaatttaccttctatgccataagtg

SEQ ID NO: 1488620 - DNA, 25 bp, Homo sapien
ggtagcttagcttgttcagaggtgt

SEQ ID NO: 1488621 - DNA, 25 bp, Homo sapien
ctgagtctggggtagcttagcttgt

SEQ ID NO: 1488622 - DNA, 25 bp, Homo sapien
cagcggttccaaagactgctgggct

SEQ ID NO: 1488623 - DNA, 25 bp, Homo sapien
tagcttgttcagaggtgtgcacagg

SEQ ID NO: 1488624 - DNA, 25 bp, Homo sapien
gaagtctgccttacgtcttgggcca

SEQ ID NO: 1488625 - DNA, 25 bp, Homo sapien
gtctcatcccagtgcaaagtgtcct

SEQ ID NO: 1488626 - DNA, 25 bp, Homo sapien
acttaaggactcaccaagcggcagg

SEQ ID NO: 1488627 - DNA, 25 bp, Homo sapien
cacagctgatctttgaccatgggta

SEQ ID NO: 1488628 - DNA, 25 bp, Homo sapien
ggttaagctgcatcccaagtgtttt

SEQ ID NO: 1488629 - DNA, 25 bp, Homo sapien
ttattggtcacggagcactcaggcc

SEQ ID NO: 1488630 - DNA, 25 bp, Homo sapien
tgctccaggatcccaggtatggtct

SEQ ID NO: 1488631 - DNA, 25 bp, Homo sapien
aaagcccaggttaagctgcatccca

SEQ ID NO: 1488632 - DNA, 25 bp, Homo sapien
gatggcagcctctaaagaggttagc

SEQ ID NO: 1488633 - DNA, 25 bp, Homo sapien
aagccagtaaagatggcagcctcta

SEQ ID NO: 1488634 - DNA, 25 bp, Homo sapien
cggatcgtggcacatccttgtggtc

SEQ ID NO: 1488635 - DNA, 25 bp, Homo sapien
gggtggcacacaccgaggaagattc

SEQ ID NO: 1488636 - DNA, 25 bp, Homo sapien
gtaagccatgaaccagatccacggt

SEQ ID NO: 1488637 - DNA, 25 bp, Homo sapien
cagatccacggtttcacatggccag

SEQ ID NO: 1488638 - DNA, 25 bp, Homo sapien
agcctcgtaagccatgaaccagatc

SEQ ID NO: 1488639 - DNA, 25 bp, Homo sapien
gaaccagatccacggtttcacatgg

SEQ ID NO: 1488640 - DNA, 25 bp, Homo sapien
tgtcacaaggaagggcaatgtcctg

SEQ ID NO: 1488641 - DNA, 25 bp, Homo sapien
acactctctcgtgaacagctggtga

SEQ ID NO: 1488642 - DNA, 25 bp, Homo sapien
tgtcagcggcgcctctgtcacaagg

SEQ ID NO: 1488643 - DNA, 25 bp, Homo sapien
aagggcaatgtcctgtgtagccaga

SEQ ID NO: 1488644 - DNA, 25 bp, Homo sapien
cagaatgcgctgtgcttgtgtcctc

SEQ ID NO: 1488645 - DNA, 25 bp, Homo sapien
gggactttagtccatgcacatgtcg

SEQ ID NO: 1488646 - DNA, 25 bp, Homo sapien
cagtgcagatgatagaaccttgagg

SEQ ID NO: 1488647 - DNA, 25 bp, Homo sapien
tctcgcggtgagaaatactctgggt

SEQ ID NO: 1488648 - DNA, 25 bp, Homo sapien
tccaggatggatcagagctaggtga

SEQ ID NO: 1488649 - DNA, 25 bp, Homo sapien
gatgtctctgaagcccacgagctag

SEQ ID NO: 1488650 - DNA, 25 bp, Homo sapien
gctgctcccgtgagactatctctga

SEQ ID NO: 1488651 - DNA, 25 bp, Homo sapien
acgagctaggcagcacgacagactg

SEQ ID NO: 1488652 - DNA, 25 bp, Homo sapien
ttagaagactcggcggctgcgccag

SEQ ID NO: 1488653 - DNA, 25 bp, Homo sapien
gcgccagcgctgatgagcgaggaca

SEQ ID NO: 1488654 - DNA, 25 bp, Homo sapien
aagctcttgtcacacgtggcagggg

SEQ ID NO: 1488655 - DNA, 25 bp, Homo sapien
tggcaggggccggttagaagactcg

SEQ ID NO: 1488656 - DNA, 25 bp, Homo sapien
aatgagggagaagacgactctgcct

SEQ ID NO: 1488657 - DNA, 25 bp, Homo sapien
ttctgcaatttagacgtcgcaagga

SEQ ID NO: 1488658 - DNA, 25 bp, Homo sapien
cgcgggacccgagcctctagaaatg

SEQ ID NO: 1488659 - DNA, 25 bp, Homo sapien
gatgaaaacgatgcggacaggcttt

SEQ ID NO: 1488660 - DNA, 25 bp, Homo sapien
aatccatagtggaccgttgatgcaa

SEQ ID NO: 1488661 - DNA, 25 bp, Homo sapien
ccgttgatgcaatgaaggtcgtcca

SEQ ID NO: 1488662 - DNA, 25 bp, Homo sapien
gcttaatctacaagtaataaatcca

SEQ ID NO: 1488663 - DNA, 25 bp, Homo sapien
tgaaggtcgtccatgtgcattcctt

SEQ ID NO: 1488664 - DNA, 25 bp, Homo sapien
tagaggacttccaagcgcccctgca

SEQ ID NO: 1488665 - DNA, 25 bp, Homo sapien
agaggacttccaagcgcccctgcag

SEQ ID NO: 1488666 - DNA, 25 bp, Homo sapien
ctagaggacttccaagcgcccctgc

SEQ ID NO: 1488667 - DNA, 25 bp, Homo sapien
tgccgattgtggcttcgtggaaagc

SEQ ID NO: 1488668 - DNA, 25 bp, Homo sapien
ccagcaggtcaggagtataggattt

SEQ ID NO: 1488669 - DNA, 25 bp, Homo sapien
gaggtatacacgtgctcttcccggc

SEQ ID NO: 1488670 - DNA, 25 bp, Homo sapien
cacgttcttcgcagctcttgagggc

SEQ ID NO: 1488671 - DNA, 25 bp, Homo sapien
tgaaatatgcagcacaccccttctt

SEQ ID NO: 1488672 - DNA, 25 bp, Homo sapien
aaatatgcagcacaccccttcttgg

SEQ ID NO: 1488673 - DNA, 25 bp, Homo sapien
atgcagcacaccccttcttgggcca

SEQ ID NO: 1488674 - DNA, 25 bp, Homo sapien
atatgcagcacaccccttcttgggc

SEQ ID NO: 1488675 - DNA, 25 bp, Homo sapien
cttgaatgcactttggacgttgtag

SEQ ID NO: 1488676 - DNA, 25 bp, Homo sapien
cactttggacgttgtagagcagcat

SEQ ID NO: 1488677 - DNA, 25 bp, Homo sapien
gaatgcactttggacgttgtagagc

SEQ ID NO: 1488678 - DNA, 25 bp, Homo sapien
gcacttgaatgcactttggacgttg

SEQ ID NO: 1488679 - DNA, 25 bp, Homo sapien
tgtaaacagcacctcttgggccacc

SEQ ID NO: 1488680 - DNA, 25 bp, Homo sapien
tcatttgtgctttcacagccacaga

SEQ ID NO: 1488681 - DNA, 25 bp, Homo sapien
agaataccttgtaagtcatttgtgc

SEQ ID NO: 1488682 - DNA, 25 bp, Homo sapien
gtaaacagcacctcttgggccacca

SEQ ID NO: 1488683 - DNA, 25 bp, Homo sapien
ccaagtccactgtctctccacagtc

SEQ ID NO: 1488684 - DNA, 25 bp, Homo sapien
tctattagcaatgctgctctgagtc

SEQ ID NO: 1488685 - DNA, 25 bp, Homo sapien
gagtctgttgggtggaagacatcca

SEQ ID NO: 1488686 - DNA, 25 bp, Homo sapien
ttgggtggaagacatccaattggtg

SEQ ID NO: 1488687 - DNA, 25 bp, Homo sapien
ctcaatttgtctacaattgtatctc

SEQ ID NO: 1488688 - DNA, 25 bp, Homo sapien
gggacagtaagcattgcagaagaca

SEQ ID NO: 1488689 - DNA, 25 bp, Homo sapien
ctcctgtaattgactctgggacagt

SEQ ID NO: 1488690 - DNA, 25 bp, Homo sapien
cctgtaattgactctgggacagtaa

SEQ ID NO: 1488691 - DNA, 25 bp, Homo sapien
ctctgggacagtaagcattgcagaa

SEQ ID NO: 1488692 - DNA, 25 bp, Homo sapien
tcctttactctttgatccaggtggt

SEQ ID NO: 1488693 - DNA, 25 bp, Homo sapien
cagttcctttactctttgatccagg

SEQ ID NO: 1488694 - DNA, 25 bp, Homo sapien
accagttcctttactctttgatcca

SEQ ID NO: 1488695 - DNA, 25 bp, Homo sapien
ttactctttgatccaggtggttccc

SEQ ID NO: 1488696 - DNA, 25 bp, Homo sapien
ttgctttgacctttggcagagactc

SEQ ID NO: 1488697 - DNA, 25 bp, Homo sapien
gccttatcagcttgtggagccaccg

SEQ ID NO: 1488698 - DNA, 25 bp, Homo sapien
ggagccaccgtaaagcttgctttga

SEQ ID NO: 1488699 - DNA, 25 bp, Homo sapien
agagagccttatcagcttgtggagc

SEQ ID NO: 1488700 - DNA, 25 bp, Homo sapien
tggcctgattgattccagactctgg

SEQ ID NO: 1488701 - DNA, 25 bp, Homo sapien
gagatggcctgattgattccagact

SEQ ID NO: 1488702 - DNA, 25 bp, Homo sapien
ctgagaagctgacggttttgtacca

SEQ ID NO: 1488703 - DNA, 25 bp, Homo sapien
aagctgacggttttgtaccattgcc

SEQ ID NO: 1488704 - DNA, 25 bp, Homo sapien
gtgagtcatttcatctgtttctctg

SEQ ID NO: 1488705 - DNA, 25 bp, Homo sapien
cagtgagtcatttcatctgtttctc

SEQ ID NO: 1488706 - DNA, 25 bp, Homo sapien
tcagtgagtcatttcatctgtttct

SEQ ID NO: 1488707 - DNA, 25 bp, Homo sapien
tgagtcatttcatctgtttctctgc

SEQ ID NO: 1488708 - DNA, 25 bp, Homo sapien
tgaagcatttcacctcgccggggga

SEQ ID NO: 1488709 - DNA, 25 bp, Homo sapien
cagagcaagagtcctctgtagctgc

SEQ ID NO: 1488710 - DNA, 25 bp, Homo sapien
acctcgccgggggagtggcattgaa

SEQ ID NO: 1488711 - DNA, 25 bp, Homo sapien
tgtcagagcaagagtcctctgtagc

SEQ ID NO: 1488712 - DNA, 25 bp, Homo sapien
cagcagagttttacatccagagtca

SEQ ID NO: 1488713 - DNA, 25 bp, Homo sapien
cacacccagtggagttagcgtagcc

SEQ ID NO: 1488714 - DNA, 25 bp, Homo sapien
gacttgtaggaaaggccactgcctt

SEQ ID NO: 1488715 - DNA, 25 bp, Homo sapien
catctttgttataggtagcagcaag

SEQ ID NO: 1488716 - DNA, 25 bp, Homo sapien
agggaatatggagtcttccttctag

SEQ ID NO: 1488717 - DNA, 25 bp, Homo sapien
tcttccttctaggccccacagaggc

SEQ ID NO: 1488718 - DNA, 25 bp, Homo sapien
agtcttccttctaggccccacagag

SEQ ID NO: 1488719 - DNA, 25 bp, Homo sapien
aagggaatatggagtcttccttcta

SEQ ID NO: 1488720 - DNA, 25 bp, Homo sapien
acttggctagaaacacattttggaa

SEQ ID NO: 1488721 - DNA, 25 bp, Homo sapien
gacttggctagaaacacattttgga

SEQ ID NO: 1488722 - DNA, 25 bp, Homo sapien
agacttggctagaaacacattttgg

SEQ ID NO: 1488723 - DNA, 25 bp, Homo sapien
cataccagtgtatgcgggaaaaacc

SEQ ID NO: 1488724 - DNA, 25 bp, Homo sapien
tccatccaactcagcactccaaaga

SEQ ID NO: 1488725 - DNA, 25 bp, Homo sapien
ttggtaagaagttatccatccaact

SEQ ID NO: 1488726 - DNA, 25 bp, Homo sapien
tccaaagacctgcataccagtgtat

SEQ ID NO: 1488727 - DNA, 25 bp, Homo sapien
gtgaacccacaggtcgctgacatcc

SEQ ID NO: 1488728 - DNA, 25 bp, Homo sapien
ggaagctcgtgcattgaaattcatt

SEQ ID NO: 1488729 - DNA, 25 bp, Homo sapien
tcaggaagctcgtgcattgaaattc

SEQ ID NO: 1488730 - DNA, 25 bp, Homo sapien
ccttctggaccagatgtgggaatct

SEQ ID NO: 1488731 - DNA, 25 bp, Homo sapien
acacgcgttccagcggctgctctct

SEQ ID NO: 1488732 - DNA, 25 bp, Homo sapien
tgtgcctctgtgtcaggcatcctgc

SEQ ID NO: 1488733 - DNA, 25 bp, Homo sapien
ccattcaccacacgcgttccagcgg

SEQ ID NO: 1488734 - DNA, 25 bp, Homo sapien
gtgtcaggcatcctgccattcacca

SEQ ID NO: 1488735 - DNA, 25 bp, Homo sapien
gtttctgtcacttgggtcaagtttc

SEQ ID NO: 1488736 - DNA, 25 bp, Homo sapien
caagctgccctgttccgcggggaca

SEQ ID NO: 1488737 - DNA, 25 bp, Homo sapien
agccagtggacgggagcccgcacca

SEQ ID NO: 1488738 - DNA, 25 bp, Homo sapien
agttgtttcagctgcgccctccaag

SEQ ID NO: 1488739 - DNA, 25 bp, Homo sapien
ttttctggataaatgttggtgttca

SEQ ID NO: 1488740 - DNA, 25 bp, Homo sapien
ggaattttctggataaatgttggtg

SEQ ID NO: 1488741 - DNA, 25 bp, Homo sapien
tacacggtgttttcctgttgacgaa

SEQ ID NO: 1488742 - DNA, 25 bp, Homo sapien
aaatatgtctatcctgggtctggaa

SEQ ID NO: 1488743 - DNA, 25 bp, Homo sapien
ttgctcagaaaagggacaggtgacg

SEQ ID NO: 1488744 - DNA, 25 bp, Homo sapien
gatgcgagaggcatttcacccaagc

SEQ ID NO: 1488745 - DNA, 25 bp, Homo sapien
gaatgtcaacagagcagatgcgaga

SEQ ID NO: 1488746 - DNA, 25 bp, Homo sapien
gattgtgaactccagccatctgcgt

SEQ ID NO: 1488747 - DNA, 25 bp, Homo sapien
catctagtctgctgtaattgtagaa

SEQ ID NO: 1488748 - DNA, 25 bp, Homo sapien
ctggcatctagtctgctgtaattgt

SEQ ID NO: 1488749 - DNA, 25 bp, Homo sapien
caactacaaaaaagagtctcttcct

SEQ ID NO: 1488750 - DNA, 25 bp, Homo sapien
agtctgctgtaattgtagaattttc

SEQ ID NO: 1488751 - DNA, 25 bp, Homo sapien
ttattctgtgttgcggcttctggcc

SEQ ID NO: 1488752 - DNA, 25 bp, Homo sapien
tattgagctctctatatcccgacag

SEQ ID NO: 1488753 - DNA, 25 bp, Homo sapien
tactttagcacgtcagtacttgagg

SEQ ID NO: 1488754 - DNA, 25 bp, Homo sapien
catagcatgctcagtagagaacctc

SEQ ID NO: 1488755 - DNA, 25 bp, Homo sapien
caatgtggtctttagatgtgcgtgc

SEQ ID NO: 1488756 - DNA, 25 bp, Homo sapien
tgttgcctggactcggtattttggg

SEQ ID NO: 1488757 - DNA, 25 bp, Homo sapien
gaagcaccagcattgtcgtctgaac

SEQ ID NO: 1488758 - DNA, 25 bp, Homo sapien
tgtatctgggtggaatgtggtaccc

SEQ ID NO: 1488759 - DNA, 25 bp, Homo sapien
ggcttagagagattctatcgaccaa

SEQ ID NO: 1488760 - DNA, 25 bp, Homo sapien
tcacttaaaggcacggcttagagag

SEQ ID NO: 1488761 - DNA, 25 bp, Homo sapien
cacaggtgcctttagcacgtagata

SEQ ID NO: 1488762 - DNA, 25 bp, Homo sapien
aaggatggaaagagccacggagaaa

SEQ ID NO: 1488763 - DNA, 25 bp, Homo sapien
tctctagagtcaccaactcctcgaa

SEQ ID NO: 1488764 - DNA, 25 bp, Homo sapien
cgcgctgcgtctaacggagagtttt

SEQ ID NO: 1488765 - DNA, 25 bp, Homo sapien
cctcgaatatccctggggtcctggc

SEQ ID NO: 1488766 - DNA, 25 bp, Homo sapien
gcagaaagcggatggcgcgctgcgt

SEQ ID NO: 1488767 - DNA, 25 bp, Homo sapien
aggcaagccgtggtgcgcagtgctc

SEQ ID NO: 1488768 - DNA, 25 bp, Homo sapien
tttacaaaagctgtcgcaggtgcag

SEQ ID NO: 1488769 - DNA, 25 bp, Homo sapien
ctgtttacaaaagctgtcgcaggtg

SEQ ID NO: 1488770 - DNA, 25 bp, Homo sapien
tacaaaagctgtcgcaggtgcaggc

SEQ ID NO: 1488771 - DNA, 25 bp, Homo sapien
tgcactgtggcatccagagaaacag

SEQ ID NO: 1488772 - DNA, 25 bp, Homo sapien
ttcctactgcactcctgcactgtgg

SEQ ID NO: 1488773 - DNA, 25 bp, Homo sapien
tggagtcttcctactgcactcctgc

SEQ ID NO: 1488774 - DNA, 25 bp, Homo sapien
cagcgtcacttggggagaatgtcat

SEQ ID NO: 1488775 - DNA, 25 bp, Homo sapien
ttggcactggagcacccatctgctg

SEQ ID NO: 1488776 - DNA, 25 bp, Homo sapien
gcacccatctgctgggttttgtgga

SEQ ID NO: 1488777 - DNA, 25 bp, Homo sapien
attggcactggagcacccatctgct

SEQ ID NO: 1488778 - DNA, 25 bp, Homo sapien
cagagaatgcccgtagccaccagcc

SEQ ID NO: 1488779 - DNA, 25 bp, Homo sapien
ggttgcaggttctgtttccatgttt

SEQ ID NO: 1488780 - DNA, 25 bp, Homo sapien
gctggcaacaaatggttgcaggttc

SEQ ID NO: 1488781 - DNA, 25 bp, Homo sapien
ctcagagaatgcccgtagccaccag

SEQ ID NO: 1488782 - DNA, 25 bp, Homo sapien
caatggaactcctgaaccattcccg

SEQ ID NO: 1488783 - DNA, 25 bp, Homo sapien
tgctcaaatgtaacgtaaaaaggac

SEQ ID NO: 1488784 - DNA, 25 bp, Homo sapien
acaatggaactcctgaaccattccc

SEQ ID NO: 1488785 - DNA, 25 bp, Homo sapien
tcccgtgctcaaatgtaacgtaaaa

SEQ ID NO: 1488786 - DNA, 25 bp, Homo sapien
cacagcagcgtctaaccgataggga

SEQ ID NO: 1488787 - DNA, 25 bp, Homo sapien
tcttggctctgtgtgtacttttacc

SEQ ID NO: 1488788 - DNA, 25 bp, Homo sapien
ctggtagcacagcagcgtctaaccg

SEQ ID NO: 1488789 - DNA, 25 bp, Homo sapien
aaccgatagggactcttcttggctc

SEQ ID NO: 1488790 - DNA, 25 bp, Homo sapien
tggttcaccccgaggcaaatgcgtt

SEQ ID NO: 1488791 - DNA, 25 bp, Homo sapien
tgatgatcacgactagtgttcctac

SEQ ID NO: 1488792 - DNA, 25 bp, Homo sapien
tcactgatgtgctgtggaggttcga

SEQ ID NO: 1488793 - DNA, 25 bp, Homo sapien
tcgatgaatacattccccgcttccc

SEQ ID NO: 1488794 - DNA, 25 bp, Homo sapien
atgaagagccattcaatggagccac

SEQ ID NO: 1488795 - DNA, 25 bp, Homo sapien
gagccattcaatggagccacataac

SEQ ID NO: 1488796 - DNA, 25 bp, Homo sapien
ccattcaatggagccacataactgc

SEQ ID NO: 1488797 - DNA, 25 bp, Homo sapien
gaagagccattcaatggagccacat

SEQ ID NO: 1488798 - DNA, 25 bp, Homo sapien
ctctaagacatttgatggtgaccag

SEQ ID NO: 1488799 - DNA, 25 bp, Homo sapien
taacttctctaagacatttgatggt

SEQ ID NO: 1488800 - DNA, 25 bp, Homo sapien
tgtccctggacactgtaacttctct

SEQ ID NO: 1488801 - DNA, 25 bp, Homo sapien
catctaggtcgcctgacagaggccc

SEQ ID NO: 1488802 - DNA, 25 bp, Homo sapien
gctgtgtagccgttttctgtgatcc

SEQ ID NO: 1488803 - DNA, 25 bp, Homo sapien
tgcttcttataaactggcgatgctg

SEQ ID NO: 1488804 - DNA, 25 bp, Homo sapien
cacggtgccctttcacacgagtgat

SEQ ID NO: 1488805 - DNA, 25 bp, Homo sapien
agcctgcagggcaaggctttcagag

SEQ ID NO: 1488806 - DNA, 25 bp, Homo sapien
tgtccatagaactgtcccaaagtcg

SEQ ID NO: 1488807 - DNA, 25 bp, Homo sapien
ccagtgtagcttgtgtcgtgatacc

SEQ ID NO: 1488808 - DNA, 25 bp, Homo sapien
ccttgaagtgttttgccagtgtagc

SEQ ID NO: 1488809 - DNA, 25 bp, Homo sapien
aatagtaaaccttcatggctccctg

SEQ ID NO: 1488810 - DNA, 25 bp, Homo sapien
atccatccctggaattagatcggag

SEQ ID NO: 1488811 - DNA, 25 bp, Homo sapien
cctggaattagatcggagccacaga

SEQ ID NO: 1488812 - DNA, 25 bp, Homo sapien
gaattagatcggagccacagatgct

SEQ ID NO: 1488813 - DNA, 25 bp, Homo sapien
gatcggagccacagatgctatcact

SEQ ID NO: 1488814 - DNA, 25 bp, Homo sapien
gagtggagaaggtgcttttctctcc

SEQ ID NO: 1488815 - DNA, 25 bp, Homo sapien
gaacttttggcagtataatgaggct

SEQ ID NO: 1488816 - DNA, 25 bp, Homo sapien
ccaaggcaaccaggtcttgagtggc

SEQ ID NO: 1488817 - DNA, 25 bp, Homo sapien
caagatctgagatagaagggaacta

SEQ ID NO: 1488818 - DNA, 25 bp, Homo sapien
aaggcggacaagacttaagagatca

SEQ ID NO: 1488819 - DNA, 25 bp, Homo sapien
ggcggacaagacttaagagatcaag

SEQ ID NO: 1488820 - DNA, 25 bp, Homo sapien
ccaaggcggacaagacttaagagat

SEQ ID NO: 1488821 - DNA, 25 bp, Homo sapien
ctgccaaggcggacaagacttaaga

SEQ ID NO: 1488822 - DNA, 25 bp, Homo sapien
tgccccaaccaggatatacacagag

SEQ ID NO: 1488823 - DNA, 25 bp, Homo sapien
tggtatccattaatgaacctctccc

SEQ ID NO: 1488824 - DNA, 25 bp, Homo sapien
ccacagctgggtacaatgtagtaaa

SEQ ID NO: 1488825 - DNA, 25 bp, Homo sapien
aaaatgtgatttaagaagccctggc

SEQ ID NO: 1488826 - DNA, 25 bp, Homo sapien
tcttcttgcatcagatagtaaatgc

SEQ ID NO: 1488827 - DNA, 25 bp, Homo sapien
cattcttcttgcatcagatagtaaa

SEQ ID NO: 1488828 - DNA, 25 bp, Homo sapien
ctgtgtttcttggacgggttcacat

SEQ ID NO: 1488829 - DNA, 25 bp, Homo sapien
tcacattcttcttgcatcagatagt

SEQ ID NO: 1488830 - DNA, 25 bp, Homo sapien
aatcacgttgtctggaaatagctca

SEQ ID NO: 1488831 - DNA, 25 bp, Homo sapien
tttcttcagaaatcacgttgtctgg

SEQ ID NO: 1488832 - DNA, 25 bp, Homo sapien
cacgttgtctggaaatagctcagta

SEQ ID NO: 1488833 - DNA, 25 bp, Homo sapien
cagaaatcacgttgtctggaaatag

SEQ ID NO: 1488834 - DNA, 25 bp, Homo sapien
gtctcctcgtagaaagcagggagca

SEQ ID NO: 1488835 - DNA, 25 bp, Homo sapien
aaaattgtagccgtggtcagaggtg

SEQ ID NO: 1488836 - DNA, 25 bp, Homo sapien
ctctgtctcctcgtagaaagcaggg

SEQ ID NO: 1488837 - DNA, 25 bp, Homo sapien
tagttaaaattgtagccgtggtcag

SEQ ID NO: 1488838 - DNA, 25 bp, Homo sapien
tcctgtgctattacagagccccgtc

SEQ ID NO: 1488839 - DNA, 25 bp, Homo sapien
tcttcaccggttcctgtgctattac

SEQ ID NO: 1488840 - DNA, 25 bp, Homo sapien
tgctccatgccacgccctcccttgg

SEQ ID NO: 1488841 - DNA, 25 bp, Homo sapien
caccggttcctgtgctattacagag

SEQ ID NO: 1488842 - DNA, 25 bp, Homo sapien
aatgaaatccccaaactccactcgg

SEQ ID NO: 1488843 - DNA, 25 bp, Homo sapien
tcctgctggccaaatgcacctaggg

SEQ ID NO: 1488844 - DNA, 25 bp, Homo sapien
tagggccacgccttctaaaatatgt

SEQ ID NO: 1488845 - DNA, 25 bp, Homo sapien
aaaatatgtcctttgttatcaaggg

SEQ ID NO: 1488846 - DNA, 25 bp, Homo sapien
tcggcccgatgttctgccagaaagc

SEQ ID NO: 1488847 - DNA, 25 bp, Homo sapien
gaaagctttgcttgagatccaccgc

SEQ ID NO: 1488848 - DNA, 25 bp, Homo sapien
ttgctcaacgatcccactatgctgg

SEQ ID NO: 1488849 - DNA, 25 bp, Homo sapien
gaacgaagctttcatttcggcccga

SEQ ID NO: 1488850 - DNA, 25 bp, Homo sapien
aaaaccaagcgtggccttcagctgt

SEQ ID NO: 1488851 - DNA, 25 bp, Homo sapien
taaaaaccaagcgtggccttcagct

SEQ ID NO: 1488852 - DNA, 25 bp, Homo sapien
ttgtaaaaaccaagcgtggccttca

SEQ ID NO: 1488853 - DNA, 25 bp, Homo sapien
ccaagcgtggccttcagctgttgga

SEQ ID NO: 1488854 - DNA, 25 bp, Homo sapien
tctgcctttcccactcgactgtcat

SEQ ID NO: 1488855 - DNA, 25 bp, Homo sapien
gtctgcctttcccactcgactgtca

SEQ ID NO: 1488856 - DNA, 25 bp, Homo sapien
gccagtcctcatgtagagccacaag

SEQ ID NO: 1488857 - DNA, 25 bp, Homo sapien
tctggtccgtgatgaagcaagctct

SEQ ID NO: 1488858 - DNA, 25 bp, Homo sapien
gaacccggacttgcaggccatatct

SEQ ID NO: 1488859 - DNA, 25 bp, Homo sapien
caggaattgtccgttcccatggcca

SEQ ID NO: 1488860 - DNA, 25 bp, Homo sapien
actaagaagtactgtcctccagcag

SEQ ID NO: 1488861 - DNA, 25 bp, Homo sapien
tggaactctgagtctgttagtataa

SEQ ID NO: 1488862 - DNA, 25 bp, Homo sapien
gggcacagagccatagggcaggtct

SEQ ID NO: 1488863 - DNA, 25 bp, Homo sapien
ctgttagtataattccaaaggctgg

SEQ ID NO: 1488864 - DNA, 25 bp, Homo sapien
ccggatggtttttctaggggctgct

SEQ ID NO: 1488865 - DNA, 25 bp, Homo sapien
ctgtgtcatggaccggatggttttt

SEQ ID NO: 1488866 - DNA, 25 bp, Homo sapien
cactgtgtcatggaccggatggttt

SEQ ID NO: 1488867 - DNA, 25 bp, Homo sapien
tcccactgtgtcatggaccggatgg

SEQ ID NO: 1488868 - DNA, 25 bp, Homo sapien
ccgtcctcctgcacctacagtactg

SEQ ID NO: 1488869 - DNA, 25 bp, Homo sapien
gaagcacatcagaaaccgtcctcct

SEQ ID NO: 1488870 - DNA, 25 bp, Homo sapien
ccctgtccagggcacctcaaaatga

SEQ ID NO: 1488871 - DNA, 25 bp, Homo sapien
cctacaagggttgatgtggatgcat

SEQ ID NO: 1488872 - DNA, 25 bp, Homo sapien
tggacaattctggatcccactggat

SEQ ID NO: 1488873 - DNA, 25 bp, Homo sapien
cagtagattctggatcccgctagat

SEQ ID NO: 1488874 - DNA, 25 bp, Homo sapien
aatgtgatggacaattctggatccc

SEQ ID NO: 1488875 - DNA, 25 bp, Homo sapien
tcccactacactcacaacttcattc

SEQ ID NO: 1488876 - DNA, 25 bp, Homo sapien
tctgactcttaatcttcgcggtttc

SEQ ID NO: 1488877 - DNA, 25 bp, Homo sapien
tctggacagcacatgcgcagtatgc

SEQ ID NO: 1488878 - DNA, 25 bp, Homo sapien
tttcccacggatgtagatttcgcca

SEQ ID NO: 1488879 - DNA, 25 bp, Homo sapien
cttcaaccgatacctccagagaaag

SEQ ID NO: 1488880 - DNA, 25 bp, Homo sapien
cgctgagcactgtgtagggtccgtc

SEQ ID NO: 1488881 - DNA, 25 bp, Homo sapien
actgtgtagggtccgtcctgaaaga

SEQ ID NO: 1488882 - DNA, 25 bp, Homo sapien
gagcactgtgtagggtccgtcctga

SEQ ID NO: 1488883 - DNA, 25 bp, Homo sapien
ctatacagtccgtgtgaagtcttga

SEQ ID NO: 1488884 - DNA, 25 bp, Homo sapien
tcgctgaaatcggtgatggtaaaat

SEQ ID NO: 1488885 - DNA, 25 bp, Homo sapien
gaaatcggtgatggtaaaattggtc

SEQ ID NO: 1488886 - DNA, 25 bp, Homo sapien
gatggtaaaattggtctgttttcca

SEQ ID NO: 1488887 - DNA, 25 bp, Homo sapien
gcttcttcagtttccgctgagttct

SEQ ID NO: 1488888 - DNA, 25 bp, Homo sapien
cagcagcgtcggcactacatttagg

SEQ ID NO: 1488889 - DNA, 25 bp, Homo sapien
gcaccctgctgtaaacgctcagctg

SEQ ID NO: 1488890 - DNA, 25 bp, Homo sapien
catttaggaccctttctgtatgtac

SEQ ID NO: 1488891 - DNA, 25 bp, Homo sapien
ggcactacatttaggaccctttctg

SEQ ID NO: 1488892 - DNA, 25 bp, Homo sapien
aaatgttcctggctggcgtgctgca

SEQ ID NO: 1488893 - DNA, 25 bp, Homo sapien
atcatctcagatagctttgtggttg

SEQ ID NO: 1488894 - DNA, 25 bp, Homo sapien
tccctcatcatctcagatagctttg

SEQ ID NO: 1488895 - DNA, 25 bp, Homo sapien
gaagaggtacagtaagcaaatgttc

SEQ ID NO: 1488896 - DNA, 25 bp, Homo sapien
tattcatactgcatggtgaggacag

SEQ ID NO: 1488897 - DNA, 25 bp, Homo sapien
gagtatacgctaatattcctccagt

SEQ ID NO: 1488898 - DNA, 25 bp, Homo sapien
acagctgacggtatagcagccaggg

SEQ ID NO: 1488899 - DNA, 25 bp, Homo sapien
gcagataaggctgaaatttgtccca

SEQ ID NO: 1488900 - DNA, 25 bp, Homo sapien
gctgcatgcggttgccctgcaatta

SEQ ID NO: 1488901 - DNA, 25 bp, Homo sapien
tggcatatgtaaaacgtgtgctcat

SEQ ID NO: 1488902 - DNA, 25 bp, Homo sapien
tcacaatggcatatgtaaaacgtgt

SEQ ID NO: 1488903 - DNA, 25 bp, Homo sapien
cgctttgatgtgctgcatgcggttg

SEQ ID NO: 1488904 - DNA, 25 bp, Homo sapien
tgtgggtcaatcctacgtctgtgca

SEQ ID NO: 1488905 - DNA, 25 bp, Homo sapien
cgtaaatgtcagaggtggtcctgcc

SEQ ID NO: 1488906 - DNA, 25 bp, Homo sapien
cctctgatggtttgatgtgggtcaa

SEQ ID NO: 1488907 - DNA, 25 bp, Homo sapien
tgcacatcttaacaactatcgtagg

SEQ ID NO: 1488908 - DNA, 25 bp, Homo sapien
gctagtggtcccttcagagaacgaa

SEQ ID NO: 1488909 - DNA, 25 bp, Homo sapien
tgtctccgcggtggtgctcagactt

SEQ ID NO: 1488910 - DNA, 25 bp, Homo sapien
agagaacgaattatgctgaggcaga

SEQ ID NO: 1488911 - DNA, 25 bp, Homo sapien
gatactcgtcctccagccgtacttt

SEQ ID NO: 1488912 - DNA, 25 bp, Homo sapien
cgaccctgcactacaggttcctttt

SEQ ID NO: 1488913 - DNA, 25 bp, Homo sapien
tctcttcggtgcatcctctgaacca

SEQ ID NO: 1488914 - DNA, 25 bp, Homo sapien
tttctctccctgtccgtgcatccat

SEQ ID NO: 1488915 - DNA, 25 bp, Homo sapien
gaattaggttcctccacaccaaatg

SEQ ID NO: 1488916 - DNA, 25 bp, Homo sapien
gtatcctgcgctgctagcaccgtag

SEQ ID NO: 1488917 - DNA, 25 bp, Homo sapien
cagcccattttcaggcacggtatcc

SEQ ID NO: 1488918 - DNA, 25 bp, Homo sapien
cattttcaggcacggtatcctgcgc

SEQ ID NO: 1488919 - DNA, 25 bp, Homo sapien
aggcacggtatcctgcgctgctagc

SEQ ID NO: 1488920 - DNA, 25 bp, Homo sapien
gcaggtcctcttcagcgagagctac

SEQ ID NO: 1488921 - DNA, 25 bp, Homo sapien
tcctcttcagcgagagctacacgag

SEQ ID NO: 1488922 - DNA, 25 bp, Homo sapien
ttgctgaatgatgagcaggtcctct

SEQ ID NO: 1488923 - DNA, 25 bp, Homo sapien
tgtgtttgctgaatgatgagcaggt

SEQ ID NO: 1488924 - DNA, 25 bp, Homo sapien
tctagactcatttggggagtggcca

SEQ ID NO: 1488925 - DNA, 25 bp, Homo sapien
gagtggccaggagtccgggagagct

SEQ ID NO: 1488926 - DNA, 25 bp, Homo sapien
ctggttgcttatcttctagactcat

SEQ ID NO: 1488927 - DNA, 25 bp, Homo sapien
ggagtccgggagagctgccggccat

SEQ ID NO: 1488928 - DNA, 25 bp, Homo sapien
tgctttgagtctcccactgccagca

SEQ ID NO: 1488929 - DNA, 25 bp, Homo sapien
ctgctgctttgagtctcccactgcc

SEQ ID NO: 1488930 - DNA, 25 bp, Homo sapien
ctcctttagttcagatagagagatg

SEQ ID NO: 1488931 - DNA, 25 bp, Homo sapien
tcctttagttcagatagagagatga

SEQ ID NO: 1488932 - DNA, 25 bp, Homo sapien
gtcctgctagtttgaggaaattctc

SEQ ID NO: 1488933 - DNA, 25 bp, Homo sapien
tcctgctagtttgaggaaattctcc

SEQ ID NO: 1488934 - DNA, 25 bp, Homo sapien
ttgagtaaagcagagatggtccgca

SEQ ID NO: 1488935 - DNA, 25 bp, Homo sapien
tctatgcccaaaagagttgagcacc

SEQ ID NO: 1488936 - DNA, 25 bp, Homo sapien
ggtacggtgcctgctcttcgagtga

SEQ ID NO: 1488937 - DNA, 25 bp, Homo sapien
gacatccaagtaggaccaggcgtgg

SEQ ID NO: 1488938 - DNA, 25 bp, Homo sapien
aggaaacgcattcggatagggatga

SEQ ID NO: 1488939 - DNA, 25 bp, Homo sapien
ttagaatcacgttcttaaagaagga

SEQ ID NO: 1488940 - DNA, 25 bp, Homo sapien
acaccatgtagagcgcttccgttta

SEQ ID NO: 1488941 - DNA, 25 bp, Homo sapien
gagcgcttccgtttagaatcacgtt

SEQ ID NO: 1488942 - DNA, 25 bp, Homo sapien
tgtgtgggagttggccttgaaccct

SEQ ID NO: 1488943 - DNA, 25 bp, Homo sapien
catttctcctgactgtgtgggagtt

SEQ ID NO: 1488944 - DNA, 25 bp, Homo sapien
caattgcatccacatttctcctgac

SEQ ID NO: 1488945 - DNA, 25 bp, Homo sapien
agacctttaaaatcgacagcacaat

SEQ ID NO: 1488946 - DNA, 25 bp, Homo sapien
tgtatatgcctatgaaaccgtcctc

SEQ ID NO: 1488947 - DNA, 25 bp, Homo sapien
aagtttcctcgggagccttgcaatc

SEQ ID NO: 1488948 - DNA, 25 bp, Homo sapien
ggaaacatatcttgcagacggtact

SEQ ID NO: 1488949 - DNA, 25 bp, Homo sapien
gacggtactctcgtgtgtggcttct

SEQ ID NO: 1488950 - DNA, 25 bp, Homo sapien
attacatcatgaggatggatgtccc

SEQ ID NO: 1488951 - DNA, 25 bp, Homo sapien
tatgagatccggtggtttaagagtg

SEQ ID NO: 1488952 - DNA, 25 bp, Homo sapien
gagtgtgtggtactctcccccctgc

SEQ ID NO: 1488953 - DNA, 25 bp, Homo sapien
tccttcactgtgagtcaatgaaacc

SEQ ID NO: 1488954 - DNA, 25 bp, Homo sapien
tactttactccttaattctactgaa

SEQ ID NO: 1488955 - DNA, 25 bp, Homo sapien
atcgaaccatcattgcatccctagg

SEQ ID NO: 1488956 - DNA, 25 bp, Homo sapien
ttggtattaggataatggtggcctg

SEQ ID NO: 1488957 - DNA, 25 bp, Homo sapien
tcatatatgacctttgctatgctga

SEQ ID NO: 1488958 - DNA, 25 bp, Homo sapien
gctgccttcactgcgcacggcaggg

SEQ ID NO: 1488959 - DNA, 25 bp, Homo sapien
caggaaagccccgatttctttgatc

SEQ ID NO: 1488960 - DNA, 25 bp, Homo sapien
tcaagctcccgaaatgtcggagctg

SEQ ID NO: 1488961 - DNA, 25 bp, Homo sapien
ttctttgatcaattccgtcagtgct

SEQ ID NO: 1488962 - DNA, 25 bp, Homo sapien
aacctgcattacttgtgcttgctcc

SEQ ID NO: 1488963 - DNA, 25 bp, Homo sapien
ttggaacctgcattacttgtgcttg

SEQ ID NO: 1488964 - DNA, 25 bp, Homo sapien
ctgtacttggaacctgcattacttg

SEQ ID NO: 1488965 - DNA, 25 bp, Homo sapien
tacttggaacctgcattacttgtgc

SEQ ID NO: 1488966 - DNA, 25 bp, Homo sapien
gcaccctccatgtgcgctgaatgct

SEQ ID NO: 1488967 - DNA, 25 bp, Homo sapien
gaaagtgagtttggattcattaccc

SEQ ID NO: 1488968 - DNA, 25 bp, Homo sapien
cattcccacaggcaccctccatgtg

SEQ ID NO: 1488969 - DNA, 25 bp, Homo sapien
ccctccatgtgcgctgaatgcttct

SEQ ID NO: 1488970 - DNA, 25 bp, Homo sapien
cacgggtttggtctatggttcagac

SEQ ID NO: 1488971 - DNA, 25 bp, Homo sapien
caatctgtgatccaagctgcaggcc

SEQ ID NO: 1488972 - DNA, 25 bp, Homo sapien
gctgtgttccacaaaagcgatgagg

SEQ ID NO: 1488973 - DNA, 25 bp, Homo sapien
gatcagtcactgagacactttgggt

SEQ ID NO: 1488974 - DNA, 25 bp, Homo sapien
tgcttcctcctagagcccatggaga

SEQ ID NO: 1488975 - DNA, 25 bp, Homo sapien
aaggatgtggacattcccctccttg

SEQ ID NO: 1488976 - DNA, 25 bp, Homo sapien
gcaggaacttcaggacgagcctctg

SEQ ID NO: 1488977 - DNA, 25 bp, Homo sapien
gatttgggattagcctctcctttct

SEQ ID NO: 1488978 - DNA, 25 bp, Homo sapien
ggaagtgaatagaagggcagaaccg

SEQ ID NO: 1488979 - DNA, 25 bp, Homo sapien
actctatcttgatcttgctaaaggg

SEQ ID NO: 1488980 - DNA, 25 bp, Homo sapien
gggaactctatcttgatcttgctaa

SEQ ID NO: 1488981 - DNA, 25 bp, Homo sapien
gcagaaccgagagcgggaactctat

SEQ ID NO: 1488982 - DNA, 25 bp, Homo sapien
cacagcccacttgataagacagctt

SEQ ID NO: 1488983 - DNA, 25 bp, Homo sapien
tttcccacagtggagaaccagacac

SEQ ID NO: 1488984 - DNA, 25 bp, Homo sapien
ggcagctcctgcataagaagggtga

SEQ ID NO: 1488985 - DNA, 25 bp, Homo sapien
tcctgatttatctggggcagctcct

SEQ ID NO: 1488986 - DNA, 25 bp, Homo sapien
ccgagtaactgataatatacgcaca

SEQ ID NO: 1488987 - DNA, 25 bp, Homo sapien
gtgtagcaggaatacagacactgag

SEQ ID NO: 1488988 - DNA, 25 bp, Homo sapien
tatacgcacatcagcgctgaatcgg

SEQ ID NO: 1488989 - DNA, 25 bp, Homo sapien
cagacactgagcaccgagtaactga

SEQ ID NO: 1488990 - DNA, 25 bp, Homo sapien
ggacagtacggagagcccaagacgc

SEQ ID NO: 1488991 - DNA, 25 bp, Homo sapien
catcatatcacaagttgtgtcataa

SEQ ID NO: 1488992 - DNA, 25 bp, Homo sapien
gttgtgtcataaccagaaacaaaac

SEQ ID NO: 1488993 - DNA, 25 bp, Homo sapien
acggagagcccaagacgcccttggg

SEQ ID NO: 1488994 - DNA, 25 bp, Homo sapien
cctactccagtactgtactggagct

SEQ ID NO: 1488995 - DNA, 25 bp, Homo sapien
tccagtactgtactggagctcctcc

SEQ ID NO: 1488996 - DNA, 25 bp, Homo sapien
ccagtactgtactggagctcctcct

SEQ ID NO: 1488997 - DNA, 25 bp, Homo sapien
tactccagtactgtactggagctcc

SEQ ID NO: 1488998 - DNA, 25 bp, Homo sapien
gcaagtgagcaactggtcagccgaa

SEQ ID NO: 1488999 - DNA, 25 bp, Homo sapien
tcagccgaattaaagcccttggagg

SEQ ID NO: 1489000 - DNA, 25 bp, Homo sapien
cactgagacttctaggcaagtgagc

SEQ ID NO: 1489001 - DNA, 25 bp, Homo sapien
tatgttcctagatgagaccactgaa

SEQ ID NO: 1489002 - DNA, 25 bp, Homo sapien
gtaatgttggtgtaaaatgtctctg

SEQ ID NO: 1489003 - DNA, 25 bp, Homo sapien
tcttcggggaacgttgtacatcagg

SEQ ID NO: 1489004 - DNA, 25 bp, Homo sapien
agggcacagcagtggttctgactgt

SEQ ID NO: 1489005 - DNA, 25 bp, Homo sapien
gtgatccacccttgaagactgtgag

SEQ ID NO: 1489006 - DNA, 25 bp, Homo sapien
tgtgttaggtcctggctatacagga

SEQ ID NO: 1489007 - DNA, 25 bp, Homo sapien
catcctacgcagttctccaggaagg

SEQ ID NO: 1489008 - DNA, 25 bp, Homo sapien
tcttgtgatggagaggtacacccag

SEQ ID NO: 1489009 - DNA, 25 bp, Homo sapien
atacttatagaaagacgactttatg

SEQ ID NO: 1489010 - DNA, 25 bp, Homo sapien
aataacagtcttggtggcatcggcg

SEQ ID NO: 1489011 - DNA, 25 bp, Homo sapien
tggaaccatattcgggatccccaac

SEQ ID NO: 1489012 - DNA, 25 bp, Homo sapien
ggaataacagtcttggtggcattgg

SEQ ID NO: 1489013 - DNA, 25 bp, Homo sapien
tggcattgggcaagccccgaggact

SEQ ID NO: 1489014 - DNA, 25 bp, Homo sapien
tcagagacgatgaagcggcaagccg

SEQ ID NO: 1489015 - DNA, 25 bp, Homo sapien
aggttcagagacgatgaagcggcaa

SEQ ID NO: 1489016 - DNA, 25 bp, Homo sapien
agaattccacttgggctctgcagtt

SEQ ID NO: 1489017 - DNA, 25 bp, Homo sapien
caggaggttcagagacgatgaagcg

SEQ ID NO: 1489018 - DNA, 25 bp, Homo sapien
tctgctaattctgcatggttgtcac

SEQ ID NO: 1489019 - DNA, 25 bp, Homo sapien
tacacttcctgagcagaacttaaga

SEQ ID NO: 1489020 - DNA, 25 bp, Homo sapien
catggttgtcactgcgatgatgttc

SEQ ID NO: 1489021 - DNA, 25 bp, Homo sapien
agaatatctggagtaattcaggttc

SEQ ID NO: 1489022 - DNA, 25 bp, Homo sapien
caagcgagtcttgttcaatgagatc

SEQ ID NO: 1489023 - DNA, 25 bp, Homo sapien
agtttcatgggacacatataagtga

SEQ ID NO: 1489024 - DNA, 25 bp, Homo sapien
tccacttcagtcattcattgcaagc

SEQ ID NO: 1489025 - DNA, 25 bp, Homo sapien
taataaaagtttcatgggacacata

SEQ ID NO: 1489026 - DNA, 25 bp, Homo sapien
accaggatggtgtcgggaagaacgc

SEQ ID NO: 1489027 - DNA, 25 bp, Homo sapien
caactgctgcttcaccaagaatcgc

SEQ ID NO: 1489028 - DNA, 25 bp, Homo sapien
aagaacgcgtctctcccacgcatta

SEQ ID NO: 1489029 - DNA, 25 bp, Homo sapien
tgccagccccaaatgaccaggatgg

SEQ ID NO: 1489030 - DNA, 25 bp, Homo sapien
caaaggctggtccttcagccagagt

SEQ ID NO: 1489031 - DNA, 25 bp, Homo sapien
caactaatcatcgtgtacactgccg

SEQ ID NO: 1489032 - DNA, 25 bp, Homo sapien
caaccagcggtctcaggataagcaa

SEQ ID NO: 1489033 - DNA, 25 bp, Homo sapien
tgcagggacctcttctaagctctcc

SEQ ID NO: 1489034 - DNA, 25 bp, Homo sapien
tgatggcttgggaccctggtccctg

SEQ ID NO: 1489035 - DNA, 25 bp, Homo sapien
cagtcagcgtgtatttcaaagccgt

SEQ ID NO: 1489036 - DNA, 25 bp, Homo sapien
ggatcttcacagatagttggctgta

SEQ ID NO: 1489037 - DNA, 25 bp, Homo sapien
tgaggaggatatttgaacagtcagc

SEQ ID NO: 1489038 - DNA, 25 bp, Homo sapien
tgccggttgctaagcagcatacatg

SEQ ID NO: 1489039 - DNA, 25 bp, Homo sapien
caaggagagctaaaatgccggttgc

SEQ ID NO: 1489040 - DNA, 25 bp, Homo sapien
catcttttagagtccgcagaggccc

SEQ ID NO: 1489041 - DNA, 25 bp, Homo sapien
ggcccacatgaagggctcaccagca

SEQ ID NO: 1489042 - DNA, 25 bp, Homo sapien
acagggtcacgtggagatacagggg

SEQ ID NO: 1489043 - DNA, 25 bp, Homo sapien
atacagggggatgcgccttcggccc

SEQ ID NO: 1489044 - DNA, 25 bp, Homo sapien
cgccttcggcccatctgtatgtggg

SEQ ID NO: 1489045 - DNA, 25 bp, Homo sapien
gggatgcgccttcggcccatctgta

SEQ ID NO: 1489046 - DNA, 25 bp, Homo sapien
aacttttgtcatcagaggttcacag

SEQ ID NO: 1489047 - DNA, 25 bp, Homo sapien
cacagaaacctaaaccatacgttag

SEQ ID NO: 1489048 - DNA, 25 bp, Homo sapien
agtaattgaaatgggccagatgcag

SEQ ID NO: 1489049 - DNA, 25 bp, Homo sapien
caaggttacgtattgaccagttgaa

SEQ ID NO: 1489050 - DNA, 25 bp, Homo sapien
ttcctcgtcgagtgcggctgtccgt

SEQ ID NO: 1489051 - DNA, 25 bp, Homo sapien
gcatccaggtgcaacgtctctgcta

SEQ ID NO: 1489052 - DNA, 25 bp, Homo sapien
tccactgcgcatattgaagacagag

SEQ ID NO: 1489053 - DNA, 25 bp, Homo sapien
gtctctgctaagaatgtgtgccagg

SEQ ID NO: 1489054 - DNA, 25 bp, Homo sapien
aggccagaagcaggtcacgtgtaaa

SEQ ID NO: 1489055 - DNA, 25 bp, Homo sapien
ggccagaagcaggtcacgtgtaaaa

SEQ ID NO: 1489056 - DNA, 25 bp, Homo sapien
gattccctggagtacctggaggcac

SEQ ID NO: 1489057 - DNA, 25 bp, Homo sapien
agcgcctggagagccgtgtcaactt

SEQ ID NO: 1489058 - DNA, 25 bp, Homo sapien
cactggagtgtgtgacggagcgcct

SEQ ID NO: 1489059 - DNA, 25 bp, Homo sapien
tcatgatgatcacctgcttcgacat

SEQ ID NO: 1489060 - DNA, 25 bp, Homo sapien
tgtttgtacataagaactgctagca

SEQ ID NO: 1489061 - DNA, 25 bp, Homo sapien
cagaatgactgattaagtgccttgc

SEQ ID NO: 1489062 - DNA, 25 bp, Homo sapien
caagccctgtgagactgaaaaagca

SEQ ID NO: 1489063 - DNA, 25 bp, Homo sapien
tgtggaaagcgaacacaaaacaacc

SEQ ID NO: 1489064 - DNA, 25 bp, Homo sapien
ggacggccatcttgaaactgtgctg

SEQ ID NO: 1489065 - DNA, 25 bp, Homo sapien
taaggtagatcaagaccaggaagcc

SEQ ID NO: 1489066 - DNA, 25 bp, Homo sapien
catttcaatggacgaaagccaaaac

SEQ ID NO: 1489067 - DNA, 25 bp, Homo sapien
aatgcaatgtgggactgccctggaa

SEQ ID NO: 1489068 - DNA, 25 bp, Homo sapien
ttccttcagaaaagcctgcggtgac

SEQ ID NO: 1489069 - DNA, 25 bp, Homo sapien
ttcacctctagccttactgctcggg

SEQ ID NO: 1489070 - DNA, 25 bp, Homo sapien
ggtgacaacttgttcacctctagcc

SEQ ID NO: 1489071 - DNA, 25 bp, Homo sapien
aaggtggcagggatatagagctgga

SEQ ID NO: 1489072 - DNA, 25 bp, Homo sapien
tgaacttcagagcactcctagaggc

SEQ ID NO: 1489073 - DNA, 25 bp, Homo sapien
caaagaactgtaccctaggactaag

SEQ ID NO: 1489074 - DNA, 25 bp, Homo sapien
ggcaaaaactggagtctaggactca

SEQ ID NO: 1489075 - DNA, 25 bp, Homo sapien
tgatggaagtcgactaaaactcagc

SEQ ID NO: 1489076 - DNA, 25 bp, Homo sapien
gaacgccagtaaaaagtgggcagag

SEQ ID NO: 1489077 - DNA, 25 bp, Homo sapien
gaaatacatctcatactagttagaa

SEQ ID NO: 1489078 - DNA, 25 bp, Homo sapien
atacatctcatactagttagaatgg

SEQ ID NO: 1489079 - DNA, 25 bp, Homo sapien
atgcatctgaaaaggtctactatcc

SEQ ID NO: 1489080 - DNA, 25 bp, Homo sapien
tggctactgatacttgtatatgctc

SEQ ID NO: 1489081 - DNA, 25 bp, Homo sapien
tactgatacttgtatatgctccaca

SEQ ID NO: 1489082 - DNA, 25 bp, Homo sapien
gctactgatacttgtatatgctcca

SEQ ID NO: 1489083 - DNA, 25 bp, Homo sapien
ctgatacttgtatatgctccacaaa

SEQ ID NO: 1489084 - DNA, 25 bp, Homo sapien
taaaatcgccaatgagtaagcaaat

SEQ ID NO: 1489085 - DNA, 25 bp, Homo sapien
agtttttgcttggaagcaaatgtga

SEQ ID NO: 1489086 - DNA, 25 bp, Homo sapien
ttatccctacatatatccaaagaga

SEQ ID NO: 1489087 - DNA, 25 bp, Homo sapien
aagatgacatctcaaaattctgctt

SEQ ID NO: 1489088 - DNA, 25 bp, Homo sapien
tcgtgcttctctacaactaatgatt

SEQ ID NO: 1489089 - DNA, 25 bp, Homo sapien
tttattataatcgtgcttctctaca

SEQ ID NO: 1489090 - DNA, 25 bp, Homo sapien
gaatttattataatcgtgcttctct

SEQ ID NO: 1489091 - DNA, 25 bp, Homo sapien
ttataatcgtgcttctctacaacta

SEQ ID NO: 1489092 - DNA, 25 bp, Homo sapien
tatttacctacacaaacacggaaca

SEQ ID NO: 1489093 - DNA, 25 bp, Homo sapien
gccgtatttccctctgactgcgttc

SEQ ID NO: 1489094 - DNA, 25 bp, Homo sapien
gtgtgtgacctcaataaggcattca

SEQ ID NO: 1489095 - DNA, 25 bp, Homo sapien
ctaacaaagcatagagtgtgtgacc

SEQ ID NO: 1489096 - DNA, 25 bp, Homo sapien
tcaaatcttcaatcaggctgtgttc

SEQ ID NO: 1489097 - DNA, 25 bp, Homo sapien
tgctctgatgttggcgtcgcattct

SEQ ID NO: 1489098 - DNA, 25 bp, Homo sapien
tggcgtcgcattcttctaaaagtag

SEQ ID NO: 1489099 - DNA, 25 bp, Homo sapien
tgtgtcactctcataatatcaaaag

SEQ ID NO: 1489100 - DNA, 25 bp, Homo sapien
gggcccagtgacaatcgatgatctt

SEQ ID NO: 1489101 - DNA, 25 bp, Homo sapien
cagtgacaatcgatgatcttcaaag

SEQ ID NO: 1489102 - DNA, 25 bp, Homo sapien
agtgacaatcgatgatcttcaaaga

SEQ ID NO: 1489103 - DNA, 25 bp, Homo sapien
gctggggcccagtgacaatcgatga

SEQ ID NO: 1489104 - DNA, 25 bp, Homo sapien
cactgatccagtatattcctgttca

SEQ ID NO: 1489105 - DNA, 25 bp, Homo sapien
ccccactgatccagtatattcctgt

SEQ ID NO: 1489106 - DNA, 25 bp, Homo sapien
tgcagctttaagagtaaggtctact

SEQ ID NO: 1489107 - DNA, 25 bp, Homo sapien
cagctttaagagtaaggtctactcc

SEQ ID NO: 1489108 - DNA, 25 bp, Homo sapien
cacaggtgccttccttgtcaagatg

SEQ ID NO: 1489109 - DNA, 25 bp, Homo sapien
gactcaacccagtgtgtccattcca

SEQ ID NO: 1489110 - DNA, 25 bp, Homo sapien
gcagcctccccgtatgaacagactg

SEQ ID NO: 1489111 - DNA, 25 bp, Homo sapien
gttagactaaggatgacctctcggc

SEQ ID NO: 1489112 - DNA, 25 bp, Homo sapien
tgtgttctcttacttgatgctgaat

SEQ ID NO: 1489113 - DNA, 25 bp, Homo sapien
tgttctcttacttgatgctgaatgc

SEQ ID NO: 1489114 - DNA, 25 bp, Homo sapien
ttctcttacttgatgctgaatgcat

SEQ ID NO: 1489115 - DNA, 25 bp, Homo sapien
gttctgtgttctcttacttgatgct

SEQ ID NO: 1489116 - DNA, 25 bp, Homo sapien
tagtagaagcttttgctcatatgtt

SEQ ID NO: 1489117 - DNA, 25 bp, Homo sapien
aagcttttgctcatatgtttaggtc

SEQ ID NO: 1489118 - DNA, 25 bp, Homo sapien
tagaagcttttgctcatatgtttag

SEQ ID NO: 1489119 - DNA, 25 bp, Homo sapien
ctagtagaagcttttgctcatatgt

SEQ ID NO: 1489120 - DNA, 25 bp, Homo sapien
tttgttactgattcataggtcccct

SEQ ID NO: 1489121 - DNA, 25 bp, Homo sapien
tcttctttacggcttctacttctta

SEQ ID NO: 1489122 - DNA, 25 bp, Homo sapien
tgtttttcagcttgggcagtttcaa

SEQ ID NO: 1489123 - DNA, 25 bp, Homo sapien
taggtcccctgaggcactgttcaat

SEQ ID NO: 1489124 - DNA, 25 bp, Homo sapien
gctatggctagcattcggcgaaaat

SEQ ID NO: 1489125 - DNA, 25 bp, Homo sapien
cggcgaaaatgagcactgtggaatc

SEQ ID NO: 1489126 - DNA, 25 bp, Homo sapien
tctggcttttaagaatcccttcggc

SEQ ID NO: 1489127 - DNA, 25 bp, Homo sapien
gttttgggatcagccggcccctgga

SEQ ID NO: 1489128 - DNA, 25 bp, Homo sapien
gcagtttgccaactttcatcacttg

SEQ ID NO: 1489129 - DNA, 25 bp, Homo sapien
cattgcttggggaaacatgccttga

SEQ ID NO: 1489130 - DNA, 25 bp, Homo sapien
ctctgacgggatggcttcctgggaa

SEQ ID NO: 1489131 - DNA, 25 bp, Homo sapien
ttcatcacttgaacccctctgacgg

SEQ ID NO: 1489132 - DNA, 25 bp, Homo sapien
aaacggcaaacagtgtcagcagccc

SEQ ID NO: 1489133 - DNA, 25 bp, Homo sapien
cggcaaacagtgtcagcagccctca

SEQ ID NO: 1489134 - DNA, 25 bp, Homo sapien
aacggcaaacagtgtcagcagccct

SEQ ID NO: 1489135 - DNA, 25 bp, Homo sapien
gcaaacagtgtcagcagccctcacc

SEQ ID NO: 1489136 - DNA, 25 bp, Homo sapien
tcttggatttcatgacttgaacttc

SEQ ID NO: 1489137 - DNA, 25 bp, Homo sapien
catcttggatttcatgacttgaact

SEQ ID NO: 1489138 - DNA, 25 bp, Homo sapien
ttggatttcatgacttgaacttccc

SEQ ID NO: 1489139 - DNA, 25 bp, Homo sapien
gatttcatgacttgaacttcccagc

SEQ ID NO: 1489140 - DNA, 25 bp, Homo sapien
ccaggaaatctgagcatgaaatggc

SEQ ID NO: 1489141 - DNA, 25 bp, Homo sapien
aatggcattgcgcatggaagaaaaa

SEQ ID NO: 1489142 - DNA, 25 bp, Homo sapien
tccttactcagccaagacaactgta

SEQ ID NO: 1489143 - DNA, 25 bp, Homo sapien
aaacatatttctgggataatccagg

SEQ ID NO: 1489144 - DNA, 25 bp, Homo sapien
tgtgagaaccagctgtagactgagc

SEQ ID NO: 1489145 - DNA, 25 bp, Homo sapien
tacagatctgatgagggaatccaaa

SEQ ID NO: 1489146 - DNA, 25 bp, Homo sapien
tccaaagagcactaagccaagggca

SEQ ID NO: 1489147 - DNA, 25 bp, Homo sapien
tgtcacattgaatacgggcataagc

SEQ ID NO: 1489148 - DNA, 25 bp, Homo sapien
tgctgtgactatagctccctgtaac

SEQ ID NO: 1489149 - DNA, 25 bp, Homo sapien
tctttcaagagacagggcacctctc

SEQ ID NO: 1489150 - DNA, 25 bp, Homo sapien
cactcttggagatactagatactac

SEQ ID NO: 1489151 - DNA, 25 bp, Homo sapien
taggatgcagctataccacggttac

SEQ ID NO: 1489152 - DNA, 25 bp, Homo sapien
tatgtgccaagtggtgccagtgtgc

SEQ ID NO: 1489153 - DNA, 25 bp, Homo sapien
caagtggtgccagtgtgccactgct

SEQ ID NO: 1489154 - DNA, 25 bp, Homo sapien
gccagtgtgccactgctaattatta

SEQ ID NO: 1489155 - DNA, 25 bp, Homo sapien
ctaattatgtgccaagtggtgccag

SEQ ID NO: 1489156 - DNA, 25 bp, Homo sapien
gagcacgggtcagccagacagatta

SEQ ID NO: 1489157 - DNA, 25 bp, Homo sapien
cgggtcagccagacagattatcatt

SEQ ID NO: 1489158 - DNA, 25 bp, Homo sapien
ggtcagccagacagattatcatttt

SEQ ID NO: 1489159 - DNA, 25 bp, Homo sapien
cacgggtcagccagacagattatca

SEQ ID NO: 1489160 - DNA, 25 bp, Homo sapien
attctattagctccaaacatactgc

SEQ ID NO: 1489161 - DNA, 25 bp, Homo sapien
aaccacctgttgaagctgggaaggc

SEQ ID NO: 1489162 - DNA, 25 bp, Homo sapien
ggacagctagatcactgctccattc

SEQ ID NO: 1489163 - DNA, 25 bp, Homo sapien
catagtctccgcatctgcagttagc

SEQ ID NO: 1489164 - DNA, 25 bp, Homo sapien
agaaagcatcacaattccaattagt

SEQ ID NO: 1489165 - DNA, 25 bp, Homo sapien
aggccatgacttaaggtgcaaaaca

SEQ ID NO: 1489166 - DNA, 25 bp, Homo sapien
ggccatgacttaaggtgcaaaacac

SEQ ID NO: 1489167 - DNA, 25 bp, Homo sapien
aaggccatgacttaaggtgcaaaac

SEQ ID NO: 1489168 - DNA, 25 bp, Homo sapien
ccacctgtccatctgcccacctcat

SEQ ID NO: 1489169 - DNA, 25 bp, Homo sapien
ctgtccacctgtccatctgcccacc

SEQ ID NO: 1489170 - DNA, 25 bp, Homo sapien
gtccacctgtccatctgcccacctc

SEQ ID NO: 1489171 - DNA, 25 bp, Homo sapien
tgtccacctgtccatctgcccacct

SEQ ID NO: 1489172 - DNA, 25 bp, Homo sapien
gtccacctgtccatctgcccacctc

SEQ ID NO: 1489173 - DNA, 25 bp, Homo sapien
ccacctgtccatctgcccacctcat

SEQ ID NO: 1489174 - DNA, 25 bp, Homo sapien
ctgtccacctgtccatctgcccacc

SEQ ID NO: 1489175 - DNA, 25 bp, Homo sapien
tgtccacctgtccatctgcccacct

SEQ ID NO: 1489176 - DNA, 25 bp, Homo sapien
agctttctggataataaggtggctc

SEQ ID NO: 1489177 - DNA, 25 bp, Homo sapien
cctggttagtggcttcaggctatag

SEQ ID NO: 1489178 - DNA, 25 bp, Homo sapien
agtggcttcaggctatagcctaggg

SEQ ID NO: 1489179 - DNA, 25 bp, Homo sapien
tcaggctatagcctagggcctggct

SEQ ID NO: 1489180 - DNA, 25 bp, Homo sapien
ccaaataactcagggctctgtactg

SEQ ID NO: 1489181 - DNA, 25 bp, Homo sapien
gcttttcatgaggtctccaaataac

SEQ ID NO: 1489182 - DNA, 25 bp, Homo sapien
cagactgggctcaaaaggcttttca

SEQ ID NO: 1489183 - DNA, 25 bp, Homo sapien
ctcctggccggttgtgattttaaga

SEQ ID NO: 1489184 - DNA, 25 bp, Homo sapien
gaagcagcaccaggaatcaggacag

SEQ ID NO: 1489185 - DNA, 25 bp, Homo sapien
gaatattgcgcttttcggaccggcc

SEQ ID NO: 1489186 - DNA, 25 bp, Homo sapien
acgagattatatcccgcatctggct

SEQ ID NO: 1489187 - DNA, 25 bp, Homo sapien
tattgcgcttttcggaccggcctaa

SEQ ID NO: 1489188 - DNA, 25 bp, Homo sapien
cgagattatatcccgcatctggctc

SEQ ID NO: 1489189 - DNA, 25 bp, Homo sapien
acttatatggtttcagaacacctta

SEQ ID NO: 1489190 - DNA, 25 bp, Homo sapien
gggcactattctaggccctagggat

SEQ ID NO: 1489191 - DNA, 25 bp, Homo sapien
gaagctaacttaattctagggatta

SEQ ID NO: 1489192 - DNA, 25 bp, Homo sapien
ggagcctattgtacactgggcacta

SEQ ID NO: 1489193 - DNA, 25 bp, Homo sapien
ggcagccgctgaaacgacacttcaa

SEQ ID NO: 1489194 - DNA, 25 bp, Homo sapien
tgtttggaccaagttcgccagagta

SEQ ID NO: 1489195 - DNA, 25 bp, Homo sapien
taatagatcctttgtgagggcagcc

SEQ ID NO: 1489196 - DNA, 25 bp, Homo sapien
cacaaaggttgtcgatgtttggacc

SEQ ID NO: 1489197 - DNA, 25 bp, Homo sapien
ggatgtggacgagtaaagccagcct

SEQ ID NO: 1489198 - DNA, 25 bp, Homo sapien
gaactagtggagactttggcaaact

SEQ ID NO: 1489199 - DNA, 25 bp, Homo sapien
tgacagagaatacgccaggtttaag

SEQ ID NO: 1489200 - DNA, 25 bp, Homo sapien
aggccagggatcacacacttacgag

SEQ ID NO: 1489201 - DNA, 25 bp, Homo sapien
ggtccgagtaccatagaacaaggct

SEQ ID NO: 1489202 - DNA, 25 bp, Homo sapien
gagtaccatagaacaaggcttcctc

SEQ ID NO: 1489203 - DNA, 25 bp, Homo sapien
ctgtatggctccatggtccgagtac

SEQ ID NO: 1489204 - DNA, 25 bp, Homo sapien
gctccatggtccgagtaccatagaa

SEQ ID NO: 1489205 - DNA, 25 bp, Homo sapien
cagctggtagatgttgatatcggga

SEQ ID NO: 1489206 - DNA, 25 bp, Homo sapien
tgatgcaggcatccatggcgcagtc

SEQ ID NO: 1489207 - DNA, 25 bp, Homo sapien
cagtcgagcaccttcagctggtaga

SEQ ID NO: 1489208 - DNA, 25 bp, Homo sapien
tcgggaagccgttcagaattgctgc

SEQ ID NO: 1489209 - DNA, 25 bp, Homo sapien
gatattccctgtcttacagaggcag

SEQ ID NO: 1489210 - DNA, 25 bp, Homo sapien
tcatgtagccttggagtgacttcgc

SEQ ID NO: 1489211 - DNA, 25 bp, Homo sapien
agtgaattctctgggaaacacagcg

SEQ ID NO: 1489212 - DNA, 25 bp, Homo sapien
cttcactgtgcggtgtgttaggcga

SEQ ID NO: 1489213 - DNA, 25 bp, Homo sapien
gcagcctagcctttgactgtagtaa

SEQ ID NO: 1489214 - DNA, 25 bp, Homo sapien
tagattcagatctaatcgagtcctg

SEQ ID NO: 1489215 - DNA, 25 bp, Homo sapien
cattccagtagggtgaaaaggtttg

SEQ ID NO: 1489216 - DNA, 25 bp, Homo sapien
cccagtggagctccaaattcatctg

SEQ ID NO: 1489217 - DNA, 25 bp, Homo sapien
gctcatcaccagttagcatatcagc

SEQ ID NO: 1489218 - DNA, 25 bp, Homo sapien
aacttccttccatacttgctcatca

SEQ ID NO: 1489219 - DNA, 25 bp, Homo sapien
tccagtgtgccttcagttcttcaat

SEQ ID NO: 1489220 - DNA, 25 bp, Homo sapien
tccatacttgctcatcaccagttag

SEQ ID NO: 1489221 - DNA, 25 bp, Homo sapien
tactgttaacagagtcttccagaca

SEQ ID NO: 1489222 - DNA, 25 bp, Homo sapien
gtaaccgtctcataaaccaagcatg

SEQ ID NO: 1489223 - DNA, 25 bp, Homo sapien
ttagcagatgacgatcagacaggtc

SEQ ID NO: 1489224 - DNA, 25 bp, Homo sapien
aaggtctgacggagcttcataaaca

SEQ ID NO: 1489225 - DNA, 25 bp, Homo sapien
atactaaaccattagctgttccctg

SEQ ID NO: 1489226 - DNA, 25 bp, Homo sapien
cagcctttatcctccagcaatacta

SEQ ID NO: 1489227 - DNA, 25 bp, Homo sapien
aagtgtgggtgacctccaacaccta

SEQ ID NO: 1489228 - DNA, 25 bp, Homo sapien
tttcagacttagggtcaaagtgtgg

SEQ ID NO: 1489229 - DNA, 25 bp, Homo sapien
tcagacttagggtcaaagtgtgggt

SEQ ID NO: 1489230 - DNA, 25 bp, Homo sapien
caaagtgtgggtgacctccaacacc

SEQ ID NO: 1489231 - DNA, 25 bp, Homo sapien
tctgctatgtacaccccctcagtga

SEQ ID NO: 1489232 - DNA, 25 bp, Homo sapien
gctatgtacaccccctcagtgacag

SEQ ID NO: 1489233 - DNA, 25 bp, Homo sapien
tccttctgctatgtacaccccctca

SEQ ID NO: 1489234 - DNA, 25 bp, Homo sapien
tatgtacaccccctcagtgacagca

SEQ ID NO: 1489235 - DNA, 25 bp, Homo sapien
ggacataacagggccacgtgaagga

SEQ ID NO: 1489236 - DNA, 25 bp, Homo sapien
tggacataacagggccacgtgaagg

SEQ ID NO: 1489237 - DNA, 25 bp, Homo sapien
ccgaggtggacataacagggccacg

SEQ ID NO: 1489238 - DNA, 25 bp, Homo sapien
cgaggtggacataacagggccacgt

SEQ ID NO: 1489239 - DNA, 25 bp, Homo sapien
cattgtttcttcctttcactcaaac

SEQ ID NO: 1489240 - DNA, 25 bp, Homo sapien
tcattgtttcttcctttcactcaaa

SEQ ID NO: 1489241 - DNA, 25 bp, Homo sapien
tcttcagggctgtgtaactcatagg

SEQ ID NO: 1489242 - DNA, 25 bp, Homo sapien
ctcataggtgtcgtggagggtctca

SEQ ID NO: 1489243 - DNA, 25 bp, Homo sapien
tcagaaggaaacgagggaaggcaat

SEQ ID NO: 1489244 - DNA, 25 bp, Homo sapien
ttcacggtttacagggcatagccca

SEQ ID NO: 1489245 - DNA, 25 bp, Homo sapien
ctgggtttggcaacggaaacagtca

SEQ ID NO: 1489246 - DNA, 25 bp, Homo sapien
tggtccctcagctgcttccggcgct

SEQ ID NO: 1489247 - DNA, 25 bp, Homo sapien
ttccggcgctcctcactggtcatca

SEQ ID NO: 1489248 - DNA, 25 bp, Homo sapien
gcatatccaggtagcagatggtgag

SEQ ID NO: 1489249 - DNA, 25 bp, Homo sapien
agagagagggaagcgctgaaacatc

SEQ ID NO: 1489250 - DNA, 25 bp, Homo sapien
gagagagggaagcgctgaaacatct

SEQ ID NO: 1489251 - DNA, 25 bp, Homo sapien
gagggaagcgctgaaacatctgctg

SEQ ID NO: 1489252 - DNA, 25 bp, Homo sapien
gagagggaagcgctgaaacatctgc

SEQ ID NO: 1489253 - DNA, 25 bp, Homo sapien
tgtggcaactgagatccttcagctg

SEQ ID NO: 1489254 - DNA, 25 bp, Homo sapien
aagaagctggcgtcccttaaggagt

SEQ ID NO: 1489255 - DNA, 25 bp, Homo sapien
taaggagtgtccgtagcaccgtcaa

SEQ ID NO: 1489256 - DNA, 25 bp, Homo sapien
cacacctgtgttagagaatgttctg

SEQ ID NO: 1489257 - DNA, 25 bp, Homo sapien
tctgtgtctatgtctacaatgcctt

SEQ ID NO: 1489258 - DNA, 25 bp, Homo sapien
gtctatgtctacaatgccttttcca

SEQ ID NO: 1489259 - DNA, 25 bp, Homo sapien
ccagcctcatccaactctaactcca

SEQ ID NO: 1489260 - DNA, 25 bp, Homo sapien
ccctggcctctgtgtctatgtctac

SEQ ID NO: 1489261 - DNA, 25 bp, Homo sapien
cttctgcctcagttgctgttgagtc

SEQ ID NO: 1489262 - DNA, 25 bp, Homo sapien
agtcttccattgtgaatcccatatt

SEQ ID NO: 1489263 - DNA, 25 bp, Homo sapien
aaatgttgattgaggaacttctgcc

SEQ ID NO: 1489264 - DNA, 25 bp, Homo sapien
ctcaacaaatgttgattgaggaact

SEQ ID NO: 1489265 - DNA, 25 bp, Homo sapien
tggagcagcccgtttgcagctgtct

SEQ ID NO: 1489266 - DNA, 25 bp, Homo sapien
ttgaagtcctttgcggccccagaaa

SEQ ID NO: 1489267 - DNA, 25 bp, Homo sapien
caagcttaggttcagagccctggag

SEQ ID NO: 1489268 - DNA, 25 bp, Homo sapien
ttcatacactggtcctaaaatctgg

SEQ ID NO: 1489269 - DNA, 25 bp, Homo sapien
ctgctggaggtcatcctccctgtcc

SEQ ID NO: 1489270 - DNA, 25 bp, Homo sapien
actgctggaggtcatcctccctgtc

SEQ ID NO: 1489271 - DNA, 25 bp, Homo sapien
ggggtcaaggccagttcactgctgg

SEQ ID NO: 1489272 - DNA, 25 bp, Homo sapien
caatgtagccagtggccttccgagt

SEQ ID NO: 1489273 - DNA, 25 bp, Homo sapien
gccttccgagtgaagaagtcttggg

SEQ ID NO: 1489274 - DNA, 25 bp, Homo sapien
cttggggatcccactcacaagctgg

SEQ ID NO: 1489275 - DNA, 25 bp, Homo sapien
cagtggccttccgagtgaagaagtc

SEQ ID NO: 1489276 - DNA, 25 bp, Homo sapien
ctgttgccactgaggagatttcatg

SEQ ID NO: 1489277 - DNA, 25 bp, Homo sapien
cccacggaaggatatgagaggctgc

SEQ ID NO: 1489278 - DNA, 25 bp, Homo sapien
tgcccacggaaggatatgagaggct

SEQ ID NO: 1489279 - DNA, 25 bp, Homo sapien
cacggaaggatatgagaggctgctc

SEQ ID NO: 1489280 - DNA, 25 bp, Homo sapien
tctcggactgctcgcagtaagaggt

SEQ ID NO: 1489281 - DNA, 25 bp, Homo sapien
ccattgaacacaatcgaacagttgg

SEQ ID NO: 1489282 - DNA, 25 bp, Homo sapien
tcccacctcgatgtctcggactgct

SEQ ID NO: 1489283 - DNA, 25 bp, Homo sapien
cattgaacacaatcgaacagttggg

SEQ ID NO: 1489284 - DNA, 25 bp, Homo sapien
ctgggatataggccaacaccaactt

SEQ ID NO: 1489285 - DNA, 25 bp, Homo sapien
tataggccaacaccaacttcctgca

SEQ ID NO: 1489286 - DNA, 25 bp, Homo sapien
gatataggccaacaccaacttcctg

SEQ ID NO: 1489287 - DNA, 25 bp, Homo sapien
gggatataggccaacaccaacttcc

SEQ ID NO: 1489288 - DNA, 25 bp, Homo sapien
cattacagatggtgaaagagttgca

SEQ ID NO: 1489289 - DNA, 25 bp, Homo sapien
tacagatggtgaaagagttgcagat

SEQ ID NO: 1489290 - DNA, 25 bp, Homo sapien
cgcattacagatggtgaaagagttg

SEQ ID NO: 1489291 - DNA, 25 bp, Homo sapien
ctccgcattacagatggtgaaagag

SEQ ID NO: 1489292 - DNA, 25 bp, Homo sapien
cactggaggtcatttagtcaagcca

SEQ ID NO: 1489293 - DNA, 25 bp, Homo sapien
gcctccgtggagctcaagttctagt

SEQ ID NO: 1489294 - DNA, 25 bp, Homo sapien
tcttatgcagggacggagcagaagc

SEQ ID NO: 1489295 - DNA, 25 bp, Homo sapien
gaaagcgaagtatcccgtgactgag

SEQ ID NO: 1489296 - DNA, 25 bp, Homo sapien
atgctgtaaggttgcggggacaaag

SEQ ID NO: 1489297 - DNA, 25 bp, Homo sapien
tgctgtaaggttgcggggacaaagg

SEQ ID NO: 1489298 - DNA, 25 bp, Homo sapien
gctgtaaggttgcggggacaaaggc

SEQ ID NO: 1489299 - DNA, 25 bp, Homo sapien
ggccactccttctttggttgcccaa

SEQ ID NO: 1489300 - DNA, 25 bp, Homo sapien
aagcatgcctgatccctggatacag

SEQ ID NO: 1489301 - DNA, 25 bp, Homo sapien
tttggttgcccaagcatgcctgatc

SEQ ID NO: 1489302 - DNA, 25 bp, Homo sapien
tgatccctggatacagcccgataac

SEQ ID NO: 1489303 - DNA, 25 bp, Homo sapien
ttgtcctcaaagctctcctccacca

SEQ ID NO: 1489304 - DNA, 25 bp, Homo sapien
cctccaccaccttcctccaccgcat

SEQ ID NO: 1489305 - DNA, 25 bp, Homo sapien
tgtcctcaaagctctcctccaccac

SEQ ID NO: 1489306 - DNA, 25 bp, Homo sapien
tctcctccaccaccttcctccaccg

SEQ ID NO: 1489307 - DNA, 25 bp, Homo sapien
caactccaactagaccaaaatcttt

SEQ ID NO: 1489308 - DNA, 25 bp, Homo sapien
atatatcaactccaactagaccaaa

SEQ ID NO: 1489309 - DNA, 25 bp, Homo sapien
ctccaactagaccaaaatctttcaa

SEQ ID NO: 1489310 - DNA, 25 bp, Homo sapien
tatcaactccaactagaccaaaatc

SEQ ID NO: 1489311 - DNA, 25 bp, Homo sapien
tatagctgacagacctcttgatgtg

SEQ ID NO: 1489312 - DNA, 25 bp, Homo sapien
ggctcaacattatatcctaagattc

SEQ ID NO: 1489313 - DNA, 25 bp, Homo sapien
aatgaccctatgttcattactaggt

SEQ ID NO: 1489314 - DNA, 25 bp, Homo sapien
tgtgtcttctaggaggcgcttatga

SEQ ID NO: 1489315 - DNA, 25 bp, Homo sapien
taacgtcaacgtttctctcagcatg

SEQ ID NO: 1489316 - DNA, 25 bp, Homo sapien
ttccctagcgttgctgtatttctta

SEQ ID NO: 1489317 - DNA, 25 bp, Homo sapien
gtatttcttacacccgcttggattc

SEQ ID NO: 1489318 - DNA, 25 bp, Homo sapien
tctctaacttgagctatcatttcac

SEQ ID NO: 1489319 - DNA, 25 bp, Homo sapien
cactcgctgctcaggatatattgtg

SEQ ID NO: 1489320 - DNA, 25 bp, Homo sapien
atattgtgtctatacttgagtaggc

SEQ ID NO: 1489321 - DNA, 25 bp, Homo sapien
cgctgctcaggatatattgtgtcta

SEQ ID NO: 1489322 - DNA, 25 bp, Homo sapien
gcccactcgctgctcaggatatatt

SEQ ID NO: 1489323 - DNA, 25 bp, Homo sapien
catgggctcactagaagactgagac

SEQ ID NO: 1489324 - DNA, 25 bp, Homo sapien
taaagacgtaaccaatgctggctaa

SEQ ID NO: 1489325 - DNA, 25 bp, Homo sapien
gcagggcctcgcagtgagtatcaga

SEQ ID NO: 1489326 - DNA, 25 bp, Homo sapien
gacccactcacaggactacaggaga

SEQ ID NO: 1489327 - DNA, 25 bp, Homo sapien
cttcatcataattatttttccgcat

SEQ ID NO: 1489328 - DNA, 25 bp, Homo sapien
tcttcttcatcataattatttttcc

SEQ ID NO: 1489329 - DNA, 25 bp, Homo sapien
ttcttcatcataattatttttccgc

SEQ ID NO: 1489330 - DNA, 25 bp, Homo sapien
ctttcttcttcatcataattatttt

SEQ ID NO: 1489331 - DNA, 25 bp, Homo sapien
taagaattagagacaattaggtaaa

SEQ ID NO: 1489332 - DNA, 25 bp, Homo sapien
gtagcttctgtagcgagcctctgca

SEQ ID NO: 1489333 - DNA, 25 bp, Homo sapien
gtaaaattcaaagaaccgtggctga

SEQ ID NO: 1489334 - DNA, 25 bp, Homo sapien
ataagcaaacggcacctgcccactt

SEQ ID NO: 1489335 - DNA, 25 bp, Homo sapien
tggagccgtgaatcagcagtggcag

SEQ ID NO: 1489336 - DNA, 25 bp, Homo sapien
cttggagccgtgaatcagcagtggc

SEQ ID NO: 1489337 - DNA, 25 bp, Homo sapien
tccttggagccgtgaatcagcagtg

SEQ ID NO: 1489338 - DNA, 25 bp, Homo sapien
ttccttggagccgtgaatcagcagt

SEQ ID NO: 1489339 - DNA, 25 bp, Homo sapien
ctgaggaaaaccaagatgtgggctg

SEQ ID NO: 1489340 - DNA, 25 bp, Homo sapien
gaggaaaaccaagatgtgggctggc

SEQ ID NO: 1489341 - DNA, 25 bp, Homo sapien
aggaaaaccaagatgtgggctggct

SEQ ID NO: 1489342 - DNA, 25 bp, Homo sapien
gaaaaccaagatgtgggctggctgg

SEQ ID NO: 1489343 - DNA, 25 bp, Homo sapien
aagacacagtcacggcagcggacag

SEQ ID NO: 1489344 - DNA, 25 bp, Homo sapien
aaacaagacacagtcacggcagcgg

SEQ ID NO: 1489345 - DNA, 25 bp, Homo sapien
acaagacacagtcacggcagcggac

SEQ ID NO: 1489346 - DNA, 25 bp, Homo sapien
gaaacaagacacagtcacggcagcg

SEQ ID NO: 1489347 - DNA, 25 bp, Homo sapien
aaattcaaagcatggcattcctcca

SEQ ID NO: 1489348 - DNA, 25 bp, Homo sapien
gaaattcaaagcatggcattcctcc

SEQ ID NO: 1489349 - DNA, 25 bp, Homo sapien
ggctggacaataacacagtctgtag

SEQ ID NO: 1489350 - DNA, 25 bp, Homo sapien
ttgccaacccatcttcaaccttata

SEQ ID NO: 1489351 - DNA, 25 bp, Homo sapien
ctacaagtatgattcccacaagcac

SEQ ID NO: 1489352 - DNA, 25 bp, Homo sapien
cccatcttcaaccttatagggtgca

SEQ ID NO: 1489353 - DNA, 25 bp, Homo sapien
tcttcaaccttatagggtgcagatg

SEQ ID NO: 1489354 - DNA, 25 bp, Homo sapien
tatggaagagacagtgtctggcttc

SEQ ID NO: 1489355 - DNA, 25 bp, Homo sapien
ggaagagacagtgtctggcttcatc

SEQ ID NO: 1489356 - DNA, 25 bp, Homo sapien
ctatggaagagacagtgtctggctt

SEQ ID NO: 1489357 - DNA, 25 bp, Homo sapien
tggaagagacagtgtctggcttcat

SEQ ID NO: 1489358 - DNA, 25 bp, Homo sapien
ggaacaagtcataagtccactgaga

SEQ ID NO: 1489359 - DNA, 25 bp, Homo sapien
actccggtctgacgggcaagatgac

SEQ ID NO: 1489360 - DNA, 25 bp, Homo sapien
cactgagaagcgcatgccagttgtg

SEQ ID NO: 1489361 - DNA, 25 bp, Homo sapien
atgccagttgtgaggagactccggt

SEQ ID NO: 1489362 - DNA, 25 bp, Homo sapien
tcacttgaaagtcaaccaatgaatg

SEQ ID NO: 1489363 - DNA, 25 bp, Homo sapien
ccaatgaatgagcaccagggtgaag

SEQ ID NO: 1489364 - DNA, 25 bp, Homo sapien
aagtcaaccaatgaatgagcaccag

SEQ ID NO: 1489365 - DNA, 25 bp, Homo sapien
cagccacagtacctgcaagagtcca

SEQ ID NO: 1489366 - DNA, 25 bp, Homo sapien
cttaaaactgatgagcgagttggag

SEQ ID NO: 1489367 - DNA, 25 bp, Homo sapien
ctgatgagcgagttggagggactgg

SEQ ID NO: 1489368 - DNA, 25 bp, Homo sapien
gagggactgggatgttggaggggct

SEQ ID NO: 1489369 - DNA, 25 bp, Homo sapien
aaactgatgagcgagttggagggac

SEQ ID NO: 1489370 - DNA, 25 bp, Homo sapien
caaaactgccctgtctttcagccca

SEQ ID NO: 1489371 - DNA, 25 bp, Homo sapien
ctgtctcgcctaacaaaactgccct

SEQ ID NO: 1489372 - DNA, 25 bp, Homo sapien
acaaaactgccctgtctttcagccc

SEQ ID NO: 1489373 - DNA, 25 bp, Homo sapien
taaggcccgaagctgaggacagaaa

SEQ ID NO: 1489374 - DNA, 25 bp, Homo sapien
gggattatcaggcagcactctgcta

SEQ ID NO: 1489375 - DNA, 25 bp, Homo sapien
gacagaaagtgatcaactccccaca

SEQ ID NO: 1489376 - DNA, 25 bp, Homo sapien
tcccaatccgtagaaagcaagactc

SEQ ID NO: 1489377 - DNA, 25 bp, Homo sapien
tgatgccaaagaaagactactgtcc

SEQ ID NO: 1489378 - DNA, 25 bp, Homo sapien
tactgtcctacgaagacagccatct

SEQ ID NO: 1489379 - DNA, 25 bp, Homo sapien
agtgtttaagtcatagtccctacca

SEQ ID NO: 1489380 - DNA, 25 bp, Homo sapien
tcctaatggtatcacaagcgatgtg

SEQ ID NO: 1489381 - DNA, 25 bp, Homo sapien
cttatccacagacgcacagagcggt

SEQ ID NO: 1489382 - DNA, 25 bp, Homo sapien
cttgcctaggatgtctaagggctct

SEQ ID NO: 1489383 - DNA, 25 bp, Homo sapien
gaaacatcagttaccacttgcctag

SEQ ID NO: 1489384 - DNA, 25 bp, Homo sapien
tctgaaaggcctcggagaaactgtg

SEQ ID NO: 1489385 - DNA, 25 bp, Homo sapien
taaggcaagtctctccaatcaggtc

SEQ ID NO: 1489386 - DNA, 25 bp, Homo sapien
cagatggccagagccgtaaggcaag

SEQ ID NO: 1489387 - DNA, 25 bp, Homo sapien
gtgaccccaggcagagtaactagaa

SEQ ID NO: 1489388 - DNA, 25 bp, Homo sapien
taacaacgcaaaaggcaatactggt

SEQ ID NO: 1489389 - DNA, 25 bp, Homo sapien
gataccagctaccaattgcttgctg

SEQ ID NO: 1489390 - DNA, 25 bp, Homo sapien
tggccgtcagtatcattatccactg

SEQ ID NO: 1489391 - DNA, 25 bp, Homo sapien
gaagaactaagtttttcatcagaca

SEQ ID NO: 1489392 - DNA, 25 bp, Homo sapien
aatgaaactgatactggccgtcagt

SEQ ID NO: 1489393 - DNA, 25 bp, Homo sapien
cttgctctcagtaggacaaaggcag

SEQ ID NO: 1489394 - DNA, 25 bp, Homo sapien
tgctctcagtaggacaaaggcaggc

SEQ ID NO: 1489395 - DNA, 25 bp, Homo sapien
gctctcagtaggacaaaggcaggca

SEQ ID NO: 1489396 - DNA, 25 bp, Homo sapien
caagaaatcttgctctcagtaggac

SEQ ID NO: 1489397 - DNA, 25 bp, Homo sapien
cctaggttaagagggacactgatcg

SEQ ID NO: 1489398 - DNA, 25 bp, Homo sapien
tgggttctgtgttgcttcgacattc

SEQ ID NO: 1489399 - DNA, 25 bp, Homo sapien
aactgtgacataatcagcgtttcct

SEQ ID NO: 1489400 - DNA, 25 bp, Homo sapien
gacctcttggaaggtttgactggta

SEQ ID NO: 1489401 - DNA, 25 bp, Homo sapien
tgcgacctgaggcaacttacataac

SEQ ID NO: 1489402 - DNA, 25 bp, Homo sapien
tgagaactacagtgcacagcgaggg

SEQ ID NO: 1489403 - DNA, 25 bp, Homo sapien
gactttgacacacactaacagtgcg

SEQ ID NO: 1489404 - DNA, 25 bp, Homo sapien
gttctggagccacgcagccttgctt

SEQ ID NO: 1489405 - DNA, 25 bp, Homo sapien
cagtatccacggtgaatgagaacag

SEQ ID NO: 1489406 - DNA, 25 bp, Homo sapien
ggtttcagtatccacggtgaatgag

SEQ ID NO: 1489407 - DNA, 25 bp, Homo sapien
tcagtatccacggtgaatgagaaca

SEQ ID NO: 1489408 - DNA, 25 bp, Homo sapien
ttcagtatccacggtgaatgagaac

SEQ ID NO: 1489409 - DNA, 25 bp, Homo sapien
aagtggacagcatctaggaaggaga

SEQ ID NO: 1489410 - DNA, 25 bp, Homo sapien
tgcctgaacaacaaaaggttaaaga

SEQ ID NO: 1489411 - DNA, 25 bp, Homo sapien
gtggacagcatctaggaagagagat

SEQ ID NO: 1489412 - DNA, 25 bp, Homo sapien
aaaaagaggaacctcattctgcctg

SEQ ID NO: 1489413 - DNA, 25 bp, Homo sapien
tttgcagcaacaggaatgagcccga

SEQ ID NO: 1489414 - DNA, 25 bp, Homo sapien
tacagacatgatggagtactattca

SEQ ID NO: 1489415 - DNA, 25 bp, Homo sapien
ccccaatgcgtattgcagcactatt

SEQ ID NO: 1489416 - DNA, 25 bp, Homo sapien
caccactctactttcacgcatgaag

SEQ ID NO: 1489417 - DNA, 25 bp, Homo sapien
gagagctcatatccgagtcctggct

SEQ ID NO: 1489418 - DNA, 25 bp, Homo sapien
tctgagcattaccagccatgagctg

SEQ ID NO: 1489419 - DNA, 25 bp, Homo sapien
tgcctgccctagcactgaaggagag

SEQ ID NO: 1489420 - DNA, 25 bp, Homo sapien
cagacagaacgggatggagagctca

SEQ ID NO: 1489421 - DNA, 25 bp, Homo sapien
atgttccctgtagttgaaataaacg

SEQ ID NO: 1489422 - DNA, 25 bp, Homo sapien
cccaggatgactgctgtgccactca

SEQ ID NO: 1489423 - DNA, 25 bp, Homo sapien
tctgagttgaagtaaaccgaaagga

SEQ ID NO: 1489424 - DNA, 25 bp, Homo sapien
cagcaggacgggactgtcgtttcac

SEQ ID NO: 1489425 - DNA, 25 bp, Homo sapien
tatccgaatcgcattaattggaaca

SEQ ID NO: 1489426 - DNA, 25 bp, Homo sapien
cattaattggaacatcttgtcacag

SEQ ID NO: 1489427 - DNA, 25 bp, Homo sapien
tggaacatcttgtcacaggataaga

SEQ ID NO: 1489428 - DNA, 25 bp, Homo sapien
tacgggcagacagatgtatccgaat

SEQ ID NO: 1489429 - DNA, 25 bp, Homo sapien
tgtaccttaagctagtcagaccatg

SEQ ID NO: 1489430 - DNA, 25 bp, Homo sapien
aactttcgacggaaggctgagacac

SEQ ID NO: 1489431 - DNA, 25 bp, Homo sapien
caatcccagggatagtaatagcttc

SEQ ID NO: 1489432 - DNA, 25 bp, Homo sapien
catttgcaggtctccgagcgtcaca

SEQ ID NO: 1489433 - DNA, 25 bp, Homo sapien
ctgggtttggactgtggcatacgac

SEQ ID NO: 1489434 - DNA, 25 bp, Homo sapien
ggcatacgacgagaggatttggcta

SEQ ID NO: 1489435 - DNA, 25 bp, Homo sapien
tttttgtccaaacaggaggcgatag

SEQ ID NO: 1489436 - DNA, 25 bp, Homo sapien
tattaattaaggaagcgagactggg

SEQ ID NO: 1489437 - DNA, 25 bp, Homo sapien
aaataaatgaaagggccagcctcag

SEQ ID NO: 1489438 - DNA, 25 bp, Homo sapien
tagagactaagagcatggcctttgg

SEQ ID NO: 1489439 - DNA, 25 bp, Homo sapien
ttttaacaagtgacatccaagtagg

SEQ ID NO: 1489440 - DNA, 25 bp, Homo sapien
gacggcatgtgatcagacaactctg

SEQ ID NO: 1489441 - DNA, 25 bp, Homo sapien
gcaggaagatcgcttgataccagga

SEQ ID NO: 1489442 - DNA, 25 bp, Homo sapien
aagatcgcttgataccaggagttga

SEQ ID NO: 1489443 - DNA, 25 bp, Homo sapien
tcgcttgataccaggagttgaagac

SEQ ID NO: 1489444 - DNA, 25 bp, Homo sapien
gaggcaggaagatcgcttgatacca

SEQ ID NO: 1489445 - DNA, 25 bp, Homo sapien
catttctaatggactgcaaattcac

SEQ ID NO: 1489446 - DNA, 25 bp, Homo sapien
gcacccggcccacaactccacattt

SEQ ID NO: 1489447 - DNA, 25 bp, Homo sapien
aactccacatttctaatggactgca

SEQ ID NO: 1489448 - DNA, 25 bp, Homo sapien
ggcccacaactccacatttctaatg

SEQ ID NO: 1489449 - DNA, 25 bp, Homo sapien
gtaaacgagggaggcaatagatcct

SEQ ID NO: 1489450 - DNA, 25 bp, Homo sapien
gggtctgatgttacagccaactcaa

SEQ ID NO: 1489451 - DNA, 25 bp, Homo sapien
gcagaggcagggataataaaacaca

SEQ ID NO: 1489452 - DNA, 25 bp, Homo sapien
aagtaaacgagggaggcaatagatc

SEQ ID NO: 1489453 - DNA, 25 bp, Homo sapien
gagttgcgggacaaggtatgagttg

SEQ ID NO: 1489454 - DNA, 25 bp, Homo sapien
tgggagttgcgggacaaggtatgag

SEQ ID NO: 1489455 - DNA, 25 bp, Homo sapien
tggggagtgggagttgcgggacaag

SEQ ID NO: 1489456 - DNA, 25 bp, Homo sapien
ggagtgggagttgcgggacaaggta

SEQ ID NO: 1489457 - DNA, 25 bp, Homo sapien
tcagcatcatgtggcaggaaaaccg

SEQ ID NO: 1489458 - DNA, 25 bp, Homo sapien
tcaataccagcagtaagggcgactc

SEQ ID NO: 1489459 - DNA, 25 bp, Homo sapien
tcctggtacaaataatagctgcgcc

SEQ ID NO: 1489460 - DNA, 25 bp, Homo sapien
tacaggctgttgtatgtgcaccaag

SEQ ID NO: 1489461 - DNA, 25 bp, Homo sapien
gaagggggacaaatggtcctcagca

SEQ ID NO: 1489462 - DNA, 25 bp, Homo sapien
agggggacaaatggtcctcagcaag

SEQ ID NO: 1489463 - DNA, 25 bp, Homo sapien
caggaagggggacaaatggtcctca

SEQ ID NO: 1489464 - DNA, 25 bp, Homo sapien
ggaagggggacaaatggtcctcagc

SEQ ID NO: 1489465 - DNA, 25 bp, Homo sapien
cactgtggatgcatcgtgtagttct

SEQ ID NO: 1489466 - DNA, 25 bp, Homo sapien
gggagggattcgtgtgctttccact

SEQ ID NO: 1489467 - DNA, 25 bp, Homo sapien
ttcgtgtgctttccgctgtgctcac

SEQ ID NO: 1489468 - DNA, 25 bp, Homo sapien
tgtgctcactgtcgctgcatcgtgt

SEQ ID NO: 1489469 - DNA, 25 bp, Homo sapien
tgtgctcactgtggatgcatcgtgt

SEQ ID NO: 1489470 - DNA, 25 bp, Homo sapien
tgtgctttccgctgtgctcactgtg

SEQ ID NO: 1489471 - DNA, 25 bp, Homo sapien
tgtgctcactgtcgctgcatcgtgt

SEQ ID NO: 1489472 - DNA, 25 bp, Homo sapien
gggagggattcgtgtgctttccact

SEQ ID NO: 1489473 - DNA, 25 bp, Homo sapien
ctggggagggattcgtgtgccttcc

SEQ ID NO: 1489474 - DNA, 25 bp, Homo sapien
agggattcgtgtgccttccactgtg

SEQ ID NO: 1489475 - DNA, 25 bp, Homo sapien
ttccactgtgctcactgtggctgca

SEQ ID NO: 1489476 - DNA, 25 bp, Homo sapien
ccactgtgctcactgtggctgcatc

SEQ ID NO: 1489477 - DNA, 25 bp, Homo sapien
catttattttaactgctcccactag

SEQ ID NO: 1489478 - DNA, 25 bp, Homo sapien
gctctttctggctcatttattttaa

SEQ ID NO: 1489479 - DNA, 25 bp, Homo sapien
ttattttaactgctcccactagcat

SEQ ID NO: 1489480 - DNA, 25 bp, Homo sapien
tctttctggctcatttattttaact

SEQ ID NO: 1489481 - DNA, 25 bp, Homo sapien
catcatatgtacagcttcactggga

SEQ ID NO: 1489482 - DNA, 25 bp, Homo sapien
aatgtgatcattctggccaataggc

SEQ ID NO: 1489483 - DNA, 25 bp, Homo sapien
tgtgccagagtacaccacgcatttt

SEQ ID NO: 1489484 - DNA, 25 bp, Homo sapien
ttttggaactagatggcacagagca

SEQ ID NO: 1489485 - DNA, 25 bp, Homo sapien
ctatgtagagagaagtagacataag

SEQ ID NO: 1489486 - DNA, 25 bp, Homo sapien
ctgttactgtgtctatgtagagaga

SEQ ID NO: 1489487 - DNA, 25 bp, Homo sapien
tgtgacagtctgaaatatggcctcc

SEQ ID NO: 1489488 - DNA, 25 bp, Homo sapien
cagtctgaaatatggcctcctggga

SEQ ID NO: 1489489 - DNA, 25 bp, Homo sapien
aaatgcccgataatgatcgataaat

SEQ ID NO: 1489490 - DNA, 25 bp, Homo sapien
cccagaaatgcccgataatgatcga

SEQ ID NO: 1489491 - DNA, 25 bp, Homo sapien
cagaaatgcccgataatgatcgata

SEQ ID NO: 1489492 - DNA, 25 bp, Homo sapien
gaaatgcccgataatgatcgataaa

SEQ ID NO: 1489493 - DNA, 25 bp, Homo sapien
catgcagtgacatagagacctgaac

SEQ ID NO: 1489494 - DNA, 25 bp, Homo sapien
ggtgccctccctatacccagaagaa

SEQ ID NO: 1489495 - DNA, 25 bp, Homo sapien
caaaggaccctaatgtgtgaggtgc

SEQ ID NO: 1489496 - DNA, 25 bp, Homo sapien
gtgaccatctgccacaatgccagag

SEQ ID NO: 1489497 - DNA, 25 bp, Homo sapien
ccctcgcccttccgacaggcccagt

SEQ ID NO: 1489498 - DNA, 25 bp, Homo sapien
acacattagcaatttttcctgatgc

SEQ ID NO: 1489499 - DNA, 25 bp, Homo sapien
ctcgcccttccgacaggcccagtgt

SEQ ID NO: 1489500 - DNA, 25 bp, Homo sapien
cacattagcaatttttcctgatgct

SEQ ID NO: 1489501 - DNA, 25 bp, Homo sapien
gaaattccatgaagtagtccaacta

SEQ ID NO: 1489502 - DNA, 25 bp, Homo sapien
taagtctgaggacattgattagtgc

SEQ ID NO: 1489503 - DNA, 25 bp, Homo sapien
taaaagttaagagtaatcacgcctg

SEQ ID NO: 1489504 - DNA, 25 bp, Homo sapien
tcagtacaatatccccaaaagtttg

SEQ ID NO: 1489505 - DNA, 25 bp, Homo sapien
tgtgtaggtaattacttgaccttat

SEQ ID NO: 1489506 - DNA, 25 bp, Homo sapien
gcccagccactcgaccctactttta

SEQ ID NO: 1489507 - DNA, 25 bp, Homo sapien
cattgattattgtgtaggtaattac

SEQ ID NO: 1489508 - DNA, 25 bp, Homo sapien
taagcccagccactcgaccctactt

SEQ ID NO: 1489509 - DNA, 25 bp, Homo sapien
caaattcctggtttactagaagtcg

SEQ ID NO: 1489510 - DNA, 25 bp, Homo sapien
agtcggtgtagcgtgtgtttcacta

SEQ ID NO: 1489511 - DNA, 25 bp, Homo sapien
tactagaagtcggtgtagcgtgtgt

SEQ ID NO: 1489512 - DNA, 25 bp, Homo sapien
tagcgtgtgtttcactatcctgcat

SEQ ID NO: 1489513 - DNA, 25 bp, Homo sapien
acatatcatcgcatcaatgatgccc

SEQ ID NO: 1489514 - DNA, 25 bp, Homo sapien
tgggcttccaaagccccgtgcacat

SEQ ID NO: 1489515 - DNA, 25 bp, Homo sapien
ctcagctgaactgcaggctcctctt

SEQ ID NO: 1489516 - DNA, 25 bp, Homo sapien
cttgcgggtggctagcacaaataca

SEQ ID NO: 1489517 - DNA, 25 bp, Homo sapien
tgtgtcttgcgcatcaatctcagag

SEQ ID NO: 1489518 - DNA, 25 bp, Homo sapien
tgtagacagtctcattacctacttg

SEQ ID NO: 1489519 - DNA, 25 bp, Homo sapien
cagctgtgggctcgcagaacctctg

SEQ ID NO: 1489520 - DNA, 25 bp, Homo sapien
gagcaagcagaatagatgatctgaa

SEQ ID NO: 1489521 - DNA, 25 bp, Homo sapien
caatatcccgaacaatcaagcttca

SEQ ID NO: 1489522 - DNA, 25 bp, Homo sapien
cactgagtcctagcactgtcaccaa

SEQ ID NO: 1489523 - DNA, 25 bp, Homo sapien
taagtatttatggacagcccagcac

SEQ ID NO: 1489524 - DNA, 25 bp, Homo sapien
gctgatgagatgatcctaacgggtg

SEQ ID NO: 1489525 - DNA, 25 bp, Homo sapien
taactgcaatgctagtatgaccctt

SEQ ID NO: 1489526 - DNA, 25 bp, Homo sapien
tgcttaaaatgctcccagactcgcc

SEQ ID NO: 1489527 - DNA, 25 bp, Homo sapien
caatggcttagtgaagacaggacct

SEQ ID NO: 1489528 - DNA, 25 bp, Homo sapien
tatgcggttaggttcttgttctcaa

SEQ ID NO: 1489529 - DNA, 25 bp, Homo sapien
taatggccagcacaatcccactgaa

SEQ ID NO: 1489530 - DNA, 25 bp, Homo sapien
tgccatatagaacccagcctctgag

SEQ ID NO: 1489531 - DNA, 25 bp, Homo sapien
tctcttgttttcaccggctagcacg

SEQ ID NO: 1489532 - DNA, 25 bp, Homo sapien
tcctaacagtattctaggccaggca

SEQ ID NO: 1489533 - DNA, 25 bp, Homo sapien
gctaattttgctacggctcctgtga

SEQ ID NO: 1489534 - DNA, 25 bp, Homo sapien
tttaaaacgtgagctacctgagggc

SEQ ID NO: 1489535 - DNA, 25 bp, Homo sapien
ctgctgtatttaagtgcctgtcctc

SEQ ID NO: 1489536 - DNA, 25 bp, Homo sapien
tgttataatacagaaggccccatca

SEQ ID NO: 1489537 - DNA, 25 bp, Homo sapien
tatacaaagactagaacggtgctac

SEQ ID NO: 1489538 - DNA, 25 bp, Homo sapien
aatttctacagcaatgtgacacggc

SEQ ID NO: 1489539 - DNA, 25 bp, Homo sapien
gcatgctgttcaccagagactgttg

SEQ ID NO: 1489540 - DNA, 25 bp, Homo sapien
catttactgtgaaacatccctggta

SEQ ID NO: 1489541 - DNA, 25 bp, Homo sapien
tcatcaatgttatcagcatctggaa

SEQ ID NO: 1489542 - DNA, 25 bp, Homo sapien
ttcatcaatgttatcagcatctgga

SEQ ID NO: 1489543 - DNA, 25 bp, Homo sapien
aagccctctggcctatgtggagcca

SEQ ID NO: 1489544 - DNA, 25 bp, Homo sapien
agccctctggcctatgtggagccat

SEQ ID NO: 1489545 - DNA, 25 bp, Homo sapien
gagtagccctacagcagtcacttcg

SEQ ID NO: 1489546 - DNA, 25 bp, Homo sapien
gaccagcttactgaagagtagccct

SEQ ID NO: 1489547 - DNA, 25 bp, Homo sapien
ggaactgtaccatgttacaaacgta

SEQ ID NO: 1489548 - DNA, 25 bp, Homo sapien
gctagctcaagggaaaacaacgtta

SEQ ID NO: 1489549 - DNA, 25 bp, Homo sapien
cagaagttgacttaagatacagtgt

SEQ ID NO: 1489550 - DNA, 25 bp, Homo sapien
gaaatagcagtgttgattatctctc

SEQ ID NO: 1489551 - DNA, 25 bp, Homo sapien
aaaatgaaagagtccaaaattcatc

SEQ ID NO: 1489552 - DNA, 25 bp, Homo sapien
taaaattaatagcagctcatactga

SEQ ID NO: 1489553 - DNA, 25 bp, Homo sapien
tgagctcgaaggaaagacatacttc

SEQ ID NO: 1489554 - DNA, 25 bp, Homo sapien
gagtggtaacatataataaaagacc

SEQ ID NO: 1489555 - DNA, 25 bp, Homo sapien
gacatacttcgatggagtggtaaca

SEQ ID NO: 1489556 - DNA, 25 bp, Homo sapien
aagttcagctgaggaccacgattta

SEQ ID NO: 1489557 - DNA, 25 bp, Homo sapien
ctttcgacattcagcgccatttcct

SEQ ID NO: 1489558 - DNA, 25 bp, Homo sapien
tttcgacattcagcgccatttcctt

SEQ ID NO: 1489559 - DNA, 25 bp, Homo sapien
attcagcgccatttcctttgactcc

SEQ ID NO: 1489560 - DNA, 25 bp, Homo sapien
gacattcagcgccatttcctttgac

SEQ ID NO: 1489561 - DNA, 25 bp, Homo sapien
tgttgctgccttcaatgaacctgag

SEQ ID NO: 1489562 - DNA, 25 bp, Homo sapien
caggcttggcaatcaggtgaccgag

SEQ ID NO: 1489563 - DNA, 25 bp, Homo sapien
cattcagtaagtagcgtaagcctct

SEQ ID NO: 1489564 - DNA, 25 bp, Homo sapien
catctaactcaaaaggctgtcagga

SEQ ID NO: 1489565 - DNA, 25 bp, Homo sapien
cccaaggattcaggcgtatgtaggc

SEQ ID NO: 1489566 - DNA, 25 bp, Homo sapien
tacagaggtattttcagagcctagc

SEQ ID NO: 1489567 - DNA, 25 bp, Homo sapien
tcaaccccagaagtagattcaatac

SEQ ID NO: 1489568 - DNA, 25 bp, Homo sapien
caaacatcacttgattagatgagca

SEQ ID NO: 1489569 - DNA, 25 bp, Homo sapien
tgggtgaggtagaaccaatgctgtc

SEQ ID NO: 1489570 - DNA, 25 bp, Homo sapien
gaaagactgacacgttataatgctc

SEQ ID NO: 1489571 - DNA, 25 bp, Homo sapien
tgctttcaagaaacgtagtcgagaa

SEQ ID NO: 1489572 - DNA, 25 bp, Homo sapien
tctgtgctcccacgcattgggtgag

SEQ ID NO: 1489573 - DNA, 25 bp, Homo sapien
ccggtgtcatcactggaaaagagct

SEQ ID NO: 1489574 - DNA, 25 bp, Homo sapien
tacctatgtagagcactgaccatga

SEQ ID NO: 1489575 - DNA, 25 bp, Homo sapien
tacaagttgctctccgtgaatgagc

SEQ ID NO: 1489576 - DNA, 25 bp, Homo sapien
cacctgagagtactggagtcatgtc

SEQ ID NO: 1489577 - DNA, 25 bp, Homo sapien
cactttgatagaactggcagtaccg

SEQ ID NO: 1489578 - DNA, 25 bp, Homo sapien
tataaacgagcaacacagtcatttc

SEQ ID NO: 1489579 - DNA, 25 bp, Homo sapien
taataccaggttcaccacaaacacg

SEQ ID NO: 1489580 - DNA, 25 bp, Homo sapien
caggtggtagaaagttccccgctct

SEQ ID NO: 1489581 - DNA, 25 bp, Homo sapien
ccagagaacagcacggtgggtgaat

SEQ ID NO: 1489582 - DNA, 25 bp, Homo sapien
tgaaagccctcagaaaaagacccaa

SEQ ID NO: 1489583 - DNA, 25 bp, Homo sapien
gagagtctggcactgtcaatgtcca

SEQ ID NO: 1489584 - DNA, 25 bp, Homo sapien
gaaaacttgacctgtgagagtctgg

SEQ ID NO: 1489585 - DNA, 25 bp, Homo sapien
agtcattatgcaagaggtctcacgg

SEQ ID NO: 1489586 - DNA, 25 bp, Homo sapien
cagggcaaaaggttcacaacagcag

SEQ ID NO: 1489587 - DNA, 25 bp, Homo sapien
cacaggcacagttacctcgcaggag

SEQ ID NO: 1489588 - DNA, 25 bp, Homo sapien
tcctcagccaagtcgtgggaaaggc

SEQ ID NO: 1489589 - DNA, 25 bp, Homo sapien
cccttgtacaggagccatactaatc

SEQ ID NO: 1489590 - DNA, 25 bp, Homo sapien
tctctgtctcattctaattttttag

SEQ ID NO: 1489591 - DNA, 25 bp, Homo sapien
tctgtctcattctaattttttagta

SEQ ID NO: 1489592 - DNA, 25 bp, Homo sapien
ttgcatgtcacccttgtacaggagc

SEQ ID NO: 1489593 - DNA, 25 bp, Homo sapien
tgtgctatccaaaaggtagtcacta

SEQ ID NO: 1489594 - DNA, 25 bp, Homo sapien
cattatctcacgagtagacatgcca

SEQ ID NO: 1489595 - DNA, 25 bp, Homo sapien
gctatccaaaaggtagtcactaacc

SEQ ID NO: 1489596 - DNA, 25 bp, Homo sapien
gacatgccaaacctagccatctaga

SEQ ID NO: 1489597 - DNA, 25 bp, Homo sapien
tctgctatcgatgcccactccgacc

SEQ ID NO: 1489598 - DNA, 25 bp, Homo sapien
gcaaagtcagggctgagtccgggca

SEQ ID NO: 1489599 - DNA, 25 bp, Homo sapien
tatcgatgcccactccgacctggga

SEQ ID NO: 1489600 - DNA, 25 bp, Homo sapien
ccactccgacctgggagcaaagtca

SEQ ID NO: 1489601 - DNA, 25 bp, Homo sapien
gaacgggagctcagtatagcaatca

SEQ ID NO: 1489602 - DNA, 25 bp, Homo sapien
tacgttagactatactggtggcaaa

SEQ ID NO: 1489603 - DNA, 25 bp, Homo sapien
tagatggctggacatacgaacggga

SEQ ID NO: 1489604 - DNA, 25 bp, Homo sapien
tttttgtactgagcacttgactggg

SEQ ID NO: 1489605 - DNA, 25 bp, Homo sapien
ttgcctataggtcaagctgacagca

SEQ ID NO: 1489606 - DNA, 25 bp, Homo sapien
gatctctttcctggtccattgccta

SEQ ID NO: 1489607 - DNA, 25 bp, Homo sapien
tagcaacagttgatggcacttgacc

SEQ ID NO: 1489608 - DNA, 25 bp, Homo sapien
tgtgtggtactcctacccgaggctc

SEQ ID NO: 1489609 - DNA, 25 bp, Homo sapien
gagaagcactccttcaatccacact

SEQ ID NO: 1489610 - DNA, 25 bp, Homo sapien
cacacagaggagaagcactccttca

SEQ ID NO: 1489611 - DNA, 25 bp, Homo sapien
cactgtgatgaacatataccacaca

SEQ ID NO: 1489612 - DNA, 25 bp, Homo sapien
cactccttcaatccacactgtgatg

SEQ ID NO: 1489613 - DNA, 25 bp, Homo sapien
gagaagcactccttcaatccacact

SEQ ID NO: 1489614 - DNA, 25 bp, Homo sapien
cacacagaggagaagcactccttca

SEQ ID NO: 1489615 - DNA, 25 bp, Homo sapien
cactccttcaatccacactgtgatg

SEQ ID NO: 1489616 - DNA, 25 bp, Homo sapien
cactgtgatgaacatataccacaca

SEQ ID NO: 1489617 - DNA, 25 bp, Homo sapien
ctttcttacatctcagattatcttc

SEQ ID NO: 1489618 - DNA, 25 bp, Homo sapien
tcattgcagaaactccttacatata

SEQ ID NO: 1489619 - DNA, 25 bp, Homo sapien
cattgcagaaactccttacatatat

SEQ ID NO: 1489620 - DNA, 25 bp, Homo sapien
ttcattgcagaaactccttacatat

SEQ ID NO: 1489621 - DNA, 25 bp, Homo sapien
attgcagaaactccttacatatatt

SEQ ID NO: 1489622 - DNA, 25 bp, Homo sapien
gagagacgaactgtgcaagtagaga

SEQ ID NO: 1489623 - DNA, 25 bp, Homo sapien
tagagatgcctgatgagcgtcacac

SEQ ID NO: 1489624 - DNA, 25 bp, Homo sapien
caacgttttcggtggatagtcacga

SEQ ID NO: 1489625 - DNA, 25 bp, Homo sapien
tgcaatattccagcaggacagtgtg

SEQ ID NO: 1489626 - DNA, 25 bp, Homo sapien
tttattaagaaagaggcagacatct

SEQ ID NO: 1489627 - DNA, 25 bp, Homo sapien
cagaaatactgggaataaaagtatt

SEQ ID NO: 1489628 - DNA, 25 bp, Homo sapien
tttttgaaacatgtagatcctcttt

SEQ ID NO: 1489629 - DNA, 25 bp, Homo sapien
tctcacacttaggaaaatctcaacc

SEQ ID NO: 1489630 - DNA, 25 bp, Homo sapien
tgcctttgttcttacggtatgatcc

SEQ ID NO: 1489631 - DNA, 25 bp, Homo sapien
tgccagaaaagtcacagctaaagtt

SEQ ID NO: 1489632 - DNA, 25 bp, Homo sapien
tatttgagtagctagggctcctgtt

SEQ ID NO: 1489633 - DNA, 25 bp, Homo sapien
tgaggactctggacattgctctagt

SEQ ID NO: 1489634 - DNA, 25 bp, Homo sapien
atttgggcaggtcgtttgttcccat

SEQ ID NO: 1489635 - DNA, 25 bp, Homo sapien
tcacaaaacacacgctgggctctca

SEQ ID NO: 1489636 - DNA, 25 bp, Homo sapien
cacacactcattttcggattttgaa

SEQ ID NO: 1489637 - DNA, 25 bp, Homo sapien
cactcattttcggattttgaaggga

SEQ ID NO: 1489638 - DNA, 25 bp, Homo sapien
tcaattaccggtcagtatgtaagta

SEQ ID NO: 1489639 - DNA, 25 bp, Homo sapien
aaagtctgagtgtagctccatctac

SEQ ID NO: 1489640 - DNA, 25 bp, Homo sapien
tatcaattaccggtcagtatgtaag

SEQ ID NO: 1489641 - DNA, 25 bp, Homo sapien
aattaccggtcagtatgtaagtagc

SEQ ID NO: 1489642 - DNA, 25 bp, Homo sapien
tatcaactaataagatcaggtcacg

SEQ ID NO: 1489643 - DNA, 25 bp, Homo sapien
cacgttaagtctattgatctcacct

SEQ ID NO: 1489644 - DNA, 25 bp, Homo sapien
tgctttggcaactgttccttagata

SEQ ID NO: 1489645 - DNA, 25 bp, Homo sapien
atctcacctttcactgtaatatctg

SEQ ID NO: 1489646 - DNA, 25 bp, Homo sapien
gacaaactcagttatcatggaatag

SEQ ID NO: 1489647 - DNA, 25 bp, Homo sapien
aatactctgtcttctaaaacctggc

SEQ ID NO: 1489648 - DNA, 25 bp, Homo sapien
accctgtgatgactgtgactgctga

SEQ ID NO: 1489649 - DNA, 25 bp, Homo sapien
catggaatagctacctgaagaaaac

SEQ ID NO: 1489650 - DNA, 25 bp, Homo sapien
agtctactgttgctaggcacctagg

SEQ ID NO: 1489651 - DNA, 25 bp, Homo sapien
tctactgcaaatgagactggattca

SEQ ID NO: 1489652 - DNA, 25 bp, Homo sapien
gaaacctccaatggcgttccacagt

SEQ ID NO: 1489653 - DNA, 25 bp, Homo sapien
cacagcgatgaacatgcaactatat

SEQ ID NO: 1489654 - DNA, 25 bp, Homo sapien
gatacatagatataaacgggagttt

SEQ ID NO: 1489655 - DNA, 25 bp, Homo sapien
tgtcagaactcaatactgttctctt

SEQ ID NO: 1489656 - DNA, 25 bp, Homo sapien
tgactcaatcttaagagattgtgtg

SEQ ID NO: 1489657 - DNA, 25 bp, Homo sapien
catagatataaacgggagtttgtta

SEQ ID NO: 1489658 - DNA, 25 bp, Homo sapien
cagaacacctttaaggaactcttgt

SEQ ID NO: 1489659 - DNA, 25 bp, Homo sapien
gaacacctttaaggaactcttgtga

SEQ ID NO: 1489660 - DNA, 25 bp, Homo sapien
cacctttaaggaactcttgtgaggc

SEQ ID NO: 1489661 - DNA, 25 bp, Homo sapien
acacctttaaggaactcttgtgagg

SEQ ID NO: 1489662 - DNA, 25 bp, Homo sapien
tgtgcaatcctttggtggtgttact

SEQ ID NO: 1489663 - DNA, 25 bp, Homo sapien
cagtttggtgactatatgacttagt

SEQ ID NO: 1489664 - DNA, 25 bp, Homo sapien
cattccctggatagctttagaagct

SEQ ID NO: 1489665 - DNA, 25 bp, Homo sapien
attccagaactggttgatttctttt

SEQ ID NO: 1489666 - DNA, 25 bp, Homo sapien
cactgtcccacaggaagagttgcgt

SEQ ID NO: 1489667 - DNA, 25 bp, Homo sapien
tgttctgaatacctggagatctgtc

SEQ ID NO: 1489668 - DNA, 25 bp, Homo sapien
agcagctcgggctactgacccaagt

SEQ ID NO: 1489669 - DNA, 25 bp, Homo sapien
tgctgaaccagataagcaggtgctc

SEQ ID NO: 1489670 - DNA, 25 bp, Homo sapien
tatccaccagacactgtcgcagagg

SEQ ID NO: 1489671 - DNA, 25 bp, Homo sapien
gaggttgtttgccagtgttctgctc

SEQ ID NO: 1489672 - DNA, 25 bp, Homo sapien
cactgtcgcagaggttgtttgccag

SEQ ID NO: 1489673 - DNA, 25 bp, Homo sapien
caccagacactgtcgcagaggttgt

SEQ ID NO: 1489674 - DNA, 25 bp, Homo sapien
tactaaaacatgaactgaccttaac

SEQ ID NO: 1489675 - DNA, 25 bp, Homo sapien
gaaagctcaagacacattactaaaa

SEQ ID NO: 1489676 - DNA, 25 bp, Homo sapien
taaatataggaaggtcatcaacaag

SEQ ID NO: 1489677 - DNA, 25 bp, Homo sapien
gatgggcataaacagcgccctctgt

SEQ ID NO: 1489678 - DNA, 25 bp, Homo sapien
gaaacccaagtcaggtggcaaatac

SEQ ID NO: 1489679 - DNA, 25 bp, Homo sapien
tatgcttggcacagcgtctaccatt

SEQ ID NO: 1489680 - DNA, 25 bp, Homo sapien
ctaacagaatcatggaaaggaagcc

SEQ ID NO: 1489681 - DNA, 25 bp, Homo sapien
tatagccggtctctgacacctagca

SEQ ID NO: 1489682 - DNA, 25 bp, Homo sapien
aattttctggtaggcatgaggtgga

SEQ ID NO: 1489683 - DNA, 25 bp, Homo sapien
gagctgatcttcataccagcgtatt

SEQ ID NO: 1489684 - DNA, 25 bp, Homo sapien
ccaggtcagagttagggctcattaa

SEQ ID NO: 1489685 - DNA, 25 bp, Homo sapien
cctttaaagctccttagtatgcagg

SEQ ID NO: 1489686 - DNA, 25 bp, Homo sapien
tgagagcatctttttgaaccaacgg

SEQ ID NO: 1489687 - DNA, 25 bp, Homo sapien
cattttgtgaagtgtgagccaggag

SEQ ID NO: 1489688 - DNA, 25 bp, Homo sapien
catgagccactatatccagttctgc

SEQ ID NO: 1489689 - DNA, 25 bp, Homo sapien
gatattcacatgtcagcagctctca

SEQ ID NO: 1489690 - DNA, 25 bp, Homo sapien
tattgggaatgtcatgccctgtcca

SEQ ID NO: 1489691 - DNA, 25 bp, Homo sapien
tatgttccaacggtacctggtacag

SEQ ID NO: 1489692 - DNA, 25 bp, Homo sapien
taacgtgattccaaatccctaagtg

SEQ ID NO: 1489693 - DNA, 25 bp, Homo sapien
caactctaatgtccaaactgcgtga

SEQ ID NO: 1489694 - DNA, 25 bp, Homo sapien
cagaaaagaatatgatcccaagtaa

SEQ ID NO: 1489695 - DNA, 25 bp, Homo sapien
cgagtaaaacctcagaaaagaatat

SEQ ID NO: 1489696 - DNA, 25 bp, Homo sapien
tcgagtaaaacctcagaaaagaata

SEQ ID NO: 1489697 - DNA, 25 bp, Homo sapien
cagagactgcaccttaggtacggga

SEQ ID NO: 1489698 - DNA, 25 bp, Homo sapien
tcctggattacaactctaaggcaga

SEQ ID NO: 1489699 - DNA, 25 bp, Homo sapien
taaagaagccggacaaatcagacca

SEQ ID NO: 1489700 - DNA, 25 bp, Homo sapien
tcctatgagcctgagagaggacagg

SEQ ID NO: 1489701 - DNA, 25 bp, Homo sapien
tagatcgactaacaacacagcaaga

SEQ ID NO: 1489702 - DNA, 25 bp, Homo sapien
gctttcactgtgcaccatggactcg

SEQ ID NO: 1489703 - DNA, 25 bp, Homo sapien
tctaaaatgtatgcttcaaggccca

SEQ ID NO: 1489704 - DNA, 25 bp, Homo sapien
gggttaaggcccaactacatgaagc

SEQ ID NO: 1489705 - DNA, 25 bp, Homo sapien
ttttgtagagaagctgtcttcctac

SEQ ID NO: 1489706 - DNA, 25 bp, Homo sapien
catcttgcctggctcattttaaaaa

SEQ ID NO: 1489707 - DNA, 25 bp, Homo sapien
aagctgtcttcctacgttgcccagg

SEQ ID NO: 1489708 - DNA, 25 bp, Homo sapien
ctcagccgtaagcagccgggactac

SEQ ID NO: 1489709 - DNA, 25 bp, Homo sapien
gactttcccgttgattccattggtc

SEQ ID NO: 1489710 - DNA, 25 bp, Homo sapien
tgtatacaaacttagataaaggtcc

SEQ ID NO: 1489711 - DNA, 25 bp, Homo sapien
ggtcacagtagcttcttagcaaatt

SEQ ID NO: 1489712 - DNA, 25 bp, Homo sapien
catttgaccatataggtgaggtttt

SEQ ID NO: 1489713 - DNA, 25 bp, Homo sapien
tcttgcctaaatggtctagctagaa

SEQ ID NO: 1489714 - DNA, 25 bp, Homo sapien
tctttcaccagtaagatgttagcta

SEQ ID NO: 1489715 - DNA, 25 bp, Homo sapien
tgtgtattcacgttgtgccccaata

SEQ ID NO: 1489716 - DNA, 25 bp, Homo sapien
ggtcatatcatctatgaacagagat

SEQ ID NO: 1489717 - DNA, 25 bp, Homo sapien
ttcaagaacgcagcttttggtttca

SEQ ID NO: 1489718 - DNA, 25 bp, Homo sapien
acgcccggcccagtaatgtccccat

SEQ ID NO: 1489719 - DNA, 25 bp, Homo sapien
tattttagcaattggaatcttcttt

SEQ ID NO: 1489720 - DNA, 25 bp, Homo sapien
gttaatcttttcaagaacgcagctt

SEQ ID NO: 1489721 - DNA, 25 bp, Homo sapien
cgtggtccaccggcctccttaagtg

SEQ ID NO: 1489722 - DNA, 25 bp, Homo sapien
gcccggccactaatctctcctattg

SEQ ID NO: 1489723 - DNA, 25 bp, Homo sapien
tctctcctattgctttcctattctc

SEQ ID NO: 1489724 - DNA, 25 bp, Homo sapien
ttaaagacagagtgttggtcttgtc

SEQ ID NO: 1489725 - DNA, 25 bp, Homo sapien
aaaacataggcaacactctaccggg

SEQ ID NO: 1489726 - DNA, 25 bp, Homo sapien
tgactactgtagctgggacacctca

SEQ ID NO: 1489727 - DNA, 25 bp, Homo sapien
tattcgagtcaaaagacacagggac

SEQ ID NO: 1489728 - DNA, 25 bp, Homo sapien
gaacggcatggctcattctggcacc

SEQ ID NO: 1489729 - DNA, 25 bp, Homo sapien
ttcactagccgtattaacactggca

SEQ ID NO: 1489730 - DNA, 25 bp, Homo sapien
cactagccgtattaacactggcaag

SEQ ID NO: 1489731 - DNA, 25 bp, Homo sapien
tactagccgtattaacactggcaag

SEQ ID NO: 1489732 - DNA, 25 bp, Homo sapien
aatgtctgtagtggagtctgatgcc

SEQ ID NO: 1489733 - DNA, 25 bp, Homo sapien
ctagccgtattaacactggcaagtt

SEQ ID NO: 1489734 - DNA, 25 bp, Homo sapien
taatgtctgtagtggagtctgatgc

SEQ ID NO: 1489735 - DNA, 25 bp, Homo sapien
atgtctgtagtggagtctgatgccc

SEQ ID NO: 1489736 - DNA, 25 bp, Homo sapien
ttttactagccgtattaacactggc

SEQ ID NO: 1489737 - DNA, 25 bp, Homo sapien
gcaactgctgactggaatgcatcat

SEQ ID NO: 1489738 - DNA, 25 bp, Homo sapien
gaccaccgctcagtaataaagagga

SEQ ID NO: 1489739 - DNA, 25 bp, Homo sapien
caaactactgacacaaacgacatgg

SEQ ID NO: 1489740 - DNA, 25 bp, Homo sapien
cagccagacgtgtaggaggattgat

SEQ ID NO: 1489741 - DNA, 25 bp, Homo sapien
gataaatgaagcacagtagttaact

SEQ ID NO: 1489742 - DNA, 25 bp, Homo sapien
gcagatgagacttctgcttcaacat

SEQ ID NO: 1489743 - DNA, 25 bp, Homo sapien
taaatgttgcttctagcagatgaga

SEQ ID NO: 1489744 - DNA, 25 bp, Homo sapien
tcatgactagaataactgaacagtc

SEQ ID NO: 1489745 - DNA, 25 bp, Homo sapien
aatccttactctggctaaactgggc

SEQ ID NO: 1489746 - DNA, 25 bp, Homo sapien
gactcagggtggcttgggttcacac

SEQ ID NO: 1489747 - DNA, 25 bp, Homo sapien
gaaatcgaccaggatctgcttgcag

SEQ ID NO: 1489748 - DNA, 25 bp, Homo sapien
taaaggttcttctgctcaacaatgg

SEQ ID NO: 1489749 - DNA, 25 bp, Homo sapien
gaataactggatcctcacctctcac

SEQ ID NO: 1489750 - DNA, 25 bp, Homo sapien
aatgcacaacctcactaatgatcag

SEQ ID NO: 1489751 - DNA, 25 bp, Homo sapien
cacatgcaggagaataactggatcc

SEQ ID NO: 1489752 - DNA, 25 bp, Homo sapien
acaaacatgcgagtgcaagccacat

SEQ ID NO: 1489753 - DNA, 25 bp, Homo sapien
tgaatgtaatcactatttaatagtt

SEQ ID NO: 1489754 - DNA, 25 bp, Homo sapien
ggtcaatgagctaaagatttccttt

SEQ ID NO: 1489755 - DNA, 25 bp, Homo sapien
atatagttttcggaataataattag

SEQ ID NO: 1489756 - DNA, 25 bp, Homo sapien
tttagaatttcatgaatatcaattg

SEQ ID NO: 1489757 - DNA, 25 bp, Homo sapien
gagactaagactccccagagtggag

SEQ ID NO: 1489758 - DNA, 25 bp, Homo sapien
aatgtgcagcctggatttagaaccg

SEQ ID NO: 1489759 - DNA, 25 bp, Homo sapien
tttagaaccgtagctccacagagaa

SEQ ID NO: 1489760 - DNA, 25 bp, Homo sapien
taaaagctaaggctagtccaggcac

SEQ ID NO: 1489761 - DNA, 25 bp, Homo sapien
gtactctggacctgcattaactctg

SEQ ID NO: 1489762 - DNA, 25 bp, Homo sapien
gttttagtgcatgcagaacgtcacc

SEQ ID NO: 1489763 - DNA, 25 bp, Homo sapien
ttactctagagcactgtttcacagc

SEQ ID NO: 1489764 - DNA, 25 bp, Homo sapien
gaacgtcaccagttttgtctccaat

SEQ ID NO: 1489765 - DNA, 25 bp, Homo sapien
tggtcaagacaagcatcagttacaa

SEQ ID NO: 1489766 - DNA, 25 bp, Homo sapien
tatacagcttgctaacaaattaggg

SEQ ID NO: 1489767 - DNA, 25 bp, Homo sapien
tgtttatggagaccacgaggcacct

SEQ ID NO: 1489768 - DNA, 25 bp, Homo sapien
tgtctggacctatgttcaactgtaa

SEQ ID NO: 1489769 - DNA, 25 bp, Homo sapien
caacataagctttttcctttgtcta

SEQ ID NO: 1489770 - DNA, 25 bp, Homo sapien
tacaccctcttctggaaagacaata

SEQ ID NO: 1489771 - DNA, 25 bp, Homo sapien
tgtctatataaacctgcaggttcac

SEQ ID NO: 1489772 - DNA, 25 bp, Homo sapien
tctcttgctacaccctcttctggaa

SEQ ID NO: 1489773 - DNA, 25 bp, Homo sapien
aaatcaaaattgaaggcttatacaa

SEQ ID NO: 1489774 - DNA, 25 bp, Homo sapien
tattcaacaggatcccagcacattg

SEQ ID NO: 1489775 - DNA, 25 bp, Homo sapien
aaaaatattcaacaggatcccagca

SEQ ID NO: 1489776 - DNA, 25 bp, Homo sapien
aatatatttctgctcctgtcttcat

SEQ ID NO: 1489777 - DNA, 25 bp, Homo sapien
agaggacaagagaaatcggaggcaa

SEQ ID NO: 1489778 - DNA, 25 bp, Homo sapien
aggacaagagaaatcggaggcaagt

SEQ ID NO: 1489779 - DNA, 25 bp, Homo sapien
caagagaaatcggaggcaagtctac

SEQ ID NO: 1489780 - DNA, 25 bp, Homo sapien
gacaagagaaatcggaggcaagtct

SEQ ID NO: 1489781 - DNA, 25 bp, Homo sapien
taaatatgtgacctatggaatgatc

SEQ ID NO: 1489782 - DNA, 25 bp, Homo sapien
tgatcacactgactgagagctctat

SEQ ID NO: 1489783 - DNA, 25 bp, Homo sapien
gagcctactcaactaatactgaaga

SEQ ID NO: 1489784 - DNA, 25 bp, Homo sapien
tggaatgatcacactctatagaatg

SEQ ID NO: 1489785 - DNA, 25 bp, Homo sapien
gcatatatagtttatagcatagaaa

SEQ ID NO: 1489786 - DNA, 25 bp, Homo sapien
tatctatagaatcatagggaaaagc

SEQ ID NO: 1489787 - DNA, 25 bp, Homo sapien
gaaaagcacacccaataatggcttg

SEQ ID NO: 1489788 - DNA, 25 bp, Homo sapien
cactgcatatatagtttatagcata

SEQ ID NO: 1489789 - DNA, 25 bp, Homo sapien
taggaaacttgtgatcaatccgcca

SEQ ID NO: 1489790 - DNA, 25 bp, Homo sapien
tgtaaggcatgatgtaccacctgga

SEQ ID NO: 1489791 - DNA, 25 bp, Homo sapien
cacatacagttgtggcaacatcagc

SEQ ID NO: 1489792 - DNA, 25 bp, Homo sapien
ttaaaacaaaggagtgcggcactag

SEQ ID NO: 1489793 - DNA, 25 bp, Homo sapien
ttgaaactcatcattagacaagcta

SEQ ID NO: 1489794 - DNA, 25 bp, Homo sapien
gataggcttcaatataagaaacaga

SEQ ID NO: 1489795 - DNA, 25 bp, Homo sapien
taaacacggacatacagaatctctg

SEQ ID NO: 1489796 - DNA, 25 bp, Homo sapien
cacattttcacttcaacttagcagc

SEQ ID NO: 1489797 - DNA, 25 bp, Homo sapien
tcctgtcactgggtgactacttccc

SEQ ID NO: 1489798 - DNA, 25 bp, Homo sapien
tctcttcagccctaaagttgtataa

SEQ ID NO: 1489799 - DNA, 25 bp, Homo sapien
ccctctctaagccacaactgatgta

SEQ ID NO: 1489800 - DNA, 25 bp, Homo sapien
tatagtctaagtgggaacctaagaa

SEQ ID NO: 1489801 - DNA, 25 bp, Homo sapien
tatcacctctgtctgcattaatggc

SEQ ID NO: 1489802 - DNA, 25 bp, Homo sapien
taaagacctcctgcatacaatgaag

SEQ ID NO: 1489803 - DNA, 25 bp, Homo sapien
tagtagagagacacagtattccagt

SEQ ID NO: 1489804 - DNA, 25 bp, Homo sapien
tgtgctccacaaaacggaaaaggga

SEQ ID NO: 1489805 - DNA, 25 bp, Homo sapien
tatttgtagcaaatgtttcggaccc

SEQ ID NO: 1489806 - DNA, 25 bp, Homo sapien
gcaaatgtttcggacccaatcagta

SEQ ID NO: 1489807 - DNA, 25 bp, Homo sapien
gacccaatcagtacaccgaatcaca

SEQ ID NO: 1489808 - DNA, 25 bp, Homo sapien
tcagtacaccgaatcacagcatttg

SEQ ID NO: 1489809 - DNA, 25 bp, Homo sapien
agggtgagaccctattcccaaagag

SEQ ID NO: 1489810 - DNA, 25 bp, Homo sapien
caacagggtgagaccctattcccaa

SEQ ID NO: 1489811 - DNA, 25 bp, Homo sapien
gcaacagggtgagaccctattccca

SEQ ID NO: 1489812 - DNA, 25 bp, Homo sapien
acagggtgagaccctattcccaaag

SEQ ID NO: 1489813 - DNA, 25 bp, Homo sapien
gactaacactggtgctaagaagtgg

SEQ ID NO: 1489814 - DNA, 25 bp, Homo sapien
gagtcagagtcagactaacactggt

SEQ ID NO: 1489815 - DNA, 25 bp, Homo sapien
tgtattaacactggtgctaagagtc

SEQ ID NO: 1489816 - DNA, 25 bp, Homo sapien
cactggtgctaagagtcagagtcag

SEQ ID NO: 1489817 - DNA, 25 bp, Homo sapien
ttcttcaagtaagacttttgacctg

SEQ ID NO: 1489818 - DNA, 25 bp, Homo sapien
cagacgacgaaatatgctctcggga

SEQ ID NO: 1489819 - DNA, 25 bp, Homo sapien
gaaatatgctctcgggattaagaac

SEQ ID NO: 1489820 - DNA, 25 bp, Homo sapien
tcctttcaggggaagtgcaagtttg

SEQ ID NO: 1489821 - DNA, 25 bp, Homo sapien
ggctctatgcttaaacaaccaccat

SEQ ID NO: 1489822 - DNA, 25 bp, Homo sapien
gcaatgcaacggcaaacaagtccat

SEQ ID NO: 1489823 - DNA, 25 bp, Homo sapien
tgaacatactcaggcaataacaaga

SEQ ID NO: 1489824 - DNA, 25 bp, Homo sapien
tttcttccaagggtacactttgaga

SEQ ID NO: 1489825 - DNA, 25 bp, Homo sapien
cgagttgcctgaggccctctttctt

SEQ ID NO: 1489826 - DNA, 25 bp, Homo sapien
tgttgaaatgtcattacgagttgcc

SEQ ID NO: 1489827 - DNA, 25 bp, Homo sapien
tcattacgagttgcctgaggccctc

SEQ ID NO: 1489828 - DNA, 25 bp, Homo sapien
aggtggcagctgagaggcatcctgt

SEQ ID NO: 1489829 - DNA, 25 bp, Homo sapien
gcttctctgattctgaaggtgctcc

SEQ ID NO: 1489830 - DNA, 25 bp, Homo sapien
aatgagtaaagcttctctgattctg

SEQ ID NO: 1489831 - DNA, 25 bp, Homo sapien
aaagcttctctgattctgaaggtgc

SEQ ID NO: 1489832 - DNA, 25 bp, Homo sapien
gatcataaaatgagtaaagcttctc

SEQ ID NO: 1489833 - DNA, 25 bp, Homo sapien
tgccaagaagtcgaacggagtctgg

SEQ ID NO: 1489834 - DNA, 25 bp, Homo sapien
agtctggaggatatctgggtttgca

SEQ ID NO: 1489835 - DNA, 25 bp, Homo sapien
aggcatttgcattcccgcttgtggt

SEQ ID NO: 1489836 - DNA, 25 bp, Homo sapien
cgcttgtggtctggccaagcttttt

SEQ ID NO: 1489837 - DNA, 25 bp, Homo sapien
ctagtggagtccaaagaaagagcca

SEQ ID NO: 1489838 - DNA, 25 bp, Homo sapien
ctggctagtggagtccaaagaaaga

SEQ ID NO: 1489839 - DNA, 25 bp, Homo sapien
ggctagtggagtccaaagaaagagc

SEQ ID NO: 1489840 - DNA, 25 bp, Homo sapien
tagtggagtccaaagaaagagccat

SEQ ID NO: 1489841 - DNA, 25 bp, Homo sapien
gattttgctcataacattggctgta

SEQ ID NO: 1489842 - DNA, 25 bp, Homo sapien
cataacattggctgtagtattttct

SEQ ID NO: 1489843 - DNA, 25 bp, Homo sapien
atacaggatataattaagattttgc

SEQ ID NO: 1489844 - DNA, 25 bp, Homo sapien
ttaagattttgctcataacattggc

SEQ ID NO: 1489845 - DNA, 25 bp, Homo sapien
tgacacttagcactacagtatttgg

SEQ ID NO: 1489846 - DNA, 25 bp, Homo sapien
actacagtatttggcgacgcggcac

SEQ ID NO: 1489847 - DNA, 25 bp, Homo sapien
cagtatttggcgacgcggcactgag

SEQ ID NO: 1489848 - DNA, 25 bp, Homo sapien
tagcactacagtatttggcgacgcg

SEQ ID NO: 1489849 - DNA, 25 bp, Homo sapien
ttgaagtcagtttctagaggacctc

SEQ ID NO: 1489850 - DNA, 25 bp, Homo sapien
ttccctaacgctatagtccaagttg

SEQ ID NO: 1489851 - DNA, 25 bp, Homo sapien
ctttgttccctaacgctatagtcca

SEQ ID NO: 1489852 - DNA, 25 bp, Homo sapien
ccctaacgctatagtccaagttggg

SEQ ID NO: 1489853 - DNA, 25 bp, Homo sapien
tgttccctaacgctatagtccaagt

SEQ ID NO: 1489854 - DNA, 25 bp, Homo sapien
cagaaaagccaatacacggagaaca

SEQ ID NO: 1489855 - DNA, 25 bp, Homo sapien
aaagagtttaattactgcaaggcag

SEQ ID NO: 1489856 - DNA, 25 bp, Homo sapien
gagtttaattactgcaaggcagctg

SEQ ID NO: 1489857 - DNA, 25 bp, Homo sapien
gcccagaaaagccaatacacggaga

SEQ ID NO: 1489858 - DNA, 25 bp, Homo sapien
tatcacaaggacaaagggatttcta

SEQ ID NO: 1489859 - DNA, 25 bp, Homo sapien
aggcagcttgtgttagtcagctcaa

SEQ ID NO: 1489860 - DNA, 25 bp, Homo sapien
tgctacaagacggataaaccgacaa

SEQ ID NO: 1489861 - DNA, 25 bp, Homo sapien
tacaaggtgctcttttaatctagcc

SEQ ID NO: 1489862 - DNA, 25 bp, Homo sapien
tgcctgcgtgctcccctttgtcagg

SEQ ID NO: 1489863 - DNA, 25 bp, Homo sapien
gccaaactccacgtcgttctgctgg

SEQ ID NO: 1489864 - DNA, 25 bp, Homo sapien
tcgggcgctcggtgacctgggctct

SEQ ID NO: 1489865 - DNA, 25 bp, Homo sapien
ttctcccggagtcgggcgctcggtg

SEQ ID NO: 1489866 - DNA, 25 bp, Homo sapien
tctcttcgattatatctcttttttt

SEQ ID NO: 1489867 - DNA, 25 bp, Homo sapien
ctcttcgattatatctctttttttt

SEQ ID NO: 1489868 - DNA, 25 bp, Homo sapien
ctagtcaagcgcagtagtaacaagt

SEQ ID NO: 1489869 - DNA, 25 bp, Homo sapien
taacaagtggagaaagactagaaca

SEQ ID NO: 1489870 - DNA, 25 bp, Homo sapien
tcaagcgcagtagtaacaagtggag

SEQ ID NO: 1489871 - DNA, 25 bp, Homo sapien
cagtagtaacaagtggagaaagact

SEQ ID NO: 1489872 - DNA, 25 bp, Homo sapien
cttataccttctaactcattattgt

SEQ ID NO: 1489873 - DNA, 25 bp, Homo sapien
tttagagagctgtacagccatcacc

SEQ ID NO: 1489874 - DNA, 25 bp, Homo sapien
ttatcatacctattaccctattgag

SEQ ID NO: 1489875 - DNA, 25 bp, Homo sapien
tgtactattcaatgggttgaagtat

SEQ ID NO: 1489876 - DNA, 25 bp, Homo sapien
gcaaggcgactagatcattcagcca

SEQ ID NO: 1489877 - DNA, 25 bp, Homo sapien
aatttgagagcctatttactatacc

SEQ ID NO: 1489878 - DNA, 25 bp, Homo sapien
agccatccaggtatgtaaacaaaga

SEQ ID NO: 1489879 - DNA, 25 bp, Homo sapien
cactgagttttctaagttcctctga

SEQ ID NO: 1489880 - DNA, 25 bp, Homo sapien
cgcccagactgaagtgcagtgacac

SEQ ID NO: 1489881 - DNA, 25 bp, Homo sapien
tcgcccagactgaagtgcagtgaca

SEQ ID NO: 1489882 - DNA, 25 bp, Homo sapien
gcattaagtaacattttggttcaca

SEQ ID NO: 1489883 - DNA, 25 bp, Homo sapien
tatggtagctcttcctattttggat

SEQ ID NO: 1489884 - DNA, 25 bp, Homo sapien
ttaaaaatgtatggtagctcttcct

SEQ ID NO: 1489885 - DNA, 25 bp, Homo sapien
tttgcattaagtaacattttggttc

SEQ ID NO: 1489886 - DNA, 25 bp, Homo sapien
tgtagctctttgagcttgcaacagg

SEQ ID NO: 1489887 - DNA, 25 bp, Homo sapien
aatctttcaaagaatgtcaaaaatg

SEQ ID NO: 1489888 - DNA, 25 bp, Homo sapien
tgaaaccactatattatccaataaa

SEQ ID NO: 1489889 - DNA, 25 bp, Homo sapien
tccacatcagagatattagaggtgc

SEQ ID NO: 1489890 - DNA, 25 bp, Homo sapien
tgttctcgtgatagagtcctcaaga

SEQ ID NO: 1489891 - DNA, 25 bp, Homo sapien
tctgacccagtaggcaaaacaaagc

SEQ ID NO: 1489892 - DNA, 25 bp, Homo sapien
tgttctccttacagagttctcgcaa

SEQ ID NO: 1489893 - DNA, 25 bp, Homo sapien
gcagcctaacctagtgccaggaaca

SEQ ID NO: 1489894 - DNA, 25 bp, Homo sapien
taagtaccacagtgctttacctcga

SEQ ID NO: 1489895 - DNA, 25 bp, Homo sapien
gtctctgcactcaagcacagtctag

SEQ ID NO: 1489896 - DNA, 25 bp, Homo sapien
tcaatttacttgtcctgagaggaac

SEQ ID NO: 1489897 - DNA, 25 bp, Homo sapien
tatatctcactgtgggtcatgaaca

SEQ ID NO: 1489898 - DNA, 25 bp, Homo sapien
tgctccacagtgatcagcggtaccc

SEQ ID NO: 1489899 - DNA, 25 bp, Homo sapien
ataggcccccgactgtgccactgtg

SEQ ID NO: 1489900 - DNA, 25 bp, Homo sapien
actgtgtccactggtaattgtacac

SEQ ID NO: 1489901 - DNA, 25 bp, Homo sapien
tagaggtctggagaactgtgctcca

SEQ ID NO: 1489902 - DNA, 25 bp, Homo sapien
agatacacaagaaaaggcctggtgc

SEQ ID NO: 1489903 - DNA, 25 bp, Homo sapien
taaagatacacaagaaaaggcctgg

SEQ ID NO: 1489904 - DNA, 25 bp, Homo sapien
gaatgtgtcagtagagagagaaaaa

SEQ ID NO: 1489905 - DNA, 25 bp, Homo sapien
ggaatgtgtcagtagagagagaaaa

SEQ ID NO: 1489906 - DNA, 25 bp, Homo sapien
ggactaactatgagctgccatcact

SEQ ID NO: 1489907 - DNA, 25 bp, Homo sapien
tagcggcatctacttctaaaactag

SEQ ID NO: 1489908 - DNA, 25 bp, Homo sapien
cagacccaagggatatggcaggaga

SEQ ID NO: 1489909 - DNA, 25 bp, Homo sapien
cctcgatgatgcagggaatcagtgc

SEQ ID NO: 1489910 - DNA, 25 bp, Homo sapien
ttggccactcactggagaggcctct

SEQ ID NO: 1489911 - DNA, 25 bp, Homo sapien
ggaggtctcaccaacgacttcttca

SEQ ID NO: 1489912 - DNA, 25 bp, Homo sapien
acattccatcactagagcaaaagag

SEQ ID NO: 1489913 - DNA, 25 bp, Homo sapien
tggcccattcagtacctccacattc

SEQ ID NO: 1489914 - DNA, 25 bp, Homo sapien
ctatcagattaaggagggtgtcgcc

SEQ ID NO: 1489915 - DNA, 25 bp, Homo sapien
tgcagaggtcagcaactccaaggtt

SEQ ID NO: 1489916 - DNA, 25 bp, Homo sapien
aaattggtcctatctgtgctatcag

SEQ ID NO: 1489917 - DNA, 25 bp, Homo sapien
tattgtctgcaggtcattctctggc

SEQ ID NO: 1489918 - DNA, 25 bp, Homo sapien
atcttcagtaccaacaacagtggct

SEQ ID NO: 1489919 - DNA, 25 bp, Homo sapien
gattagcagtcatggtgggctctcc

SEQ ID NO: 1489920 - DNA, 25 bp, Homo sapien
gtggcacaaagtggtattaccccag

SEQ ID NO: 1489921 - DNA, 25 bp, Homo sapien
tcacctaagggcaacatgcagaaag

SEQ ID NO: 1489922 - DNA, 25 bp, Homo sapien
cagttacaatggttgacgaaagcca

SEQ ID NO: 1489923 - DNA, 25 bp, Homo sapien
ttaaagagcattacataatgagtca

SEQ ID NO: 1489924 - DNA, 25 bp, Homo sapien
gcaaaacattaaagagcattacata

SEQ ID NO: 1489925 - DNA, 25 bp, Homo sapien
aaagagcattacataatgagtcata

SEQ ID NO: 1489926 - DNA, 25 bp, Homo sapien
aattcaagcaaaacattaaagagca

SEQ ID NO: 1489927 - DNA, 25 bp, Homo sapien
gtttaaatggctgctttcgggtaga

SEQ ID NO: 1489928 - DNA, 25 bp, Homo sapien
tgctttcgggtagatttccctccaa

SEQ ID NO: 1489929 - DNA, 25 bp, Homo sapien
tccctccaaggtcttatcggacatc

SEQ ID NO: 1489930 - DNA, 25 bp, Homo sapien
tttccctccaaggtcttatcggaca

SEQ ID NO: 1489931 - DNA, 25 bp, Homo sapien
tcacttgatcagctctttgaggagg

SEQ ID NO: 1489932 - DNA, 25 bp, Homo sapien
gaggtgcaccgtagacatcaagatt

SEQ ID NO: 1489933 - DNA, 25 bp, Homo sapien
gtgtgatttccacagccgcaccaag

SEQ ID NO: 1489934 - DNA, 25 bp, Homo sapien
tgcaagcctgatgctttaccggcgg

SEQ ID NO: 1489935 - DNA, 25 bp, Homo sapien
atttccaccgcagcccaggttgggg

SEQ ID NO: 1489936 - DNA, 25 bp, Homo sapien
cccagccccgctgcggcaacctagg

SEQ ID NO: 1489937 - DNA, 25 bp, Homo sapien
gtccagcacacagacttttcgtctc

SEQ ID NO: 1489938 - DNA, 25 bp, Homo sapien
cagcaaaattatccccggcacaacg

SEQ ID NO: 1489939 - DNA, 25 bp, Homo sapien
gcagcaccgccaagctgcctgtgca

SEQ ID NO: 1489940 - DNA, 25 bp, Homo sapien
cacagctcgcgactcaggtaggcga

SEQ ID NO: 1489941 - DNA, 25 bp, Homo sapien
accccacacagctcgcgactcaggt

SEQ ID NO: 1489942 - DNA, 25 bp, Homo sapien
gggcacacgcgcgtcaggggcagca

SEQ ID NO: 1489943 - DNA, 25 bp, Homo sapien
tccgagcggaagagtagctctccgg

SEQ ID NO: 1489944 - DNA, 25 bp, Homo sapien
ttgcacaccgtgtacgccaagggat

SEQ ID NO: 1489945 - DNA, 25 bp, Homo sapien
agcggtcgcagacgacgccacgact

SEQ ID NO: 1489946 - DNA, 25 bp, Homo sapien
ctcttggcggttgcgaacttttcca

SEQ ID NO: 1489947 - DNA, 25 bp, Homo sapien
gcagctccggcacctcagacggcta

SEQ ID NO: 1489948 - DNA, 25 bp, Homo sapien
acctcagacggctacccgcgtccag

SEQ ID NO: 1489949 - DNA, 25 bp, Homo sapien
gcgggcgtctcacgggctgccggga

SEQ ID NO: 1489950 - DNA, 25 bp, Homo sapien
gctacccgcgtccagcagcgggcgt

SEQ ID NO: 1489951 - DNA, 25 bp, Homo sapien
gtggtcgtaaggctccgcgtgcggc

SEQ ID NO: 1489952 - DNA, 25 bp, Homo sapien
ctgaaggtggtcgtaaggctccgcg

SEQ ID NO: 1489953 - DNA, 25 bp, Homo sapien
aaggtggtcgtaaggctccgcgtgc

SEQ ID NO: 1489954 - DNA, 25 bp, Homo sapien
tgaaggtggtcgtaaggctccgcgt

SEQ ID NO: 1489955 - DNA, 25 bp, Homo sapien
aagccaacagctgggccagtgccca

SEQ ID NO: 1489956 - DNA, 25 bp, Homo sapien
tccccaggcccataaaggagaaaca

SEQ ID NO: 1489957 - DNA, 25 bp, Homo sapien
gggagtgcctctcacaagccaacag

SEQ ID NO: 1489958 - DNA, 25 bp, Homo sapien
aaacaaggcagcagcgtggctcagg

SEQ ID NO: 1489959 - DNA, 25 bp, Homo sapien
tctgacaagagccatgtccatcagg

SEQ ID NO: 1489960 - DNA, 25 bp, Homo sapien
ttcctcaggatgcaaatttattttc

SEQ ID NO: 1489961 - DNA, 25 bp, Homo sapien
gactcatgtcatcggagagggcaga

SEQ ID NO: 1489962 - DNA, 25 bp, Homo sapien
caacttgtccaaaatgtttcctgag

SEQ ID NO: 1489963 - DNA, 25 bp, Homo sapien
caaatataccaggaagatgtagaat

SEQ ID NO: 1489964 - DNA, 25 bp, Homo sapien
gaagatgtagaataattcctgctgc

SEQ ID NO: 1489965 - DNA, 25 bp, Homo sapien
atgccaaatataccaggaagatgta

SEQ ID NO: 1489966 - DNA, 25 bp, Homo sapien
tatatgccaaatataccaggaagat

SEQ ID NO: 1489967 - DNA, 25 bp, Homo sapien
tcctcagtgcatggtacgggctcct

SEQ ID NO: 1489968 - DNA, 25 bp, Homo sapien
ttgcgagcgactgcccaactggctt

SEQ ID NO: 1489969 - DNA, 25 bp, Homo sapien
caccagctgtggatgagagtctccg

SEQ ID NO: 1489970 - DNA, 25 bp, Homo sapien
tcacttcatctctgctgggaccctg

SEQ ID NO: 1489971 - DNA, 25 bp, Homo sapien
ctccaggtcaatctggtggataggt

SEQ ID NO: 1489972 - DNA, 25 bp, Homo sapien
acctcttgcccttttctttcatgac

SEQ ID NO: 1489973 - DNA, 25 bp, Homo sapien
gaggacctcttgcccttttctttca

SEQ ID NO: 1489974 - DNA, 25 bp, Homo sapien
tcagaggacctcttgcccttttctt

SEQ ID NO: 1489975 - DNA, 25 bp, Homo sapien
ggacctcttgcccttttctttcatg

SEQ ID NO: 1489976 - DNA, 25 bp, Homo sapien
taagctgggctcgatgttccctcca

SEQ ID NO: 1489977 - DNA, 25 bp, Homo sapien
cacagtcagcactcgtggaaggagg

SEQ ID NO: 1489978 - DNA, 25 bp, Homo sapien
tcagaacagatggaaggacccctgc

SEQ ID NO: 1489979 - DNA, 25 bp, Homo sapien
tatgtcaccgtctgcccaggatatg

SEQ ID NO: 1489980 - DNA, 25 bp, Homo sapien
tcctcaatacaggtgaggtcaagct

SEQ ID NO: 1489981 - DNA, 25 bp, Homo sapien
catgattcctcaatacaggtgaggt

SEQ ID NO: 1489982 - DNA, 25 bp, Homo sapien
gggtgacctcagcaaggaccagacc

SEQ ID NO: 1489983 - DNA, 25 bp, Homo sapien
tgattcctcaatacaggtgaggtca

SEQ ID NO: 1489984 - DNA, 25 bp, Homo sapien
ccacttttccatgtgtctcatgtcc

SEQ ID NO: 1489985 - DNA, 25 bp, Homo sapien
tcttgctcatcctatatttctgcca

SEQ ID NO: 1489986 - DNA, 25 bp, Homo sapien
cttcttgctcatcctatatttctgc

SEQ ID NO: 1489987 - DNA, 25 bp, Homo sapien
tccatgtgtctcatgtcctgtcaca

SEQ ID NO: 1489988 - DNA, 25 bp, Homo sapien
agggcattgacagggggcaactctg

SEQ ID NO: 1489989 - DNA, 25 bp, Homo sapien
cagggcctttagccacaagctctgc

SEQ ID NO: 1489990 - DNA, 25 bp, Homo sapien
agggcctttagccacaagctctgct

SEQ ID NO: 1489991 - DNA, 25 bp, Homo sapien
gggcctttagccacaagctctgctg

SEQ ID NO: 1489992 - DNA, 25 bp, Homo sapien
ccttgggggaaccatggcatggtcc

SEQ ID NO: 1489993 - DNA, 25 bp, Homo sapien
ggcatggtccttgggggaaccatgg

SEQ ID NO: 1489994 - DNA, 25 bp, Homo sapien
ttgggggaaccatggcatggtccat

SEQ ID NO: 1489995 - DNA, 25 bp, Homo sapien
ggaaccatggcatggtccatgcgga

SEQ ID NO: 1489996 - DNA, 25 bp, Homo sapien
gatgggccatgctccctagatgaac

SEQ ID NO: 1489997 - DNA, 25 bp, Homo sapien
atgggccacgctccctagattaacc

SEQ ID NO: 1489998 - DNA, 25 bp, Homo sapien
atgaaccacactccctagatgggcc

SEQ ID NO: 1489999 - DNA, 25 bp, Homo sapien
ctagatgaaccatgctccctagatg

SEQ ID NO: 1490000 - DNA, 25 bp, Homo sapien
tagatgaaccactctccctagatga

SEQ ID NO: 1490001 - DNA, 25 bp, Homo sapien
gatgaaccatgctccctagatgggc

SEQ ID NO: 1490002 - DNA, 25 bp, Homo sapien
gatgggccatgctccctagatgaac

SEQ ID NO: 1490003 - DNA, 25 bp, Homo sapien
tagatgaaccatgctccctagatgg

SEQ ID NO: 1490004 - DNA, 25 bp, Homo sapien
gttaacatgcccaggctatatgtcc

SEQ ID NO: 1490005 - DNA, 25 bp, Homo sapien
gaatcccaaggcaatcagagatctt

SEQ ID NO: 1490006 - DNA, 25 bp, Homo sapien
aaggcaatcagagatcttgtagatg

SEQ ID NO: 1490007 - DNA, 25 bp, Homo sapien
cccaggctatatgtccgctggcagc

SEQ ID NO: 1490008 - DNA, 25 bp, Homo sapien
agatgctggcggtgtgtgaccccca

SEQ ID NO: 1490009 - DNA, 25 bp, Homo sapien
atgctggcggtgtgtgacccccatt

SEQ ID NO: 1490010 - DNA, 25 bp, Homo sapien
ggcggtgtgtgacccccattccatc

SEQ ID NO: 1490011 - DNA, 25 bp, Homo sapien
cccagatgctggcggtgtgtgaccc

SEQ ID NO: 1490012 - DNA, 25 bp, Homo sapien
ggccccaagcaggagtgcctccttc

SEQ ID NO: 1490013 - DNA, 25 bp, Homo sapien
aggccccaagcaggagtgcctcctt

SEQ ID NO: 1490014 - DNA, 25 bp, Homo sapien
cgggtctctggagtctcaggcccca

SEQ ID NO: 1490015 - DNA, 25 bp, Homo sapien
ctgcacgggtctctggagtctcagg

SEQ ID NO: 1490016 - DNA, 25 bp, Homo sapien
aatagtgggacctggacagagaatc

SEQ ID NO: 1490017 - DNA, 25 bp, Homo sapien
cagagaatcccgttgtccccaaatg

SEQ ID NO: 1490018 - DNA, 25 bp, Homo sapien
ctaaggacttgagaatagtgggacc

SEQ ID NO: 1490019 - DNA, 25 bp, Homo sapien
ccgttgtccccaaatgccatgaaat

SEQ ID NO: 1490020 - DNA, 25 bp, Homo sapien
ccgctttaggaatcatgccagttga

SEQ ID NO: 1490021 - DNA, 25 bp, Homo sapien
gaagccgctttaggaatcatgccag

SEQ ID NO: 1490022 - DNA, 25 bp, Homo sapien
gtgaagccgctttaggaatcatgcc

SEQ ID NO: 1490023 - DNA, 25 bp, Homo sapien
cagtgaagccgctttaggaatcatg

SEQ ID NO: 1490024 - DNA, 25 bp, Homo sapien
gctgggctgagttatgcctctcatg

SEQ ID NO: 1490025 - DNA, 25 bp, Homo sapien
tcacagatagcactgtgcgtgtgca

SEQ ID NO: 1490026 - DNA, 25 bp, Homo sapien
atagcactgtgcgtgtgcaactgct

SEQ ID NO: 1490027 - DNA, 25 bp, Homo sapien
tcatgtagcaaactctcatgaacac

SEQ ID NO: 1490028 - DNA, 25 bp, Homo sapien
ccactcatgtctgcacccagttcct

SEQ ID NO: 1490029 - DNA, 25 bp, Homo sapien
ctcatgtctgcacccagttcctcat

SEQ ID NO: 1490030 - DNA, 25 bp, Homo sapien
ctgtgtgttgcttctctggccaggc

SEQ ID NO: 1490031 - DNA, 25 bp, Homo sapien
tgccccactcatgtctgcacccagt

SEQ ID NO: 1490032 - DNA, 25 bp, Homo sapien
aggcccaggaccagcatcagagcat

SEQ ID NO: 1490033 - DNA, 25 bp, Homo sapien
ccccgaggcccaggaccagcatcag

SEQ ID NO: 1490034 - DNA, 25 bp, Homo sapien
cgaggcccaggaccagcatcagagc

SEQ ID NO: 1490035 - DNA, 25 bp, Homo sapien
ccaggaccagcatcagagcatccat

SEQ ID NO: 1490036 - DNA, 25 bp, Homo sapien
tccaggatccagagagcatatcagc

SEQ ID NO: 1490037 - DNA, 25 bp, Homo sapien
gatccagagagcatatcagccagct

SEQ ID NO: 1490038 - DNA, 25 bp, Homo sapien
ggctggccgtgtggatcacgtgggc

SEQ ID NO: 1490039 - DNA, 25 bp, Homo sapien
agagagcatatcagccagcttcagg

SEQ ID NO: 1490040 - DNA, 25 bp, Homo sapien
tgtcttctgacgaaccgtgatgcct

SEQ ID NO: 1490041 - DNA, 25 bp, Homo sapien
actggatgtttgtcgtgtcttctga

SEQ ID NO: 1490042 - DNA, 25 bp, Homo sapien
tgtttgtcgtgtcttctgacgaacc

SEQ ID NO: 1490043 - DNA, 25 bp, Homo sapien
cttcctcactggatgtttgtcgtgt

SEQ ID NO: 1490044 - DNA, 25 bp, Homo sapien
tgaggaggagagtaacgtgaggcat

SEQ ID NO: 1490045 - DNA, 25 bp, Homo sapien
ggaggagagtaacgtgaggcattcc

SEQ ID NO: 1490046 - DNA, 25 bp, Homo sapien
aggaggagagtaacgtgaggcattc

SEQ ID NO: 1490047 - DNA, 25 bp, Homo sapien
ttgaggaggagagtaacgtgaggca

SEQ ID NO: 1490048 - DNA, 25 bp, Homo sapien
gctggcgtcatcagtgctggtgccc

SEQ ID NO: 1490049 - DNA, 25 bp, Homo sapien
aaatctgttgaggattgaacaactg

SEQ ID NO: 1490050 - DNA, 25 bp, Homo sapien
tagttggattgctggcgtcatcagt

SEQ ID NO: 1490051 - DNA, 25 bp, Homo sapien
ttaaatctgttgaggattgaacaac

SEQ ID NO: 1490052 - DNA, 25 bp, Homo sapien
tattgacgctacatgacagaactaa

SEQ ID NO: 1490053 - DNA, 25 bp, Homo sapien
gaacaaatgtgcagacttttcagta

SEQ ID NO: 1490054 - DNA, 25 bp, Homo sapien
tagacccatgggctcagttgtcctc

SEQ ID NO: 1490055 - DNA, 25 bp, Homo sapien
tatttagagaccaaaagaaaccaca

SEQ ID NO: 1490056 - DNA, 25 bp, Homo sapien
tctaagcttaataatgtacagactc

SEQ ID NO: 1490057 - DNA, 25 bp, Homo sapien
agcttaataatgtacagactcttgc

SEQ ID NO: 1490058 - DNA, 25 bp, Homo sapien
tactttctaagcttaataatgtaca

SEQ ID NO: 1490059 - DNA, 25 bp, Homo sapien
tatttaaataggaatctgaaacaaa

SEQ ID NO: 1490060 - DNA, 25 bp, Homo sapien
taagccaatgatatcagcttaggag

SEQ ID NO: 1490061 - DNA, 25 bp, Homo sapien
gatctgcctggcttgtgcaagacaa

SEQ ID NO: 1490062 - DNA, 25 bp, Homo sapien
ttgtgcaagacaagaacagttacct

SEQ ID NO: 1490063 - DNA, 25 bp, Homo sapien
ccaataagccaatgatatcagctta

SEQ ID NO: 1490064 - DNA, 25 bp, Homo sapien
tcttgagggtgcatgttaactactt

SEQ ID NO: 1490065 - DNA, 25 bp, Homo sapien
cacaatctttggaacgctctatagt

SEQ ID NO: 1490066 - DNA, 25 bp, Homo sapien
gcatcaatatatctctcgcatcaag

SEQ ID NO: 1490067 - DNA, 25 bp, Homo sapien
tctcgcatcaagtggagtcaatgaa

SEQ ID NO: 1490068 - DNA, 25 bp, Homo sapien
tcaaagtcttgttggcgctctctgc

SEQ ID NO: 1490069 - DNA, 25 bp, Homo sapien
gactttgaatgactatgggctgctg

SEQ ID NO: 1490070 - DNA, 25 bp, Homo sapien
tacaaattacacagatggctgggcg

SEQ ID NO: 1490071 - DNA, 25 bp, Homo sapien
acttacagggacgtatgcatcagcc

SEQ ID NO: 1490072 - DNA, 25 bp, Homo sapien
aaatttgatccagagcaagggaacc

SEQ ID NO: 1490073 - DNA, 25 bp, Homo sapien
tcctcaaaatgtacaccagggagaa

SEQ ID NO: 1490074 - DNA, 25 bp, Homo sapien
tagtggtaggcagctagtgcttcct

SEQ ID NO: 1490075 - DNA, 25 bp, Homo sapien
tgtgggcacgcctccagtaatgctg

SEQ ID NO: 1490076 - DNA, 25 bp, Homo sapien
gtggcgctgcgcctcccaaaacagt

SEQ ID NO: 1490077 - DNA, 25 bp, Homo sapien
gtaaataaattttgacgaggaatca

SEQ ID NO: 1490078 - DNA, 25 bp, Homo sapien
cgtaagtggtctattacagtggcgc

SEQ ID NO: 1490079 - DNA, 25 bp, Homo sapien
gtctattacagtggcgctgcgcctc

SEQ ID NO: 1490080 - DNA, 25 bp, Homo sapien
ttgaataagatacagcttttgttgt

SEQ ID NO: 1490081 - DNA, 25 bp, Homo sapien
tgaataagatacagcttttgttgta

SEQ ID NO: 1490082 - DNA, 25 bp, Homo sapien
ggccctttccgggtgtatatatcaa

SEQ ID NO: 1490083 - DNA, 25 bp, Homo sapien
tccagcggccctttccgggtgtata

SEQ ID NO: 1490084 - DNA, 25 bp, Homo sapien
gtatatatcaaatgatgaccaaggc

SEQ ID NO: 1490085 - DNA, 25 bp, Homo sapien
atatatcaaatgatgaccaaggctc

SEQ ID NO: 1490086 - DNA, 25 bp, Homo sapien
gaaattcctagcagttccaggaatg

SEQ ID NO: 1490087 - DNA, 25 bp, Homo sapien
ggttaaaatagatctgacataggct

SEQ ID NO: 1490088 - DNA, 25 bp, Homo sapien
tgagagtggctaaaacatataattg

SEQ ID NO: 1490089 - DNA, 25 bp, Homo sapien
cacaaggtctgaaaggctactgtca

SEQ ID NO: 1490090 - DNA, 25 bp, Homo sapien
atgtgcagaaccttaatctcacaag

SEQ ID NO: 1490091 - DNA, 25 bp, Homo sapien
catgtgcagaaccttaatctcacaa

SEQ ID NO: 1490092 - DNA, 25 bp, Homo sapien
gaccctcaaatgtcacgagccctaa

SEQ ID NO: 1490093 - DNA, 25 bp, Homo sapien
tcgcacagattaagagtactcagag

SEQ ID NO: 1490094 - DNA, 25 bp, Homo sapien
tgtacaatgggaatgcagttaaaac

SEQ ID NO: 1490095 - DNA, 25 bp, Homo sapien
tgaaaaagcaacctgagcataagac

SEQ ID NO: 1490096 - DNA, 25 bp, Homo sapien
caagtcatatgcgagtttccaaagt

SEQ ID NO: 1490097 - DNA, 25 bp, Homo sapien
gaatacaagtcatatgcgagtttcc

SEQ ID NO: 1490098 - DNA, 25 bp, Homo sapien
tacaggaatacaagtcatatgcgag

SEQ ID NO: 1490099 - DNA, 25 bp, Homo sapien
tacaagtcatatgcgagtttccaaa

SEQ ID NO: 1490100 - DNA, 25 bp, Homo sapien
aattcttaaagagccctcgagaaga

SEQ ID NO: 1490101 - DNA, 25 bp, Homo sapien
taaagagccctcgagaagacatagc

SEQ ID NO: 1490102 - DNA, 25 bp, Homo sapien
aagagccctcgagaagacatagcag

SEQ ID NO: 1490103 - DNA, 25 bp, Homo sapien
tcttaaagagccctcgagaagacat

SEQ ID NO: 1490104 - DNA, 25 bp, Homo sapien
tagtgagctgtgactgcagcactgc

SEQ ID NO: 1490105 - DNA, 25 bp, Homo sapien
gggaagttgagactgtagtgagctg

SEQ ID NO: 1490106 - DNA, 25 bp, Homo sapien
actccagcctgggcaatgggagtga

SEQ ID NO: 1490107 - DNA, 25 bp, Homo sapien
ctgagcctgggaagttgagactgta

SEQ ID NO: 1490108 - DNA, 25 bp, Homo sapien
aaagttttgtcactttcgagcgcaa

SEQ ID NO: 1490109 - DNA, 25 bp, Homo sapien
actttcgagcgcaaccactttggca

SEQ ID NO: 1490110 - DNA, 25 bp, Homo sapien
gcttcaagtaatgcctgagtcagga

SEQ ID NO: 1490111 - DNA, 25 bp, Homo sapien
ccagcttcaagtaatgcctgagtca

SEQ ID NO: 1490112 - DNA, 25 bp, Homo sapien
taaagtctaagctggccttagacgc

SEQ ID NO: 1490113 - DNA, 25 bp, Homo sapien
gacgccttccttggcggattcctga

SEQ ID NO: 1490114 - DNA, 25 bp, Homo sapien
tgtggaggtctacttggttttccca

SEQ ID NO: 1490115 - DNA, 25 bp, Homo sapien
tttcccaaatagatttgcgccaggg

SEQ ID NO: 1490116 - DNA, 25 bp, Homo sapien
agcccacagtggttcctcgccggca

SEQ ID NO: 1490117 - DNA, 25 bp, Homo sapien
atgctttcgcgtcgccgcttcagac

SEQ ID NO: 1490118 - DNA, 25 bp, Homo sapien
gagcccacagtggttcctcgccggc

SEQ ID NO: 1490119 - DNA, 25 bp, Homo sapien
ctaaaatgcaaaagcgaccagcgcc

SEQ ID NO: 1490120 - DNA, 25 bp, Homo sapien
taaaatgcaaaagcgaccagcgccc

SEQ ID NO: 1490121 - DNA, 25 bp, Homo sapien
tagtgcagctactacagtgaacccc

SEQ ID NO: 1490122 - DNA, 25 bp, Homo sapien
gggccaggtcaagcggaagtaaaca

SEQ ID NO: 1490123 - DNA, 25 bp, Homo sapien
gcagggtatcccacgtggaacattt

SEQ ID NO: 1490124 - DNA, 25 bp, Homo sapien
cattttctggcgtccgggccaggtc

SEQ ID NO: 1490125 - DNA, 25 bp, Homo sapien
agagcctgcgcatgcgaacagcgga

SEQ ID NO: 1490126 - DNA, 25 bp, Homo sapien
ctagagcctgcgcatgcgaacagcg

SEQ ID NO: 1490127 - DNA, 25 bp, Homo sapien
ctgcgcatgcgaacagcggagcctt

SEQ ID NO: 1490128 - DNA, 25 bp, Homo sapien
tgcgaacagcggagccttcctgctt

SEQ ID NO: 1490129 - DNA, 25 bp, Homo sapien
gaccgttgaggagagcgaccgacca

SEQ ID NO: 1490130 - DNA, 25 bp, Homo sapien
ccgaggattgtgagtggaccgttga

SEQ ID NO: 1490131 - DNA, 25 bp, Homo sapien
tcagccgcccgaggattgtgagtgg

SEQ ID NO: 1490132 - DNA, 25 bp, Homo sapien
atccggctggtgtccggactcgtac

SEQ ID NO: 1490133 - DNA, 25 bp, Homo sapien
tggttgtccgcgctctgcgcttcct

SEQ ID NO: 1490134 - DNA, 25 bp, Homo sapien
aagctccgtgacagcacgtcggccg

SEQ ID NO: 1490135 - DNA, 25 bp, Homo sapien
agtgctctatgctccgcggtcgcgg

SEQ ID NO: 1490136 - DNA, 25 bp, Homo sapien
gggagacccgagcaagctccgtgac

SEQ ID NO: 1490137 - DNA, 25 bp, Homo sapien
ccacggtctccgttcctttctgttg

SEQ ID NO: 1490138 - DNA, 25 bp, Homo sapien
catcactaccactttggttgtcaag

SEQ ID NO: 1490139 - DNA, 25 bp, Homo sapien
ggttgtcaagaaccgcgtggtgtct

SEQ ID NO: 1490140 - DNA, 25 bp, Homo sapien
acggtctccgttcctttctgttgtg

SEQ ID NO: 1490141 - DNA, 25 bp, Homo sapien
gaagcagtctctaccttgttgttgt

SEQ ID NO: 1490142 - DNA, 25 bp, Homo sapien
acaaatcttatgattccaggtcact

SEQ ID NO: 1490143 - DNA, 25 bp, Homo sapien
gattcacctctagtgcatctataga

SEQ ID NO: 1490144 - DNA, 25 bp, Homo sapien
ggtcacttggtgagactgaagcagt

SEQ ID NO: 1490145 - DNA, 25 bp, Homo sapien
tagccattttgatattagcaaagtc

SEQ ID NO: 1490146 - DNA, 25 bp, Homo sapien
ttgtttgtggacctggataagtagt

SEQ ID NO: 1490147 - DNA, 25 bp, Homo sapien
tagttttaagaatttggctaggcac

SEQ ID NO: 1490148 - DNA, 25 bp, Homo sapien
tgaatttaatcggatttgaaaaatc

SEQ ID NO: 1490149 - DNA, 25 bp, Homo sapien
ttgttgtcacacgagcatttccagg

SEQ ID NO: 1490150 - DNA, 25 bp, Homo sapien
tttgataaattgctgggtgcgtttg

SEQ ID NO: 1490151 - DNA, 25 bp, Homo sapien
gataaattgctgggtgcgtttggtt

SEQ ID NO: 1490152 - DNA, 25 bp, Homo sapien
gctgggtgcgtttggttttgttgtc

SEQ ID NO: 1490153 - DNA, 25 bp, Homo sapien
gggactacatacatacgccaccacg

SEQ ID NO: 1490154 - DNA, 25 bp, Homo sapien
tgggactacatacatacgccaccac

SEQ ID NO: 1490155 - DNA, 25 bp, Homo sapien
ggggtaagccactgcgcccggccaa

SEQ ID NO: 1490156 - DNA, 25 bp, Homo sapien
gtaagccactgcgcccggccaatac

SEQ ID NO: 1490157 - DNA, 25 bp, Homo sapien
catacccaattctctcttgaactga

SEQ ID NO: 1490158 - DNA, 25 bp, Homo sapien
tctcactggagctattggaaacgtc

SEQ ID NO: 1490159 - DNA, 25 bp, Homo sapien
catgttgttaaatccggtggtcaga

SEQ ID NO: 1490160 - DNA, 25 bp, Homo sapien
ggtggtcagacctcagttttcatct

SEQ ID NO: 1490161 - DNA, 25 bp, Homo sapien
gggacattgccgcccccgtgatggt

SEQ ID NO: 1490162 - DNA, 25 bp, Homo sapien
ttgagcttggcaacgtgcgccacag

SEQ ID NO: 1490163 - DNA, 25 bp, Homo sapien
ttttgagcttggcaacgtgcgccac

SEQ ID NO: 1490164 - DNA, 25 bp, Homo sapien
cccgggacattgccgcccccgtgat

SEQ ID NO: 1490165 - DNA, 25 bp, Homo sapien
cccctgtgtctctagatgggcaaat

SEQ ID NO: 1490166 - DNA, 25 bp, Homo sapien
cctggcccagcggtgacatgttttt

SEQ ID NO: 1490167 - DNA, 25 bp, Homo sapien
ggtgaccgccgtgttctttctggaa

SEQ ID NO: 1490168 - DNA, 25 bp, Homo sapien
tatcaatctgccatagaaggagcca

SEQ ID NO: 1490169 - DNA, 25 bp, Homo sapien
ggtgagctcgggaacataacgatgt

SEQ ID NO: 1490170 - DNA, 25 bp, Homo sapien
tgaaagtgtgttactgcgcatgcat

SEQ ID NO: 1490171 - DNA, 25 bp, Homo sapien
tgtctcagagaaaccatgggtgtcc

SEQ ID NO: 1490172 - DNA, 25 bp, Homo sapien
tatttgcccataggcaaccagagcc

SEQ ID NO: 1490173 - DNA, 25 bp, Homo sapien
cagtgcagaactatgagcaacagcg

SEQ ID NO: 1490174 - DNA, 25 bp, Homo sapien
tctggtgacatgaactgcgtaactg

SEQ ID NO: 1490175 - DNA, 25 bp, Homo sapien
tctattcccgtgagatcagtgcaga

SEQ ID NO: 1490176 - DNA, 25 bp, Homo sapien
cctgatcaaagaagagttgctccca

SEQ ID NO: 1490177 - DNA, 25 bp, Homo sapien
ccgcttcccaggttcaccctattct

SEQ ID NO: 1490178 - DNA, 25 bp, Homo sapien
cgcttcccaggttcaccctattctc

SEQ ID NO: 1490179 - DNA, 25 bp, Homo sapien
gagattccagagacgaggccttcac

SEQ ID NO: 1490180 - DNA, 25 bp, Homo sapien
caagttatgctgtcgtgattgctgg

SEQ ID NO: 1490181 - DNA, 25 bp, Homo sapien
ctagttccgactacacaagttatgc

SEQ ID NO: 1490182 - DNA, 25 bp, Homo sapien
gcaggctcatgtcgttttttcccca

SEQ ID NO: 1490183 - DNA, 25 bp, Homo sapien
gcctgtctgagtgtatgtggaaacg

SEQ ID NO: 1490184 - DNA, 25 bp, Homo sapien
cgtgcgtgaattaacagcttctcta

SEQ ID NO: 1490185 - DNA, 25 bp, Homo sapien
taaacactggaagaattaactgaag

SEQ ID NO: 1490186 - DNA, 25 bp, Homo sapien
taactgaagtcataacgtgcgtgaa

SEQ ID NO: 1490187 - DNA, 25 bp, Homo sapien
gaaccgcagactctacactgaaaag

SEQ ID NO: 1490188 - DNA, 25 bp, Homo sapien
cactgaaaaggtcccatcatatggg

SEQ ID NO: 1490189 - DNA, 25 bp, Homo sapien
taagacccatcagtcaatttgtgga

SEQ ID NO: 1490190 - DNA, 25 bp, Homo sapien
taaccattgtctgtaggtctgacag

SEQ ID NO: 1490191 - DNA, 25 bp, Homo sapien
catctgtgaccgttggtgtataaac

SEQ ID NO: 1490192 - DNA, 25 bp, Homo sapien
taaacggtcgaagcatttgatcaac

SEQ ID NO: 1490193 - DNA, 25 bp, Homo sapien
taagagcaacgtcattttcagtgtc

SEQ ID NO: 1490194 - DNA, 25 bp, Homo sapien
cacaagctggattcacgtagatccc

SEQ ID NO: 1490195 - DNA, 25 bp, Homo sapien
tggctgaaaatgggaacggcagaga

SEQ ID NO: 1490196 - DNA, 25 bp, Homo sapien
ctggctgaaaatgggaacggcagag

SEQ ID NO: 1490197 - DNA, 25 bp, Homo sapien
actggctgaaaatgggaacggcaga

SEQ ID NO: 1490198 - DNA, 25 bp, Homo sapien
gtagtgtgacgtgatggaggagatg

SEQ ID NO: 1490199 - DNA, 25 bp, Homo sapien
agagcaggtagtgtgacgtgatgga

SEQ ID NO: 1490200 - DNA, 25 bp, Homo sapien
gcaggtagtgtgacgtgatggagga

SEQ ID NO: 1490201 - DNA, 25 bp, Homo sapien
caggtagtgtgacgtgatggaggag

SEQ ID NO: 1490202 - DNA, 25 bp, Homo sapien
ttgctcttccgcttcagcatatacg

SEQ ID NO: 1490203 - DNA, 25 bp, Homo sapien
tcctcgccttgctcttccgcttcag

SEQ ID NO: 1490204 - DNA, 25 bp, Homo sapien
tcagcatatacgtctccaagctcag

SEQ ID NO: 1490205 - DNA, 25 bp, Homo sapien
tccgcttcagcatatacgtctccaa

SEQ ID NO: 1490206 - DNA, 25 bp, Homo sapien
gccctcttgccgtgttcatgctttg

SEQ ID NO: 1490207 - DNA, 25 bp, Homo sapien
ttggtagaacaccttcagagccttg

SEQ ID NO: 1490208 - DNA, 25 bp, Homo sapien
tgaaaagctgccctcttgccgtgtt

SEQ ID NO: 1490209 - DNA, 25 bp, Homo sapien
gttcatgctttggtagaacaccttc

SEQ ID NO: 1490210 - DNA, 25 bp, Homo sapien
atggcagttgcgcagtcatcccgct

SEQ ID NO: 1490211 - DNA, 25 bp, Homo sapien
ttggctcatctccccggcggatggc

SEQ ID NO: 1490212 - DNA, 25 bp, Homo sapien
atcccgctgatcttcagagtgttgg

SEQ ID NO: 1490213 - DNA, 25 bp, Homo sapien
atctccccggcggatggcagttgcg

SEQ ID NO: 1490214 - DNA, 25 bp, Homo sapien
tgaccagaagcagttttcgcaagtg

SEQ ID NO: 1490215 - DNA, 25 bp, Homo sapien
gcagttttcgcaagtgatgctttga

SEQ ID NO: 1490216 - DNA, 25 bp, Homo sapien
cagttttcgcaagtgatgctttgag

SEQ ID NO: 1490217 - DNA, 25 bp, Homo sapien
cagaagcagttttcgcaagtgatgc

SEQ ID NO: 1490218 - DNA, 25 bp, Homo sapien
tgttcctgagcggttccgtctcctg

SEQ ID NO: 1490219 - DNA, 25 bp, Homo sapien
gagcggttccgtctcctgctctagc

SEQ ID NO: 1490220 - DNA, 25 bp, Homo sapien
ctgttaatgttcctgagcggttccg

SEQ ID NO: 1490221 - DNA, 25 bp, Homo sapien
ctctcagggctctgttaatgttcct

SEQ ID NO: 1490222 - DNA, 25 bp, Homo sapien
ctggcttatatccttcacagtggaa

SEQ ID NO: 1490223 - DNA, 25 bp, Homo sapien
tggcttatatccttcacagtggaaa

SEQ ID NO: 1490224 - DNA, 25 bp, Homo sapien
ttaaggctgcaaattggacagtctc

SEQ ID NO: 1490225 - DNA, 25 bp, Homo sapien
aaggccccataggtcaacaataagg

SEQ ID NO: 1490226 - DNA, 25 bp, Homo sapien
ccatacaggtttggtatagatagtg

SEQ ID NO: 1490227 - DNA, 25 bp, Homo sapien
taattcagaaactcctgagatgcag

SEQ ID NO: 1490228 - DNA, 25 bp, Homo sapien
gagtgccccgctttgcatcttcctt

SEQ ID NO: 1490229 - DNA, 25 bp, Homo sapien
cttcatccagttgacgccaaggcac

SEQ ID NO: 1490230 - DNA, 25 bp, Homo sapien
ggcaccggacaatgtgaatctgaaa

SEQ ID NO: 1490231 - DNA, 25 bp, Homo sapien
agggtcaataaccacatcctcctcg

SEQ ID NO: 1490232 - DNA, 25 bp, Homo sapien
cacagggccgtgatctccatctaga

SEQ ID NO: 1490233 - DNA, 25 bp, Homo sapien
tgctatgcaggtatgcagcaccgcc

SEQ ID NO: 1490234 - DNA, 25 bp, Homo sapien
tagaaagcgctggtaaagttcctgc

SEQ ID NO: 1490235 - DNA, 25 bp, Homo sapien
cagaaagggtcgtcatctcgagcca

SEQ ID NO: 1490236 - DNA, 25 bp, Homo sapien
tattaattcctggacctgttacttc

SEQ ID NO: 1490237 - DNA, 25 bp, Homo sapien
tggacctgttacttccccattgctt

SEQ ID NO: 1490238 - DNA, 25 bp, Homo sapien
aatatcgtattaattcctggacctg

SEQ ID NO: 1490239 - DNA, 25 bp, Homo sapien
gacatcaagaatatcgtattaattc

SEQ ID NO: 1490240 - DNA, 25 bp, Homo sapien
caggacaacagcctgccgctgtctt

SEQ ID NO: 1490241 - DNA, 25 bp, Homo sapien
tccaggacaacagcctgccgctgtc

SEQ ID NO: 1490242 - DNA, 25 bp, Homo sapien
atccaggacaacagcctgccgctgt

SEQ ID NO: 1490243 - DNA, 25 bp, Homo sapien
ggacaacagcctgccgctgtcttcc

SEQ ID NO: 1490244 - DNA, 25 bp, Homo sapien
gaaacaaacctgaagccacaggagg

SEQ ID NO: 1490245 - DNA, 25 bp, Homo sapien
tttagaccataaatatcaggtaaaa

SEQ ID NO: 1490246 - DNA, 25 bp, Homo sapien
cagagggattccaggtaggtcgttt

SEQ ID NO: 1490247 - DNA, 25 bp, Homo sapien
aaactagcaactccttttctgagca

SEQ ID NO: 1490248 - DNA, 25 bp, Homo sapien
gaagtccatgctgactccctagggt

SEQ ID NO: 1490249 - DNA, 25 bp, Homo sapien
catgctgactccctagggtgagggt

SEQ ID NO: 1490250 - DNA, 25 bp, Homo sapien
agagaagtccatgctgactccctag

SEQ ID NO: 1490251 - DNA, 25 bp, Homo sapien
tccatgctgactccctagggtgagg

SEQ ID NO: 1490252 - DNA, 25 bp, Homo sapien
gggagaccctgtctgcatcacacag

SEQ ID NO: 1490253 - DNA, 25 bp, Homo sapien
ggagaccctgtctgcatcacacaga

SEQ ID NO: 1490254 - DNA, 25 bp, Homo sapien
gagaccctgtctgcatcacacagac

SEQ ID NO: 1490255 - DNA, 25 bp, Homo sapien
gaggatccttgcttggtttcctccc

SEQ ID NO: 1490256 - DNA, 25 bp, Homo sapien
tccaggaggatccttgcttggtttc

SEQ ID NO: 1490257 - DNA, 25 bp, Homo sapien
gaaaggggccggtctctgaggagct

SEQ ID NO: 1490258 - DNA, 25 bp, Homo sapien
cctccctggggcagcatcttggcag

SEQ ID NO: 1490259 - DNA, 25 bp, Homo sapien
gctgcagctggtaaagataacctgt

SEQ ID NO: 1490260 - DNA, 25 bp, Homo sapien
gataacctgtgtccccatggatcct

SEQ ID NO: 1490261 - DNA, 25 bp, Homo sapien
ttgactgggtctccggaggctgcag

SEQ ID NO: 1490262 - DNA, 25 bp, Homo sapien
ttgcccttgactgggtctccggagg

SEQ ID NO: 1490263 - DNA, 25 bp, Homo sapien
cgtccccgtggatcctcacctcctg

SEQ ID NO: 1490264 - DNA, 25 bp, Homo sapien
gtccccgtggatcctcacctcctga

SEQ ID NO: 1490265 - DNA, 25 bp, Homo sapien
ccgtccccgtggatcctcacctcct

SEQ ID NO: 1490266 - DNA, 25 bp, Homo sapien
tcccgtccccgtggatcctcacctc

SEQ ID NO: 1490267 - DNA, 25 bp, Homo sapien
ttccccgtggatcctcacctcctga

SEQ ID NO: 1490268 - DNA, 25 bp, Homo sapien
gtccccgtggatcctcacctcctga

SEQ ID NO: 1490269 - DNA, 25 bp, Homo sapien
gagtcccttccccgtggatcctcac

SEQ ID NO: 1490270 - DNA, 25 bp, Homo sapien
gagtcccgtccccatggatcttcac

SEQ ID NO: 1490271 - DNA, 25 bp, Homo sapien
tagcccctggaatctgacgatgcca

SEQ ID NO: 1490272 - DNA, 25 bp, Homo sapien
gacgatgccaaatttttcaccttca

SEQ ID NO: 1490273 - DNA, 25 bp, Homo sapien
gacctccttctgtaggtcatagccc

SEQ ID NO: 1490274 - DNA, 25 bp, Homo sapien
tcgtgagacccgtggtgggtcacct

SEQ ID NO: 1490275 - DNA, 25 bp, Homo sapien
gaaccagcggcatcagtttgatgta

SEQ ID NO: 1490276 - DNA, 25 bp, Homo sapien
accagcggcatcagtttgatgtagt

SEQ ID NO: 1490277 - DNA, 25 bp, Homo sapien
atttgatttgcttctgaaccagcgg

SEQ ID NO: 1490278 - DNA, 25 bp, Homo sapien
tcatttgatttgcttctgaaccagc

SEQ ID NO: 1490279 - DNA, 25 bp, Homo sapien
actggggcccgccttgccgtctcca

SEQ ID NO: 1490280 - DNA, 25 bp, Homo sapien
aggacactggggcccgccttgccgt

SEQ ID NO: 1490281 - DNA, 25 bp, Homo sapien
gcccgccttgccgtctccaccgtcc

SEQ ID NO: 1490282 - DNA, 25 bp, Homo sapien
cttgccgtctccaccgtccgcagca

SEQ ID NO: 1490283 - DNA, 25 bp, Homo sapien
cctagggtccgagccagggtctggg

SEQ ID NO: 1490284 - DNA, 25 bp, Homo sapien
ccctagggtccgagccagggtctgg

SEQ ID NO: 1490285 - DNA, 25 bp, Homo sapien
gaaggcgcgcgaaagccccagcaga

SEQ ID NO: 1490286 - DNA, 25 bp, Homo sapien
aggtcactcagatcgcagcgggctc

SEQ ID NO: 1490287 - DNA, 25 bp, Homo sapien
agaggcctcgggctgcacgttcttc

SEQ ID NO: 1490288 - DNA, 25 bp, Homo sapien
gttcttccgggccgcgcatttgcag

SEQ ID NO: 1490289 - DNA, 25 bp, Homo sapien
ctggaagaagtcgtaatcgaacctg

SEQ ID NO: 1490290 - DNA, 25 bp, Homo sapien
aaaccccacgtacaggtaggtgctg

SEQ ID NO: 1490291 - DNA, 25 bp, Homo sapien
gagtttgtctgcactcgctccctcc

SEQ ID NO: 1490292 - DNA, 25 bp, Homo sapien
aggtaggtgctgttggatcccaaaa

SEQ ID NO: 1490293 - DNA, 25 bp, Homo sapien
ggacattctgtgagcctgcaggaaa

SEQ ID NO: 1490294 - DNA, 25 bp, Homo sapien
tgggggggacctaggacattctgtg

SEQ ID NO: 1490295 - DNA, 25 bp, Homo sapien
taggacattctgtgagcctgcagga

SEQ ID NO: 1490296 - DNA, 25 bp, Homo sapien
gggacctaggacattctgtgagcct

SEQ ID NO: 1490297 - DNA, 25 bp, Homo sapien
gtgatgggcaccccgttaacggcaa

SEQ ID NO: 1490298 - DNA, 25 bp, Homo sapien
gagtgaccgtcactttaccgtcggc

SEQ ID NO: 1490299 - DNA, 25 bp, Homo sapien
taccgtcggcatttgtgaaggaagc

SEQ ID NO: 1490300 - DNA, 25 bp, Homo sapien
catttgctatgtggagtgaccgtca

SEQ ID NO: 1490301 - DNA, 25 bp, Homo sapien
ttttgatctgtttctgcgccctcgc

SEQ ID NO: 1490302 - DNA, 25 bp, Homo sapien
ctactccgggtacgttttgatctgt

SEQ ID NO: 1490303 - DNA, 25 bp, Homo sapien
tgtttctgcgccctcgccgtataaa

SEQ ID NO: 1490304 - DNA, 25 bp, Homo sapien
tgcgccctcgccgtataaattcaga

SEQ ID NO: 1490305 - DNA, 25 bp, Homo sapien
tgatctgtctgaaggatgtaggtga

SEQ ID NO: 1490306 - DNA, 25 bp, Homo sapien
ctgtgcgttggactaaggacgtgtt

SEQ ID NO: 1490307 - DNA, 25 bp, Homo sapien
ggatgtaggtgatggtgcttcccag

SEQ ID NO: 1490308 - DNA, 25 bp, Homo sapien
tggactaaggacgtgttctggaaag

SEQ ID NO: 1490309 - DNA, 25 bp, Homo sapien
cccaaaccttgaatcgtgatagcat

SEQ ID NO: 1490310 - DNA, 25 bp, Homo sapien
gaatcgtgatagcatttgaggcagc

SEQ ID NO: 1490311 - DNA, 25 bp, Homo sapien
gcagcctgaccggtgccacatgaac

SEQ ID NO: 1490312 - DNA, 25 bp, Homo sapien
gcatttgaggcagcctgaccggtgc

SEQ ID NO: 1490313 - DNA, 25 bp, Homo sapien
ggtgtttgaagctccgtttctgtgt

SEQ ID NO: 1490314 - DNA, 25 bp, Homo sapien
caccattaggtctgggccttaggag

SEQ ID NO: 1490315 - DNA, 25 bp, Homo sapien
gaggaagacaccattaggtctgggc

SEQ ID NO: 1490316 - DNA, 25 bp, Homo sapien
ttaggagacccactgaatactggcc

SEQ ID NO: 1490317 - DNA, 25 bp, Homo sapien
tggggggtgcacggagcccttgcgg

SEQ ID NO: 1490318 - DNA, 25 bp, Homo sapien
acatcccacggccatctcgcacgga

SEQ ID NO: 1490319 - DNA, 25 bp, Homo sapien
cttgcggccgtccttggggtgctcg

SEQ ID NO: 1490320 - DNA, 25 bp, Homo sapien
gcacggagccctcgcggcggccctg

SEQ ID NO: 1490321 - DNA, 25 bp, Homo sapien
aaggtgagggaaggtcatcatctgc

SEQ ID NO: 1490322 - DNA, 25 bp, Homo sapien
gagggaaggtcatcatctgccgctc

SEQ ID NO: 1490323 - DNA, 25 bp, Homo sapien
gtcctcgctgaggttaagaaggtga

SEQ ID NO: 1490324 - DNA, 25 bp, Homo sapien
gtgagggaaggtcatcatctgccgc

SEQ ID NO: 1490325 - DNA, 25 bp, Homo sapien
tgcaggagaagtggagagggttggg

SEQ ID NO: 1490326 - DNA, 25 bp, Homo sapien
caggagaagtggagagggttgggtg

SEQ ID NO: 1490327 - DNA, 25 bp, Homo sapien
gagaagtggagagggttgggtgtca

SEQ ID NO: 1490328 - DNA, 25 bp, Homo sapien
ctgcaggagaagtggagagggttgg

SEQ ID NO: 1490329 - DNA, 25 bp, Homo sapien
gggagagcaacacttctttcccgtc

SEQ ID NO: 1490330 - DNA, 25 bp, Homo sapien
tggggagagcaacacttctttcccg

SEQ ID NO: 1490331 - DNA, 25 bp, Homo sapien
ctggggagagcaacacttctttccc

SEQ ID NO: 1490332 - DNA, 25 bp, Homo sapien
ggagagcaacacttctttcccgtct

SEQ ID NO: 1490333 - DNA, 25 bp, Homo sapien
tctgcctggagacaggccgacggct

SEQ ID NO: 1490334 - DNA, 25 bp, Homo sapien
tgctacgcgtaggtccacatctggc

SEQ ID NO: 1490335 - DNA, 25 bp, Homo sapien
tagtccgtgtctgtgcttgagagca

SEQ ID NO: 1490336 - DNA, 25 bp, Homo sapien
caccgattctgatttagggagcgct

SEQ ID NO: 1490337 - DNA, 25 bp, Homo sapien
tacggagatttgtgacaggcagagc

SEQ ID NO: 1490338 - DNA, 25 bp, Homo sapien
ttctcgataattgcgcacgttggaa

SEQ ID NO: 1490339 - DNA, 25 bp, Homo sapien
gggttctcgataattgcgcacgttg

SEQ ID NO: 1490340 - DNA, 25 bp, Homo sapien
cgataattgcgcacgttggaaccac

SEQ ID NO: 1490341 - DNA, 25 bp, Homo sapien
tcacaggggttctcgataattgcgc

SEQ ID NO: 1490342 - DNA, 25 bp, Homo sapien
ttccagcgtcatctctccgcaggaa

SEQ ID NO: 1490343 - DNA, 25 bp, Homo sapien
gggcagacatcaggtggccactgtc

SEQ ID NO: 1490344 - DNA, 25 bp, Homo sapien
tggtttctgaggttgggcggagccc

SEQ ID NO: 1490345 - DNA, 25 bp, Homo sapien
ctttagcgctgacggctgcccggga

SEQ ID NO: 1490346 - DNA, 25 bp, Homo sapien
ccactgctctgttccggatctttta

SEQ ID NO: 1490347 - DNA, 25 bp, Homo sapien
actgctctgttccggatcttttaag

SEQ ID NO: 1490348 - DNA, 25 bp, Homo sapien
cactgctctgttccggatcttttaa

SEQ ID NO: 1490349 - DNA, 25 bp, Homo sapien
tgctctgttccggatcttttaagcc

SEQ ID NO: 1490350 - DNA, 25 bp, Homo sapien
agaaccaggcctgacagtcccagtc

SEQ ID NO: 1490351 - DNA, 25 bp, Homo sapien
ctggtggattcccaaggccggcctt

SEQ ID NO: 1490352 - DNA, 25 bp, Homo sapien
gggacggtcctaccatggccacaga

SEQ ID NO: 1490353 - DNA, 25 bp, Homo sapien
ttcaggagagcagacttggtacgag

SEQ ID NO: 1490354 - DNA, 25 bp, Homo sapien
gccacctccacagactgcagtgtgc

SEQ ID NO: 1490355 - DNA, 25 bp, Homo sapien
ccacctccacagactgcagtgtgca

SEQ ID NO: 1490356 - DNA, 25 bp, Homo sapien
aaatccccttgtctggcaccacgcc

SEQ ID NO: 1490357 - DNA, 25 bp, Homo sapien
cccagcgagtggctctgaccgaggc

SEQ ID NO: 1490358 - DNA, 25 bp, Homo sapien
tggctctgaccgaggcgctgtcgct

SEQ ID NO: 1490359 - DNA, 25 bp, Homo sapien
ctgtcgcttacagagctcatcttca

SEQ ID NO: 1490360 - DNA, 25 bp, Homo sapien
tgtcagctggacttacggctgcgat

SEQ ID NO: 1490361 - DNA, 25 bp, Homo sapien
ctttccgcatatctcaatgttgata

SEQ ID NO: 1490362 - DNA, 25 bp, Homo sapien
caatgttgatagagtttcctcatag

SEQ ID NO: 1490363 - DNA, 25 bp, Homo sapien
gcagatgtcagctggacttacggct

SEQ ID NO: 1490364 - DNA, 25 bp, Homo sapien
gagaaatgcatgtaactggtcccga

SEQ ID NO: 1490365 - DNA, 25 bp, Homo sapien
tgttgaggcccacaggtaactgaca

SEQ ID NO: 1490366 - DNA, 25 bp, Homo sapien
ggtcccgacagggagcatttctctc

SEQ ID NO: 1490367 - DNA, 25 bp, Homo sapien
gaagtattgaaactggtcaggattg

SEQ ID NO: 1490368 - DNA, 25 bp, Homo sapien
tctctgtatggaatgtgcaagacct

SEQ ID NO: 1490369 - DNA, 25 bp, Homo sapien
tgtatggaatgtgcaagaccttctt

SEQ ID NO: 1490370 - DNA, 25 bp, Homo sapien
ttccccatagctgcgtcagccagaa

SEQ ID NO: 1490371 - DNA, 25 bp, Homo sapien
acagaatctctgtatggaatgtgca

SEQ ID NO: 1490372 - DNA, 25 bp, Homo sapien
gccaggtccaccaaattaatactgg

SEQ ID NO: 1490373 - DNA, 25 bp, Homo sapien
tttctgcctctcacttcttgccagg

SEQ ID NO: 1490374 - DNA, 25 bp, Homo sapien
atttctgcctctcacttcttgccag

SEQ ID NO: 1490375 - DNA, 25 bp, Homo sapien
attaatactggattgtttggtgaga

SEQ ID NO: 1490376 - DNA, 25 bp, Homo sapien
gggaaccttccacggagcagccttg

SEQ ID NO: 1490377 - DNA, 25 bp, Homo sapien
cagggggaaccttccacggagcagc

SEQ ID NO: 1490378 - DNA, 25 bp, Homo sapien
tatgccagggggaaccttccacgga

SEQ ID NO: 1490379 - DNA, 25 bp, Homo sapien
accttccacggagcagccttgtgtg

SEQ ID NO: 1490380 - DNA, 25 bp, Homo sapien
gcggccttgtgtggagatcccacca

SEQ ID NO: 1490381 - DNA, 25 bp, Homo sapien
cagagcggccttgtgtggagatccc

SEQ ID NO: 1490382 - DNA, 25 bp, Homo sapien
agcggccttgtgtggagatcccacc

SEQ ID NO: 1490383 - DNA, 25 bp, Homo sapien
gagcggccttgtgtggagatcccac

SEQ ID NO: 1490384 - DNA, 25 bp, Homo sapien
atggtgatgaccaagtgagaccggc

SEQ ID NO: 1490385 - DNA, 25 bp, Homo sapien
tgaactggatggtgatgaccaagtg

SEQ ID NO: 1490386 - DNA, 25 bp, Homo sapien
ctgcttgaactggatggtgatgacc

SEQ ID NO: 1490387 - DNA, 25 bp, Homo sapien
atgaccaagtgagaccggctgctgc

SEQ ID NO: 1490388 - DNA, 25 bp, Homo sapien
aatttgggcatagttctcacagggc

SEQ ID NO: 1490389 - DNA, 25 bp, Homo sapien
ttcaggccttccacgtaaaatccca

SEQ ID NO: 1490390 - DNA, 25 bp, Homo sapien
tgttccttgttccatcagcctttca

SEQ ID NO: 1490391 - DNA, 25 bp, Homo sapien
taaaatcccagctgttgatcttccc

SEQ ID NO: 1490392 - DNA, 25 bp, Homo sapien
gatgtttagtggtgtctttaaggac

SEQ ID NO: 1490393 - DNA, 25 bp, Homo sapien
gctccaggccgagaaaggatagatg

SEQ ID NO: 1490394 - DNA, 25 bp, Homo sapien
gaaacggtgctccaggccgagaaag

SEQ ID NO: 1490395 - DNA, 25 bp, Homo sapien
gagctggatgtttagtggtgtcttt

SEQ ID NO: 1490396 - DNA, 25 bp, Homo sapien
ggaacggttccgtgtgtgaagagaa

SEQ ID NO: 1490397 - DNA, 25 bp, Homo sapien
acggttccgtgtgtgaagagaaggg

SEQ ID NO: 1490398 - DNA, 25 bp, Homo sapien
aggaggaacggttccgtgtgtgaag

SEQ ID NO: 1490399 - DNA, 25 bp, Homo sapien
gagaaggggacgttgatgaagttgg

SEQ ID NO: 1490400 - DNA, 25 bp, Homo sapien
tgtaaatttctagcatactgaacat

SEQ ID NO: 1490401 - DNA, 25 bp, Homo sapien
aaatttctagcatactgaacataac

SEQ ID NO: 1490402 - DNA, 25 bp, Homo sapien
cttgtaaatttctagcatactgaac

SEQ ID NO: 1490403 - DNA, 25 bp, Homo sapien
gtaaatttctagcatactgaacata

SEQ ID NO: 1490404 - DNA, 25 bp, Homo sapien
gccctgcctgacctggtgctttttt

SEQ ID NO: 1490405 - DNA, 25 bp, Homo sapien
tgatggccagcagcggcctgtgcca

SEQ ID NO: 1490406 - DNA, 25 bp, Homo sapien
gttctccaaatgtggcgtgatggcc

SEQ ID NO: 1490407 - DNA, 25 bp, Homo sapien
ggcctgtgccaatccgtggcggcct

SEQ ID NO: 1490408 - DNA, 25 bp, Homo sapien
tgcccagaacgctgcgtcatgacag

SEQ ID NO: 1490409 - DNA, 25 bp, Homo sapien
cgtcatgacagtgtacgcgcgcatg

SEQ ID NO: 1490410 - DNA, 25 bp, Homo sapien
cgcatgcgtgttgtgggaattgcac

SEQ ID NO: 1490411 - DNA, 25 bp, Homo sapien
attgcacgggagatggaaggcttca

SEQ ID NO: 1490412 - DNA, 25 bp, Homo sapien
taaagaaaggattcgagaatacgta

SEQ ID NO: 1490413 - DNA, 25 bp, Homo sapien
tctcgattgctcgaaagagctcctc

SEQ ID NO: 1490414 - DNA, 25 bp, Homo sapien
tggttctcgattgctcgaaagagct

SEQ ID NO: 1490415 - DNA, 25 bp, Homo sapien
agctcctcacacacagttggaataa

SEQ ID NO: 1490416 - DNA, 25 bp, Homo sapien
gattgctcgaaagagctcctcacac

SEQ ID NO: 1490417 - DNA, 25 bp, Homo sapien
gccataggctaggagagttgcatta

SEQ ID NO: 1490418 - DNA, 25 bp, Homo sapien
tgcattatagccttgccaagcactg

SEQ ID NO: 1490419 - DNA, 25 bp, Homo sapien
tgccaaggtcatggaagacgtctct

SEQ ID NO: 1490420 - DNA, 25 bp, Homo sapien
ccaaacccaatcatggaatagcttt

SEQ ID NO: 1490421 - DNA, 25 bp, Homo sapien
tagcagtgacgggaatagacaccct

SEQ ID NO: 1490422 - DNA, 25 bp, Homo sapien
caggaaagggcccacttgatagtga

SEQ ID NO: 1490423 - DNA, 25 bp, Homo sapien
tgccgtcctatggagaacacctgct

SEQ ID NO: 1490424 - DNA, 25 bp, Homo sapien
taaggcccacccgatatatgattcg

SEQ ID NO: 1490425 - DNA, 25 bp, Homo sapien
aaataaaaatagatcgggcgtgatg

SEQ ID NO: 1490426 - DNA, 25 bp, Homo sapien
gaccaatatgccaggtcaaaagtaa

SEQ ID NO: 1490427 - DNA, 25 bp, Homo sapien
tccattgtgagaccaatatgccagg

SEQ ID NO: 1490428 - DNA, 25 bp, Homo sapien
tcagctgaaataaggacaccatcct

SEQ ID NO: 1490429 - DNA, 25 bp, Homo sapien
ctggcctgcaaatttacgactagga

SEQ ID NO: 1490430 - DNA, 25 bp, Homo sapien
gcatggaaatcacacatttgctccc

SEQ ID NO: 1490431 - DNA, 25 bp, Homo sapien
atgcatggaaatcacacatttgctc

SEQ ID NO: 1490432 - DNA, 25 bp, Homo sapien
atggaaatcacacatttgctcccag

SEQ ID NO: 1490433 - DNA, 25 bp, Homo sapien
tgcatggaaatcacacatttgctcc

SEQ ID NO: 1490434 - DNA, 25 bp, Homo sapien
gaaaggcttgtctctagtcacatta

SEQ ID NO: 1490435 - DNA, 25 bp, Homo sapien
ttatgacaagcagttgttcctgtac

SEQ ID NO: 1490436 - DNA, 25 bp, Homo sapien
tgtgttacttttagcagctattatg

SEQ ID NO: 1490437 - DNA, 25 bp, Homo sapien
tcctgtactccctcggaatttttga

SEQ ID NO: 1490438 - DNA, 25 bp, Homo sapien
tgtaaagcaatttataccccaggac

SEQ ID NO: 1490439 - DNA, 25 bp, Homo sapien
aaaccattgttctcccagcgtgact

SEQ ID NO: 1490440 - DNA, 25 bp, Homo sapien
aaatagtgaagtttaacagctgggc

SEQ ID NO: 1490441 - DNA, 25 bp, Homo sapien
tgtgcttccctaaggaacaacggtg

SEQ ID NO: 1490442 - DNA, 25 bp, Homo sapien
tattcaccaaattgcgttggtttaa

SEQ ID NO: 1490443 - DNA, 25 bp, Homo sapien
ccatgtttattgtgctacttgcgca

SEQ ID NO: 1490444 - DNA, 25 bp, Homo sapien
catgtttattgtgctacttgcgcaa

SEQ ID NO: 1490445 - DNA, 25 bp, Homo sapien
atccatgtttattgtgctacttgcg

SEQ ID NO: 1490446 - DNA, 25 bp, Homo sapien
tccatgtttattgtgctacttgcgc

SEQ ID NO: 1490447 - DNA, 25 bp, Homo sapien
cataaatgacaagcagcttaaatac

SEQ ID NO: 1490448 - DNA, 25 bp, Homo sapien
gaaattttcaacaaggcagcgtaac

SEQ ID NO: 1490449 - DNA, 25 bp, Homo sapien
taaataagttcaatattccataaat

SEQ ID NO: 1490450 - DNA, 25 bp, Homo sapien
ttcaacaaggcagcgtaacatccat

SEQ ID NO: 1490451 - DNA, 25 bp, Homo sapien
ctgactaaaaggccgcactcgcact

SEQ ID NO: 1490452 - DNA, 25 bp, Homo sapien
cctttgataaggttgcaagtgagca

SEQ ID NO: 1490453 - DNA, 25 bp, Homo sapien
tttctgtggttcaatagcaagctcc

SEQ ID NO: 1490454 - DNA, 25 bp, Homo sapien
tattaggcacatacaagatgcactc

SEQ ID NO: 1490455 - DNA, 25 bp, Homo sapien
caagtgagcagtgaaccggtcaatc

SEQ ID NO: 1490456 - DNA, 25 bp, Homo sapien
ctgatgactttacaaataggtgtac

SEQ ID NO: 1490457 - DNA, 25 bp, Homo sapien
gaaaaattgcctggactgaaacaat

SEQ ID NO: 1490458 - DNA, 25 bp, Homo sapien
aacaatcactccatatggagttact

SEQ ID NO: 1490459 - DNA, 25 bp, Homo sapien
tggagttactttacttattgaagac

SEQ ID NO: 1490460 - DNA, 25 bp, Homo sapien
ttggtttgctcttgactccgtcagc

SEQ ID NO: 1490461 - DNA, 25 bp, Homo sapien
aatcagccgaatttctatgggagga

SEQ ID NO: 1490462 - DNA, 25 bp, Homo sapien
gaggaggtgaccaagcactttcttt

SEQ ID NO: 1490463 - DNA, 25 bp, Homo sapien
cagcatttttctgcgtaaaatttgc

SEQ ID NO: 1490464 - DNA, 25 bp, Homo sapien
aaagatatgatcaagtaagaataaa

SEQ ID NO: 1490465 - DNA, 25 bp, Homo sapien
aagatatgatcaagtaagaataaac

SEQ ID NO: 1490466 - DNA, 25 bp, Homo sapien
aaaagatatgatcaagtaagaataa

SEQ ID NO: 1490467 - DNA, 25 bp, Homo sapien
cccatgtggcatgtcagaaatgtca

SEQ ID NO: 1490468 - DNA, 25 bp, Homo sapien
cctgacaaagaggtaaaccatccca

SEQ ID NO: 1490469 - DNA, 25 bp, Homo sapien
gagtttctcacatagatacgccagt

SEQ ID NO: 1490470 - DNA, 25 bp, Homo sapien
ttgaattcaaccatgcctactaagc

SEQ ID NO: 1490471 - DNA, 25 bp, Homo sapien
tttctactgattgtgcatcatcttt

SEQ ID NO: 1490472 - DNA, 25 bp, Homo sapien
gtttctactgattgtgcatcatctt

SEQ ID NO: 1490473 - DNA, 25 bp, Homo sapien
actgagaagataaatccgaaactaa

SEQ ID NO: 1490474 - DNA, 25 bp, Homo sapien
tcttcaagcttgttcttattggatg

SEQ ID NO: 1490475 - DNA, 25 bp, Homo sapien
aatccgaaactaattctttcagctg

SEQ ID NO: 1490476 - DNA, 25 bp, Homo sapien
caagcttgttcttattggatgtgtt

SEQ ID NO: 1490477 - DNA, 25 bp, Homo sapien
tgccctggcatcttaggagtagcaa

SEQ ID NO: 1490478 - DNA, 25 bp, Homo sapien
ccacgttttctaggtatggcagaca

SEQ ID NO: 1490479 - DNA, 25 bp, Homo sapien
gaaaggtccggcaacaagatggcct

SEQ ID NO: 1490480 - DNA, 25 bp, Homo sapien
ggaggaaaccacgtcatcaacctgg

SEQ ID NO: 1490481 - DNA, 25 bp, Homo sapien
cagttgctgtgttagctgctttagg

SEQ ID NO: 1490482 - DNA, 25 bp, Homo sapien
taggttcaggcacatatggtaaagt

SEQ ID NO: 1490483 - DNA, 25 bp, Homo sapien
tctgcaattgctactttaataggtt

SEQ ID NO: 1490484 - DNA, 25 bp, Homo sapien
tgcaaaatcacctggctcaacttct

SEQ ID NO: 1490485 - DNA, 25 bp, Homo sapien
taagtgttccagagggatataactc

SEQ ID NO: 1490486 - DNA, 25 bp, Homo sapien
ggtcaatagtatcaaaattgtactg

SEQ ID NO: 1490487 - DNA, 25 bp, Homo sapien
tgaaagattcctagcctcttctcct

SEQ ID NO: 1490488 - DNA, 25 bp, Homo sapien
attaaatgaaagattcctagcctct

SEQ ID NO: 1490489 - DNA, 25 bp, Homo sapien
tacctaactatccacacttttctaa

SEQ ID NO: 1490490 - DNA, 25 bp, Homo sapien
ttttctaaatagcacgatccccgta

SEQ ID NO: 1490491 - DNA, 25 bp, Homo sapien
catttaaggacttattctattctca

SEQ ID NO: 1490492 - DNA, 25 bp, Homo sapien
tgatgctaacagttctgaaaacatt

SEQ ID NO: 1490493 - DNA, 25 bp, Homo sapien
aggctttcaagttcagtacctctcc

SEQ ID NO: 1490494 - DNA, 25 bp, Homo sapien
agtacctctcctgcaagggtttggt

SEQ ID NO: 1490495 - DNA, 25 bp, Homo sapien
ttgggctagactcaatcctcttccc

SEQ ID NO: 1490496 - DNA, 25 bp, Homo sapien
gggctgcataaaccatgaaattcct

SEQ ID NO: 1490497 - DNA, 25 bp, Homo sapien
gtagaaagtaacagagagatctcct

SEQ ID NO: 1490498 - DNA, 25 bp, Homo sapien
ccacccacctagacaatgacatttt

SEQ ID NO: 1490499 - DNA, 25 bp, Homo sapien
cacctagacaatgacattttcccac

SEQ ID NO: 1490500 - DNA, 25 bp, Homo sapien
gagatctcctgaccaagaaggtaga

SEQ ID NO: 1490501 - DNA, 25 bp, Homo sapien
tcttctggtaagtcaacactttctt

SEQ ID NO: 1490502 - DNA, 25 bp, Homo sapien
gctcagagacaataggaccttcaga

SEQ ID NO: 1490503 - DNA, 25 bp, Homo sapien
tttcttgagtatcaggagggctgtc

SEQ ID NO: 1490504 - DNA, 25 bp, Homo sapien
acttcctggttaagcctgcgctcag

SEQ ID NO: 1490505 - DNA, 25 bp, Homo sapien
gacccaacaagtccatggttaggaa

SEQ ID NO: 1490506 - DNA, 25 bp, Homo sapien
caaatgttcagcaataagcaattag

SEQ ID NO: 1490507 - DNA, 25 bp, Homo sapien
cccaaaatggtgattggcccaaatg

SEQ ID NO: 1490508 - DNA, 25 bp, Homo sapien
aaatctgtacatacttctggaccca

SEQ ID NO: 1490509 - DNA, 25 bp, Homo sapien
aacactggtaccttggacttctggg

SEQ ID NO: 1490510 - DNA, 25 bp, Homo sapien
ccttggacttctgggtgaagatttt

SEQ ID NO: 1490511 - DNA, 25 bp, Homo sapien
tggtaccttggacttctgggtgaag

SEQ ID NO: 1490512 - DNA, 25 bp, Homo sapien
tccaacactggtaccttggacttct

SEQ ID NO: 1490513 - DNA, 25 bp, Homo sapien
tgaaaatgcctctgctgcaactaag

SEQ ID NO: 1490514 - DNA, 25 bp, Homo sapien
cctctgctgcaactaagagatcctt

SEQ ID NO: 1490515 - DNA, 25 bp, Homo sapien
aaaatgcctctgctgcaactaagag

SEQ ID NO: 1490516 - DNA, 25 bp, Homo sapien
tgcctctgctgcaactaagagatcc

SEQ ID NO: 1490517 - DNA, 25 bp, Homo sapien
tcatcggatgtgattgaaacactgc

SEQ ID NO: 1490518 - DNA, 25 bp, Homo sapien
tagtagttagtgcagtggaagagct

SEQ ID NO: 1490519 - DNA, 25 bp, Homo sapien
gcttagaggccgtgaaaacagtctc

SEQ ID NO: 1490520 - DNA, 25 bp, Homo sapien
tgtggtcctatctttgctcttcagc

SEQ ID NO: 1490521 - DNA, 25 bp, Homo sapien
tctttaagtcgttgaggagaccttc

SEQ ID NO: 1490522 - DNA, 25 bp, Homo sapien
gagatgctaaaggtgttgatcgaag

SEQ ID NO: 1490523 - DNA, 25 bp, Homo sapien
tccagaagtagtaactgacatggcc

SEQ ID NO: 1490524 - DNA, 25 bp, Homo sapien
tgttgatcgaagagtagacctcagg

SEQ ID NO: 1490525 - DNA, 25 bp, Homo sapien
cttgagggcagtgaacgggatacta

SEQ ID NO: 1490526 - DNA, 25 bp, Homo sapien
tggcctgaggcgatccttttaattg

SEQ ID NO: 1490527 - DNA, 25 bp, Homo sapien
gagctttgctgaataaactccgaac

SEQ ID NO: 1490528 - DNA, 25 bp, Homo sapien
ctacaagaggagtttcaagcaaatg

SEQ ID NO: 1490529 - DNA, 25 bp, Homo sapien
ataaaaacttgtagttgcagtacct

SEQ ID NO: 1490530 - DNA, 25 bp, Homo sapien
agctctggagctgggagcgaataca

SEQ ID NO: 1490531 - DNA, 25 bp, Homo sapien
cgaatacactataggagatggttct

SEQ ID NO: 1490532 - DNA, 25 bp, Homo sapien
caaaaaatgcctcaggcagctctgg

SEQ ID NO: 1490533 - DNA, 25 bp, Homo sapien
tggtgttccaaaaaatgcctcaggc

SEQ ID NO: 1490534 - DNA, 25 bp, Homo sapien
tagataacacattgttgatgaaaac

SEQ ID NO: 1490535 - DNA, 25 bp, Homo sapien
aacagatcttgtcaacacagttcct

SEQ ID NO: 1490536 - DNA, 25 bp, Homo sapien
cacagttcctgttacaacttgcttt

SEQ ID NO: 1490537 - DNA, 25 bp, Homo sapien
tctttgcttgcccaaacttctccaa

SEQ ID NO: 1490538 - DNA, 25 bp, Homo sapien
tagcagtggcctactgccagggtca

SEQ ID NO: 1490539 - DNA, 25 bp, Homo sapien
aacattacagctattagaggcagca

SEQ ID NO: 1490540 - DNA, 25 bp, Homo sapien
taataacaacctaaagacacagcta

SEQ ID NO: 1490541 - DNA, 25 bp, Homo sapien
ggcagcagtatagctacctaaaagg

SEQ ID NO: 1490542 - DNA, 25 bp, Homo sapien
ccacacttagattcagaaagatgaa

SEQ ID NO: 1490543 - DNA, 25 bp, Homo sapien
ctcaggagttaaagccaaacgcaaa

SEQ ID NO: 1490544 - DNA, 25 bp, Homo sapien
cgcaaagggtattttccacacttag

SEQ ID NO: 1490545 - DNA, 25 bp, Homo sapien
tcaggagttaaagccaaacgcaaag

SEQ ID NO: 1490546 - DNA, 25 bp, Homo sapien
ttgtgactccactaacccaagctgt

SEQ ID NO: 1490547 - DNA, 25 bp, Homo sapien
taatactcagatcgggctcccttgt

SEQ ID NO: 1490548 - DNA, 25 bp, Homo sapien
agtgatgccccaggacccaaaaact

SEQ ID NO: 1490549 - DNA, 25 bp, Homo sapien
gatcaaggatctaacaggtgtctcc

SEQ ID NO: 1490550 - DNA, 25 bp, Homo sapien
tcatgacaaagggtgccaaactcca

SEQ ID NO: 1490551 - DNA, 25 bp, Homo sapien
ttgacatggtggtcatgaaacggcc

SEQ ID NO: 1490552 - DNA, 25 bp, Homo sapien
gacaaatacgtgtccctctgaggca

SEQ ID NO: 1490553 - DNA, 25 bp, Homo sapien
aatgctaggaccactaaaaagggtg

SEQ ID NO: 1490554 - DNA, 25 bp, Homo sapien
tcccgcaaacgaggatcacgatcat

SEQ ID NO: 1490555 - DNA, 25 bp, Homo sapien
caatggctaattttcgatggactct

SEQ ID NO: 1490556 - DNA, 25 bp, Homo sapien
taaggcttagctcgttcaatggcta

SEQ ID NO: 1490557 - DNA, 25 bp, Homo sapien
gaatttcgagccagtgatctctccc

SEQ ID NO: 1490558 - DNA, 25 bp, Homo sapien
aatggtgcactaaaaggaattcatg

SEQ ID NO: 1490559 - DNA, 25 bp, Homo sapien
caaatggtgcactaaaaggaattca

SEQ ID NO: 1490560 - DNA, 25 bp, Homo sapien
gctgcaaatggtgcactaaaaggaa

SEQ ID NO: 1490561 - DNA, 25 bp, Homo sapien
gcaaatggtgcactaaaaggaattc

SEQ ID NO: 1490562 - DNA, 25 bp, Homo sapien
caatgttgccgcaaaaaattccagg

SEQ ID NO: 1490563 - DNA, 25 bp, Homo sapien
ttcagtaactcctctatattcaacc

SEQ ID NO: 1490564 - DNA, 25 bp, Homo sapien
tttcctgacagacttcatacatgtg

SEQ ID NO: 1490565 - DNA, 25 bp, Homo sapien
ctcagtgtctgtaaatggtaacttc

SEQ ID NO: 1490566 - DNA, 25 bp, Homo sapien
gctccacagggcttatacaggccaa

SEQ ID NO: 1490567 - DNA, 25 bp, Homo sapien
caaatggtacccactgttggcagat

SEQ ID NO: 1490568 - DNA, 25 bp, Homo sapien
cgtgcttctcttactagacggtgga

SEQ ID NO: 1490569 - DNA, 25 bp, Homo sapien
gatttccctaatgcatacaaagcgg

SEQ ID NO: 1490570 - DNA, 25 bp, Homo sapien
aacagtgaggtgaaggataacatcg

SEQ ID NO: 1490571 - DNA, 25 bp, Homo sapien
ctgaatatatctgagggcttgtctg

SEQ ID NO: 1490572 - DNA, 25 bp, Homo sapien
ggcttgtctgtgctcgccctgactc

SEQ ID NO: 1490573 - DNA, 25 bp, Homo sapien
cagtagctggatgaaacaaaagatc

SEQ ID NO: 1490574 - DNA, 25 bp, Homo sapien
ttaacttggccccaagaaatggcaa

SEQ ID NO: 1490575 - DNA, 25 bp, Homo sapien
tgggaaagattcaatgggagtgtct

SEQ ID NO: 1490576 - DNA, 25 bp, Homo sapien
atacagttgggaaagattcaatggg

SEQ ID NO: 1490577 - DNA, 25 bp, Homo sapien
ctgttttgttgggaaaggaatacat

SEQ ID NO: 1490578 - DNA, 25 bp, Homo sapien
tcagtaacgccgtctaataggtaca

SEQ ID NO: 1490579 - DNA, 25 bp, Homo sapien
gccgtctaataggtacatatcaagt

SEQ ID NO: 1490580 - DNA, 25 bp, Homo sapien
ggctgcttcagtaacgccgtctaat

SEQ ID NO: 1490581 - DNA, 25 bp, Homo sapien
gtgtttggctgcttcagtaacgccg

SEQ ID NO: 1490582 - DNA, 25 bp, Homo sapien
tcatcaagcaatcgggattccactt

SEQ ID NO: 1490583 - DNA, 25 bp, Homo sapien
caggaggatattttcctgtgcctcc

SEQ ID NO: 1490584 - DNA, 25 bp, Homo sapien
agaaaccagtccatcaatcatcaag

SEQ ID NO: 1490585 - DNA, 25 bp, Homo sapien
tcaattcgctctcctaactgagaaa

SEQ ID NO: 1490586 - DNA, 25 bp, Homo sapien
gggtagttgtagcataaccttgaca

SEQ ID NO: 1490587 - DNA, 25 bp, Homo sapien
ttgataaacgctcaaacttctgtcg

SEQ ID NO: 1490588 - DNA, 25 bp, Homo sapien
tgtcgacgactggtgtagtagttct

SEQ ID NO: 1490589 - DNA, 25 bp, Homo sapien
attacagggtagttgtagcataacc

SEQ ID NO: 1490590 - DNA, 25 bp, Homo sapien
gtggcagaggcacttctaaataaaa

SEQ ID NO: 1490591 - DNA, 25 bp, Homo sapien
cagtggcagaggcacttctaaataa

SEQ ID NO: 1490592 - DNA, 25 bp, Homo sapien
tggcagaggcacttctaaataaaat

SEQ ID NO: 1490593 - DNA, 25 bp, Homo sapien
acagtggcagaggcacttctaaata

SEQ ID NO: 1490594 - DNA, 25 bp, Homo sapien
ctatgccttctggtaaaagcccaga

SEQ ID NO: 1490595 - DNA, 25 bp, Homo sapien
aaccacaaacttattgcttaagtct

SEQ ID NO: 1490596 - DNA, 25 bp, Homo sapien
cttctggtaaaagcccagaatgaga

SEQ ID NO: 1490597 - DNA, 25 bp, Homo sapien
aacttattgcttaagtctatcagtc

SEQ ID NO: 1490598 - DNA, 25 bp, Homo sapien
cagctcaagactatattaagattgc

SEQ ID NO: 1490599 - DNA, 25 bp, Homo sapien
gctaagaagcaaatagcattgctgg

SEQ ID NO: 1490600 - DNA, 25 bp, Homo sapien
gatctctcgggcttctgatgcaaaa

SEQ ID NO: 1490601 - DNA, 25 bp, Homo sapien
agactgtatagtttgtggatccatg

SEQ ID NO: 1490602 - DNA, 25 bp, Homo sapien
agaaccactttattccacgtccatt

SEQ ID NO: 1490603 - DNA, 25 bp, Homo sapien
cattcaagaacaaagcgcaaattag

SEQ ID NO: 1490604 - DNA, 25 bp, Homo sapien
aagaacaaagcgcaaattagtggca

SEQ ID NO: 1490605 - DNA, 25 bp, Homo sapien
caaagcgcaaattagtggcagaatt

SEQ ID NO: 1490606 - DNA, 25 bp, Homo sapien
catcttcggatataaccagtcaaaa

SEQ ID NO: 1490607 - DNA, 25 bp, Homo sapien
gacaatatagcttctaactgttctt

SEQ ID NO: 1490608 - DNA, 25 bp, Homo sapien
tctgttatccatcttcggatataac

SEQ ID NO: 1490609 - DNA, 25 bp, Homo sapien
aaagtcccagggaactagtctgaat

SEQ ID NO: 1490610 - DNA, 25 bp, Homo sapien
gaatgagttcattgagtgatggacc

SEQ ID NO: 1490611 - DNA, 25 bp, Homo sapien
ggaatgagttcattgagtgatggac

SEQ ID NO: 1490612 - DNA, 25 bp, Homo sapien
atgagttcattgagtgatggacctg

SEQ ID NO: 1490613 - DNA, 25 bp, Homo sapien
aactggaaggctgaacatcaacaaa

SEQ ID NO: 1490614 - DNA, 25 bp, Homo sapien
tcccgagtttaacaaacaagtggca

SEQ ID NO: 1490615 - DNA, 25 bp, Homo sapien
tatgaaggagggactcctctattta

SEQ ID NO: 1490616 - DNA, 25 bp, Homo sapien
taaaaaactgctcgggaggtggata

SEQ ID NO: 1490617 - DNA, 25 bp, Homo sapien
gactcctctatttaaacttctctca

SEQ ID NO: 1490618 - DNA, 25 bp, Homo sapien
gtactaatatatccaagatgccatg

SEQ ID NO: 1490619 - DNA, 25 bp, Homo sapien
ctccaatgaccacagtgcaaaataa

SEQ ID NO: 1490620 - DNA, 25 bp, Homo sapien
ggctttccctgtccatatatattca

SEQ ID NO: 1490621 - DNA, 25 bp, Homo sapien
ggcatttgtgcatgataccaacgat

SEQ ID NO: 1490622 - DNA, 25 bp, Homo sapien
atcaaaaagccccaaatatacagaa

SEQ ID NO: 1490623 - DNA, 25 bp, Homo sapien
taccaacgatttatatcaaaaagcc

SEQ ID NO: 1490624 - DNA, 25 bp, Homo sapien
gaaacactagtgtcaggcgatagag

SEQ ID NO: 1490625 - DNA, 25 bp, Homo sapien
tgaaacactagtgtcaggcgataga

SEQ ID NO: 1490626 - DNA, 25 bp, Homo sapien
tcctccctgtcaccatgagatcgaa

SEQ ID NO: 1490627 - DNA, 25 bp, Homo sapien
tatactctggcatcccaacaatttg

SEQ ID NO: 1490628 - DNA, 25 bp, Homo sapien
ccctcaaagggaacatgccacctgt

SEQ ID NO: 1490629 - DNA, 25 bp, Homo sapien
gtattactcgtctgtcccctcaaag

SEQ ID NO: 1490630 - DNA, 25 bp, Homo sapien
ctcatataagatttgtcctgatgcc

SEQ ID NO: 1490631 - DNA, 25 bp, Homo sapien
tgaacagcccacaagtaacagcaat

SEQ ID NO: 1490632 - DNA, 25 bp, Homo sapien
tatcttgtgtagactgaacagccca

SEQ ID NO: 1490633 - DNA, 25 bp, Homo sapien
agtaacagcaattccgaggatcatt

SEQ ID NO: 1490634 - DNA, 25 bp, Homo sapien
cagcaattccgaggatcattctcag

SEQ ID NO: 1490635 - DNA, 25 bp, Homo sapien
ttgaaaagtgacagcatatacagga

SEQ ID NO: 1490636 - DNA, 25 bp, Homo sapien
catatacaggaacttgtccactttc

SEQ ID NO: 1490637 - DNA, 25 bp, Homo sapien
gaaaagtgacagcatatacaggaac

SEQ ID NO: 1490638 - DNA, 25 bp, Homo sapien
cagcatatacaggaacttgtccact

SEQ ID NO: 1490639 - DNA, 25 bp, Homo sapien
aaaaggtacatcatgtaagaacttg

SEQ ID NO: 1490640 - DNA, 25 bp, Homo sapien
aaggtacatcatgtaagaacttggg

SEQ ID NO: 1490641 - DNA, 25 bp, Homo sapien
aaccactgttcctacacttccccag

SEQ ID NO: 1490642 - DNA, 25 bp, Homo sapien
gcaaccactgttcctacacttcccc

SEQ ID NO: 1490643 - DNA, 25 bp, Homo sapien
tcctgttggacttactaactggaaa

SEQ ID NO: 1490644 - DNA, 25 bp, Homo sapien
tctaatgtgtggtacttcagctggg

SEQ ID NO: 1490645 - DNA, 25 bp, Homo sapien
tccaaagtgctagatagccatcaga

SEQ ID NO: 1490646 - DNA, 25 bp, Homo sapien
taactggaaacacagatggcgccct

SEQ ID NO: 1490647 - DNA, 25 bp, Homo sapien
acaattggagtaactaggtatcacc

SEQ ID NO: 1490648 - DNA, 25 bp, Homo sapien
aatcatcattttgcagcccttaatg

SEQ ID NO: 1490649 - DNA, 25 bp, Homo sapien
tagacattgtgtttcagagtgacca

SEQ ID NO: 1490650 - DNA, 25 bp, Homo sapien
catttatcctgcctgttctgtagac

SEQ ID NO: 1490651 - DNA, 25 bp, Homo sapien
cattttgattgcatgacaagtcatc

SEQ ID NO: 1490652 - DNA, 25 bp, Homo sapien
aggatctgtccaacatcagtgacca

SEQ ID NO: 1490653 - DNA, 25 bp, Homo sapien
ccatcgcagacttggatgtaaatgc

SEQ ID NO: 1490654 - DNA, 25 bp, Homo sapien
tgccactccaaaaagccatcgcaga

SEQ ID NO: 1490655 - DNA, 25 bp, Homo sapien
gctaaaactacaggaggctgttcat

SEQ ID NO: 1490656 - DNA, 25 bp, Homo sapien
gccaagcaagcaagtccatttttcc

SEQ ID NO: 1490657 - DNA, 25 bp, Homo sapien
gacaatcgctctcctgttatagagt

SEQ ID NO: 1490658 - DNA, 25 bp, Homo sapien
tactacctcaagttgtggaccacaa

SEQ ID NO: 1490659 - DNA, 25 bp, Homo sapien
tggcaggagaccactagtcacttga

SEQ ID NO: 1490660 - DNA, 25 bp, Homo sapien
accactagtcacttgagctcttaag

SEQ ID NO: 1490661 - DNA, 25 bp, Homo sapien
tccaagggcttgaagagtcacttct

SEQ ID NO: 1490662 - DNA, 25 bp, Homo sapien
caaactttccacgaagcacagattc

SEQ ID NO: 1490663 - DNA, 25 bp, Homo sapien
tatgccacaggacctgagaagaggg

SEQ ID NO: 1490664 - DNA, 25 bp, Homo sapien
tgccacaggacctgagaagagggcc

SEQ ID NO: 1490665 - DNA, 25 bp, Homo sapien
ccacaggacctgagaagagggccat

SEQ ID NO: 1490666 - DNA, 25 bp, Homo sapien
gccacaggacctgagaagagggcca

SEQ ID NO: 1490667 - DNA, 25 bp, Homo sapien
caggcccaagcgcatgtggaacaca

SEQ ID NO: 1490668 - DNA, 25 bp, Homo sapien
ggccaggcccaagcgcatgtggaac

SEQ ID NO: 1490669 - DNA, 25 bp, Homo sapien
aggcccaagcgcatgtggaacacac

SEQ ID NO: 1490670 - DNA, 25 bp, Homo sapien
tgtggccaggcccaagcgcatgtgg

SEQ ID NO: 1490671 - DNA, 25 bp, Homo sapien
cagcacgccggccgcttccctcggg

SEQ ID NO: 1490672 - DNA, 25 bp, Homo sapien
agcacgccggccgcttccctcgggg

SEQ ID NO: 1490673 - DNA, 25 bp, Homo sapien
gcacgccggccgcttccctcgggga

SEQ ID NO: 1490674 - DNA, 25 bp, Homo sapien
cgcgtgggagaacagtgggaaaggg

SEQ ID NO: 1490675 - DNA, 25 bp, Homo sapien
acccgactgccggcgcaggacgcga

SEQ ID NO: 1490676 - DNA, 25 bp, Homo sapien
gactgccggcgcaggacgcgaacca

SEQ ID NO: 1490677 - DNA, 25 bp, Homo sapien
ccgactgccggcgcaggacgcgaac

SEQ ID NO: 1490678 - DNA, 25 bp, Homo sapien
gtccgagattatgtaacgaagcccg

SEQ ID NO: 1490679 - DNA, 25 bp, Homo sapien
agattatgtaacgaagcccggcgcc

SEQ ID NO: 1490680 - DNA, 25 bp, Homo sapien
gccgctcctccggtccgagattatg

SEQ ID NO: 1490681 - DNA, 25 bp, Homo sapien
tcctccggtccgagattatgtaacg

SEQ ID NO: 1490682 - DNA, 25 bp, Homo sapien
cccgagagtgccttcgcgggctgta

SEQ ID NO: 1490683 - DNA, 25 bp, Homo sapien
gagctcctcccgtgcgggtccgtca

SEQ ID NO: 1490684 - DNA, 25 bp, Homo sapien
agcatctcccgggagacgtggccgc

SEQ ID NO: 1490685 - DNA, 25 bp, Homo sapien
tgtaggcctgcagaccgctcagcgg

SEQ ID NO: 1490686 - DNA, 25 bp, Homo sapien
ggaccagagttctcgcgatggttcc

SEQ ID NO: 1490687 - DNA, 25 bp, Homo sapien
agatcgcggctgcagggaccagagt

SEQ ID NO: 1490688 - DNA, 25 bp, Homo sapien
gatggttccgcgctctagcgccggc

SEQ ID NO: 1490689 - DNA, 25 bp, Homo sapien
tgcgcattaccctgcgccgacaaaa

SEQ ID NO: 1490690 - DNA, 25 bp, Homo sapien
ctcggtgaaagaaggaggtgggagg

SEQ ID NO: 1490691 - DNA, 25 bp, Homo sapien
gaaagggaggaaagagaagcagggc

SEQ ID NO: 1490692 - DNA, 25 bp, Homo sapien
agggaaagggaggaaagagaagcag

SEQ ID NO: 1490693 - DNA, 25 bp, Homo sapien
gagggaaagggaggaaagagaagca

SEQ ID NO: 1490694 - DNA, 25 bp, Homo sapien
tctattcatggagttaggacaacca

SEQ ID NO: 1490695 - DNA, 25 bp, Homo sapien
ttctattcatggagttaggacaacc

SEQ ID NO: 1490696 - DNA, 25 bp, Homo sapien
tttctattcatggagttaggacaac

SEQ ID NO: 1490697 - DNA, 25 bp, Homo sapien
ctattcatggagttaggacaaccaa

SEQ ID NO: 1490698 - DNA, 25 bp, Homo sapien
cagaactcgggctgacgcagctgga

SEQ ID NO: 1490699 - DNA, 25 bp, Homo sapien
tctgtgggaggcatgttttaattca

SEQ ID NO: 1490700 - DNA, 25 bp, Homo sapien
aatagattctgtgggaggcatgttt

SEQ ID NO: 1490701 - DNA, 25 bp, Homo sapien
tcagaactcgggctgacgcagctgg

SEQ ID NO: 1490702 - DNA, 25 bp, Homo sapien
agcagcgacggaacctccgcagggt

SEQ ID NO: 1490703 - DNA, 25 bp, Homo sapien
cactgtgttcaagcagcgacggaac

SEQ ID NO: 1490704 - DNA, 25 bp, Homo sapien
cagcgacggaacctccgcagggtct

SEQ ID NO: 1490705 - DNA, 25 bp, Homo sapien
tgttcaagcagcgacggaacctccg

SEQ ID NO: 1490706 - DNA, 25 bp, Homo sapien
gcagctcgatggtcgacgactggac

SEQ ID NO: 1490707 - DNA, 25 bp, Homo sapien
aagcagctcgatggtcgacgactgg

SEQ ID NO: 1490708 - DNA, 25 bp, Homo sapien
agcagctcgatggtcgacgactgga

SEQ ID NO: 1490709 - DNA, 25 bp, Homo sapien
cagctcgatggtcgacgactggacc

SEQ ID NO: 1490710 - DNA, 25 bp, Homo sapien
tgttctcaattcttatgcggtctga

SEQ ID NO: 1490711 - DNA, 25 bp, Homo sapien
ctcaattcttatgcggtctgatttc

SEQ ID NO: 1490712 - DNA, 25 bp, Homo sapien
attcttatgcggtctgatttcttac

SEQ ID NO: 1490713 - DNA, 25 bp, Homo sapien
cttatgcggtctgatttcttactca

SEQ ID NO: 1490714 - DNA, 25 bp, Homo sapien
tccagtcttgctcttggagaaaact

SEQ ID NO: 1490715 - DNA, 25 bp, Homo sapien
gtcttgctcttggagaaaacttggt

SEQ ID NO: 1490716 - DNA, 25 bp, Homo sapien
cagtcttgctcttggagaaaacttg

SEQ ID NO: 1490717 - DNA, 25 bp, Homo sapien
ggctccagtcttgctcttggagaaa

SEQ ID NO: 1490718 - DNA, 25 bp, Homo sapien
ctgtaggcctgatccagagaatcct

SEQ ID NO: 1490719 - DNA, 25 bp, Homo sapien
ctcttcagatagtgagatgtgtggg

SEQ ID NO: 1490720 - DNA, 25 bp, Homo sapien
gggattcctgtaggcctgatccaga

SEQ ID NO: 1490721 - DNA, 25 bp, Homo sapien
tctttgctttaactgggattcctgt

SEQ ID NO: 1490722 - DNA, 25 bp, Homo sapien
gtgctttgcagacatatgagttgtc

SEQ ID NO: 1490723 - DNA, 25 bp, Homo sapien
tgctttgcagacatatgagttgtca

SEQ ID NO: 1490724 - DNA, 25 bp, Homo sapien
gttctgtgggctttacatgcttctg

SEQ ID NO: 1490725 - DNA, 25 bp, Homo sapien
ctgtgggctttacatgcttctgctt

SEQ ID NO: 1490726 - DNA, 25 bp, Homo sapien
gggctttacatgcttctgcttctgg

SEQ ID NO: 1490727 - DNA, 25 bp, Homo sapien
tgggctttacatgcttctgcttctg

SEQ ID NO: 1490728 - DNA, 25 bp, Homo sapien
ggcttgtgtcttataccctctggag

SEQ ID NO: 1490729 - DNA, 25 bp, Homo sapien
tactgtagctcccaataaggtcctc

SEQ ID NO: 1490730 - DNA, 25 bp, Homo sapien
agttcaacagatccctatagcaggg

SEQ ID NO: 1490731 - DNA, 25 bp, Homo sapien
ttatagcaatgtcccaactctctgg

SEQ ID NO: 1490732 - DNA, 25 bp, Homo sapien
taagtttctgcgttgttatgaagtc

SEQ ID NO: 1490733 - DNA, 25 bp, Homo sapien
tgcgttgttatgaagtctctctgga

SEQ ID NO: 1490734 - DNA, 25 bp, Homo sapien
gctgggagcttttaagtttctgcgt

SEQ ID NO: 1490735 - DNA, 25 bp, Homo sapien
ctgctgggagcttttaagtttctgc

SEQ ID NO: 1490736 - DNA, 25 bp, Homo sapien
cactgaagttttggactgagggctg

SEQ ID NO: 1490737 - DNA, 25 bp, Homo sapien
gaaagttcagagtttggcatgcaaa

SEQ ID NO: 1490738 - DNA, 25 bp, Homo sapien
gtctctgagggaattaagccaagtg

SEQ ID NO: 1490739 - DNA, 25 bp, Homo sapien
tctacggaggaaacatatgaacgca

SEQ ID NO: 1490740 - DNA, 25 bp, Homo sapien
gaggaaacgaccatctctgaaggga

SEQ ID NO: 1490741 - DNA, 25 bp, Homo sapien
tgcagaaactagatgtggcacactg

SEQ ID NO: 1490742 - DNA, 25 bp, Homo sapien
gagaggcagggacaagaactttatt

SEQ ID NO: 1490743 - DNA, 25 bp, Homo sapien
taacttattctattaggcaggaggg

SEQ ID NO: 1490744 - DNA, 25 bp, Homo sapien
gccttcccaattactcatataaaaa

SEQ ID NO: 1490745 - DNA, 25 bp, Homo sapien
taacgttggtggtaggatacgcatc

SEQ ID NO: 1490746 - DNA, 25 bp, Homo sapien
gagatactattccaccatgttaccc

SEQ ID NO: 1490747 - DNA, 25 bp, Homo sapien
cctacaaccgtaactaaggtgagat

SEQ ID NO: 1490748 - DNA, 25 bp, Homo sapien
catcacttaatgtacaacggtccaa

SEQ ID NO: 1490749 - DNA, 25 bp, Homo sapien
aaggatatgaacaacacccacccga

SEQ ID NO: 1490750 - DNA, 25 bp, Homo sapien
cagtaggcctcatgccttcacataa

SEQ ID NO: 1490751 - DNA, 25 bp, Homo sapien
tagtactctgaagacctatctcatg

SEQ ID NO: 1490752 - DNA, 25 bp, Homo sapien
cactagaaatgaaggcatggtatca

SEQ ID NO: 1490753 - DNA, 25 bp, Homo sapien
gagttttctcatgtacagcaagttg

SEQ ID NO: 1490754 - DNA, 25 bp, Homo sapien
tatgtttagaaaggtgtgagctctg

SEQ ID NO: 1490755 - DNA, 25 bp, Homo sapien
tcatgtacagcaagttgtgcagagt

SEQ ID NO: 1490756 - DNA, 25 bp, Homo sapien
caagttgtgcagagtggttaaaggc

SEQ ID NO: 1490757 - DNA, 25 bp, Homo sapien
ttatgctgaataaggtatgagaacc

SEQ ID NO: 1490758 - DNA, 25 bp, Homo sapien
tatgttcagtcagatgtgagctctg

SEQ ID NO: 1490759 - DNA, 25 bp, Homo sapien
aaggtatgacaacaatttaaagact

SEQ ID NO: 1490760 - DNA, 25 bp, Homo sapien
ttgagtaaggtatgggaacaactta

SEQ ID NO: 1490761 - DNA, 25 bp, Homo sapien
tatgtttagtaagaactgagcacag

SEQ ID NO: 1490762 - DNA, 25 bp, Homo sapien
tagtaagaactgagcacaggttaaa

SEQ ID NO: 1490763 - DNA, 25 bp, Homo sapien
aactgagcacaggttaaaagctttg

SEQ ID NO: 1490764 - DNA, 25 bp, Homo sapien
acagcaagacttgagcaagacttaa

SEQ ID NO: 1490765 - DNA, 25 bp, Homo sapien
cagcaagacttgagcaagacttaaa

SEQ ID NO: 1490766 - DNA, 25 bp, Homo sapien
aacaacagcaagacttgagcaagac

SEQ ID NO: 1490767 - DNA, 25 bp, Homo sapien
caacagcaagacttgagcaagactt

SEQ ID NO: 1490768 - DNA, 25 bp, Homo sapien
acattggtacgggttctctccaata

SEQ ID NO: 1490769 - DNA, 25 bp, Homo sapien
gacatgcaagagacattgccacatt

SEQ ID NO: 1490770 - DNA, 25 bp, Homo sapien
tttttgctatgagtagttgctgagc

SEQ ID NO: 1490771 - DNA, 25 bp, Homo sapien
gtaaagcatgagcactcattaaagg

SEQ ID NO: 1490772 - DNA, 25 bp, Homo sapien
ttccttaagcgtaatttctcaagac

SEQ ID NO: 1490773 - DNA, 25 bp, Homo sapien
tctcaagacaacatctttcatatct

SEQ ID NO: 1490774 - DNA, 25 bp, Homo sapien
ttcccagtcattccttaagcgtaat

SEQ ID NO: 1490775 - DNA, 25 bp, Homo sapien
atttctcaagacaacatctttcata

SEQ ID NO: 1490776 - DNA, 25 bp, Homo sapien
tcagaatacacaaataggctggcag

SEQ ID NO: 1490777 - DNA, 25 bp, Homo sapien
agaatacacaaataggctggcagtg

SEQ ID NO: 1490778 - DNA, 25 bp, Homo sapien
attcagaatacacaaataggctggc

SEQ ID NO: 1490779 - DNA, 25 bp, Homo sapien
ataattcagaatacacaaataggct

SEQ ID NO: 1490780 - DNA, 25 bp, Homo sapien
ggctgaggcaggataatctcttgaa

SEQ ID NO: 1490781 - DNA, 25 bp, Homo sapien
aatttgccagatgtggtggcgggca

SEQ ID NO: 1490782 - DNA, 25 bp, Homo sapien
cccgggaggcggagggtgcagtgag

SEQ ID NO: 1490783 - DNA, 25 bp, Homo sapien
cacctgtaatccctgctactgggga

SEQ ID NO: 1490784 - DNA, 25 bp, Homo sapien
agttctggcttagacatagcaagac

SEQ ID NO: 1490785 - DNA, 25 bp, Homo sapien
tctctgtgttcacgttccagggctc

SEQ ID NO: 1490786 - DNA, 25 bp, Homo sapien
cttctctgtgttcacgttccagggc

SEQ ID NO: 1490787 - DNA, 25 bp, Homo sapien
ctgtgttcacgttccagggctcttt

SEQ ID NO: 1490788 - DNA, 25 bp, Homo sapien
ctgttttattagaaaaaaggtgcat

SEQ ID NO: 1490789 - DNA, 25 bp, Homo sapien
tgaaataggaattgcatattgaagc

SEQ ID NO: 1490790 - DNA, 25 bp, Homo sapien
gaaataggaattgcatattgaagct

SEQ ID NO: 1490791 - DNA, 25 bp, Homo sapien
gtgaaataggaattgcatattgaag

SEQ ID NO: 1490792 - DNA, 25 bp, Homo sapien
tccctatacaaactccgctgagctg

SEQ ID NO: 1490793 - DNA, 25 bp, Homo sapien
tatacaaactccgctgagctgggtc

SEQ ID NO: 1490794 - DNA, 25 bp, Homo sapien
ccctatacaaactccgctgagctgg

SEQ ID NO: 1490795 - DNA, 25 bp, Homo sapien
aggccacagggcgatggagcctgcg

SEQ ID NO: 1490796 - DNA, 25 bp, Homo sapien
gcgatggagcctgcggcagtcaccc

SEQ ID NO: 1490797 - DNA, 25 bp, Homo sapien
cagcttttgggggtcccagcgtcct

SEQ ID NO: 1490798 - DNA, 25 bp, Homo sapien
ccctataaatctcgcaatacctgca

SEQ ID NO: 1490799 - DNA, 25 bp, Homo sapien
cagggacgggcaggagacagatgcc

SEQ ID NO: 1490800 - DNA, 25 bp, Homo sapien
gacgggcaggagacagatgccttcc

SEQ ID NO: 1490801 - DNA, 25 bp, Homo sapien
attgcccagggacgggcaggagaca

SEQ ID NO: 1490802 - DNA, 25 bp, Homo sapien
gggacgggcaggagacagatgcctt

SEQ ID NO: 1490803 - DNA, 25 bp, Homo sapien
aaattaaaggattggtactggatag

SEQ ID NO: 1490804 - DNA, 25 bp, Homo sapien
gacttttgtgcaaaatatacacttc

SEQ ID NO: 1490805 - DNA, 25 bp, Homo sapien
tggtactggatagaaaccctacaaa

SEQ ID NO: 1490806 - DNA, 25 bp, Homo sapien
ggattggtactggatagaaacccta

SEQ ID NO: 1490807 - DNA, 25 bp, Homo sapien
ggaattttgattgcatgtgccccac

SEQ ID NO: 1490808 - DNA, 25 bp, Homo sapien
tgcaacacagttaagagactccaga

SEQ ID NO: 1490809 - DNA, 25 bp, Homo sapien
tctggaccacagcatgactcatgac

SEQ ID NO: 1490810 - DNA, 25 bp, Homo sapien
ggttttatagcccaggatcacctga

SEQ ID NO: 1490811 - DNA, 25 bp, Homo sapien
cagtgatggcaaccaaacgagatgc

SEQ ID NO: 1490812 - DNA, 25 bp, Homo sapien
tggtcaaccagtcatgtctaggagt

SEQ ID NO: 1490813 - DNA, 25 bp, Homo sapien
gggtaccttggaaactgcctgccaa

SEQ ID NO: 1490814 - DNA, 25 bp, Homo sapien
tgccaaacacaggtcaaggtggaac

SEQ ID NO: 1490815 - DNA, 25 bp, Homo sapien
tgaaatacttgggaacggaagtgct

SEQ ID NO: 1490816 - DNA, 25 bp, Homo sapien
actatatggtatactagggcacacc

SEQ ID NO: 1490817 - DNA, 25 bp, Homo sapien
ttctgttgagcataagactggtgct

SEQ ID NO: 1490818 - DNA, 25 bp, Homo sapien
caatatgggttgagtgtttcttatc

SEQ ID NO: 1490819 - DNA, 25 bp, Homo sapien
ttcacacgcagattagacaagcata

SEQ ID NO: 1490820 - DNA, 25 bp, Homo sapien
gactatcagtagaatgccaaaaacc

SEQ ID NO: 1490821 - DNA, 25 bp, Homo sapien
tcagtaaccccaacatgtagacagg

SEQ ID NO: 1490822 - DNA, 25 bp, Homo sapien
gcctagacaatacagcgagatccca

SEQ ID NO: 1490823 - DNA, 25 bp, Homo sapien
tccatgattccctgcaaaaaactga

SEQ ID NO: 1490824 - DNA, 25 bp, Homo sapien
tattttatgacgttctttcccagga

SEQ ID NO: 1490825 - DNA, 25 bp, Homo sapien
taacacacttcttacattgacagag

SEQ ID NO: 1490826 - DNA, 25 bp, Homo sapien
tcaacttagtctagggatccaacaa

SEQ ID NO: 1490827 - DNA, 25 bp, Homo sapien
taagctctttcatgctttcgaaggg

SEQ ID NO: 1490828 - DNA, 25 bp, Homo sapien
tataagctctttcatgctttcgaag

SEQ ID NO: 1490829 - DNA, 25 bp, Homo sapien
acatataagctctttcatgctttcg

SEQ ID NO: 1490830 - DNA, 25 bp, Homo sapien
agctctttcatgctttcgaagggaa

SEQ ID NO: 1490831 - DNA, 25 bp, Homo sapien
ctttcatggcttcgaagggcactgg

SEQ ID NO: 1490832 - DNA, 25 bp, Homo sapien
tcatggcttcgaagggcactggaag

SEQ ID NO: 1490833 - DNA, 25 bp, Homo sapien
tcctttcatggcttcgaagggcact

SEQ ID NO: 1490834 - DNA, 25 bp, Homo sapien
catggcttcgaagggcactggaaga

SEQ ID NO: 1490835 - DNA, 25 bp, Homo sapien
tcccaagtaagtggaacgactgaag

SEQ ID NO: 1490836 - DNA, 25 bp, Homo sapien
gtgtaagtgctctgaggcatttgaa

SEQ ID NO: 1490837 - DNA, 25 bp, Homo sapien
gatctttcatgttggcgaagagaac

SEQ ID NO: 1490838 - DNA, 25 bp, Homo sapien
gttctttcatgctcacataggttac

SEQ ID NO: 1490839 - DNA, 25 bp, Homo sapien
catgtgtctgtcaacactggtgaga

SEQ ID NO: 1490840 - DNA, 25 bp, Homo sapien
tggctttactccagtagaaactttc

SEQ ID NO: 1490841 - DNA, 25 bp, Homo sapien
ttataaggcccattactagtgtgtg

SEQ ID NO: 1490842 - DNA, 25 bp, Homo sapien
tttccaatgtgagacaggatgtgcc

SEQ ID NO: 1490843 - DNA, 25 bp, Homo sapien
catcattaatggtacatttattcat

SEQ ID NO: 1490844 - DNA, 25 bp, Homo sapien
acatcattaatggtacatttattca

SEQ ID NO: 1490845 - DNA, 25 bp, Homo sapien
aacatcattaatggtacatttattc

SEQ ID NO: 1490846 - DNA, 25 bp, Homo sapien
ggatattctggtcttctgatttgtt

SEQ ID NO: 1490847 - DNA, 25 bp, Homo sapien
actcctcctgagtaaaggccacagc

SEQ ID NO: 1490848 - DNA, 25 bp, Homo sapien
ccaggttcctgaagatttcttgcat

SEQ ID NO: 1490849 - DNA, 25 bp, Homo sapien
ccacatcttcaaatgacactgaatc

SEQ ID NO: 1490850 - DNA, 25 bp, Homo sapien
cctgaagatttcttgcatcacatct

SEQ ID NO: 1490851 - DNA, 25 bp, Homo sapien
ctgtctcacagggtgatgccttgat

SEQ ID NO: 1490852 - DNA, 25 bp, Homo sapien
tgatgccttgatgtggtgccctccc

SEQ ID NO: 1490853 - DNA, 25 bp, Homo sapien
ctcacagggtgatgccttgatgtgg

SEQ ID NO: 1490854 - DNA, 25 bp, Homo sapien
cttctgtctcacagggtgatgcctt

SEQ ID NO: 1490855 - DNA, 25 bp, Homo sapien
tgacccaggtcagatattcatcaga

SEQ ID NO: 1490856 - DNA, 25 bp, Homo sapien
tgtcctccggaagaagatgacccag

SEQ ID NO: 1490857 - DNA, 25 bp, Homo sapien
tcatcagacactccaagataaggcc

SEQ ID NO: 1490858 - DNA, 25 bp, Homo sapien
gcatcttgggttatgccagacagtt

SEQ ID NO: 1490859 - DNA, 25 bp, Homo sapien
agaacttcgtactgcctttaaagag

SEQ ID NO: 1490860 - DNA, 25 bp, Homo sapien
tatagactcattgtctaatggagcc

SEQ ID NO: 1490861 - DNA, 25 bp, Homo sapien
cattgaagcagaacttcgtactgcc

SEQ ID NO: 1490862 - DNA, 25 bp, Homo sapien
taaagagttccactgttgtcttcct

SEQ ID NO: 1490863 - DNA, 25 bp, Homo sapien
agatacagcccaaggtggttcattc

SEQ ID NO: 1490864 - DNA, 25 bp, Homo sapien
caaggtggagatacagcccaaggtg

SEQ ID NO: 1490865 - DNA, 25 bp, Homo sapien
tcaaggtggagatacagcccaaggt

SEQ ID NO: 1490866 - DNA, 25 bp, Homo sapien
tggagatacagcccaaggtggttca

SEQ ID NO: 1490867 - DNA, 25 bp, Homo sapien
agatacagcccaaggtggttcattc

SEQ ID NO: 1490868 - DNA, 25 bp, Homo sapien
tggagatacagcccaaggtggttca

SEQ ID NO: 1490869 - DNA, 25 bp, Homo sapien
caaggtggagatacagcccaaggtg

SEQ ID NO: 1490870 - DNA, 25 bp, Homo sapien
tcaaggtggagatacagcccaaggt

SEQ ID NO: 1490871 - DNA, 25 bp, Homo sapien
tggctgccaccaacgtgtctccaag

SEQ ID NO: 1490872 - DNA, 25 bp, Homo sapien
ttcccaagtccgagaaaatccagag

SEQ ID NO: 1490873 - DNA, 25 bp, Homo sapien
ttaataccagcatctgactggctgc

SEQ ID NO: 1490874 - DNA, 25 bp, Homo sapien
tgtcctttgagatagtttttctcct

SEQ ID NO: 1490875 - DNA, 25 bp, Homo sapien
tccactcatgtgtaatgttcagaaa

SEQ ID NO: 1490876 - DNA, 25 bp, Homo sapien
gatgtgagatcctgttgccatacac

SEQ ID NO: 1490877 - DNA, 25 bp, Homo sapien
gcttgagcccgagtccaagactcca

SEQ ID NO: 1490878 - DNA, 25 bp, Homo sapien
tactacaagccccagaagagttagg

SEQ ID NO: 1490879 - DNA, 25 bp, Homo sapien
attcgcgctgcccaacacaaaagcc

SEQ ID NO: 1490880 - DNA, 25 bp, Homo sapien
cagtctccggtgtctggggtcctcc

SEQ ID NO: 1490881 - DNA, 25 bp, Homo sapien
ggagacgcaccgagctcgccacatt

SEQ ID NO: 1490882 - DNA, 25 bp, Homo sapien
gaccacttggacctcccagggataa

SEQ ID NO: 1490883 - DNA, 25 bp, Homo sapien
gccaaattgtcccatcgtaagtgag

SEQ ID NO: 1490884 - DNA, 25 bp, Homo sapien
ggcttatggcgtttcctaacactca

SEQ ID NO: 1490885 - DNA, 25 bp, Homo sapien
tatacgttgcaaaaagatgaccatt

SEQ ID NO: 1490886 - DNA, 25 bp, Homo sapien
tctggagcagacagaaactgtgtgc

SEQ ID NO: 1490887 - DNA, 25 bp, Homo sapien
caaacagggatcatatgacttcttc

SEQ ID NO: 1490888 - DNA, 25 bp, Homo sapien
ttcctcacctcctgaggagggagca

SEQ ID NO: 1490889 - DNA, 25 bp, Homo sapien
cttgcaaggcattcagcaccagcag

SEQ ID NO: 1490890 - DNA, 25 bp, Homo sapien
gaagggcacagtacacataacctgg

SEQ ID NO: 1490891 - DNA, 25 bp, Homo sapien
atcagaatgcagttcaggacaccag

SEQ ID NO: 1490892 - DNA, 25 bp, Homo sapien
ttggcctcagcgttctcttgcaagg

SEQ ID NO: 1490893 - DNA, 25 bp, Homo sapien
ccaaccttgacccagacagtgggtg

SEQ ID NO: 1490894 - DNA, 25 bp, Homo sapien
ccttgacccagacagtgggtggcat

SEQ ID NO: 1490895 - DNA, 25 bp, Homo sapien
cagacagtgggtggcatgggaccac

SEQ ID NO: 1490896 - DNA, 25 bp, Homo sapien
ctgccccaaccttgacccagacagt

SEQ ID NO: 1490897 - DNA, 25 bp, Homo sapien
agctcagctctaaggtatccctgct

SEQ ID NO: 1490898 - DNA, 25 bp, Homo sapien
ctgggtgagtggcagctcagctcta

SEQ ID NO: 1490899 - DNA, 25 bp, Homo sapien
tctaaggtatccctgctgccaaaga

SEQ ID NO: 1490900 - DNA, 25 bp, Homo sapien
agctctaaggtatccctgctgccaa

SEQ ID NO: 1490901 - DNA, 25 bp, Homo sapien
gagtcaccatagcacccagactttg

SEQ ID NO: 1490902 - DNA, 25 bp, Homo sapien
tgctagtttgaatctggccacaggg

SEQ ID NO: 1490903 - DNA, 25 bp, Homo sapien
gcagacatagcagcgaaggccacag

SEQ ID NO: 1490904 - DNA, 25 bp, Homo sapien
tggtgagacagatgaccatgaggca

SEQ ID NO: 1490905 - DNA, 25 bp, Homo sapien
gagtgaggaacaatctgaccaagat

SEQ ID NO: 1490906 - DNA, 25 bp, Homo sapien
ctgagtgaggaacaatctgaccaag

SEQ ID NO: 1490907 - DNA, 25 bp, Homo sapien
tgagtgaggaacaatctgaccaaga

SEQ ID NO: 1490908 - DNA, 25 bp, Homo sapien
ctcacagatgaggaccccagctttg

SEQ ID NO: 1490909 - DNA, 25 bp, Homo sapien
tgtcagagtcgccaagtgagctgat

SEQ ID NO: 1490910 - DNA, 25 bp, Homo sapien
tcagagtcgccaagtgagctgatca

SEQ ID NO: 1490911 - DNA, 25 bp, Homo sapien
cagagtcgccaagtgagctgatcag

SEQ ID NO: 1490912 - DNA, 25 bp, Homo sapien
aggccatccctctccgccaggccac

SEQ ID NO: 1490913 - DNA, 25 bp, Homo sapien
caggccatccctctccgccaggcca

SEQ ID NO: 1490914 - DNA, 25 bp, Homo sapien
cagtgcgcatgtggggtggacagca

SEQ ID NO: 1490915 - DNA, 25 bp, Homo sapien
ggcagtgcgcatgtggggtggacag

SEQ ID NO: 1490916 - DNA, 25 bp, Homo sapien
cctggcagtgcgcatgtggggtgga

SEQ ID NO: 1490917 - DNA, 25 bp, Homo sapien
gagcctggcagtgcgcatgtggggt

SEQ ID NO: 1490918 - DNA, 25 bp, Homo sapien
gggcctgcttggctgggggctgcgg

SEQ ID NO: 1490919 - DNA, 25 bp, Homo sapien
tggaatccttgggcctgcttggctg

SEQ ID NO: 1490920 - DNA, 25 bp, Homo sapien
cctgcttggctgggggctgcggctt

SEQ ID NO: 1490921 - DNA, 25 bp, Homo sapien
ctggaatccttgggcctgcttggct

SEQ ID NO: 1490922 - DNA, 25 bp, Homo sapien
gagaaggccctccacgtactgccag

SEQ ID NO: 1490923 - DNA, 25 bp, Homo sapien
tctgattggcagtgggcatgcaacc

SEQ ID NO: 1490924 - DNA, 25 bp, Homo sapien
gtcgcccacatccaggaggcatcga

SEQ ID NO: 1490925 - DNA, 25 bp, Homo sapien
ccttcgaatcccaggtacgagcgag

SEQ ID NO: 1490926 - DNA, 25 bp, Homo sapien
agccattccccgggactcacgtggt

SEQ ID NO: 1490927 - DNA, 25 bp, Homo sapien
caggcatcagtctcggtcctggcca

SEQ ID NO: 1490928 - DNA, 25 bp, Homo sapien
ttcctcacacgcggctctggtagga

SEQ ID NO: 1490929 - DNA, 25 bp, Homo sapien
gtaggatgcattgctctgtacccag

SEQ ID NO: 1490930 - DNA, 25 bp, Homo sapien
ctgaggtgacaatggccacggtcat

SEQ ID NO: 1490931 - DNA, 25 bp, Homo sapien
ccatcaagccttgcagtctgaagat

SEQ ID NO: 1490932 - DNA, 25 bp, Homo sapien
gagagtgccactcagtcttcctggg

SEQ ID NO: 1490933 - DNA, 25 bp, Homo sapien
ccattacgtcgaaggccatcaagcc

SEQ ID NO: 1490934 - DNA, 25 bp, Homo sapien
atgcagtaaggccattacgtcgaag

SEQ ID NO: 1490935 - DNA, 25 bp, Homo sapien
gacaagggataaccaaaatttgcca

SEQ ID NO: 1490936 - DNA, 25 bp, Homo sapien
tactcactggtccattaatcacaga

SEQ ID NO: 1490937 - DNA, 25 bp, Homo sapien
caagtgaggctagtaagaaaatcgc

SEQ ID NO: 1490938 - DNA, 25 bp, Homo sapien
aattaaacttactccgctgggcaca

SEQ ID NO: 1490939 - DNA, 25 bp, Homo sapien
caaaattcaaccatgaatccagcac

SEQ ID NO: 1490940 - DNA, 25 bp, Homo sapien
ttttttcaagcaccgcacgataatt

SEQ ID NO: 1490941 - DNA, 25 bp, Homo sapien
tgcatcaggctttccaaattagaaa

SEQ ID NO: 1490942 - DNA, 25 bp, Homo sapien
aaatgcatactcaagactctttaag

SEQ ID NO: 1490943 - DNA, 25 bp, Homo sapien
gagaaatgaaaacattcccacattc

SEQ ID NO: 1490944 - DNA, 25 bp, Homo sapien
tcatagggtttttctcaggaatgag

SEQ ID NO: 1490945 - DNA, 25 bp, Homo sapien
cttgagcagatatgagagaaatgaa

SEQ ID NO: 1490946 - DNA, 25 bp, Homo sapien
aaacattcccacattctggacattc

SEQ ID NO: 1490947 - DNA, 25 bp, Homo sapien
ctcgtgatctgcatgcacagggctt

SEQ ID NO: 1490948 - DNA, 25 bp, Homo sapien
cgcctgctgcgcacggcttttcatg

SEQ ID NO: 1490949 - DNA, 25 bp, Homo sapien
tgcgcacggcttttcatgtccttga

SEQ ID NO: 1490950 - DNA, 25 bp, Homo sapien
ttccccgcctgctgcgcacggcttt

SEQ ID NO: 1490951 - DNA, 25 bp, Homo sapien
gttgcccaggttgtttcacattgtt

SEQ ID NO: 1490952 - DNA, 25 bp, Homo sapien
ttgcccaggttgtttcacattgttt

SEQ ID NO: 1490953 - DNA, 25 bp, Homo sapien
tataggctgagtcactacacccagc

SEQ ID NO: 1490954 - DNA, 25 bp, Homo sapien
ctacacccagcctctatatcatgac

SEQ ID NO: 1490955 - DNA, 25 bp, Homo sapien
ataggctgagtcactacacccagcc

SEQ ID NO: 1490956 - DNA, 25 bp, Homo sapien
gattataggctgagtcactacaccc

SEQ ID NO: 1490957 - DNA, 25 bp, Homo sapien
tgactggaacgagtgtaggctttac

SEQ ID NO: 1490958 - DNA, 25 bp, Homo sapien
tcatggcgagtaaggtgactggaac

SEQ ID NO: 1490959 - DNA, 25 bp, Homo sapien
ttctttcatggcgagtaaggtgact

SEQ ID NO: 1490960 - DNA, 25 bp, Homo sapien
gtgactggaacgagtgtaggcttta

SEQ ID NO: 1490961 - DNA, 25 bp, Homo sapien
tgaatgcttccatggtaacgaaggg

SEQ ID NO: 1490962 - DNA, 25 bp, Homo sapien
gaactgaggcgactgaaggcttgat

SEQ ID NO: 1490963 - DNA, 25 bp, Homo sapien
taacgaagggaagtggaacagctga

SEQ ID NO: 1490964 - DNA, 25 bp, Homo sapien
tgagtacttctatggttacaaaggg

SEQ ID NO: 1490965 - DNA, 25 bp, Homo sapien
tagacaagaaccggaaacagtgaat

SEQ ID NO: 1490966 - DNA, 25 bp, Homo sapien
tattagacaagaaccggaaacagtg

SEQ ID NO: 1490967 - DNA, 25 bp, Homo sapien
gacaagaaccggaaacagtgaatgc

SEQ ID NO: 1490968 - DNA, 25 bp, Homo sapien
attagacaagaaccggaaacagtga

SEQ ID NO: 1490969 - DNA, 25 bp, Homo sapien
cgtacatttataagctggatttcca

SEQ ID NO: 1490970 - DNA, 25 bp, Homo sapien
tgttctcgttcagatcaagatttgg

SEQ ID NO: 1490971 - DNA, 25 bp, Homo sapien
gctgacaacttctccatactgacca

SEQ ID NO: 1490972 - DNA, 25 bp, Homo sapien
taaggagggaatgacgtacaaagac

SEQ ID NO: 1490973 - DNA, 25 bp, Homo sapien
tcccaggtttttcgaagtgatcttc

SEQ ID NO: 1490974 - DNA, 25 bp, Homo sapien
caggtttttcgaagtgatcttcaat

SEQ ID NO: 1490975 - DNA, 25 bp, Homo sapien
cccaggtttttcgaagtgatcttca

SEQ ID NO: 1490976 - DNA, 25 bp, Homo sapien
ggtttttcgaagtgatcttcaatat

SEQ ID NO: 1490977 - DNA, 25 bp, Homo sapien
ctgagaagaatctagcaaagcccat

SEQ ID NO: 1490978 - DNA, 25 bp, Homo sapien
gcaggtttcctgcatcacttctctg

SEQ ID NO: 1490979 - DNA, 25 bp, Homo sapien
agaagccaggttcctgcaggtttcc

SEQ ID NO: 1490980 - DNA, 25 bp, Homo sapien
ttcttctgagaagaatctagcaaag

SEQ ID NO: 1490981 - DNA, 25 bp, Homo sapien
ctcctgggtaaagttcacagccaca

SEQ ID NO: 1490982 - DNA, 25 bp, Homo sapien
tcctcctgggtaaagttcacagcca

SEQ ID NO: 1490983 - DNA, 25 bp, Homo sapien
cagccacatcctcaaaagccaccga

SEQ ID NO: 1490984 - DNA, 25 bp, Homo sapien
ccacatcctcaaaagccaccgagtc

SEQ ID NO: 1490985 - DNA, 25 bp, Homo sapien
tcggtccgcaggttccggagccgat

SEQ ID NO: 1490986 - DNA, 25 bp, Homo sapien
gccacggcgactcggtccgcaggtt

SEQ ID NO: 1490987 - DNA, 25 bp, Homo sapien
gagccgatggcgtggaggcccgagt

SEQ ID NO: 1490988 - DNA, 25 bp, Homo sapien
tcgcgccacagcaggtttcaaccag

SEQ ID NO: 1490989 - DNA, 25 bp, Homo sapien
ggatgtcccaatactcgcaggtcac

SEQ ID NO: 1490990 - DNA, 25 bp, Homo sapien
gagactaacaggaagagccggctcc

SEQ ID NO: 1490991 - DNA, 25 bp, Homo sapien
cagagccaagaactagcagcggaga

SEQ ID NO: 1490992 - DNA, 25 bp, Homo sapien
cctggcgtcagctagggatgtccca

SEQ ID NO: 1490993 - DNA, 25 bp, Homo sapien
agatgaacactggtttgatccggga

SEQ ID NO: 1490994 - DNA, 25 bp, Homo sapien
tgtccaatctctcatggagtagctg

SEQ ID NO: 1490995 - DNA, 25 bp, Homo sapien
aagcgggtcaactcgaagccaggag

SEQ ID NO: 1490996 - DNA, 25 bp, Homo sapien
gatccgggacaacctgaagcaaaag

SEQ ID NO: 1490997 - DNA, 25 bp, Homo sapien
aaacctggtggacagatgaagcaac

SEQ ID NO: 1490998 - DNA, 25 bp, Homo sapien
taactcagttcgacagggtccaagg

SEQ ID NO: 1490999 - DNA, 25 bp, Homo sapien
gaactatatgcctaagagcctggga

SEQ ID NO: 1491000 - DNA, 25 bp, Homo sapien
aatgctcaagtccaacgtcccgtta

SEQ ID NO: 1491001 - DNA, 25 bp, Homo sapien
gatgcggctcaaaaggctatttcag

SEQ ID NO: 1491002 - DNA, 25 bp, Homo sapien
cccaaatggattgaggcaggtttca

SEQ ID NO: 1491003 - DNA, 25 bp, Homo sapien
cagaatgtcaggcagcaattagacc

SEQ ID NO: 1491004 - DNA, 25 bp, Homo sapien
catgccaggaaagtgatcgttcagc

SEQ ID NO: 1491005 - DNA, 25 bp, Homo sapien
gaagagactggctcacattgcagaa

SEQ ID NO: 1491006 - DNA, 25 bp, Homo sapien
tatgatggcggtaatctccttggtg

SEQ ID NO: 1491007 - DNA, 25 bp, Homo sapien
gacatcttaagctgtgccatgagac

SEQ ID NO: 1491008 - DNA, 25 bp, Homo sapien
tctgggtacccacaagacatcttaa

SEQ ID NO: 1491009 - DNA, 25 bp, Homo sapien
gaggcagatcaaaattacacctatt

SEQ ID NO: 1491010 - DNA, 25 bp, Homo sapien
cacctatttttgtaataggaggaag

SEQ ID NO: 1491011 - DNA, 25 bp, Homo sapien
tacacctatttttgtaataggagga

SEQ ID NO: 1491012 - DNA, 25 bp, Homo sapien
ctgtagcagaggcagatcaaaatta

SEQ ID NO: 1491013 - DNA, 25 bp, Homo sapien
aatcatcattgattgggcccctagg

SEQ ID NO: 1491014 - DNA, 25 bp, Homo sapien
cactattaaataccttgagcatggc

SEQ ID NO: 1491015 - DNA, 25 bp, Homo sapien
taaacggtcagaaaagctagaggtg

SEQ ID NO: 1491016 - DNA, 25 bp, Homo sapien
gactattttgcaaacgactacccag

SEQ ID NO: 1491017 - DNA, 25 bp, Homo sapien
attcaaactgcggactttgtgggta

SEQ ID NO: 1491018 - DNA, 25 bp, Homo sapien
tcaaactgcggactttgtgggtagt

SEQ ID NO: 1491019 - DNA, 25 bp, Homo sapien
aaactgcggactttgtgggtagttg

SEQ ID NO: 1491020 - DNA, 25 bp, Homo sapien
gccttgctggtgttgctttgcactc

SEQ ID NO: 1491021 - DNA, 25 bp, Homo sapien
aaatcctttgtctgcgccggactcg

SEQ ID NO: 1491022 - DNA, 25 bp, Homo sapien
tagacacacgcctttgctagaggaa

SEQ ID NO: 1491023 - DNA, 25 bp, Homo sapien
ttttagtctacagatgccgacggcg

SEQ ID NO: 1491024 - DNA, 25 bp, Homo sapien
tttgccctaagaacgaagagctggt

SEQ ID NO: 1491025 - DNA, 25 bp, Homo sapien
gtcgctcccgctccggaaagtttgc

SEQ ID NO: 1491026 - DNA, 25 bp, Homo sapien
gcggcgccaggtggccgaagtcgga

SEQ ID NO: 1491027 - DNA, 25 bp, Homo sapien
ctcccgcagcctaggagcgcgccct

SEQ ID NO: 1491028 - DNA, 25 bp, Homo sapien
acagtcgctcccgctccggaaagtt

SEQ ID NO: 1491029 - DNA, 25 bp, Homo sapien
gcgccgccttggagctcgtaggcac

SEQ ID NO: 1491030 - DNA, 25 bp, Homo sapien
ggaccgtcttggctggcgccgcctt

SEQ ID NO: 1491031 - DNA, 25 bp, Homo sapien
tctaagaagtcgaatgccaggcgga

SEQ ID NO: 1491032 - DNA, 25 bp, Homo sapien
ctgggcccatgtcagggacggctct

SEQ ID NO: 1491033 - DNA, 25 bp, Homo sapien
ccccggccttagctgggcggagcaa

SEQ ID NO: 1491034 - DNA, 25 bp, Homo sapien
cggccgctgacagcctcgcagggag

SEQ ID NO: 1491035 - DNA, 25 bp, Homo sapien
cttagctgggcggagcaattccggt

SEQ ID NO: 1491036 - DNA, 25 bp, Homo sapien
gatccggtggacgatcggctcctca

SEQ ID NO: 1491037 - DNA, 25 bp, Homo sapien
aacagcacttccaggttgccacagc

SEQ ID NO: 1491038 - DNA, 25 bp, Homo sapien
actgtgaccgggaaacatgcccagg

SEQ ID NO: 1491039 - DNA, 25 bp, Homo sapien
ggcggttcttggcatgtggcaccct

SEQ ID NO: 1491040 - DNA, 25 bp, Homo sapien
catgcccaggcgctgaacagcactt

SEQ ID NO: 1491041 - DNA, 25 bp, Homo sapien
gtgcccttctgtgtgcgagtgacag

SEQ ID NO: 1491042 - DNA, 25 bp, Homo sapien
ccttctgtgtgcgagtgacaggtga

SEQ ID NO: 1491043 - DNA, 25 bp, Homo sapien
aaggtcttgcttgtcattggtggag

SEQ ID NO: 1491044 - DNA, 25 bp, Homo sapien
ggaggtgtggctgccacaactctac

SEQ ID NO: 1491045 - DNA, 25 bp, Homo sapien
actccggtactctcgccctgagtcc

SEQ ID NO: 1491046 - DNA, 25 bp, Homo sapien
acatactccggtactctcgccctga

SEQ ID NO: 1491047 - DNA, 25 bp, Homo sapien
cacatactccggtactctcgccctg

SEQ ID NO: 1491048 - DNA, 25 bp, Homo sapien
atactccggtactctcgccctgagt

SEQ ID NO: 1491049 - DNA, 25 bp, Homo sapien
caggtaggagttaggcgttttcatc

SEQ ID NO: 1491050 - DNA, 25 bp, Homo sapien
catcccaggtaggagttaggcgttt

SEQ ID NO: 1491051 - DNA, 25 bp, Homo sapien
ctgaccatcccaggtaggagttagg

SEQ ID NO: 1491052 - DNA, 25 bp, Homo sapien
ggagttaggcgttttcatcccatgt

SEQ ID NO: 1491053 - DNA, 25 bp, Homo sapien
gtgccttggcgtcatcccctgagag

SEQ ID NO: 1491054 - DNA, 25 bp, Homo sapien
gccttggcgtcatcccctgagaggt

SEQ ID NO: 1491055 - DNA, 25 bp, Homo sapien
ccttggcgtcatcccctgagaggtg

SEQ ID NO: 1491056 - DNA, 25 bp, Homo sapien
cagtgccttggcgtcatcccctgag

SEQ ID NO: 1491057 - DNA, 25 bp, Homo sapien
gcaaggtcatcacggggaggggtcg

SEQ ID NO: 1491058 - DNA, 25 bp, Homo sapien
gacagcaaggtcatcacggggaggg

SEQ ID NO: 1491059 - DNA, 25 bp, Homo sapien
tgtggggggtgacagcaaggtcatc

SEQ ID NO: 1491060 - DNA, 25 bp, Homo sapien
gtggggggtgacagcaaggtcatca

SEQ ID NO: 1491061 - DNA, 25 bp, Homo sapien
tggggggggtgacagcaaggtcatc

SEQ ID NO: 1491062 - DNA, 25 bp, Homo sapien
gacagcaaggtcatcacggggaggg

SEQ ID NO: 1491063 - DNA, 25 bp, Homo sapien
gcgggtgacagcaaggtcatccctg

SEQ ID NO: 1491064 - DNA, 25 bp, Homo sapien
cgggtgacagcaaggtcatccctgg

SEQ ID NO: 1491065 - DNA, 25 bp, Homo sapien
gacagcaaggtcatcacggggaggg

SEQ ID NO: 1491066 - DNA, 25 bp, Homo sapien
ggtgacagcaaggtcatcacgggga

SEQ ID NO: 1491067 - DNA, 25 bp, Homo sapien
gtgacagcaaggtcatcacggggag

SEQ ID NO: 1491068 - DNA, 25 bp, Homo sapien
tgacagcaaggtcatcacggggagg

SEQ ID NO: 1491069 - DNA, 25 bp, Homo sapien
gggtgacagcaaggtcatcactggg

SEQ ID NO: 1491070 - DNA, 25 bp, Homo sapien
gacagcaaggtcatcacggggaggg

SEQ ID NO: 1491071 - DNA, 25 bp, Homo sapien
tgtggggggtgacagcaaggtcatc

SEQ ID NO: 1491072 - DNA, 25 bp, Homo sapien
tgggggggtgacagcaaggtcatca

SEQ ID NO: 1491073 - DNA, 25 bp, Homo sapien
tggggggtgacagcaaggtcatcac

SEQ ID NO: 1491074 - DNA, 25 bp, Homo sapien
tggggggggtgacagcaaggtcatc

SEQ ID NO: 1491075 - DNA, 25 bp, Homo sapien
gacagcaaggtcatcacggggaggg

SEQ ID NO: 1491076 - DNA, 25 bp, Homo sapien
gcgggtgacagcaaggtcatccctg

SEQ ID NO: 1491077 - DNA, 25 bp, Homo sapien
cgggtgacagcaaggtcatccctgg

SEQ ID NO: 1491078 - DNA, 25 bp, Homo sapien
tggggggtgacagcaaggtcatcac

SEQ ID NO: 1491079 - DNA, 25 bp, Homo sapien
tgtggggggtgacagcaaggtcatc

SEQ ID NO: 1491080 - DNA, 25 bp, Homo sapien
gacagcaaggtcatcacggggaggg

SEQ ID NO: 1491081 - DNA, 25 bp, Homo sapien
tgggggggtgacagcaaggtcatca

SEQ ID NO: 1491082 - DNA, 25 bp, Homo sapien
agcacgctggacctctcagcaggag

SEQ ID NO: 1491083 - DNA, 25 bp, Homo sapien
ctgaaggtctcaaggccaaggtgga

SEQ ID NO: 1491084 - DNA, 25 bp, Homo sapien
ccaaggtggagcacgctggacctct

SEQ ID NO: 1491085 - DNA, 25 bp, Homo sapien
tgggagcctcgtctacttcagcagg

SEQ ID NO: 1491086 - DNA, 25 bp, Homo sapien
ggaaccagcttgtggtgccagacac

SEQ ID NO: 1491087 - DNA, 25 bp, Homo sapien
gcttgtggtgccagacaccaacacc

SEQ ID NO: 1491088 - DNA, 25 bp, Homo sapien
caggaaccagcttgtggtgccagac

SEQ ID NO: 1491089 - DNA, 25 bp, Homo sapien
aggaaccagcttgtggtgccagaca

SEQ ID NO: 1491090 - DNA, 25 bp, Homo sapien
cttccacttggagccgaggcaccgg

SEQ ID NO: 1491091 - DNA, 25 bp, Homo sapien
ggcaccggcagtagagtctggttat

SEQ ID NO: 1491092 - DNA, 25 bp, Homo sapien
gaagagggcggtgcgttcagactgc

SEQ ID NO: 1491093 - DNA, 25 bp, Homo sapien
atcacacgcgagcatcgaggtgggc

SEQ ID NO: 1491094 - DNA, 25 bp, Homo sapien
ttcaagtaacaacggtcatccccag

SEQ ID NO: 1491095 - DNA, 25 bp, Homo sapien
cattgaagtgcacaaggcgatgacc

SEQ ID NO: 1491096 - DNA, 25 bp, Homo sapien
caacagtgaagtggataaatgccca

SEQ ID NO: 1491097 - DNA, 25 bp, Homo sapien
ctgagatttcgggtgtatgtcgcca

SEQ ID NO: 1491098 - DNA, 25 bp, Homo sapien
cacgaagttaatcctgagtcccagc

SEQ ID NO: 1491099 - DNA, 25 bp, Homo sapien
ggtgaagagtactagatggatccca

SEQ ID NO: 1491100 - DNA, 25 bp, Homo sapien
tattgggatcacacacgtatcgaac

SEQ ID NO: 1491101 - DNA, 25 bp, Homo sapien
caagttcttccaagatgcgtcagaa

SEQ ID NO: 1491102 - DNA, 25 bp, Homo sapien
ggattcaaacagcatagaattcacc

SEQ ID NO: 1491103 - DNA, 25 bp, Homo sapien
ttctagaaaatgtaatagtccaggc

SEQ ID NO: 1491104 - DNA, 25 bp, Homo sapien
ttttagtcatcctactgggaatgca

SEQ ID NO: 1491105 - DNA, 25 bp, Homo sapien
ggctggatctcatattaattagtcc

SEQ ID NO: 1491106 - DNA, 25 bp, Homo sapien
taaaatcctttccagacaaatgctg

SEQ ID NO: 1491107 - DNA, 25 bp, Homo sapien
cctttccagacaaatgctgaaggat

SEQ ID NO: 1491108 - DNA, 25 bp, Homo sapien
acggcgcccagcctcaacattctta

SEQ ID NO: 1491109 - DNA, 25 bp, Homo sapien
cacggcgcccagcctcaacattctt

SEQ ID NO: 1491110 - DNA, 25 bp, Homo sapien
caatagatgttggtgaggctgtggg

SEQ ID NO: 1491111 - DNA, 25 bp, Homo sapien
aggaaacaatagatgttggtgaggc

SEQ ID NO: 1491112 - DNA, 25 bp, Homo sapien
aacaatagatgttggtgaggctgtg

SEQ ID NO: 1491113 - DNA, 25 bp, Homo sapien
gaaacaatagatgttggtgaggctg

SEQ ID NO: 1491114 - DNA, 25 bp, Homo sapien
ccatagaacactatgtagacataaa

SEQ ID NO: 1491115 - DNA, 25 bp, Homo sapien
tatatatataccatagaacactatg

SEQ ID NO: 1491116 - DNA, 25 bp, Homo sapien
aattctccgatcaatcacatggcaa

SEQ ID NO: 1491117 - DNA, 25 bp, Homo sapien
atgttctacacgtatcccgttttcg

SEQ ID NO: 1491118 - DNA, 25 bp, Homo sapien
agcacatcttcatgaaccagtacat

SEQ ID NO: 1491119 - DNA, 25 bp, Homo sapien
gagtagaaacccataagcacatctt

SEQ ID NO: 1491120 - DNA, 25 bp, Homo sapien
taagcacatcttcatgaaccagtac

SEQ ID NO: 1491121 - DNA, 25 bp, Homo sapien
tagagtagaaacccataagcacatc

SEQ ID NO: 1491122 - DNA, 25 bp, Homo sapien
gaagttttcgtggatgatatcctag

SEQ ID NO: 1491123 - DNA, 25 bp, Homo sapien
gttgaatataggccctgagtctttt

SEQ ID NO: 1491124 - DNA, 25 bp, Homo sapien
ggaagttttcgtggatgatatccta

SEQ ID NO: 1491125 - DNA, 25 bp, Homo sapien
ctgccctgtatagctgcctttaaca

SEQ ID NO: 1491126 - DNA, 25 bp, Homo sapien
gaaggtgacggatgaacatgtgtcc

SEQ ID NO: 1491127 - DNA, 25 bp, Homo sapien
aatcagtttgaaaccaggacatgcc

SEQ ID NO: 1491128 - DNA, 25 bp, Homo sapien
tctattggcattttacactgggatc

SEQ ID NO: 1491129 - DNA, 25 bp, Homo sapien
cacacaggcttaaccgagaatttga

SEQ ID NO: 1491130 - DNA, 25 bp, Homo sapien
cactttgggctaggttgccactcag

SEQ ID NO: 1491131 - DNA, 25 bp, Homo sapien
aaagtcagctaaaagcttgctaccg

SEQ ID NO: 1491132 - DNA, 25 bp, Homo sapien
tagaaaagccagatgaaatagcgac

SEQ ID NO: 1491133 - DNA, 25 bp, Homo sapien
cagttgtttactctgcgggtttcgg

SEQ ID NO: 1491134 - DNA, 25 bp, Homo sapien
tactatccaatgtgctaagagccaa

SEQ ID NO: 1491135 - DNA, 25 bp, Homo sapien
cactaaaccttatttggaaagcaga

SEQ ID NO: 1491136 - DNA, 25 bp, Homo sapien
gccaatacattgagttgtcactgga

SEQ ID NO: 1491137 - DNA, 25 bp, Homo sapien
cctcaaatggcaaagtgatcaagtt

SEQ ID NO: 1491138 - DNA, 25 bp, Homo sapien
ggatgatcaaagagacccaactgga

SEQ ID NO: 1491139 - DNA, 25 bp, Homo sapien
tgatcacagctgaggaatctcaagg

SEQ ID NO: 1491140 - DNA, 25 bp, Homo sapien
gaagcaagagctccatatctgtatc

SEQ ID NO: 1491141 - DNA, 25 bp, Homo sapien
aggaagccttctcataagccctggc

SEQ ID NO: 1491142 - DNA, 25 bp, Homo sapien
gacattgctgaaaaggtacaaactt

SEQ ID NO: 1491143 - DNA, 25 bp, Homo sapien
tacagaaattgtgatacacacacgc

SEQ ID NO: 1491144 - DNA, 25 bp, Homo sapien
tggagcttaaaaacattgaactcgt

SEQ ID NO: 1491145 - DNA, 25 bp, Homo sapien
attctaatgtacagcacgggtggca

SEQ ID NO: 1491146 - DNA, 25 bp, Homo sapien
ttcaacatgaatttaggcggaggac

SEQ ID NO: 1491147 - DNA, 25 bp, Homo sapien
catctcaatgatgagggcacagcct

SEQ ID NO: 1491148 - DNA, 25 bp, Homo sapien
taagtcacggcagatgatactgatt

SEQ ID NO: 1491149 - DNA, 25 bp, Homo sapien
ccattggcagactgtctctggtgaa

SEQ ID NO: 1491150 - DNA, 25 bp, Homo sapien
ggatgctaaatagagtattgctgcc

SEQ ID NO: 1491151 - DNA, 25 bp, Homo sapien
tccacttaggacatgtgcatgtatc

SEQ ID NO: 1491152 - DNA, 25 bp, Homo sapien
tatttaaaactatatggtgctatcc

SEQ ID NO: 1491153 - DNA, 25 bp, Homo sapien
taagttgaaggatgctaaatagagt

SEQ ID NO: 1491154 - DNA, 25 bp, Homo sapien
caagacactgttcgatcacaggtct

SEQ ID NO: 1491155 - DNA, 25 bp, Homo sapien
caatgttacctatgcaaatagccaa

SEQ ID NO: 1491156 - DNA, 25 bp, Homo sapien
ttctcagattagacacaagacactg

SEQ ID NO: 1491157 - DNA, 25 bp, Homo sapien
taagactggatgctttctttctcag

SEQ ID NO: 1491158 - DNA, 25 bp, Homo sapien
tccagtgggagttttcacatgacct

SEQ ID NO: 1491159 - DNA, 25 bp, Homo sapien
tgttataccatcaaataccactgga

SEQ ID NO: 1491160 - DNA, 25 bp, Homo sapien
tgaaggcattctcacattcgatacc

SEQ ID NO: 1491161 - DNA, 25 bp, Homo sapien
taggatttcaatctggtgggcattc

SEQ ID NO: 1491162 - DNA, 25 bp, Homo sapien
tatgcttccaaagggtactagcacg

SEQ ID NO: 1491163 - DNA, 25 bp, Homo sapien
tgtttctgaagggaactggcgtatc

SEQ ID NO: 1491164 - DNA, 25 bp, Homo sapien
gtcctttcatggtcacgaagggaac

SEQ ID NO: 1491165 - DNA, 25 bp, Homo sapien
gagcctttatatgtccttgcaagga

SEQ ID NO: 1491166 - DNA, 25 bp, Homo sapien
tatgtctattaagagaacgggaaaa

SEQ ID NO: 1491167 - DNA, 25 bp, Homo sapien
cacgaaggtgactggaacgactgaa

SEQ ID NO: 1491168 - DNA, 25 bp, Homo sapien
tctttcatggtaatgaaggcaattg

SEQ ID NO: 1491169 - DNA, 25 bp, Homo sapien
gcaattggagtaacggaaggctttc

SEQ ID NO: 1491170 - DNA, 25 bp, Homo sapien
attactgtgtctctgtgaacccttg

SEQ ID NO: 1491171 - DNA, 25 bp, Homo sapien
ttcctcacacccatatgggttgttt

SEQ ID NO: 1491172 - DNA, 25 bp, Homo sapien
tacatggcttctttccgcattcctc

SEQ ID NO: 1491173 - DNA, 25 bp, Homo sapien
gtacaaccataatgtccatttccag

SEQ ID NO: 1491174 - DNA, 25 bp, Homo sapien
gggatgaatgacgtatgaagaattt

SEQ ID NO: 1491175 - DNA, 25 bp, Homo sapien
gacgtatgaagaatttttcacacac

SEQ ID NO: 1491176 - DNA, 25 bp, Homo sapien
gaagggatgaatgacgtatgaagaa

SEQ ID NO: 1491177 - DNA, 25 bp, Homo sapien
gaatgacgtatgaagaatttttcac

SEQ ID NO: 1491178 - DNA, 25 bp, Homo sapien
gctaccaatatcagagaaagtgcag

SEQ ID NO: 1491179 - DNA, 25 bp, Homo sapien
tcctcatgttggaggtatgacctgg

SEQ ID NO: 1491180 - DNA, 25 bp, Homo sapien
tagttcctgaaagatccgattgtta

SEQ ID NO: 1491181 - DNA, 25 bp, Homo sapien
tgtggtaatgagtgacttctcgctc

SEQ ID NO: 1491182 - DNA, 25 bp, Homo sapien
tccatgttacattgaagtatatatt

SEQ ID NO: 1491183 - DNA, 25 bp, Homo sapien
ttttgtactgatcttcaatgctctg

SEQ ID NO: 1491184 - DNA, 25 bp, Homo sapien
tcttcaatgctctggtcttcccctt

SEQ ID NO: 1491185 - DNA, 25 bp, Homo sapien
tagatttcttgaagaatttttgtac

SEQ ID NO: 1491186 - DNA, 25 bp, Homo sapien
ttcttgaagaatttttgtactgatc

SEQ ID NO: 1491187 - DNA, 25 bp, Homo sapien
tttctgattgactaagtgaagaaat

SEQ ID NO: 1491188 - DNA, 25 bp, Homo sapien
ccagattcctgaaggtttcctgcat

SEQ ID NO: 1491189 - DNA, 25 bp, Homo sapien
gaagccagattcctgaaggtttcct

SEQ ID NO: 1491190 - DNA, 25 bp, Homo sapien
gccagattcctgaaggtttcctgca

SEQ ID NO: 1491191 - DNA, 25 bp, Homo sapien
ctatggaagccagattcctgaaggt

SEQ ID NO: 1491192 - DNA, 25 bp, Homo sapien
attcttctgggaaggatccaacaaa

SEQ ID NO: 1491193 - DNA, 25 bp, Homo sapien
cttctgggaaggatccaacaaagcc

SEQ ID NO: 1491194 - DNA, 25 bp, Homo sapien
ccacatcctcaaaggcaaccgagtt

SEQ ID NO: 1491195 - DNA, 25 bp, Homo sapien
cacgtctctatagagattcttctgg

SEQ ID NO: 1491196 - DNA, 25 bp, Homo sapien
ttttgtagaggatggatgagactga

SEQ ID NO: 1491197 - DNA, 25 bp, Homo sapien
ggatgagactgaaagcactggaaat

SEQ ID NO: 1491198 - DNA, 25 bp, Homo sapien
tattccacatttttgtagaggatgg

SEQ ID NO: 1491199 - DNA, 25 bp, Homo sapien
atggatgagactgaaagcactggaa

SEQ ID NO: 1491200 - DNA, 25 bp, Homo sapien
cacccttcttgttggtgggtccagg

SEQ ID NO: 1491201 - DNA, 25 bp, Homo sapien
caaagtcttactatctggtgtgcat

SEQ ID NO: 1491202 - DNA, 25 bp, Homo sapien
tctttatagcatatacctgcagtac

SEQ ID NO: 1491203 - DNA, 25 bp, Homo sapien
gttgaactgttcagcaaggcagcag

SEQ ID NO: 1491204 - DNA, 25 bp, Homo sapien
aagatgcccaaagcgactgccacaa

SEQ ID NO: 1491205 - DNA, 25 bp, Homo sapien
gcccaaagcgactgccacaaaagaa

SEQ ID NO: 1491206 - DNA, 25 bp, Homo sapien
catgatgaagatgcccaaagcgact

SEQ ID NO: 1491207 - DNA, 25 bp, Homo sapien
gatgaagatgcccaaagcgactgcc

SEQ ID NO: 1491208 - DNA, 25 bp, Homo sapien
cccagcttccggggtgtcccgacat

SEQ ID NO: 1491209 - DNA, 25 bp, Homo sapien
tcccagcttccggggtgtcccgaca

SEQ ID NO: 1491210 - DNA, 25 bp, Homo sapien
ctgaaccgccgagagtgaaggagaa

SEQ ID NO: 1491211 - DNA, 25 bp, Homo sapien
agagcctcctgaaccgccgagagtg

SEQ ID NO: 1491212 - DNA, 25 bp, Homo sapien
gaccgagacacgcacgtgcgggcac

SEQ ID NO: 1491213 - DNA, 25 bp, Homo sapien
agaagcgcagggctactgaccgaga

SEQ ID NO: 1491214 - DNA, 25 bp, Homo sapien
gaaggtggaccatatcctctgtttg

SEQ ID NO: 1491215 - DNA, 25 bp, Homo sapien
tagggtcctgatgtttatgcaaaag

SEQ ID NO: 1491216 - DNA, 25 bp, Homo sapien
ccttaggtccataggtgagattcaa

SEQ ID NO: 1491217 - DNA, 25 bp, Homo sapien
aaacatggaataaagctctgctgcc

SEQ ID NO: 1491218 - DNA, 25 bp, Homo sapien
aatggaggacgaataaacaggtgat

SEQ ID NO: 1491219 - DNA, 25 bp, Homo sapien
acaggagggccttctaagaacacac

SEQ ID NO: 1491220 - DNA, 25 bp, Homo sapien
agggccttctaagaacacacctgct

SEQ ID NO: 1491221 - DNA, 25 bp, Homo sapien
caaagcgggaaatggaggacgaata

SEQ ID NO: 1491222 - DNA, 25 bp, Homo sapien
catactcagtggacgttattacttc

SEQ ID NO: 1491223 - DNA, 25 bp, Homo sapien
gaggtgataccagagccttcgcaac

SEQ ID NO: 1491224 - DNA, 25 bp, Homo sapien
ctgctgtccagtatgtacacggtca

SEQ ID NO: 1491225 - DNA, 25 bp, Homo sapien
cattctcttgttcaggcatgagagg

SEQ ID NO: 1491226 - DNA, 25 bp, Homo sapien
tattggtaaacaaatcactcagggt

SEQ ID NO: 1491227 - DNA, 25 bp, Homo sapien
ggtattttagccgagtatctacttc

SEQ ID NO: 1491228 - DNA, 25 bp, Homo sapien
tacaaaccaccaactcttaaaggca

SEQ ID NO: 1491229 - DNA, 25 bp, Homo sapien
gcaacttacctctttctcacactga

SEQ ID NO: 1491230 - DNA, 25 bp, Homo sapien
gctgatgcccaggttatagcgggac

SEQ ID NO: 1491231 - DNA, 25 bp, Homo sapien
agctgatgcccaggttatagcggga

SEQ ID NO: 1491232 - DNA, 25 bp, Homo sapien
gttcatggccttgtcgtattctcca

SEQ ID NO: 1491233 - DNA, 25 bp, Homo sapien
ttgaaaaggacctgcaagccacact

SEQ ID NO: 1491234 - DNA, 25 bp, Homo sapien
ggtagctgtgaagcagttcatggcc

SEQ ID NO: 1491235 - DNA, 25 bp, Homo sapien
cagttgcacagttgctaggaagagc

SEQ ID NO: 1491236 - DNA, 25 bp, Homo sapien
cagagatcccaagatatgcttgctg

SEQ ID NO: 1491237 - DNA, 25 bp, Homo sapien
aagatatgcttgctggcgcccagtc

SEQ ID NO: 1491238 - DNA, 25 bp, Homo sapien
gatcccaagatatgcttgctggcgc

SEQ ID NO: 1491239 - DNA, 25 bp, Homo sapien
gacaacagagatcccaagatatgct

SEQ ID NO: 1491240 - DNA, 25 bp, Homo sapien
agttcttgttcattctctgcctggt

SEQ ID NO: 1491241 - DNA, 25 bp, Homo sapien
tcttgttcattctctgcctggttgg

SEQ ID NO: 1491242 - DNA, 25 bp, Homo sapien
ttcttgttcattctctgcctggttg

SEQ ID NO: 1491243 - DNA, 25 bp, Homo sapien
ttgttcattctctgcctggttggta

SEQ ID NO: 1491244 - DNA, 25 bp, Homo sapien
tccatgtgcttaggatcctgctgca

SEQ ID NO: 1491245 - DNA, 25 bp, Homo sapien
ttccatgtgcttaggatcctgctgc

SEQ ID NO: 1491246 - DNA, 25 bp, Homo sapien
gggagggccctctcctgaagtcgct

SEQ ID NO: 1491247 - DNA, 25 bp, Homo sapien
gatgcgaggtcatcatagccagaaa

SEQ ID NO: 1491248 - DNA, 25 bp, Homo sapien
cataggaagctgatgcgaggtcatc

SEQ ID NO: 1491249 - DNA, 25 bp, Homo sapien
gggccctctcctgaagtcgctgcag

SEQ ID NO: 1491250 - DNA, 25 bp, Homo sapien
gcaactctacagctgacttggcgcg

SEQ ID NO: 1491251 - DNA, 25 bp, Homo sapien
ctgcaactctacagctgacttggcg

SEQ ID NO: 1491252 - DNA, 25 bp, Homo sapien
caactctacagctgacttggcgcgt

SEQ ID NO: 1491253 - DNA, 25 bp, Homo sapien
actctacagctgacttggcgcgttc

SEQ ID NO: 1491254 - DNA, 25 bp, Homo sapien
ctatcaagggcagctgtgtttactc

SEQ ID NO: 1491255 - DNA, 25 bp, Homo sapien
atcaagggcagctgtgtttactcgt

SEQ ID NO: 1491256 - DNA, 25 bp, Homo sapien
tatcaagggcagctgtgtttactcg

SEQ ID NO: 1491257 - DNA, 25 bp, Homo sapien
ctgcaagtcactctgggcccagttc

SEQ ID NO: 1491258 - DNA, 25 bp, Homo sapien
cttgaaggtctgaggggcacgggat

SEQ ID NO: 1491259 - DNA, 25 bp, Homo sapien
cgggatacaagggtacactgtggtc

SEQ ID NO: 1491260 - DNA, 25 bp, Homo sapien
gggcacgggatacaagggtacactg

SEQ ID NO: 1491261 - DNA, 25 bp, Homo sapien
tgaggggcacgggatacaagggtac

SEQ ID NO: 1491262 - DNA, 25 bp, Homo sapien
tcagatttttggcttcaatcaccat

SEQ ID NO: 1491263 - DNA, 25 bp, Homo sapien
ctgaattcagatttttggcttcaat

SEQ ID NO: 1491264 - DNA, 25 bp, Homo sapien
aattcagatttttggcttcaatcac

SEQ ID NO: 1491265 - DNA, 25 bp, Homo sapien
attcagatttttggcttcaatcacc

SEQ ID NO: 1491266 - DNA, 25 bp, Homo sapien
gactattttccatgttttcaccaca

SEQ ID NO: 1491267 - DNA, 25 bp, Homo sapien
caaaactgctataaagactattttc

SEQ ID NO: 1491268 - DNA, 25 bp, Homo sapien
tgctataaagactattttccatgtt

SEQ ID NO: 1491269 - DNA, 25 bp, Homo sapien
actgctataaagactattttccatg

SEQ ID NO: 1491270 - DNA, 25 bp, Homo sapien
ttgcctgcttcatacattccaaaat

SEQ ID NO: 1491271 - DNA, 25 bp, Homo sapien
gcctgcttcatacattccaaaatca

SEQ ID NO: 1491272 - DNA, 25 bp, Homo sapien
atttgcctgcttcatacattccaaa

SEQ ID NO: 1491273 - DNA, 25 bp, Homo sapien
aaatagaaggtaggggcatttgcct

SEQ ID NO: 1491274 - DNA, 25 bp, Homo sapien
gactaagcagggtattttcacaatg

SEQ ID NO: 1491275 - DNA, 25 bp, Homo sapien
caccattgtactggaggtatgagcc

SEQ ID NO: 1491276 - DNA, 25 bp, Homo sapien
ttctggacaatatagggaatcccca

SEQ ID NO: 1491277 - DNA, 25 bp, Homo sapien
tcattaaaaacctacttgaggctgg

SEQ ID NO: 1491278 - DNA, 25 bp, Homo sapien
attgaggtctgagcagtggttaaag

SEQ ID NO: 1491279 - DNA, 25 bp, Homo sapien
tagcatttctctcttgtatgaattc

SEQ ID NO: 1491280 - DNA, 25 bp, Homo sapien
gtctgagcagtggttaaaggttttg

SEQ ID NO: 1491281 - DNA, 25 bp, Homo sapien
aggtctgagcagtggttaaaggttt

SEQ ID NO: 1491282 - DNA, 25 bp, Homo sapien
cttgaacaagatataaagactttac

SEQ ID NO: 1491283 - DNA, 25 bp, Homo sapien
ctctgaagtggagttagaactgagg

SEQ ID NO: 1491284 - DNA, 25 bp, Homo sapien
cttttatgtagagttaggtatgaga

SEQ ID NO: 1491285 - DNA, 25 bp, Homo sapien
catggtttgaactgtggttaaaagc

SEQ ID NO: 1491286 - DNA, 25 bp, Homo sapien
gaggatatgtaaaaggaattgtcac

SEQ ID NO: 1491287 - DNA, 25 bp, Homo sapien
tttctgcaccttagattcacccaca

SEQ ID NO: 1491288 - DNA, 25 bp, Homo sapien
tatgtgtagttgataaagattggtt

SEQ ID NO: 1491289 - DNA, 25 bp, Homo sapien
tggtatgtgtagttgataaagattg

SEQ ID NO: 1491290 - DNA, 25 bp, Homo sapien
ctttctgcaccttagattcacccac

SEQ ID NO: 1491291 - DNA, 25 bp, Homo sapien
aattctcaatgccatagcttccata

SEQ ID NO: 1491292 - DNA, 25 bp, Homo sapien
ttgtaaattctcaatgccatagctt

SEQ ID NO: 1491293 - DNA, 25 bp, Homo sapien
tctcaatgccatagcttccatatct

SEQ ID NO: 1491294 - DNA, 25 bp, Homo sapien
gtaaattctcaatgccatagcttcc

SEQ ID NO: 1491295 - DNA, 25 bp, Homo sapien
taaaataacatattatccaacttac

SEQ ID NO: 1491296 - DNA, 25 bp, Homo sapien
atccaacttactggacttagatgaa

SEQ ID NO: 1491297 - DNA, 25 bp, Homo sapien
caacttactggacttagatgaatat

SEQ ID NO: 1491298 - DNA, 25 bp, Homo sapien
aataacatattatccaacttactgg

SEQ ID NO: 1491299 - DNA, 25 bp, Homo sapien
taagaaatctaggaagctgatacgg

SEQ ID NO: 1491300 - DNA, 25 bp, Homo sapien
gatcatacggtctgttccaagctat

SEQ ID NO: 1491301 - DNA, 25 bp, Homo sapien
gatacactaaaccacactacagttg

SEQ ID NO: 1491302 - DNA, 25 bp, Homo sapien
tgctctaagctacccaaatacacag

SEQ ID NO: 1491303 - DNA, 25 bp, Homo sapien
ccagggctcattcctttgctctaga

SEQ ID NO: 1491304 - DNA, 25 bp, Homo sapien
ctgggtgtctggctactgtctcatg

SEQ ID NO: 1491305 - DNA, 25 bp, Homo sapien
gtgtctggctactgtctcatgtttc

SEQ ID NO: 1491306 - DNA, 25 bp, Homo sapien
tccagggctcattcctttgctctag

SEQ ID NO: 1491307 - DNA, 25 bp, Homo sapien
gaaattcattcgtgcaaagcagaat

SEQ ID NO: 1491308 - DNA, 25 bp, Homo sapien
aaattcattcgtgcaaagcagaatt

SEQ ID NO: 1491309 - DNA, 25 bp, Homo sapien
cgtccctatacagattctgctgagc

SEQ ID NO: 1491310 - DNA, 25 bp, Homo sapien
cacattaggcaggtacatcagaagt

SEQ ID NO: 1491311 - DNA, 25 bp, Homo sapien
tttagcatcctagacagcaaatgtc

SEQ ID NO: 1491312 - DNA, 25 bp, Homo sapien
gaaatctaaacggtacatgatcccc

SEQ ID NO: 1491313 - DNA, 25 bp, Homo sapien
tcaagctatagctgtttccctggtt

SEQ ID NO: 1491314 - DNA, 25 bp, Homo sapien
aggtgagattatctggacaaatcac

SEQ ID NO: 1491315 - DNA, 25 bp, Homo sapien
tcaggtgagattatctggacaaatc

SEQ ID NO: 1491316 - DNA, 25 bp, Homo sapien
ggtgagattatctggacaaatcaca

SEQ ID NO: 1491317 - DNA, 25 bp, Homo sapien
caggtgagattatctggacaaatca

SEQ ID NO: 1491318 - DNA, 25 bp, Homo sapien
taaaggtgtcaacacaaccctttca

SEQ ID NO: 1491319 - DNA, 25 bp, Homo sapien
aaccctttcacctgcaaccagcaca

SEQ ID NO: 1491320 - DNA, 25 bp, Homo sapien
accctttcacctgcaaccagcacac

SEQ ID NO: 1491321 - DNA, 25 bp, Homo sapien
ggcagcactggtttcaatgaaaaac

SEQ ID NO: 1491322 - DNA, 25 bp, Homo sapien
aattacacagtgctttgttctcatt

SEQ ID NO: 1491323 - DNA, 25 bp, Homo sapien
tcatggaggaactactgcatctgca

SEQ ID NO: 1491324 - DNA, 25 bp, Homo sapien
aaaacaaagggccacaattacacag

SEQ ID NO: 1491325 - DNA, 25 bp, Homo sapien
cacgcaacaactctgatgtcctcta

SEQ ID NO: 1491326 - DNA, 25 bp, Homo sapien
caactctgatgtcctctaatgaatt

SEQ ID NO: 1491327 - DNA, 25 bp, Homo sapien
gaaccaccacgcaacaactctgatg

SEQ ID NO: 1491328 - DNA, 25 bp, Homo sapien
tcacaggaaccaccacgcaacaact

SEQ ID NO: 1491329 - DNA, 25 bp, Homo sapien
tgggaagcaggctgatctggcagag

SEQ ID NO: 1491330 - DNA, 25 bp, Homo sapien
tttcagggtgggataaggcctggga

SEQ ID NO: 1491331 - DNA, 25 bp, Homo sapien
gagatttcagggtgggataaggcct

SEQ ID NO: 1491332 - DNA, 25 bp, Homo sapien
ctgcgacggagatttcagggtggga

SEQ ID NO: 1491333 - DNA, 25 bp, Homo sapien
cagcttctcacctttaggcctctgg

SEQ ID NO: 1491334 - DNA, 25 bp, Homo sapien
gggccacgaagcagaccctcagctt

SEQ ID NO: 1491335 - DNA, 25 bp, Homo sapien
ctctgggtactaccggttctctttg

SEQ ID NO: 1491336 - DNA, 25 bp, Homo sapien
gttctctttgtcctaggcctgccca

SEQ ID NO: 1491337 - DNA, 25 bp, Homo sapien
tggctctagactgaaagttcctggt

SEQ ID NO: 1491338 - DNA, 25 bp, Homo sapien
ggtaaggacccaagactgtgccatc

SEQ ID NO: 1491339 - DNA, 25 bp, Homo sapien
cacaggatgccgaattcaaccgttt

SEQ ID NO: 1491340 - DNA, 25 bp, Homo sapien
caaccgtttatccactggctctaga

SEQ ID NO: 1491341 - DNA, 25 bp, Homo sapien
tgtgagggggaaagaagaaacatgc

SEQ ID NO: 1491342 - DNA, 25 bp, Homo sapien
gtgagggggaaagaagaaacatgca

SEQ ID NO: 1491343 - DNA, 25 bp, Homo sapien
tgagggggaaagaagaaacatgcat

SEQ ID NO: 1491344 - DNA, 25 bp, Homo sapien
ttgtgagggggaaagaagaaacatg

SEQ ID NO: 1491345 - DNA, 25 bp, Homo sapien
tgagatgagatagcgcatgttcgga

SEQ ID NO: 1491346 - DNA, 25 bp, Homo sapien
agatgagatgagatagcgcatgttc

SEQ ID NO: 1491347 - DNA, 25 bp, Homo sapien
agatagcgcatgttcggagtggtat

SEQ ID NO: 1491348 - DNA, 25 bp, Homo sapien
tgagatagcgcatgttcggagtggt

SEQ ID NO: 1491349 - DNA, 25 bp, Homo sapien
agtgaccctgggcttatgtccccat

SEQ ID NO: 1491350 - DNA, 25 bp, Homo sapien
tgaccctgggcttatgtccccatgg

SEQ ID NO: 1491351 - DNA, 25 bp, Homo sapien
ccctgggcttatgtccccatggtga

SEQ ID NO: 1491352 - DNA, 25 bp, Homo sapien
ctgggcttatgtccccatggtgatc

SEQ ID NO: 1491353 - DNA, 25 bp, Homo sapien
cttatttctagctgctgtcagtata

SEQ ID NO: 1491354 - DNA, 25 bp, Homo sapien
tgcttggggtgtacggacacctgca

SEQ ID NO: 1491355 - DNA, 25 bp, Homo sapien
ttatttctagctgctgtcagtataa

SEQ ID NO: 1491356 - DNA, 25 bp, Homo sapien
gagcttctttcatgcttggggtgta

SEQ ID NO: 1491357 - DNA, 25 bp, Homo sapien
ttccagtaggtctggattcaggcac

SEQ ID NO: 1491358 - DNA, 25 bp, Homo sapien
tcgtcttggactcatggatatctga

SEQ ID NO: 1491359 - DNA, 25 bp, Homo sapien
ccacagccaagtcaagggccatcgt

SEQ ID NO: 1491360 - DNA, 25 bp, Homo sapien
taggtctggattcaggcacttgagg

SEQ ID NO: 1491361 - DNA, 25 bp, Homo sapien
gggacaaactgtgtatcaaagaggg

SEQ ID NO: 1491362 - DNA, 25 bp, Homo sapien
gacaaactgtgtatcaaagagggtt

SEQ ID NO: 1491363 - DNA, 25 bp, Homo sapien
tgggacaaactgtgtatcaaagagg

SEQ ID NO: 1491364 - DNA, 25 bp, Homo sapien
ctgggacaaactgtgtatcaaagag

SEQ ID NO: 1491365 - DNA, 25 bp, Homo sapien
ttgttttgcaggctcaagattggcc

SEQ ID NO: 1491366 - DNA, 25 bp, Homo sapien
gctctctagggctctatagctcctc

SEQ ID NO: 1491367 - DNA, 25 bp, Homo sapien
gctcctctcagtataaagtgctcct

SEQ ID NO: 1491368 - DNA, 25 bp, Homo sapien
tcactgggctccgacttctatttcc

SEQ ID NO: 1491369 - DNA, 25 bp, Homo sapien
acatatctaggagatgccaagtccc

SEQ ID NO: 1491370 - DNA, 25 bp, Homo sapien
ttttgatgaagcaatgtaattcacc

SEQ ID NO: 1491371 - DNA, 25 bp, Homo sapien
cagtattaaactcagacatctagat

SEQ ID NO: 1491372 - DNA, 25 bp, Homo sapien
tagataatagagatatcaactccac

SEQ ID NO: 1491373 - DNA, 25 bp, Homo sapien
gcgccccctcactgcagtgggtctt

SEQ ID NO: 1491374 - DNA, 25 bp, Homo sapien
actttgcagattctcgcgccccctc

SEQ ID NO: 1491375 - DNA, 25 bp, Homo sapien
ccccttcacaagtctgagagaatcc

SEQ ID NO: 1491376 - DNA, 25 bp, Homo sapien
tctcaatatcagcatccaactggct

SEQ ID NO: 1491377 - DNA, 25 bp, Homo sapien
caatgtgtccccaaggaacagacgc

SEQ ID NO: 1491378 - DNA, 25 bp, Homo sapien
aaggaacagacgctggagttgggtg

SEQ ID NO: 1491379 - DNA, 25 bp, Homo sapien
aatgtgtccccaaggaacagacgct

SEQ ID NO: 1491380 - DNA, 25 bp, Homo sapien
tgctcccttaagaggctccacctcc

SEQ ID NO: 1491381 - DNA, 25 bp, Homo sapien
ctcccttaagaggctccacctccat

SEQ ID NO: 1491382 - DNA, 25 bp, Homo sapien
ttagctttgtaaatgaagggtagga

SEQ ID NO: 1491383 - DNA, 25 bp, Homo sapien
gctttgtaaatgaagggtaggacca

SEQ ID NO: 1491384 - DNA, 25 bp, Homo sapien
aacaacgtgctaatgttcactaaac

SEQ ID NO: 1491385 - DNA, 25 bp, Homo sapien
tgggtcacccccagacaattatgaa

SEQ ID NO: 1491386 - DNA, 25 bp, Homo sapien
gacaattatgaaacccaggcacaga

SEQ ID NO: 1491387 - DNA, 25 bp, Homo sapien
ctaaacatgccttgagatgggtcac

SEQ ID NO: 1491388 - DNA, 25 bp, Homo sapien
tctcgggtctgcagactccggaggc

SEQ ID NO: 1491389 - DNA, 25 bp, Homo sapien
gttccagcccgtttccatcagcccc

SEQ ID NO: 1491390 - DNA, 25 bp, Homo sapien
cgccgggcggaagtcgagcgcagaa

SEQ ID NO: 1491391 - DNA, 25 bp, Homo sapien
agaagcggaccggacgccgggtgag

SEQ ID NO: 1491392 - DNA, 25 bp, Homo sapien
gctgtggcggccacctgagcttccc

SEQ ID NO: 1491393 - DNA, 25 bp, Homo sapien
ctgagcttccccgagcaaagcacgc

SEQ ID NO: 1491394 - DNA, 25 bp, Homo sapien
aaagcacgccgagcacagaagacga

SEQ ID NO: 1491395 - DNA, 25 bp, Homo sapien
aggctgcttagctatggatctcctg

SEQ ID NO: 1491396 - DNA, 25 bp, Homo sapien
gccaatggcatcctcaatgtctctt

SEQ ID NO: 1491397 - DNA, 25 bp, Homo sapien
tgacattgatgccaatggcatcctc

SEQ ID NO: 1491398 - DNA, 25 bp, Homo sapien
tgccaatggcatcctcaatgtctct

SEQ ID NO: 1491399 - DNA, 25 bp, Homo sapien
ttttgacattgatgccaatggcatc

SEQ ID NO: 1491400 - DNA, 25 bp, Homo sapien
cctggagcacgcttaggaggcaagt

SEQ ID NO: 1491401 - DNA, 25 bp, Homo sapien
cacccatagccacttgagaggacca

SEQ ID NO: 1491402 - DNA, 25 bp, Homo sapien
tcagtgacaaacaaaagactggccc

SEQ ID NO: 1491403 - DNA, 25 bp, Homo sapien
taagtcggaggacaccagtatcgcc

SEQ ID NO: 1491404 - DNA, 25 bp, Homo sapien
gaactgtgaactaaaccgtatatcc

SEQ ID NO: 1491405 - DNA, 25 bp, Homo sapien
gacatagatgccttgaattataaac

SEQ ID NO: 1491406 - DNA, 25 bp, Homo sapien
ctagtaacaggatagaactgtgaac

SEQ ID NO: 1491407 - DNA, 25 bp, Homo sapien
taaaccgtatatccaattcacttgc

SEQ ID NO: 1491408 - DNA, 25 bp, Homo sapien
ctcatggttagatgagagttttggg

SEQ ID NO: 1491409 - DNA, 25 bp, Homo sapien
agccactttgcccagtctgtctgat

SEQ ID NO: 1491410 - DNA, 25 bp, Homo sapien
ttggggttgaaagaccacagaggta

SEQ ID NO: 1491411 - DNA, 25 bp, Homo sapien
agtctgtctgatgattttctcatgg

SEQ ID NO: 1491412 - DNA, 25 bp, Homo sapien
gacaggctgccggaattgaaatctt

SEQ ID NO: 1491413 - DNA, 25 bp, Homo sapien
tcttggatctgctgcgtgtccctca

SEQ ID NO: 1491414 - DNA, 25 bp, Homo sapien
gctccacgcactatgaaatgcccag

SEQ ID NO: 1491415 - DNA, 25 bp, Homo sapien
tccaagagggcctggcgtttcagca

SEQ ID NO: 1491416 - DNA, 25 bp, Homo sapien
tggaatccgggcagggcccaccgct

SEQ ID NO: 1491417 - DNA, 25 bp, Homo sapien
cacttctacagactcctaggaaatt

SEQ ID NO: 1491418 - DNA, 25 bp, Homo sapien
tccctagagagcacttgcagacctc

SEQ ID NO: 1491419 - DNA, 25 bp, Homo sapien
gagccacgcagcagtgttgagactg

SEQ ID NO: 1491420 - DNA, 25 bp, Homo sapien
tctgctgcagcacggttggattaaa

SEQ ID NO: 1491421 - DNA, 25 bp, Homo sapien
gcagcacggttggattaaacccatc

SEQ ID NO: 1491422 - DNA, 25 bp, Homo sapien
tgctgcagcacggttggattaaacc

SEQ ID NO: 1491423 - DNA, 25 bp, Homo sapien
gcacggttggattaaacccatccca

SEQ ID NO: 1491424 - DNA, 25 bp, Homo sapien
agccacggtgtcctggattttccta

SEQ ID NO: 1491425 - DNA, 25 bp, Homo sapien
ctaagcccctttccgatggggctgg

SEQ ID NO: 1491426 - DNA, 25 bp, Homo sapien
cacggtgtcctggattttcctaagc

SEQ ID NO: 1491427 - DNA, 25 bp, Homo sapien
tgtgagggtcacaggacagcagagc

SEQ ID NO: 1491428 - DNA, 25 bp, Homo sapien
agccacgccctaagactgagcacag

SEQ ID NO: 1491429 - DNA, 25 bp, Homo sapien
cagccatgcctctgtcataaacttc

SEQ ID NO: 1491430 - DNA, 25 bp, Homo sapien
aaagaccaccctctagagcagcgct

SEQ ID NO: 1491431 - DNA, 25 bp, Homo sapien
tgaggctcagcagacgtcctatctt

SEQ ID NO: 1491432 - DNA, 25 bp, Homo sapien
tgccaaaaacaatgacaaaaccact

SEQ ID NO: 1491433 - DNA, 25 bp, Homo sapien
gccaaaaacaatgacaaaaccactc

SEQ ID NO: 1491434 - DNA, 25 bp, Homo sapien
caaaaacaatgacaaaaccactcac

SEQ ID NO: 1491435 - DNA, 25 bp, Homo sapien
cctgccaaaaacaatgacaaaacca

SEQ ID NO: 1491436 - DNA, 25 bp, Homo sapien
tccgctcagaaacgcgactgcatct

SEQ ID NO: 1491437 - DNA, 25 bp, Homo sapien
agactgtcccatccgctcagaaacg

SEQ ID NO: 1491438 - DNA, 25 bp, Homo sapien
ttcagtattctcagactgtcccatc

SEQ ID NO: 1491439 - DNA, 25 bp, Homo sapien
gactgcatctatgaggcttactcct

SEQ ID NO: 1491440 - DNA, 25 bp, Homo sapien
ggagggctctggacaacttactgtg

SEQ ID NO: 1491441 - DNA, 25 bp, Homo sapien
acctgccttggcgaccacgggatca

SEQ ID NO: 1491442 - DNA, 25 bp, Homo sapien
caggaaacttggttcagcccaaact

SEQ ID NO: 1491443 - DNA, 25 bp, Homo sapien
gtctctttcagctttaacactctag

SEQ ID NO: 1491444 - DNA, 25 bp, Homo sapien
tgtcacacagttgtcggcctgcctg

SEQ ID NO: 1491445 - DNA, 25 bp, Homo sapien
gaatcgtctacgtaactctgcaagc

SEQ ID NO: 1491446 - DNA, 25 bp, Homo sapien
gccaagatgtgtgaggtaagccccg

SEQ ID NO: 1491447 - DNA, 25 bp, Homo sapien
taatactaagtgtgtctggaggctg

SEQ ID NO: 1491448 - DNA, 25 bp, Homo sapien
atagcaacctccaccgttcacagca

SEQ ID NO: 1491449 - DNA, 25 bp, Homo sapien
gcctgcaggtcttagaaaacatgtt

SEQ ID NO: 1491450 - DNA, 25 bp, Homo sapien
agtggcgctccaccgttcatagcaa

SEQ ID NO: 1491451 - DNA, 25 bp, Homo sapien
gaccagaactatctaaagcctgcag

SEQ ID NO: 1491452 - DNA, 25 bp, Homo sapien
ggtaaacgtgtacagagagcctggc

SEQ ID NO: 1491453 - DNA, 25 bp, Homo sapien
gtttcagttacattacccaggagga

SEQ ID NO: 1491454 - DNA, 25 bp, Homo sapien
tagagctacagagagaatcctcagc

SEQ ID NO: 1491455 - DNA, 25 bp, Homo sapien
tctgaagcaggaaggtgaataacct

SEQ ID NO: 1491456 - DNA, 25 bp, Homo sapien
gagcagatcctagcgttcagacagg

SEQ ID NO: 1491457 - DNA, 25 bp, Homo sapien
ggtctgaaccctgcctttgatggaa

SEQ ID NO: 1491458 - DNA, 25 bp, Homo sapien
gagtatgattcttccatgcagagga

SEQ ID NO: 1491459 - DNA, 25 bp, Homo sapien
tcggaaggcaccaactctgaggaca

SEQ ID NO: 1491460 - DNA, 25 bp, Homo sapien
gtgaagctcttgacgcagtaccggc

SEQ ID NO: 1491461 - DNA, 25 bp, Homo sapien
tgttctctagagatcgcgggttgcc

SEQ ID NO: 1491462 - DNA, 25 bp, Homo sapien
ttggaacggcgcttcatgtgcaggc

SEQ ID NO: 1491463 - DNA, 25 bp, Homo sapien
cgcagatgccggatgaagttgaccc

SEQ ID NO: 1491464 - DNA, 25 bp, Homo sapien
caatggtcctcggtgaccggggcgg

SEQ ID NO: 1491465 - DNA, 25 bp, Homo sapien
acaatggtcctcggtgaccggggcg

SEQ ID NO: 1491466 - DNA, 25 bp, Homo sapien
tacaatggtcctcggtgaccggggc

SEQ ID NO: 1491467 - DNA, 25 bp, Homo sapien
taagaaagcgtgcactggagagaca

SEQ ID NO: 1491468 - DNA, 25 bp, Homo sapien
aacaaagtgacaaggtggaccgcta

SEQ ID NO: 1491469 - DNA, 25 bp, Homo sapien
ccaggctgccgatgacaaggtactt

SEQ ID NO: 1491470 - DNA, 25 bp, Homo sapien
tcttacttgttaactgggcgaggag

SEQ ID NO: 1491471 - DNA, 25 bp, Homo sapien
gcctcaggatgaatcatacttcaag

SEQ ID NO: 1491472 - DNA, 25 bp, Homo sapien
tttgccagtgcagtctcgaactact

SEQ ID NO: 1491473 - DNA, 25 bp, Homo sapien
gccctgacctgctagatttaagact

SEQ ID NO: 1491474 - DNA, 25 bp, Homo sapien
aaggtcctgagggtgaggtcttaca

SEQ ID NO: 1491475 - DNA, 25 bp, Homo sapien
accacctacagcttgtgagcactgg

SEQ ID NO: 1491476 - DNA, 25 bp, Homo sapien
taaatcactgaatcctggtgcaatg

SEQ ID NO: 1491477 - DNA, 25 bp, Homo sapien
gcaagtgacttcagctctcgggtgc

SEQ ID NO: 1491478 - DNA, 25 bp, Homo sapien
tgccccagctgcaatacagagacat

SEQ ID NO: 1491479 - DNA, 25 bp, Homo sapien
tcagctggcgggaaaagccttttag

SEQ ID NO: 1491480 - DNA, 25 bp, Homo sapien
catggagctgggtcaaaatggcata

SEQ ID NO: 1491481 - DNA, 25 bp, Homo sapien
aaaagcccctttgtccatgcatgaa

SEQ ID NO: 1491482 - DNA, 25 bp, Homo sapien
gaatgcatcactcttggcacgcaga

SEQ ID NO: 1491483 - DNA, 25 bp, Homo sapien
gcttcagtatgccagaaacctgctc

SEQ ID NO: 1491484 - DNA, 25 bp, Homo sapien
cagaaacctgctctttaatcccagt

SEQ ID NO: 1491485 - DNA, 25 bp, Homo sapien
cagtatgccagaaacctgctcttta

SEQ ID NO: 1491486 - DNA, 25 bp, Homo sapien
tcctgtgcagcttcagtatgccaga

SEQ ID NO: 1491487 - DNA, 25 bp, Homo sapien
gtgttttgaggcaccaccgtctgtg

SEQ ID NO: 1491488 - DNA, 25 bp, Homo sapien
tgcagctcctcacgtttccttcttt

SEQ ID NO: 1491489 - DNA, 25 bp, Homo sapien
cttctacctggaatggctggagact

SEQ ID NO: 1491490 - DNA, 25 bp, Homo sapien
gcacctgcagctcctcacgtttcct

SEQ ID NO: 1491491 - DNA, 25 bp, Homo sapien
tctacctggaatggctggagacttg

SEQ ID NO: 1491492 - DNA, 25 bp, Homo sapien
ttttgcacctacagcactacctggg

SEQ ID NO: 1491493 - DNA, 25 bp, Homo sapien
cctgaaggcaaaatgggccaactcc

SEQ ID NO: 1491494 - DNA, 25 bp, Homo sapien
gggtggccactcaataagtgtctgc

SEQ ID NO: 1491495 - DNA, 25 bp, Homo sapien
ggtgctatccgaatagatgccaggc

SEQ ID NO: 1491496 - DNA, 25 bp, Homo sapien
tcatgggtgcaagtgctggcgacac

SEQ ID NO: 1491497 - DNA, 25 bp, Homo sapien
tctatggccagagacaagcacttcc

SEQ ID NO: 1491498 - DNA, 25 bp, Homo sapien
gatgcttcgaagcaccatggcatgg

SEQ ID NO: 1491499 - DNA, 25 bp, Homo sapien
tagacagaatcgacgtagatccggg

SEQ ID NO: 1491500 - DNA, 25 bp, Homo sapien
tttgccctggagatcctgcaactct

SEQ ID NO: 1491501 - DNA, 25 bp, Homo sapien
gatcctgcaactctggaacgcgtgg

SEQ ID NO: 1491502 - DNA, 25 bp, Homo sapien
tctttgccctggagatcctgcaact

SEQ ID NO: 1491503 - DNA, 25 bp, Homo sapien
tctggaacgcgtggctcattctcct

SEQ ID NO: 1491504 - DNA, 25 bp, Homo sapien
caggtgatggtcaatcggacacact

SEQ ID NO: 1491505 - DNA, 25 bp, Homo sapien
tctgataagcctgatgtggcgagac

SEQ ID NO: 1491506 - DNA, 25 bp, Homo sapien
gatcctatgggacgaagttgactct

SEQ ID NO: 1491507 - DNA, 25 bp, Homo sapien
cacacgcagggagagctatgggctt

SEQ ID NO: 1491508 - DNA, 25 bp, Homo sapien
ttggaggcattgagaccccgtaatc

SEQ ID NO: 1491509 - DNA, 25 bp, Homo sapien
ggaggcattgagaccccgtaatcct

SEQ ID NO: 1491510 - DNA, 25 bp, Homo sapien
cgtaatcctccccaatgatgaactc

SEQ ID NO: 1491511 - DNA, 25 bp, Homo sapien
caatgatgaactctccatagaagcc

SEQ ID NO: 1491512 - DNA, 25 bp, Homo sapien
taatagtctgttcatgggctgggca

SEQ ID NO: 1491513 - DNA, 25 bp, Homo sapien
ttccaaatagtggtgaggccggcgc

SEQ ID NO: 1491514 - DNA, 25 bp, Homo sapien
tacacgcacagaaagaatgacggcc

SEQ ID NO: 1491515 - DNA, 25 bp, Homo sapien
ttggagcctcactagaaatcacccg

SEQ ID NO: 1491516 - DNA, 25 bp, Homo sapien
cagtgtggttctcctgcaaaatgcg

SEQ ID NO: 1491517 - DNA, 25 bp, Homo sapien
tgagtctaaccccacctgagggaag

SEQ ID NO: 1491518 - DNA, 25 bp, Homo sapien
tgtatcccagtgatcacagctgacg

SEQ ID NO: 1491519 - DNA, 25 bp, Homo sapien
acagctgacgtgacccatgcaggac

SEQ ID NO: 1491520 - DNA, 25 bp, Homo sapien
gactagacagtcaaggcatcacaga

SEQ ID NO: 1491521 - DNA, 25 bp, Homo sapien
aacaggacattgatctacagcggga

SEQ ID NO: 1491522 - DNA, 25 bp, Homo sapien
tatggaccaatgcttacatgctggg

SEQ ID NO: 1491523 - DNA, 25 bp, Homo sapien
gaaggaagttcactagaccatgcag

SEQ ID NO: 1491524 - DNA, 25 bp, Homo sapien
ctataggagcacaccaccattccca

SEQ ID NO: 1491525 - DNA, 25 bp, Homo sapien
gatgcaatcacagcttactatgcag

SEQ ID NO: 1491526 - DNA, 25 bp, Homo sapien
tactatgcagcctcaaccccctggg

SEQ ID NO: 1491527 - DNA, 25 bp, Homo sapien
tataggagcacaccaccattcccag

SEQ ID NO: 1491528 - DNA, 25 bp, Homo sapien
tctacatgttcaagtaacacacaga

SEQ ID NO: 1491529 - DNA, 25 bp, Homo sapien
tacaaatggtctacatacatcaatc

SEQ ID NO: 1491530 - DNA, 25 bp, Homo sapien
agtaactggcagagtagattagaaa

SEQ ID NO: 1491531 - DNA, 25 bp, Homo sapien
taagccctaacatgtcggtaatgac

SEQ ID NO: 1491532 - DNA, 25 bp, Homo sapien
caggaggtatccttctggtgaagca

SEQ ID NO: 1491533 - DNA, 25 bp, Homo sapien
gatatatacacacatgggagtatta

SEQ ID NO: 1491534 - DNA, 25 bp, Homo sapien
tatcattgtcaataccctgggtgtg

SEQ ID NO: 1491535 - DNA, 25 bp, Homo sapien
gttctctatcttgcatgtatcattg

SEQ ID NO: 1491536 - DNA, 25 bp, Homo sapien
cattgctgcgatgattattaaattg

SEQ ID NO: 1491537 - DNA, 25 bp, Homo sapien
tgtgacaggactgaaattatctgtg

SEQ ID NO: 1491538 - DNA, 25 bp, Homo sapien
caggactgaaattatctgtgctttc

SEQ ID NO: 1491539 - DNA, 25 bp, Homo sapien
tttctaaaatataaccattgctgcg

SEQ ID NO: 1491540 - DNA, 25 bp, Homo sapien
tgctgtgtgtcccgcacattctctt

SEQ ID NO: 1491541 - DNA, 25 bp, Homo sapien
gctgtgtgtcccgcacattctcttc

SEQ ID NO: 1491542 - DNA, 25 bp, Homo sapien
tgaagaaggaaagcatcttgcagaa

SEQ ID NO: 1491543 - DNA, 25 bp, Homo sapien
ctgaagaaggaaagcatcttgcaga

SEQ ID NO: 1491544 - DNA, 25 bp, Homo sapien
tggtgtcctaaagtgggccagggcc

SEQ ID NO: 1491545 - DNA, 25 bp, Homo sapien
gaaaatggtgtcctaaagtgggcca

SEQ ID NO: 1491546 - DNA, 25 bp, Homo sapien
agaaaatcacaagagaggcaccaac

SEQ ID NO: 1491547 - DNA, 25 bp, Homo sapien
aaatggtgtcctaaagtgggccagg

SEQ ID NO: 1491548 - DNA, 25 bp, Homo sapien
tctgcaagtcataagaaagtctccc

SEQ ID NO: 1491549 - DNA, 25 bp, Homo sapien
ttctgcaagtcataagaaagtctcc

SEQ ID NO: 1491550 - DNA, 25 bp, Homo sapien
agcttatcataatgccaaacacaac

SEQ ID NO: 1491551 - DNA, 25 bp, Homo sapien
aagcttatcataatgccaaacacaa

SEQ ID NO: 1491552 - DNA, 25 bp, Homo sapien
gtaattactatctctgctggacaga

SEQ ID NO: 1491553 - DNA, 25 bp, Homo sapien
caggccttgtgttcaaccttttgta

SEQ ID NO: 1491554 - DNA, 25 bp, Homo sapien
tgtacatataaagcaccgtggcaag

SEQ ID NO: 1491555 - DNA, 25 bp, Homo sapien
gacttccttcaacccaagggcgctg

SEQ ID NO: 1491556 - DNA, 25 bp, Homo sapien
acagaagcgttagctctgagaggct

SEQ ID NO: 1491557 - DNA, 25 bp, Homo sapien
tacagaagcgttagctctgagaggc

SEQ ID NO: 1491558 - DNA, 25 bp, Homo sapien
tgaagaggacaaacatcctgatgag

SEQ ID NO: 1491559 - DNA, 25 bp, Homo sapien
gaaccatgaagaggacaaacatcct

SEQ ID NO: 1491560 - DNA, 25 bp, Homo sapien
cctgatgaggttctcatttaattgc

SEQ ID NO: 1491561 - DNA, 25 bp, Homo sapien
catgaagaggacaaacatcctgatg

SEQ ID NO: 1491562 - DNA, 25 bp, Homo sapien
gggactcagaccctgacaacagctc

SEQ ID NO: 1491563 - DNA, 25 bp, Homo sapien
aagggactcagaccctgacaacagc

SEQ ID NO: 1491564 - DNA, 25 bp, Homo sapien
ctaggaagggactcagaccctgaca

SEQ ID NO: 1491565 - DNA, 25 bp, Homo sapien
ggaagggactcagaccctgacaaca

SEQ ID NO: 1491566 - DNA, 25 bp, Homo sapien
tgcaaggtcgctgtggggctctacc

SEQ ID NO: 1491567 - DNA, 25 bp, Homo sapien
tgtggggctctaccggcagctgctc

SEQ ID NO: 1491568 - DNA, 25 bp, Homo sapien
tggttctttgcaaggtcgctgtggg

SEQ ID NO: 1491569 - DNA, 25 bp, Homo sapien
ctggcttggtggtctgcttgggagc

SEQ ID NO: 1491570 - DNA, 25 bp, Homo sapien
agacagcttttcagggctaggggaa

SEQ ID NO: 1491571 - DNA, 25 bp, Homo sapien
gcaatcccagagacagcttttcagg

SEQ ID NO: 1491572 - DNA, 25 bp, Homo sapien
cccagagacagcttttcagggctag

SEQ ID NO: 1491573 - DNA, 25 bp, Homo sapien
cagagacagcttttcagggctaggg

SEQ ID NO: 1491574 - DNA, 25 bp, Homo sapien
gtcccagccccacctcttctactca

SEQ ID NO: 1491575 - DNA, 25 bp, Homo sapien
ccgtcccagccccacctcttctact

SEQ ID NO: 1491576 - DNA, 25 bp, Homo sapien
tcccagccccacctcttctactcac

SEQ ID NO: 1491577 - DNA, 25 bp, Homo sapien
cgtcccagccccacctcttctactc

SEQ ID NO: 1491578 - DNA, 25 bp, Homo sapien
ccgcacaggtcccagaggcgctgca

SEQ ID NO: 1491579 - DNA, 25 bp, Homo sapien
ctcccgggctcccgttccagtgcct

SEQ ID NO: 1491580 - DNA, 25 bp, Homo sapien
tcccgggctcccgttccagtgcctc

SEQ ID NO: 1491581 - DNA, 25 bp, Homo sapien
gcacaggtcccagaggcgctgcagg

SEQ ID NO: 1491582 - DNA, 25 bp, Homo sapien
ctggtagcggaaacggcggaagaga

SEQ ID NO: 1491583 - DNA, 25 bp, Homo sapien
cgagaggactcggggctgggaagct

SEQ ID NO: 1491584 - DNA, 25 bp, Homo sapien
gcggaaacggcggaagagacgccga

SEQ ID NO: 1491585 - DNA, 25 bp, Homo sapien
cggcggaagagacgccgagaggact

SEQ ID NO: 1491586 - DNA, 25 bp, Homo sapien
tcggagccaagactcgggggcacag

SEQ ID NO: 1491587 - DNA, 25 bp, Homo sapien
ttcggagccaagactcgggggcaca

SEQ ID NO: 1491588 - DNA, 25 bp, Homo sapien
ggagccaagactcgggggcacaggg

SEQ ID NO: 1491589 - DNA, 25 bp, Homo sapien
cttcggagccaagactcgggggcac

SEQ ID NO: 1491590 - DNA, 25 bp, Homo sapien
gatgggatttgatgggggtcagcag

SEQ ID NO: 1491591 - DNA, 25 bp, Homo sapien
gggatttgatgggggtcagcagcag

SEQ ID NO: 1491592 - DNA, 25 bp, Homo sapien
tgggggtcagcagcagaagacgacc

SEQ ID NO: 1491593 - DNA, 25 bp, Homo sapien
gatttgatgggggtcagcagcagaa

SEQ ID NO: 1491594 - DNA, 25 bp, Homo sapien
agatgtaatcaagacgctctggtac

SEQ ID NO: 1491595 - DNA, 25 bp, Homo sapien
ggtcctcctggagagatccgagatg

SEQ ID NO: 1491596 - DNA, 25 bp, Homo sapien
gcaggccactatcttgaagctccgg

SEQ ID NO: 1491597 - DNA, 25 bp, Homo sapien
tgttcttgttattaagacctttaca

SEQ ID NO: 1491598 - DNA, 25 bp, Homo sapien
gctccggagccgaagtcactgttct

SEQ ID NO: 1491599 - DNA, 25 bp, Homo sapien
cagaatcagctttgcccagcagagt

SEQ ID NO: 1491600 - DNA, 25 bp, Homo sapien
tgcatcggatgagccttcaagcaca

SEQ ID NO: 1491601 - DNA, 25 bp, Homo sapien
acaaagacatgcatcggatgagcct

SEQ ID NO: 1491602 - DNA, 25 bp, Homo sapien
tgctgcgtgctggatggacaaccca

SEQ ID NO: 1491603 - DNA, 25 bp, Homo sapien
actcggatcgtctccaaccagacgg

SEQ ID NO: 1491604 - DNA, 25 bp, Homo sapien
cagacggccgcgtccgtctttgtca

SEQ ID NO: 1491605 - DNA, 25 bp, Homo sapien
ttgtcacggcggcacctggcgcgtc

SEQ ID NO: 1491606 - DNA, 25 bp, Homo sapien
cgcgtcggaggctcggaggagatgc

SEQ ID NO: 1491607 - DNA, 25 bp, Homo sapien
cccgcaggggcggagcgagctccca

SEQ ID NO: 1491608 - DNA, 25 bp, Homo sapien
accgagctggatcggcagaaaggga

SEQ ID NO: 1491609 - DNA, 25 bp, Homo sapien
gggaccgagctggatcggcagaaag

SEQ ID NO: 1491610 - DNA, 25 bp, Homo sapien
gagctggatcggcagaaagggaagg

SEQ ID NO: 1491611 - DNA, 25 bp, Homo sapien
ggaccgagctggatcggcagaaagg

SEQ ID NO: 1491612 - DNA, 25 bp, Homo sapien
aagtccagggcagccgtcctcatcc

SEQ ID NO: 1491613 - DNA, 25 bp, Homo sapien
cgtccagaccgcgtctcccgatcat

SEQ ID NO: 1491614 - DNA, 25 bp, Homo sapien
cgtctcccgatcatccggaaagcca

SEQ ID NO: 1491615 - DNA, 25 bp, Homo sapien
atccggaaagccacggctcggctcg

SEQ ID NO: 1491616 - DNA, 25 bp, Homo sapien
ccgcccgcaccttcctgagcgctgg

SEQ ID NO: 1491617 - DNA, 25 bp, Homo sapien
gcaccttcctgagcgctgggctctg

SEQ ID NO: 1491618 - DNA, 25 bp, Homo sapien
tgaaaaacaatggtgttgctttctc

SEQ ID NO: 1491619 - DNA, 25 bp, Homo sapien
ggtgttgctttctcccccgcccgca

SEQ ID NO: 1491620 - DNA, 25 bp, Homo sapien
cgccgcggcgcgtccctgttggcgg

SEQ ID NO: 1491621 - DNA, 25 bp, Homo sapien
gccgcggcgcgtccctgttggcggg

SEQ ID NO: 1491622 - DNA, 25 bp, Homo sapien
ggcgcgtccctgttggcgggcggcg

SEQ ID NO: 1491623 - DNA, 25 bp, Homo sapien
gcggcgcgtccctgttggcgggcgg

SEQ ID NO: 1491624 - DNA, 25 bp, Homo sapien
tccgcgccttccgggcctggcgccc

SEQ ID NO: 1491625 - DNA, 25 bp, Homo sapien
atccgcgccttccgggcctggcgcc

SEQ ID NO: 1491626 - DNA, 25 bp, Homo sapien
ccgcgccttccgggcctggcgccca

SEQ ID NO: 1491627 - DNA, 25 bp, Homo sapien
cgcgccttccgggcctggcgcccac

SEQ ID NO: 1491628 - DNA, 25 bp, Homo sapien
gctcgctgaagtgaacacggttgca

SEQ ID NO: 1491629 - DNA, 25 bp, Homo sapien
gggctcgttgctcgctgaagtgaac

SEQ ID NO: 1491630 - DNA, 25 bp, Homo sapien
tgcggtgagtcctgaccctgagtgg

SEQ ID NO: 1491631 - DNA, 25 bp, Homo sapien
gaaaggccgcgcatccggaggccac

SEQ ID NO: 1491632 - DNA, 25 bp, Homo sapien
caaattcttacatgggtcgtccccg

SEQ ID NO: 1491633 - DNA, 25 bp, Homo sapien
ccccggggaatgctcatttttcagg

SEQ ID NO: 1491634 - DNA, 25 bp, Homo sapien
aatatagcccaaattcttacatggg

SEQ ID NO: 1491635 - DNA, 25 bp, Homo sapien
cgctgcactatgctgaatatagccc

SEQ ID NO: 1491636 - DNA, 25 bp, Homo sapien
cggtccctgagcaggtctgattccc

SEQ ID NO: 1491637 - DNA, 25 bp, Homo sapien
tggccccttcgccatctgctctgca

SEQ ID NO: 1491638 - DNA, 25 bp, Homo sapien
aggtctgattcccatggccccttcg

SEQ ID NO: 1491639 - DNA, 25 bp, Homo sapien
tgctctgcaccgaaattggattctc

SEQ ID NO: 1491640 - DNA, 25 bp, Homo sapien
ggatcccctttcaagggcaagcaga

SEQ ID NO: 1491641 - DNA, 25 bp, Homo sapien
tccgtcttccggagggtagctactg

SEQ ID NO: 1491642 - DNA, 25 bp, Homo sapien
tgaggcacgggatcctttagctccg

SEQ ID NO: 1491643 - DNA, 25 bp, Homo sapien
tccaaagaaagtggcccggctgagt

SEQ ID NO: 1491644 - DNA, 25 bp, Homo sapien
caaggtgggctggtgagtgagagga

SEQ ID NO: 1491645 - DNA, 25 bp, Homo sapien
tatcagataccacgggtgaagcatc

SEQ ID NO: 1491646 - DNA, 25 bp, Homo sapien
gtaaaccctgctcaaggactgcacc

SEQ ID NO: 1491647 - DNA, 25 bp, Homo sapien
gaaggtgttcgcctctgaatgaagt

SEQ ID NO: 1491648 - DNA, 25 bp, Homo sapien
cacagctggtgaacagtaggcccaa

SEQ ID NO: 1491649 - DNA, 25 bp, Homo sapien
gagatgctcggttcctggagttgac

SEQ ID NO: 1491650 - DNA, 25 bp, Homo sapien
gaatcgttgtagagatcccggcagg

SEQ ID NO: 1491651 - DNA, 25 bp, Homo sapien
ggagtgtggcctaacggaatcttga

SEQ ID NO: 1491652 - DNA, 25 bp, Homo sapien
gtgactggggctgaaactgggtgac

SEQ ID NO: 1491653 - DNA, 25 bp, Homo sapien
gcagccgttccactgtgacatcgcc

SEQ ID NO: 1491654 - DNA, 25 bp, Homo sapien
ggaaatgtgatgtgtaacctaaagc

SEQ ID NO: 1491655 - DNA, 25 bp, Homo sapien
tgatgtgtaacctaaagccccagtg

SEQ ID NO: 1491656 - DNA, 25 bp, Homo sapien
ctggaaagtgaagtgtgcacaagga

SEQ ID NO: 1491657 - DNA, 25 bp, Homo sapien
ttggagaagaactagcaggacaatc

SEQ ID NO: 1491658 - DNA, 25 bp, Homo sapien
catttggagaagaactagcaggaca

SEQ ID NO: 1491659 - DNA, 25 bp, Homo sapien
gaagaactagcaggacaatcagcag

SEQ ID NO: 1491660 - DNA, 25 bp, Homo sapien
tttcaggcttattggggattcccca

SEQ ID NO: 1491661 - DNA, 25 bp, Homo sapien
aggcggctggagcgggggtctccaa

SEQ ID NO: 1491662 - DNA, 25 bp, Homo sapien
cggctggagcgggggtctccaaggt

SEQ ID NO: 1491663 - DNA, 25 bp, Homo sapien
tggagcgggggtctccaaggtgggc

SEQ ID NO: 1491664 - DNA, 25 bp, Homo sapien
agcgggggtctccaaggtgggcctg

SEQ ID NO: 1491665 - DNA, 25 bp, Homo sapien
cagtgaatttggaagaggaatccct

SEQ ID NO: 1491666 - DNA, 25 bp, Homo sapien
ttttccagaaaagtcgctgattccc

SEQ ID NO: 1491667 - DNA, 25 bp, Homo sapien
tctttcctactgagggctttttgaa

SEQ ID NO: 1491668 - DNA, 25 bp, Homo sapien
agaaaagtcgctgattcccagtgtc

SEQ ID NO: 1491669 - DNA, 25 bp, Homo sapien
tctcaacaggtcttgcaccgttgtt

SEQ ID NO: 1491670 - DNA, 25 bp, Homo sapien
catcccctctgaacttggaaagaaa

SEQ ID NO: 1491671 - DNA, 25 bp, Homo sapien
gtttttcaccctatgagttctgcat

SEQ ID NO: 1491672 - DNA, 25 bp, Homo sapien
ctctcttggacaaaaacgttccgat

SEQ ID NO: 1491673 - DNA, 25 bp, Homo sapien
cgctcggccgagtgtattgctctta

SEQ ID NO: 1491674 - DNA, 25 bp, Homo sapien
taactcatagacgtatttctgaagg

SEQ ID NO: 1491675 - DNA, 25 bp, Homo sapien
cccagtaggaggtagatctgttaca

SEQ ID NO: 1491676 - DNA, 25 bp, Homo sapien
ccaggctcccagagacggttcttag

SEQ ID NO: 1491677 - DNA, 25 bp, Homo sapien
tacatcaactcttgaagaggccaag

SEQ ID NO: 1491678 - DNA, 25 bp, Homo sapien
cacctgtaatccaactgatatggtt

SEQ ID NO: 1491679 - DNA, 25 bp, Homo sapien
agctatgtgaaaatgactaatacat

SEQ ID NO: 1491680 - DNA, 25 bp, Homo sapien
tgagactgaaaaaactcactaattt

SEQ ID NO: 1491681 - DNA, 25 bp, Homo sapien
gagactccgtctgacattcccctgg

SEQ ID NO: 1491682 - DNA, 25 bp, Homo sapien
tcagacgcagagactggcagaaaat

SEQ ID NO: 1491683 - DNA, 25 bp, Homo sapien
tctgctgaatcaaggaattagcccc

SEQ ID NO: 1491684 - DNA, 25 bp, Homo sapien
gcaggtttggtggaacaaccctcga

SEQ ID NO: 1491685 - DNA, 25 bp, Homo sapien
gagtgatagacccatccctggcact

SEQ ID NO: 1491686 - DNA, 25 bp, Homo sapien
ctcccagaagagtgatagacccatc

SEQ ID NO: 1491687 - DNA, 25 bp, Homo sapien
ttttcctcccagaagagtgatagac

SEQ ID NO: 1491688 - DNA, 25 bp, Homo sapien
gaagagtgatagacccatccctggc

SEQ ID NO: 1491689 - DNA, 25 bp, Homo sapien
tacggacgccgtcagcgtctcggtc

SEQ ID NO: 1491690 - DNA, 25 bp, Homo sapien
cgcaagttgtacttggctgtgacca

SEQ ID NO: 1491691 - DNA, 25 bp, Homo sapien
aggacagtacggacgccgtcagcgt

SEQ ID NO: 1491692 - DNA, 25 bp, Homo sapien
ttagctggagctgaattgttccgca

SEQ ID NO: 1491693 - DNA, 25 bp, Homo sapien
cgagccccgcagccgctcaggccca

SEQ ID NO: 1491694 - DNA, 25 bp, Homo sapien
gagccccgcagccgctcaggcccac

SEQ ID NO: 1491695 - DNA, 25 bp, Homo sapien
tgggaccagcactgagcgccttttc

SEQ ID NO: 1491696 - DNA, 25 bp, Homo sapien
gtgcctgcagccagcgcacactggg

SEQ ID NO: 1491697 - DNA, 25 bp, Homo sapien
gaccagcactgagcgccttttctgt

SEQ ID NO: 1491698 - DNA, 25 bp, Homo sapien
ctgggaccagcactgagcgcctttt

SEQ ID NO: 1491699 - DNA, 25 bp, Homo sapien
ttcccgcgccctctggtggaaagtg

SEQ ID NO: 1491700 - DNA, 25 bp, Homo sapien
cctctggtggaaagtgttcgctttt

SEQ ID NO: 1491701 - DNA, 25 bp, Homo sapien
ttacaaggttgggtttcagccgagc

SEQ ID NO: 1491702 - DNA, 25 bp, Homo sapien
gtttcagccgagcaagtctgaggcc

SEQ ID NO: 1491703 - DNA, 25 bp, Homo sapien
caggatggctctgttcgcagagggt

SEQ ID NO: 1491704 - DNA, 25 bp, Homo sapien
ccaggatggctctgttcgcagaggg

SEQ ID NO: 1491705 - DNA, 25 bp, Homo sapien
ggatggctctgttcgcagagggttg

SEQ ID NO: 1491706 - DNA, 25 bp, Homo sapien
atggctctgttcgcagagggttgaa

SEQ ID NO: 1491707 - DNA, 25 bp, Homo sapien
ctgtggacgaggcatctcggttttt

SEQ ID NO: 1491708 - DNA, 25 bp, Homo sapien
gtggacgaggcatctcggttttttg

SEQ ID NO: 1491709 - DNA, 25 bp, Homo sapien
tgtggacgaggcatctcggtttttt

SEQ ID NO: 1491710 - DNA, 25 bp, Homo sapien
tatttgcaaagcatggtgctgatcc

SEQ ID NO: 1491711 - DNA, 25 bp, Homo sapien
ctatttgcaaagcatggtgctgatc

SEQ ID NO: 1491712 - DNA, 25 bp, Homo sapien
tggagagtaaagagcacgctagcat

SEQ ID NO: 1491713 - DNA, 25 bp, Homo sapien
agcacgctagcatcacgtgcggcca

SEQ ID NO: 1491714 - DNA, 25 bp, Homo sapien
gtgcggccaacctggccacgagctg

SEQ ID NO: 1491715 - DNA, 25 bp, Homo sapien
tttggaggtataacatagacacccg

SEQ ID NO: 1491716 - DNA, 25 bp, Homo sapien
tgtcctggaaacttcggggacgcca

SEQ ID NO: 1491717 - DNA, 25 bp, Homo sapien
tttacagcaattagctttctccatc

SEQ ID NO: 1491718 - DNA, 25 bp, Homo sapien
tcggggacgccaatcatgtactctt

SEQ ID NO: 1491719 - DNA, 25 bp, Homo sapien
tggtgctgctccgcagtcctccgct

SEQ ID NO: 1491720 - DNA, 25 bp, Homo sapien
ggaacagacaaccatttgctctggc

SEQ ID NO: 1491721 - DNA, 25 bp, Homo sapien
ttgctctggcagatgctcgtccgtg

SEQ ID NO: 1491722 - DNA, 25 bp, Homo sapien
tcccacactgggaacagacaaccat

SEQ ID NO: 1491723 - DNA, 25 bp, Homo sapien
tcacagtgtccaaagaggttttggg

SEQ ID NO: 1491724 - DNA, 25 bp, Homo sapien
gttcgtagttgattttagaaatgac

SEQ ID NO: 1491725 - DNA, 25 bp, Homo sapien
agtggtgtcttcatagaagtggaga

SEQ ID NO: 1491726 - DNA, 25 bp, Homo sapien
catagaagtggagattccttttctg

SEQ ID NO: 1491727 - DNA, 25 bp, Homo sapien
atgacacgggggctagagctttccc

SEQ ID NO: 1491728 - DNA, 25 bp, Homo sapien
tcagagatattggagagcactggga

SEQ ID NO: 1491729 - DNA, 25 bp, Homo sapien
gagtttgcaataaagtcctctcgat

SEQ ID NO: 1491730 - DNA, 25 bp, Homo sapien
ccttctctttgtgagtttgcaataa

SEQ ID NO: 1491731 - DNA, 25 bp, Homo sapien
tcctctcgatttgctttaacttggc

SEQ ID NO: 1491732 - DNA, 25 bp, Homo sapien
tggggaagctgactcagcgccagca

SEQ ID NO: 1491733 - DNA, 25 bp, Homo sapien
ggaagctgactcagcgccagcactc

SEQ ID NO: 1491734 - DNA, 25 bp, Homo sapien
agctggggaagctgactcagcgcca

SEQ ID NO: 1491735 - DNA, 25 bp, Homo sapien
gggaagctgactcagcgccagcact

SEQ ID NO: 1491736 - DNA, 25 bp, Homo sapien
tcctgctagtcacattttttctggt

SEQ ID NO: 1491737 - DNA, 25 bp, Homo sapien
aacctcagatactttggcactcccc

SEQ ID NO: 1491738 - DNA, 25 bp, Homo sapien
tctgtttcttggtaacctcagatac

SEQ ID NO: 1491739 - DNA, 25 bp, Homo sapien
tccccacctccgatctcttctgttc

SEQ ID NO: 1491740 - DNA, 25 bp, Homo sapien
gagggtcgcaggcaaggagtcggac

SEQ ID NO: 1491741 - DNA, 25 bp, Homo sapien
aggtgagggtcgcaggcaaggagtc

SEQ ID NO: 1491742 - DNA, 25 bp, Homo sapien
aagctgaggtgagggtcgcaggcaa

SEQ ID NO: 1491743 - DNA, 25 bp, Homo sapien
gaaagctgaggtgagggtcgcaggc

SEQ ID NO: 1491744 - DNA, 25 bp, Homo sapien
tcatctgcttctcgtgaacttccca

SEQ ID NO: 1491745 - DNA, 25 bp, Homo sapien
cggagagtgaagcagcgaaggctgg

SEQ ID NO: 1491746 - DNA, 25 bp, Homo sapien
cacaggagtggtcgcagcattcagc

SEQ ID NO: 1491747 - DNA, 25 bp, Homo sapien
tacacaattgcagccagttcgccag

SEQ ID NO: 1491748 - DNA, 25 bp, Homo sapien
tcttttggagcatatttggtctgct

SEQ ID NO: 1491749 - DNA, 25 bp, Homo sapien
ttggagcatatttggtctgctttct

SEQ ID NO: 1491750 - DNA, 25 bp, Homo sapien
tttggagcatatttggtctgctttc

SEQ ID NO: 1491751 - DNA, 25 bp, Homo sapien
cttttggagcatatttggtctgctt

SEQ ID NO: 1491752 - DNA, 25 bp, Homo sapien
cctggttcatggagactcaggtctg

SEQ ID NO: 1491753 - DNA, 25 bp, Homo sapien
tggttcatggagactcaggtctgct

SEQ ID NO: 1491754 - DNA, 25 bp, Homo sapien
aatgacacctttcacctggttcatg

SEQ ID NO: 1491755 - DNA, 25 bp, Homo sapien
agctccagccccgaatgacaccttt

SEQ ID NO: 1491756 - DNA, 25 bp, Homo sapien
taaaggcctcacgtttagccattca

SEQ ID NO: 1491757 - DNA, 25 bp, Homo sapien
gcccctaagcaggactagatgcctc

SEQ ID NO: 1491758 - DNA, 25 bp, Homo sapien
tagatgcctctctcatgttgtagag

SEQ ID NO: 1491759 - DNA, 25 bp, Homo sapien
gaaaggtggtagtcatcggaaccaa

SEQ ID NO: 1491760 - DNA, 25 bp, Homo sapien
tattagttgaggataaccactggga

SEQ ID NO: 1491761 - DNA, 25 bp, Homo sapien
gaggacgaggcactgagtcaaagca

SEQ ID NO: 1491762 - DNA, 25 bp, Homo sapien
gatgtttaaatcagcaccgacttcc

SEQ ID NO: 1491763 - DNA, 25 bp, Homo sapien
tctgtcggactcatacagcaaagca

SEQ ID NO: 1491764 - DNA, 25 bp, Homo sapien
gagccttcttggtaggagtggaaac

SEQ ID NO: 1491765 - DNA, 25 bp, Homo sapien
ggagagagctgcgatccatccaggc

SEQ ID NO: 1491766 - DNA, 25 bp, Homo sapien
agaagagagcttgccgacgatgcct

SEQ ID NO: 1491767 - DNA, 25 bp, Homo sapien
tctgtgatccttccggtggagtgtc

SEQ ID NO: 1491768 - DNA, 25 bp, Homo sapien
ggagacgatcatcaggtgggaggaa

SEQ ID NO: 1491769 - DNA, 25 bp, Homo sapien
aggccttgtgtcgtcccttggagga

SEQ ID NO: 1491770 - DNA, 25 bp, Homo sapien
aataaatttgccctgctcttgggag

SEQ ID NO: 1491771 - DNA, 25 bp, Homo sapien
cagatacatgtaaatcgcaggtagg

SEQ ID NO: 1491772 - DNA, 25 bp, Homo sapien
gaatggcaattgcaccgtcaggacc

SEQ ID NO: 1491773 - DNA, 25 bp, Homo sapien
tgcacgaaggagttgccgaagccac

SEQ ID NO: 1491774 - DNA, 25 bp, Homo sapien
tcattcacagcggtgtcagcacacg

SEQ ID NO: 1491775 - DNA, 25 bp, Homo sapien
tcagcacacgacagcttgatcacgg

SEQ ID NO: 1491776 - DNA, 25 bp, Homo sapien
ggagttgaggatccacccgggatgc

SEQ ID NO: 1491777 - DNA, 25 bp, Homo sapien
ggagtcccctaagaagctatggttg

SEQ ID NO: 1491778 - DNA, 25 bp, Homo sapien
gatgccaggatgatggcgacgttcc

SEQ ID NO: 1491779 - DNA, 25 bp, Homo sapien
ggatgatggcgacgttccccaacat

SEQ ID NO: 1491780 - DNA, 25 bp, Homo sapien
tggcacttgtggcaaattgagaaaa

SEQ ID NO: 1491781 - DNA, 25 bp, Homo sapien
ctggcacttgtggcaaattgagaaa

SEQ ID NO: 1491782 - DNA, 25 bp, Homo sapien
tgttcacgctgaattcccgcagttt

SEQ ID NO: 1491783 - DNA, 25 bp, Homo sapien
tcacgctgaattcccgcagtttctt

SEQ ID NO: 1491784 - DNA, 25 bp, Homo sapien
ctgaattcccgcagtttcttctggg

SEQ ID NO: 1491785 - DNA, 25 bp, Homo sapien
gctgaattcccgcagtttcttctgg

SEQ ID NO: 1491786 - DNA, 25 bp, Homo sapien
cctcagcctcgtcagttattccttc

SEQ ID NO: 1491787 - DNA, 25 bp, Homo sapien
gtcctcagcctcgtcagttattcct

SEQ ID NO: 1491788 - DNA, 25 bp, Homo sapien
agtcctcagcctcgtcagttattcc

SEQ ID NO: 1491789 - DNA, 25 bp, Homo sapien
gagtcctcagcctcgtcagttattc

SEQ ID NO: 1491790 - DNA, 25 bp, Homo sapien
gagagattattctcagtctagaagg

SEQ ID NO: 1491791 - DNA, 25 bp, Homo sapien
aaggagtctgctgtccgttgcaaca

SEQ ID NO: 1491792 - DNA, 25 bp, Homo sapien
caaccctctgagcaagtctgagaga

SEQ ID NO: 1491793 - DNA, 25 bp, Homo sapien
catttactggaacccaaccctctga

SEQ ID NO: 1491794 - DNA, 25 bp, Homo sapien
ctgccttaaccttagtcccccagag

SEQ ID NO: 1491795 - DNA, 25 bp, Homo sapien
agtacgtgaggtcggtggaactgcc

SEQ ID NO: 1491796 - DNA, 25 bp, Homo sapien
acgtgaggtcggtggaactgcctta

SEQ ID NO: 1491797 - DNA, 25 bp, Homo sapien
cttggcagtacgtgaggtcggtgga

SEQ ID NO: 1491798 - DNA, 25 bp, Homo sapien
gttacttccgaggataaggctttca

SEQ ID NO: 1491799 - DNA, 25 bp, Homo sapien
tggaggttacttccgaggataaggc

SEQ ID NO: 1491800 - DNA, 25 bp, Homo sapien
ttgacatggtggaggttacttccga

SEQ ID NO: 1491801 - DNA, 25 bp, Homo sapien
ttccgaggataaggctttcaggcaa

SEQ ID NO: 1491802 - DNA, 25 bp, Homo sapien
cctcagatttaacttgacctcattc

SEQ ID NO: 1491803 - DNA, 25 bp, Homo sapien
gcccgtgtcacgctctctgttcatt

SEQ ID NO: 1491804 - DNA, 25 bp, Homo sapien
ttgcccgtgtcacgctctctgttca

SEQ ID NO: 1491805 - DNA, 25 bp, Homo sapien
tttaacttgacctcattctctccac

SEQ ID NO: 1491806 - DNA, 25 bp, Homo sapien
tactctctcccacggagagccagat

SEQ ID NO: 1491807 - DNA, 25 bp, Homo sapien
cgactgtgctttggcgaagaagtgg

SEQ ID NO: 1491808 - DNA, 25 bp, Homo sapien
agggaggagagaatatgtcccagaa

SEQ ID NO: 1491809 - DNA, 25 bp, Homo sapien
tcttgtactctctcccacggagagc

SEQ ID NO: 1491810 - DNA, 25 bp, Homo sapien
tggttttactctgggctctggttac

SEQ ID NO: 1491811 - DNA, 25 bp, Homo sapien
actggttttactctgggctctggtt

SEQ ID NO: 1491812 - DNA, 25 bp, Homo sapien
tgggctctggttactctgcaattcc

SEQ ID NO: 1491813 - DNA, 25 bp, Homo sapien
gttactctgcaattccagttatctg

SEQ ID NO: 1491814 - DNA, 25 bp, Homo sapien
gaagtcaggacaaagctccactgtg

SEQ ID NO: 1491815 - DNA, 25 bp, Homo sapien
gtcaggacaaagctccactgtgaca

SEQ ID NO: 1491816 - DNA, 25 bp, Homo sapien
cagaagtcaggacaaagctccactg

SEQ ID NO: 1491817 - DNA, 25 bp, Homo sapien
caggacaaagctccactgtgacaca

SEQ ID NO: 1491818 - DNA, 25 bp, Homo sapien
gaagccaggacagagctccaccatg

SEQ ID NO: 1491819 - DNA, 25 bp, Homo sapien
gccaggacagagctccaccatgaca

SEQ ID NO: 1491820 - DNA, 25 bp, Homo sapien
tggagaggacactcaggccagaagc

SEQ ID NO: 1491821 - DNA, 25 bp, Homo sapien
ctggagaggacactcaggccagaag

SEQ ID NO: 1491822 - DNA, 25 bp, Homo sapien
taatcttcagaaattgcaatcctca

SEQ ID NO: 1491823 - DNA, 25 bp, Homo sapien
aatcttcagaaattgcaatcctcat

SEQ ID NO: 1491824 - DNA, 25 bp, Homo sapien
ataatcttcagaaattgcaatcctc

SEQ ID NO: 1491825 - DNA, 25 bp, Homo sapien
tctcttcaccacttgttccaacgtt

SEQ ID NO: 1491826 - DNA, 25 bp, Homo sapien
cctctatgtcaccccatgcctcctc

SEQ ID NO: 1491827 - DNA, 25 bp, Homo sapien
tctatgtcaccccatgcctcctcct

SEQ ID NO: 1491828 - DNA, 25 bp, Homo sapien
tcttcaccacttgttccaacgttta

SEQ ID NO: 1491829 - DNA, 25 bp, Homo sapien
tatagaatcaaagacaacgcacggg

SEQ ID NO: 1491830 - DNA, 25 bp, Homo sapien
tcaggtttggttggtggatgtcaca

SEQ ID NO: 1491831 - DNA, 25 bp, Homo sapien
caaatgtggcagttctagtcagggt

SEQ ID NO: 1491832 - DNA, 25 bp, Homo sapien
ggtgaaggtgtcctaaatgaggcca

SEQ ID NO: 1491833 - DNA, 25 bp, Homo sapien
aggcaaatccatggcccgcgtgggt

SEQ ID NO: 1491834 - DNA, 25 bp, Homo sapien
acgtcgccgcgtacacgtacctggg

SEQ ID NO: 1491835 - DNA, 25 bp, Homo sapien
tctgccagttcgtgtgtgggacgcc

SEQ ID NO: 1491836 - DNA, 25 bp, Homo sapien
gggagctgccattccgccctgacgt

SEQ ID NO: 1491837 - DNA, 25 bp, Homo sapien
cgattcaacacttatatgatgacaa

SEQ ID NO: 1491838 - DNA, 25 bp, Homo sapien
caaagatgtgtagaatcatgtcaac

SEQ ID NO: 1491839 - DNA, 25 bp, Homo sapien
gtcccactagaaaaacgattcaaca

SEQ ID NO: 1491840 - DNA, 25 bp, Homo sapien
caactaccgctacaaatcagtaagc

SEQ ID NO: 1491841 - DNA, 25 bp, Homo sapien
catggaggcatctacatttagcagt

SEQ ID NO: 1491842 - DNA, 25 bp, Homo sapien
gcaaacaatcaatcctatggcagac

SEQ ID NO: 1491843 - DNA, 25 bp, Homo sapien
tcctgaagctacgtagggactacta

SEQ ID NO: 1491844 - DNA, 25 bp, Homo sapien
tggaaataacgccaggtctgctggg

SEQ ID NO: 1491845 - DNA, 25 bp, Homo sapien
aatcttgagcctgctattccctggg

SEQ ID NO: 1491846 - DNA, 25 bp, Homo sapien
taggtttgaaatatacctgtgcaca

SEQ ID NO: 1491847 - DNA, 25 bp, Homo sapien
gaagcttgccatgttgagggtgatt

SEQ ID NO: 1491848 - DNA, 25 bp, Homo sapien
tactctatctggctcataatacctg

SEQ ID NO: 1491849 - DNA, 25 bp, Homo sapien
aactgggagctttgtgaaatgcatc

SEQ ID NO: 1491850 - DNA, 25 bp, Homo sapien
tttggccatgaccaagggtgactgg

SEQ ID NO: 1491851 - DNA, 25 bp, Homo sapien
ggtgatgcatgaccctcacagtgtg

SEQ ID NO: 1491852 - DNA, 25 bp, Homo sapien
ccatacatgaagtagagggttcaca

SEQ ID NO: 1491853 - DNA, 25 bp, Homo sapien
gaaaattctgacatattcggctgaa

SEQ ID NO: 1491854 - DNA, 25 bp, Homo sapien
gaaaagggacctggcatcgaaagac

SEQ ID NO: 1491855 - DNA, 25 bp, Homo sapien
cctggcatcgaaagacaagtggtgt

SEQ ID NO: 1491856 - DNA, 25 bp, Homo sapien
gctgaaaagggacctggcatcgaaa

SEQ ID NO: 1491857 - DNA, 25 bp, Homo sapien
ggagggtctgcgttgtctgctatcc

SEQ ID NO: 1491858 - DNA, 25 bp, Homo sapien
aggagagtgtgagttatggtcatca

SEQ ID NO: 1491859 - DNA, 25 bp, Homo sapien
cccacataaactgatgaggacctgc

SEQ ID NO: 1491860 - DNA, 25 bp, Homo sapien
tgagcacatgaccaatcagcctgag

SEQ ID NO: 1491861 - DNA, 25 bp, Homo sapien
ggtgagagcgttcaaaatcctgtct

SEQ ID NO: 1491862 - DNA, 25 bp, Homo sapien
gtgagagcgttcaaaatcctgtctt

SEQ ID NO: 1491863 - DNA, 25 bp, Homo sapien
cctttgaatcatcaggcagagaatg

SEQ ID NO: 1491864 - DNA, 25 bp, Homo sapien
gcacactggcttagagctctctgca

SEQ ID NO: 1491865 - DNA, 25 bp, Homo sapien
caggaactgccacatggttttggtc

SEQ ID NO: 1491866 - DNA, 25 bp, Homo sapien
catctggaaagactagctgttgtaa

SEQ ID NO: 1491867 - DNA, 25 bp, Homo sapien
ctctaattttaacatgtatcaggta

SEQ ID NO: 1491868 - DNA, 25 bp, Homo sapien
tctcaaaaaagcttagcgttgttac

SEQ ID NO: 1491869 - DNA, 25 bp, Homo sapien
tctatatacagaagtaataaaatgc

SEQ ID NO: 1491870 - DNA, 25 bp, Homo sapien
atggatagaatatgaaaatgtcttg

SEQ ID NO: 1491871 - DNA, 25 bp, Homo sapien
aaatgcacacaaaacaatggataga

SEQ ID NO: 1491872 - DNA, 25 bp, Homo sapien
ctctatatacagaagtaataaaatg

SEQ ID NO: 1491873 - DNA, 25 bp, Homo sapien
acagcgagggttccggagcctgcaa

SEQ ID NO: 1491874 - DNA, 25 bp, Homo sapien
tcggcgcggtcttggtctgggtcgg

SEQ ID NO: 1491875 - DNA, 25 bp, Homo sapien
agcctaacggcctccgggcgcattt

SEQ ID NO: 1491876 - DNA, 25 bp, Homo sapien
tttgggcggcgccatgtttcctccc

SEQ ID NO: 1491877 - DNA, 25 bp, Homo sapien
gcgctctcagcgtcgtcaaagttta

SEQ ID NO: 1491878 - DNA, 25 bp, Homo sapien
gtttattatccacggagcgtcctgg

SEQ ID NO: 1491879 - DNA, 25 bp, Homo sapien
cacccgcttcggatactgaggaaca

SEQ ID NO: 1491880 - DNA, 25 bp, Homo sapien
caaggtcactttgctcgatgtaaac

SEQ ID NO: 1491881 - DNA, 25 bp, Homo sapien
cagagccacagcagttctctaatac

SEQ ID NO: 1491882 - DNA, 25 bp, Homo sapien
ctaaatttgcgccagcttgcctgca

SEQ ID NO: 1491883 - DNA, 25 bp, Homo sapien
cctgcagagccacagcagttctcta

SEQ ID NO: 1491884 - DNA, 25 bp, Homo sapien
aaatttgcgccagcttgcctgcaga

SEQ ID NO: 1491885 - DNA, 25 bp, Homo sapien
cgcaggagtgactacggtgtagaac

SEQ ID NO: 1491886 - DNA, 25 bp, Homo sapien
ggtgtaaataagtgggttcagcgca

SEQ ID NO: 1491887 - DNA, 25 bp, Homo sapien
taaataagtgggttcagcgcaggag

SEQ ID NO: 1491888 - DNA, 25 bp, Homo sapien
caggagtgactacggtgtagaacag

SEQ ID NO: 1491889 - DNA, 25 bp, Homo sapien
gatgctcccgtaaaacagagacacc

SEQ ID NO: 1491890 - DNA, 25 bp, Homo sapien
atgatgctcccgtaaaacagagaca

SEQ ID NO: 1491891 - DNA, 25 bp, Homo sapien
tcccgtaaaacagagacaccacagc

SEQ ID NO: 1491892 - DNA, 25 bp, Homo sapien
tgctcccgtaaaacagagacaccac

SEQ ID NO: 1491893 - DNA, 25 bp, Homo sapien
ctgatcttcaacacggcccgggcaa

SEQ ID NO: 1491894 - DNA, 25 bp, Homo sapien
tgatcttcaacacggcccgggcaat

SEQ ID NO: 1491895 - DNA, 25 bp, Homo sapien
aatgtggccgtaagagaccaggatg

SEQ ID NO: 1491896 - DNA, 25 bp, Homo sapien
cccgggcaatgtggccgtaagagac

SEQ ID NO: 1491897 - DNA, 25 bp, Homo sapien
ggacaatgctcgtggtgaagctcat

SEQ ID NO: 1491898 - DNA, 25 bp, Homo sapien
gggcatctcgcaaaagaagtggtcg

SEQ ID NO: 1491899 - DNA, 25 bp, Homo sapien
caattgttcccacacagcggtagga

SEQ ID NO: 1491900 - DNA, 25 bp, Homo sapien
ccaatgggagatatagaactggacc

SEQ ID NO: 1491901 - DNA, 25 bp, Homo sapien
caggaaggggaggttggcaagaaag

SEQ ID NO: 1491902 - DNA, 25 bp, Homo sapien
gtccaggaaggggaggttggcaaga

SEQ ID NO: 1491903 - DNA, 25 bp, Homo sapien
gggaggttggcaagaaagaagtaca

SEQ ID NO: 1491904 - DNA, 25 bp, Homo sapien
ggaggttggcaagaaagaagtacat

SEQ ID NO: 1491905 - DNA, 25 bp, Homo sapien
tctggagaactcacattggctattt

SEQ ID NO: 1491906 - DNA, 25 bp, Homo sapien
tctgtatgggagaccagaatgatga

SEQ ID NO: 1491907 - DNA, 25 bp, Homo sapien
tcaagacaactatgaagaggacagt

SEQ ID NO: 1491908 - DNA, 25 bp, Homo sapien
tgccattgcccaagatcgataccat

SEQ ID NO: 1491909 - DNA, 25 bp, Homo sapien
tgtatgctgggggtggggcaaaagg

SEQ ID NO: 1491910 - DNA, 25 bp, Homo sapien
tgctgggggtggggcaaaaggccac

SEQ ID NO: 1491911 - DNA, 25 bp, Homo sapien
gtatgctgggggtggggcaaaaggc

SEQ ID NO: 1491912 - DNA, 25 bp, Homo sapien
tatgctgggggtggggcaaaaggcc

SEQ ID NO: 1491913 - DNA, 25 bp, Homo sapien
gaagagcacagggcatacagggcat

SEQ ID NO: 1491914 - DNA, 25 bp, Homo sapien
ctgtgggaagagcacagggcataca

SEQ ID NO: 1491915 - DNA, 25 bp, Homo sapien
gtgggaagagcacagggcatacagg

SEQ ID NO: 1491916 - DNA, 25 bp, Homo sapien
gggaagagcacagggcatacagggc

SEQ ID NO: 1491917 - DNA, 25 bp, Homo sapien
tccattccagagaggtcttattgca

SEQ ID NO: 1491918 - DNA, 25 bp, Homo sapien
ggattgtagatcataagacctccat

SEQ ID NO: 1491919 - DNA, 25 bp, Homo sapien
gaatctcacgatgggtcttgctggg

SEQ ID NO: 1491920 - DNA, 25 bp, Homo sapien
aaaaaaggaacactgctcagagagg

SEQ ID NO: 1491921 - DNA, 25 bp, Homo sapien
aatgtgctttatttacagaaagaac

SEQ ID NO: 1491922 - DNA, 25 bp, Homo sapien
gtttagataataggcctctgcagtt

SEQ ID NO: 1491923 - DNA, 25 bp, Homo sapien
gggcaatgtcatgtcagatgtttag

SEQ ID NO: 1491924 - DNA, 25 bp, Homo sapien
tattgatgctatctcagaacacatg

SEQ ID NO: 1491925 - DNA, 25 bp, Homo sapien
accagcagtgttattccccagctcc

SEQ ID NO: 1491926 - DNA, 25 bp, Homo sapien
atctctccttcctgtaccgctgctt

SEQ ID NO: 1491927 - DNA, 25 bp, Homo sapien
caagcttcatatgccgatgtatttc

SEQ ID NO: 1491928 - DNA, 25 bp, Homo sapien
accatcattctggtttctcgtctgg

SEQ ID NO: 1491929 - DNA, 25 bp, Homo sapien
ttggttcacctttacaactcccatg

SEQ ID NO: 1491930 - DNA, 25 bp, Homo sapien
tgtgaccgctatgtggctgtctgcc

SEQ ID NO: 1491931 - DNA, 25 bp, Homo sapien
gcgtcctcccggctgtgatgtcctg

SEQ ID NO: 1491932 - DNA, 25 bp, Homo sapien
catgaaaactatcgcctatggtggc

SEQ ID NO: 1491933 - DNA, 25 bp, Homo sapien
tacgggcaaagagattctctttaaa

SEQ ID NO: 1491934 - DNA, 25 bp, Homo sapien
ctttaaaggggatgacgaagatctt

SEQ ID NO: 1491935 - DNA, 25 bp, Homo sapien
cgggcaaagagattctctttaaagg

SEQ ID NO: 1491936 - DNA, 25 bp, Homo sapien
gggatgacgaagatcttctctatgg

SEQ ID NO: 1491937 - DNA, 25 bp, Homo sapien
gttagtatatgagttgcagaagtga

SEQ ID NO: 1491938 - DNA, 25 bp, Homo sapien
cttttcagtactgaggtgagtagca

SEQ ID NO: 1491939 - DNA, 25 bp, Homo sapien
gcagaagtagagaggtgttgaagat

SEQ ID NO: 1491940 - DNA, 25 bp, Homo sapien
atagtaggtgctgcttttggaggtt

SEQ ID NO: 1491941 - DNA, 25 bp, Homo sapien
tcttgttgagatagatagtaggtgc

SEQ ID NO: 1491942 - DNA, 25 bp, Homo sapien
cccttccatttcttcagcagagtct

SEQ ID NO: 1491943 - DNA, 25 bp, Homo sapien
ttcccttccatttcttcagcagagt

SEQ ID NO: 1491944 - DNA, 25 bp, Homo sapien
atttcttcagcagagtctctcttac

SEQ ID NO: 1491945 - DNA, 25 bp, Homo sapien
ttccatttcttcagcagagtctctc

SEQ ID NO: 1491946 - DNA, 25 bp, Homo sapien
gtcaccacagtgttcaggacgtgga

SEQ ID NO: 1491947 - DNA, 25 bp, Homo sapien
cataccaaatgagcaccacggtgag

SEQ ID NO: 1491948 - DNA, 25 bp, Homo sapien
tctttgatagaggtgcggacgtgaa

SEQ ID NO: 1491949 - DNA, 25 bp, Homo sapien
cagctttgatcagatccaaggcatc

SEQ ID NO: 1491950 - DNA, 25 bp, Homo sapien
tagcagatggcaagacagcggtcat

SEQ ID NO: 1491951 - DNA, 25 bp, Homo sapien
catgatggctccgtagtgtaaagga

SEQ ID NO: 1491952 - DNA, 25 bp, Homo sapien
gcaatccagggtgcaatgtcacaga

SEQ ID NO: 1491953 - DNA, 25 bp, Homo sapien
tatgcaactgatgggaggtgctcac

SEQ ID NO: 1491954 - DNA, 25 bp, Homo sapien
aaccagaaaacagagtccccgcact

SEQ ID NO: 1491955 - DNA, 25 bp, Homo sapien
tgtgtccattgtggtactgaaacca

SEQ ID NO: 1491956 - DNA, 25 bp, Homo sapien
gcctgtgtccattgtggtactgaaa

SEQ ID NO: 1491957 - DNA, 25 bp, Homo sapien
tgagccctttaacccaatcacacag

SEQ ID NO: 1491958 - DNA, 25 bp, Homo sapien
ctgcatgtatccactgtcgctaagg

SEQ ID NO: 1491959 - DNA, 25 bp, Homo sapien
ttcccgcataaacccaaagctactg

SEQ ID NO: 1491960 - DNA, 25 bp, Homo sapien
tcgcgttcaccaacgccgaatgttg

SEQ ID NO: 1491961 - DNA, 25 bp, Homo sapien
aaagctactgcatgtatccactgtc

SEQ ID NO: 1491962 - DNA, 25 bp, Homo sapien
aagctctaatgggcacatgaatcac

SEQ ID NO: 1491963 - DNA, 25 bp, Homo sapien
ctcaagctctaatgggcacatgaat

SEQ ID NO: 1491964 - DNA, 25 bp, Homo sapien
tctcaagctctaatgggcacatgaa

SEQ ID NO: 1491965 - DNA, 25 bp, Homo sapien
tcaagctctaatgggcacatgaatc

SEQ ID NO: 1491966 - DNA, 25 bp, Homo sapien
atctgtaaggcactgtatcactgac

SEQ ID NO: 1491967 - DNA, 25 bp, Homo sapien
tgatctgtaaggcactgtatcactg

SEQ ID NO: 1491968 - DNA, 25 bp, Homo sapien
caaataaggaaagtttcttgtgatc

SEQ ID NO: 1491969 - DNA, 25 bp, Homo sapien
aaagtttcttgtgatctgtaaggca

SEQ ID NO: 1491970 - DNA, 25 bp, Homo sapien
gttttctgcagcaaccttatcagag

SEQ ID NO: 1491971 - DNA, 25 bp, Homo sapien
tgcagcaaccttatcagagcacatt

SEQ ID NO: 1491972 - DNA, 25 bp, Homo sapien
gaggcatcacagtgtagatcacaga

SEQ ID NO: 1491973 - DNA, 25 bp, Homo sapien
tttcatgtcattgttccgcaggctg

SEQ ID NO: 1491974 - DNA, 25 bp, Homo sapien
atttgaaggtggcttaagataaaca

SEQ ID NO: 1491975 - DNA, 25 bp, Homo sapien
tgaatttgaaggtggcttaagataa

SEQ ID NO: 1491976 - DNA, 25 bp, Homo sapien
tttgaaggtggcttaagataaacaa

SEQ ID NO: 1491977 - DNA, 25 bp, Homo sapien
gaatttgaaggtggcttaagataaa

SEQ ID NO: 1491978 - DNA, 25 bp, Homo sapien
aaaacagtgagatgggggaagcatg

SEQ ID NO: 1491979 - DNA, 25 bp, Homo sapien
gatgggggaagcatgtggaaaaagc

SEQ ID NO: 1491980 - DNA, 25 bp, Homo sapien
catgtggaaaaagctttggactgac

SEQ ID NO: 1491981 - DNA, 25 bp, Homo sapien
gaagcatgtggaaaaagctttggac

SEQ ID NO: 1491982 - DNA, 25 bp, Homo sapien
gatcacaatacagatgaaacaagaa

SEQ ID NO: 1491983 - DNA, 25 bp, Homo sapien
tcagtacagtggagaagatataaat

SEQ ID NO: 1491984 - DNA, 25 bp, Homo sapien
caagaaatgcttaaacatgcaccaa

SEQ ID NO: 1491985 - DNA, 25 bp, Homo sapien
gcttaaacatgcaccaactccaata

SEQ ID NO: 1491986 - DNA, 25 bp, Homo sapien
tgtgccagctgtgtacgcagtacca

SEQ ID NO: 1491987 - DNA, 25 bp, Homo sapien
ccttagtaatgaaggaacatcacag

SEQ ID NO: 1491988 - DNA, 25 bp, Homo sapien
gcagtaccaaagagccctccaatgg

SEQ ID NO: 1491989 - DNA, 25 bp, Homo sapien
gccattaacacacagactccagtat

SEQ ID NO: 1491990 - DNA, 25 bp, Homo sapien
gctggaaggcacatcctagaatgga

SEQ ID NO: 1491991 - DNA, 25 bp, Homo sapien
gaacagacaccaggaagacatccaa

SEQ ID NO: 1491992 - DNA, 25 bp, Homo sapien
gaggataaatatctctcctgctgag

SEQ ID NO: 1491993 - DNA, 25 bp, Homo sapien
aagtcattaaaagtagctggaaggc

SEQ ID NO: 1491994 - DNA, 25 bp, Homo sapien
taggaagagcacaccatataaaatc

SEQ ID NO: 1491995 - DNA, 25 bp, Homo sapien
gagcacaccatataaaatccgcagc

SEQ ID NO: 1491996 - DNA, 25 bp, Homo sapien
atccgcagcttctggatattagaaa

SEQ ID NO: 1491997 - DNA, 25 bp, Homo sapien
cagcttctggatattagaaaacccc

SEQ ID NO: 1491998 - DNA, 25 bp, Homo sapien
tacatgatggttgacagagtgtcgc

SEQ ID NO: 1491999 - DNA, 25 bp, Homo sapien
tgaaaggattcagcatcggagccac

SEQ ID NO: 1492000 - DNA, 25 bp, Homo sapien
ctattaggacagtatgcaggagggc

SEQ ID NO: 1492001 - DNA, 25 bp, Homo sapien
ggcgtgagagccaatagacctccta

SEQ ID NO: 1492002 - DNA, 25 bp, Homo sapien
tgtagtcgacgtaaagcagatgtca

SEQ ID NO: 1492003 - DNA, 25 bp, Homo sapien
gtcgacgtaaagcagatgtcaacaa

SEQ ID NO: 1492004 - DNA, 25 bp, Homo sapien
cgacgtaaagcagatgtcaacaaag

SEQ ID NO: 1492005 - DNA, 25 bp, Homo sapien
tagtcgacgtaaagcagatgtcaac

SEQ ID NO: 1492006 - DNA, 25 bp, Homo sapien
cgtcgcaatgatgagcatgttcccc

SEQ ID NO: 1492007 - DNA, 25 bp, Homo sapien
gccaatcgtcgcaatgatgagcatg

SEQ ID NO: 1492008 - DNA, 25 bp, Homo sapien
gagtcaaagccaatcgtcgcaatga

SEQ ID NO: 1492009 - DNA, 25 bp, Homo sapien
caaagccaatcgtcgcaatgatgag

SEQ ID NO: 1492010 - DNA, 25 bp, Homo sapien
tccctgacaactgttagatttcttt

SEQ ID NO: 1492011 - DNA, 25 bp, Homo sapien
tgctctgctgagctaggaagtccca

SEQ ID NO: 1492012 - DNA, 25 bp, Homo sapien
tgctgagctaggaagtcccagaagg

SEQ ID NO: 1492013 - DNA, 25 bp, Homo sapien
tcccagaaggacgaattccctgaca

SEQ ID NO: 1492014 - DNA, 25 bp, Homo sapien
tattaaattgtaaaagccagcagtg

SEQ ID NO: 1492015 - DNA, 25 bp, Homo sapien
taaattgtaaaagccagcagtgtta

SEQ ID NO: 1492016 - DNA, 25 bp, Homo sapien
aaattgtaaaagccagcagtgttaa

SEQ ID NO: 1492017 - DNA, 25 bp, Homo sapien
attaaattgtaaaagccagcagtgt

SEQ ID NO: 1492018 - DNA, 25 bp, Homo sapien
gagcccagtgtttgtggcctgtgct

SEQ ID NO: 1492019 - DNA, 25 bp, Homo sapien
aggacccttccttgtagcatcttgg

SEQ ID NO: 1492020 - DNA, 25 bp, Homo sapien
tgtgtagtaagtcattgagagccca

SEQ ID NO: 1492021 - DNA, 25 bp, Homo sapien
tgctcatcatttggtggagcctctg

SEQ ID NO: 1492022 - DNA, 25 bp, Homo sapien
tctggcgaactccatgcaagaggac

SEQ ID NO: 1492023 - DNA, 25 bp, Homo sapien
tattcctccacaattgcacccaggg

SEQ ID NO: 1492024 - DNA, 25 bp, Homo sapien
ggaccacacaatttcctttggcgga

SEQ ID NO: 1492025 - DNA, 25 bp, Homo sapien
tgagcatgtctcaccaggtctgtgt

SEQ ID NO: 1492026 - DNA, 25 bp, Homo sapien
ttgataggaattctttttcagtgag

SEQ ID NO: 1492027 - DNA, 25 bp, Homo sapien
ttattgataggaattctttttcagt

SEQ ID NO: 1492028 - DNA, 25 bp, Homo sapien
gataggaattctttttcagtgagac

SEQ ID NO: 1492029 - DNA, 25 bp, Homo sapien
tattgataggaattctttttcagtg

SEQ ID NO: 1492030 - DNA, 25 bp, Homo sapien
tgagttgtgccccaactaggaagca

SEQ ID NO: 1492031 - DNA, 25 bp, Homo sapien
gaagcagatgacgtgaactgtcatc

SEQ ID NO: 1492032 - DNA, 25 bp, Homo sapien
cccagtgaagggctccacaagaata

SEQ ID NO: 1492033 - DNA, 25 bp, Homo sapien
atcagtgcaatacacacaggcccag

SEQ ID NO: 1492034 - DNA, 25 bp, Homo sapien
gcctctgtaacttatggtaattgca

SEQ ID NO: 1492035 - DNA, 25 bp, Homo sapien
tctccccaagtgctcaatattgtct

SEQ ID NO: 1492036 - DNA, 25 bp, Homo sapien
gatcttcagtatctttgctcctctg

SEQ ID NO: 1492037 - DNA, 25 bp, Homo sapien
tggtgatagacacgccctggaagaa

SEQ ID NO: 1492038 - DNA, 25 bp, Homo sapien
aggtcctcagacaggttgaggctgt

SEQ ID NO: 1492039 - DNA, 25 bp, Homo sapien
agtgaggtcctcagacaggttgagg

SEQ ID NO: 1492040 - DNA, 25 bp, Homo sapien
ggtcctcagacaggttgaggctgtc

SEQ ID NO: 1492041 - DNA, 25 bp, Homo sapien
ccactggtgaatgagggatttagag

SEQ ID NO: 1492042 - DNA, 25 bp, Homo sapien
cagggtgaagtatcctgaatcctct

SEQ ID NO: 1492043 - DNA, 25 bp, Homo sapien
tccctcagggacagcccactggtga

SEQ ID NO: 1492044 - DNA, 25 bp, Homo sapien
gaatcctctttctgtgcaatcctcc

SEQ ID NO: 1492045 - DNA, 25 bp, Homo sapien
tcttgactgtagagaagacgtggac

SEQ ID NO: 1492046 - DNA, 25 bp, Homo sapien
tatagcagtatagcggtcaaaggac

SEQ ID NO: 1492047 - DNA, 25 bp, Homo sapien
gatggaccatgttggacccacagta

SEQ ID NO: 1492048 - DNA, 25 bp, Homo sapien
cgatagatttgggagccgtgactga

SEQ ID NO: 1492049 - DNA, 25 bp, Homo sapien
caacaagaagagaatcgaatgcaaa

SEQ ID NO: 1492050 - DNA, 25 bp, Homo sapien
gaagagaatcgaatgcaaaatgcac

SEQ ID NO: 1492051 - DNA, 25 bp, Homo sapien
gataaattcagtcacgattgtgaga

SEQ ID NO: 1492052 - DNA, 25 bp, Homo sapien
cagtcacgattgtgagatttgccat

SEQ ID NO: 1492053 - DNA, 25 bp, Homo sapien
tctgcaccacaaagtgtcacctgac

SEQ ID NO: 1492054 - DNA, 25 bp, Homo sapien
tgcaccacaaagtgtcacctgacac

SEQ ID NO: 1492055 - DNA, 25 bp, Homo sapien
gcaccacaaagtgtcacctgacacc

SEQ ID NO: 1492056 - DNA, 25 bp, Homo sapien
ctgcaccacaaagtgtcacctgaca

SEQ ID NO: 1492057 - DNA, 25 bp, Homo sapien
tcaatagcacgaatgtcagcacagg

SEQ ID NO: 1492058 - DNA, 25 bp, Homo sapien
taaactcagtgcatccggaaagaaa

SEQ ID NO: 1492059 - DNA, 25 bp, Homo sapien
tgtgcagagcattcgccacttgtga

SEQ ID NO: 1492060 - DNA, 25 bp, Homo sapien
tgtgatgctcttcctttccgacggg

SEQ ID NO: 1492061 - DNA, 25 bp, Homo sapien
taggaacagcacaggttatggttaa

SEQ ID NO: 1492062 - DNA, 25 bp, Homo sapien
ttaggaacagcacaggttatggtta

SEQ ID NO: 1492063 - DNA, 25 bp, Homo sapien
aggaacagcacaggttatggttaat

SEQ ID NO: 1492064 - DNA, 25 bp, Homo sapien
ctgtcaccaaataggctgataaaaa

SEQ ID NO: 1492065 - DNA, 25 bp, Homo sapien
taatccacaagaatcaggataataa

SEQ ID NO: 1492066 - DNA, 25 bp, Homo sapien
taagggtgtttccaaggactgtcac

SEQ ID NO: 1492067 - DNA, 25 bp, Homo sapien
ccaaataggctgataaaaaatcaca

SEQ ID NO: 1492068 - DNA, 25 bp, Homo sapien
cacacggcagccaattataacagag

SEQ ID NO: 1492069 - DNA, 25 bp, Homo sapien
aagctgcctgggatgttgcgagcac

SEQ ID NO: 1492070 - DNA, 25 bp, Homo sapien
gcagctatggcttccagtgtcacat

SEQ ID NO: 1492071 - DNA, 25 bp, Homo sapien
catgtagagggctcaggattccagt

SEQ ID NO: 1492072 - DNA, 25 bp, Homo sapien
tccttttacttgtactccatagaat

SEQ ID NO: 1492073 - DNA, 25 bp, Homo sapien
ttttacttgtactccatagaatacc

SEQ ID NO: 1492074 - DNA, 25 bp, Homo sapien
tttacttgtactccatagaatacca

SEQ ID NO: 1492075 - DNA, 25 bp, Homo sapien
ccttttacttgtactccatagaata

SEQ ID NO: 1492076 - DNA, 25 bp, Homo sapien
tcccgtagtagagagtgacaacagc

SEQ ID NO: 1492077 - DNA, 25 bp, Homo sapien
cacctcggtgatataaactctggaa

SEQ ID NO: 1492078 - DNA, 25 bp, Homo sapien
cacagcacggcaattgacaggatga

SEQ ID NO: 1492079 - DNA, 25 bp, Homo sapien
catagggccccagtgtcagaaaaaa

SEQ ID NO: 1492080 - DNA, 25 bp, Homo sapien
ggacgtgtaccagacctccagaaag

SEQ ID NO: 1492081 - DNA, 25 bp, Homo sapien
gcacagtggtggacgtgtaccagac

SEQ ID NO: 1492082 - DNA, 25 bp, Homo sapien
ggtggacgtgtaccagacctccaga

SEQ ID NO: 1492083 - DNA, 25 bp, Homo sapien
cagtggtggacgtgtaccagacctc

SEQ ID NO: 1492084 - DNA, 25 bp, Homo sapien
ggagtgcagtcgcaggccctggctc

SEQ ID NO: 1492085 - DNA, 25 bp, Homo sapien
ataggggagtgcagtcgcaggccct

SEQ ID NO: 1492086 - DNA, 25 bp, Homo sapien
gggagtgcagtcgcaggccctggct

SEQ ID NO: 1492087 - DNA, 25 bp, Homo sapien
aggggagtgcagtcgcaggccctgg

SEQ ID NO: 1492088 - DNA, 25 bp, Homo sapien
tgagcaggaaaatgacaaagagcag

SEQ ID NO: 1492089 - DNA, 25 bp, Homo sapien
ggttctggaatcctaacagctgaaa

SEQ ID NO: 1492090 - DNA, 25 bp, Homo sapien
cattccctataatggtcaggcagta

SEQ ID NO: 1492091 - DNA, 25 bp, Homo sapien
gcctgccattcaagaaggttctgga

SEQ ID NO: 1492092 - DNA, 25 bp, Homo sapien
gagtccaactcacactgtgtttttc

SEQ ID NO: 1492093 - DNA, 25 bp, Homo sapien
gaactgaagacagcatgctgcatcc

SEQ ID NO: 1492094 - DNA, 25 bp, Homo sapien
agcagagaacatccccatggaactg

SEQ ID NO: 1492095 - DNA, 25 bp, Homo sapien
gaacatccccatggaactgaagaca

SEQ ID NO: 1492096 - DNA, 25 bp, Homo sapien
ggaactgaagacagcatgctgcatc

SEQ ID NO: 1492097 - DNA, 25 bp, Homo sapien
aaattaggattggtatattcatgag

SEQ ID NO: 1492098 - DNA, 25 bp, Homo sapien
aattaggattggtatattcatgagc

SEQ ID NO: 1492099 - DNA, 25 bp, Homo sapien
attaggattggtatattcatgagca

SEQ ID NO: 1492100 - DNA, 25 bp, Homo sapien
aaaattaggattggtatattcatga

SEQ ID NO: 1492101 - DNA, 25 bp, Homo sapien
cacgcccagaagaacgaggattagt

SEQ ID NO: 1492102 - DNA, 25 bp, Homo sapien
catgcccagaagaacgaggattagt

SEQ ID NO: 1492103 - DNA, 25 bp, Homo sapien
ccacgcccagaagaacgaggattag

SEQ ID NO: 1492104 - DNA, 25 bp, Homo sapien
tattcatgagccgtatcagagtcac

SEQ ID NO: 1492105 - DNA, 25 bp, Homo sapien
tctaccagtcctttctttcctttca

SEQ ID NO: 1492106 - DNA, 25 bp, Homo sapien
acggcgcacccgagtctgctcttga

SEQ ID NO: 1492107 - DNA, 25 bp, Homo sapien
tctttccgcagtggatgtaaagctg

SEQ ID NO: 1492108 - DNA, 25 bp, Homo sapien
tgtaaagctggatcccgccacggcg

SEQ ID NO: 1492109 - DNA, 25 bp, Homo sapien
ttccgcagtggatgtaaagctggat

SEQ ID NO: 1492110 - DNA, 25 bp, Homo sapien
gcgcagtgtgcaggatggagaacca

SEQ ID NO: 1492111 - DNA, 25 bp, Homo sapien
cgcagtgtgcaggatggagaaccat

SEQ ID NO: 1492112 - DNA, 25 bp, Homo sapien
ctgcgcagtgtgcaggatggagaac

SEQ ID NO: 1492113 - DNA, 25 bp, Homo sapien
tgcgcagtgtgcaggatggagaacc

SEQ ID NO: 1492114 - DNA, 25 bp, Homo sapien
atttgaacatcaactctggtagagc

SEQ ID NO: 1492115 - DNA, 25 bp, Homo sapien
taaacgatatggtgcatccacgcca

SEQ ID NO: 1492116 - DNA, 25 bp, Homo sapien
gctctgacagttaccagtgaaattc

SEQ ID NO: 1492117 - DNA, 25 bp, Homo sapien
catatccttaaggactgctctgaca

SEQ ID NO: 1492118 - DNA, 25 bp, Homo sapien
aggcatttcgtgacctggctgaggc

SEQ ID NO: 1492119 - DNA, 25 bp, Homo sapien
gctgaggccctctcgctatgtctgt

SEQ ID NO: 1492120 - DNA, 25 bp, Homo sapien
ccctctcgctatgtctgtgttcctg

SEQ ID NO: 1492121 - DNA, 25 bp, Homo sapien
gagggtagaaggcatttcgtgacct

SEQ ID NO: 1492122 - DNA, 25 bp, Homo sapien
tggtggtgtagggactcagcatagc

SEQ ID NO: 1492123 - DNA, 25 bp, Homo sapien
ttggttttcgtaaattgtgccacat

SEQ ID NO: 1492124 - DNA, 25 bp, Homo sapien
gcctcctccatacagcccatctgtg

SEQ ID NO: 1492125 - DNA, 25 bp, Homo sapien
ggcagaacatcacggtcttggtggt

SEQ ID NO: 1492126 - DNA, 25 bp, Homo sapien
tgctgggcagcgtccaattttacca

SEQ ID NO: 1492127 - DNA, 25 bp, Homo sapien
tgggatgagccgtagggtcttcaac

SEQ ID NO: 1492128 - DNA, 25 bp, Homo sapien
catatgggctgtcagagctgttctc

SEQ ID NO: 1492129 - DNA, 25 bp, Homo sapien
tcttggtacaggagatcacgcgtaa

SEQ ID NO: 1492130 - DNA, 25 bp, Homo sapien
ctggaagagtgtgaaacctggtagt

SEQ ID NO: 1492131 - DNA, 25 bp, Homo sapien
tggaagagtgtgaaacctggtagta

SEQ ID NO: 1492132 - DNA, 25 bp, Homo sapien
aggcaggcgacagtgaccgtggtca

SEQ ID NO: 1492133 - DNA, 25 bp, Homo sapien
atcaaggatcagttcaggcaggcga

SEQ ID NO: 1492134 - DNA, 25 bp, Homo sapien
tgtccagcccagatcaaggatcagt

SEQ ID NO: 1492135 - DNA, 25 bp, Homo sapien
caggggcgtgtccagcccagatcaa

SEQ ID NO: 1492136 - DNA, 25 bp, Homo sapien
tgggtcagccggttctcgtgcagaa

SEQ ID NO: 1492137 - DNA, 25 bp, Homo sapien
ttctcatcgctcctgtgctcgctgt

SEQ ID NO: 1492138 - DNA, 25 bp, Homo sapien
gatgttctcggttttcaggtgtgcg

SEQ ID NO: 1492139 - DNA, 25 bp, Homo sapien
cgctgtagacggtgtttaactcaga

SEQ ID NO: 1492140 - DNA, 25 bp, Homo sapien
aaaggtgatatgcatggaccgcgga

SEQ ID NO: 1492141 - DNA, 25 bp, Homo sapien
ggaatggctggatgttattctcctt

SEQ ID NO: 1492142 - DNA, 25 bp, Homo sapien
gaccgcggagggtgaaccagtcaca

SEQ ID NO: 1492143 - DNA, 25 bp, Homo sapien
gagctcaaaggtgatatgcatggac

SEQ ID NO: 1492144 - DNA, 25 bp, Homo sapien
tgagttttggcggtgccgcctcccg

SEQ ID NO: 1492145 - DNA, 25 bp, Homo sapien
ttttcgagagcgttgagttttggcg

SEQ ID NO: 1492146 - DNA, 25 bp, Homo sapien
agagcgttgagttttggcggtgccg

SEQ ID NO: 1492147 - DNA, 25 bp, Homo sapien
tttttcgagagcgttgagttttggc

SEQ ID NO: 1492148 - DNA, 25 bp, Homo sapien
tgaccctccggcaacccgagacgtc

SEQ ID NO: 1492149 - DNA, 25 bp, Homo sapien
atgaccctccggcaacccgagacgt

SEQ ID NO: 1492150 - DNA, 25 bp, Homo sapien
gcagatgaccctccggcaacccgag

SEQ ID NO: 1492151 - DNA, 25 bp, Homo sapien
attgcagatgaccctccggcaaccc

SEQ ID NO: 1492152 - DNA, 25 bp, Homo sapien
tccaagcactcacccccttgccaca

SEQ ID NO: 1492153 - DNA, 25 bp, Homo sapien
ccttgccacaggcgccttggcccag

SEQ ID NO: 1492154 - DNA, 25 bp, Homo sapien
gggtccaagcactcacccccttgcc

SEQ ID NO: 1492155 - DNA, 25 bp, Homo sapien
cccccttgccacaggcgccttggcc

SEQ ID NO: 1492156 - DNA, 25 bp, Homo sapien
ggcgcctgtttatcatcttccgcac

SEQ ID NO: 1492157 - DNA, 25 bp, Homo sapien
accaggtggcgcctgtttatcatct

SEQ ID NO: 1492158 - DNA, 25 bp, Homo sapien
ttgtctttattgctcttggggccaa

SEQ ID NO: 1492159 - DNA, 25 bp, Homo sapien
ggccaatcaccgacccggccaccag

SEQ ID NO: 1492160 - DNA, 25 bp, Homo sapien
ctggggctgccggaggacgcgctcc

SEQ ID NO: 1492161 - DNA, 25 bp, Homo sapien
acgcgctccttcaggacccgctgcg

SEQ ID NO: 1492162 - DNA, 25 bp, Homo sapien
aggacgcgctccttcaggacccgct

SEQ ID NO: 1492163 - DNA, 25 bp, Homo sapien
gctccttcaggacccgctgcggcca

SEQ ID NO: 1492164 - DNA, 25 bp, Homo sapien
cagccgcggcgtctttggcagtagt

SEQ ID NO: 1492165 - DNA, 25 bp, Homo sapien
agtagtgggcgtgcttgcgggtcca

SEQ ID NO: 1492166 - DNA, 25 bp, Homo sapien
tgaagaccctctcgaaaggaagggc

SEQ ID NO: 1492167 - DNA, 25 bp, Homo sapien
accgccgaccacgatgagagcgtga

SEQ ID NO: 1492168 - DNA, 25 bp, Homo sapien
tccagaccgaggtatcagacgagag

SEQ ID NO: 1492169 - DNA, 25 bp, Homo sapien
gggcacgccttccagaccgaggtat

SEQ ID NO: 1492170 - DNA, 25 bp, Homo sapien
accgaggtatcagacgagaggcccc

SEQ ID NO: 1492171 - DNA, 25 bp, Homo sapien
gccttccagaccgaggtatcagacg

SEQ ID NO: 1492172 - DNA, 25 bp, Homo sapien
tggtggagatacacatagtcttttg

SEQ ID NO: 1492173 - DNA, 25 bp, Homo sapien
tgggtattgtggtggagatacacat

SEQ ID NO: 1492174 - DNA, 25 bp, Homo sapien
tagtcttttgaacattccgttgtag

SEQ ID NO: 1492175 - DNA, 25 bp, Homo sapien
tcgctggtagctggatatgtccttt

SEQ ID NO: 1492176 - DNA, 25 bp, Homo sapien
agaacctagtgatggagtgtgactc

SEQ ID NO: 1492177 - DNA, 25 bp, Homo sapien
gatacaggaatgtctcttattctct

SEQ ID NO: 1492178 - DNA, 25 bp, Homo sapien
gaatacaatgtgtggcagggataca

SEQ ID NO: 1492179 - DNA, 25 bp, Homo sapien
ttaatgaatacaatgtgtggcaggg

SEQ ID NO: 1492180 - DNA, 25 bp, Homo sapien
catgacttgggatcagctcctctgc

SEQ ID NO: 1492181 - DNA, 25 bp, Homo sapien
ccaaaaggatcaacgttattttcat

SEQ ID NO: 1492182 - DNA, 25 bp, Homo sapien
cataaaagttatccgcttaggtcct

SEQ ID NO: 1492183 - DNA, 25 bp, Homo sapien
ttctctgagtgaaaggccattgctt

SEQ ID NO: 1492184 - DNA, 25 bp, Homo sapien
tgggtgggcctgtatcaatcctcct

SEQ ID NO: 1492185 - DNA, 25 bp, Homo sapien
tccatgggcaattgaaccctgtggg

SEQ ID NO: 1492186 - DNA, 25 bp, Homo sapien
tttggtctgttaccactccatgggc

SEQ ID NO: 1492187 - DNA, 25 bp, Homo sapien
tatagtaagaggacataaaacccat

SEQ ID NO: 1492188 - DNA, 25 bp, Homo sapien
taggaagaaaccgcatcaactgtcg

SEQ ID NO: 1492189 - DNA, 25 bp, Homo sapien
aaccgcatcaactgtcgagcaaaat

SEQ ID NO: 1492190 - DNA, 25 bp, Homo sapien
gaaaccgcatcaactgtcgagcaaa

SEQ ID NO: 1492191 - DNA, 25 bp, Homo sapien
gaagaaaccgcatcaactgtcgagc

SEQ ID NO: 1492192 - DNA, 25 bp, Homo sapien
tgtttcaggtttacacatgtcccca

SEQ ID NO: 1492193 - DNA, 25 bp, Homo sapien
tcatcttgacctgtgggcctcattt

SEQ ID NO: 1492194 - DNA, 25 bp, Homo sapien
tgggcctcattttgctggtgtttca

SEQ ID NO: 1492195 - DNA, 25 bp, Homo sapien
tgtccccagccaccgtttcagggct

SEQ ID NO: 1492196 - DNA, 25 bp, Homo sapien
tgcaccgcaatatgggaagctcagg

SEQ ID NO: 1492197 - DNA, 25 bp, Homo sapien
gaagctcagggtagcaacagcctgc

SEQ ID NO: 1492198 - DNA, 25 bp, Homo sapien
gaacagcagcgaggatgagaccata

SEQ ID NO: 1492199 - DNA, 25 bp, Homo sapien
aagtgatcgatctcgtgtgcaccgc

SEQ ID NO: 1492200 - DNA, 25 bp, Homo sapien
tggtggaaaccagcatcacgtccat

SEQ ID NO: 1492201 - DNA, 25 bp, Homo sapien
cacagtggtggaaaccagcatcacg

SEQ ID NO: 1492202 - DNA, 25 bp, Homo sapien
cagtggtggaaaccagcatcacgtc

SEQ ID NO: 1492203 - DNA, 25 bp, Homo sapien
gtggtggaaaccagcatcacgtcca

SEQ ID NO: 1492204 - DNA, 25 bp, Homo sapien
agagttggctcaggaggaagtacat

SEQ ID NO: 1492205 - DNA, 25 bp, Homo sapien
gagagttggctcaggaggaagtaca

SEQ ID NO: 1492206 - DNA, 25 bp, Homo sapien
gggagagttggctcaggaggaagta

SEQ ID NO: 1492207 - DNA, 25 bp, Homo sapien
gagggagagttggctcaggaggaag

SEQ ID NO: 1492208 - DNA, 25 bp, Homo sapien
ccagcacggcaccaaggtgagagga

SEQ ID NO: 1492209 - DNA, 25 bp, Homo sapien
gcaaaagacgggaatagactttctc

SEQ ID NO: 1492210 - DNA, 25 bp, Homo sapien
cgatccgcgtggctccatctgagtc

SEQ ID NO: 1492211 - DNA, 25 bp, Homo sapien
tgagtccctggttaggctcccttgg

SEQ ID NO: 1492212 - DNA, 25 bp, Homo sapien
ccaggatttgccacgagagtctggg

SEQ ID NO: 1492213 - DNA, 25 bp, Homo sapien
gcagctgcatacaatgcacaccagg

SEQ ID NO: 1492214 - DNA, 25 bp, Homo sapien
aacctttgggccataggcagctgca

SEQ ID NO: 1492215 - DNA, 25 bp, Homo sapien
gctgaagaaacactgattggcctga

SEQ ID NO: 1492216 - DNA, 25 bp, Homo sapien
ggagtctggatagacagctgtgcct

SEQ ID NO: 1492217 - DNA, 25 bp, Homo sapien
agggagtctggatagacagctgtgc

SEQ ID NO: 1492218 - DNA, 25 bp, Homo sapien
agagggagtctggatagacagctgt

SEQ ID NO: 1492219 - DNA, 25 bp, Homo sapien
agtctggatagacagctgtgcctgg

SEQ ID NO: 1492220 - DNA, 25 bp, Homo sapien
gtcatttggactactggagttgctg

SEQ ID NO: 1492221 - DNA, 25 bp, Homo sapien
ttgtggaggtatagaatttaaggtc

SEQ ID NO: 1492222 - DNA, 25 bp, Homo sapien
gatttaacattttgtggaggtatag

SEQ ID NO: 1492223 - DNA, 25 bp, Homo sapien
gataggccttcggacaagtgggtca

SEQ ID NO: 1492224 - DNA, 25 bp, Homo sapien
tggataaagaaggtgtttgctccat

SEQ ID NO: 1492225 - DNA, 25 bp, Homo sapien
ttaccctggctcccttggataaaga

SEQ ID NO: 1492226 - DNA, 25 bp, Homo sapien
taccctggctcccttggataaagaa

SEQ ID NO: 1492227 - DNA, 25 bp, Homo sapien
cttggataaagaaggtgtttgctcc

SEQ ID NO: 1492228 - DNA, 25 bp, Homo sapien
tcatcttgacctgtgggcctcattt

SEQ ID NO: 1492229 - DNA, 25 bp, Homo sapien
tgttttatgtttacacacgtcccca

SEQ ID NO: 1492230 - DNA, 25 bp, Homo sapien
ttatgtttacacacgtccccagcca

SEQ ID NO: 1492231 - DNA, 25 bp, Homo sapien
gcctcattttgctggtgttttatgt

SEQ ID NO: 1492232 - DNA, 25 bp, Homo sapien
tacatggcgttttcgaagactgaag

SEQ ID NO: 1492233 - DNA, 25 bp, Homo sapien
tagagcgcatgtgcagaacagcagc

SEQ ID NO: 1492234 - DNA, 25 bp, Homo sapien
tagtcagccgccattttgggcacag

SEQ ID NO: 1492235 - DNA, 25 bp, Homo sapien
gaacagcagcgaggatgagaccata

SEQ ID NO: 1492236 - DNA, 25 bp, Homo sapien
cttggtgggctctggtgtggttaaa

SEQ ID NO: 1492237 - DNA, 25 bp, Homo sapien
tgggctctggtgtggttaaagagtc

SEQ ID NO: 1492238 - DNA, 25 bp, Homo sapien
gaagaggacttggtgggctctggtg

SEQ ID NO: 1492239 - DNA, 25 bp, Homo sapien
agaggacttggtgggctctggtgtg

SEQ ID NO: 1492240 - DNA, 25 bp, Homo sapien
ctaggagaataaaatctggggtagt

SEQ ID NO: 1492241 - DNA, 25 bp, Homo sapien
aggagaataaaatctggggtagtat

SEQ ID NO: 1492242 - DNA, 25 bp, Homo sapien
ataaaatctggggtagtatttctca

SEQ ID NO: 1492243 - DNA, 25 bp, Homo sapien
taaaatctggggtagtatttctcat

SEQ ID NO: 1492244 - DNA, 25 bp, Homo sapien
ttttatggtctgaataactgtttga

SEQ ID NO: 1492245 - DNA, 25 bp, Homo sapien
gttgtcttactgttaaatgcagtca

SEQ ID NO: 1492246 - DNA, 25 bp, Homo sapien
gggcctcattttgctggtgttttag

SEQ ID NO: 1492247 - DNA, 25 bp, Homo sapien
ggcctcattttgctggtgttttagg

SEQ ID NO: 1492248 - DNA, 25 bp, Homo sapien
gaggtcaaaacggtggccagaagca

SEQ ID NO: 1492249 - DNA, 25 bp, Homo sapien
aggtcaaaacggtggccagaagcat

SEQ ID NO: 1492250 - DNA, 25 bp, Homo sapien
catgaagaggacttggtgggctctg

SEQ ID NO: 1492251 - DNA, 25 bp, Homo sapien
cttggtgggctctggtgtggttaaa

SEQ ID NO: 1492252 - DNA, 25 bp, Homo sapien
tgggctctggtgtggttaaagagtc

SEQ ID NO: 1492253 - DNA, 25 bp, Homo sapien
atgaagaggacttggtgggctctgg

SEQ ID NO: 1492254 - DNA, 25 bp, Homo sapien
ttttatggtctgaataactgtttga

SEQ ID NO: 1492255 - DNA, 25 bp, Homo sapien
gccaccacaaaatcatgccaaattg

SEQ ID NO: 1492256 - DNA, 25 bp, Homo sapien
ccatcaaggctaggaggaaactgca

SEQ ID NO: 1492257 - DNA, 25 bp, Homo sapien
accacaaaatcatgccaaattgtaa

SEQ ID NO: 1492258 - DNA, 25 bp, Homo sapien
gaacaacgggtaccagccaccacaa

SEQ ID NO: 1492259 - DNA, 25 bp, Homo sapien
tgaaagtcgcaagtcctgtgcttct

SEQ ID NO: 1492260 - DNA, 25 bp, Homo sapien
ctggtggcgcagagatgggcgcaaa

SEQ ID NO: 1492261 - DNA, 25 bp, Homo sapien
cccagctacttctgcggggctggtg

SEQ ID NO: 1492262 - DNA, 25 bp, Homo sapien
caaaggctgaaagtcgcaagtcctg

SEQ ID NO: 1492263 - DNA, 25 bp, Homo sapien
tctccttgcgccatggggccgtgct

SEQ ID NO: 1492264 - DNA, 25 bp, Homo sapien
gcttcctttccagcgggtctccttg

SEQ ID NO: 1492265 - DNA, 25 bp, Homo sapien
agccaggcgggtcgcgggtgctgga

SEQ ID NO: 1492266 - DNA, 25 bp, Homo sapien
atggagggagcctaaccacggactc

SEQ ID NO: 1492267 - DNA, 25 bp, Homo sapien
tggagccgcctgaggactggagccg

SEQ ID NO: 1492268 - DNA, 25 bp, Homo sapien
ggagccgcctgaggactggagccgc

SEQ ID NO: 1492269 - DNA, 25 bp, Homo sapien
ccgcctgaggactggagccgcctga

SEQ ID NO: 1492270 - DNA, 25 bp, Homo sapien
tggagccgcctgaggactggagccg

SEQ ID NO: 1492271 - DNA, 25 bp, Homo sapien
agccgcctgaggactggagccgcct

SEQ ID NO: 1492272 - DNA, 25 bp, Homo sapien
ggagccgcctgaggactggagccgc

SEQ ID NO: 1492273 - DNA, 25 bp, Homo sapien
ggacagtggccagggccggccccga

SEQ ID NO: 1492274 - DNA, 25 bp, Homo sapien
cagggacagtggccagggccggccc

SEQ ID NO: 1492275 - DNA, 25 bp, Homo sapien
ctgcagggacagtggccagggccgg

SEQ ID NO: 1492276 - DNA, 25 bp, Homo sapien
acagtggccagggccggccccgagg

SEQ ID NO: 1492277 - DNA, 25 bp, Homo sapien
gcgagcaatattcaactatcaaccc

SEQ ID NO: 1492278 - DNA, 25 bp, Homo sapien
gagcaatattcaactatcaacccct

SEQ ID NO: 1492279 - DNA, 25 bp, Homo sapien
cccgcgagcaatattcaactatcaa

SEQ ID NO: 1492280 - DNA, 25 bp, Homo sapien
gcaatattcaactatcaacccctca

SEQ ID NO: 1492281 - DNA, 25 bp, Homo sapien
tgccctttcctaagattttcattaa

SEQ ID NO: 1492282 - DNA, 25 bp, Homo sapien
agattttcattaatgctctggtcac

SEQ ID NO: 1492283 - DNA, 25 bp, Homo sapien
tcctaagattttcattaatgctctg

SEQ ID NO: 1492284 - DNA, 25 bp, Homo sapien
cctttcctaagattttcattaatgc

SEQ ID NO: 1492285 - DNA, 25 bp, Homo sapien
cctgcataggagaatgatgagatgt

SEQ ID NO: 1492286 - DNA, 25 bp, Homo sapien
ttgtcctgcataggagaatgatgag

SEQ ID NO: 1492287 - DNA, 25 bp, Homo sapien
aatgatgagatgtgggctgaatgca

SEQ ID NO: 1492288 - DNA, 25 bp, Homo sapien
gagatgtgggctgaatgcacatgaa

SEQ ID NO: 1492289 - DNA, 25 bp, Homo sapien
aatgattccatctgtagagcccagg

SEQ ID NO: 1492290 - DNA, 25 bp, Homo sapien
tatttcccgagacccacagtaggag

SEQ ID NO: 1492291 - DNA, 25 bp, Homo sapien
ccagacaagtagttgaaggccatct

SEQ ID NO: 1492292 - DNA, 25 bp, Homo sapien
caacagaaagcattcggagccaagc

SEQ ID NO: 1492293 - DNA, 25 bp, Homo sapien
aggccactgaaaagatggccaggac

SEQ ID NO: 1492294 - DNA, 25 bp, Homo sapien
cactgaaaagatggccaggaccaga

SEQ ID NO: 1492295 - DNA, 25 bp, Homo sapien
aaagatggccaggaccagaaagaag

SEQ ID NO: 1492296 - DNA, 25 bp, Homo sapien
gatggagtttcccatgaaggccact

SEQ ID NO: 1492297 - DNA, 25 bp, Homo sapien
aggaggaagtcagagttgaaggtct

SEQ ID NO: 1492298 - DNA, 25 bp, Homo sapien
ctatgattgaagattcccaggagga

SEQ ID NO: 1492299 - DNA, 25 bp, Homo sapien
aggaagtcagagttgaaggtctgat

SEQ ID NO: 1492300 - DNA, 25 bp, Homo sapien
tgaaggtctgattctcccatgccat

SEQ ID NO: 1492301 - DNA, 25 bp, Homo sapien
tatgagacccaatcctgaagctcag

SEQ ID NO: 1492302 - DNA, 25 bp, Homo sapien
aggaatatgagacccaatcctgaag

SEQ ID NO: 1492303 - DNA, 25 bp, Homo sapien
ccaatcctgaagctcagtgtaagtt

SEQ ID NO: 1492304 - DNA, 25 bp, Homo sapien
tcctgaagctcagtgtaagttatcc

SEQ ID NO: 1492305 - DNA, 25 bp, Homo sapien
tcacatcttttcgaccgtgctcggg

SEQ ID NO: 1492306 - DNA, 25 bp, Homo sapien
gctgcccttctgtcggtccaacgtt

SEQ ID NO: 1492307 - DNA, 25 bp, Homo sapien
tcagtggtcttgtctatgcaggcat

SEQ ID NO: 1492308 - DNA, 25 bp, Homo sapien
ggagcagacagaacaaaggcctttt

SEQ ID NO: 1492309 - DNA, 25 bp, Homo sapien
ggcgagggtgttgacagtttcccca

SEQ ID NO: 1492310 - DNA, 25 bp, Homo sapien
gaggcgagggtgttgacagtttccc

SEQ ID NO: 1492311 - DNA, 25 bp, Homo sapien
agaggcgagggtgttgacagtttcc

SEQ ID NO: 1492312 - DNA, 25 bp, Homo sapien
tgccgccacagatcatcaccagaag

SEQ ID NO: 1492313 - DNA, 25 bp, Homo sapien
tgctgccgccacagatcatcaccag

SEQ ID NO: 1492314 - DNA, 25 bp, Homo sapien
ctgccgccacagatcatcaccagaa

SEQ ID NO: 1492315 - DNA, 25 bp, Homo sapien
aggaaataagacacagtttccttct

SEQ ID NO: 1492316 - DNA, 25 bp, Homo sapien
ttctgaggagtctggtgtgtaggag

SEQ ID NO: 1492317 - DNA, 25 bp, Homo sapien
tctgaggagtctggtgtgtaggagg

SEQ ID NO: 1492318 - DNA, 25 bp, Homo sapien
ctctggtttctgaggagtctggtgt

SEQ ID NO: 1492319 - DNA, 25 bp, Homo sapien
gactctggtttctgaggagtctggt

SEQ ID NO: 1492320 - DNA, 25 bp, Homo sapien
ttaaagggcacattgcctgctccat

SEQ ID NO: 1492321 - DNA, 25 bp, Homo sapien
taacttttgggcaatgattttatca

SEQ ID NO: 1492322 - DNA, 25 bp, Homo sapien
gttcttttcacctggagtgacctga

SEQ ID NO: 1492323 - DNA, 25 bp, Homo sapien
tcataacttttgggcaatgatttta

SEQ ID NO: 1492324 - DNA, 25 bp, Homo sapien
ggattattagaaggagttttctcca

SEQ ID NO: 1492325 - DNA, 25 bp, Homo sapien
ggatgtttatgatgtcacatactag

SEQ ID NO: 1492326 - DNA, 25 bp, Homo sapien
cagttttcagtacccatcagaacca

SEQ ID NO: 1492327 - DNA, 25 bp, Homo sapien
tcagaaccagtttagttgatattcc

SEQ ID NO: 1492328 - DNA, 25 bp, Homo sapien
aagagaaaagcggtcctggtccagg

SEQ ID NO: 1492329 - DNA, 25 bp, Homo sapien
gaaaggatcacaaaccagtccaagg

SEQ ID NO: 1492330 - DNA, 25 bp, Homo sapien
caagatggcatcagttaacatggct

SEQ ID NO: 1492331 - DNA, 25 bp, Homo sapien
acttggtagtcagcgttgtgggcac

SEQ ID NO: 1492332 - DNA, 25 bp, Homo sapien
caagcagctcttggaagtgcccatg

SEQ ID NO: 1492333 - DNA, 25 bp, Homo sapien
catgttaacatgtgaccatgagtcc

SEQ ID NO: 1492334 - DNA, 25 bp, Homo sapien
cagagggcattctcagtcaagtagc

SEQ ID NO: 1492335 - DNA, 25 bp, Homo sapien
aagtagccctacaaaccattcatgg

SEQ ID NO: 1492336 - DNA, 25 bp, Homo sapien
tcctgcctgtctgtattgctaacgt

SEQ ID NO: 1492337 - DNA, 25 bp, Homo sapien
tgctaacgtgtgatcatgggtcctg

SEQ ID NO: 1492338 - DNA, 25 bp, Homo sapien
gctaacgtgtgatcatgggtcctgc

SEQ ID NO: 1492339 - DNA, 25 bp, Homo sapien
gtcctgcctgtctgtattgctaacg

SEQ ID NO: 1492340 - DNA, 25 bp, Homo sapien
attgctgaccaacttttgaatggaa

SEQ ID NO: 1492341 - DNA, 25 bp, Homo sapien
gctgaccaacttttgaatggaaatt

SEQ ID NO: 1492342 - DNA, 25 bp, Homo sapien
tgctgaccaacttttgaatggaaat

SEQ ID NO: 1492343 - DNA, 25 bp, Homo sapien
aatggaaattggaaggagcatttgc

SEQ ID NO: 1492344 - DNA, 25 bp, Homo sapien
tcaatatgctaacccctaggtggct

SEQ ID NO: 1492345 - DNA, 25 bp, Homo sapien
ggacagagcggttacatagttgaca

SEQ ID NO: 1492346 - DNA, 25 bp, Homo sapien
tcctggagggattaagtgaagaaac

SEQ ID NO: 1492347 - DNA, 25 bp, Homo sapien
cctccattgttgctgacgtagataa

SEQ ID NO: 1492348 - DNA, 25 bp, Homo sapien
tgactacaaatcttctcagcacaag

SEQ ID NO: 1492349 - DNA, 25 bp, Homo sapien
caaagtactctgttgaccttttcac

SEQ ID NO: 1492350 - DNA, 25 bp, Homo sapien
tccattacagtactagagtgttcca

SEQ ID NO: 1492351 - DNA, 25 bp, Homo sapien
gttaacgagatttacacacctccat

SEQ ID NO: 1492352 - DNA, 25 bp, Homo sapien
tgaatcaccgtatatcaaatggtag

SEQ ID NO: 1492353 - DNA, 25 bp, Homo sapien
gtgtgaatcaccgtatatcaaatgg

SEQ ID NO: 1492354 - DNA, 25 bp, Homo sapien
gaatcaccgtatatcaaatggtaga

SEQ ID NO: 1492355 - DNA, 25 bp, Homo sapien
aatgttgtatattaagaagtgtgaa

SEQ ID NO: 1492356 - DNA, 25 bp, Homo sapien
gagctgatgggaactctgcactcca

SEQ ID NO: 1492357 - DNA, 25 bp, Homo sapien
gagtgttgtcatccaaggaccaaga

SEQ ID NO: 1492358 - DNA, 25 bp, Homo sapien
tctcagagccttacgaaaagtgaag

SEQ ID NO: 1492359 - DNA, 25 bp, Homo sapien
catggtccctgttgcttatagctgc

SEQ ID NO: 1492360 - DNA, 25 bp, Homo sapien
ggagagatacctactgacttcttta

SEQ ID NO: 1492361 - DNA, 25 bp, Homo sapien
tttcataacagaggtaaaaattgta

SEQ ID NO: 1492362 - DNA, 25 bp, Homo sapien
gagagatacctactgacttctttag

SEQ ID NO: 1492363 - DNA, 25 bp, Homo sapien
caggagagatacctactgacttctt

SEQ ID NO: 1492364 - DNA, 25 bp, Homo sapien
cctcagatgagtgtgtgatgttgga

SEQ ID NO: 1492365 - DNA, 25 bp, Homo sapien
tctgtgacatctgagttcaaacaag

SEQ ID NO: 1492366 - DNA, 25 bp, Homo sapien
ttcaaacaaggagctgagaggagac

SEQ ID NO: 1492367 - DNA, 25 bp, Homo sapien
tagtgacgaaaagttaccctcagat

SEQ ID NO: 1492368 - DNA, 25 bp, Homo sapien
tccttacagtcctccatatgaaatc

SEQ ID NO: 1492369 - DNA, 25 bp, Homo sapien
cctccatatgaaatccccctaaagt

SEQ ID NO: 1492370 - DNA, 25 bp, Homo sapien
cttccttacagtcctccatatgaaa

SEQ ID NO: 1492371 - DNA, 25 bp, Homo sapien
ttacagtcctccatatgaaatcccc

SEQ ID NO: 1492372 - DNA, 25 bp, Homo sapien
caactctgtccaggtattgctaatc

SEQ ID NO: 1492373 - DNA, 25 bp, Homo sapien
ctctgtccaggtattgctaatctcc

SEQ ID NO: 1492374 - DNA, 25 bp, Homo sapien
actctgtccaggtattgctaatctc

SEQ ID NO: 1492375 - DNA, 25 bp, Homo sapien
tctgtccaggtattgctaatctcca

SEQ ID NO: 1492376 - DNA, 25 bp, Homo sapien
tcactttgtctcacattaacatagc

SEQ ID NO: 1492377 - DNA, 25 bp, Homo sapien
tatataaatccctcgaaacaaggaa

SEQ ID NO: 1492378 - DNA, 25 bp, Homo sapien
ggttaccaactgcacgaagtatctg

SEQ ID NO: 1492379 - DNA, 25 bp, Homo sapien
gattatttaacctcctgacattaag

SEQ ID NO: 1492380 - DNA, 25 bp, Homo sapien
gcattctggtagtttgatgacaacc

SEQ ID NO: 1492381 - DNA, 25 bp, Homo sapien
gatggcactcagagccataagaggt

SEQ ID NO: 1492382 - DNA, 25 bp, Homo sapien
cacatgattggcttgccatgtccaa

SEQ ID NO: 1492383 - DNA, 25 bp, Homo sapien
ttttgcctgctaccatgacttgtaa

SEQ ID NO: 1492384 - DNA, 25 bp, Homo sapien
tgtttccaggaagccccgtgtgttg

SEQ ID NO: 1492385 - DNA, 25 bp, Homo sapien
aagaggtgcatatcaaagtgtcagg

SEQ ID NO: 1492386 - DNA, 25 bp, Homo sapien
tgtgtgcatcagtctctcgagaacc

SEQ ID NO: 1492387 - DNA, 25 bp, Homo sapien
gaatcaggaggcatacgttccagtg

SEQ ID NO: 1492388 - DNA, 25 bp, Homo sapien
taaatggactaaatgttccaattaa

SEQ ID NO: 1492389 - DNA, 25 bp, Homo sapien
taaatgtaaatggactaaatgttcc

SEQ ID NO: 1492390 - DNA, 25 bp, Homo sapien
atgtaaatggactaaatgttccaat

SEQ ID NO: 1492391 - DNA, 25 bp, Homo sapien
atggactaaatgttccaattaaaag

SEQ ID NO: 1492392 - DNA, 25 bp, Homo sapien
atccttgtttctcaggatgtagatg

SEQ ID NO: 1492393 - DNA, 25 bp, Homo sapien
ccttgtttctcaggatgtagatgag

SEQ ID NO: 1492394 - DNA, 25 bp, Homo sapien
ttgtttctcaggatgtagatgaggg

SEQ ID NO: 1492395 - DNA, 25 bp, Homo sapien
ggatgtagatgagggggtttagcat

SEQ ID NO: 1492396 - DNA, 25 bp, Homo sapien
aaggacgaatctcacagttaacatt

SEQ ID NO: 1492397 - DNA, 25 bp, Homo sapien
ggacgaatctcacagttaacatttt

SEQ ID NO: 1492398 - DNA, 25 bp, Homo sapien
ctaaaggacgaatctcacagttaac

SEQ ID NO: 1492399 - DNA, 25 bp, Homo sapien
acgaatctcacagttaacattttct

SEQ ID NO: 1492400 - DNA, 25 bp, Homo sapien
gtctgagcaggacaggatcgttaca

SEQ ID NO: 1492401 - DNA, 25 bp, Homo sapien
caggacaggatcgttacagcaggga

SEQ ID NO: 1492402 - DNA, 25 bp, Homo sapien
cctgctagtgtcagatagaggaaca

SEQ ID NO: 1492403 - DNA, 25 bp, Homo sapien
gatgaccacactaagtagagctgga

SEQ ID NO: 1492404 - DNA, 25 bp, Homo sapien
gaggatgaaatccaaccttccagtg

SEQ ID NO: 1492405 - DNA, 25 bp, Homo sapien
tcccatgaggatgaaatccaacctt

SEQ ID NO: 1492406 - DNA, 25 bp, Homo sapien
tgaggatgaaatccaaccttccagt

SEQ ID NO: 1492407 - DNA, 25 bp, Homo sapien
catgaggatgaaatccaaccttcca

SEQ ID NO: 1492408 - DNA, 25 bp, Homo sapien
ttcgtaaggctctgagagtgcaggc

SEQ ID NO: 1492409 - DNA, 25 bp, Homo sapien
ctacttcacttttcgtaaggctctg

SEQ ID NO: 1492410 - DNA, 25 bp, Homo sapien
cttttcgtaaggctctgagagtgca

SEQ ID NO: 1492411 - DNA, 25 bp, Homo sapien
tcacttttcgtaaggctctgagagt

SEQ ID NO: 1492412 - DNA, 25 bp, Homo sapien
attcttgactgcatcatgctcctca

SEQ ID NO: 1492413 - DNA, 25 bp, Homo sapien
cattcttgactgcatcatgctcctc

SEQ ID NO: 1492414 - DNA, 25 bp, Homo sapien
atctttgttgcggagactgtaaatg

SEQ ID NO: 1492415 - DNA, 25 bp, Homo sapien
gttcagcacaggagtgaagatggtg

SEQ ID NO: 1492416 - DNA, 25 bp, Homo sapien
cacaggagtgaagatggtgtaaaag

SEQ ID NO: 1492417 - DNA, 25 bp, Homo sapien
tttgttgcggagactgtaaatgagg

SEQ ID NO: 1492418 - DNA, 25 bp, Homo sapien
gcactatgatcatgtgggaggagca

SEQ ID NO: 1492419 - DNA, 25 bp, Homo sapien
cggcagaattcatcctgtggatgag

SEQ ID NO: 1492420 - DNA, 25 bp, Homo sapien
ccgaagagcagcagcactatgatca

SEQ ID NO: 1492421 - DNA, 25 bp, Homo sapien
atgtaggtgtagaaggaagcaccga

SEQ ID NO: 1492422 - DNA, 25 bp, Homo sapien
cttatagagggagacgtcagagcag

SEQ ID NO: 1492423 - DNA, 25 bp, Homo sapien
gggtgagcaacaaaccatcaaccat

SEQ ID NO: 1492424 - DNA, 25 bp, Homo sapien
accatcaaccattcccaaaacccag

SEQ ID NO: 1492425 - DNA, 25 bp, Homo sapien
tgagcaacaaaccatcaaccattcc

SEQ ID NO: 1492426 - DNA, 25 bp, Homo sapien
gtaatgggggtgagcaacaaaccat

SEQ ID NO: 1492427 - DNA, 25 bp, Homo sapien
tgagatccatgagcgcgagctggct

SEQ ID NO: 1492428 - DNA, 25 bp, Homo sapien
ggcacagtcacgcataggtacatga

SEQ ID NO: 1492429 - DNA, 25 bp, Homo sapien
taatggagaggtctgcaaacagcag

SEQ ID NO: 1492430 - DNA, 25 bp, Homo sapien
cgcgagctggctgatgaagaagtac

SEQ ID NO: 1492431 - DNA, 25 bp, Homo sapien
gagggcagcatgcttgctctcagca

SEQ ID NO: 1492432 - DNA, 25 bp, Homo sapien
aaagaaggaaggtcacggtgtagag

SEQ ID NO: 1492433 - DNA, 25 bp, Homo sapien
ctctcagcaaagagtcccgtgaggg

SEQ ID NO: 1492434 - DNA, 25 bp, Homo sapien
gagggtgaaatcagtgcttgctgtt

SEQ ID NO: 1492435 - DNA, 25 bp, Homo sapien
acaactggcgatggctgtaggaagc

SEQ ID NO: 1492436 - DNA, 25 bp, Homo sapien
cccagtgcatgctggttgcgctgaa

SEQ ID NO: 1492437 - DNA, 25 bp, Homo sapien
caggccccggaaggacaatgtgccc

SEQ ID NO: 1492438 - DNA, 25 bp, Homo sapien
tggttgcgctgaaggcgaccccgcc

SEQ ID NO: 1492439 - DNA, 25 bp, Homo sapien
tgtctactggatagcccatgtctct

SEQ ID NO: 1492440 - DNA, 25 bp, Homo sapien
tcgaatgaggtggtgaacgaaaagc

SEQ ID NO: 1492441 - DNA, 25 bp, Homo sapien
gaaatgtgggtgaccttagcctcag

SEQ ID NO: 1492442 - DNA, 25 bp, Homo sapien
aacgaaaagcgtttagcacagagtg

SEQ ID NO: 1492443 - DNA, 25 bp, Homo sapien
tatggaggtttctgcacgctcagca

SEQ ID NO: 1492444 - DNA, 25 bp, Homo sapien
taatatggaggtttctgcacgctca

SEQ ID NO: 1492445 - DNA, 25 bp, Homo sapien
ttaatatggaggtttctgcacgctc

SEQ ID NO: 1492446 - DNA, 25 bp, Homo sapien
aatatggaggtttctgcacgctcag

SEQ ID NO: 1492447 - DNA, 25 bp, Homo sapien
tcccaactgcaggtagaagtacatc

SEQ ID NO: 1492448 - DNA, 25 bp, Homo sapien
tggctcatgagcacagagtaacgga

SEQ ID NO: 1492449 - DNA, 25 bp, Homo sapien
gaccgtcacaggtatcaggagcatg

SEQ ID NO: 1492450 - DNA, 25 bp, Homo sapien
tgatgccaggaggagacatacccta

SEQ ID NO: 1492451 - DNA, 25 bp, Homo sapien
tgtcaagtctatgagtgagagctgg

SEQ ID NO: 1492452 - DNA, 25 bp, Homo sapien
gagagctggtttataaagaagtaca

SEQ ID NO: 1492453 - DNA, 25 bp, Homo sapien
ctatgagtgagagctggtttataaa

SEQ ID NO: 1492454 - DNA, 25 bp, Homo sapien
gtcaagtctatgagtgagagctggt

SEQ ID NO: 1492455 - DNA, 25 bp, Homo sapien
actgaagataagcaagcagaggcgg

SEQ ID NO: 1492456 - DNA, 25 bp, Homo sapien
aatgtaatattccaagacacagcca

SEQ ID NO: 1492457 - DNA, 25 bp, Homo sapien
ggtgtgagatctggctgaagattcc

SEQ ID NO: 1492458 - DNA, 25 bp, Homo sapien
aatgtggatcagaagtatcaatgta

SEQ ID NO: 1492459 - DNA, 25 bp, Homo sapien
tgagataactatcttcagatcatcc

SEQ ID NO: 1492460 - DNA, 25 bp, Homo sapien
taaagactactcaagtgcactagtg

SEQ ID NO: 1492461 - DNA, 25 bp, Homo sapien
aaggaattctatctgtaactggctg

SEQ ID NO: 1492462 - DNA, 25 bp, Homo sapien
aggaaaatgtagaacaaggaattct

SEQ ID NO: 1492463 - DNA, 25 bp, Homo sapien
tctggccatggatgttaacgaacct

SEQ ID NO: 1492464 - DNA, 25 bp, Homo sapien
taatacatcctcaaggaaagtggca

SEQ ID NO: 1492465 - DNA, 25 bp, Homo sapien
tgtaacacccgcatggaaaactcca

SEQ ID NO: 1492466 - DNA, 25 bp, Homo sapien
gttgctaacacacgccaaatccatg

SEQ ID NO: 1492467 - DNA, 25 bp, Homo sapien
acttgttgctactttctgagcagat

SEQ ID NO: 1492468 - DNA, 25 bp, Homo sapien
ctgagcagatgagcaacatgcaaat

SEQ ID NO: 1492469 - DNA, 25 bp, Homo sapien
tgagcagatgagcaacatgcaaata

SEQ ID NO: 1492470 - DNA, 25 bp, Homo sapien
aagacacttcttgcggttcatcagg

SEQ ID NO: 1492471 - DNA, 25 bp, Homo sapien
aatggttgatacttcgggagccaca

SEQ ID NO: 1492472 - DNA, 25 bp, Homo sapien
gagtttcatacaaggacgtgtctgc

SEQ ID NO: 1492473 - DNA, 25 bp, Homo sapien
ctttttgcgaccttcagcagagggc

SEQ ID NO: 1492474 - DNA, 25 bp, Homo sapien
aggcgagagtccacctgaatcaaga

SEQ ID NO: 1492475 - DNA, 25 bp, Homo sapien
catgatggacagctgactgagcaga

SEQ ID NO: 1492476 - DNA, 25 bp, Homo sapien
aaaagggtgtccatgatggacagct

SEQ ID NO: 1492477 - DNA, 25 bp, Homo sapien
aggagttttgggacagtggtacaga

SEQ ID NO: 1492478 - DNA, 25 bp, Homo sapien
actgtaaatacaatcccggcagcct

SEQ ID NO: 1492479 - DNA, 25 bp, Homo sapien
aggatcactgtaaatacaatcccgg

SEQ ID NO: 1492480 - DNA, 25 bp, Homo sapien
aaatttgcagtcacggcccccaaga

SEQ ID NO: 1492481 - DNA, 25 bp, Homo sapien
gaaaacagcaaggatcactgtaaat

SEQ ID NO: 1492482 - DNA, 25 bp, Homo sapien
ggcaacgggaagacacaaggaccag

SEQ ID NO: 1492483 - DNA, 25 bp, Homo sapien
tgatgtgttcgtcattgatatggcc

SEQ ID NO: 1492484 - DNA, 25 bp, Homo sapien
caagagaacacggtcaagatgggaa

SEQ ID NO: 1492485 - DNA, 25 bp, Homo sapien
attgatatggcccacgagcgtccca

SEQ ID NO: 1492486 - DNA, 25 bp, Homo sapien
cttctgagggtaccgtcaggatgaa

SEQ ID NO: 1492487 - DNA, 25 bp, Homo sapien
tgagggtaccgtcaggatgaagctt

SEQ ID NO: 1492488 - DNA, 25 bp, Homo sapien
agggtaccgtcaggatgaagcttcc

SEQ ID NO: 1492489 - DNA, 25 bp, Homo sapien
tctgagggtaccgtcaggatgaagc

SEQ ID NO: 1492490 - DNA, 25 bp, Homo sapien
gccaaactcaggcttagaaagctac

SEQ ID NO: 1492491 - DNA, 25 bp, Homo sapien
cttagaaagctacggagcagataca

SEQ ID NO: 1492492 - DNA, 25 bp, Homo sapien
tcaggcttagaaagctacggagcag

SEQ ID NO: 1492493 - DNA, 25 bp, Homo sapien
caaactcaggcttagaaagctacgg

SEQ ID NO: 1492494 - DNA, 25 bp, Homo sapien
tcactcccttttacagtgggactag

SEQ ID NO: 1492495 - DNA, 25 bp, Homo sapien
tgaagggagtggatacacaccatgt

SEQ ID NO: 1492496 - DNA, 25 bp, Homo sapien
cattacctggattagtgcatgccat

SEQ ID NO: 1492497 - DNA, 25 bp, Homo sapien
gaaaagaacacgttgatgtaaccac

SEQ ID NO: 1492498 - DNA, 25 bp, Homo sapien
caggtatactcttgaaatgtctgtc

SEQ ID NO: 1492499 - DNA, 25 bp, Homo sapien
gccccgatcactaatgtccatgata

SEQ ID NO: 1492500 - DNA, 25 bp, Homo sapien
catgatatccctagaaacttgtcaa

SEQ ID NO: 1492501 - DNA, 25 bp, Homo sapien
aatgcatttcgcttattgcttcagg

SEQ ID NO: 1492502 - DNA, 25 bp, Homo sapien
tatctacgtcagcaacaatggagga

SEQ ID NO: 1492503 - DNA, 25 bp, Homo sapien
gctgaattgaaataacaccgaggat

SEQ ID NO: 1492504 - DNA, 25 bp, Homo sapien
cttctgaatgaaaagccacctaggg

SEQ ID NO: 1492505 - DNA, 25 bp, Homo sapien
gatcgagaaggtgctagctaaggca

SEQ ID NO: 1492506 - DNA, 25 bp, Homo sapien
cttcctgatcacagtcgccaccctg

SEQ ID NO: 1492507 - DNA, 25 bp, Homo sapien
ccttcctgatcacagtcgccaccct

SEQ ID NO: 1492508 - DNA, 25 bp, Homo sapien
ggagccgaccaccatgaataagcaa

SEQ ID NO: 1492509 - DNA, 25 bp, Homo sapien
gagtcagcatgaacccatccaagga

SEQ ID NO: 1492510 - DNA, 25 bp, Homo sapien
ccataatgtgggaggaacacgtagc

SEQ ID NO: 1492511 - DNA, 25 bp, Homo sapien
gtaccgtagagggttgcacacagcc

SEQ ID NO: 1492512 - DNA, 25 bp, Homo sapien
cctgtgaggacgaagttagtggagt

SEQ ID NO: 1492513 - DNA, 25 bp, Homo sapien
acgaagttagtggagttctggagaa

SEQ ID NO: 1492514 - DNA, 25 bp, Homo sapien
ggctgttatagccaccacaaagatg

SEQ ID NO: 1492515 - DNA, 25 bp, Homo sapien
gatgggtgatgaggcctgtgaggac

SEQ ID NO: 1492516 - DNA, 25 bp, Homo sapien
agaaatctggcagcttatttaacga

SEQ ID NO: 1492517 - DNA, 25 bp, Homo sapien
gaaatctggcagcttatttaacgac

SEQ ID NO: 1492518 - DNA, 25 bp, Homo sapien
cagaaatctggcagcttatttaacg

SEQ ID NO: 1492519 - DNA, 25 bp, Homo sapien
actagagctatgagaagtatctgcc

SEQ ID NO: 1492520 - DNA, 25 bp, Homo sapien
gacacaacgtacctgtaaagcttga

SEQ ID NO: 1492521 - DNA, 25 bp, Homo sapien
ccagtgtcctttctgtggcaataaa

SEQ ID NO: 1492522 - DNA, 25 bp, Homo sapien
gaagtcacaggttcttctaccaggg

SEQ ID NO: 1492523 - DNA, 25 bp, Homo sapien
taaataaagttctccaactattgga

SEQ ID NO: 1492524 - DNA, 25 bp, Homo sapien
agttctccaactattggattgattg

SEQ ID NO: 1492525 - DNA, 25 bp, Homo sapien
catccataaataaagttctccaact

SEQ ID NO: 1492526 - DNA, 25 bp, Homo sapien
aaagttctccaactattggattgat

SEQ ID NO: 1492527 - DNA, 25 bp, Homo sapien
cacaaccttctgtagggcccctgtg

SEQ ID NO: 1492528 - DNA, 25 bp, Homo sapien
cccacaaccttctgtagggcccctg

SEQ ID NO: 1492529 - DNA, 25 bp, Homo sapien
caaccttctgtagggcccctgtgac

SEQ ID NO: 1492530 - DNA, 25 bp, Homo sapien
acaaccttctgtagggcccctgtga

SEQ ID NO: 1492531 - DNA, 25 bp, Homo sapien
gaggcagcacgtatgtgtacatggc

SEQ ID NO: 1492532 - DNA, 25 bp, Homo sapien
gatgaggagcatcataatacagcag

SEQ ID NO: 1492533 - DNA, 25 bp, Homo sapien
ttgatctcccgagaggcacagaagg

SEQ ID NO: 1492534 - DNA, 25 bp, Homo sapien
catacatggctgtctcgtaggctga

SEQ ID NO: 1492535 - DNA, 25 bp, Homo sapien
tgagcaagaaaccatcgatagaccc

SEQ ID NO: 1492536 - DNA, 25 bp, Homo sapien
gaagtgttgggcagtgcatccagca

SEQ ID NO: 1492537 - DNA, 25 bp, Homo sapien
agtcctaggaggaagaactcagccc

SEQ ID NO: 1492538 - DNA, 25 bp, Homo sapien
caatcaaccagcagatcttgcggct

SEQ ID NO: 1492539 - DNA, 25 bp, Homo sapien
cacaatggtggaaatatacaggatg

SEQ ID NO: 1492540 - DNA, 25 bp, Homo sapien
ggaaatatacaggatgtccctgagg

SEQ ID NO: 1492541 - DNA, 25 bp, Homo sapien
aaatatacaggatgtccctgaggga

SEQ ID NO: 1492542 - DNA, 25 bp, Homo sapien
tggtggaaatatacaggatgtccct

SEQ ID NO: 1492543 - DNA, 25 bp, Homo sapien
ctatgtggatgagaatgatcttgac

SEQ ID NO: 1492544 - DNA, 25 bp, Homo sapien
gaatgatcttgaccacgttgctggc

SEQ ID NO: 1492545 - DNA, 25 bp, Homo sapien
acccagaaggataaagtcggcatac

SEQ ID NO: 1492546 - DNA, 25 bp, Homo sapien
catacacggaataattgctctgctc

SEQ ID NO: 1492547 - DNA, 25 bp, Homo sapien
gggtacacaaaagagatatgacaaa

SEQ ID NO: 1492548 - DNA, 25 bp, Homo sapien
tacacaaaagagatatgacaaagtt

SEQ ID NO: 1492549 - DNA, 25 bp, Homo sapien
tagggtacacaaaagagatatgaca

SEQ ID NO: 1492550 - DNA, 25 bp, Homo sapien
ctgtagggtacacaaaagagatatg

SEQ ID NO: 1492551 - DNA, 25 bp, Homo sapien
ttaggttctgcagggagtctgcgct

SEQ ID NO: 1492552 - DNA, 25 bp, Homo sapien
accttaggttctgcagggagtctgc

SEQ ID NO: 1492553 - DNA, 25 bp, Homo sapien
tggtccaccttaggttctgcaggga

SEQ ID NO: 1492554 - DNA, 25 bp, Homo sapien
ccaccttaggttctgcagggagtct

SEQ ID NO: 1492555 - DNA, 25 bp, Homo sapien
cagtgcacatgaccctcgctttttc

SEQ ID NO: 1492556 - DNA, 25 bp, Homo sapien
atgaccctcgctttttcctggccat

SEQ ID NO: 1492557 - DNA, 25 bp, Homo sapien
catgaccctcgctttttcctggcca

SEQ ID NO: 1492558 - DNA, 25 bp, Homo sapien
atccagtgcacatgaccctcgcttt

SEQ ID NO: 1492559 - DNA, 25 bp, Homo sapien
tagaagcagtctcgcatagtgctcc

SEQ ID NO: 1492560 - DNA, 25 bp, Homo sapien
gaagcagtctcgcatagtgctcccc

SEQ ID NO: 1492561 - DNA, 25 bp, Homo sapien
cccagacacagaatacatacctatg

SEQ ID NO: 1492562 - DNA, 25 bp, Homo sapien
tatatacctatgacattgctgagta

SEQ ID NO: 1492563 - DNA, 25 bp, Homo sapien
tgctgagtaaaagcagtctcccgta

SEQ ID NO: 1492564 - DNA, 25 bp, Homo sapien
cccaaacacagaatacatacctatg

SEQ ID NO: 1492565 - DNA, 25 bp, Homo sapien
tatatacctatgacattgctgagta

SEQ ID NO: 1492566 - DNA, 25 bp, Homo sapien
ccagacacagaatacatacctatga

SEQ ID NO: 1492567 - DNA, 25 bp, Homo sapien
cagatcttctatagtaaagaccagg

SEQ ID NO: 1492568 - DNA, 25 bp, Homo sapien
gggttttgttgcagatcttctatag

SEQ ID NO: 1492569 - DNA, 25 bp, Homo sapien
gcatttctatctacatatagtagtg

SEQ ID NO: 1492570 - DNA, 25 bp, Homo sapien
tctatctacatatagtagtgcaaat

SEQ ID NO: 1492571 - DNA, 25 bp, Homo sapien
gaaacatgttgccagtgtggacggc

SEQ ID NO: 1492572 - DNA, 25 bp, Homo sapien
tcctgaagggattctgagcaccgtt

SEQ ID NO: 1492573 - DNA, 25 bp, Homo sapien
aaccagggccaacacatgagggatg

SEQ ID NO: 1492574 - DNA, 25 bp, Homo sapien
cagggccagggtcaaaaactctaca

SEQ ID NO: 1492575 - DNA, 25 bp, Homo sapien
gataaatcagcagaaacagcccggc

SEQ ID NO: 1492576 - DNA, 25 bp, Homo sapien
taagacatgacagtaaggaaggcca

SEQ ID NO: 1492577 - DNA, 25 bp, Homo sapien
taagagatggagcttctgcgagtca

SEQ ID NO: 1492578 - DNA, 25 bp, Homo sapien
gatccaaaacggagaggttcttcag

SEQ ID NO: 1492579 - DNA, 25 bp, Homo sapien
gcagctcccagataccagaaaactc

SEQ ID NO: 1492580 - DNA, 25 bp, Homo sapien
ctgcagctcccagataccagaaaac

SEQ ID NO: 1492581 - DNA, 25 bp, Homo sapien
agctcccagataccagaaaactcca

SEQ ID NO: 1492582 - DNA, 25 bp, Homo sapien
gctcccagataccagaaaactccat

SEQ ID NO: 1492583 - DNA, 25 bp, Homo sapien
tttgtgagattgtccatttggcagg

SEQ ID NO: 1492584 - DNA, 25 bp, Homo sapien
ttgtgagattgtccatttggcaggg

SEQ ID NO: 1492585 - DNA, 25 bp, Homo sapien
tgtgagattgtccatttggcaggga

SEQ ID NO: 1492586 - DNA, 25 bp, Homo sapien
cacagtgtggtaggagtaatatcct

SEQ ID NO: 1492587 - DNA, 25 bp, Homo sapien
acacagtgtggtaggagtaatatcc

SEQ ID NO: 1492588 - DNA, 25 bp, Homo sapien
acagtgtggtaggagtaatatcctc

SEQ ID NO: 1492589 - DNA, 25 bp, Homo sapien
gctgctcccgcgggcccacagcgcg

SEQ ID NO: 1492590 - DNA, 25 bp, Homo sapien
ctcaggacgcagctgccggtccagc

SEQ ID NO: 1492591 - DNA, 25 bp, Homo sapien
caggacgcagctgccggtccagctg

SEQ ID NO: 1492592 - DNA, 25 bp, Homo sapien
tccagctgctcccgcgggcccacag

SEQ ID NO: 1492593 - DNA, 25 bp, Homo sapien
gcgctgtgaggggcgctcgcccagc

SEQ ID NO: 1492594 - DNA, 25 bp, Homo sapien
cgctgtgaggggcgctcgcccagca

SEQ ID NO: 1492595 - DNA, 25 bp, Homo sapien
gctgtgaggggcgctcgcccagcag

SEQ ID NO: 1492596 - DNA, 25 bp, Homo sapien
tgcattcgtgaattccctcctgcat

SEQ ID NO: 1492597 - DNA, 25 bp, Homo sapien
tggcctgcagccttactttcatgcc

SEQ ID NO: 1492598 - DNA, 25 bp, Homo sapien
tctgcattcccgcattcccaggttc

SEQ ID NO: 1492599 - DNA, 25 bp, Homo sapien
cttcacaggtgagcggatggcttgg

SEQ ID NO: 1492600 - DNA, 25 bp, Homo sapien
cagaaatggggccagaatcagaccc

SEQ ID NO: 1492601 - DNA, 25 bp, Homo sapien
gccatcagaaatggggccagaatca

SEQ ID NO: 1492602 - DNA, 25 bp, Homo sapien
tcagccatcagaaatggggccagaa

SEQ ID NO: 1492603 - DNA, 25 bp, Homo sapien
aatggggccagaatcagacccccat

SEQ ID NO: 1492604 - DNA, 25 bp, Homo sapien
taactcaggacctacccatctagga

SEQ ID NO: 1492605 - DNA, 25 bp, Homo sapien
gcctactaacatatagacttcagag

SEQ ID NO: 1492606 - DNA, 25 bp, Homo sapien
aatgtggtctatatcaattctccag

SEQ ID NO: 1492607 - DNA, 25 bp, Homo sapien
gataaaacctgaggacaaagactaa

SEQ ID NO: 1492608 - DNA, 25 bp, Homo sapien
aagagactgggcatattgactcatg

SEQ ID NO: 1492609 - DNA, 25 bp, Homo sapien
gagatgattgaaccactacactcca

SEQ ID NO: 1492610 - DNA, 25 bp, Homo sapien
gcttaggcagtaaagtgagacatcc

SEQ ID NO: 1492611 - DNA, 25 bp, Homo sapien
tttaatcagcaagacatagtggctc

SEQ ID NO: 1492612 - DNA, 25 bp, Homo sapien
ccatgatgaaacaggaagctagaac

SEQ ID NO: 1492613 - DNA, 25 bp, Homo sapien
gttttccatcaaggctgaagtggga

SEQ ID NO: 1492614 - DNA, 25 bp, Homo sapien
tgccaacaaattgaaaggcctagaa

SEQ ID NO: 1492615 - DNA, 25 bp, Homo sapien
aggctgccaggagctacaatcatgc

SEQ ID NO: 1492616 - DNA, 25 bp, Homo sapien
tctaaacaaatatgatacagaagga

SEQ ID NO: 1492617 - DNA, 25 bp, Homo sapien
tgaaagttctagctaatcaggcaag

SEQ ID NO: 1492618 - DNA, 25 bp, Homo sapien
aagggcacacaaactggaaaagaag

SEQ ID NO: 1492619 - DNA, 25 bp, Homo sapien
aacacaccccaatacaatgtctata

SEQ ID NO: 1492620 - DNA, 25 bp, Homo sapien
ccagtaaaccaagcacacgggtgta

SEQ ID NO: 1492621 - DNA, 25 bp, Homo sapien
tcatggtctgaggaactactgaacc

SEQ ID NO: 1492622 - DNA, 25 bp, Homo sapien
taggaaccatcttgctacaaagtgg

SEQ ID NO: 1492623 - DNA, 25 bp, Homo sapien
gggaaggcccagcagtaagtcacgt

SEQ ID NO: 1492624 - DNA, 25 bp, Homo sapien
gggtatttgtctaggtgagtctaca

SEQ ID NO: 1492625 - DNA, 25 bp, Homo sapien
tctaggtgagtctacagctcaatct

SEQ ID NO: 1492626 - DNA, 25 bp, Homo sapien
tttgtctaggtgagtctacagctca

SEQ ID NO: 1492627 - DNA, 25 bp, Homo sapien
ccaagggggtatttgtctaggtgag

SEQ ID NO: 1492628 - DNA, 25 bp, Homo sapien
gttcccaactcattgcagatagtat

SEQ ID NO: 1492629 - DNA, 25 bp, Homo sapien
cagcagatcgctttggatgtatttg

SEQ ID NO: 1492630 - DNA, 25 bp, Homo sapien
tgcaaacacagttgcagctggaact

SEQ ID NO: 1492631 - DNA, 25 bp, Homo sapien
agccttccagtgcataacttcatcg

SEQ ID NO: 1492632 - DNA, 25 bp, Homo sapien
aaccagaatttctgttcgtggtata

SEQ ID NO: 1492633 - DNA, 25 bp, Homo sapien
aaatgtgatttcccggtcaagctcc

SEQ ID NO: 1492634 - DNA, 25 bp, Homo sapien
tgttcgtggtatacagataagtaga

SEQ ID NO: 1492635 - DNA, 25 bp, Homo sapien
gatttcccggtcaagctcctgcctg

SEQ ID NO: 1492636 - DNA, 25 bp, Homo sapien
gagggcgtcagttctcggttcagcc

SEQ ID NO: 1492637 - DNA, 25 bp, Homo sapien
acccctcaccgagccaggtgactgc

SEQ ID NO: 1492638 - DNA, 25 bp, Homo sapien
tgtggacttccaatttcagggtttc

SEQ ID NO: 1492639 - DNA, 25 bp, Homo sapien
gccagcatatagcagtgctccatga

SEQ ID NO: 1492640 - DNA, 25 bp, Homo sapien
tcaagagaagacgtcaaagacgtag

SEQ ID NO: 1492641 - DNA, 25 bp, Homo sapien
aagacgtagacataaccttcaagaa

SEQ ID NO: 1492642 - DNA, 25 bp, Homo sapien
agacatgagtgcagaaaactgtaag

SEQ ID NO: 1492643 - DNA, 25 bp, Homo sapien
gcatttgggaagataagacatgagt

SEQ ID NO: 1492644 - DNA, 25 bp, Homo sapien
tcccttccacctgccggaaagatga

SEQ ID NO: 1492645 - DNA, 25 bp, Homo sapien
ggaaagatgaggttctcaaactcca

SEQ ID NO: 1492646 - DNA, 25 bp, Homo sapien
gccggaaagatgaggttctcaaact

SEQ ID NO: 1492647 - DNA, 25 bp, Homo sapien
cacctgccggaaagatgaggttctc

SEQ ID NO: 1492648 - DNA, 25 bp, Homo sapien
tattgttggatatcaaacactgttg

SEQ ID NO: 1492649 - DNA, 25 bp, Homo sapien
ctattgttggatatcaaacactgtt

SEQ ID NO: 1492650 - DNA, 25 bp, Homo sapien
attgttggatatcaaacactgttgg

SEQ ID NO: 1492651 - DNA, 25 bp, Homo sapien
cctattgttggatatcaaacactgt

SEQ ID NO: 1492652 - DNA, 25 bp, Homo sapien
ctaaaccacagcagcccctgcgaac

SEQ ID NO: 1492653 - DNA, 25 bp, Homo sapien
aatcatagagacgaaacaggatggg

SEQ ID NO: 1492654 - DNA, 25 bp, Homo sapien
aaaaagcaggccgtggcacaactga

SEQ ID NO: 1492655 - DNA, 25 bp, Homo sapien
gctggaaaaaagcaggccgtggcac

SEQ ID NO: 1492656 - DNA, 25 bp, Homo sapien
tgcatgttattgcagaaatcataga

SEQ ID NO: 1492657 - DNA, 25 bp, Homo sapien
gagccagctctcacacgcaataggt

SEQ ID NO: 1492658 - DNA, 25 bp, Homo sapien
tcctgagaccagctgcgctgcagac

SEQ ID NO: 1492659 - DNA, 25 bp, Homo sapien
cacgcaataggtgattccgaggaca

SEQ ID NO: 1492660 - DNA, 25 bp, Homo sapien
aggacacacgggaatgcaagaggcc

SEQ ID NO: 1492661 - DNA, 25 bp, Homo sapien
tagggtaccctccagagttgccttg

SEQ ID NO: 1492662 - DNA, 25 bp, Homo sapien
caccttggcaatgttgaggacccag

SEQ ID NO: 1492663 - DNA, 25 bp, Homo sapien
tcttagggacccactagcaccttgg

SEQ ID NO: 1492664 - DNA, 25 bp, Homo sapien
cttacaggttacacacgggcaggct

SEQ ID NO: 1492665 - DNA, 25 bp, Homo sapien
ctgacgctgcgctggtgccgacccc

SEQ ID NO: 1492666 - DNA, 25 bp, Homo sapien
tgacgctgcgctggtgccgaccccc

SEQ ID NO: 1492667 - DNA, 25 bp, Homo sapien
gctgacgctgcgctggtgccgaccc

SEQ ID NO: 1492668 - DNA, 25 bp, Homo sapien
gccgtgcgtgaatctgctcgctgat

SEQ ID NO: 1492669 - DNA, 25 bp, Homo sapien
gatctgctccaggttacgaagggcc

SEQ ID NO: 1492670 - DNA, 25 bp, Homo sapien
tccagactgacgtggtccgagaggc

SEQ ID NO: 1492671 - DNA, 25 bp, Homo sapien
tccacggagtcgcacttctgcaggt

SEQ ID NO: 1492672 - DNA, 25 bp, Homo sapien
gctgaactgggccttgagctcaaag

SEQ ID NO: 1492673 - DNA, 25 bp, Homo sapien
tgccgatggccctccggagggtctt

SEQ ID NO: 1492674 - DNA, 25 bp, Homo sapien
ttggacccgagcctcagcctgttgg

SEQ ID NO: 1492675 - DNA, 25 bp, Homo sapien
gttggcacagccgagtcactcgctg

SEQ ID NO: 1492676 - DNA, 25 bp, Homo sapien
cagaggacacatcactgagccagga

SEQ ID NO: 1492677 - DNA, 25 bp, Homo sapien
tcagggtgttgtacagttggcccac

SEQ ID NO: 1492678 - DNA, 25 bp, Homo sapien
tctgaaaacagaagcgaggagtcac

SEQ ID NO: 1492679 - DNA, 25 bp, Homo sapien
tcaaaactcgaggtgtactgtcaga

SEQ ID NO: 1492680 - DNA, 25 bp, Homo sapien
cgtaccgcagcgctgccttctgtgt

SEQ ID NO: 1492681 - DNA, 25 bp, Homo sapien
ttcttgtcagccatgacgccctgct

SEQ ID NO: 1492682 - DNA, 25 bp, Homo sapien
tgtgcatgcttacggcccgctcgta

SEQ ID NO: 1492683 - DNA, 25 bp, Homo sapien
cacaaacaccatttctcgagcagcg

SEQ ID NO: 1492684 - DNA, 25 bp, Homo sapien
ggtagatgtgtgaaatccagcactc

SEQ ID NO: 1492685 - DNA, 25 bp, Homo sapien
cataaggatatggactagaagaaat

SEQ ID NO: 1492686 - DNA, 25 bp, Homo sapien
ctgtgctgaggataaatgccaagga

SEQ ID NO: 1492687 - DNA, 25 bp, Homo sapien
gccaaggaagcaacattctataaag

SEQ ID NO: 1492688 - DNA, 25 bp, Homo sapien
gaaggcacttaaacattagcagggc

SEQ ID NO: 1492689 - DNA, 25 bp, Homo sapien
gaaatgggcgcagatgaaaacaaca

SEQ ID NO: 1492690 - DNA, 25 bp, Homo sapien
ggtaaaggaacctcctgagcccaca

SEQ ID NO: 1492691 - DNA, 25 bp, Homo sapien
gccttcctcaaacgtggtcagccag

SEQ ID NO: 1492692 - DNA, 25 bp, Homo sapien
gatcctccgataggtggtcctggcc

SEQ ID NO: 1492693 - DNA, 25 bp, Homo sapien
gagcctcatagtagggccgggcttt

SEQ ID NO: 1492694 - DNA, 25 bp, Homo sapien
gggctttctcgatgcagctccccaa

SEQ ID NO: 1492695 - DNA, 25 bp, Homo sapien
tattcagtttcctcgccgactcctg

SEQ ID NO: 1492696 - DNA, 25 bp, Homo sapien
tccacctggttgatctcctcgctgg

SEQ ID NO: 1492697 - DNA, 25 bp, Homo sapien
tcctcgctggcctggttcaggtgct

SEQ ID NO: 1492698 - DNA, 25 bp, Homo sapien
ccagctgtagttccacctggttgat

SEQ ID NO: 1492699 - DNA, 25 bp, Homo sapien
tgtagttccacctggttgatctcct

SEQ ID NO: 1492700 - DNA, 25 bp, Homo sapien
tggcaaatcaaagtccaagacggga

SEQ ID NO: 1492701 - DNA, 25 bp, Homo sapien
cactggattccatggcctcaaatgc

SEQ ID NO: 1492702 - DNA, 25 bp, Homo sapien
caaccaggcggaaaattagtgacag

SEQ ID NO: 1492703 - DNA, 25 bp, Homo sapien
taggctatctgggagacgagtgacc

SEQ ID NO: 1492704 - DNA, 25 bp, Homo sapien
tgggacagttttgggcagtcagcaa

SEQ ID NO: 1492705 - DNA, 25 bp, Homo sapien
cagttttgggcagtcagcaacacat

SEQ ID NO: 1492706 - DNA, 25 bp, Homo sapien
gacagttttgggcagtcagcaacac

SEQ ID NO: 1492707 - DNA, 25 bp, Homo sapien
gacctgggacagttttgggcagtca

SEQ ID NO: 1492708 - DNA, 25 bp, Homo sapien
tgggctcctagggacttcatcctct

SEQ ID NO: 1492709 - DNA, 25 bp, Homo sapien
tcttctgcgactgggctcctaggga

SEQ ID NO: 1492710 - DNA, 25 bp, Homo sapien
agggacttcatcctctacaacttca

SEQ ID NO: 1492711 - DNA, 25 bp, Homo sapien
ttggggacaatttggcctcactgct

SEQ ID NO: 1492712 - DNA, 25 bp, Homo sapien
ggcagagccctatgcacaagagagg

SEQ ID NO: 1492713 - DNA, 25 bp, Homo sapien
ggaagaacctcacactaggttagag

SEQ ID NO: 1492714 - DNA, 25 bp, Homo sapien
ggttcctagagctgaagccttgtct

SEQ ID NO: 1492715 - DNA, 25 bp, Homo sapien
cctgctaggaggagcaccattcggg

SEQ ID NO: 1492716 - DNA, 25 bp, Homo sapien
ggagtccactgtgacaaacccggag

SEQ ID NO: 1492717 - DNA, 25 bp, Homo sapien
catgtattccgaccagtccctacct

SEQ ID NO: 1492718 - DNA, 25 bp, Homo sapien
aacttctctccttagccctcaagga

SEQ ID NO: 1492719 - DNA, 25 bp, Homo sapien
gccaagtatatggtcatgtcagcat

SEQ ID NO: 1492720 - DNA, 25 bp, Homo sapien
tcaaccagcgccttcgagactttcc

SEQ ID NO: 1492721 - DNA, 25 bp, Homo sapien
tcagtttccgtacaaaatggtgccc

SEQ ID NO: 1492722 - DNA, 25 bp, Homo sapien
tacatcatcggtgaacaacgctctc

SEQ ID NO: 1492723 - DNA, 25 bp, Homo sapien
cgcgggacggaaatcgagagtaact

SEQ ID NO: 1492724 - DNA, 25 bp, Homo sapien
gatccaaccaaaaacgaccaggcag

SEQ ID NO: 1492725 - DNA, 25 bp, Homo sapien
gctggtaaacttccggcagtggctc

SEQ ID NO: 1492726 - DNA, 25 bp, Homo sapien
gacggctccgatgtgtaaatcccac

SEQ ID NO: 1492727 - DNA, 25 bp, Homo sapien
aattgctccgtgaatactaaccagg

SEQ ID NO: 1492728 - DNA, 25 bp, Homo sapien
ttcgcgggcgaaggcaaagtcgatt

SEQ ID NO: 1492729 - DNA, 25 bp, Homo sapien
cacctctaggtgtcgcttggtgagg

SEQ ID NO: 1492730 - DNA, 25 bp, Homo sapien
actcgtgcacccagggtcagatgcc

SEQ ID NO: 1492731 - DNA, 25 bp, Homo sapien
taactcagttaattcactcgtgcac

SEQ ID NO: 1492732 - DNA, 25 bp, Homo sapien
gtatcgttacctaggtccctgagcg

SEQ ID NO: 1492733 - DNA, 25 bp, Homo sapien
gtcatatgcgggtcagcaaacactc

SEQ ID NO: 1492734 - DNA, 25 bp, Homo sapien
tctttctaggttaaatatccccagc

SEQ ID NO: 1492735 - DNA, 25 bp, Homo sapien
tccttaatccgtgttgtcatatgcg

SEQ ID NO: 1492736 - DNA, 25 bp, Homo sapien
gaagaaagtcatctaatccagtcct

SEQ ID NO: 1492737 - DNA, 25 bp, Homo sapien
agcgattggccggacacgtccgcgc

SEQ ID NO: 1492738 - DNA, 25 bp, Homo sapien
tctgcctcgggcgactggtgtctgc

SEQ ID NO: 1492739 - DNA, 25 bp, Homo sapien
agagggacaggagcgtgacctcccc

SEQ ID NO: 1492740 - DNA, 25 bp, Homo sapien
tcagctgtggctagtcttctcccat

SEQ ID NO: 1492741 - DNA, 25 bp, Homo sapien
gccatgctgtcctcgtataactcgg

SEQ ID NO: 1492742 - DNA, 25 bp, Homo sapien
tgtaggcacgttaccagccctgtgg

SEQ ID NO: 1492743 - DNA, 25 bp, Homo sapien
ttggcaagagctctacgctgacgcg

SEQ ID NO: 1492744 - DNA, 25 bp, Homo sapien
tgtccaatctcaacgtgcatcggcg

SEQ ID NO: 1492745 - DNA, 25 bp, Homo sapien
actctgtcgccttagttcctgggga

SEQ ID NO: 1492746 - DNA, 25 bp, Homo sapien
taggaagactaaagtagtccagctc

SEQ ID NO: 1492747 - DNA, 25 bp, Homo sapien
tcctggggaccaagcatctggcatt

SEQ ID NO: 1492748 - DNA, 25 bp, Homo sapien
ttgctccttttcagtccctggagtc

SEQ ID NO: 1492749 - DNA, 25 bp, Homo sapien
ggtgactcttgaggggctagaagca

SEQ ID NO: 1492750 - DNA, 25 bp, Homo sapien
gagatgcagagggcctggacccctc

SEQ ID NO: 1492751 - DNA, 25 bp, Homo sapien
gggtgactcttgaggggctagaagc

SEQ ID NO: 1492752 - DNA, 25 bp, Homo sapien
cttctggcggcaggtaaacccgcat

SEQ ID NO: 1492753 - DNA, 25 bp, Homo sapien
cgtctctgcatgcttgcgctggtgc

SEQ ID NO: 1492754 - DNA, 25 bp, Homo sapien
gaattcacaggggaagcgcaaggca

SEQ ID NO: 1492755 - DNA, 25 bp, Homo sapien
gcggcaggtaaacccgcatatctca

SEQ ID NO: 1492756 - DNA, 25 bp, Homo sapien
ggcctcaggccatcatgacttccct

SEQ ID NO: 1492757 - DNA, 25 bp, Homo sapien
ctatatgcctagcttccagactcca

SEQ ID NO: 1492758 - DNA, 25 bp, Homo sapien
ggtgtcctatatgcctagcttccag

SEQ ID NO: 1492759 - DNA, 25 bp, Homo sapien
ccccactgcctaggtgtcctatatg

SEQ ID NO: 1492760 - DNA, 25 bp, Homo sapien
gaactcacagatgtagtcccgggtg

SEQ ID NO: 1492761 - DNA, 25 bp, Homo sapien
tacgtctgtggatgacaaggttgct

SEQ ID NO: 1492762 - DNA, 25 bp, Homo sapien
aggttgctgctagtgcggaaagacc

SEQ ID NO: 1492763 - DNA, 25 bp, Homo sapien
aagaccgggcgcagaactcacagat

SEQ ID NO: 1492764 - DNA, 25 bp, Homo sapien
aggcatatgagggacactccagcat

SEQ ID NO: 1492765 - DNA, 25 bp, Homo sapien
gcaggcatatgagggacactccagc

SEQ ID NO: 1492766 - DNA, 25 bp, Homo sapien
caggcatatgagggacactccagca

SEQ ID NO: 1492767 - DNA, 25 bp, Homo sapien
ggcatatgagggacactccagcatc

SEQ ID NO: 1492768 - DNA, 25 bp, Homo sapien
cagagtgcaccgtattggaggtcag

SEQ ID NO: 1492769 - DNA, 25 bp, Homo sapien
tccaaatcatggagcccgtctggac

SEQ ID NO: 1492770 - DNA, 25 bp, Homo sapien
gttctaattagttgttatccaaatc

SEQ ID NO: 1492771 - DNA, 25 bp, Homo sapien
tatccaaatcatggagcccgtctgg

SEQ ID NO: 1492772 - DNA, 25 bp, Homo sapien
tcacatttggcctgtcgcactagca

SEQ ID NO: 1492773 - DNA, 25 bp, Homo sapien
catggtcactgtgtggcagcagctc

SEQ ID NO: 1492774 - DNA, 25 bp, Homo sapien
gattgaagctcaaggcccaaggaca

SEQ ID NO: 1492775 - DNA, 25 bp, Homo sapien
caaaccctatcggtgccctgtggag

SEQ ID NO: 1492776 - DNA, 25 bp, Homo sapien
caggagaaagacttctggtggatgt

SEQ ID NO: 1492777 - DNA, 25 bp, Homo sapien
tccttcaggtgtttcttaaagttga

SEQ ID NO: 1492778 - DNA, 25 bp, Homo sapien
tgcagcttcatgtgctccttcaggt

SEQ ID NO: 1492779 - DNA, 25 bp, Homo sapien
cttctggtggatgtgctggtacttt

SEQ ID NO: 1492780 - DNA, 25 bp, Homo sapien
agagatgaactgagctgacccggca

SEQ ID NO: 1492781 - DNA, 25 bp, Homo sapien
gcagtttgggtaagtatgatcatcc

SEQ ID NO: 1492782 - DNA, 25 bp, Homo sapien
gatagccaccttccacggagagatg

SEQ ID NO: 1492783 - DNA, 25 bp, Homo sapien
tcatggcctgctcgtttccttgagg

SEQ ID NO: 1492784 - DNA, 25 bp, Homo sapien
gtcacaaggcatcagctctcttttg

SEQ ID NO: 1492785 - DNA, 25 bp, Homo sapien
ccggttggagaagatccttccacag

SEQ ID NO: 1492786 - DNA, 25 bp, Homo sapien
aatttgtgcagtgtcctcatcccag

SEQ ID NO: 1492787 - DNA, 25 bp, Homo sapien
tcccaggccggggttggagcagact

SEQ ID NO: 1492788 - DNA, 25 bp, Homo sapien
agcagactgggcctgactcccagtg

SEQ ID NO: 1492789 - DNA, 25 bp, Homo sapien
taattctcttggggccaatttgtgc

SEQ ID NO: 1492790 - DNA, 25 bp, Homo sapien
ggagcagagggcctcgagggagggc

SEQ ID NO: 1492791 - DNA, 25 bp, Homo sapien
tgccctttctgtctcagccatcagg

SEQ ID NO: 1492792 - DNA, 25 bp, Homo sapien
acatcccaggacgcccctgcccttt

SEQ ID NO: 1492793 - DNA, 25 bp, Homo sapien
ggcctcgagggagggccacatccca

SEQ ID NO: 1492794 - DNA, 25 bp, Homo sapien
tgagctgtggctgcaccctgacttc

SEQ ID NO: 1492795 - DNA, 25 bp, Homo sapien
gctctggaactcaatgaggatgctg

SEQ ID NO: 1492796 - DNA, 25 bp, Homo sapien
gcctcagtctgctgggccgcttgag

SEQ ID NO: 1492797 - DNA, 25 bp, Homo sapien
caggtggaggagctctggaactcaa

SEQ ID NO: 1492798 - DNA, 25 bp, Homo sapien
ctccccctctttaggtgtgcaggtg

SEQ ID NO: 1492799 - DNA, 25 bp, Homo sapien
tgtctccccctctttaggtgtgcag

SEQ ID NO: 1492800 - DNA, 25 bp, Homo sapien
cccctctttaggtgtgcaggtgaca

SEQ ID NO: 1492801 - DNA, 25 bp, Homo sapien
cctctttaggtgtgcaggtgacagg

SEQ ID NO: 1492802 - DNA, 25 bp, Homo sapien
ctctagtctgcaaagccatgaactg

SEQ ID NO: 1492803 - DNA, 25 bp, Homo sapien
gaagatggcattaactttctgggca

SEQ ID NO: 1492804 - DNA, 25 bp, Homo sapien
tgcccgaccctagcccctaaactga

SEQ ID NO: 1492805 - DNA, 25 bp, Homo sapien
ccctgcacctgacttcacccctttt

SEQ ID NO: 1492806 - DNA, 25 bp, Homo sapien
gaggagctgtaggtccataagctgg

SEQ ID NO: 1492807 - DNA, 25 bp, Homo sapien
gggaggagctgtaggtccataagct

SEQ ID NO: 1492808 - DNA, 25 bp, Homo sapien
agctgtaggtccataagctggcatc

SEQ ID NO: 1492809 - DNA, 25 bp, Homo sapien
ggagctgtaggtccataagctggca

SEQ ID NO: 1492810 - DNA, 25 bp, Homo sapien
tctcctggaggtgggaaggtctctg

SEQ ID NO: 1492811 - DNA, 25 bp, Homo sapien
cctcttcctctcctggaggtgggaa

SEQ ID NO: 1492812 - DNA, 25 bp, Homo sapien
ctggaggtgggaaggtctctggtgg

SEQ ID NO: 1492813 - DNA, 25 bp, Homo sapien
tcctggaggtgggaaggtctctggt

SEQ ID NO: 1492814 - DNA, 25 bp, Homo sapien
ggcctcttgagtcctctcatcatgc

SEQ ID NO: 1492815 - DNA, 25 bp, Homo sapien
gcctcttgagtcctctcatcatgct

SEQ ID NO: 1492816 - DNA, 25 bp, Homo sapien
tggcctcttgagtcctctcatcatg

SEQ ID NO: 1492817 - DNA, 25 bp, Homo sapien
catagttcacaaaactatacagtca

SEQ ID NO: 1492818 - DNA, 25 bp, Homo sapien
cagagatatgtcatacattcgcaag

SEQ ID NO: 1492819 - DNA, 25 bp, Homo sapien
ctatacagtcaaaaatctcctttcc

SEQ ID NO: 1492820 - DNA, 25 bp, Homo sapien
gctatctgagtaggaggagttgttc

SEQ ID NO: 1492821 - DNA, 25 bp, Homo sapien
ctcctgcccactcgtggcctcggaa

SEQ ID NO: 1492822 - DNA, 25 bp, Homo sapien
gtccccaggagaaggtatggcctgc

SEQ ID NO: 1492823 - DNA, 25 bp, Homo sapien
ccaacttctccgagtagtatgtgga

SEQ ID NO: 1492824 - DNA, 25 bp, Homo sapien
tgtagggctcaaagagggtccccag

SEQ ID NO: 1492825 - DNA, 25 bp, Homo sapien
caccagatactgcagaccttttgga

SEQ ID NO: 1492826 - DNA, 25 bp, Homo sapien
cagatactgcagaccttttggaggc

SEQ ID NO: 1492827 - DNA, 25 bp, Homo sapien
aagagcaccagatactgcagacctt

SEQ ID NO: 1492828 - DNA, 25 bp, Homo sapien
tactgcagaccttttggaggcaaag

SEQ ID NO: 1492829 - DNA, 25 bp, Homo sapien
gttgcctccatcaaactaccctgtg

SEQ ID NO: 1492830 - DNA, 25 bp, Homo sapien
ggctgaactgggaagtctcctcctc

SEQ ID NO: 1492831 - DNA, 25 bp, Homo sapien
gacacactagatcctgagacattgc

SEQ ID NO: 1492832 - DNA, 25 bp, Homo sapien
cttcagaacctagacacactagatc

SEQ ID NO: 1492833 - DNA, 25 bp, Homo sapien
acagaggacacagcctgaagaagtg

SEQ ID NO: 1492834 - DNA, 25 bp, Homo sapien
tgcacagaggacacagcctgaagaa

SEQ ID NO: 1492835 - DNA, 25 bp, Homo sapien
ctgcacagaggacacagcctgaaga

SEQ ID NO: 1492836 - DNA, 25 bp, Homo sapien
gaggacacagcctgaagaagtgtac

SEQ ID NO: 1492837 - DNA, 25 bp, Homo sapien
actcacacatgtaaggggccagccc

SEQ ID NO: 1492838 - DNA, 25 bp, Homo sapien
gggccagccctaagggccgctattc

SEQ ID NO: 1492839 - DNA, 25 bp, Homo sapien
gcaggaccctcggaggccacaagtc

SEQ ID NO: 1492840 - DNA, 25 bp, Homo sapien
ctattcgctgagaccatgaggaggg

SEQ ID NO: 1492841 - DNA, 25 bp, Homo sapien
agaaacctgagggtggaaaagagca

SEQ ID NO: 1492842 - DNA, 25 bp, Homo sapien
ctgagggtggaaaagagcagcagga

SEQ ID NO: 1492843 - DNA, 25 bp, Homo sapien
agggtggaaaagagcagcaggacag

SEQ ID NO: 1492844 - DNA, 25 bp, Homo sapien
tgagaaacctgagggtggaaaagag

SEQ ID NO: 1492845 - DNA, 25 bp, Homo sapien
ggagaggaggctaggggctgctgcc

SEQ ID NO: 1492846 - DNA, 25 bp, Homo sapien
gctgcctgggtaccctcccccaagc

SEQ ID NO: 1492847 - DNA, 25 bp, Homo sapien
gggctgctgcctgggtaccctcccc

SEQ ID NO: 1492848 - DNA, 25 bp, Homo sapien
gagaggaggctaggggctgctgcct

SEQ ID NO: 1492849 - DNA, 25 bp, Homo sapien
agggagaagcccagccgctccttga

SEQ ID NO: 1492850 - DNA, 25 bp, Homo sapien
cgcccaggcggatgcggcacttgct

SEQ ID NO: 1492851 - DNA, 25 bp, Homo sapien
caacaggaacttggcgagctgcgag

SEQ ID NO: 1492852 - DNA, 25 bp, Homo sapien
atgcggcacttgctgcggcgcgcgt

SEQ ID NO: 1492853 - DNA, 25 bp, Homo sapien
gggacgtcttcagcgccctgccgat

SEQ ID NO: 1492854 - DNA, 25 bp, Homo sapien
tggagggtggaagggacgtcttcag

SEQ ID NO: 1492855 - DNA, 25 bp, Homo sapien
gtggaagggacgtcttcagcgccct

SEQ ID NO: 1492856 - DNA, 25 bp, Homo sapien
ggaagggacgtcttcagcgccctgc

SEQ ID NO: 1492857 - DNA, 25 bp, Homo sapien
ggctccacctgccgttagggcctca

SEQ ID NO: 1492858 - DNA, 25 bp, Homo sapien
ctccacctgccgttagggcctcagt

SEQ ID NO: 1492859 - DNA, 25 bp, Homo sapien
gctccacctgccgttagggcctcag

SEQ ID NO: 1492860 - DNA, 25 bp, Homo sapien
ccggctccacctgccgttagggcct

SEQ ID NO: 1492861 - DNA, 25 bp, Homo sapien
tacagggtgttgaagctcagcgcta

SEQ ID NO: 1492862 - DNA, 25 bp, Homo sapien
gacagtgagtggagcggactaatcc

SEQ ID NO: 1492863 - DNA, 25 bp, Homo sapien
tttcatcttgaatagggcagcggcc

SEQ ID NO: 1492864 - DNA, 25 bp, Homo sapien
tcacgggaaatttcaactgggctgg

SEQ ID NO: 1492865 - DNA, 25 bp, Homo sapien
ccgggcctagcgagcaggcccggag

SEQ ID NO: 1492866 - DNA, 25 bp, Homo sapien
ctcccgggcctagcgagcaggcccg

SEQ ID NO: 1492867 - DNA, 25 bp, Homo sapien
cccgggcctagcgagcaggcccgga

SEQ ID NO: 1492868 - DNA, 25 bp, Homo sapien
cgggcctagcgagcaggcccggagc

SEQ ID NO: 1492869 - DNA, 25 bp, Homo sapien
tctcggcgtcggctgctgtagcccg

SEQ ID NO: 1492870 - DNA, 25 bp, Homo sapien
ctcgcgcgcgcagcgtttctctttt

SEQ ID NO: 1492871 - DNA, 25 bp, Homo sapien
taagaagaaacggtgcctctcggcg

SEQ ID NO: 1492872 - DNA, 25 bp, Homo sapien
cgcgcgcagcgtttctcttttaaga

SEQ ID NO: 1492873 - DNA, 25 bp, Homo sapien
tcaagtcgcccgcgcgtgtcgcgga

SEQ ID NO: 1492874 - DNA, 25 bp, Homo sapien
tcgtggttgcccgactcaagtcgcc

SEQ ID NO: 1492875 - DNA, 25 bp, Homo sapien
gggcgagtcggaggccgacgccgtg

SEQ ID NO: 1492876 - DNA, 25 bp, Homo sapien
cggcagttgtggttgggtggcttct

SEQ ID NO: 1492877 - DNA, 25 bp, Homo sapien
tcctgttagctttggctccgggccg

SEQ ID NO: 1492878 - DNA, 25 bp, Homo sapien
aagagactcgccgtggtaaattcag

SEQ ID NO: 1492879 - DNA, 25 bp, Homo sapien
cagcggagcgacatgttgctcctgg

SEQ ID NO: 1492880 - DNA, 25 bp, Homo sapien
agagatgcggttgcccttgctcctg

SEQ ID NO: 1492881 - DNA, 25 bp, Homo sapien
tttttgagttgtgccctagctctct

SEQ ID NO: 1492882 - DNA, 25 bp, Homo sapien
ttttgagttgtgccctagctctctc

SEQ ID NO: 1492883 - DNA, 25 bp, Homo sapien
ctatttttgagttgtgccctagctc

SEQ ID NO: 1492884 - DNA, 25 bp, Homo sapien
tatttttgagttgtgccctagctct

SEQ ID NO: 1492885 - DNA, 25 bp, Homo sapien
ccaggaagaaggttacaactagact

SEQ ID NO: 1492886 - DNA, 25 bp, Homo sapien
tttgctgcccggttttccctgtctg

SEQ ID NO: 1492887 - DNA, 25 bp, Homo sapien
ttttccctgtctgccgcagcaaggg

SEQ ID NO: 1492888 - DNA, 25 bp, Homo sapien
tagactactcatctttgctgcccgg

SEQ ID NO: 1492889 - DNA, 25 bp, Homo sapien
tccatgagaagacctgattgaccct

SEQ ID NO: 1492890 - DNA, 25 bp, Homo sapien
ggatgtatccattccatgtgagcag

SEQ ID NO: 1492891 - DNA, 25 bp, Homo sapien
cataaaccaggtgtttggcaagaca

SEQ ID NO: 1492892 - DNA, 25 bp, Homo sapien
gacattaaacgagaccaggacccat

SEQ ID NO: 1492893 - DNA, 25 bp, Homo sapien
tgtttttaagacaggccatactgaa

SEQ ID NO: 1492894 - DNA, 25 bp, Homo sapien
tgaggagttctacaatctttgctgt

SEQ ID NO: 1492895 - DNA, 25 bp, Homo sapien
tctacatctggtaatgctcttggca

SEQ ID NO: 1492896 - DNA, 25 bp, Homo sapien
catgtaacctgctgtggtgtagaca

SEQ ID NO: 1492897 - DNA, 25 bp, Homo sapien
gacccattaatcatgggcgcttggg

SEQ ID NO: 1492898 - DNA, 25 bp, Homo sapien
taggctgtgatactgctatggctgt

SEQ ID NO: 1492899 - DNA, 25 bp, Homo sapien
caagcaagcttcaagaaaccagcaa

SEQ ID NO: 1492900 - DNA, 25 bp, Homo sapien
taaggtgttatttagtcaatgcgac

SEQ ID NO: 1492901 - DNA, 25 bp, Homo sapien
gagaattctctctggatcataaagg

SEQ ID NO: 1492902 - DNA, 25 bp, Homo sapien
tcaaatgtgctaggcttgcttcgcc

SEQ ID NO: 1492903 - DNA, 25 bp, Homo sapien
tgtctccagccattctcaaatgtgc

SEQ ID NO: 1492904 - DNA, 25 bp, Homo sapien
caagtatccaaattgcagtgagaat

SEQ ID NO: 1492905 - DNA, 25 bp, Homo sapien
tctcaacggcggcatccgaggagtt

SEQ ID NO: 1492906 - DNA, 25 bp, Homo sapien
taaggccgattattgggcacaccct

SEQ ID NO: 1492907 - DNA, 25 bp, Homo sapien
caggaacaatgggattccgagggcc

SEQ ID NO: 1492908 - DNA, 25 bp, Homo sapien
cctcgcaggcgttttcgggatccct

SEQ ID NO: 1492909 - DNA, 25 bp, Homo sapien
tgtcctctttgtggacaggctatgc

SEQ ID NO: 1492910 - DNA, 25 bp, Homo sapien
gcatgtcctctttgtggacaggcta

SEQ ID NO: 1492911 - DNA, 25 bp, Homo sapien
ctctttgtggacaggctatgctaat

SEQ ID NO: 1492912 - DNA, 25 bp, Homo sapien
tcctctttgtggacaggctatgcta

SEQ ID NO: 1492913 - DNA, 25 bp, Homo sapien
tcactctggagcagctaaaacgcgg

SEQ ID NO: 1492914 - DNA, 25 bp, Homo sapien
ctccaatgctgtgggcatagagcca

SEQ ID NO: 1492915 - DNA, 25 bp, Homo sapien
gaggctgaccagtcgtcactctgga

SEQ ID NO: 1492916 - DNA, 25 bp, Homo sapien
cactggtgaagctgtatcaggagaa

SEQ ID NO: 1492917 - DNA, 25 bp, Homo sapien
cacaacatctcaagggaggcgaagc

SEQ ID NO: 1492918 - DNA, 25 bp, Homo sapien
tgagagccgcttcgatatgattggg

SEQ ID NO: 1492919 - DNA, 25 bp, Homo sapien
gaagtgccagaagggtgtccatgcc

SEQ ID NO: 1492920 - DNA, 25 bp, Homo sapien
tgccaaatgcttcagggagtaccac

SEQ ID NO: 1492921 - DNA, 25 bp, Homo sapien
catagatccgttctttgctgagctt

SEQ ID NO: 1492922 - DNA, 25 bp, Homo sapien
ctatagatctcagtgagttcaaagc

SEQ ID NO: 1492923 - DNA, 25 bp, Homo sapien
aaattcttctatagatctcagtgag

SEQ ID NO: 1492924 - DNA, 25 bp, Homo sapien
cctgtgtgcaggcatagatccgttc

SEQ ID NO: 1492925 - DNA, 25 bp, Homo sapien
tcccgataggaggagcggcagtctg

SEQ ID NO: 1492926 - DNA, 25 bp, Homo sapien
ccggcctgaatgatggtggtgagcg

SEQ ID NO: 1492927 - DNA, 25 bp, Homo sapien
agatggccccgaggaggtcccgata

SEQ ID NO: 1492928 - DNA, 25 bp, Homo sapien
tgagcgggaggtctcgaggtgatcc

SEQ ID NO: 1492929 - DNA, 25 bp, Homo sapien
cgggaacgcggtctgcggtccaggg

SEQ ID NO: 1492930 - DNA, 25 bp, Homo sapien
cagcatgcgcgatgcgggctgggca

SEQ ID NO: 1492931 - DNA, 25 bp, Homo sapien
tcagcaaaatgggaacgtgtcagaa

SEQ ID NO: 1492932 - DNA, 25 bp, Homo sapien
agggttggcccaaggcagccgccgg

SEQ ID NO: 1492933 - DNA, 25 bp, Homo sapien
ctcgggagtctcgcagggaccccat

SEQ ID NO: 1492934 - DNA, 25 bp, Homo sapien
cttcgcggtgccgcacggatcttcc

SEQ ID NO: 1492935 - DNA, 25 bp, Homo sapien
tccctcgggagtctcgcagggaccc

SEQ ID NO: 1492936 - DNA, 25 bp, Homo sapien
tcgcggtgccgcacggatcttcctg

SEQ ID NO: 1492937 - DNA, 25 bp, Homo sapien
tctcgccaacgtccggggataatct

SEQ ID NO: 1492938 - DNA, 25 bp, Homo sapien
gagatccccttgctctcgccaacgt

SEQ ID NO: 1492939 - DNA, 25 bp, Homo sapien
tgcagagatgacctcgtccccatca

SEQ ID NO: 1492940 - DNA, 25 bp, Homo sapien
ttcaccaaacatgcagagatcccct

SEQ ID NO: 1492941 - DNA, 25 bp, Homo sapien
tggtccccaccaacatccagggata

SEQ ID NO: 1492942 - DNA, 25 bp, Homo sapien
cacccacaggatgacctggtcccca

SEQ ID NO: 1492943 - DNA, 25 bp, Homo sapien
aggatgacctggtccccaccaacat

SEQ ID NO: 1492944 - DNA, 25 bp, Homo sapien
catccagggataaccttgaacccat

SEQ ID NO: 1492945 - DNA, 25 bp, Homo sapien
ttgcctctatcgacgcagaggccac

SEQ ID NO: 1492946 - DNA, 25 bp, Homo sapien
agccggtacaggagcctccggttca

SEQ ID NO: 1492947 - DNA, 25 bp, Homo sapien
tgctccggatgcagccggtacagga

SEQ ID NO: 1492948 - DNA, 25 bp, Homo sapien
ggccggcatgccctgctccggatgc

SEQ ID NO: 1492949 - DNA, 25 bp, Homo sapien
gggctcccgtaacaagtgctccgga

SEQ ID NO: 1492950 - DNA, 25 bp, Homo sapien
tgtcgtagccgggtccccgaagcag

SEQ ID NO: 1492951 - DNA, 25 bp, Homo sapien
ggtgaccctgtacacaggcagctcc

SEQ ID NO: 1492952 - DNA, 25 bp, Homo sapien
ttgaagatgtgtccagcccggggct

SEQ ID NO: 1492953 - DNA, 25 bp, Homo sapien
agaggggcacaggcgcaagggggcc

SEQ ID NO: 1492954 - DNA, 25 bp, Homo sapien
gaggtggtgggaagagcgcacacag

SEQ ID NO: 1492955 - DNA, 25 bp, Homo sapien
ggtggtgggaagagcgcacacagct

SEQ ID NO: 1492956 - DNA, 25 bp, Homo sapien
aggtggtgggaagagcgcacacagc

SEQ ID NO: 1492957 - DNA, 25 bp, Homo sapien
acacagcttgcaaaggccggggtac

SEQ ID NO: 1492958 - DNA, 25 bp, Homo sapien
gtcctcgtcccaggcagacgccgtg

SEQ ID NO: 1492959 - DNA, 25 bp, Homo sapien
gagtcctcgtcccaggcagacgccg

SEQ ID NO: 1492960 - DNA, 25 bp, Homo sapien
cctcgtcccaggcagacgccgtgca

SEQ ID NO: 1492961 - DNA, 25 bp, Homo sapien
ggtgccggccttggaaggcagcggc

SEQ ID NO: 1492962 - DNA, 25 bp, Homo sapien
tcacagccgtggctcggacgggaac

SEQ ID NO: 1492963 - DNA, 25 bp, Homo sapien
cacagccgtggctcggacgggaacc

SEQ ID NO: 1492964 - DNA, 25 bp, Homo sapien
ctggccgcggctgcggtgggtctcc

SEQ ID NO: 1492965 - DNA, 25 bp, Homo sapien
gccactggccgcggctgcggtgggt

SEQ ID NO: 1492966 - DNA, 25 bp, Homo sapien
actcgggccactggccgcggctgcg

SEQ ID NO: 1492967 - DNA, 25 bp, Homo sapien
tgcggtgggtctcccggagccccca

SEQ ID NO: 1492968 - DNA, 25 bp, Homo sapien
ttccagccgctggaatcccagagct

SEQ ID NO: 1492969 - DNA, 25 bp, Homo sapien
ctcctggcagctcccgccgggtctc

SEQ ID NO: 1492970 - DNA, 25 bp, Homo sapien
cgccgggtctctgcgggacactctt

SEQ ID NO: 1492971 - DNA, 25 bp, Homo sapien
cttccagccgctggaatcccagagc

SEQ ID NO: 1492972 - DNA, 25 bp, Homo sapien
cctctgtgtcatgacggattccatc

SEQ ID NO: 1492973 - DNA, 25 bp, Homo sapien
atcctctgtgtcatgacggattcca

SEQ ID NO: 1492974 - DNA, 25 bp, Homo sapien
tctgtgtcatgacggattccatcca

SEQ ID NO: 1492975 - DNA, 25 bp, Homo sapien
tcctctgtgtcatgacggattccat

SEQ ID NO: 1492976 - DNA, 25 bp, Homo sapien
tgttcttatttacatcttcccaaaa

SEQ ID NO: 1492977 - DNA, 25 bp, Homo sapien
agaagcaaccacacctgtaccgcgg

SEQ ID NO: 1492978 - DNA, 25 bp, Homo sapien
ggagcccattctttatcagcccggg

SEQ ID NO: 1492979 - DNA, 25 bp, Homo sapien
agaccctaagccaacaccagctaca

SEQ ID NO: 1492980 - DNA, 25 bp, Homo sapien
aagaaaggacgagatcctctcggtc

SEQ ID NO: 1492981 - DNA, 25 bp, Homo sapien
cgaattgttggtctcgagcccagaa

SEQ ID NO: 1492982 - DNA, 25 bp, Homo sapien
cccgcgttggcttcacaaggttctg

SEQ ID NO: 1492983 - DNA, 25 bp, Homo sapien
agaatgaaaggcctggtctccctgg

SEQ ID NO: 1492984 - DNA, 25 bp, Homo sapien
ttcgagaccagcctggccaacttga

SEQ ID NO: 1492985 - DNA, 25 bp, Homo sapien
tttttacggtgacttcaggtcagga

SEQ ID NO: 1492986 - DNA, 25 bp, Homo sapien
ttttacggtgacttcaggtcaggag

SEQ ID NO: 1492987 - DNA, 25 bp, Homo sapien
gtgcagcctcgagaagctgttggaa

SEQ ID NO: 1492988 - DNA, 25 bp, Homo sapien
tgcagcctcgagaagctgttggaag

SEQ ID NO: 1492989 - DNA, 25 bp, Homo sapien
gcagtgcagcctcgagaagctgttg

SEQ ID NO: 1492990 - DNA, 25 bp, Homo sapien
agtgcagcctcgagaagctgttgga

SEQ ID NO: 1492991 - DNA, 25 bp, Homo sapien
agagccggggacacagtgccgacat

SEQ ID NO: 1492992 - DNA, 25 bp, Homo sapien
gggcacatcccagagccggggacac

SEQ ID NO: 1492993 - DNA, 25 bp, Homo sapien
ctgggtgacggaccatttcagcacg

SEQ ID NO: 1492994 - DNA, 25 bp, Homo sapien
catttcagcacgacagggcgcgtga

SEQ ID NO: 1492995 - DNA, 25 bp, Homo sapien
agccgggactcctcgtgcgaaatgg

SEQ ID NO: 1492996 - DNA, 25 bp, Homo sapien
ttcttgttcaggcagtacgtcatcg

SEQ ID NO: 1492997 - DNA, 25 bp, Homo sapien
acatagctgacaggccaggtcagca

SEQ ID NO: 1492998 - DNA, 25 bp, Homo sapien
tcagcagcacggggcacagaccgta

SEQ ID NO: 1492999 - DNA, 25 bp, Homo sapien
catttcagcaccacggggccgtggg

SEQ ID NO: 1493000 - DNA, 25 bp, Homo sapien
gccccacatagctgacaggccaggt

SEQ ID NO: 1493001 - DNA, 25 bp, Homo sapien
ttgtgtacaccatatggacaaagtg

SEQ ID NO: 1493002 - DNA, 25 bp, Homo sapien
aaagtgcaggttcttctccgagccc

SEQ ID NO: 1493003 - DNA, 25 bp, Homo sapien
caccagcgccgttgtgtacaccata

SEQ ID NO: 1493004 - DNA, 25 bp, Homo sapien
ccagcatgtgggctatccgcaggtc

SEQ ID NO: 1493005 - DNA, 25 bp, Homo sapien
gctcagcccctcgaagtttctgcag

SEQ ID NO: 1493006 - DNA, 25 bp, Homo sapien
tgatacaggcgaccaggtactcgtg

SEQ ID NO: 1493007 - DNA, 25 bp, Homo sapien
gacacagcatgtccccgaagatgtt

SEQ ID NO: 1493008 - DNA, 25 bp, Homo sapien
caggatgaccacctcgcgtggatgc

SEQ ID NO: 1493009 - DNA, 25 bp, Homo sapien
caaggagctctcgtcttcataggag

SEQ ID NO: 1493010 - DNA, 25 bp, Homo sapien
taggagacgatgacctgttggcccc

SEQ ID NO: 1493011 - DNA, 25 bp, Homo sapien
catggtctccaggtatcggatgagg

SEQ ID NO: 1493012 - DNA, 25 bp, Homo sapien
ggatgagggcctcggtcttcaccct

SEQ ID NO: 1493013 - DNA, 25 bp, Homo sapien
tgatgttggtgcaccgtgaacccgg

SEQ ID NO: 1493014 - DNA, 25 bp, Homo sapien
tcttctccagggactcggacgggtg

SEQ ID NO: 1493015 - DNA, 25 bp, Homo sapien
acgaagccgtctgcgccgatgaagt

SEQ ID NO: 1493016 - DNA, 25 bp, Homo sapien
ttctccgtgaggttgatgccggcca

SEQ ID NO: 1493017 - DNA, 25 bp, Homo sapien
cacagcagcttctgattgagcgcga

SEQ ID NO: 1493018 - DNA, 25 bp, Homo sapien
cagcagcttctgattgagcgcgatg

SEQ ID NO: 1493019 - DNA, 25 bp, Homo sapien
tcagcaccacagcagcttctgattg

SEQ ID NO: 1493020 - DNA, 25 bp, Homo sapien
gcagcttctgattgagcgcgatgac

SEQ ID NO: 1493021 - DNA, 25 bp, Homo sapien
cgccgcgtcccgaacttcagaaggg

SEQ ID NO: 1493022 - DNA, 25 bp, Homo sapien
ccgccgcgtcccgaacttcagaagg

SEQ ID NO: 1493023 - DNA, 25 bp, Homo sapien
agccgccgcgtcccgaacttcagaa

SEQ ID NO: 1493024 - DNA, 25 bp, Homo sapien
gccgccgcgtcccgaacttcagaag

SEQ ID NO: 1493025 - DNA, 25 bp, Homo sapien
tattatcatcggtcctatgatcacc

SEQ ID NO: 1493026 - DNA, 25 bp, Homo sapien
cggtcctatgatcaccaacatttgg

SEQ ID NO: 1493027 - DNA, 25 bp, Homo sapien
ctatgatcaccaacatttggcccaa

SEQ ID NO: 1493028 - DNA, 25 bp, Homo sapien
aatgaaaacgtattatcatcggtcc

SEQ ID NO: 1493029 - DNA, 25 bp, Homo sapien
gggaagacaggcgaagtcaccacgc

SEQ ID NO: 1493030 - DNA, 25 bp, Homo sapien
gaagacaggcgaagtcaccacgccc

SEQ ID NO: 1493031 - DNA, 25 bp, Homo sapien
ggaagacaggcgaagtcaccacgcc

SEQ ID NO: 1493032 - DNA, 25 bp, Homo sapien
ctgggaagacaggcgaagtcaccac

SEQ ID NO: 1493033 - DNA, 25 bp, Homo sapien
ggtctgtaagggctccagacgccac

SEQ ID NO: 1493034 - DNA, 25 bp, Homo sapien
aggccggctcctaagtgggctgtca

SEQ ID NO: 1493035 - DNA, 25 bp, Homo sapien
tataggcttggtgtgagaactagct

SEQ ID NO: 1493036 - DNA, 25 bp, Homo sapien
cagacgccacagcaaggagaataca

SEQ ID NO: 1493037 - DNA, 25 bp, Homo sapien
ggaccgttcacgcttcagaggcaga

SEQ ID NO: 1493038 - DNA, 25 bp, Homo sapien
acctgtgcagaaaaccggtgtgcga

SEQ ID NO: 1493039 - DNA, 25 bp, Homo sapien
ttgaacacttcagtagcactccggg

SEQ ID NO: 1493040 - DNA, 25 bp, Homo sapien
tttaaagaaatatcggcggctgggc

SEQ ID NO: 1493041 - DNA, 25 bp, Homo sapien
tgctaaacacacaaaaattatccgg

SEQ ID NO: 1493042 - DNA, 25 bp, Homo sapien
ctctgctaaacacacaaaaattatc

SEQ ID NO: 1493043 - DNA, 25 bp, Homo sapien
tgagccaggatcacactactacact

SEQ ID NO: 1493044 - DNA, 25 bp, Homo sapien
gagccaggatcacactactacactc

SEQ ID NO: 1493045 - DNA, 25 bp, Homo sapien
gcagctccaacaagcgacatgtaga

SEQ ID NO: 1493046 - DNA, 25 bp, Homo sapien
ttcggtgattttgtggatacgcccc

SEQ ID NO: 1493047 - DNA, 25 bp, Homo sapien
gatacgcccctgacagacaaggatt

SEQ ID NO: 1493048 - DNA, 25 bp, Homo sapien
tcatttcaccgtagcaaccgggtac

SEQ ID NO: 1493049 - DNA, 25 bp, Homo sapien
tttctaaagatgcttctggcgtgct

SEQ ID NO: 1493050 - DNA, 25 bp, Homo sapien
gcacccggcctcctgaattaacatt

SEQ ID NO: 1493051 - DNA, 25 bp, Homo sapien
ctatcctgaaagctgccagaggtgt

SEQ ID NO: 1493052 - DNA, 25 bp, Homo sapien
gctgccagaggtgtcttggctgcat

SEQ ID NO: 1493053 - DNA, 25 bp, Homo sapien
cactgtgcccggcctgaattaactt

SEQ ID NO: 1493054 - DNA, 25 bp, Homo sapien
ctgtgcccggcctgaattaactttt

SEQ ID NO: 1493055 - DNA, 25 bp, Homo sapien
gggttttcagcatgtcggtcaggct

SEQ ID NO: 1493056 - DNA, 25 bp, Homo sapien
gccactgtgcccggcctgaattaac

SEQ ID NO: 1493057 - DNA, 25 bp, Homo sapien
cctacggcaaattccggaagctctt

SEQ ID NO: 1493058 - DNA, 25 bp, Homo sapien
gctggctgtataaggaggccacagt

SEQ ID NO: 1493059 - DNA, 25 bp, Homo sapien
tctttccaggatgaacggacgccca

SEQ ID NO: 1493060 - DNA, 25 bp, Homo sapien
gggtcatcatcagcaactcagccta

SEQ ID NO: 1493061 - DNA, 25 bp, Homo sapien
tcaaattttgtgtaaggagcctgcc

SEQ ID NO: 1493062 - DNA, 25 bp, Homo sapien
gatgaagccgccctaaagctttgaa

SEQ ID NO: 1493063 - DNA, 25 bp, Homo sapien
cgtccactgttggtctaggagcccc

SEQ ID NO: 1493064 - DNA, 25 bp, Homo sapien
tcatcttgcacgtgagggacgtcag

SEQ ID NO: 1493065 - DNA, 25 bp, Homo sapien
atctgtctacaccatcgcctctcct

SEQ ID NO: 1493066 - DNA, 25 bp, Homo sapien
tacaccatccttctgtcaacaccgg

SEQ ID NO: 1493067 - DNA, 25 bp, Homo sapien
cacccgtctatacaatccacccatc

SEQ ID NO: 1493068 - DNA, 25 bp, Homo sapien
tgtctacactggcaccactgcccca

SEQ ID NO: 1493069 - DNA, 25 bp, Homo sapien
tgccctatctataccaccaccctgt

SEQ ID NO: 1493070 - DNA, 25 bp, Homo sapien
caccagcaccactaccccatctata

SEQ ID NO: 1493071 - DNA, 25 bp, Homo sapien
cgtctacataatccacccgtgtaca

SEQ ID NO: 1493072 - DNA, 25 bp, Homo sapien
aatccacccatctacaccatcacct

SEQ ID NO: 1493073 - DNA, 25 bp, Homo sapien
ggtggctacatttccgcacaatccc

SEQ ID NO: 1493074 - DNA, 25 bp, Homo sapien
tcagcctcccgacatgtaaacggtg

SEQ ID NO: 1493075 - DNA, 25 bp, Homo sapien
tactcccacataaagtaacgtagaa

SEQ ID NO: 1493076 - DNA, 25 bp, Homo sapien
cataaagtaacgtagaaagacgagc

SEQ ID NO: 1493077 - DNA, 25 bp, Homo sapien
ttttgtagataatggggtcttacca

SEQ ID NO: 1493078 - DNA, 25 bp, Homo sapien
ttgtagataatggggtcttaccata

SEQ ID NO: 1493079 - DNA, 25 bp, Homo sapien
agataatggggtcttaccatattgc

SEQ ID NO: 1493080 - DNA, 25 bp, Homo sapien
gtagataatggggtcttaccatatt

SEQ ID NO: 1493081 - DNA, 25 bp, Homo sapien
ttttgtagataatggggtcttacca

SEQ ID NO: 1493082 - DNA, 25 bp, Homo sapien
ttgtagataatggggtcttaccata

SEQ ID NO: 1493083 - DNA, 25 bp, Homo sapien
agataatggggtcttaccatattgc

SEQ ID NO: 1493084 - DNA, 25 bp, Homo sapien
gtagataatggggtcttaccatatt

SEQ ID NO: 1493085 - DNA, 25 bp, Homo sapien
ttgtagataatagggtcttaccata

SEQ ID NO: 1493086 - DNA, 25 bp, Homo sapien
tgtagataatagggtcttaccatat

SEQ ID NO: 1493087 - DNA, 25 bp, Homo sapien
gtagataatagggtcttaccatatt

SEQ ID NO: 1493088 - DNA, 25 bp, Homo sapien
tgtagataatagggtcttaccatat

SEQ ID NO: 1493089 - DNA, 25 bp, Homo sapien
ttgtagataatagggtcttaccata

SEQ ID NO: 1493090 - DNA, 25 bp, Homo sapien
gtagataatagggtcttaccatatt

SEQ ID NO: 1493091 - DNA, 25 bp, Homo sapien
ttgtagataatagggtcttaccata

SEQ ID NO: 1493092 - DNA, 25 bp, Homo sapien
tgtagataatagggtcttaccatat

SEQ ID NO: 1493093 - DNA, 25 bp, Homo sapien
gtagataatagggtcttaccatatt

SEQ ID NO: 1493094 - DNA, 25 bp, Homo sapien
ccaaaacagacgacggcttcaccat

SEQ ID NO: 1493095 - DNA, 25 bp, Homo sapien
cgtcttccaaaacagacgacggctt

SEQ ID NO: 1493096 - DNA, 25 bp, Homo sapien
tcttccaaaacagacgacggcttca

SEQ ID NO: 1493097 - DNA, 25 bp, Homo sapien
caccgtcttccaaaacagacgacgg

SEQ ID NO: 1493098 - DNA, 25 bp, Homo sapien
cagtgacggatgtagacaaagagcc

SEQ ID NO: 1493099 - DNA, 25 bp, Homo sapien
ctagagccgtcatcatccctgggct

SEQ ID NO: 1493100 - DNA, 25 bp, Homo sapien
tccccgtgggtagaaaatccagtga

SEQ ID NO: 1493101 - DNA, 25 bp, Homo sapien
cccgtgcaggagaaacgcaggtgca

SEQ ID NO: 1493102 - DNA, 25 bp, Homo sapien
gtagctgtctccaccccggtatcag

SEQ ID NO: 1493103 - DNA, 25 bp, Homo sapien
atggcgtagctgtctccaccccggt

SEQ ID NO: 1493104 - DNA, 25 bp, Homo sapien
tgtcctcaccatggcgtagctgtct

SEQ ID NO: 1493105 - DNA, 25 bp, Homo sapien
ggcctggccgtcggctgcagcctcc

SEQ ID NO: 1493106 - DNA, 25 bp, Homo sapien
gtgatggcaagacgggctacccaga

SEQ ID NO: 1493107 - DNA, 25 bp, Homo sapien
caagacgggctacccagaataaggg

SEQ ID NO: 1493108 - DNA, 25 bp, Homo sapien
acggggcccggagagccatgagacg

SEQ ID NO: 1493109 - DNA, 25 bp, Homo sapien
gacagtgatggcaagacgggctacc

SEQ ID NO: 1493110 - DNA, 25 bp, Homo sapien
ggtgaccgccggcaccagaccggca

SEQ ID NO: 1493111 - DNA, 25 bp, Homo sapien
acctcctcacgggacaagacacagc

SEQ ID NO: 1493112 - DNA, 25 bp, Homo sapien
catgagctctgttccgggaggacca

SEQ ID NO: 1493113 - DNA, 25 bp, Homo sapien
gccttcgtgtcagaaccaagagtgt

SEQ ID NO: 1493114 - DNA, 25 bp, Homo sapien
ctctgaatgacaatcgtgggtcccc

SEQ ID NO: 1493115 - DNA, 25 bp, Homo sapien
agggaccccacaaaacaagcactcg

SEQ ID NO: 1493116 - DNA, 25 bp, Homo sapien
agaagccaggatgttccagggctca

SEQ ID NO: 1493117 - DNA, 25 bp, Homo sapien
accccttggagatccccgagcaggg

SEQ ID NO: 1493118 - DNA, 25 bp, Homo sapien
cgacacctttgccggagaagtgggg

SEQ ID NO: 1493119 - DNA, 25 bp, Homo sapien
ggctgagacatgagaggcctccctg

SEQ ID NO: 1493120 - DNA, 25 bp, Homo sapien
ccaattagggttcaaggctgagaca

SEQ ID NO: 1493121 - DNA, 25 bp, Homo sapien
cccatggtcatgggagggctctgac

SEQ ID NO: 1493122 - DNA, 25 bp, Homo sapien
acacacctatgagccggagcccatg

SEQ ID NO: 1493123 - DNA, 25 bp, Homo sapien
tcccgggggaatgctgctgtcccca

SEQ ID NO: 1493124 - DNA, 25 bp, Homo sapien
ctcccgggggaatgctgctgtcccc

SEQ ID NO: 1493125 - DNA, 25 bp, Homo sapien
gggcaggaggttctgccgcagggaa

SEQ ID NO: 1493126 - DNA, 25 bp, Homo sapien
aggcggacgcacagggtggtcccgt

SEQ ID NO: 1493127 - DNA, 25 bp, Homo sapien
gtgaaggaggcggacgcacagggtg

SEQ ID NO: 1493128 - DNA, 25 bp, Homo sapien
gcacagggtggtcccgtgacccctg

SEQ ID NO: 1493129 - DNA, 25 bp, Homo sapien
gacgcacagggtggtcccgtgaccc

SEQ ID NO: 1493130 - DNA, 25 bp, Homo sapien
ggcacccgacgtggatgagcccagg

SEQ ID NO: 1493131 - DNA, 25 bp, Homo sapien
caggaaacggaggtggcagcgtcca

SEQ ID NO: 1493132 - DNA, 25 bp, Homo sapien
agagcagcatacgcaccccgttcat

SEQ ID NO: 1493133 - DNA, 25 bp, Homo sapien
caggtggtgaccatgggaacaaccc

SEQ ID NO: 1493134 - DNA, 25 bp, Homo sapien
gcgtggctccgtccaggatttacaa

SEQ ID NO: 1493135 - DNA, 25 bp, Homo sapien
tcacgcttgtacgtttggaggattt

SEQ ID NO: 1493136 - DNA, 25 bp, Homo sapien
gccacagcgtggctccgtccaggat

SEQ ID NO: 1493137 - DNA, 25 bp, Homo sapien
ggattttcagtcacgggctcggctc

SEQ ID NO: 1493138 - DNA, 25 bp, Homo sapien
tgaatgggacgggttcccacacgga

SEQ ID NO: 1493139 - DNA, 25 bp, Homo sapien
gtgaatgttttgtgtaaacgtacaa

SEQ ID NO: 1493140 - DNA, 25 bp, Homo sapien
tgcgcacaacggtgaccggcggctc

SEQ ID NO: 1493141 - DNA, 25 bp, Homo sapien
tggaaagggtccgtgtgcgcacaac

SEQ ID NO: 1493142 - DNA, 25 bp, Homo sapien
cagggctgagctccgtcaggatcct

SEQ ID NO: 1493143 - DNA, 25 bp, Homo sapien
ggctgagctccgtcaggatcctcat

SEQ ID NO: 1493144 - DNA, 25 bp, Homo sapien
ggccagggctgagctccgtcaggat

SEQ ID NO: 1493145 - DNA, 25 bp, Homo sapien
cgggacgcccttccaggtggccagg

SEQ ID NO: 1493146 - DNA, 25 bp, Homo sapien
tggcggcctcgttccctgtcctggc

SEQ ID NO: 1493147 - DNA, 25 bp, Homo sapien
cgcgttgccgggccccacaaggagt

SEQ ID NO: 1493148 - DNA, 25 bp, Homo sapien
cgttccctgtcctggccgtgcgggt

SEQ ID NO: 1493149 - DNA, 25 bp, Homo sapien
gtgcgggtgggcgtgccgccgcgtt

SEQ ID NO: 1493150 - DNA, 25 bp, Homo sapien
tctaaaagtccgcagatggccgggt

SEQ ID NO: 1493151 - DNA, 25 bp, Homo sapien
gaagccaggtctaaaagtccgcaga

SEQ ID NO: 1493152 - DNA, 25 bp, Homo sapien
agatggccgggtcccgttgccgtgt

SEQ ID NO: 1493153 - DNA, 25 bp, Homo sapien
gcgagggaagccaggtctaaaagtc

SEQ ID NO: 1493154 - DNA, 25 bp, Homo sapien
ctgtcggttggtgtcggcgtgccct

SEQ ID NO: 1493155 - DNA, 25 bp, Homo sapien
tcgggactttgtctgcctcgcgagt

SEQ ID NO: 1493156 - DNA, 25 bp, Homo sapien
tgtcggcgtgccctgtgcgactgta

SEQ ID NO: 1493157 - DNA, 25 bp, Homo sapien
tgtgcgactgtagacgctcgggact

SEQ ID NO: 1493158 - DNA, 25 bp, Homo sapien
cccttgtgacctgcggtgaggatac

SEQ ID NO: 1493159 - DNA, 25 bp, Homo sapien
ttgaggcgctgtcagtgggaccctt

SEQ ID NO: 1493160 - DNA, 25 bp, Homo sapien
tcaggattgtgggtgcaaaggccct

SEQ ID NO: 1493161 - DNA, 25 bp, Homo sapien
actggtatgcggacttcctccctgg

SEQ ID NO: 1493162 - DNA, 25 bp, Homo sapien
agagctcactgcagaatattcgcgg

SEQ ID NO: 1493163 - DNA, 25 bp, Homo sapien
tcaggaaggttggtttgtgtaccca

SEQ ID NO: 1493164 - DNA, 25 bp, Homo sapien
gatgcattgtgggatcgtggactca

SEQ ID NO: 1493165 - DNA, 25 bp, Homo sapien
tccgtaccccaaatagcagagctgt

SEQ ID NO: 1493166 - DNA, 25 bp, Homo sapien
ctctgtggctttgatcgtggtgtcc

SEQ ID NO: 1493167 - DNA, 25 bp, Homo sapien
gctgtgcgttgcagcccgtactgag

SEQ ID NO: 1493168 - DNA, 25 bp, Homo sapien
ttccgcctcccgctgcagagtgggg

SEQ ID NO: 1493169 - DNA, 25 bp, Homo sapien
ctttgatcgtggtgtccggtcctgc

SEQ ID NO: 1493170 - DNA, 25 bp, Homo sapien
atccatgagtgtgcgtcccggccaa

SEQ ID NO: 1493171 - DNA, 25 bp, Homo sapien
atgagtgtgcgtcccggccaaaccc

SEQ ID NO: 1493172 - DNA, 25 bp, Homo sapien
gggctcagctggaatccatgagtgt

SEQ ID NO: 1493173 - DNA, 25 bp, Homo sapien
gaatccatgagtgtgcgtcccggcc

SEQ ID NO: 1493174 - DNA, 25 bp, Homo sapien
gggaacgtccacacagaagaccaag

SEQ ID NO: 1493175 - DNA, 25 bp, Homo sapien
gagggtgccggatcctcccctcgct

SEQ ID NO: 1493176 - DNA, 25 bp, Homo sapien
tgtgttgcgcggcatccaccgtcac

SEQ ID NO: 1493177 - DNA, 25 bp, Homo sapien
gcttgtggacgcagggagggtgccg

SEQ ID NO: 1493178 - DNA, 25 bp, Homo sapien
ggggtccttcgggtggacgcacaga

SEQ ID NO: 1493179 - DNA, 25 bp, Homo sapien
ggtccttcgggtggacgcacagacc

SEQ ID NO: 1493180 - DNA, 25 bp, Homo sapien
gggtccttcgggtggacgcacagac

SEQ ID NO: 1493181 - DNA, 25 bp, Homo sapien
cggggtccttcgggtggacgcacag

SEQ ID NO: 1493182 - DNA, 25 bp, Homo sapien
ctgactgtgcgacgtcccacctggg

SEQ ID NO: 1493183 - DNA, 25 bp, Homo sapien
ccctggcgggtgctcctgagcttga

SEQ ID NO: 1493184 - DNA, 25 bp, Homo sapien
gagcttgatcttctgactgtgcgac

SEQ ID NO: 1493185 - DNA, 25 bp, Homo sapien
tcaggggtcctctgacgggcacagc

SEQ ID NO: 1493186 - DNA, 25 bp, Homo sapien
tcgtgctgccctctcggttcaagaa

SEQ ID NO: 1493187 - DNA, 25 bp, Homo sapien
actggcccgcggctgcgacttcgtg

SEQ ID NO: 1493188 - DNA, 25 bp, Homo sapien
tcggttcaagaagcggctgaaggcc

SEQ ID NO: 1493189 - DNA, 25 bp, Homo sapien
gctggccgtgcacccgttgttgcgt

SEQ ID NO: 1493190 - DNA, 25 bp, Homo sapien
gcagcttggagaccgtctggctcag

SEQ ID NO: 1493191 - DNA, 25 bp, Homo sapien
gaaaatgtgaactagagctagaggc

SEQ ID NO: 1493192 - DNA, 25 bp, Homo sapien
cattttccaaaagtacgtgtcgatg

SEQ ID NO: 1493193 - DNA, 25 bp, Homo sapien
tccagatcccgatccaggaggggac

SEQ ID NO: 1493194 - DNA, 25 bp, Homo sapien
cggcggcgtcgcctcgtgatgacat

SEQ ID NO: 1493195 - DNA, 25 bp, Homo sapien
aagcctcctgcaaaagctccgaggg

SEQ ID NO: 1493196 - DNA, 25 bp, Homo sapien
caaagcctcctgcaaaagctccgag

SEQ ID NO: 1493197 - DNA, 25 bp, Homo sapien
gcgcgcgtggctagcggcggcgtcg

SEQ ID NO: 1493198 - DNA, 25 bp, Homo sapien
ctctggcaggcacgcattgcgcatg

SEQ ID NO: 1493199 - DNA, 25 bp, Homo sapien
tctaggactgccacgccgccatggg

SEQ ID NO: 1493200 - DNA, 25 bp, Homo sapien
tatgcacggcgcatgctccatgcgg

SEQ ID NO: 1493201 - DNA, 25 bp, Homo sapien
tcgcatttccgcagctctaggactg

SEQ ID NO: 1493202 - DNA, 25 bp, Homo sapien
tgcaagacggacagacccgaatggg

SEQ ID NO: 1493203 - DNA, 25 bp, Homo sapien
gccccagcgcagactgaaggcgcat

SEQ ID NO: 1493204 - DNA, 25 bp, Homo sapien
gcgtccatccggctgtggagcagct

SEQ ID NO: 1493205 - DNA, 25 bp, Homo sapien
gcttggataattgcagctggccaca

SEQ ID NO: 1493206 - DNA, 25 bp, Homo sapien
gcgccgctcgggacaaaaggggcga

SEQ ID NO: 1493207 - DNA, 25 bp, Homo sapien
caaaaggggcgatgtgtgaagggtt

SEQ ID NO: 1493208 - DNA, 25 bp, Homo sapien
cgccgctcgggacaaaaggggcgat

SEQ ID NO: 1493209 - DNA, 25 bp, Homo sapien
aatagcggcacgtggcggccgcctt

SEQ ID NO: 1493210 - DNA, 25 bp, Homo sapien
ttcttaatttgtgaccacgcttcct

SEQ ID NO: 1493211 - DNA, 25 bp, Homo sapien
aatccattgcggagtctcacttcca

SEQ ID NO: 1493212 - DNA, 25 bp, Homo sapien
tgacttcatgtaaatagcggcacgt

SEQ ID NO: 1493213 - DNA, 25 bp, Homo sapien
tggggcacgaacaagacatctgaaa

SEQ ID NO: 1493214 - DNA, 25 bp, Homo sapien
acggcaccggacgtcagctgttctc

SEQ ID NO: 1493215 - DNA, 25 bp, Homo sapien
tctgaaaataactggggttccgtgc

SEQ ID NO: 1493216 - DNA, 25 bp, Homo sapien
gtgctgccaaaacggcaccggacgt

SEQ ID NO: 1493217 - DNA, 25 bp, Homo sapien
cagcctttacgctttgccgccccag

SEQ ID NO: 1493218 - DNA, 25 bp, Homo sapien
gccagcctttacgctttgccgcccc

SEQ ID NO: 1493219 - DNA, 25 bp, Homo sapien
gcctttacgctttgccgccccagca

SEQ ID NO: 1493220 - DNA, 25 bp, Homo sapien
gctttgccgccccagcacgcaggtg

SEQ ID NO: 1493221 - DNA, 25 bp, Homo sapien
cgcctgaattggagtagctcttccc

SEQ ID NO: 1493222 - DNA, 25 bp, Homo sapien
cgtggagcccatcgcaatgcctggg

SEQ ID NO: 1493223 - DNA, 25 bp, Homo sapien
tccagatctgccagtccgcctgaat

SEQ ID NO: 1493224 - DNA, 25 bp, Homo sapien
ccacagtcacgacagctgccctggg

SEQ ID NO: 1493225 - DNA, 25 bp, Homo sapien
ccagctgtgctcgccatgcttattt

SEQ ID NO: 1493226 - DNA, 25 bp, Homo sapien
ctttcaaccttcggaattcctggcg

SEQ ID NO: 1493227 - DNA, 25 bp, Homo sapien
tgcttatttaaatctcgctgattta

SEQ ID NO: 1493228 - DNA, 25 bp, Homo sapien
tgtgctcgccatgcttatttaaatc

SEQ ID NO: 1493229 - DNA, 25 bp, Homo sapien
ctgaccgccgatgccaagcgggatg

SEQ ID NO: 1493230 - DNA, 25 bp, Homo sapien
caagcgggatgtctaaatcgggcgc

SEQ ID NO: 1493231 - DNA, 25 bp, Homo sapien
ttgcaagccaccctgaccgccgatg

SEQ ID NO: 1493232 - DNA, 25 bp, Homo sapien
cgccgatgccaagcgggatgtctaa

SEQ ID NO: 1493233 - DNA, 25 bp, Homo sapien
taattcggaaggtggcacattcccc

SEQ ID NO: 1493234 - DNA, 25 bp, Homo sapien
ggaaccagtgcccttctaattcgga

SEQ ID NO: 1493235 - DNA, 25 bp, Homo sapien
agacgctgtgttacggttccccgcg

SEQ ID NO: 1493236 - DNA, 25 bp, Homo sapien
ccgagctcagccgtgggtcctggag

SEQ ID NO: 1493237 - DNA, 25 bp, Homo sapien
gcccgtccctttagtctttgagctc

SEQ ID NO: 1493238 - DNA, 25 bp, Homo sapien
ttctaaatgtcataagggaaactta

SEQ ID NO: 1493239 - DNA, 25 bp, Homo sapien
ctcctcttctcggtctcctcccgcg

SEQ ID NO: 1493240 - DNA, 25 bp, Homo sapien
gctgtggagggtacttccattttca

SEQ ID NO: 1493241 - DNA, 25 bp, Homo sapien
aaaacggtgtgcgtgatctggactc

SEQ ID NO: 1493242 - DNA, 25 bp, Homo sapien
ctggattatggaaaacggtgtgcgt

SEQ ID NO: 1493243 - DNA, 25 bp, Homo sapien
aaacggtgtgcgtgatctggactcg

SEQ ID NO: 1493244 - DNA, 25 bp, Homo sapien
tatggaaaacggtgtgcgtgatctg

SEQ ID NO: 1493245 - DNA, 25 bp, Homo sapien
agccccgggcacacggtgaacagtt

SEQ ID NO: 1493246 - DNA, 25 bp, Homo sapien
caggtcccgttaggtcctctgagaa

SEQ ID NO: 1493247 - DNA, 25 bp, Homo sapien
gggatggcttcagcgttcacctccg

SEQ ID NO: 1493248 - DNA, 25 bp, Homo sapien
acagttcctagtgggctggtgatga

SEQ ID NO: 1493249 - DNA, 25 bp, Homo sapien
tgcagaagcaaagatcgagctcctg

SEQ ID NO: 1493250 - DNA, 25 bp, Homo sapien
tttgcagacgtttctcggtaatgtt

SEQ ID NO: 1493251 - DNA, 25 bp, Homo sapien
ggtttgcagacgtttctcggtaatg

SEQ ID NO: 1493252 - DNA, 25 bp, Homo sapien
gcagaagcaaagatcgagctcctgg

SEQ ID NO: 1493253 - DNA, 25 bp, Homo sapien
gtggatcggcagaaacaagttgtgt

SEQ ID NO: 1493254 - DNA, 25 bp, Homo sapien
agcgtcctgcgtggcgaggtgcccg

SEQ ID NO: 1493255 - DNA, 25 bp, Homo sapien
ttacgggaagcccggagcgtcctgc

SEQ ID NO: 1493256 - DNA, 25 bp, Homo sapien
cagacacgggtgttcttacgggaag

SEQ ID NO: 1493257 - DNA, 25 bp, Homo sapien
tcaaaactcagcaaagggtccgaca

SEQ ID NO: 1493258 - DNA, 25 bp, Homo sapien
ggagcgtcagaaacacagtcgagca

SEQ ID NO: 1493259 - DNA, 25 bp, Homo sapien
gagcaaaggtttcacgacgtcagtt

SEQ ID NO: 1493260 - DNA, 25 bp, Homo sapien
cccacaaggctgaaggcagtgacgt

SEQ ID NO: 1493261 - DNA, 25 bp, Homo sapien
agtgaaacgcggctgattttcctct

SEQ ID NO: 1493262 - DNA, 25 bp, Homo sapien
tcctctcctgggctagaccattgct

SEQ ID NO: 1493263 - DNA, 25 bp, Homo sapien
gagatgacggtgcaaagtgaaacgc

SEQ ID NO: 1493264 - DNA, 25 bp, Homo sapien
tctcctgggctagaccattgctcac

SEQ ID NO: 1493265 - DNA, 25 bp, Homo sapien
cgggaatgggagtcttttgcccaag

SEQ ID NO: 1493266 - DNA, 25 bp, Homo sapien
tgcgtctacagacacggaaatgtgt

SEQ ID NO: 1493267 - DNA, 25 bp, Homo sapien
ccctcggaatcttgcaagtgtggga

SEQ ID NO: 1493268 - DNA, 25 bp, Homo sapien
gagaagcggcttcctccctcggaat

SEQ ID NO: 1493269 - DNA, 25 bp, Homo sapien
ggatgtttgtggacttttgtagcca

SEQ ID NO: 1493270 - DNA, 25 bp, Homo sapien
tgtgcccacgaagacgattattcta

SEQ ID NO: 1493271 - DNA, 25 bp, Homo sapien
tgcccacgaagacgattattctaag

SEQ ID NO: 1493272 - DNA, 25 bp, Homo sapien
cgaagacgattattctaagggagaa

SEQ ID NO: 1493273 - DNA, 25 bp, Homo sapien
acaggtgcctctcacggcgctgaca

SEQ ID NO: 1493274 - DNA, 25 bp, Homo sapien
acagccccggcacgtgtcgtgggct

SEQ ID NO: 1493275 - DNA, 25 bp, Homo sapien
tcaagaatagaagctccttccccta

SEQ ID NO: 1493276 - DNA, 25 bp, Homo sapien
aaatgtcatccgtcctcagctcggg

SEQ ID NO: 1493277 - DNA, 25 bp, Homo sapien
agctggaaagttggcggtaggtctt

SEQ ID NO: 1493278 - DNA, 25 bp, Homo sapien
gggcccgtgtgttcatcacacctgc

SEQ ID NO: 1493279 - DNA, 25 bp, Homo sapien
ggggcccgtgtgttcatcacacctg

SEQ ID NO: 1493280 - DNA, 25 bp, Homo sapien
cggggcccgtgtgttcatcacacct

SEQ ID NO: 1493281 - DNA, 25 bp, Homo sapien
gaaacttgagttcccgtgcgtgcgt

SEQ ID NO: 1493282 - DNA, 25 bp, Homo sapien
tgaaacttgagttcccgtgcgtgcg

SEQ ID NO: 1493283 - DNA, 25 bp, Homo sapien
cccgtgcgtgcgtgtcctcgtcctc

SEQ ID NO: 1493284 - DNA, 25 bp, Homo sapien
gtgaaacttgagttcccgtgcgtgc

SEQ ID NO: 1493285 - DNA, 25 bp, Homo sapien
caaaaacattatcttcgggagcacg

SEQ ID NO: 1493286 - DNA, 25 bp, Homo sapien
acaaaaacattatcttcgggagcac

SEQ ID NO: 1493287 - DNA, 25 bp, Homo sapien
gccttccggagcttctccgtgccct

SEQ ID NO: 1493288 - DNA, 25 bp, Homo sapien
cctcctgtacattgcctagaaatcg

SEQ ID NO: 1493289 - DNA, 25 bp, Homo sapien
tagaaatcgccagaaagctgccacc

SEQ ID NO: 1493290 - DNA, 25 bp, Homo sapien
ttccccaagcatccagccttccgga

SEQ ID NO: 1493291 - DNA, 25 bp, Homo sapien
ctgtgacaggtgcagaccggtgtcc

SEQ ID NO: 1493292 - DNA, 25 bp, Homo sapien
cggctggctggacgtctggacatct

SEQ ID NO: 1493293 - DNA, 25 bp, Homo sapien
ctggctggacgtctggacatctgga

SEQ ID NO: 1493294 - DNA, 25 bp, Homo sapien
gtgcagaccggtgtccggctggctg

SEQ ID NO: 1493295 - DNA, 25 bp, Homo sapien
tctccagaggccgccaaacttgcgg

SEQ ID NO: 1493296 - DNA, 25 bp, Homo sapien
tcttacgtcaacaaatgcaccgccg

SEQ ID NO: 1493297 - DNA, 25 bp, Homo sapien
ctacattacttcttacgtcaacaaa

SEQ ID NO: 1493298 - DNA, 25 bp, Homo sapien
gtcaacaaatgcaccgccgtttctc

SEQ ID NO: 1493299 - DNA, 25 bp, Homo sapien
ccttgaaataaaacgccgcttgccg

SEQ ID NO: 1493300 - DNA, 25 bp, Homo sapien
catagacggtgtgcgtgactgaaca

SEQ ID NO: 1493301 - DNA, 25 bp, Homo sapien
gatcatttcagctcctagccttgaa

SEQ ID NO: 1493302 - DNA, 25 bp, Homo sapien
ccgacggacgtctgcaatgatgatg

SEQ ID NO: 1493303 - DNA, 25 bp, Homo sapien
ctcagagtctccaatgcacatctca

SEQ ID NO: 1493304 - DNA, 25 bp, Homo sapien
cagagtctccaatgcacatctcaga

SEQ ID NO: 1493305 - DNA, 25 bp, Homo sapien
tcagagtctccaatgcacatctcag

SEQ ID NO: 1493306 - DNA, 25 bp, Homo sapien
tcagtctccaatgcccacgtcagag

SEQ ID NO: 1493307 - DNA, 25 bp, Homo sapien
ccgggaaatcgttcatttcaatcag

SEQ ID NO: 1493308 - DNA, 25 bp, Homo sapien
aactcggagcttcaccgggaaatcg

SEQ ID NO: 1493309 - DNA, 25 bp, Homo sapien
caggatgtaggggacctcaccccat

SEQ ID NO: 1493310 - DNA, 25 bp, Homo sapien
taggggacctcaccccatagaacca

SEQ ID NO: 1493311 - DNA, 25 bp, Homo sapien
ggcagcacctgtggacgtgaacatc

SEQ ID NO: 1493312 - DNA, 25 bp, Homo sapien
gcacctgtggacgtgaacatcagcc

SEQ ID NO: 1493313 - DNA, 25 bp, Homo sapien
cagcacctgtggacgtgaacatcag

SEQ ID NO: 1493314 - DNA, 25 bp, Homo sapien
gcagcacctgtggacgtgaacatca

SEQ ID NO: 1493315 - DNA, 25 bp, Homo sapien
agagggacagtatcccattgcctga

SEQ ID NO: 1493316 - DNA, 25 bp, Homo sapien
tgctccgaagccctgggttgcactg

SEQ ID NO: 1493317 - DNA, 25 bp, Homo sapien
catgacaagtcgcagagtgtggtcg

SEQ ID NO: 1493318 - DNA, 25 bp, Homo sapien
caaaaatcaggactatcaacgcgtg

SEQ ID NO: 1493319 - DNA, 25 bp, Homo sapien
ccaagaacgcttgcctggtacacaa

SEQ ID NO: 1493320 - DNA, 25 bp, Homo sapien
ctgcgtcagccctaccccggtgtct

SEQ ID NO: 1493321 - DNA, 25 bp, Homo sapien
tctcgtccaagaacgcttgcctggt

SEQ ID NO: 1493322 - DNA, 25 bp, Homo sapien
cccggtgtctcgtccaagaacgctt

SEQ ID NO: 1493323 - DNA, 25 bp, Homo sapien
gttccgagttcctgtctgggaatag

SEQ ID NO: 1493324 - DNA, 25 bp, Homo sapien
ggacgctttgatataagcctgtaac

SEQ ID NO: 1493325 - DNA, 25 bp, Homo sapien
ttgccaacagttggacgctttgata

SEQ ID NO: 1493326 - DNA, 25 bp, Homo sapien
gagttcctgtctgggaatagaaggc

SEQ ID NO: 1493327 - DNA, 25 bp, Homo sapien
gttttttaactactgacgctttgca

SEQ ID NO: 1493328 - DNA, 25 bp, Homo sapien
ccagaatggtgggtggttcccattt

SEQ ID NO: 1493329 - DNA, 25 bp, Homo sapien
taactactgacgctttgcacgtcca

SEQ ID NO: 1493330 - DNA, 25 bp, Homo sapien
ctactgacgctttgcacgtccaatc

SEQ ID NO: 1493331 - DNA, 25 bp, Homo sapien
gcctgcaaacgctaactggggcttg

SEQ ID NO: 1493332 - DNA, 25 bp, Homo sapien
cccgaatgcctgcaaacgctaactg

SEQ ID NO: 1493333 - DNA, 25 bp, Homo sapien
tcccccgaatgcctgcaaacgctaa

SEQ ID NO: 1493334 - DNA, 25 bp, Homo sapien
ctgcaaacgctaactggggcttggt

SEQ ID NO: 1493335 - DNA, 25 bp, Homo sapien
aggaattcacgatgctcacagccca

SEQ ID NO: 1493336 - DNA, 25 bp, Homo sapien
tcttgggagattaagaccccatttg

SEQ ID NO: 1493337 - DNA, 25 bp, Homo sapien
tcatgatctgcaggttcatccctaa

SEQ ID NO: 1493338 - DNA, 25 bp, Homo sapien
catgtctctgtgagtcacggtcact

SEQ ID NO: 1493339 - DNA, 25 bp, Homo sapien
atttttaattgccacgtatatcctc

SEQ ID NO: 1493340 - DNA, 25 bp, Homo sapien
ggcgcgcttcagaggcccggctgtc

SEQ ID NO: 1493341 - DNA, 25 bp, Homo sapien
tatatcctcacaactgcgtcttcca

SEQ ID NO: 1493342 - DNA, 25 bp, Homo sapien
gcgtcttccacggcgcgcttcagag

SEQ ID NO: 1493343 - DNA, 25 bp, Homo sapien
cagccgtggtgacattggacgtcgt

SEQ ID NO: 1493344 - DNA, 25 bp, Homo sapien
gaagacggctggctttttccggcga

SEQ ID NO: 1493345 - DNA, 25 bp, Homo sapien
tgaggggggacatgcaccctgtcca

SEQ ID NO: 1493346 - DNA, 25 bp, Homo sapien
tctgcaaggtgcgacatgcagccgt

SEQ ID NO: 1493347 - DNA, 25 bp, Homo sapien
aacaccctcgatcacccccacaaag

SEQ ID NO: 1493348 - DNA, 25 bp, Homo sapien
accttcgtccatacagcaaacaccc

SEQ ID NO: 1493349 - DNA, 25 bp, Homo sapien
aacattttcatccacaccttcgtcc

SEQ ID NO: 1493350 - DNA, 25 bp, Homo sapien
agggtggcctcccatgactgagatt

SEQ ID NO: 1493351 - DNA, 25 bp, Homo sapien
agtgctatctttgggagcaggtttg

SEQ ID NO: 1493352 - DNA, 25 bp, Homo sapien
gttagtgctatctttgggagcaggt

SEQ ID NO: 1493353 - DNA, 25 bp, Homo sapien
tactactggtgctgaggaatgagac

SEQ ID NO: 1493354 - DNA, 25 bp, Homo sapien
tccccccgttactactggtgctgag

SEQ ID NO: 1493355 - DNA, 25 bp, Homo sapien
gaaacgtcgcctgccttttcagttg

SEQ ID NO: 1493356 - DNA, 25 bp, Homo sapien
tacgtgaaatgtctacggcttgagg

SEQ ID NO: 1493357 - DNA, 25 bp, Homo sapien
gcttgaggatccgtaatcttgacgc

SEQ ID NO: 1493358 - DNA, 25 bp, Homo sapien
tcttgacgctttggtgaccgattca

SEQ ID NO: 1493359 - DNA, 25 bp, Homo sapien
gctggctgcatgagtttacaattcc

SEQ ID NO: 1493360 - DNA, 25 bp, Homo sapien
ttacaattccgatgagatctccacg

SEQ ID NO: 1493361 - DNA, 25 bp, Homo sapien
tgtacggtgcagagatgacaacacg

SEQ ID NO: 1493362 - DNA, 25 bp, Homo sapien
taatgtcattcttggaaacaggtcg

SEQ ID NO: 1493363 - DNA, 25 bp, Homo sapien
atgaagatcagcaccccggcacgta

SEQ ID NO: 1493364 - DNA, 25 bp, Homo sapien
cccggcacgtacaatctggccttat

SEQ ID NO: 1493365 - DNA, 25 bp, Homo sapien
gcacgtacaatctggccttattcta

SEQ ID NO: 1493366 - DNA, 25 bp, Homo sapien
catgaagatcagcaccccggcacgt

SEQ ID NO: 1493367 - DNA, 25 bp, Homo sapien
tcgtggcatccgaggtgacagcttt

SEQ ID NO: 1493368 - DNA, 25 bp, Homo sapien
gaaagatgctgcctccacagcgtaa

SEQ ID NO: 1493369 - DNA, 25 bp, Homo sapien
catttcgtttctgccgaccgtgtgg

SEQ ID NO: 1493370 - DNA, 25 bp, Homo sapien
gagattttcacacaccgtcgtggca

SEQ ID NO: 1493371 - DNA, 25 bp, Homo sapien
cggaggttcattcgcgtcctggcgt

SEQ ID NO: 1493372 - DNA, 25 bp, Homo sapien
tgtttgcagtagaaagagacgcgcg

SEQ ID NO: 1493373 - DNA, 25 bp, Homo sapien
gctgctgcgtcctgggcgtctgatc

SEQ ID NO: 1493374 - DNA, 25 bp, Homo sapien
cgcaaaccctgtgcggactcgggct

SEQ ID NO: 1493375 - DNA, 25 bp, Homo sapien
tttgtctagtaggaaactccgctct

SEQ ID NO: 1493376 - DNA, 25 bp, Homo sapien
aaactccgctctaccagggtgtccg

SEQ ID NO: 1493377 - DNA, 25 bp, Homo sapien
tgtccgagcctccaggaatgagcat

SEQ ID NO: 1493378 - DNA, 25 bp, Homo sapien
ttgggccgcaatctggacccctttg

SEQ ID NO: 1493379 - DNA, 25 bp, Homo sapien
tcactatttatacgcggcgacctcg

SEQ ID NO: 1493380 - DNA, 25 bp, Homo sapien
cctgtctggtgcaattactggtctc

SEQ ID NO: 1493381 - DNA, 25 bp, Homo sapien
tttggcgtccgtacaccttggtgcg

SEQ ID NO: 1493382 - DNA, 25 bp, Homo sapien
ggacgcacgcagagacgctgtgtct

SEQ ID NO: 1493383 - DNA, 25 bp, Homo sapien
ggagaggacggcccgtgcgcgcggg

SEQ ID NO: 1493384 - DNA, 25 bp, Homo sapien
gggctggtggatgcgcgcgtctccc

SEQ ID NO: 1493385 - DNA, 25 bp, Homo sapien
gcgcggagaggacggcccgtgcgcg

SEQ ID NO: 1493386 - DNA, 25 bp, Homo sapien
gaggacggcccgtgcgcgcgggtgg

SEQ ID NO: 1493387 - DNA, 25 bp, Homo sapien
gatacaaaagccgtgagctcttcca

SEQ ID NO: 1493388 - DNA, 25 bp, Homo sapien
ttggatacaaaagccgtgagctctt

SEQ ID NO: 1493389 - DNA, 25 bp, Homo sapien
aagacttggatacaaaagccgtgag

SEQ ID NO: 1493390 - DNA, 25 bp, Homo sapien
cgccgttaccgtccttgcttttctg

SEQ ID NO: 1493391 - DNA, 25 bp, Homo sapien
tccttgtcattgtctacgtggtcct

SEQ ID NO: 1493392 - DNA, 25 bp, Homo sapien
tcgcggtgccgaattctttcagttt

SEQ ID NO: 1493393 - DNA, 25 bp, Homo sapien
tggaggctggaatccgacgtcccca

SEQ ID NO: 1493394 - DNA, 25 bp, Homo sapien
cgtggtccttgaacaaatgcaccgg

SEQ ID NO: 1493395 - DNA, 25 bp, Homo sapien
ctaccccaccagagtgtgccaaaaa

SEQ ID NO: 1493396 - DNA, 25 bp, Homo sapien
tctccagtagttggtgacctgtctg

SEQ ID NO: 1493397 - DNA, 25 bp, Homo sapien
ccactttttcacacgcggtcgggca

SEQ ID NO: 1493398 - DNA, 25 bp, Homo sapien
aaccgcgtgcgcagaaatctctcct

SEQ ID NO: 1493399 - DNA, 25 bp, Homo sapien
gtcctccgacttcacgtcctcgcgc

SEQ ID NO: 1493400 - DNA, 25 bp, Homo sapien
ctccgacttcacgtcctcgcgcttc

SEQ ID NO: 1493401 - DNA, 25 bp, Homo sapien
cgtcctcgcgcttctctttgcattc

SEQ ID NO: 1493402 - DNA, 25 bp, Homo sapien
cctccgacttcacgtcctcgcgctt

SEQ ID NO: 1493403 - DNA, 25 bp, Homo sapien
gtaatgggtctcgtcgaagagtcgc

SEQ ID NO: 1493404 - DNA, 25 bp, Homo sapien
aagttggtgcggctgcgcctctgtt

SEQ ID NO: 1493405 - DNA, 25 bp, Homo sapien
tggctgagctcctcgcgcatgaagg

SEQ ID NO: 1493406 - DNA, 25 bp, Homo sapien
aagagtcgctcgagctcgttcagct

SEQ ID NO: 1493407 - DNA, 25 bp, Homo sapien
cagacgccctaaggagggacacagt

SEQ ID NO: 1493408 - DNA, 25 bp, Homo sapien
acagccctcggtaaagatgcctggg

SEQ ID NO: 1493409 - DNA, 25 bp, Homo sapien
tccctcctgggctgtatcgctttgg

SEQ ID NO: 1493410 - DNA, 25 bp, Homo sapien
cacatgggaagacggaagagaatca

SEQ ID NO: 1493411 - DNA, 25 bp, Homo sapien
agctgaactaacgtgctctcgtcgg

SEQ ID NO: 1493412 - DNA, 25 bp, Homo sapien
tttccgcagctgaactaacgtgctc

SEQ ID NO: 1493413 - DNA, 25 bp, Homo sapien
ccacaaccaattttccgcagctgaa

SEQ ID NO: 1493414 - DNA, 25 bp, Homo sapien
ctaacgtgctctcgtcggtaataga

SEQ ID NO: 1493415 - DNA, 25 bp, Homo sapien
ttagggcgttctcggggtccgcaca

SEQ ID NO: 1493416 - DNA, 25 bp, Homo sapien
tagggcgttctcggggtccgcacac

SEQ ID NO: 1493417 - DNA, 25 bp, Homo sapien
gggcgttctcggggtccgcacacac

SEQ ID NO: 1493418 - DNA, 25 bp, Homo sapien
agggcgttctcggggtccgcacaca

SEQ ID NO: 1493419 - DNA, 25 bp, Homo sapien
agagagatgtgaagagccctgtgaa

SEQ ID NO: 1493420 - DNA, 25 bp, Homo sapien
gagagatgtgaagagccctgtgaac

SEQ ID NO: 1493421 - DNA, 25 bp, Homo sapien
atgtgaagagccctgtgaacccagc

SEQ ID NO: 1493422 - DNA, 25 bp, Homo sapien
gagatgtgaagagccctgtgaaccc

SEQ ID NO: 1493423 - DNA, 25 bp, Homo sapien
attctcttgtttgcggcacttggct

SEQ ID NO: 1493424 - DNA, 25 bp, Homo sapien
gattctcttgtttgcggcacttggc

SEQ ID NO: 1493425 - DNA, 25 bp, Homo sapien
tgattctcttgtttgcggcacttgg

SEQ ID NO: 1493426 - DNA, 25 bp, Homo sapien
taaggctcccatgttgacgtagggt

SEQ ID NO: 1493427 - DNA, 25 bp, Homo sapien
catgttgacgtagggtgccactcgg

SEQ ID NO: 1493428 - DNA, 25 bp, Homo sapien
tagggtgccactcggcaggcgtcta

SEQ ID NO: 1493429 - DNA, 25 bp, Homo sapien
gaaaggcatccgtaaggctcccatg

SEQ ID NO: 1493430 - DNA, 25 bp, Homo sapien
tgcgggctccaacggcctaatttca

SEQ ID NO: 1493431 - DNA, 25 bp, Homo sapien
gacggtacaagaagtaggctcgttc

SEQ ID NO: 1493432 - DNA, 25 bp, Homo sapien
ccaagactccggtgcgcaaagccag

SEQ ID NO: 1493433 - DNA, 25 bp, Homo sapien
atttcactgggtcccgccgtcggca

SEQ ID NO: 1493434 - DNA, 25 bp, Homo sapien
ctcccaggacaccaggtccccaagc

SEQ ID NO: 1493435 - DNA, 25 bp, Homo sapien
aggacaccaggtccccaagcctctc

SEQ ID NO: 1493436 - DNA, 25 bp, Homo sapien
tcccaggacaccaggtccccaagcc

SEQ ID NO: 1493437 - DNA, 25 bp, Homo sapien
ctccaagcctctcccaggacaccag

SEQ ID NO: 1493438 - DNA, 25 bp, Homo sapien
tgggacaccaggtgtccaagcctct

SEQ ID NO: 1493439 - DNA, 25 bp, Homo sapien
tccaaggtcaccaggtccccaagcc

SEQ ID NO: 1493440 - DNA, 25 bp, Homo sapien
gggacaccaagtccccaagcctctc

SEQ ID NO: 1493441 - DNA, 25 bp, Homo sapien
cgggacaccaggtccccaagcctct

SEQ ID NO: 1493442 - DNA, 25 bp, Homo sapien
tcccgagacaccaggtccccaagcc

SEQ ID NO: 1493443 - DNA, 25 bp, Homo sapien
cagggattcagggactttggctcac

SEQ ID NO: 1493444 - DNA, 25 bp, Homo sapien
gatgcgctctcttcgcagggattca

SEQ ID NO: 1493445 - DNA, 25 bp, Homo sapien
ggtccacaaatggaacgccctcagg

SEQ ID NO: 1493446 - DNA, 25 bp, Homo sapien
gggaatccgaacagctccctgcaaa

SEQ ID NO: 1493447 - DNA, 25 bp, Homo sapien
gcgtcgccccttctccagccgtgga

SEQ ID NO: 1493448 - DNA, 25 bp, Homo sapien
cctagggagcgtcgccccttctcca

SEQ ID NO: 1493449 - DNA, 25 bp, Homo sapien
tgcgggagcggacccggcggggtga

SEQ ID NO: 1493450 - DNA, 25 bp, Homo sapien
tccagccgtggagaccaccccacac

SEQ ID NO: 1493451 - DNA, 25 bp, Homo sapien
gcggccgaggcggactcggccagcg

SEQ ID NO: 1493452 - DNA, 25 bp, Homo sapien
actcggccagcgacgcgatgggcag

SEQ ID NO: 1493453 - DNA, 25 bp, Homo sapien
ggcggactcggccagcgacgcgatg

SEQ ID NO: 1493454 - DNA, 25 bp, Homo sapien
ccagcgacgcgatgggcagcccgaa

SEQ ID NO: 1493455 - DNA, 25 bp, Homo sapien
agggcctccgcgtgcttccgcgcct

SEQ ID NO: 1493456 - DNA, 25 bp, Homo sapien
gtgcttccgcgccttgagccgcagg

SEQ ID NO: 1493457 - DNA, 25 bp, Homo sapien
ctccgcgtgcttccgcgccttgagc

SEQ ID NO: 1493458 - DNA, 25 bp, Homo sapien
gccttgagccgcaggtcggcgatgc

SEQ ID NO: 1493459 - DNA, 25 bp, Homo sapien
cgttggcaacgaagaaatggcattt

SEQ ID NO: 1493460 - DNA, 25 bp, Homo sapien
aatggcattttcatcggagaccagc

SEQ ID NO: 1493461 - DNA, 25 bp, Homo sapien
catagggtatagcagaggaagacgc

SEQ ID NO: 1493462 - DNA, 25 bp, Homo sapien
cagctccgggatctttgcagtttca

SEQ ID NO: 1493463 - DNA, 25 bp, Homo sapien
tcagaacatggaacgtggatctccc

SEQ ID NO: 1493464 - DNA, 25 bp, Homo sapien
agtatgacaccttgcaaccacgcgt

SEQ ID NO: 1493465 - DNA, 25 bp, Homo sapien
cagaagatacaaatgagacgggtcc

SEQ ID NO: 1493466 - DNA, 25 bp, Homo sapien
tctacacccgtgatttttgcaaagg

SEQ ID NO: 1493467 - DNA, 25 bp, Homo sapien
tgtccccgggaaaactgtggagcta

SEQ ID NO: 1493468 - DNA, 25 bp, Homo sapien
tcatttcggttaaacgcccagctgt

SEQ ID NO: 1493469 - DNA, 25 bp, Homo sapien
tgaccagagcttggcaccaaaacct

SEQ ID NO: 1493470 - DNA, 25 bp, Homo sapien
caaagtgcctccgaaatgtgtgtcg

SEQ ID NO: 1493471 - DNA, 25 bp, Homo sapien
tgtcaaacgtgtccaccgaaagcct

SEQ ID NO: 1493472 - DNA, 25 bp, Homo sapien
gacctgcacgtacaatgggctgaac

SEQ ID NO: 1493473 - DNA, 25 bp, Homo sapien
gaatgagggcgtcaccagagaaact

SEQ ID NO: 1493474 - DNA, 25 bp, Homo sapien
ccacgtgtgtcgaagaatatcagca

SEQ ID NO: 1493475 - DNA, 25 bp, Homo sapien
catgccattatactccagcccgggc

SEQ ID NO: 1493476 - DNA, 25 bp, Homo sapien
ccgggcgacaagagcaaaactccat

SEQ ID NO: 1493477 - DNA, 25 bp, Homo sapien
agcccgggcgacaagagcaaaactc

SEQ ID NO: 1493478 - DNA, 25 bp, Homo sapien
atgccattatactccagcccgggcg

SEQ ID NO: 1493479 - DNA, 25 bp, Homo sapien
agaggatctttggagctcaggagct

SEQ ID NO: 1493480 - DNA, 25 bp, Homo sapien
tcagcagcaaagcaagatcccgtct

SEQ ID NO: 1493481 - DNA, 25 bp, Homo sapien
aaacattatcttgacatggtggtgg

SEQ ID NO: 1493482 - DNA, 25 bp, Homo sapien
gagaccacgggcagtggttcatgct

SEQ ID NO: 1493483 - DNA, 25 bp, Homo sapien
tgtaccccagaatgtgtttagttaa

SEQ ID NO: 1493484 - DNA, 25 bp, Homo sapien
ccagaatgtgtttagttaacacaca

SEQ ID NO: 1493485 - DNA, 25 bp, Homo sapien
ttaattaattagcacatgtatctca

SEQ ID NO: 1493486 - DNA, 25 bp, Homo sapien
tgtggggggatagaaggcaagagga

SEQ ID NO: 1493487 - DNA, 25 bp, Homo sapien
caagggcagccctatagtgggtgtc

SEQ ID NO: 1493488 - DNA, 25 bp, Homo sapien
tggaatgtccgtgcctccaggcttg

SEQ ID NO: 1493489 - DNA, 25 bp, Homo sapien
ttcacaaagcgtccatccaagggca

SEQ ID NO: 1493490 - DNA, 25 bp, Homo sapien
tctcgtactctagggatattgcacc

SEQ ID NO: 1493491 - DNA, 25 bp, Homo sapien
ccaagctctccaaactccgaaatcc

SEQ ID NO: 1493492 - DNA, 25 bp, Homo sapien
tccggttgcccttggaactcggcat

SEQ ID NO: 1493493 - DNA, 25 bp, Homo sapien
atccggttgcccttggaactcggca

SEQ ID NO: 1493494 - DNA, 25 bp, Homo sapien
tctccaaactccgaaatccggttgc

SEQ ID NO: 1493495 - DNA, 25 bp, Homo sapien
gtccacgaccagacgatgaacagtt

SEQ ID NO: 1493496 - DNA, 25 bp, Homo sapien
tcaatgtccacgaccagacgatgaa

SEQ ID NO: 1493497 - DNA, 25 bp, Homo sapien
tgtccacgaccagacgatgaacagt

SEQ ID NO: 1493498 - DNA, 25 bp, Homo sapien
gggactcaatgtccacgaccagacg

SEQ ID NO: 1493499 - DNA, 25 bp, Homo sapien
ctggcagttctacggttgggggctg

SEQ ID NO: 1493500 - DNA, 25 bp, Homo sapien
agctggcagttctacggttgggggc

SEQ ID NO: 1493501 - DNA, 25 bp, Homo sapien
ggagctggcagttctacggttgggg

SEQ ID NO: 1493502 - DNA, 25 bp, Homo sapien
ggcagttctacggttgggggctgcc

SEQ ID NO: 1493503 - DNA, 25 bp, Homo sapien
gacaaggaggcatacatcttgcaag

SEQ ID NO: 1493504 - DNA, 25 bp, Homo sapien
cagacaaggaggcatacatcttgca

SEQ ID NO: 1493505 - DNA, 25 bp, Homo sapien
aaggaggcatacatcttgcaagcac

SEQ ID NO: 1493506 - DNA, 25 bp, Homo sapien
gaggcatacatcttgcaagcaccct

SEQ ID NO: 1493507 - DNA, 25 bp, Homo sapien
gacaaggaggcatacatcttgcaag

SEQ ID NO: 1493508 - DNA, 25 bp, Homo sapien
aaggaggcatacatcttgcaagcac

SEQ ID NO: 1493509 - DNA, 25 bp, Homo sapien
cagacaaggaggcatacatcttgca

SEQ ID NO: 1493510 - DNA, 25 bp, Homo sapien
gaggcatacatcttgcaagcaccct

SEQ ID NO: 1493511 - DNA, 25 bp, Homo sapien
tcatgacacctggtagcaggaagca

SEQ ID NO: 1493512 - DNA, 25 bp, Homo sapien
ggaggatctgtgttctattcccacc

SEQ ID NO: 1493513 - DNA, 25 bp, Homo sapien
gcaatgcctgcctctgaacaatgaa

SEQ ID NO: 1493514 - DNA, 25 bp, Homo sapien
aacaatgaagttggctctgaacgcc

SEQ ID NO: 1493515 - DNA, 25 bp, Homo sapien
cagaagcttcttctcgccaaactct

SEQ ID NO: 1493516 - DNA, 25 bp, Homo sapien
tcttctcgccaaactctggtgcact

SEQ ID NO: 1493517 - DNA, 25 bp, Homo sapien
gccaaactctggtgcactccagcca

SEQ ID NO: 1493518 - DNA, 25 bp, Homo sapien
agtgaggtcaccatacagccagagt

SEQ ID NO: 1493519 - DNA, 25 bp, Homo sapien
ttcgagcatggggtacttgggatag

SEQ ID NO: 1493520 - DNA, 25 bp, Homo sapien
cattcgagcatggggtacttgggat

SEQ ID NO: 1493521 - DNA, 25 bp, Homo sapien
cgagcatggggtacttgggatagag

SEQ ID NO: 1493522 - DNA, 25 bp, Homo sapien
catggggtacttgggatagaggatg

SEQ ID NO: 1493523 - DNA, 25 bp, Homo sapien
cgcgaatttgcagcgtccagctcag

SEQ ID NO: 1493524 - DNA, 25 bp, Homo sapien
gcccacatcaccctggactgtgtcc

SEQ ID NO: 1493525 - DNA, 25 bp, Homo sapien
gggtgatgccgaaaacgtgtcttcc

SEQ ID NO: 1493526 - DNA, 25 bp, Homo sapien
tgtcttcccgcgaatttgcagcgtc

SEQ ID NO: 1493527 - DNA, 25 bp, Homo sapien
ttttgcgggtgcgtttgatcttcct

SEQ ID NO: 1493528 - DNA, 25 bp, Homo sapien
tcggtcgtggtcatcatccatagaa

SEQ ID NO: 1493529 - DNA, 25 bp, Homo sapien
tgatcttccttagtgaacgctcacg

SEQ ID NO: 1493530 - DNA, 25 bp, Homo sapien
tgaagcttgcctgagattacgtcgg

SEQ ID NO: 1493531 - DNA, 25 bp, Homo sapien
acgtcccctgtgcattgaataccgg

SEQ ID NO: 1493532 - DNA, 25 bp, Homo sapien
gtgcattgaataccggcgtccactg

SEQ ID NO: 1493533 - DNA, 25 bp, Homo sapien
tgaccggggcgttagcagggcctgg

SEQ ID NO: 1493534 - DNA, 25 bp, Homo sapien
agacacgtcccctgtgcattgaata

SEQ ID NO: 1493535 - DNA, 25 bp, Homo sapien
tgcattgaataccagcgtccactgt

SEQ ID NO: 1493536 - DNA, 25 bp, Homo sapien
cctgtgcattgaataccagcgtcca

SEQ ID NO: 1493537 - DNA, 25 bp, Homo sapien
tcccctgtgcattgaataccagcgt

SEQ ID NO: 1493538 - DNA, 25 bp, Homo sapien
gaataccagcgtccactgtctgcac

SEQ ID NO: 1493539 - DNA, 25 bp, Homo sapien
catggagtcacgtcccctgtgcatt

SEQ ID NO: 1493540 - DNA, 25 bp, Homo sapien
gtcacgtcccctgtgcattgaatac

SEQ ID NO: 1493541 - DNA, 25 bp, Homo sapien
tctgtggtgaggtttgcatggagtc

SEQ ID NO: 1493542 - DNA, 25 bp, Homo sapien
tgaggtttgcatggagtcacgtccc

SEQ ID NO: 1493543 - DNA, 25 bp, Homo sapien
cctggacctgtctgtggtgaggttt

SEQ ID NO: 1493544 - DNA, 25 bp, Homo sapien
tgaataccagcgtccactgtctgca

SEQ ID NO: 1493545 - DNA, 25 bp, Homo sapien
tgaggtttgcatggagtcacgtccc

SEQ ID NO: 1493546 - DNA, 25 bp, Homo sapien
tcacgtcccctgtgcattgaatacc

SEQ ID NO: 1493547 - DNA, 25 bp, Homo sapien
agacacgtcccctgtgcattgaata

SEQ ID NO: 1493548 - DNA, 25 bp, Homo sapien
cctggacctgtctgtggtgaggttt

SEQ ID NO: 1493549 - DNA, 25 bp, Homo sapien
cacgtcccctgtgcattgaataccg

SEQ ID NO: 1493550 - DNA, 25 bp, Homo sapien
gcctggacctgtctgtggtgaggtt

SEQ ID NO: 1493551 - DNA, 25 bp, Homo sapien
gtgcattgaataccggcgtccactg

SEQ ID NO: 1493552 - DNA, 25 bp, Homo sapien
cgtcccctgtgcattgaataccggc

SEQ ID NO: 1493553 - DNA, 25 bp, Homo sapien
tcccctgtgcattgaataccggcgt

SEQ ID NO: 1493554 - DNA, 25 bp, Homo sapien
cctgtgcattgaataccggcgtcca

SEQ ID NO: 1493555 - DNA, 25 bp, Homo sapien
agggtgttagcagggcctggtccca

SEQ ID NO: 1493556 - DNA, 25 bp, Homo sapien
cagggtgttagcagggcctggtccc

SEQ ID NO: 1493557 - DNA, 25 bp, Homo sapien
cactgtgtgtacctgacctgtgccc

SEQ ID NO: 1493558 - DNA, 25 bp, Homo sapien
ccaggatgttagcagtgcctggaca

SEQ ID NO: 1493559 - DNA, 25 bp, Homo sapien
gatgagtattgaatgttcacgtcca

SEQ ID NO: 1493560 - DNA, 25 bp, Homo sapien
ttagcagggtctggtcccatctggg

SEQ ID NO: 1493561 - DNA, 25 bp, Homo sapien
aattccatgcccattggccgttctg

SEQ ID NO: 1493562 - DNA, 25 bp, Homo sapien
gctgggaattccatgcccattggcc

SEQ ID NO: 1493563 - DNA, 25 bp, Homo sapien
tggccgttctgtgccagcacgatgc

SEQ ID NO: 1493564 - DNA, 25 bp, Homo sapien
tgcccattggccgttctgtgccagc

SEQ ID NO: 1493565 - DNA, 25 bp, Homo sapien
ccggtgctggccgtgctagacactt

SEQ ID NO: 1493566 - DNA, 25 bp, Homo sapien
tccacctgcacctgcggattctcat

SEQ ID NO: 1493567 - DNA, 25 bp, Homo sapien
aggtccccgtatctctggccggtgc

SEQ ID NO: 1493568 - DNA, 25 bp, Homo sapien
tggccgtgctagacactttccgcag

SEQ ID NO: 1493569 - DNA, 25 bp, Homo sapien
ggctgaagtccagcaaccagatgtc

SEQ ID NO: 1493570 - DNA, 25 bp, Homo sapien
gggctgaagtccagcaaccagatgt

SEQ ID NO: 1493571 - DNA, 25 bp, Homo sapien
tcacggacgggtgttgtaggaatta

SEQ ID NO: 1493572 - DNA, 25 bp, Homo sapien
tgccaccatgcactgataggcagtc

SEQ ID NO: 1493573 - DNA, 25 bp, Homo sapien
ctcataggcgctcaatgccacaatg

SEQ ID NO: 1493574 - DNA, 25 bp, Homo sapien
ggcagtcaacgctgcaatgcactca

SEQ ID NO: 1493575 - DNA, 25 bp, Homo sapien
tgcaatgcactcataggcgctcaat

SEQ ID NO: 1493576 - DNA, 25 bp, Homo sapien
gcactgatacgcactcaacattacg

SEQ ID NO: 1493577 - DNA, 25 bp, Homo sapien
acaatgcactgatacacactcaatg

SEQ ID NO: 1493578 - DNA, 25 bp, Homo sapien
cgcactcaacattacgatgcactga

SEQ ID NO: 1493579 - DNA, 25 bp, Homo sapien
tattatgatgcactgatacatgctg

SEQ ID NO: 1493580 - DNA, 25 bp, Homo sapien
gaccatgtggatggctgagccatga

SEQ ID NO: 1493581 - DNA, 25 bp, Homo sapien
gatggctgagccatgaacagagatg

SEQ ID NO: 1493582 - DNA, 25 bp, Homo sapien
atgtggatggctgagccatgaacag

SEQ ID NO: 1493583 - DNA, 25 bp, Homo sapien
ctgggaccatgtggatggctgagcc

SEQ ID NO: 1493584 - DNA, 25 bp, Homo sapien
gaggacatctgccatcagttgatgg

SEQ ID NO: 1493585 - DNA, 25 bp, Homo sapien
gaaatcttgagtctgaaaaccctga

SEQ ID NO: 1493586 - DNA, 25 bp, Homo sapien
caaatttgtccgagtttcgagcaac

SEQ ID NO: 1493587 - DNA, 25 bp, Homo sapien
gaaaaaagcgatgggtctcttctct

SEQ ID NO: 1493588 - DNA, 25 bp, Homo sapien
tgttttatatggcagagcaccagca

SEQ ID NO: 1493589 - DNA, 25 bp, Homo sapien
cagcctcctcggacggacttgagga

SEQ ID NO: 1493590 - DNA, 25 bp, Homo sapien
cggacggacttgaggatgttttata

SEQ ID NO: 1493591 - DNA, 25 bp, Homo sapien
tttatatggcagagcaccagcagcc

SEQ ID NO: 1493592 - DNA, 25 bp, Homo sapien
ccagaaggcttgatccgcagcattg

SEQ ID NO: 1493593 - DNA, 25 bp, Homo sapien
aacaaaaggcccagaaggcttgatc

SEQ ID NO: 1493594 - DNA, 25 bp, Homo sapien
tgatccgcagcattgagtgagtgcg

SEQ ID NO: 1493595 - DNA, 25 bp, Homo sapien
aaaggcccagaaggcttgatccgca

SEQ ID NO: 1493596 - DNA, 25 bp, Homo sapien
cgcgggccggtaaatgagacggctg

SEQ ID NO: 1493597 - DNA, 25 bp, Homo sapien
gccggtaaatgagacggctgccgaa

SEQ ID NO: 1493598 - DNA, 25 bp, Homo sapien
taaatgagacggctgccgaacacaa

SEQ ID NO: 1493599 - DNA, 25 bp, Homo sapien
gagacggctgccgaacacaatggcc

SEQ ID NO: 1493600 - DNA, 25 bp, Homo sapien
cctgggcccgaaatataggtgtgat

SEQ ID NO: 1493601 - DNA, 25 bp, Homo sapien
taggtgtgataatcatagctttctc

SEQ ID NO: 1493602 - DNA, 25 bp, Homo sapien
gcccgaaatataggtgtgataatca

SEQ ID NO: 1493603 - DNA, 25 bp, Homo sapien
tgataatcatagctttctcccacat

SEQ ID NO: 1493604 - DNA, 25 bp, Homo sapien
tgatcaaatttttcccggattcgtc

SEQ ID NO: 1493605 - DNA, 25 bp, Homo sapien
ccggattcgtcgacataacccttgg

SEQ ID NO: 1493606 - DNA, 25 bp, Homo sapien
cggattcgtcgacataacccttggg

SEQ ID NO: 1493607 - DNA, 25 bp, Homo sapien
cccggattcgtcgacataacccttg

SEQ ID NO: 1493608 - DNA, 25 bp, Homo sapien
gtcatatcccgattttgattccata

SEQ ID NO: 1493609 - DNA, 25 bp, Homo sapien
ccgtaacgctaaatatcccgatcgg

SEQ ID NO: 1493610 - DNA, 25 bp, Homo sapien
gtaacaatgtcatatcccgattttg

SEQ ID NO: 1493611 - DNA, 25 bp, Homo sapien
tcaatacccctgctatggaaccagg

SEQ ID NO: 1493612 - DNA, 25 bp, Homo sapien
ataccccataactatatacactgct

SEQ ID NO: 1493613 - DNA, 25 bp, Homo sapien
atccttataccccataactatatac

SEQ ID NO: 1493614 - DNA, 25 bp, Homo sapien
aatatccttataccccataactata

SEQ ID NO: 1493615 - DNA, 25 bp, Homo sapien
aaatatccttataccccataactat

SEQ ID NO: 1493616 - DNA, 25 bp, Homo sapien
caccctgggtgtaggacaagtagaa

SEQ ID NO: 1493617 - DNA, 25 bp, Homo sapien
gattaactctcaaacccaagtcttg

SEQ ID NO: 1493618 - DNA, 25 bp, Homo sapien
gggtgtaccctcttccgcagagaca

SEQ ID NO: 1493619 - DNA, 25 bp, Homo sapien
tgtttcaggaagacgtatggtagca

SEQ ID NO: 1493620 - DNA, 25 bp, Homo sapien
tgcatttggtgacaccgcaggcaga

SEQ ID NO: 1493621 - DNA, 25 bp, Homo sapien
tgcatcctggaaaccctggttcctg

SEQ ID NO: 1493622 - DNA, 25 bp, Homo sapien
cctccaggtttaggaggggtctctg

SEQ ID NO: 1493623 - DNA, 25 bp, Homo sapien
ccgcggatgccacgtccatttgctt

SEQ ID NO: 1493624 - DNA, 25 bp, Homo sapien
ggtttagaaggggtgtctgggtgca

SEQ ID NO: 1493625 - DNA, 25 bp, Homo sapien
tcctggaaaccctggttcttgcctc

SEQ ID NO: 1493626 - DNA, 25 bp, Homo sapien
ccgcggatgccacgtccatttgctt

SEQ ID NO: 1493627 - DNA, 25 bp, Homo sapien
tgcatttggtgacaccgcaggcaga

SEQ ID NO: 1493628 - DNA, 25 bp, Homo sapien
ttgaaaggatcagtaacgaagtccg

SEQ ID NO: 1493629 - DNA, 25 bp, Homo sapien
tgaaaggatcagtaacgaagtccgg

SEQ ID NO: 1493630 - DNA, 25 bp, Homo sapien
tttgaaaggatcagtaacgaagtcc

SEQ ID NO: 1493631 - DNA, 25 bp, Homo sapien
ctttgaaaggatcagtaacgaagtc

SEQ ID NO: 1493632 - DNA, 25 bp, Homo sapien
tctggattttcaggaggccagttct

SEQ ID NO: 1493633 - DNA, 25 bp, Homo sapien
cgctgaagctacagagaggacctct

SEQ ID NO: 1493634 - DNA, 25 bp, Homo sapien
gaagttgtcggtgctaagttctctc

SEQ ID NO: 1493635 - DNA, 25 bp, Homo sapien
tgtgcccggtcaggtaggatctcat

SEQ ID NO: 1493636 - DNA, 25 bp, Homo sapien
ctgcattgcaatggactgtgcggtg

SEQ ID NO: 1493637 - DNA, 25 bp, Homo sapien
aagcagggcctgcattgcaatggac

SEQ ID NO: 1493638 - DNA, 25 bp, Homo sapien
ggcctgcattgcaatggactgtgcg

SEQ ID NO: 1493639 - DNA, 25 bp, Homo sapien
agggcctgcattgcaatggactgtg

SEQ ID NO: 1493640 - DNA, 25 bp, Homo sapien
cctgattcttgggagcctatattcc

SEQ ID NO: 1493641 - DNA, 25 bp, Homo sapien
tccgaaggagttgctattcctgcct

SEQ ID NO: 1493642 - DNA, 25 bp, Homo sapien
tacgcaatgccgctattattttcaa

SEQ ID NO: 1493643 - DNA, 25 bp, Homo sapien
gctgtatttgtgagacgatacgcaa

SEQ ID NO: 1493644 - DNA, 25 bp, Homo sapien
cccatgaattgtgcatacgggtccg

SEQ ID NO: 1493645 - DNA, 25 bp, Homo sapien
tgacgcccatgaattgtgcatacgg

SEQ ID NO: 1493646 - DNA, 25 bp, Homo sapien
ctgacgcccatgaattgtgcatacg

SEQ ID NO: 1493647 - DNA, 25 bp, Homo sapien
atgaattgtgcatacgggtccgccc

SEQ ID NO: 1493648 - DNA, 25 bp, Homo sapien
ctagaccacacgtaattcatggcaa

SEQ ID NO: 1493649 - DNA, 25 bp, Homo sapien
tagaccacacgtaattcatggcaaa

SEQ ID NO: 1493650 - DNA, 25 bp, Homo sapien
gaccacacgtaattcatggcaaact

SEQ ID NO: 1493651 - DNA, 25 bp, Homo sapien
agaccacacgtaattcatggcaaac

SEQ ID NO: 1493652 - DNA, 25 bp, Homo sapien
cccatccatgaagccatcctggtcc

SEQ ID NO: 1493653 - DNA, 25 bp, Homo sapien
ccatccatgaagccatcctggtcca

SEQ ID NO: 1493654 - DNA, 25 bp, Homo sapien
catccatgaagccatcctggtccat

SEQ ID NO: 1493655 - DNA, 25 bp, Homo sapien
aagaagcagcttgttactaggagaa

SEQ ID NO: 1493656 - DNA, 25 bp, Homo sapien
gaagaagcagcttgttactaggaga

SEQ ID NO: 1493657 - DNA, 25 bp, Homo sapien
ggaagaagcagcttgttactaggag

SEQ ID NO: 1493658 - DNA, 25 bp, Homo sapien
gaagcagcttgttactaggagaatt

SEQ ID NO: 1493659 - DNA, 25 bp, Homo sapien
tgagtgttggaggccccataggaat

SEQ ID NO: 1493660 - DNA, 25 bp, Homo sapien
catgtgttccccgaggaggaacggc

SEQ ID NO: 1493661 - DNA, 25 bp, Homo sapien
gaggaacggcgtagtcttggcgggc

SEQ ID NO: 1493662 - DNA, 25 bp, Homo sapien
ctgcccatgtgttccccgaggagga

SEQ ID NO: 1493663 - DNA, 25 bp, Homo sapien
cggcgtagtcttggcgggcttgtgg

SEQ ID NO: 1493664 - DNA, 25 bp, Homo sapien
atgagttgccaaagtgacatcttcc

SEQ ID NO: 1493665 - DNA, 25 bp, Homo sapien
acaatgagttgccaaagtgacatct

SEQ ID NO: 1493666 - DNA, 25 bp, Homo sapien
gagttgccaaagtgacatcttcctc

SEQ ID NO: 1493667 - DNA, 25 bp, Homo sapien
gttgccaaagtgacatcttcctctt

SEQ ID NO: 1493668 - DNA, 25 bp, Homo sapien
gctggcgagggtagtggcatctttg

SEQ ID NO: 1493669 - DNA, 25 bp, Homo sapien
tagtgggctggcgagggtagtggca

SEQ ID NO: 1493670 - DNA, 25 bp, Homo sapien
ggcgagggtagtggcatctttgtaa

SEQ ID NO: 1493671 - DNA, 25 bp, Homo sapien
catcttagtgggctggcgagggtag

SEQ ID NO: 1493672 - DNA, 25 bp, Homo sapien
agcgagaaaaagctgagatgctgct

SEQ ID NO: 1493673 - DNA, 25 bp, Homo sapien
ctgccagcgagaaaaagctgagatg

SEQ ID NO: 1493674 - DNA, 25 bp, Homo sapien
tggttgcatgggtcccccatagagt

SEQ ID NO: 1493675 - DNA, 25 bp, Homo sapien
agatgctgctggttgcatgggtccc

SEQ ID NO: 1493676 - DNA, 25 bp, Homo sapien
taatgtgcggccctgagcgtataat

SEQ ID NO: 1493677 - DNA, 25 bp, Homo sapien
tgggatgctggtttcccgcagacac

SEQ ID NO: 1493678 - DNA, 25 bp, Homo sapien
cgtataatcaacacgctcgcgtctg

SEQ ID NO: 1493679 - DNA, 25 bp, Homo sapien
cgcgtctgaagtgaactgggatgct

SEQ ID NO: 1493680 - DNA, 25 bp, Homo sapien
cagcagtatggatgcgtgcccaggt

SEQ ID NO: 1493681 - DNA, 25 bp, Homo sapien
tgaattcgagataaacagcagtatg

SEQ ID NO: 1493682 - DNA, 25 bp, Homo sapien
tgcgtgcccaggtatacttgaattc

SEQ ID NO: 1493683 - DNA, 25 bp, Homo sapien
cttgaattcgaggtgaacaggagta

SEQ ID NO: 1493684 - DNA, 25 bp, Homo sapien
acatttgagttggagataaacagca

SEQ ID NO: 1493685 - DNA, 25 bp, Homo sapien
agtggaattcgaggtaaacagcaga

SEQ ID NO: 1493686 - DNA, 25 bp, Homo sapien
gcagaacagttgcatgctcaggtac

SEQ ID NO: 1493687 - DNA, 25 bp, Homo sapien
ccaggtagagtggaattcgaggtaa

SEQ ID NO: 1493688 - DNA, 25 bp, Homo sapien
aaacaggccaatttgtcctgtctct

SEQ ID NO: 1493689 - DNA, 25 bp, Homo sapien
gcacgccggccccaaacaggccaat

SEQ ID NO: 1493690 - DNA, 25 bp, Homo sapien
ccccaaacaggccaatttgtcctgt

SEQ ID NO: 1493691 - DNA, 25 bp, Homo sapien
cctgtctctgtgggatctcttggtt

SEQ ID NO: 1493692 - DNA, 25 bp, Homo sapien
cggccgttgagtggcgtctgggatc

SEQ ID NO: 1493693 - DNA, 25 bp, Homo sapien
tttccagtgcgatggggcggccgtt

SEQ ID NO: 1493694 - DNA, 25 bp, Homo sapien
tcacgcctcatctggtttgatgtag

SEQ ID NO: 1493695 - DNA, 25 bp, Homo sapien
tcatctggtttgatgtagtcttttg

SEQ ID NO: 1493696 - DNA, 25 bp, Homo sapien
ggccattctctgactcccagacttt

SEQ ID NO: 1493697 - DNA, 25 bp, Homo sapien
ctggcttcaggccacggccattctc

SEQ ID NO: 1493698 - DNA, 25 bp, Homo sapien
ttctctgactcccagactttaattc

SEQ ID NO: 1493699 - DNA, 25 bp, Homo sapien
ggccacggccattctctgactccca

SEQ ID NO: 1493700 - DNA, 25 bp, Homo sapien
aggagccggtggtatgtcttcaatc

SEQ ID NO: 1493701 - DNA, 25 bp, Homo sapien
tagaactgatgcttccgttgcagag

SEQ ID NO: 1493702 - DNA, 25 bp, Homo sapien
gcttgatagcttttctctaaccaca

SEQ ID NO: 1493703 - DNA, 25 bp, Homo sapien
agaaggtcccgtctggtatctgacg

SEQ ID NO: 1493704 - DNA, 25 bp, Homo sapien
gcctggcttagaactgatgcttccg

SEQ ID NO: 1493705 - DNA, 25 bp, Homo sapien
ccagcgggtggccagagccgctgac

SEQ ID NO: 1493706 - DNA, 25 bp, Homo sapien
cagcgggtggccagagccgctgact

SEQ ID NO: 1493707 - DNA, 25 bp, Homo sapien
gccagcgggtggccagagccgctga

SEQ ID NO: 1493708 - DNA, 25 bp, Homo sapien
tgagaggatagagcgagaaggcggc

SEQ ID NO: 1493709 - DNA, 25 bp, Homo sapien
ctccaccctcgaaggaggaaggaag

SEQ ID NO: 1493710 - DNA, 25 bp, Homo sapien
gaaggaagcccttgataaaagccac

SEQ ID NO: 1493711 - DNA, 25 bp, Homo sapien
aaggccctgagaggatagagcgaga

SEQ ID NO: 1493712 - DNA, 25 bp, Homo sapien
ttgactttgctcaccctttgggacc

SEQ ID NO: 1493713 - DNA, 25 bp, Homo sapien
ccttgagggactcgtggaatccggc

SEQ ID NO: 1493714 - DNA, 25 bp, Homo sapien
gacttgtggtatccggtctggtatg

SEQ ID NO: 1493715 - DNA, 25 bp, Homo sapien
ccggtctggtatgaagattgtgaaa

SEQ ID NO: 1493716 - DNA, 25 bp, Homo sapien
tatcctatgcacataaacacagccc

SEQ ID NO: 1493717 - DNA, 25 bp, Homo sapien
actggaaagtctctggttatggaac

SEQ ID NO: 1493718 - DNA, 25 bp, Homo sapien
gggttcttctgaaagctcgcggata

SEQ ID NO: 1493719 - DNA, 25 bp, Homo sapien
gaatgggaagtaacagctccgctcg

SEQ ID NO: 1493720 - DNA, 25 bp, Homo sapien
acatcctacgcacataaacacagct

SEQ ID NO: 1493721 - DNA, 25 bp, Homo sapien
ggaatgggaagtaacagcgttgcat

SEQ ID NO: 1493722 - DNA, 25 bp, Homo sapien
gaagtaacagcgttgcattcagaag

SEQ ID NO: 1493723 - DNA, 25 bp, Homo sapien
actggaaagtctctggttgtggaac

SEQ ID NO: 1493724 - DNA, 25 bp, Homo sapien
tttcagggtgccccgaaagagcttc

SEQ ID NO: 1493725 - DNA, 25 bp, Homo sapien
aaaccttattagtctctgctgcagc

SEQ ID NO: 1493726 - DNA, 25 bp, Homo sapien
tcctgtccgatgaatgaggtttcag

SEQ ID NO: 1493727 - DNA, 25 bp, Homo sapien
tctgctgcagctctaatgtcctgtc

SEQ ID NO: 1493728 - DNA, 25 bp, Homo sapien
cccaaggtcacgctcatacactgga

SEQ ID NO: 1493729 - DNA, 25 bp, Homo sapien
tcacgctcatacactggacagggct

SEQ ID NO: 1493730 - DNA, 25 bp, Homo sapien
acagatccccaaggtcacgctcata

SEQ ID NO: 1493731 - DNA, 25 bp, Homo sapien
aaggtcacgctcatacactggacag

SEQ ID NO: 1493732 - DNA, 25 bp, Homo sapien
tagtgtagagtgtagatggatcccc

SEQ ID NO: 1493733 - DNA, 25 bp, Homo sapien
tattgtagagtgtaggaggatcccc

SEQ ID NO: 1493734 - DNA, 25 bp, Homo sapien
tagtgtagagtgtaggaggatcccc

SEQ ID NO: 1493735 - DNA, 25 bp, Homo sapien
tattgtagagtgtaggtggatcccc

SEQ ID NO: 1493736 - DNA, 25 bp, Homo sapien
ggatccccagatgggtgtgtctatt

SEQ ID NO: 1493737 - DNA, 25 bp, Homo sapien
taggtggatccccagatgggtgttt

SEQ ID NO: 1493738 - DNA, 25 bp, Homo sapien
tattgtagagtatagctggatccca

SEQ ID NO: 1493739 - DNA, 25 bp, Homo sapien
taaagggtaagtggatccccagatg

SEQ ID NO: 1493740 - DNA, 25 bp, Homo sapien
ctctgcagactttataggcaggctg

SEQ ID NO: 1493741 - DNA, 25 bp, Homo sapien
taatcttaagcaaatgggatttcca

SEQ ID NO: 1493742 - DNA, 25 bp, Homo sapien
gatttccagttgatcggcgccatct

SEQ ID NO: 1493743 - DNA, 25 bp, Homo sapien
gcatgacatccatagagtgcgtggg

SEQ ID NO: 1493744 - DNA, 25 bp, Homo sapien
gacgtgttgactagagttctctcgg

SEQ ID NO: 1493745 - DNA, 25 bp, Homo sapien
cgatgtcccacggacgacgtgttga

SEQ ID NO: 1493746 - DNA, 25 bp, Homo sapien
ccttttgccgaaagcgatgtgaaca

SEQ ID NO: 1493747 - DNA, 25 bp, Homo sapien
gaacagaaatacagccgatgtccca

SEQ ID NO: 1493748 - DNA, 25 bp, Homo sapien
cattatcaaattgggctcactcagc

SEQ ID NO: 1493749 - DNA, 25 bp, Homo sapien
gatatgcaaactggaaggctgggca

SEQ ID NO: 1493750 - DNA, 25 bp, Homo sapien
ttccaaaccagaacgtatccagctg

SEQ ID NO: 1493751 - DNA, 25 bp, Homo sapien
tccagctgccttggataccgaggat

SEQ ID NO: 1493752 - DNA, 25 bp, Homo sapien
cacatccagaagttgaaaggaagag

SEQ ID NO: 1493753 - DNA, 25 bp, Homo sapien
taccctgtggccgtacaggaagcca

SEQ ID NO: 1493754 - DNA, 25 bp, Homo sapien
gaagccacaggcgtgtacattaccc

SEQ ID NO: 1493755 - DNA, 25 bp, Homo sapien
gctgaatctctaacaacatctaaca

SEQ ID NO: 1493756 - DNA, 25 bp, Homo sapien
aggcagcaggaacatgtaaattata

SEQ ID NO: 1493757 - DNA, 25 bp, Homo sapien
tcagagtttgctttcatatgcccca

SEQ ID NO: 1493758 - DNA, 25 bp, Homo sapien
cgataccgtagcgtggaaggcagca

SEQ ID NO: 1493759 - DNA, 25 bp, Homo sapien
aagtcatcaggtgctccgataccgt

SEQ ID NO: 1493760 - DNA, 25 bp, Homo sapien
ggtgcatttagcacagatggttccc

SEQ ID NO: 1493761 - DNA, 25 bp, Homo sapien
gaggccagacggatttgttgtgaaa

SEQ ID NO: 1493762 - DNA, 25 bp, Homo sapien
cagacggatttgttgtgaaagatga

SEQ ID NO: 1493763 - DNA, 25 bp, Homo sapien
gcaagaggccagacggatttgttgt

SEQ ID NO: 1493764 - DNA, 25 bp, Homo sapien
agaaattcagaccgagttgcattgg

SEQ ID NO: 1493765 - DNA, 25 bp, Homo sapien
aaattcagaccgagttgcattggcc

SEQ ID NO: 1493766 - DNA, 25 bp, Homo sapien
aattcagaccgagttgcattggcca

SEQ ID NO: 1493767 - DNA, 25 bp, Homo sapien
attcagaccgagttgcattggccat

SEQ ID NO: 1493768 - DNA, 25 bp, Homo sapien
tggtaaccgcctccaaatgcaccga

SEQ ID NO: 1493769 - DNA, 25 bp, Homo sapien
gtggagaggccgtccccaagcgtct

SEQ ID NO: 1493770 - DNA, 25 bp, Homo sapien
gccgtttgatcacggcagccacctg

SEQ ID NO: 1493771 - DNA, 25 bp, Homo sapien
tcagcaccggcggacacgccgtttg

SEQ ID NO: 1493772 - DNA, 25 bp, Homo sapien
tgcccggctgccgattaatatgaag

SEQ ID NO: 1493773 - DNA, 25 bp, Homo sapien
gacttttcggaaagatcagacagcg

SEQ ID NO: 1493774 - DNA, 25 bp, Homo sapien
ttttcctacagagatgacgtcccgg

SEQ ID NO: 1493775 - DNA, 25 bp, Homo sapien
cagacagcgatgtaccttggaccgt

SEQ ID NO: 1493776 - DNA, 25 bp, Homo sapien
acgtcgctgctgaacgcctccagcc

SEQ ID NO: 1493777 - DNA, 25 bp, Homo sapien
gacaactgccttctctgttacggcc

SEQ ID NO: 1493778 - DNA, 25 bp, Homo sapien
ggtatggggatatcacagcaggaaa

SEQ ID NO: 1493779 - DNA, 25 bp, Homo sapien
tccagcccacgagatccttctcagt

SEQ ID NO: 1493780 - DNA, 25 bp, Homo sapien
gaaggttgtactccccgattgagct

SEQ ID NO: 1493781 - DNA, 25 bp, Homo sapien
gatacagccttcgtggttccagttg

SEQ ID NO: 1493782 - DNA, 25 bp, Homo sapien
gggtcagcagcttcgtaaccatgaa

SEQ ID NO: 1493783 - DNA, 25 bp, Homo sapien
tcccgtgtgcgctgaaagcagcttt

SEQ ID NO: 1493784 - DNA, 25 bp, Homo sapien
tcgtctatagatgggtatgagggct

SEQ ID NO: 1493785 - DNA, 25 bp, Homo sapien
tctatagatgggtatgagggctgtc

SEQ ID NO: 1493786 - DNA, 25 bp, Homo sapien
tcatctatagatgggtatgagggct

SEQ ID NO: 1493787 - DNA, 25 bp, Homo sapien
ttcatctatagatgggtatgagggc

SEQ ID NO: 1493788 - DNA, 25 bp, Homo sapien
tcaacacacggaaattcctaagtgg

SEQ ID NO: 1493789 - DNA, 25 bp, Homo sapien
caaagcagtggaaggaagtataatt

SEQ ID NO: 1493790 - DNA, 25 bp, Homo sapien
taagtggctgcagttaccgtaacaa

SEQ ID NO: 1493791 - DNA, 25 bp, Homo sapien
tttctgccgcatcccagaaaggctg

SEQ ID NO: 1493792 - DNA, 25 bp, Homo sapien
caggttcaagtgactctcctgcctc

SEQ ID NO: 1493793 - DNA, 25 bp, Homo sapien
tgcagtggcacgatcttggctcatt

SEQ ID NO: 1493794 - DNA, 25 bp, Homo sapien
ctcgcccttgtcgtccaggctagag

SEQ ID NO: 1493795 - DNA, 25 bp, Homo sapien
ttgcaacctctgcctcccaggttca

SEQ ID NO: 1493796 - DNA, 25 bp, Homo sapien
cgggaacgcagctccggaacgcagg

SEQ ID NO: 1493797 - DNA, 25 bp, Homo sapien
cgcagctccggaacgcaggacagag

SEQ ID NO: 1493798 - DNA, 25 bp, Homo sapien
aacgcagctccggaacgcaggacag

SEQ ID NO: 1493799 - DNA, 25 bp, Homo sapien
gctccggaacgcaggacagaggtgc

SEQ ID NO: 1493800 - DNA, 25 bp, Homo sapien
tgatcaggagcagcgtgagccaaag

SEQ ID NO: 1493801 - DNA, 25 bp, Homo sapien
agggtgatcaggagcagcgtgagcc

SEQ ID NO: 1493802 - DNA, 25 bp, Homo sapien
agcagcgtgagccaaaggaggacca

SEQ ID NO: 1493803 - DNA, 25 bp, Homo sapien
atcaggagcagcgtgagccaaagga

SEQ ID NO: 1493804 - DNA, 25 bp, Homo sapien
aactgctgagcctttgctttcatcc

SEQ ID NO: 1493805 - DNA, 25 bp, Homo sapien
acatttctgttaaggtcccaggtca

SEQ ID NO: 1493806 - DNA, 25 bp, Homo sapien
cggcatagaatagtcggcgtcttta

SEQ ID NO: 1493807 - DNA, 25 bp, Homo sapien
gcgtctttaacacactcgatatcgg

SEQ ID NO: 1493808 - DNA, 25 bp, Homo sapien
ccagcgatgggagcagtattggttc

SEQ ID NO: 1493809 - DNA, 25 bp, Homo sapien
ccaggtagtcatgacaccagcgatg

SEQ ID NO: 1493810 - DNA, 25 bp, Homo sapien
tgggagcagtattggttctgagatt

SEQ ID NO: 1493811 - DNA, 25 bp, Homo sapien
cttcggggcagaaaccaggtagtca

SEQ ID NO: 1493812 - DNA, 25 bp, Homo sapien
gacggtgtagttggtcacttcacat

SEQ ID NO: 1493813 - DNA, 25 bp, Homo sapien
cacataaggaaattgctccaaactg

SEQ ID NO: 1493814 - DNA, 25 bp, Homo sapien
tcagggaagaggatccacgtggaga

SEQ ID NO: 1493815 - DNA, 25 bp, Homo sapien
tgggttggccactcggacggtgtag

SEQ ID NO: 1493816 - DNA, 25 bp, Homo sapien
tcaagaaatccacgtcatgaatcca

SEQ ID NO: 1493817 - DNA, 25 bp, Homo sapien
ttggcaacgttcaagtacaggtcgt

SEQ ID NO: 1493818 - DNA, 25 bp, Homo sapien
aatccagcaggtcagattctccgca

SEQ ID NO: 1493819 - DNA, 25 bp, Homo sapien
gtacaggtcgtactggacgtccgcg

SEQ ID NO: 1493820 - DNA, 25 bp, Homo sapien
gggacgaccccacgccgatggcacc

SEQ ID NO: 1493821 - DNA, 25 bp, Homo sapien
tgggggacgaccccacgccgatggc

SEQ ID NO: 1493822 - DNA, 25 bp, Homo sapien
cgaccccacgccgatggcacccgca

SEQ ID NO: 1493823 - DNA, 25 bp, Homo sapien
ccccacgccgatggcacccgcacca

SEQ ID NO: 1493824 - DNA, 25 bp, Homo sapien
tgagcatccgttttgtagtgaagac

SEQ ID NO: 1493825 - DNA, 25 bp, Homo sapien
tgccccgcaccaggatgtgggaact

SEQ ID NO: 1493826 - DNA, 25 bp, Homo sapien
gagatgtcatcgaaacgacacccga

SEQ ID NO: 1493827 - DNA, 25 bp, Homo sapien
tagtgaagacactcgtactgttgac

SEQ ID NO: 1493828 - DNA, 25 bp, Homo sapien
cattttccagtgcataaaggaatgt

SEQ ID NO: 1493829 - DNA, 25 bp, Homo sapien
gaatgtgtcttattacactttgcag

SEQ ID NO: 1493830 - DNA, 25 bp, Homo sapien
tctgaagctcatagcgaaatttgcg

SEQ ID NO: 1493831 - DNA, 25 bp, Homo sapien
aatttgcgattgaaatgacttctca

SEQ ID NO: 1493832 - DNA, 25 bp, Homo sapien
ctgttctgtgattacaggctgcatt

SEQ ID NO: 1493833 - DNA, 25 bp, Homo sapien
tgttctgtgattacaggctgcattc

SEQ ID NO: 1493834 - DNA, 25 bp, Homo sapien
gttctgtgattacaggctgcattct

SEQ ID NO: 1493835 - DNA, 25 bp, Homo sapien
tttgcaatgtcaagtacagcggctg

SEQ ID NO: 1493836 - DNA, 25 bp, Homo sapien
tgcaatgtcaagtacagcggctggg

SEQ ID NO: 1493837 - DNA, 25 bp, Homo sapien
cctttgcaatgtcaagtacagcggc

SEQ ID NO: 1493838 - DNA, 25 bp, Homo sapien
agcggctgggggtagggaacactca

SEQ ID NO: 1493839 - DNA, 25 bp, Homo sapien
ctgggcaacaagagaaaaactccgt

SEQ ID NO: 1493840 - DNA, 25 bp, Homo sapien
gatgaagagagggaaggagaaaggg

SEQ ID NO: 1493841 - DNA, 25 bp, Homo sapien
ctccgtttcaaaaagaaagatgaag

SEQ ID NO: 1493842 - DNA, 25 bp, Homo sapien
gcaacaagagaaaaactccgtttca

SEQ ID NO: 1493843 - DNA, 25 bp, Homo sapien
agagagacagagaggggaagggaga

SEQ ID NO: 1493844 - DNA, 25 bp, Homo sapien
agagacagagaggggaagggagaga

SEQ ID NO: 1493845 - DNA, 25 bp, Homo sapien
gagagagagacagaggggaagggag

SEQ ID NO: 1493846 - DNA, 25 bp, Homo sapien
gagagagacagaggggaagggagag

SEQ ID NO: 1493847 - DNA, 25 bp, Homo sapien
ggaaggatcctcattagtccatgaa

SEQ ID NO: 1493848 - DNA, 25 bp, Homo sapien
caggaggacggagatagaaacagac

SEQ ID NO: 1493849 - DNA, 25 bp, Homo sapien
tggactaatacaggaggacggagat

SEQ ID NO: 1493850 - DNA, 25 bp, Homo sapien
aacagacatagacagagatagtggg

SEQ ID NO: 1493851 - DNA, 25 bp, Homo sapien
aaataaagaagaggggccaggtatg

SEQ ID NO: 1493852 - DNA, 25 bp, Homo sapien
caggtatggtggctcatgactctca

SEQ ID NO: 1493853 - DNA, 25 bp, Homo sapien
ggccaggtatggtggctcatgactc

SEQ ID NO: 1493854 - DNA, 25 bp, Homo sapien
aggtatggtggctcatgactctcac

SEQ ID NO: 1493855 - DNA, 25 bp, Homo sapien
ctttcccgggctcttatttgtactg

SEQ ID NO: 1493856 - DNA, 25 bp, Homo sapien
gtgctccaggcgctcaagaattcat

SEQ ID NO: 1493857 - DNA, 25 bp, Homo sapien
tgtactgtgtacgttccaggattga

SEQ ID NO: 1493858 - DNA, 25 bp, Homo sapien
gaattcatacactctttcccgggct

SEQ ID NO: 1493859 - DNA, 25 bp, Homo sapien
tgcagatcacgaagacacagaccag

SEQ ID NO: 1493860 - DNA, 25 bp, Homo sapien
cgacgtccgccaggcacgtgtgttt

SEQ ID NO: 1493861 - DNA, 25 bp, Homo sapien
tgtgtttgcgccctcctcctggtcg

SEQ ID NO: 1493862 - DNA, 25 bp, Homo sapien
gcgatcagcagcgacgtccgccagg

SEQ ID NO: 1493863 - DNA, 25 bp, Homo sapien
ctgaacccaaaaccgaccagctcat

SEQ ID NO: 1493864 - DNA, 25 bp, Homo sapien
aaaaccgaccagctcatcatctggg

SEQ ID NO: 1493865 - DNA, 25 bp, Homo sapien
aacccaaaaccgaccagctcatcat

SEQ ID NO: 1493866 - DNA, 25 bp, Homo sapien
ccaaaaccgaccagctcatcatctg

SEQ ID NO: 1493867 - DNA, 25 bp, Homo sapien
tcggaggaaagagaaatggcccagc

SEQ ID NO: 1493868 - DNA, 25 bp, Homo sapien
cggaggaaagagaaatggcccagct

SEQ ID NO: 1493869 - DNA, 25 bp, Homo sapien
ctcggaggaaagagaaatggcccag

SEQ ID NO: 1493870 - DNA, 25 bp, Homo sapien
tggaagctgtcaccgatggggtctt

SEQ ID NO: 1493871 - DNA, 25 bp, Homo sapien
ttttggaagctgtcaccgatggggt

SEQ ID NO: 1493872 - DNA, 25 bp, Homo sapien
agggatgcggggaaagagtctctgc

SEQ ID NO: 1493873 - DNA, 25 bp, Homo sapien
gctgtcaccgatggggtctttcatg

SEQ ID NO: 1493874 - DNA, 25 bp, Homo sapien
tcccaaagtggccaccacgcctcca

SEQ ID NO: 1493875 - DNA, 25 bp, Homo sapien
gcctccagacccgtcccaaggcaga

SEQ ID NO: 1493876 - DNA, 25 bp, Homo sapien
tccagacccgtcccaaggcagaaaa

SEQ ID NO: 1493877 - DNA, 25 bp, Homo sapien
aaagtggccaccacgcctccagacc

SEQ ID NO: 1493878 - DNA, 25 bp, Homo sapien
tcaagttttctgcacgacctgtact

SEQ ID NO: 1493879 - DNA, 25 bp, Homo sapien
tctgcacgacctgtacttcagtcac

SEQ ID NO: 1493880 - DNA, 25 bp, Homo sapien
agttttctgcacgacctgtacttca

SEQ ID NO: 1493881 - DNA, 25 bp, Homo sapien
tttctgcacgacctgtacttcagtc

SEQ ID NO: 1493882 - DNA, 25 bp, Homo sapien
ccattcctgggctgcgtgcgcaggt

SEQ ID NO: 1493883 - DNA, 25 bp, Homo sapien
ccaccacccgttaggaatgtccatt

SEQ ID NO: 1493884 - DNA, 25 bp, Homo sapien
cagccagtctgtgcaggcgcctggc

SEQ ID NO: 1493885 - DNA, 25 bp, Homo sapien
tcctggcagcttcggacgaaattac

SEQ ID NO: 1493886 - DNA, 25 bp, Homo sapien
gggccagactcggtgactacaggcc

SEQ ID NO: 1493887 - DNA, 25 bp, Homo sapien
cagactcggtgactacaggccagcc

SEQ ID NO: 1493888 - DNA, 25 bp, Homo sapien
agaccgagactcggtctgaaaaaag

SEQ ID NO: 1493889 - DNA, 25 bp, Homo sapien
tcggtgactacaggccagcctgtaa

SEQ ID NO: 1493890 - DNA, 25 bp, Homo sapien
gagacactccagtactgagacctag

SEQ ID NO: 1493891 - DNA, 25 bp, Homo sapien
cttcaagggtgcgtggtccaacgtc

SEQ ID NO: 1493892 - DNA, 25 bp, Homo sapien
tcaagaaggtgatctaagggccgcg

SEQ ID NO: 1493893 - DNA, 25 bp, Homo sapien
tgctggtcctgtacgacgagctcaa

SEQ ID NO: 1493894 - DNA, 25 bp, Homo sapien
ctccaccgtgaagggtaattctaag

SEQ ID NO: 1493895 - DNA, 25 bp, Homo sapien
ggccaatagggcaacgagcctgccc

SEQ ID NO: 1493896 - DNA, 25 bp, Homo sapien
aacccttccggtggatgcctggcag

SEQ ID NO: 1493897 - DNA, 25 bp, Homo sapien
gaaggccgcgatcgctttgtccacg

SEQ ID NO: 1493898 - DNA, 25 bp, Homo sapien
ttcttcttggtccttggaggggcag

SEQ ID NO: 1493899 - DNA, 25 bp, Homo sapien
ctcccaggtcatgccctagtcaggc

SEQ ID NO: 1493900 - DNA, 25 bp, Homo sapien
cacttccaattcctgggtgtgaggc

SEQ ID NO: 1493901 - DNA, 25 bp, Homo sapien
agtgagagacacagctctaccccca

SEQ ID NO: 1493902 - DNA, 25 bp, Homo sapien
tcccggccgtccgatgaagcctgaa

SEQ ID NO: 1493903 - DNA, 25 bp, Homo sapien
gccgtccgatgaagcctgaagtctt

SEQ ID NO: 1493904 - DNA, 25 bp, Homo sapien
cgatgaagcctgaagtcttcccgtt

SEQ ID NO: 1493905 - DNA, 25 bp, Homo sapien
tcccgttaaaacacctctgcttctg

SEQ ID NO: 1493906 - DNA, 25 bp, Homo sapien
tgatgtcgagtacacagctcctccc

SEQ ID NO: 1493907 - DNA, 25 bp, Homo sapien
aggatgatgtcgagtacacagctcc

SEQ ID NO: 1493908 - DNA, 25 bp, Homo sapien
agaggtcttggggagccctcttcca

SEQ ID NO: 1493909 - DNA, 25 bp, Homo sapien
tgaggagcccttttcaggggggtga

SEQ ID NO: 1493910 - DNA, 25 bp, Homo sapien
aaacaggacctctggactcttaaga

SEQ ID NO: 1493911 - DNA, 25 bp, Homo sapien
tgcccttaaagcaagggcccgtgga

SEQ ID NO: 1493912 - DNA, 25 bp, Homo sapien
tggagtaactgtgcaaaaacaggac

SEQ ID NO: 1493913 - DNA, 25 bp, Homo sapien
ggtgccctcgccatttgcccttaaa

SEQ ID NO: 1493914 - DNA, 25 bp, Homo sapien
ctttgatggttttgaagcctgaagc

SEQ ID NO: 1493915 - DNA, 25 bp, Homo sapien
ggggaatggggacgggatgcagaca

SEQ ID NO: 1493916 - DNA, 25 bp, Homo sapien
gcggggaatggggacgggatgcaga

SEQ ID NO: 1493917 - DNA, 25 bp, Homo sapien
ttttgaagcctgaagctccttcctc

SEQ ID NO: 1493918 - DNA, 25 bp, Homo sapien
ctgtcttacggcacgaagcccaggg

SEQ ID NO: 1493919 - DNA, 25 bp, Homo sapien
ctccgtagggctcacaggcggcttc

SEQ ID NO: 1493920 - DNA, 25 bp, Homo sapien
tgaccactggccatctcggaagaaa

SEQ ID NO: 1493921 - DNA, 25 bp, Homo sapien
ggcttctagagaagatgcccgccac

SEQ ID NO: 1493922 - DNA, 25 bp, Homo sapien
tgagaaagcaggcaaagtccctgcc

SEQ ID NO: 1493923 - DNA, 25 bp, Homo sapien
ggccctcaccgcgtggcaatcaaga

SEQ ID NO: 1493924 - DNA, 25 bp, Homo sapien
tcaagaaggatgaggcttccaggcc

SEQ ID NO: 1493925 - DNA, 25 bp, Homo sapien
tggggcgacagcatcccggtcacct

SEQ ID NO: 1493926 - DNA, 25 bp, Homo sapien
tcacacatggtgtctccatgggagg

SEQ ID NO: 1493927 - DNA, 25 bp, Homo sapien
cacacatggtgtctccatgggaggc

SEQ ID NO: 1493928 - DNA, 25 bp, Homo sapien
ggcggcctatatcaaggtgcgagct

SEQ ID NO: 1493929 - DNA, 25 bp, Homo sapien
tgttctatccgtgtacaggcacgtg

SEQ ID NO: 1493930 - DNA, 25 bp, Homo sapien
tacagtggcctggtatcacaaaaga

SEQ ID NO: 1493931 - DNA, 25 bp, Homo sapien
ggcctatttcaaggtgctcactgca

SEQ ID NO: 1493932 - DNA, 25 bp, Homo sapien
cacatgctcactgcggttgtaggga

SEQ ID NO: 1493933 - DNA, 25 bp, Homo sapien
ggaggcatctgcaaagcgagaaccg

SEQ ID NO: 1493934 - DNA, 25 bp, Homo sapien
taggtgctgttttcacggcgcgtgc

SEQ ID NO: 1493935 - DNA, 25 bp, Homo sapien
ccttaggaggcactgaggttcagga

SEQ ID NO: 1493936 - DNA, 25 bp, Homo sapien
agagactgtcacgagcgggacctcc

SEQ ID NO: 1493937 - DNA, 25 bp, Homo sapien
gagactgtcacgagcgggacctccc

SEQ ID NO: 1493938 - DNA, 25 bp, Homo sapien
caggctatggagtggcagttctctg

SEQ ID NO: 1493939 - DNA, 25 bp, Homo sapien
cccacaggctatggagtggcagttc

SEQ ID NO: 1493940 - DNA, 25 bp, Homo sapien
cacaggctatggagtggcagttctc

SEQ ID NO: 1493941 - DNA, 25 bp, Homo sapien
atgcccacaggctatggagtggcag

SEQ ID NO: 1493942 - DNA, 25 bp, Homo sapien
tcttctgcacgatttccagtgtgtt

SEQ ID NO: 1493943 - DNA, 25 bp, Homo sapien
caggcagacggctgctgtgacggtg

SEQ ID NO: 1493944 - DNA, 25 bp, Homo sapien
tgccgtctaccaggcagggtctcag

SEQ ID NO: 1493945 - DNA, 25 bp, Homo sapien
gtgtgtttcctccatggggcgccat

SEQ ID NO: 1493946 - DNA, 25 bp, Homo sapien
cactgaacatgctggtgcagactga

SEQ ID NO: 1493947 - DNA, 25 bp, Homo sapien
actgaacatgctggtgcagactgaa

SEQ ID NO: 1493948 - DNA, 25 bp, Homo sapien
agtcactgaacatgctggtgcagac

SEQ ID NO: 1493949 - DNA, 25 bp, Homo sapien
ctgtgtcctgctgaaggatccccgc

SEQ ID NO: 1493950 - DNA, 25 bp, Homo sapien
cgttctgagctcctgttgcctgctg

SEQ ID NO: 1493951 - DNA, 25 bp, Homo sapien
gagctcctgttgcctgctgtgtccc

SEQ ID NO: 1493952 - DNA, 25 bp, Homo sapien
ctgctgaaggatccccgcctggctg

SEQ ID NO: 1493953 - DNA, 25 bp, Homo sapien
ggccagacgacaaagtccacaagtt

SEQ ID NO: 1493954 - DNA, 25 bp, Homo sapien
ctggccagacgacaaagtccacaag

SEQ ID NO: 1493955 - DNA, 25 bp, Homo sapien
aaagtccacaagttactcagcaggg

SEQ ID NO: 1493956 - DNA, 25 bp, Homo sapien
agttactcagcagggtcgccgagag

SEQ ID NO: 1493957 - DNA, 25 bp, Homo sapien
tgtacgtcctgtgccggatcctgca

SEQ ID NO: 1493958 - DNA, 25 bp, Homo sapien
cccagcgctgagctgtacgtcctgt

SEQ ID NO: 1493959 - DNA, 25 bp, Homo sapien
ctgacggacgtatctcgttttgtct

SEQ ID NO: 1493960 - DNA, 25 bp, Homo sapien
gagctgtacgtcctgtgccggatcc

SEQ ID NO: 1493961 - DNA, 25 bp, Homo sapien
gagtcaaaccgcacgggcgtgacat

SEQ ID NO: 1493962 - DNA, 25 bp, Homo sapien
tgtacttcaggaagacccattcccg

SEQ ID NO: 1493963 - DNA, 25 bp, Homo sapien
tggagctctgttcaagtccccacgg

SEQ ID NO: 1493964 - DNA, 25 bp, Homo sapien
ggcgtgacatcactaaccagctcct

SEQ ID NO: 1493965 - DNA, 25 bp, Homo sapien
tgccattgcccactcaccggcagtg

SEQ ID NO: 1493966 - DNA, 25 bp, Homo sapien
atgtgcgccgactctgcctgcctcg

SEQ ID NO: 1493967 - DNA, 25 bp, Homo sapien
cctgaatcaggggatcaccagagaa

SEQ ID NO: 1493968 - DNA, 25 bp, Homo sapien
cagcaattacagaggggcgtgcagc

SEQ ID NO: 1493969 - DNA, 25 bp, Homo sapien
cagaccggaggtctgagatcaaggc

SEQ ID NO: 1493970 - DNA, 25 bp, Homo sapien
cctgtcctgcagaccggaggtctga

SEQ ID NO: 1493971 - DNA, 25 bp, Homo sapien
ctggggcttaggacttggacagatc

SEQ ID NO: 1493972 - DNA, 25 bp, Homo sapien
gatcttttggacgtcaccacccaac

SEQ ID NO: 1493973 - DNA, 25 bp, Homo sapien
tcatcagtgcaagtagccgagacgt

SEQ ID NO: 1493974 - DNA, 25 bp, Homo sapien
tcacggaaggaactgacccgagagc

SEQ ID NO: 1493975 - DNA, 25 bp, Homo sapien
cattcatgggcatccacggtgccga

SEQ ID NO: 1493976 - DNA, 25 bp, Homo sapien
gaacagccgagatcagcattcatgg

SEQ ID NO: 1493977 - DNA, 25 bp, Homo sapien
gtgtgcgtgcctgtctgttggtgta

SEQ ID NO: 1493978 - DNA, 25 bp, Homo sapien
tgcctgtcactgtatctgtatgtcc

SEQ ID NO: 1493979 - DNA, 25 bp, Homo sapien
tgtgtgcgtgcctgtctgttggtgt

SEQ ID NO: 1493980 - DNA, 25 bp, Homo sapien
tgtgcgtgcgtaagaatgtgtctct

SEQ ID NO: 1493981 - DNA, 25 bp, Homo sapien
ctgctgtgcttgtgtgtacgtctgt

SEQ ID NO: 1493982 - DNA, 25 bp, Homo sapien
catgactgactgtgtgtggtatgtc

SEQ ID NO: 1493983 - DNA, 25 bp, Homo sapien
tgtgtgcgtgcgtaagaatgtgtct

SEQ ID NO: 1493984 - DNA, 25 bp, Homo sapien
taacacaggtctattgactcacaca

SEQ ID NO: 1493985 - DNA, 25 bp, Homo sapien
aaggcgtggcagctcatgccggtaa

SEQ ID NO: 1493986 - DNA, 25 bp, Homo sapien
cacttggctatggagagcagccgac

SEQ ID NO: 1493987 - DNA, 25 bp, Homo sapien
tcagtatgatgatttttgcagccac

SEQ ID NO: 1493988 - DNA, 25 bp, Homo sapien
catcgtcccttagttgtggttctgg

SEQ ID NO: 1493989 - DNA, 25 bp, Homo sapien
tccctgctgacatcgtcccttagtt

SEQ ID NO: 1493990 - DNA, 25 bp, Homo sapien
cggtgcacgccgaaatttctgttta

SEQ ID NO: 1493991 - DNA, 25 bp, Homo sapien
gttctggtctccgtagcccggtgca

SEQ ID NO: 1493992 - DNA, 25 bp, Homo sapien
tcttggagatgccaggcgtaataac

SEQ ID NO: 1493993 - DNA, 25 bp, Homo sapien
ccaggcgtaataacaaacagaaaag

SEQ ID NO: 1493994 - DNA, 25 bp, Homo sapien
ggatgctactccacacctcagcaag

SEQ ID NO: 1493995 - DNA, 25 bp, Homo sapien
cagcctggatgctactccacacctc

SEQ ID NO: 1493996 - DNA, 25 bp, Homo sapien
acagaaccgagagattcaggccacc

SEQ ID NO: 1493997 - DNA, 25 bp, Homo sapien
caggacagaaccgagagattcaggc

SEQ ID NO: 1493998 - DNA, 25 bp, Homo sapien
ctcccaggacagaaccgagagattc

SEQ ID NO: 1493999 - DNA, 25 bp, Homo sapien
tcccaggacagaaccgagagattca

SEQ ID NO: 1494000 - DNA, 25 bp, Homo sapien
ctgtcacaggaaggaaggctggata

SEQ ID NO: 1494001 - DNA, 25 bp, Homo sapien
gtcacaggaaggaaggctggatagc

SEQ ID NO: 1494002 - DNA, 25 bp, Homo sapien
cacaggaaggaaggctggatagcag

SEQ ID NO: 1494003 - DNA, 25 bp, Homo sapien
caggaaggaaggctggatagcagcc

SEQ ID NO: 1494004 - DNA, 25 bp, Homo sapien
ttccaagacgtagttcacaagaggg

SEQ ID NO: 1494005 - DNA, 25 bp, Homo sapien
taagcctggacatggtatctgagaa

SEQ ID NO: 1494006 - DNA, 25 bp, Homo sapien
tagttcacaagagggccctgggact

SEQ ID NO: 1494007 - DNA, 25 bp, Homo sapien
aagtcggaccgaaaacattcagatg

SEQ ID NO: 1494008 - DNA, 25 bp, Homo sapien
ggccaaaagtctgcaaagcaccgtc

SEQ ID NO: 1494009 - DNA, 25 bp, Homo sapien
atgcacagagtgcttccaggggtct

SEQ ID NO: 1494010 - DNA, 25 bp, Homo sapien
gtctgcaaagcaccgtcacagggat

SEQ ID NO: 1494011 - DNA, 25 bp, Homo sapien
gcaaagcaccgtcacagggatgcac

SEQ ID NO: 1494012 - DNA, 25 bp, Homo sapien
cagtagctctgatggaatctccagg

SEQ ID NO: 1494013 - DNA, 25 bp, Homo sapien
cgtatgaggatgaatgcaagacttt

SEQ ID NO: 1494014 - DNA, 25 bp, Homo sapien
caagactttgagttcacacggtgct

SEQ ID NO: 1494015 - DNA, 25 bp, Homo sapien
tggaagcacttgctcctccgggctt

SEQ ID NO: 1494016 - DNA, 25 bp, Homo sapien
ggtgagccgccgagctggactttta

SEQ ID NO: 1494017 - DNA, 25 bp, Homo sapien
gagctctcacctgctacttctgccg

SEQ ID NO: 1494018 - DNA, 25 bp, Homo sapien
agccgccgagctggacttttatgct

SEQ ID NO: 1494019 - DNA, 25 bp, Homo sapien
acaggtgagccgccgagctggactt

SEQ ID NO: 1494020 - DNA, 25 bp, Homo sapien
tgacagccgtgggaccccactctgt

SEQ ID NO: 1494021 - DNA, 25 bp, Homo sapien
cgcactcacaaacctgtagagtatc

SEQ ID NO: 1494022 - DNA, 25 bp, Homo sapien
ggtctccgcactcacaaacctgtag

SEQ ID NO: 1494023 - DNA, 25 bp, Homo sapien
gcctgtttggggtctccgcactcac

SEQ ID NO: 1494024 - DNA, 25 bp, Homo sapien
gctcctccgaggtgaaacacttatg

SEQ ID NO: 1494025 - DNA, 25 bp, Homo sapien
gactgccgctatccgattttctcca

SEQ ID NO: 1494026 - DNA, 25 bp, Homo sapien
ctcctccgaggtgaaacacttatgt

SEQ ID NO: 1494027 - DNA, 25 bp, Homo sapien
gccgctatccgattttctccaagct

SEQ ID NO: 1494028 - DNA, 25 bp, Homo sapien
ttcagcaattgcatgtccgtccttc

SEQ ID NO: 1494029 - DNA, 25 bp, Homo sapien
tttcagcaattgcatgtccgtcctt

SEQ ID NO: 1494030 - DNA, 25 bp, Homo sapien
tcagcaattgcatgtccgtccttct

SEQ ID NO: 1494031 - DNA, 25 bp, Homo sapien
tcattgtcaatggataggattgtca

SEQ ID NO: 1494032 - DNA, 25 bp, Homo sapien
cattgtcaatggataggattgtcat

SEQ ID NO: 1494033 - DNA, 25 bp, Homo sapien
atcattgtcaatggataggattgtc

SEQ ID NO: 1494034 - DNA, 25 bp, Homo sapien
cccggaggcgcctccgacgccgcca

SEQ ID NO: 1494035 - DNA, 25 bp, Homo sapien
gtcgccgcccgccctctatgacgca

SEQ ID NO: 1494036 - DNA, 25 bp, Homo sapien
ccgccgctggcccaagctcccgccg

SEQ ID NO: 1494037 - DNA, 25 bp, Homo sapien
gacgatccccggacaggcgcggcct

SEQ ID NO: 1494038 - DNA, 25 bp, Homo sapien
atccagcagccagcagctcccaagg

SEQ ID NO: 1494039 - DNA, 25 bp, Homo sapien
tccagcagccagcagctcccaaggc

SEQ ID NO: 1494040 - DNA, 25 bp, Homo sapien
aacataagacgcagacagtcagcac

SEQ ID NO: 1494041 - DNA, 25 bp, Homo sapien
cactttctggacccggagaagagaa

SEQ ID NO: 1494042 - DNA, 25 bp, Homo sapien
tctgccgtgtcagagaccggtttcc

SEQ ID NO: 1494043 - DNA, 25 bp, Homo sapien
gaaacagcagtgtctctctgccgtg

SEQ ID NO: 1494044 - DNA, 25 bp, Homo sapien
tacaagccgtaagcagggcagagct

SEQ ID NO: 1494045 - DNA, 25 bp, Homo sapien
tgctcttggaaatacgcagcgtgga

SEQ ID NO: 1494046 - DNA, 25 bp, Homo sapien
tgtcgtgcacgatggtagccgctgc

SEQ ID NO: 1494047 - DNA, 25 bp, Homo sapien
tgcacataggcctcgaagttcaagt

SEQ ID NO: 1494048 - DNA, 25 bp, Homo sapien
gccgtcctcgcccttgtacatgagt

SEQ ID NO: 1494049 - DNA, 25 bp, Homo sapien
gcccttgtacatgagtttcatcccg

SEQ ID NO: 1494050 - DNA, 25 bp, Homo sapien
tacatgagtttcatcccgcgcaggg

SEQ ID NO: 1494051 - DNA, 25 bp, Homo sapien
tcctcgcccttgtacatgagtttca

SEQ ID NO: 1494052 - DNA, 25 bp, Homo sapien
ttctctctgcgcttttgttcttctc

SEQ ID NO: 1494053 - DNA, 25 bp, Homo sapien
tgccgcttcttaattgaggcatcac

SEQ ID NO: 1494054 - DNA, 25 bp, Homo sapien
cagctgccgcttcttaattgaggca

SEQ ID NO: 1494055 - DNA, 25 bp, Homo sapien
actcaggtgtttggtcgaatcaaaa

SEQ ID NO: 1494056 - DNA, 25 bp, Homo sapien
ccaggtgccggacaccagcgccgag

SEQ ID NO: 1494057 - DNA, 25 bp, Homo sapien
aggtgccggacaccagcgccgaggg

SEQ ID NO: 1494058 - DNA, 25 bp, Homo sapien
actcccaggtgccggacaccagcgc

SEQ ID NO: 1494059 - DNA, 25 bp, Homo sapien
cgagggcccgctcccgcagaaggta

SEQ ID NO: 1494060 - DNA, 25 bp, Homo sapien
catgtgtgctatgtgccgatacaga

SEQ ID NO: 1494061 - DNA, 25 bp, Homo sapien
catacaaagtacacacaccggttca

SEQ ID NO: 1494062 - DNA, 25 bp, Homo sapien
tcgggcgcacatagggacatacaaa

SEQ ID NO: 1494063 - DNA, 25 bp, Homo sapien
agccggcagagatcgtgtcagacca

SEQ ID NO: 1494064 - DNA, 25 bp, Homo sapien
gcgcagctcacggtccctctgcttc

SEQ ID NO: 1494065 - DNA, 25 bp, Homo sapien
ttctgctccctcttgcgaagcttct

SEQ ID NO: 1494066 - DNA, 25 bp, Homo sapien
gcgatgagccggatggactgcaggt

SEQ ID NO: 1494067 - DNA, 25 bp, Homo sapien
ccagcttcttctgattccggcgcag

SEQ ID NO: 1494068 - DNA, 25 bp, Homo sapien
agcgctacaccctcccgggaaggag

SEQ ID NO: 1494069 - DNA, 25 bp, Homo sapien
gctggtttcgtagctacagctgcag

SEQ ID NO: 1494070 - DNA, 25 bp, Homo sapien
ggagccgtcatcctcggcattaaag

SEQ ID NO: 1494071 - DNA, 25 bp, Homo sapien
atcgggaacgacagacgagcgctac

SEQ ID NO: 1494072 - DNA, 25 bp, Homo sapien
tgcaaaaggaaaccgtcacagctct

SEQ ID NO: 1494073 - DNA, 25 bp, Homo sapien
acgcagccctcctgaggacaaggag

SEQ ID NO: 1494074 - DNA, 25 bp, Homo sapien
atgggagttaccagtcgcgcctgca

SEQ ID NO: 1494075 - DNA, 25 bp, Homo sapien
gcgctggtgagacctgtcaggttca

SEQ ID NO: 1494076 - DNA, 25 bp, Homo sapien
gctccttcccggggacttatcacaa

SEQ ID NO: 1494077 - DNA, 25 bp, Homo sapien
gactgggctgccacatgtctcagcc

SEQ ID NO: 1494078 - DNA, 25 bp, Homo sapien
gtctcagcctcttgtcatgctcctt

SEQ ID NO: 1494079 - DNA, 25 bp, Homo sapien
catgaggtaaggactgggctgccac

SEQ ID NO: 1494080 - DNA, 25 bp, Homo sapien
gcctggcctagcctgggttagtgtc

SEQ ID NO: 1494081 - DNA, 25 bp, Homo sapien
agctgagatgacgccgcagacgcat

SEQ ID NO: 1494082 - DNA, 25 bp, Homo sapien
agacgcatgccaccgccgtagctgc

SEQ ID NO: 1494083 - DNA, 25 bp, Homo sapien
ctggcctagcctgggttagtgtctt

SEQ ID NO: 1494084 - DNA, 25 bp, Homo sapien
ggaccacacgacaggagctctgaac

SEQ ID NO: 1494085 - DNA, 25 bp, Homo sapien
tcttctctggagagccatcctcggg

SEQ ID NO: 1494086 - DNA, 25 bp, Homo sapien
gagacattctgctcgcaggcaggga

SEQ ID NO: 1494087 - DNA, 25 bp, Homo sapien
cgttcacgcttttgggagcgccgtc

SEQ ID NO: 1494088 - DNA, 25 bp, Homo sapien
gtgtggtccgggctcgtgctgcgcc

SEQ ID NO: 1494089 - DNA, 25 bp, Homo sapien
ctttgctgtgggacctccgggaccg

SEQ ID NO: 1494090 - DNA, 25 bp, Homo sapien
tctcccgcttgtgccggtcagcaag

SEQ ID NO: 1494091 - DNA, 25 bp, Homo sapien
cccggttgcacttgtcctgttctga

SEQ ID NO: 1494092 - DNA, 25 bp, Homo sapien
gctccgtggacattcgtggctgcag

SEQ ID NO: 1494093 - DNA, 25 bp, Homo sapien
aactgaagtgccaagtacgctgcgg

SEQ ID NO: 1494094 - DNA, 25 bp, Homo sapien
gaggaccggccgcattaaagctatc

SEQ ID NO: 1494095 - DNA, 25 bp, Homo sapien
cagtgtgactatggtggcccgtgca

SEQ ID NO: 1494096 - DNA, 25 bp, Homo sapien
caatgtcagcacgacgattcggcat

SEQ ID NO: 1494097 - DNA, 25 bp, Homo sapien
tgtcagcacgacgattcggcatccc

SEQ ID NO: 1494098 - DNA, 25 bp, Homo sapien
cgtgactcaatgtcagcacgacgat

SEQ ID NO: 1494099 - DNA, 25 bp, Homo sapien
cttcctcatccgtgactcaatgtca

SEQ ID NO: 1494100 - DNA, 25 bp, Homo sapien
tcacttggagaagcaaacgattata

SEQ ID NO: 1494101 - DNA, 25 bp, Homo sapien
aggtatttctgagcttcacttggag

SEQ ID NO: 1494102 - DNA, 25 bp, Homo sapien
gaaggagcatcagaccattttgtac

SEQ ID NO: 1494103 - DNA, 25 bp, Homo sapien
taaaacaagtttgcagcctgaaatc

SEQ ID NO: 1494104 - DNA, 25 bp, Homo sapien
ctcttgcttctcgtcccaaaagtct

SEQ ID NO: 1494105 - DNA, 25 bp, Homo sapien
gtcagcctcatgagtgcgatcagct

SEQ ID NO: 1494106 - DNA, 25 bp, Homo sapien
agcctcatgagtgcgatcagctcca

SEQ ID NO: 1494107 - DNA, 25 bp, Homo sapien
cttgcttctcgtcccaaaagtctgg

SEQ ID NO: 1494108 - DNA, 25 bp, Homo sapien
gccggtccggccgcagcttcagcat

SEQ ID NO: 1494109 - DNA, 25 bp, Homo sapien
ccgagctggccggtccggccgcagc

SEQ ID NO: 1494110 - DNA, 25 bp, Homo sapien
ccggtccggccgcagcttcagcatc

SEQ ID NO: 1494111 - DNA, 25 bp, Homo sapien
tggccggtccggccgcagcttcagc

SEQ ID NO: 1494112 - DNA, 25 bp, Homo sapien
caatgaccctggcacagatgggctt

SEQ ID NO: 1494113 - DNA, 25 bp, Homo sapien
cttccggactgagtgcctcggtggt

SEQ ID NO: 1494114 - DNA, 25 bp, Homo sapien
gagtgcctcggtggtctctggcagc

SEQ ID NO: 1494115 - DNA, 25 bp, Homo sapien
accctggcacagatgggcttccgga

SEQ ID NO: 1494116 - DNA, 25 bp, Homo sapien
gacggatcactctagaaatttgcat

SEQ ID NO: 1494117 - DNA, 25 bp, Homo sapien
cctgcccagtactcaaacaaagacg

SEQ ID NO: 1494118 - DNA, 25 bp, Homo sapien
tctagaaatttgcattaaccgtatt

SEQ ID NO: 1494119 - DNA, 25 bp, Homo sapien
caaacaaagacggatcactctagaa

SEQ ID NO: 1494120 - DNA, 25 bp, Homo sapien
ggggaagagccacccgctcacagct

SEQ ID NO: 1494121 - DNA, 25 bp, Homo sapien
gggaagagccacccgctcacagctg

SEQ ID NO: 1494122 - DNA, 25 bp, Homo sapien
gtctccaatccagccgtggcttccg

SEQ ID NO: 1494123 - DNA, 25 bp, Homo sapien
tagtcattaaggaggcgataggcct

SEQ ID NO: 1494124 - DNA, 25 bp, Homo sapien
ccgttggcgtagtcattaaggaggc

SEQ ID NO: 1494125 - DNA, 25 bp, Homo sapien
gataggcctggtcctctgaggatcc

SEQ ID NO: 1494126 - DNA, 25 bp, Homo sapien
caccatgaagccgttggcgtagtca

SEQ ID NO: 1494127 - DNA, 25 bp, Homo sapien
gaaggtcaaacacgcccagctcgca

SEQ ID NO: 1494128 - DNA, 25 bp, Homo sapien
ggcgagaaggtcaaacacgcccagc

SEQ ID NO: 1494129 - DNA, 25 bp, Homo sapien
gcctcggcgagaaggtcaaacacgc

SEQ ID NO: 1494130 - DNA, 25 bp, Homo sapien
gctctgtcccatgggcgctggccct

SEQ ID NO: 1494131 - DNA, 25 bp, Homo sapien
gtggccccagcaccggtagctggtc

SEQ ID NO: 1494132 - DNA, 25 bp, Homo sapien
ggctgaccgtggtcaggtagtcgct

SEQ ID NO: 1494133 - DNA, 25 bp, Homo sapien
gacagctctgtgtttcgatagaaag

SEQ ID NO: 1494134 - DNA, 25 bp, Homo sapien
tgcattgtgacgtcgggctgaccgt

SEQ ID NO: 1494135 - DNA, 25 bp, Homo sapien
cctggggtcagccaccacctcccag

SEQ ID NO: 1494136 - DNA, 25 bp, Homo sapien
agcatctgcctgggtgcagccacca

SEQ ID NO: 1494137 - DNA, 25 bp, Homo sapien
agcatctgcctggggtcagccacca

SEQ ID NO: 1494138 - DNA, 25 bp, Homo sapien
acctcccagcatctgcctgggtgca

SEQ ID NO: 1494139 - DNA, 25 bp, Homo sapien
ctgtagatggccgtaaaaagctctt

SEQ ID NO: 1494140 - DNA, 25 bp, Homo sapien
gaacgccaaacgtctccaggtactg

SEQ ID NO: 1494141 - DNA, 25 bp, Homo sapien
tcttcagcgggaacgccaaacgtct

SEQ ID NO: 1494142 - DNA, 25 bp, Homo sapien
taaaaagctcttcagcgggaacgcc

SEQ ID NO: 1494143 - DNA, 25 bp, Homo sapien
ctttcgaaggaagggtcacgttgca

SEQ ID NO: 1494144 - DNA, 25 bp, Homo sapien
gagtttgtgagtagtcctttcgaag

SEQ ID NO: 1494145 - DNA, 25 bp, Homo sapien
gcttcctcctgggttgtgccatttg

SEQ ID NO: 1494146 - DNA, 25 bp, Homo sapien
taaacatcagatgagcaaaatctgg

SEQ ID NO: 1494147 - DNA, 25 bp, Homo sapien
ccagagcaagggtgtacataacccc

SEQ ID NO: 1494148 - DNA, 25 bp, Homo sapien
gggacgtgcccagagcaagggtgta

SEQ ID NO: 1494149 - DNA, 25 bp, Homo sapien
cccagagcaagggtgtacataaccc

SEQ ID NO: 1494150 - DNA, 25 bp, Homo sapien
cgtgcccagagcaagggtgtacata

SEQ ID NO: 1494151 - DNA, 25 bp, Homo sapien
ggcatgcaaaaccacgcttgtcaag

SEQ ID NO: 1494152 - DNA, 25 bp, Homo sapien
ctggcatgcaaaaccacgcttgtca

SEQ ID NO: 1494153 - DNA, 25 bp, Homo sapien
aaaccacgcttgtcaagatggtgag

SEQ ID NO: 1494154 - DNA, 25 bp, Homo sapien
tgcaaaaccacgcttgtcaagatgg

SEQ ID NO: 1494155 - DNA, 25 bp, Homo sapien
ggtcagcacgcttctcccgttgacg

SEQ ID NO: 1494156 - DNA, 25 bp, Homo sapien
ttgacgctccagacctcctgcagag

SEQ ID NO: 1494157 - DNA, 25 bp, Homo sapien
cttgcatgaactgtagccgctcgcc

SEQ ID NO: 1494158 - DNA, 25 bp, Homo sapien
cactgacaggtcaaaggcggtcagc

SEQ ID NO: 1494159 - DNA, 25 bp, Homo sapien
gccccccaggccctgacaggcccca

SEQ ID NO: 1494160 - DNA, 25 bp, Homo sapien
ccagcctcccagccccccaggccct

SEQ ID NO: 1494161 - DNA, 25 bp, Homo sapien
tgtcctagtgctctccctcccccag

SEQ ID NO: 1494162 - DNA, 25 bp, Homo sapien
ctcccagccccccaggccctgacag

SEQ ID NO: 1494163 - DNA, 25 bp, Homo sapien
agacatgcattccttagccagagct

SEQ ID NO: 1494164 - DNA, 25 bp, Homo sapien
tctgggatgtcaaaaacggtgatct

SEQ ID NO: 1494165 - DNA, 25 bp, Homo sapien
gatcttacatccagggtacagagac

SEQ ID NO: 1494166 - DNA, 25 bp, Homo sapien
tttgccgtccacaccacttctggga

SEQ ID NO: 1494167 - DNA, 25 bp, Homo sapien
aggcacaccgaggtcagcctgcaat

SEQ ID NO: 1494168 - DNA, 25 bp, Homo sapien
ggtcttccaggctagtcacctgcag

SEQ ID NO: 1494169 - DNA, 25 bp, Homo sapien
catttgactaaacctattctgggca

SEQ ID NO: 1494170 - DNA, 25 bp, Homo sapien
attctgggcacaaaaggtcacctgg

SEQ ID NO: 1494171 - DNA, 25 bp, Homo sapien
accctggccaggatgtacagatcag

SEQ ID NO: 1494172 - DNA, 25 bp, Homo sapien
cactttccgtctgcccagtcatgga

SEQ ID NO: 1494173 - DNA, 25 bp, Homo sapien
gatgtacagatcagcttccggaaga

SEQ ID NO: 1494174 - DNA, 25 bp, Homo sapien
ccagcaggtgtgagcactttccgtc

SEQ ID NO: 1494175 - DNA, 25 bp, Homo sapien
cagagagtagagctgcgtgagcaga

SEQ ID NO: 1494176 - DNA, 25 bp, Homo sapien
gaggctttcaattaccagaatgcca

SEQ ID NO: 1494177 - DNA, 25 bp, Homo sapien
tgcccttccgtctgcacaagcatgt

SEQ ID NO: 1494178 - DNA, 25 bp, Homo sapien
gaggacctcgcctgtcttcatccag

SEQ ID NO: 1494179 - DNA, 25 bp, Homo sapien
tgtgtgctttgacgttagttccagg

SEQ ID NO: 1494180 - DNA, 25 bp, Homo sapien
gctttgacgttagttccaggtcaca

SEQ ID NO: 1494181 - DNA, 25 bp, Homo sapien
gacgttagttccaggtcacaagaaa

SEQ ID NO: 1494182 - DNA, 25 bp, Homo sapien
tatgtcttgtgtgctttgacgttag

SEQ ID NO: 1494183 - DNA, 25 bp, Homo sapien
tctcacggttgaaatggcatcacta

SEQ ID NO: 1494184 - DNA, 25 bp, Homo sapien
cttgttgacattgcggaagaggtcc

SEQ ID NO: 1494185 - DNA, 25 bp, Homo sapien
tgtggcgtgatctaatctggcggca

SEQ ID NO: 1494186 - DNA, 25 bp, Homo sapien
gcaaatgcccgcactctcatggtgg

SEQ ID NO: 1494187 - DNA, 25 bp, Homo sapien
gattagacattgcaaaaagaagcag

SEQ ID NO: 1494188 - DNA, 25 bp, Homo sapien
gaaatgtgcacaccattccttacct

SEQ ID NO: 1494189 - DNA, 25 bp, Homo sapien
tgttaggaccacctaacatggtgaa

SEQ ID NO: 1494190 - DNA, 25 bp, Homo sapien
cctttcttgtagatgagtttgttag

SEQ ID NO: 1494191 - DNA, 25 bp, Homo sapien
catgtggtagaaggagtaatggccc

SEQ ID NO: 1494192 - DNA, 25 bp, Homo sapien
caaatccccatgtgatagacagaat

SEQ ID NO: 1494193 - DNA, 25 bp, Homo sapien
tagcctagggaaactgacttcagcc

SEQ ID NO: 1494194 - DNA, 25 bp, Homo sapien
catcccactccccatatggtagagg

SEQ ID NO: 1494195 - DNA, 25 bp, Homo sapien
ggcaccggttctcgctcttccggaa

SEQ ID NO: 1494196 - DNA, 25 bp, Homo sapien
tcgctcttccggaatggtccacatg

SEQ ID NO: 1494197 - DNA, 25 bp, Homo sapien
ctgctggcaggcaccggttctcgct

SEQ ID NO: 1494198 - DNA, 25 bp, Homo sapien
tccggaatggtccacatgttgccat

SEQ ID NO: 1494199 - DNA, 25 bp, Homo sapien
aatgcagaaacagcgcctcggtaat

SEQ ID NO: 1494200 - DNA, 25 bp, Homo sapien
aaatgcagaaacagcgcctcggtaa

SEQ ID NO: 1494201 - DNA, 25 bp, Homo sapien
cagaaacagcgcctcggtaatttct

SEQ ID NO: 1494202 - DNA, 25 bp, Homo sapien
aacagcgcctcggtaatttctgaca

SEQ ID NO: 1494203 - DNA, 25 bp, Homo sapien
tcagacccatcgaggccggacaggg

SEQ ID NO: 1494204 - DNA, 25 bp, Homo sapien
cccaggtcgcttcccgtctgtaaat

SEQ ID NO: 1494205 - DNA, 25 bp, Homo sapien
tggcgatgcccggagatcgtgcaac

SEQ ID NO: 1494206 - DNA, 25 bp, Homo sapien
taaatggagtctcgtggtgcccgag

SEQ ID NO: 1494207 - DNA, 25 bp, Homo sapien
gctattgtccacaagctgcagtggg

SEQ ID NO: 1494208 - DNA, 25 bp, Homo sapien
aagatctgttcacgtgctattgtcc

SEQ ID NO: 1494209 - DNA, 25 bp, Homo sapien
cctccggagggagctgcatgtagtt

SEQ ID NO: 1494210 - DNA, 25 bp, Homo sapien
agagattgcagtgatgcggccagaa

SEQ ID NO: 1494211 - DNA, 25 bp, Homo sapien
agcagaactgccagccgagaaaaca

SEQ ID NO: 1494212 - DNA, 25 bp, Homo sapien
tggccctgaatctgtcccctgcatc

SEQ ID NO: 1494213 - DNA, 25 bp, Homo sapien
tcacaagtgaacaatctccaggtcc

SEQ ID NO: 1494214 - DNA, 25 bp, Homo sapien
ctctgcagatggagtaattccaata

SEQ ID NO: 1494215 - DNA, 25 bp, Homo sapien
cactgaagctgaagattgaggctcc

SEQ ID NO: 1494216 - DNA, 25 bp, Homo sapien
gccgcatatactcatcacgcacatt

SEQ ID NO: 1494217 - DNA, 25 bp, Homo sapien
cattctctttgagcccgattctgtt

SEQ ID NO: 1494218 - DNA, 25 bp, Homo sapien
tactcatcacgcacattctctttga

SEQ ID NO: 1494219 - DNA, 25 bp, Homo sapien
ttattgctgccgcatatactcatca

SEQ ID NO: 1494220 - DNA, 25 bp, Homo sapien
tggccgtcacgcttgaagaaaatct

SEQ ID NO: 1494221 - DNA, 25 bp, Homo sapien
tctggcaaacgatgtaattatatcc

SEQ ID NO: 1494222 - DNA, 25 bp, Homo sapien
atgacacaagcgacttccccaggaa

SEQ ID NO: 1494223 - DNA, 25 bp, Homo sapien
aggaaggaagcactcccacatctgg

SEQ ID NO: 1494224 - DNA, 25 bp, Homo sapien
acactagaattcacaccttcagact

SEQ ID NO: 1494225 - DNA, 25 bp, Homo sapien
cacactagaattcacaccttcagac

SEQ ID NO: 1494226 - DNA, 25 bp, Homo sapien
tcacactagaattcacaccttcaga

SEQ ID NO: 1494227 - DNA, 25 bp, Homo sapien
cactagaattcacaccttcagactc

SEQ ID NO: 1494228 - DNA, 25 bp, Homo sapien
gaaactggatattcccgtgcctcag

SEQ ID NO: 1494229 - DNA, 25 bp, Homo sapien
gagaagggcacggacttatcttttg

SEQ ID NO: 1494230 - DNA, 25 bp, Homo sapien
cactatggttgttatcaggcaggtt

SEQ ID NO: 1494231 - DNA, 25 bp, Homo sapien
atggttgttatcaggcaggttcttc

SEQ ID NO: 1494232 - DNA, 25 bp, Homo sapien
cttgtccatgacgagatgggccagt

SEQ ID NO: 1494233 - DNA, 25 bp, Homo sapien
cacaggtaggagaccccaacacagt

SEQ ID NO: 1494234 - DNA, 25 bp, Homo sapien
acattctaaaggtgactgtcggcca

SEQ ID NO: 1494235 - DNA, 25 bp, Homo sapien
agatgggccagtccacatcacaggc

SEQ ID NO: 1494236 - DNA, 25 bp, Homo sapien
tgcagccttggaaagccgtctcagg

SEQ ID NO: 1494237 - DNA, 25 bp, Homo sapien
cagccttggaaagccgtctcaggcc

SEQ ID NO: 1494238 - DNA, 25 bp, Homo sapien
cttggaaagccgtctcaggccgggc

SEQ ID NO: 1494239 - DNA, 25 bp, Homo sapien
ttctgcagccttggaaagccgtctc

SEQ ID NO: 1494240 - DNA, 25 bp, Homo sapien
caaagaggatctgctattgcagact

SEQ ID NO: 1494241 - DNA, 25 bp, Homo sapien
ctgaggatgtctcacatgaggcaac

SEQ ID NO: 1494242 - DNA, 25 bp, Homo sapien
ctggatcacgtgcaaacccaggcaa

SEQ ID NO: 1494243 - DNA, 25 bp, Homo sapien
caacgggtcggtgggtggtttgctg

SEQ ID NO: 1494244 - DNA, 25 bp, Homo sapien
cctggagaatgtgcttcaggtctcg

SEQ ID NO: 1494245 - DNA, 25 bp, Homo sapien
accagagattcgtacctgcggcacg

SEQ ID NO: 1494246 - DNA, 25 bp, Homo sapien
tgcagaaggtccctgtccgagactt

SEQ ID NO: 1494247 - DNA, 25 bp, Homo sapien
gagacttcaaataccgatcctggag

SEQ ID NO: 1494248 - DNA, 25 bp, Homo sapien
gaagtcccttccaagaacagcgaga

SEQ ID NO: 1494249 - DNA, 25 bp, Homo sapien
ctggaagtcccttccaagaacagcg

SEQ ID NO: 1494250 - DNA, 25 bp, Homo sapien
ggctggaagtcccttccaagaacag

SEQ ID NO: 1494251 - DNA, 25 bp, Homo sapien
ttccaggctggaagtcccttccaag

SEQ ID NO: 1494252 - DNA, 25 bp, Homo sapien
ccccattgggagattgagtatacac

SEQ ID NO: 1494253 - DNA, 25 bp, Homo sapien
tgatttgcagtaagccccacaaggg

SEQ ID NO: 1494254 - DNA, 25 bp, Homo sapien
cccttgggaagccaaaatagctgct

SEQ ID NO: 1494255 - DNA, 25 bp, Homo sapien
tagctgctaggcgacaaactgtcag

SEQ ID NO: 1494256 - DNA, 25 bp, Homo sapien
caatcttcctagtcatcacttatta

SEQ ID NO: 1494257 - DNA, 25 bp, Homo sapien
tccaaagggaaccattaataagtca

SEQ ID NO: 1494258 - DNA, 25 bp, Homo sapien
tcacttattaccactcaacagaatt

SEQ ID NO: 1494259 - DNA, 25 bp, Homo sapien
tcattctcccaagtatccattcaat

SEQ ID NO: 1494260 - DNA, 25 bp, Homo sapien
agagggcatgtgcagcggaacctgg

SEQ ID NO: 1494261 - DNA, 25 bp, Homo sapien
gtgccagactcttctgacaagcatt

SEQ ID NO: 1494262 - DNA, 25 bp, Homo sapien
gatcaaggcattgcagggctgcttc

SEQ ID NO: 1494263 - DNA, 25 bp, Homo sapien
ttcatttaggagatagatcagcagg

SEQ ID NO: 1494264 - DNA, 25 bp, Homo sapien
gctgaacagatgtcagtagaaccta

SEQ ID NO: 1494265 - DNA, 25 bp, Homo sapien
gagggctatgaaaatgcatcactgg

SEQ ID NO: 1494266 - DNA, 25 bp, Homo sapien
ggttggttgcaaaatggatcttcgc

SEQ ID NO: 1494267 - DNA, 25 bp, Homo sapien
gacatctatggagagggaatccact

SEQ ID NO: 1494268 - DNA, 25 bp, Homo sapien
gttagacagacccaaagagacagat

SEQ ID NO: 1494269 - DNA, 25 bp, Homo sapien
gatacttgtcttcgttgcattgccg

SEQ ID NO: 1494270 - DNA, 25 bp, Homo sapien
gcgttgcattgtggaccagagctca

SEQ ID NO: 1494271 - DNA, 25 bp, Homo sapien
caaggcagccgtgagcaatttcaca

SEQ ID NO: 1494272 - DNA, 25 bp, Homo sapien
ttcaaggcagccgtgagcaattgca

SEQ ID NO: 1494273 - DNA, 25 bp, Homo sapien
tcaaggcagccgtgagcaattgcac

SEQ ID NO: 1494274 - DNA, 25 bp, Homo sapien
caaggcagccgtgagcaattgcaca

SEQ ID NO: 1494275 - DNA, 25 bp, Homo sapien
tgtggaggcacaggacgcgtcctct

SEQ ID NO: 1494276 - DNA, 25 bp, Homo sapien
tcacaacagccaatgtcaagggtgt

SEQ ID NO: 1494277 - DNA, 25 bp, Homo sapien
gccacagatgtgaggagctctcacc

SEQ ID NO: 1494278 - DNA, 25 bp, Homo sapien
tggagcagggactgattatacccag

SEQ ID NO: 1494279 - DNA, 25 bp, Homo sapien
gagaccccacctctagagagaaaga

SEQ ID NO: 1494280 - DNA, 25 bp, Homo sapien
cattgatattggtggatgcgacact

SEQ ID NO: 1494281 - DNA, 25 bp, Homo sapien
gcgacactccaggtgaaataggtcc

SEQ ID NO: 1494282 - DNA, 25 bp, Homo sapien
agcatctgcagtcaggcctatttgg

SEQ ID NO: 1494283 - DNA, 25 bp, Homo sapien
tttccgtgcctgctattataaatgg

SEQ ID NO: 1494284 - DNA, 25 bp, Homo sapien
ttgactcgggaggacattttctaga

SEQ ID NO: 1494285 - DNA, 25 bp, Homo sapien
tcgggaggacattttctagatcatt

SEQ ID NO: 1494286 - DNA, 25 bp, Homo sapien
tcttagatcagcaaagtctggttga

SEQ ID NO: 1494287 - DNA, 25 bp, Homo sapien
agtgaccacagggcctatcgtgggc

SEQ ID NO: 1494288 - DNA, 25 bp, Homo sapien
aatgtgacctgagggaatttcagtt

SEQ ID NO: 1494289 - DNA, 25 bp, Homo sapien
gtgacctgagggaatttcagttcca

SEQ ID NO: 1494290 - DNA, 25 bp, Homo sapien
cctgagggaatttcagttccacctc

SEQ ID NO: 1494291 - DNA, 25 bp, Homo sapien
gaatccagataacctctgcgcgtag

SEQ ID NO: 1494292 - DNA, 25 bp, Homo sapien
cctctgcgcgtagattgagttgctg

SEQ ID NO: 1494293 - DNA, 25 bp, Homo sapien
agttgctgcaccgtcgtcgtcgtga

SEQ ID NO: 1494294 - DNA, 25 bp, Homo sapien
tcgtcgtgatgttctcccaccagtc

SEQ ID NO: 1494295 - DNA, 25 bp, Homo sapien
ccaccagccttgtgcccactcacac

SEQ ID NO: 1494296 - DNA, 25 bp, Homo sapien
gaccaccagccttgtgcccactcac

SEQ ID NO: 1494297 - DNA, 25 bp, Homo sapien
cccagaataggaaacgcaagctgct

SEQ ID NO: 1494298 - DNA, 25 bp, Homo sapien
ccagaataggaaacgcaagctgctc

SEQ ID NO: 1494299 - DNA, 25 bp, Homo sapien
tgctctcatgcagtggtagtatcat

SEQ ID NO: 1494300 - DNA, 25 bp, Homo sapien
ctgctctcatgcagtggtagtatca

SEQ ID NO: 1494301 - DNA, 25 bp, Homo sapien
agttattactgctctcacacggcgg

SEQ ID NO: 1494302 - DNA, 25 bp, Homo sapien
cacacggcggtggtattgtattact

SEQ ID NO: 1494303 - DNA, 25 bp, Homo sapien
tactgctctcacacggcggtggtat

SEQ ID NO: 1494304 - DNA, 25 bp, Homo sapien
tgttgtagttattactgctctcaca

SEQ ID NO: 1494305 - DNA, 25 bp, Homo sapien
ctgctctcatgtggcggtagtatca

SEQ ID NO: 1494306 - DNA, 25 bp, Homo sapien
tgttgttgctctcatgcggcggtag

SEQ ID NO: 1494307 - DNA, 25 bp, Homo sapien
tactgctctcatgcggcggtagtat

SEQ ID NO: 1494308 - DNA, 25 bp, Homo sapien
tcatgcggcggtagtatcatattac

SEQ ID NO: 1494309 - DNA, 25 bp, Homo sapien
tactgctctcatgcggcggtagtat

SEQ ID NO: 1494310 - DNA, 25 bp, Homo sapien
tcatgcggcggtagtatcatattac

SEQ ID NO: 1494311 - DNA, 25 bp, Homo sapien
tctcatgcggcggtagtatcatatt

SEQ ID NO: 1494312 - DNA, 25 bp, Homo sapien
catgtggcggtggtatcatattact

SEQ ID NO: 1494313 - DNA, 25 bp, Homo sapien
gttactagcacccaagcgaggcaga

SEQ ID NO: 1494314 - DNA, 25 bp, Homo sapien
gcacccaagcgaggcagacagatgg

SEQ ID NO: 1494315 - DNA, 25 bp, Homo sapien
actagcacccaagcgaggcagacag

SEQ ID NO: 1494316 - DNA, 25 bp, Homo sapien
tgtgttactagcacccaagcgaggc

SEQ ID NO: 1494317 - DNA, 25 bp, Homo sapien
tatgtgaagacacttcatgcctgag

SEQ ID NO: 1494318 - DNA, 25 bp, Homo sapien
cttgccttcggtgtgtacatcgtga

SEQ ID NO: 1494319 - DNA, 25 bp, Homo sapien
tacatcgtgaggaatgacgcgtata

SEQ ID NO: 1494320 - DNA, 25 bp, Homo sapien
gagtttgaaagcataagaagatgta

SEQ ID NO: 1494321 - DNA, 25 bp, Homo sapien
agtgcagtggcatcatctcggctca

SEQ ID NO: 1494322 - DNA, 25 bp, Homo sapien
ctgcaacctccgcttcctgagttca

SEQ ID NO: 1494323 - DNA, 25 bp, Homo sapien
gcacatgccaccatgactggccaat

SEQ ID NO: 1494324 - DNA, 25 bp, Homo sapien
gagtctcgctctgtttccgggctgg

SEQ ID NO: 1494325 - DNA, 25 bp, Homo sapien
gcaaagaggatttcgggcagcagac

SEQ ID NO: 1494326 - DNA, 25 bp, Homo sapien
caatgacagaaactcgtaggcgatc

SEQ ID NO: 1494327 - DNA, 25 bp, Homo sapien
caagctgccagcgtctctgctgtaa

SEQ ID NO: 1494328 - DNA, 25 bp, Homo sapien
tctgctgtaaggatgaggcgctgac

SEQ ID NO: 1494329 - DNA, 25 bp, Homo sapien
cgcatttccgtatacaaaaccatga

SEQ ID NO: 1494330 - DNA, 25 bp, Homo sapien
tgtctgagactagcagggcacccat

SEQ ID NO: 1494331 - DNA, 25 bp, Homo sapien
gataagactttggaaaatgaggccc

SEQ ID NO: 1494332 - DNA, 25 bp, Homo sapien
catgacgatgtctgcaaaaatacag

SEQ ID NO: 1494333 - DNA, 25 bp, Homo sapien
gtcctgtctttcactctttaggcaa

SEQ ID NO: 1494334 - DNA, 25 bp, Homo sapien
gcctcagatgagtgtccgactgtga

SEQ ID NO: 1494335 - DNA, 25 bp, Homo sapien
ctcaatactgtcaaaccaggaaaaa

SEQ ID NO: 1494336 - DNA, 25 bp, Homo sapien
tgtgataagctcttccgtgccattt

SEQ ID NO: 1494337 - DNA, 25 bp, Homo sapien
gttgtactatcgaatactaggtatg

SEQ ID NO: 1494338 - DNA, 25 bp, Homo sapien
cgaatactaggtatgaataattaca

SEQ ID NO: 1494339 - DNA, 25 bp, Homo sapien
ctatcgaatactaggtatgaataat

SEQ ID NO: 1494340 - DNA, 25 bp, Homo sapien
tgtactatcgaatactaggtatgaa

SEQ ID NO: 1494341 - DNA, 25 bp, Homo sapien
gtatcagctcttcccggcagcgtgt

SEQ ID NO: 1494342 - DNA, 25 bp, Homo sapien
cggcagcgtgtggatttcctgcaaa

SEQ ID NO: 1494343 - DNA, 25 bp, Homo sapien
ggatttcctgcaaaagtggcctcat

SEQ ID NO: 1494344 - DNA, 25 bp, Homo sapien
tctcaatttagttgtatcagctctt

SEQ ID NO: 1494345 - DNA, 25 bp, Homo sapien
tccacagcagtgtgcagcaggctgc

SEQ ID NO: 1494346 - DNA, 25 bp, Homo sapien
agtccacagcagtgtgcagcaggct

SEQ ID NO: 1494347 - DNA, 25 bp, Homo sapien
ttagtccacagcagtgtgcagcagg

SEQ ID NO: 1494348 - DNA, 25 bp, Homo sapien
cacagcagtgtgcagcaggctgctg

SEQ ID NO: 1494349 - DNA, 25 bp, Homo sapien
ctgccgtattctctttctccgatcg

SEQ ID NO: 1494350 - DNA, 25 bp, Homo sapien
ttctccgatcgtctccctcatgcct

SEQ ID NO: 1494351 - DNA, 25 bp, Homo sapien
gccgtattctctttctccgatcgtc

SEQ ID NO: 1494352 - DNA, 25 bp, Homo sapien
ttctgccgtattctctttctccgat

SEQ ID NO: 1494353 - DNA, 25 bp, Homo sapien
tgtgataccagatgatgctcaaggc

SEQ ID NO: 1494354 - DNA, 25 bp, Homo sapien
tgttgacgccctttgccatcatcta

SEQ ID NO: 1494355 - DNA, 25 bp, Homo sapien
tgataccagatgatgctcaaggccc

SEQ ID NO: 1494356 - DNA, 25 bp, Homo sapien
cagcccagaggtgttgacgcccttt

SEQ ID NO: 1494357 - DNA, 25 bp, Homo sapien
tgagggtatcgtgcaaagcagccct

SEQ ID NO: 1494358 - DNA, 25 bp, Homo sapien
cagccctgttcaaaagacccggatc

SEQ ID NO: 1494359 - DNA, 25 bp, Homo sapien
gcaaagcagccctgttcaaaagacc

SEQ ID NO: 1494360 - DNA, 25 bp, Homo sapien
ctgagggtatcgtgcaaagcagccc

SEQ ID NO: 1494361 - DNA, 25 bp, Homo sapien
ctggaaccagtgtgaagcaaggaca

SEQ ID NO: 1494362 - DNA, 25 bp, Homo sapien
gcagaatgactaagccaccaggaat

SEQ ID NO: 1494363 - DNA, 25 bp, Homo sapien
caatccccagggcagaatgactaag

SEQ ID NO: 1494364 - DNA, 25 bp, Homo sapien
gtgtgaagcaaggacaatccccagg

SEQ ID NO: 1494365 - DNA, 25 bp, Homo sapien
gacagaaggctacagataaccggag

SEQ ID NO: 1494366 - DNA, 25 bp, Homo sapien
gctgtcctcattcgtctaaacctga

SEQ ID NO: 1494367 - DNA, 25 bp, Homo sapien
gacggtaaggagataagctgtcctc

SEQ ID NO: 1494368 - DNA, 25 bp, Homo sapien
ggagtcaaccaccacgtgctgtacg

SEQ ID NO: 1494369 - DNA, 25 bp, Homo sapien
tatttccggctgttgtgctatgtct

SEQ ID NO: 1494370 - DNA, 25 bp, Homo sapien
tatgaaaggctatttccggctgttg

SEQ ID NO: 1494371 - DNA, 25 bp, Homo sapien
ggctgttgtgctatgtctgtgctct

SEQ ID NO: 1494372 - DNA, 25 bp, Homo sapien
gaaaggctatttccggctgttgtgc

SEQ ID NO: 1494373 - DNA, 25 bp, Homo sapien
agagtctgctggcgacaaaaatcac

SEQ ID NO: 1494374 - DNA, 25 bp, Homo sapien
gtctgctggcgacaaaaatcaccat

SEQ ID NO: 1494375 - DNA, 25 bp, Homo sapien
gagtctgctggcgacaaaaatcacc

SEQ ID NO: 1494376 - DNA, 25 bp, Homo sapien
agtctgctggcgacaaaaatcacca

SEQ ID NO: 1494377 - DNA, 25 bp, Homo sapien
gcctctctctttcttaagttgacag

SEQ ID NO: 1494378 - DNA, 25 bp, Homo sapien
ccacgactggcctctgtgtaatttc

SEQ ID NO: 1494379 - DNA, 25 bp, Homo sapien
gatttggcccaagtacaagagtcac

SEQ ID NO: 1494380 - DNA, 25 bp, Homo sapien
gttgacagaagaggattgatttggc

SEQ ID NO: 1494381 - DNA, 25 bp, Homo sapien
cgccaaagccgtaaatgcattgaga

SEQ ID NO: 1494382 - DNA, 25 bp, Homo sapien
gaatacgccggcgttttcatcacca

SEQ ID NO: 1494383 - DNA, 25 bp, Homo sapien
taaggcagggtgttcacgaatacgc

SEQ ID NO: 1494384 - DNA, 25 bp, Homo sapien
aattatcccctcagccgaatgcaag

SEQ ID NO: 1494385 - DNA, 25 bp, Homo sapien
tcagaatccccacggttaaacacaa

SEQ ID NO: 1494386 - DNA, 25 bp, Homo sapien
aaaagttcacacaggtatgccggcg

SEQ ID NO: 1494387 - DNA, 25 bp, Homo sapien
ttttgagaccagacacgaagcacgg

SEQ ID NO: 1494388 - DNA, 25 bp, Homo sapien
tatgccggcgcgatcttcagaatcc

SEQ ID NO: 1494389 - DNA, 25 bp, Homo sapien
tatcggattattgaggtggatcctc

SEQ ID NO: 1494390 - DNA, 25 bp, Homo sapien
agatgggaggatgatatcggattat

SEQ ID NO: 1494391 - DNA, 25 bp, Homo sapien
gatatcggattattgaggtggatcc

SEQ ID NO: 1494392 - DNA, 25 bp, Homo sapien
aggatgatatcggattattgaggtg

SEQ ID NO: 1494393 - DNA, 25 bp, Homo sapien
agctgggtgcagtggtgggtgcctg

SEQ ID NO: 1494394 - DNA, 25 bp, Homo sapien
ggcaggagaatggcgtgaacctggg

SEQ ID NO: 1494395 - DNA, 25 bp, Homo sapien
agtgagccgaggtcttgccactgta

SEQ ID NO: 1494396 - DNA, 25 bp, Homo sapien
tagtcccggctactcgggaggctga

SEQ ID NO: 1494397 - DNA, 25 bp, Homo sapien
cattgagcctttacctcgactgagt

SEQ ID NO: 1494398 - DNA, 25 bp, Homo sapien
gggacatttcggctgtggccattga

SEQ ID NO: 1494399 - DNA, 25 bp, Homo sapien
tgtgagtggtatctgctgcccacaa

SEQ ID NO: 1494400 - DNA, 25 bp, Homo sapien
cacaacatcttatggacgaccacag

SEQ ID NO: 1494401 - DNA, 25 bp, Homo sapien
tggctttttttgatgctcccagctt

SEQ ID NO: 1494402 - DNA, 25 bp, Homo sapien
ggtggtcttcccaaataatcacttc

SEQ ID NO: 1494403 - DNA, 25 bp, Homo sapien
agcgttgacggtgccaccatggaaa

SEQ ID NO: 1494404 - DNA, 25 bp, Homo sapien
tggtgcttctgtcctatgccagcgt

SEQ ID NO: 1494405 - DNA, 25 bp, Homo sapien
tgtcgattcagacatgtatgcaaat

SEQ ID NO: 1494406 - DNA, 25 bp, Homo sapien
ctacttaggtgtcgattcagacatg

SEQ ID NO: 1494407 - DNA, 25 bp, Homo sapien
tatgcaaatgttgatgtgcatatag

SEQ ID NO: 1494408 - DNA, 25 bp, Homo sapien
agctcatgaaggtgatattcacaac

SEQ ID NO: 1494409 - DNA, 25 bp, Homo sapien
tcacactgacggcatattgcagagc

SEQ ID NO: 1494410 - DNA, 25 bp, Homo sapien
gacggcatattgcagagcctgccag

SEQ ID NO: 1494411 - DNA, 25 bp, Homo sapien
gcatattgcagagcctgccagggac

SEQ ID NO: 1494412 - DNA, 25 bp, Homo sapien
tcacaggggatgacaggggatttat

SEQ ID NO: 1494413 - DNA, 25 bp, Homo sapien
gaaacatatcacagattggctcaga

SEQ ID NO: 1494414 - DNA, 25 bp, Homo sapien
aacatatcacagattggctcagagc

SEQ ID NO: 1494415 - DNA, 25 bp, Homo sapien
tcagagccccgtgatgacgccctgt

SEQ ID NO: 1494416 - DNA, 25 bp, Homo sapien
catatcacagattggctcagagccc

SEQ ID NO: 1494417 - DNA, 25 bp, Homo sapien
tgtgctgaactgtggcggagctccc

SEQ ID NO: 1494418 - DNA, 25 bp, Homo sapien
ggattctccatgaatctattccttc

SEQ ID NO: 1494419 - DNA, 25 bp, Homo sapien
ttcaggagacccttgatagccttgt

SEQ ID NO: 1494420 - DNA, 25 bp, Homo sapien
caagtggattctccatgaatctatt

SEQ ID NO: 1494421 - DNA, 25 bp, Homo sapien
tggtgaacgtgatgagatagaattt

SEQ ID NO: 1494422 - DNA, 25 bp, Homo sapien
aaagctccgaggtgtgatcattgca

SEQ ID NO: 1494423 - DNA, 25 bp, Homo sapien
tcaaatagtccttagcctttgttct

SEQ ID NO: 1494424 - DNA, 25 bp, Homo sapien
gctccttggatgtctttgttggtga

SEQ ID NO: 1494425 - DNA, 25 bp, Homo sapien
cgttggtgtcgtgaagtcctgcctc

SEQ ID NO: 1494426 - DNA, 25 bp, Homo sapien
gaaaggaatccttttgacactcaac

SEQ ID NO: 1494427 - DNA, 25 bp, Homo sapien
aactggctaaagctaggcaccatgg

SEQ ID NO: 1494428 - DNA, 25 bp, Homo sapien
tggctaaagctaggcaccatggagc

SEQ ID NO: 1494429 - DNA, 25 bp, Homo sapien
acatgcttagggaacgtcttcagtg

SEQ ID NO: 1494430 - DNA, 25 bp, Homo sapien
catgcttagggaacgtcttcagtgt

SEQ ID NO: 1494431 - DNA, 25 bp, Homo sapien
ccctgttttggtagcattgctgagg

SEQ ID NO: 1494432 - DNA, 25 bp, Homo sapien
taggttgtgcgttatcttagagggc

SEQ ID NO: 1494433 - DNA, 25 bp, Homo sapien
cattcaggctccaactggcttttag

SEQ ID NO: 1494434 - DNA, 25 bp, Homo sapien
gaacgattgccttttcacattcagg

SEQ ID NO: 1494435 - DNA, 25 bp, Homo sapien
tgccttcgtgcacctttcattcttg

SEQ ID NO: 1494436 - DNA, 25 bp, Homo sapien
ttcattcttgatccaaccgttgttg

SEQ ID NO: 1494437 - DNA, 25 bp, Homo sapien
ggaggatgacaggagagcaacctta

SEQ ID NO: 1494438 - DNA, 25 bp, Homo sapien
tatatccgtgtagacttgggaggat

SEQ ID NO: 1494439 - DNA, 25 bp, Homo sapien
ccccacccagatcagaggttgagaa

SEQ ID NO: 1494440 - DNA, 25 bp, Homo sapien
tgagaacctgaatcttcggatttct

SEQ ID NO: 1494441 - DNA, 25 bp, Homo sapien
cctgaatcttcggatttctggagat

SEQ ID NO: 1494442 - DNA, 25 bp, Homo sapien
atcttcggatttctggagatgcccc

SEQ ID NO: 1494443 - DNA, 25 bp, Homo sapien
ggcacagtgagagacgcagccagcc

SEQ ID NO: 1494444 - DNA, 25 bp, Homo sapien
cacagtgagagacgcagccagcctg

SEQ ID NO: 1494445 - DNA, 25 bp, Homo sapien
cagtgagagacgcagccagcctgct

SEQ ID NO: 1494446 - DNA, 25 bp, Homo sapien
agtgagagacgcagccagcctgctc

SEQ ID NO: 1494447 - DNA, 25 bp, Homo sapien
gaggtgctggactcacagtggctct

SEQ ID NO: 1494448 - DNA, 25 bp, Homo sapien
gctcggatgacaggtgtcagccacg

SEQ ID NO: 1494449 - DNA, 25 bp, Homo sapien
cagtggctctgtgctgtgatgaaat

SEQ ID NO: 1494450 - DNA, 25 bp, Homo sapien
tgttttcttttcataagaggtgctg

SEQ ID NO: 1494451 - DNA, 25 bp, Homo sapien
tctggtgtttggtgtgccgcacgtt

SEQ ID NO: 1494452 - DNA, 25 bp, Homo sapien
tgtttggtgtgccgcacgttgtccc

SEQ ID NO: 1494453 - DNA, 25 bp, Homo sapien
cagtccggtctcctgtttctggtgt

SEQ ID NO: 1494454 - DNA, 25 bp, Homo sapien
agtccggtctcctgtttctggtgtt

SEQ ID NO: 1494455 - DNA, 25 bp, Homo sapien
cttatgtggtatccgtttcctctgt

SEQ ID NO: 1494456 - DNA, 25 bp, Homo sapien
tggtctgaatcacatcacaggcttc

SEQ ID NO: 1494457 - DNA, 25 bp, Homo sapien
tatccgtttcctctgtcagcgacca

SEQ ID NO: 1494458 - DNA, 25 bp, Homo sapien
tgtggtatccgtttcctctgtcagc

SEQ ID NO: 1494459 - DNA, 25 bp, Homo sapien
tggcgtcccacgtgttgtccctgta

SEQ ID NO: 1494460 - DNA, 25 bp, Homo sapien
tttggcgtcccacgtgttgtccctg

SEQ ID NO: 1494461 - DNA, 25 bp, Homo sapien
tgagtcatccaccttccgtgtggtc

SEQ ID NO: 1494462 - DNA, 25 bp, Homo sapien
ggcgtcccacgtgttgtccctgtaa

SEQ ID NO: 1494463 - DNA, 25 bp, Homo sapien
ctggtttcaaactcgcagataaact

SEQ ID NO: 1494464 - DNA, 25 bp, Homo sapien
gtttcaaactcgcagataaactgtt

SEQ ID NO: 1494465 - DNA, 25 bp, Homo sapien
aaactcgcagataaactgtttccac

SEQ ID NO: 1494466 - DNA, 25 bp, Homo sapien
ttcaaactcgcagataaactgtttc

SEQ ID NO: 1494467 - DNA, 25 bp, Homo sapien
ccccgcgcctggcggcgcctttcat

SEQ ID NO: 1494468 - DNA, 25 bp, Homo sapien
gcgcctggcggcgcctttcattctt

SEQ ID NO: 1494469 - DNA, 25 bp, Homo sapien
cccgcgcctggcggcgcctttcatt

SEQ ID NO: 1494470 - DNA, 25 bp, Homo sapien
cctggcggcgcctttcattcttgat

SEQ ID NO: 1494471 - DNA, 25 bp, Homo sapien
tttggtgtgtagatggccgccgtcc

SEQ ID NO: 1494472 - DNA, 25 bp, Homo sapien
gtatgcacagcgtggcagtcccttg

SEQ ID NO: 1494473 - DNA, 25 bp, Homo sapien
tagggatcgtcttcagtatgcacag

SEQ ID NO: 1494474 - DNA, 25 bp, Homo sapien
tgtacaccgttgtggtcccttggcc

SEQ ID NO: 1494475 - DNA, 25 bp, Homo sapien
tgtatgttaaagacgtcttccttgg

SEQ ID NO: 1494476 - DNA, 25 bp, Homo sapien
ttgtatgttaaagacgtcttccttg

SEQ ID NO: 1494477 - DNA, 25 bp, Homo sapien
tatgttaaagacgtcttccttggtg

SEQ ID NO: 1494478 - DNA, 25 bp, Homo sapien
tcgtgaagtccctgatttcctaaga

SEQ ID NO: 1494479 - DNA, 25 bp, Homo sapien
gtgaagtccctgatttcctaagaca

SEQ ID NO: 1494480 - DNA, 25 bp, Homo sapien
gttggcatcgtgaagtccctgattt

SEQ ID NO: 1494481 - DNA, 25 bp, Homo sapien
catcgtgaagtccctgatttcctaa

SEQ ID NO: 1494482 - DNA, 25 bp, Homo sapien
tttttgcatcccacatgttgtccct

SEQ ID NO: 1494483 - DNA, 25 bp, Homo sapien
ggttttttgcatcccacatgttgtc

SEQ ID NO: 1494484 - DNA, 25 bp, Homo sapien
ttttttgcatcccacatgttgtccc

SEQ ID NO: 1494485 - DNA, 25 bp, Homo sapien
gttttttgcatcccacatgttgtcc

SEQ ID NO: 1494486 - DNA, 25 bp, Homo sapien
ctttctttcttgatccacctggttt

SEQ ID NO: 1494487 - DNA, 25 bp, Homo sapien
tctttcttgatccacctggttttaa

SEQ ID NO: 1494488 - DNA, 25 bp, Homo sapien
tcttgatccacctggttttaaactc

SEQ ID NO: 1494489 - DNA, 25 bp, Homo sapien
ttgatccacctggttttaaactcac

SEQ ID NO: 1494490 - DNA, 25 bp, Homo sapien
tcttcagtgcgtacacggtggtccc

SEQ ID NO: 1494491 - DNA, 25 bp, Homo sapien
gtacacggtggtcccgtagccacat

SEQ ID NO: 1494492 - DNA, 25 bp, Homo sapien
ccctggtcgcattcttacggaatgt

SEQ ID NO: 1494493 - DNA, 25 bp, Homo sapien
cagtgtgcacatgtggcggtcccct

SEQ ID NO: 1494494 - DNA, 25 bp, Homo sapien
ggcatcattaaaatgccgaaatttc

SEQ ID NO: 1494495 - DNA, 25 bp, Homo sapien
tccaagtgctgttggttgactgcct

SEQ ID NO: 1494496 - DNA, 25 bp, Homo sapien
tctttcttgcacgttttgggttgaa

SEQ ID NO: 1494497 - DNA, 25 bp, Homo sapien
tgttggttgactgcctgtccttggg

SEQ ID NO: 1494498 - DNA, 25 bp, Homo sapien
cctgagccggtttaagtctgtggaa

SEQ ID NO: 1494499 - DNA, 25 bp, Homo sapien
gtgaacttggaaccctcagctccgg

SEQ ID NO: 1494500 - DNA, 25 bp, Homo sapien
tcagctccgggtgttctcggcagaa

SEQ ID NO: 1494501 - DNA, 25 bp, Homo sapien
aatgttatccttacgtcctgagccg

SEQ ID NO: 1494502 - DNA, 25 bp, Homo sapien
ttgatttgattaccggaaaggactc

SEQ ID NO: 1494503 - DNA, 25 bp, Homo sapien
gattaccggaaaggactcttgattc

SEQ ID NO: 1494504 - DNA, 25 bp, Homo sapien
gtgtctcagccctaaaagtccagtt

SEQ ID NO: 1494505 - DNA, 25 bp, Homo sapien
tatgtcttcggtgtctcagccctaa

SEQ ID NO: 1494506 - DNA, 25 bp, Homo sapien
cagagaccatccactgtctttgaca

SEQ ID NO: 1494507 - DNA, 25 bp, Homo sapien
agagaccatccactgtctttgacac

SEQ ID NO: 1494508 - DNA, 25 bp, Homo sapien
tcagagaccatccactgtctttgac

SEQ ID NO: 1494509 - DNA, 25 bp, Homo sapien
gactggacacaatgggcattttgag

SEQ ID NO: 1494510 - DNA, 25 bp, Homo sapien
caggtgtgtgatatttgcccagttg

SEQ ID NO: 1494511 - DNA, 25 bp, Homo sapien
gcacaggtgtgtgatatttgcccag

SEQ ID NO: 1494512 - DNA, 25 bp, Homo sapien
acaggtgtgactggacacaatgggc

SEQ ID NO: 1494513 - DNA, 25 bp, Homo sapien
actccaggtactagacctgtttcag

SEQ ID NO: 1494514 - DNA, 25 bp, Homo sapien
tggctcttagtacaaaacttcactc

SEQ ID NO: 1494515 - DNA, 25 bp, Homo sapien
cctttgttcagggtactgtgacttc

SEQ ID NO: 1494516 - DNA, 25 bp, Homo sapien
cctttgttcagggtactgtgacctc

SEQ ID NO: 1494517 - DNA, 25 bp, Homo sapien
agggcaggcccgttaagtggcaact

SEQ ID NO: 1494518 - DNA, 25 bp, Homo sapien
caggcccgttaagtggcaactttgt

SEQ ID NO: 1494519 - DNA, 25 bp, Homo sapien
atgggcccttctccggaggacgtct

SEQ ID NO: 1494520 - DNA, 25 bp, Homo sapien
cccttctccggaggacgtctccaga

SEQ ID NO: 1494521 - DNA, 25 bp, Homo sapien
ccttctccggaggacgtctccagag

SEQ ID NO: 1494522 - DNA, 25 bp, Homo sapien
gaggatgggcccttctccggaggac

SEQ ID NO: 1494523 - DNA, 25 bp, Homo sapien
cttgggaggagtctatggatctgac

SEQ ID NO: 1494524 - DNA, 25 bp, Homo sapien
gggtgtctgggcgtgccccagtggg

SEQ ID NO: 1494525 - DNA, 25 bp, Homo sapien
ggcttgaatggggttccatggtctt

SEQ ID NO: 1494526 - DNA, 25 bp, Homo sapien
gttccatggtcttggctggagtgtg

SEQ ID NO: 1494527 - DNA, 25 bp, Homo sapien
tctgggtaggggatctgtgatccca

SEQ ID NO: 1494528 - DNA, 25 bp, Homo sapien
tctgcgtggggttacatgattctgg

SEQ ID NO: 1494529 - DNA, 25 bp, Homo sapien
ggtccaagtccttgtggtccctgct

SEQ ID NO: 1494530 - DNA, 25 bp, Homo sapien
tggtccctgctgaggtctgcgtggg

SEQ ID NO: 1494531 - DNA, 25 bp, Homo sapien
gggtccaagtccttgtggtccctgc

SEQ ID NO: 1494532 - DNA, 25 bp, Homo sapien
tggtccataatcctggcatggctct

SEQ ID NO: 1494533 - DNA, 25 bp, Homo sapien
agtcctggtccataatcctggcatg

SEQ ID NO: 1494534 - DNA, 25 bp, Homo sapien
ctgtgggagtcctggtccataatcc

SEQ ID NO: 1494535 - DNA, 25 bp, Homo sapien
tgggagtcctggtccataatcctgg

SEQ ID NO: 1494536 - DNA, 25 bp, Homo sapien
ctgtggtgtcagtacgaattagggt

SEQ ID NO: 1494537 - DNA, 25 bp, Homo sapien
ggttctgtggtgtcagtacgaatta

SEQ ID NO: 1494538 - DNA, 25 bp, Homo sapien
ttctgtggtgtcagtacgaattagg

SEQ ID NO: 1494539 - DNA, 25 bp, Homo sapien
gtgtcagtacgaattagggtgtggg

SEQ ID NO: 1494540 - DNA, 25 bp, Homo sapien
gtgagttcctgtgggcaaatgagcc

SEQ ID NO: 1494541 - DNA, 25 bp, Homo sapien
cctgtgagttcctgtgggcaaatga

SEQ ID NO: 1494542 - DNA, 25 bp, Homo sapien
gtttttagagtattgcagtcagcac

SEQ ID NO: 1494543 - DNA, 25 bp, Homo sapien
agagtattgcagtcagcacagtttc

SEQ ID NO: 1494544 - DNA, 25 bp, Homo sapien
tcagtttttagagtattgcagtcag

SEQ ID NO: 1494545 - DNA, 25 bp, Homo sapien
ttttagagtattgcagtcagcacag

SEQ ID NO: 1494546 - DNA, 25 bp, Homo sapien
ttcatccacgtgttgaactgaaggt

SEQ ID NO: 1494547 - DNA, 25 bp, Homo sapien
tggaggcacatgtctgggtaacaga

SEQ ID NO: 1494548 - DNA, 25 bp, Homo sapien
actgaaggtcatagagagaactcat

SEQ ID NO: 1494549 - DNA, 25 bp, Homo sapien
ctgaaggtcatagagagaactcatc

SEQ ID NO: 1494550 - DNA, 25 bp, Homo sapien
ggaccatgtcctattcacactgtct

SEQ ID NO: 1494551 - DNA, 25 bp, Homo sapien
ctctgtgctcttcagggaccatgtc

SEQ ID NO: 1494552 - DNA, 25 bp, Homo sapien
tggataggacagaagctccgcccag

SEQ ID NO: 1494553 - DNA, 25 bp, Homo sapien
cagccccacatgagagctctgtgct

SEQ ID NO: 1494554 - DNA, 25 bp, Homo sapien
gattttgcgtgcatgtcttccagca

SEQ ID NO: 1494555 - DNA, 25 bp, Homo sapien
gcttcggtttaattgcatgcacatc

SEQ ID NO: 1494556 - DNA, 25 bp, Homo sapien
ctgtgcttgcaagggttccgtaaca

SEQ ID NO: 1494557 - DNA, 25 bp, Homo sapien
agaaacactaaacctctttgcaatg

SEQ ID NO: 1494558 - DNA, 25 bp, Homo sapien
atattggaacttgcctgcattgcag

SEQ ID NO: 1494559 - DNA, 25 bp, Homo sapien
tggaacttgcctgcattgcagatgt

SEQ ID NO: 1494560 - DNA, 25 bp, Homo sapien
atgttcatattggaacttgcctgca

SEQ ID NO: 1494561 - DNA, 25 bp, Homo sapien
gttccacagatgttcatattggaac

SEQ ID NO: 1494562 - DNA, 25 bp, Homo sapien
gacactgaattatgtcaacagttct

SEQ ID NO: 1494563 - DNA, 25 bp, Homo sapien
gtcaacagttctcccccaagtaatg

SEQ ID NO: 1494564 - DNA, 25 bp, Homo sapien
caagtaatgcatgggtttaaatcac

SEQ ID NO: 1494565 - DNA, 25 bp, Homo sapien
tgttccttcccctgttgacactgaa

SEQ ID NO: 1494566 - DNA, 25 bp, Homo sapien
ggcgcagtcagataagcattaacta

SEQ ID NO: 1494567 - DNA, 25 bp, Homo sapien
aggcagcatattccctgccgagccg

SEQ ID NO: 1494568 - DNA, 25 bp, Homo sapien
gtacccagcctcggtgaaaacctca

SEQ ID NO: 1494569 - DNA, 25 bp, Homo sapien
atattccctgccgagccggtaggtg

SEQ ID NO: 1494570 - DNA, 25 bp, Homo sapien
tcctggagttcaccaatatggcgtg

SEQ ID NO: 1494571 - DNA, 25 bp, Homo sapien
ctctgggtgccaagacacgtgatca

SEQ ID NO: 1494572 - DNA, 25 bp, Homo sapien
tatggcgtggactttacctcctcaa

SEQ ID NO: 1494573 - DNA, 25 bp, Homo sapien
tcagtcagtgcaagatggtccaacc

SEQ ID NO: 1494574 - DNA, 25 bp, Homo sapien
gcggccaccagacggcggagcaggc

SEQ ID NO: 1494575 - DNA, 25 bp, Homo sapien
cggagcccgcggaggactcgaaggg

SEQ ID NO: 1494576 - DNA, 25 bp, Homo sapien
cccaaggcgagcagagatcgtccgc

SEQ ID NO: 1494577 - DNA, 25 bp, Homo sapien
agcagagatcgtccgcgagtgcagc

SEQ ID NO: 1494578 - DNA, 25 bp, Homo sapien
cgcgtcccgccgggcacggaagagg

SEQ ID NO: 1494579 - DNA, 25 bp, Homo sapien
cacagcgcgtcccgccgggcacgga

SEQ ID NO: 1494580 - DNA, 25 bp, Homo sapien
ctgggtccccgtgggcacagcgcgt

SEQ ID NO: 1494581 - DNA, 25 bp, Homo sapien
agcgcgtcccgccgggcacggaaga

SEQ ID NO: 1494582 - DNA, 25 bp, Homo sapien
gagaaagtgggcgcctcctccggac

SEQ ID NO: 1494583 - DNA, 25 bp, Homo sapien
atcaggaaaggcatcgctaagtcaa

SEQ ID NO: 1494584 - DNA, 25 bp, Homo sapien
tcaggaaaggcatcgctaagtcaaa

SEQ ID NO: 1494585 - DNA, 25 bp, Homo sapien
acatgagagttgcaatcatcagtac

SEQ ID NO: 1494586 - DNA, 25 bp, Homo sapien
gggggcattaggtggtgctgggtca

SEQ ID NO: 1494587 - DNA, 25 bp, Homo sapien
ccaggtcggttggggtttggatctg

SEQ ID NO: 1494588 - DNA, 25 bp, Homo sapien
atctggctttggtttgggggcatta

SEQ ID NO: 1494589 - DNA, 25 bp, Homo sapien
ggggcattaggtggtgctgggtcac

SEQ ID NO: 1494590 - DNA, 25 bp, Homo sapien
ctccctcaccaaaggcatctgctaa

SEQ ID NO: 1494591 - DNA, 25 bp, Homo sapien
tgtttcctccctcaccaaaggcatc

SEQ ID NO: 1494592 - DNA, 25 bp, Homo sapien
cctcaccaaaggcatctgctaagtc

SEQ ID NO: 1494593 - DNA, 25 bp, Homo sapien
tcaccaaaggcatctgctaagtcaa

SEQ ID NO: 1494594 - DNA, 25 bp, Homo sapien
gctcttatcagtgaaaccaggtcag

SEQ ID NO: 1494595 - DNA, 25 bp, Homo sapien
caacatagagaccaccccgtagggt

SEQ ID NO: 1494596 - DNA, 25 bp, Homo sapien
aatctcctcttctcagatgacacgg

SEQ ID NO: 1494597 - DNA, 25 bp, Homo sapien
agatgacacggacatcactgccagg

SEQ ID NO: 1494598 - DNA, 25 bp, Homo sapien
tggagccccacgtgactaaatactt

SEQ ID NO: 1494599 - DNA, 25 bp, Homo sapien
caatactgacgggaaaacaccttag

SEQ ID NO: 1494600 - DNA, 25 bp, Homo sapien
ggtgaacaccaatatcggagacggt

SEQ ID NO: 1494601 - DNA, 25 bp, Homo sapien
caccttctgtgagggagaccctaag

SEQ ID NO: 1494602 - DNA, 25 bp, Homo sapien
atttcctccatcacgaaaggcatct

SEQ ID NO: 1494603 - DNA, 25 bp, Homo sapien
tccatcacgaaaggcatctgctaag

SEQ ID NO: 1494604 - DNA, 25 bp, Homo sapien
cctccatcacgaaaggcatctgcta

SEQ ID NO: 1494605 - DNA, 25 bp, Homo sapien
tcacgaaaggcatctgctaagtcaa

SEQ ID NO: 1494606 - DNA, 25 bp, Homo sapien
gggttcgcatttggcttcagcttgg

SEQ ID NO: 1494607 - DNA, 25 bp, Homo sapien
tttggcttcagcttgggtgaattaa

SEQ ID NO: 1494608 - DNA, 25 bp, Homo sapien
tcagcttgggtgaattaagaggtgc

SEQ ID NO: 1494609 - DNA, 25 bp, Homo sapien
aggctgctcagggttcgcatttggc

SEQ ID NO: 1494610 - DNA, 25 bp, Homo sapien
aaaaacagttgctagtcagattacc

SEQ ID NO: 1494611 - DNA, 25 bp, Homo sapien
tacaaaaagtcaatagcaagcacct

SEQ ID NO: 1494612 - DNA, 25 bp, Homo sapien
cctgcccactggagtaactgtacaa

SEQ ID NO: 1494613 - DNA, 25 bp, Homo sapien
ccatcacaatgccaagaggatatga

SEQ ID NO: 1494614 - DNA, 25 bp, Homo sapien
gaaatggtctcgtaaacagatgcag

SEQ ID NO: 1494615 - DNA, 25 bp, Homo sapien
gctggacaaactgacgtgaaaactc

SEQ ID NO: 1494616 - DNA, 25 bp, Homo sapien
ttggaattccaactctaacctgcac

SEQ ID NO: 1494617 - DNA, 25 bp, Homo sapien
tgactctgccaacccatttatgctg

SEQ ID NO: 1494618 - DNA, 25 bp, Homo sapien
tttgtcatgtaaggcatctgctaag

SEQ ID NO: 1494619 - DNA, 25 bp, Homo sapien
aatatggcacccttgtaagcatggg

SEQ ID NO: 1494620 - DNA, 25 bp, Homo sapien
ggtccctgggtgatcgaacaagtca

SEQ ID NO: 1494621 - DNA, 25 bp, Homo sapien
cactcatgaagcctaacttggccag

SEQ ID NO: 1494622 - DNA, 25 bp, Homo sapien
gatcagctacagaattggcaaggta

SEQ ID NO: 1494623 - DNA, 25 bp, Homo sapien
gtaaaagatgagagttgagattatg

SEQ ID NO: 1494624 - DNA, 25 bp, Homo sapien
ggtgggttcagtggtgctggctcgt

SEQ ID NO: 1494625 - DNA, 25 bp, Homo sapien
ccatgaagaaacatctgtgaaatca

SEQ ID NO: 1494626 - DNA, 25 bp, Homo sapien
tcaccatgaagaaacatctgtgaaa

SEQ ID NO: 1494627 - DNA, 25 bp, Homo sapien
gaaacatctgtgaaatcaaagtcat

SEQ ID NO: 1494628 - DNA, 25 bp, Homo sapien
tgaagaaacatctgtgaaatcaaag

SEQ ID NO: 1494629 - DNA, 25 bp, Homo sapien
caacagcagcgtgggatcagagcca

SEQ ID NO: 1494630 - DNA, 25 bp, Homo sapien
cctagggacactcgaagggacattt

SEQ ID NO: 1494631 - DNA, 25 bp, Homo sapien
gacattttcaagactgggcactgac

SEQ ID NO: 1494632 - DNA, 25 bp, Homo sapien
actttgcacttagctgccgaaggga

SEQ ID NO: 1494633 - DNA, 25 bp, Homo sapien
acatgggaggccgtttgaaatgccc

SEQ ID NO: 1494634 - DNA, 25 bp, Homo sapien
tatctgccttggacctgattctagg

SEQ ID NO: 1494635 - DNA, 25 bp, Homo sapien
caatggtgcggttgctttgaaaagc

SEQ ID NO: 1494636 - DNA, 25 bp, Homo sapien
gcctggcggatccttcaatggttaa

SEQ ID NO: 1494637 - DNA, 25 bp, Homo sapien
gaaaccttgagctgaatagttcaaa

SEQ ID NO: 1494638 - DNA, 25 bp, Homo sapien
gttgtcacaaactgggcatcttggg

SEQ ID NO: 1494639 - DNA, 25 bp, Homo sapien
tggaatctggaaagatctctgcctg

SEQ ID NO: 1494640 - DNA, 25 bp, Homo sapien
tacccccaagaactggaatctggaa

SEQ ID NO: 1494641 - DNA, 25 bp, Homo sapien
cctgaatgtgaagatcggtgaccga

SEQ ID NO: 1494642 - DNA, 25 bp, Homo sapien
gcccagtgaattgaagaatctccag

SEQ ID NO: 1494643 - DNA, 25 bp, Homo sapien
tgtacgagcctccatcagaggatag

SEQ ID NO: 1494644 - DNA, 25 bp, Homo sapien
taaatgtggaccctgggaacaagga

SEQ ID NO: 1494645 - DNA, 25 bp, Homo sapien
acgcccagctagttgttgttttaag

SEQ ID NO: 1494646 - DNA, 25 bp, Homo sapien
cccagctagttgttgttttaagact

SEQ ID NO: 1494647 - DNA, 25 bp, Homo sapien
gactgagtctcactccagcccgggc

SEQ ID NO: 1494648 - DNA, 25 bp, Homo sapien
cagctagttgttgttttaagactga

SEQ ID NO: 1494649 - DNA, 25 bp, Homo sapien
tgagcatgcccacgagaggtctcag

SEQ ID NO: 1494650 - DNA, 25 bp, Homo sapien
gggtccctactcctgaggtcctgaa

SEQ ID NO: 1494651 - DNA, 25 bp, Homo sapien
gaacagatctcattaagcacaggag

SEQ ID NO: 1494652 - DNA, 25 bp, Homo sapien
gaatttcccctgtaccggtgagtga

SEQ ID NO: 1494653 - DNA, 25 bp, Homo sapien
caggcgtgctgccaattaaagggac

SEQ ID NO: 1494654 - DNA, 25 bp, Homo sapien
ggcgtgctgccaattaaagggacag

SEQ ID NO: 1494655 - DNA, 25 bp, Homo sapien
aaagggacagctttgtggagctcca

SEQ ID NO: 1494656 - DNA, 25 bp, Homo sapien
cagctttgtggagctccagaagcat

SEQ ID NO: 1494657 - DNA, 25 bp, Homo sapien
taacctcattgtttatgggtggccc

SEQ ID NO: 1494658 - DNA, 25 bp, Homo sapien
tagctgaggctggttgacccatcca

SEQ ID NO: 1494659 - DNA, 25 bp, Homo sapien
tgacttcgggtaggtccaaaggcaa

SEQ ID NO: 1494660 - DNA, 25 bp, Homo sapien
taatggctctggaaccaatgtctcc

SEQ ID NO: 1494661 - DNA, 25 bp, Homo sapien
tgtgaaacccacgaacacggtcaac

SEQ ID NO: 1494662 - DNA, 25 bp, Homo sapien
tgtcaacagcaatgtgaaacccacg

SEQ ID NO: 1494663 - DNA, 25 bp, Homo sapien
cacgaacacggtcaacatcgtagag

SEQ ID NO: 1494664 - DNA, 25 bp, Homo sapien
attctttctggtatgtcaacagcaa

SEQ ID NO: 1494665 - DNA, 25 bp, Homo sapien
cagacacttggtttgaagagatcca

SEQ ID NO: 1494666 - DNA, 25 bp, Homo sapien
tctatcggacaatgagtgaatggct

SEQ ID NO: 1494667 - DNA, 25 bp, Homo sapien
tgtctcagaactgctagaccagctg

SEQ ID NO: 1494668 - DNA, 25 bp, Homo sapien
tgtgttctgagtggaggcatgcctc

SEQ ID NO: 1494669 - DNA, 25 bp, Homo sapien
ggtgtaaaatgactgtcactgaggg

SEQ ID NO: 1494670 - DNA, 25 bp, Homo sapien
ttatactaactaccaccaaggccat

SEQ ID NO: 1494671 - DNA, 25 bp, Homo sapien
gattctacagtcaagagatccccat

SEQ ID NO: 1494672 - DNA, 25 bp, Homo sapien
gaagcatactatatttccagtgcaa

SEQ ID NO: 1494673 - DNA, 25 bp, Homo sapien
tattttaatcggcacttcagctcag

SEQ ID NO: 1494674 - DNA, 25 bp, Homo sapien
tctgatgcaaggttgtcgcagttcc

SEQ ID NO: 1494675 - DNA, 25 bp, Homo sapien
cattctatgtagagcaggacttgag

SEQ ID NO: 1494676 - DNA, 25 bp, Homo sapien
acatttgttcctgggtaaagcagct

SEQ ID NO: 1494677 - DNA, 25 bp, Homo sapien
tttagagaggcaatgcgatcatcgc

SEQ ID NO: 1494678 - DNA, 25 bp, Homo sapien
gcccatgcctgtctagtggcctgta

SEQ ID NO: 1494679 - DNA, 25 bp, Homo sapien
ttctgtgagaccaaggtttctagac

SEQ ID NO: 1494680 - DNA, 25 bp, Homo sapien
tcatgtggtacttgtctttccgtgc

SEQ ID NO: 1494681 - DNA, 25 bp, Homo sapien
aacttggcccgtgtgcagaagtgcc

SEQ ID NO: 1494682 - DNA, 25 bp, Homo sapien
gattcctgcacccaatagagactgg

SEQ ID NO: 1494683 - DNA, 25 bp, Homo sapien
tctttagaactaagcagggtgcagc

SEQ ID NO: 1494684 - DNA, 25 bp, Homo sapien
tgttcagatcttcatgagcctgggc

SEQ ID NO: 1494685 - DNA, 25 bp, Homo sapien
agtggcaagatgcttggtgctgtgc

SEQ ID NO: 1494686 - DNA, 25 bp, Homo sapien
gaatgggctaatacaggctcctact

SEQ ID NO: 1494687 - DNA, 25 bp, Homo sapien
ggttttgcaccatccccctcaatta

SEQ ID NO: 1494688 - DNA, 25 bp, Homo sapien
aatatgtctagagagaaattttggc

SEQ ID NO: 1494689 - DNA, 25 bp, Homo sapien
tttggcatcctgaggcaagtctgac

SEQ ID NO: 1494690 - DNA, 25 bp, Homo sapien
cattatgttccagtagagtctagac

SEQ ID NO: 1494691 - DNA, 25 bp, Homo sapien
taaaaagaacgcagggtcttcctgc

SEQ ID NO: 1494692 - DNA, 25 bp, Homo sapien
cctctgacatttggacggcactgca

SEQ ID NO: 1494693 - DNA, 25 bp, Homo sapien
ggcaggacagatactcccccacggg

SEQ ID NO: 1494694 - DNA, 25 bp, Homo sapien
aggcggcaggacagatactccccca

SEQ ID NO: 1494695 - DNA, 25 bp, Homo sapien
ggacggtcccggagtgcagggcgtg

SEQ ID NO: 1494696 - DNA, 25 bp, Homo sapien
tcccggagtgcagggcgtgggcgaa

SEQ ID NO: 1494697 - DNA, 25 bp, Homo sapien
ggggcggcgaccagaacacccagca

SEQ ID NO: 1494698 - DNA, 25 bp, Homo sapien
caaggccgccccacatgtaagagtt

SEQ ID NO: 1494699 - DNA, 25 bp, Homo sapien
tgtaagagtttgcaactccgacaac

SEQ ID NO: 1494700 - DNA, 25 bp, Homo sapien
ttttctctctggaacggctccagga

SEQ ID NO: 1494701 - DNA, 25 bp, Homo sapien
gacaacaaacgctgacttttctctc

SEQ ID NO: 1494702 - DNA, 25 bp, Homo sapien
gatctgtaagaaggtcccctagatt

SEQ ID NO: 1494703 - DNA, 25 bp, Homo sapien
agagatctgtaagaaggtcccctag

SEQ ID NO: 1494704 - DNA, 25 bp, Homo sapien
tcatgcaaagggagagagatctgta

SEQ ID NO: 1494705 - DNA, 25 bp, Homo sapien
ctgtaagaaggtcccctagattggg

SEQ ID NO: 1494706 - DNA, 25 bp, Homo sapien
tcctagcgattccaaatttaggccc

SEQ ID NO: 1494707 - DNA, 25 bp, Homo sapien
ggcctgaagacgcaggtccccaaac

SEQ ID NO: 1494708 - DNA, 25 bp, Homo sapien
ctagcgattccaaatttaggcccgg

SEQ ID NO: 1494709 - DNA, 25 bp, Homo sapien
cgcgcgcggcctgaagacgcaggtc

SEQ ID NO: 1494710 - DNA, 25 bp, Homo sapien
ccgccgcagatggacaatttggtaa

SEQ ID NO: 1494711 - DNA, 25 bp, Homo sapien
taagcacacgtttctttctgcgccc

SEQ ID NO: 1494712 - DNA, 25 bp, Homo sapien
cacagcacgcgctgaaattcccgga

SEQ ID NO: 1494713 - DNA, 25 bp, Homo sapien
ttataacataccacatccggcaggg

SEQ ID NO: 1494714 - DNA, 25 bp, Homo sapien
caactttcccgatgaaacgtgtatt

SEQ ID NO: 1494715 - DNA, 25 bp, Homo sapien
gagaagcgtccctcaaggagatcca

SEQ ID NO: 1494716 - DNA, 25 bp, Homo sapien
agcagggtcagactgcaaagaaggg

SEQ ID NO: 1494717 - DNA, 25 bp, Homo sapien
taatattattgggacaggctgtttc

SEQ ID NO: 1494718 - DNA, 25 bp, Homo sapien
tttacaatgatttttcaggtggctc

SEQ ID NO: 1494719 - DNA, 25 bp, Homo sapien
cctgagcccgggagacacaggtcgc

SEQ ID NO: 1494720 - DNA, 25 bp, Homo sapien
aataagaatgtaggacagttgattt

SEQ ID NO: 1494721 - DNA, 25 bp, Homo sapien
acttccaaataagaatgtaggacag

SEQ ID NO: 1494722 - DNA, 25 bp, Homo sapien
tagagcagctagaatccaagccact

SEQ ID NO: 1494723 - DNA, 25 bp, Homo sapien
cagaggtgaagcacggaagacagca

SEQ ID NO: 1494724 - DNA, 25 bp, Homo sapien
tctttgttgagggtactagagcagc

SEQ ID NO: 1494725 - DNA, 25 bp, Homo sapien
gaaaatccacatgggcctgggacat

SEQ ID NO: 1494726 - DNA, 25 bp, Homo sapien
gggtggctgcaagctactttcacag

SEQ ID NO: 1494727 - DNA, 25 bp, Homo sapien
gagggagcggaacaaaagctttgcc

SEQ ID NO: 1494728 - DNA, 25 bp, Homo sapien
tgcccatgcggcttctttagcaagg

SEQ ID NO: 1494729 - DNA, 25 bp, Homo sapien
tcctctcctctgttgaattttcttc

SEQ ID NO: 1494730 - DNA, 25 bp, Homo sapien
gaagaagacagctagcaacagcagc

SEQ ID NO: 1494731 - DNA, 25 bp, Homo sapien
tctctccgagtgttcaattgctgag

SEQ ID NO: 1494732 - DNA, 25 bp, Homo sapien
taaatgcctaacacttctctccgag

SEQ ID NO: 1494733 - DNA, 25 bp, Homo sapien
gctgaattcatcgaagacagccctg

SEQ ID NO: 1494734 - DNA, 25 bp, Homo sapien
cattacagtttaaggagcacagctc

SEQ ID NO: 1494735 - DNA, 25 bp, Homo sapien
cacctgaagcgctttctcacaagta

SEQ ID NO: 1494736 - DNA, 25 bp, Homo sapien
caaacgtgtggtcaactctgcaggc

SEQ ID NO: 1494737 - DNA, 25 bp, Homo sapien
ttttaaagcctacccatgtgatgca

SEQ ID NO: 1494738 - DNA, 25 bp, Homo sapien
atgaagacccgccactggcctgggt

SEQ ID NO: 1494739 - DNA, 25 bp, Homo sapien
aaatgtccaattcactcagccccag

SEQ ID NO: 1494740 - DNA, 25 bp, Homo sapien
ggacatcatttaagcagtgctctgt

SEQ ID NO: 1494741 - DNA, 25 bp, Homo sapien
tgtgtgctctttacttgctgctgag

SEQ ID NO: 1494742 - DNA, 25 bp, Homo sapien
aggctagagtacagtagcatgatct

SEQ ID NO: 1494743 - DNA, 25 bp, Homo sapien
ctagagtacagtagcatgatctcaa

SEQ ID NO: 1494744 - DNA, 25 bp, Homo sapien
ggctagagtacagtagcatgatctc

SEQ ID NO: 1494745 - DNA, 25 bp, Homo sapien
agagtacagtagcatgatctcaact

SEQ ID NO: 1494746 - DNA, 25 bp, Homo sapien
gggcatcggataaatcgaaaccacc

SEQ ID NO: 1494747 - DNA, 25 bp, Homo sapien
caggaagggcatcggataaatcgaa

SEQ ID NO: 1494748 - DNA, 25 bp, Homo sapien
gcatcggataaatcgaaaccaccat

SEQ ID NO: 1494749 - DNA, 25 bp, Homo sapien
gaagggcatcggataaatcgaaacc

SEQ ID NO: 1494750 - DNA, 25 bp, Homo sapien
acaccgagctgaggtttatacaacg

SEQ ID NO: 1494751 - DNA, 25 bp, Homo sapien
acagaggctgctaccggccatggtt

SEQ ID NO: 1494752 - DNA, 25 bp, Homo sapien
ttatacaacgactcttgagcccaga

SEQ ID NO: 1494753 - DNA, 25 bp, Homo sapien
cagaggctgctaccggccatggttt

SEQ ID NO: 1494754 - DNA, 25 bp, Homo sapien
gattgcagtgggtttcttgttttca

SEQ ID NO: 1494755 - DNA, 25 bp, Homo sapien
cagcactgggtttcttggggattgc

SEQ ID NO: 1494756 - DNA, 25 bp, Homo sapien
cactgggtttcttggggattgcagt

SEQ ID NO: 1494757 - DNA, 25 bp, Homo sapien
tttcttggggattgcagtgggtttc

SEQ ID NO: 1494758 - DNA, 25 bp, Homo sapien
taaaaagctaggagagaagctctca

SEQ ID NO: 1494759 - DNA, 25 bp, Homo sapien
tatgtgctccgcaactgatgtgaca

SEQ ID NO: 1494760 - DNA, 25 bp, Homo sapien
gaaggaatgacctcgtgaacagatc

SEQ ID NO: 1494761 - DNA, 25 bp, Homo sapien
aatgaattgtgttgcctggaccaag

SEQ ID NO: 1494762 - DNA, 25 bp, Homo sapien
acaacagcatctcctaagtcaaagt

SEQ ID NO: 1494763 - DNA, 25 bp, Homo sapien
acagcatctcctaagtcaaagtcat

SEQ ID NO: 1494764 - DNA, 25 bp, Homo sapien
gcatctcctaagtcaaagtcatccc

SEQ ID NO: 1494765 - DNA, 25 bp, Homo sapien
cattttctccatcaacaacagcatc

SEQ ID NO: 1494766 - DNA, 25 bp, Homo sapien
tggttggggtttggatttggcatcg

SEQ ID NO: 1494767 - DNA, 25 bp, Homo sapien
tggatttggcatcggtttgggtggg

SEQ ID NO: 1494768 - DNA, 25 bp, Homo sapien
tttggatttggcatcggtttgggtg

SEQ ID NO: 1494769 - DNA, 25 bp, Homo sapien
gtggttggggtttggatttggcatc

SEQ ID NO: 1494770 - DNA, 25 bp, Homo sapien
catccgcaaggtcagcatctgaaaa

SEQ ID NO: 1494771 - DNA, 25 bp, Homo sapien
ccatccgcaaggtcagcatctgaaa

SEQ ID NO: 1494772 - DNA, 25 bp, Homo sapien
tcttccccttctttcctgtggctgc

SEQ ID NO: 1494773 - DNA, 25 bp, Homo sapien
ccttctttcctgtggctgcctccac

SEQ ID NO: 1494774 - DNA, 25 bp, Homo sapien
cctgtggctgcctccaccatcactg

SEQ ID NO: 1494775 - DNA, 25 bp, Homo sapien
gcctccaccatcactgcctcctttt

SEQ ID NO: 1494776 - DNA, 25 bp, Homo sapien
tactttgtcacccaggctggagtgc

SEQ ID NO: 1494777 - DNA, 25 bp, Homo sapien
agagtcttgctctgttgcccaggct

SEQ ID NO: 1494778 - DNA, 25 bp, Homo sapien
tttttggcggggagacagagtcttg

SEQ ID NO: 1494779 - DNA, 25 bp, Homo sapien
ttttgaaatgcagtcttactttgtc

SEQ ID NO: 1494780 - DNA, 25 bp, Homo sapien
ttctttttctggtaagcaatgaagc

SEQ ID NO: 1494781 - DNA, 25 bp, Homo sapien
cacaatcccggggatcacgcctggg

SEQ ID NO: 1494782 - DNA, 25 bp, Homo sapien
caatgaagctagagatggctccagc

SEQ ID NO: 1494783 - DNA, 25 bp, Homo sapien
ggtaagcaatgaagctagagatggc

SEQ ID NO: 1494784 - DNA, 25 bp, Homo sapien
gcttcacggcggatcccaatacaag

SEQ ID NO: 1494785 - DNA, 25 bp, Homo sapien
ccaatacaaggtcccaaagagcctg

SEQ ID NO: 1494786 - DNA, 25 bp, Homo sapien
cagcttcacggcggatcccaataca

SEQ ID NO: 1494787 - DNA, 25 bp, Homo sapien
tcccaatacaaggtcccaaagagcc

SEQ ID NO: 1494788 - DNA, 25 bp, Homo sapien
gggaaataaacacgagcagctcatt

SEQ ID NO: 1494789 - DNA, 25 bp, Homo sapien
acacgagcagctcatttaaagtctt

SEQ ID NO: 1494790 - DNA, 25 bp, Homo sapien
cgctctaaataatgtttgtggatgt

SEQ ID NO: 1494791 - DNA, 25 bp, Homo sapien
ttaaagtcttgagatccgaaagctg

SEQ ID NO: 1494792 - DNA, 25 bp, Homo sapien
gcttttgttcttgaagaatctagga

SEQ ID NO: 1494793 - DNA, 25 bp, Homo sapien
tcttgaagaatctaggaaaattgtt

SEQ ID NO: 1494794 - DNA, 25 bp, Homo sapien
acctcgccaggacatatttgctttt

SEQ ID NO: 1494795 - DNA, 25 bp, Homo sapien
aggtgtcggccacctcgccaggaca

SEQ ID NO: 1494796 - DNA, 25 bp, Homo sapien
tccttaggacgtgagtgagcttaac

SEQ ID NO: 1494797 - DNA, 25 bp, Homo sapien
caaaagcatatggaactgaaggcag

SEQ ID NO: 1494798 - DNA, 25 bp, Homo sapien
gataaaacgattacggtcaggacgc

SEQ ID NO: 1494799 - DNA, 25 bp, Homo sapien
taaaacatggaagtcactgccctgt

SEQ ID NO: 1494800 - DNA, 25 bp, Homo sapien
gaggctccgtgctcaaatgtgtgaa

SEQ ID NO: 1494801 - DNA, 25 bp, Homo sapien
gtgtgaatagggacctgaccaccca

SEQ ID NO: 1494802 - DNA, 25 bp, Homo sapien
caagttggtggactttggaaacaga

SEQ ID NO: 1494803 - DNA, 25 bp, Homo sapien
atccaaggaagacggccgcagaggc

SEQ ID NO: 1494804 - DNA, 25 bp, Homo sapien
taaagtctcacaagggcaaagtcca

SEQ ID NO: 1494805 - DNA, 25 bp, Homo sapien
tctgtgagaaggtgaccagacccat

SEQ ID NO: 1494806 - DNA, 25 bp, Homo sapien
gaggatcaaaccatccgtgctcagc

SEQ ID NO: 1494807 - DNA, 25 bp, Homo sapien
tagaactacggctcaaccataaggg

SEQ ID NO: 1494808 - DNA, 25 bp, Homo sapien
tgtcatttgttctgccagtcacaag

SEQ ID NO: 1494809 - DNA, 25 bp, Homo sapien
agtcacaagttgtcaacacgggtgc

SEQ ID NO: 1494810 - DNA, 25 bp, Homo sapien
atgtcatttgttctgccagtcacaa

SEQ ID NO: 1494811 - DNA, 25 bp, Homo sapien
ttgtcaacacgggtgcattttgcag

SEQ ID NO: 1494812 - DNA, 25 bp, Homo sapien
agccagcagcgtaacttttaatgac

SEQ ID NO: 1494813 - DNA, 25 bp, Homo sapien
cagcctcgccagtttacgctacgtg

SEQ ID NO: 1494814 - DNA, 25 bp, Homo sapien
accgtgccaagccagcagcgtaact

SEQ ID NO: 1494815 - DNA, 25 bp, Homo sapien
gccagtttacgctacgtgaactcca

SEQ ID NO: 1494816 - DNA, 25 bp, Homo sapien
ggactccgagcactaagagcttccc

SEQ ID NO: 1494817 - DNA, 25 bp, Homo sapien
agagcttccccagccatcaaaggac

SEQ ID NO: 1494818 - DNA, 25 bp, Homo sapien
aaggacaagacagccaaggcgtctt

SEQ ID NO: 1494819 - DNA, 25 bp, Homo sapien
cagccaaggcgtcttgtgtacccgg

SEQ ID NO: 1494820 - DNA, 25 bp, Homo sapien
gaggctcagtgcaacagataaccca

SEQ ID NO: 1494821 - DNA, 25 bp, Homo sapien
cttcaacagggtaatccaagcagct

SEQ ID NO: 1494822 - DNA, 25 bp, Homo sapien
gaggaacacgcacatggaagctctt

SEQ ID NO: 1494823 - DNA, 25 bp, Homo sapien
tgaggtcgacgctcctattgcttgg

SEQ ID NO: 1494824 - DNA, 25 bp, Homo sapien
ggcattccggtggctctccatgtcc

SEQ ID NO: 1494825 - DNA, 25 bp, Homo sapien
agctggctctgcgttggcattccgg

SEQ ID NO: 1494826 - DNA, 25 bp, Homo sapien
ctggctctgcgttggcattccggtg

SEQ ID NO: 1494827 - DNA, 25 bp, Homo sapien
cagctggctctgcgttggcattccg

SEQ ID NO: 1494828 - DNA, 25 bp, Homo sapien
gagaccctgtctgggcaacctagtg

SEQ ID NO: 1494829 - DNA, 25 bp, Homo sapien
gagaaggttccaatgtatgcacaaa

SEQ ID NO: 1494830 - DNA, 25 bp, Homo sapien
ttcaaaagtggttctgatggcaaaa

SEQ ID NO: 1494831 - DNA, 25 bp, Homo sapien
aatgcctgccttttaccctgagaag

SEQ ID NO: 1494832 - DNA, 25 bp, Homo sapien
gttgcagtgagcagaggtcgcacca

SEQ ID NO: 1494833 - DNA, 25 bp, Homo sapien
agaggtcgcaccactgcactccagc

SEQ ID NO: 1494834 - DNA, 25 bp, Homo sapien
gaatcacttgacactgggaggcagg

SEQ ID NO: 1494835 - DNA, 25 bp, Homo sapien
gcctgggtgacagagagacactcca

SEQ ID NO: 1494836 - DNA, 25 bp, Homo sapien
caatcaatttcattgaatgatgcca

SEQ ID NO: 1494837 - DNA, 25 bp, Homo sapien
gaaaacagcagaaggcaatttccac

SEQ ID NO: 1494838 - DNA, 25 bp, Homo sapien
aaatgggcccaaaactcatcacgag

SEQ ID NO: 1494839 - DNA, 25 bp, Homo sapien
gcaaaaccctaaatctcaatcaatt

SEQ ID NO: 1494840 - DNA, 25 bp, Homo sapien
tatttctctaaaagagtacgctgaa

SEQ ID NO: 1494841 - DNA, 25 bp, Homo sapien
ctatttctctaaaagagtacgctga

SEQ ID NO: 1494842 - DNA, 25 bp, Homo sapien
gcaacaagcaaagcacatcgcaaga

SEQ ID NO: 1494843 - DNA, 25 bp, Homo sapien
gttagtaaacatcatccgcccagca

SEQ ID NO: 1494844 - DNA, 25 bp, Homo sapien
gaatccgccgtgaacagaaggcctc

SEQ ID NO: 1494845 - DNA, 25 bp, Homo sapien
ggacttaataatggccagcctttca

SEQ ID NO: 1494846 - DNA, 25 bp, Homo sapien
tgaaaaacaaatatccctacaaatg

SEQ ID NO: 1494847 - DNA, 25 bp, Homo sapien
tttattagtctgatatgaaaaacaa

SEQ ID NO: 1494848 - DNA, 25 bp, Homo sapien
caaatatccctacaaatgaaagaaa

SEQ ID NO: 1494849 - DNA, 25 bp, Homo sapien
aaacaaatatccctacaaatgaaag

SEQ ID NO: 1494850 - DNA, 25 bp, Homo sapien
gccgaccacggatgtgcatgtttaa

SEQ ID NO: 1494851 - DNA, 25 bp, Homo sapien
cagtggcgggcacctcttggttatt

SEQ ID NO: 1494852 - DNA, 25 bp, Homo sapien
tagaagtttcgcaaatgcccaggac

SEQ ID NO: 1494853 - DNA, 25 bp, Homo sapien
gcaaatacctataggatgccacctg

SEQ ID NO: 1494854 - DNA, 25 bp, Homo sapien
gctgttgaggattcgacaccttttc

SEQ ID NO: 1494855 - DNA, 25 bp, Homo sapien
ctgggtgggagtcatccaagcagtc

SEQ ID NO: 1494856 - DNA, 25 bp, Homo sapien
cattctcaggatattgaagggcaca

SEQ ID NO: 1494857 - DNA, 25 bp, Homo sapien
ccttcaatttcagttctgggtggga

SEQ ID NO: 1494858 - DNA, 25 bp, Homo sapien
tcggaatgggattgacgtcataaac

SEQ ID NO: 1494859 - DNA, 25 bp, Homo sapien
ggtgttaaaaactgactgctgcacg

SEQ ID NO: 1494860 - DNA, 25 bp, Homo sapien
cagtcgcacaggcaggctaacgtga

SEQ ID NO: 1494861 - DNA, 25 bp, Homo sapien
gatatcatcagtacgtcctcagtcg

SEQ ID NO: 1494862 - DNA, 25 bp, Homo sapien
cattcaactcgagaagtcatcctgt

SEQ ID NO: 1494863 - DNA, 25 bp, Homo sapien
gatgaaaagttagaacctcgcctgt

SEQ ID NO: 1494864 - DNA, 25 bp, Homo sapien
tatagatgaaaacctgttgtaaccc

SEQ ID NO: 1494865 - DNA, 25 bp, Homo sapien
tccatacacttggaggatgcggaag

SEQ ID NO: 1494866 - DNA, 25 bp, Homo sapien
gaactgccagaaacaaatgggctcc

SEQ ID NO: 1494867 - DNA, 25 bp, Homo sapien
ccagccaagcggattgtgagacccg

SEQ ID NO: 1494868 - DNA, 25 bp, Homo sapien
gtggaaaatatgagcggaactgcca

SEQ ID NO: 1494869 - DNA, 25 bp, Homo sapien
ccaagcggattgtgagacccggcct

SEQ ID NO: 1494870 - DNA, 25 bp, Homo sapien
ctcgggcgtgcattagaaaacacag

SEQ ID NO: 1494871 - DNA, 25 bp, Homo sapien
gaacgcaagacagggaagtccccac

SEQ ID NO: 1494872 - DNA, 25 bp, Homo sapien
ttagaaaacacaggaacgcaagaca

SEQ ID NO: 1494873 - DNA, 25 bp, Homo sapien
caagacagggaagtccccaccagct

SEQ ID NO: 1494874 - DNA, 25 bp, Homo sapien
tggtgcatgatctgctcctcggaac

SEQ ID NO: 1494875 - DNA, 25 bp, Homo sapien
gcatgatctgctcctcggaacccat

SEQ ID NO: 1494876 - DNA, 25 bp, Homo sapien
gagcaggccgccctggtgcatgatc

SEQ ID NO: 1494877 - DNA, 25 bp, Homo sapien
gctgcagacaccagagctgagcagg

SEQ ID NO: 1494878 - DNA, 25 bp, Homo sapien
cacatgacgccattgctttcacggg

SEQ ID NO: 1494879 - DNA, 25 bp, Homo sapien
ggagatgtcccaggtagacaacgct

SEQ ID NO: 1494880 - DNA, 25 bp, Homo sapien
ccaggtagacaacgctaactctggg

SEQ ID NO: 1494881 - DNA, 25 bp, Homo sapien
ctgtctccaaggtcgggttgcacat

SEQ ID NO: 1494882 - DNA, 25 bp, Homo sapien
tcacatccagacctcgttacataaa

SEQ ID NO: 1494883 - DNA, 25 bp, Homo sapien
tccggccagcatcagacggcctggg

SEQ ID NO: 1494884 - DNA, 25 bp, Homo sapien
actgagacagtctccagtcccgcat

SEQ ID NO: 1494885 - DNA, 25 bp, Homo sapien
cgttacataaaccaggcggactccg

SEQ ID NO: 1494886 - DNA, 25 bp, Homo sapien
caggctttgccgctccttgtggagg

SEQ ID NO: 1494887 - DNA, 25 bp, Homo sapien
caaaaatcggtctgcctcggtgacg

SEQ ID NO: 1494888 - DNA, 25 bp, Homo sapien
acatagattcgtataggctgtggca

SEQ ID NO: 1494889 - DNA, 25 bp, Homo sapien
aattagggcctctccggagcagaag

SEQ ID NO: 1494890 - DNA, 25 bp, Homo sapien
ctcacttgcccctgccagtactagc

SEQ ID NO: 1494891 - DNA, 25 bp, Homo sapien
ttgatcttgttcctcacttgcccct

SEQ ID NO: 1494892 - DNA, 25 bp, Homo sapien
aaagcagttaatctaatgaatgtgt

SEQ ID NO: 1494893 - DNA, 25 bp, Homo sapien
aaaagcagttaatctaatgaatgtg

SEQ ID NO: 1494894 - DNA, 25 bp, Homo sapien
gggcatctgccaaatcaaagtctct

SEQ ID NO: 1494895 - DNA, 25 bp, Homo sapien
ggcatctgccaaatcaaagtctctt

SEQ ID NO: 1494896 - DNA, 25 bp, Homo sapien
ggtatgggacaatgagggatatgaa

SEQ ID NO: 1494897 - DNA, 25 bp, Homo sapien
agccccgtcagtgaaggtaaccaga

SEQ ID NO: 1494898 - DNA, 25 bp, Homo sapien
gggagaacggaatgaagtgtgctct

SEQ ID NO: 1494899 - DNA, 25 bp, Homo sapien
cggaatgaagtgtgctctgggaggg

SEQ ID NO: 1494900 - DNA, 25 bp, Homo sapien
agccagaaaggttctagctgaactt

SEQ ID NO: 1494901 - DNA, 25 bp, Homo sapien
gccagaaaggttctagctgaacttg

SEQ ID NO: 1494902 - DNA, 25 bp, Homo sapien
gtcagccagaaaggttctagctgaa

SEQ ID NO: 1494903 - DNA, 25 bp, Homo sapien
cagaaaggttctagctgaacttgga

SEQ ID NO: 1494904 - DNA, 25 bp, Homo sapien
acagtcgccatgcaggtgactgtgg

SEQ ID NO: 1494905 - DNA, 25 bp, Homo sapien
tcttaaagcccaggcagtatagaca

SEQ ID NO: 1494906 - DNA, 25 bp, Homo sapien
gaaaagtgaattccccacagtcgcc

SEQ ID NO: 1494907 - DNA, 25 bp, Homo sapien
gcccaggcagtatagacagtgaaaa

SEQ ID NO: 1494908 - DNA, 25 bp, Homo sapien
gtgacaaagccatacaaagtaaatg

SEQ ID NO: 1494909 - DNA, 25 bp, Homo sapien
gccaaagtagctgagaacatccaag

SEQ ID NO: 1494910 - DNA, 25 bp, Homo sapien
aacatccaagacaagtaagtgagcc

SEQ ID NO: 1494911 - DNA, 25 bp, Homo sapien
ccatgaacgccctgatgaaaggtga

SEQ ID NO: 1494912 - DNA, 25 bp, Homo sapien
tctctttcatataccccacagttct

SEQ ID NO: 1494913 - DNA, 25 bp, Homo sapien
gctatctggtacagttgttgcatct

SEQ ID NO: 1494914 - DNA, 25 bp, Homo sapien
tcccctccgtaagcatcagttcaag

SEQ ID NO: 1494915 - DNA, 25 bp, Homo sapien
cagttcaaggacgttgcctcagttt

SEQ ID NO: 1494916 - DNA, 25 bp, Homo sapien
taaaagtgaataattcaggggcact

SEQ ID NO: 1494917 - DNA, 25 bp, Homo sapien
ggcagtcacgacattgcttctggtt

SEQ ID NO: 1494918 - DNA, 25 bp, Homo sapien
acctctgtgtacttccagaatgctt

SEQ ID NO: 1494919 - DNA, 25 bp, Homo sapien
ggttctagggattcacctattcttg

SEQ ID NO: 1494920 - DNA, 25 bp, Homo sapien
ttccaccgctgtcgggattctcggg

SEQ ID NO: 1494921 - DNA, 25 bp, Homo sapien
ggattctcgggctgtgggtagtaag

SEQ ID NO: 1494922 - DNA, 25 bp, Homo sapien
ctcgggctgtgggtagtaaggtggt

SEQ ID NO: 1494923 - DNA, 25 bp, Homo sapien
ttctcgggctgtgggtagtaaggtg

SEQ ID NO: 1494924 - DNA, 25 bp, Homo sapien
ggacttcatcctatgaatttgcggg

SEQ ID NO: 1494925 - DNA, 25 bp, Homo sapien
caagacaacatgaggacaggcacag

SEQ ID NO: 1494926 - DNA, 25 bp, Homo sapien
gcttgcatcaaaaagaatccgtgcc

SEQ ID NO: 1494927 - DNA, 25 bp, Homo sapien
ggatactagtcctattggatccgga

SEQ ID NO: 1494928 - DNA, 25 bp, Homo sapien
tttgaggtctctaaaatgatacaac

SEQ ID NO: 1494929 - DNA, 25 bp, Homo sapien
tacaactgtgggggattatggaaac

SEQ ID NO: 1494930 - DNA, 25 bp, Homo sapien
cttttgaggtctctaaaatgataca

SEQ ID NO: 1494931 - DNA, 25 bp, Homo sapien
tcttttgaggtctctaaaatgatac

SEQ ID NO: 1494932 - DNA, 25 bp, Homo sapien
cactgttgccggaattgccaggctg

SEQ ID NO: 1494933 - DNA, 25 bp, Homo sapien
ggttgagggcgtggctttggccttg

SEQ ID NO: 1494934 - DNA, 25 bp, Homo sapien
gttgagggcgtggctttggccttgg

SEQ ID NO: 1494935 - DNA, 25 bp, Homo sapien
ccactgttgccggaattgccaggct

SEQ ID NO: 1494936 - DNA, 25 bp, Homo sapien
ttccgacgccaactggctctttgca

SEQ ID NO: 1494937 - DNA, 25 bp, Homo sapien
ggcattgctcatgagacctctccaa

SEQ ID NO: 1494938 - DNA, 25 bp, Homo sapien
ttttggagaagagcgttccgacgcc

SEQ ID NO: 1494939 - DNA, 25 bp, Homo sapien
ctctccaaaggtccccttcacacca

SEQ ID NO: 1494940 - DNA, 25 bp, Homo sapien
ggtagcgtccgtcatcacggtccac

SEQ ID NO: 1494941 - DNA, 25 bp, Homo sapien
cgggtagcgtccgtcatcacggtcc

SEQ ID NO: 1494942 - DNA, 25 bp, Homo sapien
cctgggcgggtagcgtccgtcatca

SEQ ID NO: 1494943 - DNA, 25 bp, Homo sapien
tagcgtccgtcatcacggtccacat

SEQ ID NO: 1494944 - DNA, 25 bp, Homo sapien
gcaaattcaatgtgtcgcatctggg

SEQ ID NO: 1494945 - DNA, 25 bp, Homo sapien
ctctgtgcaaattcaatgtgtcgca

SEQ ID NO: 1494946 - DNA, 25 bp, Homo sapien
cgcatctggggaggctcggcaccta

SEQ ID NO: 1494947 - DNA, 25 bp, Homo sapien
tgtgcaaattcaatgtgtcgcatct

SEQ ID NO: 1494948 - DNA, 25 bp, Homo sapien
ggtttcctgcaggtgttggtctgtc

SEQ ID NO: 1494949 - DNA, 25 bp, Homo sapien
ttgggaatggcaacaagtcgtgtga

SEQ ID NO: 1494950 - DNA, 25 bp, Homo sapien
ctgcaggtgttggtctgtccagctc

SEQ ID NO: 1494951 - DNA, 25 bp, Homo sapien
aatggcaacaagtcgtgtgaacgtg

SEQ ID NO: 1494952 - DNA, 25 bp, Homo sapien
cggagttgccataactggagtagcc

SEQ ID NO: 1494953 - DNA, 25 bp, Homo sapien
tgcgtgttgtcggagttgccataac

SEQ ID NO: 1494954 - DNA, 25 bp, Homo sapien
cgtgcgtgttgtcggagttgccata

SEQ ID NO: 1494955 - DNA, 25 bp, Homo sapien
tgttgtcggagttgccataactgga

SEQ ID NO: 1494956 - DNA, 25 bp, Homo sapien
catcgcatgcccagatgtaggggta

SEQ ID NO: 1494957 - DNA, 25 bp, Homo sapien
atcgcatgcccagatgtaggggtac

SEQ ID NO: 1494958 - DNA, 25 bp, Homo sapien
agcgcagacctcccgagactaactt

SEQ ID NO: 1494959 - DNA, 25 bp, Homo sapien
acaggaaacgatcagggctctcagg

SEQ ID NO: 1494960 - DNA, 25 bp, Homo sapien
cagtaagctttgatccattcgggag

SEQ ID NO: 1494961 - DNA, 25 bp, Homo sapien
cattcgggagccagataatggtccc

SEQ ID NO: 1494962 - DNA, 25 bp, Homo sapien
cataagtatttccataacgagagtt

SEQ ID NO: 1494963 - DNA, 25 bp, Homo sapien
taacgagagttgagtctatagcccc

SEQ ID NO: 1494964 - DNA, 25 bp, Homo sapien
tatttccataacgagagttgagtct

SEQ ID NO: 1494965 - DNA, 25 bp, Homo sapien
gagttgagtctatagccccctcttc

SEQ ID NO: 1494966 - DNA, 25 bp, Homo sapien
tattctgtaagacataattccttta

SEQ ID NO: 1494967 - DNA, 25 bp, Homo sapien
atattctgtaagacataattccttt

SEQ ID NO: 1494968 - DNA, 25 bp, Homo sapien
attctgtaagacataattcctttac

SEQ ID NO: 1494969 - DNA, 25 bp, Homo sapien
gattgccatacgttgaatggtgatc

SEQ ID NO: 1494970 - DNA, 25 bp, Homo sapien
ttctggattgccatacgttgaatgg

SEQ ID NO: 1494971 - DNA, 25 bp, Homo sapien
ccatacgttgaatggtgatctccac

SEQ ID NO: 1494972 - DNA, 25 bp, Homo sapien
tgccatacgttgaatggtgatctcc

SEQ ID NO: 1494973 - DNA, 25 bp, Homo sapien
catacaaagtatgagtgctccgtga

SEQ ID NO: 1494974 - DNA, 25 bp, Homo sapien
gggaccgggtgagtcaatcagttac

SEQ ID NO: 1494975 - DNA, 25 bp, Homo sapien
tctgcagtgaaaaccaatgcttgcc

SEQ ID NO: 1494976 - DNA, 25 bp, Homo sapien
tctttgggcagagtgttcatacctt

SEQ ID NO: 1494977 - DNA, 25 bp, Homo sapien
tggaggtctttcctggtcaccattg

SEQ ID NO: 1494978 - DNA, 25 bp, Homo sapien
tccttccctggttcccgttgcattc

SEQ ID NO: 1494979 - DNA, 25 bp, Homo sapien
tggtcaccattgcatccttccctgg

SEQ ID NO: 1494980 - DNA, 25 bp, Homo sapien
ccctggttcccgttgcattccacat

SEQ ID NO: 1494981 - DNA, 25 bp, Homo sapien
ctatgccgcctaagctcgtcctgaa

SEQ ID NO: 1494982 - DNA, 25 bp, Homo sapien
actatgccgcctaagctcgtcctga

SEQ ID NO: 1494983 - DNA, 25 bp, Homo sapien
tatgccgcctaagctcgtcctgaac

SEQ ID NO: 1494984 - DNA, 25 bp, Homo sapien
cactatgccgcctaagctcgtcctg

SEQ ID NO: 1494985 - DNA, 25 bp, Homo sapien
gacacgatttttgctaccatattgc

SEQ ID NO: 1494986 - DNA, 25 bp, Homo sapien
ggagacacgatttttgctaccatat

SEQ ID NO: 1494987 - DNA, 25 bp, Homo sapien
ccacggatacgatgggagacacgat

SEQ ID NO: 1494988 - DNA, 25 bp, Homo sapien
gtgtcaccaccaccacggatacgat

SEQ ID NO: 1494989 - DNA, 25 bp, Homo sapien
ttagctaacggttgatactgcccat

SEQ ID NO: 1494990 - DNA, 25 bp, Homo sapien
caaatcctaaagcaaacaccgtagg

SEQ ID NO: 1494991 - DNA, 25 bp, Homo sapien
acggttgatactgcccattcaccag

SEQ ID NO: 1494992 - DNA, 25 bp, Homo sapien
cgtaggaatgggcacccctttctgg

SEQ ID NO: 1494993 - DNA, 25 bp, Homo sapien
ttttagaacgcagggtctagctgcc

SEQ ID NO: 1494994 - DNA, 25 bp, Homo sapien
tgaaaacagaatgcccagcaggtgg

SEQ ID NO: 1494995 - DNA, 25 bp, Homo sapien
gctgaaaggatgatcaaaccctgct

SEQ ID NO: 1494996 - DNA, 25 bp, Homo sapien
tatgggccccatatatacattccag

SEQ ID NO: 1494997 - DNA, 25 bp, Homo sapien
ttcataactgggctcagatcaaagt

SEQ ID NO: 1494998 - DNA, 25 bp, Homo sapien
gtgagcctttcttcaacagacacag

SEQ ID NO: 1494999 - DNA, 25 bp, Homo sapien
tgagcctttcttcaacagacacagg

SEQ ID NO: 1495000 - DNA, 25 bp, Homo sapien
cagatcaaagttgtggtggaagcct

SEQ ID NO: 1495001 - DNA, 25 bp, Homo sapien
tcttccgcgctctggctgcctcggc

SEQ ID NO: 1495002 - DNA, 25 bp, Homo sapien
ccgcgggcgcgggtcctctcctcct

SEQ ID NO: 1495003 - DNA, 25 bp, Homo sapien
ccgagggcagcgattggcctctgtc

SEQ ID NO: 1495004 - DNA, 25 bp, Homo sapien
attggcctctgtccggaagcccggc

SEQ ID NO: 1495005 - DNA, 25 bp, Homo sapien
ccgcagagcagaggcgccgtctccg

SEQ ID NO: 1495006 - DNA, 25 bp, Homo sapien
ccgtctccgggaatccgcgtggatt

SEQ ID NO: 1495007 - DNA, 25 bp, Homo sapien
ggacctgcagacctgcgcccgggag

SEQ ID NO: 1495008 - DNA, 25 bp, Homo sapien
tgggtggacttcctcgccacgaacc

SEQ ID NO: 1495009 - DNA, 25 bp, Homo sapien
cccttcatgaggatctcagtgacaa

SEQ ID NO: 1495010 - DNA, 25 bp, Homo sapien
ctctatctaatcctgggacatttca

SEQ ID NO: 1495011 - DNA, 25 bp, Homo sapien
tttatttatcacagtaaatttcaca

SEQ ID NO: 1495012 - DNA, 25 bp, Homo sapien
acatgacataaaattcgccattgta

SEQ ID NO: 1495013 - DNA, 25 bp, Homo sapien
acctctatctaatcctgggacattt

SEQ ID NO: 1495014 - DNA, 25 bp, Homo sapien
ctgaggtgggtgaattgcttgacct

SEQ ID NO: 1495015 - DNA, 25 bp, Homo sapien
aggagttcgagaccagcctgggcac

SEQ ID NO: 1495016 - DNA, 25 bp, Homo sapien
cctgggcaccatggtgaaactctgt

SEQ ID NO: 1495017 - DNA, 25 bp, Homo sapien
tgggcaccatggtgaaactctgtct

SEQ ID NO: 1495018 - DNA, 25 bp, Homo sapien
gagggacagcaggggtgacggggcc

SEQ ID NO: 1495019 - DNA, 25 bp, Homo sapien
gggacagcaggggtgacggggccat

SEQ ID NO: 1495020 - DNA, 25 bp, Homo sapien
tgagggacagcaggggtgacggggc

SEQ ID NO: 1495021 - DNA, 25 bp, Homo sapien
ctgagggacagcaggggtgacgggg

SEQ ID NO: 1495022 - DNA, 25 bp, Homo sapien
aaaatcaacagaaacaccagagtta

SEQ ID NO: 1495023 - DNA, 25 bp, Homo sapien
tcaacagaaacaccagagttacact

SEQ ID NO: 1495024 - DNA, 25 bp, Homo sapien
caacagaaacaccagagttacactc

SEQ ID NO: 1495025 - DNA, 25 bp, Homo sapien
aatcaacagaaacaccagagttaca

SEQ ID NO: 1495026 - DNA, 25 bp, Homo sapien
cagcttcctcgtcagcctgtgtctc

SEQ ID NO: 1495027 - DNA, 25 bp, Homo sapien
ccctggcagtagatgtcattggtgg

SEQ ID NO: 1495028 - DNA, 25 bp, Homo sapien
gggcgccctggcagtagatgtcatt

SEQ ID NO: 1495029 - DNA, 25 bp, Homo sapien
gaggagtgatcaacaccaccagctt

SEQ ID NO: 1495030 - DNA, 25 bp, Homo sapien
tcagatgcccatcatgactgccggc

SEQ ID NO: 1495031 - DNA, 25 bp, Homo sapien
cagatgcccatcatgactgccggcc

SEQ ID NO: 1495032 - DNA, 25 bp, Homo sapien
agatgcccatcatgactgccggcca

SEQ ID NO: 1495033 - DNA, 25 bp, Homo sapien
atgattcgaaggttccttacaaacg

SEQ ID NO: 1495034 - DNA, 25 bp, Homo sapien
cacatgattcgaaggttccttacaa

SEQ ID NO: 1495035 - DNA, 25 bp, Homo sapien
acatgattcgaaggttccttacaaa

SEQ ID NO: 1495036 - DNA, 25 bp, Homo sapien
tcacatgattcgaaggttccttaca

SEQ ID NO: 1495037 - DNA, 25 bp, Homo sapien
taccacttggtgtctacatttgagc

SEQ ID NO: 1495038 - DNA, 25 bp, Homo sapien
aaatctccctctgcttttggcccag

SEQ ID NO: 1495039 - DNA, 25 bp, Homo sapien
tgacagatattgaagctctcggacc

SEQ ID NO: 1495040 - DNA, 25 bp, Homo sapien
caccacagttgcgtaaagatccggg

SEQ ID NO: 1495041 - DNA, 25 bp, Homo sapien
tcaatccacgcatttcccattaagg

SEQ ID NO: 1495042 - DNA, 25 bp, Homo sapien
ttcccattaaggctctgaaacttgt

SEQ ID NO: 1495043 - DNA, 25 bp, Homo sapien
gttttcttcaatccacgcatttccc

SEQ ID NO: 1495044 - DNA, 25 bp, Homo sapien
acgcatttcccattaaggctctgaa

SEQ ID NO: 1495045 - DNA, 25 bp, Homo sapien
atgcaaatgccaatggtgtgaaacc

SEQ ID NO: 1495046 - DNA, 25 bp, Homo sapien
tgcaaatgccaatggtgtgaaaccc

SEQ ID NO: 1495047 - DNA, 25 bp, Homo sapien
gcaaatgccaatggtgtgaaacccc

SEQ ID NO: 1495048 - DNA, 25 bp, Homo sapien
tcagagcacatttccacggatggct

SEQ ID NO: 1495049 - DNA, 25 bp, Homo sapien
tcactgcggtctccatgttcagagc

SEQ ID NO: 1495050 - DNA, 25 bp, Homo sapien
aacgtggaatgcaaagagaatcccc

SEQ ID NO: 1495051 - DNA, 25 bp, Homo sapien
ttagagctgtgcacaccgtccactt

SEQ ID NO: 1495052 - DNA, 25 bp, Homo sapien
caatgacttcatcgaacaccttcga

SEQ ID NO: 1495053 - DNA, 25 bp, Homo sapien
gacttcatcgaacaccttcgagagg

SEQ ID NO: 1495054 - DNA, 25 bp, Homo sapien
ttcatcgaacaccttcgagaggatg

SEQ ID NO: 1495055 - DNA, 25 bp, Homo sapien
atcgaacaccttcgagaggatgacc

SEQ ID NO: 1495056 - DNA, 25 bp, Homo sapien
atccaggaagacacacttgctgtag

SEQ ID NO: 1495057 - DNA, 25 bp, Homo sapien
tgagcccgagctcaggtctcttcag

SEQ ID NO: 1495058 - DNA, 25 bp, Homo sapien
gtagtgagtgagagtccaacagtga

SEQ ID NO: 1495059 - DNA, 25 bp, Homo sapien
agcccgagctcaggtctcttcagaa

SEQ ID NO: 1495060 - DNA, 25 bp, Homo sapien
tattgaagcaatccggccatccggg

SEQ ID NO: 1495061 - DNA, 25 bp, Homo sapien
tcaaagctgccgtgttccatggcgt

SEQ ID NO: 1495062 - DNA, 25 bp, Homo sapien
ggaagacaaacaccccgctattgaa

SEQ ID NO: 1495063 - DNA, 25 bp, Homo sapien
gcagaaaactctcccctgtcaaaca

SEQ ID NO: 1495064 - DNA, 25 bp, Homo sapien
gaaggcagggctgtaagtgtacatc

SEQ ID NO: 1495065 - DNA, 25 bp, Homo sapien
tgtggtcgaccagttcctgaagaaa

SEQ ID NO: 1495066 - DNA, 25 bp, Homo sapien
caagttatagatgaacggcaggtgc

SEQ ID NO: 1495067 - DNA, 25 bp, Homo sapien
gaagaaactattcagtaagccttgg

SEQ ID NO: 1495068 - DNA, 25 bp, Homo sapien
aggaacccaaagagctttgtccgtg

SEQ ID NO: 1495069 - DNA, 25 bp, Homo sapien
cccaaggtgattctcagattctcta

SEQ ID NO: 1495070 - DNA, 25 bp, Homo sapien
gggacaccgtgtcctctgtagagaa

SEQ ID NO: 1495071 - DNA, 25 bp, Homo sapien
ttttcgtggatcacctcctcatgaa

SEQ ID NO: 1495072 - DNA, 25 bp, Homo sapien
gcagcacgttgttctggtagaccgt

SEQ ID NO: 1495073 - DNA, 25 bp, Homo sapien
aaaagtggacgacctttgcactgga

SEQ ID NO: 1495074 - DNA, 25 bp, Homo sapien
ggtagaccgtccaccagagatgaag

SEQ ID NO: 1495075 - DNA, 25 bp, Homo sapien
tgtagttccaaggtttcatggaccc

SEQ ID NO: 1495076 - DNA, 25 bp, Homo sapien
ggcacgcccgcactgggtgttgaat

SEQ ID NO: 1495077 - DNA, 25 bp, Homo sapien
gaacggcgtccttcaggtagggaca

SEQ ID NO: 1495078 - DNA, 25 bp, Homo sapien
gacagggtctcatccactatctggg

SEQ ID NO: 1495079 - DNA, 25 bp, Homo sapien
tctccaacaccagaggctgaatccg

SEQ ID NO: 1495080 - DNA, 25 bp, Homo sapien
ggcatcaaggcaggatgatcctcaa

SEQ ID NO: 1495081 - DNA, 25 bp, Homo sapien
tccctccacgggaaagtctctccta

SEQ ID NO: 1495082 - DNA, 25 bp, Homo sapien
catcacgattctctccatgagcttt

SEQ ID NO: 1495083 - DNA, 25 bp, Homo sapien
catgagctttcctcagaagccccaa

SEQ ID NO: 1495084 - DNA, 25 bp, Homo sapien
ctgagtagagttgccagcagtgcta

SEQ ID NO: 1495085 - DNA, 25 bp, Homo sapien
taataatcaggaccaatgagggacc

SEQ ID NO: 1495086 - DNA, 25 bp, Homo sapien
ggtaccttacttccactcagggcaa

SEQ ID NO: 1495087 - DNA, 25 bp, Homo sapien
tacctcagggtatggacaaatcaca

SEQ ID NO: 1495088 - DNA, 25 bp, Homo sapien
tacagcaaagcatcaaattgtactc

SEQ ID NO: 1495089 - DNA, 25 bp, Homo sapien
tatttgtcagtggtacctcaataca

SEQ ID NO: 1495090 - DNA, 25 bp, Homo sapien
tgtactccttaaatacacaccaatt

SEQ ID NO: 1495091 - DNA, 25 bp, Homo sapien
ttgtcagtggtacctcaatacagct

SEQ ID NO: 1495092 - DNA, 25 bp, Homo sapien
cggcaggagtctcagtttcaggaca

SEQ ID NO: 1495093 - DNA, 25 bp, Homo sapien
ctgggacagtgggtcacacgttatc

SEQ ID NO: 1495094 - DNA, 25 bp, Homo sapien
ggtcacacgttatcacggcaggagt

SEQ ID NO: 1495095 - DNA, 25 bp, Homo sapien
cgttatcacggcaggagtctcagtt

SEQ ID NO: 1495096 - DNA, 25 bp, Homo sapien
tttcctcggatgagacactttcgac

SEQ ID NO: 1495097 - DNA, 25 bp, Homo sapien
ctggcttggttcgaaggtttcctcg

SEQ ID NO: 1495098 - DNA, 25 bp, Homo sapien
cagggagttcctggcttggttcgaa

SEQ ID NO: 1495099 - DNA, 25 bp, Homo sapien
gagacactttcgactttatttgctg

SEQ ID NO: 1495100 - DNA, 25 bp, Homo sapien
agccttgggcaaggggaagaatttg

SEQ ID NO: 1495101 - DNA, 25 bp, Homo sapien
ttgggcaaggggaagaatttggata

SEQ ID NO: 1495102 - DNA, 25 bp, Homo sapien
tgggcaaggggaagaatttggatac

SEQ ID NO: 1495103 - DNA, 25 bp, Homo sapien
cttgggcaaggggaagaatttggat

SEQ ID NO: 1495104 - DNA, 25 bp, Homo sapien
tgtgtgcatgcagttgacctcagtg

SEQ ID NO: 1495105 - DNA, 25 bp, Homo sapien
aattaacagctgttgtgtgcatgca

SEQ ID NO: 1495106 - DNA, 25 bp, Homo sapien
tgacctcagtgacggtggatggccc

SEQ ID NO: 1495107 - DNA, 25 bp, Homo sapien
gaaaaattaacagctgttgtgtgca

SEQ ID NO: 1495108 - DNA, 25 bp, Homo sapien
ctgctaaaacccatccagtgtaggg

SEQ ID NO: 1495109 - DNA, 25 bp, Homo sapien
ttttgcagctgtccattatcgaggg

SEQ ID NO: 1495110 - DNA, 25 bp, Homo sapien
gtagggtcccgcagaaagatgcatc

SEQ ID NO: 1495111 - DNA, 25 bp, Homo sapien
tatcgagggaaagactgctaaaacc

SEQ ID NO: 1495112 - DNA, 25 bp, Homo sapien
ctgggaaacagagacggccaggtcg

SEQ ID NO: 1495113 - DNA, 25 bp, Homo sapien
gggaaacagagacggccaggtcgac

SEQ ID NO: 1495114 - DNA, 25 bp, Homo sapien
tgggaaacagagacggccaggtcga

SEQ ID NO: 1495115 - DNA, 25 bp, Homo sapien
aaacgcgtccttccccatgtagtcg

SEQ ID NO: 1495116 - DNA, 25 bp, Homo sapien
catgtagtcgatacggccttcctcc

SEQ ID NO: 1495117 - DNA, 25 bp, Homo sapien
tcctggatgcgagcaaacgcgtcct

SEQ ID NO: 1495118 - DNA, 25 bp, Homo sapien
ttccccatgtagtcgatacggcctt

SEQ ID NO: 1495119 - DNA, 25 bp, Homo sapien
tcaacagcgtttccctttgaaagga

SEQ ID NO: 1495120 - DNA, 25 bp, Homo sapien
agaggagatctccacgcaacaggac

SEQ ID NO: 1495121 - DNA, 25 bp, Homo sapien
ggacattgtctaactacacacaacg

SEQ ID NO: 1495122 - DNA, 25 bp, Homo sapien
aaatagaggcacaaggttcaacagc

SEQ ID NO: 1495123 - DNA, 25 bp, Homo sapien
tttgccgacagcttcaagggtagaa

SEQ ID NO: 1495124 - DNA, 25 bp, Homo sapien
gaccaccatcgagagtctactagaa

SEQ ID NO: 1495125 - DNA, 25 bp, Homo sapien
cagcgtacttcagaggtccttcggg

SEQ ID NO: 1495126 - DNA, 25 bp, Homo sapien
gtccttcgggcaagagcggagacca

SEQ ID NO: 1495127 - DNA, 25 bp, Homo sapien
gaccacagccgaggtgtttctcaga

SEQ ID NO: 1495128 - DNA, 25 bp, Homo sapien
gcctcagaggtgctaaatacgtata

SEQ ID NO: 1495129 - DNA, 25 bp, Homo sapien
tcgccaagtccaaatgaaagtcagt

SEQ ID NO: 1495130 - DNA, 25 bp, Homo sapien
taattctgaatagggtaggtctcac

SEQ ID NO: 1495131 - DNA, 25 bp, Homo sapien
gaatttctgtcaacgctctaggaag

SEQ ID NO: 1495132 - DNA, 25 bp, Homo sapien
gaatcggtttagatcctctaagcca

SEQ ID NO: 1495133 - DNA, 25 bp, Homo sapien
tctcaaccaggaagtgaatcggttt

SEQ ID NO: 1495134 - DNA, 25 bp, Homo sapien
taaacgatttagagcaagccctcgt

SEQ ID NO: 1495135 - DNA, 25 bp, Homo sapien
aatgcacggcggaattccagactgg

SEQ ID NO: 1495136 - DNA, 25 bp, Homo sapien
tggaccgactgcaccctgacttttg

SEQ ID NO: 1495137 - DNA, 25 bp, Homo sapien
tgacacaggctaggatcgagttctc

SEQ ID NO: 1495138 - DNA, 25 bp, Homo sapien
gggtagagaccaagccaagagcagt

SEQ ID NO: 1495139 - DNA, 25 bp, Homo sapien
ttccagctcaaataatgcttattat

SEQ ID NO: 1495140 - DNA, 25 bp, Homo sapien
gcaattccagctcaaataatgctta

SEQ ID NO: 1495141 - DNA, 25 bp, Homo sapien
tttaccttgcaattccagctcaaat

SEQ ID NO: 1495142 - DNA, 25 bp, Homo sapien
taaaattttaccttgcaattccagc

SEQ ID NO: 1495143 - DNA, 25 bp, Homo sapien
tactggctgcgtttccctgaggagg

SEQ ID NO: 1495144 - DNA, 25 bp, Homo sapien
catgagcatgtggtattgtaatccc

SEQ ID NO: 1495145 - DNA, 25 bp, Homo sapien
cagcagctcatgctttcatgcttaa

SEQ ID NO: 1495146 - DNA, 25 bp, Homo sapien
tattgtctcgttttatcctcagaaa

SEQ ID NO: 1495147 - DNA, 25 bp, Homo sapien
cagccatcaacaagattcccgcttt

SEQ ID NO: 1495148 - DNA, 25 bp, Homo sapien
tttccaggctctctgccgactctat

SEQ ID NO: 1495149 - DNA, 25 bp, Homo sapien
tcctatgaattctggctggcctttg

SEQ ID NO: 1495150 - DNA, 25 bp, Homo sapien
gactctatcctatgaattctggctg

SEQ ID NO: 1495151 - DNA, 25 bp, Homo sapien
tacactgaacccaatgtgtgtggtc

SEQ ID NO: 1495152 - DNA, 25 bp, Homo sapien
gctcttctccacaagaccccaaagt

SEQ ID NO: 1495153 - DNA, 25 bp, Homo sapien
tgtgtgtggtcttctatccctcacc

SEQ ID NO: 1495154 - DNA, 25 bp, Homo sapien
gtcagttctttagtgacaatttgtg

SEQ ID NO: 1495155 - DNA, 25 bp, Homo sapien
agatcaaggtgttctgctctccccg

SEQ ID NO: 1495156 - DNA, 25 bp, Homo sapien
acaaggtgggatagtagatcaaggt

SEQ ID NO: 1495157 - DNA, 25 bp, Homo sapien
tctccccgatccaagccaaggagga

SEQ ID NO: 1495158 - DNA, 25 bp, Homo sapien
caacagtaatcccataaagccaccg

SEQ ID NO: 1495159 - DNA, 25 bp, Homo sapien
gctctgcgaataggacagttgcatt

SEQ ID NO: 1495160 - DNA, 25 bp, Homo sapien
tgcatttcttgggaatcaagtgcat

SEQ ID NO: 1495161 - DNA, 25 bp, Homo sapien
tgtggacggctctgcgaataggaca

SEQ ID NO: 1495162 - DNA, 25 bp, Homo sapien
ggacggctctgcgaataggacagtt

SEQ ID NO: 1495163 - DNA, 25 bp, Homo sapien
ggtagaagaatcatcacagccctgc

SEQ ID NO: 1495164 - DNA, 25 bp, Homo sapien
gaagcaggatataagcccagggctg

SEQ ID NO: 1495165 - DNA, 25 bp, Homo sapien
gcacttaaccgaaggaggtcaggga

SEQ ID NO: 1495166 - DNA, 25 bp, Homo sapien
aagtgagcccaactacacgatggag

SEQ ID NO: 1495167 - DNA, 25 bp, Homo sapien
tgttcaataccaggtattaggtgag

SEQ ID NO: 1495168 - DNA, 25 bp, Homo sapien
cagtgttcaataccaggtattaggt

SEQ ID NO: 1495169 - DNA, 25 bp, Homo sapien
tcaataccaggtattaggtgaggat

SEQ ID NO: 1495170 - DNA, 25 bp, Homo sapien
aaggcagtgttcaataccaggtatt

SEQ ID NO: 1495171 - DNA, 25 bp, Homo sapien
ctttgcaggaagcatactgggaatt

SEQ ID NO: 1495172 - DNA, 25 bp, Homo sapien
aattgaaacgagagcctaaatgaca

SEQ ID NO: 1495173 - DNA, 25 bp, Homo sapien
tattcccctcagtccatctatcgag

SEQ ID NO: 1495174 - DNA, 25 bp, Homo sapien
gatgggaggaccttgcactattccc

SEQ ID NO: 1495175 - DNA, 25 bp, Homo sapien
aagtcaattctagtgtgtttcatcc

SEQ ID NO: 1495176 - DNA, 25 bp, Homo sapien
tgatggaagtgtagtcctaacctac

SEQ ID NO: 1495177 - DNA, 25 bp, Homo sapien
tccctacattcctcaaatagctaag

SEQ ID NO: 1495178 - DNA, 25 bp, Homo sapien
atagctaagatttggccagtgtgtt

SEQ ID NO: 1495179 - DNA, 25 bp, Homo sapien
ttgccccttgggcaaagagacagcc

SEQ ID NO: 1495180 - DNA, 25 bp, Homo sapien
gacgcatcgctttattgtcaaatta

SEQ ID NO: 1495181 - DNA, 25 bp, Homo sapien
tgtcaaattaaacaactctatctca

SEQ ID NO: 1495182 - DNA, 25 bp, Homo sapien
aattaaacaactctatctcattctg

SEQ ID NO: 1495183 - DNA, 25 bp, Homo sapien
gactgaggtttttgacgcatcgctt

SEQ ID NO: 1495184 - DNA, 25 bp, Homo sapien
ccagaattaggttggtcagcaggaa

SEQ ID NO: 1495185 - DNA, 25 bp, Homo sapien
ttccaagtaatgagccgatcaaggg

SEQ ID NO: 1495186 - DNA, 25 bp, Homo sapien
tatggctgccacagtgtcagacatc

SEQ ID NO: 1495187 - DNA, 25 bp, Homo sapien
ggaagcaacccaaggctagcaggct

SEQ ID NO: 1495188 - DNA, 25 bp, Homo sapien
gccacgaggatggggatggcacccc

SEQ ID NO: 1495189 - DNA, 25 bp, Homo sapien
gaagcgtctggaaggttcattacac

SEQ ID NO: 1495190 - DNA, 25 bp, Homo sapien
gttttccatgagcaacatcctgtgg

SEQ ID NO: 1495191 - DNA, 25 bp, Homo sapien
cgttctgcgttcacacctgcgtgga

SEQ ID NO: 1495192 - DNA, 25 bp, Homo sapien
ttcatgctgataccacagggccgac

SEQ ID NO: 1495193 - DNA, 25 bp, Homo sapien
atagagttcacagtcttaaaagtct

SEQ ID NO: 1495194 - DNA, 25 bp, Homo sapien
gagttcacagtcttaaaagtctgca

SEQ ID NO: 1495195 - DNA, 25 bp, Homo sapien
gttcacagtcttaaaagtctgcatt

SEQ ID NO: 1495196 - DNA, 25 bp, Homo sapien
agagttcacagtcttaaaagtctgc

SEQ ID NO: 1495197 - DNA, 25 bp, Homo sapien
tgatcactcagacaccaaactggag

SEQ ID NO: 1495198 - DNA, 25 bp, Homo sapien
gatgagccgtgcttcccgttggaac

SEQ ID NO: 1495199 - DNA, 25 bp, Homo sapien
tgcacatgaacaggagataggcccc

SEQ ID NO: 1495200 - DNA, 25 bp, Homo sapien
tcgtttacggccacaaggatgagcc

SEQ ID NO: 1495201 - DNA, 25 bp, Homo sapien
ttgtgtagacttcctaattcaacca

SEQ ID NO: 1495202 - DNA, 25 bp, Homo sapien
ctgtggtcttggatatgtctatttg

SEQ ID NO: 1495203 - DNA, 25 bp, Homo sapien
gtgtagacttcctaattcaaccaca

SEQ ID NO: 1495204 - DNA, 25 bp, Homo sapien
ctctgtggtcttggatatgtctatt

SEQ ID NO: 1495205 - DNA, 25 bp, Homo sapien
gaaaattcgctgtgggttccgtgta

SEQ ID NO: 1495206 - DNA, 25 bp, Homo sapien
gatctgggtaaaatgcactggacca

SEQ ID NO: 1495207 - DNA, 25 bp, Homo sapien
tatacagaagtaaagctccacacgg

SEQ ID NO: 1495208 - DNA, 25 bp, Homo sapien
ggagtctgtaaaggcagcaagagca

SEQ ID NO: 1495209 - DNA, 25 bp, Homo sapien
tcactgagttattaccgtagcagca

SEQ ID NO: 1495210 - DNA, 25 bp, Homo sapien
ccatcagcaggacaatgttgggtct

SEQ ID NO: 1495211 - DNA, 25 bp, Homo sapien
tctggcgtttcttgtcataaatgtg

SEQ ID NO: 1495212 - DNA, 25 bp, Homo sapien
taaatgtgccatcaacaccgcaaaa

SEQ ID NO: 1495213 - DNA, 25 bp, Homo sapien
gcagctgcgagatgctgggtaagcc

SEQ ID NO: 1495214 - DNA, 25 bp, Homo sapien
aaggcagcccgacttggggtgcaca

SEQ ID NO: 1495215 - DNA, 25 bp, Homo sapien
ggtaccggccggtcaggaaggcagc

SEQ ID NO: 1495216 - DNA, 25 bp, Homo sapien
tgccaggcggtcaatattaggtgtg

SEQ ID NO: 1495217 - DNA, 25 bp, Homo sapien
ggtctctgctagcttaaagacatca

SEQ ID NO: 1495218 - DNA, 25 bp, Homo sapien
catcaggggtctcttgagaaatctt

SEQ ID NO: 1495219 - DNA, 25 bp, Homo sapien
aagacatcaggggtctcttgagaaa

SEQ ID NO: 1495220 - DNA, 25 bp, Homo sapien
ctgcatggtctctgctagcttaaag

SEQ ID NO: 1495221 - DNA, 25 bp, Homo sapien
cacgtgaaggcacggttcaggttgt

SEQ ID NO: 1495222 - DNA, 25 bp, Homo sapien
caccaagccacgtgaaggcacggtt

SEQ ID NO: 1495223 - DNA, 25 bp, Homo sapien
tatgagtcccgtgcggtagccacgg

SEQ ID NO: 1495224 - DNA, 25 bp, Homo sapien
caaaagtcgtttcattggtgggaag

SEQ ID NO: 1495225 - DNA, 25 bp, Homo sapien
gaggctgcaggatcacgtttccacg

SEQ ID NO: 1495226 - DNA, 25 bp, Homo sapien
cgtttccacgggcagagttccggcg

SEQ ID NO: 1495227 - DNA, 25 bp, Homo sapien
ccttagacacgatgacagagaggct

SEQ ID NO: 1495228 - DNA, 25 bp, Homo sapien
tcaaagagaagtcggtcaaactggc

SEQ ID NO: 1495229 - DNA, 25 bp, Homo sapien
aaataaaatcgtaccatggcagcat

SEQ ID NO: 1495230 - DNA, 25 bp, Homo sapien
aaaataaaatcgtaccatggcagca

SEQ ID NO: 1495231 - DNA, 25 bp, Homo sapien
taaaataaaatcgtaccatggcagc

SEQ ID NO: 1495232 - DNA, 25 bp, Homo sapien
gacaaagatgaccttccatggcact

SEQ ID NO: 1495233 - DNA, 25 bp, Homo sapien
cagtttgatcctgagccagcggtgc

SEQ ID NO: 1495234 - DNA, 25 bp, Homo sapien
taacagtgatcattccgagaggcgc

SEQ ID NO: 1495235 - DNA, 25 bp, Homo sapien
ggatgcaattccaacgtcgagtaaa

SEQ ID NO: 1495236 - DNA, 25 bp, Homo sapien
atttactgcgcccaacaaacttctt

SEQ ID NO: 1495237 - DNA, 25 bp, Homo sapien
cattgtccccatacctgccatattt

SEQ ID NO: 1495238 - DNA, 25 bp, Homo sapien
gagtatgtacgtgcaggaaggaaaa

SEQ ID NO: 1495239 - DNA, 25 bp, Homo sapien
tctttttggagatgagtggagtatg

SEQ ID NO: 1495240 - DNA, 25 bp, Homo sapien
tacaccaaggtgtggttggccaggc

SEQ ID NO: 1495241 - DNA, 25 bp, Homo sapien
cccgttgtcagaggtgaagtacacc

SEQ ID NO: 1495242 - DNA, 25 bp, Homo sapien
cacccagctgaacagccccgtccag

SEQ ID NO: 1495243 - DNA, 25 bp, Homo sapien
tggcccccgttgtcagaggtgaagt

SEQ ID NO: 1495244 - DNA, 25 bp, Homo sapien
cctatataagacagcgtcggataga

SEQ ID NO: 1495245 - DNA, 25 bp, Homo sapien
gacaagatccctccgcctatataag

SEQ ID NO: 1495246 - DNA, 25 bp, Homo sapien
aagactgacggccaccggaatatcc

SEQ ID NO: 1495247 - DNA, 25 bp, Homo sapien
gaatatccctggcacacggatacct

SEQ ID NO: 1495248 - DNA, 25 bp, Homo sapien
gcattaggttctggccgtcaatcac

SEQ ID NO: 1495249 - DNA, 25 bp, Homo sapien
tcgtggtcggagtgggacgcccttc

SEQ ID NO: 1495250 - DNA, 25 bp, Homo sapien
tagtggaagaggaactcgtggtcgg

SEQ ID NO: 1495251 - DNA, 25 bp, Homo sapien
tgaccgtgtgcagatagaccccaca

SEQ ID NO: 1495252 - DNA, 25 bp, Homo sapien
caggcacctgttccttcagggtaga

SEQ ID NO: 1495253 - DNA, 25 bp, Homo sapien
gatcacggagtcaaataatggctca

SEQ ID NO: 1495254 - DNA, 25 bp, Homo sapien
cgatgctctcttatggctgcctcca

SEQ ID NO: 1495255 - DNA, 25 bp, Homo sapien
ggtgttagtgtcctacgatgctctc

SEQ ID NO: 1495256 - DNA, 25 bp, Homo sapien
ttattagaaagctagcatgcctggg

SEQ ID NO: 1495257 - DNA, 25 bp, Homo sapien
tgggtaacacgtggtccgcatggtc

SEQ ID NO: 1495258 - DNA, 25 bp, Homo sapien
caggttcactgttatatgggcccac

SEQ ID NO: 1495259 - DNA, 25 bp, Homo sapien
taaccagatgcgtatcggacaggaa

SEQ ID NO: 1495260 - DNA, 25 bp, Homo sapien
ccccagtcctctgaatatgtgcctt

SEQ ID NO: 1495261 - DNA, 25 bp, Homo sapien
cttcccatgtgggagcgtccctgat

SEQ ID NO: 1495262 - DNA, 25 bp, Homo sapien
gggagcgtccctgatgaagactctg

SEQ ID NO: 1495263 - DNA, 25 bp, Homo sapien
tctttaaggttcatggtaggaggct

SEQ ID NO: 1495264 - DNA, 25 bp, Homo sapien
gcatttcccattaaggctctgaaac

SEQ ID NO: 1495265 - DNA, 25 bp, Homo sapien
ttcccattaaggctctgaaacttgt

SEQ ID NO: 1495266 - DNA, 25 bp, Homo sapien
tcaatccacgcatttcccattaagg

SEQ ID NO: 1495267 - DNA, 25 bp, Homo sapien
ccacgcatttcccattaaggctctg

SEQ ID NO: 1495268 - DNA, 25 bp, Homo sapien
tctgattgcatgaatcaggttttct

SEQ ID NO: 1495269 - DNA, 25 bp, Homo sapien
ctctgattgcatgaatcaggttttc

SEQ ID NO: 1495270 - DNA, 25 bp, Homo sapien
tggaggagaaacctaaagccaggga

SEQ ID NO: 1495271 - DNA, 25 bp, Homo sapien
cagggagggcttccaatggccctgc

SEQ ID NO: 1495272 - DNA, 25 bp, Homo sapien
tggccctgcgggtaacttagctccg

SEQ ID NO: 1495273 - DNA, 25 bp, Homo sapien
ttccactggaggagaaacctaaagc

SEQ ID NO: 1495274 - DNA, 25 bp, Homo sapien
acagcagtggaaaagtaacagaagg

SEQ ID NO: 1495275 - DNA, 25 bp, Homo sapien
ccaacagtgacttctatctcaacag

SEQ ID NO: 1495276 - DNA, 25 bp, Homo sapien
ctatctcaacagcagtggaaaagta

SEQ ID NO: 1495277 - DNA, 25 bp, Homo sapien
aacagtgacttctatctcaacagca

SEQ ID NO: 1495278 - DNA, 25 bp, Homo sapien
gtgctatgacggctagtaccatggg

SEQ ID NO: 1495279 - DNA, 25 bp, Homo sapien
tggaggtttccttgatcattcttta

SEQ ID NO: 1495280 - DNA, 25 bp, Homo sapien
catggggccataagctgtctgcaga

SEQ ID NO: 1495281 - DNA, 25 bp, Homo sapien
gcagagtcaataggacaactttgcc

SEQ ID NO: 1495282 - DNA, 25 bp, Homo sapien
ctatcagccgtattatctctctaat

SEQ ID NO: 1495283 - DNA, 25 bp, Homo sapien
gtgcagcttggaataccttcttgtt

SEQ ID NO: 1495284 - DNA, 25 bp, Homo sapien
tgcagcttggaataccttcttgttg

SEQ ID NO: 1495285 - DNA, 25 bp, Homo sapien
tgtgcagcttggaataccttcttgt

SEQ ID NO: 1495286 - DNA, 25 bp, Homo sapien
gcagcttggaataccttcttgttgt

SEQ ID NO: 1495287 - DNA, 25 bp, Homo sapien
taggacaatattaggcttgtcgtca

SEQ ID NO: 1495288 - DNA, 25 bp, Homo sapien
ttaggacaatattaggcttgtcgtc

SEQ ID NO: 1495289 - DNA, 25 bp, Homo sapien
tgattaggacaatattaggcttgtc

SEQ ID NO: 1495290 - DNA, 25 bp, Homo sapien
gattaggacaatattaggcttgtcg

SEQ ID NO: 1495291 - DNA, 25 bp, Homo sapien
gagatgtgctgagtcagtcgcacgc

SEQ ID NO: 1495292 - DNA, 25 bp, Homo sapien
tgtgctgagtcagtcgcacgccttc

SEQ ID NO: 1495293 - DNA, 25 bp, Homo sapien
gcagagatgtgctgagtcagtcgca

SEQ ID NO: 1495294 - DNA, 25 bp, Homo sapien
tgagtcagtcgcacgccttccctgg

SEQ ID NO: 1495295 - DNA, 25 bp, Homo sapien
ctgatcggatggggtatcttcccgt

SEQ ID NO: 1495296 - DNA, 25 bp, Homo sapien
tgatcggatggggtatcttcccgtc

SEQ ID NO: 1495297 - DNA, 25 bp, Homo sapien
atcttcccgtcaagaacgcggaccg

SEQ ID NO: 1495298 - DNA, 25 bp, Homo sapien
ggtatcttcccgtcaagaacgcgga

SEQ ID NO: 1495299 - DNA, 25 bp, Homo sapien
ctataagccccgtgctgtatccttg

SEQ ID NO: 1495300 - DNA, 25 bp, Homo sapien
ctgcaagattttggatgacacgtct

SEQ ID NO: 1495301 - DNA, 25 bp, Homo sapien
tgacacgtctattaccactagaaac

SEQ ID NO: 1495302 - DNA, 25 bp, Homo sapien
aggcctgcggggactgcaagatttt

SEQ ID NO: 1495303 - DNA, 25 bp, Homo sapien
tgatggaagaatagatacaccgcag

SEQ ID NO: 1495304 - DNA, 25 bp, Homo sapien
tattcagatccggttgtgagcaaca

SEQ ID NO: 1495305 - DNA, 25 bp, Homo sapien
taaaaaatccgagtgccacttagcc

SEQ ID NO: 1495306 - DNA, 25 bp, Homo sapien
gcaaggcaggttacagatgatggaa

SEQ ID NO: 1495307 - DNA, 25 bp, Homo sapien
tatggatggtggcactggtcacttc

SEQ ID NO: 1495308 - DNA, 25 bp, Homo sapien
caaaggctaattccgtgttacgaga

SEQ ID NO: 1495309 - DNA, 25 bp, Homo sapien
tgtcaacgagagtgaacggcatgcc

SEQ ID NO: 1495310 - DNA, 25 bp, Homo sapien
ttcgggagtcgcagttcaagccttg

SEQ ID NO: 1495311 - DNA, 25 bp, Homo sapien
ctggtgccagtgaaatcgtccgtgg

SEQ ID NO: 1495312 - DNA, 25 bp, Homo sapien
tgccagtgaaatcgtccgtggtggg

SEQ ID NO: 1495313 - DNA, 25 bp, Homo sapien
ggtgccagtgaaatcgtccgtggtg

SEQ ID NO: 1495314 - DNA, 25 bp, Homo sapien
tgaaatcgtccgtggtggggagagg

SEQ ID NO: 1495315 - DNA, 25 bp, Homo sapien
attatccccatacaagccatgcttg

SEQ ID NO: 1495316 - DNA, 25 bp, Homo sapien
cattatccccatacaagccatgctt

SEQ ID NO: 1495317 - DNA, 25 bp, Homo sapien
actaagatattggtgctcaacagac

SEQ ID NO: 1495318 - DNA, 25 bp, Homo sapien
tcccaatccccaactaagatattgg

SEQ ID NO: 1495319 - DNA, 25 bp, Homo sapien
aactaagatattggtgctcaacaga

SEQ ID NO: 1495320 - DNA, 25 bp, Homo sapien
tgggcatgccctcgcctagcttcca

SEQ ID NO: 1495321 - DNA, 25 bp, Homo sapien
tgtaaagtagacaagggtgttgttc

SEQ ID NO: 1495322 - DNA, 25 bp, Homo sapien
tccttaggccaaaatcatcgatagc

SEQ ID NO: 1495323 - DNA, 25 bp, Homo sapien
ccctccgtgatctgatgtaaagtag

SEQ ID NO: 1495324 - DNA, 25 bp, Homo sapien
tgatgcgacagttggtaaaatatcc

SEQ ID NO: 1495325 - DNA, 25 bp, Homo sapien
tttccaggccatcggacaattcctg

SEQ ID NO: 1495326 - DNA, 25 bp, Homo sapien
taatcaaccgtccagctggtacctt

SEQ ID NO: 1495327 - DNA, 25 bp, Homo sapien
gacaattcctgggacgcggattcca

SEQ ID NO: 1495328 - DNA, 25 bp, Homo sapien
ggatccaccgcacggcgtgcaggta

SEQ ID NO: 1495329 - DNA, 25 bp, Homo sapien
ggcatgaggtctcggccgtcaatga

SEQ ID NO: 1495330 - DNA, 25 bp, Homo sapien
ctgacgttgccctgcagcaagggca

SEQ ID NO: 1495331 - DNA, 25 bp, Homo sapien
aaagaaattcatgctccgagtgcct

SEQ ID NO: 1495332 - DNA, 25 bp, Homo sapien
tctgagaaacttctccaaaaccatg

SEQ ID NO: 1495333 - DNA, 25 bp, Homo sapien
ctttctgcagaagagcaattctgag

SEQ ID NO: 1495334 - DNA, 25 bp, Homo sapien
gagaaacttctccaaaaccatgtgt

SEQ ID NO: 1495335 - DNA, 25 bp, Homo sapien
tctccaaaaccatgtgttcagtgag

SEQ ID NO: 1495336 - DNA, 25 bp, Homo sapien
gggtcacatagtgagccttccaaac

SEQ ID NO: 1495337 - DNA, 25 bp, Homo sapien
agaagctggtggctggaataccggg

SEQ ID NO: 1495338 - DNA, 25 bp, Homo sapien
taccggggtcacatagtgagccttc

SEQ ID NO: 1495339 - DNA, 25 bp, Homo sapien
gtggctggaataccggggtcacata

SEQ ID NO: 1495340 - DNA, 25 bp, Homo sapien
gagatcgaagagcagaggggggttg

SEQ ID NO: 1495341 - DNA, 25 bp, Homo sapien
agagatcgaagagcagaggggggtt

SEQ ID NO: 1495342 - DNA, 25 bp, Homo sapien
ggagagatcgaagagcagagggggg

SEQ ID NO: 1495343 - DNA, 25 bp, Homo sapien
gagagatcgaagagcagaggggggt

SEQ ID NO: 1495344 - DNA, 25 bp, Homo sapien
cagttctgagagttggtaggtcaca

SEQ ID NO: 1495345 - DNA, 25 bp, Homo sapien
aaaatgggaacaccccacagcaagg

SEQ ID NO: 1495346 - DNA, 25 bp, Homo sapien
tcttctcgttaggaccccgaggctg

SEQ ID NO: 1495347 - DNA, 25 bp, Homo sapien
gtaggtcacaggcacgatggtttcc

SEQ ID NO: 1495348 - DNA, 25 bp, Homo sapien
acttgaaagcaccaaagttagtgct

SEQ ID NO: 1495349 - DNA, 25 bp, Homo sapien
tatctcttctcgttaggaccaaagg

SEQ ID NO: 1495350 - DNA, 25 bp, Homo sapien
aaggcttcctctggtagcctgattg

SEQ ID NO: 1495351 - DNA, 25 bp, Homo sapien
gactattaaatgcactccttgccaa

SEQ ID NO: 1495352 - DNA, 25 bp, Homo sapien
tatcagctgttgctgaaatttccag

SEQ ID NO: 1495353 - DNA, 25 bp, Homo sapien
gctgccaggagaccaattgctatgt

SEQ ID NO: 1495354 - DNA, 25 bp, Homo sapien
cacgctgtcttatcagctgttgctg

SEQ ID NO: 1495355 - DNA, 25 bp, Homo sapien
gagaccaattgctatgtcactcagt

SEQ ID NO: 1495356 - DNA, 25 bp, Homo sapien
atgcataggttcttccatcagatct

SEQ ID NO: 1495357 - DNA, 25 bp, Homo sapien
caacccagggtttgcaatgcatagg

SEQ ID NO: 1495358 - DNA, 25 bp, Homo sapien
cctgaggtatctcagtggcatctcc

SEQ ID NO: 1495359 - DNA, 25 bp, Homo sapien
cttcctcggcatttcccctgaggta

SEQ ID NO: 1495360 - DNA, 25 bp, Homo sapien
ggcatcaaactctgtcttgatttca

SEQ ID NO: 1495361 - DNA, 25 bp, Homo sapien
tggcatcaaactctgtcttgatttc

SEQ ID NO: 1495362 - DNA, 25 bp, Homo sapien
gcatcaaactctgtcttgatttcat

SEQ ID NO: 1495363 - DNA, 25 bp, Homo sapien
cagcatgccttcttcgaagtgcgct

SEQ ID NO: 1495364 - DNA, 25 bp, Homo sapien
gtcacgggcttcatctctctctgca

SEQ ID NO: 1495365 - DNA, 25 bp, Homo sapien
cttcttcgaagtgcgcttctgcagg

SEQ ID NO: 1495366 - DNA, 25 bp, Homo sapien
ggtcacgggcttcatctctctctgc

SEQ ID NO: 1495367 - DNA, 25 bp, Homo sapien
atggagccagcggacttgtaatggt

SEQ ID NO: 1495368 - DNA, 25 bp, Homo sapien
tccacagcgttgacagctttcacgt

SEQ ID NO: 1495369 - DNA, 25 bp, Homo sapien
ggactgaagtcacacagagcactga

SEQ ID NO: 1495370 - DNA, 25 bp, Homo sapien
agagcactgatggagccagcggact

SEQ ID NO: 1495371 - DNA, 25 bp, Homo sapien
tagcaagggctgcatgttaggattc

SEQ ID NO: 1495372 - DNA, 25 bp, Homo sapien
cacagaagtgtgattgagggacaac

SEQ ID NO: 1495373 - DNA, 25 bp, Homo sapien
gacaacagggcgtgatctaacggga

SEQ ID NO: 1495374 - DNA, 25 bp, Homo sapien
tctggagatagacagggcacttctt

SEQ ID NO: 1495375 - DNA, 25 bp, Homo sapien
caatcatcaccagccctatggcggt

SEQ ID NO: 1495376 - DNA, 25 bp, Homo sapien
tcaccagccctatggcggttctgag

SEQ ID NO: 1495377 - DNA, 25 bp, Homo sapien
gcggttctgagcctcggtcatgcca

SEQ ID NO: 1495378 - DNA, 25 bp, Homo sapien
tgccacatgcatcctccaaatagca

SEQ ID NO: 1495379 - DNA, 25 bp, Homo sapien
atttgcttattgctaaactctttgg

SEQ ID NO: 1495380 - DNA, 25 bp, Homo sapien
ttattgctaaactctttgggtccag

SEQ ID NO: 1495381 - DNA, 25 bp, Homo sapien
gcttattgctaaactctttgggtcc

SEQ ID NO: 1495382 - DNA, 25 bp, Homo sapien
tgcttattgctaaactctttgggtc

SEQ ID NO: 1495383 - DNA, 25 bp, Homo sapien
tgcgttgttttcgatggcatcgtac

SEQ ID NO: 1495384 - DNA, 25 bp, Homo sapien
ctgtgactgaattcactagtgatgc

SEQ ID NO: 1495385 - DNA, 25 bp, Homo sapien
tattttgcatgaattgcatgcgttg

SEQ ID NO: 1495386 - DNA, 25 bp, Homo sapien
tcactagtgatgctttcagaaggaa

SEQ ID NO: 1495387 - DNA, 25 bp, Homo sapien
tgtacgcttgggcaaggcatccttc

SEQ ID NO: 1495388 - DNA, 25 bp, Homo sapien
gtcttgtacgcttgggcaaggcatc

SEQ ID NO: 1495389 - DNA, 25 bp, Homo sapien
cggctgtgacaagggcaacagctga

SEQ ID NO: 1495390 - DNA, 25 bp, Homo sapien
agcagcacggctgtgacaagggcaa

SEQ ID NO: 1495391 - DNA, 25 bp, Homo sapien
tcattagttgccacaaaggaaggtt

SEQ ID NO: 1495392 - DNA, 25 bp, Homo sapien
ctgacttctccggttagtggagaga

SEQ ID NO: 1495393 - DNA, 25 bp, Homo sapien
ggaaggtttcatcccattctgactt

SEQ ID NO: 1495394 - DNA, 25 bp, Homo sapien
ggagagaacacttgcaaatttccaa

SEQ ID NO: 1495395 - DNA, 25 bp, Homo sapien
gctgcgagtctacaagccggctctt

SEQ ID NO: 1495396 - DNA, 25 bp, Homo sapien
gcgagtctacaagccggctcttctt

SEQ ID NO: 1495397 - DNA, 25 bp, Homo sapien
tcagctgcgagtctacaagccggct

SEQ ID NO: 1495398 - DNA, 25 bp, Homo sapien
ctctcagctgcgagtctacaagccg

SEQ ID NO: 1495399 - DNA, 25 bp, Homo sapien
tccagggcagatgggtgaacccagt

SEQ ID NO: 1495400 - DNA, 25 bp, Homo sapien
tggacttcgaaggtctggtgacaac

SEQ ID NO: 1495401 - DNA, 25 bp, Homo sapien
gccacggcgagttcccaactgatct

SEQ ID NO: 1495402 - DNA, 25 bp, Homo sapien
caactgatctgggttctgccccaca

SEQ ID NO: 1495403 - DNA, 25 bp, Homo sapien
tgtgtcggtgggtctttgaacgtcc

SEQ ID NO: 1495404 - DNA, 25 bp, Homo sapien
ttgaacgtccatggcaaacgatttc

SEQ ID NO: 1495405 - DNA, 25 bp, Homo sapien
tctcactaaggatcctaagaagttc

SEQ ID NO: 1495406 - DNA, 25 bp, Homo sapien
tatccattgccaaagtctgacaaca

SEQ ID NO: 1495407 - DNA, 25 bp, Homo sapien
cacatagaaacacaccctaactctg

SEQ ID NO: 1495408 - DNA, 25 bp, Homo sapien
gaaacacaccctaactctgagcctt

SEQ ID NO: 1495409 - DNA, 25 bp, Homo sapien
cagtcaacaccttcccacatagaaa

SEQ ID NO: 1495410 - DNA, 25 bp, Homo sapien
aactctgagccttcccttgatgtcc

SEQ ID NO: 1495411 - DNA, 25 bp, Homo sapien
ggcatagcaagtcggacaccatcta

SEQ ID NO: 1495412 - DNA, 25 bp, Homo sapien
cccatttggcatagcaagtcggaca

SEQ ID NO: 1495413 - DNA, 25 bp, Homo sapien
tagcaagtcggacaccatctatccc

SEQ ID NO: 1495414 - DNA, 25 bp, Homo sapien
tttggcatagcaagtcggacaccat

SEQ ID NO: 1495415 - DNA, 25 bp, Homo sapien
gcccagtaagagttaagttctgtgg

SEQ ID NO: 1495416 - DNA, 25 bp, Homo sapien
gagctctagacatgtgggttttctc

SEQ ID NO: 1495417 - DNA, 25 bp, Homo sapien
ttcatcaaagcaccgggcagcatat

SEQ ID NO: 1495418 - DNA, 25 bp, Homo sapien
agctagagctctagacatgtgggtt

SEQ ID NO: 1495419 - DNA, 25 bp, Homo sapien
gaaccttcacatccaaggcaactaa

SEQ ID NO: 1495420 - DNA, 25 bp, Homo sapien
aatgtattcatgatatgccagtggc

SEQ ID NO: 1495421 - DNA, 25 bp, Homo sapien
tgtggataaataggacatagaacct

SEQ ID NO: 1495422 - DNA, 25 bp, Homo sapien
tccagcaaaagtgtaaggttcattt

SEQ ID NO: 1495423 - DNA, 25 bp, Homo sapien
tgaatttgcacaatgctgccttgtg

SEQ ID NO: 1495424 - DNA, 25 bp, Homo sapien
gccaccgtggaacgaaagtctctgc

SEQ ID NO: 1495425 - DNA, 25 bp, Homo sapien
aagtctctgcgggaatcagctgagt

SEQ ID NO: 1495426 - DNA, 25 bp, Homo sapien
gccacctggaaatactggacgcata

SEQ ID NO: 1495427 - DNA, 25 bp, Homo sapien
gcagatttgcagattgcaggcttca

SEQ ID NO: 1495428 - DNA, 25 bp, Homo sapien
taagcagcaggcagctttagaaaga

SEQ ID NO: 1495429 - DNA, 25 bp, Homo sapien
ggcttcaacatgcaggaccttgtcg

SEQ ID NO: 1495430 - DNA, 25 bp, Homo sapien
ctttagaaagatggtgcagatttgc

SEQ ID NO: 1495431 - DNA, 25 bp, Homo sapien
ccatgatttgctgacgctgcaagct

SEQ ID NO: 1495432 - DNA, 25 bp, Homo sapien
gtagcagggtgagtgtccatgattt

SEQ ID NO: 1495433 - DNA, 25 bp, Homo sapien
gagtgtccatgatttgctgacgctg

SEQ ID NO: 1495434 - DNA, 25 bp, Homo sapien
cagggtgagtgtccatgatttgctg

SEQ ID NO: 1495435 - DNA, 25 bp, Homo sapien
ttaagtatccattgctgtgtggctc

SEQ ID NO: 1495436 - DNA, 25 bp, Homo sapien
agtatccattgctgtgtggctctgg

SEQ ID NO: 1495437 - DNA, 25 bp, Homo sapien
tgcctcctggggtaaaaatgtacca

SEQ ID NO: 1495438 - DNA, 25 bp, Homo sapien
cctggggtaaaaatgtaccagcatt

SEQ ID NO: 1495439 - DNA, 25 bp, Homo sapien
tcttgctcctcttgtgatagtcagg

SEQ ID NO: 1495440 - DNA, 25 bp, Homo sapien
gtgattaaatcgtgggagtggactt

SEQ ID NO: 1495441 - DNA, 25 bp, Homo sapien
gctcctcttgtgatagtcagggagt

SEQ ID NO: 1495442 - DNA, 25 bp, Homo sapien
tgattaaatcgtgggagtggacttc

SEQ ID NO: 1495443 - DNA, 25 bp, Homo sapien
tgttggcaactcaaatagcagcagg

SEQ ID NO: 1495444 - DNA, 25 bp, Homo sapien
cattgagatagataccagaactgcc

SEQ ID NO: 1495445 - DNA, 25 bp, Homo sapien
caggttctgatcaaggcaattgact

SEQ ID NO: 1495446 - DNA, 25 bp, Homo sapien
gacccacaggtttgctctagatgta

SEQ ID NO: 1495447 - DNA, 25 bp, Homo sapien
gaatagctgtcaatagctggtccct

SEQ ID NO: 1495448 - DNA, 25 bp, Homo sapien
tatttgcccattttccacgtgagga

SEQ ID NO: 1495449 - DNA, 25 bp, Homo sapien
gaattagagccgaggtcttggcagc

SEQ ID NO: 1495450 - DNA, 25 bp, Homo sapien
ccaggaataccgatgaagcagataa

SEQ ID NO: 1495451 - DNA, 25 bp, Homo sapien
ctcctgctaacctgtcccattgctg

SEQ ID NO: 1495452 - DNA, 25 bp, Homo sapien
aaactcctgctaacctgtcccattg

SEQ ID NO: 1495453 - DNA, 25 bp, Homo sapien
ccaaactcctgctaacctgtcccat

SEQ ID NO: 1495454 - DNA, 25 bp, Homo sapien
ctgctaacctgtcccattgctgact

SEQ ID NO: 1495455 - DNA, 25 bp, Homo sapien
agcaccaacaagactattacttctg

SEQ ID NO: 1495456 - DNA, 25 bp, Homo sapien
aacaagactattacttctgaagttg

SEQ ID NO: 1495457 - DNA, 25 bp, Homo sapien
gcaccaacaagactattacttctga

SEQ ID NO: 1495458 - DNA, 25 bp, Homo sapien
ccaacaagactattacttctgaagt

SEQ ID NO: 1495459 - DNA, 25 bp, Homo sapien
aacacgtggaaagaatcaatttggg

SEQ ID NO: 1495460 - DNA, 25 bp, Homo sapien
cactgtcagtgcgtgcgtcttgatc

SEQ ID NO: 1495461 - DNA, 25 bp, Homo sapien
gaaccttcccactgtcagtgcgtgc

SEQ ID NO: 1495462 - DNA, 25 bp, Homo sapien
cttgatctggttttgcgtgtgtgta

SEQ ID NO: 1495463 - DNA, 25 bp, Homo sapien
acaagatgcccaagcgcgcgcactg

SEQ ID NO: 1495464 - DNA, 25 bp, Homo sapien
gagaatcaggcaccccgacaagatg

SEQ ID NO: 1495465 - DNA, 25 bp, Homo sapien
gcgaggtccactgcacgttccgatc

SEQ ID NO: 1495466 - DNA, 25 bp, Homo sapien
ttgtgcctgctacgtccccagcgag

SEQ ID NO: 1495467 - DNA, 25 bp, Homo sapien
ctgtgaataagctcatctcttcgtt

SEQ ID NO: 1495468 - DNA, 25 bp, Homo sapien
gtgaataagctcatctcttcgttgt

SEQ ID NO: 1495469 - DNA, 25 bp, Homo sapien
taagctcatctcttcgttgttctac

SEQ ID NO: 1495470 - DNA, 25 bp, Homo sapien
gaataagctcatctcttcgttgttc

SEQ ID NO: 1495471 - DNA, 25 bp, Homo sapien
cgggacagtcatcacgcagacaaaa

SEQ ID NO: 1495472 - DNA, 25 bp, Homo sapien
ccagctcgacgcgacccagcggact

SEQ ID NO: 1495473 - DNA, 25 bp, Homo sapien
ggaaagctcgtaattcatcccgcag

SEQ ID NO: 1495474 - DNA, 25 bp, Homo sapien
cagccgcgttccgggaaagctcgta

SEQ ID NO: 1495475 - DNA, 25 bp, Homo sapien
gattgcaccgttccccagcactgtt

SEQ ID NO: 1495476 - DNA, 25 bp, Homo sapien
tgagacacccaagggaaacactggg

SEQ ID NO: 1495477 - DNA, 25 bp, Homo sapien
gggtgaagggatttgagacacccaa

SEQ ID NO: 1495478 - DNA, 25 bp, Homo sapien
ggatttgagacacccaagggaaaca

SEQ ID NO: 1495479 - DNA, 25 bp, Homo sapien
tcccgtgtgcggcggcttcccaagg

SEQ ID NO: 1495480 - DNA, 25 bp, Homo sapien
cgtgtgcggcggcttcccaaggaca

SEQ ID NO: 1495481 - DNA, 25 bp, Homo sapien
cgctcccgtgtgcggcggcttccca

SEQ ID NO: 1495482 - DNA, 25 bp, Homo sapien
ccgtgtgcggcggcttcccaaggac

SEQ ID NO: 1495483 - DNA, 25 bp, Homo sapien
gagaaaacaccgtctggcccggaga

SEQ ID NO: 1495484 - DNA, 25 bp, Homo sapien
gagctgccgagaaaacaccgtctgg

SEQ ID NO: 1495485 - DNA, 25 bp, Homo sapien
gctcctgcttgcacacggtctggga

SEQ ID NO: 1495486 - DNA, 25 bp, Homo sapien
gcttgcacacggtctgggaagagct

SEQ ID NO: 1495487 - DNA, 25 bp, Homo sapien
aaccctcgccttgcccctcgaatgc

SEQ ID NO: 1495488 - DNA, 25 bp, Homo sapien
tcgaatgctccccaagccggagggg

SEQ ID NO: 1495489 - DNA, 25 bp, Homo sapien
ttttgccttgtcgccaggtcgctcc

SEQ ID NO: 1495490 - DNA, 25 bp, Homo sapien
ataccatcagactctccgaacgtcc

SEQ ID NO: 1495491 - DNA, 25 bp, Homo sapien
tggaatcccctagaagccatttggt

SEQ ID NO: 1495492 - DNA, 25 bp, Homo sapien
ttccatgtggaatcccctagaagcc

SEQ ID NO: 1495493 - DNA, 25 bp, Homo sapien
cagccagtagtgctcagaactagtt

SEQ ID NO: 1495494 - DNA, 25 bp, Homo sapien
tagtgctcagaactagtttcagtga

SEQ ID NO: 1495495 - DNA, 25 bp, Homo sapien
tgccacttgagggcaaggtctccac

SEQ ID NO: 1495496 - DNA, 25 bp, Homo sapien
atgccacttgagggcaaggtctcca

SEQ ID NO: 1495497 - DNA, 25 bp, Homo sapien
catgccacttgagggcaaggtctcc

SEQ ID NO: 1495498 - DNA, 25 bp, Homo sapien
gtgcagtgaaccactaggaccccgg

SEQ ID NO: 1495499 - DNA, 25 bp, Homo sapien
tctggctgattttggccaggtaggc

SEQ ID NO: 1495500 - DNA, 25 bp, Homo sapien
tggaggtgtgagttccctgcatctg

SEQ ID NO: 1495501 - DNA, 25 bp, Homo sapien
ggacacagcgtctgggattggaggt

SEQ ID NO: 1495502 - DNA, 25 bp, Homo sapien
agtagtcctcatacaggatgctgga

SEQ ID NO: 1495503 - DNA, 25 bp, Homo sapien
tcctcatacaggatgctggactgga

SEQ ID NO: 1495504 - DNA, 25 bp, Homo sapien
aggatgctggactggatggctggcc

SEQ ID NO: 1495505 - DNA, 25 bp, Homo sapien
aggtagtagtcctcatacaggatgc

SEQ ID NO: 1495506 - DNA, 25 bp, Homo sapien
tggtcccctcctgctgggtgatttc

SEQ ID NO: 1495507 - DNA, 25 bp, Homo sapien
ttggtcccctcctgctgggtgattt

SEQ ID NO: 1495508 - DNA, 25 bp, Homo sapien
gtcccctcctgctgggtgatttcca

SEQ ID NO: 1495509 - DNA, 25 bp, Homo sapien
tcccctcctgctgggtgatttccac

SEQ ID NO: 1495510 - DNA, 25 bp, Homo sapien
tttcccatgacgccgtaggatacat

SEQ ID NO: 1495511 - DNA, 25 bp, Homo sapien
ttcccatgacgccgtaggatacata

SEQ ID NO: 1495512 - DNA, 25 bp, Homo sapien
ctttcccatgacgccgtaggataca

SEQ ID NO: 1495513 - DNA, 25 bp, Homo sapien
tcccatgacgccgtaggatacatac

SEQ ID NO: 1495514 - DNA, 25 bp, Homo sapien
agggccagtgagcaggtgagctcaa

SEQ ID NO: 1495515 - DNA, 25 bp, Homo sapien
tgagggccagtgagcaggtgagctc

SEQ ID NO: 1495516 - DNA, 25 bp, Homo sapien
gccagtgagcaggtgagctcaaaca

SEQ ID NO: 1495517 - DNA, 25 bp, Homo sapien
gtgagcaggtgagctcaaacaggac

SEQ ID NO: 1495518 - DNA, 25 bp, Homo sapien
ttccatgagatcattaaggcccttg

SEQ ID NO: 1495519 - DNA, 25 bp, Homo sapien
tttgcgtattccatgagatcattaa

SEQ ID NO: 1495520 - DNA, 25 bp, Homo sapien
cgtattccatgagatcattaaggcc

SEQ ID NO: 1495521 - DNA, 25 bp, Homo sapien
tattccatgagatcattaaggccct

SEQ ID NO: 1495522 - DNA, 25 bp, Homo sapien
catagatgcctcaggacttcattgt

SEQ ID NO: 1495523 - DNA, 25 bp, Homo sapien
tagatgcctcaggacttcattgtaa

SEQ ID NO: 1495524 - DNA, 25 bp, Homo sapien
gatgcctcaggacttcattgtaatg

SEQ ID NO: 1495525 - DNA, 25 bp, Homo sapien
tcatagatgcctcaggacttcattg

SEQ ID NO: 1495526 - DNA, 25 bp, Homo sapien
tagctcctgggacttgacgatgtag

SEQ ID NO: 1495527 - DNA, 25 bp, Homo sapien
tgtccgaggatgtatacctggccct

SEQ ID NO: 1495528 - DNA, 25 bp, Homo sapien
actagctcctgggacttgacgatgt

SEQ ID NO: 1495529 - DNA, 25 bp, Homo sapien
ggactcctgtccgaggatgtatacc

SEQ ID NO: 1495530 - DNA, 25 bp, Homo sapien
tccttcagcctaagggaactgatgg

SEQ ID NO: 1495531 - DNA, 25 bp, Homo sapien
ctggctcctaatcgccctgcacact

SEQ ID NO: 1495532 - DNA, 25 bp, Homo sapien
aagggaactgatggtgatgaacccg

SEQ ID NO: 1495533 - DNA, 25 bp, Homo sapien
ggtggcatcaactggctcctaatcg

SEQ ID NO: 1495534 - DNA, 25 bp, Homo sapien
tgtctaaatcaaacaatgtgctgtg

SEQ ID NO: 1495535 - DNA, 25 bp, Homo sapien
taggaatgtctacaactggttgaat

SEQ ID NO: 1495536 - DNA, 25 bp, Homo sapien
aaccaagactgacaaatacctgtct

SEQ ID NO: 1495537 - DNA, 25 bp, Homo sapien
gacaaatacctgtctaaatcaaaca

SEQ ID NO: 1495538 - DNA, 25 bp, Homo sapien
cctgagtgcttctgtgaggataggt

SEQ ID NO: 1495539 - DNA, 25 bp, Homo sapien
caggaagggaatgggctccatttcc

SEQ ID NO: 1495540 - DNA, 25 bp, Homo sapien
attgcacagaaacctcggtctcctc

SEQ ID NO: 1495541 - DNA, 25 bp, Homo sapien
gagtgcttctgtgaggataggttac

SEQ ID NO: 1495542 - DNA, 25 bp, Homo sapien
caaagttgccaaaaggatatgcctc

SEQ ID NO: 1495543 - DNA, 25 bp, Homo sapien
tatgcctcaatgtaagatttcccca

SEQ ID NO: 1495544 - DNA, 25 bp, Homo sapien
ccctccagacatgtttcattgatgg

SEQ ID NO: 1495545 - DNA, 25 bp, Homo sapien
gtagaatcgatgacttccctccaga

SEQ ID NO: 1495546 - DNA, 25 bp, Homo sapien
cacgtgcaggttttttgcatgggtg

SEQ ID NO: 1495547 - DNA, 25 bp, Homo sapien
cacctccctccctgttctagtagtc

SEQ ID NO: 1495548 - DNA, 25 bp, Homo sapien
gattgatcacctcactgaggtagtg

SEQ ID NO: 1495549 - DNA, 25 bp, Homo sapien
gcatgggtgtattgtgcaatgctga

SEQ ID NO: 1495550 - DNA, 25 bp, Homo sapien
tggcaatcaatttaactccatagaa

SEQ ID NO: 1495551 - DNA, 25 bp, Homo sapien
aaatgaggttactcatggcaatcaa

SEQ ID NO: 1495552 - DNA, 25 bp, Homo sapien
taaaatgaggttactcatggcaatc

SEQ ID NO: 1495553 - DNA, 25 bp, Homo sapien
ctccatagaactgtttggaaaattc

SEQ ID NO: 1495554 - DNA, 25 bp, Homo sapien
gatggaaggaagtgtatcagaagcc

SEQ ID NO: 1495555 - DNA, 25 bp, Homo sapien
gaaggaagtgtatcagaagccccag

SEQ ID NO: 1495556 - DNA, 25 bp, Homo sapien
tggaaggaagtgtatcagaagcccc

SEQ ID NO: 1495557 - DNA, 25 bp, Homo sapien
aggatggaaggaagtgtatcagaag

SEQ ID NO: 1495558 - DNA, 25 bp, Homo sapien
aggccaccggaaatgttgcaggtga

SEQ ID NO: 1495559 - DNA, 25 bp, Homo sapien
ggaggccaccggaaatgttgcaggt

SEQ ID NO: 1495560 - DNA, 25 bp, Homo sapien
ttctcggaggccaccggaaatgttg

SEQ ID NO: 1495561 - DNA, 25 bp, Homo sapien
ctagtggtcggttggtttctcggag

SEQ ID NO: 1495562 - DNA, 25 bp, Homo sapien
cagctgcccagcttgcatgtgggaa

SEQ ID NO: 1495563 - DNA, 25 bp, Homo sapien
aagggccagaccacgttgaaggaca

SEQ ID NO: 1495564 - DNA, 25 bp, Homo sapien
agggccagaccacgttgaaggacat

SEQ ID NO: 1495565 - DNA, 25 bp, Homo sapien
cttgcatgtgggaagcagttttgtt

SEQ ID NO: 1495566 - DNA, 25 bp, Homo sapien
cagagtgatgaagccggcatccaca

SEQ ID NO: 1495567 - DNA, 25 bp, Homo sapien
cacaatgtatgtgtaccgtttagga

SEQ ID NO: 1495568 - DNA, 25 bp, Homo sapien
gaagccggcatccacaatgtatgtg

SEQ ID NO: 1495569 - DNA, 25 bp, Homo sapien
tgtatgtgtaccgtttaggactcat

SEQ ID NO: 1495570 - DNA, 25 bp, Homo sapien
gggtagaggtacatttgccagccct

SEQ ID NO: 1495571 - DNA, 25 bp, Homo sapien
tgcagttgcaaggagagccatccgg

SEQ ID NO: 1495572 - DNA, 25 bp, Homo sapien
gtccattctaggaagagtgggtccc

SEQ ID NO: 1495573 - DNA, 25 bp, Homo sapien
cacagcgtcttggttggaaacacac

SEQ ID NO: 1495574 - DNA, 25 bp, Homo sapien
ctccctggagctccccatttctccc

SEQ ID NO: 1495575 - DNA, 25 bp, Homo sapien
acctgggctccctggagctccccat

SEQ ID NO: 1495576 - DNA, 25 bp, Homo sapien
ctcatttccacctgggctccctgga

SEQ ID NO: 1495577 - DNA, 25 bp, Homo sapien
tgggctccctggagctccccatttc

SEQ ID NO: 1495578 - DNA, 25 bp, Homo sapien
tgggttgatttatgattctttcccc

SEQ ID NO: 1495579 - DNA, 25 bp, Homo sapien
aattcttgactctgttccaactcac

SEQ ID NO: 1495580 - DNA, 25 bp, Homo sapien
tcttgactctgttccaactcacact

SEQ ID NO: 1495581 - DNA, 25 bp, Homo sapien
gaaaattcttgactctgttccaact

SEQ ID NO: 1495582 - DNA, 25 bp, Homo sapien
ggctgttttctttggcggtgaccaa

SEQ ID NO: 1495583 - DNA, 25 bp, Homo sapien
ctgttttctttggcggtgaccaact

SEQ ID NO: 1495584 - DNA, 25 bp, Homo sapien
aggctgttttctttggcggtgacca

SEQ ID NO: 1495585 - DNA, 25 bp, Homo sapien
caaggctgttttctttggcggtgac

SEQ ID NO: 1495586 - DNA, 25 bp, Homo sapien
gtagaatgaaaacgcacttgaaggc

SEQ ID NO: 1495587 - DNA, 25 bp, Homo sapien
tgaaggcgttgtcaggaagtcctac

SEQ ID NO: 1495588 - DNA, 25 bp, Homo sapien
cctccttttgtctggagcagttagc

SEQ ID NO: 1495589 - DNA, 25 bp, Homo sapien
ccttttgtctggagcagttagctga

SEQ ID NO: 1495590 - DNA, 25 bp, Homo sapien
aggcattgtatgaaaaagacttgcc

SEQ ID NO: 1495591 - DNA, 25 bp, Homo sapien
aaaagacttgcccacgcatgtttat

SEQ ID NO: 1495592 - DNA, 25 bp, Homo sapien
aagaaggcattgtatgaaaaagact

SEQ ID NO: 1495593 - DNA, 25 bp, Homo sapien
aaagacttgcccacgcatgtttata

SEQ ID NO: 1495594 - DNA, 25 bp, Homo sapien
gagagatctcgggtttggagaccaa

SEQ ID NO: 1495595 - DNA, 25 bp, Homo sapien
gaagagagatctcgggtttggagac

SEQ ID NO: 1495596 - DNA, 25 bp, Homo sapien
agagagatctcgggtttggagacca

SEQ ID NO: 1495597 - DNA, 25 bp, Homo sapien
agagatctcgggtttggagaccaag

SEQ ID NO: 1495598 - DNA, 25 bp, Homo sapien
gaagaaatcgtgtgcctgtagaaga

SEQ ID NO: 1495599 - DNA, 25 bp, Homo sapien
taaacacactctgcgctcatctgaa

SEQ ID NO: 1495600 - DNA, 25 bp, Homo sapien
tctaaacaaggaccactccaagccg

SEQ ID NO: 1495601 - DNA, 25 bp, Homo sapien
tggaaagcggccgtgatgctaccac

SEQ ID NO: 1495602 - DNA, 25 bp, Homo sapien
cggagaaaggcccaacaagatctcg

SEQ ID NO: 1495603 - DNA, 25 bp, Homo sapien
tccagagcggagaaaggcccaacaa

SEQ ID NO: 1495604 - DNA, 25 bp, Homo sapien
catccagaaaatccagagcggagaa

SEQ ID NO: 1495605 - DNA, 25 bp, Homo sapien
gaaaggcccaacaagatctcgtgtt

SEQ ID NO: 1495606 - DNA, 25 bp, Homo sapien
aagccctctgatgggctatttgtag

SEQ ID NO: 1495607 - DNA, 25 bp, Homo sapien
tctgatgggctatttgtagcatccc

SEQ ID NO: 1495608 - DNA, 25 bp, Homo sapien
accaaaagccctctgatgggctatt

SEQ ID NO: 1495609 - DNA, 25 bp, Homo sapien
gggctatttgtagcatccctgctaa

SEQ ID NO: 1495610 - DNA, 25 bp, Homo sapien
cccatatggaccctttgagtctcag

SEQ ID NO: 1495611 - DNA, 25 bp, Homo sapien
gggttttggcctgatcagggctcca

SEQ ID NO: 1495612 - DNA, 25 bp, Homo sapien
cattgccacccatatggaccctttg

SEQ ID NO: 1495613 - DNA, 25 bp, Homo sapien
tcagggctccattgccacccatatg

SEQ ID NO: 1495614 - DNA, 25 bp, Homo sapien
accaagagcttcttcaagctgaggt

SEQ ID NO: 1495615 - DNA, 25 bp, Homo sapien
tcatgtcttgccgtcagccatcatc

SEQ ID NO: 1495616 - DNA, 25 bp, Homo sapien
atcatcaccaagagcttcttcaagc

SEQ ID NO: 1495617 - DNA, 25 bp, Homo sapien
catgtcttgccgtcagccatcatca

SEQ ID NO: 1495618 - DNA, 25 bp, Homo sapien
tgcaaaatgtgcacacttagtatct

SEQ ID NO: 1495619 - DNA, 25 bp, Homo sapien
tgtgcacacttagtatctgttcgct

SEQ ID NO: 1495620 - DNA, 25 bp, Homo sapien
agtatctgttcgctaatctgaaggg

SEQ ID NO: 1495621 - DNA, 25 bp, Homo sapien
tctgttcgctaatctgaagggctgc

SEQ ID NO: 1495622 - DNA, 25 bp, Homo sapien
gattgggtgtcaaaggttactgaac

SEQ ID NO: 1495623 - DNA, 25 bp, Homo sapien
tgatggattgggtgtcaaaggttac

SEQ ID NO: 1495624 - DNA, 25 bp, Homo sapien
gatggattgggtgtcaaaggttact

SEQ ID NO: 1495625 - DNA, 25 bp, Homo sapien
tggattgggtgtcaaaggttactga

SEQ ID NO: 1495626 - DNA, 25 bp, Homo sapien
gctgtccttcctggaccacaactgt

SEQ ID NO: 1495627 - DNA, 25 bp, Homo sapien
tggaccacaactgtccttcctggac

SEQ ID NO: 1495628 - DNA, 25 bp, Homo sapien
ctggaccacaactgtccttcctgga

SEQ ID NO: 1495629 - DNA, 25 bp, Homo sapien
ttagctgtccttcctggaccacaac

SEQ ID NO: 1495630 - DNA, 25 bp, Homo sapien
ccttggcggtcatcgtttgtcactg

SEQ ID NO: 1495631 - DNA, 25 bp, Homo sapien
gatagagcccttggcggtcatcgtt

SEQ ID NO: 1495632 - DNA, 25 bp, Homo sapien
gagcccttggcggtcatcgtttgtc

SEQ ID NO: 1495633 - DNA, 25 bp, Homo sapien
cggtcatcgtttgtcactgttaaca

SEQ ID NO: 1495634 - DNA, 25 bp, Homo sapien
atcctgcatatttgcaacaggtctg

SEQ ID NO: 1495635 - DNA, 25 bp, Homo sapien
gtctggcccagagcggaactggaaa

SEQ ID NO: 1495636 - DNA, 25 bp, Homo sapien
taaggtctgcagatatctgggcagt

SEQ ID NO: 1495637 - DNA, 25 bp, Homo sapien
ttagggtccatcctgcatatttgca

SEQ ID NO: 1495638 - DNA, 25 bp, Homo sapien
tgatgacaaacctgacccaacgagg

SEQ ID NO: 1495639 - DNA, 25 bp, Homo sapien
gcagacttcatgcaaagtctccatg

SEQ ID NO: 1495640 - DNA, 25 bp, Homo sapien
caaggtgttgcaccctgatgacaaa

SEQ ID NO: 1495641 - DNA, 25 bp, Homo sapien
tacccggctgtctgttcccaaggtg

SEQ ID NO: 1495642 - DNA, 25 bp, Homo sapien
gaagcagtcgcttttcgccaggtga

SEQ ID NO: 1495643 - DNA, 25 bp, Homo sapien
tattgcctagcaatccgacaggaca

SEQ ID NO: 1495644 - DNA, 25 bp, Homo sapien
tctgccgaggcatttctgagaaccc

SEQ ID NO: 1495645 - DNA, 25 bp, Homo sapien
tgaggatctctgtggcgaatgcaac

SEQ ID NO: 1495646 - DNA, 25 bp, Homo sapien
agctaggaagagtgtaagcttcctg

SEQ ID NO: 1495647 - DNA, 25 bp, Homo sapien
gctaggaagagtgtaagcttcctgt

SEQ ID NO: 1495648 - DNA, 25 bp, Homo sapien
gatgtgtttgcattggccgagatgt

SEQ ID NO: 1495649 - DNA, 25 bp, Homo sapien
cgagatgtgtagacgttaccaggac

SEQ ID NO: 1495650 - DNA, 25 bp, Homo sapien
tctgtgccggtaaaatagctctgtg

SEQ ID NO: 1495651 - DNA, 25 bp, Homo sapien
gacgttaccaggacacaactccaag

SEQ ID NO: 1495652 - DNA, 25 bp, Homo sapien
tcttgcccacatgtccgatcagggg

SEQ ID NO: 1495653 - DNA, 25 bp, Homo sapien
gaaatagtctctgcacccatgaaaa

SEQ ID NO: 1495654 - DNA, 25 bp, Homo sapien
ctgcctagaaatagtctctgcaccc

SEQ ID NO: 1495655 - DNA, 25 bp, Homo sapien
agtctctgcacccatgaaaagttct

SEQ ID NO: 1495656 - DNA, 25 bp, Homo sapien
aatactttagctttagccctctctc

SEQ ID NO: 1495657 - DNA, 25 bp, Homo sapien
ctccccaagaccctcataatccttc

SEQ ID NO: 1495658 - DNA, 25 bp, Homo sapien
tccccaagaccctcataatccttcc

SEQ ID NO: 1495659 - DNA, 25 bp, Homo sapien
atcctaaatccctgcactggacatg

SEQ ID NO: 1495660 - DNA, 25 bp, Homo sapien
tcctaaatccctgcactggacatga

SEQ ID NO: 1495661 - DNA, 25 bp, Homo sapien
cctaaatccctgcactggacatgaa

SEQ ID NO: 1495662 - DNA, 25 bp, Homo sapien
gaatcctaaatccctgcactggaca

SEQ ID NO: 1495663 - DNA, 25 bp, Homo sapien
actgaagcttcagttgaccgcagac

SEQ ID NO: 1495664 - DNA, 25 bp, Homo sapien
ggtcaatagtaagaccatcacagca

SEQ ID NO: 1495665 - DNA, 25 bp, Homo sapien
cctgggacagtgaccaaaactgaag

SEQ ID NO: 1495666 - DNA, 25 bp, Homo sapien
cctgctgcgcggacagtcctatggc

SEQ ID NO: 1495667 - DNA, 25 bp, Homo sapien
tcatgggtccagcaattaagtattg

SEQ ID NO: 1495668 - DNA, 25 bp, Homo sapien
gaaagtccctggctctcggagtgag

SEQ ID NO: 1495669 - DNA, 25 bp, Homo sapien
ttgcagccggtacagctttttccca

SEQ ID NO: 1495670 - DNA, 25 bp, Homo sapien
ctcgccggaaccagaagggacgatt

SEQ ID NO: 1495671 - DNA, 25 bp, Homo sapien
tcatccttgtatgggccttgctaat

SEQ ID NO: 1495672 - DNA, 25 bp, Homo sapien
atttacctgtcatccttgtatgggc

SEQ ID NO: 1495673 - DNA, 25 bp, Homo sapien
tgtatgggccttgctaatcttatct

SEQ ID NO: 1495674 - DNA, 25 bp, Homo sapien
aaataatgagatgcttcacgaattt

SEQ ID NO: 1495675 - DNA, 25 bp, Homo sapien
gttgcatattcagcaacatcattga

SEQ ID NO: 1495676 - DNA, 25 bp, Homo sapien
gcaacatcattgaatcttgcaaaca

SEQ ID NO: 1495677 - DNA, 25 bp, Homo sapien
tattcagcaacatcattgaatcttg

SEQ ID NO: 1495678 - DNA, 25 bp, Homo sapien
aattgttgcatattcagcaacatca

SEQ ID NO: 1495679 - DNA, 25 bp, Homo sapien
tccttccctgtgttccatcttattc

SEQ ID NO: 1495680 - DNA, 25 bp, Homo sapien
tgtgttccatcttattcttcccctt

SEQ ID NO: 1495681 - DNA, 25 bp, Homo sapien
cccctttgcttctggggagcacatc

SEQ ID NO: 1495682 - DNA, 25 bp, Homo sapien
cttattcttcccctttgcttctggg

SEQ ID NO: 1495683 - DNA, 25 bp, Homo sapien
tatggacagtatttgaggattgagg

SEQ ID NO: 1495684 - DNA, 25 bp, Homo sapien
taggtgctacaactaacaagcatca

SEQ ID NO: 1495685 - DNA, 25 bp, Homo sapien
aaacgatggagaagctaaagtcact

SEQ ID NO: 1495686 - DNA, 25 bp, Homo sapien
gagagcacacgatttttatggacag

SEQ ID NO: 1495687 - DNA, 25 bp, Homo sapien
tgagcccattctccgcagacataca

SEQ ID NO: 1495688 - DNA, 25 bp, Homo sapien
tctccgcagacatacaatgctgcat

SEQ ID NO: 1495689 - DNA, 25 bp, Homo sapien
tgctgcatgagacatcctcagtgat

SEQ ID NO: 1495690 - DNA, 25 bp, Homo sapien
gcatgagacatcctcagtgatttca

SEQ ID NO: 1495691 - DNA, 25 bp, Homo sapien
atcctgtctgtttgttgcacaatgg

SEQ ID NO: 1495692 - DNA, 25 bp, Homo sapien
aatcactgtgatttgtacatatgcc

SEQ ID NO: 1495693 - DNA, 25 bp, Homo sapien
catatgccctaggaaaattttactg

SEQ ID NO: 1495694 - DNA, 25 bp, Homo sapien
tgtttgttgcacaatggaaatcact

SEQ ID NO: 1495695 - DNA, 25 bp, Homo sapien
gagctctgctcaactgtcgtagctg

SEQ ID NO: 1495696 - DNA, 25 bp, Homo sapien
tgagctctgctcaactgtcgtagct

SEQ ID NO: 1495697 - DNA, 25 bp, Homo sapien
agctctgctcaactgtcgtagctga

SEQ ID NO: 1495698 - DNA, 25 bp, Homo sapien
gttgagctctgctcaactgtcgtag

SEQ ID NO: 1495699 - DNA, 25 bp, Homo sapien
taaattatcgtgtgttgggaagttc

SEQ ID NO: 1495700 - DNA, 25 bp, Homo sapien
tgttgaggcttagtttgatcttcca

SEQ ID NO: 1495701 - DNA, 25 bp, Homo sapien
gaacagtcccttcctaatagcaggg

SEQ ID NO: 1495702 - DNA, 25 bp, Homo sapien
gatgctctgtcatggttttctgtaa

SEQ ID NO: 1495703 - DNA, 25 bp, Homo sapien
gaagaaaagcacacgaacaggtgtc

SEQ ID NO: 1495704 - DNA, 25 bp, Homo sapien
ctaacttaaacggatgggattcact

SEQ ID NO: 1495705 - DNA, 25 bp, Homo sapien
cattggaggagtcgtatgcactgtt

SEQ ID NO: 1495706 - DNA, 25 bp, Homo sapien
gaacaggtgtcttaatgcatttgga

SEQ ID NO: 1495707 - DNA, 25 bp, Homo sapien
tcaccagtggaactaaacagttgag

SEQ ID NO: 1495708 - DNA, 25 bp, Homo sapien
tactgttaaagaccccaaggctcca

SEQ ID NO: 1495709 - DNA, 25 bp, Homo sapien
tccagctactgagtgaacagggtgc

SEQ ID NO: 1495710 - DNA, 25 bp, Homo sapien
tacatggcctctaattctttggacc

SEQ ID NO: 1495711 - DNA, 25 bp, Homo sapien
ggtgaaactggtgctgacttcggca

SEQ ID NO: 1495712 - DNA, 25 bp, Homo sapien
ggtgcactcctgtaaccctgggact

SEQ ID NO: 1495713 - DNA, 25 bp, Homo sapien
taaacatttagcgtgcggtttccca

SEQ ID NO: 1495714 - DNA, 25 bp, Homo sapien
tgaagagaacgtccaccttaaggct

SEQ ID NO: 1495715 - DNA, 25 bp, Homo sapien
ttcctgccctgtcaaaattctgtac

SEQ ID NO: 1495716 - DNA, 25 bp, Homo sapien
tttttcgtctttggtccggaatgca

SEQ ID NO: 1495717 - DNA, 25 bp, Homo sapien
acaaaacactaacagctttgcttgc

SEQ ID NO: 1495718 - DNA, 25 bp, Homo sapien
gagcagaatgactggatttgtttct

SEQ ID NO: 1495719 - DNA, 25 bp, Homo sapien
tgggaatggcgtagtgaccatcata

SEQ ID NO: 1495720 - DNA, 25 bp, Homo sapien
tctgctgggaatggcgtagtgacca

SEQ ID NO: 1495721 - DNA, 25 bp, Homo sapien
ctagaatctgctgggaatggcgtag

SEQ ID NO: 1495722 - DNA, 25 bp, Homo sapien
atggcgtagtgaccatcataggtac

SEQ ID NO: 1495723 - DNA, 25 bp, Homo sapien
ctggggcctcccctgttctcctggg

SEQ ID NO: 1495724 - DNA, 25 bp, Homo sapien
ctgtcacctgctcccacagccctct

SEQ ID NO: 1495725 - DNA, 25 bp, Homo sapien
cctctggggcctcccctgttctcct

SEQ ID NO: 1495726 - DNA, 25 bp, Homo sapien
tgtcacctgctcccacagccctctg

SEQ ID NO: 1495727 - DNA, 25 bp, Homo sapien
agcccgcttgttgcttcccggatga

SEQ ID NO: 1495728 - DNA, 25 bp, Homo sapien
tccagccggcctgagctcgcctgga

SEQ ID NO: 1495729 - DNA, 25 bp, Homo sapien
cctattccctgggagcccgcttgtt

SEQ ID NO: 1495730 - DNA, 25 bp, Homo sapien
ggaccaccccaagccttctcagtct

SEQ ID NO: 1495731 - DNA, 25 bp, Homo sapien
gaaggcgtgtctaagccaggtcctg

SEQ ID NO: 1495732 - DNA, 25 bp, Homo sapien
gagtggcctccattgtcgcaaaagc

SEQ ID NO: 1495733 - DNA, 25 bp, Homo sapien
ggcacttttccagataggaacctgt

SEQ ID NO: 1495734 - DNA, 25 bp, Homo sapien
caccatgtggctctgcacgaaaggc

SEQ ID NO: 1495735 - DNA, 25 bp, Homo sapien
ttcctgagctcccttcagccaccca

SEQ ID NO: 1495736 - DNA, 25 bp, Homo sapien
tgagcttcctgagctcccttcagcc

SEQ ID NO: 1495737 - DNA, 25 bp, Homo sapien
gcttcctgagctcccttcagccacc

SEQ ID NO: 1495738 - DNA, 25 bp, Homo sapien
gagcttcctgagctcccttcagcca

SEQ ID NO: 1495739 - DNA, 25 bp, Homo sapien
ttaagggctagttgcagtgcagcca

SEQ ID NO: 1495740 - DNA, 25 bp, Homo sapien
ggagcctcacatggcatagatgttg

SEQ ID NO: 1495741 - DNA, 25 bp, Homo sapien
acaaaagcccagctttatggcgggc

SEQ ID NO: 1495742 - DNA, 25 bp, Homo sapien
gagaggaggaccaacttctacggta

SEQ ID NO: 1495743 - DNA, 25 bp, Homo sapien
ccttggtctaaggagaactgcgtag

SEQ ID NO: 1495744 - DNA, 25 bp, Homo sapien
catttgatgccaagccttccagtgc

SEQ ID NO: 1495745 - DNA, 25 bp, Homo sapien
aactgcgtagggtgagaagagtccc

SEQ ID NO: 1495746 - DNA, 25 bp, Homo sapien
gagtcccagcgatacgtggaaaagg

SEQ ID NO: 1495747 - DNA, 25 bp, Homo sapien
ccttggtgtctcagcggagccactg

SEQ ID NO: 1495748 - DNA, 25 bp, Homo sapien
attttccatgtagccacctctcttg

SEQ ID NO: 1495749 - DNA, 25 bp, Homo sapien
agccacctctcttggagtgtccatg

SEQ ID NO: 1495750 - DNA, 25 bp, Homo sapien
tccttggtgtctcagcggagccact

SEQ ID NO: 1495751 - DNA, 25 bp, Homo sapien
cattgcagtttctcggaggtagaca

SEQ ID NO: 1495752 - DNA, 25 bp, Homo sapien
attgcagtttctcggaggtagacag

SEQ ID NO: 1495753 - DNA, 25 bp, Homo sapien
tcattgcagtttctcggaggtagac

SEQ ID NO: 1495754 - DNA, 25 bp, Homo sapien
ttcattgcagtttctcggaggtaga

SEQ ID NO: 1495755 - DNA, 25 bp, Homo sapien
tcaggaaagaatggccgcattgtgt

SEQ ID NO: 1495756 - DNA, 25 bp, Homo sapien
agtgcccctgggtagacctgtgtgt

SEQ ID NO: 1495757 - DNA, 25 bp, Homo sapien
gcctggtgttcttgttgagtgagca

SEQ ID NO: 1495758 - DNA, 25 bp, Homo sapien
tgtgtgctccaaaaggcgattttgt

SEQ ID NO: 1495759 - DNA, 25 bp, Homo sapien
caggtgcgaggatggaaattccttc

SEQ ID NO: 1495760 - DNA, 25 bp, Homo sapien
cacctttagcgaagatgtaaatgat

SEQ ID NO: 1495761 - DNA, 25 bp, Homo sapien
cctgtctgaacacctttagcgaaga

SEQ ID NO: 1495762 - DNA, 25 bp, Homo sapien
actcaggtgcgaggatggaaattcc

SEQ ID NO: 1495763 - DNA, 25 bp, Homo sapien
gtgccaggcccgcaagttaagcact

SEQ ID NO: 1495764 - DNA, 25 bp, Homo sapien
tgggccgccctggtcgcgggtcagg

SEQ ID NO: 1495765 - DNA, 25 bp, Homo sapien
caggcccgcaagttaagcactgtct

SEQ ID NO: 1495766 - DNA, 25 bp, Homo sapien
cccgcaagttaagcactgtctgcat

SEQ ID NO: 1495767 - DNA, 25 bp, Homo sapien
caaaggcgtttgcagtttgacccct

SEQ ID NO: 1495768 - DNA, 25 bp, Homo sapien
gatccctcaaaacaaaggcgtttgc

SEQ ID NO: 1495769 - DNA, 25 bp, Homo sapien
tcgcagaatcgctgagatccctcaa

SEQ ID NO: 1495770 - DNA, 25 bp, Homo sapien
tgctgctcaaactgtggtcggcgaa

SEQ ID NO: 1495771 - DNA, 25 bp, Homo sapien
ggccgctttggctctcggaaagccc

SEQ ID NO: 1495772 - DNA, 25 bp, Homo sapien
gaggccgctttggctctcggaaagc

SEQ ID NO: 1495773 - DNA, 25 bp, Homo sapien
gccgctttggctctcggaaagcccc

SEQ ID NO: 1495774 - DNA, 25 bp, Homo sapien
aggccgctttggctctcggaaagcc

SEQ ID NO: 1495775 - DNA, 25 bp, Homo sapien
ttcaccgcagatggcagtgaaaggg

SEQ ID NO: 1495776 - DNA, 25 bp, Homo sapien
caccgcagatggcagtgaaagggaa

SEQ ID NO: 1495777 - DNA, 25 bp, Homo sapien
cttcaccgcagatggcagtgaaagg

SEQ ID NO: 1495778 - DNA, 25 bp, Homo sapien
accgcagatggcagtgaaagggaag

SEQ ID NO: 1495779 - DNA, 25 bp, Homo sapien
gcaaaagatgaagagtaggctcctt

SEQ ID NO: 1495780 - DNA, 25 bp, Homo sapien
catctgagggttcaacctcaagggt

SEQ ID NO: 1495781 - DNA, 25 bp, Homo sapien
tcagcaaaagatgaagagtaggctc

SEQ ID NO: 1495782 - DNA, 25 bp, Homo sapien
tatcgcatctgagggttcaacctca

SEQ ID NO: 1495783 - DNA, 25 bp, Homo sapien
cattcgtcagaagggcactaatttt

SEQ ID NO: 1495784 - DNA, 25 bp, Homo sapien
gtcagaagggcactaattttgtcat

SEQ ID NO: 1495785 - DNA, 25 bp, Homo sapien
tcgtcagaagggcactaattttgtc

SEQ ID NO: 1495786 - DNA, 25 bp, Homo sapien
cagaagggcactaattttgtcattc

SEQ ID NO: 1495787 - DNA, 25 bp, Homo sapien
taagtcagacaacatttgccgcaat

SEQ ID NO: 1495788 - DNA, 25 bp, Homo sapien
aataatgtctgtcaaagtggcttac

SEQ ID NO: 1495789 - DNA, 25 bp, Homo sapien
agtaagtcagacaacatttgccgca

SEQ ID NO: 1495790 - DNA, 25 bp, Homo sapien
gtcagacaacatttgccgcaataat

SEQ ID NO: 1495791 - DNA, 25 bp, Homo sapien
cattagcttcccttttgaaggaagg

SEQ ID NO: 1495792 - DNA, 25 bp, Homo sapien
gaggagtaaacgcagcccattctaa

SEQ ID NO: 1495793 - DNA, 25 bp, Homo sapien
ctgtgacgttcaaatctggaaatcc

SEQ ID NO: 1495794 - DNA, 25 bp, Homo sapien
tctaattacaggctcatctaggcgt

SEQ ID NO: 1495795 - DNA, 25 bp, Homo sapien
ccacacgtttttgctttcccacatt

SEQ ID NO: 1495796 - DNA, 25 bp, Homo sapien
acacacgtttttgctttcccacacg

SEQ ID NO: 1495797 - DNA, 25 bp, Homo sapien
tgctttcccacattgacattatagg

SEQ ID NO: 1495798 - DNA, 25 bp, Homo sapien
acgtttttgctttcccacattgaca

SEQ ID NO: 1495799 - DNA, 25 bp, Homo sapien
tcaggtttcctttgtattagcctcg

SEQ ID NO: 1495800 - DNA, 25 bp, Homo sapien
cctcgtaccgataagtattgatgac

SEQ ID NO: 1495801 - DNA, 25 bp, Homo sapien
tgtattagcctcgtaccgataagta

SEQ ID NO: 1495802 - DNA, 25 bp, Homo sapien
ccgataagtattgatgactagctgg

SEQ ID NO: 1495803 - DNA, 25 bp, Homo sapien
taaggcaggaagcatgtactccttc

SEQ ID NO: 1495804 - DNA, 25 bp, Homo sapien
ttctgtgccagaagcaaagcagtac

SEQ ID NO: 1495805 - DNA, 25 bp, Homo sapien
ggaaaacggctttagtccattcagc

SEQ ID NO: 1495806 - DNA, 25 bp, Homo sapien
cagtgagtgactgaacctgaaattc

SEQ ID NO: 1495807 - DNA, 25 bp, Homo sapien
cataggaaggtcacattgtaacccg

SEQ ID NO: 1495808 - DNA, 25 bp, Homo sapien
ggcacccgaaggcacaagtctgcat

SEQ ID NO: 1495809 - DNA, 25 bp, Homo sapien
tgcaacttgcccttcccataggaag

SEQ ID NO: 1495810 - DNA, 25 bp, Homo sapien
tgcattttgtactactgcaacttgc

SEQ ID NO: 1495811 - DNA, 25 bp, Homo sapien
cttcctccatgagtctatgtgctcg

SEQ ID NO: 1495812 - DNA, 25 bp, Homo sapien
gcttcctccatgagtctatgtgctc

SEQ ID NO: 1495813 - DNA, 25 bp, Homo sapien
tgcttcctccatgagtctatgtgct

SEQ ID NO: 1495814 - DNA, 25 bp, Homo sapien
tagaggaaataatgagaaagggtgt

SEQ ID NO: 1495815 - DNA, 25 bp, Homo sapien
gaggaaataatgagaaagggtgtaa

SEQ ID NO: 1495816 - DNA, 25 bp, Homo sapien
agaggaaataatgagaaagggtgta

SEQ ID NO: 1495817 - DNA, 25 bp, Homo sapien
ttagaggaaataatgagaaagggtg

SEQ ID NO: 1495818 - DNA, 25 bp, Homo sapien
ctgaataggaattggtcctgtcctt

SEQ ID NO: 1495819 - DNA, 25 bp, Homo sapien
tctgaataggaattggtcctgtcct

SEQ ID NO: 1495820 - DNA, 25 bp, Homo sapien
aatctgaataggaattggtcctgtc

SEQ ID NO: 1495821 - DNA, 25 bp, Homo sapien
ttgatcaagcccagtaggttggaac

SEQ ID NO: 1495822 - DNA, 25 bp, Homo sapien
taaaatgttcgtgactcttcacact

SEQ ID NO: 1495823 - DNA, 25 bp, Homo sapien
ttaaaatgttcgtgactcttcacac

SEQ ID NO: 1495824 - DNA, 25 bp, Homo sapien
aatgttcgtgactcttcacactcat

SEQ ID NO: 1495825 - DNA, 25 bp, Homo sapien
aaatgttcgtgactcttcacactca

SEQ ID NO: 1495826 - DNA, 25 bp, Homo sapien
accattagtaaccaccccagctcca

SEQ ID NO: 1495827 - DNA, 25 bp, Homo sapien
ttcctcaccattagtaaccacccca

SEQ ID NO: 1495828 - DNA, 25 bp, Homo sapien
tcctcaccattagtaaccaccccag

SEQ ID NO: 1495829 - DNA, 25 bp, Homo sapien
ctcaccattagtaaccaccccagct

SEQ ID NO: 1495830 - DNA, 25 bp, Homo sapien
gtctgttcttttcccgaatctcttg

SEQ ID NO: 1495831 - DNA, 25 bp, Homo sapien
tggctggctggtagcatcactgcga

SEQ ID NO: 1495832 - DNA, 25 bp, Homo sapien
ggtagcatcactgcgagtgaatcaa

SEQ ID NO: 1495833 - DNA, 25 bp, Homo sapien
gcgagtgaatcaaactcagactcat

SEQ ID NO: 1495834 - DNA, 25 bp, Homo sapien
tcactgcgagtgaatcaaactcaga

SEQ ID NO: 1495835 - DNA, 25 bp, Homo sapien
gcccaggtctgaggagtcaagatcg

SEQ ID NO: 1495836 - DNA, 25 bp, Homo sapien
caggtctgaggagtcaagatcgtac

SEQ ID NO: 1495837 - DNA, 25 bp, Homo sapien
tgtggttagttctataggaagaata

SEQ ID NO: 1495838 - DNA, 25 bp, Homo sapien
caagatcgtactttgtggttagttc

SEQ ID NO: 1495839 - DNA, 25 bp, Homo sapien
cagtgggactgcaccgtcatcacca

SEQ ID NO: 1495840 - DNA, 25 bp, Homo sapien
agtgggactgcaccgtcatcaccat

SEQ ID NO: 1495841 - DNA, 25 bp, Homo sapien
actgcaccgtcatcaccattcacca

SEQ ID NO: 1495842 - DNA, 25 bp, Homo sapien
gggactgcaccgtcatcaccattca

SEQ ID NO: 1495843 - DNA, 25 bp, Homo sapien
tatcatcaggtaagccagcaagcct

SEQ ID NO: 1495844 - DNA, 25 bp, Homo sapien
tcatggtgctgacaatatcatcagg

SEQ ID NO: 1495845 - DNA, 25 bp, Homo sapien
gtggccatgctgtttaattgagtgc

SEQ ID NO: 1495846 - DNA, 25 bp, Homo sapien
gagtgcatctgatttgttcgcaagc

SEQ ID NO: 1495847 - DNA, 25 bp, Homo sapien
tctgcccttggacacgtctgctgta

SEQ ID NO: 1495848 - DNA, 25 bp, Homo sapien
cattccgtatgcctgactccagctg

SEQ ID NO: 1495849 - DNA, 25 bp, Homo sapien
gtggttggccactgcattccgtatg

SEQ ID NO: 1495850 - DNA, 25 bp, Homo sapien
gctgtagtatcctccagcctgaggc

SEQ ID NO: 1495851 - DNA, 25 bp, Homo sapien
gcctaagtggttcgtccacctgcat

SEQ ID NO: 1495852 - DNA, 25 bp, Homo sapien
gtcagcaaggttacaacacactcag

SEQ ID NO: 1495853 - DNA, 25 bp, Homo sapien
tgccttcctggatatacacagacac

SEQ ID NO: 1495854 - DNA, 25 bp, Homo sapien
cacactcagcatgtctctgcctaag

SEQ ID NO: 1495855 - DNA, 25 bp, Homo sapien
ggaggatatgagctatcattgctaa

SEQ ID NO: 1495856 - DNA, 25 bp, Homo sapien
gataggagatatcaaaaaacggcgt

SEQ ID NO: 1495857 - DNA, 25 bp, Homo sapien
taaaaagcctcgtgaagtttgtgaa

SEQ ID NO: 1495858 - DNA, 25 bp, Homo sapien
tcatctgtagacttcgtatgctctg

SEQ ID NO: 1495859 - DNA, 25 bp, Homo sapien
gcaggacacgcttcctttgttgccc

SEQ ID NO: 1495860 - DNA, 25 bp, Homo sapien
ctgctcctgctcttgtgtaggccac

SEQ ID NO: 1495861 - DNA, 25 bp, Homo sapien
tcctgctcttgtgtaggccacactt

SEQ ID NO: 1495862 - DNA, 25 bp, Homo sapien
tctcctgagacaaagatacttcctg

SEQ ID NO: 1495863 - DNA, 25 bp, Homo sapien
tcttctgtgcagcatacacttcctg

SEQ ID NO: 1495864 - DNA, 25 bp, Homo sapien
cttctgtgcagcatacacttcctgt

SEQ ID NO: 1495865 - DNA, 25 bp, Homo sapien
ctgtgaatgacactccttctgttgt

SEQ ID NO: 1495866 - DNA, 25 bp, Homo sapien
gtgaatgacactccttctgttgttt

SEQ ID NO: 1495867 - DNA, 25 bp, Homo sapien
tgtgaatgacactccttctgttgtt

SEQ ID NO: 1495868 - DNA, 25 bp, Homo sapien
ttttccatgtggaggacatacttcc

SEQ ID NO: 1495869 - DNA, 25 bp, Homo sapien
tgtttactccgatgtgcatgacaca

SEQ ID NO: 1495870 - DNA, 25 bp, Homo sapien
ccctgtgaaagatacccttcctgtt

SEQ ID NO: 1495871 - DNA, 25 bp, Homo sapien
ctttctgttcttccggtatgcagga

SEQ ID NO: 1495872 - DNA, 25 bp, Homo sapien
cactgttgactgtgacctcatagac

SEQ ID NO: 1495873 - DNA, 25 bp, Homo sapien
ggccagatatttacttcgtggcata

SEQ ID NO: 1495874 - DNA, 25 bp, Homo sapien
tttacttcgtggcataagcataggc

SEQ ID NO: 1495875 - DNA, 25 bp, Homo sapien
cagatatttacttcgtggcataagc

SEQ ID NO: 1495876 - DNA, 25 bp, Homo sapien
ggacatggccagatatttacttcgt

SEQ ID NO: 1495877 - DNA, 25 bp, Homo sapien
aatacatagaaggaattcataactg

SEQ ID NO: 1495878 - DNA, 25 bp, Homo sapien
ggaattcataactgagctactggga

SEQ ID NO: 1495879 - DNA, 25 bp, Homo sapien
gagctactgggaaaatctaccccca

SEQ ID NO: 1495880 - DNA, 25 bp, Homo sapien
catagaaggaattcataactgagct

SEQ ID NO: 1495881 - DNA, 25 bp, Homo sapien
taaggccttattatgttgacacagg

SEQ ID NO: 1495882 - DNA, 25 bp, Homo sapien
aattaaggccttattatgttgacac

SEQ ID NO: 1495883 - DNA, 25 bp, Homo sapien
gctattttgaattaaggccttatta

SEQ ID NO: 1495884 - DNA, 25 bp, Homo sapien
aggccttattatgttgacacaggac

SEQ ID NO: 1495885 - DNA, 25 bp, Homo sapien
ggccaaagcgcagaaatttgaattg

SEQ ID NO: 1495886 - DNA, 25 bp, Homo sapien
ccacgggggcaggaagtaattcatc

SEQ ID NO: 1495887 - DNA, 25 bp, Homo sapien
tcataggccaaagcgcagaaatttg

SEQ ID NO: 1495888 - DNA, 25 bp, Homo sapien
taattcatcaacgaatgtttcagtg

SEQ ID NO: 1495889 - DNA, 25 bp, Homo sapien
tcacctacatttaaggattcagata

SEQ ID NO: 1495890 - DNA, 25 bp, Homo sapien
tttaaggattcagatacatatctgc

SEQ ID NO: 1495891 - DNA, 25 bp, Homo sapien
catttaaggattcagatacatatct

SEQ ID NO: 1495892 - DNA, 25 bp, Homo sapien
cctacatttaaggattcagatacat

SEQ ID NO: 1495893 - DNA, 25 bp, Homo sapien
ctgcaccagcaattgatttaatttt

SEQ ID NO: 1495894 - DNA, 25 bp, Homo sapien
tgcaccagcaattgatttaattttc

SEQ ID NO: 1495895 - DNA, 25 bp, Homo sapien
ccagcaattgatttaattttctctt

SEQ ID NO: 1495896 - DNA, 25 bp, Homo sapien
caccagcaattgatttaattttctc

SEQ ID NO: 1495897 - DNA, 25 bp, Homo sapien
tagttctctttccacggactcactc

SEQ ID NO: 1495898 - DNA, 25 bp, Homo sapien
gagattgtttacttgacttgcctct

SEQ ID NO: 1495899 - DNA, 25 bp, Homo sapien
ccaacgtatgtgtttcatacaagag

SEQ ID NO: 1495900 - DNA, 25 bp, Homo sapien
gactcactcctttttccaacgtatg

SEQ ID NO: 1495901 - DNA, 25 bp, Homo sapien
ttctgccttttagaagttctctcag

SEQ ID NO: 1495902 - DNA, 25 bp, Homo sapien
tggctctagatgtgacctcaacact

SEQ ID NO: 1495903 - DNA, 25 bp, Homo sapien
ccttttagaagttctctcagggcac

SEQ ID NO: 1495904 - DNA, 25 bp, Homo sapien
cttggctctagatgtgacctcaaca

SEQ ID NO: 1495905 - DNA, 25 bp, Homo sapien
attcttgcatgccagtagggttcct

SEQ ID NO: 1495906 - DNA, 25 bp, Homo sapien
tagatcaggagacatttgggaattc

SEQ ID NO: 1495907 - DNA, 25 bp, Homo sapien
gaattcttgcatgccagtagggttc

SEQ ID NO: 1495908 - DNA, 25 bp, Homo sapien
ataaacctttccaggtagatcagga

SEQ ID NO: 1495909 - DNA, 25 bp, Homo sapien
catccaaagggatgctaaaactgta

SEQ ID NO: 1495910 - DNA, 25 bp, Homo sapien
tcatccaaagggatgctaaaactgt

SEQ ID NO: 1495911 - DNA, 25 bp, Homo sapien
ttcatccaaagggatgctaaaactg

SEQ ID NO: 1495912 - DNA, 25 bp, Homo sapien
aattcatccaaagggatgctaaaac

SEQ ID NO: 1495913 - DNA, 25 bp, Homo sapien
gagatacagacaggcagtgtgtggc

SEQ ID NO: 1495914 - DNA, 25 bp, Homo sapien
agagatacagacaggcagtgtgtgg

SEQ ID NO: 1495915 - DNA, 25 bp, Homo sapien
ttgaagagtgactttgatggacagc

SEQ ID NO: 1495916 - DNA, 25 bp, Homo sapien
gaagagtgactttgatggacagccc

SEQ ID NO: 1495917 - DNA, 25 bp, Homo sapien
agaatgcttgcagggctcagtgttc

SEQ ID NO: 1495918 - DNA, 25 bp, Homo sapien
agagaatgcttgcagggctcagtgt

SEQ ID NO: 1495919 - DNA, 25 bp, Homo sapien
cagagaatgcttgcagggctcagtg

SEQ ID NO: 1495920 - DNA, 25 bp, Homo sapien
cacagagaatgcttgcagggctcag

SEQ ID NO: 1495921 - DNA, 25 bp, Homo sapien
ctttcgtggtgcgtacaacccttgg

SEQ ID NO: 1495922 - DNA, 25 bp, Homo sapien
gccacttaagtggaaattgtgcttt

SEQ ID NO: 1495923 - DNA, 25 bp, Homo sapien
gtgcgtacaacccttggacttgtct

SEQ ID NO: 1495924 - DNA, 25 bp, Homo sapien
ttggccacttaagtggaaattgtgc

SEQ ID NO: 1495925 - DNA, 25 bp, Homo sapien
tctcatagatgtaagagaatctctt

SEQ ID NO: 1495926 - DNA, 25 bp, Homo sapien
tgcagctggaccatctcatagatgt

SEQ ID NO: 1495927 - DNA, 25 bp, Homo sapien
gaatctctttgtgacatactttgtt

SEQ ID NO: 1495928 - DNA, 25 bp, Homo sapien
tttgtgacatactttgttccactct

SEQ ID NO: 1495929 - DNA, 25 bp, Homo sapien
gcagatttccgtatgtttcaaacac

SEQ ID NO: 1495930 - DNA, 25 bp, Homo sapien
gacagtgtgatagctgtttctgtgc

SEQ ID NO: 1495931 - DNA, 25 bp, Homo sapien
gaacatgggcataatggaaatagct

SEQ ID NO: 1495932 - DNA, 25 bp, Homo sapien
gatgccactaaaagcattctcactg

SEQ ID NO: 1495933 - DNA, 25 bp, Homo sapien
tatcgatgaatctagacaaccacca

SEQ ID NO: 1495934 - DNA, 25 bp, Homo sapien
gaatctagacaaccaccaaacatag

SEQ ID NO: 1495935 - DNA, 25 bp, Homo sapien
atctagacaaccaccaaacatagcc

SEQ ID NO: 1495936 - DNA, 25 bp, Homo sapien
cttatggatatcgatgaatctagac

SEQ ID NO: 1495937 - DNA, 25 bp, Homo sapien
tgctctgctaggcatattgtactct

SEQ ID NO: 1495938 - DNA, 25 bp, Homo sapien
taggcatattgtactctgacttcac

SEQ ID NO: 1495939 - DNA, 25 bp, Homo sapien
tctgacttcacatcaatgccgtcag

SEQ ID NO: 1495940 - DNA, 25 bp, Homo sapien
tgacttcacatcaatgccgtcagac

SEQ ID NO: 1495941 - DNA, 25 bp, Homo sapien
ccttttttcatagagggcttctatc

SEQ ID NO: 1495942 - DNA, 25 bp, Homo sapien
tatgccttttttcatagagggcttc

SEQ ID NO: 1495943 - DNA, 25 bp, Homo sapien
ttatgccttttttcatagagggctt

SEQ ID NO: 1495944 - DNA, 25 bp, Homo sapien
tgccttttttcatagagggcttcta

SEQ ID NO: 1495945 - DNA, 25 bp, Homo sapien
gggtccttggtctttgctttcctga

SEQ ID NO: 1495946 - DNA, 25 bp, Homo sapien
aactctccattttctgggtccttgg

SEQ ID NO: 1495947 - DNA, 25 bp, Homo sapien
ctcaaactctccattttctgggtcc

SEQ ID NO: 1495948 - DNA, 25 bp, Homo sapien
ctctccattttctgggtccttggtc

SEQ ID NO: 1495949 - DNA, 25 bp, Homo sapien
caaagataagattctcataggtgta

SEQ ID NO: 1495950 - DNA, 25 bp, Homo sapien
catgatcttcccaaaatggtgtcca

SEQ ID NO: 1495951 - DNA, 25 bp, Homo sapien
gagtccaacccaatgttttcctgct

SEQ ID NO: 1495952 - DNA, 25 bp, Homo sapien
tggtgtccaacatgaccatgaaaca

SEQ ID NO: 1495953 - DNA, 25 bp, Homo sapien
aatttggccacacagtcacattatg

SEQ ID NO: 1495954 - DNA, 25 bp, Homo sapien
tttggccacacagtcacattatgga

SEQ ID NO: 1495955 - DNA, 25 bp, Homo sapien
caatttggccacacagtcacattat

SEQ ID NO: 1495956 - DNA, 25 bp, Homo sapien
tatggaaggacaaagatccatcttc

SEQ ID NO: 1495957 - DNA, 25 bp, Homo sapien
ccctgtatagggtgctcatgctttg

SEQ ID NO: 1495958 - DNA, 25 bp, Homo sapien
tgctcatgctttgggtacctatgca

SEQ ID NO: 1495959 - DNA, 25 bp, Homo sapien
tatgcacattatctccattgctcat

SEQ ID NO: 1495960 - DNA, 25 bp, Homo sapien
gcatgcttctcaaaccctgtatagg

SEQ ID NO: 1495961 - DNA, 25 bp, Homo sapien
gcaatattgcatagcagaatggata

SEQ ID NO: 1495962 - DNA, 25 bp, Homo sapien
taatatgttgcacttaggtgtcttc

SEQ ID NO: 1495963 - DNA, 25 bp, Homo sapien
tctgaatcgtacagggcaatattgc

SEQ ID NO: 1495964 - DNA, 25 bp, Homo sapien
tctacaggtcttggtggacctaagc

SEQ ID NO: 1495965 - DNA, 25 bp, Homo sapien
aaataacaccaatcacaatctttgc

SEQ ID NO: 1495966 - DNA, 25 bp, Homo sapien
gcagaagaaataacaccaatcacaa

SEQ ID NO: 1495967 - DNA, 25 bp, Homo sapien
ctgtagggacatagcagaagaaata

SEQ ID NO: 1495968 - DNA, 25 bp, Homo sapien
gaagaaataacaccaatcacaatct

SEQ ID NO: 1495969 - DNA, 25 bp, Homo sapien
tgctgccaacatctctttgcaagtg

SEQ ID NO: 1495970 - DNA, 25 bp, Homo sapien
ggagtggctccttgcctcattgagc

SEQ ID NO: 1495971 - DNA, 25 bp, Homo sapien
cttgcacccactggcctacttttag

SEQ ID NO: 1495972 - DNA, 25 bp, Homo sapien
tcattcatgtagaacggcaggagtg

SEQ ID NO: 1495973 - DNA, 25 bp, Homo sapien
tatctgtctggccactaaggacacc

SEQ ID NO: 1495974 - DNA, 25 bp, Homo sapien
tctggccataatgaagactgtgtga

SEQ ID NO: 1495975 - DNA, 25 bp, Homo sapien
tgaagactgtgtgaatttatatctg

SEQ ID NO: 1495976 - DNA, 25 bp, Homo sapien
tctgctactggcactgtctggccat

SEQ ID NO: 1495977 - DNA, 25 bp, Homo sapien
cctggtgtcagtacccgaaatgggc

SEQ ID NO: 1495978 - DNA, 25 bp, Homo sapien
tcagtacccgaaatgggctgctgtc

SEQ ID NO: 1495979 - DNA, 25 bp, Homo sapien
gcactcagtgcctggtgtcagtacc

SEQ ID NO: 1495980 - DNA, 25 bp, Homo sapien
cagtgcctggtgtcagtacccgaaa

SEQ ID NO: 1495981 - DNA, 25 bp, Homo sapien
cttttctccttgatgtagtgatggg

SEQ ID NO: 1495982 - DNA, 25 bp, Homo sapien
tgatgctcttgacacattcagacgg

SEQ ID NO: 1495983 - DNA, 25 bp, Homo sapien
tgcatggaagactgatctcttacag

SEQ ID NO: 1495984 - DNA, 25 bp, Homo sapien
gacggcctgagatgacacttttctc

SEQ ID NO: 1495985 - DNA, 25 bp, Homo sapien
caggtttacaaacatctccaatttg

SEQ ID NO: 1495986 - DNA, 25 bp, Homo sapien
gtttacaaacatctccaatttgcat

SEQ ID NO: 1495987 - DNA, 25 bp, Homo sapien
ttgtatttccaggtttacaaacatc

SEQ ID NO: 1495988 - DNA, 25 bp, Homo sapien
cttaccatacgttgtatttccaggt

SEQ ID NO: 1495989 - DNA, 25 bp, Homo sapien
ttgctggagtacctacactgctgcc

SEQ ID NO: 1495990 - DNA, 25 bp, Homo sapien
cctagacccctttgttgctggagta

SEQ ID NO: 1495991 - DNA, 25 bp, Homo sapien
gacttcaaggtctgagcatctgttt

SEQ ID NO: 1495992 - DNA, 25 bp, Homo sapien
caaagcagaatgtgcggtggcgtcc

SEQ ID NO: 1495993 - DNA, 25 bp, Homo sapien
actccgattgggtatttcccattgg

SEQ ID NO: 1495994 - DNA, 25 bp, Homo sapien
ctccgattgggtatttcccattgga

SEQ ID NO: 1495995 - DNA, 25 bp, Homo sapien
aactccgattgggtatttcccattg

SEQ ID NO: 1495996 - DNA, 25 bp, Homo sapien
caattttagttagtactcgagaata

SEQ ID NO: 1495997 - DNA, 25 bp, Homo sapien
tagttagtactcgagaataagtcat

SEQ ID NO: 1495998 - DNA, 25 bp, Homo sapien
tttagttagtactcgagaataagtc

SEQ ID NO: 1495999 - DNA, 25 bp, Homo sapien
gaacaattttagttagtactcgaga

SEQ ID NO: 1496000 - DNA, 25 bp, Homo sapien
tgtcttcctagtttgtaattcacca

SEQ ID NO: 1496001 - DNA, 25 bp, Homo sapien
ccagcaccagaagtttgcttggaga

SEQ ID NO: 1496002 - DNA, 25 bp, Homo sapien
tcttcctagtttgtaattcaccagc

SEQ ID NO: 1496003 - DNA, 25 bp, Homo sapien
caccagcaccagaagtttgcttgga

SEQ ID NO: 1496004 - DNA, 25 bp, Homo sapien
taaggaggctgtacactgaatccat

SEQ ID NO: 1496005 - DNA, 25 bp, Homo sapien
acactgaatccatgcttttctgtcc

SEQ ID NO: 1496006 - DNA, 25 bp, Homo sapien
tgtacactgaatccatgcttttctg

SEQ ID NO: 1496007 - DNA, 25 bp, Homo sapien
gaggctgtacactgaatccatgctt

SEQ ID NO: 1496008 - DNA, 25 bp, Homo sapien
tgttacgatacagaatagactcagc

SEQ ID NO: 1496009 - DNA, 25 bp, Homo sapien
gatgggatttaaggattcccatcca

SEQ ID NO: 1496010 - DNA, 25 bp, Homo sapien
tctgcatgaagaggtagagatctga

SEQ ID NO: 1496011 - DNA, 25 bp, Homo sapien
caatatctaacagcattttgactag

SEQ ID NO: 1496012 - DNA, 25 bp, Homo sapien
ttctgtgctgaaagtctcctgtgag

SEQ ID NO: 1496013 - DNA, 25 bp, Homo sapien
tactggttattctggtcaggcatca

SEQ ID NO: 1496014 - DNA, 25 bp, Homo sapien
ccgtaggttccatgttcacgtgcat

SEQ ID NO: 1496015 - DNA, 25 bp, Homo sapien
tatgcgacccatctaaggatatcag

SEQ ID NO: 1496016 - DNA, 25 bp, Homo sapien
tatgtctattgactcttgctgtgga

SEQ ID NO: 1496017 - DNA, 25 bp, Homo sapien
ttcttatgtctattgactcttgctg

SEQ ID NO: 1496018 - DNA, 25 bp, Homo sapien
attgactcttgctgtggactggttc

SEQ ID NO: 1496019 - DNA, 25 bp, Homo sapien
tgactcttgctgtggactggttcat

SEQ ID NO: 1496020 - DNA, 25 bp, Homo sapien
catttgctgccaagttgatgtgaca

SEQ ID NO: 1496021 - DNA, 25 bp, Homo sapien
gactgagcacttatcttcagtgtga

SEQ ID NO: 1496022 - DNA, 25 bp, Homo sapien
cccaaaattccatgtctgccatttg

SEQ ID NO: 1496023 - DNA, 25 bp, Homo sapien
taaatgcttctctcatgacgcggtc

SEQ ID NO: 1496024 - DNA, 25 bp, Homo sapien
agagtcagcgaaggaagataagggt

SEQ ID NO: 1496025 - DNA, 25 bp, Homo sapien
cagcgaaggaagataagggtggggc

SEQ ID NO: 1496026 - DNA, 25 bp, Homo sapien
tcagcgaaggaagataagggtgggg

SEQ ID NO: 1496027 - DNA, 25 bp, Homo sapien
agtcagcgaaggaagataagggtgg

SEQ ID NO: 1496028 - DNA, 25 bp, Homo sapien
gtctacggggcttccaaggcgatca

SEQ ID NO: 1496029 - DNA, 25 bp, Homo sapien
ctacggggcttccaaggcgatcagg

SEQ ID NO: 1496030 - DNA, 25 bp, Homo sapien
cgctaagccgagaaggagtcagtca

SEQ ID NO: 1496031 - DNA, 25 bp, Homo sapien
ggcttccaaggcgatcaggcagcgt

SEQ ID NO: 1496032 - DNA, 25 bp, Homo sapien
gggtgtttttgagccaagatgagcc

SEQ ID NO: 1496033 - DNA, 25 bp, Homo sapien
cagtgggggtgtttttgagccaaga

SEQ ID NO: 1496034 - DNA, 25 bp, Homo sapien
tgggggtgtttttgagccaagatga

SEQ ID NO: 1496035 - DNA, 25 bp, Homo sapien
ggggtgtttttgagccaagatgagc

SEQ ID NO: 1496036 - DNA, 25 bp, Homo sapien
tgaggtcagaccaccagcggaagac

SEQ ID NO: 1496037 - DNA, 25 bp, Homo sapien
gaggtcagaccaccagcggaagacc

SEQ ID NO: 1496038 - DNA, 25 bp, Homo sapien
cttcttgacattggcttgtttcttg

SEQ ID NO: 1496039 - DNA, 25 bp, Homo sapien
tgacattggcttgtttcttgacctc

SEQ ID NO: 1496040 - DNA, 25 bp, Homo sapien
cattggcttgtttcttgacctccat

SEQ ID NO: 1496041 - DNA, 25 bp, Homo sapien
tcttgacattggcttgtttcttgac

SEQ ID NO: 1496042 - DNA, 25 bp, Homo sapien
cacagattaggaacattcgagtttt

SEQ ID NO: 1496043 - DNA, 25 bp, Homo sapien
ctggaagtaggaggctatagcattc

SEQ ID NO: 1496044 - DNA, 25 bp, Homo sapien
cccttttctcatggccagcataaag

SEQ ID NO: 1496045 - DNA, 25 bp, Homo sapien
tttacacttgcatgtctcatccctt

SEQ ID NO: 1496046 - DNA, 25 bp, Homo sapien
gctgaagacatccaagcacgctgct

SEQ ID NO: 1496047 - DNA, 25 bp, Homo sapien
taatgctgagtgctgaagacatcca

SEQ ID NO: 1496048 - DNA, 25 bp, Homo sapien
agcacgctgcttgtggccgtcacgt

SEQ ID NO: 1496049 - DNA, 25 bp, Homo sapien
tcttttgtctgacgcttagatctgc

SEQ ID NO: 1496050 - DNA, 25 bp, Homo sapien
caaattgtgttataaagattgtttc

SEQ ID NO: 1496051 - DNA, 25 bp, Homo sapien
catcaaattgtgttataaagattgt

SEQ ID NO: 1496052 - DNA, 25 bp, Homo sapien
ccagctgtttgctctcctatgacaa

SEQ ID NO: 1496053 - DNA, 25 bp, Homo sapien
tgacaaatgggaccggtgtatgcat

SEQ ID NO: 1496054 - DNA, 25 bp, Homo sapien
tttgccatgaatctggacagcttca

SEQ ID NO: 1496055 - DNA, 25 bp, Homo sapien
tacaagcacttgtaagggctccagc

SEQ ID NO: 1496056 - DNA, 25 bp, Homo sapien
caacctcgaaaagtcatctctggaa

SEQ ID NO: 1496057 - DNA, 25 bp, Homo sapien
gggctccagcacacatgtgacattg

SEQ ID NO: 1496058 - DNA, 25 bp, Homo sapien
agtgttcttaactctgataatcaag

SEQ ID NO: 1496059 - DNA, 25 bp, Homo sapien
tgatgatggaacatgcaacctcttc

SEQ ID NO: 1496060 - DNA, 25 bp, Homo sapien
aagaacaaagccatgcagtttatat

SEQ ID NO: 1496061 - DNA, 25 bp, Homo sapien
gactacttggtccttctaatgaaaa

SEQ ID NO: 1496062 - DNA, 25 bp, Homo sapien
tgccaaatgctgctagatggggcat

SEQ ID NO: 1496063 - DNA, 25 bp, Homo sapien
atacttacttcacttctgccaaatg

SEQ ID NO: 1496064 - DNA, 25 bp, Homo sapien
tttgaaaagagtcctcagtgtttct

SEQ ID NO: 1496065 - DNA, 25 bp, Homo sapien
tctttgaaaagagtcctcagtgttt

SEQ ID NO: 1496066 - DNA, 25 bp, Homo sapien
gtctctttgaaaagagtcctcagtg

SEQ ID NO: 1496067 - DNA, 25 bp, Homo sapien
tctctttgaaaagagtcctcagtgt

SEQ ID NO: 1496068 - DNA, 25 bp, Homo sapien
gagatctgtccattccttcaggctg

SEQ ID NO: 1496069 - DNA, 25 bp, Homo sapien
ctcagttttcttcttcctattattt

SEQ ID NO: 1496070 - DNA, 25 bp, Homo sapien
tctcagttttcttcttcctattatt

SEQ ID NO: 1496071 - DNA, 25 bp, Homo sapien
gtctcagttttcttcttcctattat

SEQ ID NO: 1496072 - DNA, 25 bp, Homo sapien
caaatatagagtatcttccaggttc

SEQ ID NO: 1496073 - DNA, 25 bp, Homo sapien
caggttcttcaagtccttcccaggc

SEQ ID NO: 1496074 - DNA, 25 bp, Homo sapien
aggctccagatccttcctgagattc

SEQ ID NO: 1496075 - DNA, 25 bp, Homo sapien
gttgttggttgaattttgtattcaa

SEQ ID NO: 1496076 - DNA, 25 bp, Homo sapien
gggcaatggctctcttctggtgctt

SEQ ID NO: 1496077 - DNA, 25 bp, Homo sapien
ggcacagatgggcaatggctctctt

SEQ ID NO: 1496078 - DNA, 25 bp, Homo sapien
tctggtgctttgttaaatactgtat

SEQ ID NO: 1496079 - DNA, 25 bp, Homo sapien
gttaaatactgtatatggctcctgc

SEQ ID NO: 1496080 - DNA, 25 bp, Homo sapien
cttcactttcccattttcctttcat

SEQ ID NO: 1496081 - DNA, 25 bp, Homo sapien
caaagttggaacttcactttcccat

SEQ ID NO: 1496082 - DNA, 25 bp, Homo sapien
actctatctggattggtaatgacat

SEQ ID NO: 1496083 - DNA, 25 bp, Homo sapien
ttactctatctggattggtaatgac

SEQ ID NO: 1496084 - DNA, 25 bp, Homo sapien
tactctatctggattggtaatgaca

SEQ ID NO: 1496085 - DNA, 25 bp, Homo sapien
gccctgtggcccctgagccttctct

SEQ ID NO: 1496086 - DNA, 25 bp, Homo sapien
tgtggcccctgagccttctctgggc

SEQ ID NO: 1496087 - DNA, 25 bp, Homo sapien
cctgtggcccctgagccttctctgg

SEQ ID NO: 1496088 - DNA, 25 bp, Homo sapien
tggcccctgagccttctctgggcat

SEQ ID NO: 1496089 - DNA, 25 bp, Homo sapien
caagtagagaaggcccatccaggcc

SEQ ID NO: 1496090 - DNA, 25 bp, Homo sapien
atgatgttggtagtaatattttctc

SEQ ID NO: 1496091 - DNA, 25 bp, Homo sapien
ttccccagatcatacccacttttag

SEQ ID NO: 1496092 - DNA, 25 bp, Homo sapien
tcaacagcagacttcacttattttt

SEQ ID NO: 1496093 - DNA, 25 bp, Homo sapien
gttttctggtaagcgcaaacgagaa

SEQ ID NO: 1496094 - DNA, 25 bp, Homo sapien
cagcaccaacttctttatctcattg

SEQ ID NO: 1496095 - DNA, 25 bp, Homo sapien
acagcaccaacttctttatctcatt

SEQ ID NO: 1496096 - DNA, 25 bp, Homo sapien
taaccatatagttagagccataaat

SEQ ID NO: 1496097 - DNA, 25 bp, Homo sapien
ttttaaccatatagttagagccata

SEQ ID NO: 1496098 - DNA, 25 bp, Homo sapien
aattttaaccatatagttagagcca

SEQ ID NO: 1496099 - DNA, 25 bp, Homo sapien
ttaattttaaccatatagttagagc

SEQ ID NO: 1496100 - DNA, 25 bp, Homo sapien
gtaattatctgggtcactcaagaaa

SEQ ID NO: 1496101 - DNA, 25 bp, Homo sapien
tatcgaagtgtggtgaaattcctga

SEQ ID NO: 1496102 - DNA, 25 bp, Homo sapien
taggtgaagcgttgctagggctaca

SEQ ID NO: 1496103 - DNA, 25 bp, Homo sapien
agaggaagattacacctaggatatc

SEQ ID NO: 1496104 - DNA, 25 bp, Homo sapien
cagtgtattgggttgtactacaagg

SEQ ID NO: 1496105 - DNA, 25 bp, Homo sapien
tttacaagaccagtgtattgggttg

SEQ ID NO: 1496106 - DNA, 25 bp, Homo sapien
caagaccagtgtattgggttgtact

SEQ ID NO: 1496107 - DNA, 25 bp, Homo sapien
tggggagagggttcttcatttctgg

SEQ ID NO: 1496108 - DNA, 25 bp, Homo sapien
cacttgagtatgtcgacagtattca

SEQ ID NO: 1496109 - DNA, 25 bp, Homo sapien
cttcctgtggttacatggagataag

SEQ ID NO: 1496110 - DNA, 25 bp, Homo sapien
agaacactggatgtgattgacaaca

SEQ ID NO: 1496111 - DNA, 25 bp, Homo sapien
tatctggttgaaattgccaactgca

SEQ ID NO: 1496112 - DNA, 25 bp, Homo sapien
gataagaactgtcaccaagggtaag

SEQ ID NO: 1496113 - DNA, 25 bp, Homo sapien
aatttcacttttattttgttgatca

SEQ ID NO: 1496114 - DNA, 25 bp, Homo sapien
tgaatgttccgaatacattgcttga

SEQ ID NO: 1496115 - DNA, 25 bp, Homo sapien
gtaatgaatgttccgaatacattgc

SEQ ID NO: 1496116 - DNA, 25 bp, Homo sapien
ttccgaatacattgcttgatggttt

SEQ ID NO: 1496117 - DNA, 25 bp, Homo sapien
tgagtaatgaatgttccgaatacat

SEQ ID NO: 1496118 - DNA, 25 bp, Homo sapien
caaacctcttatcctgaccaccacc

SEQ ID NO: 1496119 - DNA, 25 bp, Homo sapien
tccacaaacctcttatcctgaccac

SEQ ID NO: 1496120 - DNA, 25 bp, Homo sapien
cacaaacctcttatcctgaccacca

SEQ ID NO: 1496121 - DNA, 25 bp, Homo sapien
ttacttccacaaacctcttatcctg

SEQ ID NO: 1496122 - DNA, 25 bp, Homo sapien
gctcccgaaatgctgacgctaatat

SEQ ID NO: 1496123 - DNA, 25 bp, Homo sapien
gaaatgctgacgctaatatccttat

SEQ ID NO: 1496124 - DNA, 25 bp, Homo sapien
gtaccagctcccgaaatgctgacgc

SEQ ID NO: 1496125 - DNA, 25 bp, Homo sapien
gctgacgctaatatccttatgtgca

SEQ ID NO: 1496126 - DNA, 25 bp, Homo sapien
ttaagacttgttcagtgactaccat

SEQ ID NO: 1496127 - DNA, 25 bp, Homo sapien
atttaagacttgttcagtgactacc

SEQ ID NO: 1496128 - DNA, 25 bp, Homo sapien
tgatttatttaagacttgttcagtg

SEQ ID NO: 1496129 - DNA, 25 bp, Homo sapien
agatgatttatttaagacttgttca

SEQ ID NO: 1496130 - DNA, 25 bp, Homo sapien
tgcttattaccagtgtgtatttgaa

SEQ ID NO: 1496131 - DNA, 25 bp, Homo sapien
ttgcttattaccagtgtgtatttga

SEQ ID NO: 1496132 - DNA, 25 bp, Homo sapien
cttggaatccacagaggactctttc

SEQ ID NO: 1496133 - DNA, 25 bp, Homo sapien
tggaatccacagaggactctttcag

SEQ ID NO: 1496134 - DNA, 25 bp, Homo sapien
ttggaatccacagaggactctttca

SEQ ID NO: 1496135 - DNA, 25 bp, Homo sapien
ggaatccacagaggactctttcagc

SEQ ID NO: 1496136 - DNA, 25 bp, Homo sapien
tgctttagcatctgggtgagcacca

SEQ ID NO: 1496137 - DNA, 25 bp, Homo sapien
gtgagcaccaatacatccatgcctg

SEQ ID NO: 1496138 - DNA, 25 bp, Homo sapien
tagccacggactctgtaactgtcac

SEQ ID NO: 1496139 - DNA, 25 bp, Homo sapien
gagcaccaatacatccatgcctgtc

SEQ ID NO: 1496140 - DNA, 25 bp, Homo sapien
tcacattggcctctatacagtcctt

SEQ ID NO: 1496141 - DNA, 25 bp, Homo sapien
atgtttttaagtagatggctccttt

SEQ ID NO: 1496142 - DNA, 25 bp, Homo sapien
ggcctctatacagtccttgtaacgt

SEQ ID NO: 1496143 - DNA, 25 bp, Homo sapien
cattggcctctatacagtccttgta

SEQ ID NO: 1496144 - DNA, 25 bp, Homo sapien
aattactgtcagtactgagtgctgc

SEQ ID NO: 1496145 - DNA, 25 bp, Homo sapien
tctcattgttggtgccatatgccag

SEQ ID NO: 1496146 - DNA, 25 bp, Homo sapien
tcatctcctggaaggaaggatatgc

SEQ ID NO: 1496147 - DNA, 25 bp, Homo sapien
gccatatgccagagacagacaatta

SEQ ID NO: 1496148 - DNA, 25 bp, Homo sapien
tatcctcacaggtgaacctccgact

SEQ ID NO: 1496149 - DNA, 25 bp, Homo sapien
caggtctggtaaatatcctcacagg

SEQ ID NO: 1496150 - DNA, 25 bp, Homo sapien
cccacaggtctggtaaatatcctca

SEQ ID NO: 1496151 - DNA, 25 bp, Homo sapien
gaacctccgacttctcacctcttgt

SEQ ID NO: 1496152 - DNA, 25 bp, Homo sapien
gatgcagccattgctacaaggcacc

SEQ ID NO: 1496153 - DNA, 25 bp, Homo sapien
tctagggcatgttgtagttgacact

SEQ ID NO: 1496154 - DNA, 25 bp, Homo sapien
gaacttcaacggtactcttgtgaga

SEQ ID NO: 1496155 - DNA, 25 bp, Homo sapien
gattctctgtgtgcatgatagcctt

SEQ ID NO: 1496156 - DNA, 25 bp, Homo sapien
gtgaaccttctctcatatcttggat

SEQ ID NO: 1496157 - DNA, 25 bp, Homo sapien
aaccttctctcatatcttggattat

SEQ ID NO: 1496158 - DNA, 25 bp, Homo sapien
ctcatatcttggattataaattctc

SEQ ID NO: 1496159 - DNA, 25 bp, Homo sapien
tatcttggattataaattctcacca

SEQ ID NO: 1496160 - DNA, 25 bp, Homo sapien
ccgaaacactgagcgacgttgaggc

SEQ ID NO: 1496161 - DNA, 25 bp, Homo sapien
atatcgttggccgaaacactgagcg

SEQ ID NO: 1496162 - DNA, 25 bp, Homo sapien
ttggccgaaacactgagcgacgttg

SEQ ID NO: 1496163 - DNA, 25 bp, Homo sapien
aaacactgagcgacgttgaggcgtg

SEQ ID NO: 1496164 - DNA, 25 bp, Homo sapien
tttatagagcaatgtattaaccttt

SEQ ID NO: 1496165 - DNA, 25 bp, Homo sapien
gtcttctggttgacatgcataagtg

SEQ ID NO: 1496166 - DNA, 25 bp, Homo sapien
tgtaaaggcctattttgttctccaa

SEQ ID NO: 1496167 - DNA, 25 bp, Homo sapien
tgtgtcaatatcgactattaggaac

SEQ ID NO: 1496168 - DNA, 25 bp, Homo sapien
agaatctttggcataagcacatggg

SEQ ID NO: 1496169 - DNA, 25 bp, Homo sapien
aatctttggcataagcacatgggcc

SEQ ID NO: 1496170 - DNA, 25 bp, Homo sapien
tctttggcataagcacatgggccat

SEQ ID NO: 1496171 - DNA, 25 bp, Homo sapien
gaatctttggcataagcacatgggc

SEQ ID NO: 1496172 - DNA, 25 bp, Homo sapien
ggtgagactgcaagaatataggctt

SEQ ID NO: 1496173 - DNA, 25 bp, Homo sapien
tctgatgaaagttctctcctctagg

SEQ ID NO: 1496174 - DNA, 25 bp, Homo sapien
tgttgggcagcacaaaatgattgac

SEQ ID NO: 1496175 - DNA, 25 bp, Homo sapien
ggtaccaggttgtctgcaaacctca

SEQ ID NO: 1496176 - DNA, 25 bp, Homo sapien
gagtccttcaccatgattaccagtg

SEQ ID NO: 1496177 - DNA, 25 bp, Homo sapien
catgaggatcgttcctctctctggc

SEQ ID NO: 1496178 - DNA, 25 bp, Homo sapien
ctaactctaggcatgatatttttct

SEQ ID NO: 1496179 - DNA, 25 bp, Homo sapien
ccaggattgtattagacatgaggat

SEQ ID NO: 1496180 - DNA, 25 bp, Homo sapien
ttctgaattaatgcccctaacaggt

SEQ ID NO: 1496181 - DNA, 25 bp, Homo sapien
atcctgactgatgcaccttcaccat

SEQ ID NO: 1496182 - DNA, 25 bp, Homo sapien
tacatcctgactgatgcaccttcac

SEQ ID NO: 1496183 - DNA, 25 bp, Homo sapien
gaattaatgcccctaacaggttctg

SEQ ID NO: 1496184 - DNA, 25 bp, Homo sapien
tcccataagtataactggccatatc

SEQ ID NO: 1496185 - DNA, 25 bp, Homo sapien
gtgaaaatagttactcatgtcaata

SEQ ID NO: 1496186 - DNA, 25 bp, Homo sapien
catatcattgtgagactataccagc

SEQ ID NO: 1496187 - DNA, 25 bp, Homo sapien
ctcatgtcaatatacgatggcccaa

SEQ ID NO: 1496188 - DNA, 25 bp, Homo sapien
cttgtttttgacccacaccgacact

SEQ ID NO: 1496189 - DNA, 25 bp, Homo sapien
tccttgtttttgacccacaccgaca

SEQ ID NO: 1496190 - DNA, 25 bp, Homo sapien
tgtttttgacccacaccgacactat

SEQ ID NO: 1496191 - DNA, 25 bp, Homo sapien
ttttgacccacaccgacactattgg

SEQ ID NO: 1496192 - DNA, 25 bp, Homo sapien
aaggagggattccagcattgggagt

SEQ ID NO: 1496193 - DNA, 25 bp, Homo sapien
ttccagcattgggagttagcttcct

SEQ ID NO: 1496194 - DNA, 25 bp, Homo sapien
cattgggagttagcttcctctggct

SEQ ID NO: 1496195 - DNA, 25 bp, Homo sapien
agggattccagcattgggagttagc

SEQ ID NO: 1496196 - DNA, 25 bp, Homo sapien
tgttgttctgaagtatctaacagca

SEQ ID NO: 1496197 - DNA, 25 bp, Homo sapien
aatctaaagtcaaggtcttcttgtg

SEQ ID NO: 1496198 - DNA, 25 bp, Homo sapien
gaagggcagaagtgaaatcctggaa

SEQ ID NO: 1496199 - DNA, 25 bp, Homo sapien
taacagcattcagagggaaggtccc

SEQ ID NO: 1496200 - DNA, 25 bp, Homo sapien
tcctcctctgattgtgcgtcccgtg

SEQ ID NO: 1496201 - DNA, 25 bp, Homo sapien
tctgattgtgcgtcccgtgtcttca

SEQ ID NO: 1496202 - DNA, 25 bp, Homo sapien
tcctctgattgtgcgtcccgtgtct

SEQ ID NO: 1496203 - DNA, 25 bp, Homo sapien
ctgattgtgcgtcccgtgtcttcat

SEQ ID NO: 1496204 - DNA, 25 bp, Homo sapien
aagatccttgatcttggtcaaggaa

SEQ ID NO: 1496205 - DNA, 25 bp, Homo sapien
gatccttgatcttggtcaaggaaaa

SEQ ID NO: 1496206 - DNA, 25 bp, Homo sapien
agtttcctatggtagactcaagatc

SEQ ID NO: 1496207 - DNA, 25 bp, Homo sapien
cctatggtagactcaagatccttga

SEQ ID NO: 1496208 - DNA, 25 bp, Homo sapien
ccctggattaacttcgtcattgacc

SEQ ID NO: 1496209 - DNA, 25 bp, Homo sapien
cacttttccctgaacgattcggtag

SEQ ID NO: 1496210 - DNA, 25 bp, Homo sapien
ttttcctggattaactcggtcattg

SEQ ID NO: 1496211 - DNA, 25 bp, Homo sapien
gggcttgattctttcccctggactg

SEQ ID NO: 1496212 - DNA, 25 bp, Homo sapien
agagcccagggaagctagagcaagg

SEQ ID NO: 1496213 - DNA, 25 bp, Homo sapien
ttgatgtagctgggcattcctcaga

SEQ ID NO: 1496214 - DNA, 25 bp, Homo sapien
ggttgatgtagctgggcattcctca

SEQ ID NO: 1496215 - DNA, 25 bp, Homo sapien
aggttgatgtagctgggcattcctc

SEQ ID NO: 1496216 - DNA, 25 bp, Homo sapien
acattcagagaccacgtcattccct

SEQ ID NO: 1496217 - DNA, 25 bp, Homo sapien
gaatcctgccattccggataaacta

SEQ ID NO: 1496218 - DNA, 25 bp, Homo sapien
gtggaatcctgccattccggataaa

SEQ ID NO: 1496219 - DNA, 25 bp, Homo sapien
agagaccacgtcattccctgtggaa

SEQ ID NO: 1496220 - DNA, 25 bp, Homo sapien
gggtgtttttatcactcagcggaat

SEQ ID NO: 1496221 - DNA, 25 bp, Homo sapien
cactcagcggaatgcccagtggcaa

SEQ ID NO: 1496222 - DNA, 25 bp, Homo sapien
ttttatcactcagcggaatgcccag

SEQ ID NO: 1496223 - DNA, 25 bp, Homo sapien
tgtttttatcactcagcggaatgcc

SEQ ID NO: 1496224 - DNA, 25 bp, Homo sapien
ccgttgcttcttgacctgaaaaggc

SEQ ID NO: 1496225 - DNA, 25 bp, Homo sapien
tacatgtgtcgttctccgttgcttc

SEQ ID NO: 1496226 - DNA, 25 bp, Homo sapien
tataaagaaggctgaagcctacatg

SEQ ID NO: 1496227 - DNA, 25 bp, Homo sapien
tgcttcttgacctgaaaaggccatg

SEQ ID NO: 1496228 - DNA, 25 bp, Homo sapien
cctcattgtgcattgcagaattcat

SEQ ID NO: 1496229 - DNA, 25 bp, Homo sapien
acctcattgtgcattgcagaattca

SEQ ID NO: 1496230 - DNA, 25 bp, Homo sapien
cacctcattgtgcattgcagaattc

SEQ ID NO: 1496231 - DNA, 25 bp, Homo sapien
catctttatacttcccagtcattgc

SEQ ID NO: 1496232 - DNA, 25 bp, Homo sapien
tttacatctttatacttcccagtca

SEQ ID NO: 1496233 - DNA, 25 bp, Homo sapien
cattctgtactttacatctttatac

SEQ ID NO: 1496234 - DNA, 25 bp, Homo sapien
tgtactttacatctttatacttccc

SEQ ID NO: 1496235 - DNA, 25 bp, Homo sapien
tgaaactgttccgataagttgtagg

SEQ ID NO: 1496236 - DNA, 25 bp, Homo sapien
gagtgcaaagccgtaggtgaaactg

SEQ ID NO: 1496237 - DNA, 25 bp, Homo sapien
cagggtatcagatccttgaaagaca

SEQ ID NO: 1496238 - DNA, 25 bp, Homo sapien
tgaaagacagtaagagtgcaaagcc

SEQ ID NO: 1496239 - DNA, 25 bp, Homo sapien
cttgctgcgattgtgttatttctgc

SEQ ID NO: 1496240 - DNA, 25 bp, Homo sapien
aaattatgggtagtaagacgatgcc

SEQ ID NO: 1496241 - DNA, 25 bp, Homo sapien
tgtgaatttagacccaagtattgag

SEQ ID NO: 1496242 - DNA, 25 bp, Homo sapien
ctggtgtgtaggacacagaccttgc

SEQ ID NO: 1496243 - DNA, 25 bp, Homo sapien
tgcctttgtaccaatcttttgtctc

SEQ ID NO: 1496244 - DNA, 25 bp, Homo sapien
tttgtaccaatcttttgtctccatg

SEQ ID NO: 1496245 - DNA, 25 bp, Homo sapien
cctttgtaccaatcttttgtctcca

SEQ ID NO: 1496246 - DNA, 25 bp, Homo sapien
ttgtaccaatcttttgtctccatga

SEQ ID NO: 1496247 - DNA, 25 bp, Homo sapien
tcatggcttggcgtcccaatgaatg

SEQ ID NO: 1496248 - DNA, 25 bp, Homo sapien
tgactgctgtacaagctttcgatct

SEQ ID NO: 1496249 - DNA, 25 bp, Homo sapien
gaatgaagccttccgctaagtcagc

SEQ ID NO: 1496250 - DNA, 25 bp, Homo sapien
catgtacactttacgctttaaatag

SEQ ID NO: 1496251 - DNA, 25 bp, Homo sapien
gaaggtcattcttagtgcacagtag

SEQ ID NO: 1496252 - DNA, 25 bp, Homo sapien
ggtcattcttagtgcacagtagtac

SEQ ID NO: 1496253 - DNA, 25 bp, Homo sapien
tcattcttagtgcacagtagtacat

SEQ ID NO: 1496254 - DNA, 25 bp, Homo sapien
ttgaaggtcattcttagtgcacagt

SEQ ID NO: 1496255 - DNA, 25 bp, Homo sapien
tagtctttctgcattgctcgaaatg

SEQ ID NO: 1496256 - DNA, 25 bp, Homo sapien
tttctgcattgctcgaaatgccatg

SEQ ID NO: 1496257 - DNA, 25 bp, Homo sapien
tctttctgcattgctcgaaatgcca

SEQ ID NO: 1496258 - DNA, 25 bp, Homo sapien
tctgcattgctcgaaatgccatgaa

SEQ ID NO: 1496259 - DNA, 25 bp, Homo sapien
tctacactagtatgaaattccaaat

SEQ ID NO: 1496260 - DNA, 25 bp, Homo sapien
aaatagaacatgtatcgactgcagt

SEQ ID NO: 1496261 - DNA, 25 bp, Homo sapien
aaaaaactcattgtgcctacctcat

SEQ ID NO: 1496262 - DNA, 25 bp, Homo sapien
gtatctcccataatgaaacattgca

SEQ ID NO: 1496263 - DNA, 25 bp, Homo sapien
ttaacatctgttcatcatttctctc

SEQ ID NO: 1496264 - DNA, 25 bp, Homo sapien
acatctgttcatcatttctctccat

SEQ ID NO: 1496265 - DNA, 25 bp, Homo sapien
taacatctgttcatcatttctctcc

SEQ ID NO: 1496266 - DNA, 25 bp, Homo sapien
cattaacatctgttcatcatttctc

SEQ ID NO: 1496267 - DNA, 25 bp, Homo sapien
catcgatttccattttctgattcat

SEQ ID NO: 1496268 - DNA, 25 bp, Homo sapien
tctgattcattatctctctggctac

SEQ ID NO: 1496269 - DNA, 25 bp, Homo sapien
tcatcgatttccattttctgattca

SEQ ID NO: 1496270 - DNA, 25 bp, Homo sapien
gattcattatctctctggctacttt

SEQ ID NO: 1496271 - DNA, 25 bp, Homo sapien
ctctctctgctgcatcttgtgttta

SEQ ID NO: 1496272 - DNA, 25 bp, Homo sapien
gctgcatcttgtgtttatccgagaa

SEQ ID NO: 1496273 - DNA, 25 bp, Homo sapien
tctctctgctgcatcttgtgtttat

SEQ ID NO: 1496274 - DNA, 25 bp, Homo sapien
tctgctgcatcttgtgtttatccga

SEQ ID NO: 1496275 - DNA, 25 bp, Homo sapien
tttccaggagaggagtagtctccca

SEQ ID NO: 1496276 - DNA, 25 bp, Homo sapien
cagagtgagggctatcccttgtgaa

SEQ ID NO: 1496277 - DNA, 25 bp, Homo sapien
aaattcagaagcttccatagggata

SEQ ID NO: 1496278 - DNA, 25 bp, Homo sapien
ttgtgaacagaagaccaggaaaagc

SEQ ID NO: 1496279 - DNA, 25 bp, Homo sapien
gctccaatcgtgtgatctttctctt

SEQ ID NO: 1496280 - DNA, 25 bp, Homo sapien
ccaatcgtgtgatctttctcttgtc

SEQ ID NO: 1496281 - DNA, 25 bp, Homo sapien
tggatgatttcctgtcttcattatt

SEQ ID NO: 1496282 - DNA, 25 bp, Homo sapien
tttctttgctccaatcgtgtgatct

SEQ ID NO: 1496283 - DNA, 25 bp, Homo sapien
cacatccccaaacaacaggcccaaa

SEQ ID NO: 1496284 - DNA, 25 bp, Homo sapien
catccccaaacaacaggcccaaatc

SEQ ID NO: 1496285 - DNA, 25 bp, Homo sapien
tttcacatccccaaacaacaggccc

SEQ ID NO: 1496286 - DNA, 25 bp, Homo sapien
ctatttcacatccccaaacaacagg

SEQ ID NO: 1496287 - DNA, 25 bp, Homo sapien
acatggcattcatggtgatcacacc

SEQ ID NO: 1496288 - DNA, 25 bp, Homo sapien
aagaggagcaactttggagaggtca

SEQ ID NO: 1496289 - DNA, 25 bp, Homo sapien
cagcccactaaggaggacatccaag

SEQ ID NO: 1496290 - DNA, 25 bp, Homo sapien
agaggagcaactttggagaggtcat

SEQ ID NO: 1496291 - DNA, 25 bp, Homo sapien
cctgaagatgcctggccattcattc

SEQ ID NO: 1496292 - DNA, 25 bp, Homo sapien
gaggccagaacgagtcagtctccat

SEQ ID NO: 1496293 - DNA, 25 bp, Homo sapien
ccttgtacaaagcttccaacccaca

SEQ ID NO: 1496294 - DNA, 25 bp, Homo sapien
tgctgcttgctgtagacgcatgact

SEQ ID NO: 1496295 - DNA, 25 bp, Homo sapien
cataagatagactgaacgttggttc

SEQ ID NO: 1496296 - DNA, 25 bp, Homo sapien
ggttgtaattagagccaagcaggcg

SEQ ID NO: 1496297 - DNA, 25 bp, Homo sapien
gataacttgcccaatagcactgatc

SEQ ID NO: 1496298 - DNA, 25 bp, Homo sapien
ccgagagagtgataccttggtgatg

SEQ ID NO: 1496299 - DNA, 25 bp, Homo sapien
ggccctctgttccaagcagccgttg

SEQ ID NO: 1496300 - DNA, 25 bp, Homo sapien
ctttgggccctctgttccaagcagc

SEQ ID NO: 1496301 - DNA, 25 bp, Homo sapien
gggccctctgttccaagcagccgtt

SEQ ID NO: 1496302 - DNA, 25 bp, Homo sapien
ttgggccctctgttccaagcagccg

SEQ ID NO: 1496303 - DNA, 25 bp, Homo sapien
atttgaacctctaaactctctcatc

SEQ ID NO: 1496304 - DNA, 25 bp, Homo sapien
tcccaagcacagcagtaattcatca

SEQ ID NO: 1496305 - DNA, 25 bp, Homo sapien
tctcatctcccaagcacagcagtaa

SEQ ID NO: 1496306 - DNA, 25 bp, Homo sapien
ttcatttgaacctctaaactctctc

SEQ ID NO: 1496307 - DNA, 25 bp, Homo sapien
acagatgatgctctctttcatgaac

SEQ ID NO: 1496308 - DNA, 25 bp, Homo sapien
tgctctctttcatgaacttcgtttc

SEQ ID NO: 1496309 - DNA, 25 bp, Homo sapien
gatgatgctctctttcatgaacttc

SEQ ID NO: 1496310 - DNA, 25 bp, Homo sapien
tgatgctctctttcatgaacttcgt

SEQ ID NO: 1496311 - DNA, 25 bp, Homo sapien
tcataaataaatgcagactgccgct

SEQ ID NO: 1496312 - DNA, 25 bp, Homo sapien
caatttgggtggctgctagatgagt

SEQ ID NO: 1496313 - DNA, 25 bp, Homo sapien
cataaataaatgcagactgccgctt

SEQ ID NO: 1496314 - DNA, 25 bp, Homo sapien
ctgcaatttgggtggctgctagatg

SEQ ID NO: 1496315 - DNA, 25 bp, Homo sapien
cattgatctaacatacttctactca

SEQ ID NO: 1496316 - DNA, 25 bp, Homo sapien
caggtccttaagattctgtcccaaa

SEQ ID NO: 1496317 - DNA, 25 bp, Homo sapien
ctcattttacaaatcagcaggtcct

SEQ ID NO: 1496318 - DNA, 25 bp, Homo sapien
aatcagcaggtccttaagattctgt

SEQ ID NO: 1496319 - DNA, 25 bp, Homo sapien
tgctcttgacaaattgagggatgcg

SEQ ID NO: 1496320 - DNA, 25 bp, Homo sapien
tctgttgctcttgacaaattgaggg

SEQ ID NO: 1496321 - DNA, 25 bp, Homo sapien
gacaaattgagggatgcgtcagcat

SEQ ID NO: 1496322 - DNA, 25 bp, Homo sapien
ctcttgacaaattgagggatgcgtc

SEQ ID NO: 1496323 - DNA, 25 bp, Homo sapien
ccccttgtctccaaatgcagccttg

SEQ ID NO: 1496324 - DNA, 25 bp, Homo sapien
tatgccaaacgctaacttcaaggtc

SEQ ID NO: 1496325 - DNA, 25 bp, Homo sapien
agaccacctgcatatgccaaacgct

SEQ ID NO: 1496326 - DNA, 25 bp, Homo sapien
cctgcatatgccaaacgctaacttc

SEQ ID NO: 1496327 - DNA, 25 bp, Homo sapien
gttttgtagaattccttccagctcc

SEQ ID NO: 1496328 - DNA, 25 bp, Homo sapien
tttcaagaggaagagtctatggttt

SEQ ID NO: 1496329 - DNA, 25 bp, Homo sapien
tttgtagaattccttccagctccat

SEQ ID NO: 1496330 - DNA, 25 bp, Homo sapien
tcaagaggaagagtctatggttttg

SEQ ID NO: 1496331 - DNA, 25 bp, Homo sapien
tcccgataaacgtctttataatctc

SEQ ID NO: 1496332 - DNA, 25 bp, Homo sapien
ggagcggacagttaatttattggaa

SEQ ID NO: 1496333 - DNA, 25 bp, Homo sapien
cagctgattcggattggagcggaca

SEQ ID NO: 1496334 - DNA, 25 bp, Homo sapien
ggaatgaacacatgtcagcagcact

SEQ ID NO: 1496335 - DNA, 25 bp, Homo sapien
acagcaaggtagcttctttcaacca

SEQ ID NO: 1496336 - DNA, 25 bp, Homo sapien
cctgttgctgcaaggtgttgaagca

SEQ ID NO: 1496337 - DNA, 25 bp, Homo sapien
gaagcactttaccaagaataccatt

SEQ ID NO: 1496338 - DNA, 25 bp, Homo sapien
caagagctggttggatgttcataga

SEQ ID NO: 1496339 - DNA, 25 bp, Homo sapien
tagattttatccctgttgctgcaag

SEQ ID NO: 1496340 - DNA, 25 bp, Homo sapien
tttaatagaatgagcattcaccttg

SEQ ID NO: 1496341 - DNA, 25 bp, Homo sapien
aaagtaatttaatagaatgagcatt

SEQ ID NO: 1496342 - DNA, 25 bp, Homo sapien
agctttgacaccttggatttccatg

SEQ ID NO: 1496343 - DNA, 25 bp, Homo sapien
gagctttgacaccttggatttccat

SEQ ID NO: 1496344 - DNA, 25 bp, Homo sapien
aacgttcagcggcagacacagggca

SEQ ID NO: 1496345 - DNA, 25 bp, Homo sapien
tgtcatttaggaagagtgattccac

SEQ ID NO: 1496346 - DNA, 25 bp, Homo sapien
gataccactaaaagaacgttcagcg

SEQ ID NO: 1496347 - DNA, 25 bp, Homo sapien
ttcctctgtcctcggataccactaa

SEQ ID NO: 1496348 - DNA, 25 bp, Homo sapien
ttaaaacccttgttgtgcctgcatc

SEQ ID NO: 1496349 - DNA, 25 bp, Homo sapien
gaccatccgtgtaaatacttagaac

SEQ ID NO: 1496350 - DNA, 25 bp, Homo sapien
aatgaccatccgtgtaaatacttag

SEQ ID NO: 1496351 - DNA, 25 bp, Homo sapien
ttctctaaaatgaccatccgtgtaa

SEQ ID NO: 1496352 - DNA, 25 bp, Homo sapien
taaaatgaccatccgtgtaaatact

SEQ ID NO: 1496353 - DNA, 25 bp, Homo sapien
ccagctgcacagttgaggaggctct

SEQ ID NO: 1496354 - DNA, 25 bp, Homo sapien
caagccctgtttggtgaagctcctc

SEQ ID NO: 1496355 - DNA, 25 bp, Homo sapien
caggtgacactgtctgaaacggagt

SEQ ID NO: 1496356 - DNA, 25 bp, Homo sapien
cactgtgccttcttgcgtcactgtg

SEQ ID NO: 1496357 - DNA, 25 bp, Homo sapien
cgcgtcaggcttgtgacatttgaat

SEQ ID NO: 1496358 - DNA, 25 bp, Homo sapien
tgcaagcaatgtatgaccccacctg

SEQ ID NO: 1496359 - DNA, 25 bp, Homo sapien
catccatgttggtttcgtctgtctg

SEQ ID NO: 1496360 - DNA, 25 bp, Homo sapien
caatatgtacagtaacgcgtcaggc

SEQ ID NO: 1496361 - DNA, 25 bp, Homo sapien
tttagaaatgcgtacaagtcacccc

SEQ ID NO: 1496362 - DNA, 25 bp, Homo sapien
catgttcctcggctccattgtgggt

SEQ ID NO: 1496363 - DNA, 25 bp, Homo sapien
ccataaaaattgtccagctgcctgg

SEQ ID NO: 1496364 - DNA, 25 bp, Homo sapien
tctccgctaaagtggacattcccca

SEQ ID NO: 1496365 - DNA, 25 bp, Homo sapien
gattcaagaacagtcctgtgactgc

SEQ ID NO: 1496366 - DNA, 25 bp, Homo sapien
tacagaaagtacaattgatcaaacg

SEQ ID NO: 1496367 - DNA, 25 bp, Homo sapien
caattgatcaaacgttggctgtagg

SEQ ID NO: 1496368 - DNA, 25 bp, Homo sapien
caaacgttggctgtagggattcaag

SEQ ID NO: 1496369 - DNA, 25 bp, Homo sapien
caaaggtggatattccacagttcac

SEQ ID NO: 1496370 - DNA, 25 bp, Homo sapien
ctttgcaaaggtggatattccacag

SEQ ID NO: 1496371 - DNA, 25 bp, Homo sapien
tgcaaaggtggatattccacagttc

SEQ ID NO: 1496372 - DNA, 25 bp, Homo sapien
aggtggatattccacagttcacttc

SEQ ID NO: 1496373 - DNA, 25 bp, Homo sapien
ttccgcagattgatgcctcgtctta

SEQ ID NO: 1496374 - DNA, 25 bp, Homo sapien
ttattgctctttccgcagattgatg

SEQ ID NO: 1496375 - DNA, 25 bp, Homo sapien
gatgcctcgtcttatcctctgtagt

SEQ ID NO: 1496376 - DNA, 25 bp, Homo sapien
gattgatgcctcgtcttatcctctg

SEQ ID NO: 1496377 - DNA, 25 bp, Homo sapien
tcactctggcgcactgaagaagttt

SEQ ID NO: 1496378 - DNA, 25 bp, Homo sapien
gtttttaaccagctcctcaacgcag

SEQ ID NO: 1496379 - DNA, 25 bp, Homo sapien
actctctaaaggagccagcattagg

SEQ ID NO: 1496380 - DNA, 25 bp, Homo sapien
tcaacgcagctgagttttccgtggg

SEQ ID NO: 1496381 - DNA, 25 bp, Homo sapien
aacttttgccagtagcccttgactc

SEQ ID NO: 1496382 - DNA, 25 bp, Homo sapien
agtagcccttgactcttgacccctg

SEQ ID NO: 1496383 - DNA, 25 bp, Homo sapien
cttaacttttgccagtagcccttga

SEQ ID NO: 1496384 - DNA, 25 bp, Homo sapien
ctcttgacccctgatctgaacactg

SEQ ID NO: 1496385 - DNA, 25 bp, Homo sapien
tcttgaccgttgagttaacccataa

SEQ ID NO: 1496386 - DNA, 25 bp, Homo sapien
gcttcttgaccgttgagttaaccca

SEQ ID NO: 1496387 - DNA, 25 bp, Homo sapien
cattgcttcttgaccgttgagttaa

SEQ ID NO: 1496388 - DNA, 25 bp, Homo sapien
accattgcttcttgaccgttgagtt

SEQ ID NO: 1496389 - DNA, 25 bp, Homo sapien
ttgatgtggactcttatgccctatt

SEQ ID NO: 1496390 - DNA, 25 bp, Homo sapien
ttatgccctattcatttgtgttttg

SEQ ID NO: 1496391 - DNA, 25 bp, Homo sapien
ggtatcttctaattgatgtggactc

SEQ ID NO: 1496392 - DNA, 25 bp, Homo sapien
taatttgggtatcttctaattgatg

SEQ ID NO: 1496393 - DNA, 25 bp, Homo sapien
taagttcactatcagtgcttcctga

SEQ ID NO: 1496394 - DNA, 25 bp, Homo sapien
tactgctatacttgtctacttgcag

SEQ ID NO: 1496395 - DNA, 25 bp, Homo sapien
tcctgagcatggtttctcgtatggg

SEQ ID NO: 1496396 - DNA, 25 bp, Homo sapien
cgtatggggtactcactgacctgtc

SEQ ID NO: 1496397 - DNA, 25 bp, Homo sapien
ccaataatgctgtggtgaaacccag

SEQ ID NO: 1496398 - DNA, 25 bp, Homo sapien
ggaaaaagaggccttcaaggctgca

SEQ ID NO: 1496399 - DNA, 25 bp, Homo sapien
tttgctgcttgtatgaacacgatgc

SEQ ID NO: 1496400 - DNA, 25 bp, Homo sapien
gaaacccaggccaaatattccaaca

SEQ ID NO: 1496401 - DNA, 25 bp, Homo sapien
gggcttggtatcacaggaccagcat

SEQ ID NO: 1496402 - DNA, 25 bp, Homo sapien
gcttaaaggaaagggagccagtctg

SEQ ID NO: 1496403 - DNA, 25 bp, Homo sapien
tcccgtgcacatcatcccggcatgg

SEQ ID NO: 1496404 - DNA, 25 bp, Homo sapien
atattacaggaagtaacctttcctg

SEQ ID NO: 1496405 - DNA, 25 bp, Homo sapien
cttgaaatttagtagccagtctgcc

SEQ ID NO: 1496406 - DNA, 25 bp, Homo sapien
gatctgagttagagaactctcctgg

SEQ ID NO: 1496407 - DNA, 25 bp, Homo sapien
catggagttaggcacagatgggatc

SEQ ID NO: 1496408 - DNA, 25 bp, Homo sapien
actgagactcagtggacagaattca

SEQ ID NO: 1496409 - DNA, 25 bp, Homo sapien
tggagctggtgtgaataagaaggga

SEQ ID NO: 1496410 - DNA, 25 bp, Homo sapien
cactgatgactgaaggtttcttgga

SEQ ID NO: 1496411 - DNA, 25 bp, Homo sapien
cttggagctggtgtgaataagaagg

SEQ ID NO: 1496412 - DNA, 25 bp, Homo sapien
aggggtgatgattcacactgatgac

SEQ ID NO: 1496413 - DNA, 25 bp, Homo sapien
gacttgatccttctattaggagctg

SEQ ID NO: 1496414 - DNA, 25 bp, Homo sapien
tgtcttgggatcagttgtgacttga

SEQ ID NO: 1496415 - DNA, 25 bp, Homo sapien
gaattgtcttgggatcagttgtgac

SEQ ID NO: 1496416 - DNA, 25 bp, Homo sapien
gatcagttgtgacttgatccttcta

SEQ ID NO: 1496417 - DNA, 25 bp, Homo sapien
cagtgttagcaatatgcatggtaca

SEQ ID NO: 1496418 - DNA, 25 bp, Homo sapien
cctgctcagggaacaagactgactt

SEQ ID NO: 1496419 - DNA, 25 bp, Homo sapien
gagggttctttctcggagcacctgc

SEQ ID NO: 1496420 - DNA, 25 bp, Homo sapien
gactgactttaaaccagtgttagca

SEQ ID NO: 1496421 - DNA, 25 bp, Homo sapien
tcagaaatgaggatggaattagagg

SEQ ID NO: 1496422 - DNA, 25 bp, Homo sapien
cagaaatgaggatggaattagaggt

SEQ ID NO: 1496423 - DNA, 25 bp, Homo sapien
agaaatgaggatggaattagaggtg

SEQ ID NO: 1496424 - DNA, 25 bp, Homo sapien
ggaaactgcaagcatcgttgtcagc

SEQ ID NO: 1496425 - DNA, 25 bp, Homo sapien
tggaaactgcaagcatcgttgtcag

SEQ ID NO: 1496426 - DNA, 25 bp, Homo sapien
tgaccaaagagcacttctttctatg

SEQ ID NO: 1496427 - DNA, 25 bp, Homo sapien
gggcacagtccctttctagatgacc

SEQ ID NO: 1496428 - DNA, 25 bp, Homo sapien
catcaccatcgtagctgacagggcc

SEQ ID NO: 1496429 - DNA, 25 bp, Homo sapien
tctttctatgtggttcacatttggc

SEQ ID NO: 1496430 - DNA, 25 bp, Homo sapien
gctgaacctcttctgtgatcctcac

SEQ ID NO: 1496431 - DNA, 25 bp, Homo sapien
ttcagctgaacctcttctgtgatcc

SEQ ID NO: 1496432 - DNA, 25 bp, Homo sapien
cacttcagctgaacctcttctgtga

SEQ ID NO: 1496433 - DNA, 25 bp, Homo sapien
agctgaacctcttctgtgatcctca

SEQ ID NO: 1496434 - DNA, 25 bp, Homo sapien
catggaagactaaaaactgtcccag

SEQ ID NO: 1496435 - DNA, 25 bp, Homo sapien
atggaagactaaaaactgtcccagg

SEQ ID NO: 1496436 - DNA, 25 bp, Homo sapien
gacatggaagactaaaaactgtccc

SEQ ID NO: 1496437 - DNA, 25 bp, Homo sapien
tgacatggaagactaaaaactgtcc

SEQ ID NO: 1496438 - DNA, 25 bp, Homo sapien
tattcatggttagcagtatatccca

SEQ ID NO: 1496439 - DNA, 25 bp, Homo sapien
agtatatcccacttgcttcactttg

SEQ ID NO: 1496440 - DNA, 25 bp, Homo sapien
gatacatttggaattgagtctcaaa

SEQ ID NO: 1496441 - DNA, 25 bp, Homo sapien
tctccatcacattggaataactgga

SEQ ID NO: 1496442 - DNA, 25 bp, Homo sapien
tcaccccacggtaccatgaagagat

SEQ ID NO: 1496443 - DNA, 25 bp, Homo sapien
cccctggcggtggtaggacctatat

SEQ ID NO: 1496444 - DNA, 25 bp, Homo sapien
tctgattcacagatgctgccttgac

SEQ ID NO: 1496445 - DNA, 25 bp, Homo sapien
aacaagtcaggtgttctccagaaga

SEQ ID NO: 1496446 - DNA, 25 bp, Homo sapien
agacttggcagacagcgcagcttca

SEQ ID NO: 1496447 - DNA, 25 bp, Homo sapien
tgtgtacacgccatttgaggatgca

SEQ ID NO: 1496448 - DNA, 25 bp, Homo sapien
ccagatttccgttttcacagaccaa

SEQ ID NO: 1496449 - DNA, 25 bp, Homo sapien
cccgggttattactctgtgtacacg

SEQ ID NO: 1496450 - DNA, 25 bp, Homo sapien
tgctctgttgatccattgggagaag

SEQ ID NO: 1496451 - DNA, 25 bp, Homo sapien
ctgagacagctaagtaggtgacaac

SEQ ID NO: 1496452 - DNA, 25 bp, Homo sapien
ttgatccattgggagaagtacagta

SEQ ID NO: 1496453 - DNA, 25 bp, Homo sapien
ggtgacaacctgaactacggttgct

SEQ ID NO: 1496454 - DNA, 25 bp, Homo sapien
aggtaaggcagtcgctaccacaggg

SEQ ID NO: 1496455 - DNA, 25 bp, Homo sapien
ggcacaggtttcgaagcagttcagg

SEQ ID NO: 1496456 - DNA, 25 bp, Homo sapien
caggtttcgaagcagttcaggagga

SEQ ID NO: 1496457 - DNA, 25 bp, Homo sapien
ctaggcaggtaaggcagtcgctacc

SEQ ID NO: 1496458 - DNA, 25 bp, Homo sapien
cttgtcattagtcgtttctgtgacc

SEQ ID NO: 1496459 - DNA, 25 bp, Homo sapien
cttcttgtcattagtcgtttctgtg

SEQ ID NO: 1496460 - DNA, 25 bp, Homo sapien
tcttgtcattagtcgtttctgtgac

SEQ ID NO: 1496461 - DNA, 25 bp, Homo sapien
tgtcattagtcgtttctgtgaccat

SEQ ID NO: 1496462 - DNA, 25 bp, Homo sapien
gctgtgttaactccagtgcaccttc

SEQ ID NO: 1496463 - DNA, 25 bp, Homo sapien
ttaactccagtgcaccttcctgatg

SEQ ID NO: 1496464 - DNA, 25 bp, Homo sapien
ccagtgtagctgtgttaactccagt

SEQ ID NO: 1496465 - DNA, 25 bp, Homo sapien
accttgtccagtgtagctgtgttaa

SEQ ID NO: 1496466 - DNA, 25 bp, Homo sapien
ctggcagtgattgacctactcggta

SEQ ID NO: 1496467 - DNA, 25 bp, Homo sapien
gcagtgattgacctactcggtagcg

SEQ ID NO: 1496468 - DNA, 25 bp, Homo sapien
gtgattgacctactcggtagcgagt

SEQ ID NO: 1496469 - DNA, 25 bp, Homo sapien
gattgacctactcggtagcgagttg

SEQ ID NO: 1496470 - DNA, 25 bp, Homo sapien
gatctggggtgaattaatacagctg

SEQ ID NO: 1496471 - DNA, 25 bp, Homo sapien
tgtgtgatctggggtgaattaatac

SEQ ID NO: 1496472 - DNA, 25 bp, Homo sapien
tgtgatctggggtgaattaatacag

SEQ ID NO: 1496473 - DNA, 25 bp, Homo sapien
tgatctggggtgaattaatacagct

SEQ ID NO: 1496474 - DNA, 25 bp, Homo sapien
gatgtcattcaactgacagtcatgg

SEQ ID NO: 1496475 - DNA, 25 bp, Homo sapien
cattcaactgacagtcatggactcc

SEQ ID NO: 1496476 - DNA, 25 bp, Homo sapien
ccaaactctatgtcacctttatgag

SEQ ID NO: 1496477 - DNA, 25 bp, Homo sapien
tatgagtaggcgagaatggattttt

SEQ ID NO: 1496478 - DNA, 25 bp, Homo sapien
taactccatatacattgtccgtgct

SEQ ID NO: 1496479 - DNA, 25 bp, Homo sapien
catctcagggactcctgatctttcc

SEQ ID NO: 1496480 - DNA, 25 bp, Homo sapien
gaccttccatgcaggaggcttgcag

SEQ ID NO: 1496481 - DNA, 25 bp, Homo sapien
cactttctgtaactccagtctgatc

SEQ ID NO: 1496482 - DNA, 25 bp, Homo sapien
gctaatccagttaccgtcccagtat

SEQ ID NO: 1496483 - DNA, 25 bp, Homo sapien
tcaggccactggatctgtttggttc

SEQ ID NO: 1496484 - DNA, 25 bp, Homo sapien
tctaaagaggagataggccaaggca

SEQ ID NO: 1496485 - DNA, 25 bp, Homo sapien
gaattatgataacagtttacgcagc

SEQ ID NO: 1496486 - DNA, 25 bp, Homo sapien
taaagactgacatctgtgttgtgtt

SEQ ID NO: 1496487 - DNA, 25 bp, Homo sapien
tttaaagactgacatctgtgttgtg

SEQ ID NO: 1496488 - DNA, 25 bp, Homo sapien
aagactgacatctgtgttgtgttca

SEQ ID NO: 1496489 - DNA, 25 bp, Homo sapien
ctttaaagactgacatctgtgttgt

SEQ ID NO: 1496490 - DNA, 25 bp, Homo sapien
agggtttcagatccccattggtgga

SEQ ID NO: 1496491 - DNA, 25 bp, Homo sapien
cacctcagggtggacatttagatat

SEQ ID NO: 1496492 - DNA, 25 bp, Homo sapien
caaaagcatactcattcccaagggt

SEQ ID NO: 1496493 - DNA, 25 bp, Homo sapien
tcctctgagggtgctgcataaaaca

SEQ ID NO: 1496494 - DNA, 25 bp, Homo sapien
gcagttctttgtcctatcattctag

SEQ ID NO: 1496495 - DNA, 25 bp, Homo sapien
gattccctggaaagttgacataacc

SEQ ID NO: 1496496 - DNA, 25 bp, Homo sapien
ttgctagatgtttgcaggtttttgc

SEQ ID NO: 1496497 - DNA, 25 bp, Homo sapien
tctagccttccacttgtagggattc

SEQ ID NO: 1496498 - DNA, 25 bp, Homo sapien
ggagatattactataattccacata

SEQ ID NO: 1496499 - DNA, 25 bp, Homo sapien
tggagatattactataattccacat

SEQ ID NO: 1496500 - DNA, 25 bp, Homo sapien
tagattggctttgtacctgtgagca

SEQ ID NO: 1496501 - DNA, 25 bp, Homo sapien
ctctgagcgtctagacagcagcctg

SEQ ID NO: 1496502 - DNA, 25 bp, Homo sapien
gcaaagtttctgactgtgccataca

SEQ ID NO: 1496503 - DNA, 25 bp, Homo sapien
ctcttgtggataaggagtgagggca

SEQ ID NO: 1496504 - DNA, 25 bp, Homo sapien
cacttctaatgcaaaaccttgagtc

SEQ ID NO: 1496505 - DNA, 25 bp, Homo sapien
ctgtcacttctaatgcaaaaccttg

SEQ ID NO: 1496506 - DNA, 25 bp, Homo sapien
tgtcacttctaatgcaaaaccttga

SEQ ID NO: 1496507 - DNA, 25 bp, Homo sapien
ttctaatgcaaaaccttgagtcctc

SEQ ID NO: 1496508 - DNA, 25 bp, Homo sapien
cagccaatccaagggctttatattt

SEQ ID NO: 1496509 - DNA, 25 bp, Homo sapien
gtcttgaaggggacagactcctccc

SEQ ID NO: 1496510 - DNA, 25 bp, Homo sapien
ggagtggagatgaggaaaagtcttg

SEQ ID NO: 1496511 - DNA, 25 bp, Homo sapien
tcatcatatatacatcagccaatcc

SEQ ID NO: 1496512 - DNA, 25 bp, Homo sapien
gaagctcagtttttcccaccggatg

SEQ ID NO: 1496513 - DNA, 25 bp, Homo sapien
acaacaatcaccagccaagccagga

SEQ ID NO: 1496514 - DNA, 25 bp, Homo sapien
gtctgtttactgcacgtttccctga

SEQ ID NO: 1496515 - DNA, 25 bp, Homo sapien
ccggatgctgaatgcacaacaatca

SEQ ID NO: 1496516 - DNA, 25 bp, Homo sapien
ttcccatgctaatgtgagacacaga

SEQ ID NO: 1496517 - DNA, 25 bp, Homo sapien
aagcctgttgtctatatgctggatc

SEQ ID NO: 1496518 - DNA, 25 bp, Homo sapien
gatagttgcctttgattcctgaggt

SEQ ID NO: 1496519 - DNA, 25 bp, Homo sapien
gacacagaggtttttatgagaagcc

SEQ ID NO: 1496520 - DNA, 25 bp, Homo sapien
aaagtattccataactggcatttgg

SEQ ID NO: 1496521 - DNA, 25 bp, Homo sapien
gagaaaagtattccataactggcat

SEQ ID NO: 1496522 - DNA, 25 bp, Homo sapien
cagagaaaagtattccataactggc

SEQ ID NO: 1496523 - DNA, 25 bp, Homo sapien
gtattccataactggcatttggagg

SEQ ID NO: 1496524 - DNA, 25 bp, Homo sapien
tgtctgtaagggaattgtctacact

SEQ ID NO: 1496525 - DNA, 25 bp, Homo sapien
ttcttccttccaagttgaaagtcac

SEQ ID NO: 1496526 - DNA, 25 bp, Homo sapien
gtgagggcccacgctctgtgtctgt

SEQ ID NO: 1496527 - DNA, 25 bp, Homo sapien
gaaagtcactggactccttcaagtc

SEQ ID NO: 1496528 - DNA, 25 bp, Homo sapien
gggcgagagcccagactccgtatct

SEQ ID NO: 1496529 - DNA, 25 bp, Homo sapien
tccgtatctgtcctgagaaagttag

SEQ ID NO: 1496530 - DNA, 25 bp, Homo sapien
cagactccgtatctgtcctgagaaa

SEQ ID NO: 1496531 - DNA, 25 bp, Homo sapien
gagaaagttaggacataaggaccca

SEQ ID NO: 1496532 - DNA, 25 bp, Homo sapien
tccagctgctggacctgagagattg

SEQ ID NO: 1496533 - DNA, 25 bp, Homo sapien
gtggcaaatggtcgctactgagaaa

SEQ ID NO: 1496534 - DNA, 25 bp, Homo sapien
ttggaattgcctttgagagaagacc

SEQ ID NO: 1496535 - DNA, 25 bp, Homo sapien
gctgcaggtggcaaatggtcgctac

SEQ ID NO: 1496536 - DNA, 25 bp, Homo sapien
aaagatttgcaatgatctaggactc

SEQ ID NO: 1496537 - DNA, 25 bp, Homo sapien
aagatttgcaatgatctaggactca

SEQ ID NO: 1496538 - DNA, 25 bp, Homo sapien
taaagatttgcaatgatctaggact

SEQ ID NO: 1496539 - DNA, 25 bp, Homo sapien
gtaaagatttgcaatgatctaggac

SEQ ID NO: 1496540 - DNA, 25 bp, Homo sapien
tgtatgtaaacctctcagaaattca

SEQ ID NO: 1496541 - DNA, 25 bp, Homo sapien
tgtaaacctctcagaaattcaccct

SEQ ID NO: 1496542 - DNA, 25 bp, Homo sapien
cagaaattcacccttggctgcactg

SEQ ID NO: 1496543 - DNA, 25 bp, Homo sapien
aaattcacccttggctgcactgctc

SEQ ID NO: 1496544 - DNA, 25 bp, Homo sapien
gcctcttctgagcacgacactgtct

SEQ ID NO: 1496545 - DNA, 25 bp, Homo sapien
tatcaccagtataggagctcatgca

SEQ ID NO: 1496546 - DNA, 25 bp, Homo sapien
gaatcatagtctagacctcttgagg

SEQ ID NO: 1496547 - DNA, 25 bp, Homo sapien
ttaatgatgcgctccctgaaagacc

SEQ ID NO: 1496548 - DNA, 25 bp, Homo sapien
catccccagtgtaaatcactttcag

SEQ ID NO: 1496549 - DNA, 25 bp, Homo sapien
tcactttcagaaataacaggtcctg

SEQ ID NO: 1496550 - DNA, 25 bp, Homo sapien
tcctcatcttggatttgaatcccct

SEQ ID NO: 1496551 - DNA, 25 bp, Homo sapien
ttggatttgaatcccctctctttcc

SEQ ID NO: 1496552 - DNA, 25 bp, Homo sapien
tcaattcagtgttcccaaaattgtc

SEQ ID NO: 1496553 - DNA, 25 bp, Homo sapien
aaaattgtcccatcatctttcttgc

SEQ ID NO: 1496554 - DNA, 25 bp, Homo sapien
tcagtgttcccaaaattgtcccatc

SEQ ID NO: 1496555 - DNA, 25 bp, Homo sapien
tgttcccaaaattgtcccatcatct

SEQ ID NO: 1496556 - DNA, 25 bp, Homo sapien
ctggtttgcctgattgctgcatcca

SEQ ID NO: 1496557 - DNA, 25 bp, Homo sapien
ttactgaaaggaggtgctaaaccca

SEQ ID NO: 1496558 - DNA, 25 bp, Homo sapien
catccacaaaaccatgggttctggg

SEQ ID NO: 1496559 - DNA, 25 bp, Homo sapien
ttctcagaatgatagtcttcggtac

SEQ ID NO: 1496560 - DNA, 25 bp, Homo sapien
ctgtctcttccatgtagtggtcagt

SEQ ID NO: 1496561 - DNA, 25 bp, Homo sapien
cctcattggctagtgaagaagcagc

SEQ ID NO: 1496562 - DNA, 25 bp, Homo sapien
gagcctcagaggcatttggtcacac

SEQ ID NO: 1496563 - DNA, 25 bp, Homo sapien
atgtagtggtcagttgtggcctctc

SEQ ID NO: 1496564 - DNA, 25 bp, Homo sapien
ttctttgttaagtgaacggcagtgt

SEQ ID NO: 1496565 - DNA, 25 bp, Homo sapien
tgaaaggctccactgttctttgtta

SEQ ID NO: 1496566 - DNA, 25 bp, Homo sapien
aacggcagtgtaggaagcccttcct

SEQ ID NO: 1496567 - DNA, 25 bp, Homo sapien
atttggactttgaaaggctccactg

SEQ ID NO: 1496568 - DNA, 25 bp, Homo sapien
tgaatattgccaataatgcaacttg

SEQ ID NO: 1496569 - DNA, 25 bp, Homo sapien
taatgcaacttgttgagcgaatgca

SEQ ID NO: 1496570 - DNA, 25 bp, Homo sapien
ccaataatgcaacttgttgagcgaa

SEQ ID NO: 1496571 - DNA, 25 bp, Homo sapien
ttttgtaatactgttgaatattgcc

SEQ ID NO: 1496572 - DNA, 25 bp, Homo sapien
gtttgaatggacgcactgagccttt

SEQ ID NO: 1496573 - DNA, 25 bp, Homo sapien
ttgaatggacgcactgagccttttc

SEQ ID NO: 1496574 - DNA, 25 bp, Homo sapien
tttgaatggacgcactgagcctttt

SEQ ID NO: 1496575 - DNA, 25 bp, Homo sapien
ggtttgaatggacgcactgagcctt

SEQ ID NO: 1496576 - DNA, 25 bp, Homo sapien
gacgtcctccgcatcatacccctcc

SEQ ID NO: 1496577 - DNA, 25 bp, Homo sapien
ggaggacgtcctccgcatcataccc

SEQ ID NO: 1496578 - DNA, 25 bp, Homo sapien
tcctccgcatcatacccctcccctt

SEQ ID NO: 1496579 - DNA, 25 bp, Homo sapien
cggaggacgtcctccgcatcatacc

SEQ ID NO: 1496580 - DNA, 25 bp, Homo sapien
ctggctctttcgcccctccgagaac

SEQ ID NO: 1496581 - DNA, 25 bp, Homo sapien
gccgccagacacagcgccctttctt

SEQ ID NO: 1496582 - DNA, 25 bp, Homo sapien
tgggccgcacccgaagctttgcgcc

SEQ ID NO: 1496583 - DNA, 25 bp, Homo sapien
gcccgagcgcacgattccggcgcct

SEQ ID NO: 1496584 - DNA, 25 bp, Homo sapien
agagggaggtaggtgccgctcggct

SEQ ID NO: 1496585 - DNA, 25 bp, Homo sapien
tggttttccaagaggccggtcgcta

SEQ ID NO: 1496586 - DNA, 25 bp, Homo sapien
cgctcggctgcagatgatgcgtggg

SEQ ID NO: 1496587 - DNA, 25 bp, Homo sapien
gaggacactctcatccttcagtcag

SEQ ID NO: 1496588 - DNA, 25 bp, Homo sapien
cgcgctggcacccgcgtggcctgac

SEQ ID NO: 1496589 - DNA, 25 bp, Homo sapien
agcccgcgctggcacccgcgtggcc

SEQ ID NO: 1496590 - DNA, 25 bp, Homo sapien
cccgcgctggcacccgcgtggcctg

SEQ ID NO: 1496591 - DNA, 25 bp, Homo sapien
gcccgcgctggcacccgcgtggcct

SEQ ID NO: 1496592 - DNA, 25 bp, Homo sapien
tgtcccgggccgatttcatctcgtc

SEQ ID NO: 1496593 - DNA, 25 bp, Homo sapien
cagagagagagtgaacttcagtcct

SEQ ID NO: 1496594 - DNA, 25 bp, Homo sapien
ctgatggagaagatccgccaagcgc

SEQ ID NO: 1496595 - DNA, 25 bp, Homo sapien
gaggagtcggttccaataggcgcac

SEQ ID NO: 1496596 - DNA, 25 bp, Homo sapien
tgaactgcccgcttttccgaaggag

SEQ ID NO: 1496597 - DNA, 25 bp, Homo sapien
aaaagaactcttaacggccgatgca

SEQ ID NO: 1496598 - DNA, 25 bp, Homo sapien
gagaccccgcgtgaagatgaaatga

SEQ ID NO: 1496599 - DNA, 25 bp, Homo sapien
tattgttgtgaagactacctggccc

SEQ ID NO: 1496600 - DNA, 25 bp, Homo sapien
tgagccagctttccagggactgcat

SEQ ID NO: 1496601 - DNA, 25 bp, Homo sapien
tgtcacagttgtgagccagctttcc

SEQ ID NO: 1496602 - DNA, 25 bp, Homo sapien
gactgcagtgtcacagttgtgagcc

SEQ ID NO: 1496603 - DNA, 25 bp, Homo sapien
gttgtgagccagctttccagggact

SEQ ID NO: 1496604 - DNA, 25 bp, Homo sapien
tgcctgtccactcctctagagccac

SEQ ID NO: 1496605 - DNA, 25 bp, Homo sapien
ctgttgcctgtccactcctctagag

SEQ ID NO: 1496606 - DNA, 25 bp, Homo sapien
tgttgcctgtccactcctctagagc

SEQ ID NO: 1496607 - DNA, 25 bp, Homo sapien
gttgcctgtccactcctctagagcc

SEQ ID NO: 1496608 - DNA, 25 bp, Homo sapien
ttcttgagctggaagtgtggcccag

SEQ ID NO: 1496609 - DNA, 25 bp, Homo sapien
tgtggcccagggtgatgcctgaagc

SEQ ID NO: 1496610 - DNA, 25 bp, Homo sapien
aagccagtcaggagggtgctttcct

SEQ ID NO: 1496611 - DNA, 25 bp, Homo sapien
tgggagaggaagcctcttgtgtaac

SEQ ID NO: 1496612 - DNA, 25 bp, Homo sapien
atagatggtgaagcccttgatgcat

SEQ ID NO: 1496613 - DNA, 25 bp, Homo sapien
aggttggggccctgctattatagat

SEQ ID NO: 1496614 - DNA, 25 bp, Homo sapien
ggttggggccctgctattatagatg

SEQ ID NO: 1496615 - DNA, 25 bp, Homo sapien
attatagatggtgaagcccttgatg

SEQ ID NO: 1496616 - DNA, 25 bp, Homo sapien
catccccagctcctaataagttgac

SEQ ID NO: 1496617 - DNA, 25 bp, Homo sapien
atagctcagtttcttttaggcccat

SEQ ID NO: 1496618 - DNA, 25 bp, Homo sapien
tcctaataagttgaccacacctcct

SEQ ID NO: 1496619 - DNA, 25 bp, Homo sapien
ttttaggcccatgtcccgcttactc

SEQ ID NO: 1496620 - DNA, 25 bp, Homo sapien
aggttgattgtgatcaatgaagagc

SEQ ID NO: 1496621 - DNA, 25 bp, Homo sapien
gagctgttcatttgaacgaaccagg

SEQ ID NO: 1496622 - DNA, 25 bp, Homo sapien
tgctttgcaaggttctcctgcactc

SEQ ID NO: 1496623 - DNA, 25 bp, Homo sapien
cttcaaaggttgattgtgatcaatg

SEQ ID NO: 1496624 - DNA, 25 bp, Homo sapien
tacagcgatgagtttccacgtgtgc

SEQ ID NO: 1496625 - DNA, 25 bp, Homo sapien
ttacagcgatgagtttccacgtgtg

SEQ ID NO: 1496626 - DNA, 25 bp, Homo sapien
acagcgatgagtttccacgtgtgca

SEQ ID NO: 1496627 - DNA, 25 bp, Homo sapien
gtgctcatttcagaacgtcctgtgc

SEQ ID NO: 1496628 - DNA, 25 bp, Homo sapien
cattatcatctacagctacattcat

SEQ ID NO: 1496629 - DNA, 25 bp, Homo sapien
catctacagctacattcatcatcat

SEQ ID NO: 1496630 - DNA, 25 bp, Homo sapien
cgtcctgtgctcttaatgcatttct

SEQ ID NO: 1496631 - DNA, 25 bp, Homo sapien
gttgcaaaggcaaaattttgaatgc

SEQ ID NO: 1496632 - DNA, 25 bp, Homo sapien
ctggcgataacagttgcaaaggcaa

SEQ ID NO: 1496633 - DNA, 25 bp, Homo sapien
taacagttgcaaaggcaaaattttg

SEQ ID NO: 1496634 - DNA, 25 bp, Homo sapien
cgataacagttgcaaaggcaaaatt

SEQ ID NO: 1496635 - DNA, 25 bp, Homo sapien
tccatatgacggttgcattttcact

SEQ ID NO: 1496636 - DNA, 25 bp, Homo sapien
tatgtattgaaccaaatctcttcca

SEQ ID NO: 1496637 - DNA, 25 bp, Homo sapien
gagatgaaggatcctctgtagtttc

SEQ ID NO: 1496638 - DNA, 25 bp, Homo sapien
tcacttccaagccataagagggaga

SEQ ID NO: 1496639 - DNA, 25 bp, Homo sapien
tcttctatgtctgtaatgtggcgga

SEQ ID NO: 1496640 - DNA, 25 bp, Homo sapien
tgtggcggactctggctgaatacga

SEQ ID NO: 1496641 - DNA, 25 bp, Homo sapien
gaagcttcaaaaacaacgcaccagt

SEQ ID NO: 1496642 - DNA, 25 bp, Homo sapien
tgatagacccaattcaagatcaaag

SEQ ID NO: 1496643 - DNA, 25 bp, Homo sapien
tgaaaactccaattgcctctggaag

SEQ ID NO: 1496644 - DNA, 25 bp, Homo sapien
gatactgccgctttcttctccagga

SEQ ID NO: 1496645 - DNA, 25 bp, Homo sapien
taatattgtgcgtggaaagtccctt

SEQ ID NO: 1496646 - DNA, 25 bp, Homo sapien
agtaaagctggagccttcaacccca

SEQ ID NO: 1496647 - DNA, 25 bp, Homo sapien
cttggacctgagagttgtgtagcac

SEQ ID NO: 1496648 - DNA, 25 bp, Homo sapien
ttaaagttgttacttggacctgaga

SEQ ID NO: 1496649 - DNA, 25 bp, Homo sapien
acttggacctgagagttgtgtagca

SEQ ID NO: 1496650 - DNA, 25 bp, Homo sapien
tgttaaagttgttacttggacctga

SEQ ID NO: 1496651 - DNA, 25 bp, Homo sapien
ctggcaatgcagagagattcttcct

SEQ ID NO: 1496652 - DNA, 25 bp, Homo sapien
tgggaggcattcgtagacatgcaat

SEQ ID NO: 1496653 - DNA, 25 bp, Homo sapien
ttctggcaatgcagagagattcttc

SEQ ID NO: 1496654 - DNA, 25 bp, Homo sapien
tgtgtctgaaactctgtgctatctg

SEQ ID NO: 1496655 - DNA, 25 bp, Homo sapien
gaacccggttcttggacatgaccca

SEQ ID NO: 1496656 - DNA, 25 bp, Homo sapien
tcctctcgagtgtgtgaagcgtggc

SEQ ID NO: 1496657 - DNA, 25 bp, Homo sapien
tgcagcaacaaggtctcctctcgag

SEQ ID NO: 1496658 - DNA, 25 bp, Homo sapien
cacatggctccgttaactctcaaca

SEQ ID NO: 1496659 - DNA, 25 bp, Homo sapien
ggtaggggttctgctttggtctcac

SEQ ID NO: 1496660 - DNA, 25 bp, Homo sapien
gggtaggggttctgctttggtctca

SEQ ID NO: 1496661 - DNA, 25 bp, Homo sapien
cagaagattccataacaattgtcaa

SEQ ID NO: 1496662 - DNA, 25 bp, Homo sapien
tcctactttgacaactgtcttacag

SEQ ID NO: 1496663 - DNA, 25 bp, Homo sapien
cattgaaaatgccagagccccagaa

SEQ ID NO: 1496664 - DNA, 25 bp, Homo sapien
ctgaagccactgaacggatggaaac

SEQ ID NO: 1496665 - DNA, 25 bp, Homo sapien
tagtactaatgtcaagcatgtgcat

SEQ ID NO: 1496666 - DNA, 25 bp, Homo sapien
caacgtttactgagcttagtactaa

SEQ ID NO: 1496667 - DNA, 25 bp, Homo sapien
gagcttagtactaatgtcaagcatg

SEQ ID NO: 1496668 - DNA, 25 bp, Homo sapien
tttactgagcttagtactaatgtca

SEQ ID NO: 1496669 - DNA, 25 bp, Homo sapien
tcctttaaatacaccaatgatcaca

SEQ ID NO: 1496670 - DNA, 25 bp, Homo sapien
cttcttcctttaaatacaccaatga

SEQ ID NO: 1496671 - DNA, 25 bp, Homo sapien
tatccattgtgtactctgtttgcca

SEQ ID NO: 1496672 - DNA, 25 bp, Homo sapien
tggactttcttctccgtatcttctt

SEQ ID NO: 1496673 - DNA, 25 bp, Homo sapien
tcatttctgctgaactggactgtgc

SEQ ID NO: 1496674 - DNA, 25 bp, Homo sapien
gatacactctcttattcctcccatg

SEQ ID NO: 1496675 - DNA, 25 bp, Homo sapien
tgtaaggccctgtccgatacactct

SEQ ID NO: 1496676 - DNA, 25 bp, Homo sapien
ctcccatgtgccctaatcatagtct

SEQ ID NO: 1496677 - DNA, 25 bp, Homo sapien
ctgaaagcagtacgaattacatcat

SEQ ID NO: 1496678 - DNA, 25 bp, Homo sapien
agcagtacgaattacatcatgggtc

SEQ ID NO: 1496679 - DNA, 25 bp, Homo sapien
gaaagcagtacgaattacatcatgg

SEQ ID NO: 1496680 - DNA, 25 bp, Homo sapien
aaagcagtacgaattacatcatggg

SEQ ID NO: 1496681 - DNA, 25 bp, Homo sapien
aatggagcccagaaccagggaaatg

SEQ ID NO: 1496682 - DNA, 25 bp, Homo sapien
agcccagaaccagggaaatgggcag

SEQ ID NO: 1496683 - DNA, 25 bp, Homo sapien
ttagtgccggaactgattaaaaatg

SEQ ID NO: 1496684 - DNA, 25 bp, Homo sapien
tgattaaaaatggagcccagaacca

SEQ ID NO: 1496685 - DNA, 25 bp, Homo sapien
cgaaattgaaacacttcttctctta

SEQ ID NO: 1496686 - DNA, 25 bp, Homo sapien
aataaaacagctgtaattaatcaaa

SEQ ID NO: 1496687 - DNA, 25 bp, Homo sapien
attgctgaaactcataaactagcct

SEQ ID NO: 1496688 - DNA, 25 bp, Homo sapien
gaaaaactattgtaatcctgttcaa

SEQ ID NO: 1496689 - DNA, 25 bp, Homo sapien
cataaactagccttgtagaaaaact

SEQ ID NO: 1496690 - DNA, 25 bp, Homo sapien
tcaaggttttgtgcatagtgtaggg

SEQ ID NO: 1496691 - DNA, 25 bp, Homo sapien
ctctcactctcaaggttttgtgcat

SEQ ID NO: 1496692 - DNA, 25 bp, Homo sapien
cactctcaaggttttgtgcatagtg

SEQ ID NO: 1496693 - DNA, 25 bp, Homo sapien
ctctcaaggttttgtgcatagtgta

SEQ ID NO: 1496694 - DNA, 25 bp, Homo sapien
caataaaaattatacgatatccaaa

SEQ ID NO: 1496695 - DNA, 25 bp, Homo sapien
ggaggaagagcaattaaacaatggc

SEQ ID NO: 1496696 - DNA, 25 bp, Homo sapien
aaaggaggcttatgtttcatgacaa

SEQ ID NO: 1496697 - DNA, 25 bp, Homo sapien
gctagtgggccaaatctgtctggcc

SEQ ID NO: 1496698 - DNA, 25 bp, Homo sapien
gcggccaagataagggatctaccac

SEQ ID NO: 1496699 - DNA, 25 bp, Homo sapien
tgtgcggccaagataagggatctac

SEQ ID NO: 1496700 - DNA, 25 bp, Homo sapien
ctgatgtgcggccaagataagggat

SEQ ID NO: 1496701 - DNA, 25 bp, Homo sapien
gattctgatgtgcggccaagataag

SEQ ID NO: 1496702 - DNA, 25 bp, Homo sapien
aatggttcttagagcttggcagcac

SEQ ID NO: 1496703 - DNA, 25 bp, Homo sapien
tgcaggcttcttgacgatggttgct

SEQ ID NO: 1496704 - DNA, 25 bp, Homo sapien
tccaccacaagatgggcagatgaga

SEQ ID NO: 1496705 - DNA, 25 bp, Homo sapien
taaatatccgtgtagctccaccaca

SEQ ID NO: 1496706 - DNA, 25 bp, Homo sapien
gatttttcgatttggcatttcttgt

SEQ ID NO: 1496707 - DNA, 25 bp, Homo sapien
agatttttcgatttggcatttcttg

SEQ ID NO: 1496708 - DNA, 25 bp, Homo sapien
ctagatttttcgatttggcatttct

SEQ ID NO: 1496709 - DNA, 25 bp, Homo sapien
tagatttttcgatttggcatttctt

SEQ ID NO: 1496710 - DNA, 25 bp, Homo sapien
gaactgcttctgattaagtaatttg

SEQ ID NO: 1496711 - DNA, 25 bp, Homo sapien
tgaattcatttaggtagataccacc

SEQ ID NO: 1496712 - DNA, 25 bp, Homo sapien
tcaagtcccctggaagtagcacgtt

SEQ ID NO: 1496713 - DNA, 25 bp, Homo sapien
cacgttctggtcagagaactgcttc

SEQ ID NO: 1496714 - DNA, 25 bp, Homo sapien
gggcagagaaatggatccctagaca

SEQ ID NO: 1496715 - DNA, 25 bp, Homo sapien
aacaaatttatgcacgttgggagaa

SEQ ID NO: 1496716 - DNA, 25 bp, Homo sapien
tttatgcacgttgggagaaagtatt

SEQ ID NO: 1496717 - DNA, 25 bp, Homo sapien
atcaggggcagagaaatggatccct

SEQ ID NO: 1496718 - DNA, 25 bp, Homo sapien
gagttctctcgtatacccccaattg

SEQ ID NO: 1496719 - DNA, 25 bp, Homo sapien
cccccaattgaaaactctttgcagt

SEQ ID NO: 1496720 - DNA, 25 bp, Homo sapien
gaatctcccttgattttgctctgtg

SEQ ID NO: 1496721 - DNA, 25 bp, Homo sapien
tttgcagtctgcccaccggagctgt

SEQ ID NO: 1496722 - DNA, 25 bp, Homo sapien
gcctgcatccctctgatggacaggc

SEQ ID NO: 1496723 - DNA, 25 bp, Homo sapien
tgcatccctctgatggacaggcact

SEQ ID NO: 1496724 - DNA, 25 bp, Homo sapien
catccctctgatggacaggcactga

SEQ ID NO: 1496725 - DNA, 25 bp, Homo sapien
cctgcatccctctgatggacaggca

SEQ ID NO: 1496726 - DNA, 25 bp, Homo sapien
agtgtccctgagagcgttgataatc

SEQ ID NO: 1496727 - DNA, 25 bp, Homo sapien
tgataatctgcttgaatgtgagctc

SEQ ID NO: 1496728 - DNA, 25 bp, Homo sapien
ggcctccccggacttggcaggcagc

SEQ ID NO: 1496729 - DNA, 25 bp, Homo sapien
tgtgagctcaatgctgggacggcct

SEQ ID NO: 1496730 - DNA, 25 bp, Homo sapien
gattaatagcctgcacggatatggc

SEQ ID NO: 1496731 - DNA, 25 bp, Homo sapien
aacattgatgttctgcaagatgttc

SEQ ID NO: 1496732 - DNA, 25 bp, Homo sapien
gaaggacttgcacacccagttgatt

SEQ ID NO: 1496733 - DNA, 25 bp, Homo sapien
ccatctataaggatggtgtgcgtgt

SEQ ID NO: 1496734 - DNA, 25 bp, Homo sapien
tagactttagcaaatgtagtccatc

SEQ ID NO: 1496735 - DNA, 25 bp, Homo sapien
tggcatttggatagactttagcaaa

SEQ ID NO: 1496736 - DNA, 25 bp, Homo sapien
gctggcatttggatagactttagca

SEQ ID NO: 1496737 - DNA, 25 bp, Homo sapien
tttggatagactttagcaaatgtag

SEQ ID NO: 1496738 - DNA, 25 bp, Homo sapien
caccccacagctttaaaattgcctg

SEQ ID NO: 1496739 - DNA, 25 bp, Homo sapien
cagtcctctgttgtaacgttctttg

SEQ ID NO: 1496740 - DNA, 25 bp, Homo sapien
agctttaaaattgcctgttgctctc

SEQ ID NO: 1496741 - DNA, 25 bp, Homo sapien
ctctgttgtaacgttctttgcttgc

SEQ ID NO: 1496742 - DNA, 25 bp, Homo sapien
gcaaacagtgtttcgaggctcagtg

SEQ ID NO: 1496743 - DNA, 25 bp, Homo sapien
gacagcacgccactttggcaaaaca

SEQ ID NO: 1496744 - DNA, 25 bp, Homo sapien
agtaaatactcttctcgacagcacg

SEQ ID NO: 1496745 - DNA, 25 bp, Homo sapien
tgagcagataggagccgcaatgcaa

SEQ ID NO: 1496746 - DNA, 25 bp, Homo sapien
gcatctcctcaaagcagtttcctgt

SEQ ID NO: 1496747 - DNA, 25 bp, Homo sapien
gcagtttcctgtactttcacagaca

SEQ ID NO: 1496748 - DNA, 25 bp, Homo sapien
ctcaaagcagtttcctgtactttca

SEQ ID NO: 1496749 - DNA, 25 bp, Homo sapien
ccttttgcatctcctcaaagcagtt

SEQ ID NO: 1496750 - DNA, 25 bp, Homo sapien
gagatggctgattagttgaactgag

SEQ ID NO: 1496751 - DNA, 25 bp, Homo sapien
cttgcaatgagggttcttggagatg

SEQ ID NO: 1496752 - DNA, 25 bp, Homo sapien
ggttcttggagatggctgattagtt

SEQ ID NO: 1496753 - DNA, 25 bp, Homo sapien
agttgaactgagagtattcttaaag

SEQ ID NO: 1496754 - DNA, 25 bp, Homo sapien
cctcatctgcatcttgataggagag

SEQ ID NO: 1496755 - DNA, 25 bp, Homo sapien
ttttatagcatcagcgtcatcatag

SEQ ID NO: 1496756 - DNA, 25 bp, Homo sapien
ggagagttgactggcctgtttccca

SEQ ID NO: 1496757 - DNA, 25 bp, Homo sapien
cagttgctgacagcaaccaggcctt

SEQ ID NO: 1496758 - DNA, 25 bp, Homo sapien
tggccatgtcattggggaccaaccg

SEQ ID NO: 1496759 - DNA, 25 bp, Homo sapien
ccaaccgtgctcgacccaagaggaa

SEQ ID NO: 1496760 - DNA, 25 bp, Homo sapien
tgtgccagttctatcaccatccatg

SEQ ID NO: 1496761 - DNA, 25 bp, Homo sapien
tctatcaccatccatggccatgtca

SEQ ID NO: 1496762 - DNA, 25 bp, Homo sapien
atttgagagaccgttcctgaatgca

SEQ ID NO: 1496763 - DNA, 25 bp, Homo sapien
cacatgccacctttgcgcgtgcaat

SEQ ID NO: 1496764 - DNA, 25 bp, Homo sapien
cctttgcgcgtgcaatttgagagac

SEQ ID NO: 1496765 - DNA, 25 bp, Homo sapien
tttgagagaccgttcctgaatgcac

SEQ ID NO: 1496766 - DNA, 25 bp, Homo sapien
cgtaagtggatgagctccatgcaaa

SEQ ID NO: 1496767 - DNA, 25 bp, Homo sapien
gacaaggcttcaagcgtaagtggat

SEQ ID NO: 1496768 - DNA, 25 bp, Homo sapien
caagcgtaagtggatgagctccatg

SEQ ID NO: 1496769 - DNA, 25 bp, Homo sapien
gcttcaagcgtaagtggatgagctc

SEQ ID NO: 1496770 - DNA, 25 bp, Homo sapien
tacttaatcccgtcacctggtgtcc

SEQ ID NO: 1496771 - DNA, 25 bp, Homo sapien
ctggtgtccactccccatacccagc

SEQ ID NO: 1496772 - DNA, 25 bp, Homo sapien
aagccttacttaatcccgtcacctg

SEQ ID NO: 1496773 - DNA, 25 bp, Homo sapien
cttacttaatcccgtcacctggtgt

SEQ ID NO: 1496774 - DNA, 25 bp, Homo sapien
ccatgtgcacgatttcagcaaaaag

SEQ ID NO: 1496775 - DNA, 25 bp, Homo sapien
ccatgtgactgttgagagtggaagt

SEQ ID NO: 1496776 - DNA, 25 bp, Homo sapien
gaagtgttcctatcatccatgtgca

SEQ ID NO: 1496777 - DNA, 25 bp, Homo sapien
aaagcaggcccttccgtgaaccatt

SEQ ID NO: 1496778 - DNA, 25 bp, Homo sapien
cctttctcttctttatcgccaacct

SEQ ID NO: 1496779 - DNA, 25 bp, Homo sapien
ctttctcttctttatcgccaacctt

SEQ ID NO: 1496780 - DNA, 25 bp, Homo sapien
ctcctttctcttctttatcgccaac

SEQ ID NO: 1496781 - DNA, 25 bp, Homo sapien
tcctttctcttctttatcgccaacc

SEQ ID NO: 1496782 - DNA, 25 bp, Homo sapien
cactgccgcctctggggtgcatagg

SEQ ID NO: 1496783 - DNA, 25 bp, Homo sapien
tatctcatccacatgatggtcccca

SEQ ID NO: 1496784 - DNA, 25 bp, Homo sapien
ttctttcttcactgccgcctctggg

SEQ ID NO: 1496785 - DNA, 25 bp, Homo sapien
taggatccgagataagaatctccct

SEQ ID NO: 1496786 - DNA, 25 bp, Homo sapien
tataccttgtccgtatcccgtgatc

SEQ ID NO: 1496787 - DNA, 25 bp, Homo sapien
cttgaactccttccttctgatctca

SEQ ID NO: 1496788 - DNA, 25 bp, Homo sapien
gtgatctacaaatcttcccacttga

SEQ ID NO: 1496789 - DNA, 25 bp, Homo sapien
tgtccgtatcccgtgatctacaaat

SEQ ID NO: 1496790 - DNA, 25 bp, Homo sapien
cagggccagggactagttgtggttt

SEQ ID NO: 1496791 - DNA, 25 bp, Homo sapien
tcactctggccgaaggctgtgccac

SEQ ID NO: 1496792 - DNA, 25 bp, Homo sapien
atgtgcagcaattttatcactctgg

SEQ ID NO: 1496793 - DNA, 25 bp, Homo sapien
tgccacttggccagtaatcatagcc

SEQ ID NO: 1496794 - DNA, 25 bp, Homo sapien
gttggcagcatcgttgtaaacaaac

SEQ ID NO: 1496795 - DNA, 25 bp, Homo sapien
acagaattcatgagagtatgttgca

SEQ ID NO: 1496796 - DNA, 25 bp, Homo sapien
aaggccagtacttttgccaacagaa

SEQ ID NO: 1496797 - DNA, 25 bp, Homo sapien
gcagcatcgttgtaaacaaacacta

SEQ ID NO: 1496798 - DNA, 25 bp, Homo sapien
ttccgggtaggtgtcatagtttcta

SEQ ID NO: 1496799 - DNA, 25 bp, Homo sapien
tccgggtaggtgtcatagtttctat

SEQ ID NO: 1496800 - DNA, 25 bp, Homo sapien
catttggtatccagagagctaattc

SEQ ID NO: 1496801 - DNA, 25 bp, Homo sapien
gctctggttcgaattggctttccca

SEQ ID NO: 1496802 - DNA, 25 bp, Homo sapien
cctgcattcttgatcagtctttgac

SEQ ID NO: 1496803 - DNA, 25 bp, Homo sapien
gatcagtctttgacaacgaacactg

SEQ ID NO: 1496804 - DNA, 25 bp, Homo sapien
tgttccttgtttgtccatgaattac

SEQ ID NO: 1496805 - DNA, 25 bp, Homo sapien
ctgttccttgtttgtccatgaatta

SEQ ID NO: 1496806 - DNA, 25 bp, Homo sapien
gttccttgtttgtccatgaattact

SEQ ID NO: 1496807 - DNA, 25 bp, Homo sapien
tccttgtttgtccatgaattacttt

SEQ ID NO: 1496808 - DNA, 25 bp, Homo sapien
aatcatgtaaaagataacgtcgtgg

SEQ ID NO: 1496809 - DNA, 25 bp, Homo sapien
gaagatgctgtgtagcgattgcact

SEQ ID NO: 1496810 - DNA, 25 bp, Homo sapien
gataacgtcgtggaaagattcaggg

SEQ ID NO: 1496811 - DNA, 25 bp, Homo sapien
ttagttattcatggaaatcatgtaa

SEQ ID NO: 1496812 - DNA, 25 bp, Homo sapien
ataaaggggcttgccgacaaacact

SEQ ID NO: 1496813 - DNA, 25 bp, Homo sapien
aaggggcttgccgacaaacacttgc

SEQ ID NO: 1496814 - DNA, 25 bp, Homo sapien
aaaggggcttgccgacaaacacttg

SEQ ID NO: 1496815 - DNA, 25 bp, Homo sapien
gcttcctcagccgtaatttgatttc

SEQ ID NO: 1496816 - DNA, 25 bp, Homo sapien
acttcagccccaaataatcagtcat

SEQ ID NO: 1496817 - DNA, 25 bp, Homo sapien
cttactggccgggaaactttgatct

SEQ ID NO: 1496818 - DNA, 25 bp, Homo sapien
tgatttcctttaagcaataacttca

SEQ ID NO: 1496819 - DNA, 25 bp, Homo sapien
gggatcaaacagcaagtcttcgcgg

SEQ ID NO: 1496820 - DNA, 25 bp, Homo sapien
gatcaaacagcaagtcttcgcgggc

SEQ ID NO: 1496821 - DNA, 25 bp, Homo sapien
acagcaagtcttcgcgggctctgtc

SEQ ID NO: 1496822 - DNA, 25 bp, Homo sapien
tcaaacagcaagtcttcgcgggctc

SEQ ID NO: 1496823 - DNA, 25 bp, Homo sapien
attggatggatcactctttgtggcc

SEQ ID NO: 1496824 - DNA, 25 bp, Homo sapien
ttattggatggatcactctttgtgg

SEQ ID NO: 1496825 - DNA, 25 bp, Homo sapien
agttattggatggatcactctttgt

SEQ ID NO: 1496826 - DNA, 25 bp, Homo sapien
gaaactggggtctgccacataaccc

SEQ ID NO: 1496827 - DNA, 25 bp, Homo sapien
tactcctttgctcagttggcggtca

SEQ ID NO: 1496828 - DNA, 25 bp, Homo sapien
ttccgaaccctactcctttgctcag

SEQ ID NO: 1496829 - DNA, 25 bp, Homo sapien
ctttgctcagttggcggtcattggt

SEQ ID NO: 1496830 - DNA, 25 bp, Homo sapien
gaaccctactcctttgctcagttgg

SEQ ID NO: 1496831 - DNA, 25 bp, Homo sapien
gacatagttacactcgcaaatggaa

SEQ ID NO: 1496832 - DNA, 25 bp, Homo sapien
taggcagggacatagttacactcgc

SEQ ID NO: 1496833 - DNA, 25 bp, Homo sapien
cgacacctggataggcagggacata

SEQ ID NO: 1496834 - DNA, 25 bp, Homo sapien
ttctgcttccattgcgacacctgga

SEQ ID NO: 1496835 - DNA, 25 bp, Homo sapien
cggccttgggagacacctttgatct

SEQ ID NO: 1496836 - DNA, 25 bp, Homo sapien
cttgggagacacctttgatctttgg

SEQ ID NO: 1496837 - DNA, 25 bp, Homo sapien
atggggctgacttgcttcagctgtc

SEQ ID NO: 1496838 - DNA, 25 bp, Homo sapien
gtgacagccggccttgggagacacc

SEQ ID NO: 1496839 - DNA, 25 bp, Homo sapien
acatagagatgagggcaaacgttga

SEQ ID NO: 1496840 - DNA, 25 bp, Homo sapien
gatgagggcaaacgttgagcacagt

SEQ ID NO: 1496841 - DNA, 25 bp, Homo sapien
aactggagtatcattctgaatatct

SEQ ID NO: 1496842 - DNA, 25 bp, Homo sapien
tatctgtcctcatacatagagatga

SEQ ID NO: 1496843 - DNA, 25 bp, Homo sapien
ccatgaagacgtgtttcaaatatga

SEQ ID NO: 1496844 - DNA, 25 bp, Homo sapien
catggatccatgaagacgtgtttca

SEQ ID NO: 1496845 - DNA, 25 bp, Homo sapien
gagtgaatccgttcttccatcgcct

SEQ ID NO: 1496846 - DNA, 25 bp, Homo sapien
tgattttgagtgaatccgttcttcc

SEQ ID NO: 1496847 - DNA, 25 bp, Homo sapien
ttctgccccaattctcctcgttcat

SEQ ID NO: 1496848 - DNA, 25 bp, Homo sapien
ttttgctgcagggtgatgtgtgatt

SEQ ID NO: 1496849 - DNA, 25 bp, Homo sapien
gtctgatgtgtgtttcctagtgctg

SEQ ID NO: 1496850 - DNA, 25 bp, Homo sapien
cattggcaaggtctgatgtgtgttt

SEQ ID NO: 1496851 - DNA, 25 bp, Homo sapien
tctgagctaccaaaagcctccttgt

SEQ ID NO: 1496852 - DNA, 25 bp, Homo sapien
gcctccttgtacctcttacccagtg

SEQ ID NO: 1496853 - DNA, 25 bp, Homo sapien
ttgtacctcttacccagtggcttac

SEQ ID NO: 1496854 - DNA, 25 bp, Homo sapien
cttctgagctaccaaaagcctcctt

SEQ ID NO: 1496855 - DNA, 25 bp, Homo sapien
gtcccactcatagggaggctttccc

SEQ ID NO: 1496856 - DNA, 25 bp, Homo sapien
gccttggcgtcccactcatagggag

SEQ ID NO: 1496857 - DNA, 25 bp, Homo sapien
cttgtcctttgtaggtccaaagtag

SEQ ID NO: 1496858 - DNA, 25 bp, Homo sapien
taggtccaaagtagaggatgctatt

SEQ ID NO: 1496859 - DNA, 25 bp, Homo sapien
caaggcaagaaatttatcatggtcg

SEQ ID NO: 1496860 - DNA, 25 bp, Homo sapien
tgggcagtgcctacagatgatctag

SEQ ID NO: 1496861 - DNA, 25 bp, Homo sapien
ggtgctcagggacatttttgggaca

SEQ ID NO: 1496862 - DNA, 25 bp, Homo sapien
tgagggacctaatcctagaaaccag

SEQ ID NO: 1496863 - DNA, 25 bp, Homo sapien
taaagtccattcattagagccaggg

SEQ ID NO: 1496864 - DNA, 25 bp, Homo sapien
gtttaattcacggaaacactgccat

SEQ ID NO: 1496865 - DNA, 25 bp, Homo sapien
tttcaagggctcaggagacgcagaa

SEQ ID NO: 1496866 - DNA, 25 bp, Homo sapien
ttatgtcttacattcccaagggctc

SEQ ID NO: 1496867 - DNA, 25 bp, Homo sapien
ttcaaggagcggcatcacgctctca

SEQ ID NO: 1496868 - DNA, 25 bp, Homo sapien
tcttcacactgacgtgcgggtctac

SEQ ID NO: 1496869 - DNA, 25 bp, Homo sapien
gcggcatcacgctctcagagggctt

SEQ ID NO: 1496870 - DNA, 25 bp, Homo sapien
ttcacactgacgtgcgggtctacca

SEQ ID NO: 1496871 - DNA, 25 bp, Homo sapien
ttctcaggtctgagctaggcgcctg

SEQ ID NO: 1496872 - DNA, 25 bp, Homo sapien
tgatgtagtcttcggtacatctcac

SEQ ID NO: 1496873 - DNA, 25 bp, Homo sapien
tgagctaggcgcctgatgtagtctt

SEQ ID NO: 1496874 - DNA, 25 bp, Homo sapien
tttcccttctcaggtctgagctagg

SEQ ID NO: 1496875 - DNA, 25 bp, Homo sapien
tcagttagaagagagtgcctggaat

SEQ ID NO: 1496876 - DNA, 25 bp, Homo sapien
ctggatcagttagaagagagtgcct

SEQ ID NO: 1496877 - DNA, 25 bp, Homo sapien
tggatcagttagaagagagtgcctg

SEQ ID NO: 1496878 - DNA, 25 bp, Homo sapien
gatcagttagaagagagtgcctgga

SEQ ID NO: 1496879 - DNA, 25 bp, Homo sapien
tatttactcatcagcacatccatcc

SEQ ID NO: 1496880 - DNA, 25 bp, Homo sapien
gcttcctcctttctatggtaggttc

SEQ ID NO: 1496881 - DNA, 25 bp, Homo sapien
tctatggtaggttcatagtagattt

SEQ ID NO: 1496882 - DNA, 25 bp, Homo sapien
atttactcatcagcacatccatccg

SEQ ID NO: 1496883 - DNA, 25 bp, Homo sapien
gaattctgcctgacaccagtatgcc

SEQ ID NO: 1496884 - DNA, 25 bp, Homo sapien
tcctgtagccatgcacagagtaggt

SEQ ID NO: 1496885 - DNA, 25 bp, Homo sapien
cctggaattatgcaagcctgctggt

SEQ ID NO: 1496886 - DNA, 25 bp, Homo sapien
tgcccttccaatgtcttgcagggag

SEQ ID NO: 1496887 - DNA, 25 bp, Homo sapien
tccttttaacttcatctaatttcac

SEQ ID NO: 1496888 - DNA, 25 bp, Homo sapien
cttctacactcaaagcttcctttct

SEQ ID NO: 1496889 - DNA, 25 bp, Homo sapien
ctacactcaaagcttcctttcttat

SEQ ID NO: 1496890 - DNA, 25 bp, Homo sapien
atccttttaacttcatctaatttca

SEQ ID NO: 1496891 - DNA, 25 bp, Homo sapien
tctgtgctctgatgcaacagttgca

SEQ ID NO: 1496892 - DNA, 25 bp, Homo sapien
tgtgctctgatgcaacagttgcaag

SEQ ID NO: 1496893 - DNA, 25 bp, Homo sapien
tttctgtgctctgatgcaacagttg

SEQ ID NO: 1496894 - DNA, 25 bp, Homo sapien
gctctgatgcaacagttgcaagtct

SEQ ID NO: 1496895 - DNA, 25 bp, Homo sapien
tgagtttgtggttcagttcccaaaa

SEQ ID NO: 1496896 - DNA, 25 bp, Homo sapien
tcagttcccaaaattgacacattta

SEQ ID NO: 1496897 - DNA, 25 bp, Homo sapien
cagttcccaaaattgacacatttac

SEQ ID NO: 1496898 - DNA, 25 bp, Homo sapien
ttcccctaggactggatcttccctg

SEQ ID NO: 1496899 - DNA, 25 bp, Homo sapien
cctaggactggatcttccctggtct

SEQ ID NO: 1496900 - DNA, 25 bp, Homo sapien
tcatctttgtgcctgcaaacttgat

SEQ ID NO: 1496901 - DNA, 25 bp, Homo sapien
ggactggatcttccctggtcttcat

SEQ ID NO: 1496902 - DNA, 25 bp, Homo sapien
ctcagacatagcgacccaacccagc

SEQ ID NO: 1496903 - DNA, 25 bp, Homo sapien
ctcagtgccgctgcaggactcttgc

SEQ ID NO: 1496904 - DNA, 25 bp, Homo sapien
catcatcgccctggataattgcaca

SEQ ID NO: 1496905 - DNA, 25 bp, Homo sapien
aattgcacaactagatccattccat

SEQ ID NO: 1496906 - DNA, 25 bp, Homo sapien
aataatgtccttgggcatagggccg

SEQ ID NO: 1496907 - DNA, 25 bp, Homo sapien
tatggtatgaagctgagagggccac

SEQ ID NO: 1496908 - DNA, 25 bp, Homo sapien
caccaggaggagagtcaacatgcag

SEQ ID NO: 1496909 - DNA, 25 bp, Homo sapien
catagggccgcatggaagataatga

SEQ ID NO: 1496910 - DNA, 25 bp, Homo sapien
tctacaaggctctttagagacacca

SEQ ID NO: 1496911 - DNA, 25 bp, Homo sapien
tagaagcttttctgagcggtgctcc

SEQ ID NO: 1496912 - DNA, 25 bp, Homo sapien
gaggattcacccgaactgactgact

SEQ ID NO: 1496913 - DNA, 25 bp, Homo sapien
cagcgtgcctatttctagacggcca

SEQ ID NO: 1496914 - DNA, 25 bp, Homo sapien
tgccaaataacagccctccagggct

SEQ ID NO: 1496915 - DNA, 25 bp, Homo sapien
tttcccttcagtgctccacttggca

SEQ ID NO: 1496916 - DNA, 25 bp, Homo sapien
gacaggataaattgacttctttccc

SEQ ID NO: 1496917 - DNA, 25 bp, Homo sapien
tggcaagcgcttagagtttggaact

SEQ ID NO: 1496918 - DNA, 25 bp, Homo sapien
cagggaaccttgttaaaaccagcat

SEQ ID NO: 1496919 - DNA, 25 bp, Homo sapien
gccaccatcagggaaccttgttaaa

SEQ ID NO: 1496920 - DNA, 25 bp, Homo sapien
catcagggaaccttgttaaaaccag

SEQ ID NO: 1496921 - DNA, 25 bp, Homo sapien
aggccaccatcagggaaccttgtta

SEQ ID NO: 1496922 - DNA, 25 bp, Homo sapien
cagccacgctgtgggagcagcacac

SEQ ID NO: 1496923 - DNA, 25 bp, Homo sapien
ctcagccacgctgtgggagcagcac

SEQ ID NO: 1496924 - DNA, 25 bp, Homo sapien
cttcctccaaccgggaatcagcttc

SEQ ID NO: 1496925 - DNA, 25 bp, Homo sapien
tccaaccgggaatcagcttccaccc

SEQ ID NO: 1496926 - DNA, 25 bp, Homo sapien
tgggaaaggagtcctacaggaccaa

SEQ ID NO: 1496927 - DNA, 25 bp, Homo sapien
tctgggaaaggagtcctacaggacc

SEQ ID NO: 1496928 - DNA, 25 bp, Homo sapien
gaaaggagtcctacaggaccaactc

SEQ ID NO: 1496929 - DNA, 25 bp, Homo sapien
aaggagtcctacaggaccaactcct

SEQ ID NO: 1496930 - DNA, 25 bp, Homo sapien
catgggggaggaaccgcgtgggtct

SEQ ID NO: 1496931 - DNA, 25 bp, Homo sapien
tgggggaggaaccgcgtgggtctgc

SEQ ID NO: 1496932 - DNA, 25 bp, Homo sapien
gcatgggggaggaaccgcgtgggtc

SEQ ID NO: 1496933 - DNA, 25 bp, Homo sapien
ggggaggaaccgcgtgggtctgcac

SEQ ID NO: 1496934 - DNA, 25 bp, Homo sapien
gagggtcacagggacgaggctgcag

SEQ ID NO: 1496935 - DNA, 25 bp, Homo sapien
gatcctctcagagctccagagggtc

SEQ ID NO: 1496936 - DNA, 25 bp, Homo sapien
tgctgccacgcagacctggatggca

SEQ ID NO: 1496937 - DNA, 25 bp, Homo sapien
gagctgtattctcttggatcctctc

SEQ ID NO: 1496938 - DNA, 25 bp, Homo sapien
ttcccatgaaggcaaccaattttgc

SEQ ID NO: 1496939 - DNA, 25 bp, Homo sapien
acatgatgaagagtggactcctctt

SEQ ID NO: 1496940 - DNA, 25 bp, Homo sapien
ttttggcaatggcataagacttctt

SEQ ID NO: 1496941 - DNA, 25 bp, Homo sapien
catgcaccttggagtttttcaggac

SEQ ID NO: 1496942 - DNA, 25 bp, Homo sapien
gtctggtttgttgaagcaataagac

SEQ ID NO: 1496943 - DNA, 25 bp, Homo sapien
ttgtctggtttgttgaagcaataag

SEQ ID NO: 1496944 - DNA, 25 bp, Homo sapien
tgtctggtttgttgaagcaataaga

SEQ ID NO: 1496945 - DNA, 25 bp, Homo sapien
aagcaagttttagagtcctccagta

SEQ ID NO: 1496946 - DNA, 25 bp, Homo sapien
gcaagttttagagtcctccagtaca

SEQ ID NO: 1496947 - DNA, 25 bp, Homo sapien
taatattctcaaagtcggtgaaaac

SEQ ID NO: 1496948 - DNA, 25 bp, Homo sapien
catttgccagtcttgaagcaagttt

SEQ ID NO: 1496949 - DNA, 25 bp, Homo sapien
ttgctccttgaaagtgattctgcat

SEQ ID NO: 1496950 - DNA, 25 bp, Homo sapien
tgtgcctgttttggtgccaaatgat

SEQ ID NO: 1496951 - DNA, 25 bp, Homo sapien
ctggcagcaggacttggacttctgt

SEQ ID NO: 1496952 - DNA, 25 bp, Homo sapien
caggacttggacttctgtgcctgtt

SEQ ID NO: 1496953 - DNA, 25 bp, Homo sapien
gacttctgtgcctgttttggtgcca

SEQ ID NO: 1496954 - DNA, 25 bp, Homo sapien
gagattaaaggactaatcctgaagt

SEQ ID NO: 1496955 - DNA, 25 bp, Homo sapien
agattaaaggactaatcctgaagtc

SEQ ID NO: 1496956 - DNA, 25 bp, Homo sapien
agagattaaaggactaatcctgaag

SEQ ID NO: 1496957 - DNA, 25 bp, Homo sapien
cttgatcacttttgctacatctgaa

SEQ ID NO: 1496958 - DNA, 25 bp, Homo sapien
catggcaggaccttggagtatcttt

SEQ ID NO: 1496959 - DNA, 25 bp, Homo sapien
aagggtgcaccaaatatgtagagag

SEQ ID NO: 1496960 - DNA, 25 bp, Homo sapien
ttgtaatcactgaagggtgcaccaa

SEQ ID NO: 1496961 - DNA, 25 bp, Homo sapien
ggacagcaccatgggacagagtcca

SEQ ID NO: 1496962 - DNA, 25 bp, Homo sapien
tgtggacagcaccatgggacagagt

SEQ ID NO: 1496963 - DNA, 25 bp, Homo sapien
cattgtggacagcaccatgggacag

SEQ ID NO: 1496964 - DNA, 25 bp, Homo sapien
tcagtcattgtggacagcaccatgg

SEQ ID NO: 1496965 - DNA, 25 bp, Homo sapien
agcactgcttcattgtggctcagcc

SEQ ID NO: 1496966 - DNA, 25 bp, Homo sapien
aaatcgggagtgaaggagcactgct

SEQ ID NO: 1496967 - DNA, 25 bp, Homo sapien
tggtgagtctcagtgcccaggaaca

SEQ ID NO: 1496968 - DNA, 25 bp, Homo sapien
ttgccagagaaaaacggtggtagcc

SEQ ID NO: 1496969 - DNA, 25 bp, Homo sapien
ggtgtcatgtatcccattgctgttt

SEQ ID NO: 1496970 - DNA, 25 bp, Homo sapien
tcctgacagctgttagcaaagcggc

SEQ ID NO: 1496971 - DNA, 25 bp, Homo sapien
aagtgtaagagtccggcaaatgtcg

SEQ ID NO: 1496972 - DNA, 25 bp, Homo sapien
caaagcggccacatgagaggaggaa

SEQ ID NO: 1496973 - DNA, 25 bp, Homo sapien
cctcccttgtcgttggaaatgtcat

SEQ ID NO: 1496974 - DNA, 25 bp, Homo sapien
ctgcgcttcaacatcgttggagaag

SEQ ID NO: 1496975 - DNA, 25 bp, Homo sapien
tcacctcccttgtcgttggaaatgt

SEQ ID NO: 1496976 - DNA, 25 bp, Homo sapien
tcaacatcgttggagaagtcagttc

SEQ ID NO: 1496977 - DNA, 25 bp, Homo sapien
cagttccctattgcttctcagtttt

SEQ ID NO: 1496978 - DNA, 25 bp, Homo sapien
agcttctccatcaggcttaacatcc

SEQ ID NO: 1496979 - DNA, 25 bp, Homo sapien
catccagttccctattgcttctcag

SEQ ID NO: 1496980 - DNA, 25 bp, Homo sapien
aggtatcatccagttccctattgct

SEQ ID NO: 1496981 - DNA, 25 bp, Homo sapien
tacgaaatgtgatcccaagtaggca

SEQ ID NO: 1496982 - DNA, 25 bp, Homo sapien
ggacgtgctgttgatcccagctgct

SEQ ID NO: 1496983 - DNA, 25 bp, Homo sapien
ccttccctgctgtgactgttctgtc

SEQ ID NO: 1496984 - DNA, 25 bp, Homo sapien
ctgttctgtctgcttcccgatggga

SEQ ID NO: 1496985 - DNA, 25 bp, Homo sapien
ccacagtgggcctgtattagcaggg

SEQ ID NO: 1496986 - DNA, 25 bp, Homo sapien
ctgagtcatcttccctaaacccact

SEQ ID NO: 1496987 - DNA, 25 bp, Homo sapien
ctgcctctgaccagaaatccctgag

SEQ ID NO: 1496988 - DNA, 25 bp, Homo sapien
tggtgaatggactgctgtccctgct

SEQ ID NO: 1496989 - DNA, 25 bp, Homo sapien
ggcctccacaatgcttgtgtacaca

SEQ ID NO: 1496990 - DNA, 25 bp, Homo sapien
tgcttgtgtacacattctcggactt

SEQ ID NO: 1496991 - DNA, 25 bp, Homo sapien
tgtacacattctcggacttgccctc

SEQ ID NO: 1496992 - DNA, 25 bp, Homo sapien
ttgtaccttcctcacccgatctggc

SEQ ID NO: 1496993 - DNA, 25 bp, Homo sapien
gcaataaagcccgtgaactctccca

SEQ ID NO: 1496994 - DNA, 25 bp, Homo sapien
cttgcattgcataacattgctgtag

SEQ ID NO: 1496995 - DNA, 25 bp, Homo sapien
ggcctgggctaatttgcaataaagc

SEQ ID NO: 1496996 - DNA, 25 bp, Homo sapien
tgtagttgaggaatccgctttttaa

SEQ ID NO: 1496997 - DNA, 25 bp, Homo sapien
ctggcttcttggcagacccacagcc

SEQ ID NO: 1496998 - DNA, 25 bp, Homo sapien
tggagagctgctcgtcattcttggg

SEQ ID NO: 1496999 - DNA, 25 bp, Homo sapien
tcctccagactggtttccagggctt

SEQ ID NO: 1497000 - DNA, 25 bp, Homo sapien
tacagtcagcggcagaatctgtcct

SEQ ID NO: 1497001 - DNA, 25 bp, Homo sapien
cgcctcggggggcatttcatcctgg

SEQ ID NO: 1497002 - DNA, 25 bp, Homo sapien
tgaaaccacagacatccgtttccca

SEQ ID NO: 1497003 - DNA, 25 bp, Homo sapien
atctgccgctcctgactgctgaaac

SEQ ID NO: 1497004 - DNA, 25 bp, Homo sapien
agacatccgtttcccacgctcctct

SEQ ID NO: 1497005 - DNA, 25 bp, Homo sapien
tgagcattggatgtatgagggctga

SEQ ID NO: 1497006 - DNA, 25 bp, Homo sapien
tcctgagcattggatgtatgagggc

SEQ ID NO: 1497007 - DNA, 25 bp, Homo sapien
cctgagcattggatgtatgagggct

SEQ ID NO: 1497008 - DNA, 25 bp, Homo sapien
ctgagcattggatgtatgagggctg

SEQ ID NO: 1497009 - DNA, 25 bp, Homo sapien
gcaacactgagttacgggcacagcc

SEQ ID NO: 1497010 - DNA, 25 bp, Homo sapien
aacactgagttacgggcacagccac

SEQ ID NO: 1497011 - DNA, 25 bp, Homo sapien
actgagttacgggcacagccacact

SEQ ID NO: 1497012 - DNA, 25 bp, Homo sapien
agagggtgaggaccgtcacctgcca

SEQ ID NO: 1497013 - DNA, 25 bp, Homo sapien
gttaaataaggctcctcctcaggtg

SEQ ID NO: 1497014 - DNA, 25 bp, Homo sapien
tttagagagccgaccgcttgtggtg

SEQ ID NO: 1497015 - DNA, 25 bp, Homo sapien
tctgaccgttctgtgactgccaaga

SEQ ID NO: 1497016 - DNA, 25 bp, Homo sapien
aagatggagtccttggcctgaacga

SEQ ID NO: 1497017 - DNA, 25 bp, Homo sapien
agatgaccccgaagtgcagcatggc

SEQ ID NO: 1497018 - DNA, 25 bp, Homo sapien
catccacctgcggaaacatggcatc

SEQ ID NO: 1497019 - DNA, 25 bp, Homo sapien
tcgttcgatatgaagacaagccgcc

SEQ ID NO: 1497020 - DNA, 25 bp, Homo sapien
catcttcctagcttgtgccaagagg

SEQ ID NO: 1497021 - DNA, 25 bp, Homo sapien
tgtggagctgacaaccgcttttaga

SEQ ID NO: 1497022 - DNA, 25 bp, Homo sapien
tcagcatctggtggacgcctttgtg

SEQ ID NO: 1497023 - DNA, 25 bp, Homo sapien
ttgggaaacgtatcgctcaaccgcc

SEQ ID NO: 1497024 - DNA, 25 bp, Homo sapien
tgttaagtagcgctgcagcagtccc

SEQ ID NO: 1497025 - DNA, 25 bp, Homo sapien
gtaacgggttacaggacgcactgcc

SEQ ID NO: 1497026 - DNA, 25 bp, Homo sapien
ggccatttgatcctagatgtgggaa

SEQ ID NO: 1497027 - DNA, 25 bp, Homo sapien
aaatgagttgagaggtgttccctcc

SEQ ID NO: 1497028 - DNA, 25 bp, Homo sapien
catctaaatggtcaaatgtgttgcc

SEQ ID NO: 1497029 - DNA, 25 bp, Homo sapien
gtgagctgattgtttggagcaacag

SEQ ID NO: 1497030 - DNA, 25 bp, Homo sapien
ttggagcaacagatacctagatatc

SEQ ID NO: 1497031 - DNA, 25 bp, Homo sapien
gatacctagatatctgtctctctgc

SEQ ID NO: 1497032 - DNA, 25 bp, Homo sapien
ttcccactcacagtgctgattctcc

SEQ ID NO: 1497033 - DNA, 25 bp, Homo sapien
cagatcacccaacaaaagaatgcca

SEQ ID NO: 1497034 - DNA, 25 bp, Homo sapien
tcacccaacaaaagaatgccacgaa

SEQ ID NO: 1497035 - DNA, 25 bp, Homo sapien
cccaacaaaagaatgccacgaacac

SEQ ID NO: 1497036 - DNA, 25 bp, Homo sapien
gatcacccaacaaaagaatgccacg

SEQ ID NO: 1497037 - DNA, 25 bp, Homo sapien
ggttctcggcacacagcgttaatga

SEQ ID NO: 1497038 - DNA, 25 bp, Homo sapien
gctcagcagaatcccacaggtgtgt

SEQ ID NO: 1497039 - DNA, 25 bp, Homo sapien
ttaatgacatgcacggccctctaag

SEQ ID NO: 1497040 - DNA, 25 bp, Homo sapien
tctggtcctgggatagcatcagcgt

SEQ ID NO: 1497041 - DNA, 25 bp, Homo sapien
agcatccaggtgtagagcgctgcca

SEQ ID NO: 1497042 - DNA, 25 bp, Homo sapien
tgcaaagggaatagcatccagtcct

SEQ ID NO: 1497043 - DNA, 25 bp, Homo sapien
cagtgacttttaggtgagcatccag

SEQ ID NO: 1497044 - DNA, 25 bp, Homo sapien
tcctggcgccagtagtagaaatggt

SEQ ID NO: 1497045 - DNA, 25 bp, Homo sapien
cttgttccgtctcctgtgccagtgg

SEQ ID NO: 1497046 - DNA, 25 bp, Homo sapien
cacactgacacagtcacatctcttg

SEQ ID NO: 1497047 - DNA, 25 bp, Homo sapien
ttagtgatggaggtattgtgctgtc

SEQ ID NO: 1497048 - DNA, 25 bp, Homo sapien
cagtcctgtagattttcatatgtcc

SEQ ID NO: 1497049 - DNA, 25 bp, Homo sapien
ccccagccagagtcaacattgggaa

SEQ ID NO: 1497050 - DNA, 25 bp, Homo sapien
ccagccagagtcaacattgggaacc

SEQ ID NO: 1497051 - DNA, 25 bp, Homo sapien
cagccagagtcaacattgggaacct

SEQ ID NO: 1497052 - DNA, 25 bp, Homo sapien
ttccccagccagagtcaacattggg

SEQ ID NO: 1497053 - DNA, 25 bp, Homo sapien
gtgacctttcagaacagtttttgct

SEQ ID NO: 1497054 - DNA, 25 bp, Homo sapien
gcccacagtgacctttcagaacagt

SEQ ID NO: 1497055 - DNA, 25 bp, Homo sapien
ccacgtgcgtggacgtgactctggg

SEQ ID NO: 1497056 - DNA, 25 bp, Homo sapien
gactctgggagtgaagtgaaatagc

SEQ ID NO: 1497057 - DNA, 25 bp, Homo sapien
tcatcccatgagtctagtcggcagc

SEQ ID NO: 1497058 - DNA, 25 bp, Homo sapien
taggggtttgctaacggatggccaa

SEQ ID NO: 1497059 - DNA, 25 bp, Homo sapien
gacttatctcctttaagggacttga

SEQ ID NO: 1497060 - DNA, 25 bp, Homo sapien
ccttggccagctcaatgacttatct

SEQ ID NO: 1497061 - DNA, 25 bp, Homo sapien
gtcattaccaaaggctgggcaaggg

SEQ ID NO: 1497062 - DNA, 25 bp, Homo sapien
gggcatggagattagttcattctga

SEQ ID NO: 1497063 - DNA, 25 bp, Homo sapien
tgatgcagggtctttttggcgtaga

SEQ ID NO: 1497064 - DNA, 25 bp, Homo sapien
catgtggtaagggatgcaggagtgc

SEQ ID NO: 1497065 - DNA, 25 bp, Homo sapien
tgtgagtgagcatttctgactcctc

SEQ ID NO: 1497066 - DNA, 25 bp, Homo sapien
aaaggtcagttgctctttgagaatg

SEQ ID NO: 1497067 - DNA, 25 bp, Homo sapien
ctgtccttccctggtaattggagct

SEQ ID NO: 1497068 - DNA, 25 bp, Homo sapien
tccttccctggtaattggagctgtg

SEQ ID NO: 1497069 - DNA, 25 bp, Homo sapien
agacaactcgattttcttgggagcc

SEQ ID NO: 1497070 - DNA, 25 bp, Homo sapien
cccaaatgagccaccggaagggttg

SEQ ID NO: 1497071 - DNA, 25 bp, Homo sapien
gcagagcaaacgcatcccaaatgag

SEQ ID NO: 1497072 - DNA, 25 bp, Homo sapien
tggccagtcggatgtgcctcacagc

SEQ ID NO: 1497073 - DNA, 25 bp, Homo sapien
ctgcagctttctcacatgcctcagt

SEQ ID NO: 1497074 - DNA, 25 bp, Homo sapien
tctctagctatgaacgtcatgggtg

SEQ ID NO: 1497075 - DNA, 25 bp, Homo sapien
ctaacacaaaagtccgcctgtcctt

SEQ ID NO: 1497076 - DNA, 25 bp, Homo sapien
tgagcagtaattcttaatagtgggc

SEQ ID NO: 1497077 - DNA, 25 bp, Homo sapien
catttttaagagcactaggattttc

SEQ ID NO: 1497078 - DNA, 25 bp, Homo sapien
cttgcataagatgtgacaggaactc

SEQ ID NO: 1497079 - DNA, 25 bp, Homo sapien
cgcaaggcgcacattagagatggca

SEQ ID NO: 1497080 - DNA, 25 bp, Homo sapien
tattcagaagcagagacgacgcaag

SEQ ID NO: 1497081 - DNA, 25 bp, Homo sapien
tgggtacccctctttgtgaatgtgg

SEQ ID NO: 1497082 - DNA, 25 bp, Homo sapien
cacgttgtggtcctgattgcttaca

SEQ ID NO: 1497083 - DNA, 25 bp, Homo sapien
gaggttgaactctccaccctgatcg

SEQ ID NO: 1497084 - DNA, 25 bp, Homo sapien
gcaaagttgccgagtcaatgaagta

SEQ ID NO: 1497085 - DNA, 25 bp, Homo sapien
gacttgtggcaagctacctgacttt

SEQ ID NO: 1497086 - DNA, 25 bp, Homo sapien
tgaacagctgaagacgatcttgcgc

SEQ ID NO: 1497087 - DNA, 25 bp, Homo sapien
gaacagctgaagacgatcttgcgcc

SEQ ID NO: 1497088 - DNA, 25 bp, Homo sapien
acagctgaagacgatcttgcgccat

SEQ ID NO: 1497089 - DNA, 25 bp, Homo sapien
aacagctgaagacgatcttgcgcca

SEQ ID NO: 1497090 - DNA, 25 bp, Homo sapien
tgtcctaacaccctgatatcttgag

SEQ ID NO: 1497091 - DNA, 25 bp, Homo sapien
taaacatctactaaggcacgctgtg

SEQ ID NO: 1497092 - DNA, 25 bp, Homo sapien
gataaacaagctctacctgggcaaa

SEQ ID NO: 1497093 - DNA, 25 bp, Homo sapien
gcacgctgtgcatcgtagggataca

SEQ ID NO: 1497094 - DNA, 25 bp, Homo sapien
catgagaaacctctgctttgaagca

SEQ ID NO: 1497095 - DNA, 25 bp, Homo sapien
cgtcagctgctggaggcttggccaa

SEQ ID NO: 1497096 - DNA, 25 bp, Homo sapien
cactgcaacctcactacagctgggt

SEQ ID NO: 1497097 - DNA, 25 bp, Homo sapien
ctgtgatggaggagattgcaacttc

SEQ ID NO: 1497098 - DNA, 25 bp, Homo sapien
ctccagcttgtgatcctgttgttgg

SEQ ID NO: 1497099 - DNA, 25 bp, Homo sapien
cagcttgtgatcctgttgttgggga

SEQ ID NO: 1497100 - DNA, 25 bp, Homo sapien
tccagcttgtgatcctgttgttggg

SEQ ID NO: 1497101 - DNA, 25 bp, Homo sapien
cttgtgatcctgttgttggggaact

SEQ ID NO: 1497102 - DNA, 25 bp, Homo sapien
gccttggtgcatgcagacagctccc

SEQ ID NO: 1497103 - DNA, 25 bp, Homo sapien
cagagtcactaaggacactggacat

SEQ ID NO: 1497104 - DNA, 25 bp, Homo sapien
agacagctcccccagagtcactaag

SEQ ID NO: 1497105 - DNA, 25 bp, Homo sapien
agctcccccagagtcactaaggaca

SEQ ID NO: 1497106 - DNA, 25 bp, Homo sapien
gatgctgcgtggctctcggcttccc

SEQ ID NO: 1497107 - DNA, 25 bp, Homo sapien
gaggtcgtcagccatcaccaggatg

SEQ ID NO: 1497108 - DNA, 25 bp, Homo sapien
atgctgcgtggctctcggcttccca

SEQ ID NO: 1497109 - DNA, 25 bp, Homo sapien
tccaatgccgaggtcgtcagccatc

SEQ ID NO: 1497110 - DNA, 25 bp, Homo sapien
cccactggccaaccggtcgatattg

SEQ ID NO: 1497111 - DNA, 25 bp, Homo sapien
caggtgctgagtgagtttcactccc

SEQ ID NO: 1497112 - DNA, 25 bp, Homo sapien
gtaccggccagtcatgaaggctgcc

SEQ ID NO: 1497113 - DNA, 25 bp, Homo sapien
tgcttggtgtgcacagcggtgatgc

SEQ ID NO: 1497114 - DNA, 25 bp, Homo sapien
gaggaaaactccagtgcgggaccaa

SEQ ID NO: 1497115 - DNA, 25 bp, Homo sapien
ctgtgaagaggaaaactccagtgcg

SEQ ID NO: 1497116 - DNA, 25 bp, Homo sapien
gaaaactccagtgcgggaccaagat

SEQ ID NO: 1497117 - DNA, 25 bp, Homo sapien
ccagtgcgggaccaagatgccattc

SEQ ID NO: 1497118 - DNA, 25 bp, Homo sapien
gcttagcaaaggtaatctcatcggt

SEQ ID NO: 1497119 - DNA, 25 bp, Homo sapien
taatctcatcggtgggaagtcctcc

SEQ ID NO: 1497120 - DNA, 25 bp, Homo sapien
tccttcagaagcttagcaaaggtaa

SEQ ID NO: 1497121 - DNA, 25 bp, Homo sapien
catcggtgggaagtcctcccgaaga

SEQ ID NO: 1497122 - DNA, 25 bp, Homo sapien
gatggttcccatcccatagatgtcc

SEQ ID NO: 1497123 - DNA, 25 bp, Homo sapien
atagatggttcccatcccatagatg

SEQ ID NO: 1497124 - DNA, 25 bp, Homo sapien
ggttcccatcccatagatgtccata

SEQ ID NO: 1497125 - DNA, 25 bp, Homo sapien
ctatagatggttcccatcccataga

SEQ ID NO: 1497126 - DNA, 25 bp, Homo sapien
gcaaagtcatccctaagataactgt

SEQ ID NO: 1497127 - DNA, 25 bp, Homo sapien
tctcccactcttttgctaactttgt

SEQ ID NO: 1497128 - DNA, 25 bp, Homo sapien
cactcttttgctaactttgtccaag

SEQ ID NO: 1497129 - DNA, 25 bp, Homo sapien
ccctaagataactgtcatgatgtcc

SEQ ID NO: 1497130 - DNA, 25 bp, Homo sapien
taattgaagccgtgatgtaaagggt

SEQ ID NO: 1497131 - DNA, 25 bp, Homo sapien
gattggtcaaagagatcccatagaa

SEQ ID NO: 1497132 - DNA, 25 bp, Homo sapien
aagtcagtcttgctgtgacagctca

SEQ ID NO: 1497133 - DNA, 25 bp, Homo sapien
ctctccgggcttgcagtctctcaga

SEQ ID NO: 1497134 - DNA, 25 bp, Homo sapien
aaaaaacgcctagaggcacgtggag

SEQ ID NO: 1497135 - DNA, 25 bp, Homo sapien
ctgaaaaaaacgcctagaggcacgt

SEQ ID NO: 1497136 - DNA, 25 bp, Homo sapien
aaaacgcctagaggcacgtggagta

SEQ ID NO: 1497137 - DNA, 25 bp, Homo sapien
aacgcctagaggcacgtggagtagc

SEQ ID NO: 1497138 - DNA, 25 bp, Homo sapien
tctcgtagttcctcatcatgaagca

SEQ ID NO: 1497139 - DNA, 25 bp, Homo sapien
gaagtaatgaaggaagcccaagaaa

SEQ ID NO: 1497140 - DNA, 25 bp, Homo sapien
cctctgggtgagattgtcataggac

SEQ ID NO: 1497141 - DNA, 25 bp, Homo sapien
cgctgtatgaactgggccgcctcca

SEQ ID NO: 1497142 - DNA, 25 bp, Homo sapien
agaatccgagaggtttctgcagtct

SEQ ID NO: 1497143 - DNA, 25 bp, Homo sapien
ctgtgagcagaatccgagaggtttc

SEQ ID NO: 1497144 - DNA, 25 bp, Homo sapien
gagcagaatccgagaggtttctgca

SEQ ID NO: 1497145 - DNA, 25 bp, Homo sapien
tgtgagcagaatccgagaggtttct

SEQ ID NO: 1497146 - DNA, 25 bp, Homo sapien
cctctcttaggaattgcacgacatc

SEQ ID NO: 1497147 - DNA, 25 bp, Homo sapien
tacagttctgaaccaagcgccatgc

SEQ ID NO: 1497148 - DNA, 25 bp, Homo sapien
aggtggtcagccctgcaatgcctgc

SEQ ID NO: 1497149 - DNA, 25 bp, Homo sapien
tgtgggctgaccacgggcactaact

SEQ ID NO: 1497150 - DNA, 25 bp, Homo sapien
catttctgctgtgcacctaagttgg

SEQ ID NO: 1497151 - DNA, 25 bp, Homo sapien
ggcaaaaccgaaagctgtgataatg

SEQ ID NO: 1497152 - DNA, 25 bp, Homo sapien
cacctaagttggatctgttttgcat

SEQ ID NO: 1497153 - DNA, 25 bp, Homo sapien
agggatggcaaaaccgaaagctgtg

SEQ ID NO: 1497154 - DNA, 25 bp, Homo sapien
ccagggttggtgagagctctgagag

SEQ ID NO: 1497155 - DNA, 25 bp, Homo sapien
ttggtgagagctctgagagatttgt

SEQ ID NO: 1497156 - DNA, 25 bp, Homo sapien
gctctgagagatttgtgcaagaagc

SEQ ID NO: 1497157 - DNA, 25 bp, Homo sapien
gtgagagctctgagagatttgtgca

SEQ ID NO: 1497158 - DNA, 25 bp, Homo sapien
gacaagcaggaacggagtctcagtg

SEQ ID NO: 1497159 - DNA, 25 bp, Homo sapien
tgcacgtggaggtaggacaagacaa

SEQ ID NO: 1497160 - DNA, 25 bp, Homo sapien
caagacaagcaggaacggagtctca

SEQ ID NO: 1497161 - DNA, 25 bp, Homo sapien
aagcaggaacggagtctcagtgttc

SEQ ID NO: 1497162 - DNA, 25 bp, Homo sapien
catccccgtagactccgtgttgact

SEQ ID NO: 1497163 - DNA, 25 bp, Homo sapien
atccccgtagactccgtgttgactt

SEQ ID NO: 1497164 - DNA, 25 bp, Homo sapien
cccgtagactccgtgttgacttttg

SEQ ID NO: 1497165 - DNA, 25 bp, Homo sapien
gatctcgtcactgttgccctgagag

SEQ ID NO: 1497166 - DNA, 25 bp, Homo sapien
gaacacgaggatctcgtcactgttg

SEQ ID NO: 1497167 - DNA, 25 bp, Homo sapien
cagctgcaggtattctggatccaaa

SEQ ID NO: 1497168 - DNA, 25 bp, Homo sapien
gagcctcgccaaggctgtagccagc

SEQ ID NO: 1497169 - DNA, 25 bp, Homo sapien
gcaatatccaactggaggtgcaacc

SEQ ID NO: 1497170 - DNA, 25 bp, Homo sapien
tgccctgggaggtaacccagcctgt

SEQ ID NO: 1497171 - DNA, 25 bp, Homo sapien
ggtaatcgggtacagccatttgctg

SEQ ID NO: 1497172 - DNA, 25 bp, Homo sapien
gaagtcaatgcaaagctctggacac

SEQ ID NO: 1497173 - DNA, 25 bp, Homo sapien
gtcagcatgcctgtagctcaaggga

SEQ ID NO: 1497174 - DNA, 25 bp, Homo sapien
gacatcgtttccatagggttatcga

SEQ ID NO: 1497175 - DNA, 25 bp, Homo sapien
caagggaagccactttggacatcgt

SEQ ID NO: 1497176 - DNA, 25 bp, Homo sapien
cacaatagagtggtttccctgagcc

SEQ ID NO: 1497177 - DNA, 25 bp, Homo sapien
tttcttggattaacaataacttgtg

SEQ ID NO: 1497178 - DNA, 25 bp, Homo sapien
cagggtgttgcatttgctggaaata

SEQ ID NO: 1497179 - DNA, 25 bp, Homo sapien
tccaacttgttctcacgttcatggg

SEQ ID NO: 1497180 - DNA, 25 bp, Homo sapien
taacaataacttgtgtgttttccag

SEQ ID NO: 1497181 - DNA, 25 bp, Homo sapien
gttgttgtgataatgttgtgatttc

SEQ ID NO: 1497182 - DNA, 25 bp, Homo sapien
ggttgttgtgataatgttgtgattt

SEQ ID NO: 1497183 - DNA, 25 bp, Homo sapien
ttgttgtgataatgttgtgatttcc

SEQ ID NO: 1497184 - DNA, 25 bp, Homo sapien
gaaggactgcagagtgagatgccca

SEQ ID NO: 1497185 - DNA, 25 bp, Homo sapien
gaaggagaaggactgcagagtgaga

SEQ ID NO: 1497186 - DNA, 25 bp, Homo sapien
aggagaaggactgcagagtgagatg

SEQ ID NO: 1497187 - DNA, 25 bp, Homo sapien
gagaaggactgcagagtgagatgcc

SEQ ID NO: 1497188 - DNA, 25 bp, Homo sapien
taaactatccctcacatgaatatca

SEQ ID NO: 1497189 - DNA, 25 bp, Homo sapien
agtagatacccaaatctaaactatc

SEQ ID NO: 1497190 - DNA, 25 bp, Homo sapien
tatccctcacatgaatatcaatatt

SEQ ID NO: 1497191 - DNA, 25 bp, Homo sapien
actatccctcacatgaatatcaata

SEQ ID NO: 1497192 - DNA, 25 bp, Homo sapien
tctaaggctataaagaagtctatca

SEQ ID NO: 1497193 - DNA, 25 bp, Homo sapien
ctaaggctataaagaagtctatcat

SEQ ID NO: 1497194 - DNA, 25 bp, Homo sapien
ctctaaggctataaagaagtctatc

SEQ ID NO: 1497195 - DNA, 25 bp, Homo sapien
gctggtgttggctctaaggctataa

SEQ ID NO: 1497196 - DNA, 25 bp, Homo sapien
catgtgctccctggtccgatgtgaa

SEQ ID NO: 1497197 - DNA, 25 bp, Homo sapien
gagggtatcattagccaatctcagc

SEQ ID NO: 1497198 - DNA, 25 bp, Homo sapien
ccgatgtgaagtagatgagggtatc

SEQ ID NO: 1497199 - DNA, 25 bp, Homo sapien
tagatcccattacttccgccatgaa

SEQ ID NO: 1497200 - DNA, 25 bp, Homo sapien
attgatgtacacgtctcctcctcgg

SEQ ID NO: 1497201 - DNA, 25 bp, Homo sapien
tactctccaaccacttctagaattg

SEQ ID NO: 1497202 - DNA, 25 bp, Homo sapien
caaccacttctagaattgtgattga

SEQ ID NO: 1497203 - DNA, 25 bp, Homo sapien
tcggcagctgctaagctattttgga

SEQ ID NO: 1497204 - DNA, 25 bp, Homo sapien
ctggctgtagagccacttgacagag

SEQ ID NO: 1497205 - DNA, 25 bp, Homo sapien
tggctgtagagccacttgacagagt

SEQ ID NO: 1497206 - DNA, 25 bp, Homo sapien
ggctgtagagccacttgacagagtg

SEQ ID NO: 1497207 - DNA, 25 bp, Homo sapien
ttcctcacccttcatgacaaagaca

SEQ ID NO: 1497208 - DNA, 25 bp, Homo sapien
tcgctgggggaataaacactgcttc

SEQ ID NO: 1497209 - DNA, 25 bp, Homo sapien
caggtgacccatcgctgggggaata

SEQ ID NO: 1497210 - DNA, 25 bp, Homo sapien
aacactgcttcctcacccttcatga

SEQ ID NO: 1497211 - DNA, 25 bp, Homo sapien
tccatgttgctagtgggctcatcaa

SEQ ID NO: 1497212 - DNA, 25 bp, Homo sapien
caagggagctccagccagcttggct

SEQ ID NO: 1497213 - DNA, 25 bp, Homo sapien
cctgtatcaccctgggccaacgaag

SEQ ID NO: 1497214 - DNA, 25 bp, Homo sapien
ggctactgtaggaaatatgtccatg

SEQ ID NO: 1497215 - DNA, 25 bp, Homo sapien
cagagctcaacaataccaaccaccc

SEQ ID NO: 1497216 - DNA, 25 bp, Homo sapien
tcagagctcaacaataccaaccacc

SEQ ID NO: 1497217 - DNA, 25 bp, Homo sapien
aaccttggatccacgggcttctgat

SEQ ID NO: 1497218 - DNA, 25 bp, Homo sapien
gggcatcagatcacgtccatcaatg

SEQ ID NO: 1497219 - DNA, 25 bp, Homo sapien
gaaactcatgatcggagcgttggct

SEQ ID NO: 1497220 - DNA, 25 bp, Homo sapien
ccagcgcacagcatttaagtaggcg

SEQ ID NO: 1497221 - DNA, 25 bp, Homo sapien
taagtaggcgttgcagtaatggaag

SEQ ID NO: 1497222 - DNA, 25 bp, Homo sapien
catgcaataaagcaaccggccacag

SEQ ID NO: 1497223 - DNA, 25 bp, Homo sapien
ggagtgctaggaagtgaagctgggc

SEQ ID NO: 1497224 - DNA, 25 bp, Homo sapien
tctctgctgggatagagaagctgtg

SEQ ID NO: 1497225 - DNA, 25 bp, Homo sapien
cggccacagcgccctgttgagaaca

SEQ ID NO: 1497226 - DNA, 25 bp, Homo sapien
ccacataatgtgttcctccagcctc

SEQ ID NO: 1497227 - DNA, 25 bp, Homo sapien
ctccacataatgtgttcctccagcc

SEQ ID NO: 1497228 - DNA, 25 bp, Homo sapien
gatccaatatgttccttcccgcttc

SEQ ID NO: 1497229 - DNA, 25 bp, Homo sapien
ctcctccacataatgtgttcctcca

SEQ ID NO: 1497230 - DNA, 25 bp, Homo sapien
gccatcttgaagttcttcaagaacc

SEQ ID NO: 1497231 - DNA, 25 bp, Homo sapien
tgttgccatcttgaagttcttcaag

SEQ ID NO: 1497232 - DNA, 25 bp, Homo sapien
ctctgttgccatcttgaagttcttc

SEQ ID NO: 1497233 - DNA, 25 bp, Homo sapien
gttgccatcttgaagttcttcaaga

SEQ ID NO: 1497234 - DNA, 25 bp, Homo sapien
ccattctggccaaacgtgagcagta

SEQ ID NO: 1497235 - DNA, 25 bp, Homo sapien
ggtggtccctgacaaatggatggca

SEQ ID NO: 1497236 - DNA, 25 bp, Homo sapien
tgcgcgcatgatagacactcagagg

SEQ ID NO: 1497237 - DNA, 25 bp, Homo sapien
acaacgtgagtgtgcccttacggcc

SEQ ID NO: 1497238 - DNA, 25 bp, Homo sapien
tctggaaagcctgttcggcacaagt

SEQ ID NO: 1497239 - DNA, 25 bp, Homo sapien
acaaaaccaggtctggaaagcctgt

SEQ ID NO: 1497240 - DNA, 25 bp, Homo sapien
agcctgttcggcacaagtaaagaca

SEQ ID NO: 1497241 - DNA, 25 bp, Homo sapien
aacaaaaccaggtctggaaagcctg

SEQ ID NO: 1497242 - DNA, 25 bp, Homo sapien
tctgaattctctacttagagcagtc

SEQ ID NO: 1497243 - DNA, 25 bp, Homo sapien
gtccataacacagctcggcacagtc

SEQ ID NO: 1497244 - DNA, 25 bp, Homo sapien
tgtcttgcagaagtctcagagccat

SEQ ID NO: 1497245 - DNA, 25 bp, Homo sapien
ttctggcttctcatagtgacgcaag

SEQ ID NO: 1497246 - DNA, 25 bp, Homo sapien
cactgaccgagtggtgaagttacta

SEQ ID NO: 1497247 - DNA, 25 bp, Homo sapien
atgacatctgtttcggcactgaccg

SEQ ID NO: 1497248 - DNA, 25 bp, Homo sapien
tattagtatctagcacaagctccct

SEQ ID NO: 1497249 - DNA, 25 bp, Homo sapien
caagctccctcttaacgtcttggag

SEQ ID NO: 1497250 - DNA, 25 bp, Homo sapien
taaacaatgtgactcaactcatgag

SEQ ID NO: 1497251 - DNA, 25 bp, Homo sapien
gcttaggaaatcatcacccatctgg

SEQ ID NO: 1497252 - DNA, 25 bp, Homo sapien
gagaaaaagttgatgcctaagccag

SEQ ID NO: 1497253 - DNA, 25 bp, Homo sapien
cgaattgtcacaagtgatggtcaaa

SEQ ID NO: 1497254 - DNA, 25 bp, Homo sapien
tccagggtatgagaaatttccttca

SEQ ID NO: 1497255 - DNA, 25 bp, Homo sapien
ccagggtatgagaaatttccttcag

SEQ ID NO: 1497256 - DNA, 25 bp, Homo sapien
tttcttccagggtatgagaaatttc

SEQ ID NO: 1497257 - DNA, 25 bp, Homo sapien
tcttccagggtatgagaaatttcct

SEQ ID NO: 1497258 - DNA, 25 bp, Homo sapien
cgtgtgtggcaaagcatccgttgga

SEQ ID NO: 1497259 - DNA, 25 bp, Homo sapien
tcccgaaacagaagcacacgtgtgt

SEQ ID NO: 1497260 - DNA, 25 bp, Homo sapien
gtcgtgatgggtgacataactcccg

SEQ ID NO: 1497261 - DNA, 25 bp, Homo sapien
ggtgaagaaaaaggccttccagatg

SEQ ID NO: 1497262 - DNA, 25 bp, Homo sapien
tagcggctcagtctcttatcctgtt

SEQ ID NO: 1497263 - DNA, 25 bp, Homo sapien
tgtttttctctatcacactggcaag

SEQ ID NO: 1497264 - DNA, 25 bp, Homo sapien
acactggcaagacaggccggtggaa

SEQ ID NO: 1497265 - DNA, 25 bp, Homo sapien
tgttccatgaaaactgatcgggcac

SEQ ID NO: 1497266 - DNA, 25 bp, Homo sapien
gggtgagttaaggtacctcctgcac

SEQ ID NO: 1497267 - DNA, 25 bp, Homo sapien
tatgctggttattgcatcactgcag

SEQ ID NO: 1497268 - DNA, 25 bp, Homo sapien
tgagctttgccacatgcgtctgtct

SEQ ID NO: 1497269 - DNA, 25 bp, Homo sapien
gaatcagtccaaatccaaggtgtag

SEQ ID NO: 1497270 - DNA, 25 bp, Homo sapien
ccagtaataatgacttgccttccaa

SEQ ID NO: 1497271 - DNA, 25 bp, Homo sapien
cagagactttctaggccaatgattc

SEQ ID NO: 1497272 - DNA, 25 bp, Homo sapien
tggaagagattccatgaaccacagc

SEQ ID NO: 1497273 - DNA, 25 bp, Homo sapien
aatagtgttaagcttctaggtccct

SEQ ID NO: 1497274 - DNA, 25 bp, Homo sapien
aatttctcagtcacaaaacttgcat

SEQ ID NO: 1497275 - DNA, 25 bp, Homo sapien
aaatcatgcatctcattgtggattg

SEQ ID NO: 1497276 - DNA, 25 bp, Homo sapien
aacaaaatcatgcatctcattgtgg

SEQ ID NO: 1497277 - DNA, 25 bp, Homo sapien
tgcatctcattgtggattggaagca

SEQ ID NO: 1497278 - DNA, 25 bp, Homo sapien
tggatggcagcttctctcgattttg

SEQ ID NO: 1497279 - DNA, 25 bp, Homo sapien
taaatgcataagcaggtggatggca

SEQ ID NO: 1497280 - DNA, 25 bp, Homo sapien
tctcctaggcgatcagttgcgcatt

SEQ ID NO: 1497281 - DNA, 25 bp, Homo sapien
caaatagaaggtggtcagacaagtc

SEQ ID NO: 1497282 - DNA, 25 bp, Homo sapien
tgcaactccacaggtaatatgaatg

SEQ ID NO: 1497283 - DNA, 25 bp, Homo sapien
cattctctgcaaaccgctgtgtggg

SEQ ID NO: 1497284 - DNA, 25 bp, Homo sapien
tcactaaggtttggatatgcaactc

SEQ ID NO: 1497285 - DNA, 25 bp, Homo sapien
taagctagtaccctctctaagaatg

SEQ ID NO: 1497286 - DNA, 25 bp, Homo sapien
cactctcggatcatggaggtcggag

SEQ ID NO: 1497287 - DNA, 25 bp, Homo sapien
cagtaagactttcatgggccacaaa

SEQ ID NO: 1497288 - DNA, 25 bp, Homo sapien
aatgagagccgatcctagtcccaat

SEQ ID NO: 1497289 - DNA, 25 bp, Homo sapien
ttaggaccatcatgacaggtacggg

SEQ ID NO: 1497290 - DNA, 25 bp, Homo sapien
gaaagctgagctctaaagaccctgc

SEQ ID NO: 1497291 - DNA, 25 bp, Homo sapien
cagtcatgctgtcccaataggtttc

SEQ ID NO: 1497292 - DNA, 25 bp, Homo sapien
cagaacaggttcacgatgtcggaaa

SEQ ID NO: 1497293 - DNA, 25 bp, Homo sapien
tcggaaaaccaagaatgctcagggc

SEQ ID NO: 1497294 - DNA, 25 bp, Homo sapien
ctgcttgcattctaacaaggaaagc

SEQ ID NO: 1497295 - DNA, 25 bp, Homo sapien
tacatagttacatggcaatgtttcc

SEQ ID NO: 1497296 - DNA, 25 bp, Homo sapien
tgggtagtttttaagctgcttgcat

SEQ ID NO: 1497297 - DNA, 25 bp, Homo sapien
cctttccagaaagacatgggtagtt

SEQ ID NO: 1497298 - DNA, 25 bp, Homo sapien
ggctcaaccggagaaggatccactt

SEQ ID NO: 1497299 - DNA, 25 bp, Homo sapien
caatcaaagtgttagccagtgctgt

SEQ ID NO: 1497300 - DNA, 25 bp, Homo sapien
tggctgttggccaaagatggccctc

SEQ ID NO: 1497301 - DNA, 25 bp, Homo sapien
caggaatctgggtatggcttgtgta

SEQ ID NO: 1497302 - DNA, 25 bp, Homo sapien
gttctccttgaagatccagaatcta

SEQ ID NO: 1497303 - DNA, 25 bp, Homo sapien
caatgaactcaaacaaatttacaag

SEQ ID NO: 1497304 - DNA, 25 bp, Homo sapien
tgaactcaaacaaatttacaagaaa

SEQ ID NO: 1497305 - DNA, 25 bp, Homo sapien
agttctccttgaagatccagaatct

SEQ ID NO: 1497306 - DNA, 25 bp, Homo sapien
tgtacgctatacaagcatcaggatg

SEQ ID NO: 1497307 - DNA, 25 bp, Homo sapien
ccaaggcaggcaagcgtattctagc

SEQ ID NO: 1497308 - DNA, 25 bp, Homo sapien
cactgagcactatgcatgggccaca

SEQ ID NO: 1497309 - DNA, 25 bp, Homo sapien
cattggatcttagagcttagctccc

SEQ ID NO: 1497310 - DNA, 25 bp, Homo sapien
tgttcgcagacaacccgtttgaggg

SEQ ID NO: 1497311 - DNA, 25 bp, Homo sapien
ccgtttgagggagtatcgatcctac

SEQ ID NO: 1497312 - DNA, 25 bp, Homo sapien
gcttcactgactgttgttttgttcg

SEQ ID NO: 1497313 - DNA, 25 bp, Homo sapien
ggagtatcgatcctactttaatccc

SEQ ID NO: 1497314 - DNA, 25 bp, Homo sapien
ttgtctttcctgagataaattctga

SEQ ID NO: 1497315 - DNA, 25 bp, Homo sapien
taaattctgacctcttatcttctcc

SEQ ID NO: 1497316 - DNA, 25 bp, Homo sapien
attctgacctcttatcttctcccag

SEQ ID NO: 1497317 - DNA, 25 bp, Homo sapien
tcccaggattttgaaggatctgctc

SEQ ID NO: 1497318 - DNA, 25 bp, Homo sapien
attcctcacccctccaagggattct

SEQ ID NO: 1497319 - DNA, 25 bp, Homo sapien
attctttgggtctgaggaagtcctt

SEQ ID NO: 1497320 - DNA, 25 bp, Homo sapien
tccttgggaattcctcacccctcca

SEQ ID NO: 1497321 - DNA, 25 bp, Homo sapien
gggattctttgggtctgaggaagtc

SEQ ID NO: 1497322 - DNA, 25 bp, Homo sapien
aaagtcctccagaatgtggccatct

SEQ ID NO: 1497323 - DNA, 25 bp, Homo sapien
taactgggcattctacttccgtgga

SEQ ID NO: 1497324 - DNA, 25 bp, Homo sapien
tatgcatactaagtgcagtcccgca

SEQ ID NO: 1497325 - DNA, 25 bp, Homo sapien
ggatctatggatgccccttgtaaac

SEQ ID NO: 1497326 - DNA, 25 bp, Homo sapien
catgacagatatcagaagaatgtta

SEQ ID NO: 1497327 - DNA, 25 bp, Homo sapien
ccatcatgacagatatcagaagaat

SEQ ID NO: 1497328 - DNA, 25 bp, Homo sapien
gaatgttaccattttgggatctgta

SEQ ID NO: 1497329 - DNA, 25 bp, Homo sapien
tagtggttcggagtgggcaagaatg

SEQ ID NO: 1497330 - DNA, 25 bp, Homo sapien
ccaaccgctcaccaaatccaccctt

SEQ ID NO: 1497331 - DNA, 25 bp, Homo sapien
attccaaccgctcaccaaatccacc

SEQ ID NO: 1497332 - DNA, 25 bp, Homo sapien
caaccgctcaccaaatccacccttt

SEQ ID NO: 1497333 - DNA, 25 bp, Homo sapien
gtgattccaaccgctcaccaaatcc

SEQ ID NO: 1497334 - DNA, 25 bp, Homo sapien
aattgccttagcattaaactgtaca

SEQ ID NO: 1497335 - DNA, 25 bp, Homo sapien
ttcttcaaagcacccacgtcctgtt

SEQ ID NO: 1497336 - DNA, 25 bp, Homo sapien
ttcaaagcacccacgtcctgtttca

SEQ ID NO: 1497337 - DNA, 25 bp, Homo sapien
aaactgtacaattcctggcttcttc

SEQ ID NO: 1497338 - DNA, 25 bp, Homo sapien
gaactgtgcaaactctatataattt

SEQ ID NO: 1497339 - DNA, 25 bp, Homo sapien
cagtagttgacatggaagttcatgt

SEQ ID NO: 1497340 - DNA, 25 bp, Homo sapien
caaattgtcttatgcagtagttgac

SEQ ID NO: 1497341 - DNA, 25 bp, Homo sapien
aataaacatagtaagaactgtgcaa

SEQ ID NO: 1497342 - DNA, 25 bp, Homo sapien
atttttcttctacatcagagctgcc

SEQ ID NO: 1497343 - DNA, 25 bp, Homo sapien
tgccagttccatcatgcttcaccat

SEQ ID NO: 1497344 - DNA, 25 bp, Homo sapien
ttccatgtctagcagatttttcttc

SEQ ID NO: 1497345 - DNA, 25 bp, Homo sapien
agtcttccatgtctagcagattttt

SEQ ID NO: 1497346 - DNA, 25 bp, Homo sapien
caggcaggatcaatatcatgcattg

SEQ ID NO: 1497347 - DNA, 25 bp, Homo sapien
gaagtattggcaatgcgctgcaggc

SEQ ID NO: 1497348 - DNA, 25 bp, Homo sapien
taccgattttatctgaagtattggc

SEQ ID NO: 1497349 - DNA, 25 bp, Homo sapien
gcaatgcgctgcaggcaggatcaat

SEQ ID NO: 1497350 - DNA, 25 bp, Homo sapien
gaggcatgatgctggcccaaccaca

SEQ ID NO: 1497351 - DNA, 25 bp, Homo sapien
aagggaggcatgatgctggcccaac

SEQ ID NO: 1497352 - DNA, 25 bp, Homo sapien
ctgcaaagggaggcatgatgctggc

SEQ ID NO: 1497353 - DNA, 25 bp, Homo sapien
tgcaaagggaggcatgatgctggcc

SEQ ID NO: 1497354 - DNA, 25 bp, Homo sapien
tcagtcagacatacagtagcttcag

SEQ ID NO: 1497355 - DNA, 25 bp, Homo sapien
gaaacatcagtgttggcgaactttg

SEQ ID NO: 1497356 - DNA, 25 bp, Homo sapien
catttccagcggtcagatgtactga

SEQ ID NO: 1497357 - DNA, 25 bp, Homo sapien
gatctgtgcaaatctggatgggaaa

SEQ ID NO: 1497358 - DNA, 25 bp, Homo sapien
gcctttcatgcagcaaaccatttac

SEQ ID NO: 1497359 - DNA, 25 bp, Homo sapien
gaaaaccacacgtgtgcacagagcg

SEQ ID NO: 1497360 - DNA, 25 bp, Homo sapien
gaaaaagccctcctattgaaattgc

SEQ ID NO: 1497361 - DNA, 25 bp, Homo sapien
ctaacgaaagtaatccagattgcct

SEQ ID NO: 1497362 - DNA, 25 bp, Homo sapien
tgagctgaggcacgttcctggaatg

SEQ ID NO: 1497363 - DNA, 25 bp, Homo sapien
tacaagtgccactttctcgaggagg

SEQ ID NO: 1497364 - DNA, 25 bp, Homo sapien
gttctgcaagcaccagtgcaccaag

SEQ ID NO: 1497365 - DNA, 25 bp, Homo sapien
tacaacagcggaaatccctgcggag

SEQ ID NO: 1497366 - DNA, 25 bp, Homo sapien
cctcctaaaggatcatggcgcacag

SEQ ID NO: 1497367 - DNA, 25 bp, Homo sapien
ggatcatggcgcacaggaggtaaaa

SEQ ID NO: 1497368 - DNA, 25 bp, Homo sapien
cacctagatatttccctcctaaagg

SEQ ID NO: 1497369 - DNA, 25 bp, Homo sapien
cattcatatcacctagatatttccc

SEQ ID NO: 1497370 - DNA, 25 bp, Homo sapien
cacttcccttctcgagatacctaag

SEQ ID NO: 1497371 - DNA, 25 bp, Homo sapien
tattgagggagtgttctatctggtt

SEQ ID NO: 1497372 - DNA, 25 bp, Homo sapien
gttatcgatgatgtgtcctgctgca

SEQ ID NO: 1497373 - DNA, 25 bp, Homo sapien
cattctggagactggtgacactgtg

SEQ ID NO: 1497374 - DNA, 25 bp, Homo sapien
cagagctacctttcgctgtgagata

SEQ ID NO: 1497375 - DNA, 25 bp, Homo sapien
tgtgctaccgaagtactgtccagca

SEQ ID NO: 1497376 - DNA, 25 bp, Homo sapien
tcatagctggacttggaagacagcc

SEQ ID NO: 1497377 - DNA, 25 bp, Homo sapien
ttcccaggcctgatcattgaataag

SEQ ID NO: 1497378 - DNA, 25 bp, Homo sapien
ggtgcttcagatccccacatgctag

SEQ ID NO: 1497379 - DNA, 25 bp, Homo sapien
tgttgagagtgaaacccacaaagag

SEQ ID NO: 1497380 - DNA, 25 bp, Homo sapien
gttgctgtccttgccaaaacaaaga

SEQ ID NO: 1497381 - DNA, 25 bp, Homo sapien
caataacacctctcatgacactcgg

SEQ ID NO: 1497382 - DNA, 25 bp, Homo sapien
ctttgcaaaatgtgacaactgctgc

SEQ ID NO: 1497383 - DNA, 25 bp, Homo sapien
atgtctggcaagcacttctttgcaa

SEQ ID NO: 1497384 - DNA, 25 bp, Homo sapien
tgcaaaatgtgacaactgctgccat

SEQ ID NO: 1497385 - DNA, 25 bp, Homo sapien
ggcaagcacttctttgcaaaatgtg

SEQ ID NO: 1497386 - DNA, 25 bp, Homo sapien
tggctgaaatctgatcagggatttc

SEQ ID NO: 1497387 - DNA, 25 bp, Homo sapien
tctgatcagggatttcctgcgcagg

SEQ ID NO: 1497388 - DNA, 25 bp, Homo sapien
taaattgctccgtggaccataaaag

SEQ ID NO: 1497389 - DNA, 25 bp, Homo sapien
tggaccataaaagctacttgatctg

SEQ ID NO: 1497390 - DNA, 25 bp, Homo sapien
taaaggtcttggctgatctccccca

SEQ ID NO: 1497391 - DNA, 25 bp, Homo sapien
aaaggtcttggctgatctcccccac

SEQ ID NO: 1497392 - DNA, 25 bp, Homo sapien
gatgtagtctcacctgtcaatttgt

SEQ ID NO: 1497393 - DNA, 25 bp, Homo sapien
tcccattgagtagtgctgccatcct

SEQ ID NO: 1497394 - DNA, 25 bp, Homo sapien
tctgactccatgtaaattgtaggct

SEQ ID NO: 1497395 - DNA, 25 bp, Homo sapien
tcaggaagcatgtgatctccaaatt

SEQ ID NO: 1497396 - DNA, 25 bp, Homo sapien
ggcttccccttgtagacagatttga

SEQ ID NO: 1497397 - DNA, 25 bp, Homo sapien
acagatttgagtccacgaagcaggg

SEQ ID NO: 1497398 - DNA, 25 bp, Homo sapien
tgtctgtatcttatccaccgttagg

SEQ ID NO: 1497399 - DNA, 25 bp, Homo sapien
gctgacctagcaggtgtccagccgc

SEQ ID NO: 1497400 - DNA, 25 bp, Homo sapien
acccactgcatccaccgtgtcaggc

SEQ ID NO: 1497401 - DNA, 25 bp, Homo sapien
ccactgcatccaccgtgtcaggcat

SEQ ID NO: 1497402 - DNA, 25 bp, Homo sapien
ctggtaactgatagatgctgcatcc

SEQ ID NO: 1497403 - DNA, 25 bp, Homo sapien
ggtaactgatagatgctgcatccac

SEQ ID NO: 1497404 - DNA, 25 bp, Homo sapien
tatagtagcaaacacaggaattacg

SEQ ID NO: 1497405 - DNA, 25 bp, Homo sapien
tacgagatgtactagcgtagtatcc

SEQ ID NO: 1497406 - DNA, 25 bp, Homo sapien
cccagtgaacaatacgacagttaaa

SEQ ID NO: 1497407 - DNA, 25 bp, Homo sapien
aattacgcgtgccaacccagtgaac

SEQ ID NO: 1497408 - DNA, 25 bp, Homo sapien
gatgtgctgctatctctcctagagc

SEQ ID NO: 1497409 - DNA, 25 bp, Homo sapien
cttccaccccttgatgtgctgctat

SEQ ID NO: 1497410 - DNA, 25 bp, Homo sapien
gctgacgatgaaaatctgtaagtat

SEQ ID NO: 1497411 - DNA, 25 bp, Homo sapien
tttgccgctagtgttgcctgaaagc

SEQ ID NO: 1497412 - DNA, 25 bp, Homo sapien
cctgagtcttaattcatggttcagg

SEQ ID NO: 1497413 - DNA, 25 bp, Homo sapien
ctattgccttcagggtagctctaca

SEQ ID NO: 1497414 - DNA, 25 bp, Homo sapien
caaaagccaattgcaacattctctc

SEQ ID NO: 1497415 - DNA, 25 bp, Homo sapien
tctggaccataaagcttttgaaacg

SEQ ID NO: 1497416 - DNA, 25 bp, Homo sapien
tcattgaatttagtcatcaggcagt

SEQ ID NO: 1497417 - DNA, 25 bp, Homo sapien
gaatttagtcatcaggcagttgctg

SEQ ID NO: 1497418 - DNA, 25 bp, Homo sapien
gagaattgaggcgagatcattgaat

SEQ ID NO: 1497419 - DNA, 25 bp, Homo sapien
tgtcgctgttattccattatacatg

SEQ ID NO: 1497420 - DNA, 25 bp, Homo sapien
gagccaaaaagctttaggcaacgct

SEQ ID NO: 1497421 - DNA, 25 bp, Homo sapien
tcagatgtcgcatcccatgtgcaac

SEQ ID NO: 1497422 - DNA, 25 bp, Homo sapien
gcaacgcttgactgatagttctcca

SEQ ID NO: 1497423 - DNA, 25 bp, Homo sapien
taaagccgtaaaaggattgcagtct

SEQ ID NO: 1497424 - DNA, 25 bp, Homo sapien
catcttctcttagtggacatgagca

SEQ ID NO: 1497425 - DNA, 25 bp, Homo sapien
gacatgagcatcgtccgtctgcctg

SEQ ID NO: 1497426 - DNA, 25 bp, Homo sapien
aaagtttccttctcggaggtcgctg

SEQ ID NO: 1497427 - DNA, 25 bp, Homo sapien
gaggtcgctgtgtctatgaccatct

SEQ ID NO: 1497428 - DNA, 25 bp, Homo sapien
gcaccctctctgttatagactggag

SEQ ID NO: 1497429 - DNA, 25 bp, Homo sapien
gctgagagccagaccataggaagag

SEQ ID NO: 1497430 - DNA, 25 bp, Homo sapien
tggccatcaactgctacctgggtta

SEQ ID NO: 1497431 - DNA, 25 bp, Homo sapien
caaggaaccatggaagaggtctccc

SEQ ID NO: 1497432 - DNA, 25 bp, Homo sapien
gctgatgatttagagccattgttct

SEQ ID NO: 1497433 - DNA, 25 bp, Homo sapien
ttcctcttcgaaggccacagctgct

SEQ ID NO: 1497434 - DNA, 25 bp, Homo sapien
gttctttcctcttcgaaggccacag

SEQ ID NO: 1497435 - DNA, 25 bp, Homo sapien
aaagctgatgatttagagccattgt

SEQ ID NO: 1497436 - DNA, 25 bp, Homo sapien
tctcttgtttagtcttttcagtcat

SEQ ID NO: 1497437 - DNA, 25 bp, Homo sapien
gaacagagttctcttgtttagtctt

SEQ ID NO: 1497438 - DNA, 25 bp, Homo sapien
gagttctcttgtttagtcttttcag

SEQ ID NO: 1497439 - DNA, 25 bp, Homo sapien
gagaacagagttctcttgtttagtc

SEQ ID NO: 1497440 - DNA, 25 bp, Homo sapien
ctgtgttgttcattgctatggctac

SEQ ID NO: 1497441 - DNA, 25 bp, Homo sapien
ctatggctacatactcatgggatct

SEQ ID NO: 1497442 - DNA, 25 bp, Homo sapien
tgtagacacgacataattcaggtat

SEQ ID NO: 1497443 - DNA, 25 bp, Homo sapien
actcatgggatctgtagacacgaca

SEQ ID NO: 1497444 - DNA, 25 bp, Homo sapien
ccgataacccaattttgtgctcagc

SEQ ID NO: 1497445 - DNA, 25 bp, Homo sapien
actccgataacccaattttgtgctc

SEQ ID NO: 1497446 - DNA, 25 bp, Homo sapien
gcacagcactccgataacccaattt

SEQ ID NO: 1497447 - DNA, 25 bp, Homo sapien
agcactccgataacccaattttgtg

SEQ ID NO: 1497448 - DNA, 25 bp, Homo sapien
ctaaagtccatgcagggttttaact

SEQ ID NO: 1497449 - DNA, 25 bp, Homo sapien
gttctctaaagtccatgcagggttt

SEQ ID NO: 1497450 - DNA, 25 bp, Homo sapien
gttttaacttttccctcatagatgc

SEQ ID NO: 1497451 - DNA, 25 bp, Homo sapien
caattcttgcctccggagagtccac

SEQ ID NO: 1497452 - DNA, 25 bp, Homo sapien
gcaagaatgagtgcgtgcatcagat

SEQ ID NO: 1497453 - DNA, 25 bp, Homo sapien
cagagagccatcgaagttgtctgac

SEQ ID NO: 1497454 - DNA, 25 bp, Homo sapien
gggtcttgcagacatgcatcgttgc

SEQ ID NO: 1497455 - DNA, 25 bp, Homo sapien
gcatcagatgaaagttgtccatggg

SEQ ID NO: 1497456 - DNA, 25 bp, Homo sapien
tctgacttaaatgatcgtatgtggc

SEQ ID NO: 1497457 - DNA, 25 bp, Homo sapien
cgtatgtggctctcgtaagatacaa

SEQ ID NO: 1497458 - DNA, 25 bp, Homo sapien
catgcccatgtgatagctgcctgtc

SEQ ID NO: 1497459 - DNA, 25 bp, Homo sapien
aatcatgcccatgtgatagctgcct

SEQ ID NO: 1497460 - DNA, 25 bp, Homo sapien
cgttggcctgttactctctcctttt

SEQ ID NO: 1497461 - DNA, 25 bp, Homo sapien
ccgttggcctgttactctctccttt

SEQ ID NO: 1497462 - DNA, 25 bp, Homo sapien
ttttcttcatagaggctcatctcat

SEQ ID NO: 1497463 - DNA, 25 bp, Homo sapien
tagaggctcatctcatccaatgtca

SEQ ID NO: 1497464 - DNA, 25 bp, Homo sapien
tccagatatttatatcgatccaaga

SEQ ID NO: 1497465 - DNA, 25 bp, Homo sapien
tttactttgcaacaatagtcctgaa

SEQ ID NO: 1497466 - DNA, 25 bp, Homo sapien
tttatatcgatccaagaaccacatt

SEQ ID NO: 1497467 - DNA, 25 bp, Homo sapien
aaccacatttactttgcaacaatag

SEQ ID NO: 1497468 - DNA, 25 bp, Homo sapien
ccacaactggctgacaggtttatga

SEQ ID NO: 1497469 - DNA, 25 bp, Homo sapien
gacatttctcgaaagaaaacccaca

SEQ ID NO: 1497470 - DNA, 25 bp, Homo sapien
tcatctgttgagtatgtaccacccc

SEQ ID NO: 1497471 - DNA, 25 bp, Homo sapien
cacctgttaggacgggtattagcaa

SEQ ID NO: 1497472 - DNA, 25 bp, Homo sapien
tcacttcttggatgcaatcaaagaa

SEQ ID NO: 1497473 - DNA, 25 bp, Homo sapien
acttcttggatgcaatcaaagaact

SEQ ID NO: 1497474 - DNA, 25 bp, Homo sapien
cacttcttggatgcaatcaaagaac

SEQ ID NO: 1497475 - DNA, 25 bp, Homo sapien
gattggtcaacactccactacccag

SEQ ID NO: 1497476 - DNA, 25 bp, Homo sapien
acgagacaatcacgcccctgagctg

SEQ ID NO: 1497477 - DNA, 25 bp, Homo sapien
gctgtgattggtcaacactccacta

SEQ ID NO: 1497478 - DNA, 25 bp, Homo sapien
ctctcgcgatcccaggacgagacaa

SEQ ID NO: 1497479 - DNA, 25 bp, Homo sapien
tcccgaggctctcggctttggactc

SEQ ID NO: 1497480 - DNA, 25 bp, Homo sapien
ggtcccgaggctctcggctttggac

SEQ ID NO: 1497481 - DNA, 25 bp, Homo sapien
gaggtcccgaggctctcggctttgg

SEQ ID NO: 1497482 - DNA, 25 bp, Homo sapien
tggccttggccggaggtcccgaggc

SEQ ID NO: 1497483 - DNA, 25 bp, Homo sapien
acagggacgtgtcctcagaagcggt

SEQ ID NO: 1497484 - DNA, 25 bp, Homo sapien
ggaacagggacgtgtcctcagaagc

SEQ ID NO: 1497485 - DNA, 25 bp, Homo sapien
gggacgtgtcctcagaagcggtggg

SEQ ID NO: 1497486 - DNA, 25 bp, Homo sapien
aacagggacgtgtcctcagaagcgg

SEQ ID NO: 1497487 - DNA, 25 bp, Homo sapien
ctgactcagtggttcttccacctcg

SEQ ID NO: 1497488 - DNA, 25 bp, Homo sapien
gactcagtggttcttccacctcgct

SEQ ID NO: 1497489 - DNA, 25 bp, Homo sapien
tgactcagtggttcttccacctcgc

SEQ ID NO: 1497490 - DNA, 25 bp, Homo sapien
tgactcggtggttcctccacctggc

SEQ ID NO: 1497491 - DNA, 25 bp, Homo sapien
ctcctgactcagtggttcttccatc

SEQ ID NO: 1497492 - DNA, 25 bp, Homo sapien
gactcagtggttcttccatctcgct

SEQ ID NO: 1497493 - DNA, 25 bp, Homo sapien
ctgactcggtggttcctccacctgg

SEQ ID NO: 1497494 - DNA, 25 bp, Homo sapien
tacacactcggtagttcttccatct

SEQ ID NO: 1497495 - DNA, 25 bp, Homo sapien
acactcggtagttcttccatctcgc

SEQ ID NO: 1497496 - DNA, 25 bp, Homo sapien
cacactcggtagttcttccatctcg

SEQ ID NO: 1497497 - DNA, 25 bp, Homo sapien
ctacacactcggtagttcttccatc

SEQ ID NO: 1497498 - DNA, 25 bp, Homo sapien
tcggagataggggagtacttggccg

SEQ ID NO: 1497499 - DNA, 25 bp, Homo sapien
gcggctgggcctgaacttagtcgct

SEQ ID NO: 1497500 - DNA, 25 bp, Homo sapien
tatcttcagaatggcaagcaccccg

SEQ ID NO: 1497501 - DNA, 25 bp, Homo sapien
cttagtcgctgctctcggagatagg

SEQ ID NO: 1497502 - DNA, 25 bp, Homo sapien
agcacctcccttaataaaagcagat

SEQ ID NO: 1497503 - DNA, 25 bp, Homo sapien
cctcccttaataaaagcagatacct

SEQ ID NO: 1497504 - DNA, 25 bp, Homo sapien
ccttaataaaagcagatacctcatt

SEQ ID NO: 1497505 - DNA, 25 bp, Homo sapien
tcacacgctctagcacctcccttaa

SEQ ID NO: 1497506 - DNA, 25 bp, Homo sapien
actggggttaaaacttgctttgctg

SEQ ID NO: 1497507 - DNA, 25 bp, Homo sapien
ctggggttaaaacttgctttgctgg

SEQ ID NO: 1497508 - DNA, 25 bp, Homo sapien
catgcatccagcttggtaactgggg

SEQ ID NO: 1497509 - DNA, 25 bp, Homo sapien
tcatgcatccagcttggtaactggg

SEQ ID NO: 1497510 - DNA, 25 bp, Homo sapien
tttgaggagttatgcatagacccac

SEQ ID NO: 1497511 - DNA, 25 bp, Homo sapien
ggtccctgtggtatatactttctcc

SEQ ID NO: 1497512 - DNA, 25 bp, Homo sapien
cactctagagtaatgatggtccctg

SEQ ID NO: 1497513 - DNA, 25 bp, Homo sapien
tttagcacataaacaccaacgatgg

SEQ ID NO: 1497514 - DNA, 25 bp, Homo sapien
tgcacataaggcacgcgggaaactc

SEQ ID NO: 1497515 - DNA, 25 bp, Homo sapien
gccttgaaaagctgcgggatgtcca

SEQ ID NO: 1497516 - DNA, 25 bp, Homo sapien
aaagttccccagagtcatagtccag

SEQ ID NO: 1497517 - DNA, 25 bp, Homo sapien
caaaatagccgctggagttggcccc

SEQ ID NO: 1497518 - DNA, 25 bp, Homo sapien
aggctgcccggtgataaagttttca

SEQ ID NO: 1497519 - DNA, 25 bp, Homo sapien
ccaggtgtagaaatagtggatgccc

SEQ ID NO: 1497520 - DNA, 25 bp, Homo sapien
tcctgaatcgacctgctgacagtgt

SEQ ID NO: 1497521 - DNA, 25 bp, Homo sapien
gttgtggtgttcatccaggctgccc

SEQ ID NO: 1497522 - DNA, 25 bp, Homo sapien
ctgtaggcacctcccgaagctaaag

SEQ ID NO: 1497523 - DNA, 25 bp, Homo sapien
ttcctactccgtagctggtgtgcac

SEQ ID NO: 1497524 - DNA, 25 bp, Homo sapien
tggtgtgcacaaccagggcatctgt

SEQ ID NO: 1497525 - DNA, 25 bp, Homo sapien
cccttatgggatacaggataaaatc

SEQ ID NO: 1497526 - DNA, 25 bp, Homo sapien
cgttccctgaggttgcacctggcac

SEQ ID NO: 1497527 - DNA, 25 bp, Homo sapien
gttgcacctggcacgtgtggcacca

SEQ ID NO: 1497528 - DNA, 25 bp, Homo sapien
ggcacgtgtggcaccagctatgttc

SEQ ID NO: 1497529 - DNA, 25 bp, Homo sapien
ggttcctggactggcgttccctgag

SEQ ID NO: 1497530 - DNA, 25 bp, Homo sapien
acggggaagaaatgggaggtgtgat

SEQ ID NO: 1497531 - DNA, 25 bp, Homo sapien
cggggaagaaatgggaggtgtgatc

SEQ ID NO: 1497532 - DNA, 25 bp, Homo sapien
ggggaagaaatgggaggtgtgatca

SEQ ID NO: 1497533 - DNA, 25 bp, Homo sapien
ctctgccagaaatatggactaggaa

SEQ ID NO: 1497534 - DNA, 25 bp, Homo sapien
tgaggttgtataaactccagagctg

SEQ ID NO: 1497535 - DNA, 25 bp, Homo sapien
ccacgtttggttatggtgtgcacac

SEQ ID NO: 1497536 - DNA, 25 bp, Homo sapien
aatgagactctacactgtctgtgct

SEQ ID NO: 1497537 - DNA, 25 bp, Homo sapien
tcggattggcaacctgccctaactt

SEQ ID NO: 1497538 - DNA, 25 bp, Homo sapien
aatagtcaaggcatattcaggctgc

SEQ ID NO: 1497539 - DNA, 25 bp, Homo sapien
caaatgcttatagccctcgtcgaag

SEQ ID NO: 1497540 - DNA, 25 bp, Homo sapien
ttcaggctgccaatactcggattgg

SEQ ID NO: 1497541 - DNA, 25 bp, Homo sapien
gacagcaatacagttccaaatccct

SEQ ID NO: 1497542 - DNA, 25 bp, Homo sapien
tctttaaggcagatagtggttagca

SEQ ID NO: 1497543 - DNA, 25 bp, Homo sapien
caaacaaaggacactcgaagaaagg

SEQ ID NO: 1497544 - DNA, 25 bp, Homo sapien
gaattagtcaactctgccacctctg

SEQ ID NO: 1497545 - DNA, 25 bp, Homo sapien
cagtttggacaaggacaagccagta

SEQ ID NO: 1497546 - DNA, 25 bp, Homo sapien
gacctaggatacagagtggcttcac

SEQ ID NO: 1497547 - DNA, 25 bp, Homo sapien
gaatgcatgaaagaacacaaccctg

SEQ ID NO: 1497548 - DNA, 25 bp, Homo sapien
caaataagtgcctgcaaggtagggc

SEQ ID NO: 1497549 - DNA, 25 bp, Homo sapien
tacttcctgagagctctcaaatcct

SEQ ID NO: 1497550 - DNA, 25 bp, Homo sapien
acttcctgagagctctcaaatcctt

SEQ ID NO: 1497551 - DNA, 25 bp, Homo sapien
ggaattaccaacctgagacttttga

SEQ ID NO: 1497552 - DNA, 25 bp, Homo sapien
gcttggaaacaccatgcagaatgta

SEQ ID NO: 1497553 - DNA, 25 bp, Homo sapien
taagaatgctgaacccaagaaagat

SEQ ID NO: 1497554 - DNA, 25 bp, Homo sapien
catctttcttggactggactgtgga

SEQ ID NO: 1497555 - DNA, 25 bp, Homo sapien
tgcactgtgctacgataaacatatg

SEQ ID NO: 1497556 - DNA, 25 bp, Homo sapien
gaggtccaggcttttagtgcatcca

SEQ ID NO: 1497557 - DNA, 25 bp, Homo sapien
ttttgcatagtcacagcttagcccc

SEQ ID NO: 1497558 - DNA, 25 bp, Homo sapien
tttagccacacatcagttggtgggc

SEQ ID NO: 1497559 - DNA, 25 bp, Homo sapien
caccgagagaagttgtacagtgcta

SEQ ID NO: 1497560 - DNA, 25 bp, Homo sapien
tatagctagctctttagtaacctcc

SEQ ID NO: 1497561 - DNA, 25 bp, Homo sapien
tctttaggatcgcaacaccgagaga

SEQ ID NO: 1497562 - DNA, 25 bp, Homo sapien
taacatgtgcgatctctgtctttcg

SEQ ID NO: 1497563 - DNA, 25 bp, Homo sapien
tgcttgagcccgatcttgtatatac

SEQ ID NO: 1497564 - DNA, 25 bp, Homo sapien
tgatgacccataggtaaaggttaag

SEQ ID NO: 1497565 - DNA, 25 bp, Homo sapien
aaaggcagttcaggctgtatggtga

SEQ ID NO: 1497566 - DNA, 25 bp, Homo sapien
tgcacgacgcactttatggctaggt

SEQ ID NO: 1497567 - DNA, 25 bp, Homo sapien
ctttcttgtccttccactatagaac

SEQ ID NO: 1497568 - DNA, 25 bp, Homo sapien
ggtaaggggtggcataaatatcaac

SEQ ID NO: 1497569 - DNA, 25 bp, Homo sapien
tgtccttccactatagaacaaatag

SEQ ID NO: 1497570 - DNA, 25 bp, Homo sapien
tcaactgttccatcactaagtacat

SEQ ID NO: 1497571 - DNA, 25 bp, Homo sapien
cacaatttgtttaggcactcgccca

SEQ ID NO: 1497572 - DNA, 25 bp, Homo sapien
gagatcctggaagtacaaacatatg

SEQ ID NO: 1497573 - DNA, 25 bp, Homo sapien
gctgtaaaggacatctgaaactcat

SEQ ID NO: 1497574 - DNA, 25 bp, Homo sapien
tacgcttagttttgcaacatttggc

SEQ ID NO: 1497575 - DNA, 25 bp, Homo sapien
acaacggcaaaccaagctatcaggg

SEQ ID NO: 1497576 - DNA, 25 bp, Homo sapien
atcctccactgttaaccgaccccag

SEQ ID NO: 1497577 - DNA, 25 bp, Homo sapien
tagccaaatccatgggacaacggca

SEQ ID NO: 1497578 - DNA, 25 bp, Homo sapien
gggtggtgcagccacttggcttggt

SEQ ID NO: 1497579 - DNA, 25 bp, Homo sapien
agcaggccatccttgccccaaaatt

SEQ ID NO: 1497580 - DNA, 25 bp, Homo sapien
ctttgacagggtgtagtgaagacag

SEQ ID NO: 1497581 - DNA, 25 bp, Homo sapien
tcatgagagtcacaagggaaggtca

SEQ ID NO: 1497582 - DNA, 25 bp, Homo sapien
gcaccagaactttgacagggtgtag

SEQ ID NO: 1497583 - DNA, 25 bp, Homo sapien
aaagtagagctagtatttctagagg

SEQ ID NO: 1497584 - DNA, 25 bp, Homo sapien
gtcaagaaggtatatgaggtacact

SEQ ID NO: 1497585 - DNA, 25 bp, Homo sapien
gcgtggctgttgagtatttgccttt

SEQ ID NO: 1497586 - DNA, 25 bp, Homo sapien
gcctttttgtgggtccataaagata

SEQ ID NO: 1497587 - DNA, 25 bp, Homo sapien
gaagtgtcttcacagactattacat

SEQ ID NO: 1497588 - DNA, 25 bp, Homo sapien
tcacagactattacataatctctaa

SEQ ID NO: 1497589 - DNA, 25 bp, Homo sapien
tcttcacagactattacataatctc

SEQ ID NO: 1497590 - DNA, 25 bp, Homo sapien
tacataatctctaatcttttggatt

SEQ ID NO: 1497591 - DNA, 25 bp, Homo sapien
tgcagctccctgctagagggtagcg

SEQ ID NO: 1497592 - DNA, 25 bp, Homo sapien
agagggtagcggaagaagtcccctg

SEQ ID NO: 1497593 - DNA, 25 bp, Homo sapien
agctgctgggcacctagagactctg

SEQ ID NO: 1497594 - DNA, 25 bp, Homo sapien
caaggggttgttacaggccctcctg

SEQ ID NO: 1497595 - DNA, 25 bp, Homo sapien
tagtggaatctacatgacagacgaa

SEQ ID NO: 1497596 - DNA, 25 bp, Homo sapien
cacatttcagtagcgctgaggttga

SEQ ID NO: 1497597 - DNA, 25 bp, Homo sapien
gtgggtagatgccagagattctgct

SEQ ID NO: 1497598 - DNA, 25 bp, Homo sapien
aggacagccctctcgcaacaaaaac

SEQ ID NO: 1497599 - DNA, 25 bp, Homo sapien
tgaaagattcagaaccttgttccag

SEQ ID NO: 1497600 - DNA, 25 bp, Homo sapien
gctgaaagattcagaaccttgttcc

SEQ ID NO: 1497601 - DNA, 25 bp, Homo sapien
ctgaaagattcagaaccttgttcca

SEQ ID NO: 1497602 - DNA, 25 bp, Homo sapien
gaaagattcagaaccttgttccagc

SEQ ID NO: 1497603 - DNA, 25 bp, Homo sapien
tgcatactgcacaaaggctctggaa

SEQ ID NO: 1497604 - DNA, 25 bp, Homo sapien
catttgattggtaccttcccctagg

SEQ ID NO: 1497605 - DNA, 25 bp, Homo sapien
taagctgagggtacttctgctgagt

SEQ ID NO: 1497606 - DNA, 25 bp, Homo sapien
tccatgatgacagatgccacccatt

SEQ ID NO: 1497607 - DNA, 25 bp, Homo sapien
tactgttccctcgagacaaattgga

SEQ ID NO: 1497608 - DNA, 25 bp, Homo sapien
caaccaggattaagctaaggccagg

SEQ ID NO: 1497609 - DNA, 25 bp, Homo sapien
tgaagacccaatgcaggttcaaggc

SEQ ID NO: 1497610 - DNA, 25 bp, Homo sapien
taatagcttttggatgcacagccac

SEQ ID NO: 1497611 - DNA, 25 bp, Homo sapien
gcagaagattccactccctggatcc

SEQ ID NO: 1497612 - DNA, 25 bp, Homo sapien
agacagagtttagtgcttcttgctc

SEQ ID NO: 1497613 - DNA, 25 bp, Homo sapien
gagtcatgctgaccgaagacagagt

SEQ ID NO: 1497614 - DNA, 25 bp, Homo sapien
ggctgagagtcatgctgaccgaaga

SEQ ID NO: 1497615 - DNA, 25 bp, Homo sapien
tgaccgaagacagagtttagtgctt

SEQ ID NO: 1497616 - DNA, 25 bp, Homo sapien
catgcaggacatatccagatcagtg

SEQ ID NO: 1497617 - DNA, 25 bp, Homo sapien
tgcaggccccaatcatcagcatttt

SEQ ID NO: 1497618 - DNA, 25 bp, Homo sapien
tatgccaagagtagagagaactcag

SEQ ID NO: 1497619 - DNA, 25 bp, Homo sapien
atatactttgatctccctcctcggg

SEQ ID NO: 1497620 - DNA, 25 bp, Homo sapien
ttgtgtaactactgacctctgccat

SEQ ID NO: 1497621 - DNA, 25 bp, Homo sapien
aactgcacctcctatagcaaatgtg

SEQ ID NO: 1497622 - DNA, 25 bp, Homo sapien
tctcaggttagtaggcaactgcacc

SEQ ID NO: 1497623 - DNA, 25 bp, Homo sapien
tggctgagtgcttaccatctccaag

SEQ ID NO: 1497624 - DNA, 25 bp, Homo sapien
agcttggccttttatatgggtctcc

SEQ ID NO: 1497625 - DNA, 25 bp, Homo sapien
tactcgtgtcacatgtttggcttag

SEQ ID NO: 1497626 - DNA, 25 bp, Homo sapien
tcgtgtcacatgtttggcttaggga

SEQ ID NO: 1497627 - DNA, 25 bp, Homo sapien
tatttggcagctatggactgttaac

SEQ ID NO: 1497628 - DNA, 25 bp, Homo sapien
cagtccctttcaaatgctaaacacc

SEQ ID NO: 1497629 - DNA, 25 bp, Homo sapien
gccagtccctttcaaatgctaaaca

SEQ ID NO: 1497630 - DNA, 25 bp, Homo sapien
ccctttcaaatgctaaacacctcat

SEQ ID NO: 1497631 - DNA, 25 bp, Homo sapien
ctgccagtccctttcaaatgctaaa

SEQ ID NO: 1497632 - DNA, 25 bp, Homo sapien
cacagctcctaaagaatgggatcca

SEQ ID NO: 1497633 - DNA, 25 bp, Homo sapien
aagaatgggatccagtgcctctcct

SEQ ID NO: 1497634 - DNA, 25 bp, Homo sapien
agaagcacagctcctaaagaatggg

SEQ ID NO: 1497635 - DNA, 25 bp, Homo sapien
ttttacagaagcacagctcctaaag

SEQ ID NO: 1497636 - DNA, 25 bp, Homo sapien
gtcttacagtgtctcaaactcccca

SEQ ID NO: 1497637 - DNA, 25 bp, Homo sapien
gattattcgagctctgatgctgcgg

SEQ ID NO: 1497638 - DNA, 25 bp, Homo sapien
tgtccaaggacatactgtgaagtag

SEQ ID NO: 1497639 - DNA, 25 bp, Homo sapien
gagcaaacagctgcaatgtccccac

SEQ ID NO: 1497640 - DNA, 25 bp, Homo sapien
aggttctgtaggatgggtcttcaca

SEQ ID NO: 1497641 - DNA, 25 bp, Homo sapien
gttctgtaggatgggtcttcacagg

SEQ ID NO: 1497642 - DNA, 25 bp, Homo sapien
tgaaaagaacaactggcgtcagagc

SEQ ID NO: 1497643 - DNA, 25 bp, Homo sapien
aacaactggcgtcagagcttgtgct

SEQ ID NO: 1497644 - DNA, 25 bp, Homo sapien
aatggagcctttaatgctgcccagc

SEQ ID NO: 1497645 - DNA, 25 bp, Homo sapien
gctcagccacgggatctgcctgttt

SEQ ID NO: 1497646 - DNA, 25 bp, Homo sapien
tcaccttcgcaagaagagctctttg

SEQ ID NO: 1497647 - DNA, 25 bp, Homo sapien
gcctgtttactgatccctctctgat

SEQ ID NO: 1497648 - DNA, 25 bp, Homo sapien
tgttttcctgcaactggacagtctc

SEQ ID NO: 1497649 - DNA, 25 bp, Homo sapien
ttttcctgcaactggacagtctcat

SEQ ID NO: 1497650 - DNA, 25 bp, Homo sapien
gttttcctgcaactggacagtctca

SEQ ID NO: 1497651 - DNA, 25 bp, Homo sapien
gaagccaacagtgtctcagtccaag

SEQ ID NO: 1497652 - DNA, 25 bp, Homo sapien
gaaaactgacgtgactactctagag

SEQ ID NO: 1497653 - DNA, 25 bp, Homo sapien
ggaaaccactggtacaagtcccaga

SEQ ID NO: 1497654 - DNA, 25 bp, Homo sapien
gcacagtatactagggttctccaga

SEQ ID NO: 1497655 - DNA, 25 bp, Homo sapien
tagtgttaaacgcaatttcaaagaa

SEQ ID NO: 1497656 - DNA, 25 bp, Homo sapien
tgaatcacacgtctgcaggcttggg

SEQ ID NO: 1497657 - DNA, 25 bp, Homo sapien
aaagaaagtgaatcacacgtctgca

SEQ ID NO: 1497658 - DNA, 25 bp, Homo sapien
gaaagtgaatcacacgtctgcaggc

SEQ ID NO: 1497659 - DNA, 25 bp, Homo sapien
tggtgacctcggataaccttcaaaa

SEQ ID NO: 1497660 - DNA, 25 bp, Homo sapien
gataagtccgtagtcatagcctggt

SEQ ID NO: 1497661 - DNA, 25 bp, Homo sapien
gaaagaaccaggcaagaatgcatct

SEQ ID NO: 1497662 - DNA, 25 bp, Homo sapien
tatatcccagggaacgagtaaagga

SEQ ID NO: 1497663 - DNA, 25 bp, Homo sapien
gaggtaagctcatttgtcccaggca

SEQ ID NO: 1497664 - DNA, 25 bp, Homo sapien
gcatgagtgaactagacttcggtaa

SEQ ID NO: 1497665 - DNA, 25 bp, Homo sapien
tccaggaggcacacaatagattggt

SEQ ID NO: 1497666 - DNA, 25 bp, Homo sapien
tgtgagttgcaattaccagatggta

SEQ ID NO: 1497667 - DNA, 25 bp, Homo sapien
ctaacttaggatagcaatgtgcatt

SEQ ID NO: 1497668 - DNA, 25 bp, Homo sapien
tgcctgctggttcactgacagatac

SEQ ID NO: 1497669 - DNA, 25 bp, Homo sapien
gctcattatatgaagcagctctcaa

SEQ ID NO: 1497670 - DNA, 25 bp, Homo sapien
cccaggtggaacactgaagatgagg

SEQ ID NO: 1497671 - DNA, 25 bp, Homo sapien
cttaacctcccctgtttgttcatca

SEQ ID NO: 1497672 - DNA, 25 bp, Homo sapien
taacctcccctgtttgttcatcagt

SEQ ID NO: 1497673 - DNA, 25 bp, Homo sapien
tggccctcggtcatgctcctctttc

SEQ ID NO: 1497674 - DNA, 25 bp, Homo sapien
acctcccctgtttgttcatcagttc

SEQ ID NO: 1497675 - DNA, 25 bp, Homo sapien
tcttgacatatatgtcccttaaaag

SEQ ID NO: 1497676 - DNA, 25 bp, Homo sapien
catatatgtcccttaaaagacaagc

SEQ ID NO: 1497677 - DNA, 25 bp, Homo sapien
tatgtcccttaaaagacaagcacat

SEQ ID NO: 1497678 - DNA, 25 bp, Homo sapien
tcaaaactcttgacatatatgtccc

SEQ ID NO: 1497679 - DNA, 25 bp, Homo sapien
tagactggagtcaaaagtaggagat

SEQ ID NO: 1497680 - DNA, 25 bp, Homo sapien
cctagttctggaatagactggagtc

SEQ ID NO: 1497681 - DNA, 25 bp, Homo sapien
gagatgattgaaagcccagatttct

SEQ ID NO: 1497682 - DNA, 25 bp, Homo sapien
tctttgccagtgaggagagtattca

SEQ ID NO: 1497683 - DNA, 25 bp, Homo sapien
aaacagtattacagccgaaaggttg

SEQ ID NO: 1497684 - DNA, 25 bp, Homo sapien
agtattacagccgaaaggttgagaa

SEQ ID NO: 1497685 - DNA, 25 bp, Homo sapien
gagaacagataacttggccaaatcg

SEQ ID NO: 1497686 - DNA, 25 bp, Homo sapien
agataacttggccaaatcgccttgg

SEQ ID NO: 1497687 - DNA, 25 bp, Homo sapien
tgaggtctgcttccaggccttgcct

SEQ ID NO: 1497688 - DNA, 25 bp, Homo sapien
gtaaagcagtacaccctcacagcat

SEQ ID NO: 1497689 - DNA, 25 bp, Homo sapien
actaaaacacgtcaattggcatggc

SEQ ID NO: 1497690 - DNA, 25 bp, Homo sapien
gaacaaagactcaaggtacacccaa

SEQ ID NO: 1497691 - DNA, 25 bp, Homo sapien
agcagaaaacgaaaaggcacgtaat

SEQ ID NO: 1497692 - DNA, 25 bp, Homo sapien
ggcacgtaataattgctatctggtc

SEQ ID NO: 1497693 - DNA, 25 bp, Homo sapien
tgtagttacattcctctcccatttt

SEQ ID NO: 1497694 - DNA, 25 bp, Homo sapien
cttttctctaaattcacgatattta

SEQ ID NO: 1497695 - DNA, 25 bp, Homo sapien
gagtttggaggacacaatctcttaa

SEQ ID NO: 1497696 - DNA, 25 bp, Homo sapien
tgatgagtttggaggacacaatctc

SEQ ID NO: 1497697 - DNA, 25 bp, Homo sapien
tcttaacttgtcttcataatagtcc

SEQ ID NO: 1497698 - DNA, 25 bp, Homo sapien
ggaggacacaatctcttaacttgtc

SEQ ID NO: 1497699 - DNA, 25 bp, Homo sapien
cagagatccattcagtctgcaatca

SEQ ID NO: 1497700 - DNA, 25 bp, Homo sapien
tccatttgacatggcctagagaaaa

SEQ ID NO: 1497701 - DNA, 25 bp, Homo sapien
aacaacctttacattcttggagctg

SEQ ID NO: 1497702 - DNA, 25 bp, Homo sapien
taccgttaattgtgtgcagtttgaa

SEQ ID NO: 1497703 - DNA, 25 bp, Homo sapien
ggagggcctttccttattgatgggc

SEQ ID NO: 1497704 - DNA, 25 bp, Homo sapien
gaacataatcaattgggcacttacc

SEQ ID NO: 1497705 - DNA, 25 bp, Homo sapien
tcacacgttggtggagagacgagat

SEQ ID NO: 1497706 - DNA, 25 bp, Homo sapien
tgtgtctgcacccactttaataaga

SEQ ID NO: 1497707 - DNA, 25 bp, Homo sapien
tgcacctataagaattgggaacaag

SEQ ID NO: 1497708 - DNA, 25 bp, Homo sapien
catttgaacatgtagatcttgatcc

SEQ ID NO: 1497709 - DNA, 25 bp, Homo sapien
aactttcaagaacgcaataccctgt

SEQ ID NO: 1497710 - DNA, 25 bp, Homo sapien
taacggtactataactaaactgcac

SEQ ID NO: 1497711 - DNA, 25 bp, Homo sapien
tctctagctgaaagccaataccagt

SEQ ID NO: 1497712 - DNA, 25 bp, Homo sapien
gaatttcccctaatcagagctccaa

SEQ ID NO: 1497713 - DNA, 25 bp, Homo sapien
tattggccactttacaagaaacaag

SEQ ID NO: 1497714 - DNA, 25 bp, Homo sapien
tgagtatacattcctggcccgttac

SEQ ID NO: 1497715 - DNA, 25 bp, Homo sapien
ctctgcacgcgtgtcaccaggaagg

SEQ ID NO: 1497716 - DNA, 25 bp, Homo sapien
aaggcatctactgatccttcgtgcc

SEQ ID NO: 1497717 - DNA, 25 bp, Homo sapien
catctactgatccttcgtgcctcat

SEQ ID NO: 1497718 - DNA, 25 bp, Homo sapien
tctctgcacgcgtgtcaccaggaag

SEQ ID NO: 1497719 - DNA, 25 bp, Homo sapien
tcattttctgtgaccagagtagcct

SEQ ID NO: 1497720 - DNA, 25 bp, Homo sapien
gaaaagagttgacagcaactgggca

SEQ ID NO: 1497721 - DNA, 25 bp, Homo sapien
tttgcaatgtgtacagtccatgggt

SEQ ID NO: 1497722 - DNA, 25 bp, Homo sapien
gagttgacagcaactgggcattcag

SEQ ID NO: 1497723 - DNA, 25 bp, Homo sapien
gagcctttcaaatacgttgaaattg

SEQ ID NO: 1497724 - DNA, 25 bp, Homo sapien
aacagtaggcaagaagcaatgttgc

SEQ ID NO: 1497725 - DNA, 25 bp, Homo sapien
taggaatcagatccattcgtcccat

SEQ ID NO: 1497726 - DNA, 25 bp, Homo sapien
cagctttgccagtctcaatactagg

SEQ ID NO: 1497727 - DNA, 25 bp, Homo sapien
tgccgattaggcaggtcaattctaa

SEQ ID NO: 1497728 - DNA, 25 bp, Homo sapien
gccacgctgaatctcctgtctgctg

SEQ ID NO: 1497729 - DNA, 25 bp, Homo sapien
taaaaagagctcgaatgacagggcc

SEQ ID NO: 1497730 - DNA, 25 bp, Homo sapien
cactgtgctaacaaggtcaaggtca

SEQ ID NO: 1497731 - DNA, 25 bp, Homo sapien
caggattcattaaaagaagggccat

SEQ ID NO: 1497732 - DNA, 25 bp, Homo sapien
tgcaggattcattaaaagaagggcc

SEQ ID NO: 1497733 - DNA, 25 bp, Homo sapien
ttgcaggattcattaaaagaagggc

SEQ ID NO: 1497734 - DNA, 25 bp, Homo sapien
atttgcaggattcattaaaagaagg

SEQ ID NO: 1497735 - DNA, 25 bp, Homo sapien
gatttgatacactggtgtcctccat

SEQ ID NO: 1497736 - DNA, 25 bp, Homo sapien
tcaccatatgaagatttgatacact

SEQ ID NO: 1497737 - DNA, 25 bp, Homo sapien
gaagatttgatacactggtgtcctc

SEQ ID NO: 1497738 - DNA, 25 bp, Homo sapien
ctcaccatatgaagatttgatacac

SEQ ID NO: 1497739 - DNA, 25 bp, Homo sapien
tgagtcatagagtttcccagaaggc

SEQ ID NO: 1497740 - DNA, 25 bp, Homo sapien
cacatatacctgcaatggtgagtca

SEQ ID NO: 1497741 - DNA, 25 bp, Homo sapien
gcaatggtgagtcatagagtttccc

SEQ ID NO: 1497742 - DNA, 25 bp, Homo sapien
tactgtccacatatacctgcaatgg

SEQ ID NO: 1497743 - DNA, 25 bp, Homo sapien
tcaagcaagctacacatctcaggtc

SEQ ID NO: 1497744 - DNA, 25 bp, Homo sapien
taatctgatggaaccaacgctaggt

SEQ ID NO: 1497745 - DNA, 25 bp, Homo sapien
taccgtgtatatgatggtgaggccc

SEQ ID NO: 1497746 - DNA, 25 bp, Homo sapien
tctgaactgaatccacgtgaacgca

SEQ ID NO: 1497747 - DNA, 25 bp, Homo sapien
ggcacagagagttgatcccatgaac

SEQ ID NO: 1497748 - DNA, 25 bp, Homo sapien
tatggaggaactcttatggcacaga

SEQ ID NO: 1497749 - DNA, 25 bp, Homo sapien
catattgctctcacccagaagggcc

SEQ ID NO: 1497750 - DNA, 25 bp, Homo sapien
caccagtgcgagtgccatattgctc

SEQ ID NO: 1497751 - DNA, 25 bp, Homo sapien
ggtctatcttaaagttagtatgttc

SEQ ID NO: 1497752 - DNA, 25 bp, Homo sapien
atccaccatgcccttccagagtatg

SEQ ID NO: 1497753 - DNA, 25 bp, Homo sapien
catggacaatggaaaagggcaccag

SEQ ID NO: 1497754 - DNA, 25 bp, Homo sapien
aagttagtatgtaaaagtggtacag

SEQ ID NO: 1497755 - DNA, 25 bp, Homo sapien
tgcctgaagtcatgatgtcttcatt

SEQ ID NO: 1497756 - DNA, 25 bp, Homo sapien
gtcatgatgtcttcatttagctgca

SEQ ID NO: 1497757 - DNA, 25 bp, Homo sapien
gaagtcatgatgtcttcatttagct

SEQ ID NO: 1497758 - DNA, 25 bp, Homo sapien
cctgaagtcatgatgtcttcattta

SEQ ID NO: 1497759 - DNA, 25 bp, Homo sapien
ctgccccgacagagagccaacatga

SEQ ID NO: 1497760 - DNA, 25 bp, Homo sapien
tcctttccaatgggatgccagtctg

SEQ ID NO: 1497761 - DNA, 25 bp, Homo sapien
ctagccagtaaaagtgtggagttct

SEQ ID NO: 1497762 - DNA, 25 bp, Homo sapien
gccaacatgaccacccgtgcaggtg

SEQ ID NO: 1497763 - DNA, 25 bp, Homo sapien
tgcaacatgaaataagcgcatcagg

SEQ ID NO: 1497764 - DNA, 25 bp, Homo sapien
cccctactgttcttatggtaatgag

SEQ ID NO: 1497765 - DNA, 25 bp, Homo sapien
ttgatacaggcattgatatggcttg

SEQ ID NO: 1497766 - DNA, 25 bp, Homo sapien
tgactgtagtcaacctgctttgcta

SEQ ID NO: 1497767 - DNA, 25 bp, Homo sapien
cttgtaatgaagtaggatgacagca

SEQ ID NO: 1497768 - DNA, 25 bp, Homo sapien
gtaatgaagtaggatgacagcagaa

SEQ ID NO: 1497769 - DNA, 25 bp, Homo sapien
gcagaaacttatgaaggtggtttcc

SEQ ID NO: 1497770 - DNA, 25 bp, Homo sapien
cttatgaaggtggtttcctattttg

SEQ ID NO: 1497771 - DNA, 25 bp, Homo sapien
ttccccgaccggcaggcacagagca

SEQ ID NO: 1497772 - DNA, 25 bp, Homo sapien
agcagtagcccttccccgaccggca

SEQ ID NO: 1497773 - DNA, 25 bp, Homo sapien
ttctacaggagcattgatcccaggc

SEQ ID NO: 1497774 - DNA, 25 bp, Homo sapien
acaggagcattgatcccaggctggg

SEQ ID NO: 1497775 - DNA, 25 bp, Homo sapien
ttctaaataactgcggctttccaaa

SEQ ID NO: 1497776 - DNA, 25 bp, Homo sapien
aagctcatgccgaacagccttcttt

SEQ ID NO: 1497777 - DNA, 25 bp, Homo sapien
gacaaagctcatgccgaacagcctt

SEQ ID NO: 1497778 - DNA, 25 bp, Homo sapien
ccttctttctaaataactgcggctt

SEQ ID NO: 1497779 - DNA, 25 bp, Homo sapien
gaccaagctccaatgaagctagctt

SEQ ID NO: 1497780 - DNA, 25 bp, Homo sapien
ggaccaagctccaatgaagctagct

SEQ ID NO: 1497781 - DNA, 25 bp, Homo sapien
tggaccaagctccaatgaagctagc

SEQ ID NO: 1497782 - DNA, 25 bp, Homo sapien
tctattggggagtgtttgcctctga

SEQ ID NO: 1497783 - DNA, 25 bp, Homo sapien
gctttaggggagctatctactctgt

SEQ ID NO: 1497784 - DNA, 25 bp, Homo sapien
taatgcagaagtggaggcattgatc

SEQ ID NO: 1497785 - DNA, 25 bp, Homo sapien
tcagaattgtccaaccaaataatgc

SEQ ID NO: 1497786 - DNA, 25 bp, Homo sapien
tgcctcagaccaaacacatccctgg

SEQ ID NO: 1497787 - DNA, 25 bp, Homo sapien
aagatgcctcagaccaaacacatcc

SEQ ID NO: 1497788 - DNA, 25 bp, Homo sapien
ttaagatgcctcagaccaaacacat

SEQ ID NO: 1497789 - DNA, 25 bp, Homo sapien
tcttaagatgcctcagaccaaacac

SEQ ID NO: 1497790 - DNA, 25 bp, Homo sapien
aatacaaaggattctgtattcttac

SEQ ID NO: 1497791 - DNA, 25 bp, Homo sapien
tcaatacaaaggattctgtattctt

SEQ ID NO: 1497792 - DNA, 25 bp, Homo sapien
caatacaaaggattctgtattctta

SEQ ID NO: 1497793 - DNA, 25 bp, Homo sapien
taaacttgagacttgtaaacatagt

SEQ ID NO: 1497794 - DNA, 25 bp, Homo sapien
cccatacgtgggcttccatgttcca

SEQ ID NO: 1497795 - DNA, 25 bp, Homo sapien
tccctgcctagccttcattcggaga

SEQ ID NO: 1497796 - DNA, 25 bp, Homo sapien
cagatgcaggtcatttggttttcat

SEQ ID NO: 1497797 - DNA, 25 bp, Homo sapien
tggacatctgagcatggcggcaggg

SEQ ID NO: 1497798 - DNA, 25 bp, Homo sapien
ttctggctcctccatggaccactgg

SEQ ID NO: 1497799 - DNA, 25 bp, Homo sapien
tcaggatccactagtgactggacat

SEQ ID NO: 1497800 - DNA, 25 bp, Homo sapien
ccactagtgactggacatctgagca

SEQ ID NO: 1497801 - DNA, 25 bp, Homo sapien
gatggtatcatcattgggaagtact

SEQ ID NO: 1497802 - DNA, 25 bp, Homo sapien
gcagtgtcatcatggacattggcat

SEQ ID NO: 1497803 - DNA, 25 bp, Homo sapien
tggcatcagtggtgatggtatcatc

SEQ ID NO: 1497804 - DNA, 25 bp, Homo sapien
ggtatcatcattgggaagtactgag

SEQ ID NO: 1497805 - DNA, 25 bp, Homo sapien
ctttgtggacactaatgggcattgc

SEQ ID NO: 1497806 - DNA, 25 bp, Homo sapien
tcaggatgataggtgcatccaccac

SEQ ID NO: 1497807 - DNA, 25 bp, Homo sapien
taaaagatatggtctagctgtgttg

SEQ ID NO: 1497808 - DNA, 25 bp, Homo sapien
ttctccagcctaagtagtcaggatg

SEQ ID NO: 1497809 - DNA, 25 bp, Homo sapien
cattgatggtaaactggacacagca

SEQ ID NO: 1497810 - DNA, 25 bp, Homo sapien
tatggtgagaccatctagggcagct

SEQ ID NO: 1497811 - DNA, 25 bp, Homo sapien
gagatggccccaatttaaagcagat

SEQ ID NO: 1497812 - DNA, 25 bp, Homo sapien
ttgtcactcaggaatggtaggccat

SEQ ID NO: 1497813 - DNA, 25 bp, Homo sapien
tgtgcagggcctaagacgtcacttc

SEQ ID NO: 1497814 - DNA, 25 bp, Homo sapien
tatctcaagcctgctcaaggaacgt

SEQ ID NO: 1497815 - DNA, 25 bp, Homo sapien
ttcctacaccactggaagggttgcc

SEQ ID NO: 1497816 - DNA, 25 bp, Homo sapien
tattctggaagccaaaagagccaca

SEQ ID NO: 1497817 - DNA, 25 bp, Homo sapien
gagatttggcaagaacaaacatccc

SEQ ID NO: 1497818 - DNA, 25 bp, Homo sapien
gaaaaacacccctgattgagttcca

SEQ ID NO: 1497819 - DNA, 25 bp, Homo sapien
ttgactcactatcaccaacaccaag

SEQ ID NO: 1497820 - DNA, 25 bp, Homo sapien
catgtttatatcatcagcctaggcc

SEQ ID NO: 1497821 - DNA, 25 bp, Homo sapien
cccagcgaatgctttcttggtcttt

SEQ ID NO: 1497822 - DNA, 25 bp, Homo sapien
cttgcacttgtgtgacccagcgaat

SEQ ID NO: 1497823 - DNA, 25 bp, Homo sapien
gttgttcctgctaaagtccccttga

SEQ ID NO: 1497824 - DNA, 25 bp, Homo sapien
agtaaaccaactgcagcacgacact

SEQ ID NO: 1497825 - DNA, 25 bp, Homo sapien
tctgtgttgaaaccagcagcaatga

SEQ ID NO: 1497826 - DNA, 25 bp, Homo sapien
ctgtgttgaaaccagcagcaatgaa

SEQ ID NO: 1497827 - DNA, 25 bp, Homo sapien
gtgttgaaaccagcagcaatgaaaa

SEQ ID NO: 1497828 - DNA, 25 bp, Homo sapien
tgtgttgaaaccagcagcaatgaaa

SEQ ID NO: 1497829 - DNA, 25 bp, Homo sapien
tgtgtggacccctggcaatattcat

SEQ ID NO: 1497830 - DNA, 25 bp, Homo sapien
tttcttctgcaccaagaccaaggct

SEQ ID NO: 1497831 - DNA, 25 bp, Homo sapien
ggacctggacactcaagcatgtatg

SEQ ID NO: 1497832 - DNA, 25 bp, Homo sapien
tcttgctccatgcaggtctgtgtgg

SEQ ID NO: 1497833 - DNA, 25 bp, Homo sapien
cttgtgcatttatcttgtaggattg

SEQ ID NO: 1497834 - DNA, 25 bp, Homo sapien
ttatcttgtgcatttatcttgtagg

SEQ ID NO: 1497835 - DNA, 25 bp, Homo sapien
tgaagaattatcttgtgcatttatc

SEQ ID NO: 1497836 - DNA, 25 bp, Homo sapien
tatcttgtaggattgtgatacaatt

SEQ ID NO: 1497837 - DNA, 25 bp, Homo sapien
catatttccctactggaatggtctc

SEQ ID NO: 1497838 - DNA, 25 bp, Homo sapien
ataacttatggcagttttcagattc

SEQ ID NO: 1497839 - DNA, 25 bp, Homo sapien
ggcagttttcagattctgaacccat

SEQ ID NO: 1497840 - DNA, 25 bp, Homo sapien
atatttccctactggaatggtctcc

SEQ ID NO: 1497841 - DNA, 25 bp, Homo sapien
caacagcaaggtcttggatgcctgg

SEQ ID NO: 1497842 - DNA, 25 bp, Homo sapien
gcctggcaaacctcggcagcgcttt

SEQ ID NO: 1497843 - DNA, 25 bp, Homo sapien
ggatgcctggcaaacctcggcagcg

SEQ ID NO: 1497844 - DNA, 25 bp, Homo sapien
atgcctggcaaacctcggcagcgct

SEQ ID NO: 1497845 - DNA, 25 bp, Homo sapien
tagatgacttcattgcagaatttag

SEQ ID NO: 1497846 - DNA, 25 bp, Homo sapien
tgcctagataagttggggtggaacc

SEQ ID NO: 1497847 - DNA, 25 bp, Homo sapien
gatgacttcattgcagaatttagct

SEQ ID NO: 1497848 - DNA, 25 bp, Homo sapien
gacttcattgcagaatttagcttca

SEQ ID NO: 1497849 - DNA, 25 bp, Homo sapien
catattttttgttgcccgtggacag

SEQ ID NO: 1497850 - DNA, 25 bp, Homo sapien
atattttttgttgcccgtggacaga

SEQ ID NO: 1497851 - DNA, 25 bp, Homo sapien
tattttttgttgcccgtggacagaa

SEQ ID NO: 1497852 - DNA, 25 bp, Homo sapien
tcatattttttgttgcccgtggaca

SEQ ID NO: 1497853 - DNA, 25 bp, Homo sapien
catttgcaaacagtggtaatgccgt

SEQ ID NO: 1497854 - DNA, 25 bp, Homo sapien
gctctagaatatggcacaatacaca

SEQ ID NO: 1497855 - DNA, 25 bp, Homo sapien
tcctcaagacatttaaagatgggca

SEQ ID NO: 1497856 - DNA, 25 bp, Homo sapien
tgtcactgagagtcaagggattaca

SEQ ID NO: 1497857 - DNA, 25 bp, Homo sapien
attcctctgctacaccttgaggatc

SEQ ID NO: 1497858 - DNA, 25 bp, Homo sapien
aatccctccatgctaactgggatgg

SEQ ID NO: 1497859 - DNA, 25 bp, Homo sapien
tccatgctaactgggatggatggag

SEQ ID NO: 1497860 - DNA, 25 bp, Homo sapien
tacaccttgaggatcattcacttct

SEQ ID NO: 1497861 - DNA, 25 bp, Homo sapien
gattggtcaacactccactacccag

SEQ ID NO: 1497862 - DNA, 25 bp, Homo sapien
acgagacaatcacgcccctgagctg

SEQ ID NO: 1497863 - DNA, 25 bp, Homo sapien
ctctcgcgatcccaggacgagacaa

SEQ ID NO: 1497864 - DNA, 25 bp, Homo sapien
gctgtgattggtcaacactccacta

SEQ ID NO: 1497865 - DNA, 25 bp, Homo sapien
tcccgaggctctcggctttggactc

SEQ ID NO: 1497866 - DNA, 25 bp, Homo sapien
gaggtcccgaggctctcggctttgg

SEQ ID NO: 1497867 - DNA, 25 bp, Homo sapien
tggccttggccggaggtcccgaggc

SEQ ID NO: 1497868 - DNA, 25 bp, Homo sapien
ggtcccgaggctctcggctttggac

SEQ ID NO: 1497869 - DNA, 25 bp, Homo sapien
acagggacgtgtcctcagaagcggt

SEQ ID NO: 1497870 - DNA, 25 bp, Homo sapien
ggaacagggacgtgtcctcagaagc

SEQ ID NO: 1497871 - DNA, 25 bp, Homo sapien
gggacgtgtcctcagaagcggtggg

SEQ ID NO: 1497872 - DNA, 25 bp, Homo sapien
aacagggacgtgtcctcagaagcgg

SEQ ID NO: 1497873 - DNA, 25 bp, Homo sapien
ctgactcagtggttcttccacctcg

SEQ ID NO: 1497874 - DNA, 25 bp, Homo sapien
tgactcagtggttcttccacctcgc

SEQ ID NO: 1497875 - DNA, 25 bp, Homo sapien
gactcagtggttcttccacctcgct

SEQ ID NO: 1497876 - DNA, 25 bp, Homo sapien
ctgactcagtggttcttccacctcg

SEQ ID NO: 1497877 - DNA, 25 bp, Homo sapien
gactcagtggttcttccacctcgct

SEQ ID NO: 1497878 - DNA, 25 bp, Homo sapien
tgactcagtggttcttccacctcgc

SEQ ID NO: 1497879 - DNA, 25 bp, Homo sapien
tacacactcggtagttcttccatct

SEQ ID NO: 1497880 - DNA, 25 bp, Homo sapien
acactcggtagttcttccatctcgc

SEQ ID NO: 1497881 - DNA, 25 bp, Homo sapien
cacactcggtagttcttccatctcg

SEQ ID NO: 1497882 - DNA, 25 bp, Homo sapien
ctacacactcggtagttcttccatc

SEQ ID NO: 1497883 - DNA, 25 bp, Homo sapien
tcatcagaatggcaagcaccccgct

SEQ ID NO: 1497884 - DNA, 25 bp, Homo sapien
gcggctgggcctgaacttagtcgct

SEQ ID NO: 1497885 - DNA, 25 bp, Homo sapien
tcggagataggggagtacttggccg

SEQ ID NO: 1497886 - DNA, 25 bp, Homo sapien
cttagtcgctgctctcggagatagg

SEQ ID NO: 1497887 - DNA, 25 bp, Homo sapien
gaaaagctaagagacagaaccattt

SEQ ID NO: 1497888 - DNA, 25 bp, Homo sapien
ggtgtgcctctattgtccctactga

SEQ ID NO: 1497889 - DNA, 25 bp, Homo sapien
tccaagctggtagaataaatgcaca

SEQ ID NO: 1497890 - DNA, 25 bp, Homo sapien
taagagtgtgtatacagaatgctaa

SEQ ID NO: 1497891 - DNA, 25 bp, Homo sapien
tcttcaatgggaagctcatcgccat

SEQ ID NO: 1497892 - DNA, 25 bp, Homo sapien
aatgggaagctcatcgccatcatcc

SEQ ID NO: 1497893 - DNA, 25 bp, Homo sapien
tggcttcttcaatgggaagctcatc

SEQ ID NO: 1497894 - DNA, 25 bp, Homo sapien
cttcttcaatgggaagctcatcgcc

SEQ ID NO: 1497895 - DNA, 25 bp, Homo sapien
aaaatgcatcctttagtccccctgt

SEQ ID NO: 1497896 - DNA, 25 bp, Homo sapien
caataatctttctctatatgggaaa

SEQ ID NO: 1497897 - DNA, 25 bp, Homo sapien
aggaatttaggccagaaatcctagg

SEQ ID NO: 1497898 - DNA, 25 bp, Homo sapien
gaaatcctaggtgccaataatcttt

SEQ ID NO: 1497899 - DNA, 25 bp, Homo sapien
tcaggaatagtatcggcatgactta

SEQ ID NO: 1497900 - DNA, 25 bp, Homo sapien
caggaatagtatcggcatgacttac

SEQ ID NO: 1497901 - DNA, 25 bp, Homo sapien
ttttgcaagagaataactgggcctc

SEQ ID NO: 1497902 - DNA, 25 bp, Homo sapien
agaagggctgtagcaaccacctcct

SEQ ID NO: 1497903 - DNA, 25 bp, Homo sapien
ccttccggatacttagtaaggcacg

SEQ ID NO: 1497904 - DNA, 25 bp, Homo sapien
taaagcagcattataaggccttccg

SEQ ID NO: 1497905 - DNA, 25 bp, Homo sapien
agggttatcatctgagatggactgg

SEQ ID NO: 1497906 - DNA, 25 bp, Homo sapien
caggacggatgcctgaagggttatc

SEQ ID NO: 1497907 - DNA, 25 bp, Homo sapien
gatgcctgaagggttatcatctgag

SEQ ID NO: 1497908 - DNA, 25 bp, Homo sapien
cctgaagggttatcatctgagatgg

SEQ ID NO: 1497909 - DNA, 25 bp, Homo sapien
tgttccgaccttcaggatggcagac

SEQ ID NO: 1497910 - DNA, 25 bp, Homo sapien
tacagccaggttagtactgcctatg

SEQ ID NO: 1497911 - DNA, 25 bp, Homo sapien
gaaatgtcagattcatgaactaacg

SEQ ID NO: 1497912 - DNA, 25 bp, Homo sapien
gaagggaaatatctctcagtagcat

SEQ ID NO: 1497913 - DNA, 25 bp, Homo sapien
ttaatgccctttcttatgccgtggg

SEQ ID NO: 1497914 - DNA, 25 bp, Homo sapien
tggttgacttcaaaggcctaaactg

SEQ ID NO: 1497915 - DNA, 25 bp, Homo sapien
catagccgactgtatacagaggttc

SEQ ID NO: 1497916 - DNA, 25 bp, Homo sapien
tgaaaaccttagatacatagccgac

SEQ ID NO: 1497917 - DNA, 25 bp, Homo sapien
tccctgtttgtaccgacttactaga

SEQ ID NO: 1497918 - DNA, 25 bp, Homo sapien
tctttaccgactggaagtgcaagtg

SEQ ID NO: 1497919 - DNA, 25 bp, Homo sapien
gggcattaagccatcctgtcaggtc

SEQ ID NO: 1497920 - DNA, 25 bp, Homo sapien
catcaagacgttccggacgccggag

SEQ ID NO: 1497921 - DNA, 25 bp, Homo sapien
gactatcaagagttcacatcacaag

SEQ ID NO: 1497922 - DNA, 25 bp, Homo sapien
tgcccttagaatagccaactaccgt

SEQ ID NO: 1497923 - DNA, 25 bp, Homo sapien
ttatgggcattgacagatactgtgt

SEQ ID NO: 1497924 - DNA, 25 bp, Homo sapien
gagaactggcacctcagcatatttt

SEQ ID NO: 1497925 - DNA, 25 bp, Homo sapien
tcttggaacataacctgccctttga

SEQ ID NO: 1497926 - DNA, 25 bp, Homo sapien
gggtaccgaatattgtactagccca

SEQ ID NO: 1497927 - DNA, 25 bp, Homo sapien
taaagtacacttggattggacaact

SEQ ID NO: 1497928 - DNA, 25 bp, Homo sapien
gccttttttacctgaatgcctgaaa

SEQ ID NO: 1497929 - DNA, 25 bp, Homo sapien
gatgcactaatgtcttagaggagct

SEQ ID NO: 1497930 - DNA, 25 bp, Homo sapien
tgcattgcccacagtatgaaggagg

SEQ ID NO: 1497931 - DNA, 25 bp, Homo sapien
gaggctcttctaaaccctgtgcaaa

SEQ ID NO: 1497932 - DNA, 25 bp, Homo sapien
ggagcagacctaccacataatgcca

SEQ ID NO: 1497933 - DNA, 25 bp, Homo sapien
cgaattgattcggtggggccatcag

SEQ ID NO: 1497934 - DNA, 25 bp, Homo sapien
tttacattggcctcatagtctgtca

SEQ ID NO: 1497935 - DNA, 25 bp, Homo sapien
tcatagtctgtcaagccgctgaagg

SEQ ID NO: 1497936 - DNA, 25 bp, Homo sapien
tgtcaagccgctgaagggaatttgc

SEQ ID NO: 1497937 - DNA, 25 bp, Homo sapien
aaaggtgaagttgagaatctttgtc

SEQ ID NO: 1497938 - DNA, 25 bp, Homo sapien
gaaatcaggttgactgaaaggtgtg

SEQ ID NO: 1497939 - DNA, 25 bp, Homo sapien
gggccacacgagaagtatttcttca

SEQ ID NO: 1497940 - DNA, 25 bp, Homo sapien
acattctgccgacacctgcagaaag

SEQ ID NO: 1497941 - DNA, 25 bp, Homo sapien
tgctcagcgtgtccttaatggtcat

SEQ ID NO: 1497942 - DNA, 25 bp, Homo sapien
gtgctcagcgtgtccttaatggtca

SEQ ID NO: 1497943 - DNA, 25 bp, Homo sapien
tgtgctcagcgtgtccttaatggtc

SEQ ID NO: 1497944 - DNA, 25 bp, Homo sapien
ctgtgctcagcgtgtccttaatggt

SEQ ID NO: 1497945 - DNA, 25 bp, Homo sapien
gatattttatctccagtagacctca

SEQ ID NO: 1497946 - DNA, 25 bp, Homo sapien
agaagcaacccccatacggctgatg

SEQ ID NO: 1497947 - DNA, 25 bp, Homo sapien
cccatacggctgatgatattttatc

SEQ ID NO: 1497948 - DNA, 25 bp, Homo sapien
cttctaagaagcaacccccatacgg

SEQ ID NO: 1497949 - DNA, 25 bp, Homo sapien
tccataaaggttgtagttggggcga

SEQ ID NO: 1497950 - DNA, 25 bp, Homo sapien
gcagacactggtaaacctgccaagt

SEQ ID NO: 1497951 - DNA, 25 bp, Homo sapien
gctttggaagcagcgtcatgttgca

SEQ ID NO: 1497952 - DNA, 25 bp, Homo sapien
cagcgtcatgttgcataaaattgct

SEQ ID NO: 1497953 - DNA, 25 bp, Homo sapien
tattttttgcaggtagagcctgaaa

SEQ ID NO: 1497954 - DNA, 25 bp, Homo sapien
gaaattattgagtcttggaaactca

SEQ ID NO: 1497955 - DNA, 25 bp, Homo sapien
tttttgcaggtagagcctgaaatta

SEQ ID NO: 1497956 - DNA, 25 bp, Homo sapien
gagcctgaaattattgagtcttgga

SEQ ID NO: 1497957 - DNA, 25 bp, Homo sapien
aatttgccacaagtgcaattgtctg

SEQ ID NO: 1497958 - DNA, 25 bp, Homo sapien
gcagttccaagacccaaggcaaatt

SEQ ID NO: 1497959 - DNA, 25 bp, Homo sapien
gcaattgtctgctgtgttttcacgt

SEQ ID NO: 1497960 - DNA, 25 bp, Homo sapien
aagccctgttgtgaaggcccttcaa

SEQ ID NO: 1497961 - DNA, 25 bp, Homo sapien
tgatggctgcaagtctccgagttct

SEQ ID NO: 1497962 - DNA, 25 bp, Homo sapien
gaaacttcacaatggcttcgggact

SEQ ID NO: 1497963 - DNA, 25 bp, Homo sapien
gcttcagtgagcacagtgtaccgac

SEQ ID NO: 1497964 - DNA, 25 bp, Homo sapien
cgagttctcacagctgaatggttga

SEQ ID NO: 1497965 - DNA, 25 bp, Homo sapien
tcattttccggtaattcaaccacgc

SEQ ID NO: 1497966 - DNA, 25 bp, Homo sapien
gctcagacaggtgtcgtccttggaa

SEQ ID NO: 1497967 - DNA, 25 bp, Homo sapien
caagttgaatccaggatgtgctcag

SEQ ID NO: 1497968 - DNA, 25 bp, Homo sapien
agttgaatccaggatgtgctcagac

SEQ ID NO: 1497969 - DNA, 25 bp, Homo sapien
ttggaagtcctggcaggagccaact

SEQ ID NO: 1497970 - DNA, 25 bp, Homo sapien
tcttcccgtgtgtgttgtctttgca

SEQ ID NO: 1497971 - DNA, 25 bp, Homo sapien
gaaagccagattgactagcattcat

SEQ ID NO: 1497972 - DNA, 25 bp, Homo sapien
tgtcattgaaataacggctgggtgc

SEQ ID NO: 1497973 - DNA, 25 bp, Homo sapien
caaatgtgtttctagcctaatgtac

SEQ ID NO: 1497974 - DNA, 25 bp, Homo sapien
tttgattccaccttgttgacagatg

SEQ ID NO: 1497975 - DNA, 25 bp, Homo sapien
tcaaatgagagggctggagtcactg

SEQ ID NO: 1497976 - DNA, 25 bp, Homo sapien
caaatgagagggctggagtcactgt

SEQ ID NO: 1497977 - DNA, 25 bp, Homo sapien
gagttttgattccaccttgttgaca

SEQ ID NO: 1497978 - DNA, 25 bp, Homo sapien
ggacagagttctgctcacctagagg

SEQ ID NO: 1497979 - DNA, 25 bp, Homo sapien
tctgagaactctgcaccaacaattt

SEQ ID NO: 1497980 - DNA, 25 bp, Homo sapien
tctgatgcagcgctgagatttccac

SEQ ID NO: 1497981 - DNA, 25 bp, Homo sapien
gctgttttatccctcgcttgatggt

SEQ ID NO: 1497982 - DNA, 25 bp, Homo sapien
tggcctccatattttgaaagcaggt

SEQ ID NO: 1497983 - DNA, 25 bp, Homo sapien
ttttgaaagcaggttgtctatcaac

SEQ ID NO: 1497984 - DNA, 25 bp, Homo sapien
cctggcctccatattttgaaagcag

SEQ ID NO: 1497985 - DNA, 25 bp, Homo sapien
tccatattttgaaagcaggttgtct

SEQ ID NO: 1497986 - DNA, 25 bp, Homo sapien
gatacctgagtaatccaacactgct

SEQ ID NO: 1497987 - DNA, 25 bp, Homo sapien
tgggaatgcagaccagggatacctg

SEQ ID NO: 1497988 - DNA, 25 bp, Homo sapien
acaaagtggctgtcaaccacgccca

SEQ ID NO: 1497989 - DNA, 25 bp, Homo sapien
cacaagggactcagtactgaggcat

SEQ ID NO: 1497990 - DNA, 25 bp, Homo sapien
cgttcgcgagtgtgcagttgagttt

SEQ ID NO: 1497991 - DNA, 25 bp, Homo sapien
tcttgaaccggctggtgaagctggc

SEQ ID NO: 1497992 - DNA, 25 bp, Homo sapien
tctaagtcgtagaagcagcgtctcg

SEQ ID NO: 1497993 - DNA, 25 bp, Homo sapien
ggtgtcagagaaatgggcacgctct

SEQ ID NO: 1497994 - DNA, 25 bp, Homo sapien
tctggagggaccaaaaggagaaatg

SEQ ID NO: 1497995 - DNA, 25 bp, Homo sapien
cttcagggaaactctggagggacca

SEQ ID NO: 1497996 - DNA, 25 bp, Homo sapien
aagttcccaatttctcgcttcaggg

SEQ ID NO: 1497997 - DNA, 25 bp, Homo sapien
ccaatttctcgcttcagggaaactc

SEQ ID NO: 1497998 - DNA, 25 bp, Homo sapien
ctcgcagctgacgagaccggcccat

SEQ ID NO: 1497999 - DNA, 25 bp, Homo sapien
ggagcgcccgggctcgcagctgacg

SEQ ID NO: 1498000 - DNA, 25 bp, Homo sapien
cgcggcgtggaaagccgctcggcgt

SEQ ID NO: 1498001 - DNA, 25 bp, Homo sapien
gtggaaagccgctcggcgtcgccct

SEQ ID NO: 1498002 - DNA, 25 bp, Homo sapien
ggttggtgcgaacgggagaggcgcc

SEQ ID NO: 1498003 - DNA, 25 bp, Homo sapien
gggagaggcgcctgcgtgggagctg

SEQ ID NO: 1498004 - DNA, 25 bp, Homo sapien
ggagaggcgcctgcgtgggagctgg

SEQ ID NO: 1498005 - DNA, 25 bp, Homo sapien
aggaagcggttggtgcgaacgggag

SEQ ID NO: 1498006 - DNA, 25 bp, Homo sapien
ttctttccactacctgggcaaagga

SEQ ID NO: 1498007 - DNA, 25 bp, Homo sapien
tcgaatatgtgaaagcgtgggaaaa

SEQ ID NO: 1498008 - DNA, 25 bp, Homo sapien
tcacttctttccactacctgggcaa

SEQ ID NO: 1498009 - DNA, 25 bp, Homo sapien
ggcaaaggaaattcgaatatgtgaa

SEQ ID NO: 1498010 - DNA, 25 bp, Homo sapien
gacagagccccagtactgactgggc

SEQ ID NO: 1498011 - DNA, 25 bp, Homo sapien
ccaagtcaggactggcaaacgagat

SEQ ID NO: 1498012 - DNA, 25 bp, Homo sapien
ccaagtggacaccaagtcaggactg

SEQ ID NO: 1498013 - DNA, 25 bp, Homo sapien
ggcaaacgagattctggttttcaca

SEQ ID NO: 1498014 - DNA, 25 bp, Homo sapien
gagagcaacatccaccactggcatg

SEQ ID NO: 1498015 - DNA, 25 bp, Homo sapien
caagaggagagacgaccatttcagg

SEQ ID NO: 1498016 - DNA, 25 bp, Homo sapien
cgtgaaggcgccagctgtttagttc

SEQ ID NO: 1498017 - DNA, 25 bp, Homo sapien
tccgtagcgtggctgacactgatgg

SEQ ID NO: 1498018 - DNA, 25 bp, Homo sapien
catttgaagctgtgtgaacatgagc

SEQ ID NO: 1498019 - DNA, 25 bp, Homo sapien
gagaagatcatatgcatcattgccc

SEQ ID NO: 1498020 - DNA, 25 bp, Homo sapien
gtcataatgttcgtagttccgtaag

SEQ ID NO: 1498021 - DNA, 25 bp, Homo sapien
gatggtcctgatcacatagatacat

SEQ ID NO: 1498022 - DNA, 25 bp, Homo sapien
caatcagagaggagcgtggatagcc

SEQ ID NO: 1498023 - DNA, 25 bp, Homo sapien
gagctggagacacctgagtgatccc

SEQ ID NO: 1498024 - DNA, 25 bp, Homo sapien
ggagtccaccatgcacgtgctaaga

SEQ ID NO: 1498025 - DNA, 25 bp, Homo sapien
tgctctcgcgagaactgaggaccca

SEQ ID NO: 1498026 - DNA, 25 bp, Homo sapien
tggaatcatcctgatgagtccaagg

SEQ ID NO: 1498027 - DNA, 25 bp, Homo sapien
gctgtgattcagactccggtgtgcc

SEQ ID NO: 1498028 - DNA, 25 bp, Homo sapien
ccttgtatacctggaggatgaggag

SEQ ID NO: 1498029 - DNA, 25 bp, Homo sapien
caatccagaaaatcagctgtgattc

SEQ ID NO: 1498030 - DNA, 25 bp, Homo sapien
ggccctgaattcttccgatgctgtt

SEQ ID NO: 1498031 - DNA, 25 bp, Homo sapien
gggagtggccctgaattcttccgat

SEQ ID NO: 1498032 - DNA, 25 bp, Homo sapien
tccgatgctgttcaattgtattcat

SEQ ID NO: 1498033 - DNA, 25 bp, Homo sapien
cttccgatgctgttcaattgtattc

SEQ ID NO: 1498034 - DNA, 25 bp, Homo sapien
cacaccagatgcaggtccatactag

SEQ ID NO: 1498035 - DNA, 25 bp, Homo sapien
catagagcaatgagcaacagatggg

SEQ ID NO: 1498036 - DNA, 25 bp, Homo sapien
gaccatatgtgccaagggcgggctt

SEQ ID NO: 1498037 - DNA, 25 bp, Homo sapien
tcatggttctgtataagggccaggc

SEQ ID NO: 1498038 - DNA, 25 bp, Homo sapien
agatttcagccccagtagagacgga

SEQ ID NO: 1498039 - DNA, 25 bp, Homo sapien
ccccagtagagacggatggtagaat

SEQ ID NO: 1498040 - DNA, 25 bp, Homo sapien
tagagacggatggtagaatctccca

SEQ ID NO: 1498041 - DNA, 25 bp, Homo sapien
gatggtagaatctcccaggtagacc

SEQ ID NO: 1498042 - DNA, 25 bp, Homo sapien
ccctccagtccctgtccccatatag

SEQ ID NO: 1498043 - DNA, 25 bp, Homo sapien
cagaaagcatgaaaacgtttggccc

SEQ ID NO: 1498044 - DNA, 25 bp, Homo sapien
catgaaaacgtttggccctccagtc

SEQ ID NO: 1498045 - DNA, 25 bp, Homo sapien
ctggacaatgagcagaaagcatgaa

SEQ ID NO: 1498046 - DNA, 25 bp, Homo sapien
tctctggggcaatgtgcagttcctt

SEQ ID NO: 1498047 - DNA, 25 bp, Homo sapien
atctctctggggcaatgtgcagttc

SEQ ID NO: 1498048 - DNA, 25 bp, Homo sapien
ctctctggggcaatgtgcagttcct

SEQ ID NO: 1498049 - DNA, 25 bp, Homo sapien
tctggggcaatgtgcagttccttcc

SEQ ID NO: 1498050 - DNA, 25 bp, Homo sapien
aaacctggcggcatccgtggtgagc

SEQ ID NO: 1498051 - DNA, 25 bp, Homo sapien
ggaaagattgctttactccacaaca

SEQ ID NO: 1498052 - DNA, 25 bp, Homo sapien
gaacacttggttctccagcgctggc

SEQ ID NO: 1498053 - DNA, 25 bp, Homo sapien
tgttgagaatgccaacggctctgct

SEQ ID NO: 1498054 - DNA, 25 bp, Homo sapien
tatgcagaagtctcaaaaccgattt

SEQ ID NO: 1498055 - DNA, 25 bp, Homo sapien
gccatcatattctgggtactgagaa

SEQ ID NO: 1498056 - DNA, 25 bp, Homo sapien
gcctggcttacgtttccctggtgac

SEQ ID NO: 1498057 - DNA, 25 bp, Homo sapien
ccctggtgacgctctcttgttgttc

SEQ ID NO: 1498058 - DNA, 25 bp, Homo sapien
caggaaatgcaggagtatcttgcaa

SEQ ID NO: 1498059 - DNA, 25 bp, Homo sapien
cactatctgtatagggctggcggac

SEQ ID NO: 1498060 - DNA, 25 bp, Homo sapien
ctggcggacgtgagaagcacaacag

SEQ ID NO: 1498061 - DNA, 25 bp, Homo sapien
gcaggagaggcattgtcaacacaaa

SEQ ID NO: 1498062 - DNA, 25 bp, Homo sapien
tgttactgaagcagagtgatcctcc

SEQ ID NO: 1498063 - DNA, 25 bp, Homo sapien
taattcctgagtgagaaccgcctga

SEQ ID NO: 1498064 - DNA, 25 bp, Homo sapien
tgactcccaaggataatggtcctgg

SEQ ID NO: 1498065 - DNA, 25 bp, Homo sapien
gatcctccaggtactcataatcagt

SEQ ID NO: 1498066 - DNA, 25 bp, Homo sapien
cctctccgatagagcttccatgcat

SEQ ID NO: 1498067 - DNA, 25 bp, Homo sapien
cctgcttgtacctctccgatagagc

SEQ ID NO: 1498068 - DNA, 25 bp, Homo sapien
tgtacctctccgatagagcttccat

SEQ ID NO: 1498069 - DNA, 25 bp, Homo sapien
gcttgtacctctccgatagagcttc

SEQ ID NO: 1498070 - DNA, 25 bp, Homo sapien
actctcacgggaccagttcttgctc

SEQ ID NO: 1498071 - DNA, 25 bp, Homo sapien
cttcacaagcagattccaaactctc

SEQ ID NO: 1498072 - DNA, 25 bp, Homo sapien
gattccaaactctcacgggaccagt

SEQ ID NO: 1498073 - DNA, 25 bp, Homo sapien
agcaatgtctccatcctatcttttc

SEQ ID NO: 1498074 - DNA, 25 bp, Homo sapien
tcctcgaaggcccaaatctgaggtt

SEQ ID NO: 1498075 - DNA, 25 bp, Homo sapien
gacagctgagctctatacctggata

SEQ ID NO: 1498076 - DNA, 25 bp, Homo sapien
catgtgtcctcaagagaaggaagac

SEQ ID NO: 1498077 - DNA, 25 bp, Homo sapien
tgcagttgcatctccatattgacag

SEQ ID NO: 1498078 - DNA, 25 bp, Homo sapien
gtaaatggacccagattccaactct

SEQ ID NO: 1498079 - DNA, 25 bp, Homo sapien
gtttttgaaccaagccttcagcctg

SEQ ID NO: 1498080 - DNA, 25 bp, Homo sapien
ctcatgtacaaggtttaggtttttg

SEQ ID NO: 1498081 - DNA, 25 bp, Homo sapien
tcttgattttagctcatgtacaagg

SEQ ID NO: 1498082 - DNA, 25 bp, Homo sapien
actctcacctgaagatttgcccatg

SEQ ID NO: 1498083 - DNA, 25 bp, Homo sapien
tctgagtcgcattattgcattcttt

SEQ ID NO: 1498084 - DNA, 25 bp, Homo sapien
ctctcacctgaagatttgcccatga

SEQ ID NO: 1498085 - DNA, 25 bp, Homo sapien
ggctccttgcttctgagtcgcatta

SEQ ID NO: 1498086 - DNA, 25 bp, Homo sapien
cttggaagcagagggtatcggccac

SEQ ID NO: 1498087 - DNA, 25 bp, Homo sapien
tgcaatgccgctctacacagtggtt

SEQ ID NO: 1498088 - DNA, 25 bp, Homo sapien
catgtgaggactgagcctcgaggta

SEQ ID NO: 1498089 - DNA, 25 bp, Homo sapien
taattatgtctaccggccttggaag

SEQ ID NO: 1498090 - DNA, 25 bp, Homo sapien
tttgctgctctggttacacttttag

SEQ ID NO: 1498091 - DNA, 25 bp, Homo sapien
atgcctgatcggttttgctgctctg

SEQ ID NO: 1498092 - DNA, 25 bp, Homo sapien
aatgtcatagttggcatgcgcatgc

SEQ ID NO: 1498093 - DNA, 25 bp, Homo sapien
tagatgcagctgcatccggaactgc

SEQ ID NO: 1498094 - DNA, 25 bp, Homo sapien
ctccacggggatagtttctcctgct

SEQ ID NO: 1498095 - DNA, 25 bp, Homo sapien
tctggggctccttcatcaaatgtac

SEQ ID NO: 1498096 - DNA, 25 bp, Homo sapien
tccttcatcaaatgtacctgagagc

SEQ ID NO: 1498097 - DNA, 25 bp, Homo sapien
tacctgagagcttgatgacagaaac

SEQ ID NO: 1498098 - DNA, 25 bp, Homo sapien
cctcttattggagctatgactgggt

SEQ ID NO: 1498099 - DNA, 25 bp, Homo sapien
gaagaaagattcaagtgctgacatg

SEQ ID NO: 1498100 - DNA, 25 bp, Homo sapien
tgcacttgtctcacgaagctctgta

SEQ ID NO: 1498101 - DNA, 25 bp, Homo sapien
tgagctttatccacctaagcgaacc

SEQ ID NO: 1498102 - DNA, 25 bp, Homo sapien
tgaagataggagaccccagcttccc

SEQ ID NO: 1498103 - DNA, 25 bp, Homo sapien
tccattgtgcctgaagttggaagca

SEQ ID NO: 1498104 - DNA, 25 bp, Homo sapien
ccttgtctctcatgacgaatgaaga

SEQ ID NO: 1498105 - DNA, 25 bp, Homo sapien
gcttttcctcatctagcccttgtct

SEQ ID NO: 1498106 - DNA, 25 bp, Homo sapien
gaagtctgggagactgtgactgttc

SEQ ID NO: 1498107 - DNA, 25 bp, Homo sapien
actgtgactgttctggaggacagtc

SEQ ID NO: 1498108 - DNA, 25 bp, Homo sapien
tgactgttctggaggacagtctgca

SEQ ID NO: 1498109 - DNA, 25 bp, Homo sapien
tctgggagactgtgactgttctgga

SEQ ID NO: 1498110 - DNA, 25 bp, Homo sapien
gcagacaccaaaacacacggtagat

SEQ ID NO: 1498111 - DNA, 25 bp, Homo sapien
cacgacaagggctagaagttatgca

SEQ ID NO: 1498112 - DNA, 25 bp, Homo sapien
cccatttggtggaggtgaccatcag

SEQ ID NO: 1498113 - DNA, 25 bp, Homo sapien
tcttcctgaggcaacacgacaaggg

SEQ ID NO: 1498114 - DNA, 25 bp, Homo sapien
gagggcattatggtttattcagtct

SEQ ID NO: 1498115 - DNA, 25 bp, Homo sapien
catacacccagaaccatgtttgacc

SEQ ID NO: 1498116 - DNA, 25 bp, Homo sapien
tgggctccctgtagtccagtgcagt

SEQ ID NO: 1498117 - DNA, 25 bp, Homo sapien
ttgaatgaagctcatccacactggg

SEQ ID NO: 1498118 - DNA, 25 bp, Homo sapien
aatcagggtgcaggtctacacaaga

SEQ ID NO: 1498119 - DNA, 25 bp, Homo sapien
ttctgtcaatagatagagtggtggg

SEQ ID NO: 1498120 - DNA, 25 bp, Homo sapien
gggacttcttcattgggatatggat

SEQ ID NO: 1498121 - DNA, 25 bp, Homo sapien
cattgggatatggatgctcagaaag

SEQ ID NO: 1498122 - DNA, 25 bp, Homo sapien
tggatatatcgagtttgacgtgagc

SEQ ID NO: 1498123 - DNA, 25 bp, Homo sapien
tttggatatatcgagtttgacgtga

SEQ ID NO: 1498124 - DNA, 25 bp, Homo sapien
atttttggatatatcgagtttgacg

SEQ ID NO: 1498125 - DNA, 25 bp, Homo sapien
gatatatcgagtttgacgtgagcat

SEQ ID NO: 1498126 - DNA, 25 bp, Homo sapien
ttctcttggggcttaatgacagtgc

SEQ ID NO: 1498127 - DNA, 25 bp, Homo sapien
tctcttggggcttaatgacagtgct

SEQ ID NO: 1498128 - DNA, 25 bp, Homo sapien
agcagaagccaattgtgcagaagca

SEQ ID NO: 1498129 - DNA, 25 bp, Homo sapien
tgagcagaagccaattgtgcagaag

SEQ ID NO: 1498130 - DNA, 25 bp, Homo sapien
ctggagtcaacgagtcgtcgaaact

SEQ ID NO: 1498131 - DNA, 25 bp, Homo sapien
cgagtcgtcgaaacttgtgtggaga

SEQ ID NO: 1498132 - DNA, 25 bp, Homo sapien
ctgcaggaaaatgccaacaaggagc

SEQ ID NO: 1498133 - DNA, 25 bp, Homo sapien
ttctaccctgcgaacgtcagcagtc

SEQ ID NO: 1498134 - DNA, 25 bp, Homo sapien
ccgggagtggtgaagaggcagttta

SEQ ID NO: 1498135 - DNA, 25 bp, Homo sapien
cacccacacaatgtattagaatccg

SEQ ID NO: 1498136 - DNA, 25 bp, Homo sapien
gcaccggcagtgagagaagtgggac

SEQ ID NO: 1498137 - DNA, 25 bp, Homo sapien
cctatccttgacaaagtctctgtag

SEQ ID NO: 1498138 - DNA, 25 bp, Homo sapien
ttcacaagtcccagctcactgtggc

SEQ ID NO: 1498139 - DNA, 25 bp, Homo sapien
gcagatggacttggcacacttcaca

SEQ ID NO: 1498140 - DNA, 25 bp, Homo sapien
caaatgcttccacttcgtctcttgc

SEQ ID NO: 1498141 - DNA, 25 bp, Homo sapien
agatcaattgggatcaggcatgttc

SEQ ID NO: 1498142 - DNA, 25 bp, Homo sapien
tttccaagatcaattgggatcaggc

SEQ ID NO: 1498143 - DNA, 25 bp, Homo sapien
gatcaattgggatcaggcatgttca

SEQ ID NO: 1498144 - DNA, 25 bp, Homo sapien
ccaagatcaattgggatcaggcatg

SEQ ID NO: 1498145 - DNA, 25 bp, Homo sapien
aggactcagaaagcccttgaacctc

SEQ ID NO: 1498146 - DNA, 25 bp, Homo sapien
tcagaaagcccttgaacctctgaca

SEQ ID NO: 1498147 - DNA, 25 bp, Homo sapien
cctgaaatccacaggactcagaaag

SEQ ID NO: 1498148 - DNA, 25 bp, Homo sapien
ctggaatcctgaaatccacaggact

SEQ ID NO: 1498149 - DNA, 25 bp, Homo sapien
ctgtgccctttccatttaaccctgt

SEQ ID NO: 1498150 - DNA, 25 bp, Homo sapien
caccgtaggtcctgttgactctcag

SEQ ID NO: 1498151 - DNA, 25 bp, Homo sapien
tcaggcaaagagattgacccttgtt

SEQ ID NO: 1498152 - DNA, 25 bp, Homo sapien
tgtttcgctgattccaccgtaggtc

SEQ ID NO: 1498153 - DNA, 25 bp, Homo sapien
tcttgtcctgccatggtgaaagcct

SEQ ID NO: 1498154 - DNA, 25 bp, Homo sapien
atggtgaaagcctgaggaagactga

SEQ ID NO: 1498155 - DNA, 25 bp, Homo sapien
ctcttgtcctgccatggtgaaagcc

SEQ ID NO: 1498156 - DNA, 25 bp, Homo sapien
gtgaaagcctgaggaagactgaagt

SEQ ID NO: 1498157 - DNA, 25 bp, Homo sapien
atttctcccttagtgttgcaaatct

SEQ ID NO: 1498158 - DNA, 25 bp, Homo sapien
tagtgttgcaaatcttgaataagac

SEQ ID NO: 1498159 - DNA, 25 bp, Homo sapien
ctcccttagtgttgcaaatcttgaa

SEQ ID NO: 1498160 - DNA, 25 bp, Homo sapien
cccttagtgttgcaaatcttgaata

SEQ ID NO: 1498161 - DNA, 25 bp, Homo sapien
tggcttctctcgaaggattgtaata

SEQ ID NO: 1498162 - DNA, 25 bp, Homo sapien
cagccctgcgagtcccagggagtgc

SEQ ID NO: 1498163 - DNA, 25 bp, Homo sapien
agggagtgctcgctgcaccctgtct

SEQ ID NO: 1498164 - DNA, 25 bp, Homo sapien
ccctgtctcagctaatgtgtttgtt

SEQ ID NO: 1498165 - DNA, 25 bp, Homo sapien
tatcaggcctagtgggcacatatgt

SEQ ID NO: 1498166 - DNA, 25 bp, Homo sapien
gtgcttttatcaggcctagtgggca

SEQ ID NO: 1498167 - DNA, 25 bp, Homo sapien
ctgtgcttttatcaggcctagtggg

SEQ ID NO: 1498168 - DNA, 25 bp, Homo sapien
cttttatcaggcctagtgggcacat

SEQ ID NO: 1498169 - DNA, 25 bp, Homo sapien
ggtttgttgaaacagagctccacaa

SEQ ID NO: 1498170 - DNA, 25 bp, Homo sapien
ctttgattttgatgtgccgatctgg

SEQ ID NO: 1498171 - DNA, 25 bp, Homo sapien
tccacaagggccgagaaggcctcct

SEQ ID NO: 1498172 - DNA, 25 bp, Homo sapien
gccttcttcacgcttcgcctttgat

SEQ ID NO: 1498173 - DNA, 25 bp, Homo sapien
aaagagaaggacagcgtagagaatg

SEQ ID NO: 1498174 - DNA, 25 bp, Homo sapien
gaaagagaaggacagcgtagagaat

SEQ ID NO: 1498175 - DNA, 25 bp, Homo sapien
gagaaggacagcgtagagaatgttg

SEQ ID NO: 1498176 - DNA, 25 bp, Homo sapien
aagagaaggacagcgtagagaatgt

SEQ ID NO: 1498177 - DNA, 25 bp, Homo sapien
tatatgttaggtgccaaagacatcc

SEQ ID NO: 1498178 - DNA, 25 bp, Homo sapien
gatttgttcccttacgaccactctg

SEQ ID NO: 1498179 - DNA, 25 bp, Homo sapien
gagttactgatttgttcccttacga

SEQ ID NO: 1498180 - DNA, 25 bp, Homo sapien
ttacgaccactctgaaatcggccac

SEQ ID NO: 1498181 - DNA, 25 bp, Homo sapien
aatagcacagccgtactcagatccc

SEQ ID NO: 1498182 - DNA, 25 bp, Homo sapien
agcacagccgtactcagatccctgg

SEQ ID NO: 1498183 - DNA, 25 bp, Homo sapien
tttaatagcacagccgtactcagat

SEQ ID NO: 1498184 - DNA, 25 bp, Homo sapien
ctttaatagcacagccgtactcaga

SEQ ID NO: 1498185 - DNA, 25 bp, Homo sapien
aacggcatccttcactttgtcctta

SEQ ID NO: 1498186 - DNA, 25 bp, Homo sapien
gatccaaggtgatgcataaggcaca

SEQ ID NO: 1498187 - DNA, 25 bp, Homo sapien
caggtaaagccttcatacttatgga

SEQ ID NO: 1498188 - DNA, 25 bp, Homo sapien
tggatccactactcaccaggagtga

SEQ ID NO: 1498189 - DNA, 25 bp, Homo sapien
ctaggtggttcacagtcgttttccg

SEQ ID NO: 1498190 - DNA, 25 bp, Homo sapien
gcagaatgcaaatcactaggtggtt

SEQ ID NO: 1498191 - DNA, 25 bp, Homo sapien
gggtccgattatccccaaaagcaga

SEQ ID NO: 1498192 - DNA, 25 bp, Homo sapien
tccgttctgggcacaatggcctttc

SEQ ID NO: 1498193 - DNA, 25 bp, Homo sapien
tgcagatgatagtatgagcagtagc

SEQ ID NO: 1498194 - DNA, 25 bp, Homo sapien
acttccatacatcgctagcagctgg

SEQ ID NO: 1498195 - DNA, 25 bp, Homo sapien
tgagcagtagcaactaaaacatgtc

SEQ ID NO: 1498196 - DNA, 25 bp, Homo sapien
tgtctgacacttccatacatcgcta

SEQ ID NO: 1498197 - DNA, 25 bp, Homo sapien
tgacagaactacagccagtgactca

SEQ ID NO: 1498198 - DNA, 25 bp, Homo sapien
taatggctacaaattggaactgaat

SEQ ID NO: 1498199 - DNA, 25 bp, Homo sapien
tattgatgaaagcaccaggcacctt

SEQ ID NO: 1498200 - DNA, 25 bp, Homo sapien
gaactgaattttattgatgaaagca

SEQ ID NO: 1498201 - DNA, 25 bp, Homo sapien
tgtgggttagagttgaagacttaga

SEQ ID NO: 1498202 - DNA, 25 bp, Homo sapien
aagcaatggtaatcatggactcatt

SEQ ID NO: 1498203 - DNA, 25 bp, Homo sapien
ttacttgcccccacaagtaacagtg

SEQ ID NO: 1498204 - DNA, 25 bp, Homo sapien
ttgcccccacaagtaacagtgaaat

SEQ ID NO: 1498205 - DNA, 25 bp, Homo sapien
catgtgtcgacagcaaagtttggct

SEQ ID NO: 1498206 - DNA, 25 bp, Homo sapien
cagctcttgctcgtgtatgatctag

SEQ ID NO: 1498207 - DNA, 25 bp, Homo sapien
tgaagtcaacgaagaagcagcatcc

SEQ ID NO: 1498208 - DNA, 25 bp, Homo sapien
gctttgccgatgtctgctctgatga

SEQ ID NO: 1498209 - DNA, 25 bp, Homo sapien
catcctcttcttacgcagttgtctg

SEQ ID NO: 1498210 - DNA, 25 bp, Homo sapien
tctgcagacggctggattgaggcct

SEQ ID NO: 1498211 - DNA, 25 bp, Homo sapien
agaggactttgcctggtagggcttt

SEQ ID NO: 1498212 - DNA, 25 bp, Homo sapien
agaagactcggagctttcagcagag

SEQ ID NO: 1498213 - DNA, 25 bp, Homo sapien
agtttgagccgtcctcgccccatgg

SEQ ID NO: 1498214 - DNA, 25 bp, Homo sapien
tcctcgccccatggtggtaactgtg

SEQ ID NO: 1498215 - DNA, 25 bp, Homo sapien
ttgagccgtcctcgccccatggtgg

SEQ ID NO: 1498216 - DNA, 25 bp, Homo sapien
ctttccatccagtttgagccgtcct

SEQ ID NO: 1498217 - DNA, 25 bp, Homo sapien
catgctgattgccatgccgattgca

SEQ ID NO: 1498218 - DNA, 25 bp, Homo sapien
tttttattccgcaagtccatgctga

SEQ ID NO: 1498219 - DNA, 25 bp, Homo sapien
aattgcaggaattctatagatacgg

SEQ ID NO: 1498220 - DNA, 25 bp, Homo sapien
ccgattgcaggaactctagagatat

SEQ ID NO: 1498221 - DNA, 25 bp, Homo sapien
gaattgaccaccaaaattgctgcat

SEQ ID NO: 1498222 - DNA, 25 bp, Homo sapien
ttggaagcgccaccagaattgacca

SEQ ID NO: 1498223 - DNA, 25 bp, Homo sapien
gcatccctctcagcatcaattcagg

SEQ ID NO: 1498224 - DNA, 25 bp, Homo sapien
ttcgcgacatcacgtcatttggaag

SEQ ID NO: 1498225 - DNA, 25 bp, Homo sapien
cttcacagttgtgtggagtggaata

SEQ ID NO: 1498226 - DNA, 25 bp, Homo sapien
agtggaataacgagagtgtgtgctt

SEQ ID NO: 1498227 - DNA, 25 bp, Homo sapien
tcacagttgtgtggagtggaataac

SEQ ID NO: 1498228 - DNA, 25 bp, Homo sapien
acagttgtgtggagtggaataacga

SEQ ID NO: 1498229 - DNA, 25 bp, Homo sapien
caggatgaatggctcttcataatcg

SEQ ID NO: 1498230 - DNA, 25 bp, Homo sapien
gatgaatggctcttcataatcgtag

SEQ ID NO: 1498231 - DNA, 25 bp, Homo sapien
gaatggctcttcataatcgtagatg

SEQ ID NO: 1498232 - DNA, 25 bp, Homo sapien
ctcttcataatcgtagatggtttta

SEQ ID NO: 1498233 - DNA, 25 bp, Homo sapien
gaacagcgactgttgatgctctcct

SEQ ID NO: 1498234 - DNA, 25 bp, Homo sapien
tctgatggttgtagcagtgggccca

SEQ ID NO: 1498235 - DNA, 25 bp, Homo sapien
tcctgatcccaggatgatttcctac

SEQ ID NO: 1498236 - DNA, 25 bp, Homo sapien
ctactgaactttttggagggtcagg

SEQ ID NO: 1498237 - DNA, 25 bp, Homo sapien
taacccgtgttaaggagcaagcatt

SEQ ID NO: 1498238 - DNA, 25 bp, Homo sapien
tgcgcgcctggcaaatacagtattt

SEQ ID NO: 1498239 - DNA, 25 bp, Homo sapien
tattaccggcttatttgaactggag

SEQ ID NO: 1498240 - DNA, 25 bp, Homo sapien
tctgatgcagacattgccctaggca

SEQ ID NO: 1498241 - DNA, 25 bp, Homo sapien
tcttgtccccggcttgtatccttaa

SEQ ID NO: 1498242 - DNA, 25 bp, Homo sapien
ttgtccccggcttgtatccttaatc

SEQ ID NO: 1498243 - DNA, 25 bp, Homo sapien
ttcccactcttgtccccggcttgta

SEQ ID NO: 1498244 - DNA, 25 bp, Homo sapien
gtccccggcttgtatccttaatcat

SEQ ID NO: 1498245 - DNA, 25 bp, Homo sapien
ccagacctgcatgtcggaatgtgta

SEQ ID NO: 1498246 - DNA, 25 bp, Homo sapien
ggtcctgactccagttcccatcttg

SEQ ID NO: 1498247 - DNA, 25 bp, Homo sapien
ccaggacagcccttcggtcctgact

SEQ ID NO: 1498248 - DNA, 25 bp, Homo sapien
catgtcggaatgtgtaaaataggaa

SEQ ID NO: 1498249 - DNA, 25 bp, Homo sapien
ccagctttgaaacattgaatggtag

SEQ ID NO: 1498250 - DNA, 25 bp, Homo sapien
cagccagctttgaaacattgaatgg

SEQ ID NO: 1498251 - DNA, 25 bp, Homo sapien
tgaatggtaggtttgctttctactt

SEQ ID NO: 1498252 - DNA, 25 bp, Homo sapien
tggtaggtttgctttctacttctaa

SEQ ID NO: 1498253 - DNA, 25 bp, Homo sapien
cctgttttcgggcagttgcaagtct

SEQ ID NO: 1498254 - DNA, 25 bp, Homo sapien
ttgcctgttttcgggcagttgcaag

SEQ ID NO: 1498255 - DNA, 25 bp, Homo sapien
tgttttcgggcagttgcaagtctct

SEQ ID NO: 1498256 - DNA, 25 bp, Homo sapien
gttttcgggcagttgcaagtctctc

SEQ ID NO: 1498257 - DNA, 25 bp, Homo sapien
atcgtggctctattttaacacgagt

SEQ ID NO: 1498258 - DNA, 25 bp, Homo sapien
tcgtggctctattttaacacgagtg

SEQ ID NO: 1498259 - DNA, 25 bp, Homo sapien
catcgtggctctattttaacacgag

SEQ ID NO: 1498260 - DNA, 25 bp, Homo sapien
caggccagaccactcctgtctgagg

SEQ ID NO: 1498261 - DNA, 25 bp, Homo sapien
gcctgctgccgaaactctccagtgg

SEQ ID NO: 1498262 - DNA, 25 bp, Homo sapien
ggccagaccactcctgtctgagggc

SEQ ID NO: 1498263 - DNA, 25 bp, Homo sapien
ctgagggcctgctgccgaaactctc

SEQ ID NO: 1498264 - DNA, 25 bp, Homo sapien
cttgtccccatttagggaagaggtg

SEQ ID NO: 1498265 - DNA, 25 bp, Homo sapien
tgctagggcctataggcatggcctg

SEQ ID NO: 1498266 - DNA, 25 bp, Homo sapien
ttcacgtaggcgcatcccctgctct

SEQ ID NO: 1498267 - DNA, 25 bp, Homo sapien
gcatggcctggaagccggagggctt

SEQ ID NO: 1498268 - DNA, 25 bp, Homo sapien
actcgatgtcatctgtgcaggtcaa

SEQ ID NO: 1498269 - DNA, 25 bp, Homo sapien
gaggaagccccggtttagagctgta

SEQ ID NO: 1498270 - DNA, 25 bp, Homo sapien
gaaagtgaggaatgggtcacaagaa

SEQ ID NO: 1498271 - DNA, 25 bp, Homo sapien
ttagagctgtagactcgatgtcatc

SEQ ID NO: 1498272 - DNA, 25 bp, Homo sapien
tagaagaaaactgagtgcgtgctcc

SEQ ID NO: 1498273 - DNA, 25 bp, Homo sapien
ttagaggcagggatccgagaaacct

SEQ ID NO: 1498274 - DNA, 25 bp, Homo sapien
tggagaatatcctccctttggagac

SEQ ID NO: 1498275 - DNA, 25 bp, Homo sapien
tgcgtgctccaaccagtcttgtgaa

SEQ ID NO: 1498276 - DNA, 25 bp, Homo sapien
aacaatggaagcgtggacctttcgc

SEQ ID NO: 1498277 - DNA, 25 bp, Homo sapien
ggatactggatactgttgccccatc

SEQ ID NO: 1498278 - DNA, 25 bp, Homo sapien
gacctttcgctaatatcccacagca

SEQ ID NO: 1498279 - DNA, 25 bp, Homo sapien
ctaagagacactctggccaacaatg

SEQ ID NO: 1498280 - DNA, 25 bp, Homo sapien
ttgatcggcataatatgctacagcc

SEQ ID NO: 1498281 - DNA, 25 bp, Homo sapien
gggactacacgcgtggcccacgctg

SEQ ID NO: 1498282 - DNA, 25 bp, Homo sapien
gtgcagacacttgatcggcataata

SEQ ID NO: 1498283 - DNA, 25 bp, Homo sapien
cagacacttgatcggcataatatgc

SEQ ID NO: 1498284 - DNA, 25 bp, Homo sapien
acacaggaggtttgacctgtttcat

SEQ ID NO: 1498285 - DNA, 25 bp, Homo sapien
caacacaggaggtttgacctgtttc

SEQ ID NO: 1498286 - DNA, 25 bp, Homo sapien
aacacaggaggtttgacctgtttca

SEQ ID NO: 1498287 - DNA, 25 bp, Homo sapien
tctgcctttccgtgtggtgtctgtt

SEQ ID NO: 1498288 - DNA, 25 bp, Homo sapien
tctttctgcctttccgtgtggtgtc

SEQ ID NO: 1498289 - DNA, 25 bp, Homo sapien
cctttccgtgtggtgtctgttgaag

SEQ ID NO: 1498290 - DNA, 25 bp, Homo sapien
tgcctttccgtgtggtgtctgttga

SEQ ID NO: 1498291 - DNA, 25 bp, Homo sapien
tggctgcagagagacggagctgtgt

SEQ ID NO: 1498292 - DNA, 25 bp, Homo sapien
tctggctgcagagagacggagctgt

SEQ ID NO: 1498293 - DNA, 25 bp, Homo sapien
ctggctgcagagagacggagctgtg

SEQ ID NO: 1498294 - DNA, 25 bp, Homo sapien
atctggctgcagagagacggagctg

SEQ ID NO: 1498295 - DNA, 25 bp, Homo sapien
taatggggctcttaggcatgaggat

SEQ ID NO: 1498296 - DNA, 25 bp, Homo sapien
atggggctcttaggcatgaggatct

SEQ ID NO: 1498297 - DNA, 25 bp, Homo sapien
cattcactgcgtcctgcttaatggg

SEQ ID NO: 1498298 - DNA, 25 bp, Homo sapien
ttcactgcgtcctgcttaatggggc

SEQ ID NO: 1498299 - DNA, 25 bp, Homo sapien
ggccatggctgcacttacggggcca

SEQ ID NO: 1498300 - DNA, 25 bp, Homo sapien
ttacggggccatgcacctgaggcac

SEQ ID NO: 1498301 - DNA, 25 bp, Homo sapien
ctgttaacgagtaggcctgtggcca

SEQ ID NO: 1498302 - DNA, 25 bp, Homo sapien
tagcaggtgtatccaggcttgctcc

SEQ ID NO: 1498303 - DNA, 25 bp, Homo sapien
ctgaaatgcaatcgtttgttaaaag

SEQ ID NO: 1498304 - DNA, 25 bp, Homo sapien
aatgcaatcgtttgttaaaaggctg

SEQ ID NO: 1498305 - DNA, 25 bp, Homo sapien
tgaaatgcaatcgtttgttaaaagg

SEQ ID NO: 1498306 - DNA, 25 bp, Homo sapien
ttgcaagcataagctaccagtgagc

SEQ ID NO: 1498307 - DNA, 25 bp, Homo sapien
caatgatcgcattcacgaagttcct

SEQ ID NO: 1498308 - DNA, 25 bp, Homo sapien
gagtactcccgaataaatagcgtga

SEQ ID NO: 1498309 - DNA, 25 bp, Homo sapien
ggaagattccagatacctgacctag

SEQ ID NO: 1498310 - DNA, 25 bp, Homo sapien
tcatgttgcagcacaccaaggcttt

SEQ ID NO: 1498311 - DNA, 25 bp, Homo sapien
tgttctctcgttggcctgttccaga

SEQ ID NO: 1498312 - DNA, 25 bp, Homo sapien
tttcttcagtacttcacatgttctc

SEQ ID NO: 1498313 - DNA, 25 bp, Homo sapien
cctcttcatgttgcagcacaccaag

SEQ ID NO: 1498314 - DNA, 25 bp, Homo sapien
gatcagctatctggaatctgcccag

SEQ ID NO: 1498315 - DNA, 25 bp, Homo sapien
aacacaaagaggcaatacggatgct

SEQ ID NO: 1498316 - DNA, 25 bp, Homo sapien
tcattagcctaaaccataacacaaa

SEQ ID NO: 1498317 - DNA, 25 bp, Homo sapien
tacggatgctcctggtcgaatggct

SEQ ID NO: 1498318 - DNA, 25 bp, Homo sapien
tgagtgaaggtccaggatccaaaca

SEQ ID NO: 1498319 - DNA, 25 bp, Homo sapien
gagccaccaatttcctgagtgaagg

SEQ ID NO: 1498320 - DNA, 25 bp, Homo sapien
gagtgaaggtccaggatccaaacag

SEQ ID NO: 1498321 - DNA, 25 bp, Homo sapien
cttgatctgagccaccaatttcctg

SEQ ID NO: 1498322 - DNA, 25 bp, Homo sapien
tcatgttgcagcacaccaaggcttt

SEQ ID NO: 1498323 - DNA, 25 bp, Homo sapien
tgttctctcgttggcctgttccaga

SEQ ID NO: 1498324 - DNA, 25 bp, Homo sapien
tttcttcagtacttcacatgttctc

SEQ ID NO: 1498325 - DNA, 25 bp, Homo sapien
cctcttcatgttgcagcacaccaag

SEQ ID NO: 1498326 - DNA, 25 bp, Homo sapien
agctggtcgtcccatgatttcggaa

SEQ ID NO: 1498327 - DNA, 25 bp, Homo sapien
tggtcgtcccatgatttcggaaacg

SEQ ID NO: 1498328 - DNA, 25 bp, Homo sapien
cgtaatggtagatcagctatctgga

SEQ ID NO: 1498329 - DNA, 25 bp, Homo sapien
tgatttcggaaacgtaatggtagat

SEQ ID NO: 1498330 - DNA, 25 bp, Homo sapien
ggctttggattcctccagcaatatt

SEQ ID NO: 1498331 - DNA, 25 bp, Homo sapien
caagcttcttgatctgagccaccaa

SEQ ID NO: 1498332 - DNA, 25 bp, Homo sapien
gcttcttgatctgagccaccaattt

SEQ ID NO: 1498333 - DNA, 25 bp, Homo sapien
cagcaatattcgattacatgagaca

SEQ ID NO: 1498334 - DNA, 25 bp, Homo sapien
tgagtgaaggtccaggatccaaaca

SEQ ID NO: 1498335 - DNA, 25 bp, Homo sapien
gagccaccaatttcctgagtgaagg

SEQ ID NO: 1498336 - DNA, 25 bp, Homo sapien
gagtgaaggtccaggatccaaacag

SEQ ID NO: 1498337 - DNA, 25 bp, Homo sapien
cttgatctgagccaccaatttcctg

SEQ ID NO: 1498338 - DNA, 25 bp, Homo sapien
tgttctctcgttggcctgttccaga

SEQ ID NO: 1498339 - DNA, 25 bp, Homo sapien
tttcttcagtacttcacatgttctc

SEQ ID NO: 1498340 - DNA, 25 bp, Homo sapien
catgttctctcgttggcctgttcca

SEQ ID NO: 1498341 - DNA, 25 bp, Homo sapien
ttcacatgttctctcgttggcctgt

SEQ ID NO: 1498342 - DNA, 25 bp, Homo sapien
gcttcttgatctgagccaccaattt

SEQ ID NO: 1498343 - DNA, 25 bp, Homo sapien
cttcttgatctgagccaccaatttc

SEQ ID NO: 1498344 - DNA, 25 bp, Homo sapien
aagcttcttgatctgagccaccaat

SEQ ID NO: 1498345 - DNA, 25 bp, Homo sapien
caagcttcttgatctgagccaccaa

SEQ ID NO: 1498346 - DNA, 25 bp, Homo sapien
tgttctctcgttggcctgttccaga

SEQ ID NO: 1498347 - DNA, 25 bp, Homo sapien
tcatgttgcagcacaccaaggcttt

SEQ ID NO: 1498348 - DNA, 25 bp, Homo sapien
tttcttcagtacttcacatgttctc

SEQ ID NO: 1498349 - DNA, 25 bp, Homo sapien
cctcttcatgttgcagcacaccaag

SEQ ID NO: 1498350 - DNA, 25 bp, Homo sapien
cgtaatggtagatcagctatctgga

SEQ ID NO: 1498351 - DNA, 25 bp, Homo sapien
agctggtcgtcccatgatttcggaa

SEQ ID NO: 1498352 - DNA, 25 bp, Homo sapien
tggtcgtcccatgatttcggaaacg

SEQ ID NO: 1498353 - DNA, 25 bp, Homo sapien
tgatttcggaaacgtaatggtagat

SEQ ID NO: 1498354 - DNA, 25 bp, Homo sapien
gagccaccaatttcctgagtgaagg

SEQ ID NO: 1498355 - DNA, 25 bp, Homo sapien
gagtgaaggtccaggatccaaacag

SEQ ID NO: 1498356 - DNA, 25 bp, Homo sapien
cttgatctgagccaccaatttcctg

SEQ ID NO: 1498357 - DNA, 25 bp, Homo sapien
tgagtgaaggtccaggatccaaaca

SEQ ID NO: 1498358 - DNA, 25 bp, Homo sapien
tgttctctcgttggcctgttccaga

SEQ ID NO: 1498359 - DNA, 25 bp, Homo sapien
tcatgttgcagcacaccaaggcttt

SEQ ID NO: 1498360 - DNA, 25 bp, Homo sapien
tttcttcagtacttcacatgttctc

SEQ ID NO: 1498361 - DNA, 25 bp, Homo sapien
tcttcatgttgcagcacaccaaggc

SEQ ID NO: 1498362 - DNA, 25 bp, Homo sapien
atggagtccaacccttgggcagaac

SEQ ID NO: 1498363 - DNA, 25 bp, Homo sapien
tggagtccaacccttgggcagaacc

SEQ ID NO: 1498364 - DNA, 25 bp, Homo sapien
cgtaatggtagatcagctatctgga

SEQ ID NO: 1498365 - DNA, 25 bp, Homo sapien
agctggtcgtcccatgatttcggaa

SEQ ID NO: 1498366 - DNA, 25 bp, Homo sapien
tggtcgtcccatgatttcggaaacg

SEQ ID NO: 1498367 - DNA, 25 bp, Homo sapien
tgatttcggaaacgtaatggtagat

SEQ ID NO: 1498368 - DNA, 25 bp, Homo sapien
gcttcttgatctgagccaccaattt

SEQ ID NO: 1498369 - DNA, 25 bp, Homo sapien
ggctttggattcctccagcaatatt

SEQ ID NO: 1498370 - DNA, 25 bp, Homo sapien
caagcttcttgatctgagccaccaa

SEQ ID NO: 1498371 - DNA, 25 bp, Homo sapien
cagcaatattcgattacatgagaca

SEQ ID NO: 1498372 - DNA, 25 bp, Homo sapien
tgagccaccaatttcctgattgaag

SEQ ID NO: 1498373 - DNA, 25 bp, Homo sapien
ctgagccaccaatttcctgattgaa

SEQ ID NO: 1498374 - DNA, 25 bp, Homo sapien
tcatgttgcagcacaccaaggcttt

SEQ ID NO: 1498375 - DNA, 25 bp, Homo sapien
tgttctctcgttggcctgttccaga

SEQ ID NO: 1498376 - DNA, 25 bp, Homo sapien
tttcttcagtacttcacatgttctc

SEQ ID NO: 1498377 - DNA, 25 bp, Homo sapien
cctcttcatgttgcagcacaccaag

SEQ ID NO: 1498378 - DNA, 25 bp, Homo sapien
tggagtccaacccttgggcagaacc

SEQ ID NO: 1498379 - DNA, 25 bp, Homo sapien
atggagtccaacccttgggcagaac

SEQ ID NO: 1498380 - DNA, 25 bp, Homo sapien
tcatgttgcagcacaccaaggcttt

SEQ ID NO: 1498381 - DNA, 25 bp, Homo sapien
tgttctctcgttggcctgttccaga

SEQ ID NO: 1498382 - DNA, 25 bp, Homo sapien
cctcttcatgttgcagcacaccaag

SEQ ID NO: 1498383 - DNA, 25 bp, Homo sapien
ttcacatgttctctcgttggcctgt

SEQ ID NO: 1498384 - DNA, 25 bp, Homo sapien
acggagccagcaagctgtgccttgc

SEQ ID NO: 1498385 - DNA, 25 bp, Homo sapien
ccccatgcacgtcgccttgcaatct

SEQ ID NO: 1498386 - DNA, 25 bp, Homo sapien
cacggagccagcaagctgtgccttg

SEQ ID NO: 1498387 - DNA, 25 bp, Homo sapien
acgtcgccttgcaatctttctcctg

SEQ ID NO: 1498388 - DNA, 25 bp, Homo sapien
gcactcgagcacttgagcaccagga

SEQ ID NO: 1498389 - DNA, 25 bp, Homo sapien
tgacatgacctggtgtgaccgacac

SEQ ID NO: 1498390 - DNA, 25 bp, Homo sapien
aatgcccatggcgttcagaagccgt

SEQ ID NO: 1498391 - DNA, 25 bp, Homo sapien
ggacctgagaaatcctcggcagtga

SEQ ID NO: 1498392 - DNA, 25 bp, Homo sapien
catccggtttgtccggtgtgctttt

SEQ ID NO: 1498393 - DNA, 25 bp, Homo sapien
tggcaccagaatatggatccagtga

SEQ ID NO: 1498394 - DNA, 25 bp, Homo sapien
agtccttcatgtgatcccttgttat

SEQ ID NO: 1498395 - DNA, 25 bp, Homo sapien
gcttggcaatgtatcccagaatatt

SEQ ID NO: 1498396 - DNA, 25 bp, Homo sapien
ttcatgtgatcccttgttatttctc

SEQ ID NO: 1498397 - DNA, 25 bp, Homo sapien
acagtgggcgtccatcttccacatg

SEQ ID NO: 1498398 - DNA, 25 bp, Homo sapien
gatgtagtcagacagtgggcgtcca

SEQ ID NO: 1498399 - DNA, 25 bp, Homo sapien
cagacagtgggcgtccatcttccac

SEQ ID NO: 1498400 - DNA, 25 bp, Homo sapien
gacagtgggcgtccatcttccacat

SEQ ID NO: 1498401 - DNA, 25 bp, Homo sapien
caaaggcagactggactctttctgg

SEQ ID NO: 1498402 - DNA, 25 bp, Homo sapien
tattgtagtcagacagggtgtgtcc

SEQ ID NO: 1498403 - DNA, 25 bp, Homo sapien
aaaggcagactggactctttctgga

SEQ ID NO: 1498404 - DNA, 25 bp, Homo sapien
tagtcagacagggtgtgtccatctt

SEQ ID NO: 1498405 - DNA, 25 bp, Homo sapien
tccttttattttacggtgctctaca

SEQ ID NO: 1498406 - DNA, 25 bp, Homo sapien
gtctctgctctgatgggtgccctct

SEQ ID NO: 1498407 - DNA, 25 bp, Homo sapien
ccagtgctgcttctgtgaggacgtc

SEQ ID NO: 1498408 - DNA, 25 bp, Homo sapien
ttgtgctgttccctgaatgtttgca

SEQ ID NO: 1498409 - DNA, 25 bp, Homo sapien
caggcttctccgagcatttcggtct

SEQ ID NO: 1498410 - DNA, 25 bp, Homo sapien
ccagatacaggtcttatagaaattt

SEQ ID NO: 1498411 - DNA, 25 bp, Homo sapien
agccatttgataagaccagatacag

SEQ ID NO: 1498412 - DNA, 25 bp, Homo sapien
tgttgttattttcactagagcacag

SEQ ID NO: 1498413 - DNA, 25 bp, Homo sapien
ttttcactagagcacagccatttga

SEQ ID NO: 1498414 - DNA, 25 bp, Homo sapien
cataattgtgaatcagcagaataga

SEQ ID NO: 1498415 - DNA, 25 bp, Homo sapien
gagcctgcccttcgttgctcctggg

SEQ ID NO: 1498416 - DNA, 25 bp, Homo sapien
caaggccccccagaaggacatggtg

SEQ ID NO: 1498417 - DNA, 25 bp, Homo sapien
tgtatcagttgccattcaaggcccc

SEQ ID NO: 1498418 - DNA, 25 bp, Homo sapien
gggactggcacggacagtgacctcc

SEQ ID NO: 1498419 - DNA, 25 bp, Homo sapien
agcgcgggcgctggaaagtttcggt

SEQ ID NO: 1498420 - DNA, 25 bp, Homo sapien
tcctcgctcccaagcgcggagtggg

SEQ ID NO: 1498421 - DNA, 25 bp, Homo sapien
tcgtcgcgagcagcgcaacttgtgg

SEQ ID NO: 1498422 - DNA, 25 bp, Homo sapien
tgtactctagactgaatcctggtga

SEQ ID NO: 1498423 - DNA, 25 bp, Homo sapien
taggactccattcggataaagaccc

SEQ ID NO: 1498424 - DNA, 25 bp, Homo sapien
catagattcagtatcacctgggtgg

SEQ ID NO: 1498425 - DNA, 25 bp, Homo sapien
tacatattagcgtatggacagctga

SEQ ID NO: 1498426 - DNA, 25 bp, Homo sapien
tggctcacacccgtagtaatcctag

SEQ ID NO: 1498427 - DNA, 25 bp, Homo sapien
gactgtggtgctggtttcacaaata

SEQ ID NO: 1498428 - DNA, 25 bp, Homo sapien
tgtatgaaaaaacgagccaggcacg

SEQ ID NO: 1498429 - DNA, 25 bp, Homo sapien
ctggtttcacaaatatgggtgtgtg

SEQ ID NO: 1498430 - DNA, 25 bp, Homo sapien
ccagctgaggtaagggctccctttc

SEQ ID NO: 1498431 - DNA, 25 bp, Homo sapien
tacagaggcataccgaacagaaagg

SEQ ID NO: 1498432 - DNA, 25 bp, Homo sapien
caacaaaacgtcttggtacagaggc

SEQ ID NO: 1498433 - DNA, 25 bp, Homo sapien
cacaaaacgctcacaccagctgagg

SEQ ID NO: 1498434 - DNA, 25 bp, Homo sapien
tctagcccgaattctaaaaggacca

SEQ ID NO: 1498435 - DNA, 25 bp, Homo sapien
gagatcaaagcctacttaagcaaat

SEQ ID NO: 1498436 - DNA, 25 bp, Homo sapien
tgtcaccatggttcaagcttatata

SEQ ID NO: 1498437 - DNA, 25 bp, Homo sapien
gaagaagtctatgagttgatttgcc

SEQ ID NO: 1498438 - DNA, 25 bp, Homo sapien
caggccatggatatctttaacgaca

SEQ ID NO: 1498439 - DNA, 25 bp, Homo sapien
cattcgggctaggaacgtctgatcc

SEQ ID NO: 1498440 - DNA, 25 bp, Homo sapien
gttttaagaccaagtggagccctga

SEQ ID NO: 1498441 - DNA, 25 bp, Homo sapien
cgtctgatccaatcaaccaggtgag

SEQ ID NO: 1498442 - DNA, 25 bp, Homo sapien
aggtggcaagactcagcccagggca

SEQ ID NO: 1498443 - DNA, 25 bp, Homo sapien
ctgcaggtggcaagactcagcccag

SEQ ID NO: 1498444 - DNA, 25 bp, Homo sapien
ggtggcaagactcagcccagggcat

SEQ ID NO: 1498445 - DNA, 25 bp, Homo sapien
tgcaggtggcaagactcagcccagg

SEQ ID NO: 1498446 - DNA, 25 bp, Homo sapien
tgcgaggcatctgatatggtatgat

SEQ ID NO: 1498447 - DNA, 25 bp, Homo sapien
ctggtgctctgcgaggcatctgata

SEQ ID NO: 1498448 - DNA, 25 bp, Homo sapien
gctctgcgaggcatctgatatggta

SEQ ID NO: 1498449 - DNA, 25 bp, Homo sapien
ggcatctgatatggtatgattttct

SEQ ID NO: 1498450 - DNA, 25 bp, Homo sapien
aatttccaacgaggcaagaagaggg

SEQ ID NO: 1498451 - DNA, 25 bp, Homo sapien
aaagaatttccaacgaggcaagaag

SEQ ID NO: 1498452 - DNA, 25 bp, Homo sapien
agaatttccaacgaggcaagaagag

SEQ ID NO: 1498453 - DNA, 25 bp, Homo sapien
aggaaagaatttccaacgaggcaag

SEQ ID NO: 1498454 - DNA, 25 bp, Homo sapien
ttctcctacttggtcgattcagctg

SEQ ID NO: 1498455 - DNA, 25 bp, Homo sapien
tatgcttcacgatacttgtgtgtgc

SEQ ID NO: 1498456 - DNA, 25 bp, Homo sapien
tacttgtttatgcttcacgatactt

SEQ ID NO: 1498457 - DNA, 25 bp, Homo sapien
ctcctacttggtcgattcagctgtt

SEQ ID NO: 1498458 - DNA, 25 bp, Homo sapien
ctcttagcccatgcctatgtcatga

SEQ ID NO: 1498459 - DNA, 25 bp, Homo sapien
gtcatgaatggtattgcttaggtta

SEQ ID NO: 1498460 - DNA, 25 bp, Homo sapien
gaactcttagcccatgcctatgtca

SEQ ID NO: 1498461 - DNA, 25 bp, Homo sapien
gattgcagaagttttctcccactct

SEQ ID NO: 1498462 - DNA, 25 bp, Homo sapien
taataacacaagttacagcaaggac

SEQ ID NO: 1498463 - DNA, 25 bp, Homo sapien
agcaaggacggcactttcctgccct

SEQ ID NO: 1498464 - DNA, 25 bp, Homo sapien
acagccaacagtacagtcaacacag

SEQ ID NO: 1498465 - DNA, 25 bp, Homo sapien
acagtacagtcaacacagactcgca

SEQ ID NO: 1498466 - DNA, 25 bp, Homo sapien
tcaactgtgccgagactctgggggc

SEQ ID NO: 1498467 - DNA, 25 bp, Homo sapien
aatgcacagtcccaaggcttggttc

SEQ ID NO: 1498468 - DNA, 25 bp, Homo sapien
tggttctcggaataagcagagcaaa

SEQ ID NO: 1498469 - DNA, 25 bp, Homo sapien
ccgggtgccttcatttgtattcaaa

SEQ ID NO: 1498470 - DNA, 25 bp, Homo sapien
caaatgtcccctaggtgcagatcac

SEQ ID NO: 1498471 - DNA, 25 bp, Homo sapien
tcctaaggatctgataagcaggtgc

SEQ ID NO: 1498472 - DNA, 25 bp, Homo sapien
tccaagtggacgaattcagtgaatc

SEQ ID NO: 1498473 - DNA, 25 bp, Homo sapien
gttaacctgccccagtcgggaagca

SEQ ID NO: 1498474 - DNA, 25 bp, Homo sapien
gatgttcgatgatctggctccgcta

SEQ ID NO: 1498475 - DNA, 25 bp, Homo sapien
ccttgtgcaaggcagtaaacgagcc

SEQ ID NO: 1498476 - DNA, 25 bp, Homo sapien
ttcggtttctacaagtcacgcaggc

SEQ ID NO: 1498477 - DNA, 25 bp, Homo sapien
tacagtggacccatttcgagtacaa

SEQ ID NO: 1498478 - DNA, 25 bp, Homo sapien
tgtccgtgcacatgaaccagctgtg

SEQ ID NO: 1498479 - DNA, 25 bp, Homo sapien
tgctatctccacaatgacactgaca

SEQ ID NO: 1498480 - DNA, 25 bp, Homo sapien
ggttcttaattgtggcaacacggag

SEQ ID NO: 1498481 - DNA, 25 bp, Homo sapien
aacacggagataacaggcagggaca

SEQ ID NO: 1498482 - DNA, 25 bp, Homo sapien
caagagtcattggagggcaacacaa

SEQ ID NO: 1498483 - DNA, 25 bp, Homo sapien
tccgtctgtgctggcccttgagaaa

SEQ ID NO: 1498484 - DNA, 25 bp, Homo sapien
caatgacttaaaacgatgggcttcc

SEQ ID NO: 1498485 - DNA, 25 bp, Homo sapien
tcttctaaagggctggaccacattc

SEQ ID NO: 1498486 - DNA, 25 bp, Homo sapien
tgtatagtactcagtttataacgaa

SEQ ID NO: 1498487 - DNA, 25 bp, Homo sapien
gactgtatagtactcagtttataac

SEQ ID NO: 1498488 - DNA, 25 bp, Homo sapien
cccagagactgtatagtactcagtt

SEQ ID NO: 1498489 - DNA, 25 bp, Homo sapien
tagtactcagtttataacgaagatg

SEQ ID NO: 1498490 - DNA, 25 bp, Homo sapien
ttcaaagagcagagggtcaaaggca

SEQ ID NO: 1498491 - DNA, 25 bp, Homo sapien
gcagggcaggctactcggatttcct

SEQ ID NO: 1498492 - DNA, 25 bp, Homo sapien
ttggcaggtccagctctcaaacgtg

SEQ ID NO: 1498493 - DNA, 25 bp, Homo sapien
tgcacaggtgtatgggaaggaatcc

SEQ ID NO: 1498494 - DNA, 25 bp, Homo sapien
gcacacggctttaaaatcccactgg

SEQ ID NO: 1498495 - DNA, 25 bp, Homo sapien
aacccttccggcatttggagaagca

SEQ ID NO: 1498496 - DNA, 25 bp, Homo sapien
tgtcctgcagaatcctgactgagta

SEQ ID NO: 1498497 - DNA, 25 bp, Homo sapien
cagttcagagtttggggacctggca

SEQ ID NO: 1498498 - DNA, 25 bp, Homo sapien
tttcatgcaacagcccttaggctct

SEQ ID NO: 1498499 - DNA, 25 bp, Homo sapien
acaaagccagcaacaatcccttcca

SEQ ID NO: 1498500 - DNA, 25 bp, Homo sapien
atgcaacagcccttaggctctgtcc

SEQ ID NO: 1498501 - DNA, 25 bp, Homo sapien
gctgttataggacaaagccagcaac

SEQ ID NO: 1498502 - DNA, 25 bp, Homo sapien
tggcctggtaagctagcatccctga

SEQ ID NO: 1498503 - DNA, 25 bp, Homo sapien
ggtctgctgtctgcgataggtccct

SEQ ID NO: 1498504 - DNA, 25 bp, Homo sapien
aaaggctgggaatgtctcaggagca

SEQ ID NO: 1498505 - DNA, 25 bp, Homo sapien
tgcacgaatacccaccatcactgtg

SEQ ID NO: 1498506 - DNA, 25 bp, Homo sapien
gagccttcatggcacctatgggagc

SEQ ID NO: 1498507 - DNA, 25 bp, Homo sapien
gcaagccggtgcttcactgtcacca

SEQ ID NO: 1498508 - DNA, 25 bp, Homo sapien
tatgggagccccatttaaccacagc

SEQ ID NO: 1498509 - DNA, 25 bp, Homo sapien
cagctgcttcccctttcgaaggagc

SEQ ID NO: 1498510 - DNA, 25 bp, Homo sapien
caagctacctcaagttgtgaaattc

SEQ ID NO: 1498511 - DNA, 25 bp, Homo sapien
aattccacttacacaagctacctca

SEQ ID NO: 1498512 - DNA, 25 bp, Homo sapien
tacacaagctacctcaagttgtgaa

SEQ ID NO: 1498513 - DNA, 25 bp, Homo sapien
cacttacacaagctacctcaagttg

SEQ ID NO: 1498514 - DNA, 25 bp, Homo sapien
taggatgctggaccaactaagagta

SEQ ID NO: 1498515 - DNA, 25 bp, Homo sapien
ccctggcgagtgaaatctctttgct

SEQ ID NO: 1498516 - DNA, 25 bp, Homo sapien
gctccgcgctaacaagcacagtttt

SEQ ID NO: 1498517 - DNA, 25 bp, Homo sapien
tcagcacatatttgaaggaaagacc

SEQ ID NO: 1498518 - DNA, 25 bp, Homo sapien
caaacagcgctgagagaagttacca

SEQ ID NO: 1498519 - DNA, 25 bp, Homo sapien
gcgtccagggaaaatcgtactcatt

SEQ ID NO: 1498520 - DNA, 25 bp, Homo sapien
gaagttaccatgctgcgaaggcaac

SEQ ID NO: 1498521 - DNA, 25 bp, Homo sapien
gcagcggatgcttacgttttaacca

SEQ ID NO: 1498522 - DNA, 25 bp, Homo sapien
gggaccttgcaacataagccattta

SEQ ID NO: 1498523 - DNA, 25 bp, Homo sapien
tcactgattccacaccaggaagctg

SEQ ID NO: 1498524 - DNA, 25 bp, Homo sapien
tatccgaagcccaacatggaaaaac

SEQ ID NO: 1498525 - DNA, 25 bp, Homo sapien
catagggagtatatgtcagcctgag

SEQ ID NO: 1498526 - DNA, 25 bp, Homo sapien
aattgtgctgtctcgatgtctgtac

SEQ ID NO: 1498527 - DNA, 25 bp, Homo sapien
cataaaatagatcagtggccgccag

SEQ ID NO: 1498528 - DNA, 25 bp, Homo sapien
gacgcttcctggagtgatgacaatg

SEQ ID NO: 1498529 - DNA, 25 bp, Homo sapien
tgtacaaccagaaaactagactact

SEQ ID NO: 1498530 - DNA, 25 bp, Homo sapien
ttattaagcgggttctccacgccca

SEQ ID NO: 1498531 - DNA, 25 bp, Homo sapien
cctacataaagaaagcatgctgcat

SEQ ID NO: 1498532 - DNA, 25 bp, Homo sapien
cactagggtccatagacatttgcaa

SEQ ID NO: 1498533 - DNA, 25 bp, Homo sapien
gtttcagtccagcaatatattctca

SEQ ID NO: 1498534 - DNA, 25 bp, Homo sapien
tgcatgaacactgcggaatctgtct

SEQ ID NO: 1498535 - DNA, 25 bp, Homo sapien
gtctggacctactccccatctttgg

SEQ ID NO: 1498536 - DNA, 25 bp, Homo sapien
ccatctttggtccacgctattagca

SEQ ID NO: 1498537 - DNA, 25 bp, Homo sapien
tattagcaaggtctcctaactggtt

SEQ ID NO: 1498538 - DNA, 25 bp, Homo sapien
catcgggaagagctgctatcagcag

SEQ ID NO: 1498539 - DNA, 25 bp, Homo sapien
tccatattcatgccatcgggaagag

SEQ ID NO: 1498540 - DNA, 25 bp, Homo sapien
ctccatattcatgccatcgggaaga

SEQ ID NO: 1498541 - DNA, 25 bp, Homo sapien
gccatcgggaagagctgctatcagc

SEQ ID NO: 1498542 - DNA, 25 bp, Homo sapien
ttcttcaagaacagctgcagtggcg

SEQ ID NO: 1498543 - DNA, 25 bp, Homo sapien
tgcacgctggctccatgagtgccct

SEQ ID NO: 1498544 - DNA, 25 bp, Homo sapien
tccatgagtgccctggtagcaagag

SEQ ID NO: 1498545 - DNA, 25 bp, Homo sapien
tcaacgggccaatttcactcttctg

SEQ ID NO: 1498546 - DNA, 25 bp, Homo sapien
tggtgcagcaccaaaatactggaca

SEQ ID NO: 1498547 - DNA, 25 bp, Homo sapien
gctggggcagacttaaccctcatct

SEQ ID NO: 1498548 - DNA, 25 bp, Homo sapien
gtttgagtgggacaccagcgtcccc

SEQ ID NO: 1498549 - DNA, 25 bp, Homo sapien
caaaatactggacaaccggtttgag

SEQ ID NO: 1498550 - DNA, 25 bp, Homo sapien
agcacgggaagtggatagtcagctt

SEQ ID NO: 1498551 - DNA, 25 bp, Homo sapien
cgcagcactccatatgcatgtgtgt

SEQ ID NO: 1498552 - DNA, 25 bp, Homo sapien
cagataatgcacagagacttcgcag

SEQ ID NO: 1498553 - DNA, 25 bp, Homo sapien
gttgagaagagggtacgcgctcccc

SEQ ID NO: 1498554 - DNA, 25 bp, Homo sapien
ttccagcgagtccaaagtgcatcac

SEQ ID NO: 1498555 - DNA, 25 bp, Homo sapien
aggtccaggcactttccagcgagtc

SEQ ID NO: 1498556 - DNA, 25 bp, Homo sapien
ctttccagcgagtccaaagtgcatc

SEQ ID NO: 1498557 - DNA, 25 bp, Homo sapien
cagaggtccaggcactttccagcga

SEQ ID NO: 1498558 - DNA, 25 bp, Homo sapien
gggcagaaagtaaattgctggttgc

SEQ ID NO: 1498559 - DNA, 25 bp, Homo sapien
cacaaaagtccctatgttgtgagta

SEQ ID NO: 1498560 - DNA, 25 bp, Homo sapien
tgtgagtatttacctgaaatgtcag

SEQ ID NO: 1498561 - DNA, 25 bp, Homo sapien
attgctggttgcaccggttgggaca

SEQ ID NO: 1498562 - DNA, 25 bp, Homo sapien
tgcgttagcgcatcactcaggtcaa

SEQ ID NO: 1498563 - DNA, 25 bp, Homo sapien
gacacactgacgtggcctgatgcct

SEQ ID NO: 1498564 - DNA, 25 bp, Homo sapien
tcaggtcaatctctcccgatgggtg

SEQ ID NO: 1498565 - DNA, 25 bp, Homo sapien
tcatctaagcaagatatctggcccc

SEQ ID NO: 1498566 - DNA, 25 bp, Homo sapien
gacagcacgtgcttctcaataccag

SEQ ID NO: 1498567 - DNA, 25 bp, Homo sapien
ccagcttggcgcagttggatttcca

SEQ ID NO: 1498568 - DNA, 25 bp, Homo sapien
tggttctacttagcgccgtcgacag

SEQ ID NO: 1498569 - DNA, 25 bp, Homo sapien
tcaattccacgatgccaggagccgt

SEQ ID NO: 1498570 - DNA, 25 bp, Homo sapien
tctcactcccgacacagatgggttt

SEQ ID NO: 1498571 - DNA, 25 bp, Homo sapien
ctggctcactccaagggcggaaata

SEQ ID NO: 1498572 - DNA, 25 bp, Homo sapien
gttttcatggaagtcactggcctcc

SEQ ID NO: 1498573 - DNA, 25 bp, Homo sapien
atccgaccagaaggagggcaacctg

SEQ ID NO: 1498574 - DNA, 25 bp, Homo sapien
caggagcaaggccatgccgacggct

SEQ ID NO: 1498575 - DNA, 25 bp, Homo sapien
cgacggctgtctggtagcaccgttc

SEQ ID NO: 1498576 - DNA, 25 bp, Homo sapien
ccatgccgacggctgtctggtagca

SEQ ID NO: 1498577 - DNA, 25 bp, Homo sapien
caaggccatgccgacggctgtctgg

SEQ ID NO: 1498578 - DNA, 25 bp, Homo sapien
gattggcttcacagaaactgactct

SEQ ID NO: 1498579 - DNA, 25 bp, Homo sapien
ggaagccagtcacactcggttaaga

SEQ ID NO: 1498580 - DNA, 25 bp, Homo sapien
tcataggcccaacataacaaagtac

SEQ ID NO: 1498581 - DNA, 25 bp, Homo sapien
ccttttccctgtacgagtgtgtcca

SEQ ID NO: 1498582 - DNA, 25 bp, Homo sapien
gcactggggcttctcgttcacaacg

SEQ ID NO: 1498583 - DNA, 25 bp, Homo sapien
cactggggcttctcgttcacaacga

SEQ ID NO: 1498584 - DNA, 25 bp, Homo sapien
cggctaattctgacttctgcatctg

SEQ ID NO: 1498585 - DNA, 25 bp, Homo sapien
tggcttttgaccttgctgcttaaca

SEQ ID NO: 1498586 - DNA, 25 bp, Homo sapien
tttgaccttgctgcttaacaggctt

SEQ ID NO: 1498587 - DNA, 25 bp, Homo sapien
acaggcttctgtttatcaggagcca

SEQ ID NO: 1498588 - DNA, 25 bp, Homo sapien
tcaggccgagtgtccagaactggca

SEQ ID NO: 1498589 - DNA, 25 bp, Homo sapien
taaacatctgcccaatgaacgagtg

SEQ ID NO: 1498590 - DNA, 25 bp, Homo sapien
gaaatgtccgataagtcaggccgag

SEQ ID NO: 1498591 - DNA, 25 bp, Homo sapien
tgagaaaatcgtttgcccttaggac

SEQ ID NO: 1498592 - DNA, 25 bp, Homo sapien
aaagaaacttggcagcatgaacggc

SEQ ID NO: 1498593 - DNA, 25 bp, Homo sapien
acttggcagcatgaacggctgcttc

SEQ ID NO: 1498594 - DNA, 25 bp, Homo sapien
ttccatacacactgcatactgtagc

SEQ ID NO: 1498595 - DNA, 25 bp, Homo sapien
ctgtagcatgaagaggactcctagt

SEQ ID NO: 1498596 - DNA, 25 bp, Homo sapien
gcctggtgacactgagttcagactg

SEQ ID NO: 1498597 - DNA, 25 bp, Homo sapien
tgcctggtgacactgagttcagact

SEQ ID NO: 1498598 - DNA, 25 bp, Homo sapien
atgcctggtgacactgagttcagac

SEQ ID NO: 1498599 - DNA, 25 bp, Homo sapien
tgtcactagccaacgctctgcctta

SEQ ID NO: 1498600 - DNA, 25 bp, Homo sapien
cccaggcgatcgaaaggcagcttgt

SEQ ID NO: 1498601 - DNA, 25 bp, Homo sapien
aatgtttgcgggcttcagaacgccc

SEQ ID NO: 1498602 - DNA, 25 bp, Homo sapien
tgaccaaggtccaggcgaatgtttg

SEQ ID NO: 1498603 - DNA, 25 bp, Homo sapien
tcaatctgctgctactggatagagc

SEQ ID NO: 1498604 - DNA, 25 bp, Homo sapien
tccccgaccagtgtgaaacagatta

SEQ ID NO: 1498605 - DNA, 25 bp, Homo sapien
cagacagacattggaacttgggatc

SEQ ID NO: 1498606 - DNA, 25 bp, Homo sapien
gcccgcaggctctacaatttgtgga

SEQ ID NO: 1498607 - DNA, 25 bp, Homo sapien
tgcaaggtgctacgcagtgaagaag

SEQ ID NO: 1498608 - DNA, 25 bp, Homo sapien
gattctaagtgttcaccaagagcct

SEQ ID NO: 1498609 - DNA, 25 bp, Homo sapien
tgagatcatctctggccaaggatgg

SEQ ID NO: 1498610 - DNA, 25 bp, Homo sapien
gatacctgccaagaccatgtgagat

SEQ ID NO: 1498611 - DNA, 25 bp, Homo sapien
gatttccaaggctccaactagtgaa

SEQ ID NO: 1498612 - DNA, 25 bp, Homo sapien
actggatttccaaggctccaactag

SEQ ID NO: 1498613 - DNA, 25 bp, Homo sapien
ggatttccaaggctccaactagtga

SEQ ID NO: 1498614 - DNA, 25 bp, Homo sapien
ttccaaggctccaactagtgaacat

SEQ ID NO: 1498615 - DNA, 25 bp, Homo sapien
tctacgtgggcctgccctgttctgc

SEQ ID NO: 1498616 - DNA, 25 bp, Homo sapien
tccctgagcgcttccagagaatgct

SEQ ID NO: 1498617 - DNA, 25 bp, Homo sapien
agagaccattttctacgtgggcctg

SEQ ID NO: 1498618 - DNA, 25 bp, Homo sapien
gttctgctccctgagcgcttccaga

SEQ ID NO: 1498619 - DNA, 25 bp, Homo sapien
aggcagctcaggtaggtgacgtggc

SEQ ID NO: 1498620 - DNA, 25 bp, Homo sapien
cagctcaggtaggtgacgtggcact

SEQ ID NO: 1498621 - DNA, 25 bp, Homo sapien
tgaggcagctcaggtaggtgacgtg

SEQ ID NO: 1498622 - DNA, 25 bp, Homo sapien
ggtaggtgacgtggcactggagaag

SEQ ID NO: 1498623 - DNA, 25 bp, Homo sapien
gcttgctgtgggagccactgtcccc

SEQ ID NO: 1498624 - DNA, 25 bp, Homo sapien
atgggtagagcagatgggcttgctg

SEQ ID NO: 1498625 - DNA, 25 bp, Homo sapien
ttgctgtgggagccactgtccccat

SEQ ID NO: 1498626 - DNA, 25 bp, Homo sapien
gggtagagcagatgggcttgctgtg

SEQ ID NO: 1498627 - DNA, 25 bp, Homo sapien
ccgctgacattctgcactggagtgt

SEQ ID NO: 1498628 - DNA, 25 bp, Homo sapien
cttcactcccctggcaggacacatg

SEQ ID NO: 1498629 - DNA, 25 bp, Homo sapien
aggacacatgcacgtccgctgacat

SEQ ID NO: 1498630 - DNA, 25 bp, Homo sapien
ccgctgagctatgctagtggaaggt

SEQ ID NO: 1498631 - DNA, 25 bp, Homo sapien
gcctgtagtctccataagtcacacc

SEQ ID NO: 1498632 - DNA, 25 bp, Homo sapien
catggcatctcgtctctcttctagc

SEQ ID NO: 1498633 - DNA, 25 bp, Homo sapien
aaccatggcatctcgtctctcttct

SEQ ID NO: 1498634 - DNA, 25 bp, Homo sapien
tgtagtctccataagtcacacctcc

SEQ ID NO: 1498635 - DNA, 25 bp, Homo sapien
gccacttgaaggtccaagcagcatc

SEQ ID NO: 1498636 - DNA, 25 bp, Homo sapien
gaaggtccaagcagcatctcaaacg

SEQ ID NO: 1498637 - DNA, 25 bp, Homo sapien
caagcagcatctcaaacgcaacacg

SEQ ID NO: 1498638 - DNA, 25 bp, Homo sapien
cacttgaaggtccaagcagcatctc

SEQ ID NO: 1498639 - DNA, 25 bp, Homo sapien
tacgatgttcaggactgtgcttgtg

SEQ ID NO: 1498640 - DNA, 25 bp, Homo sapien
tatacgatgttcaggactgtgcttg

SEQ ID NO: 1498641 - DNA, 25 bp, Homo sapien
cgatgttcaggactgtgcttgtggt

SEQ ID NO: 1498642 - DNA, 25 bp, Homo sapien
ttatacgatgttcaggactgtgctt

SEQ ID NO: 1498643 - DNA, 25 bp, Homo sapien
tctgaatgttcgtcaaacttagaaa

SEQ ID NO: 1498644 - DNA, 25 bp, Homo sapien
acagtctcagaatcttgatagtttc

SEQ ID NO: 1498645 - DNA, 25 bp, Homo sapien
cagtagagttgtggcctttcctaga

SEQ ID NO: 1498646 - DNA, 25 bp, Homo sapien
tactttccagtagagttgtggcctt

SEQ ID NO: 1498647 - DNA, 25 bp, Homo sapien
tgtttgcacatctcaactacactgt

SEQ ID NO: 1498648 - DNA, 25 bp, Homo sapien
gcacatctcaactacactgtactca

SEQ ID NO: 1498649 - DNA, 25 bp, Homo sapien
tgtactcatacccagtgtaagccat

SEQ ID NO: 1498650 - DNA, 25 bp, Homo sapien
tcaactacactgtactcatacccag

SEQ ID NO: 1498651 - DNA, 25 bp, Homo sapien
cagccgctgaataggaatatttttc

SEQ ID NO: 1498652 - DNA, 25 bp, Homo sapien
cagtgtcctttcttgatatgcgaca

SEQ ID NO: 1498653 - DNA, 25 bp, Homo sapien
gccacccttgtaagaattctgattc

SEQ ID NO: 1498654 - DNA, 25 bp, Homo sapien
gatatgcgacactgataactaagac

SEQ ID NO: 1498655 - DNA, 25 bp, Homo sapien
tgcagaagaagaagatccgtattcc

SEQ ID NO: 1498656 - DNA, 25 bp, Homo sapien
tgcctgagggcaacctcagcacagg

SEQ ID NO: 1498657 - DNA, 25 bp, Homo sapien
cacaagtagagcaggtttgtcttgg

SEQ ID NO: 1498658 - DNA, 25 bp, Homo sapien
tttgtcttggttacttagaatggcc

SEQ ID NO: 1498659 - DNA, 25 bp, Homo sapien
gagtctcctcctacccaggaatgaa

SEQ ID NO: 1498660 - DNA, 25 bp, Homo sapien
tacccaggaatgaaaggtgcacagg

SEQ ID NO: 1498661 - DNA, 25 bp, Homo sapien
tcctcctacccaggaatgaaaggtg

SEQ ID NO: 1498662 - DNA, 25 bp, Homo sapien
ctgagtctcctcctacccaggaatg

SEQ ID NO: 1498663 - DNA, 25 bp, Homo sapien
cagctgatacatgaacctgtgcaca

SEQ ID NO: 1498664 - DNA, 25 bp, Homo sapien
ttcccttgaaatatcagtttttgga

SEQ ID NO: 1498665 - DNA, 25 bp, Homo sapien
tgatacatgaacctgtgcacaccct

SEQ ID NO: 1498666 - DNA, 25 bp, Homo sapien
aacctgtgcacaccctcgggagaag

SEQ ID NO: 1498667 - DNA, 25 bp, Homo sapien
ataaaaatgggaagccgtctgcagg

SEQ ID NO: 1498668 - DNA, 25 bp, Homo sapien
tatggtgacttcatgtatggacctg

SEQ ID NO: 1498669 - DNA, 25 bp, Homo sapien
tcccagcatccggtcataaaaatgg

SEQ ID NO: 1498670 - DNA, 25 bp, Homo sapien
ggcttcccagcatccggtcataaaa

SEQ ID NO: 1498671 - DNA, 25 bp, Homo sapien
aaaacctgggaatgtcggctgggcg

SEQ ID NO: 1498672 - DNA, 25 bp, Homo sapien
ggaatgccgcttttcacagaataaa

SEQ ID NO: 1498673 - DNA, 25 bp, Homo sapien
aatcatccctgacgggacatggtgg

SEQ ID NO: 1498674 - DNA, 25 bp, Homo sapien
taggtgtggaggcatgcccctgtat

SEQ ID NO: 1498675 - DNA, 25 bp, Homo sapien
tcatggaaacgagcaaactctgccc

SEQ ID NO: 1498676 - DNA, 25 bp, Homo sapien
cattgtccagtgacagcacgatgaa

SEQ ID NO: 1498677 - DNA, 25 bp, Homo sapien
cacatatgggaactatcaggccgcc

SEQ ID NO: 1498678 - DNA, 25 bp, Homo sapien
gaactgacctcagcctctaaagggc

SEQ ID NO: 1498679 - DNA, 25 bp, Homo sapien
agagctggtgctggtagttaaggac

SEQ ID NO: 1498680 - DNA, 25 bp, Homo sapien
tttcttgccaagaggccagccgtgt

SEQ ID NO: 1498681 - DNA, 25 bp, Homo sapien
tggtgctggtagttaaggacagaaa

SEQ ID NO: 1498682 - DNA, 25 bp, Homo sapien
acagaaagggcaagttcgtttcttg

SEQ ID NO: 1498683 - DNA, 25 bp, Homo sapien
agcatccgcttccagccttcgagtt

SEQ ID NO: 1498684 - DNA, 25 bp, Homo sapien
cgagttctgagaactcctgtggatg

SEQ ID NO: 1498685 - DNA, 25 bp, Homo sapien
ccagccttcgagttctgagaactcc

SEQ ID NO: 1498686 - DNA, 25 bp, Homo sapien
tgagaactcctgtggatgttttcca

SEQ ID NO: 1498687 - DNA, 25 bp, Homo sapien
aacaaacgaaaaaactagctgagtg

SEQ ID NO: 1498688 - DNA, 25 bp, Homo sapien
acaaacgaaaaaactagctgagtgt

SEQ ID NO: 1498689 - DNA, 25 bp, Homo sapien
ctgtttgggaactgtctttggtgtc

SEQ ID NO: 1498690 - DNA, 25 bp, Homo sapien
ggtgtctatatcacacatttgcaag

SEQ ID NO: 1498691 - DNA, 25 bp, Homo sapien
ctgtgaccaaaggtgggcatcagca

SEQ ID NO: 1498692 - DNA, 25 bp, Homo sapien
acgcccggccagcactaaacatctt

SEQ ID NO: 1498693 - DNA, 25 bp, Homo sapien
ttgaaagtggtgcaagactgactgc

SEQ ID NO: 1498694 - DNA, 25 bp, Homo sapien
ctctccctcgcaaacgttgaaagtg

SEQ ID NO: 1498695 - DNA, 25 bp, Homo sapien
aagactgactgcatggcccctcttc

SEQ ID NO: 1498696 - DNA, 25 bp, Homo sapien
atgaagaggcgccagcgagctcggt

SEQ ID NO: 1498697 - DNA, 25 bp, Homo sapien
tccatgctattatacacatgaaggt

SEQ ID NO: 1498698 - DNA, 25 bp, Homo sapien
tgagcaaaaaccacatgaatgaagc

SEQ ID NO: 1498699 - DNA, 25 bp, Homo sapien
cgcgccccataagcggcaggaatgg

SEQ ID NO: 1498700 - DNA, 25 bp, Homo sapien
ctttgcgttcaataaagctctgtgc

SEQ ID NO: 1498701 - DNA, 25 bp, Homo sapien
cgcggcgatgaggtgttgatgaagt

SEQ ID NO: 1498702 - DNA, 25 bp, Homo sapien
tcgcggcgatgaggtgttgatgaag

SEQ ID NO: 1498703 - DNA, 25 bp, Homo sapien
gcggcgatgaggtgttgatgaagtg

SEQ ID NO: 1498704 - DNA, 25 bp, Homo sapien
ctcgcggcgatgaggtgttgatgaa

SEQ ID NO: 1498705 - DNA, 25 bp, Homo sapien
aagttcacctcgtcactggttatgc

SEQ ID NO: 1498706 - DNA, 25 bp, Homo sapien
ccagaaagttcacctcgtcactggt

SEQ ID NO: 1498707 - DNA, 25 bp, Homo sapien
gaaagttcacctcgtcactggttat

SEQ ID NO: 1498708 - DNA, 25 bp, Homo sapien
gttcacctcgtcactggttatgctc

SEQ ID NO: 1498709 - DNA, 25 bp, Homo sapien
ttcatctgcacagaagtgtcaaggg

SEQ ID NO: 1498710 - DNA, 25 bp, Homo sapien
caaccgctcttgattcctgcctgat

SEQ ID NO: 1498711 - DNA, 25 bp, Homo sapien
cccatcagcactaagaaccttctta

SEQ ID NO: 1498712 - DNA, 25 bp, Homo sapien
cctggttttgaattaagcgttgatc

SEQ ID NO: 1498713 - DNA, 25 bp, Homo sapien
tcatgcatgccctcgccgaggtgga

SEQ ID NO: 1498714 - DNA, 25 bp, Homo sapien
cagctcatgcatgccctcgccgagg

SEQ ID NO: 1498715 - DNA, 25 bp, Homo sapien
gctcatgcatgccctcgccgaggtg

SEQ ID NO: 1498716 - DNA, 25 bp, Homo sapien
catgcatgccctcgccgaggtggag

SEQ ID NO: 1498717 - DNA, 25 bp, Homo sapien
tagaggatcgtagactggttttccc

SEQ ID NO: 1498718 - DNA, 25 bp, Homo sapien
caggccagctgtgagagaactcaag

SEQ ID NO: 1498719 - DNA, 25 bp, Homo sapien
tgagagaactcaagcctagaggatc

SEQ ID NO: 1498720 - DNA, 25 bp, Homo sapien
tccctccaatcgaatacatgcatct

SEQ ID NO: 1498721 - DNA, 25 bp, Homo sapien
cacacacaggtaaggagggatgacc

SEQ ID NO: 1498722 - DNA, 25 bp, Homo sapien
taactgacaccatggatactggcag

SEQ ID NO: 1498723 - DNA, 25 bp, Homo sapien
gaaaacttgtccgtcactgtacctg

SEQ ID NO: 1498724 - DNA, 25 bp, Homo sapien
ttgagtgttccagcagaccttccag

SEQ ID NO: 1498725 - DNA, 25 bp, Homo sapien
gaccctcagcatgagtgagtctcaa

SEQ ID NO: 1498726 - DNA, 25 bp, Homo sapien
tttggattttgggatgaagtcccag

SEQ ID NO: 1498727 - DNA, 25 bp, Homo sapien
cctcataccgttttgcaagttcctg

SEQ ID NO: 1498728 - DNA, 25 bp, Homo sapien
cacccgattatcttgcaggcagctc

SEQ ID NO: 1498729 - DNA, 25 bp, Homo sapien
tatgaagggcattggaacacaggga

SEQ ID NO: 1498730 - DNA, 25 bp, Homo sapien
gatgatgaatcccactcgactgaca

SEQ ID NO: 1498731 - DNA, 25 bp, Homo sapien
tctacagggcatgagctacaaccca

SEQ ID NO: 1498732 - DNA, 25 bp, Homo sapien
ttcacggacagactgaagctcccag

SEQ ID NO: 1498733 - DNA, 25 bp, Homo sapien
taggtgcattcacactactgtgcaa

SEQ ID NO: 1498734 - DNA, 25 bp, Homo sapien
tgtcttcaagtgtcatccgtgctgg

SEQ ID NO: 1498735 - DNA, 25 bp, Homo sapien
gaggtatcccttctaagtggaatcc

SEQ ID NO: 1498736 - DNA, 25 bp, Homo sapien
tggattagactcctcgaggtatccc

SEQ ID NO: 1498737 - DNA, 25 bp, Homo sapien
ggacactggccatatgtccagaata

SEQ ID NO: 1498738 - DNA, 25 bp, Homo sapien
gtcagacaccaatgtagcttacaaa

SEQ ID NO: 1498739 - DNA, 25 bp, Homo sapien
tgggactatgaaaaagcccttatca

SEQ ID NO: 1498740 - DNA, 25 bp, Homo sapien
ttgcttcaactacgcccactgatgg

SEQ ID NO: 1498741 - DNA, 25 bp, Homo sapien
gattcttctgtttccaacggcccca

SEQ ID NO: 1498742 - DNA, 25 bp, Homo sapien
caagcaatgtccgtatgacaaatgc

SEQ ID NO: 1498743 - DNA, 25 bp, Homo sapien
gggaagaagccatgcaccgactttt

SEQ ID NO: 1498744 - DNA, 25 bp, Homo sapien
gacaaatgctgtttgcttccagctg

SEQ ID NO: 1498745 - DNA, 25 bp, Homo sapien
acaaggactgcattttgcttgccgt

SEQ ID NO: 1498746 - DNA, 25 bp, Homo sapien
tgcattttgcttgccgtgaacgtct

SEQ ID NO: 1498747 - DNA, 25 bp, Homo sapien
gactgcattttgcttgccgtgaacg

SEQ ID NO: 1498748 - DNA, 25 bp, Homo sapien
gcttgccgtgaacgtctatttgagt

SEQ ID NO: 1498749 - DNA, 25 bp, Homo sapien
ggaaccctgtacagaaaccgcacaa

SEQ ID NO: 1498750 - DNA, 25 bp, Homo sapien
cacaaggtatgaggcgttttcctga

SEQ ID NO: 1498751 - DNA, 25 bp, Homo sapien
cctgtacagaaaccgcacaaggtat

SEQ ID NO: 1498752 - DNA, 25 bp, Homo sapien
gaaaccgcacaaggtatgaggcgtt

SEQ ID NO: 1498753 - DNA, 25 bp, Homo sapien
ccagacaactcgcttgctgttcggt

SEQ ID NO: 1498754 - DNA, 25 bp, Homo sapien
agcaaagggatgtacagagacttcg

SEQ ID NO: 1498755 - DNA, 25 bp, Homo sapien
caaagggatgtacagagacttcggg

SEQ ID NO: 1498756 - DNA, 25 bp, Homo sapien
gtgtctgacagtccagacaactcgc

SEQ ID NO: 1498757 - DNA, 25 bp, Homo sapien
aggacagtagtagttgagaagtgaa

SEQ ID NO: 1498758 - DNA, 25 bp, Homo sapien
catcttgaggacagtagtagttgag

SEQ ID NO: 1498759 - DNA, 25 bp, Homo sapien
tagtagttgagaagtgaacggagaa

SEQ ID NO: 1498760 - DNA, 25 bp, Homo sapien
gagaagtgaacggagaaggaggcac

SEQ ID NO: 1498761 - DNA, 25 bp, Homo sapien
gagagtgacatattactacaggcac

SEQ ID NO: 1498762 - DNA, 25 bp, Homo sapien
taatgtgccactaaccctacttgcc

SEQ ID NO: 1498763 - DNA, 25 bp, Homo sapien
aatcaacggcttctaactggacagg

SEQ ID NO: 1498764 - DNA, 25 bp, Homo sapien
cagctggtgttaatgtgccactaac

SEQ ID NO: 1498765 - DNA, 25 bp, Homo sapien
caggttcccgtgtctcagctggtgt

SEQ ID NO: 1498766 - DNA, 25 bp, Homo sapien
gacatccgtaggaacaaagaccaga

SEQ ID NO: 1498767 - DNA, 25 bp, Homo sapien
acttggactccagggctaatgggca

SEQ ID NO: 1498768 - DNA, 25 bp, Homo sapien
gataaacgaagcaccaaggactgcc

SEQ ID NO: 1498769 - DNA, 25 bp, Homo sapien
ggtgagacttcggtgccttgtgcct

SEQ ID NO: 1498770 - DNA, 25 bp, Homo sapien
ctcgaaggtctttcatcagcttggg

SEQ ID NO: 1498771 - DNA, 25 bp, Homo sapien
tcctcttttggagagggtaggtcat

SEQ ID NO: 1498772 - DNA, 25 bp, Homo sapien
tcatcagcttgggtcctcttttgga

SEQ ID NO: 1498773 - DNA, 25 bp, Homo sapien
atcagcttgggtcctcttttggaga

SEQ ID NO: 1498774 - DNA, 25 bp, Homo sapien
cagccagcgtgggtgcagctcaggc

SEQ ID NO: 1498775 - DNA, 25 bp, Homo sapien
gccagcgtgggtgcagctcaggcaa

SEQ ID NO: 1498776 - DNA, 25 bp, Homo sapien
cagcagccagcgtgggtgcagctca

SEQ ID NO: 1498777 - DNA, 25 bp, Homo sapien
gacagcagccagcgtgggtgcagct

SEQ ID NO: 1498778 - DNA, 25 bp, Homo sapien
gctgctcagctagaccactggcagc

SEQ ID NO: 1498779 - DNA, 25 bp, Homo sapien
ctgctcagctagaccactggcagct

SEQ ID NO: 1498780 - DNA, 25 bp, Homo sapien
tgatgacggcacctgacaagcaaac

SEQ ID NO: 1498781 - DNA, 25 bp, Homo sapien
gatcttttgagggtaactgacagcc

SEQ ID NO: 1498782 - DNA, 25 bp, Homo sapien
ttcattcccgcaagcagcactgggc

SEQ ID NO: 1498783 - DNA, 25 bp, Homo sapien
cacgtggctcctactaaatggcttc

SEQ ID NO: 1498784 - DNA, 25 bp, Homo sapien
gatgagggaacagcaaacgctgacc

SEQ ID NO: 1498785 - DNA, 25 bp, Homo sapien
ccaagatgagggaacagcaaacgct

SEQ ID NO: 1498786 - DNA, 25 bp, Homo sapien
tgagggaacagcaaacgctgaccct

SEQ ID NO: 1498787 - DNA, 25 bp, Homo sapien
tggcacgcggggcaagtgtatcaca

SEQ ID NO: 1498788 - DNA, 25 bp, Homo sapien
tgagggcggccggtggcactagcgt

SEQ ID NO: 1498789 - DNA, 25 bp, Homo sapien
gcggccggtggcactagcgtcccat

SEQ ID NO: 1498790 - DNA, 25 bp, Homo sapien
actgatctcggcctctacatactgc

SEQ ID NO: 1498791 - DNA, 25 bp, Homo sapien
ctcgttgatactgatctcggcctct

SEQ ID NO: 1498792 - DNA, 25 bp, Homo sapien
gagacagcaagtctgcattaagtgc

SEQ ID NO: 1498793 - DNA, 25 bp, Homo sapien
cagatgtggcggtgtaagtgtttac

SEQ ID NO: 1498794 - DNA, 25 bp, Homo sapien
gtgcaaggcaaacgtccactccgaa

SEQ ID NO: 1498795 - DNA, 25 bp, Homo sapien
gaagatctgccgtatctttttcaga

SEQ ID NO: 1498796 - DNA, 25 bp, Homo sapien
cgggggaagcggcatggacctggag

SEQ ID NO: 1498797 - DNA, 25 bp, Homo sapien
agggaagtggggcgtaaacagctgg

SEQ ID NO: 1498798 - DNA, 25 bp, Homo sapien
gccacgggggaagcggcatggacct

SEQ ID NO: 1498799 - DNA, 25 bp, Homo sapien
cagggggccacgggggaagcggcat

SEQ ID NO: 1498800 - DNA, 25 bp, Homo sapien
cgtcgggcatcacggcgtctatcag

SEQ ID NO: 1498801 - DNA, 25 bp, Homo sapien
catcacggcgtctatcagtgacagg

SEQ ID NO: 1498802 - DNA, 25 bp, Homo sapien
cacgtcgggcatcacggcgtctatc

SEQ ID NO: 1498803 - DNA, 25 bp, Homo sapien
gggcatcacggcgtctatcagtgac

SEQ ID NO: 1498804 - DNA, 25 bp, Homo sapien
ctcggaatgcctgctgccgcgtctg

SEQ ID NO: 1498805 - DNA, 25 bp, Homo sapien
tgctgagcgagcttctctcggaatg

SEQ ID NO: 1498806 - DNA, 25 bp, Homo sapien
ttgctgctgagcgagcttctctcgg

SEQ ID NO: 1498807 - DNA, 25 bp, Homo sapien
gagcgagcttctctcggaatgcctg

SEQ ID NO: 1498808 - DNA, 25 bp, Homo sapien
ggaaacgccggctgaggtcgtggtg

SEQ ID NO: 1498809 - DNA, 25 bp, Homo sapien
ggtcgtggtggctgctgtcgctgct

SEQ ID NO: 1498810 - DNA, 25 bp, Homo sapien
cattcaccgtggcctctctgttctt

SEQ ID NO: 1498811 - DNA, 25 bp, Homo sapien
tcgatggattttggtgggaaacgcc

SEQ ID NO: 1498812 - DNA, 25 bp, Homo sapien
gacagcaacgtcatagtcagctcga

SEQ ID NO: 1498813 - DNA, 25 bp, Homo sapien
catagtcagctcgatcttcaaggac

SEQ ID NO: 1498814 - DNA, 25 bp, Homo sapien
gcaacgtcatagtcagctcgatctt

SEQ ID NO: 1498815 - DNA, 25 bp, Homo sapien
caggtaagacagcaacgtcatagtc

SEQ ID NO: 1498816 - DNA, 25 bp, Homo sapien
tggctctctacacaccaggaagttg

SEQ ID NO: 1498817 - DNA, 25 bp, Homo sapien
caggaagttgtggagccaagacgta

SEQ ID NO: 1498818 - DNA, 25 bp, Homo sapien
tgtggatggtaacttgtcacagggc

SEQ ID NO: 1498819 - DNA, 25 bp, Homo sapien
acagggcttggctcgggctgcagcc

SEQ ID NO: 1498820 - DNA, 25 bp, Homo sapien
tggatggaatctcaacctctccatc

SEQ ID NO: 1498821 - DNA, 25 bp, Homo sapien
ggatggaatctcaacctctccatct

SEQ ID NO: 1498822 - DNA, 25 bp, Homo sapien
gatggaatctcaacctctccatcta

SEQ ID NO: 1498823 - DNA, 25 bp, Homo sapien
ctggatggaatctcaacctctccat

SEQ ID NO: 1498824 - DNA, 25 bp, Homo sapien
gcccccgttgctattctcattcagg

SEQ ID NO: 1498825 - DNA, 25 bp, Homo sapien
gagcccccgttgctattctcattca

SEQ ID NO: 1498826 - DNA, 25 bp, Homo sapien
ctcaacacgagctgggtggagcccc

SEQ ID NO: 1498827 - DNA, 25 bp, Homo sapien
ggtggagcccccgttgctattctca

SEQ ID NO: 1498828 - DNA, 25 bp, Homo sapien
acgtctttgttactcgggacgtcat

SEQ ID NO: 1498829 - DNA, 25 bp, Homo sapien
gacgtctttgttactcgggacgtca

SEQ ID NO: 1498830 - DNA, 25 bp, Homo sapien
tgacgtctttgttactcgggacgtc

SEQ ID NO: 1498831 - DNA, 25 bp, Homo sapien
gaggtgacgtctttgttactcggga

SEQ ID NO: 1498832 - DNA, 25 bp, Homo sapien
tgcccagggggtggaagatgcttac

SEQ ID NO: 1498833 - DNA, 25 bp, Homo sapien
aaagtgcccagggggtggaagatgc

SEQ ID NO: 1498834 - DNA, 25 bp, Homo sapien
agtgcccagggggtggaagatgctt

SEQ ID NO: 1498835 - DNA, 25 bp, Homo sapien
caatttcaaagtgcccagggggtgg

SEQ ID NO: 1498836 - DNA, 25 bp, Homo sapien
ggtacactggaaccatttgccactg

SEQ ID NO: 1498837 - DNA, 25 bp, Homo sapien
gagagcctctccgaggatccaggta

SEQ ID NO: 1498838 - DNA, 25 bp, Homo sapien
aaaacaacttaggagcggcagcacc

SEQ ID NO: 1498839 - DNA, 25 bp, Homo sapien
gcagcaccgaagcagctcggagagc

SEQ ID NO: 1498840 - DNA, 25 bp, Homo sapien
catcttccgtccatattcttgcaaa

SEQ ID NO: 1498841 - DNA, 25 bp, Homo sapien
atcttccgtccatattcttgcaaaa

SEQ ID NO: 1498842 - DNA, 25 bp, Homo sapien
ccgtagccaagagtgttccattggt

SEQ ID NO: 1498843 - DNA, 25 bp, Homo sapien
cccgtagccaagagtgttccattgg

SEQ ID NO: 1498844 - DNA, 25 bp, Homo sapien
ctttcggttccatttcaaggcaaag

SEQ ID NO: 1498845 - DNA, 25 bp, Homo sapien
aaatctgcggtctacggtgggaagc

SEQ ID NO: 1498846 - DNA, 25 bp, Homo sapien
catgcacctggagttaacactaccg

SEQ ID NO: 1498847 - DNA, 25 bp, Homo sapien
tgaggaaagccgaagcctgaagaac

SEQ ID NO: 1498848 - DNA, 25 bp, Homo sapien
tgagtctcgggaacgcacaactgtt

SEQ ID NO: 1498849 - DNA, 25 bp, Homo sapien
aatacttgcaagaactaccaaaatt

SEQ ID NO: 1498850 - DNA, 25 bp, Homo sapien
agatctttgtggcatttgttccaag

SEQ ID NO: 1498851 - DNA, 25 bp, Homo sapien
gcaagaactaccaaaattggtagga

SEQ ID NO: 1498852 - DNA, 25 bp, Homo sapien
caaatgcagaaactgttgaaaaacc

SEQ ID NO: 1498853 - DNA, 25 bp, Homo sapien
tgtgggcatcccaaattattgttgt

SEQ ID NO: 1498854 - DNA, 25 bp, Homo sapien
ctgaatgaaaaggaaactgctgttt

SEQ ID NO: 1498855 - DNA, 25 bp, Homo sapien
aaactgctgtttggcttctcctgtg

SEQ ID NO: 1498856 - DNA, 25 bp, Homo sapien
ctcctgtgtgggcatcccaaattat

SEQ ID NO: 1498857 - DNA, 25 bp, Homo sapien
cagaacatcatttaagcaccccaag

SEQ ID NO: 1498858 - DNA, 25 bp, Homo sapien
tctaacacaatcgtgcctcgacggg

SEQ ID NO: 1498859 - DNA, 25 bp, Homo sapien
cgtgggtgcctatgcatctaacaca

SEQ ID NO: 1498860 - DNA, 25 bp, Homo sapien
catggaatataacagacgtgggtgc

SEQ ID NO: 1498861 - DNA, 25 bp, Homo sapien
ctgtatgaggagtccctgctgaagt

SEQ ID NO: 1498862 - DNA, 25 bp, Homo sapien
tgtatgaggagtccctgctgaagta

SEQ ID NO: 1498863 - DNA, 25 bp, Homo sapien
agcagaaacagcgtcctccctgagt

SEQ ID NO: 1498864 - DNA, 25 bp, Homo sapien
tttggtgtgggtcccaagctgtgca

SEQ ID NO: 1498865 - DNA, 25 bp, Homo sapien
tttgtctctcgtatgctcagcacct

SEQ ID NO: 1498866 - DNA, 25 bp, Homo sapien
taacaaatttcaccggcaaccctga

SEQ ID NO: 1498867 - DNA, 25 bp, Homo sapien
tttgcagtctagagcacagagtagc

SEQ ID NO: 1498868 - DNA, 25 bp, Homo sapien
taagccaaacgtgacggaactccat

SEQ ID NO: 1498869 - DNA, 25 bp, Homo sapien
gagctttctgcattagacatccctg

SEQ ID NO: 1498870 - DNA, 25 bp, Homo sapien
tctgcgtgtctagggctgtgaacct

SEQ ID NO: 1498871 - DNA, 25 bp, Homo sapien
aggtgcaagcctccatgtgtttatc

SEQ ID NO: 1498872 - DNA, 25 bp, Homo sapien
tcttcctcggtcttcaaataagagg

SEQ ID NO: 1498873 - DNA, 25 bp, Homo sapien
acagggaccccattcgcttccccat

SEQ ID NO: 1498874 - DNA, 25 bp, Homo sapien
catgtgtttatcctccataagcaca

SEQ ID NO: 1498875 - DNA, 25 bp, Homo sapien
gggccacaccagcagatcatgttcc

SEQ ID NO: 1498876 - DNA, 25 bp, Homo sapien
cagagaactgatgagcagcagaaaa

SEQ ID NO: 1498877 - DNA, 25 bp, Homo sapien
aggtctccggtctctttccactgcg

SEQ ID NO: 1498878 - DNA, 25 bp, Homo sapien
ccatgcgatgccgagacagaagggc

SEQ ID NO: 1498879 - DNA, 25 bp, Homo sapien
tcctctagcagagagtgggtctgcg

SEQ ID NO: 1498880 - DNA, 25 bp, Homo sapien
tctcaggcgtccacggactgcaggg

SEQ ID NO: 1498881 - DNA, 25 bp, Homo sapien
tgggagcgagcatctgttccacctc

SEQ ID NO: 1498882 - DNA, 25 bp, Homo sapien
cggctgggagcgagcatctgttcca

SEQ ID NO: 1498883 - DNA, 25 bp, Homo sapien
gagagccgaggcatctcaggagatc

SEQ ID NO: 1498884 - DNA, 25 bp, Homo sapien
caggttgacggcttcctggagtctc

SEQ ID NO: 1498885 - DNA, 25 bp, Homo sapien
gatgtggatgttgcaagcagcccca

SEQ ID NO: 1498886 - DNA, 25 bp, Homo sapien
aatggccaaggcactcgctaaaagc

SEQ ID NO: 1498887 - DNA, 25 bp, Homo sapien
gagaggctccgtgacacttcttgca

SEQ ID NO: 1498888 - DNA, 25 bp, Homo sapien
taaaaacgtctcaagcgtgaacaca

SEQ ID NO: 1498889 - DNA, 25 bp, Homo sapien
cgctcccatggcacagttaagaagg

SEQ ID NO: 1498890 - DNA, 25 bp, Homo sapien
gccttctgaatagcgcatgccatca

SEQ ID NO: 1498891 - DNA, 25 bp, Homo sapien
tgttgttctgccagtccacatcaag

SEQ ID NO: 1498892 - DNA, 25 bp, Homo sapien
gtctgtgctacaggaggcaaaggtc

SEQ ID NO: 1498893 - DNA, 25 bp, Homo sapien
tgtctgtgctacaggaggcaaaggt

SEQ ID NO: 1498894 - DNA, 25 bp, Homo sapien
tgttctgccagtccacatcaagggc

SEQ ID NO: 1498895 - DNA, 25 bp, Homo sapien
aaggttttgactgggcggtcacagc

SEQ ID NO: 1498896 - DNA, 25 bp, Homo sapien
tttgactgggcggtcacagccgagc

SEQ ID NO: 1498897 - DNA, 25 bp, Homo sapien
tgggcggtcacagccgagcctgcac

SEQ ID NO: 1498898 - DNA, 25 bp, Homo sapien
ctggaaggttttgactgggcggtca

SEQ ID NO: 1498899 - DNA, 25 bp, Homo sapien
tgtgggggtctaaggcagggagcat

SEQ ID NO: 1498900 - DNA, 25 bp, Homo sapien
ctgtgggggtctaaggcagggagca

SEQ ID NO: 1498901 - DNA, 25 bp, Homo sapien
ttgatgcactctgcgttttctggga

SEQ ID NO: 1498902 - DNA, 25 bp, Homo sapien
cacagagatatcctgggtgctggtg

SEQ ID NO: 1498903 - DNA, 25 bp, Homo sapien
gagaaaggcaagatgccatggtccc

SEQ ID NO: 1498904 - DNA, 25 bp, Homo sapien
acgcaggccagcagctactgccagg

SEQ ID NO: 1498905 - DNA, 25 bp, Homo sapien
aaggtgaatgaatgtacccaggggc

SEQ ID NO: 1498906 - DNA, 25 bp, Homo sapien
acggggacactaccgggacaggcat

SEQ ID NO: 1498907 - DNA, 25 bp, Homo sapien
ggataaaggtgaatgaatgtaccca

SEQ ID NO: 1498908 - DNA, 25 bp, Homo sapien
gacggggacactaccgggacaggca

SEQ ID NO: 1498909 - DNA, 25 bp, Homo sapien
tgtgcaacacaagtgagaggcaaat

SEQ ID NO: 1498910 - DNA, 25 bp, Homo sapien
gccaggtagcgaaaagcacaggctc

SEQ ID NO: 1498911 - DNA, 25 bp, Homo sapien
caaaatcctggctgggggctcgtga

SEQ ID NO: 1498912 - DNA, 25 bp, Homo sapien
gctcgtgatcggcacagccaggtag

SEQ ID NO: 1498913 - DNA, 25 bp, Homo sapien
ctccagtgtccacacccattagaag

SEQ ID NO: 1498914 - DNA, 25 bp, Homo sapien
aacatgagaagtgaaccctcaccta

SEQ ID NO: 1498915 - DNA, 25 bp, Homo sapien
tgcacttttaatgtaacagttcctc

SEQ ID NO: 1498916 - DNA, 25 bp, Homo sapien
tcacctattacggagttcaagcggg

SEQ ID NO: 1498917 - DNA, 25 bp, Homo sapien
atcccatttgatggcgttgacctcg

SEQ ID NO: 1498918 - DNA, 25 bp, Homo sapien
gcaacattccagacggatcccattt

SEQ ID NO: 1498919 - DNA, 25 bp, Homo sapien
tccgagcaggatgccagcaacattc

SEQ ID NO: 1498920 - DNA, 25 bp, Homo sapien
aatgtcatgtcatccgagcaggatg

SEQ ID NO: 1498921 - DNA, 25 bp, Homo sapien
taagagtgaccgtgagactggcatc

SEQ ID NO: 1498922 - DNA, 25 bp, Homo sapien
gaaatcgtagctcaccggatgacag

SEQ ID NO: 1498923 - DNA, 25 bp, Homo sapien
gaggctgcgattctcagtgggacta

SEQ ID NO: 1498924 - DNA, 25 bp, Homo sapien
tcctgcatccgggaacgatgtggaa

SEQ ID NO: 1498925 - DNA, 25 bp, Homo sapien
tggatgcacacctcctgtttcatgc

SEQ ID NO: 1498926 - DNA, 25 bp, Homo sapien
atggatgcacacctcctgtttcatg

SEQ ID NO: 1498927 - DNA, 25 bp, Homo sapien
tgtgtaacaccgagctgtgccagct

SEQ ID NO: 1498928 - DNA, 25 bp, Homo sapien
tggccccttcaaagtgagctaccgc

SEQ ID NO: 1498929 - DNA, 25 bp, Homo sapien
tgaagggcttcaacacacgtgcatg

SEQ ID NO: 1498930 - DNA, 25 bp, Homo sapien
cacgtgcatggacgcgctttagcag

SEQ ID NO: 1498931 - DNA, 25 bp, Homo sapien
gagtcatcacaaaacaactcgagtg

SEQ ID NO: 1498932 - DNA, 25 bp, Homo sapien
ttaattcgagcaccgtcaacaggag

SEQ ID NO: 1498933 - DNA, 25 bp, Homo sapien
tggttccgtctctcagtggatgcag

SEQ ID NO: 1498934 - DNA, 25 bp, Homo sapien
tatgctcctaatagtaccacgcgac

SEQ ID NO: 1498935 - DNA, 25 bp, Homo sapien
gaagctgcaaccataggtccacacc

SEQ ID NO: 1498936 - DNA, 25 bp, Homo sapien
tcctatagacgtaaatggtaaatat

SEQ ID NO: 1498937 - DNA, 25 bp, Homo sapien
caactaaattaatacagacagccat

SEQ ID NO: 1498938 - DNA, 25 bp, Homo sapien
cccagccctgtttctatgtttccta

SEQ ID NO: 1498939 - DNA, 25 bp, Homo sapien
agctacgctatagacaggctcctga

SEQ ID NO: 1498940 - DNA, 25 bp, Homo sapien
tgtgggtgcagacgcctcgttctat

SEQ ID NO: 1498941 - DNA, 25 bp, Homo sapien
gttctatgtcccacagtcgcaccgt

SEQ ID NO: 1498942 - DNA, 25 bp, Homo sapien
gcacttgtcgaaggatccactggcc

SEQ ID NO: 1498943 - DNA, 25 bp, Homo sapien
catcccttactaaaaggatttggtg

SEQ ID NO: 1498944 - DNA, 25 bp, Homo sapien
ggacacgacgcccttcctcagggag

SEQ ID NO: 1498945 - DNA, 25 bp, Homo sapien
aagggcactggagtcgtggctattt

SEQ ID NO: 1498946 - DNA, 25 bp, Homo sapien
tggagtcgtggctatttgggcatcc

SEQ ID NO: 1498947 - DNA, 25 bp, Homo sapien
tttggaatcaaatggccaagagcca

SEQ ID NO: 1498948 - DNA, 25 bp, Homo sapien
tcaaggaagaacgtgtgccaaggtg

SEQ ID NO: 1498949 - DNA, 25 bp, Homo sapien
ggaaggtttcgtgccatggactcag

SEQ ID NO: 1498950 - DNA, 25 bp, Homo sapien
aagacagcggctccttcaaggaaga

SEQ ID NO: 1498951 - DNA, 25 bp, Homo sapien
gggcgcctgcgacagatgcaggtgt

SEQ ID NO: 1498952 - DNA, 25 bp, Homo sapien
tcctccggccctgacgtttcgtcat

SEQ ID NO: 1498953 - DNA, 25 bp, Homo sapien
gtggaatgtgcgctcctccggccct

SEQ ID NO: 1498954 - DNA, 25 bp, Homo sapien
gcagctgtcacttacaacgcaaggg

SEQ ID NO: 1498955 - DNA, 25 bp, Homo sapien
cggtagctgtggacaagatttccac

SEQ ID NO: 1498956 - DNA, 25 bp, Homo sapien
cggacgcgctggcacccactttgtc

SEQ ID NO: 1498957 - DNA, 25 bp, Homo sapien
ggacgcgctggcacccactttgtct

SEQ ID NO: 1498958 - DNA, 25 bp, Homo sapien
tccgatgggatccagcccagaagct

SEQ ID NO: 1498959 - DNA, 25 bp, Homo sapien
tgtccttagaggtgcagaatcaccc

SEQ ID NO: 1498960 - DNA, 25 bp, Homo sapien
gaaggccattcccagatgtggtacc

SEQ ID NO: 1498961 - DNA, 25 bp, Homo sapien
aatgttgactagaaggacactctgg

SEQ ID NO: 1498962 - DNA, 25 bp, Homo sapien
catcggaccgagcaaactgaagcaa

SEQ ID NO: 1498963 - DNA, 25 bp, Homo sapien
cctttagagtgagaagtcggcaagc

SEQ ID NO: 1498964 - DNA, 25 bp, Homo sapien
gagaagctctcataacagactggca

SEQ ID NO: 1498965 - DNA, 25 bp, Homo sapien
tatgtttagatagatccggacgcac

SEQ ID NO: 1498966 - DNA, 25 bp, Homo sapien
ttacttccgcagatccaaaacacac

SEQ ID NO: 1498967 - DNA, 25 bp, Homo sapien
cacattcacggctggtcattagaat

SEQ ID NO: 1498968 - DNA, 25 bp, Homo sapien
tgcaaccctacacattcacggctgg

SEQ ID NO: 1498969 - DNA, 25 bp, Homo sapien
agagctgcaaccctacacattcacg

SEQ ID NO: 1498970 - DNA, 25 bp, Homo sapien
agaatagagctgcaaccctacacat

SEQ ID NO: 1498971 - DNA, 25 bp, Homo sapien
aaaagtcaagtcctacggtgtcgcg

SEQ ID NO: 1498972 - DNA, 25 bp, Homo sapien
ttagactaagtgacatgcgggcgcc

SEQ ID NO: 1498973 - DNA, 25 bp, Homo sapien
gaaaacatatagactcctgcggcca

SEQ ID NO: 1498974 - DNA, 25 bp, Homo sapien
tatcttcaaagatgggtgcggcgac

SEQ ID NO: 1498975 - DNA, 25 bp, Homo sapien
tgctgacagggaggagctacttgct

SEQ ID NO: 1498976 - DNA, 25 bp, Homo sapien
gagttaccaggcatgtactactgtg

SEQ ID NO: 1498977 - DNA, 25 bp, Homo sapien
tgctgaaaccatatggcatcgtcca

SEQ ID NO: 1498978 - DNA, 25 bp, Homo sapien
tcatcatatctagggtcacaatcag

SEQ ID NO: 1498979 - DNA, 25 bp, Homo sapien
tccaaattctgttcccttccgcact

SEQ ID NO: 1498980 - DNA, 25 bp, Homo sapien
gtacatctccactgtttctcttcta

SEQ ID NO: 1498981 - DNA, 25 bp, Homo sapien
ataaataagtattctctcagagcac

SEQ ID NO: 1498982 - DNA, 25 bp, Homo sapien
ccaacaggcctctgttttagtaggt

SEQ ID NO: 1498983 - DNA, 25 bp, Homo sapien
ttttctcccacgataaagcttcaga

SEQ ID NO: 1498984 - DNA, 25 bp, Homo sapien
ctcccacgataaagcttcagaattt

SEQ ID NO: 1498985 - DNA, 25 bp, Homo sapien
ttttttctcccacgataaagcttca

SEQ ID NO: 1498986 - DNA, 25 bp, Homo sapien
tctcccacgataaagcttcagaatt

SEQ ID NO: 1498987 - DNA, 25 bp, Homo sapien
aattcctttcgtctgccacaatcct

SEQ ID NO: 1498988 - DNA, 25 bp, Homo sapien
tctcccacaattcctttcgtctgcc

SEQ ID NO: 1498989 - DNA, 25 bp, Homo sapien
ttcgtctgccacaatccttgccttt

SEQ ID NO: 1498990 - DNA, 25 bp, Homo sapien
ttcctttcgtctgccacaatccttg

SEQ ID NO: 1498991 - DNA, 25 bp, Homo sapien
gggagcgagccaggggggcatggcc

SEQ ID NO: 1498992 - DNA, 25 bp, Homo sapien
gggactgggtggagcttatagagcc

SEQ ID NO: 1498993 - DNA, 25 bp, Homo sapien
tgggtggagcttatagagcctggcc

SEQ ID NO: 1498994 - DNA, 25 bp, Homo sapien
ggtggagcttatagagcctggccgg

SEQ ID NO: 1498995 - DNA, 25 bp, Homo sapien
ctcagcgtggtatggaggcgttggg

SEQ ID NO: 1498996 - DNA, 25 bp, Homo sapien
ggacggttgtggctcagcgtggtat

SEQ ID NO: 1498997 - DNA, 25 bp, Homo sapien
aagacgcggtgttgagagttagcat

SEQ ID NO: 1498998 - DNA, 25 bp, Homo sapien
catagaaagtctgcgtcttgtttgg

SEQ ID NO: 1498999 - DNA, 25 bp, Homo sapien
caggcaatgcaggactaagttggtt

SEQ ID NO: 1499000 - DNA, 25 bp, Homo sapien
cgggctgggtcttagatgatagaac

SEQ ID NO: 1499001 - DNA, 25 bp, Homo sapien
aacactggtgagagttcctggagaa

SEQ ID NO: 1499002 - DNA, 25 bp, Homo sapien
tcttagatgatagaacagcataggc

SEQ ID NO: 1499003 - DNA, 25 bp, Homo sapien
tctgtagagaatgtgcaccggaagg

SEQ ID NO: 1499004 - DNA, 25 bp, Homo sapien
tgtgcaccggaagggaaatcccaga

SEQ ID NO: 1499005 - DNA, 25 bp, Homo sapien
cggaagggaaatcccagagtaacag

SEQ ID NO: 1499006 - DNA, 25 bp, Homo sapien
cagccatcttgtaggttaagggtgt

SEQ ID NO: 1499007 - DNA, 25 bp, Homo sapien
tcacgtgcggcttcctgacgtcaga

SEQ ID NO: 1499008 - DNA, 25 bp, Homo sapien
gatgcaggctcttcccgattgcaga

SEQ ID NO: 1499009 - DNA, 25 bp, Homo sapien
tctaccctgccgtctcaaggatggg

SEQ ID NO: 1499010 - DNA, 25 bp, Homo sapien
tgtggatccagctgttgtacagtgc

SEQ ID NO: 1499011 - DNA, 25 bp, Homo sapien
aacttccagatgtttctgcctccca

SEQ ID NO: 1499012 - DNA, 25 bp, Homo sapien
cagatttgtagttgtactgtttcat

SEQ ID NO: 1499013 - DNA, 25 bp, Homo sapien
cttttctcagatttgtagttgtact

SEQ ID NO: 1499014 - DNA, 25 bp, Homo sapien
ccctgtatctcccatatctacgaaa

SEQ ID NO: 1499015 - DNA, 25 bp, Homo sapien
atgtactcaaagaccgattgtttct

SEQ ID NO: 1499016 - DNA, 25 bp, Homo sapien
ctcaaagaccgattgtttctgcaca

SEQ ID NO: 1499017 - DNA, 25 bp, Homo sapien
ctcaaagttcatattcagcaccgcc

SEQ ID NO: 1499018 - DNA, 25 bp, Homo sapien
caaagttcatattcagcaccgccat

SEQ ID NO: 1499019 - DNA, 25 bp, Homo sapien
tcatctggtggacccaaaagagggc

SEQ ID NO: 1499020 - DNA, 25 bp, Homo sapien
tctggtggacccaaaagagggctgt

SEQ ID NO: 1499021 - DNA, 25 bp, Homo sapien
gagtttaaggcacattgtgtgtcta

SEQ ID NO: 1499022 - DNA, 25 bp, Homo sapien
agagtttaaggcacattgtgtgtct

SEQ ID NO: 1499023 - DNA, 25 bp, Homo sapien
ttataaagcagagacagtgatttca

SEQ ID NO: 1499024 - DNA, 25 bp, Homo sapien
cattataaagcagagacagtgattt

SEQ ID NO: 1499025 - DNA, 25 bp, Homo sapien
gggctaaaattcagaccactagact

SEQ ID NO: 1499026 - DNA, 25 bp, Homo sapien
gaccactagactcattataaagcag

SEQ ID NO: 1499027 - DNA, 25 bp, Homo sapien
gcgcagaaagccgttgcgtctagat

SEQ ID NO: 1499028 - DNA, 25 bp, Homo sapien
ccactcgcctaggattggaccacaa

SEQ ID NO: 1499029 - DNA, 25 bp, Homo sapien
cgcctaggattggaccacaaggtct

SEQ ID NO: 1499030 - DNA, 25 bp, Homo sapien
ttgcgtctagatgctgtccccactc

SEQ ID NO: 1499031 - DNA, 25 bp, Homo sapien
ggccctgcgcgcactcacactctgg

SEQ ID NO: 1499032 - DNA, 25 bp, Homo sapien
cgggctgccgcgcaggtgagagcgg

SEQ ID NO: 1499033 - DNA, 25 bp, Homo sapien
ctgccgcgcaggtgagagcggaagc

SEQ ID NO: 1499034 - DNA, 25 bp, Homo sapien
gcgcaggtgagagcggaagcgccgc

SEQ ID NO: 1499035 - DNA, 25 bp, Homo sapien
cgctcaggcgcgcgcgccgttcagc

SEQ ID NO: 1499036 - DNA, 25 bp, Homo sapien
cgcgccccggttctctcgcccggtg

SEQ ID NO: 1499037 - DNA, 25 bp, Homo sapien
gagaggggcgcgccccggttctctc

SEQ ID NO: 1499038 - DNA, 25 bp, Homo sapien
gcgcgcgccgttcagcgggttcggg

SEQ ID NO: 1499039 - DNA, 25 bp, Homo sapien
gcaagggaggctccgagcgccgcag

SEQ ID NO: 1499040 - DNA, 25 bp, Homo sapien
tggcccgcgcccatgcactccgggc

SEQ ID NO: 1499041 - DNA, 25 bp, Homo sapien
agtcccggccgtgggatcgcaaggg

SEQ ID NO: 1499042 - DNA, 25 bp, Homo sapien
ggcgcgaccgctcagcgtccctggc

SEQ ID NO: 1499043 - DNA, 25 bp, Homo sapien
gatgaccagcggctcgccgtgctcg

SEQ ID NO: 1499044 - DNA, 25 bp, Homo sapien
cgcccttcagggtgaagccccacgg

SEQ ID NO: 1499045 - DNA, 25 bp, Homo sapien
ccgcccttcagggtgaagccccacg

SEQ ID NO: 1499046 - DNA, 25 bp, Homo sapien
ttggtgatgaccagcggctcgccgt

SEQ ID NO: 1499047 - DNA, 25 bp, Homo sapien
gaaagggactccgggcaggagccat

SEQ ID NO: 1499048 - DNA, 25 bp, Homo sapien
ggaaagggactccgggcaggagcca

SEQ ID NO: 1499049 - DNA, 25 bp, Homo sapien
tctaagtttgcgcaggtatccagtg

SEQ ID NO: 1499050 - DNA, 25 bp, Homo sapien
gatttcgtagtgatcacaggcacgg

SEQ ID NO: 1499051 - DNA, 25 bp, Homo sapien
gctggcgacagctgctactctggat

SEQ ID NO: 1499052 - DNA, 25 bp, Homo sapien
gaatcgagaagttgcgctggcgaca

SEQ ID NO: 1499053 - DNA, 25 bp, Homo sapien
tattattattagaactcgggtcctg

SEQ ID NO: 1499054 - DNA, 25 bp, Homo sapien
actcgggtcctgctcttaggaagca

SEQ ID NO: 1499055 - DNA, 25 bp, Homo sapien
ttagaactcgggtcctgctcttagg

SEQ ID NO: 1499056 - DNA, 25 bp, Homo sapien
ggtcctgctcttaggaagcaggctt

SEQ ID NO: 1499057 - DNA, 25 bp, Homo sapien
tatttcacaaagagcttggttggct

SEQ ID NO: 1499058 - DNA, 25 bp, Homo sapien
gctgaattcatcaggtccctctttt

SEQ ID NO: 1499059 - DNA, 25 bp, Homo sapien
tcgtgcagatgttgaccgcacactg

SEQ ID NO: 1499060 - DNA, 25 bp, Homo sapien
agttgagagtcacccgctcctgacc

SEQ ID NO: 1499061 - DNA, 25 bp, Homo sapien
gggtcacattaattcacaggctggg

SEQ ID NO: 1499062 - DNA, 25 bp, Homo sapien
tcttgcccaaaacatcgccggagaa

SEQ ID NO: 1499063 - DNA, 25 bp, Homo sapien
catgaagaccgaacgcatcctggta

SEQ ID NO: 1499064 - DNA, 25 bp, Homo sapien
cctggaataggacttgaggctcact

SEQ ID NO: 1499065 - DNA, 25 bp, Homo sapien
ttcacaaccatgaatagtggtacaa

SEQ ID NO: 1499066 - DNA, 25 bp, Homo sapien
tcacaaccatgaatagtggtacaag

SEQ ID NO: 1499067 - DNA, 25 bp, Homo sapien
cacaaccatgaatagtggtacaagt

SEQ ID NO: 1499068 - DNA, 25 bp, Homo sapien
caaccatgaatagtggtacaagttt

SEQ ID NO: 1499069 - DNA, 25 bp, Homo sapien
catggaaccaagggttaccgcaaag

SEQ ID NO: 1499070 - DNA, 25 bp, Homo sapien
agtcccatacccatggaaccaaggg

SEQ ID NO: 1499071 - DNA, 25 bp, Homo sapien
ctgagccagtcccatacccatggaa

SEQ ID NO: 1499072 - DNA, 25 bp, Homo sapien
tggaaccaagggttaccgcaaagca

SEQ ID NO: 1499073 - DNA, 25 bp, Homo sapien
gaaaagcgccgggcacccttctctg

SEQ ID NO: 1499074 - DNA, 25 bp, Homo sapien
cacggagcaccatcgggtgggaaaa

SEQ ID NO: 1499075 - DNA, 25 bp, Homo sapien
ggcacggagcaccatcgggtgggaa

SEQ ID NO: 1499076 - DNA, 25 bp, Homo sapien
agcaccatcgggtgggaaaagcgcc

SEQ ID NO: 1499077 - DNA, 25 bp, Homo sapien
ctggtagtgtgtggcagtcagttct

SEQ ID NO: 1499078 - DNA, 25 bp, Homo sapien
ctgaatctggtagtgtgtggcagtc

SEQ ID NO: 1499079 - DNA, 25 bp, Homo sapien
tctggtagtgtgtggcagtcagttc

SEQ ID NO: 1499080 - DNA, 25 bp, Homo sapien
aatctggtagtgtgtggcagtcagt

SEQ ID NO: 1499081 - DNA, 25 bp, Homo sapien
aaaccaggcccaagttcatcagtac

SEQ ID NO: 1499082 - DNA, 25 bp, Homo sapien
tgtaaaaaccaggcccaagttcatc

SEQ ID NO: 1499083 - DNA, 25 bp, Homo sapien
taaaaaccaggcccaagttcatcag

SEQ ID NO: 1499084 - DNA, 25 bp, Homo sapien
aaaaccaggcccaagttcatcagta

SEQ ID NO: 1499085 - DNA, 25 bp, Homo sapien
aagttagcagcaggagcctggcagc

SEQ ID NO: 1499086 - DNA, 25 bp, Homo sapien
caagttagcagcaggagcctggcag

SEQ ID NO: 1499087 - DNA, 25 bp, Homo sapien
tcaagttagcagcaggagcctggca

SEQ ID NO: 1499088 - DNA, 25 bp, Homo sapien
tctgagagggtgaagtactaccgta

SEQ ID NO: 1499089 - DNA, 25 bp, Homo sapien
tactggatgaaaccctcaaacaccg

SEQ ID NO: 1499090 - DNA, 25 bp, Homo sapien
ccggagatcggaatgctccaagcgg

SEQ ID NO: 1499091 - DNA, 25 bp, Homo sapien
tcaaacaccggagatcggaatgctc

SEQ ID NO: 1499092 - DNA, 25 bp, Homo sapien
tgaagaggtgaaggttttgattttg

SEQ ID NO: 1499093 - DNA, 25 bp, Homo sapien
ctatagcacgggtttctgaaatata

SEQ ID NO: 1499094 - DNA, 25 bp, Homo sapien
cacgggtttctgaaatataaccaga

SEQ ID NO: 1499095 - DNA, 25 bp, Homo sapien
tataaccagaaatgatgaagaggtg

SEQ ID NO: 1499096 - DNA, 25 bp, Homo sapien
tgcatgtcaagccaaagcagcaaac

SEQ ID NO: 1499097 - DNA, 25 bp, Homo sapien
gaatcctgaaacagatatgcatgtc

SEQ ID NO: 1499098 - DNA, 25 bp, Homo sapien
gctgcaagacatattggatggactc

SEQ ID NO: 1499099 - DNA, 25 bp, Homo sapien
taaactctgcacattcattctcaaa

SEQ ID NO: 1499100 - DNA, 25 bp, Homo sapien
gctggtctgcaccagatttggccat

SEQ ID NO: 1499101 - DNA, 25 bp, Homo sapien
agctggtctgcaccagatttggcca

SEQ ID NO: 1499102 - DNA, 25 bp, Homo sapien
gagctggtctgcaccagatttggcc

SEQ ID NO: 1499103 - DNA, 25 bp, Homo sapien
cacgagagactgcttttaacgagcg

SEQ ID NO: 1499104 - DNA, 25 bp, Homo sapien
cttgatccacttcacgagagactgc

SEQ ID NO: 1499105 - DNA, 25 bp, Homo sapien
gcgtgccctctctactggaccataa

SEQ ID NO: 1499106 - DNA, 25 bp, Homo sapien
tttaacgagcgtgccctctctactg

SEQ ID NO: 1499107 - DNA, 25 bp, Homo sapien
tcccctttatagacaaggcacccaa

SEQ ID NO: 1499108 - DNA, 25 bp, Homo sapien
cacaggtttgagtggcatttcttct

SEQ ID NO: 1499109 - DNA, 25 bp, Homo sapien
aaagcctctcctaaactggcaatca

SEQ ID NO: 1499110 - DNA, 25 bp, Homo sapien
aaaatgggaacatgaagcaatggcc

SEQ ID NO: 1499111 - DNA, 25 bp, Homo sapien
taaaatcaccgaggaggagtctgca

SEQ ID NO: 1499112 - DNA, 25 bp, Homo sapien
aagatgccctgaacatctgccgcag

SEQ ID NO: 1499113 - DNA, 25 bp, Homo sapien
tgcaataaggcccaactcccgtgtt

SEQ ID NO: 1499114 - DNA, 25 bp, Homo sapien
gacatgctaagattacgtgtgccgt

SEQ ID NO: 1499115 - DNA, 25 bp, Homo sapien
taatatcagaggatccctggcagcc

SEQ ID NO: 1499116 - DNA, 25 bp, Homo sapien
accatggagactggagcagcctcgt

SEQ ID NO: 1499117 - DNA, 25 bp, Homo sapien
agccctgccctccttaatatctgaa

SEQ ID NO: 1499118 - DNA, 25 bp, Homo sapien
ggaagaccgcaccttttggaactga

SEQ ID NO: 1499119 - DNA, 25 bp, Homo sapien
gaaatgagcagccaggatgcacgaa

SEQ ID NO: 1499120 - DNA, 25 bp, Homo sapien
tcatggggaaatgagcagccaggat

SEQ ID NO: 1499121 - DNA, 25 bp, Homo sapien
ccaggatgcacgaattttgcaatgt

SEQ ID NO: 1499122 - DNA, 25 bp, Homo sapien
ttttgcaatgtgtttaatgcagctg

SEQ ID NO: 1499123 - DNA, 25 bp, Homo sapien
gaaatgcttcctactcttggtttta

SEQ ID NO: 1499124 - DNA, 25 bp, Homo sapien
cccaaaaatggtggtaagagctggt

SEQ ID NO: 1499125 - DNA, 25 bp, Homo sapien
aaatggtggtaagagctggttgtct

SEQ ID NO: 1499126 - DNA, 25 bp, Homo sapien
gtacacaatttggagaaatgcttcc

SEQ ID NO: 1499127 - DNA, 25 bp, Homo sapien
aatgtgtctcattcccacaagcacg

SEQ ID NO: 1499128 - DNA, 25 bp, Homo sapien
cgtgtgtaagcaagtcctgaaggac

SEQ ID NO: 1499129 - DNA, 25 bp, Homo sapien
ggtgacacagttctgtgtctgactc

SEQ ID NO: 1499130 - DNA, 25 bp, Homo sapien
tctgacttcactgcaaaggacaaca

SEQ ID NO: 1499131 - DNA, 25 bp, Homo sapien
cttccctggacacgactcctgttta

SEQ ID NO: 1499132 - DNA, 25 bp, Homo sapien
tgggaaagcttgagaacacacacaa

SEQ ID NO: 1499133 - DNA, 25 bp, Homo sapien
tttatccagggaatgggaaagcttg

SEQ ID NO: 1499134 - DNA, 25 bp, Homo sapien
gggacctgaagatactgattcattt

SEQ ID NO: 1499135 - DNA, 25 bp, Homo sapien
tgttccatgagccttccacgagcag

SEQ ID NO: 1499136 - DNA, 25 bp, Homo sapien
gaagcatgttccatgagccttccac

SEQ ID NO: 1499137 - DNA, 25 bp, Homo sapien
agagaagcatgttccatgagccttc

SEQ ID NO: 1499138 - DNA, 25 bp, Homo sapien
gcatgttccatgagccttccacgag

SEQ ID NO: 1499139 - DNA, 25 bp, Homo sapien
ttatgggaccccttcaccaggcaaa

SEQ ID NO: 1499140 - DNA, 25 bp, Homo sapien
tgatgccgacgatctcatctccagc

SEQ ID NO: 1499141 - DNA, 25 bp, Homo sapien
tctaaaccctgagagaccaatgtca

SEQ ID NO: 1499142 - DNA, 25 bp, Homo sapien
ggcaaatcgcttcctgtctaaaccc

SEQ ID NO: 1499143 - DNA, 25 bp, Homo sapien
tgggagcataagcaccgttttctgc

SEQ ID NO: 1499144 - DNA, 25 bp, Homo sapien
acaaggaagatatcttcatgtctgt

SEQ ID NO: 1499145 - DNA, 25 bp, Homo sapien
aacaaggaagatatcttcatgtctg

SEQ ID NO: 1499146 - DNA, 25 bp, Homo sapien
aaaacaaggaagatatcttcatgtc

SEQ ID NO: 1499147 - DNA, 25 bp, Homo sapien
tcaaaacaaggaagatatcttcatg

SEQ ID NO: 1499148 - DNA, 25 bp, Homo sapien
tccagtgtccccactaaggagcatg

SEQ ID NO: 1499149 - DNA, 25 bp, Homo sapien
gtgtccccactaaggagcatgccct

SEQ ID NO: 1499150 - DNA, 25 bp, Homo sapien
ggagcatgccctccatctgaccatg

SEQ ID NO: 1499151 - DNA, 25 bp, Homo sapien
cactaaggagcatgccctccatctg

SEQ ID NO: 1499152 - DNA, 25 bp, Homo sapien
gcgagtggcacactggacagaagcc

SEQ ID NO: 1499153 - DNA, 25 bp, Homo sapien
gcaggacactacctcccagatgaca

SEQ ID NO: 1499154 - DNA, 25 bp, Homo sapien
ctgccctgctaagcccactaagagg

SEQ ID NO: 1499155 - DNA, 25 bp, Homo sapien
cactaagaggtcagcacgtgatccc

SEQ ID NO: 1499156 - DNA, 25 bp, Homo sapien
gatcagtctccctgcatgcaacaca

SEQ ID NO: 1499157 - DNA, 25 bp, Homo sapien
tggccaggtcttgccctcactctag

SEQ ID NO: 1499158 - DNA, 25 bp, Homo sapien
tctagaaccatcagctgctcccagt

SEQ ID NO: 1499159 - DNA, 25 bp, Homo sapien
cttttcctgccaatcctccggaagg

SEQ ID NO: 1499160 - DNA, 25 bp, Homo sapien
tagaaccgtgggtctcatgtgcagg

SEQ ID NO: 1499161 - DNA, 25 bp, Homo sapien
gtcgctcaatcacagacccgtggag

SEQ ID NO: 1499162 - DNA, 25 bp, Homo sapien
catcctgcagacttgacgagtgcct

SEQ ID NO: 1499163 - DNA, 25 bp, Homo sapien
tgtggtgtttcctcctgcacaagcc

SEQ ID NO: 1499164 - DNA, 25 bp, Homo sapien
cctgtacctggcctagggataattt

SEQ ID NO: 1499165 - DNA, 25 bp, Homo sapien
cttggttactgtggacagtgaaaat

SEQ ID NO: 1499166 - DNA, 25 bp, Homo sapien
tcaagccggggtcagagtggtttct

SEQ ID NO: 1499167 - DNA, 25 bp, Homo sapien
gaatttcctggtgcataatgaatgt

SEQ ID NO: 1499168 - DNA, 25 bp, Homo sapien
catttgcacgtatggcccctgcaga

SEQ ID NO: 1499169 - DNA, 25 bp, Homo sapien
gtatggcccctgcagaggcaacgtg

SEQ ID NO: 1499170 - DNA, 25 bp, Homo sapien
agaggcaacgtggaaaaagactgag

SEQ ID NO: 1499171 - DNA, 25 bp, Homo sapien
aaggaagtcatttgcacgtatggcc

SEQ ID NO: 1499172 - DNA, 25 bp, Homo sapien
gacagccgctggtggaggtgaatgg

SEQ ID NO: 1499173 - DNA, 25 bp, Homo sapien
tgtcagagaacttggtggcatgcca

SEQ ID NO: 1499174 - DNA, 25 bp, Homo sapien
tggcatgccaggagtgaggcctcca

SEQ ID NO: 1499175 - DNA, 25 bp, Homo sapien
tggctgtcagagaacttggtggcat

SEQ ID NO: 1499176 - DNA, 25 bp, Homo sapien
gcaagaatgagaagaaggacaaggc

SEQ ID NO: 1499177 - DNA, 25 bp, Homo sapien
aagaatgagaagaaggacaaggcat

SEQ ID NO: 1499178 - DNA, 25 bp, Homo sapien
caagaatgagaagaaggacaaggca

SEQ ID NO: 1499179 - DNA, 25 bp, Homo sapien
ctgcaagaatgagaagaaggacaag

SEQ ID NO: 1499180 - DNA, 25 bp, Homo sapien
gctgtaggttcgtctgctcccagga

SEQ ID NO: 1499181 - DNA, 25 bp, Homo sapien
cctgggcgggaaacaactgagcttc

SEQ ID NO: 1499182 - DNA, 25 bp, Homo sapien
tctctgcggaggacgtgtcggcttt

SEQ ID NO: 1499183 - DNA, 25 bp, Homo sapien
gctgaagtgatctaaggtgcgctgt

SEQ ID NO: 1499184 - DNA, 25 bp, Homo sapien
gatggtgctttcttcttatcgggaa

SEQ ID NO: 1499185 - DNA, 25 bp, Homo sapien
ggtggggatgatggtgctttcttct

SEQ ID NO: 1499186 - DNA, 25 bp, Homo sapien
tggtgctttcttcttatcgggaaca

SEQ ID NO: 1499187 - DNA, 25 bp, Homo sapien
tgctttcttcttatcgggaacatac

SEQ ID NO: 1499188 - DNA, 25 bp, Homo sapien
cagggccgtaaagtgctgtgccgca

SEQ ID NO: 1499189 - DNA, 25 bp, Homo sapien
caaggccgatcggtgagctctggtc

SEQ ID NO: 1499190 - DNA, 25 bp, Homo sapien
gccgtaaagtgctgtgccgcagccg

SEQ ID NO: 1499191 - DNA, 25 bp, Homo sapien
gtctccggtcaccacgaggctgagc

SEQ ID NO: 1499192 - DNA, 25 bp, Homo sapien
gaagcgcacatctgagctggacaga

SEQ ID NO: 1499193 - DNA, 25 bp, Homo sapien
gctgccgtctgcgtgggcctcctgt

SEQ ID NO: 1499194 - DNA, 25 bp, Homo sapien
aagctccatccttggagggcggcca

SEQ ID NO: 1499195 - DNA, 25 bp, Homo sapien
aggcctgcagcctactggaagctcc

SEQ ID NO: 1499196 - DNA, 25 bp, Homo sapien
tcctgcccaaggctgtcagcacaga

SEQ ID NO: 1499197 - DNA, 25 bp, Homo sapien
tgcccaaggctgtcagcacagaggg

SEQ ID NO: 1499198 - DNA, 25 bp, Homo sapien
cctggctcctgcccaaggctgtcag

SEQ ID NO: 1499199 - DNA, 25 bp, Homo sapien
ctcctgcccaaggctgtcagcacag

SEQ ID NO: 1499200 - DNA, 25 bp, Homo sapien
cagaaggccagcatcccgcccagag

SEQ ID NO: 1499201 - DNA, 25 bp, Homo sapien
gtgggggaagactctcgagggctcc

SEQ ID NO: 1499202 - DNA, 25 bp, Homo sapien
tgggctctggcccaccgtgggtggg

SEQ ID NO: 1499203 - DNA, 25 bp, Homo sapien
gaagactctcgagggctccaagggc

SEQ ID NO: 1499204 - DNA, 25 bp, Homo sapien
ttgtccagcgggtaacaccgtcctg

SEQ ID NO: 1499205 - DNA, 25 bp, Homo sapien
ccatctgcccacgtgatgctggctg

SEQ ID NO: 1499206 - DNA, 25 bp, Homo sapien
gtctcgcgggcatccggaggaccct

SEQ ID NO: 1499207 - DNA, 25 bp, Homo sapien
atctgcccacgtgatgctggctgcc

SEQ ID NO: 1499208 - DNA, 25 bp, Homo sapien
tcaggtggtctttataggtgccagc

SEQ ID NO: 1499209 - DNA, 25 bp, Homo sapien
aacgtgcccacagtatcctcagatg

SEQ ID NO: 1499210 - DNA, 25 bp, Homo sapien
tgactccgggtataggtctcctggg

SEQ ID NO: 1499211 - DNA, 25 bp, Homo sapien
ccaggatgtcatccgctgagtggca

SEQ ID NO: 1499212 - DNA, 25 bp, Homo sapien
ctgcaaagggcaacataatgagaca

SEQ ID NO: 1499213 - DNA, 25 bp, Homo sapien
tgccttcgcagttcgacagaagctt

SEQ ID NO: 1499214 - DNA, 25 bp, Homo sapien
cggcccggactgcggagggaagctc

SEQ ID NO: 1499215 - DNA, 25 bp, Homo sapien
cggactgcggagggaagctcttctc

SEQ ID NO: 1499216 - DNA, 25 bp, Homo sapien
ctcggcgtggactgtccctcctcgg

SEQ ID NO: 1499217 - DNA, 25 bp, Homo sapien
cctcagacgcctcttcagtaactct

SEQ ID NO: 1499218 - DNA, 25 bp, Homo sapien
ctcagacgcctcttcagtaactctg

SEQ ID NO: 1499219 - DNA, 25 bp, Homo sapien
agtaactctgaatccaaatttcacc

SEQ ID NO: 1499220 - DNA, 25 bp, Homo sapien
aactctgaatccaaatttcacccac

SEQ ID NO: 1499221 - DNA, 25 bp, Homo sapien
taaggcgctctgtgcaaagcgtgca

SEQ ID NO: 1499222 - DNA, 25 bp, Homo sapien
taggtccaatttaggaaggcctgcc

SEQ ID NO: 1499223 - DNA, 25 bp, Homo sapien
tgtgctagatagctaaagctgccct

SEQ ID NO: 1499224 - DNA, 25 bp, Homo sapien
cataagcagtctcaccgtgcggaaa

SEQ ID NO: 1499225 - DNA, 25 bp, Homo sapien
atgtgcagagcccatcgagcactgc

SEQ ID NO: 1499226 - DNA, 25 bp, Homo sapien
cagcctgcacgtgacagctgttcag

SEQ ID NO: 1499227 - DNA, 25 bp, Homo sapien
gagctggcttggaaaacagactgca

SEQ ID NO: 1499228 - DNA, 25 bp, Homo sapien
acactggtggcatcgggcaaagcaa

SEQ ID NO: 1499229 - DNA, 25 bp, Homo sapien
gtaaccataaactatcacctgaaag

SEQ ID NO: 1499230 - DNA, 25 bp, Homo sapien
accataaactatcacctgaaagcta

SEQ ID NO: 1499231 - DNA, 25 bp, Homo sapien
taaactatcacctgaaagctattcc

SEQ ID NO: 1499232 - DNA, 25 bp, Homo sapien
cataaactatcacctgaaagctatt

SEQ ID NO: 1499233 - DNA, 25 bp, Homo sapien
gagatgcctgagttaaattttcctc

SEQ ID NO: 1499234 - DNA, 25 bp, Homo sapien
cccgcttctcctccttagccgaaat

SEQ ID NO: 1499235 - DNA, 25 bp, Homo sapien
catcttggggcattggtcactttca

SEQ ID NO: 1499236 - DNA, 25 bp, Homo sapien
cccatctagaactgagatgcctgag

SEQ ID NO: 1499237 - DNA, 25 bp, Homo sapien
cgcagccaaggtcggcccagaggct

SEQ ID NO: 1499238 - DNA, 25 bp, Homo sapien
tcagcacgtgctacgggagtctctc

SEQ ID NO: 1499239 - DNA, 25 bp, Homo sapien
gagagctttgaagaacgcagccagc

SEQ ID NO: 1499240 - DNA, 25 bp, Homo sapien
aagccccaaaggatcccgtaacatg

SEQ ID NO: 1499241 - DNA, 25 bp, Homo sapien
aaaattgcatgcatccacgaggaca

SEQ ID NO: 1499242 - DNA, 25 bp, Homo sapien
aagggtcccacataccaagggctgc

SEQ ID NO: 1499243 - DNA, 25 bp, Homo sapien
gagccggaatctgcaccctgatttg

SEQ ID NO: 1499244 - DNA, 25 bp, Homo sapien
cagatgatggctctacggcttccag

SEQ ID NO: 1499245 - DNA, 25 bp, Homo sapien
aggacctcgacccattagtccgcag

SEQ ID NO: 1499246 - DNA, 25 bp, Homo sapien
ctggaggacctcgacccattagtcc

SEQ ID NO: 1499247 - DNA, 25 bp, Homo sapien
acctcgacccattagtccgcaggag

SEQ ID NO: 1499248 - DNA, 25 bp, Homo sapien
gagcccaccagactgaaaatcagcc

SEQ ID NO: 1499249 - DNA, 25 bp, Homo sapien
tgagttaagatgtactgtctgatga

SEQ ID NO: 1499250 - DNA, 25 bp, Homo sapien
gagttaagatgtactgtctgatgag

SEQ ID NO: 1499251 - DNA, 25 bp, Homo sapien
gtgagttaagatgtactgtctgatg

SEQ ID NO: 1499252 - DNA, 25 bp, Homo sapien
tagtgagttaagatgtactgtctga

SEQ ID NO: 1499253 - DNA, 25 bp, Homo sapien
gacttgagaggtactgtctgatgag

SEQ ID NO: 1499254 - DNA, 25 bp, Homo sapien
tgagttgagatgtctgtctgagtta

SEQ ID NO: 1499255 - DNA, 25 bp, Homo sapien
tgtagtgatttgagatgtctgagtt

SEQ ID NO: 1499256 - DNA, 25 bp, Homo sapien
tgtctgtctgatgaaccgtagtgaa

SEQ ID NO: 1499257 - DNA, 25 bp, Homo sapien
tgtcgccaccgcaactcctcatgca

SEQ ID NO: 1499258 - DNA, 25 bp, Homo sapien
accgcaactcctcatgcaaggtggg

SEQ ID NO: 1499259 - DNA, 25 bp, Homo sapien
tggggagtcgtgacgcacctcagac

SEQ ID NO: 1499260 - DNA, 25 bp, Homo sapien
agtcgtgacgcacctcagacaacat

SEQ ID NO: 1499261 - DNA, 25 bp, Homo sapien
gagctcactggccacgagtcttgtc

SEQ ID NO: 1499262 - DNA, 25 bp, Homo sapien
tataatctcgaggtagggttcccgc

SEQ ID NO: 1499263 - DNA, 25 bp, Homo sapien
tccccggcagtgagatagttcagag

SEQ ID NO: 1499264 - DNA, 25 bp, Homo sapien
tgggttcggtgccttctgactcggt

SEQ ID NO: 1499265 - DNA, 25 bp, Homo sapien
ctgctgcttgggagggagcagtgct

SEQ ID NO: 1499266 - DNA, 25 bp, Homo sapien
acgctcacagacagtggccttcggg

SEQ ID NO: 1499267 - DNA, 25 bp, Homo sapien
ttctggcagaggacgtgatgcgtcc

SEQ ID NO: 1499268 - DNA, 25 bp, Homo sapien
atgctggcttccacgctcacagaca

SEQ ID NO: 1499269 - DNA, 25 bp, Homo sapien
ttgtccgtcagtttctggggggcga

SEQ ID NO: 1499270 - DNA, 25 bp, Homo sapien
tgtccgtcagtttctggggggcgaa

SEQ ID NO: 1499271 - DNA, 25 bp, Homo sapien
tccccagtactgactttaagtccaa

SEQ ID NO: 1499272 - DNA, 25 bp, Homo sapien
gcgtcccacattaggagcctcatgg

SEQ ID NO: 1499273 - DNA, 25 bp, Homo sapien
taagtccaacgccttgagctaaagc

SEQ ID NO: 1499274 - DNA, 25 bp, Homo sapien
agaaagacccactgagaacccgcgt

SEQ ID NO: 1499275 - DNA, 25 bp, Homo sapien
ctcaaaccgccaatgccacccctga

SEQ ID NO: 1499276 - DNA, 25 bp, Homo sapien
agggctgtgaggactatttaatacc

SEQ ID NO: 1499277 - DNA, 25 bp, Homo sapien
tctatgctcaaaccgccaatgccac

SEQ ID NO: 1499278 - DNA, 25 bp, Homo sapien
ggctgtgaggactatttaataccat

SEQ ID NO: 1499279 - DNA, 25 bp, Homo sapien
tcaagaagctccctctgactcctac

SEQ ID NO: 1499280 - DNA, 25 bp, Homo sapien
ggatgaggcagaggcctcaagaagc

SEQ ID NO: 1499281 - DNA, 25 bp, Homo sapien
ctggatgaggcagaggcctcaagaa

SEQ ID NO: 1499282 - DNA, 25 bp, Homo sapien
cctcaagaagctccctctgactcct

SEQ ID NO: 1499283 - DNA, 25 bp, Homo sapien
tgaaatcgcaaagcatgctccagcc

SEQ ID NO: 1499284 - DNA, 25 bp, Homo sapien
cagaccctgattgacgtgtcccctg

SEQ ID NO: 1499285 - DNA, 25 bp, Homo sapien
gactcaaaggcactagccagccacc

SEQ ID NO: 1499286 - DNA, 25 bp, Homo sapien
gaaggagcctccatgatcccacatc

SEQ ID NO: 1499287 - DNA, 25 bp, Homo sapien
gacagaagcgcgagtagaactgctc

SEQ ID NO: 1499288 - DNA, 25 bp, Homo sapien
gatgccttccatcaagtccatagtg

SEQ ID NO: 1499289 - DNA, 25 bp, Homo sapien
ggccttcatgtagctgagccctgga

SEQ ID NO: 1499290 - DNA, 25 bp, Homo sapien
gatccaggatgtcggccagggactt

SEQ ID NO: 1499291 - DNA, 25 bp, Homo sapien
agtcgcttcccgaatcctcttcgtg

SEQ ID NO: 1499292 - DNA, 25 bp, Homo sapien
tcttcaccgacaggtcgtggtccaa

SEQ ID NO: 1499293 - DNA, 25 bp, Homo sapien
gccgacgtgctgtagtaggtagaat

SEQ ID NO: 1499294 - DNA, 25 bp, Homo sapien
cctgcaggtccttcatcttgatcag

SEQ ID NO: 1499295 - DNA, 25 bp, Homo sapien
tggtgtgatccggatgcctgcccct

SEQ ID NO: 1499296 - DNA, 25 bp, Homo sapien
gctgtcatttggaatggactctcct

SEQ ID NO: 1499297 - DNA, 25 bp, Homo sapien
aaattccactgtcctgagtgaaagc

SEQ ID NO: 1499298 - DNA, 25 bp, Homo sapien
aaagctgaacacaaacgccctggga

SEQ ID NO: 1499299 - DNA, 25 bp, Homo sapien
tctcaacaggcagaccttgtggctt

SEQ ID NO: 1499300 - DNA, 25 bp, Homo sapien
catattcctgaagggtcctgcggca

SEQ ID NO: 1499301 - DNA, 25 bp, Homo sapien
tgacaggtgaagacaagaaggttcc

SEQ ID NO: 1499302 - DNA, 25 bp, Homo sapien
gaatgaatgcaggtcttaagatccc

SEQ ID NO: 1499303 - DNA, 25 bp, Homo sapien
caccccggccacactgctcactgcc

SEQ ID NO: 1499304 - DNA, 25 bp, Homo sapien
caagggaacacggagacactggtta

SEQ ID NO: 1499305 - DNA, 25 bp, Homo sapien
ttgggcacgggatggcaagggaaca

SEQ ID NO: 1499306 - DNA, 25 bp, Homo sapien
gagacactggttaggccggccccca

SEQ ID NO: 1499307 - DNA, 25 bp, Homo sapien
aattattgagggcattctccacccg

SEQ ID NO: 1499308 - DNA, 25 bp, Homo sapien
aagcgccgtcgtccaaattattgag

SEQ ID NO: 1499309 - DNA, 25 bp, Homo sapien
ctgacagcgacagcaggaggttcac

SEQ ID NO: 1499310 - DNA, 25 bp, Homo sapien
cggaacttgtcaaactcgctgggct

SEQ ID NO: 1499311 - DNA, 25 bp, Homo sapien
tttcacgacacttgaaaaacagcct

SEQ ID NO: 1499312 - DNA, 25 bp, Homo sapien
tccaagtcagacgtatctgcattta

SEQ ID NO: 1499313 - DNA, 25 bp, Homo sapien
gaaaaacagccttcccacgagacca

SEQ ID NO: 1499314 - DNA, 25 bp, Homo sapien
atttccaagtcagacgtatctgcat

SEQ ID NO: 1499315 - DNA, 25 bp, Homo sapien
gcctgcagagcatatctgcacacaa

SEQ ID NO: 1499316 - DNA, 25 bp, Homo sapien
tgcagagcatatctgcacacaagga

SEQ ID NO: 1499317 - DNA, 25 bp, Homo sapien
cccgagcctgcagagcatatctgca

SEQ ID NO: 1499318 - DNA, 25 bp, Homo sapien
agagcatatctgcacacaaggaagc

SEQ ID NO: 1499319 - DNA, 25 bp, Homo sapien
gaggaattcagggtaggcttactaa

SEQ ID NO: 1499320 - DNA, 25 bp, Homo sapien
actcgagaggaattcagggtaggct

SEQ ID NO: 1499321 - DNA, 25 bp, Homo sapien
attcagggtaggcttactaaatgct

SEQ ID NO: 1499322 - DNA, 25 bp, Homo sapien
ggtggactcgagaggaattcagggt

SEQ ID NO: 1499323 - DNA, 25 bp, Homo sapien
ggccctcttggcgtcaaggtccgct

SEQ ID NO: 1499324 - DNA, 25 bp, Homo sapien
aacgacagaattctgagatgctgca

SEQ ID NO: 1499325 - DNA, 25 bp, Homo sapien
gaattctgagatgctgcaaagggca

SEQ ID NO: 1499326 - DNA, 25 bp, Homo sapien
gcaaagggcaaaggactgcggggcc

SEQ ID NO: 1499327 - DNA, 25 bp, Homo sapien
gagcagaagagtcaccaagggactc

SEQ ID NO: 1499328 - DNA, 25 bp, Homo sapien
cctcgaatggtgagcagaagagtca

SEQ ID NO: 1499329 - DNA, 25 bp, Homo sapien
ctgcctcgaatggtgagcagaagag

SEQ ID NO: 1499330 - DNA, 25 bp, Homo sapien
tgcctcgaatggtgagcagaagagt

SEQ ID NO: 1499331 - DNA, 25 bp, Homo sapien
gatgccaccagagatccgatggggt

SEQ ID NO: 1499332 - DNA, 25 bp, Homo sapien
acactggcaacttgtgggctggtcc

SEQ ID NO: 1499333 - DNA, 25 bp, Homo sapien
gatggggtccacacagacaaaccca

SEQ ID NO: 1499334 - DNA, 25 bp, Homo sapien
cttatcgatggaaaccctgatgcca

SEQ ID NO: 1499335 - DNA, 25 bp, Homo sapien
tcaggactctctgcttctcaagcag

SEQ ID NO: 1499336 - DNA, 25 bp, Homo sapien
ggactctctgcttctcaagcagtga

SEQ ID NO: 1499337 - DNA, 25 bp, Homo sapien
ctctctgcttctcaagcagtgattg

SEQ ID NO: 1499338 - DNA, 25 bp, Homo sapien
ctggatcaggactctctgcttctca

SEQ ID NO: 1499339 - DNA, 25 bp, Homo sapien
aaatgtcaaagacgatgcgctcgcg

SEQ ID NO: 1499340 - DNA, 25 bp, Homo sapien
ccctttcgggctgaaggctgtccaa

SEQ ID NO: 1499341 - DNA, 25 bp, Homo sapien
cgaagtgctcatagtccgcgaggct

SEQ ID NO: 1499342 - DNA, 25 bp, Homo sapien
gagggccgacttcatcttcacgaag

SEQ ID NO: 1499343 - DNA, 25 bp, Homo sapien
taaattataaccaagccatcggcgg

SEQ ID NO: 1499344 - DNA, 25 bp, Homo sapien
aacaacgggtttcccactgacagtg

SEQ ID NO: 1499345 - DNA, 25 bp, Homo sapien
tgagtgaacccaaccacacaggtgg

SEQ ID NO: 1499346 - DNA, 25 bp, Homo sapien
cacgagtatccttgggaacggagct

SEQ ID NO: 1499347 - DNA, 25 bp, Homo sapien
tagagaatgcattaccgtcaacacg

SEQ ID NO: 1499348 - DNA, 25 bp, Homo sapien
tcacgcaagtgactaccagctggag

SEQ ID NO: 1499349 - DNA, 25 bp, Homo sapien
gctacaaggatactcgagcacgacg

SEQ ID NO: 1499350 - DNA, 25 bp, Homo sapien
ccacactacaagagggcgaaggagc

SEQ ID NO: 1499351 - DNA, 25 bp, Homo sapien
caagcaggatgatctgttgataggt

SEQ ID NO: 1499352 - DNA, 25 bp, Homo sapien
cgagcatgaaatctacacacatttg

SEQ ID NO: 1499353 - DNA, 25 bp, Homo sapien
taggtgagtggtaagtgtcgagcat

SEQ ID NO: 1499354 - DNA, 25 bp, Homo sapien
tattttgttacagtcaagcaggatg

SEQ ID NO: 1499355 - DNA, 25 bp, Homo sapien
tggcttaagaatctgacgtatggtg

SEQ ID NO: 1499356 - DNA, 25 bp, Homo sapien
gacgtatggtgaggacattcttttt

SEQ ID NO: 1499357 - DNA, 25 bp, Homo sapien
taagaatctgacgtatggtgaggac

SEQ ID NO: 1499358 - DNA, 25 bp, Homo sapien
aatctgacgtatggtgaggacattc

SEQ ID NO: 1499359 - DNA, 25 bp, Homo sapien
tggcacatttcactacacccaggta

SEQ ID NO: 1499360 - DNA, 25 bp, Homo sapien
gttgttgcggcttcccttctactgc

SEQ ID NO: 1499361 - DNA, 25 bp, Homo sapien
ctggcacatttcactacacccaggt

SEQ ID NO: 1499362 - DNA, 25 bp, Homo sapien
ggagttctcatcaacacggtagcca

SEQ ID NO: 1499363 - DNA, 25 bp, Homo sapien
cgacatggacacagctcctctcgga

SEQ ID NO: 1499364 - DNA, 25 bp, Homo sapien
caccggcttcttggtccaggcagct

SEQ ID NO: 1499365 - DNA, 25 bp, Homo sapien
tcctctcggacgtcctgcctagttc

SEQ ID NO: 1499366 - DNA, 25 bp, Homo sapien
gaagaatccgaaaatgctggcagtc

SEQ ID NO: 1499367 - DNA, 25 bp, Homo sapien
tccatcctatggtggtaagggcgaa

SEQ ID NO: 1499368 - DNA, 25 bp, Homo sapien
gcgacgccggtaaatgcagactcta

SEQ ID NO: 1499369 - DNA, 25 bp, Homo sapien
tgttaaaggctctcccgaagaatcc

SEQ ID NO: 1499370 - DNA, 25 bp, Homo sapien
cttgtggcggtcatcctgggactga

SEQ ID NO: 1499371 - DNA, 25 bp, Homo sapien
cactacttgagcgtccgtgtcctac

SEQ ID NO: 1499372 - DNA, 25 bp, Homo sapien
cttgggagagaagtgtcaacattgc

SEQ ID NO: 1499373 - DNA, 25 bp, Homo sapien
ttttctggccggactcactacttga

SEQ ID NO: 1499374 - DNA, 25 bp, Homo sapien
gcctccgtgagcacgggaagttgcc

SEQ ID NO: 1499375 - DNA, 25 bp, Homo sapien
gagaagtgcaggtgtcccctccggt

SEQ ID NO: 1499376 - DNA, 25 bp, Homo sapien
gaagttgcccaacggagaagtgcag

SEQ ID NO: 1499377 - DNA, 25 bp, Homo sapien
tccggtcaccgcatttgcttgtcct

SEQ ID NO: 1499378 - DNA, 25 bp, Homo sapien
cggtccgtcgcatctggcttactca

SEQ ID NO: 1499379 - DNA, 25 bp, Homo sapien
ccacctcggctgtagtagccaggaa

SEQ ID NO: 1499380 - DNA, 25 bp, Homo sapien
gactctatcactacacggtccgtcg

SEQ ID NO: 1499381 - DNA, 25 bp, Homo sapien
tctggacctttcagtgaggactcta

SEQ ID NO: 1499382 - DNA, 25 bp, Homo sapien
ctggaatgtcactcgctgcccaggg

SEQ ID NO: 1499383 - DNA, 25 bp, Homo sapien
tcccctccatagacatgacctggaa

SEQ ID NO: 1499384 - DNA, 25 bp, Homo sapien
gggaaaagctctcttgggctgtaac

SEQ ID NO: 1499385 - DNA, 25 bp, Homo sapien
taacgctggaaggtaagcccttatc

SEQ ID NO: 1499386 - DNA, 25 bp, Homo sapien
aagaatctgtgcgtatttgatgttc

SEQ ID NO: 1499387 - DNA, 25 bp, Homo sapien
gaaagaatctgtgcgtatttgatgt

SEQ ID NO: 1499388 - DNA, 25 bp, Homo sapien
gcagaaagaatctgtgcgtatttga

SEQ ID NO: 1499389 - DNA, 25 bp, Homo sapien
gaatctgtgcgtatttgatgttcca

SEQ ID NO: 1499390 - DNA, 25 bp, Homo sapien
gaaagtacagcaactcttaagagaa

SEQ ID NO: 1499391 - DNA, 25 bp, Homo sapien
gtcactaggatggtaacggtcagct

SEQ ID NO: 1499392 - DNA, 25 bp, Homo sapien
agagaatcaaaactgtaggattcat

SEQ ID NO: 1499393 - DNA, 25 bp, Homo sapien
gctccaggaggatttagggaaagta

SEQ ID NO: 1499394 - DNA, 25 bp, Homo sapien
gtcacctggtccttttagaatctca

SEQ ID NO: 1499395 - DNA, 25 bp, Homo sapien
caacatggccgttctgaagctgcat

SEQ ID NO: 1499396 - DNA, 25 bp, Homo sapien
ccaacatggccgttctgaagctgca

SEQ ID NO: 1499397 - DNA, 25 bp, Homo sapien
cacccaacatggccgttctgaagct

SEQ ID NO: 1499398 - DNA, 25 bp, Homo sapien
gagcggagacccaagtagaccattg

SEQ ID NO: 1499399 - DNA, 25 bp, Homo sapien
ggtctgatcgtttgagcggagaccc

SEQ ID NO: 1499400 - DNA, 25 bp, Homo sapien
tcgtttgagcggagacccaagtaga

SEQ ID NO: 1499401 - DNA, 25 bp, Homo sapien
ctgagcgcttcatccggtttgtggg

SEQ ID NO: 1499402 - DNA, 25 bp, Homo sapien
ccctctgcgcacttggcgggaggct

SEQ ID NO: 1499403 - DNA, 25 bp, Homo sapien
cggtctcccacacaacccgtctggt

SEQ ID NO: 1499404 - DNA, 25 bp, Homo sapien
gtctggagaccctctgcgcacttgg

SEQ ID NO: 1499405 - DNA, 25 bp, Homo sapien
gctgtctggagaccctctgcgcact

SEQ ID NO: 1499406 - DNA, 25 bp, Homo sapien
cgctcctggcgcatcctccgcccgg

SEQ ID NO: 1499407 - DNA, 25 bp, Homo sapien
gcgccgcccactccgttcaggtagc

SEQ ID NO: 1499408 - DNA, 25 bp, Homo sapien
ccgccctagcaagccgctgcccgcg

SEQ ID NO: 1499409 - DNA, 25 bp, Homo sapien
ccgcgcgcgaagtcacagcccggga

SEQ ID NO: 1499410 - DNA, 25 bp, Homo sapien
cggcggcgcggttcccgctggggct

SEQ ID NO: 1499411 - DNA, 25 bp, Homo sapien
cggggcctcgcgcggctgtccccgc

SEQ ID NO: 1499412 - DNA, 25 bp, Homo sapien
ccgctcagccaaggcatgacggcgc

SEQ ID NO: 1499413 - DNA, 25 bp, Homo sapien
ggcgcggttcccgctggggctgcgc

SEQ ID NO: 1499414 - DNA, 25 bp, Homo sapien
cggcgggcagcggcagctcggcgct

SEQ ID NO: 1499415 - DNA, 25 bp, Homo sapien
gccggcgggcagcggcagctcggcg

SEQ ID NO: 1499416 - DNA, 25 bp, Homo sapien
agccggcgggcagcggcagctcggc

SEQ ID NO: 1499417 - DNA, 25 bp, Homo sapien
ccagccggcgggcagcggcagctcg

SEQ ID NO: 1499418 - DNA, 25 bp, Homo sapien
aagacgcgaccgtcgtagtctcgcg

SEQ ID NO: 1499419 - DNA, 25 bp, Homo sapien
gttgtggtcaatgtaaaagacgcga

SEQ ID NO: 1499420 - DNA, 25 bp, Homo sapien
gatccacgacgtctggcgcgtgttg

SEQ ID NO: 1499421 - DNA, 25 bp, Homo sapien
ggtcgatccacgacgtctggcgcgt

SEQ ID NO: 1499422 - DNA, 25 bp, Homo sapien
gagaaaggaaaagagggccatctgt

SEQ ID NO: 1499423 - DNA, 25 bp, Homo sapien
aggagcccagttcccaggcgccgga

SEQ ID NO: 1499424 - DNA, 25 bp, Homo sapien
tcagccccaggagaggaaattccag

SEQ ID NO: 1499425 - DNA, 25 bp, Homo sapien
aaagagggccatctgtcagccccag

SEQ ID NO: 1499426 - DNA, 25 bp, Homo sapien
caactagagtttgggaacagacttc

SEQ ID NO: 1499427 - DNA, 25 bp, Homo sapien
cacgtttgtgatccaaggtgacagc

SEQ ID NO: 1499428 - DNA, 25 bp, Homo sapien
taactcacgagttttaaggcgctaa

SEQ ID NO: 1499429 - DNA, 25 bp, Homo sapien
tcaagggcccgtctgacatcaggtt

SEQ ID NO: 1499430 - DNA, 25 bp, Homo sapien
gtaccccatgcatatctttcacaaa

SEQ ID NO: 1499431 - DNA, 25 bp, Homo sapien
tacgtgaataagacagctttgtacc

SEQ ID NO: 1499432 - DNA, 25 bp, Homo sapien
taagacagctttgtaccccatgcat

SEQ ID NO: 1499433 - DNA, 25 bp, Homo sapien
cttgattgggtttttatacgtgaat

SEQ ID NO: 1499434 - DNA, 25 bp, Homo sapien
tcaaatatggtatcgtccaccatac

SEQ ID NO: 1499435 - DNA, 25 bp, Homo sapien
cacctgagctacaggaaatggaaca

SEQ ID NO: 1499436 - DNA, 25 bp, Homo sapien
tccaccatacttaagctgcccagag

SEQ ID NO: 1499437 - DNA, 25 bp, Homo sapien
cagtccatctataggataataccca

SEQ ID NO: 1499438 - DNA, 25 bp, Homo sapien
ttttctctgaagtgatcattatccg

SEQ ID NO: 1499439 - DNA, 25 bp, Homo sapien
cctgggatgccttgcaactattgtt

SEQ ID NO: 1499440 - DNA, 25 bp, Homo sapien
gccttgcaactattgttatcttcat

SEQ ID NO: 1499441 - DNA, 25 bp, Homo sapien
tcattatccgagaaactgaatcaat

SEQ ID NO: 1499442 - DNA, 25 bp, Homo sapien
tcggggcactgaatggctcggagca

SEQ ID NO: 1499443 - DNA, 25 bp, Homo sapien
ccaaagggagaaccgaatggctcgg

SEQ ID NO: 1499444 - DNA, 25 bp, Homo sapien
aatggctcggggcactgaatggctc

SEQ ID NO: 1499445 - DNA, 25 bp, Homo sapien
agaaccgaatggctcggggcactga

SEQ ID NO: 1499446 - DNA, 25 bp, Homo sapien
gcagggtcgggcagttgcaacagaa

SEQ ID NO: 1499447 - DNA, 25 bp, Homo sapien
ggccttcattcacaagtcctacggg

SEQ ID NO: 1499448 - DNA, 25 bp, Homo sapien
gaatgacaaatgacatcaatcatgg

SEQ ID NO: 1499449 - DNA, 25 bp, Homo sapien
taaactgcacatgggtcaattccag

SEQ ID NO: 1499450 - DNA, 25 bp, Homo sapien
gaagacccacaagggcaagggccaa

SEQ ID NO: 1499451 - DNA, 25 bp, Homo sapien
aacgagaacagctcgctgctggagg

SEQ ID NO: 1499452 - DNA, 25 bp, Homo sapien
agggcaagggccaacgagaacagct

SEQ ID NO: 1499453 - DNA, 25 bp, Homo sapien
ctgcagcggaagacccacaagggca

SEQ ID NO: 1499454 - DNA, 25 bp, Homo sapien
tgacacgctcagtgattgctatttg

SEQ ID NO: 1499455 - DNA, 25 bp, Homo sapien
tgtaatgtggtgacacgctcagtga

SEQ ID NO: 1499456 - DNA, 25 bp, Homo sapien
tgcaccttgtaatgtggtgacacgc

SEQ ID NO: 1499457 - DNA, 25 bp, Homo sapien
cctgccagtttgcaccttgtaatgt

SEQ ID NO: 1499458 - DNA, 25 bp, Homo sapien
taacaaggtgacaatcttgggttaa

SEQ ID NO: 1499459 - DNA, 25 bp, Homo sapien
gcttttactattgagaataacaagg

SEQ ID NO: 1499460 - DNA, 25 bp, Homo sapien
ggttaacccggccaggtcaatcaca

SEQ ID NO: 1499461 - DNA, 25 bp, Homo sapien
tatgcgttcagtggggtggttttca

SEQ ID NO: 1499462 - DNA, 25 bp, Homo sapien
ctcatcatggataaagtgtataaca

SEQ ID NO: 1499463 - DNA, 25 bp, Homo sapien
tatatataagcacttctgtggccaa

SEQ ID NO: 1499464 - DNA, 25 bp, Homo sapien
cagggtttcacctgctgctacactc

SEQ ID NO: 1499465 - DNA, 25 bp, Homo sapien
acctgctgctacactcatcatggat

SEQ ID NO: 1499466 - DNA, 25 bp, Homo sapien
tctcccacctcagcctcctgagtag

SEQ ID NO: 1499467 - DNA, 25 bp, Homo sapien
ctgggactacaggcacatgccacca

SEQ ID NO: 1499468 - DNA, 25 bp, Homo sapien
gtggtgagatcgtggctcactacaa

SEQ ID NO: 1499469 - DNA, 25 bp, Homo sapien
cctctgcctcccaggttcaagtgat

SEQ ID NO: 1499470 - DNA, 25 bp, Homo sapien
tgagccagcagctgagggttcagca

SEQ ID NO: 1499471 - DNA, 25 bp, Homo sapien
ccaaaactgagccagcagctgaggg

SEQ ID NO: 1499472 - DNA, 25 bp, Homo sapien
gggttcagcactgtcatccaagaga

SEQ ID NO: 1499473 - DNA, 25 bp, Homo sapien
ctgagggttcagcactgtcatccaa

SEQ ID NO: 1499474 - DNA, 25 bp, Homo sapien
caacacccagatgtctccaagactg

SEQ ID NO: 1499475 - DNA, 25 bp, Homo sapien
ctgagaacaagtaagttgccatttt

SEQ ID NO: 1499476 - DNA, 25 bp, Homo sapien
ttctgaactacatttgctctctcaa

SEQ ID NO: 1499477 - DNA, 25 bp, Homo sapien
gacagctggccagtcaaaacaaaag

SEQ ID NO: 1499478 - DNA, 25 bp, Homo sapien
aaacatggagtgtgacgtcttctgc

SEQ ID NO: 1499479 - DNA, 25 bp, Homo sapien
gcggcatcaggaaaacatggagtgt

SEQ ID NO: 1499480 - DNA, 25 bp, Homo sapien
gagtgtgacgtcttctgcagtgtct

SEQ ID NO: 1499481 - DNA, 25 bp, Homo sapien
ctgttaagcggcatcaggaaaacat

SEQ ID NO: 1499482 - DNA, 25 bp, Homo sapien
atcgcaagagggacggcaatgccag

SEQ ID NO: 1499483 - DNA, 25 bp, Homo sapien
caatgccagagctcactttgtaacc

SEQ ID NO: 1499484 - DNA, 25 bp, Homo sapien
taaccatttctgcccgtttccgtga

SEQ ID NO: 1499485 - DNA, 25 bp, Homo sapien
ttctgcccgtttccgtgaccttgat

SEQ ID NO: 1499486 - DNA, 25 bp, Homo sapien
tgggagcttggccatcatctccgct

SEQ ID NO: 1499487 - DNA, 25 bp, Homo sapien
gagcttggccatcatctccgctcca

SEQ ID NO: 1499488 - DNA, 25 bp, Homo sapien
cttggccatcatctccgctccatac

SEQ ID NO: 1499489 - DNA, 25 bp, Homo sapien
gggagcttggccatcatctccgctc

SEQ ID NO: 1499490 - DNA, 25 bp, Homo sapien
caaggcccaacaggagcagcaaggc

SEQ ID NO: 1499491 - DNA, 25 bp, Homo sapien
gagcagcaaggccgcttctaacctg

SEQ ID NO: 1499492 - DNA, 25 bp, Homo sapien
tagaagcactgggttcaaggcccaa

SEQ ID NO: 1499493 - DNA, 25 bp, Homo sapien
cactgggttcaaggcccaacaggag

SEQ ID NO: 1499494 - DNA, 25 bp, Homo sapien
tcaggtcataaaaccccagtgagaa

SEQ ID NO: 1499495 - DNA, 25 bp, Homo sapien
tatcactcaggtcataaaaccccag

SEQ ID NO: 1499496 - DNA, 25 bp, Homo sapien
ggatatcactcaggtcataaaaccc

SEQ ID NO: 1499497 - DNA, 25 bp, Homo sapien
cagcagggatatcactcaggtcata

SEQ ID NO: 1499498 - DNA, 25 bp, Homo sapien
cagggcatagcttttcacagtgaag

SEQ ID NO: 1499499 - DNA, 25 bp, Homo sapien
ttcctgaacgtccacctgaaaagcc

SEQ ID NO: 1499500 - DNA, 25 bp, Homo sapien
tgttcacagccaactcgcctgagtt

SEQ ID NO: 1499501 - DNA, 25 bp, Homo sapien
acagtgaagcaatgggccagccagc

SEQ ID NO: 1499502 - DNA, 25 bp, Homo sapien
agccacggctctcccgtagcagaga

SEQ ID NO: 1499503 - DNA, 25 bp, Homo sapien
gcatttacactcagagccacggctc

SEQ ID NO: 1499504 - DNA, 25 bp, Homo sapien
ggtggcaagcatttacactcagagc

SEQ ID NO: 1499505 - DNA, 25 bp, Homo sapien
cgtagcagagaacgggtccctgagc

SEQ ID NO: 1499506 - DNA, 25 bp, Homo sapien
gccagattcacacttctcagtattt

SEQ ID NO: 1499507 - DNA, 25 bp, Homo sapien
ctcaatgccagattcacacttctca

SEQ ID NO: 1499508 - DNA, 25 bp, Homo sapien
cccttaaactgaccctcaatgccag

SEQ ID NO: 1499509 - DNA, 25 bp, Homo sapien
caatttccaacacacccttaaactg

SEQ ID NO: 1499510 - DNA, 25 bp, Homo sapien
aacaccactgcacttagatcagcca

SEQ ID NO: 1499511 - DNA, 25 bp, Homo sapien
catatacggtttcccatcctaaagg

SEQ ID NO: 1499512 - DNA, 25 bp, Homo sapien
cacaatcggcaaaggtcaatggctt

SEQ ID NO: 1499513 - DNA, 25 bp, Homo sapien
aagttcgtccccaacacaatcggca

SEQ ID NO: 1499514 - DNA, 25 bp, Homo sapien
ctccaatttgtttatcatatacggt

SEQ ID NO: 1499515 - DNA, 25 bp, Homo sapien
cgacttccttgtctcctcccaccat

SEQ ID NO: 1499516 - DNA, 25 bp, Homo sapien
ccgctgctgcttaatctggtagatt

SEQ ID NO: 1499517 - DNA, 25 bp, Homo sapien
tctcttggatcctcaatctgggtaa

SEQ ID NO: 1499518 - DNA, 25 bp, Homo sapien
tctcgcctccactgttctcttggat

SEQ ID NO: 1499519 - DNA, 25 bp, Homo sapien
tttgtgcagctgctggtattcctcc

SEQ ID NO: 1499520 - DNA, 25 bp, Homo sapien
tttaacaggagataagtcaactcac

SEQ ID NO: 1499521 - DNA, 25 bp, Homo sapien
tccttccctgtactgcgtactaaag

SEQ ID NO: 1499522 - DNA, 25 bp, Homo sapien
tgtactgcgtactaaagcctacagc

SEQ ID NO: 1499523 - DNA, 25 bp, Homo sapien
tccctgtactgcgtactaaagccta

SEQ ID NO: 1499524 - DNA, 25 bp, Homo sapien
ctgcgtactaaagcctacagcccaa

SEQ ID NO: 1499525 - DNA, 25 bp, Homo sapien
tgacttgcaacacagaataaagcta

SEQ ID NO: 1499526 - DNA, 25 bp, Homo sapien
gacttgcaacacagaataaagctat

SEQ ID NO: 1499527 - DNA, 25 bp, Homo sapien
tagattccgttcagagttggctttt

SEQ ID NO: 1499528 - DNA, 25 bp, Homo sapien
gataaaacacttggatcaactccta

SEQ ID NO: 1499529 - DNA, 25 bp, Homo sapien
gggacagcagcaagttgataaaaca

SEQ ID NO: 1499530 - DNA, 25 bp, Homo sapien
tagggacagcagcaagttgataaaa

SEQ ID NO: 1499531 - DNA, 25 bp, Homo sapien
ggtgtgggtcatactttgtatttgt

SEQ ID NO: 1499532 - DNA, 25 bp, Homo sapien
ctatcccgacgacttgctatttctg

SEQ ID NO: 1499533 - DNA, 25 bp, Homo sapien
ttctgctttaatttggtgtgggtca

SEQ ID NO: 1499534 - DNA, 25 bp, Homo sapien
cctatcccgacgacttgctatttct

SEQ ID NO: 1499535 - DNA, 25 bp, Homo sapien
gtcagctctcgttttaatctggaaa

SEQ ID NO: 1499536 - DNA, 25 bp, Homo sapien
ggtcagctctcgttttaatctggaa

SEQ ID NO: 1499537 - DNA, 25 bp, Homo sapien
gggtcagctctcgttttaatctgga

SEQ ID NO: 1499538 - DNA, 25 bp, Homo sapien
tttctttgtactgcagttcctgctt

SEQ ID NO: 1499539 - DNA, 25 bp, Homo sapien
gtcagtaacagtaaccacacagagt

SEQ ID NO: 1499540 - DNA, 25 bp, Homo sapien
aattgtttcgggctgggcatgtacc

SEQ ID NO: 1499541 - DNA, 25 bp, Homo sapien
gatgaaagacggcaacatggtgccc

SEQ ID NO: 1499542 - DNA, 25 bp, Homo sapien
gaagctgtgctaatactaactaggg

SEQ ID NO: 1499543 - DNA, 25 bp, Homo sapien
ccattaaacaacagctctgggcagc

SEQ ID NO: 1499544 - DNA, 25 bp, Homo sapien
caaactcctagtgaggtgctctgga

SEQ ID NO: 1499545 - DNA, 25 bp, Homo sapien
tattttaagagtggcacgggtgcct

SEQ ID NO: 1499546 - DNA, 25 bp, Homo sapien
tgcacagtaacaacgcagcgtcaga

SEQ ID NO: 1499547 - DNA, 25 bp, Homo sapien
gccgtggtggtggaagctgtgagaa

SEQ ID NO: 1499548 - DNA, 25 bp, Homo sapien
tgcttggcccagagccgtggtggtg

SEQ ID NO: 1499549 - DNA, 25 bp, Homo sapien
cagaggccgggtgtagaaacagcac

SEQ ID NO: 1499550 - DNA, 25 bp, Homo sapien
ctgtgagaaggatcagaggccgggt

SEQ ID NO: 1499551 - DNA, 25 bp, Homo sapien
caaggagagcactagctgtggaaga

SEQ ID NO: 1499552 - DNA, 25 bp, Homo sapien
gtacccacggtaaaggcaggacatc

SEQ ID NO: 1499553 - DNA, 25 bp, Homo sapien
gccacagaaggaccacaaggagagc

SEQ ID NO: 1499554 - DNA, 25 bp, Homo sapien
cagcctatgtagagtctggcttgtg

SEQ ID NO: 1499555 - DNA, 25 bp, Homo sapien
gcttctttcaggttccgagtctccc

SEQ ID NO: 1499556 - DNA, 25 bp, Homo sapien
gagtctcccagttcacaggttctgg

SEQ ID NO: 1499557 - DNA, 25 bp, Homo sapien
tgagaaattttggtccagagtggaa

SEQ ID NO: 1499558 - DNA, 25 bp, Homo sapien
catgggaagccctaaggctaaggaa

SEQ ID NO: 1499559 - DNA, 25 bp, Homo sapien
ttatctccaggttagtggtcaaaat

SEQ ID NO: 1499560 - DNA, 25 bp, Homo sapien
acatgttttgtttatctccaggtta

SEQ ID NO: 1499561 - DNA, 25 bp, Homo sapien
tgttttgtttatctccaggttagtg

SEQ ID NO: 1499562 - DNA, 25 bp, Homo sapien
tgtttatctccaggttagtggtcaa

SEQ ID NO: 1499563 - DNA, 25 bp, Homo sapien
gtcgatacaacaccctttgctcagg

SEQ ID NO: 1499564 - DNA, 25 bp, Homo sapien
cacgtcctccgctaatgattgcgca

SEQ ID NO: 1499565 - DNA, 25 bp, Homo sapien
caggtgaagacgtccgagacaggat

SEQ ID NO: 1499566 - DNA, 25 bp, Homo sapien
tgattgcgcaacaagattgcttgct

SEQ ID NO: 1499567 - DNA, 25 bp, Homo sapien
tccagtttgtagctggtgtgagtac

SEQ ID NO: 1499568 - DNA, 25 bp, Homo sapien
tctccttctcgcctgtgcaaatggc

SEQ ID NO: 1499569 - DNA, 25 bp, Homo sapien
tggccttcttgatggtccggagctc

SEQ ID NO: 1499570 - DNA, 25 bp, Homo sapien
tcactcatgatagcctgcgcctcat

SEQ ID NO: 1499571 - DNA, 25 bp, Homo sapien
caggcacgcctacatggtgagggaa

SEQ ID NO: 1499572 - DNA, 25 bp, Homo sapien
gagtcggtaacggagcagctgttct

SEQ ID NO: 1499573 - DNA, 25 bp, Homo sapien
gggaagtccactagagagtcggtaa

SEQ ID NO: 1499574 - DNA, 25 bp, Homo sapien
gatgatatcagtctgggagccggca

SEQ ID NO: 1499575 - DNA, 25 bp, Homo sapien
gccaattaagtctgactcggtctac

SEQ ID NO: 1499576 - DNA, 25 bp, Homo sapien
tctgactcggtctacaagtcttgtt

SEQ ID NO: 1499577 - DNA, 25 bp, Homo sapien
tcatattgccaattaagtctgactc

SEQ ID NO: 1499578 - DNA, 25 bp, Homo sapien
ttaagtctgactcggtctacaagtc

SEQ ID NO: 1499579 - DNA, 25 bp, Homo sapien
gtattctatcaaacgctgttctccg

SEQ ID NO: 1499580 - DNA, 25 bp, Homo sapien
gctgttctccgatgagacgtgacca

SEQ ID NO: 1499581 - DNA, 25 bp, Homo sapien
cacacacaggaactatgccacgctt

SEQ ID NO: 1499582 - DNA, 25 bp, Homo sapien
ttaagctacacgtaaatgaagatcc

SEQ ID NO: 1499583 - DNA, 25 bp, Homo sapien
tatgccatgcgagggttcggaagcc

SEQ ID NO: 1499584 - DNA, 25 bp, Homo sapien
gcctctcagctttgtgcatgtcaga

SEQ ID NO: 1499585 - DNA, 25 bp, Homo sapien
gggttcggaagcctctcagctttgt

SEQ ID NO: 1499586 - DNA, 25 bp, Homo sapien
ctatgccatgcgagggttcggaagc

SEQ ID NO: 1499587 - DNA, 25 bp, Homo sapien
caggcctttgattggacttcctcag

SEQ ID NO: 1499588 - DNA, 25 bp, Homo sapien
taagtgtcttctcaggtgtacttcc

SEQ ID NO: 1499589 - DNA, 25 bp, Homo sapien
actgggcccgtggacataagtgtct

SEQ ID NO: 1499590 - DNA, 25 bp, Homo sapien
tgacttcatctctatgccatctggg

SEQ ID NO: 1499591 - DNA, 25 bp, Homo sapien
tctgttacaacccaggcaccattaa

SEQ ID NO: 1499592 - DNA, 25 bp, Homo sapien
aaaccatgcatttatgccgcagaaa

SEQ ID NO: 1499593 - DNA, 25 bp, Homo sapien
cccgtgtcctgatagtgaagaaagc

SEQ ID NO: 1499594 - DNA, 25 bp, Homo sapien
gccgcagaaactatttagactctca

SEQ ID NO: 1499595 - DNA, 25 bp, Homo sapien
cagtgaaattaaatacatggaagta

SEQ ID NO: 1499596 - DNA, 25 bp, Homo sapien
aaatacatggaagtaaagcaaggtc

SEQ ID NO: 1499597 - DNA, 25 bp, Homo sapien
aattaaatacatggaagtaaagcaa

SEQ ID NO: 1499598 - DNA, 25 bp, Homo sapien
ttaaatacatggaagtaaagcaagg

SEQ ID NO: 1499599 - DNA, 25 bp, Homo sapien
ggagcctcgctcctgtgagtgctgt

SEQ ID NO: 1499600 - DNA, 25 bp, Homo sapien
caaacagctgatccactggttggag

SEQ ID NO: 1499601 - DNA, 25 bp, Homo sapien
gcctcgctcctgtgagtgctgttgt

SEQ ID NO: 1499602 - DNA, 25 bp, Homo sapien
tctacatccacgccaaacagctgat

SEQ ID NO: 1499603 - DNA, 25 bp, Homo sapien
aagaaacagacttcctgcctaaggc

SEQ ID NO: 1499604 - DNA, 25 bp, Homo sapien
tgcctaaggctaaacacagatgtac

SEQ ID NO: 1499605 - DNA, 25 bp, Homo sapien
gacttcctgcctaaggctaaacaca

SEQ ID NO: 1499606 - DNA, 25 bp, Homo sapien
acagatgtactgagtttcaatgcac

SEQ ID NO: 1499607 - DNA, 25 bp, Homo sapien
cagacaagacggctttgcctttaaa

SEQ ID NO: 1499608 - DNA, 25 bp, Homo sapien
gattgttcttatgtccccatgagac

SEQ ID NO: 1499609 - DNA, 25 bp, Homo sapien
cccatgagacagacaagacggcttt

SEQ ID NO: 1499610 - DNA, 25 bp, Homo sapien
tatgacttgtctaccttgccgtggg

SEQ ID NO: 1499611 - DNA, 25 bp, Homo sapien
tgatctgggtggatgcaaagcgcaa

SEQ ID NO: 1499612 - DNA, 25 bp, Homo sapien
caagtgggcactcgacaaaagctga

SEQ ID NO: 1499613 - DNA, 25 bp, Homo sapien
caaagcgcaacaatcctcaaggtgg

SEQ ID NO: 1499614 - DNA, 25 bp, Homo sapien
gagcccctggccatacatgaattca

SEQ ID NO: 1499615 - DNA, 25 bp, Homo sapien
caggactcattgtcaagccgggcca

SEQ ID NO: 1499616 - DNA, 25 bp, Homo sapien
tgcttggccaggactcattgtcaag

SEQ ID NO: 1499617 - DNA, 25 bp, Homo sapien
tgtgcaatgatgagctgaagctcct

SEQ ID NO: 1499618 - DNA, 25 bp, Homo sapien
actcattgtcaagccgggccagctg

SEQ ID NO: 1499619 - DNA, 25 bp, Homo sapien
cggaggtggcccgtgcacgccgcag

SEQ ID NO: 1499620 - DNA, 25 bp, Homo sapien
tccgtggcgccctgtgcggaggtgg

SEQ ID NO: 1499621 - DNA, 25 bp, Homo sapien
gtggcgccctgtgcggaggtggccc

SEQ ID NO: 1499622 - DNA, 25 bp, Homo sapien
gccctgtgcggaggtggcccgtgca

SEQ ID NO: 1499623 - DNA, 25 bp, Homo sapien
attcttcccccatgcaacagagctg

SEQ ID NO: 1499624 - DNA, 25 bp, Homo sapien
cacgtcaggaacagggaattcttcc

SEQ ID NO: 1499625 - DNA, 25 bp, Homo sapien
gaattcttcccccatgcaacagagc

SEQ ID NO: 1499626 - DNA, 25 bp, Homo sapien
atgcaacagagctgcccgggccgga

SEQ ID NO: 1499627 - DNA, 25 bp, Homo sapien
cctggctagaaatcaaagttggaga

SEQ ID NO: 1499628 - DNA, 25 bp, Homo sapien
aggctctcctggctagaaatcaaag

SEQ ID NO: 1499629 - DNA, 25 bp, Homo sapien
tctcctggctagaaatcaaagttgg

SEQ ID NO: 1499630 - DNA, 25 bp, Homo sapien
gctctcctggctagaaatcaaagtt

SEQ ID NO: 1499631 - DNA, 25 bp, Homo sapien
gcttcttccagctgcataagtagac

SEQ ID NO: 1499632 - DNA, 25 bp, Homo sapien
gctgcataagtagacaattcctttt

SEQ ID NO: 1499633 - DNA, 25 bp, Homo sapien
tgttaagcgggtggcttcttccagc

SEQ ID NO: 1499634 - DNA, 25 bp, Homo sapien
gactggaggtaggatgttaagcggg

SEQ ID NO: 1499635 - DNA, 25 bp, Homo sapien
aggccgtagatgtccgtgaagctga

SEQ ID NO: 1499636 - DNA, 25 bp, Homo sapien
ccgtgaagctgaccgagctcaggga

SEQ ID NO: 1499637 - DNA, 25 bp, Homo sapien
gcttctcgtactgcgggaggccgta

SEQ ID NO: 1499638 - DNA, 25 bp, Homo sapien
agagacccacggctggaggctaggg

SEQ ID NO: 1499639 - DNA, 25 bp, Homo sapien
gcatctcgccccagagagtcgaagg

SEQ ID NO: 1499640 - DNA, 25 bp, Homo sapien
gagtcgaagggaatgaggtcgaagc

SEQ ID NO: 1499641 - DNA, 25 bp, Homo sapien
tctgaaaagggagcatctcgcccca

SEQ ID NO: 1499642 - DNA, 25 bp, Homo sapien
tcgccccagagagtcgaagggaatg

SEQ ID NO: 1499643 - DNA, 25 bp, Homo sapien
tccagggaccgcctctgcttgtgga

SEQ ID NO: 1499644 - DNA, 25 bp, Homo sapien
atagccgaggcgtgtgcccgcagtc

SEQ ID NO: 1499645 - DNA, 25 bp, Homo sapien
ctgaagggccgccatgcctggtaag

SEQ ID NO: 1499646 - DNA, 25 bp, Homo sapien
cgcagtctgtctagggcgcccaggc

SEQ ID NO: 1499647 - DNA, 25 bp, Homo sapien
tggaccccacagtttccgccctgca

SEQ ID NO: 1499648 - DNA, 25 bp, Homo sapien
tgcaggtaaccctcgccccgcagga

SEQ ID NO: 1499649 - DNA, 25 bp, Homo sapien
ctgcaggtaaccctcgccccgcagg

SEQ ID NO: 1499650 - DNA, 25 bp, Homo sapien
caatattcctaaacgtaaagctcac

SEQ ID NO: 1499651 - DNA, 25 bp, Homo sapien
acatcaatattcctaaacgtaaagc

SEQ ID NO: 1499652 - DNA, 25 bp, Homo sapien
tgtgctcttcccgatcacatcaata

SEQ ID NO: 1499653 - DNA, 25 bp, Homo sapien
tttcaatgatctttccccaacacag

SEQ ID NO: 1499654 - DNA, 25 bp, Homo sapien
ctgaaagaccccagctccgaggagg

SEQ ID NO: 1499655 - DNA, 25 bp, Homo sapien
tgaaagaccccagctccgaggagga

SEQ ID NO: 1499656 - DNA, 25 bp, Homo sapien
gaaagaccccagctccgaggaggag

SEQ ID NO: 1499657 - DNA, 25 bp, Homo sapien
tagcagtttggtcttccaagcaggc

SEQ ID NO: 1499658 - DNA, 25 bp, Homo sapien
ggaacgggagaccttgttcttgatc

SEQ ID NO: 1499659 - DNA, 25 bp, Homo sapien
gaagataaagttgccatgggtggct

SEQ ID NO: 1499660 - DNA, 25 bp, Homo sapien
caattaaatgggctgaacttcagga

SEQ ID NO: 1499661 - DNA, 25 bp, Homo sapien
tcccagccttgacacgcgtggtccc

SEQ ID NO: 1499662 - DNA, 25 bp, Homo sapien
agccttgacacgcgtggtccccaga

SEQ ID NO: 1499663 - DNA, 25 bp, Homo sapien
ccttgacacgcgtggtccccagact

SEQ ID NO: 1499664 - DNA, 25 bp, Homo sapien
tgacacgcgtggtccccagactcag

SEQ ID NO: 1499665 - DNA, 25 bp, Homo sapien
tcacaaggttaagtggaggccgagt

SEQ ID NO: 1499666 - DNA, 25 bp, Homo sapien
taccacatctggagaattcgctgct

SEQ ID NO: 1499667 - DNA, 25 bp, Homo sapien
caaacatgttcaacagcacgcagaa

SEQ ID NO: 1499668 - DNA, 25 bp, Homo sapien
gaatcttccaaaggtctgccatacc

SEQ ID NO: 1499669 - DNA, 25 bp, Homo sapien
tgtgccttcctaaactgagtccact

SEQ ID NO: 1499670 - DNA, 25 bp, Homo sapien
ctttgtgccttcctaaactgagtcc

SEQ ID NO: 1499671 - DNA, 25 bp, Homo sapien
cctaaactgagtccactggtgacca

SEQ ID NO: 1499672 - DNA, 25 bp, Homo sapien
cttcctaaactgagtccactggtga

SEQ ID NO: 1499673 - DNA, 25 bp, Homo sapien
cccgcttccatctccgcacttttct

SEQ ID NO: 1499674 - DNA, 25 bp, Homo sapien
tctttggctaagttctagaaacgga

SEQ ID NO: 1499675 - DNA, 25 bp, Homo sapien
cgcttccatctccgcacttttcttt

SEQ ID NO: 1499676 - DNA, 25 bp, Homo sapien
ccgcttccatctccgcacttttctt

SEQ ID NO: 1499677 - DNA, 25 bp, Homo sapien
gaacacggaatcaaattggaagccc

SEQ ID NO: 1499678 - DNA, 25 bp, Homo sapien
tcggctggaacacggaatcaaattg

SEQ ID NO: 1499679 - DNA, 25 bp, Homo sapien
tggaacacggaatcaaattggaagc

SEQ ID NO: 1499680 - DNA, 25 bp, Homo sapien
ggctggaacacggaatcaaattgga

SEQ ID NO: 1499681 - DNA, 25 bp, Homo sapien
cactgtcgctggctagcgaataatc

SEQ ID NO: 1499682 - DNA, 25 bp, Homo sapien
ggcactgtcttctcgaagagtcact

SEQ ID NO: 1499683 - DNA, 25 bp, Homo sapien
taatccgacagacatgcggagatgc

SEQ ID NO: 1499684 - DNA, 25 bp, Homo sapien
tagaggttcaaacaccccactgtcg

SEQ ID NO: 1499685 - DNA, 25 bp, Homo sapien
ttactggccgtgtctccgtaggcag

SEQ ID NO: 1499686 - DNA, 25 bp, Homo sapien
gatctggggatctccgttactggcc

SEQ ID NO: 1499687 - DNA, 25 bp, Homo sapien
atctccgttactggccgtgtctccg

SEQ ID NO: 1499688 - DNA, 25 bp, Homo sapien
tctccgtaggcaggctcctcggcat

SEQ ID NO: 1499689 - DNA, 25 bp, Homo sapien
agccccgccgggttcttcagctgca

SEQ ID NO: 1499690 - DNA, 25 bp, Homo sapien
gcacgtgcacgaggagacactcgct

SEQ ID NO: 1499691 - DNA, 25 bp, Homo sapien
gtgcacgaggagacactcgctgcca

SEQ ID NO: 1499692 - DNA, 25 bp, Homo sapien
ggagacactcgctgccactgtcgcg

SEQ ID NO: 1499693 - DNA, 25 bp, Homo sapien
taagtgttgggcgtgcccgagtcca

SEQ ID NO: 1499694 - DNA, 25 bp, Homo sapien
tgacttcagtgtcaacgcgctggaa

SEQ ID NO: 1499695 - DNA, 25 bp, Homo sapien
tgaacacttcgttaaacaccagcgg

SEQ ID NO: 1499696 - DNA, 25 bp, Homo sapien
gctgcggagtcactgaacacacgta

SEQ ID NO: 1499697 - DNA, 25 bp, Homo sapien
tggtgaacacctgcacggaatgcca

SEQ ID NO: 1499698 - DNA, 25 bp, Homo sapien
ccttgatggttcagagctggtgaac

SEQ ID NO: 1499699 - DNA, 25 bp, Homo sapien
agcgcagctgcatctcactcaaact

SEQ ID NO: 1499700 - DNA, 25 bp, Homo sapien
atagtcagccaggttaatctgagca

SEQ ID NO: 1499701 - DNA, 25 bp, Homo sapien
ctggccaggagcaccgtcaccgcat

SEQ ID NO: 1499702 - DNA, 25 bp, Homo sapien
tggccaggagcaccgtcaccgcatc

SEQ ID NO: 1499703 - DNA, 25 bp, Homo sapien
tctggccaggagcaccgtcaccgca

SEQ ID NO: 1499704 - DNA, 25 bp, Homo sapien
ttcacgtgaagcagaaagggacgcc

SEQ ID NO: 1499705 - DNA, 25 bp, Homo sapien
gacgccgcatgaccccatttgtagg

SEQ ID NO: 1499706 - DNA, 25 bp, Homo sapien
tgaaggcggacattgcagaagccca

SEQ ID NO: 1499707 - DNA, 25 bp, Homo sapien
gaagccctggaaagatggcgcactt

SEQ ID NO: 1499708 - DNA, 25 bp, Homo sapien
acagggctctgggtacggagggctg

SEQ ID NO: 1499709 - DNA, 25 bp, Homo sapien
ggagtcgatacccatgcaacagggc

SEQ ID NO: 1499710 - DNA, 25 bp, Homo sapien
ttgctacagccgctatccaccgagt

SEQ ID NO: 1499711 - DNA, 25 bp, Homo sapien
aagaggcgagggctgaaatttctcg

SEQ ID NO: 1499712 - DNA, 25 bp, Homo sapien
cctggtacgtatggcaaaatatttg

SEQ ID NO: 1499713 - DNA, 25 bp, Homo sapien
caacacccgggccactgcgtgtgtg

SEQ ID NO: 1499714 - DNA, 25 bp, Homo sapien
tccttccagggcagtatacctggta

SEQ ID NO: 1499715 - DNA, 25 bp, Homo sapien
gcagtgcccattttacaccacaaca

SEQ ID NO: 1499716 - DNA, 25 bp, Homo sapien
gagcctctttgtccctgaaggtggg

SEQ ID NO: 1499717 - DNA, 25 bp, Homo sapien
tgctgaagaactaacaactgtggga

SEQ ID NO: 1499718 - DNA, 25 bp, Homo sapien
gatcagcggtgcctattcaagccct

SEQ ID NO: 1499719 - DNA, 25 bp, Homo sapien
gaaagttggacaagggccatgacca

SEQ ID NO: 1499720 - DNA, 25 bp, Homo sapien
gagatcttccgtgttggtttcctta

SEQ ID NO: 1499721 - DNA, 25 bp, Homo sapien
tgggccgctccttcacgaggctggc

SEQ ID NO: 1499722 - DNA, 25 bp, Homo sapien
tcttccagaaagagatcttccgtgt

SEQ ID NO: 1499723 - DNA, 25 bp, Homo sapien
tccttcacgaggctggctgcttctt

SEQ ID NO: 1499724 - DNA, 25 bp, Homo sapien
tcgtgccactccgaacaaaaggcga

SEQ ID NO: 1499725 - DNA, 25 bp, Homo sapien
acatactggcttcgtgctccaggcg

SEQ ID NO: 1499726 - DNA, 25 bp, Homo sapien
gcgagaatgtctgggaacggacaat

SEQ ID NO: 1499727 - DNA, 25 bp, Homo sapien
tctgggaacggacaatcgtgccact

SEQ ID NO: 1499728 - DNA, 25 bp, Homo sapien
taagtgcagctgttacgcaggcaca

SEQ ID NO: 1499729 - DNA, 25 bp, Homo sapien
gaacagcgaagcatccagaagcatc

SEQ ID NO: 1499730 - DNA, 25 bp, Homo sapien
cagaagcatcgccagtaagtgcagc

SEQ ID NO: 1499731 - DNA, 25 bp, Homo sapien
tctgagtaagcaaaacactacctgc

SEQ ID NO: 1499732 - DNA, 25 bp, Homo sapien
ctgcttatagcgaagggttcgtctt

SEQ ID NO: 1499733 - DNA, 25 bp, Homo sapien
acttccggggcagcgttgaactgtc

SEQ ID NO: 1499734 - DNA, 25 bp, Homo sapien
tcgtctttccaaagtatttcggaca

SEQ ID NO: 1499735 - DNA, 25 bp, Homo sapien
gggcagcgttgaactgtcgctgtca

SEQ ID NO: 1499736 - DNA, 25 bp, Homo sapien
cgcagctcacggagggcgcagagct

SEQ ID NO: 1499737 - DNA, 25 bp, Homo sapien
tgttctcgacgcctggagatccagc

SEQ ID NO: 1499738 - DNA, 25 bp, Homo sapien
tccaagtccagggaggtgcgggcca

SEQ ID NO: 1499739 - DNA, 25 bp, Homo sapien
cccagggtgggaggtcagtctggcc

SEQ ID NO: 1499740 - DNA, 25 bp, Homo sapien
tgacaggagggagtaaggcccacct

SEQ ID NO: 1499741 - DNA, 25 bp, Homo sapien
gaatgagtaagttcactgccaaccc

SEQ ID NO: 1499742 - DNA, 25 bp, Homo sapien
tggctggagtcaggcctagcgactg

SEQ ID NO: 1499743 - DNA, 25 bp, Homo sapien
gcccagaagaaccaaccacagtcag

SEQ ID NO: 1499744 - DNA, 25 bp, Homo sapien
gcctgctcatgacggtagtcaagtt

SEQ ID NO: 1499745 - DNA, 25 bp, Homo sapien
agccgcctgctcatgacggtagtca

SEQ ID NO: 1499746 - DNA, 25 bp, Homo sapien
tcatgacggtagtcaagtttggtct

SEQ ID NO: 1499747 - DNA, 25 bp, Homo sapien
tcagccgcctgctcatgacggtagt

SEQ ID NO: 1499748 - DNA, 25 bp, Homo sapien
cagctggtagatctccttggaggcc

SEQ ID NO: 1499749 - DNA, 25 bp, Homo sapien
tgcccacgcagctggtagatctcct

SEQ ID NO: 1499750 - DNA, 25 bp, Homo sapien
tctgcccacgcagctggtagatctc

SEQ ID NO: 1499751 - DNA, 25 bp, Homo sapien
cacgcagctggtagatctccttgga

SEQ ID NO: 1499752 - DNA, 25 bp, Homo sapien
gccgaggggccggccttgccacgcc

SEQ ID NO: 1499753 - DNA, 25 bp, Homo sapien
catgccaaaggcacgacagtaagga

SEQ ID NO: 1499754 - DNA, 25 bp, Homo sapien
ccaaaggcacgacagtaaggaggaa

SEQ ID NO: 1499755 - DNA, 25 bp, Homo sapien
tgccaaaggcacgacagtaaggagg

SEQ ID NO: 1499756 - DNA, 25 bp, Homo sapien
gggcactgataatgaccgattctta

SEQ ID NO: 1499757 - DNA, 25 bp, Homo sapien
cctgcagatacattttgccttaatc

SEQ ID NO: 1499758 - DNA, 25 bp, Homo sapien
tcttaggacgagtttgtaacaattc

SEQ ID NO: 1499759 - DNA, 25 bp, Homo sapien
tcactggaccatgtgtgtatgatac

SEQ ID NO: 1499760 - DNA, 25 bp, Homo sapien
atttaagtccccaacaacacatgtg

SEQ ID NO: 1499761 - DNA, 25 bp, Homo sapien
aagctggtggctctcatatcaatca

SEQ ID NO: 1499762 - DNA, 25 bp, Homo sapien
cacatgtgcttgtatagagtctcca

SEQ ID NO: 1499763 - DNA, 25 bp, Homo sapien
aattatgaagaaccgtaagagcagg

SEQ ID NO: 1499764 - DNA, 25 bp, Homo sapien
ccttgtgaagaatgctatcttctcc

SEQ ID NO: 1499765 - DNA, 25 bp, Homo sapien
agaggaggtatgttgatccttggcc

SEQ ID NO: 1499766 - DNA, 25 bp, Homo sapien
tccttggccttgtgaagaatgctat

SEQ ID NO: 1499767 - DNA, 25 bp, Homo sapien
tcagacgtcgtcggctgggagagga

SEQ ID NO: 1499768 - DNA, 25 bp, Homo sapien
tgacaaatttagcacatagcgttcg

SEQ ID NO: 1499769 - DNA, 25 bp, Homo sapien
agcgttcgcatttcaggtgtcaaaa

SEQ ID NO: 1499770 - DNA, 25 bp, Homo sapien
gccctgttgccgtcactattataaa

SEQ ID NO: 1499771 - DNA, 25 bp, Homo sapien
cagagatgtcgatttcacaacaagg

SEQ ID NO: 1499772 - DNA, 25 bp, Homo sapien
acacacacatgcttccgagtcacga

SEQ ID NO: 1499773 - DNA, 25 bp, Homo sapien
cacacacatgcttccgagtcacgat

SEQ ID NO: 1499774 - DNA, 25 bp, Homo sapien
catgcttccgagtcacgattgaacc

SEQ ID NO: 1499775 - DNA, 25 bp, Homo sapien
acacatgcttccgagtcacgattga

SEQ ID NO: 1499776 - DNA, 25 bp, Homo sapien
agcggttggcgtgcggcccacgcca

SEQ ID NO: 1499777 - DNA, 25 bp, Homo sapien
ttccaaaggcaacacagaaatgagc

SEQ ID NO: 1499778 - DNA, 25 bp, Homo sapien
cagaaagatgcttccaaaggcaaca

SEQ ID NO: 1499779 - DNA, 25 bp, Homo sapien
acacagaaatgagcggttggcgtgc

SEQ ID NO: 1499780 - DNA, 25 bp, Homo sapien
aggccctggcgcctgcttcagactc

SEQ ID NO: 1499781 - DNA, 25 bp, Homo sapien
gccctggcgcctgcttcagactcac

SEQ ID NO: 1499782 - DNA, 25 bp, Homo sapien
agaggccctggcgcctgcttcagac

SEQ ID NO: 1499783 - DNA, 25 bp, Homo sapien
accagaggccctggcgcctgcttca

SEQ ID NO: 1499784 - DNA, 25 bp, Homo sapien
acagccaccacaagcaagcaggctg

SEQ ID NO: 1499785 - DNA, 25 bp, Homo sapien
acagacagccaccacaagcaagcag

SEQ ID NO: 1499786 - DNA, 25 bp, Homo sapien
agacagccaccacaagcaagcaggc

SEQ ID NO: 1499787 - DNA, 25 bp, Homo sapien
cacagacagccaccacaagcaagca

SEQ ID NO: 1499788 - DNA, 25 bp, Homo sapien
tgtattcacccacggagtcaacgag

SEQ ID NO: 1499789 - DNA, 25 bp, Homo sapien
cattgtctgtgataggtcgcgtgtc

SEQ ID NO: 1499790 - DNA, 25 bp, Homo sapien
gattcaaagggatacctccaaggga

SEQ ID NO: 1499791 - DNA, 25 bp, Homo sapien
aaaacatttgtctagggcttcctgc

SEQ ID NO: 1499792 - DNA, 25 bp, Homo sapien
ggactgatacggaagcaggcactgc

SEQ ID NO: 1499793 - DNA, 25 bp, Homo sapien
caaaggtaaaggtggcaaacacgag

SEQ ID NO: 1499794 - DNA, 25 bp, Homo sapien
caaacacgagggctccttggactga

SEQ ID NO: 1499795 - DNA, 25 bp, Homo sapien
cgagggctccttggactgatacgga

SEQ ID NO: 1499796 - DNA, 25 bp, Homo sapien
tgaatgacaagcaacatagggcgct

SEQ ID NO: 1499797 - DNA, 25 bp, Homo sapien
gttggcgtggcagtctgaactagtc

SEQ ID NO: 1499798 - DNA, 25 bp, Homo sapien
gaactagtcagaagctccaagacca

SEQ ID NO: 1499799 - DNA, 25 bp, Homo sapien
tgcacctgcagagaactgcgcggct

SEQ ID NO: 1499800 - DNA, 25 bp, Homo sapien
tgtttttatcgcgaggcctggtaga

SEQ ID NO: 1499801 - DNA, 25 bp, Homo sapien
cagtgattagatgaagtgaaagcca

SEQ ID NO: 1499802 - DNA, 25 bp, Homo sapien
ggttttgagaccagaactgcttcta

SEQ ID NO: 1499803 - DNA, 25 bp, Homo sapien
aagccaaattcccttttacatgtgg

SEQ ID NO: 1499804 - DNA, 25 bp, Homo sapien
ttctacaattatcaatcaaagcctg

SEQ ID NO: 1499805 - DNA, 25 bp, Homo sapien
gaatactgattataacttattccca

SEQ ID NO: 1499806 - DNA, 25 bp, Homo sapien
caacagaaggctacttatttctaca

SEQ ID NO: 1499807 - DNA, 25 bp, Homo sapien
caaacagtacaaatgacacaattag

SEQ ID NO: 1499808 - DNA, 25 bp, Homo sapien
ctaatggaggcagaaactgacaagc

SEQ ID NO: 1499809 - DNA, 25 bp, Homo sapien
ggaggcagaaactgacaagctcatt

SEQ ID NO: 1499810 - DNA, 25 bp, Homo sapien
taatggaggcagaaactgacaagct

SEQ ID NO: 1499811 - DNA, 25 bp, Homo sapien
cagaaactgacaagctcattttcct

SEQ ID NO: 1499812 - DNA, 25 bp, Homo sapien
gattctgagataaagttaaaacgct

SEQ ID NO: 1499813 - DNA, 25 bp, Homo sapien
taaaacgctaccgaaatctcctgct

SEQ ID NO: 1499814 - DNA, 25 bp, Homo sapien
aaaacgctaccgaaatctcctgctc

SEQ ID NO: 1499815 - DNA, 25 bp, Homo sapien
tgagataaagttaaaacgctaccga

SEQ ID NO: 1499816 - DNA, 25 bp, Homo sapien
ttcgcgaagaattatgaaaaacaac

SEQ ID NO: 1499817 - DNA, 25 bp, Homo sapien
gaattagcaataaagggattacagt

SEQ ID NO: 1499818 - DNA, 25 bp, Homo sapien
caggctccaagcgagtaataggatt

SEQ ID NO: 1499819 - DNA, 25 bp, Homo sapien
attattacaggctccaagcgagtaa

SEQ ID NO: 1499820 - DNA, 25 bp, Homo sapien
tggacagcatcctcgagcatccttt

SEQ ID NO: 1499821 - DNA, 25 bp, Homo sapien
caggcgtttcgcttgatgtgtgcag

SEQ ID NO: 1499822 - DNA, 25 bp, Homo sapien
gtgagggtcgatggccagaaaccct

SEQ ID NO: 1499823 - DNA, 25 bp, Homo sapien
catcctttcttcagcgcgacggctg

SEQ ID NO: 1499824 - DNA, 25 bp, Homo sapien
cctgccacgggccatccccggccgg

SEQ ID NO: 1499825 - DNA, 25 bp, Homo sapien
atccccggccgggtgcatgcagctg

SEQ ID NO: 1499826 - DNA, 25 bp, Homo sapien
acgggccatccccggccgggtgcat

SEQ ID NO: 1499827 - DNA, 25 bp, Homo sapien
ggccatccccggccgggtgcatgca

SEQ ID NO: 1499828 - DNA, 25 bp, Homo sapien
actgcaacccaagacgactgctggt

SEQ ID NO: 1499829 - DNA, 25 bp, Homo sapien
cttgtggattacgagaggtgctggc

SEQ ID NO: 1499830 - DNA, 25 bp, Homo sapien
gctgggagcccctagtctcagaggg

SEQ ID NO: 1499831 - DNA, 25 bp, Homo sapien
ctgctggtccaacaagcctgtatga

SEQ ID NO: 1499832 - DNA, 25 bp, Homo sapien
caaaagggatcctctcaaaagttat

SEQ ID NO: 1499833 - DNA, 25 bp, Homo sapien
tatcacaatatttgcaaccattatg

SEQ ID NO: 1499834 - DNA, 25 bp, Homo sapien
caatatttgcaaccattatggccct

SEQ ID NO: 1499835 - DNA, 25 bp, Homo sapien
ctcaaaagggatcctctcaaaagtt

SEQ ID NO: 1499836 - DNA, 25 bp, Homo sapien
cctcgcagggacaagcaaacctttt

SEQ ID NO: 1499837 - DNA, 25 bp, Homo sapien
ggcacagggaatgaaacagcaccgg

SEQ ID NO: 1499838 - DNA, 25 bp, Homo sapien
tggcaagaccactaaccaagagact

SEQ ID NO: 1499839 - DNA, 25 bp, Homo sapien
gatcctctgggtagtcatctcgcac

SEQ ID NO: 1499840 - DNA, 25 bp, Homo sapien
ctggagctggcatcatccgaaggct

SEQ ID NO: 1499841 - DNA, 25 bp, Homo sapien
tcacccagggtctttcacaaggtct

SEQ ID NO: 1499842 - DNA, 25 bp, Homo sapien
tcaacagctggagactagaacagct

SEQ ID NO: 1499843 - DNA, 25 bp, Homo sapien
tccgaaggcttgttcactcacacat

SEQ ID NO: 1499844 - DNA, 25 bp, Homo sapien
ccggtcgttaaagacatgagcagga

SEQ ID NO: 1499845 - DNA, 25 bp, Homo sapien
ggtcgttaaagacatgagcaggaca

SEQ ID NO: 1499846 - DNA, 25 bp, Homo sapien
aaaccggtcgttaaagacatgagca

SEQ ID NO: 1499847 - DNA, 25 bp, Homo sapien
tcgttaaagacatgagcaggacatg

SEQ ID NO: 1499848 - DNA, 25 bp, Homo sapien
tcaggtttccagagccactcatcgc

SEQ ID NO: 1499849 - DNA, 25 bp, Homo sapien
ggctcatcgaggaaatccatcaggt

SEQ ID NO: 1499850 - DNA, 25 bp, Homo sapien
tggtgtggaagtcctcatacgtccc

SEQ ID NO: 1499851 - DNA, 25 bp, Homo sapien
gacttttcccttagccagtcgatgg

SEQ ID NO: 1499852 - DNA, 25 bp, Homo sapien
gaactcccatatggactccttgctc

SEQ ID NO: 1499853 - DNA, 25 bp, Homo sapien
gatgagcagcatcaccacccatccc

SEQ ID NO: 1499854 - DNA, 25 bp, Homo sapien
tgaactcccatatggactccttgct

SEQ ID NO: 1499855 - DNA, 25 bp, Homo sapien
acccatcccgaccaggcatccagca

SEQ ID NO: 1499856 - DNA, 25 bp, Homo sapien
gctgctgccagtacatgacgggaaa

SEQ ID NO: 1499857 - DNA, 25 bp, Homo sapien
tcccttgtgacaatgaagtctaatt

SEQ ID NO: 1499858 - DNA, 25 bp, Homo sapien
gcagtcaagcaaaattggtcgtcca

SEQ ID NO: 1499859 - DNA, 25 bp, Homo sapien
ttcaaaggcctttatagaagcagtc

SEQ ID NO: 1499860 - DNA, 25 bp, Homo sapien
ccatgaggggagtccgaagacaaca

SEQ ID NO: 1499861 - DNA, 25 bp, Homo sapien
catgaggggagtccgaagacaacag

SEQ ID NO: 1499862 - DNA, 25 bp, Homo sapien
tgaggggagtccgaagacaacagcc

SEQ ID NO: 1499863 - DNA, 25 bp, Homo sapien
gaggggagtccgaagacaacagcca

SEQ ID NO: 1499864 - DNA, 25 bp, Homo sapien
taagtgggcaaggaccctatctgtc

SEQ ID NO: 1499865 - DNA, 25 bp, Homo sapien
tgaacatgtacctactacacggcag

SEQ ID NO: 1499866 - DNA, 25 bp, Homo sapien
ggcagttactcatccatgtcttggg

SEQ ID NO: 1499867 - DNA, 25 bp, Homo sapien
cagcagtgcaaagagtagacccagg

SEQ ID NO: 1499868 - DNA, 25 bp, Homo sapien
gcaacactgctcatggctataccag

SEQ ID NO: 1499869 - DNA, 25 bp, Homo sapien
tcaaaagtggtctcgttagaagtcc

SEQ ID NO: 1499870 - DNA, 25 bp, Homo sapien
tataccagaaggcagacaggcagac

SEQ ID NO: 1499871 - DNA, 25 bp, Homo sapien
ttcaggtccgtcatccagtccacgg

SEQ ID NO: 1499872 - DNA, 25 bp, Homo sapien
aatgcaaacagcagcgcccatagga

SEQ ID NO: 1499873 - DNA, 25 bp, Homo sapien
aatacacgcaccagggagacagcca

SEQ ID NO: 1499874 - DNA, 25 bp, Homo sapien
caggcatatggtgcaaatacacgca

SEQ ID NO: 1499875 - DNA, 25 bp, Homo sapien
ggatgtacattaagtaattcagaat

SEQ ID NO: 1499876 - DNA, 25 bp, Homo sapien
ttagcagggtccacttccccaagta

SEQ ID NO: 1499877 - DNA, 25 bp, Homo sapien
ctaccagcaccagcgtgactgtctt

SEQ ID NO: 1499878 - DNA, 25 bp, Homo sapien
ttcccaaggctcagaccggaggaca

SEQ ID NO: 1499879 - DNA, 25 bp, Homo sapien
aagtagcccctgatgataaagccgc

SEQ ID NO: 1499880 - DNA, 25 bp, Homo sapien
tctagactgaaaagcacgcctccaa

SEQ ID NO: 1499881 - DNA, 25 bp, Homo sapien
tagactgaaaagcacgcctccaatt

SEQ ID NO: 1499882 - DNA, 25 bp, Homo sapien
gactgaaaagcacgcctccaattgg

SEQ ID NO: 1499883 - DNA, 25 bp, Homo sapien
ttctagactgaaaagcacgcctcca

SEQ ID NO: 1499884 - DNA, 25 bp, Homo sapien
ttgcagcggatgaagagggttcccc

SEQ ID NO: 1499885 - DNA, 25 bp, Homo sapien
gattttgaagatcagtgccagggcc

SEQ ID NO: 1499886 - DNA, 25 bp, Homo sapien
tccacataaaagagaacgagacggc

SEQ ID NO: 1499887 - DNA, 25 bp, Homo sapien
tgatggatctcagcgtaaaggccgc

SEQ ID NO: 1499888 - DNA, 25 bp, Homo sapien
tatagaacaagcctgactccctgtg

SEQ ID NO: 1499889 - DNA, 25 bp, Homo sapien
tgttcgctgaaatgacacgtgaccg

SEQ ID NO: 1499890 - DNA, 25 bp, Homo sapien
tgactccctgtgttcgctgaaatga

SEQ ID NO: 1499891 - DNA, 25 bp, Homo sapien
gacacgtgaccgctgaccatgggca

SEQ ID NO: 1499892 - DNA, 25 bp, Homo sapien
cagtcatggtgatggtaggccagct

SEQ ID NO: 1499893 - DNA, 25 bp, Homo sapien
gccgcagctcccaccattgcgtaca

SEQ ID NO: 1499894 - DNA, 25 bp, Homo sapien
gcgtacagccctggcgtgacacagt

SEQ ID NO: 1499895 - DNA, 25 bp, Homo sapien
gtgacacagtctgcaccgggtctgc

SEQ ID NO: 1499896 - DNA, 25 bp, Homo sapien
ggtctccttgatgagcgtctccacg

SEQ ID NO: 1499897 - DNA, 25 bp, Homo sapien
caaatccaatgaggcgctcggagtc

SEQ ID NO: 1499898 - DNA, 25 bp, Homo sapien
ccatttaagtggatgtgggcctcgt

SEQ ID NO: 1499899 - DNA, 25 bp, Homo sapien
ccagtgtgcggtgagtaaactcgtc

SEQ ID NO: 1499900 - DNA, 25 bp, Homo sapien
gaggcttcaaactttgtgggtagag

SEQ ID NO: 1499901 - DNA, 25 bp, Homo sapien
aggaggcttcaaactttgtgggtag

SEQ ID NO: 1499902 - DNA, 25 bp, Homo sapien
cttcaaactttgtgggtagaggtgc

SEQ ID NO: 1499903 - DNA, 25 bp, Homo sapien
gtgggtagaggtgctaagaacaggc

SEQ ID NO: 1499904 - DNA, 25 bp, Homo sapien
gggttcctccgtgaagtacatgatg

SEQ ID NO: 1499905 - DNA, 25 bp, Homo sapien
tctgtcactgtaaacgggctgaggt

SEQ ID NO: 1499906 - DNA, 25 bp, Homo sapien
tgaggttcaggatgcgccgcagctt

SEQ ID NO: 1499907 - DNA, 25 bp, Homo sapien
tgccgaagccccagtttccggaaga

SEQ ID NO: 1499908 - DNA, 25 bp, Homo sapien
gagctcaggctcgtggccatcccga

SEQ ID NO: 1499909 - DNA, 25 bp, Homo sapien
ccatcccgagcagggaaggtacagg

SEQ ID NO: 1499910 - DNA, 25 bp, Homo sapien
tgaaaggccccgcagacaagcatcc

SEQ ID NO: 1499911 - DNA, 25 bp, Homo sapien
ggtgggcgagcacatcaaacatgag

SEQ ID NO: 1499912 - DNA, 25 bp, Homo sapien
gaggcttcctagattgcggcattcc

SEQ ID NO: 1499913 - DNA, 25 bp, Homo sapien
tttatgatgccccttgaaccccagg

SEQ ID NO: 1499914 - DNA, 25 bp, Homo sapien
cggcattccgattcctggtccagtt

SEQ ID NO: 1499915 - DNA, 25 bp, Homo sapien
tcttagcaactggaggcttcctaga

SEQ ID NO: 1499916 - DNA, 25 bp, Homo sapien
ttcctttctagaactttcataggga

SEQ ID NO: 1499917 - DNA, 25 bp, Homo sapien
tcctttctagaactttcatagggaa

SEQ ID NO: 1499918 - DNA, 25 bp, Homo sapien
agaactttcatagggaaaatctcac

SEQ ID NO: 1499919 - DNA, 25 bp, Homo sapien
tctagaactttcatagggaaaatct

SEQ ID NO: 1499920 - DNA, 25 bp, Homo sapien
tacttaaggatgctgccacatatct

SEQ ID NO: 1499921 - DNA, 25 bp, Homo sapien
attccaggaatctggatacttaagg

SEQ ID NO: 1499922 - DNA, 25 bp, Homo sapien
gtctactccccactgtcgttggtcc

SEQ ID NO: 1499923 - DNA, 25 bp, Homo sapien
gaacaggtatcccaaaatgcagcca

SEQ ID NO: 1499924 - DNA, 25 bp, Homo sapien
tggattcggggtcctggtttgccat

SEQ ID NO: 1499925 - DNA, 25 bp, Homo sapien
ttttgtgatgatgccaagaagtctc

SEQ ID NO: 1499926 - DNA, 25 bp, Homo sapien
ttttttgtgatgatgccaagaagtc

SEQ ID NO: 1499927 - DNA, 25 bp, Homo sapien
taaacatgatggattcggggtcctg

SEQ ID NO: 1499928 - DNA, 25 bp, Homo sapien
cacagcagtagcaaactcattagga

SEQ ID NO: 1499929 - DNA, 25 bp, Homo sapien
tgtttctgctgtccccaatgcatga

SEQ ID NO: 1499930 - DNA, 25 bp, Homo sapien
catcagccttgagcagaaggagtaa

SEQ ID NO: 1499931 - DNA, 25 bp, Homo sapien
gaaacacagcttgaaactcatacgg

SEQ ID NO: 1499932 - DNA, 25 bp, Homo sapien
aatgtctttagtatgattcagtaac

SEQ ID NO: 1499933 - DNA, 25 bp, Homo sapien
gtaagcgcaaatgtctttagtatga

SEQ ID NO: 1499934 - DNA, 25 bp, Homo sapien
ctttttcaacaaagtaagcgcaaat

SEQ ID NO: 1499935 - DNA, 25 bp, Homo sapien
tcaacaaagtaagcgcaaatgtctt

SEQ ID NO: 1499936 - DNA, 25 bp, Homo sapien
agcaagaaacaggacggtcgtgagc

SEQ ID NO: 1499937 - DNA, 25 bp, Homo sapien
gaaacaggacggtcgtgagcggacc

SEQ ID NO: 1499938 - DNA, 25 bp, Homo sapien
ggagcaagaaacaggacggtcgtga

SEQ ID NO: 1499939 - DNA, 25 bp, Homo sapien
acaggacggtcgtgagcggacccac

SEQ ID NO: 1499940 - DNA, 25 bp, Homo sapien
gcccctgatgttggttcagaaactg

SEQ ID NO: 1499941 - DNA, 25 bp, Homo sapien
tgatgttggttcagaaactgatgga

SEQ ID NO: 1499942 - DNA, 25 bp, Homo sapien
cccctgatgttggttcagaaactga

SEQ ID NO: 1499943 - DNA, 25 bp, Homo sapien
cctgatgttggttcagaaactgatg

SEQ ID NO: 1499944 - DNA, 25 bp, Homo sapien
tgccagtcttgcatagagaaatgat

SEQ ID NO: 1499945 - DNA, 25 bp, Homo sapien
ggatgccagtcttgcatagagaaat

SEQ ID NO: 1499946 - DNA, 25 bp, Homo sapien
tcatcgtgcagtcccaggatgccag

SEQ ID NO: 1499947 - DNA, 25 bp, Homo sapien
cgcagtactgtatgctccaatagtt

SEQ ID NO: 1499948 - DNA, 25 bp, Homo sapien
cattgggtagcctgtttggactctt

SEQ ID NO: 1499949 - DNA, 25 bp, Homo sapien
caaatcaatgatcgggtgagtatac

SEQ ID NO: 1499950 - DNA, 25 bp, Homo sapien
ggcataccggctatggcccatggaa

SEQ ID NO: 1499951 - DNA, 25 bp, Homo sapien
tgaaagcacgcttatggcaggctgg

SEQ ID NO: 1499952 - DNA, 25 bp, Homo sapien
gcaatccatttggagggattccaac

SEQ ID NO: 1499953 - DNA, 25 bp, Homo sapien
tgacaacgcatatgcctcatcctct

SEQ ID NO: 1499954 - DNA, 25 bp, Homo sapien
atcctctccacagccgtatctgata

SEQ ID NO: 1499955 - DNA, 25 bp, Homo sapien
tctccacagccgtatctgataagac

SEQ ID NO: 1499956 - DNA, 25 bp, Homo sapien
actggatgttttgcatcctacagag

SEQ ID NO: 1499957 - DNA, 25 bp, Homo sapien
tttgcatcctacagagaagataatg

SEQ ID NO: 1499958 - DNA, 25 bp, Homo sapien
gctagtatgaagtgcatgcttatac

SEQ ID NO: 1499959 - DNA, 25 bp, Homo sapien
cctgtgctgtgattgctagtatgaa

SEQ ID NO: 1499960 - DNA, 25 bp, Homo sapien
aaatagttattaccgcgccagtgaa

SEQ ID NO: 1499961 - DNA, 25 bp, Homo sapien
tagcaagaatgaaaaccggaagggc

SEQ ID NO: 1499962 - DNA, 25 bp, Homo sapien
caggaaccatcttgcaactctgagg

SEQ ID NO: 1499963 - DNA, 25 bp, Homo sapien
tatctcatcaaagtcgcacgtaggc

SEQ ID NO: 1499964 - DNA, 25 bp, Homo sapien
ccttcagtggcccaatcactgcagt

SEQ ID NO: 1499965 - DNA, 25 bp, Homo sapien
ggctccttcagtggcccaatcactg

SEQ ID NO: 1499966 - DNA, 25 bp, Homo sapien
tcagtggcccaatcactgcagtcat

SEQ ID NO: 1499967 - DNA, 25 bp, Homo sapien
caggctccttcagtggcccaatcac

SEQ ID NO: 1499968 - DNA, 25 bp, Homo sapien
cagccttgaattatgtatatgttgg

SEQ ID NO: 1499969 - DNA, 25 bp, Homo sapien
atacatgtctgtcccctcactctgg

SEQ ID NO: 1499970 - DNA, 25 bp, Homo sapien
tctgggcgatcagtgcacagccttg

SEQ ID NO: 1499971 - DNA, 25 bp, Homo sapien
ctcactctgggcgatcagtgcacag

SEQ ID NO: 1499972 - DNA, 25 bp, Homo sapien
ttcccatgtctgtctgcgggagccc

SEQ ID NO: 1499973 - DNA, 25 bp, Homo sapien
tctgcccgtcttcccccattggcag

SEQ ID NO: 1499974 - DNA, 25 bp, Homo sapien
tcatcgtttgtactttcccatgtct

SEQ ID NO: 1499975 - DNA, 25 bp, Homo sapien
ccattggcagctggtgctgtgaacg

SEQ ID NO: 1499976 - DNA, 25 bp, Homo sapien
aaacagcatgtgctttgcagttaca

SEQ ID NO: 1499977 - DNA, 25 bp, Homo sapien
catgtgctttgcagttacattctct

SEQ ID NO: 1499978 - DNA, 25 bp, Homo sapien
ggaaacagcatgtgctttgcagtta

SEQ ID NO: 1499979 - DNA, 25 bp, Homo sapien
caaatcagatgctgtgatttccccc

SEQ ID NO: 1499980 - DNA, 25 bp, Homo sapien
aactctgaccttgatttggttacag

SEQ ID NO: 1499981 - DNA, 25 bp, Homo sapien
tggttacagtagtccacaaagctga

SEQ ID NO: 1499982 - DNA, 25 bp, Homo sapien
gaaagcctcagagagtagccaactc

SEQ ID NO: 1499983 - DNA, 25 bp, Homo sapien
ggccgccagcagattcatgacagaa

SEQ ID NO: 1499984 - DNA, 25 bp, Homo sapien
ggtaatagctggcatctgactgcat

SEQ ID NO: 1499985 - DNA, 25 bp, Homo sapien
cacaaatggcctccaatcattggaa

SEQ ID NO: 1499986 - DNA, 25 bp, Homo sapien
gaatgccacctactgggcacaaatg

SEQ ID NO: 1499987 - DNA, 25 bp, Homo sapien
attgcccgcactgggtcacactgca

SEQ ID NO: 1499988 - DNA, 25 bp, Homo sapien
caaaattacgggcatgtcatatagg

SEQ ID NO: 1499989 - DNA, 25 bp, Homo sapien
gaaacctcagcagcaaaatagcagg

SEQ ID NO: 1499990 - DNA, 25 bp, Homo sapien
tctgggcattggcaagaatctggat

SEQ ID NO: 1499991 - DNA, 25 bp, Homo sapien
ggcatgtcatataggcccagaagaa

SEQ ID NO: 1499992 - DNA, 25 bp, Homo sapien
gctggtaggatatcaaaacctgaag

SEQ ID NO: 1499993 - DNA, 25 bp, Homo sapien
tagatttcaagtgccaggtctgcct

SEQ ID NO: 1499994 - DNA, 25 bp, Homo sapien
ggatatcaaaacctgaaggcctaga

SEQ ID NO: 1499995 - DNA, 25 bp, Homo sapien
cagtgctgtacataggccatttttg

SEQ ID NO: 1499996 - DNA, 25 bp, Homo sapien
tcctccatctggtgaaactgccatc

SEQ ID NO: 1499997 - DNA, 25 bp, Homo sapien
gatgacctcctcttaacttcaaagg

SEQ ID NO: 1499998 - DNA, 25 bp, Homo sapien
tgaactccaatgcaagttggccaga

SEQ ID NO: 1499999 - DNA, 25 bp, Homo sapien
tggaagaggcacactagttctacac

SEQ ID NO: 1500000 - DNA, 25 bp, Homo sapien
aggtggcagatgtggtactgcgaaa

SEQ ID NO: 1500001 - DNA, 25 bp, Homo sapien
tggtactgcgaaattcatttgttga

SEQ ID NO: 1500002 - DNA, 25 bp, Homo sapien
cagatgtggtactgcgaaattcatt

SEQ ID NO: 1500003 - DNA, 25 bp, Homo sapien
ggcagatgtggtactgcgaaattca

SEQ ID NO: 1500004 - DNA, 25 bp, Homo sapien
tcatcagaaccaaatatagccccag

SEQ ID NO: 1500005 - DNA, 25 bp, Homo sapien
tctgattatcacttcgggtagcctg

SEQ ID NO: 1500006 - DNA, 25 bp, Homo sapien
tgcctgagaatcctgaactaagaaa

SEQ ID NO: 1500007 - DNA, 25 bp, Homo sapien
acagccatctggttcgcctttggaa

SEQ ID NO: 1500008 - DNA, 25 bp, Homo sapien
tctagttgacgctgactcatgctgc

SEQ ID NO: 1500009 - DNA, 25 bp, Homo sapien
tgcctccatcctctagttgacgctg

SEQ ID NO: 1500010 - DNA, 25 bp, Homo sapien
tgccagctagctccgggagggcatt

SEQ ID NO: 1500011 - DNA, 25 bp, Homo sapien
attgaagccagctaacgggcgcctg

SEQ ID NO: 1500012 - DNA, 25 bp, Homo sapien
ctaccacaccagcagaggttctgga

SEQ ID NO: 1500013 - DNA, 25 bp, Homo sapien
tggatggactccggggagggccctc

SEQ ID NO: 1500014 - DNA, 25 bp, Homo sapien
gctggatggactccggggagggccc

SEQ ID NO: 1500015 - DNA, 25 bp, Homo sapien
gaggttctggaaaagagctctgaga

SEQ ID NO: 1500016 - DNA, 25 bp, Homo sapien
tagagaaaccttgaggaacatgcag

SEQ ID NO: 1500017 - DNA, 25 bp, Homo sapien
agagaaaccttgaggaacatgcagc

SEQ ID NO: 1500018 - DNA, 25 bp, Homo sapien
ctagagaaaccttgaggaacatgca

SEQ ID NO: 1500019 - DNA, 25 bp, Homo sapien
gagaaaccttgaggaacatgcagca

SEQ ID NO: 1500020 - DNA, 25 bp, Homo sapien
cttcacgtgaatcatctcagattcc

SEQ ID NO: 1500021 - DNA, 25 bp, Homo sapien
ctgagaaggggtgtgacttacttgc

SEQ ID NO: 1500022 - DNA, 25 bp, Homo sapien
gaatcatctcagattccacatcttc

SEQ ID NO: 1500023 - DNA, 25 bp, Homo sapien
ttacttgcaaaggtggatggattgg

SEQ ID NO: 1500024 - DNA, 25 bp, Homo sapien
gtgaatatctgagagttctcaacat

SEQ ID NO: 1500025 - DNA, 25 bp, Homo sapien
gaagtgaatatctgagagttctcaa

SEQ ID NO: 1500026 - DNA, 25 bp, Homo sapien
tgaagtgaatatctgagagttctca

SEQ ID NO: 1500027 - DNA, 25 bp, Homo sapien
tgatgaagtgaatatctgagagttc

SEQ ID NO: 1500028 - DNA, 25 bp, Homo sapien
tctattcttgggagagtcgctggag

SEQ ID NO: 1500029 - DNA, 25 bp, Homo sapien
agtaatggatccaacagcacgggcc

SEQ ID NO: 1500030 - DNA, 25 bp, Homo sapien
catcctcaaaaaagtggtgtccagt

SEQ ID NO: 1500031 - DNA, 25 bp, Homo sapien
tactgagcagttcatgtacatcaga

SEQ ID NO: 1500032 - DNA, 25 bp, Homo sapien
agtccagcaataacatctctgtttc

SEQ ID NO: 1500033 - DNA, 25 bp, Homo sapien
cagtccagcaataacatctctgttt

SEQ ID NO: 1500034 - DNA, 25 bp, Homo sapien
cacagtccagcaataacatctctgt

SEQ ID NO: 1500035 - DNA, 25 bp, Homo sapien
tccagcaataacatctctgtttctt

SEQ ID NO: 1500036 - DNA, 25 bp, Homo sapien
aattagaaattccaacacgtcttga

SEQ ID NO: 1500037 - DNA, 25 bp, Homo sapien
gcttatatttgctcttcaacacaat

SEQ ID NO: 1500038 - DNA, 25 bp, Homo sapien
tagaaattccaacacgtcttgattc

SEQ ID NO: 1500039 - DNA, 25 bp, Homo sapien
cacaattagaaattccaacacgtct

SEQ ID NO: 1500040 - DNA, 25 bp, Homo sapien
tcttcacatggtggcagcaagaagt

SEQ ID NO: 1500041 - DNA, 25 bp, Homo sapien
cttcacatggtggcagcaagaagtg

SEQ ID NO: 1500042 - DNA, 25 bp, Homo sapien
tggtggtatagacacaagtctctga

SEQ ID NO: 1500043 - DNA, 25 bp, Homo sapien
gggactgcagcagatagactgcctt

SEQ ID NO: 1500044 - DNA, 25 bp, Homo sapien
tgaataagttagatgcagagccaaa

SEQ ID NO: 1500045 - DNA, 25 bp, Homo sapien
tgcatgtggttgcatgcaaagattc

SEQ ID NO: 1500046 - DNA, 25 bp, Homo sapien
tctttgtcccactgcaagtgtggct

SEQ ID NO: 1500047 - DNA, 25 bp, Homo sapien
ccatctttgtcccactgcaagtgtg

SEQ ID NO: 1500048 - DNA, 25 bp, Homo sapien
gtcccactgcaagtgtggctttctt

SEQ ID NO: 1500049 - DNA, 25 bp, Homo sapien
tttgtcccactgcaagtgtggcttt

SEQ ID NO: 1500050 - DNA, 25 bp, Homo sapien
ctaatccattgctgcatcatagatc

SEQ ID NO: 1500051 - DNA, 25 bp, Homo sapien
actgtgtcagcagcggtcctttgtc

SEQ ID NO: 1500052 - DNA, 25 bp, Homo sapien
catagatcactgtgtcagcagcggt

SEQ ID NO: 1500053 - DNA, 25 bp, Homo sapien
tgctgcatcatagatcactgtgtca

SEQ ID NO: 1500054 - DNA, 25 bp, Homo sapien
atagaaagctttgcgccctgatctc

SEQ ID NO: 1500055 - DNA, 25 bp, Homo sapien
aaagctttgcgccctgatctctcct

SEQ ID NO: 1500056 - DNA, 25 bp, Homo sapien
aagcacaagacaaatagaaagcttt

SEQ ID NO: 1500057 - DNA, 25 bp, Homo sapien
aaatagaaagctttgcgccctgatc

SEQ ID NO: 1500058 - DNA, 25 bp, Homo sapien
gggcacagaggaaagactttggcat

SEQ ID NO: 1500059 - DNA, 25 bp, Homo sapien
gagagtgttgagtgcgtcctctacc

SEQ ID NO: 1500060 - DNA, 25 bp, Homo sapien
aagaacagtcgtgagtttgttctcc

SEQ ID NO: 1500061 - DNA, 25 bp, Homo sapien
tggcatgaacggaggaaagaacagt

SEQ ID NO: 1500062 - DNA, 25 bp, Homo sapien
tataaaaatcacgagcattagaata

SEQ ID NO: 1500063 - DNA, 25 bp, Homo sapien
tcacgagcattagaataaacctcca

SEQ ID NO: 1500064 - DNA, 25 bp, Homo sapien
cgagcattagaataaacctccaaca

SEQ ID NO: 1500065 - DNA, 25 bp, Homo sapien
aaaatcacgagcattagaataaacc

SEQ ID NO: 1500066 - DNA, 25 bp, Homo sapien
agacaatctccacatagcccattcc

SEQ ID NO: 1500067 - DNA, 25 bp, Homo sapien
tccagacaatctccacatagcccat

SEQ ID NO: 1500068 - DNA, 25 bp, Homo sapien
tatttttccctccagacaatctcca

SEQ ID NO: 1500069 - DNA, 25 bp, Homo sapien
ttttccctccagacaatctccacat

SEQ ID NO: 1500070 - DNA, 25 bp, Homo sapien
cttattctggcaacatcgtcctggt

SEQ ID NO: 1500071 - DNA, 25 bp, Homo sapien
taccgacgacatgaaggcaaaatcc

SEQ ID NO: 1500072 - DNA, 25 bp, Homo sapien
cctgaagaagcatgtctgacgggtg

SEQ ID NO: 1500073 - DNA, 25 bp, Homo sapien
tcatgtcatcccaaaagtaccgacg

SEQ ID NO: 1500074 - DNA, 25 bp, Homo sapien
catttcactcaaggcggttagtgct

SEQ ID NO: 1500075 - DNA, 25 bp, Homo sapien
gcgcatttcactcaaggcggttagt

SEQ ID NO: 1500076 - DNA, 25 bp, Homo sapien
cactcaaggcggttagtgctttgta

SEQ ID NO: 1500077 - DNA, 25 bp, Homo sapien
tcagcgcatttcactcaaggcggtt

SEQ ID NO: 1500078 - DNA, 25 bp, Homo sapien
taagaaatatcaaagcagtaagcat

SEQ ID NO: 1500079 - DNA, 25 bp, Homo sapien
caataagaaatatcaaagcagtaag

SEQ ID NO: 1500080 - DNA, 25 bp, Homo sapien
ctccacaataagaaatatcaaagca

SEQ ID NO: 1500081 - DNA, 25 bp, Homo sapien
tccacaataagaaatatcaaagcag

SEQ ID NO: 1500082 - DNA, 25 bp, Homo sapien
tcttcagaatgtcttttttccctaa

SEQ ID NO: 1500083 - DNA, 25 bp, Homo sapien
ttctcttcagaatgtcttttttccc

SEQ ID NO: 1500084 - DNA, 25 bp, Homo sapien
ctcttcagaatgtcttttttcccta

SEQ ID NO: 1500085 - DNA, 25 bp, Homo sapien
tctcttcagaatgtcttttttccct

SEQ ID NO: 1500086 - DNA, 25 bp, Homo sapien
ctatcagtaaggtcaagcaagaggg

SEQ ID NO: 1500087 - DNA, 25 bp, Homo sapien
tatcagtaaggtcaagcaagaggga

SEQ ID NO: 1500088 - DNA, 25 bp, Homo sapien
ttgtccaactcactgggtccatatt

SEQ ID NO: 1500089 - DNA, 25 bp, Homo sapien
caggccactgggtcacttgttggat

SEQ ID NO: 1500090 - DNA, 25 bp, Homo sapien
ggatgtttgttgatgatgtagccat

SEQ ID NO: 1500091 - DNA, 25 bp, Homo sapien
ggtccatattctgcgtgtccccaga

SEQ ID NO: 1500092 - DNA, 25 bp, Homo sapien
tccctcctgggttctatttctacgc

SEQ ID NO: 1500093 - DNA, 25 bp, Homo sapien
aaaacataaagctgcctgctccctc

SEQ ID NO: 1500094 - DNA, 25 bp, Homo sapien
tgccaaaaacataaagctgcctgct

SEQ ID NO: 1500095 - DNA, 25 bp, Homo sapien
ggatttgatgccaaaaacataaagc

SEQ ID NO: 1500096 - DNA, 25 bp, Homo sapien
gctgtcaagggtatgtttgaaacca

SEQ ID NO: 1500097 - DNA, 25 bp, Homo sapien
gaagtaccagtgcatgagccctcaa

SEQ ID NO: 1500098 - DNA, 25 bp, Homo sapien
tggcactcccgacatcctgaaatgg

SEQ ID NO: 1500099 - DNA, 25 bp, Homo sapien
aaccatcaaatgattgactggaagc

SEQ ID NO: 1500100 - DNA, 25 bp, Homo sapien
ggagaatcgggtgtaggcagagaaa

SEQ ID NO: 1500101 - DNA, 25 bp, Homo sapien
tgagctcaatcaaggcttctgaccc

SEQ ID NO: 1500102 - DNA, 25 bp, Homo sapien
tcaacttggaactatgagctcaatc

SEQ ID NO: 1500103 - DNA, 25 bp, Homo sapien
ctcaatcaaggcttctgaccctggg

SEQ ID NO: 1500104 - DNA, 25 bp, Homo sapien
tccagtgaccgtggaattccatctc

SEQ ID NO: 1500105 - DNA, 25 bp, Homo sapien
cagtgaccgtggaattccatctcag

SEQ ID NO: 1500106 - DNA, 25 bp, Homo sapien
gaccgtggaattccatctcagctcc

SEQ ID NO: 1500107 - DNA, 25 bp, Homo sapien
gtcctccagtgaccgtggaattcca

SEQ ID NO: 1500108 - DNA, 25 bp, Homo sapien
tgggccttgcaaattacatagcgag

SEQ ID NO: 1500109 - DNA, 25 bp, Homo sapien
gctggcgatatcattcaagtaggac

SEQ ID NO: 1500110 - DNA, 25 bp, Homo sapien
gaactcagaaacgtggtacctctct

SEQ ID NO: 1500111 - DNA, 25 bp, Homo sapien
gtgtcatgggtatgcccagagccca

SEQ ID NO: 1500112 - DNA, 25 bp, Homo sapien
acggtctccaggtaccaataaatgc

SEQ ID NO: 1500113 - DNA, 25 bp, Homo sapien
ttttcacagtaagccatttagggta

SEQ ID NO: 1500114 - DNA, 25 bp, Homo sapien
ttaatgcactttgtacactaacagg

SEQ ID NO: 1500115 - DNA, 25 bp, Homo sapien
cacttagtagaaggacaatatttcc

SEQ ID NO: 1500116 - DNA, 25 bp, Homo sapien
gaatggtccatgaattaaggctttc

SEQ ID NO: 1500117 - DNA, 25 bp, Homo sapien
caatctgatgcgttggaatggtcca

SEQ ID NO: 1500118 - DNA, 25 bp, Homo sapien
tcttggcccagaactctggcattgg

SEQ ID NO: 1500119 - DNA, 25 bp, Homo sapien
tcaggaacctgcttataaaatgtca

SEQ ID NO: 1500120 - DNA, 25 bp, Homo sapien
tcaccagaagtgtcccgaaatcggc

SEQ ID NO: 1500121 - DNA, 25 bp, Homo sapien
tcctgctggactatgataacggctc

SEQ ID NO: 1500122 - DNA, 25 bp, Homo sapien
caccgtgtggaacaagtgtctgacg

SEQ ID NO: 1500123 - DNA, 25 bp, Homo sapien
cgaaatcggctcagatagggctcaa

SEQ ID NO: 1500124 - DNA, 25 bp, Homo sapien
tcacgagaacaacactgaaaggacc

SEQ ID NO: 1500125 - DNA, 25 bp, Homo sapien
gggagccagaagcttacaggaccct

SEQ ID NO: 1500126 - DNA, 25 bp, Homo sapien
acatttgagaccctcgatgcatgcc

SEQ ID NO: 1500127 - DNA, 25 bp, Homo sapien
ggacttacttacttacagttctatg

SEQ ID NO: 1500128 - DNA, 25 bp, Homo sapien
ctgaaaaactaacagcgacatcaac

SEQ ID NO: 1500129 - DNA, 25 bp, Homo sapien
aactaacagcgacatcaacaacatc

SEQ ID NO: 1500130 - DNA, 25 bp, Homo sapien
catcaacaacatcgtgaatggccat

SEQ ID NO: 1500131 - DNA, 25 bp, Homo sapien
gaaaaactaacagcgacatcaacaa

SEQ ID NO: 1500132 - DNA, 25 bp, Homo sapien
tcctgacaaacctcaacagaccatt

SEQ ID NO: 1500133 - DNA, 25 bp, Homo sapien
aaacctcagtagccacaaatccctg

SEQ ID NO: 1500134 - DNA, 25 bp, Homo sapien
gacagcaaacctcagtagccacaaa

SEQ ID NO: 1500135 - DNA, 25 bp, Homo sapien
agcaaacctcagtagccacaaatcc

SEQ ID NO: 1500136 - DNA, 25 bp, Homo sapien
aacctcagtagccacaaatccctgg

SEQ ID NO: 1500137 - DNA, 25 bp, Homo sapien
ggcagaaaggacccttcttgagaag

SEQ ID NO: 1500138 - DNA, 25 bp, Homo sapien
gggcagaaaggacccttcttgagaa

SEQ ID NO: 1500139 - DNA, 25 bp, Homo sapien
gcagaaaggacccttcttgagaaga

SEQ ID NO: 1500140 - DNA, 25 bp, Homo sapien
tgtagcactagctcatttgcataga

SEQ ID NO: 1500141 - DNA, 25 bp, Homo sapien
gaggccaactacatcatccttctgt

SEQ ID NO: 1500142 - DNA, 25 bp, Homo sapien
atcagcatgtccgataagctcacac

SEQ ID NO: 1500143 - DNA, 25 bp, Homo sapien
gcatagatcagcatgtccgataagc

SEQ ID NO: 1500144 - DNA, 25 bp, Homo sapien
agtgcccttgacttagaaaaatttg

SEQ ID NO: 1500145 - DNA, 25 bp, Homo sapien
gattcagtgcccttgacttagaaaa

SEQ ID NO: 1500146 - DNA, 25 bp, Homo sapien
tgattcataacaggcattggatcct

SEQ ID NO: 1500147 - DNA, 25 bp, Homo sapien
tgaatgtctccctttggattcagtg

SEQ ID NO: 1500148 - DNA, 25 bp, Homo sapien
aacacagaactggagacccttttgg

SEQ ID NO: 1500149 - DNA, 25 bp, Homo sapien
gagacccttttggctaaactcatcc

SEQ ID NO: 1500150 - DNA, 25 bp, Homo sapien
gaacacagaactggagacccttttg

SEQ ID NO: 1500151 - DNA, 25 bp, Homo sapien
acacagaactggagacccttttggc

SEQ ID NO: 1500152 - DNA, 25 bp, Homo sapien
ttggaaacctttaaccagcagccat

SEQ ID NO: 1500153 - DNA, 25 bp, Homo sapien
ctcccagtttgtacagtcatccatt

SEQ ID NO: 1500154 - DNA, 25 bp, Homo sapien
gctgcaagacttggccctcttggaa

SEQ ID NO: 1500155 - DNA, 25 bp, Homo sapien
ttctcccagtttgtacagtcatcca

SEQ ID NO: 1500156 - DNA, 25 bp, Homo sapien
catcgttgataggagagcctgagta

SEQ ID NO: 1500157 - DNA, 25 bp, Homo sapien
tagcaggaataggagaatgaccaag

SEQ ID NO: 1500158 - DNA, 25 bp, Homo sapien
acccaagagtaacttaaggagaatg

SEQ ID NO: 1500159 - DNA, 25 bp, Homo sapien
gaccaagtgttttggaatcagataa

SEQ ID NO: 1500160 - DNA, 25 bp, Homo sapien
ttcatctactgcagcagccaacact

SEQ ID NO: 1500161 - DNA, 25 bp, Homo sapien
gcagcagccaacactgctgcataga

SEQ ID NO: 1500162 - DNA, 25 bp, Homo sapien
cagcagccaacactgctgcatagag

SEQ ID NO: 1500163 - DNA, 25 bp, Homo sapien
ttattcatctactgcagcagccaac

SEQ ID NO: 1500164 - DNA, 25 bp, Homo sapien
aattttgatcattaaagccttcata

SEQ ID NO: 1500165 - DNA, 25 bp, Homo sapien
tcatatccccacagacatctgccat

SEQ ID NO: 1500166 - DNA, 25 bp, Homo sapien
taattttgatcattaaagccttcat

SEQ ID NO: 1500167 - DNA, 25 bp, Homo sapien
ttcatatccccacagacatctgcca

SEQ ID NO: 1500168 - DNA, 25 bp, Homo sapien
aaccaaattcttgcatgatacccag

SEQ ID NO: 1500169 - DNA, 25 bp, Homo sapien
tcagaaccaaattcttgcatgatac

SEQ ID NO: 1500170 - DNA, 25 bp, Homo sapien
gcatgatacccagtacagcatagac

SEQ ID NO: 1500171 - DNA, 25 bp, Homo sapien
gatacccagtacagcatagacctgg

SEQ ID NO: 1500172 - DNA, 25 bp, Homo sapien
tgatttagacttctgccaggagact

SEQ ID NO: 1500173 - DNA, 25 bp, Homo sapien
caggagggttgatttagacttctgc

SEQ ID NO: 1500174 - DNA, 25 bp, Homo sapien
tctgccaggagactaggtgtggcca

SEQ ID NO: 1500175 - DNA, 25 bp, Homo sapien
caggagactaggtgtggccatctct

SEQ ID NO: 1500176 - DNA, 25 bp, Homo sapien
tggtaaggaagttcttatcactttc

SEQ ID NO: 1500177 - DNA, 25 bp, Homo sapien
ataaggagcttggagccgttggtaa

SEQ ID NO: 1500178 - DNA, 25 bp, Homo sapien
tgatgtcagagggtggttggataag

SEQ ID NO: 1500179 - DNA, 25 bp, Homo sapien
gtcagagggtggttggataaggagc

SEQ ID NO: 1500180 - DNA, 25 bp, Homo sapien
tgctttctgccaattttccttgtac

SEQ ID NO: 1500181 - DNA, 25 bp, Homo sapien
tctgccaattttccttgtacaacag

SEQ ID NO: 1500182 - DNA, 25 bp, Homo sapien
ctgctttctgccaattttccttgta

SEQ ID NO: 1500183 - DNA, 25 bp, Homo sapien
ctttctgccaattttccttgtacaa

SEQ ID NO: 1500184 - DNA, 25 bp, Homo sapien
atgctaatcttctttgtatcattcc

SEQ ID NO: 1500185 - DNA, 25 bp, Homo sapien
cagttttagtctatgtgctgctgaa

SEQ ID NO: 1500186 - DNA, 25 bp, Homo sapien
tctatgtgctgctgaaacaagcacc

SEQ ID NO: 1500187 - DNA, 25 bp, Homo sapien
aatttgtcatccttgcattggggcc

SEQ ID NO: 1500188 - DNA, 25 bp, Homo sapien
ttcggtgaagtcaccagcatccttg

SEQ ID NO: 1500189 - DNA, 25 bp, Homo sapien
cagtggctccggcacaataaagctc

SEQ ID NO: 1500190 - DNA, 25 bp, Homo sapien
cagtcggtgcttggaggagggtagc

SEQ ID NO: 1500191 - DNA, 25 bp, Homo sapien
actgtgatgttttggcagtcggtgc

SEQ ID NO: 1500192 - DNA, 25 bp, Homo sapien
caggatgaagaagcacccatgcaaa

SEQ ID NO: 1500193 - DNA, 25 bp, Homo sapien
taaagcgactgctccaaaggacctg

SEQ ID NO: 1500194 - DNA, 25 bp, Homo sapien
tttgtgagatacagggtagacccgg

SEQ ID NO: 1500195 - DNA, 25 bp, Homo sapien
tgtgtaccacagtggctaactaggg

SEQ ID NO: 1500196 - DNA, 25 bp, Homo sapien
cctaaagacgctcgatcattaccat

SEQ ID NO: 1500197 - DNA, 25 bp, Homo sapien
aagacgctcgatcattaccatatcc

SEQ ID NO: 1500198 - DNA, 25 bp, Homo sapien
ctaccctaaagacgctcgatcatta

SEQ ID NO: 1500199 - DNA, 25 bp, Homo sapien
taaagacgctcgatcattaccatat

SEQ ID NO: 1500200 - DNA, 25 bp, Homo sapien
ggttctatatggcacagggctactt

SEQ ID NO: 1500201 - DNA, 25 bp, Homo sapien
cagtcagcaggtaataatccgcagt

SEQ ID NO: 1500202 - DNA, 25 bp, Homo sapien
ttgacccaaggatgtcacgtgcacc

SEQ ID NO: 1500203 - DNA, 25 bp, Homo sapien
tcccaatgctgcttctatgggctgg

SEQ ID NO: 1500204 - DNA, 25 bp, Homo sapien
agggccaaagcgaagttttgtgact

SEQ ID NO: 1500205 - DNA, 25 bp, Homo sapien
cttcctctaaggaaatctgctgctt

SEQ ID NO: 1500206 - DNA, 25 bp, Homo sapien
aacttacctgctttgcgctatgaaa

SEQ ID NO: 1500207 - DNA, 25 bp, Homo sapien
tagtaggagcacagaaaattgaggc

SEQ ID NO: 1500208 - DNA, 25 bp, Homo sapien
cgtgattattaatgtgccagggcac

SEQ ID NO: 1500209 - DNA, 25 bp, Homo sapien
aaattgaggcgcagaacaaaatgcc

SEQ ID NO: 1500210 - DNA, 25 bp, Homo sapien
ctggccgaaaacaacaggtttgcct

SEQ ID NO: 1500211 - DNA, 25 bp, Homo sapien
gcattcccgcaactgcatatatcct

SEQ ID NO: 1500212 - DNA, 25 bp, Homo sapien
gtttgcctgtggcattcccgcaact

SEQ ID NO: 1500213 - DNA, 25 bp, Homo sapien
ccgaaaacaacaggtttgcctgtgg

SEQ ID NO: 1500214 - DNA, 25 bp, Homo sapien
gataaaattccttatcagtccagga

SEQ ID NO: 1500215 - DNA, 25 bp, Homo sapien
ggagagggtgtgatttacaactcaa

SEQ ID NO: 1500216 - DNA, 25 bp, Homo sapien
tactcatataaggagaaaacaaggc

SEQ ID NO: 1500217 - DNA, 25 bp, Homo sapien
tccaggaagaggtttatagctttgc

SEQ ID NO: 1500218 - DNA, 25 bp, Homo sapien
ttctgttctagcagtttggaaactg

SEQ ID NO: 1500219 - DNA, 25 bp, Homo sapien
ggaaactgtattgcttctggacgtg

SEQ ID NO: 1500220 - DNA, 25 bp, Homo sapien
gcggaaccagcttgaaatgagcaca

SEQ ID NO: 1500221 - DNA, 25 bp, Homo sapien
gtttctggcggagaaggcggaacca

SEQ ID NO: 1500222 - DNA, 25 bp, Homo sapien
ttggtttcgcattctgagcacttac

SEQ ID NO: 1500223 - DNA, 25 bp, Homo sapien
tctcattttggtttcgcattctgag

SEQ ID NO: 1500224 - DNA, 25 bp, Homo sapien
gacagctgaatgtcctgaaaaagaa

SEQ ID NO: 1500225 - DNA, 25 bp, Homo sapien
tagaataaagacagctgaatgtcct

SEQ ID NO: 1500226 - DNA, 25 bp, Homo sapien
tgatgtcaggcagtcgttgtaaagg

SEQ ID NO: 1500227 - DNA, 25 bp, Homo sapien
ctctaattgtggttgatgtcaggca

SEQ ID NO: 1500228 - DNA, 25 bp, Homo sapien
ttttgcctctaattgtggttgatgt

SEQ ID NO: 1500229 - DNA, 25 bp, Homo sapien
tggttgatgtcaggcagtcgttgta

SEQ ID NO: 1500230 - DNA, 25 bp, Homo sapien
tgctgcccgtagatttcgccgggtt

SEQ ID NO: 1500231 - DNA, 25 bp, Homo sapien
ttgtcttgcgggctcctgtcgggtt

SEQ ID NO: 1500232 - DNA, 25 bp, Homo sapien
ctgtcgggttcggtgtttccgctct

SEQ ID NO: 1500233 - DNA, 25 bp, Homo sapien
tgaagactgcgacgcgggctccgat

SEQ ID NO: 1500234 - DNA, 25 bp, Homo sapien
gatttgaaataagagccaggcggtc

SEQ ID NO: 1500235 - DNA, 25 bp, Homo sapien
gcttccctgcgaccgacttttcata

SEQ ID NO: 1500236 - DNA, 25 bp, Homo sapien
cagccacctacaacgtctctgagaa

SEQ ID NO: 1500237 - DNA, 25 bp, Homo sapien
tgaaataagagccaggcggtcctcg

SEQ ID NO: 1500238 - DNA, 25 bp, Homo sapien
tctcaatttgcatgcctgacagtcg

SEQ ID NO: 1500239 - DNA, 25 bp, Homo sapien
tagacccactgaagtagcattaggt

SEQ ID NO: 1500240 - DNA, 25 bp, Homo sapien
cattaggtcagcttcgcgggatgca

SEQ ID NO: 1500241 - DNA, 25 bp, Homo sapien
gaatatcacattcgagctgagccac

SEQ ID NO: 1500242 - DNA, 25 bp, Homo sapien
ccaacggtgaaacctgtaaggactg

SEQ ID NO: 1500243 - DNA, 25 bp, Homo sapien
ggctgctctgagaccattatcctct

SEQ ID NO: 1500244 - DNA, 25 bp, Homo sapien
cggtgaaacctgtaaggactgattt

SEQ ID NO: 1500245 - DNA, 25 bp, Homo sapien
tttccttcctcaatgcagttccctg

SEQ ID NO: 1500246 - DNA, 25 bp, Homo sapien
gaacactagtaaggtggcctctgac

SEQ ID NO: 1500247 - DNA, 25 bp, Homo sapien
tcaagagaacactagtaaggtggcc

SEQ ID NO: 1500248 - DNA, 25 bp, Homo sapien
gagaacactagtaaggtggcctctg

SEQ ID NO: 1500249 - DNA, 25 bp, Homo sapien
aagagaacactagtaaggtggcctc

SEQ ID NO: 1500250 - DNA, 25 bp, Homo sapien
gattctgacgctcagagatttcacc

SEQ ID NO: 1500251 - DNA, 25 bp, Homo sapien
ccacacttgaatggcgatgactgca

SEQ ID NO: 1500252 - DNA, 25 bp, Homo sapien
ttcaccctaaaccacacttgaatgg

SEQ ID NO: 1500253 - DNA, 25 bp, Homo sapien
tatatgatgattctgacgctcagag

SEQ ID NO: 1500254 - DNA, 25 bp, Homo sapien
taaattgtgcgagtaaaacacgtcc

SEQ ID NO: 1500255 - DNA, 25 bp, Homo sapien
gaaacttcgagtcctctatcatagg

SEQ ID NO: 1500256 - DNA, 25 bp, Homo sapien
gttggagtgcctctaatatttagcc

SEQ ID NO: 1500257 - DNA, 25 bp, Homo sapien
ctatcataggcattttatgggttaa

SEQ ID NO: 1500258 - DNA, 25 bp, Homo sapien
cacaagacgctttgccatagcaaca

SEQ ID NO: 1500259 - DNA, 25 bp, Homo sapien
tcgtcaataacacaagacgctttgc

SEQ ID NO: 1500260 - DNA, 25 bp, Homo sapien
caatgtgctccatcgtcaataacac

SEQ ID NO: 1500261 - DNA, 25 bp, Homo sapien
aaacacaacaatgtgctccatcgtc

SEQ ID NO: 1500262 - DNA, 25 bp, Homo sapien
tgtaactatggattggacaggcacc

SEQ ID NO: 1500263 - DNA, 25 bp, Homo sapien
aatgcttccagagaatctcccttga

SEQ ID NO: 1500264 - DNA, 25 bp, Homo sapien
ctttatgatcagagagccaacacat

SEQ ID NO: 1500265 - DNA, 25 bp, Homo sapien
gagaatctcccttgacagcttctgc

SEQ ID NO: 1500266 - DNA, 25 bp, Homo sapien
tatattctttgtctgtatgcagagg

SEQ ID NO: 1500267 - DNA, 25 bp, Homo sapien
atccaagtagtacctagcgcaagtt

SEQ ID NO: 1500268 - DNA, 25 bp, Homo sapien
aagtagtacctagcgcaagttcaag

SEQ ID NO: 1500269 - DNA, 25 bp, Homo sapien
tttgtaacaagagccgttcagatcc

SEQ ID NO: 1500270 - DNA, 25 bp, Homo sapien
tccactggtccactggatagaaacc

SEQ ID NO: 1500271 - DNA, 25 bp, Homo sapien
tcatccactggtccactggatagaa

SEQ ID NO: 1500272 - DNA, 25 bp, Homo sapien
ctggatagaaacctaattttggatt

SEQ ID NO: 1500273 - DNA, 25 bp, Homo sapien
actggatagaaacctaattttggat

SEQ ID NO: 1500274 - DNA, 25 bp, Homo sapien
ctccagacttgctgactttttcact

SEQ ID NO: 1500275 - DNA, 25 bp, Homo sapien
cagacttgctgactttttcacttcc

SEQ ID NO: 1500276 - DNA, 25 bp, Homo sapien
cacttcctttcctgaagtttgtctt

SEQ ID NO: 1500277 - DNA, 25 bp, Homo sapien
cttctccagacttgctgactttttc

SEQ ID NO: 1500278 - DNA, 25 bp, Homo sapien
ttctcaaccatgagacacaacctct

SEQ ID NO: 1500279 - DNA, 25 bp, Homo sapien
attatacctccatcggtactggacg

SEQ ID NO: 1500280 - DNA, 25 bp, Homo sapien
cataacttcagcaaagaggttcttt

SEQ ID NO: 1500281 - DNA, 25 bp, Homo sapien
gtactggacgtacccataacttcag

SEQ ID NO: 1500282 - DNA, 25 bp, Homo sapien
caagttggaaacatgtgataccacc

SEQ ID NO: 1500283 - DNA, 25 bp, Homo sapien
taccaccacagttcttaagatggga

SEQ ID NO: 1500284 - DNA, 25 bp, Homo sapien
caaggaccaggacgctcaagttgga

SEQ ID NO: 1500285 - DNA, 25 bp, Homo sapien
aaaaatgtgggtcagcgagttgcca

SEQ ID NO: 1500286 - DNA, 25 bp, Homo sapien
ctggtgatattagaagggagaaggc

SEQ ID NO: 1500287 - DNA, 25 bp, Homo sapien
gggcttcctactttatactcgcaat

SEQ ID NO: 1500288 - DNA, 25 bp, Homo sapien
gcccaaagtcacacccaatagcata

SEQ ID NO: 1500289 - DNA, 25 bp, Homo sapien
cagacctgtggaaaaccgggtagag

SEQ ID NO: 1500290 - DNA, 25 bp, Homo sapien
aaatgctttcagatacaggggatcc

SEQ ID NO: 1500291 - DNA, 25 bp, Homo sapien
aaggcagtgatatagctcctttcaa

SEQ ID NO: 1500292 - DNA, 25 bp, Homo sapien
ggcagtgatatagctcctttcaaat

SEQ ID NO: 1500293 - DNA, 25 bp, Homo sapien
atgctttcagatacaggggatccat

SEQ ID NO: 1500294 - DNA, 25 bp, Homo sapien
tttgcatttttaatgccgccgtttc

SEQ ID NO: 1500295 - DNA, 25 bp, Homo sapien
accacattgccataattcaatcttg

SEQ ID NO: 1500296 - DNA, 25 bp, Homo sapien
tgccgccgtttcgtatttatctttg

SEQ ID NO: 1500297 - DNA, 25 bp, Homo sapien
ttaatgccgccgtttcgtatttatc

SEQ ID NO: 1500298 - DNA, 25 bp, Homo sapien
taggatagggtgatgtctgcttgtc

SEQ ID NO: 1500299 - DNA, 25 bp, Homo sapien
aatgccactcggctgcagatcacca

SEQ ID NO: 1500300 - DNA, 25 bp, Homo sapien
ttctgtgagtcagatggtaggatag

SEQ ID NO: 1500301 - DNA, 25 bp, Homo sapien
atcaccactccgcagtcacactgtg

SEQ ID NO: 1500302 - DNA, 25 bp, Homo sapien
taatgcttctgttgagcgcttctct

SEQ ID NO: 1500303 - DNA, 25 bp, Homo sapien
ctgttgagcgcttctctttttactg

SEQ ID NO: 1500304 - DNA, 25 bp, Homo sapien
tctttgtaatgcttctgttgagcgc

SEQ ID NO: 1500305 - DNA, 25 bp, Homo sapien
gaacctcatctttgtaatgcttctg

SEQ ID NO: 1500306 - DNA, 25 bp, Homo sapien
tcatgacagcctgctagatgggctg

SEQ ID NO: 1500307 - DNA, 25 bp, Homo sapien
catgacagcctgctagatgggctgg

SEQ ID NO: 1500308 - DNA, 25 bp, Homo sapien
acttcccgaggaggagggtccatct

SEQ ID NO: 1500309 - DNA, 25 bp, Homo sapien
gggtccatctcaactggttttaggc

SEQ ID NO: 1500310 - DNA, 25 bp, Homo sapien
catttgagcaaacagggccacaggg

SEQ ID NO: 1500311 - DNA, 25 bp, Homo sapien
tcagatgtgttgtaactgggcaagt

SEQ ID NO: 1500312 - DNA, 25 bp, Homo sapien
cagaacaaaggactcaacaacttgg

SEQ ID NO: 1500313 - DNA, 25 bp, Homo sapien
ctctctgagatttgcccaatttggg

SEQ ID NO: 1500314 - DNA, 25 bp, Homo sapien
catcacctctctgagatttgcccaa

SEQ ID NO: 1500315 - DNA, 25 bp, Homo sapien
aaaggactcaacaacttggcatccc

SEQ ID NO: 1500316 - DNA, 25 bp, Homo sapien
atttaagcttccaagatggatcttc

SEQ ID NO: 1500317 - DNA, 25 bp, Homo sapien
gatcttcccaaagacgaatgctcat

SEQ ID NO: 1500318 - DNA, 25 bp, Homo sapien
atggatcttcccaaagacgaatgct

SEQ ID NO: 1500319 - DNA, 25 bp, Homo sapien
ttaagcttccaagatggatcttccc

SEQ ID NO: 1500320 - DNA, 25 bp, Homo sapien
gcttcggtgattgtcccgtttggac

SEQ ID NO: 1500321 - DNA, 25 bp, Homo sapien
tgtcccgtttggactcccgttatga

SEQ ID NO: 1500322 - DNA, 25 bp, Homo sapien
ctcccgttatgatcaggacccacat

SEQ ID NO: 1500323 - DNA, 25 bp, Homo sapien
tccagctacaggcttcggtgattgt

SEQ ID NO: 1500324 - DNA, 25 bp, Homo sapien
tactgggagcctaatttcagtggga

SEQ ID NO: 1500325 - DNA, 25 bp, Homo sapien
tcatgggttttacctctaggattcc

SEQ ID NO: 1500326 - DNA, 25 bp, Homo sapien
cagtgggatcccaacattttcatgg

SEQ ID NO: 1500327 - DNA, 25 bp, Homo sapien
aaaactactgggagcctaatttcag

SEQ ID NO: 1500328 - DNA, 25 bp, Homo sapien
gagtgggaagttcttgtctaatgaa

SEQ ID NO: 1500329 - DNA, 25 bp, Homo sapien
cacttacaaaaggtctctagaatag

SEQ ID NO: 1500330 - DNA, 25 bp, Homo sapien
cagaagtacctaatgatggttatac

SEQ ID NO: 1500331 - DNA, 25 bp, Homo sapien
aggaagagtgggaagttcttgtcta

SEQ ID NO: 1500332 - DNA, 25 bp, Homo sapien
ggctgagtatcattgcctctttttg

SEQ ID NO: 1500333 - DNA, 25 bp, Homo sapien
gctgagtatcattgcctctttttgc

SEQ ID NO: 1500334 - DNA, 25 bp, Homo sapien
ctggctgagtatcattgcctctttt

SEQ ID NO: 1500335 - DNA, 25 bp, Homo sapien
ctgagtatcattgcctctttttgcc

SEQ ID NO: 1500336 - DNA, 25 bp, Homo sapien
tctcaatggatggacctcagagcac

SEQ ID NO: 1500337 - DNA, 25 bp, Homo sapien
cagctgttaacccctcttggcacat

SEQ ID NO: 1500338 - DNA, 25 bp, Homo sapien
tgatgagtgggttgcagacataccc

SEQ ID NO: 1500339 - DNA, 25 bp, Homo sapien
aaacaaagcttctcaatggatggac

SEQ ID NO: 1500340 - DNA, 25 bp, Homo sapien
ttagcactttagacattccagagag

SEQ ID NO: 1500341 - DNA, 25 bp, Homo sapien
tactgtcgtgatgagcaaactttct

SEQ ID NO: 1500342 - DNA, 25 bp, Homo sapien
caatgctttgcgaatacctccagac

SEQ ID NO: 1500343 - DNA, 25 bp, Homo sapien
tttgcacaccgaaaatccacagagg

SEQ ID NO: 1500344 - DNA, 25 bp, Homo sapien
actgagaggcgtgtaagcacacacc

SEQ ID NO: 1500345 - DNA, 25 bp, Homo sapien
tggcggatttttgcgctgactgaga

SEQ ID NO: 1500346 - DNA, 25 bp, Homo sapien
ctgagtttggcggatttttgcgctg

SEQ ID NO: 1500347 - DNA, 25 bp, Homo sapien
cgctgactgagaggcgtgtaagcac

SEQ ID NO: 1500348 - DNA, 25 bp, Homo sapien
ttggagaatgtaaggctatgggaac

SEQ ID NO: 1500349 - DNA, 25 bp, Homo sapien
gggattagctgcaaaccagattgga

SEQ ID NO: 1500350 - DNA, 25 bp, Homo sapien
cctttatctaaggagggagatgcta

SEQ ID NO: 1500351 - DNA, 25 bp, Homo sapien
cagattggattggagaatgtaaggc

SEQ ID NO: 1500352 - DNA, 25 bp, Homo sapien
ctggaagggatagggtacacactgc

SEQ ID NO: 1500353 - DNA, 25 bp, Homo sapien
ccattgctataacgttttactcttg

SEQ ID NO: 1500354 - DNA, 25 bp, Homo sapien
acctccattgctataacgttttact

SEQ ID NO: 1500355 - DNA, 25 bp, Homo sapien
aagggatagggtacacactgccacc

SEQ ID NO: 1500356 - DNA, 25 bp, Homo sapien
ggttctttgccattctggtgttgga

SEQ ID NO: 1500357 - DNA, 25 bp, Homo sapien
acaatgcatagaattcttgcagaaa

SEQ ID NO: 1500358 - DNA, 25 bp, Homo sapien
gcaggcaacgacttcagattgagca

SEQ ID NO: 1500359 - DNA, 25 bp, Homo sapien
ctttggaagagaggttattccagca

SEQ ID NO: 1500360 - DNA, 25 bp, Homo sapien
cagagcaggcgttttgtttatgtat

SEQ ID NO: 1500361 - DNA, 25 bp, Homo sapien
acagagcaggcgttttgtttatgta

SEQ ID NO: 1500362 - DNA, 25 bp, Homo sapien
ccatgatggctgcctattgggtgag

SEQ ID NO: 1500363 - DNA, 25 bp, Homo sapien
actgtgtagtggaaagacccatccc

SEQ ID NO: 1500364 - DNA, 25 bp, Homo sapien
gcaagaggttgtgtggtccaccacc

SEQ ID NO: 1500365 - DNA, 25 bp, Homo sapien
aagtgcatctttcacgtttgagaac

SEQ ID NO: 1500366 - DNA, 25 bp, Homo sapien
ttgcttgtttcttctctggatgtgg

SEQ ID NO: 1500367 - DNA, 25 bp, Homo sapien
ttgtttcttctctggatgtgggggc

SEQ ID NO: 1500368 - DNA, 25 bp, Homo sapien
gtaacagatttgcttgtttcttctc

SEQ ID NO: 1500369 - DNA, 25 bp, Homo sapien
gtttcttctctggatgtgggggcag

SEQ ID NO: 1500370 - DNA, 25 bp, Homo sapien
agggtggaatgttattccacagtta

SEQ ID NO: 1500371 - DNA, 25 bp, Homo sapien
tggagggtggaatgttattccacag

SEQ ID NO: 1500372 - DNA, 25 bp, Homo sapien
ggtggaatgttattccacagttagc

SEQ ID NO: 1500373 - DNA, 25 bp, Homo sapien
gtggaatgttattccacagttagct

SEQ ID NO: 1500374 - DNA, 25 bp, Homo sapien
ccatgaatccatggaggacctcctc

SEQ ID NO: 1500375 - DNA, 25 bp, Homo sapien
ggagataccaaccaacttaatgaca

SEQ ID NO: 1500376 - DNA, 25 bp, Homo sapien
cttaatgacaatcaaaagggaaagc

SEQ ID NO: 1500377 - DNA, 25 bp, Homo sapien
tcctctgtaattgggatggagatac

SEQ ID NO: 1500378 - DNA, 25 bp, Homo sapien
gagtctcctcctttacagcagggct

SEQ ID NO: 1500379 - DNA, 25 bp, Homo sapien
gggctcacacatttcccactcagga

SEQ ID NO: 1500380 - DNA, 25 bp, Homo sapien
ctcagggctgacagtatgattagct

SEQ ID NO: 1500381 - DNA, 25 bp, Homo sapien
gtaactgtgttgagattgcctcttc

SEQ ID NO: 1500382 - DNA, 25 bp, Homo sapien
taacagaagacagttgcgcttcaaa

SEQ ID NO: 1500383 - DNA, 25 bp, Homo sapien
tcaaagtaagggagactaacatgcc

SEQ ID NO: 1500384 - DNA, 25 bp, Homo sapien
gggagactaacatgccctctggttc

SEQ ID NO: 1500385 - DNA, 25 bp, Homo sapien
tcatctccacttcggatgcaccggg

SEQ ID NO: 1500386 - DNA, 25 bp, Homo sapien
ggtgagaacttatcatctggcctac

SEQ ID NO: 1500387 - DNA, 25 bp, Homo sapien
gatgtcacttctcctattattggtg

SEQ ID NO: 1500388 - DNA, 25 bp, Homo sapien
tattattggtgagaacttatcatct

SEQ ID NO: 1500389 - DNA, 25 bp, Homo sapien
ccttagcccagatgtcacttctcct

SEQ ID NO: 1500390 - DNA, 25 bp, Homo sapien
tgtagcaggaaattgtttgtcatta

SEQ ID NO: 1500391 - DNA, 25 bp, Homo sapien
gtagcaggaaattgtttgtcattag

SEQ ID NO: 1500392 - DNA, 25 bp, Homo sapien
aagtcttgaaatatggtgtagcagg

SEQ ID NO: 1500393 - DNA, 25 bp, Homo sapien
tcttgaaatatggtgtagcaggaaa

SEQ ID NO: 1500394 - DNA, 25 bp, Homo sapien
tcctgggattgcttgtcaacatgct

SEQ ID NO: 1500395 - DNA, 25 bp, Homo sapien
gctgaatactgtgatcaacctgact

SEQ ID NO: 1500396 - DNA, 25 bp, Homo sapien
tctgtagccacagtcgctgaatact

SEQ ID NO: 1500397 - DNA, 25 bp, Homo sapien
caacctgactattcctaggagctgg

SEQ ID NO: 1500398 - DNA, 25 bp, Homo sapien
ctggtggagggctatatttttttgc

SEQ ID NO: 1500399 - DNA, 25 bp, Homo sapien
ctacactggtggagggctatatttt

SEQ ID NO: 1500400 - DNA, 25 bp, Homo sapien
actggtggagggctatatttttttg

SEQ ID NO: 1500401 - DNA, 25 bp, Homo sapien
acactggtggagggctatatttttt

SEQ ID NO: 1500402 - DNA, 25 bp, Homo sapien
cagagagaggccccccatgaggacc

SEQ ID NO: 1500403 - DNA, 25 bp, Homo sapien
gcccccttcagttgctccccaaatc

SEQ ID NO: 1500404 - DNA, 25 bp, Homo sapien
tgctgcccccttcagttgctcccca

SEQ ID NO: 1500405 - DNA, 25 bp, Homo sapien
agagagaggccccccatgaggaccc

SEQ ID NO: 1500406 - DNA, 25 bp, Homo sapien
gaggcgacccgccaaacatctgtgt

SEQ ID NO: 1500407 - DNA, 25 bp, Homo sapien
ggcgacccgccaaacatctgtgttt

SEQ ID NO: 1500408 - DNA, 25 bp, Homo sapien
ctcgattacaccagcatgaggtgcc

SEQ ID NO: 1500409 - DNA, 25 bp, Homo sapien
gcagcggcttcttcccagggaaact

SEQ ID NO: 1500410 - DNA, 25 bp, Homo sapien
atgtcctgaatctgctcccatctct

SEQ ID NO: 1500411 - DNA, 25 bp, Homo sapien
actgcatggatgtgttgatgagtac

SEQ ID NO: 1500412 - DNA, 25 bp, Homo sapien
gatgagtacgtaggcccagcatgtc

SEQ ID NO: 1500413 - DNA, 25 bp, Homo sapien
tcagggatgtcctgaatctgctccc

SEQ ID NO: 1500414 - DNA, 25 bp, Homo sapien
tggtgcccaatggattcactggatg

SEQ ID NO: 1500415 - DNA, 25 bp, Homo sapien
ctcaaataagaaggggcatactgct

SEQ ID NO: 1500416 - DNA, 25 bp, Homo sapien
acgatggttgagagaagggataacc

SEQ ID NO: 1500417 - DNA, 25 bp, Homo sapien
ggataaccaatatggtggtgcccaa

SEQ ID NO: 1500418 - DNA, 25 bp, Homo sapien
ctgcctgcagtgttggccttgttcg

SEQ ID NO: 1500419 - DNA, 25 bp, Homo sapien
gctgtctgcctgcagtgttggcctt

SEQ ID NO: 1500420 - DNA, 25 bp, Homo sapien
cagctgtctgcctgcagtgttggcc

SEQ ID NO: 1500421 - DNA, 25 bp, Homo sapien
gcctgcagtgttggccttgttcgtg

SEQ ID NO: 1500422 - DNA, 25 bp, Homo sapien
aaggcaaatctagctgtttgggtta

SEQ ID NO: 1500423 - DNA, 25 bp, Homo sapien
ctgaaggcaaatctagctgtttggg

SEQ ID NO: 1500424 - DNA, 25 bp, Homo sapien
agctgtttgggttaagagtccaatg

SEQ ID NO: 1500425 - DNA, 25 bp, Homo sapien
gctgtttgggttaagagtccaatgc

SEQ ID NO: 1500426 - DNA, 25 bp, Homo sapien
ggtcagagctgaggataccaggcat

SEQ ID NO: 1500427 - DNA, 25 bp, Homo sapien
taggaggtcagagctgaggatacca

SEQ ID NO: 1500428 - DNA, 25 bp, Homo sapien
attaggaggtcagagctgaggatac

SEQ ID NO: 1500429 - DNA, 25 bp, Homo sapien
gaggtcagagctgaggataccaggc

SEQ ID NO: 1500430 - DNA, 25 bp, Homo sapien
acaaggccgtgttggaaggtttgat

SEQ ID NO: 1500431 - DNA, 25 bp, Homo sapien
ggttttgggtgaaaatgctgaacaa

SEQ ID NO: 1500432 - DNA, 25 bp, Homo sapien
tcaccatcattgagtcctgactaac

SEQ ID NO: 1500433 - DNA, 25 bp, Homo sapien
gaaggtttgattgccaggtcctgga

SEQ ID NO: 1500434 - DNA, 25 bp, Homo sapien
ggaagggcatttgaatgctcattgg

SEQ ID NO: 1500435 - DNA, 25 bp, Homo sapien
gaatgctcattggttggcccaaaga

SEQ ID NO: 1500436 - DNA, 25 bp, Homo sapien
tatggaacaggcacgaagcagttgg

SEQ ID NO: 1500437 - DNA, 25 bp, Homo sapien
cccaaagaaaatagatggccaatgt

SEQ ID NO: 1500438 - DNA, 25 bp, Homo sapien
aatatgggacagcttcataagtcac

SEQ ID NO: 1500439 - DNA, 25 bp, Homo sapien
tgtccgcttggctgtctttaaagaa

SEQ ID NO: 1500440 - DNA, 25 bp, Homo sapien
tatctttgatcaggtcctcaccgaa

SEQ ID NO: 1500441 - DNA, 25 bp, Homo sapien
agatagcacccctgtgtccgcttgg

SEQ ID NO: 1500442 - DNA, 25 bp, Homo sapien
tagatcatttgccagtagtaaagga

SEQ ID NO: 1500443 - DNA, 25 bp, Homo sapien
tagtaaaggatttacaccgagacat

SEQ ID NO: 1500444 - DNA, 25 bp, Homo sapien
tttgttttcaaggtgactgactcga

SEQ ID NO: 1500445 - DNA, 25 bp, Homo sapien
ggttgtccttgttcgcagtatcatt

SEQ ID NO: 1500446 - DNA, 25 bp, Homo sapien
taggtggagttaattggttcaattg

SEQ ID NO: 1500447 - DNA, 25 bp, Homo sapien
catctgaggctctgaattaggtgga

SEQ ID NO: 1500448 - DNA, 25 bp, Homo sapien
ggttcaattggagattcacacccat

SEQ ID NO: 1500449 - DNA, 25 bp, Homo sapien
ccacatctgaggctctgaattaggt

SEQ ID NO: 1500450 - DNA, 25 bp, Homo sapien
agtaaaaacttgtcgtagaatcaag

SEQ ID NO: 1500451 - DNA, 25 bp, Homo sapien
agacgtgtctagcagaggcaagccc

SEQ ID NO: 1500452 - DNA, 25 bp, Homo sapien
tcgtagaatcaagggaatgcttctg

SEQ ID NO: 1500453 - DNA, 25 bp, Homo sapien
cttctgaaggaagacgtgtctagca

SEQ ID NO: 1500454 - DNA, 25 bp, Homo sapien
cagagaaggtcttgttaaagggtgg

SEQ ID NO: 1500455 - DNA, 25 bp, Homo sapien
ctttcagagaaggtcttgttaaagg

SEQ ID NO: 1500456 - DNA, 25 bp, Homo sapien
tcagagaaggtcttgttaaagggtg

SEQ ID NO: 1500457 - DNA, 25 bp, Homo sapien
gctttcagagaaggtcttgttaaag

SEQ ID NO: 1500458 - DNA, 25 bp, Homo sapien
tttatccagtttgaatcaaggttga

SEQ ID NO: 1500459 - DNA, 25 bp, Homo sapien
caaggttgaatgacaaccttaattc

SEQ ID NO: 1500460 - DNA, 25 bp, Homo sapien
tgaatcaaggttgaatgacaacctt

SEQ ID NO: 1500461 - DNA, 25 bp, Homo sapien
ttttatccagtttgaatcaaggttg

SEQ ID NO: 1500462 - DNA, 25 bp, Homo sapien
tcctggagaccagagtttgagtgga

SEQ ID NO: 1500463 - DNA, 25 bp, Homo sapien
cactagtcaggcagagaactcctgg

SEQ ID NO: 1500464 - DNA, 25 bp, Homo sapien
agtctgatggatacactagtcaggc

SEQ ID NO: 1500465 - DNA, 25 bp, Homo sapien
ttcacaggacagagggcagactgtt

SEQ ID NO: 1500466 - DNA, 25 bp, Homo sapien
tacatgaaaactagaatgcctgtcc

SEQ ID NO: 1500467 - DNA, 25 bp, Homo sapien
taaagctgtcgaatatcaaagcctg

SEQ ID NO: 1500468 - DNA, 25 bp, Homo sapien
tggaaccctcgcttgcacgtttgag

SEQ ID NO: 1500469 - DNA, 25 bp, Homo sapien
aaagctatcctctgtccactgctgg

SEQ ID NO: 1500470 - DNA, 25 bp, Homo sapien
agtgttttctaaactctggccccag

SEQ ID NO: 1500471 - DNA, 25 bp, Homo sapien
ctccttggagacttgaaattcctca

SEQ ID NO: 1500472 - DNA, 25 bp, Homo sapien
tgcgtaagtgttttctaaactctgg

SEQ ID NO: 1500473 - DNA, 25 bp, Homo sapien
agtttcctgacaaagttttctcatg

SEQ ID NO: 1500474 - DNA, 25 bp, Homo sapien
accctccagacatactgtatgtctc

SEQ ID NO: 1500475 - DNA, 25 bp, Homo sapien
ccctccagacatactgtatgtctct

SEQ ID NO: 1500476 - DNA, 25 bp, Homo sapien
cctccagacatactgtatgtctctg

SEQ ID NO: 1500477 - DNA, 25 bp, Homo sapien
ctccagacatactgtatgtctctgt

SEQ ID NO: 1500478 - DNA, 25 bp, Homo sapien
gattgactgagttaatctccacacc

SEQ ID NO: 1500479 - DNA, 25 bp, Homo sapien
gaaattgccggttttggcattaatg

SEQ ID NO: 1500480 - DNA, 25 bp, Homo sapien
actgatgctgatgaaattgccggtt

SEQ ID NO: 1500481 - DNA, 25 bp, Homo sapien
taatgcttctgtcagccaagtgaga

SEQ ID NO: 1500482 - DNA, 25 bp, Homo sapien
ttcagtcgccaacccgaacccagag

SEQ ID NO: 1500483 - DNA, 25 bp, Homo sapien
agtcgccaacccgaacccagagcag

SEQ ID NO: 1500484 - DNA, 25 bp, Homo sapien
ggtcaccgctgtggctgcggtcacc

SEQ ID NO: 1500485 - DNA, 25 bp, Homo sapien
tcactcggtcaccgctgtggctgcg

SEQ ID NO: 1500486 - DNA, 25 bp, Homo sapien
ccaaaccggccgcggccagcctgcc

SEQ ID NO: 1500487 - DNA, 25 bp, Homo sapien
accaaaccggccgcggccagcctgc

SEQ ID NO: 1500488 - DNA, 25 bp, Homo sapien
caaaccggccgcggccagcctgccc

SEQ ID NO: 1500489 - DNA, 25 bp, Homo sapien
ggctggaaacagtgttgactgtaaa

SEQ ID NO: 1500490 - DNA, 25 bp, Homo sapien
cagtgttgactgtaaacaattttaa

SEQ ID NO: 1500491 - DNA, 25 bp, Homo sapien
tggaaacagtgttgactgtaaacaa

SEQ ID NO: 1500492 - DNA, 25 bp, Homo sapien
acagtgttgactgtaaacaatttta

SEQ ID NO: 1500493 - DNA, 25 bp, Homo sapien
tgaagcatttgaggcctgaactgca

SEQ ID NO: 1500494 - DNA, 25 bp, Homo sapien
cccttcatgcatcgggcatcctgaa

SEQ ID NO: 1500495 - DNA, 25 bp, Homo sapien
ttcccttcatgcatcgggcatcctg

SEQ ID NO: 1500496 - DNA, 25 bp, Homo sapien
cgctgaagcatttgaggcctgaact

SEQ ID NO: 1500497 - DNA, 25 bp, Homo sapien
tctcaattggagcactaaagagctg

SEQ ID NO: 1500498 - DNA, 25 bp, Homo sapien
gaaggcaggacatctaactctctca

SEQ ID NO: 1500499 - DNA, 25 bp, Homo sapien
gaatttctgaccaatgattaccacc

SEQ ID NO: 1500500 - DNA, 25 bp, Homo sapien
gattaccaccataggaaaagccagg

SEQ ID NO: 1500501 - DNA, 25 bp, Homo sapien
tccttattctcagccgcagtgcccc

SEQ ID NO: 1500502 - DNA, 25 bp, Homo sapien
tgcccctaatgggacactccacgta

SEQ ID NO: 1500503 - DNA, 25 bp, Homo sapien
cagatttgaaggatctaggttctcc

SEQ ID NO: 1500504 - DNA, 25 bp, Homo sapien
ctcataggcgcgttcctggtgggca

SEQ ID NO: 1500505 - DNA, 25 bp, Homo sapien
ctcggaatggatgactcttctctga

SEQ ID NO: 1500506 - DNA, 25 bp, Homo sapien
tctgaatctgctctcggaatggatg

SEQ ID NO: 1500507 - DNA, 25 bp, Homo sapien
atctgctcagaagggtaaacccact

SEQ ID NO: 1500508 - DNA, 25 bp, Homo sapien
caatgcaaatggctgatctggagct

SEQ ID NO: 1500509 - DNA, 25 bp, Homo sapien
ccttccaagcctgctcgttattctg

SEQ ID NO: 1500510 - DNA, 25 bp, Homo sapien
tccaagcctgctcgttattctgatt

SEQ ID NO: 1500511 - DNA, 25 bp, Homo sapien
ttctgattgtgaattctaatgatat

SEQ ID NO: 1500512 - DNA, 25 bp, Homo sapien
gcctgctcgttattctgattgtgaa

SEQ ID NO: 1500513 - DNA, 25 bp, Homo sapien
ccatccaggaacgaattcgtgccct

SEQ ID NO: 1500514 - DNA, 25 bp, Homo sapien
tccaaaccggatcaatgatggacca

SEQ ID NO: 1500515 - DNA, 25 bp, Homo sapien
tgctttccctccaaaccggatcaat

SEQ ID NO: 1500516 - DNA, 25 bp, Homo sapien
gaattcgtgcccttggtgaatactc

SEQ ID NO: 1500517 - DNA, 25 bp, Homo sapien
tgatccaatcgtgcctatcaaaagg

SEQ ID NO: 1500518 - DNA, 25 bp, Homo sapien
gaatctaaggcaggacggacgtcca

SEQ ID NO: 1500519 - DNA, 25 bp, Homo sapien
atctaacttctgtcccgcaacggtt

SEQ ID NO: 1500520 - DNA, 25 bp, Homo sapien
gaactggtagtccttgttgacttca

SEQ ID NO: 1500521 - DNA, 25 bp, Homo sapien
ccaagcgactttcattctgtcccat

SEQ ID NO: 1500522 - DNA, 25 bp, Homo sapien
acgccaccaagcgactttcattctg

SEQ ID NO: 1500523 - DNA, 25 bp, Homo sapien
gaggtccaacgccaccaagcgactt

SEQ ID NO: 1500524 - DNA, 25 bp, Homo sapien
aggtccaacgccaccaagcgacttt

SEQ ID NO: 1500525 - DNA, 25 bp, Homo sapien
gggaaaatagtttaatgtatcgctc

SEQ ID NO: 1500526 - DNA, 25 bp, Homo sapien
tagtttaatgtatcgctcagaaaaa

SEQ ID NO: 1500527 - DNA, 25 bp, Homo sapien
gaaaatagtttaatgtatcgctcag

SEQ ID NO: 1500528 - DNA, 25 bp, Homo sapien
aatagtttaatgtatcgctcagaaa

SEQ ID NO: 1500529 - DNA, 25 bp, Homo sapien
catcactgatactgggacttaagcc

SEQ ID NO: 1500530 - DNA, 25 bp, Homo sapien
gagttgaagcgttctccatctggga

SEQ ID NO: 1500531 - DNA, 25 bp, Homo sapien
tataaactgcaaggtacaacacaag

SEQ ID NO: 1500532 - DNA, 25 bp, Homo sapien
caaggtttggattaggccgactgat

SEQ ID NO: 1500533 - DNA, 25 bp, Homo sapien
catccactaatttaacactacagca

SEQ ID NO: 1500534 - DNA, 25 bp, Homo sapien
tccacacaaaactgacaaatccata

SEQ ID NO: 1500535 - DNA, 25 bp, Homo sapien
tagagtttaaggctgttctatttct

SEQ ID NO: 1500536 - DNA, 25 bp, Homo sapien
aaattaatcacccacagactgccaa

SEQ ID NO: 1500537 - DNA, 25 bp, Homo sapien
cacacagttgggtcctttgctttgg

SEQ ID NO: 1500538 - DNA, 25 bp, Homo sapien
ttggtattggtctttcccaagagga

SEQ ID NO: 1500539 - DNA, 25 bp, Homo sapien
caagaggatgcccagattaaccacc

SEQ ID NO: 1500540 - DNA, 25 bp, Homo sapien
tttcgaccgtcctgaagacactgtt

SEQ ID NO: 1500541 - DNA, 25 bp, Homo sapien
gctgattggtcgactcagtgcacat

SEQ ID NO: 1500542 - DNA, 25 bp, Homo sapien
tgcagacgctggcaccacaaggctc

SEQ ID NO: 1500543 - DNA, 25 bp, Homo sapien
gggcctgggtcctcggttctcttga

SEQ ID NO: 1500544 - DNA, 25 bp, Homo sapien
tcggttctcttgagagcagccagcc

SEQ ID NO: 1500545 - DNA, 25 bp, Homo sapien
ccagcgaccccgtgtggccggaaga

SEQ ID NO: 1500546 - DNA, 25 bp, Homo sapien
tgggatgacagaggatctccccagc

SEQ ID NO: 1500547 - DNA, 25 bp, Homo sapien
gatcctcgcggagccattgagacag

SEQ ID NO: 1500548 - DNA, 25 bp, Homo sapien
tcagtgggagtcacccggtgtgcac

SEQ ID NO: 1500549 - DNA, 25 bp, Homo sapien
ggtgactcctgaaccttgtgagtgc

SEQ ID NO: 1500550 - DNA, 25 bp, Homo sapien
gtgagtgcaaagatacagtaaggaa

SEQ ID NO: 1500551 - DNA, 25 bp, Homo sapien
actgggtgaggccttcgcaggcttc

SEQ ID NO: 1500552 - DNA, 25 bp, Homo sapien
tcctcggatgttagaggtgactcct

SEQ ID NO: 1500553 - DNA, 25 bp, Homo sapien
taaccctggtatgagggagaacctc

SEQ ID NO: 1500554 - DNA, 25 bp, Homo sapien
ggaccgcatccatcgagaagagctg

SEQ ID NO: 1500555 - DNA, 25 bp, Homo sapien
gaaaagcttgggcatcttagcacgt

SEQ ID NO: 1500556 - DNA, 25 bp, Homo sapien
tcagatcccttggacgtcaggaccg

SEQ ID NO: 1500557 - DNA, 25 bp, Homo sapien
tctcttttccgctgcttatcaattg

SEQ ID NO: 1500558 - DNA, 25 bp, Homo sapien
gcatcgatttcagcaaaatggtctc

SEQ ID NO: 1500559 - DNA, 25 bp, Homo sapien
aaatggtctcttttccgctgcttat

SEQ ID NO: 1500560 - DNA, 25 bp, Homo sapien
ccttgtcttccgcatcgatttcagc

SEQ ID NO: 1500561 - DNA, 25 bp, Homo sapien
caatatcttctagcttctggatatc

SEQ ID NO: 1500562 - DNA, 25 bp, Homo sapien
tatcttctagcttctggatatcaac

SEQ ID NO: 1500563 - DNA, 25 bp, Homo sapien
atcttctagcttctggatatcaacc

SEQ ID NO: 1500564 - DNA, 25 bp, Homo sapien
ctgcaatatcttctagcttctggat

SEQ ID NO: 1500565 - DNA, 25 bp, Homo sapien
atcttgttgccgtctcttttgttgc

SEQ ID NO: 1500566 - DNA, 25 bp, Homo sapien
ttgttgccgtctcttttgttgctct

SEQ ID NO: 1500567 - DNA, 25 bp, Homo sapien
tcccatcttgttgccgtctcttttg

SEQ ID NO: 1500568 - DNA, 25 bp, Homo sapien
gccgtctcttttgttgctcttgaaa

SEQ ID NO: 1500569 - DNA, 25 bp, Homo sapien
ctgtgaattgaggctgtttacactc

SEQ ID NO: 1500570 - DNA, 25 bp, Homo sapien
ttgaggctgtttacactcattcccc

SEQ ID NO: 1500571 - DNA, 25 bp, Homo sapien
gaattgaggctgtttacactcattc

SEQ ID NO: 1500572 - DNA, 25 bp, Homo sapien
gtgaattgaggctgtttacactcat

SEQ ID NO: 1500573 - DNA, 25 bp, Homo sapien
ttgagatgtgaatggatgcgtgcag

SEQ ID NO: 1500574 - DNA, 25 bp, Homo sapien
gagatgtgaatggatgcgtgcaggc

SEQ ID NO: 1500575 - DNA, 25 bp, Homo sapien
tgagatgtgaatggatgcgtgcagg

SEQ ID NO: 1500576 - DNA, 25 bp, Homo sapien
gaactgtggagctgattgtaccttc

SEQ ID NO: 1500577 - DNA, 25 bp, Homo sapien
tctgtactgcctaatacacaagtgg

SEQ ID NO: 1500578 - DNA, 25 bp, Homo sapien
ggagtagggctacgtcttattggtc

SEQ ID NO: 1500579 - DNA, 25 bp, Homo sapien
caaaggatggtgacttcccatggag

SEQ ID NO: 1500580 - DNA, 25 bp, Homo sapien
gttttgtctccctttaataagcaca

SEQ ID NO: 1500581 - DNA, 25 bp, Homo sapien
taactcacaaagtggcccatgtggg

SEQ ID NO: 1500582 - DNA, 25 bp, Homo sapien
tggagatgaggcctgttctccctcc

SEQ ID NO: 1500583 - DNA, 25 bp, Homo sapien
tattggtttggttgtagggtggaga

SEQ ID NO: 1500584 - DNA, 25 bp, Homo sapien
tagctttccagttactagatttgct

SEQ ID NO: 1500585 - DNA, 25 bp, Homo sapien
tgaaggatccaaaacattctctccg

SEQ ID NO: 1500586 - DNA, 25 bp, Homo sapien
ttcagattcatggtcttaaatagct

SEQ ID NO: 1500587 - DNA, 25 bp, Homo sapien
tgctttgatggtagagtttagatct

SEQ ID NO: 1500588 - DNA, 25 bp, Homo sapien
aggtcattgccccatctattggctt

SEQ ID NO: 1500589 - DNA, 25 bp, Homo sapien
tgtctcaattccacagggctttgag

SEQ ID NO: 1500590 - DNA, 25 bp, Homo sapien
tgtgtctcaattccacagggctttg

SEQ ID NO: 1500591 - DNA, 25 bp, Homo sapien
tccttattcctggaggtcattgccc

SEQ ID NO: 1500592 - DNA, 25 bp, Homo sapien
catctatggcagagctcatggaaag

SEQ ID NO: 1500593 - DNA, 25 bp, Homo sapien
aaaatattccccatcacatctatgg

SEQ ID NO: 1500594 - DNA, 25 bp, Homo sapien
actgttcaaaatattccccatcaca

SEQ ID NO: 1500595 - DNA, 25 bp, Homo sapien
atggaaagtgacatctggatcaagc

SEQ ID NO: 1500596 - DNA, 25 bp, Homo sapien
caagtttctgtttgaaactcaggga

SEQ ID NO: 1500597 - DNA, 25 bp, Homo sapien
gaaactcagggatgcttgatccttt

SEQ ID NO: 1500598 - DNA, 25 bp, Homo sapien
aggcaaataaaatccaggtccccat

SEQ ID NO: 1500599 - DNA, 25 bp, Homo sapien
aggcatggcaaaagctgctcccagg

SEQ ID NO: 1500600 - DNA, 25 bp, Homo sapien
gctcccaggaggcaggcaaataaaa

SEQ ID NO: 1500601 - DNA, 25 bp, Homo sapien
ggcatggcaaaagctgctcccagga

SEQ ID NO: 1500602 - DNA, 25 bp, Homo sapien
gaggagagacggtcatgcagaaaat

SEQ ID NO: 1500603 - DNA, 25 bp, Homo sapien
aggagagacggtcatgcagaaaatc

SEQ ID NO: 1500604 - DNA, 25 bp, Homo sapien
ggagagacggtcatgcagaaaatct

SEQ ID NO: 1500605 - DNA, 25 bp, Homo sapien
aatgatgatctgaatcaggactgtc

SEQ ID NO: 1500606 - DNA, 25 bp, Homo sapien
tgtctggtgcctgtattgtggaact

SEQ ID NO: 1500607 - DNA, 25 bp, Homo sapien
tgaatgatgatctgaatcaggactg

SEQ ID NO: 1500608 - DNA, 25 bp, Homo sapien
ctgtattgtggaactctggttgtgc

SEQ ID NO: 1500609 - DNA, 25 bp, Homo sapien
tcatagctgaagttgatataaccag

SEQ ID NO: 1500610 - DNA, 25 bp, Homo sapien
ctgaagttgatataaccagggtgcc

SEQ ID NO: 1500611 - DNA, 25 bp, Homo sapien
agttgatataaccagggtgcccagg

SEQ ID NO: 1500612 - DNA, 25 bp, Homo sapien
tagctgaagttgatataaccagggt

SEQ ID NO: 1500613 - DNA, 25 bp, Homo sapien
cattgatagcctgagaatgtgagtt

SEQ ID NO: 1500614 - DNA, 25 bp, Homo sapien
taatgcagtcctgtcaacattgata

SEQ ID NO: 1500615 - DNA, 25 bp, Homo sapien
tgcagtcctgtcaacattgatagcc

SEQ ID NO: 1500616 - DNA, 25 bp, Homo sapien
agtcctgtcaacattgatagcctga

SEQ ID NO: 1500617 - DNA, 25 bp, Homo sapien
cggtggccttatgctctggtaccac

SEQ ID NO: 1500618 - DNA, 25 bp, Homo sapien
caggaacgggcatcattggttgctg

SEQ ID NO: 1500619 - DNA, 25 bp, Homo sapien
agtgttggccaggaacgggcatcat

SEQ ID NO: 1500620 - DNA, 25 bp, Homo sapien
ttgctgggggatcacgggctgctga

SEQ ID NO: 1500621 - DNA, 25 bp, Homo sapien
gattggagtcatggagtgttggcca

SEQ ID NO: 1500622 - DNA, 25 bp, Homo sapien
aagcatctgaagtattcattcccct

SEQ ID NO: 1500623 - DNA, 25 bp, Homo sapien
tttattgtctgctaatggtactttt

SEQ ID NO: 1500624 - DNA, 25 bp, Homo sapien
tgtctgctaatggtacttttttagt

SEQ ID NO: 1500625 - DNA, 25 bp, Homo sapien
actcctgaaagcatctgaagtattc

SEQ ID NO: 1500626 - DNA, 25 bp, Homo sapien
aagcaatgtggagtactactaaatg

SEQ ID NO: 1500627 - DNA, 25 bp, Homo sapien
tgtggagtactactaaatgctacta

SEQ ID NO: 1500628 - DNA, 25 bp, Homo sapien
tggaaatgtaggaaattggttgaag

SEQ ID NO: 1500629 - DNA, 25 bp, Homo sapien
attggttgaagtcgtttttctcttg

SEQ ID NO: 1500630 - DNA, 25 bp, Homo sapien
cctgaatttgttattgcatgcagct

SEQ ID NO: 1500631 - DNA, 25 bp, Homo sapien
ttgcatgcagctgtgcaaatttgca

SEQ ID NO: 1500632 - DNA, 25 bp, Homo sapien
gaagatgggattttgtaaacctgca

SEQ ID NO: 1500633 - DNA, 25 bp, Homo sapien
ctagtcaggaccctatggaaggagc

SEQ ID NO: 1500634 - DNA, 25 bp, Homo sapien
acggtgtgtgtatttcaggctctgt

SEQ ID NO: 1500635 - DNA, 25 bp, Homo sapien
tcgtgcctactgctagaagcaaggt

SEQ ID NO: 1500636 - DNA, 25 bp, Homo sapien
cccaagccaggaagacgtgaaagat

SEQ ID NO: 1500637 - DNA, 25 bp, Homo sapien
caggctctgtgtttcgtgcctactg

SEQ ID NO: 1500638 - DNA, 25 bp, Homo sapien
tctagcactttgagcagtgtccctc

SEQ ID NO: 1500639 - DNA, 25 bp, Homo sapien
tctccctccgagatcctctagttgt

SEQ ID NO: 1500640 - DNA, 25 bp, Homo sapien
ctttcagaactaagagctccccagg

SEQ ID NO: 1500641 - DNA, 25 bp, Homo sapien
tgcattccagacagggagactgcct

SEQ ID NO: 1500642 - DNA, 25 bp, Homo sapien
ggaacgttcatttgcagctttgtta

SEQ ID NO: 1500643 - DNA, 25 bp, Homo sapien
cagcctgtatggacatttcagtaca

SEQ ID NO: 1500644 - DNA, 25 bp, Homo sapien
tacaaaatgaacacagccggcgctt

SEQ ID NO: 1500645 - DNA, 25 bp, Homo sapien
ccacaacactcgagtgtgtttcaga

SEQ ID NO: 1500646 - DNA, 25 bp, Homo sapien
ctatggaatcctgctctaaggtggg

SEQ ID NO: 1500647 - DNA, 25 bp, Homo sapien
tgccatccttcatgtaaagctgtac

SEQ ID NO: 1500648 - DNA, 25 bp, Homo sapien
ggggccggtgtcatttctccaagca

SEQ ID NO: 1500649 - DNA, 25 bp, Homo sapien
aaagctgtactatggaatcctgctc

SEQ ID NO: 1500650 - DNA, 25 bp, Homo sapien
tgagtaacaatgacgtgctgcttgt

SEQ ID NO: 1500651 - DNA, 25 bp, Homo sapien
ccagactgtcagtgagtaacaatga

SEQ ID NO: 1500652 - DNA, 25 bp, Homo sapien
ctgtcagtgagtaacaatgacgtgc

SEQ ID NO: 1500653 - DNA, 25 bp, Homo sapien
ccatcctggcccagactgtcagtga

SEQ ID NO: 1500654 - DNA, 25 bp, Homo sapien
tatgtgagttcatagtattccagct

SEQ ID NO: 1500655 - DNA, 25 bp, Homo sapien
catctttgaaaggttccagtagttt

SEQ ID NO: 1500656 - DNA, 25 bp, Homo sapien
agttcatagtattccagctcttcaa

SEQ ID NO: 1500657 - DNA, 25 bp, Homo sapien
tcatctttgaaaggttccagtagtt

SEQ ID NO: 1500658 - DNA, 25 bp, Homo sapien
cacattcttgtgaccctttgaatga

SEQ ID NO: 1500659 - DNA, 25 bp, Homo sapien
cagctttagctctacaccatggcct

SEQ ID NO: 1500660 - DNA, 25 bp, Homo sapien
gaagacgtcttaacagctttagctc

SEQ ID NO: 1500661 - DNA, 25 bp, Homo sapien
tggctgactcttccacattcttgtg

SEQ ID NO: 1500662 - DNA, 25 bp, Homo sapien
catggctgttctaacggcacatcca

SEQ ID NO: 1500663 - DNA, 25 bp, Homo sapien
tttatctcctgcgtaaatgcggcac

SEQ ID NO: 1500664 - DNA, 25 bp, Homo sapien
atccatttctggaccgacaaccgcg

SEQ ID NO: 1500665 - DNA, 25 bp, Homo sapien
gacaaccgcgtgactgaacttgcag

SEQ ID NO: 1500666 - DNA, 25 bp, Homo sapien
gcccatcgcatcagactcggccgct

SEQ ID NO: 1500667 - DNA, 25 bp, Homo sapien
tgtcgtgggcgcgttcggcctccgc

SEQ ID NO: 1500668 - DNA, 25 bp, Homo sapien
aggaattaaacgcccgcccatcgca

SEQ ID NO: 1500669 - DNA, 25 bp, Homo sapien
gagggacccgccaggagcggaagga

SEQ ID NO: 1500670 - DNA, 25 bp, Homo sapien
tgatttcagccaaggagggccttaa

SEQ ID NO: 1500671 - DNA, 25 bp, Homo sapien
gagggccttaagctgctactccagc

SEQ ID NO: 1500672 - DNA, 25 bp, Homo sapien
gagacacatgatttcagccaaggag

SEQ ID NO: 1500673 - DNA, 25 bp, Homo sapien
gccaaggagggccttaagctgctac

SEQ ID NO: 1500674 - DNA, 25 bp, Homo sapien
ctggaaaaaggaatgagaaccttca

SEQ ID NO: 1500675 - DNA, 25 bp, Homo sapien
tggaaaaaggaatgagaaccttcat

SEQ ID NO: 1500676 - DNA, 25 bp, Homo sapien
cgactccaattgatgcataacttta

SEQ ID NO: 1500677 - DNA, 25 bp, Homo sapien
tcatattctcgactccaattgatgc

SEQ ID NO: 1500678 - DNA, 25 bp, Homo sapien
ttccctgaattctcggattatcata

SEQ ID NO: 1500679 - DNA, 25 bp, Homo sapien
gaattctcggattatcatattctcg

SEQ ID NO: 1500680 - DNA, 25 bp, Homo sapien
gtgttggcgttgtcatgggaattct

SEQ ID NO: 1500681 - DNA, 25 bp, Homo sapien
tttagacaactgaaacactgtgcaa

SEQ ID NO: 1500682 - DNA, 25 bp, Homo sapien
tggcgttgtcatgggaattctgcag

SEQ ID NO: 1500683 - DNA, 25 bp, Homo sapien
tctgcaggctttagacaactgaaac

SEQ ID NO: 1500684 - DNA, 25 bp, Homo sapien
tggagaaagtgcgtgtctgacgcta

SEQ ID NO: 1500685 - DNA, 25 bp, Homo sapien
ttggagaaagtgcgtgtctgacgct

SEQ ID NO: 1500686 - DNA, 25 bp, Homo sapien
atggtctgagacaacggaagggcaa

SEQ ID NO: 1500687 - DNA, 25 bp, Homo sapien
tatggtggtatggtctgagacaacg

SEQ ID NO: 1500688 - DNA, 25 bp, Homo sapien
tatggtctgagacaacggaagggca

SEQ ID NO: 1500689 - DNA, 25 bp, Homo sapien
ggagggtatggtggtatggtctgag

SEQ ID NO: 1500690 - DNA, 25 bp, Homo sapien
cagccttggaagaacgtgcattaca

SEQ ID NO: 1500691 - DNA, 25 bp, Homo sapien
tagaggatgtcggagatgttcagcc

SEQ ID NO: 1500692 - DNA, 25 bp, Homo sapien
gtgcattacaaagggcaggctcacc

SEQ ID NO: 1500693 - DNA, 25 bp, Homo sapien
tatgaatctgatgctgtaaaacgga

SEQ ID NO: 1500694 - DNA, 25 bp, Homo sapien
cagtaaatctattgaatctatggca

SEQ ID NO: 1500695 - DNA, 25 bp, Homo sapien
gaggttcagctgcatcaaatttagg

SEQ ID NO: 1500696 - DNA, 25 bp, Homo sapien
tgaagatttggaccatcatataact

SEQ ID NO: 1500697 - DNA, 25 bp, Homo sapien
gctttaatacagctaagactgcaga

SEQ ID NO: 1500698 - DNA, 25 bp, Homo sapien
tagaattcgcattttgtccactgaa

SEQ ID NO: 1500699 - DNA, 25 bp, Homo sapien
gttaccatgggcaagcctagaattc

SEQ ID NO: 1500700 - DNA, 25 bp, Homo sapien
aagcctagaattcgcattttgtcca

SEQ ID NO: 1500701 - DNA, 25 bp, Homo sapien
tgggcaagcctagaattcgcatttt

SEQ ID NO: 1500702 - DNA, 25 bp, Homo sapien
tggattgggaaagaaacactcaaga

SEQ ID NO: 1500703 - DNA, 25 bp, Homo sapien
cactcaagatatgctgctggaggtg

SEQ ID NO: 1500704 - DNA, 25 bp, Homo sapien
gatgttaattcctgaaactctatag

SEQ ID NO: 1500705 - DNA, 25 bp, Homo sapien
ctggaggtgcaaatgcatacaactt

SEQ ID NO: 1500706 - DNA, 25 bp, Homo sapien
cctacctcaaagtcgaaaagatatt

SEQ ID NO: 1500707 - DNA, 25 bp, Homo sapien
cctcaaagtcgaaaagatattctcc

SEQ ID NO: 1500708 - DNA, 25 bp, Homo sapien
tacctcaaagtcgaaaagatattct

SEQ ID NO: 1500709 - DNA, 25 bp, Homo sapien
ttcctacctcaaagtcgaaaagata

SEQ ID NO: 1500710 - DNA, 25 bp, Homo sapien
gcactttcagcattgctgctacttt

SEQ ID NO: 1500711 - DNA, 25 bp, Homo sapien
actttcagcattgctgctactttcc

SEQ ID NO: 1500712 - DNA, 25 bp, Homo sapien
cactttcagcattgctgctactttc

SEQ ID NO: 1500713 - DNA, 25 bp, Homo sapien
gaaccaggacagtatgagcacaagg

SEQ ID NO: 1500714 - DNA, 25 bp, Homo sapien
tgccacagggtccatgacagtccag

SEQ ID NO: 1500715 - DNA, 25 bp, Homo sapien
gaagtctgtgggtagttctctaacc

SEQ ID NO: 1500716 - DNA, 25 bp, Homo sapien
cacatgtgcaggcaaaagagattct

SEQ ID NO: 1500717 - DNA, 25 bp, Homo sapien
agcttcccactaagcagctctttgg

SEQ ID NO: 1500718 - DNA, 25 bp, Homo sapien
cacaacttgtagggctgatgtgtga

SEQ ID NO: 1500719 - DNA, 25 bp, Homo sapien
cttcccactaagcagctctttggtg

SEQ ID NO: 1500720 - DNA, 25 bp, Homo sapien
acaacttgtagggctgatgtgtgat

SEQ ID NO: 1500721 - DNA, 25 bp, Homo sapien
aatgcctcagaatgtaaagatggcc

SEQ ID NO: 1500722 - DNA, 25 bp, Homo sapien
gcctcagaatgtaaagatggccctt

SEQ ID NO: 1500723 - DNA, 25 bp, Homo sapien
tgcctcagaatgtaaagatggccct

SEQ ID NO: 1500724 - DNA, 25 bp, Homo sapien
tgaatgcctcagaatgtaaagatgg

SEQ ID NO: 1500725 - DNA, 25 bp, Homo sapien
gaaaaatataatgatctccttattt

SEQ ID NO: 1500726 - DNA, 25 bp, Homo sapien
cacatgttctgtgtttcgctttccg

SEQ ID NO: 1500727 - DNA, 25 bp, Homo sapien
tctgtgtttcgctttccgtgtgtca

SEQ ID NO: 1500728 - DNA, 25 bp, Homo sapien
atgattatcccaaatgcctaaaaac

SEQ ID NO: 1500729 - DNA, 25 bp, Homo sapien
gctttccgtgtgtcatgattatccc

SEQ ID NO: 1500730 - DNA, 25 bp, Homo sapien
agcagttcctgaaattggatgggtg

SEQ ID NO: 1500731 - DNA, 25 bp, Homo sapien
cttttgttccacagcagttcctgaa

SEQ ID NO: 1500732 - DNA, 25 bp, Homo sapien
acagcagttcctgaaattggatggg

SEQ ID NO: 1500733 - DNA, 25 bp, Homo sapien
tgttccacagcagttcctgaaattg

SEQ ID NO: 1500734 - DNA, 25 bp, Homo sapien
tcccacttaggagtattgcttttct

SEQ ID NO: 1500735 - DNA, 25 bp, Homo sapien
gcgttttgacactttatcaaactgt

SEQ ID NO: 1500736 - DNA, 25 bp, Homo sapien
ttccttcctgcgttttgacacttta

SEQ ID NO: 1500737 - DNA, 25 bp, Homo sapien
caaaggttcccacttaggagtattg

SEQ ID NO: 1500738 - DNA, 25 bp, Homo sapien
tgactagtaaactcagattcaccca

SEQ ID NO: 1500739 - DNA, 25 bp, Homo sapien
ccacaaaactgggtatggtaacata

SEQ ID NO: 1500740 - DNA, 25 bp, Homo sapien
tggtaacatagctcatggttattaa

SEQ ID NO: 1500741 - DNA, 25 bp, Homo sapien
tgctccagtctgactagtaaactca

SEQ ID NO: 1500742 - DNA, 25 bp, Homo sapien
gaaacctccttcactgttgctgtca

SEQ ID NO: 1500743 - DNA, 25 bp, Homo sapien
agtaccatgtgttggtttacacaca

SEQ ID NO: 1500744 - DNA, 25 bp, Homo sapien
gtcagcctctggtggattatcagca

SEQ ID NO: 1500745 - DNA, 25 bp, Homo sapien
tctatcgtacttgcactaaattcgt

SEQ ID NO: 1500746 - DNA, 25 bp, Homo sapien
aatgaacaccagtgaaccagacatg

SEQ ID NO: 1500747 - DNA, 25 bp, Homo sapien
acaccagtgaaccagacatgaaagc

SEQ ID NO: 1500748 - DNA, 25 bp, Homo sapien
tgaacaccagtgaaccagacatgaa

SEQ ID NO: 1500749 - DNA, 25 bp, Homo sapien
caaaatgaacaccagtgaaccagac

SEQ ID NO: 1500750 - DNA, 25 bp, Homo sapien
gtcagcacatgctaatgtcccaagc

SEQ ID NO: 1500751 - DNA, 25 bp, Homo sapien
tatggttgggcatgtagtagagtaa

SEQ ID NO: 1500752 - DNA, 25 bp, Homo sapien
gctttcaaagttgccaaattctctc

SEQ ID NO: 1500753 - DNA, 25 bp, Homo sapien
gttttatatggttgggcatgtagta

SEQ ID NO: 1500754 - DNA, 25 bp, Homo sapien
ctcaagacgatgactatgatgtggc

SEQ ID NO: 1500755 - DNA, 25 bp, Homo sapien
tatgatgtggcccctgagacagtca

SEQ ID NO: 1500756 - DNA, 25 bp, Homo sapien
ctaggtatgaggatagaagtggtcc

SEQ ID NO: 1500757 - DNA, 25 bp, Homo sapien
gaagtggtccctcaagacgatgact

SEQ ID NO: 1500758 - DNA, 25 bp, Homo sapien
tattctggtcaaatggcttttgaga

SEQ ID NO: 1500759 - DNA, 25 bp, Homo sapien
gtagtgcatggtatcttggctatca

SEQ ID NO: 1500760 - DNA, 25 bp, Homo sapien
gctgtgcctgtattctggtcaaatg

SEQ ID NO: 1500761 - DNA, 25 bp, Homo sapien
ttggctatcactgcagagccaccca

SEQ ID NO: 1500762 - DNA, 25 bp, Homo sapien
ccaggaattcatgtatgggcagcat

SEQ ID NO: 1500763 - DNA, 25 bp, Homo sapien
cttggattcccaggaattcatgtat

SEQ ID NO: 1500764 - DNA, 25 bp, Homo sapien
tggattcccaggaattcatgtatgg

SEQ ID NO: 1500765 - DNA, 25 bp, Homo sapien
attcccaggaattcatgtatgggca

SEQ ID NO: 1500766 - DNA, 25 bp, Homo sapien
cagtgtaagcagtctgtgttgagca

SEQ ID NO: 1500767 - DNA, 25 bp, Homo sapien
caacagtgtaagcagtctgtgttga

SEQ ID NO: 1500768 - DNA, 25 bp, Homo sapien
acagtgtaagcagtctgtgttgagc

SEQ ID NO: 1500769 - DNA, 25 bp, Homo sapien
agcaacagtgtaagcagtctgtgtt

SEQ ID NO: 1500770 - DNA, 25 bp, Homo sapien
tctttgtacatgtaactcttccagg

SEQ ID NO: 1500771 - DNA, 25 bp, Homo sapien
tttctttgtacatgtaactcttcca

SEQ ID NO: 1500772 - DNA, 25 bp, Homo sapien
cagctaaaagtaaagtacaaccttg

SEQ ID NO: 1500773 - DNA, 25 bp, Homo sapien
ttgtacatgtaactcttccaggaac

SEQ ID NO: 1500774 - DNA, 25 bp, Homo sapien
tcaatatgccaagtcccaggctact

SEQ ID NO: 1500775 - DNA, 25 bp, Homo sapien
gctgctcatacttaaggacaagata

SEQ ID NO: 1500776 - DNA, 25 bp, Homo sapien
ggactgccaatttgaaggatgtggt

SEQ ID NO: 1500777 - DNA, 25 bp, Homo sapien
catttgggccatctttttggaacca

SEQ ID NO: 1500778 - DNA, 25 bp, Homo sapien
cctccacggagagcgctgagcgccg

SEQ ID NO: 1500779 - DNA, 25 bp, Homo sapien
ccctcctccacggagagcgctgagc

SEQ ID NO: 1500780 - DNA, 25 bp, Homo sapien
ctccctcctccacggagagcgctga

SEQ ID NO: 1500781 - DNA, 25 bp, Homo sapien
ctcctccacggagagcgctgagcgc

SEQ ID NO: 1500782 - DNA, 25 bp, Homo sapien
ggtttggcgcctggaaaactcttca

SEQ ID NO: 1500783 - DNA, 25 bp, Homo sapien
cgctgcctctagagcgagcgtacgg

SEQ ID NO: 1500784 - DNA, 25 bp, Homo sapien
tctcctcgccgcttgcaggtttggc

SEQ ID NO: 1500785 - DNA, 25 bp, Homo sapien
ggaaaactcttcacgttctgctttc

SEQ ID NO: 1500786 - DNA, 25 bp, Homo sapien
ttacatcaaaaagccctccaagagg

SEQ ID NO: 1500787 - DNA, 25 bp, Homo sapien
tccttgccgggaagattgatttccc

SEQ ID NO: 1500788 - DNA, 25 bp, Homo sapien
ccctgctgagatggttgtaagttgc

SEQ ID NO: 1500789 - DNA, 25 bp, Homo sapien
gaggctttgcgctttatagattcca

SEQ ID NO: 1500790 - DNA, 25 bp, Homo sapien
gactctgttaaccatctaccccgaa

SEQ ID NO: 1500791 - DNA, 25 bp, Homo sapien
tctccaacacccatgagcaagaatg

SEQ ID NO: 1500792 - DNA, 25 bp, Homo sapien
tgttccaagccctaggagtgctaat

SEQ ID NO: 1500793 - DNA, 25 bp, Homo sapien
gcaagaatgtatgcccttgtgcctg

SEQ ID NO: 1500794 - DNA, 25 bp, Homo sapien
ttaaaacctcaagtgtgtacctgga

SEQ ID NO: 1500795 - DNA, 25 bp, Homo sapien
ggcagctggcataggaatctaaaga

SEQ ID NO: 1500796 - DNA, 25 bp, Homo sapien
gagcttggagacagaacccggactt

SEQ ID NO: 1500797 - DNA, 25 bp, Homo sapien
tcagtttgagagacatgggcaggat

SEQ ID NO: 1500798 - DNA, 25 bp, Homo sapien
catgaagcctgttgaagagtttcag

SEQ ID NO: 1500799 - DNA, 25 bp, Homo sapien
tgaagcctgttgaagagtttcagca

SEQ ID NO: 1500800 - DNA, 25 bp, Homo sapien
ccatgaagcctgttgaagagtttca

SEQ ID NO: 1500801 - DNA, 25 bp, Homo sapien
gtttccatgaagcctgttgaagagt

SEQ ID NO: 1500802 - DNA, 25 bp, Homo sapien
ctccaacaacttccatcagtttgct

SEQ ID NO: 1500803 - DNA, 25 bp, Homo sapien
tctataaaactggttcgtgaagccg

SEQ ID NO: 1500804 - DNA, 25 bp, Homo sapien
catcagtttgcttttgccaattcta

SEQ ID NO: 1500805 - DNA, 25 bp, Homo sapien
aacctgcttattacgatcttgtgaa

SEQ ID NO: 1500806 - DNA, 25 bp, Homo sapien
ggctttctttaaatagttgatgatg

SEQ ID NO: 1500807 - DNA, 25 bp, Homo sapien
ctttaaatagttgatgatgttctgg

SEQ ID NO: 1500808 - DNA, 25 bp, Homo sapien
tggattagactaacaacttgaactc

SEQ ID NO: 1500809 - DNA, 25 bp, Homo sapien
tctggattagactaacaacttgaac

SEQ ID NO: 1500810 - DNA, 25 bp, Homo sapien
tggctgcttgacgtgctgactgatg

SEQ ID NO: 1500811 - DNA, 25 bp, Homo sapien
aatggctttagagtattgttttggg

SEQ ID NO: 1500812 - DNA, 25 bp, Homo sapien
tgcttgacgtgctgactgatgtgga

SEQ ID NO: 1500813 - DNA, 25 bp, Homo sapien
ctggttgtttggctgcttgacgtgc

SEQ ID NO: 1500814 - DNA, 25 bp, Homo sapien
gcactgtgttgtaaatattgatgga

SEQ ID NO: 1500815 - DNA, 25 bp, Homo sapien
aactctcctcctgaacaacaggact

SEQ ID NO: 1500816 - DNA, 25 bp, Homo sapien
tgtgctcaggggatagcccaactct

SEQ ID NO: 1500817 - DNA, 25 bp, Homo sapien
tgatggagcctccaagtagagccca

SEQ ID NO: 1500818 - DNA, 25 bp, Homo sapien
agacaagcccacatctattacctta

SEQ ID NO: 1500819 - DNA, 25 bp, Homo sapien
ccacatctattaccttacaactgca

SEQ ID NO: 1500820 - DNA, 25 bp, Homo sapien
ttaccttacaactgcatctcattgc

SEQ ID NO: 1500821 - DNA, 25 bp, Homo sapien
ttacaactgcatctcattgcaagtg

SEQ ID NO: 1500822 - DNA, 25 bp, Homo sapien
gcctggcttgggtgtactgttccat

SEQ ID NO: 1500823 - DNA, 25 bp, Homo sapien
aatgttagctataatgagtgttcta

SEQ ID NO: 1500824 - DNA, 25 bp, Homo sapien
tggcttgggtgtactgttccataca

SEQ ID NO: 1500825 - DNA, 25 bp, Homo sapien
gagtgttctaatcccatctcaggtt

SEQ ID NO: 1500826 - DNA, 25 bp, Homo sapien
ggaaggcactcttgaattgcaactt

SEQ ID NO: 1500827 - DNA, 25 bp, Homo sapien
aggcactcttgaattgcaacttagg

SEQ ID NO: 1500828 - DNA, 25 bp, Homo sapien
aggaaggcactcttgaattgcaact

SEQ ID NO: 1500829 - DNA, 25 bp, Homo sapien
gaaggcactcttgaattgcaactta

SEQ ID NO: 1500830 - DNA, 25 bp, Homo sapien
ccctggccaaggtctaccggcagga

SEQ ID NO: 1500831 - DNA, 25 bp, Homo sapien
aggtctaccggcaggacgtctcccg

SEQ ID NO: 1500832 - DNA, 25 bp, Homo sapien
ctcatcgtggcggagggcgaggctc

SEQ ID NO: 1500833 - DNA, 25 bp, Homo sapien
cgctgccgggacctcggaggcgcct

SEQ ID NO: 1500834 - DNA, 25 bp, Homo sapien
gtcaggctcgaagcacagcactttc

SEQ ID NO: 1500835 - DNA, 25 bp, Homo sapien
ggtcaggctcgaagcacagcacttt

SEQ ID NO: 1500836 - DNA, 25 bp, Homo sapien
tcaggctcgaagcacagcactttct

SEQ ID NO: 1500837 - DNA, 25 bp, Homo sapien
aggctcgaagcacagcactttctcc

SEQ ID NO: 1500838 - DNA, 25 bp, Homo sapien
ctcagcggccaccgttgcagtcggg

SEQ ID NO: 1500839 - DNA, 25 bp, Homo sapien
catttaacgcgaagacagaaaccgt

SEQ ID NO: 1500840 - DNA, 25 bp, Homo sapien
atcggacggccagggcgtcccacag

SEQ ID NO: 1500841 - DNA, 25 bp, Homo sapien
gaaaccgtattcgagaagcctcctc

SEQ ID NO: 1500842 - DNA, 25 bp, Homo sapien
ggtcagacccacgtaaatccttcag

SEQ ID NO: 1500843 - DNA, 25 bp, Homo sapien
tgaaaacgtaaatgctgcaaggccc

SEQ ID NO: 1500844 - DNA, 25 bp, Homo sapien
cacccaaatctgaggagctgcaaga

SEQ ID NO: 1500845 - DNA, 25 bp, Homo sapien
tcagctcccggagacttaggtggac

SEQ ID NO: 1500846 - DNA, 25 bp, Homo sapien
ttctctcctcttttagaccgacagc

SEQ ID NO: 1500847 - DNA, 25 bp, Homo sapien
ctcctcttttagaccgacagccggg

SEQ ID NO: 1500848 - DNA, 25 bp, Homo sapien
ctcttttagaccgacagccgggttg

SEQ ID NO: 1500849 - DNA, 25 bp, Homo sapien
tcttttagaccgacagccgggttga

SEQ ID NO: 1500850 - DNA, 25 bp, Homo sapien
aattagaagttagatcaggaaaact

SEQ ID NO: 1500851 - DNA, 25 bp, Homo sapien
ttagaagttagatcaggaaaactaa

SEQ ID NO: 1500852 - DNA, 25 bp, Homo sapien
agaagttagatcaggaaaactaatt

SEQ ID NO: 1500853 - DNA, 25 bp, Homo sapien
gaaaattagaagttagatcaggaaa

SEQ ID NO: 1500854 - DNA, 25 bp, Homo sapien
cattaaaatggatcagatattctgg

SEQ ID NO: 1500855 - DNA, 25 bp, Homo sapien
ttaaaatggatcagatattctggga

SEQ ID NO: 1500856 - DNA, 25 bp, Homo sapien
attaaaatggatcagatattctggg

SEQ ID NO: 1500857 - DNA, 25 bp, Homo sapien
ccattaaaatggatcagatattctg

SEQ ID NO: 1500858 - DNA, 25 bp, Homo sapien
caactggggtttccagaatcaccca

SEQ ID NO: 1500859 - DNA, 25 bp, Homo sapien
gaaacaactggggtttccagaatca

SEQ ID NO: 1500860 - DNA, 25 bp, Homo sapien
atacaatcgacttaaaagtaactat

SEQ ID NO: 1500861 - DNA, 25 bp, Homo sapien
aatccaaatacaatcgacttaaaag

SEQ ID NO: 1500862 - DNA, 25 bp, Homo sapien
gatatgaaacaacgactaaaagtac

SEQ ID NO: 1500863 - DNA, 25 bp, Homo sapien
taaaagtacctcaaagcaatagaaa

SEQ ID NO: 1500864 - DNA, 25 bp, Homo sapien
caacgactaaaagtacctcaaagca

SEQ ID NO: 1500865 - DNA, 25 bp, Homo sapien
tttagtttgatatgaaacaacgact

SEQ ID NO: 1500866 - DNA, 25 bp, Homo sapien
catgatcttctgctgcccatctatc

SEQ ID NO: 1500867 - DNA, 25 bp, Homo sapien
caatttacgctgtaatctacgattt

SEQ ID NO: 1500868 - DNA, 25 bp, Homo sapien
cggtatcacgaagcacatgatcttc

SEQ ID NO: 1500869 - DNA, 25 bp, Homo sapien
tacgattttcatcggtatcacgaag

SEQ ID NO: 1500870 - DNA, 25 bp, Homo sapien
agagtccacaccaggcaacctgcag

SEQ ID NO: 1500871 - DNA, 25 bp, Homo sapien
aggcaacctgcagcgcttcttcttt

SEQ ID NO: 1500872 - DNA, 25 bp, Homo sapien
acaccaggcaacctgcagcgcttct

SEQ ID NO: 1500873 - DNA, 25 bp, Homo sapien
tcttcagtggggaggccttttaaga

SEQ ID NO: 1500874 - DNA, 25 bp, Homo sapien
tcacactagctaatgatcggaaagt

SEQ ID NO: 1500875 - DNA, 25 bp, Homo sapien
tcataaatgggaccaaggcctggga

SEQ ID NO: 1500876 - DNA, 25 bp, Homo sapien
taggatcctacagtttcctgttgca

SEQ ID NO: 1500877 - DNA, 25 bp, Homo sapien
gcatccggtaaactcgcattttata

SEQ ID NO: 1500878 - DNA, 25 bp, Homo sapien
ctacagtcagaggaactgcttaatg

SEQ ID NO: 1500879 - DNA, 25 bp, Homo sapien
tcttcatccttgttttcactacagt

SEQ ID NO: 1500880 - DNA, 25 bp, Homo sapien
tgttttcactacagtcagaggaact

SEQ ID NO: 1500881 - DNA, 25 bp, Homo sapien
cttcatccttgttttcactacagtc

SEQ ID NO: 1500882 - DNA, 25 bp, Homo sapien
tcactgtgaatttttaccactaaaa

SEQ ID NO: 1500883 - DNA, 25 bp, Homo sapien
cactgtgaatttttaccactaaaat

SEQ ID NO: 1500884 - DNA, 25 bp, Homo sapien
tgcaatatcaaaattccatttttaa

SEQ ID NO: 1500885 - DNA, 25 bp, Homo sapien
ctgcaatatcaaaattccattttta

SEQ ID NO: 1500886 - DNA, 25 bp, Homo sapien
ttcccttcttgtttgaagctctggt

SEQ ID NO: 1500887 - DNA, 25 bp, Homo sapien
cccttcttgtttgaagctctggttc

SEQ ID NO: 1500888 - DNA, 25 bp, Homo sapien
cttgtttgaagctctggttcttctt

SEQ ID NO: 1500889 - DNA, 25 bp, Homo sapien
cttcttgtttgaagctctggttctt

SEQ ID NO: 1500890 - DNA, 25 bp, Homo sapien
aatgtagtaacaatcatcctccagc

SEQ ID NO: 1500891 - DNA, 25 bp, Homo sapien
atgtagtaacaatcatcctccagct

SEQ ID NO: 1500892 - DNA, 25 bp, Homo sapien
ataggattccaaaatcgttatgatg

SEQ ID NO: 1500893 - DNA, 25 bp, Homo sapien
gagtgtaatcaaaggttattcttaa

SEQ ID NO: 1500894 - DNA, 25 bp, Homo sapien
gtgtaatcaaaggttattcttaatc

SEQ ID NO: 1500895 - DNA, 25 bp, Homo sapien
gtaatcaaaggttattcttaatcca

SEQ ID NO: 1500896 - DNA, 25 bp, Homo sapien
ggagagtgtaatcaaaggttattct

SEQ ID NO: 1500897 - DNA, 25 bp, Homo sapien
ctgttagtgcttgtggcactttcct

SEQ ID NO: 1500898 - DNA, 25 bp, Homo sapien
actgggagagagttcctcctggctc

SEQ ID NO: 1500899 - DNA, 25 bp, Homo sapien
gatggattcaacaaaggcggactgg

SEQ ID NO: 1500900 - DNA, 25 bp, Homo sapien
ctgtggcgtggatggattcaacaaa

SEQ ID NO: 1500901 - DNA, 25 bp, Homo sapien
caaaggcggactgggagagagttcc

SEQ ID NO: 1500902 - DNA, 25 bp, Homo sapien
accggtggtcggctgactctctgtg

SEQ ID NO: 1500903 - DNA, 25 bp, Homo sapien
gctgaggtgaagcgctgctctcaga

SEQ ID NO: 1500904 - DNA, 25 bp, Homo sapien
gaagagcttgggcatgctggcggat

SEQ ID NO: 1500905 - DNA, 25 bp, Homo sapien
tgtcacagttggcactgtggcgcgt

SEQ ID NO: 1500906 - DNA, 25 bp, Homo sapien
ctggggcacccgagaatgaacctac

SEQ ID NO: 1500907 - DNA, 25 bp, Homo sapien
aacacaaagtacacgctggctctcc

SEQ ID NO: 1500908 - DNA, 25 bp, Homo sapien
catgcctggcactgactaaacacaa

SEQ ID NO: 1500909 - DNA, 25 bp, Homo sapien
cctggggcacccgagaatgaaccta

SEQ ID NO: 1500910 - DNA, 25 bp, Homo sapien
ggacatgggaatcacacgcactgta

SEQ ID NO: 1500911 - DNA, 25 bp, Homo sapien
tagcataggctaaacaaccagattg

SEQ ID NO: 1500912 - DNA, 25 bp, Homo sapien
tgcaatctgcgccaggtgtttcaac

SEQ ID NO: 1500913 - DNA, 25 bp, Homo sapien
tcatacacaagatacacctactggg

SEQ ID NO: 1500914 - DNA, 25 bp, Homo sapien
caacaggatgatgcttagaaggacc

SEQ ID NO: 1500915 - DNA, 25 bp, Homo sapien
aatggcactgggatgacttttggga

SEQ ID NO: 1500916 - DNA, 25 bp, Homo sapien
gacttttgggagttccaacaggatg

SEQ ID NO: 1500917 - DNA, 25 bp, Homo sapien
gatgcttagaaggacccctgaagga

SEQ ID NO: 1500918 - DNA, 25 bp, Homo sapien
gcaaatactttcacgcacctggaac

SEQ ID NO: 1500919 - DNA, 25 bp, Homo sapien
tctctcaggagcttatggatgtggc

SEQ ID NO: 1500920 - DNA, 25 bp, Homo sapien
tagttatctatcagacagggtggtc

SEQ ID NO: 1500921 - DNA, 25 bp, Homo sapien
cagggtggtctctttgtgtcgccca

SEQ ID NO: 1500922 - DNA, 25 bp, Homo sapien
gaattaaagactgcctcaagactgt

SEQ ID NO: 1500923 - DNA, 25 bp, Homo sapien
gaatggagccaatcacaaagggcca

SEQ ID NO: 1500924 - DNA, 25 bp, Homo sapien
caatgaagctgttaagtgccactga

SEQ ID NO: 1500925 - DNA, 25 bp, Homo sapien
gcagatggtcgcacaactctgtgaa

SEQ ID NO: 1500926 - DNA, 25 bp, Homo sapien
gaagatgatctgctatgcacaggtg

SEQ ID NO: 1500927 - DNA, 25 bp, Homo sapien
tgaagatgatctgctatgcacaggt

SEQ ID NO: 1500928 - DNA, 25 bp, Homo sapien
gtgaagatgatctgctatgcacagg

SEQ ID NO: 1500929 - DNA, 25 bp, Homo sapien
gattgtcagtgtagggctggaatcc

SEQ ID NO: 1500930 - DNA, 25 bp, Homo sapien
taagaaccttgacttccacctatag

SEQ ID NO: 1500931 - DNA, 25 bp, Homo sapien
ggaaccattgggaacaaacatcaaa

SEQ ID NO: 1500932 - DNA, 25 bp, Homo sapien
gagttaagtagccttgacagacacc

SEQ ID NO: 1500933 - DNA, 25 bp, Homo sapien
cacagtggtggcctagagcccatcc

SEQ ID NO: 1500934 - DNA, 25 bp, Homo sapien
tccctgaagggacggctattggtat

SEQ ID NO: 1500935 - DNA, 25 bp, Homo sapien
tggttcaagtgtctggcacagtggt

SEQ ID NO: 1500936 - DNA, 25 bp, Homo sapien
caaggctgatctcgagaattcaaag

SEQ ID NO: 1500937 - DNA, 25 bp, Homo sapien
gggggtaattgtcaggcacaagctt

SEQ ID NO: 1500938 - DNA, 25 bp, Homo sapien
ctggggggtaattgtcaggcacaag

SEQ ID NO: 1500939 - DNA, 25 bp, Homo sapien
tggggggtaattgtcaggcacaagc

SEQ ID NO: 1500940 - DNA, 25 bp, Homo sapien
gggtaattgtcaggcacaagcttcc

SEQ ID NO: 1500941 - DNA, 25 bp, Homo sapien
tgccccataaatgtaagagggtgga

SEQ ID NO: 1500942 - DNA, 25 bp, Homo sapien
aatcgcagcaaatgttgtgccccat

SEQ ID NO: 1500943 - DNA, 25 bp, Homo sapien
tgttgtgccccataaatgtaagagg

SEQ ID NO: 1500944 - DNA, 25 bp, Homo sapien
cagcaaatgttgtgccccataaatg

SEQ ID NO: 1500945 - DNA, 25 bp, Homo sapien
cagaaaaggacatctttccaaggat

SEQ ID NO: 1500946 - DNA, 25 bp, Homo sapien
tcaataaagccttcagattcttctc

SEQ ID NO: 1500947 - DNA, 25 bp, Homo sapien
tcttctcagaaaaggacatctttcc

SEQ ID NO: 1500948 - DNA, 25 bp, Homo sapien
gatcaaagtgcttcaataaagcctt

SEQ ID NO: 1500949 - DNA, 25 bp, Homo sapien
cagcagagcctcagatcaaatgatc

SEQ ID NO: 1500950 - DNA, 25 bp, Homo sapien
cacagcagagcctcagatcaaatga

SEQ ID NO: 1500951 - DNA, 25 bp, Homo sapien
ggacacagcagagcctcagatcaaa

SEQ ID NO: 1500952 - DNA, 25 bp, Homo sapien
ctggaagggagaggacacagcagag

SEQ ID NO: 1500953 - DNA, 25 bp, Homo sapien
agagaaagtggtccatagacatcat

SEQ ID NO: 1500954 - DNA, 25 bp, Homo sapien
ggagagaaagtggtccatagacatc

SEQ ID NO: 1500955 - DNA, 25 bp, Homo sapien
ctagccttgaaggccaaggagagaa

SEQ ID NO: 1500956 - DNA, 25 bp, Homo sapien
aaggagagaaagtggtccatagaca

SEQ ID NO: 1500957 - DNA, 25 bp, Homo sapien
actctgggaagaagtcatcgtggta

SEQ ID NO: 1500958 - DNA, 25 bp, Homo sapien
gggaagaagtcatcgtggtattctg

SEQ ID NO: 1500959 - DNA, 25 bp, Homo sapien
gaagtcatcgtggtattctgctaaa

SEQ ID NO: 1500960 - DNA, 25 bp, Homo sapien
aagtcatcgtggtattctgctaaaa

SEQ ID NO: 1500961 - DNA, 25 bp, Homo sapien
ccagagcgccaaactagacagagca

SEQ ID NO: 1500962 - DNA, 25 bp, Homo sapien
tgtgggcaactcaaacaacagagcc

SEQ ID NO: 1500963 - DNA, 25 bp, Homo sapien
agtaacaagtgtcgtgtcagagcac

SEQ ID NO: 1500964 - DNA, 25 bp, Homo sapien
gagggaaccgttagaagcaaatgca

SEQ ID NO: 1500965 - DNA, 25 bp, Homo sapien
acaggctttatttagatcaccaaaa

SEQ ID NO: 1500966 - DNA, 25 bp, Homo sapien
agacaggctttatttagatcaccaa

SEQ ID NO: 1500967 - DNA, 25 bp, Homo sapien
caaacaagacaggctttatttagat

SEQ ID NO: 1500968 - DNA, 25 bp, Homo sapien
aacaagacaggctttatttagatca

SEQ ID NO: 1500969 - DNA, 25 bp, Homo sapien
cagaggcctggaaccgtgcctgaaa

SEQ ID NO: 1500970 - DNA, 25 bp, Homo sapien
ggcaggctggaaaatatgacgacac

SEQ ID NO: 1500971 - DNA, 25 bp, Homo sapien
tgcctgaaactccttcactctgcag

SEQ ID NO: 1500972 - DNA, 25 bp, Homo sapien
ctctgcaggtgcgtggtgacagcct

SEQ ID NO: 1500973 - DNA, 25 bp, Homo sapien
ctgctggcatcttgaccgtggtcag

SEQ ID NO: 1500974 - DNA, 25 bp, Homo sapien
tcctacagcccctgccgatggaaca

SEQ ID NO: 1500975 - DNA, 25 bp, Homo sapien
gcccctgccgatggaacagaggcct

SEQ ID NO: 1500976 - DNA, 25 bp, Homo sapien
catcttgaccgtggtcagtttcttt

SEQ ID NO: 1500977 - DNA, 25 bp, Homo sapien
tgtctgcatatactgatagcaagcc

SEQ ID NO: 1500978 - DNA, 25 bp, Homo sapien
tgttgttcgcaaaatcattctgtct

SEQ ID NO: 1500979 - DNA, 25 bp, Homo sapien
tagatttggtttacttaggtgtaga

SEQ ID NO: 1500980 - DNA, 25 bp, Homo sapien
gccaattttgcagtacatcacagga

SEQ ID NO: 1500981 - DNA, 25 bp, Homo sapien
gatgtaatagaccacccaactcagc

SEQ ID NO: 1500982 - DNA, 25 bp, Homo sapien
tcctccgcagcttggatgtaataga

SEQ ID NO: 1500983 - DNA, 25 bp, Homo sapien
caatcctttggccttgctgtgtgac

SEQ ID NO: 1500984 - DNA, 25 bp, Homo sapien
cagctcatcacccaaacaggcaagc

SEQ ID NO: 1500985 - DNA, 25 bp, Homo sapien
tggattaccctctactgggcatatt

SEQ ID NO: 1500986 - DNA, 25 bp, Homo sapien
ttaccctctactgggcatatttgct

SEQ ID NO: 1500987 - DNA, 25 bp, Homo sapien
agtctgctccttcatcggatacttc

SEQ ID NO: 1500988 - DNA, 25 bp, Homo sapien
tcggatacttcaggtttacttccag

SEQ ID NO: 1500989 - DNA, 25 bp, Homo sapien
cccagagtggaaaagaggtcaactc

SEQ ID NO: 1500990 - DNA, 25 bp, Homo sapien
tgctctctaaggcagtttttgctga

SEQ ID NO: 1500991 - DNA, 25 bp, Homo sapien
tttgctgagcaaagagtcacttcca

SEQ ID NO: 1500992 - DNA, 25 bp, Homo sapien
ggatgatccacatcccgcacgagtg

SEQ ID NO: 1500993 - DNA, 25 bp, Homo sapien
ctcgtcagtggcctctgtcaagacc

SEQ ID NO: 1500994 - DNA, 25 bp, Homo sapien
ccaatccttcaggagattctgccat

SEQ ID NO: 1500995 - DNA, 25 bp, Homo sapien
cctccaatccttcaggagattctgc

SEQ ID NO: 1500996 - DNA, 25 bp, Homo sapien
cacctccaatccttcaggagattct

SEQ ID NO: 1500997 - DNA, 25 bp, Homo sapien
acttcctatgatgccacgttgtacg

SEQ ID NO: 1500998 - DNA, 25 bp, Homo sapien
cattccacttcctatgatgccacgt

SEQ ID NO: 1500999 - DNA, 25 bp, Homo sapien
tatgatgccacgttgtacgtgctta

SEQ ID NO: 1501000 - DNA, 25 bp, Homo sapien
cacgttgtacgtgcttatttctcat

SEQ ID NO: 1501001 - DNA, 25 bp, Homo sapien
gactgaagagtctgcacatgcacag

SEQ ID NO: 1501002 - DNA, 25 bp, Homo sapien
tacatatcccaaattgactgaagag

SEQ ID NO: 1501003 - DNA, 25 bp, Homo sapien
gggcttgatgagcaccctacatatc

SEQ ID NO: 1501004 - DNA, 25 bp, Homo sapien
gttcctagaagtggatcatccacag

SEQ ID NO: 1501005 - DNA, 25 bp, Homo sapien
agcaaagggaactttgatgataatc

SEQ ID NO: 1501006 - DNA, 25 bp, Homo sapien
aagggaactttgatgataatcagga

SEQ ID NO: 1501007 - DNA, 25 bp, Homo sapien
caaagggaactttgatgataatcag

SEQ ID NO: 1501008 - DNA, 25 bp, Homo sapien
gaactttgatgataatcaggataca

SEQ ID NO: 1501009 - DNA, 25 bp, Homo sapien
cagttttctccttcaaggtcctcct

SEQ ID NO: 1501010 - DNA, 25 bp, Homo sapien
ctgatgaatttctcgtatttgaaag

SEQ ID NO: 1501011 - DNA, 25 bp, Homo sapien
actgatgaatttctcgtatttgaaa

SEQ ID NO: 1501012 - DNA, 25 bp, Homo sapien
aatccagtcagcaattatctgtaat

SEQ ID NO: 1501013 - DNA, 25 bp, Homo sapien
aatactggataacaatctgtacctg

SEQ ID NO: 1501014 - DNA, 25 bp, Homo sapien
ttaaatccagtcagcaattatctgt

SEQ ID NO: 1501015 - DNA, 25 bp, Homo sapien
taaatccagtcagcaattatctgta

SEQ ID NO: 1501016 - DNA, 25 bp, Homo sapien
attcttcatttcttcctctctcatt

SEQ ID NO: 1501017 - DNA, 25 bp, Homo sapien
cattcttcatttcttcctctctcat

SEQ ID NO: 1501018 - DNA, 25 bp, Homo sapien
tcattcttcatttcttcctctctca

SEQ ID NO: 1501019 - DNA, 25 bp, Homo sapien
ttcttcatttcttcctctctcattc

SEQ ID NO: 1501020 - DNA, 25 bp, Homo sapien
tcaacagcaattacttgcaaagcaa

SEQ ID NO: 1501021 - DNA, 25 bp, Homo sapien
tggctcaacagcaattacttgcaaa

SEQ ID NO: 1501022 - DNA, 25 bp, Homo sapien
caacagcaattacttgcaaagcaat

SEQ ID NO: 1501023 - DNA, 25 bp, Homo sapien
gctcaacagcaattacttgcaaagc

SEQ ID NO: 1501024 - DNA, 25 bp, Homo sapien
gatgtgtttcattcagcctccccag

SEQ ID NO: 1501025 - DNA, 25 bp, Homo sapien
gcctttagttagacttgcatgctca

SEQ ID NO: 1501026 - DNA, 25 bp, Homo sapien
aagtggtggcccttggatgtgtttc

SEQ ID NO: 1501027 - DNA, 25 bp, Homo sapien
gctttaaagctctacaacacacgca

SEQ ID NO: 1501028 - DNA, 25 bp, Homo sapien
acagggagaaccagattaacataag

SEQ ID NO: 1501029 - DNA, 25 bp, Homo sapien
acataaggcagcactgatgactggg

SEQ ID NO: 1501030 - DNA, 25 bp, Homo sapien
gaaccagattaacataaggcagcac

SEQ ID NO: 1501031 - DNA, 25 bp, Homo sapien
taacataaggcagcactgatgactg

SEQ ID NO: 1501032 - DNA, 25 bp, Homo sapien
tataaatggactaaattctgcaatt

SEQ ID NO: 1501033 - DNA, 25 bp, Homo sapien
ttaaatataaatggactaaattctg

SEQ ID NO: 1501034 - DNA, 25 bp, Homo sapien
aatataaatggactaaattctgcaa

SEQ ID NO: 1501035 - DNA, 25 bp, Homo sapien
taaatataaatggactaaattctgc

SEQ ID NO: 1501036 - DNA, 25 bp, Homo sapien
gagacccaaattgcctacactcttg

SEQ ID NO: 1501037 - DNA, 25 bp, Homo sapien
gacctgggtaggagacccaaattgc

SEQ ID NO: 1501038 - DNA, 25 bp, Homo sapien
cctacactcttggtgccaataggca

SEQ ID NO: 1501039 - DNA, 25 bp, Homo sapien
caaattgcctacactcttggtgcca

SEQ ID NO: 1501040 - DNA, 25 bp, Homo sapien
cagtgaccctctctttctactccag

SEQ ID NO: 1501041 - DNA, 25 bp, Homo sapien
ccagtgaccctctctttctactcca

SEQ ID NO: 1501042 - DNA, 25 bp, Homo sapien
ctcactgatttgcagattcttgctc

SEQ ID NO: 1501043 - DNA, 25 bp, Homo sapien
gctcagggtcattcatgccgatcag

SEQ ID NO: 1501044 - DNA, 25 bp, Homo sapien
tcactgatttgcagattcttgctct

SEQ ID NO: 1501045 - DNA, 25 bp, Homo sapien
cagggtcattcatgccgatcaggct

SEQ ID NO: 1501046 - DNA, 25 bp, Homo sapien
aactgaggaggaataatgccgaagt

SEQ ID NO: 1501047 - DNA, 25 bp, Homo sapien
aggaggaataatgccgaagtggctt

SEQ ID NO: 1501048 - DNA, 25 bp, Homo sapien
ataatgccgaagtggcttgtgaggc

SEQ ID NO: 1501049 - DNA, 25 bp, Homo sapien
tgaggaggaataatgccgaagtggc

SEQ ID NO: 1501050 - DNA, 25 bp, Homo sapien
tcatggcccctgatttgcttacaac

SEQ ID NO: 1501051 - DNA, 25 bp, Homo sapien
ctattcatggcccctgatttgctta

SEQ ID NO: 1501052 - DNA, 25 bp, Homo sapien
ttcatggcccctgatttgcttacaa

SEQ ID NO: 1501053 - DNA, 25 bp, Homo sapien
tattcatggcccctgatttgcttac

SEQ ID NO: 1501054 - DNA, 25 bp, Homo sapien
tgaagttttctcaacttagtgtccc

SEQ ID NO: 1501055 - DNA, 25 bp, Homo sapien
ttcatgaagttttctcaacttagtg

SEQ ID NO: 1501056 - DNA, 25 bp, Homo sapien
atgaagttttctcaacttagtgtcc

SEQ ID NO: 1501057 - DNA, 25 bp, Homo sapien
catgaagttttctcaacttagtgtc

SEQ ID NO: 1501058 - DNA, 25 bp, Homo sapien
acaggctgaggtccatagctggcgt

SEQ ID NO: 1501059 - DNA, 25 bp, Homo sapien
gctggcgtcatttgggaaaatctct

SEQ ID NO: 1501060 - DNA, 25 bp, Homo sapien
gcttcattggaaaggtgagcttttc

SEQ ID NO: 1501061 - DNA, 25 bp, Homo sapien
ttggcttgcttcattggaaaggtga

SEQ ID NO: 1501062 - DNA, 25 bp, Homo sapien
gacacagtgatttacaaagagctca

SEQ ID NO: 1501063 - DNA, 25 bp, Homo sapien
tgaaaagtacctccactgaccaagt

SEQ ID NO: 1501064 - DNA, 25 bp, Homo sapien
tcaatatagcaagctctaggcagaa

SEQ ID NO: 1501065 - DNA, 25 bp, Homo sapien
caatacatgtaaaaggccgaatgcc

SEQ ID NO: 1501066 - DNA, 25 bp, Homo sapien
gatgggccttttggctactactcta

SEQ ID NO: 1501067 - DNA, 25 bp, Homo sapien
tctcttttcaacctctgtccactgg

SEQ ID NO: 1501068 - DNA, 25 bp, Homo sapien
ggctactactctaatctcatattca

SEQ ID NO: 1501069 - DNA, 25 bp, Homo sapien
cacatttgttgtgctctgccagttc

SEQ ID NO: 1501070 - DNA, 25 bp, Homo sapien
cttctaagtttgtgccatagttgac

SEQ ID NO: 1501071 - DNA, 25 bp, Homo sapien
ttgactttggcaacttctaattctg

SEQ ID NO: 1501072 - DNA, 25 bp, Homo sapien
gccatagttgactttggcaacttct

SEQ ID NO: 1501073 - DNA, 25 bp, Homo sapien
gatttgagaagatacctcaggaaag

SEQ ID NO: 1501074 - DNA, 25 bp, Homo sapien
gcaaatccgttaatttctctaactg

SEQ ID NO: 1501075 - DNA, 25 bp, Homo sapien
agcaaatccgttaatttctctaact

SEQ ID NO: 1501076 - DNA, 25 bp, Homo sapien
caaatccgttaatttctctaactga

SEQ ID NO: 1501077 - DNA, 25 bp, Homo sapien
tgtgaggcttggatgtgatggcatt

SEQ ID NO: 1501078 - DNA, 25 bp, Homo sapien
gttgtgaggcttggatgtgatggca

SEQ ID NO: 1501079 - DNA, 25 bp, Homo sapien
tgaggcttggatgtgatggcattgc

SEQ ID NO: 1501080 - DNA, 25 bp, Homo sapien
ttgtgaggcttggatgtgatggcat

SEQ ID NO: 1501081 - DNA, 25 bp, Homo sapien
gatgccatggatctcatgacccaga

SEQ ID NO: 1501082 - DNA, 25 bp, Homo sapien
taatgatgcgggaccaggccttttc

SEQ ID NO: 1501083 - DNA, 25 bp, Homo sapien
gatccagatcgtccctaggaccctt

SEQ ID NO: 1501084 - DNA, 25 bp, Homo sapien
gacccagagatgagtaaccttggag

SEQ ID NO: 1501085 - DNA, 25 bp, Homo sapien
tatatggagtgatgtaaattctctc

SEQ ID NO: 1501086 - DNA, 25 bp, Homo sapien
tggactctcaggatgggttaactga

SEQ ID NO: 1501087 - DNA, 25 bp, Homo sapien
tctcaattgttatgggacagatata

SEQ ID NO: 1501088 - DNA, 25 bp, Homo sapien
gccatagcctagaagtaatcaagca

SEQ ID NO: 1501089 - DNA, 25 bp, Homo sapien
gatgttccatataggttggcagctg

SEQ ID NO: 1501090 - DNA, 25 bp, Homo sapien
tggactgaagcatctcgaccatctg

SEQ ID NO: 1501091 - DNA, 25 bp, Homo sapien
tattgggccagatgttccatatagg

SEQ ID NO: 1501092 - DNA, 25 bp, Homo sapien
gctgagggttctttcgctgcaagtt

SEQ ID NO: 1501093 - DNA, 25 bp, Homo sapien
cttcacaaagctgaagacatccatg

SEQ ID NO: 1501094 - DNA, 25 bp, Homo sapien
caggaaaactcaatggagagggagc

SEQ ID NO: 1501095 - DNA, 25 bp, Homo sapien
gtgtgcatccccgagcaggaccatt

SEQ ID NO: 1501096 - DNA, 25 bp, Homo sapien
aggaccattgataggcacccgaggc

SEQ ID NO: 1501097 - DNA, 25 bp, Homo sapien
agaaattcaatctctaactgactgt

SEQ ID NO: 1501098 - DNA, 25 bp, Homo sapien
ctgagaatgtggaaaagagtagaac

SEQ ID NO: 1501099 - DNA, 25 bp, Homo sapien
aagaaattcaatctctaactgactg

SEQ ID NO: 1501100 - DNA, 25 bp, Homo sapien
tagtcaagtgtagtactgagaatgt

SEQ ID NO: 1501101 - DNA, 25 bp, Homo sapien
tttgagaataatagtggtcaaaacc

SEQ ID NO: 1501102 - DNA, 25 bp, Homo sapien
ttgagaataatagtggtcaaaacca

SEQ ID NO: 1501103 - DNA, 25 bp, Homo sapien
ctggtttgagaataatagtggtcaa

SEQ ID NO: 1501104 - DNA, 25 bp, Homo sapien
tgagaataatagtggtcaaaaccat

SEQ ID NO: 1501105 - DNA, 25 bp, Homo sapien
gctacataaactaacactccctggc

SEQ ID NO: 1501106 - DNA, 25 bp, Homo sapien
cataaactaacactccctggcactt

SEQ ID NO: 1501107 - DNA, 25 bp, Homo sapien
tacataaactaacactccctggcac

SEQ ID NO: 1501108 - DNA, 25 bp, Homo sapien
cgctacataaactaacactccctgg

SEQ ID NO: 1501109 - DNA, 25 bp, Homo sapien
cagaggacatcgagaggccaagctt

SEQ ID NO: 1501110 - DNA, 25 bp, Homo sapien
ccacgatctgtggacttgtgtgctg

SEQ ID NO: 1501111 - DNA, 25 bp, Homo sapien
ttagagaagggccaccacgatctgt

SEQ ID NO: 1501112 - DNA, 25 bp, Homo sapien
ggccaagcttatcaggaaggagagc

SEQ ID NO: 1501113 - DNA, 25 bp, Homo sapien
gaagcatgtcaaactttactccaca

SEQ ID NO: 1501114 - DNA, 25 bp, Homo sapien
tccacaattaaatgcatccacatcc

SEQ ID NO: 1501115 - DNA, 25 bp, Homo sapien
ctcagaagcatgtcaaactttactc

SEQ ID NO: 1501116 - DNA, 25 bp, Homo sapien
tccacaggctttccttgatccccac

SEQ ID NO: 1501117 - DNA, 25 bp, Homo sapien
ggctaggttagcaagatagcatgca

SEQ ID NO: 1501118 - DNA, 25 bp, Homo sapien
caacagaggctatgtgggaattcat

SEQ ID NO: 1501119 - DNA, 25 bp, Homo sapien
tgcacgcgttggtgtcaagcctcag

SEQ ID NO: 1501120 - DNA, 25 bp, Homo sapien
caaaacgtgagattgcattctgcac

SEQ ID NO: 1501121 - DNA, 25 bp, Homo sapien
aaacttatcagtgccttgtttcatc

SEQ ID NO: 1501122 - DNA, 25 bp, Homo sapien
caaacttatcagtgccttgtttcat

SEQ ID NO: 1501123 - DNA, 25 bp, Homo sapien
aacttatcagtgccttgtttcatct

SEQ ID NO: 1501124 - DNA, 25 bp, Homo sapien
gaatgaccccattaagtgttctagg

SEQ ID NO: 1501125 - DNA, 25 bp, Homo sapien
cccagtatcactagggctgaaagtc

SEQ ID NO: 1501126 - DNA, 25 bp, Homo sapien
ctggagtcggacgtttgggcattaa

SEQ ID NO: 1501127 - DNA, 25 bp, Homo sapien
caagcatcttcctgagaatgacccc

SEQ ID NO: 1501128 - DNA, 25 bp, Homo sapien
gatggattcgcttctttaaatcaaa

SEQ ID NO: 1501129 - DNA, 25 bp, Homo sapien
cctgttccaaccagttgtcaattag

SEQ ID NO: 1501130 - DNA, 25 bp, Homo sapien
atctttgttcttgtgaaagtacaaa

SEQ ID NO: 1501131 - DNA, 25 bp, Homo sapien
tgttcttgtgaaagtacaaattgtc

SEQ ID NO: 1501132 - DNA, 25 bp, Homo sapien
gaggtgactccttcggcatgaagca

SEQ ID NO: 1501133 - DNA, 25 bp, Homo sapien
cttggttgaagagcactactgggac

SEQ ID NO: 1501134 - DNA, 25 bp, Homo sapien
tccagtgaatctaggcaggtgatgt

SEQ ID NO: 1501135 - DNA, 25 bp, Homo sapien
aaaaggcgttctaggcaggagatga

SEQ ID NO: 1501136 - DNA, 25 bp, Homo sapien
tgctctttgatcaattggatctcct

SEQ ID NO: 1501137 - DNA, 25 bp, Homo sapien
ccttgctctttgatcaattggatct

SEQ ID NO: 1501138 - DNA, 25 bp, Homo sapien
tggaaagcaccaaccttttgcctgg

SEQ ID NO: 1501139 - DNA, 25 bp, Homo sapien
tctcctcggtcttcaaggcaactgg

SEQ ID NO: 1501140 - DNA, 25 bp, Homo sapien
gcacaacccgcccagtattcaaaaa

SEQ ID NO: 1501141 - DNA, 25 bp, Homo sapien
ctagagcacaacccgcccagtattc

SEQ ID NO: 1501142 - DNA, 25 bp, Homo sapien
gagcacaacccgcccagtattcaaa

SEQ ID NO: 1501143 - DNA, 25 bp, Homo sapien
agagcacaacccgcccagtattcaa

SEQ ID NO: 1501144 - DNA, 25 bp, Homo sapien
ctatgttggttctacctttaagaag

SEQ ID NO: 1501145 - DNA, 25 bp, Homo sapien
cctctgatttgcttcgtaactttcc

SEQ ID NO: 1501146 - DNA, 25 bp, Homo sapien
ttcctcctcctatgttggttctacc

SEQ ID NO: 1501147 - DNA, 25 bp, Homo sapien
ttgcttcgtaactttcctcctccta

SEQ ID NO: 1501148 - DNA, 25 bp, Homo sapien
cactgaactgatggggaatctggac

SEQ ID NO: 1501149 - DNA, 25 bp, Homo sapien
atttcttcctggtgatcctcccttt

SEQ ID NO: 1501150 - DNA, 25 bp, Homo sapien
cttatttcttcctggtgatcctccc

SEQ ID NO: 1501151 - DNA, 25 bp, Homo sapien
tggggaatctggacttatttcttcc

SEQ ID NO: 1501152 - DNA, 25 bp, Homo sapien
aattatattctgactctggactcca

SEQ ID NO: 1501153 - DNA, 25 bp, Homo sapien
aaaattatattctgactctggactc

SEQ ID NO: 1501154 - DNA, 25 bp, Homo sapien
ttatattctgactctggactccata

SEQ ID NO: 1501155 - DNA, 25 bp, Homo sapien
tatattctgactctggactccatac

SEQ ID NO: 1501156 - DNA, 25 bp, Homo sapien
agagggggtgaccttgaacagttgg

SEQ ID NO: 1501157 - DNA, 25 bp, Homo sapien
tcagagggggtgaccttgaacagtt

SEQ ID NO: 1501158 - DNA, 25 bp, Homo sapien
ggtgaccttgaacagttgggtcctc

SEQ ID NO: 1501159 - DNA, 25 bp, Homo sapien
tgaccttgaacagttgggtcctctg

SEQ ID NO: 1501160 - DNA, 25 bp, Homo sapien
ctgccaactctccatggaggatcct

SEQ ID NO: 1501161 - DNA, 25 bp, Homo sapien
atcaagtcctctgcttgaaattcca

SEQ ID NO: 1501162 - DNA, 25 bp, Homo sapien
aactctccatggaggatcctccctt

SEQ ID NO: 1501163 - DNA, 25 bp, Homo sapien
gtttgcatcaagtcctctgcttgaa

SEQ ID NO: 1501164 - DNA, 25 bp, Homo sapien
gagactggaacaatgtaatcccctg

SEQ ID NO: 1501165 - DNA, 25 bp, Homo sapien
gctcgccaggacattgagactggaa

SEQ ID NO: 1501166 - DNA, 25 bp, Homo sapien
ctggaacaatgtaatcccctggcat

SEQ ID NO: 1501167 - DNA, 25 bp, Homo sapien
cttttggagcaatgggtaatgagga

SEQ ID NO: 1501168 - DNA, 25 bp, Homo sapien
catcctcatgcctatcatggtttca

SEQ ID NO: 1501169 - DNA, 25 bp, Homo sapien
catggtttcaataaagtaagttgag

SEQ ID NO: 1501170 - DNA, 25 bp, Homo sapien
cctctcagaggccaatggtactcct

SEQ ID NO: 1501171 - DNA, 25 bp, Homo sapien
tccatagatccgaggatgagcagaa

SEQ ID NO: 1501172 - DNA, 25 bp, Homo sapien
ctaagatccgtgactgcctgcgggc

SEQ ID NO: 1501173 - DNA, 25 bp, Homo sapien
cagtttactaagatccgtgactgcc

SEQ ID NO: 1501174 - DNA, 25 bp, Homo sapien
gtttactaagatccgtgactgcctg

SEQ ID NO: 1501175 - DNA, 25 bp, Homo sapien
ttactaagatccgtgactgcctgcg

SEQ ID NO: 1501176 - DNA, 25 bp, Homo sapien
aagcccaaggattcttctccaaggg

SEQ ID NO: 1501177 - DNA, 25 bp, Homo sapien
actttgcaagggcagctttgacact

SEQ ID NO: 1501178 - DNA, 25 bp, Homo sapien
ttgacactgccaaaaacaaggtctg

SEQ ID NO: 1501179 - DNA, 25 bp, Homo sapien
aaacaaggtctggaagcccaaggat

SEQ ID NO: 1501180 - DNA, 25 bp, Homo sapien
gccaaattagatctctcaccaccag

SEQ ID NO: 1501181 - DNA, 25 bp, Homo sapien
catttgggcctatggaaaacatcca

SEQ ID NO: 1501182 - DNA, 25 bp, Homo sapien
tcatctaaaaatgccagatcctcca

SEQ ID NO: 1501183 - DNA, 25 bp, Homo sapien
ctccaggaagtcttgagaaagcatc

SEQ ID NO: 1501184 - DNA, 25 bp, Homo sapien
taaccctcggtctgcctcatgtgtg

SEQ ID NO: 1501185 - DNA, 25 bp, Homo sapien
tggtcattccaaatatatggtgccc

SEQ ID NO: 1501186 - DNA, 25 bp, Homo sapien
gccctttagttaccatagctacacg

SEQ ID NO: 1501187 - DNA, 25 bp, Homo sapien
caaggttgtgatgtccctgaaaatc

SEQ ID NO: 1501188 - DNA, 25 bp, Homo sapien
tccagagcccagatatacacataga

SEQ ID NO: 1501189 - DNA, 25 bp, Homo sapien
gaagtacagcccgtgagttcttgta

SEQ ID NO: 1501190 - DNA, 25 bp, Homo sapien
ggtcgcagtaacagaatccaagtag

SEQ ID NO: 1501191 - DNA, 25 bp, Homo sapien
ttcaaatgcacaagcccggagcaca

SEQ ID NO: 1501192 - DNA, 25 bp, Homo sapien
tctagtcacttgtctcttaagtgga

SEQ ID NO: 1501193 - DNA, 25 bp, Homo sapien
aattagagtccctctttcatcaagc

SEQ ID NO: 1501194 - DNA, 25 bp, Homo sapien
gtcactaattagagtccctctttca

SEQ ID NO: 1501195 - DNA, 25 bp, Homo sapien
tgtgtcactaattagagtccctctt

SEQ ID NO: 1501196 - DNA, 25 bp, Homo sapien
ctagcgagtgtggatgcacagaggg

SEQ ID NO: 1501197 - DNA, 25 bp, Homo sapien
tgtggatgcacagagggtgaataca

SEQ ID NO: 1501198 - DNA, 25 bp, Homo sapien
gcacagagggtgaatacaggtagca

SEQ ID NO: 1501199 - DNA, 25 bp, Homo sapien
cgagtgtggatgcacagagggtgaa

SEQ ID NO: 1501200 - DNA, 25 bp, Homo sapien
atagaaggtctgcatatggtttgtg

SEQ ID NO: 1501201 - DNA, 25 bp, Homo sapien
gtctgcatatggtttgtgggggaga

SEQ ID NO: 1501202 - DNA, 25 bp, Homo sapien
ctgcatatggtttgtgggggagatc

SEQ ID NO: 1501203 - DNA, 25 bp, Homo sapien
tcttcagtgcaaatagaaggtctgc

SEQ ID NO: 1501204 - DNA, 25 bp, Homo sapien
ccctcgctccccaggtgacttgctt

SEQ ID NO: 1501205 - DNA, 25 bp, Homo sapien
ttttgatcacatcgggacttatagg

SEQ ID NO: 1501206 - DNA, 25 bp, Homo sapien
tgacttgcttttgatcacatcggga

SEQ ID NO: 1501207 - DNA, 25 bp, Homo sapien
cacatcgggacttataggattcttt

SEQ ID NO: 1501208 - DNA, 25 bp, Homo sapien
ttccagctcaggtattcttaatatt

SEQ ID NO: 1501209 - DNA, 25 bp, Homo sapien
ccagctcaggtattcttaatatttt

SEQ ID NO: 1501210 - DNA, 25 bp, Homo sapien
tattccagctcaggtattcttaata

SEQ ID NO: 1501211 - DNA, 25 bp, Homo sapien
aggtattccagctcaggtattctta

SEQ ID NO: 1501212 - DNA, 25 bp, Homo sapien
taagtctgaagatttgtaggttgcc

SEQ ID NO: 1501213 - DNA, 25 bp, Homo sapien
tcctgagcatgagtagccattccca

SEQ ID NO: 1501214 - DNA, 25 bp, Homo sapien
ggcttttgtgtagccagttctttaa

SEQ ID NO: 1501215 - DNA, 25 bp, Homo sapien
gatgctgcatcaagctgcgagccaa

SEQ ID NO: 1501216 - DNA, 25 bp, Homo sapien
gaaagagatattgcattctctccat

SEQ ID NO: 1501217 - DNA, 25 bp, Homo sapien
cagcatcatggaaagagatattgca

SEQ ID NO: 1501218 - DNA, 25 bp, Homo sapien
ccatctagcattgatgatagcttcc

SEQ ID NO: 1501219 - DNA, 25 bp, Homo sapien
tccatctagcattgatgatagcttc

SEQ ID NO: 1501220 - DNA, 25 bp, Homo sapien
caccttttgtgagctctcatctgca

SEQ ID NO: 1501221 - DNA, 25 bp, Homo sapien
cacgcacctgaaacgttgtgattgt

SEQ ID NO: 1501222 - DNA, 25 bp, Homo sapien
tgcacccagggagatattctgagtg

SEQ ID NO: 1501223 - DNA, 25 bp, Homo sapien
gagcatcgcgacttctagccaacat

SEQ ID NO: 1501224 - DNA, 25 bp, Homo sapien
gaccgatagcttaaccttgctcctg

SEQ ID NO: 1501225 - DNA, 25 bp, Homo sapien
aacgtaccttgggtgcgcactgagg

SEQ ID NO: 1501226 - DNA, 25 bp, Homo sapien
taaacagcagagaacgcgaccgata

SEQ ID NO: 1501227 - DNA, 25 bp, Homo sapien
catcggtgcctctttgcaacgtacc

SEQ ID NO: 1501228 - DNA, 25 bp, Homo sapien
tcactccagttgatcatcacagacg

SEQ ID NO: 1501229 - DNA, 25 bp, Homo sapien
cagacgtcagacagatcactggaat

SEQ ID NO: 1501230 - DNA, 25 bp, Homo sapien
tctgtgaccccagttttttgcagcc

SEQ ID NO: 1501231 - DNA, 25 bp, Homo sapien
tctgtattggctgtgaagacctcca

SEQ ID NO: 1501232 - DNA, 25 bp, Homo sapien
tcctctgaaagtctcaagcctggtc

SEQ ID NO: 1501233 - DNA, 25 bp, Homo sapien
tctgaaagtctcaagcctggtccac

SEQ ID NO: 1501234 - DNA, 25 bp, Homo sapien
aaagtctcaagcctggtccactctc

SEQ ID NO: 1501235 - DNA, 25 bp, Homo sapien
tcctcctctgaaagtctcaagcctg

SEQ ID NO: 1501236 - DNA, 25 bp, Homo sapien
tcattccccacattcctcggtagtc

SEQ ID NO: 1501237 - DNA, 25 bp, Homo sapien
cattccccacattcctcggtagtcc

SEQ ID NO: 1501238 - DNA, 25 bp, Homo sapien
attccccacattcctcggtagtcct

SEQ ID NO: 1501239 - DNA, 25 bp, Homo sapien
gtcaacacagccagataagtcggaa

SEQ ID NO: 1501240 - DNA, 25 bp, Homo sapien
agatgtggcaagctggattcaggct

SEQ ID NO: 1501241 - DNA, 25 bp, Homo sapien
aatgccaaccaagtacacgctggga

SEQ ID NO: 1501242 - DNA, 25 bp, Homo sapien
ctgggagcacgtggcctgcctgaaa

SEQ ID NO: 1501243 - DNA, 25 bp, Homo sapien
caaggaatctgtagactcactaggg

SEQ ID NO: 1501244 - DNA, 25 bp, Homo sapien
gggaacctcagatactgatcatctg

SEQ ID NO: 1501245 - DNA, 25 bp, Homo sapien
gaagcaagatgacgtcaaatccatg

SEQ ID NO: 1501246 - DNA, 25 bp, Homo sapien
cacataatggtaagagcaaaatgct

SEQ ID NO: 1501247 - DNA, 25 bp, Homo sapien
gattcaaccagaaaggctcagactg

SEQ ID NO: 1501248 - DNA, 25 bp, Homo sapien
taccaggacccttgttgatgttccc

SEQ ID NO: 1501249 - DNA, 25 bp, Homo sapien
tttatgtctatgtcctgctaccagg

SEQ ID NO: 1501250 - DNA, 25 bp, Homo sapien
caggcatggccctaagaatctcaca

SEQ ID NO: 1501251 - DNA, 25 bp, Homo sapien
cagcaagaggccaattcagtttcca

SEQ ID NO: 1501252 - DNA, 25 bp, Homo sapien
tttgtaatgtgaggcactgttgcgt

SEQ ID NO: 1501253 - DNA, 25 bp, Homo sapien
taatgtgaggcactgttgcgtccat

SEQ ID NO: 1501254 - DNA, 25 bp, Homo sapien
caagaggccaattcagtttccacgt

SEQ ID NO: 1501255 - DNA, 25 bp, Homo sapien
acaaggacagtcaccacccgtgaca

SEQ ID NO: 1501256 - DNA, 25 bp, Homo sapien
tctacaaggacagtcaccacccgtg

SEQ ID NO: 1501257 - DNA, 25 bp, Homo sapien
tcaccacccgtgacacctaaatcca

SEQ ID NO: 1501258 - DNA, 25 bp, Homo sapien
agtcctctacaaggacagtcaccac

SEQ ID NO: 1501259 - DNA, 25 bp, Homo sapien
gctggttgtggttgacattattatc

SEQ ID NO: 1501260 - DNA, 25 bp, Homo sapien
tcggttttgcaatttgggtgctggt

SEQ ID NO: 1501261 - DNA, 25 bp, Homo sapien
gcccttgttggtctcggttttgcaa

SEQ ID NO: 1501262 - DNA, 25 bp, Homo sapien
tcagatacagcagcccttgttggtc

SEQ ID NO: 1501263 - DNA, 25 bp, Homo sapien
aatgacaatttaaatgggagattca

SEQ ID NO: 1501264 - DNA, 25 bp, Homo sapien
gcaatttgtatttatcctgaaaaga

SEQ ID NO: 1501265 - DNA, 25 bp, Homo sapien
agcaatttgtatttatcctgaaaag

SEQ ID NO: 1501266 - DNA, 25 bp, Homo sapien
gacaatttaaatgggagattcaaag

SEQ ID NO: 1501267 - DNA, 25 bp, Homo sapien
ttattttagacaggcaacacagatg

SEQ ID NO: 1501268 - DNA, 25 bp, Homo sapien
atgatgaggacttaacatgctgggc

SEQ ID NO: 1501269 - DNA, 25 bp, Homo sapien
tatacggtggtgatgaaaggatcct

SEQ ID NO: 1501270 - DNA, 25 bp, Homo sapien
gaaaacgtgtctaaccctgtcaggc

SEQ ID NO: 1501271 - DNA, 25 bp, Homo sapien
gaaacgcgatcgtccaatccatcaa

SEQ ID NO: 1501272 - DNA, 25 bp, Homo sapien
tatctctgagcaaatagaaacgcga

SEQ ID NO: 1501273 - DNA, 25 bp, Homo sapien
cggtctatgttagctccactgctgt

SEQ ID NO: 1501274 - DNA, 25 bp, Homo sapien
aacatttgcaggcaaacggtctatg

SEQ ID NO: 1501275 - DNA, 25 bp, Homo sapien
ttctaacattaacggagagcctccc

SEQ ID NO: 1501276 - DNA, 25 bp, Homo sapien
cattaacggagagcctcccttgtag

SEQ ID NO: 1501277 - DNA, 25 bp, Homo sapien
ttccttctaacattaacggagagcc

SEQ ID NO: 1501278 - DNA, 25 bp, Homo sapien
cccttgtagtctaggattcccttct

SEQ ID NO: 1501279 - DNA, 25 bp, Homo sapien
gaggtgaaagagaaggcccacattc

SEQ ID NO: 1501280 - DNA, 25 bp, Homo sapien
ctcaaactctggaggtgaaagagaa

SEQ ID NO: 1501281 - DNA, 25 bp, Homo sapien
ggtgaaagagaaggcccacattctt

SEQ ID NO: 1501282 - DNA, 25 bp, Homo sapien
aagagaaggcccacattcttttata

SEQ ID NO: 1501283 - DNA, 25 bp, Homo sapien
gaatcctgagctttaattgaaactt

SEQ ID NO: 1501284 - DNA, 25 bp, Homo sapien
aatcctgagctttaattgaaacttc

SEQ ID NO: 1501285 - DNA, 25 bp, Homo sapien
ctgaatcctgagctttaattgaaac

SEQ ID NO: 1501286 - DNA, 25 bp, Homo sapien
tgaatcctgagctttaattgaaact

SEQ ID NO: 1501287 - DNA, 25 bp, Homo sapien
aaggccttgagagttcttgcaattc

SEQ ID NO: 1501288 - DNA, 25 bp, Homo sapien
gtgtccatttccaccgggctcaggc

SEQ ID NO: 1501289 - DNA, 25 bp, Homo sapien
tgtccatttccaccgggctcaggca

SEQ ID NO: 1501290 - DNA, 25 bp, Homo sapien
tcttgcaattctgatgtcctgtgac

SEQ ID NO: 1501291 - DNA, 25 bp, Homo sapien
atagggcggcacctggctcaagccc

SEQ ID NO: 1501292 - DNA, 25 bp, Homo sapien
tgatgaagtagtctcgcccatctcg

SEQ ID NO: 1501293 - DNA, 25 bp, Homo sapien
ctcaagccccaggttcccgagggag

SEQ ID NO: 1501294 - DNA, 25 bp, Homo sapien
gaggcggccagcctgaagacttcgt

SEQ ID NO: 1501295 - DNA, 25 bp, Homo sapien
ctcacggtgatccggtgtttggcta

SEQ ID NO: 1501296 - DNA, 25 bp, Homo sapien
cggtgatccggtgtttggctaatca

SEQ ID NO: 1501297 - DNA, 25 bp, Homo sapien
gctaatcagtccataatcaacttgg

SEQ ID NO: 1501298 - DNA, 25 bp, Homo sapien
tgtttggctaatcagtccataatca

SEQ ID NO: 1501299 - DNA, 25 bp, Homo sapien
gttttatgtaggaatgcgggcttga

SEQ ID NO: 1501300 - DNA, 25 bp, Homo sapien
tcctgtaggagaatagccatgagtc

SEQ ID NO: 1501301 - DNA, 25 bp, Homo sapien
gaggaacctctcatgagcttggagc

SEQ ID NO: 1501302 - DNA, 25 bp, Homo sapien
gttggtctcctttatctcctgtagg

SEQ ID NO: 1501303 - DNA, 25 bp, Homo sapien
gctaatgcctaaattcttctagtga

SEQ ID NO: 1501304 - DNA, 25 bp, Homo sapien
acacctggctaatgcctaaattctt

SEQ ID NO: 1501305 - DNA, 25 bp, Homo sapien
tggctaatgcctaaattcttctagt

SEQ ID NO: 1501306 - DNA, 25 bp, Homo sapien
acctggctaatgcctaaattcttct

SEQ ID NO: 1501307 - DNA, 25 bp, Homo sapien
gtcaaacatgataagcctaaaattt

SEQ ID NO: 1501308 - DNA, 25 bp, Homo sapien
aacatgataagcctaaaatttgcca

SEQ ID NO: 1501309 - DNA, 25 bp, Homo sapien
ggcagagaatatcaaggtcaaacat

SEQ ID NO: 1501310 - DNA, 25 bp, Homo sapien
aggaggcagagaatatcaaggtcaa

SEQ ID NO: 1501311 - DNA, 25 bp, Homo sapien
tcaatgcaggttctcattggagaag

SEQ ID NO: 1501312 - DNA, 25 bp, Homo sapien
aagggcatcaaggagatgatgctgt

SEQ ID NO: 1501313 - DNA, 25 bp, Homo sapien
aagaagaagggcatcaaggagatga

SEQ ID NO: 1501314 - DNA, 25 bp, Homo sapien
caaggagatgatgctgtaggaaaca

SEQ ID NO: 1501315 - DNA, 25 bp, Homo sapien
tgcatatgtcccatggattgcgggt

SEQ ID NO: 1501316 - DNA, 25 bp, Homo sapien
agtagtacacagtctcctccgtcag

SEQ ID NO: 1501317 - DNA, 25 bp, Homo sapien
caagcttgctctagtgtgactgact

SEQ ID NO: 1501318 - DNA, 25 bp, Homo sapien
aaagaatcgcaaaacatttcccaca

SEQ ID NO: 1501319 - DNA, 25 bp, Homo sapien
gaaaacaaatcaatgacccaggata

SEQ ID NO: 1501320 - DNA, 25 bp, Homo sapien
tgggccacacaagccgtggggaaaa

SEQ ID NO: 1501321 - DNA, 25 bp, Homo sapien
cacacaagccgtggggaaaacaaat

SEQ ID NO: 1501322 - DNA, 25 bp, Homo sapien
gccacacaagccgtggggaaaacaa

SEQ ID NO: 1501323 - DNA, 25 bp, Homo sapien
tgcagatttcttatgatcataattg

SEQ ID NO: 1501324 - DNA, 25 bp, Homo sapien
gatttcttatgatcataattgatgt

SEQ ID NO: 1501325 - DNA, 25 bp, Homo sapien
agatgcagatttcttatgatcataa

SEQ ID NO: 1501326 - DNA, 25 bp, Homo sapien
cagatttcttatgatcataattgat

SEQ ID NO: 1501327 - DNA, 25 bp, Homo sapien
tgtcctcgttaaagacgataaattg

SEQ ID NO: 1501328 - DNA, 25 bp, Homo sapien
gagagctggcaaaatgtttattgac

SEQ ID NO: 1501329 - DNA, 25 bp, Homo sapien
taaagacgataaattgagagctggc

SEQ ID NO: 1501330 - DNA, 25 bp, Homo sapien
ttattgaccgtgctttgtgaatgtg

SEQ ID NO: 1501331 - DNA, 25 bp, Homo sapien
ccttagactgtccaactttacacat

SEQ ID NO: 1501332 - DNA, 25 bp, Homo sapien
aaagccccactctcacattcagaaa

SEQ ID NO: 1501333 - DNA, 25 bp, Homo sapien
aaaagccccactctcacattcagaa

SEQ ID NO: 1501334 - DNA, 25 bp, Homo sapien
ggtgactggattgctgttaatatgt

SEQ ID NO: 1501335 - DNA, 25 bp, Homo sapien
gactggattgctgttaatatgtttt

SEQ ID NO: 1501336 - DNA, 25 bp, Homo sapien
ctggtgactggattgctgttaatat

SEQ ID NO: 1501337 - DNA, 25 bp, Homo sapien
gattgctgttaatatgttttttctc

SEQ ID NO: 1501338 - DNA, 25 bp, Homo sapien
tggcagctctctaaccgagggtcgt

SEQ ID NO: 1501339 - DNA, 25 bp, Homo sapien
cgagggtcgtcaaaagggattgcct

SEQ ID NO: 1501340 - DNA, 25 bp, Homo sapien
ccggagggatgatttggcagctctc

SEQ ID NO: 1501341 - DNA, 25 bp, Homo sapien
tactgagcgaacgaccactggcttt

SEQ ID NO: 1501342 - DNA, 25 bp, Homo sapien
aatcattacaatctgatctcccggg

SEQ ID NO: 1501343 - DNA, 25 bp, Homo sapien
ctcccgggatcagcttgccttcaga

SEQ ID NO: 1501344 - DNA, 25 bp, Homo sapien
ggtgcagcgctgaccggttcatcat

SEQ ID NO: 1501345 - DNA, 25 bp, Homo sapien
atcgatgacccgctctctgggtgca

SEQ ID NO: 1501346 - DNA, 25 bp, Homo sapien
tgcttttcaagttatcttcatcctg

SEQ ID NO: 1501347 - DNA, 25 bp, Homo sapien
ttcatcctgaaagtcttgaatttcc

SEQ ID NO: 1501348 - DNA, 25 bp, Homo sapien
tctttggttttgattggatacccag

SEQ ID NO: 1501349 - DNA, 25 bp, Homo sapien
caggcttgtgctccaatctcctacc

SEQ ID NO: 1501350 - DNA, 25 bp, Homo sapien
tctttcaagctaccacatctctgca

SEQ ID NO: 1501351 - DNA, 25 bp, Homo sapien
gggaaatccctggtgtaaagccatg

SEQ ID NO: 1501352 - DNA, 25 bp, Homo sapien
gaggaccctgaaggtgtcacaggtt

SEQ ID NO: 1501353 - DNA, 25 bp, Homo sapien
tggtgtaaagccatgatcttgtctc

SEQ ID NO: 1501354 - DNA, 25 bp, Homo sapien
gtataggtggtctccaattttggat

SEQ ID NO: 1501355 - DNA, 25 bp, Homo sapien
tggtctccaattttggatttggtaa

SEQ ID NO: 1501356 - DNA, 25 bp, Homo sapien
tataggtggtctccaattttggatt

SEQ ID NO: 1501357 - DNA, 25 bp, Homo sapien
aggtggtctccaattttggatttgg

SEQ ID NO: 1501358 - DNA, 25 bp, Homo sapien
gcctccaggcctactggtgtccatg

SEQ ID NO: 1501359 - DNA, 25 bp, Homo sapien
tgacacaagaagcaccaggccccat

SEQ ID NO: 1501360 - DNA, 25 bp, Homo sapien
atgacacaagaagcaccaggcccca

SEQ ID NO: 1501361 - DNA, 25 bp, Homo sapien
tatgacacaagaagcaccaggcccc

SEQ ID NO: 1501362 - DNA, 25 bp, Homo sapien
ctatgacacaagaagcaccaggccc

SEQ ID NO: 1501363 - DNA, 25 bp, Homo sapien
gacctcatcatgaccgagccacttt

SEQ ID NO: 1501364 - DNA, 25 bp, Homo sapien
tcatcatgaccgagccacttttcct

SEQ ID NO: 1501365 - DNA, 25 bp, Homo sapien
ctgaatttgactgtggggtttgcca

SEQ ID NO: 1501366 - DNA, 25 bp, Homo sapien
aggtcttgacctcatcatgaccgag

SEQ ID NO: 1501367 - DNA, 25 bp, Homo sapien
actctgctcattgccgctgaagctt

SEQ ID NO: 1501368 - DNA, 25 bp, Homo sapien
catggactatatgaagcatttacac

SEQ ID NO: 1501369 - DNA, 25 bp, Homo sapien
atttacactctgctcattgccgctg

SEQ ID NO: 1501370 - DNA, 25 bp, Homo sapien
tacactctgctcattgccgctgaag

SEQ ID NO: 1501371 - DNA, 25 bp, Homo sapien
gaggagtatcgattctttgcagctt

SEQ ID NO: 1501372 - DNA, 25 bp, Homo sapien
tgaggagtatcgattctttgcagct

SEQ ID NO: 1501373 - DNA, 25 bp, Homo sapien
agtttactgcatgaggtaaaacagt

SEQ ID NO: 1501374 - DNA, 25 bp, Homo sapien
ttactgcatgaggtaaaacagtatc

SEQ ID NO: 1501375 - DNA, 25 bp, Homo sapien
ctgcatgaggtaaaacagtatccca

SEQ ID NO: 1501376 - DNA, 25 bp, Homo sapien
ttttctaagtttactgcatgaggta

SEQ ID NO: 1501377 - DNA, 25 bp, Homo sapien
tgctgtgagtagtgtcttagaagac

SEQ ID NO: 1501378 - DNA, 25 bp, Homo sapien
gagtagtgtcttagaagactggata

SEQ ID NO: 1501379 - DNA, 25 bp, Homo sapien
caccgatcccatcctttgctgtgag

SEQ ID NO: 1501380 - DNA, 25 bp, Homo sapien
aaatggatgatttgtctcccagagc

SEQ ID NO: 1501381 - DNA, 25 bp, Homo sapien
gacaggattggactttaatcttgcc

SEQ ID NO: 1501382 - DNA, 25 bp, Homo sapien
gagaagcgtactttgacaggattgg

SEQ ID NO: 1501383 - DNA, 25 bp, Homo sapien
cagagaagcgtactttgacaggatt

SEQ ID NO: 1501384 - DNA, 25 bp, Homo sapien
ctcctcagagaagcgtactttgaca

SEQ ID NO: 1501385 - DNA, 25 bp, Homo sapien
atgatttggtctgcccattttccag

SEQ ID NO: 1501386 - DNA, 25 bp, Homo sapien
tggcataaaaagaagtgagttgtcc

SEQ ID NO: 1501387 - DNA, 25 bp, Homo sapien
aagtgctgcagtcaaaacgaaatga

SEQ ID NO: 1501388 - DNA, 25 bp, Homo sapien
tttccagatagactttcaaaacatt

SEQ ID NO: 1501389 - DNA, 25 bp, Homo sapien
tctcttgaagggttaagatgacatc

SEQ ID NO: 1501390 - DNA, 25 bp, Homo sapien
tgatggagagcttctcttgaagggt

SEQ ID NO: 1501391 - DNA, 25 bp, Homo sapien
aagagcagcttcgttccagcccctt

SEQ ID NO: 1501392 - DNA, 25 bp, Homo sapien
agcaagagcagcttcgttccagccc

SEQ ID NO: 1501393 - DNA, 25 bp, Homo sapien
tcacttgagggtgagatttcacaga

SEQ ID NO: 1501394 - DNA, 25 bp, Homo sapien
atcacttgagggtgagatttcacag

SEQ ID NO: 1501395 - DNA, 25 bp, Homo sapien
cacttgagggtgagatttcacagac

SEQ ID NO: 1501396 - DNA, 25 bp, Homo sapien
gggacactgaagcagtcgacttttt

SEQ ID NO: 1501397 - DNA, 25 bp, Homo sapien
tggaagagtagaccaatcacacaag

SEQ ID NO: 1501398 - DNA, 25 bp, Homo sapien
ctcatcttatgggagctgggcctct

SEQ ID NO: 1501399 - DNA, 25 bp, Homo sapien
tagagatactcgaaagcaactggat

SEQ ID NO: 1501400 - DNA, 25 bp, Homo sapien
ggacgaagctaattcggaaaagaca

SEQ ID NO: 1501401 - DNA, 25 bp, Homo sapien
caattggatcttttgggacgaagct

SEQ ID NO: 1501402 - DNA, 25 bp, Homo sapien
ggtaacggttgcaatgtacatttgt

SEQ ID NO: 1501403 - DNA, 25 bp, Homo sapien
tacatttgtaatgcggccagccgca

SEQ ID NO: 1501404 - DNA, 25 bp, Homo sapien
aaatcgctcctgaaccacatcgtta

SEQ ID NO: 1501405 - DNA, 25 bp, Homo sapien
cagccgcagggctatgtcatatttc

SEQ ID NO: 1501406 - DNA, 25 bp, Homo sapien
agaaaagtctctaatccccattctt

SEQ ID NO: 1501407 - DNA, 25 bp, Homo sapien
gaagaaaagtctctaatccccattc

SEQ ID NO: 1501408 - DNA, 25 bp, Homo sapien
acagcagagggaagaaaagtctcta

SEQ ID NO: 1501409 - DNA, 25 bp, Homo sapien
cagagggaagaaaagtctctaatcc

SEQ ID NO: 1501410 - DNA, 25 bp, Homo sapien
tgctttgacaaggtgtgaaagtgct

SEQ ID NO: 1501411 - DNA, 25 bp, Homo sapien
ccccatacaatcgtaggtcactgag

SEQ ID NO: 1501412 - DNA, 25 bp, Homo sapien
tacaatcgtaggtcactgaggaact

SEQ ID NO: 1501413 - DNA, 25 bp, Homo sapien
tgagataatggaccttggcttgtag

SEQ ID NO: 1501414 - DNA, 25 bp, Homo sapien
gaggaacttgagataatggaccttg

SEQ ID NO: 1501415 - DNA, 25 bp, Homo sapien
catttcgatcctgttgacgtggcta

SEQ ID NO: 1501416 - DNA, 25 bp, Homo sapien
tctcctcctcggaaaacatttcgat

SEQ ID NO: 1501417 - DNA, 25 bp, Homo sapien
gagtcacttccgagcgcttttctgc

SEQ ID NO: 1501418 - DNA, 25 bp, Homo sapien
gacgtggctaaagtcggctaaaaga

SEQ ID NO: 1501419 - DNA, 25 bp, Homo sapien
aatggctgttaatccactcctccca

SEQ ID NO: 1501420 - DNA, 25 bp, Homo sapien
gagctctctagtgtattctgatgtg

SEQ ID NO: 1501421 - DNA, 25 bp, Homo sapien
tgctttgtagaaacgctttgccaca

SEQ ID NO: 1501422 - DNA, 25 bp, Homo sapien
tctctttcgtgatcatctgttccca

SEQ ID NO: 1501423 - DNA, 25 bp, Homo sapien
gccggtagtatccagccgtcaagca

SEQ ID NO: 1501424 - DNA, 25 bp, Homo sapien
gaggattccatcagaagcgtgatag

SEQ ID NO: 1501425 - DNA, 25 bp, Homo sapien
tggaatcaacaagcagccggtagta

SEQ ID NO: 1501426 - DNA, 25 bp, Homo sapien
catgttaaatatcgacctcctggaa

SEQ ID NO: 1501427 - DNA, 25 bp, Homo sapien
gaaaacatccttattattgttgtca

SEQ ID NO: 1501428 - DNA, 25 bp, Homo sapien
ttattgttgtcaggtggggtgtttg

SEQ ID NO: 1501429 - DNA, 25 bp, Homo sapien
tattgttgtcaggtggggtgtttgc

SEQ ID NO: 1501430 - DNA, 25 bp, Homo sapien
gaggttatgcttccccttgttttca

SEQ ID NO: 1501431 - DNA, 25 bp, Homo sapien
ttggggtatacagttccaatctggg

SEQ ID NO: 1501432 - DNA, 25 bp, Homo sapien
gccaaggaggttatgcttccccttg

SEQ ID NO: 1501433 - DNA, 25 bp, Homo sapien
ctgggccaaggaggttatgcttccc

SEQ ID NO: 1501434 - DNA, 25 bp, Homo sapien
tcctgagagggtcaatagggaccgc

SEQ ID NO: 1501435 - DNA, 25 bp, Homo sapien
taataccatcatccaaggcgaagtc

SEQ ID NO: 1501436 - DNA, 25 bp, Homo sapien
tgtctatgtacaagtgccggtgctc

SEQ ID NO: 1501437 - DNA, 25 bp, Homo sapien
taaaggacactttagctcctctcgg

SEQ ID NO: 1501438 - DNA, 25 bp, Homo sapien
tgaactgtctctaaagccaggtggg

SEQ ID NO: 1501439 - DNA, 25 bp, Homo sapien
tgggcacagcgtcaatgagggacac

SEQ ID NO: 1501440 - DNA, 25 bp, Homo sapien
catcgcttgacccagacaggttgag

SEQ ID NO: 1501441 - DNA, 25 bp, Homo sapien
gttcaaggaacgcaacaggaagtca

SEQ ID NO: 1501442 - DNA, 25 bp, Homo sapien
cccagcgtggagacgacggcattat

SEQ ID NO: 1501443 - DNA, 25 bp, Homo sapien
tagagcctctagagctcccagcgtg

SEQ ID NO: 1501444 - DNA, 25 bp, Homo sapien
gagacgacggcattatccagtccct

SEQ ID NO: 1501445 - DNA, 25 bp, Homo sapien
ctgttcttctgacacggatagagcc

SEQ ID NO: 1501446 - DNA, 25 bp, Homo sapien
gtgaatgaatgtaacaattgtgaaa

SEQ ID NO: 1501447 - DNA, 25 bp, Homo sapien
agtgaatgaatgtaacaattgtgaa

SEQ ID NO: 1501448 - DNA, 25 bp, Homo sapien
cagtgaatgaatgtaacaattgtga

SEQ ID NO: 1501449 - DNA, 25 bp, Homo sapien
tcagtgaatgaatgtaacaattgtg

SEQ ID NO: 1501450 - DNA, 25 bp, Homo sapien
acatgtaagaaaatgggactcgtta

SEQ ID NO: 1501451 - DNA, 25 bp, Homo sapien
ggatgcatcagaggcacttggagac

SEQ ID NO: 1501452 - DNA, 25 bp, Homo sapien
ctgcatgccgtaaaaaacaagaact

SEQ ID NO: 1501453 - DNA, 25 bp, Homo sapien
caagaactgattaatggatgcatca

SEQ ID NO: 1501454 - DNA, 25 bp, Homo sapien
tgatgacatccgcttggccaagtgg

SEQ ID NO: 1501455 - DNA, 25 bp, Homo sapien
caagtggtagtcacaaaggcgggcc

SEQ ID NO: 1501456 - DNA, 25 bp, Homo sapien
gaagactcaggactataagcccgca

SEQ ID NO: 1501457 - DNA, 25 bp, Homo sapien
tcacgtcagttaagaagcggtcccc

SEQ ID NO: 1501458 - DNA, 25 bp, Homo sapien
tgcatccactgaagagccttgggag

SEQ ID NO: 1501459 - DNA, 25 bp, Homo sapien
gtaattcacgcctttcccagaagcg

SEQ ID NO: 1501460 - DNA, 25 bp, Homo sapien
tcaggaatcaagtgcttccccaggg

SEQ ID NO: 1501461 - DNA, 25 bp, Homo sapien
gcaggcactgtcatccgtggacaca

SEQ ID NO: 1501462 - DNA, 25 bp, Homo sapien
catgtcatacaaagtgctaaatcca

SEQ ID NO: 1501463 - DNA, 25 bp, Homo sapien
tcatacaaagtgctaaatccatcat

SEQ ID NO: 1501464 - DNA, 25 bp, Homo sapien
acatgctcttggcatgtcatacaaa

SEQ ID NO: 1501465 - DNA, 25 bp, Homo sapien
tcttggcatgtcatacaaagtgcta

SEQ ID NO: 1501466 - DNA, 25 bp, Homo sapien
cagttctgtggccttttaaaattct

SEQ ID NO: 1501467 - DNA, 25 bp, Homo sapien
tataaagagcaaatgccattttcac

SEQ ID NO: 1501468 - DNA, 25 bp, Homo sapien
gcctcctcgtctctccttcccaggc

SEQ ID NO: 1501469 - DNA, 25 bp, Homo sapien
gtctctccttcccaggctctgtcaa

SEQ ID NO: 1501470 - DNA, 25 bp, Homo sapien
ctctccttcccaggctctgtcaaag

SEQ ID NO: 1501471 - DNA, 25 bp, Homo sapien
ctcctcgtctctccttcccaggctc

SEQ ID NO: 1501472 - DNA, 25 bp, Homo sapien
tcgcgccgagagtccaacattaggg

SEQ ID NO: 1501473 - DNA, 25 bp, Homo sapien
tcagtgtgcttacgagagcggccat

SEQ ID NO: 1501474 - DNA, 25 bp, Homo sapien
caaaagccaggttgctgaagtccaa

SEQ ID NO: 1501475 - DNA, 25 bp, Homo sapien
gaaggtctccaaatcgacagatccg

SEQ ID NO: 1501476 - DNA, 25 bp, Homo sapien
cagagagaatagtgtccaaaccagc

SEQ ID NO: 1501477 - DNA, 25 bp, Homo sapien
taacttgagcactgaatgacccagg

SEQ ID NO: 1501478 - DNA, 25 bp, Homo sapien
taggagccccatgcttagtgaatgt

SEQ ID NO: 1501479 - DNA, 25 bp, Homo sapien
catgaagccctatgctgagagctgt

SEQ ID NO: 1501480 - DNA, 25 bp, Homo sapien
gaatgcaaccctacctgcgacaata

SEQ ID NO: 1501481 - DNA, 25 bp, Homo sapien
gacaatattgtcacatgcatgcacc

SEQ ID NO: 1501482 - DNA, 25 bp, Homo sapien
tctccagatttcagtgaatgcaacc

SEQ ID NO: 1501483 - DNA, 25 bp, Homo sapien
tacctgcgacaatattgtcacatgc

SEQ ID NO: 1501484 - DNA, 25 bp, Homo sapien
ctttgaagctgtcagagggccatgt

SEQ ID NO: 1501485 - DNA, 25 bp, Homo sapien
ggccatgtcccatgacctgtgccat

SEQ ID NO: 1501486 - DNA, 25 bp, Homo sapien
agggccatgtcccatgacctgtgcc

SEQ ID NO: 1501487 - DNA, 25 bp, Homo sapien
tgaagctgtcagagggccatgtccc

SEQ ID NO: 1501488 - DNA, 25 bp, Homo sapien
gggccccaatgccagctcttggatg

SEQ ID NO: 1501489 - DNA, 25 bp, Homo sapien
caccaggatgagtacccaggtctca

SEQ ID NO: 1501490 - DNA, 25 bp, Homo sapien
cagcgctaggctccctacattggca

SEQ ID NO: 1501491 - DNA, 25 bp, Homo sapien
tctgcaaaccatagggccaccaatg

SEQ ID NO: 1501492 - DNA, 25 bp, Homo sapien
ttcatgcaggttgtatcagtcactt

SEQ ID NO: 1501493 - DNA, 25 bp, Homo sapien
taaagctttcttcggaggcaaggtg

SEQ ID NO: 1501494 - DNA, 25 bp, Homo sapien
tctgatgctgccaaggggaacgtcc

SEQ ID NO: 1501495 - DNA, 25 bp, Homo sapien
caaggggaacgtccttttcatgcag

SEQ ID NO: 1501496 - DNA, 25 bp, Homo sapien
aacagcgacagcgacgcgggaggct

SEQ ID NO: 1501497 - DNA, 25 bp, Homo sapien
ggaggcaacagcgacagcgacgcgg

SEQ ID NO: 1501498 - DNA, 25 bp, Homo sapien
aggcaacagcgacagcgacgcggga

SEQ ID NO: 1501499 - DNA, 25 bp, Homo sapien
ggcggaggcaacagcgacagcgacg

SEQ ID NO: 1501500 - DNA, 25 bp, Homo sapien
ggtcctgatgcgagctgccgctgaa

SEQ ID NO: 1501501 - DNA, 25 bp, Homo sapien
cacgcgctgggacaggtcctgatgc

SEQ ID NO: 1501502 - DNA, 25 bp, Homo sapien
acaggtcctgatgcgagctgccgct

SEQ ID NO: 1501503 - DNA, 25 bp, Homo sapien
aggcggtcggccacgcgctgggaca

SEQ ID NO: 1501504 - DNA, 25 bp, Homo sapien
gagcggctcgggaccgccgggtcgc

SEQ ID NO: 1501505 - DNA, 25 bp, Homo sapien
gacggtctgtgaccgcccagacgtc

SEQ ID NO: 1501506 - DNA, 25 bp, Homo sapien
tgaccgcccagacgtctcccttccg

SEQ ID NO: 1501507 - DNA, 25 bp, Homo sapien
ctctccccgacggtctgtgaccgcc

SEQ ID NO: 1501508 - DNA, 25 bp, Homo sapien
tccccgacggtctgtgaccgcccag

SEQ ID NO: 1501509 - DNA, 25 bp, Homo sapien
tgcggttcccgcccgctgcgcccac

SEQ ID NO: 1501510 - DNA, 25 bp, Homo sapien
atgcggttcccgcccgctgcgccca

SEQ ID NO: 1501511 - DNA, 25 bp, Homo sapien
cgatgcggttcccgcccgctgcgcc

SEQ ID NO: 1501512 - DNA, 25 bp, Homo sapien
ccgatgcggttcccgcccgctgcgc

SEQ ID NO: 1501513 - DNA, 25 bp, Homo sapien
ctgggaccagccaacccaggacgtc

SEQ ID NO: 1501514 - DNA, 25 bp, Homo sapien
gggaccagccaacccaggacgtctc

SEQ ID NO: 1501515 - DNA, 25 bp, Homo sapien
ccagccaacccaggacgtctctcca

SEQ ID NO: 1501516 - DNA, 25 bp, Homo sapien
tgggaccagccaacccaggacgtct

SEQ ID NO: 1501517 - DNA, 25 bp, Homo sapien
gtccccaggtaaacccagcgtgcaa

SEQ ID NO: 1501518 - DNA, 25 bp, Homo sapien
gggaaacctttagtcgcacgcactg

SEQ ID NO: 1501519 - DNA, 25 bp, Homo sapien
gataacgcagtggtctgcgccctgg

SEQ ID NO: 1501520 - DNA, 25 bp, Homo sapien
gtaaaatcgctgatcctccgcccgt

SEQ ID NO: 1501521 - DNA, 25 bp, Homo sapien
tgaaagttacagtcgaatcacggcg

SEQ ID NO: 1501522 - DNA, 25 bp, Homo sapien
tacagtcgaatcacggcgttgttgc

SEQ ID NO: 1501523 - DNA, 25 bp, Homo sapien
gaatcacggcgttgttgctggacac

SEQ ID NO: 1501524 - DNA, 25 bp, Homo sapien
atgggtgaaagttacagtcgaatca

SEQ ID NO: 1501525 - DNA, 25 bp, Homo sapien
gcctgggttatctctctgcctgtgc

SEQ ID NO: 1501526 - DNA, 25 bp, Homo sapien
aacccttcactaacaatcaaaatct

SEQ ID NO: 1501527 - DNA, 25 bp, Homo sapien
aatctcccaagatcagaggcctcaa

SEQ ID NO: 1501528 - DNA, 25 bp, Homo sapien
tttcatcgtcttgcaggcatccctc

SEQ ID NO: 1501529 - DNA, 25 bp, Homo sapien
actgccatcggttaatatcgaagca

SEQ ID NO: 1501530 - DNA, 25 bp, Homo sapien
aaactgccatcggttaatatcgaag

SEQ ID NO: 1501531 - DNA, 25 bp, Homo sapien
tgccatcggttaatatcgaagcata

SEQ ID NO: 1501532 - DNA, 25 bp, Homo sapien
ccatcggttaatatcgaagcatatt

SEQ ID NO: 1501533 - DNA, 25 bp, Homo sapien
catcaggttgtcgttaatttccccg

SEQ ID NO: 1501534 - DNA, 25 bp, Homo sapien
ctctggatgatgacgcaatcttgca

SEQ ID NO: 1501535 - DNA, 25 bp, Homo sapien
ggatcacggcagttactctggatga

SEQ ID NO: 1501536 - DNA, 25 bp, Homo sapien
tcttgtcgggcgtatgggaaacacg

SEQ ID NO: 1501537 - DNA, 25 bp, Homo sapien
tccctgtggtaacgtcttgtgaaac

SEQ ID NO: 1501538 - DNA, 25 bp, Homo sapien
tatgaaacaacgcagagatcctgtg

SEQ ID NO: 1501539 - DNA, 25 bp, Homo sapien
ggaccctgaaattgatacaatccag

SEQ ID NO: 1501540 - DNA, 25 bp, Homo sapien
ttagttctatccaccaccacaaaga

SEQ ID NO: 1501541 - DNA, 25 bp, Homo sapien
cactaagacgtacatgagaaggata

SEQ ID NO: 1501542 - DNA, 25 bp, Homo sapien
ttatacatgttgtgacagcaaaaga

SEQ ID NO: 1501543 - DNA, 25 bp, Homo sapien
aaatcatagatgcaatcaacgaagc

SEQ ID NO: 1501544 - DNA, 25 bp, Homo sapien
tgttagattcctcccactaagacgt

SEQ ID NO: 1501545 - DNA, 25 bp, Homo sapien
atggtgatgatgtgatccgccccag

SEQ ID NO: 1501546 - DNA, 25 bp, Homo sapien
gcatattggccacaagttttgcaga

SEQ ID NO: 1501547 - DNA, 25 bp, Homo sapien
cccagccaccgacagcatattggcc

SEQ ID NO: 1501548 - DNA, 25 bp, Homo sapien
tggtgatgatgtgatccgccccagc

SEQ ID NO: 1501549 - DNA, 25 bp, Homo sapien
ttgatttaaccatttgcagaaggaa

SEQ ID NO: 1501550 - DNA, 25 bp, Homo sapien
accatttgcagaaggaaaacacgga

SEQ ID NO: 1501551 - DNA, 25 bp, Homo sapien
catttgcagaaggaaaacacggata

SEQ ID NO: 1501552 - DNA, 25 bp, Homo sapien
taatttaacagacttgatttaacca

SEQ ID NO: 1501553 - DNA, 25 bp, Homo sapien
caaattatccacaggaatatcaaag

SEQ ID NO: 1501554 - DNA, 25 bp, Homo sapien
aatgttttcccgaatccactgcagg

SEQ ID NO: 1501555 - DNA, 25 bp, Homo sapien
cccctgcgtcaggtgaaacaatgat

SEQ ID NO: 1501556 - DNA, 25 bp, Homo sapien
tgcgggctccgcatacaaattatcc

SEQ ID NO: 1501557 - DNA, 25 bp, Homo sapien
tcggaaaaggaaaaaccaatcagca

SEQ ID NO: 1501558 - DNA, 25 bp, Homo sapien
ctgcaaggtgtagcctgcatgatac

SEQ ID NO: 1501559 - DNA, 25 bp, Homo sapien
agatggagaaatctgcaaggtgtag

SEQ ID NO: 1501560 - DNA, 25 bp, Homo sapien
gaaaaaccaatcagcagatggagaa

SEQ ID NO: 1501561 - DNA, 25 bp, Homo sapien
cggtctacttacttgctcattagca

SEQ ID NO: 1501562 - DNA, 25 bp, Homo sapien
cgaaatattaacaaagatgatgggt

SEQ ID NO: 1501563 - DNA, 25 bp, Homo sapien
tggaagtgaagcctgcggtctactt

SEQ ID NO: 1501564 - DNA, 25 bp, Homo sapien
tttaagtaatttacagcatgcttcc

SEQ ID NO: 1501565 - DNA, 25 bp, Homo sapien
tcgtgtgcattccactccacatctg

SEQ ID NO: 1501566 - DNA, 25 bp, Homo sapien
cgagcagctaggattgtgaaattct

SEQ ID NO: 1501567 - DNA, 25 bp, Homo sapien
ttctcataggtgactatttcctccc

SEQ ID NO: 1501568 - DNA, 25 bp, Homo sapien
cacaggctcgtggtttgacttctca

SEQ ID NO: 1501569 - DNA, 25 bp, Homo sapien
gcatctgcaaagctctacaaggtca

SEQ ID NO: 1501570 - DNA, 25 bp, Homo sapien
cattccaaaggctgatcacttgtca

SEQ ID NO: 1501571 - DNA, 25 bp, Homo sapien
gctcttctaagaatcagggcctgtg

SEQ ID NO: 1501572 - DNA, 25 bp, Homo sapien
ttgtgttagatcctaggtcctcagc

SEQ ID NO: 1501573 - DNA, 25 bp, Homo sapien
tgctggcagaggccgatctccagct

SEQ ID NO: 1501574 - DNA, 25 bp, Homo sapien
gcatggtccgttccttctcttctgt

SEQ ID NO: 1501575 - DNA, 25 bp, Homo sapien
cagctgcatggtccgttccttctct

SEQ ID NO: 1501576 - DNA, 25 bp, Homo sapien
tgctcccgtcttttatatatttgtg

SEQ ID NO: 1501577 - DNA, 25 bp, Homo sapien
tacagtaataggctacgtgacacag

SEQ ID NO: 1501578 - DNA, 25 bp, Homo sapien
tgtgaacattacacaccgtacagta

SEQ ID NO: 1501579 - DNA, 25 bp, Homo sapien
aataggctacgtgacacagcgctgc

SEQ ID NO: 1501580 - DNA, 25 bp, Homo sapien
tacacaccgtacagtaataggctac

SEQ ID NO: 1501581 - DNA, 25 bp, Homo sapien
ggtatccaatggtaatgtcagaaga

SEQ ID NO: 1501582 - DNA, 25 bp, Homo sapien
tgttgacacaacataccacactgaa

SEQ ID NO: 1501583 - DNA, 25 bp, Homo sapien
gagaaaatacccctgcaaacagctt

SEQ ID NO: 1501584 - DNA, 25 bp, Homo sapien
gcttcctgggttgttagaacgctat

SEQ ID NO: 1501585 - DNA, 25 bp, Homo sapien
tgtacatttgcactcaaagaaaaac

SEQ ID NO: 1501586 - DNA, 25 bp, Homo sapien
atgtacatttgcactcaaagaaaaa

SEQ ID NO: 1501587 - DNA, 25 bp, Homo sapien
gaatcaggcctctcttgatcagccc

SEQ ID NO: 1501588 - DNA, 25 bp, Homo sapien
tcatacagtcaactagagatctcgc

SEQ ID NO: 1501589 - DNA, 25 bp, Homo sapien
tttgggaatgtagcaggcaaccaca

SEQ ID NO: 1501590 - DNA, 25 bp, Homo sapien
cacacccgagagatgatgcaagaat

SEQ ID NO: 1501591 - DNA, 25 bp, Homo sapien
acgaggatggccacacggtccttca

SEQ ID NO: 1501592 - DNA, 25 bp, Homo sapien
tctttgtggatcaaagcaaattcca

SEQ ID NO: 1501593 - DNA, 25 bp, Homo sapien
agcaaattccacattcaacctgtct

SEQ ID NO: 1501594 - DNA, 25 bp, Homo sapien
caccaggaccatccggtccacttca

SEQ ID NO: 1501595 - DNA, 25 bp, Homo sapien
agaagatcccatgggtaaggatagc

SEQ ID NO: 1501596 - DNA, 25 bp, Homo sapien
taaggatagcatacactttggtggc

SEQ ID NO: 1501597 - DNA, 25 bp, Homo sapien
caaaggcggcattatttattctgga

SEQ ID NO: 1501598 - DNA, 25 bp, Homo sapien
tgtgacgacaacagcctcaaaggcg

SEQ ID NO: 1501599 - DNA, 25 bp, Homo sapien
ggctgcctttggtgtatagacagta

SEQ ID NO: 1501600 - DNA, 25 bp, Homo sapien
ttaaggatctaaagtaggtgcctgg

SEQ ID NO: 1501601 - DNA, 25 bp, Homo sapien
ttggctgcctttggtgtatagacag

SEQ ID NO: 1501602 - DNA, 25 bp, Homo sapien
tggctgcctttggtgtatagacagt

SEQ ID NO: 1501603 - DNA, 25 bp, Homo sapien
gattccccattgtgtgtccttcgga

SEQ ID NO: 1501604 - DNA, 25 bp, Homo sapien
caggtaggacacggattccccattg

SEQ ID NO: 1501605 - DNA, 25 bp, Homo sapien
tccttcggattgcttcggccaagat

SEQ ID NO: 1501606 - DNA, 25 bp, Homo sapien
cccattgtgtgtccttcggattgct

SEQ ID NO: 1501607 - DNA, 25 bp, Homo sapien
ggattaagctgctcccaagacagtc

SEQ ID NO: 1501608 - DNA, 25 bp, Homo sapien
cacttaagtttccacgccaggagca

SEQ ID NO: 1501609 - DNA, 25 bp, Homo sapien
cattcagtagaattggacaggacca

SEQ ID NO: 1501610 - DNA, 25 bp, Homo sapien
gaaagttgtcgcctcaaagtactga

SEQ ID NO: 1501611 - DNA, 25 bp, Homo sapien
ggtactgcaacacatcactccgtca

SEQ ID NO: 1501612 - DNA, 25 bp, Homo sapien
ggcacagctgttacgctttgaggaa

SEQ ID NO: 1501613 - DNA, 25 bp, Homo sapien
caacgtggacaccttatgtggcaca

SEQ ID NO: 1501614 - DNA, 25 bp, Homo sapien
gctggcctataatcgtaaagtagca

SEQ ID NO: 1501615 - DNA, 25 bp, Homo sapien
aaactccggtaagtggtgaagtctg

SEQ ID NO: 1501616 - DNA, 25 bp, Homo sapien
tcacgcaatttagatacaggatagc

SEQ ID NO: 1501617 - DNA, 25 bp, Homo sapien
atcatgtaccaaacgccctctgctg

SEQ ID NO: 1501618 - DNA, 25 bp, Homo sapien
tcagaataggaaacagagctcaaag

SEQ ID NO: 1501619 - DNA, 25 bp, Homo sapien
aatgttaatgtggtgggcaaaacca

SEQ ID NO: 1501620 - DNA, 25 bp, Homo sapien
gaaaaaaatgttaatgtggtgggca

SEQ ID NO: 1501621 - DNA, 25 bp, Homo sapien
ctggaatccgataatttgtcaagca

SEQ ID NO: 1501622 - DNA, 25 bp, Homo sapien
caaatactgatggaaggccacccag

SEQ ID NO: 1501623 - DNA, 25 bp, Homo sapien
gtcttttcctctgacaaatactgat

SEQ ID NO: 1501624 - DNA, 25 bp, Homo sapien
tctgtatgataattacagcagtctt

SEQ ID NO: 1501625 - DNA, 25 bp, Homo sapien
ctgccccatagcgtgccctctgtac

SEQ ID NO: 1501626 - DNA, 25 bp, Homo sapien
ccaagagacctcattgtagcattct

SEQ ID NO: 1501627 - DNA, 25 bp, Homo sapien
caattccacacagaatgtccacagg

SEQ ID NO: 1501628 - DNA, 25 bp, Homo sapien
cattctgagtagtatcagcaattcc

SEQ ID NO: 1501629 - DNA, 25 bp, Homo sapien
gagacctcattgtagcattctgagt

SEQ ID NO: 1501630 - DNA, 25 bp, Homo sapien
caagatcaaagccatgctcgtggga

SEQ ID NO: 1501631 - DNA, 25 bp, Homo sapien
taaaagacctgtgataccacaggtg

SEQ ID NO: 1501632 - DNA, 25 bp, Homo sapien
tgggattccttaccaaggtagtgcc

SEQ ID NO: 1501633 - DNA, 25 bp, Homo sapien
cctgcacattgttgggctcatcata

SEQ ID NO: 1501634 - DNA, 25 bp, Homo sapien
tgcaaacaatggagtatctcgtagg

SEQ ID NO: 1501635 - DNA, 25 bp, Homo sapien
caaacaatggagtatctcgtaggag

SEQ ID NO: 1501636 - DNA, 25 bp, Homo sapien
ttgcaaacaatggagtatctcgtag

SEQ ID NO: 1501637 - DNA, 25 bp, Homo sapien
acaatggagtatctcgtaggaggat

SEQ ID NO: 1501638 - DNA, 25 bp, Homo sapien
taggcttcagaaggtgggtaataat

SEQ ID NO: 1501639 - DNA, 25 bp, Homo sapien
aggcttcagaaggtgggtaataata

SEQ ID NO: 1501640 - DNA, 25 bp, Homo sapien
ggcttcagaaggtgggtaataataa

SEQ ID NO: 1501641 - DNA, 25 bp, Homo sapien
tcagaaggtgggtaataataaactc

SEQ ID NO: 1501642 - DNA, 25 bp, Homo sapien
tgtctagcctgtcaccacaactggt

SEQ ID NO: 1501643 - DNA, 25 bp, Homo sapien
gctgttcgtggacagttatttccgc

SEQ ID NO: 1501644 - DNA, 25 bp, Homo sapien
gaattctctacctggctgtctagcc

SEQ ID NO: 1501645 - DNA, 25 bp, Homo sapien
tccgctcctattgaattctctacct

SEQ ID NO: 1501646 - DNA, 25 bp, Homo sapien
gcatggagtgatcctatatctggag

SEQ ID NO: 1501647 - DNA, 25 bp, Homo sapien
gatcctatatctggagtcttctgag

SEQ ID NO: 1501648 - DNA, 25 bp, Homo sapien
gggaggcaggaagtgtagtcacaaa

SEQ ID NO: 1501649 - DNA, 25 bp, Homo sapien
agtcttctgagatgaagtgatggga

SEQ ID NO: 1501650 - DNA, 25 bp, Homo sapien
atctatatgtgttccaatgtttaaa

SEQ ID NO: 1501651 - DNA, 25 bp, Homo sapien
tctatatgtgttccaatgtttaaaa

SEQ ID NO: 1501652 - DNA, 25 bp, Homo sapien
agcagagcatgagaggtgccaagat

SEQ ID NO: 1501653 - DNA, 25 bp, Homo sapien
tcttcttccaaaatggaatgtagag

SEQ ID NO: 1501654 - DNA, 25 bp, Homo sapien
tcagcttgagatgggcccaatagca

SEQ ID NO: 1501655 - DNA, 25 bp, Homo sapien
gccaagatcagcttgagatgggccc

SEQ ID NO: 1501656 - DNA, 25 bp, Homo sapien
catgtccacgatcacttcttttgtt

SEQ ID NO: 1501657 - DNA, 25 bp, Homo sapien
ccctcctcctacaggcctcagtgag

SEQ ID NO: 1501658 - DNA, 25 bp, Homo sapien
tttttaccctaatgctctctcctgc

SEQ ID NO: 1501659 - DNA, 25 bp, Homo sapien
tgaccatcttggtaaatagttttcc

SEQ ID NO: 1501660 - DNA, 25 bp, Homo sapien
gagaaggacatgtatataactggga

SEQ ID NO: 1501661 - DNA, 25 bp, Homo sapien
aaacttgtaagagatgtctggttgc

SEQ ID NO: 1501662 - DNA, 25 bp, Homo sapien
tccaaatagcgtttttatcttcaaa

SEQ ID NO: 1501663 - DNA, 25 bp, Homo sapien
tctggttgcaatcagaggagtgaga

SEQ ID NO: 1501664 - DNA, 25 bp, Homo sapien
ccagtgaaagcacagagctcgtttg

SEQ ID NO: 1501665 - DNA, 25 bp, Homo sapien
ctcggagatcccagcaagtttgcat

SEQ ID NO: 1501666 - DNA, 25 bp, Homo sapien
agtggagctgcagacggactctttc

SEQ ID NO: 1501667 - DNA, 25 bp, Homo sapien
acgggaagcctggaactcggagatc

SEQ ID NO: 1501668 - DNA, 25 bp, Homo sapien
ttttcacaaggtgacaaggagagac

SEQ ID NO: 1501669 - DNA, 25 bp, Homo sapien
cagattttcacaaggtgacaaggag

SEQ ID NO: 1501670 - DNA, 25 bp, Homo sapien
gattttcacaaggtgacaaggagag

SEQ ID NO: 1501671 - DNA, 25 bp, Homo sapien
tcagattttcacaaggtgacaagga

SEQ ID NO: 1501672 - DNA, 25 bp, Homo sapien
ctgaaagtataagaaagaacaaatc

SEQ ID NO: 1501673 - DNA, 25 bp, Homo sapien
tgaaagtataagaaagaacaaatca

SEQ ID NO: 1501674 - DNA, 25 bp, Homo sapien
gaaagtataagaaagaacaaatcat

SEQ ID NO: 1501675 - DNA, 25 bp, Homo sapien
tgtgcagtccacgatcacatggttc

SEQ ID NO: 1501676 - DNA, 25 bp, Homo sapien
ctgtgcagtccacgatcacatggtt

SEQ ID NO: 1501677 - DNA, 25 bp, Homo sapien
gcagtccacgatcacatggttcttt

SEQ ID NO: 1501678 - DNA, 25 bp, Homo sapien
gtgcagtccacgatcacatggttct

SEQ ID NO: 1501679 - DNA, 25 bp, Homo sapien
cacagagccttttccggagctggag

SEQ ID NO: 1501680 - DNA, 25 bp, Homo sapien
gaaaagatgttgttggcctcaaggc

SEQ ID NO: 1501681 - DNA, 25 bp, Homo sapien
gaattatttttacacggcgcacaag

SEQ ID NO: 1501682 - DNA, 25 bp, Homo sapien
agcttgcgggtttgttggccactca

SEQ ID NO: 1501683 - DNA, 25 bp, Homo sapien
gggccctggatgacacggaagcaat

SEQ ID NO: 1501684 - DNA, 25 bp, Homo sapien
tctaaggcttgaacacatgcacgct

SEQ ID NO: 1501685 - DNA, 25 bp, Homo sapien
caattacaggagaatcagagcccca

SEQ ID NO: 1501686 - DNA, 25 bp, Homo sapien
tgccactcttttacaggagctgagg

SEQ ID NO: 1501687 - DNA, 25 bp, Homo sapien
agtaaagcctttggcattgccacac

SEQ ID NO: 1501688 - DNA, 25 bp, Homo sapien
gtaaagtaaagcctttggcattgcc

SEQ ID NO: 1501689 - DNA, 25 bp, Homo sapien
aggtaaagtaaagcctttggcattg

SEQ ID NO: 1501690 - DNA, 25 bp, Homo sapien
aaagtaaagcctttggcattgccac

SEQ ID NO: 1501691 - DNA, 25 bp, Homo sapien
aataattcatatagtgtgtactcac

SEQ ID NO: 1501692 - DNA, 25 bp, Homo sapien
tgtgacccttattgattaaatgtac

SEQ ID NO: 1501693 - DNA, 25 bp, Homo sapien
gttgtgaaatagttggctccagcaa

SEQ ID NO: 1501694 - DNA, 25 bp, Homo sapien
tgtacgttggaaataattcatatag

SEQ ID NO: 1501695 - DNA, 25 bp, Homo sapien
cttgctgtgggtgtctagagccaaa

SEQ ID NO: 1501696 - DNA, 25 bp, Homo sapien
ccagtgtcacctagggaagattcca

SEQ ID NO: 1501697 - DNA, 25 bp, Homo sapien
tatgaagacatgcaaccactgatgt

SEQ ID NO: 1501698 - DNA, 25 bp, Homo sapien
taggtttccaaccaaaagtgcacac

SEQ ID NO: 1501699 - DNA, 25 bp, Homo sapien
gcttgaagatccagccaatggccaa

SEQ ID NO: 1501700 - DNA, 25 bp, Homo sapien
ttcagggactgcagaaacgccttca

SEQ ID NO: 1501701 - DNA, 25 bp, Homo sapien
ggactgcagaaacgccttcacgtgt

SEQ ID NO: 1501702 - DNA, 25 bp, Homo sapien
ccttcacgtgtcagcattggcttga

SEQ ID NO: 1501703 - DNA, 25 bp, Homo sapien
tttgaggacgcatccattggtgggc

SEQ ID NO: 1501704 - DNA, 25 bp, Homo sapien
ttgatgtagagaggacagaatttga

SEQ ID NO: 1501705 - DNA, 25 bp, Homo sapien
gaatgagaacgaatgcagataggct

SEQ ID NO: 1501706 - DNA, 25 bp, Homo sapien
gatgaagtcggtgacataaaacatg

SEQ ID NO: 1501707 - DNA, 25 bp, Homo sapien
ggcgaataacatgaacattgcttca

SEQ ID NO: 1501708 - DNA, 25 bp, Homo sapien
tctcaaactcgtcttccttgtgtaa

SEQ ID NO: 1501709 - DNA, 25 bp, Homo sapien
ccttgtgtaattcacagatgtaggc

SEQ ID NO: 1501710 - DNA, 25 bp, Homo sapien
tttgtactgaacttcggatttctca

SEQ ID NO: 1501711 - DNA, 25 bp, Homo sapien
cgtaacttgcagcagcgcagaatgg

SEQ ID NO: 1501712 - DNA, 25 bp, Homo sapien
ttgcagcagcgcagaatggtaccct

SEQ ID NO: 1501713 - DNA, 25 bp, Homo sapien
taatttttcattccgtaacttgcag

SEQ ID NO: 1501714 - DNA, 25 bp, Homo sapien
cagaatggtaccctctatgcaggag

SEQ ID NO: 1501715 - DNA, 25 bp, Homo sapien
tagcaaaggaagaatatttccctca

SEQ ID NO: 1501716 - DNA, 25 bp, Homo sapien
caaaggaagaatatttccctcacct

SEQ ID NO: 1501717 - DNA, 25 bp, Homo sapien
gaaatagcaaaggaagaatatttcc

SEQ ID NO: 1501718 - DNA, 25 bp, Homo sapien
aatagcaaaggaagaatatttccct

SEQ ID NO: 1501719 - DNA, 25 bp, Homo sapien
gggatgggtcttgctgatgttccct

SEQ ID NO: 1501720 - DNA, 25 bp, Homo sapien
gatgggtcttgctgatgttccctaa

SEQ ID NO: 1501721 - DNA, 25 bp, Homo sapien
tgggtcttgctgatgttccctaaca

SEQ ID NO: 1501722 - DNA, 25 bp, Homo sapien
ggtcttgctgatgttccctaacact

SEQ ID NO: 1501723 - DNA, 25 bp, Homo sapien
caggctgcaggagctattttgcaaa

SEQ ID NO: 1501724 - DNA, 25 bp, Homo sapien
agctattttgcaaagatgactcctt

SEQ ID NO: 1501725 - DNA, 25 bp, Homo sapien
gagctattttgcaaagatgactcct

SEQ ID NO: 1501726 - DNA, 25 bp, Homo sapien
ctgcaggagctattttgcaaagatg

SEQ ID NO: 1501727 - DNA, 25 bp, Homo sapien
tttggttaggtccacagtacatgac

SEQ ID NO: 1501728 - DNA, 25 bp, Homo sapien
ggtccacagtacatgacctgccaat

SEQ ID NO: 1501729 - DNA, 25 bp, Homo sapien
catttgtcctttggttaggtccaca

SEQ ID NO: 1501730 - DNA, 25 bp, Homo sapien
cagtacatgacctgccaattttctt

SEQ ID NO: 1501731 - DNA, 25 bp, Homo sapien
gcagcttaaagcaaattgtgggcca

SEQ ID NO: 1501732 - DNA, 25 bp, Homo sapien
tccagaggatccatcttgtgtggcc

SEQ ID NO: 1501733 - DNA, 25 bp, Homo sapien
gaggtaaggcctcaacatccgattt

SEQ ID NO: 1501734 - DNA, 25 bp, Homo sapien
gaagtgcagggccattctagccata

SEQ ID NO: 1501735 - DNA, 25 bp, Homo sapien
tttcttcggcgcataactcacagga

SEQ ID NO: 1501736 - DNA, 25 bp, Homo sapien
tgtagtcgacgattgctgcactctg

SEQ ID NO: 1501737 - DNA, 25 bp, Homo sapien
gggatttccgttctggtgctgtaca

SEQ ID NO: 1501738 - DNA, 25 bp, Homo sapien
tgtcacatatttgcccaccgtttgg

SEQ ID NO: 1501739 - DNA, 25 bp, Homo sapien
gaactatttgcataactctgccggg

SEQ ID NO: 1501740 - DNA, 25 bp, Homo sapien
taagtcaagcaactcgagacgagga

SEQ ID NO: 1501741 - DNA, 25 bp, Homo sapien
taaatcgaggtgcttcagactactg

SEQ ID NO: 1501742 - DNA, 25 bp, Homo sapien
tcttcaaggtggtagcgcagctcat

SEQ ID NO: 1501743 - DNA, 25 bp, Homo sapien
ggttgtcgatgatggccaatcccgg

SEQ ID NO: 1501744 - DNA, 25 bp, Homo sapien
tgccgtagcctcaaatactgagaat

SEQ ID NO: 1501745 - DNA, 25 bp, Homo sapien
tgatgctctgcatgaggttgtcgat

SEQ ID NO: 1501746 - DNA, 25 bp, Homo sapien
ttacagatccgctgccgtagcctca

SEQ ID NO: 1501747 - DNA, 25 bp, Homo sapien
tacatattgttataccgtgaatcat

SEQ ID NO: 1501748 - DNA, 25 bp, Homo sapien
ttagtattgcttaatggaatcgaca

SEQ ID NO: 1501749 - DNA, 25 bp, Homo sapien
tgaatcattttcagtcaagaccaca

SEQ ID NO: 1501750 - DNA, 25 bp, Homo sapien
gagtttgccaaaacaagccttctgc

SEQ ID NO: 1501751 - DNA, 25 bp, Homo sapien
tagcctttggccaatagcccaggag

SEQ ID NO: 1501752 - DNA, 25 bp, Homo sapien
tatcatcaagatagcaggccatccc

SEQ ID NO: 1501753 - DNA, 25 bp, Homo sapien
tgctaagatggtccacagtgatccc

SEQ ID NO: 1501754 - DNA, 25 bp, Homo sapien
tatggcgcgaaatcatgacttaacg

SEQ ID NO: 1501755 - DNA, 25 bp, Homo sapien
gcttcgaatttagctgcatactttt

SEQ ID NO: 1501756 - DNA, 25 bp, Homo sapien
caaaagcttcgaatttagctgcata

SEQ ID NO: 1501757 - DNA, 25 bp, Homo sapien
tatagaccaaaagcttcgaatttag

SEQ ID NO: 1501758 - DNA, 25 bp, Homo sapien
acaatatagaccaaaagcttcgaat

SEQ ID NO: 1501759 - DNA, 25 bp, Homo sapien
tgagattgttggtgctgtgtagtac

SEQ ID NO: 1501760 - DNA, 25 bp, Homo sapien
accatgagtgggcaatgggaacatg

SEQ ID NO: 1501761 - DNA, 25 bp, Homo sapien
gcatgcttgccaccatgagtgggca

SEQ ID NO: 1501762 - DNA, 25 bp, Homo sapien
tgtagtactcaagagacaatcagca

SEQ ID NO: 1501763 - DNA, 25 bp, Homo sapien
ttatttaccgcttctgaatcatatt

SEQ ID NO: 1501764 - DNA, 25 bp, Homo sapien
ccaaaggagaagctatcatttttag

SEQ ID NO: 1501765 - DNA, 25 bp, Homo sapien
tctgccttgttgtcacatctctctt

SEQ ID NO: 1501766 - DNA, 25 bp, Homo sapien
tccaccctgtaccaaaggagaagct

SEQ ID NO: 1501767 - DNA, 25 bp, Homo sapien
cctgactctttgtagcacgtggtca

SEQ ID NO: 1501768 - DNA, 25 bp, Homo sapien
tgtgaactttcctacgtagccctga

SEQ ID NO: 1501769 - DNA, 25 bp, Homo sapien
tttcacttcccacgccgatgtgaac

SEQ ID NO: 1501770 - DNA, 25 bp, Homo sapien
tacgtagccctgactctttgtagca

SEQ ID NO: 1501771 - DNA, 25 bp, Homo sapien
ggtagccgctctcagacagaataga

SEQ ID NO: 1501772 - DNA, 25 bp, Homo sapien
gagtgattaccaatccccgcagtgg

SEQ ID NO: 1501773 - DNA, 25 bp, Homo sapien
ctagatatggacaagagagagcctc

SEQ ID NO: 1501774 - DNA, 25 bp, Homo sapien
tcttggcaaagagattatggcatgg

SEQ ID NO: 1501775 - DNA, 25 bp, Homo sapien
accgaggtgactgccattagcggca

SEQ ID NO: 1501776 - DNA, 25 bp, Homo sapien
ggaggattggatgggcttggccctg

SEQ ID NO: 1501777 - DNA, 25 bp, Homo sapien
tgactgccattagcggcatggcttc

SEQ ID NO: 1501778 - DNA, 25 bp, Homo sapien
cgctctacttccaccgaggtgactg

SEQ ID NO: 1501779 - DNA, 25 bp, Homo sapien
ttattggataatcacttccacagaa

SEQ ID NO: 1501780 - DNA, 25 bp, Homo sapien
tattggataatcacttccacagaag

SEQ ID NO: 1501781 - DNA, 25 bp, Homo sapien
tgaaagggggctcttcgagggagaa

SEQ ID NO: 1501782 - DNA, 25 bp, Homo sapien
tcaagagtgaagtgccaatggggcc

SEQ ID NO: 1501783 - DNA, 25 bp, Homo sapien
gagaatccacgtgggtagtggttgg

SEQ ID NO: 1501784 - DNA, 25 bp, Homo sapien
gctcttcgagggagaatccacgtgg

SEQ ID NO: 1501785 - DNA, 25 bp, Homo sapien
ggataccagaccaaggttctcagac

SEQ ID NO: 1501786 - DNA, 25 bp, Homo sapien
ggcaccagtgccagaattggaattc

SEQ ID NO: 1501787 - DNA, 25 bp, Homo sapien
gaggtgcggataccagaccaaggtt

SEQ ID NO: 1501788 - DNA, 25 bp, Homo sapien
tggcaccagtagagctggtggcacc

SEQ ID NO: 1501789 - DNA, 25 bp, Homo sapien
ccatctggtctccctcacagcagag

SEQ ID NO: 1501790 - DNA, 25 bp, Homo sapien
cttccactgattggaatctaaaacc

SEQ ID NO: 1501791 - DNA, 25 bp, Homo sapien
ctgcctgcaccccacgttcccctgt

SEQ ID NO: 1501792 - DNA, 25 bp, Homo sapien
gcctgcaccccacgttcccctgtgg

SEQ ID NO: 1501793 - DNA, 25 bp, Homo sapien
cagatccctttgtctgagtttcagg

SEQ ID NO: 1501794 - DNA, 25 bp, Homo sapien
gatccctttgtctgagtttcagggc

SEQ ID NO: 1501795 - DNA, 25 bp, Homo sapien
tccctttgtctgagtttcagggcct

SEQ ID NO: 1501796 - DNA, 25 bp, Homo sapien
ccctttgtctgagtttcagggcctc

SEQ ID NO: 1501797 - DNA, 25 bp, Homo sapien
aaggtggcaggggacgcagttttat

SEQ ID NO: 1501798 - DNA, 25 bp, Homo sapien
ggcaggggacgcagttttattttgc

SEQ ID NO: 1501799 - DNA, 25 bp, Homo sapien
ccggaaaaggtggcaggggacgcag

SEQ ID NO: 1501800 - DNA, 25 bp, Homo sapien
cggaaaaggtggcaggggacgcagt

SEQ ID NO: 1501801 - DNA, 25 bp, Homo sapien
gccaacattgcctgcgttgaagggc

SEQ ID NO: 1501802 - DNA, 25 bp, Homo sapien
tgcctgcgttgaagggcggttcccc

SEQ ID NO: 1501803 - DNA, 25 bp, Homo sapien
aacattgcctgcgttgaagggcggt

SEQ ID NO: 1501804 - DNA, 25 bp, Homo sapien
cattgcctgcgttgaagggcggttc

SEQ ID NO: 1501805 - DNA, 25 bp, Homo sapien
gaagagaaagagagacgactgctta

SEQ ID NO: 1501806 - DNA, 25 bp, Homo sapien
aagagagacgactgcttaaaggaaa

SEQ ID NO: 1501807 - DNA, 25 bp, Homo sapien
gagaaagagagacgactgcttaaag

SEQ ID NO: 1501808 - DNA, 25 bp, Homo sapien
gaaagagagacgactgcttaaagga

SEQ ID NO: 1501809 - DNA, 25 bp, Homo sapien
tgccactaccttctcctggcttctt

SEQ ID NO: 1501810 - DNA, 25 bp, Homo sapien
gagtgccactaccttctcctggctt

SEQ ID NO: 1501811 - DNA, 25 bp, Homo sapien
atgacaaaggagtgccactaccttc

SEQ ID NO: 1501812 - DNA, 25 bp, Homo sapien
ctgatgacaaaggagtgccactacc

SEQ ID NO: 1501813 - DNA, 25 bp, Homo sapien
caccgtttccgcaggttctgtgatt

SEQ ID NO: 1501814 - DNA, 25 bp, Homo sapien
cgtttagctggcagctgccgttgta

SEQ ID NO: 1501815 - DNA, 25 bp, Homo sapien
gccttttcgcccgtttagctggcag

SEQ ID NO: 1501816 - DNA, 25 bp, Homo sapien
tcacccagctgctgtcgaaaatcat

SEQ ID NO: 1501817 - DNA, 25 bp, Homo sapien
tatatatagacccttgaatgccact

SEQ ID NO: 1501818 - DNA, 25 bp, Homo sapien
agacccttgaatgccactgccagca

SEQ ID NO: 1501819 - DNA, 25 bp, Homo sapien
tctccatctacttgacttccttttt

SEQ ID NO: 1501820 - DNA, 25 bp, Homo sapien
agcagcttggacttccccgtttctc

SEQ ID NO: 1501821 - DNA, 25 bp, Homo sapien
tggcacaggcttttgtctcgctggg

SEQ ID NO: 1501822 - DNA, 25 bp, Homo sapien
aaccccttgctaatcatttttatgg

SEQ ID NO: 1501823 - DNA, 25 bp, Homo sapien
tgtctcgctggggattagagtcaac

SEQ ID NO: 1501824 - DNA, 25 bp, Homo sapien
caaggcagtgtgcaaaatattcctt

SEQ ID NO: 1501825 - DNA, 25 bp, Homo sapien
tgcggcgggcgcagctttatgggcg

SEQ ID NO: 1501826 - DNA, 25 bp, Homo sapien
cgggcgcagctttatgggcgctcct

SEQ ID NO: 1501827 - DNA, 25 bp, Homo sapien
gcgcagctttatgggcgctcctatg

SEQ ID NO: 1501828 - DNA, 25 bp, Homo sapien
caccaccgagttgtcgggcggggtg

SEQ ID NO: 1501829 - DNA, 25 bp, Homo sapien
gccttcacagggacgcggatgatga

SEQ ID NO: 1501830 - DNA, 25 bp, Homo sapien
cactcgggctcggatttagggaatg

SEQ ID NO: 1501831 - DNA, 25 bp, Homo sapien
cagtatctagggtgtttcgcatccc

SEQ ID NO: 1501832 - DNA, 25 bp, Homo sapien
agcggcacggcaaaacgccagtttt

SEQ ID NO: 1501833 - DNA, 25 bp, Homo sapien
caaaggacttgtctattcccccata

SEQ ID NO: 1501834 - DNA, 25 bp, Homo sapien
catgtctctgcaagaaggactgtaa

SEQ ID NO: 1501835 - DNA, 25 bp, Homo sapien
gtaaagatgtcatagcacagccccg

SEQ ID NO: 1501836 - DNA, 25 bp, Homo sapien
tctcccggcaattcggcatccctgg

SEQ ID NO: 1501837 - DNA, 25 bp, Homo sapien
cggcttcatcgcccgcgtcacaatg

SEQ ID NO: 1501838 - DNA, 25 bp, Homo sapien
gcgtcacaatgcagccccgcacaca

SEQ ID NO: 1501839 - DNA, 25 bp, Homo sapien
ccgcgtcacaatgcagccccgcaca

SEQ ID NO: 1501840 - DNA, 25 bp, Homo sapien
ttcatcgcccgcgtcacaatgcagc

SEQ ID NO: 1501841 - DNA, 25 bp, Homo sapien
tctagtcctctcacaaaggcggcgg

SEQ ID NO: 1501842 - DNA, 25 bp, Homo sapien
gatgcctctcaaagccgaatcttgc

SEQ ID NO: 1501843 - DNA, 25 bp, Homo sapien
taaaggctggctaggacaaggaaag

SEQ ID NO: 1501844 - DNA, 25 bp, Homo sapien
aattcaagtgggaaaaatcggcaag

SEQ ID NO: 1501845 - DNA, 25 bp, Homo sapien
gatctcagccatatcgggtttgtca

SEQ ID NO: 1501846 - DNA, 25 bp, Homo sapien
gaatttctcgatctcagccatatcg

SEQ ID NO: 1501847 - DNA, 25 bp, Homo sapien
gcagtggatttttctcttgcgtctc

SEQ ID NO: 1501848 - DNA, 25 bp, Homo sapien
cagtttcgacttatcgaatttctcg

SEQ ID NO: 1501849 - DNA, 25 bp, Homo sapien
taaagatgggggtgggtcggagctc

SEQ ID NO: 1501850 - DNA, 25 bp, Homo sapien
cccacccagcctttctaaagatggg

SEQ ID NO: 1501851 - DNA, 25 bp, Homo sapien
gctcccacccagcctttctaaagat

SEQ ID NO: 1501852 - DNA, 25 bp, Homo sapien
gccgctcccacccagcctttctaaa

SEQ ID NO: 1501853 - DNA, 25 bp, Homo sapien
ttctacacggtattccacaatggaa

SEQ ID NO: 1501854 - DNA, 25 bp, Homo sapien
gatgattaaaggattcagtacagac

SEQ ID NO: 1501855 - DNA, 25 bp, Homo sapien
cagactaaagggctttcatttaaag

SEQ ID NO: 1501856 - DNA, 25 bp, Homo sapien
cataaacattctacacggtattcca

SEQ ID NO: 1501857 - DNA, 25 bp, Homo sapien
ttcgcctgcttgcttctcctgttca

SEQ ID NO: 1501858 - DNA, 25 bp, Homo sapien
cctgcttgcttctcctgttcaatcg

SEQ ID NO: 1501859 - DNA, 25 bp, Homo sapien
ttacgattcgcctgcttgcttctcc

SEQ ID NO: 1501860 - DNA, 25 bp, Homo sapien
cgcctgcttgcttctcctgttcaat

SEQ ID NO: 1501861 - DNA, 25 bp, Homo sapien
tccctgccagccagatagatagaca

SEQ ID NO: 1501862 - DNA, 25 bp, Homo sapien
aaaggcaggcgcggccttcgttgtc

SEQ ID NO: 1501863 - DNA, 25 bp, Homo sapien
tgtacagtgcatattggcggcgcac

SEQ ID NO: 1501864 - DNA, 25 bp, Homo sapien
tgtggaatgtacagtgcatattggc

SEQ ID NO: 1501865 - DNA, 25 bp, Homo sapien
aaaaaattgtgcattccaataatta

SEQ ID NO: 1501866 - DNA, 25 bp, Homo sapien
ttatttgcatattaaaaaaattgtg

SEQ ID NO: 1501867 - DNA, 25 bp, Homo sapien
ccaataattaaaatcatttgaacaa

SEQ ID NO: 1501868 - DNA, 25 bp, Homo sapien
tttgcatattaaaaaaattgtgcat

SEQ ID NO: 1501869 - DNA, 25 bp, Homo sapien
gggaatttatccagtcaccagatgc

SEQ ID NO: 1501870 - DNA, 25 bp, Homo sapien
tattttgcatacctgggtgaaaccc

SEQ ID NO: 1501871 - DNA, 25 bp, Homo sapien
cccaatggaccaagaggtaggcctc

SEQ ID NO: 1501872 - DNA, 25 bp, Homo sapien
gcaatgtcagcttatcaaaacccgt

SEQ ID NO: 1501873 - DNA, 25 bp, Homo sapien
tttgtgcttactcctctcttcacgg

SEQ ID NO: 1501874 - DNA, 25 bp, Homo sapien
tctttgtgccttgggcatttgcact

SEQ ID NO: 1501875 - DNA, 25 bp, Homo sapien
tcttcaactgaggaacactggagct

SEQ ID NO: 1501876 - DNA, 25 bp, Homo sapien
tcttcacggagctaagcgggctgtg

SEQ ID NO: 1501877 - DNA, 25 bp, Homo sapien
cacagccgagagactcaaagtttgt

SEQ ID NO: 1501878 - DNA, 25 bp, Homo sapien
tgaaggctactagggtaaatgaagc

SEQ ID NO: 1501879 - DNA, 25 bp, Homo sapien
tataatgggtctcttacacagccga

SEQ ID NO: 1501880 - DNA, 25 bp, Homo sapien
gtaatattgtctccaaaacgctctg

SEQ ID NO: 1501881 - DNA, 25 bp, Homo sapien
tggagggatttgaattaatcattct

SEQ ID NO: 1501882 - DNA, 25 bp, Homo sapien
cattgaacttttggagggatttgaa

SEQ ID NO: 1501883 - DNA, 25 bp, Homo sapien
ctagatacatttggaaaaatggcca

SEQ ID NO: 1501884 - DNA, 25 bp, Homo sapien
ttaatcattctagatacatttggaa

SEQ ID NO: 1501885 - DNA, 25 bp, Homo sapien
caagcccatcttttcgaaatgtgga

SEQ ID NO: 1501886 - DNA, 25 bp, Homo sapien
cataatatagaggtgttacaagccc

SEQ ID NO: 1501887 - DNA, 25 bp, Homo sapien
gatttagcaccttcttgtatgacgt

SEQ ID NO: 1501888 - DNA, 25 bp, Homo sapien
tgtatgacgttgctgcaacactgat

SEQ ID NO: 1501889 - DNA, 25 bp, Homo sapien
gattaaacttctttccgctccagta

SEQ ID NO: 1501890 - DNA, 25 bp, Homo sapien
tttccgctccagtataaaagttgat

SEQ ID NO: 1501891 - DNA, 25 bp, Homo sapien
acttctttccgctccagtataaaag

SEQ ID NO: 1501892 - DNA, 25 bp, Homo sapien
tgattaaacttctttccgctccagt

SEQ ID NO: 1501893 - DNA, 25 bp, Homo sapien
cgaatgagatcctacttggaaacac

SEQ ID NO: 1501894 - DNA, 25 bp, Homo sapien
ctcccaactcgaatgagatcctact

SEQ ID NO: 1501895 - DNA, 25 bp, Homo sapien
caactcgaatgagatcctacttgga

SEQ ID NO: 1501896 - DNA, 25 bp, Homo sapien
ctcgaatgagatcctacttggaaac

SEQ ID NO: 1501897 - DNA, 25 bp, Homo sapien
tcaggactggggcatgaaggaagac

SEQ ID NO: 1501898 - DNA, 25 bp, Homo sapien
atctgaagtgagtgattaggagtcg

SEQ ID NO: 1501899 - DNA, 25 bp, Homo sapien
ctgaagtgagtgattaggagtcgaa

SEQ ID NO: 1501900 - DNA, 25 bp, Homo sapien
caatctgaagtgagtgattaggagt

SEQ ID NO: 1501901 - DNA, 25 bp, Homo sapien
acttcctggccgcttttgtcaagag

SEQ ID NO: 1501902 - DNA, 25 bp, Homo sapien
tcaagagggcccctgccgcttggca

SEQ ID NO: 1501903 - DNA, 25 bp, Homo sapien
ctgtcgctggggagtaaaaagtcac

SEQ ID NO: 1501904 - DNA, 25 bp, Homo sapien
gccgcttttgtcaagagggcccctg

SEQ ID NO: 1501905 - DNA, 25 bp, Homo sapien
ccagacagtgtcattgacctctcgc

SEQ ID NO: 1501906 - DNA, 25 bp, Homo sapien
cagtgtcattgacctctcgcttcat

SEQ ID NO: 1501907 - DNA, 25 bp, Homo sapien
ttagctcctttgaggagccagacag

SEQ ID NO: 1501908 - DNA, 25 bp, Homo sapien
cttagctcctttgaggagccagaca

SEQ ID NO: 1501909 - DNA, 25 bp, Homo sapien
gagctgtttggaatccgggctgcat

SEQ ID NO: 1501910 - DNA, 25 bp, Homo sapien
catgccaaagtctacactcagtcca

SEQ ID NO: 1501911 - DNA, 25 bp, Homo sapien
gcagcctccgtttctttgaagtcct

SEQ ID NO: 1501912 - DNA, 25 bp, Homo sapien
cagtccaatttgcaggagctgtttg

SEQ ID NO: 1501913 - DNA, 25 bp, Homo sapien
tcagtggaaggatgacctcattccc

SEQ ID NO: 1501914 - DNA, 25 bp, Homo sapien
gagtgttcagtggaaggatgacctc

SEQ ID NO: 1501915 - DNA, 25 bp, Homo sapien
gaaggatgacctcattccctaatac

SEQ ID NO: 1501916 - DNA, 25 bp, Homo sapien
ctgcaggggatgtaggggagtgttc

SEQ ID NO: 1501917 - DNA, 25 bp, Homo sapien
atgtgctgagatttaagtttgtgga

SEQ ID NO: 1501918 - DNA, 25 bp, Homo sapien
gtggagagtattcttcccaggtaaa

SEQ ID NO: 1501919 - DNA, 25 bp, Homo sapien
tggagagtattcttcccaggtaaac

SEQ ID NO: 1501920 - DNA, 25 bp, Homo sapien
gctgagatttaagtttgtggagagt

SEQ ID NO: 1501921 - DNA, 25 bp, Homo sapien
tcaagtctctcagaaagttcaggct

SEQ ID NO: 1501922 - DNA, 25 bp, Homo sapien
gttcaggctgccttgaatggctgcc

SEQ ID NO: 1501923 - DNA, 25 bp, Homo sapien
ggaaatcaagtctctcagaaagttc

SEQ ID NO: 1501924 - DNA, 25 bp, Homo sapien
agtctctcagaaagttcaggctgcc

SEQ ID NO: 1501925 - DNA, 25 bp, Homo sapien
gggtaaatcgcctccagttgagaac

SEQ ID NO: 1501926 - DNA, 25 bp, Homo sapien
ccagttgagaacaccaacttagatg

SEQ ID NO: 1501927 - DNA, 25 bp, Homo sapien
ttagatgataaccttcagtcctgga

SEQ ID NO: 1501928 - DNA, 25 bp, Homo sapien
caccaacttagatgataaccttcag

SEQ ID NO: 1501929 - DNA, 25 bp, Homo sapien
tgaactctccacaactctaaaatct

SEQ ID NO: 1501930 - DNA, 25 bp, Homo sapien
tctctggactcaactctccagcttg

SEQ ID NO: 1501931 - DNA, 25 bp, Homo sapien
tctgccaggttcagctttagccctt

SEQ ID NO: 1501932 - DNA, 25 bp, Homo sapien
aatctccgtgagagccattgaccat

SEQ ID NO: 1501933 - DNA, 25 bp, Homo sapien
catccctctgaggtctttgaattta

SEQ ID NO: 1501934 - DNA, 25 bp, Homo sapien
atccctctgaggtctttgaatttac

SEQ ID NO: 1501935 - DNA, 25 bp, Homo sapien
tcatccctctgaggtctttgaattt

SEQ ID NO: 1501936 - DNA, 25 bp, Homo sapien
ctctgcagcattaatgtctcgtgga

SEQ ID NO: 1501937 - DNA, 25 bp, Homo sapien
cattaatgtctcgtggaaggccaag

SEQ ID NO: 1501938 - DNA, 25 bp, Homo sapien
taatgtctcgtggaaggccaagtct

SEQ ID NO: 1501939 - DNA, 25 bp, Homo sapien
cagcattaatgtctcgtggaaggcc

SEQ ID NO: 1501940 - DNA, 25 bp, Homo sapien
tgattctgctactatactaagaacc

SEQ ID NO: 1501941 - DNA, 25 bp, Homo sapien
cctctcttccgcatctctgattctg

SEQ ID NO: 1501942 - DNA, 25 bp, Homo sapien
tatactaagaaccaccacgctctga

SEQ ID NO: 1501943 - DNA, 25 bp, Homo sapien
ccacgctctgagaagagacatcaac

SEQ ID NO: 1501944 - DNA, 25 bp, Homo sapien
cccagtgtaaatggagcatatatca

SEQ ID NO: 1501945 - DNA, 25 bp, Homo sapien
ctctgacaaacttcagtgaaggaag

SEQ ID NO: 1501946 - DNA, 25 bp, Homo sapien
gaagtaaaatccacaacccagtgta

SEQ ID NO: 1501947 - DNA, 25 bp, Homo sapien
cctcaagcctctgacaaacttcagt

SEQ ID NO: 1501948 - DNA, 25 bp, Homo sapien
ttcggacatggtgtgggttgcatcc

SEQ ID NO: 1501949 - DNA, 25 bp, Homo sapien
cggacatggtgtgggttgcatcctt

SEQ ID NO: 1501950 - DNA, 25 bp, Homo sapien
cccagagcccgcttcggacatggtg

SEQ ID NO: 1501951 - DNA, 25 bp, Homo sapien
ctctgtggcacggcttccggcaaga

SEQ ID NO: 1501952 - DNA, 25 bp, Homo sapien
tgaaaagcaaaacgcagttcagctg

SEQ ID NO: 1501953 - DNA, 25 bp, Homo sapien
cgcagttcagctggttttaaaagac

SEQ ID NO: 1501954 - DNA, 25 bp, Homo sapien
acagcccagggcttgtaaaacgatg

SEQ ID NO: 1501955 - DNA, 25 bp, Homo sapien
tgtgtacgggtagcttcagctggcc

SEQ ID NO: 1501956 - DNA, 25 bp, Homo sapien
tttctttcttgccacgctgccaatt

SEQ ID NO: 1501957 - DNA, 25 bp, Homo sapien
gccacgctgccaatttgtactgctg

SEQ ID NO: 1501958 - DNA, 25 bp, Homo sapien
tgccaatttgtactgctgtaagctg

SEQ ID NO: 1501959 - DNA, 25 bp, Homo sapien
tcttgccacgctgccaatttgtact

SEQ ID NO: 1501960 - DNA, 25 bp, Homo sapien
gacaggataattagaggagaagccc

SEQ ID NO: 1501961 - DNA, 25 bp, Homo sapien
tggtttaaacatcgccgtcccagga

SEQ ID NO: 1501962 - DNA, 25 bp, Homo sapien
cagagaaaccttaactgtgattggc

SEQ ID NO: 1501963 - DNA, 25 bp, Homo sapien
tgccccaaaagaagaacattgtggt

SEQ ID NO: 1501964 - DNA, 25 bp, Homo sapien
tttcaccttctgcatagttgtatgg

SEQ ID NO: 1501965 - DNA, 25 bp, Homo sapien
ttaaaacgcgtgttcatggtcccgc

SEQ ID NO: 1501966 - DNA, 25 bp, Homo sapien
gcatagttgtatgggctgccagctt

SEQ ID NO: 1501967 - DNA, 25 bp, Homo sapien
cttctgcatagttgtatgggctgcc

SEQ ID NO: 1501968 - DNA, 25 bp, Homo sapien
gaaagtgacaggtgactcaaacagg

SEQ ID NO: 1501969 - DNA, 25 bp, Homo sapien
tttggccactcgtcataaagagacc

SEQ ID NO: 1501970 - DNA, 25 bp, Homo sapien
tgtgtgcctgatactgtgcgctgga

SEQ ID NO: 1501971 - DNA, 25 bp, Homo sapien
caggcagtaccttctataccaggct

SEQ ID NO: 1501972 - DNA, 25 bp, Homo sapien
tctattaagttaaacagatgccttc

SEQ ID NO: 1501973 - DNA, 25 bp, Homo sapien
ttctattaagttaaacagatgcctt

SEQ ID NO: 1501974 - DNA, 25 bp, Homo sapien
tcaaaaatagtgatactaacttcta

SEQ ID NO: 1501975 - DNA, 25 bp, Homo sapien
atagtgatactaacttctattaagt

SEQ ID NO: 1501976 - DNA, 25 bp, Homo sapien
gacttcgcatctttaccacaccaga

SEQ ID NO: 1501977 - DNA, 25 bp, Homo sapien
tctttaccacaccagacatgaagca

SEQ ID NO: 1501978 - DNA, 25 bp, Homo sapien
taggcctggacatagacttcgcatc

SEQ ID NO: 1501979 - DNA, 25 bp, Homo sapien
ctcaccatcttgtttaggcctggac

SEQ ID NO: 1501980 - DNA, 25 bp, Homo sapien
cagatgttatagaagcttgtaagaa

SEQ ID NO: 1501981 - DNA, 25 bp, Homo sapien
ggtaatcagggatatggacagatgt

SEQ ID NO: 1501982 - DNA, 25 bp, Homo sapien
gcccatgagctgtaaagggtaatca

SEQ ID NO: 1501983 - DNA, 25 bp, Homo sapien
gtcgtttttaactgagcccatgagc

SEQ ID NO: 1501984 - DNA, 25 bp, Homo sapien
taagcctgtgtagtcccgtaggcct

SEQ ID NO: 1501985 - DNA, 25 bp, Homo sapien
caatataagcctgtgtagtcccgta

SEQ ID NO: 1501986 - DNA, 25 bp, Homo sapien
gtgtagtcccgtaggcctctgggaa

SEQ ID NO: 1501987 - DNA, 25 bp, Homo sapien
ctgtgtagtcccgtaggcctctggg

SEQ ID NO: 1501988 - DNA, 25 bp, Homo sapien
ctggggataatccatgtcaaacttc

SEQ ID NO: 1501989 - DNA, 25 bp, Homo sapien
gtcaaacttctgttatgcatgcttc

SEQ ID NO: 1501990 - DNA, 25 bp, Homo sapien
catgcttcgtgcaatttccaaatgc

SEQ ID NO: 1501991 - DNA, 25 bp, Homo sapien
tttccactagatgggtcacaggaaa

SEQ ID NO: 1501992 - DNA, 25 bp, Homo sapien
gtgagcacagggcacgtttcagccc

SEQ ID NO: 1501993 - DNA, 25 bp, Homo sapien
tcgttctgctcacctggcctggcag

SEQ ID NO: 1501994 - DNA, 25 bp, Homo sapien
ggctgtgcttggttcacactaccag

SEQ ID NO: 1501995 - DNA, 25 bp, Homo sapien
aggctgtggcttgaccatgtgcatg

SEQ ID NO: 1501996 - DNA, 25 bp, Homo sapien
gaaaatgattctttcgagctgtggt

SEQ ID NO: 1501997 - DNA, 25 bp, Homo sapien
aaaatgattctttcgagctgtggtc

SEQ ID NO: 1501998 - DNA, 25 bp, Homo sapien
ccaaattctgctgtgaaatattcat

SEQ ID NO: 1501999 - DNA, 25 bp, Homo sapien
ttatgacctaatggtttcctgcaca

SEQ ID NO: 1502000 - DNA, 25 bp, Homo sapien
tgcacaggcatctggatatccacag

SEQ ID NO: 1502001 - DNA, 25 bp, Homo sapien
aatggtttcctgcacaggcatctgg

SEQ ID NO: 1502002 - DNA, 25 bp, Homo sapien
tcagcttggtattcctgccacacag

SEQ ID NO: 1502003 - DNA, 25 bp, Homo sapien
cagcttggtattcctgccacacaga

SEQ ID NO: 1502004 - DNA, 25 bp, Homo sapien
agcttggtattcctgccacacagag

SEQ ID NO: 1502005 - DNA, 25 bp, Homo sapien
gcttggtattcctgccacacagagc

SEQ ID NO: 1502006 - DNA, 25 bp, Homo sapien
cccctggacctatcaaaaagttcat

SEQ ID NO: 1502007 - DNA, 25 bp, Homo sapien
tgcacccctggacctatcaaaaagt

SEQ ID NO: 1502008 - DNA, 25 bp, Homo sapien
ctgcacccctggacctatcaaaaag

SEQ ID NO: 1502009 - DNA, 25 bp, Homo sapien
gaatgcggaggagcccatgcaaaag

SEQ ID NO: 1502010 - DNA, 25 bp, Homo sapien
caatcttagatgtgatctggacttc

SEQ ID NO: 1502011 - DNA, 25 bp, Homo sapien
tctctcaagcgaggcaaagtcactg

SEQ ID NO: 1502012 - DNA, 25 bp, Homo sapien
ggtttaaatgtggaacgatcaatct

SEQ ID NO: 1502013 - DNA, 25 bp, Homo sapien
tgaaaagcaaacgacggaatagggc

SEQ ID NO: 1502014 - DNA, 25 bp, Homo sapien
aacgacggaatagggccctggattg

SEQ ID NO: 1502015 - DNA, 25 bp, Homo sapien
aagcaaacgacggaatagggccctg

SEQ ID NO: 1502016 - DNA, 25 bp, Homo sapien
atgaaaagcaaacgacggaataggg

SEQ ID NO: 1502017 - DNA, 25 bp, Homo sapien
ttttcacatgggtgaattggaagcc

SEQ ID NO: 1502018 - DNA, 25 bp, Homo sapien
cagattcttcaatcagggtcctgaa

SEQ ID NO: 1502019 - DNA, 25 bp, Homo sapien
tgaaggctgtaattgcaaagatgtt

SEQ ID NO: 1502020 - DNA, 25 bp, Homo sapien
cctgaagttaacctggggacactga

SEQ ID NO: 1502021 - DNA, 25 bp, Homo sapien
tcttttcccctaactgggctgactc

SEQ ID NO: 1502022 - DNA, 25 bp, Homo sapien
gagtgaagagatgatccccacatga

SEQ ID NO: 1502023 - DNA, 25 bp, Homo sapien
gaactgacttgttggtaagccttct

SEQ ID NO: 1502024 - DNA, 25 bp, Homo sapien
gactcacgggatgcactgtagccca

SEQ ID NO: 1502025 - DNA, 25 bp, Homo sapien
gggacaccagtcaatcataggtttc

SEQ ID NO: 1502026 - DNA, 25 bp, Homo sapien
caccagtcaatcataggtttcttct

SEQ ID NO: 1502027 - DNA, 25 bp, Homo sapien
gacaccagtcaatcataggtttctt

SEQ ID NO: 1502028 - DNA, 25 bp, Homo sapien
ttcagggacaccagtcaatcatagg

SEQ ID NO: 1502029 - DNA, 25 bp, Homo sapien
agtgtgtgcaggtgttctgcaagac

SEQ ID NO: 1502030 - DNA, 25 bp, Homo sapien
gtgtgtgcaggtgttctgcaagact

SEQ ID NO: 1502031 - DNA, 25 bp, Homo sapien
gggcagcctggatatcaagctgtgt

SEQ ID NO: 1502032 - DNA, 25 bp, Homo sapien
agggcagcctggatatcaagctgtg

SEQ ID NO: 1502033 - DNA, 25 bp, Homo sapien
taatgttgtggaaaagtttttctga

SEQ ID NO: 1502034 - DNA, 25 bp, Homo sapien
ctttccagattcctcttgtaattaa

SEQ ID NO: 1502035 - DNA, 25 bp, Homo sapien
tggaaaagtttttctgaggctataa

SEQ ID NO: 1502036 - DNA, 25 bp, Homo sapien
cagattcctcttgtaattaatgttg

SEQ ID NO: 1502037 - DNA, 25 bp, Homo sapien
gagtgtctagcaggtatgcacgaaa

SEQ ID NO: 1502038 - DNA, 25 bp, Homo sapien
cagaagctgagtgacacattagcac

SEQ ID NO: 1502039 - DNA, 25 bp, Homo sapien
gacagctgagaccactaagcaccgt

SEQ ID NO: 1502040 - DNA, 25 bp, Homo sapien
tctgaagttggcaggacagcaacct

SEQ ID NO: 1502041 - DNA, 25 bp, Homo sapien
agccccaattgtcccatgccagatg

SEQ ID NO: 1502042 - DNA, 25 bp, Homo sapien
attgtcccatgccagatgacagtgt

SEQ ID NO: 1502043 - DNA, 25 bp, Homo sapien
cccaattgtcccatgccagatgaca

SEQ ID NO: 1502044 - DNA, 25 bp, Homo sapien
ttagccccaattgtcccatgccaga

SEQ ID NO: 1502045 - DNA, 25 bp, Homo sapien
tagatcacagtcctcatgtcagctg

SEQ ID NO: 1502046 - DNA, 25 bp, Homo sapien
cctgccaagtagatcacagtcctca

SEQ ID NO: 1502047 - DNA, 25 bp, Homo sapien
caagtagatcacagtcctcatgtca

SEQ ID NO: 1502048 - DNA, 25 bp, Homo sapien
tgccaagtagatcacagtcctcatg

SEQ ID NO: 1502049 - DNA, 25 bp, Homo sapien
cacaatcaacttgcctacactaaat

SEQ ID NO: 1502050 - DNA, 25 bp, Homo sapien
actaaatgtgataagtaatgttagg

SEQ ID NO: 1502051 - DNA, 25 bp, Homo sapien
aatgtgataagtaatgttaggaaaa

SEQ ID NO: 1502052 - DNA, 25 bp, Homo sapien
ggccacaatcaacttgcctacacta

SEQ ID NO: 1502053 - DNA, 25 bp, Homo sapien
actgtgtctcatccgtgtgccaaac

SEQ ID NO: 1502054 - DNA, 25 bp, Homo sapien
ccgtgtgccaaacccatccggtagt

SEQ ID NO: 1502055 - DNA, 25 bp, Homo sapien
ttccaataatgagaacactgtgtct

SEQ ID NO: 1502056 - DNA, 25 bp, Homo sapien
tgccaaacccatccggtagtagctg

SEQ ID NO: 1502057 - DNA, 25 bp, Homo sapien
tttgttgcctcgctgtactctgcaa

SEQ ID NO: 1502058 - DNA, 25 bp, Homo sapien
tcgctgtactctgcaaacctgtggg

SEQ ID NO: 1502059 - DNA, 25 bp, Homo sapien
tactctgcaaacctgtgggtggatc

SEQ ID NO: 1502060 - DNA, 25 bp, Homo sapien
tctgcaaacctgtgggtggatcgtg

SEQ ID NO: 1502061 - DNA, 25 bp, Homo sapien
gacatcaccctggtgctatattcag

SEQ ID NO: 1502062 - DNA, 25 bp, Homo sapien
acatcaccctggtgctatattcagg

SEQ ID NO: 1502063 - DNA, 25 bp, Homo sapien
tggacatcaccctggtgctatattc

SEQ ID NO: 1502064 - DNA, 25 bp, Homo sapien
ggacatcaccctggtgctatattca

SEQ ID NO: 1502065 - DNA, 25 bp, Homo sapien
aaagagttccacgagcccctctgaa

SEQ ID NO: 1502066 - DNA, 25 bp, Homo sapien
ttttgtgcgtgtgcaaatgtgaacg

SEQ ID NO: 1502067 - DNA, 25 bp, Homo sapien
tagaaattgggtgtcaattttgtgc

SEQ ID NO: 1502068 - DNA, 25 bp, Homo sapien
cgttactgaggagaaggttcgttgt

SEQ ID NO: 1502069 - DNA, 25 bp, Homo sapien
ctcccttgctcctagtgtctgctcc

SEQ ID NO: 1502070 - DNA, 25 bp, Homo sapien
ccactaccagcccactcccttgctc

SEQ ID NO: 1502071 - DNA, 25 bp, Homo sapien
actcccttgctcctagtgtctgctc

SEQ ID NO: 1502072 - DNA, 25 bp, Homo sapien
tctaccttcctaccactaccagccc

SEQ ID NO: 1502073 - DNA, 25 bp, Homo sapien
cttgaaaactgccaagtggcacatg

SEQ ID NO: 1502074 - DNA, 25 bp, Homo sapien
tgaaaactgccaagtggcacatgac

SEQ ID NO: 1502075 - DNA, 25 bp, Homo sapien
gaaaactgccaagtggcacatgact

SEQ ID NO: 1502076 - DNA, 25 bp, Homo sapien
aaaactgccaagtggcacatgactg

SEQ ID NO: 1502077 - DNA, 25 bp, Homo sapien
gtctgtgcttaaggaagggcaatta

SEQ ID NO: 1502078 - DNA, 25 bp, Homo sapien
tcacaccttttctgtgagtgcgtct

SEQ ID NO: 1502079 - DNA, 25 bp, Homo sapien
aattaaccatctggctgcttgtccc

SEQ ID NO: 1502080 - DNA, 25 bp, Homo sapien
taaggaagggcaattaaccatctgg

SEQ ID NO: 1502081 - DNA, 25 bp, Homo sapien
ttgacaaggagtatgcaggtattgg

SEQ ID NO: 1502082 - DNA, 25 bp, Homo sapien
ggtttaggtaacagcacgggtctga

SEQ ID NO: 1502083 - DNA, 25 bp, Homo sapien
aacatgacattgacaaggagtatgc

SEQ ID NO: 1502084 - DNA, 25 bp, Homo sapien
gtaacagcacgggtctgaaggcctt

SEQ ID NO: 1502085 - DNA, 25 bp, Homo sapien
tttaaggatgatcctgtgcccttgc

SEQ ID NO: 1502086 - DNA, 25 bp, Homo sapien
aagtttattaatccttggctccagg

SEQ ID NO: 1502087 - DNA, 25 bp, Homo sapien
ggctccagggaagaccatttaaatg

SEQ ID NO: 1502088 - DNA, 25 bp, Homo sapien
catgaacttgtctggaggactctaa

SEQ ID NO: 1502089 - DNA, 25 bp, Homo sapien
cacatctgagtaggcggacggtttt

SEQ ID NO: 1502090 - DNA, 25 bp, Homo sapien
tctgagtaggcggacggttttatgc

SEQ ID NO: 1502091 - DNA, 25 bp, Homo sapien
cagccacatctgagtaggcggacgg

SEQ ID NO: 1502092 - DNA, 25 bp, Homo sapien
ggcggacggttttatgcgggtgcac

SEQ ID NO: 1502093 - DNA, 25 bp, Homo sapien
gattccatgagattcttagtcacga

SEQ ID NO: 1502094 - DNA, 25 bp, Homo sapien
tcctgcactctttgtggaaacctaa

SEQ ID NO: 1502095 - DNA, 25 bp, Homo sapien
tagattgcccagagactagcagatg

SEQ ID NO: 1502096 - DNA, 25 bp, Homo sapien
cagtgaccgcatttagattccatga

SEQ ID NO: 1502097 - DNA, 25 bp, Homo sapien
taccaaatcctatggtccctgaatc

SEQ ID NO: 1502098 - DNA, 25 bp, Homo sapien
tatggtccctgaatctcctggagag

SEQ ID NO: 1502099 - DNA, 25 bp, Homo sapien
ctgaatcactaccaaatcctatggt

SEQ ID NO: 1502100 - DNA, 25 bp, Homo sapien
tggagagacctcaaggctcctccca

SEQ ID NO: 1502101 - DNA, 25 bp, Homo sapien
tcacaaattcccgtagacattaccc

SEQ ID NO: 1502102 - DNA, 25 bp, Homo sapien
tagacattaccctggatatggccac

SEQ ID NO: 1502103 - DNA, 25 bp, Homo sapien
tcccgtagacattaccctggatatg

SEQ ID NO: 1502104 - DNA, 25 bp, Homo sapien
tggatattcacaaattcccgtagac

SEQ ID NO: 1502105 - DNA, 25 bp, Homo sapien
attttggtactcgagttagggccat

SEQ ID NO: 1502106 - DNA, 25 bp, Homo sapien
gtactcgagttagggccatcatcct

SEQ ID NO: 1502107 - DNA, 25 bp, Homo sapien
aggaaatccaattttggtactcgag

SEQ ID NO: 1502108 - DNA, 25 bp, Homo sapien
ctgaggaaatccaattttggtactc

SEQ ID NO: 1502109 - DNA, 25 bp, Homo sapien
taatggtggtaaggcctgtagggac

SEQ ID NO: 1502110 - DNA, 25 bp, Homo sapien
ggctgtggtttaggcccacatcagc

SEQ ID NO: 1502111 - DNA, 25 bp, Homo sapien
aggcctgtagggacacatcatcact

SEQ ID NO: 1502112 - DNA, 25 bp, Homo sapien
tcactcaactgtgtctctgtgacag

SEQ ID NO: 1502113 - DNA, 25 bp, Homo sapien
aagacaagactcaatcatttctcac

SEQ ID NO: 1502114 - DNA, 25 bp, Homo sapien
caagacaagactcaatcatttctca

SEQ ID NO: 1502115 - DNA, 25 bp, Homo sapien
ccagaagacagcatttctctctaca

SEQ ID NO: 1502116 - DNA, 25 bp, Homo sapien
gacagcatttctctctacaggacac

SEQ ID NO: 1502117 - DNA, 25 bp, Homo sapien
ggcccccaagctcagggcggtggtc

SEQ ID NO: 1502118 - DNA, 25 bp, Homo sapien
gaagacagcatttctctctacagga

SEQ ID NO: 1502119 - DNA, 25 bp, Homo sapien
tacaaacgtgaagatcaggttgtcc

SEQ ID NO: 1502120 - DNA, 25 bp, Homo sapien
ccgtggtaagtttatggtgcacaca

SEQ ID NO: 1502121 - DNA, 25 bp, Homo sapien
tagcagacacgtcccctgctcatga

SEQ ID NO: 1502122 - DNA, 25 bp, Homo sapien
tggtgcacacaatcacttacccaga

SEQ ID NO: 1502123 - DNA, 25 bp, Homo sapien
gcatcacatggtaaactgttcaggg

SEQ ID NO: 1502124 - DNA, 25 bp, Homo sapien
cacatggtaaactgttcagggaaag

SEQ ID NO: 1502125 - DNA, 25 bp, Homo sapien
cataaacgcatcacatggtaaactg

SEQ ID NO: 1502126 - DNA, 25 bp, Homo sapien
cggaatacccataaacgcatcacat

SEQ ID NO: 1502127 - DNA, 25 bp, Homo sapien
acctcatacgttctctccaagacag

SEQ ID NO: 1502128 - DNA, 25 bp, Homo sapien
caataggattacatggcaaggagaa

SEQ ID NO: 1502129 - DNA, 25 bp, Homo sapien
caatccatcagcactcacagggtac

SEQ ID NO: 1502130 - DNA, 25 bp, Homo sapien
aggagaacgaggagccactaccctt

SEQ ID NO: 1502131 - DNA, 25 bp, Homo sapien
ccaaggggtaggacatcataggaca

SEQ ID NO: 1502132 - DNA, 25 bp, Homo sapien
tggttgctccaaggggtaggacatc

SEQ ID NO: 1502133 - DNA, 25 bp, Homo sapien
tagttactcctgtgatgcacagtgc

SEQ ID NO: 1502134 - DNA, 25 bp, Homo sapien
ttctctgcacatccaccttagttac

SEQ ID NO: 1502135 - DNA, 25 bp, Homo sapien
tgtctcctctctggatatgggcaga

SEQ ID NO: 1502136 - DNA, 25 bp, Homo sapien
tggatcgtccatggcctgcttacgc

SEQ ID NO: 1502137 - DNA, 25 bp, Homo sapien
tgtgtatcggaagactggatcgtcc

SEQ ID NO: 1502138 - DNA, 25 bp, Homo sapien
gagtgcccctgctcgagcataatga

SEQ ID NO: 1502139 - DNA, 25 bp, Homo sapien
tagccttggttggcagagcattgtt

SEQ ID NO: 1502140 - DNA, 25 bp, Homo sapien
agccttggttggcagagcattgttt

SEQ ID NO: 1502141 - DNA, 25 bp, Homo sapien
taccacagtcaacacggactcaggt

SEQ ID NO: 1502142 - DNA, 25 bp, Homo sapien
ggacacccgcatctaccacagtcaa

SEQ ID NO: 1502143 - DNA, 25 bp, Homo sapien
gtcaacacggactcaggttcaatgc

SEQ ID NO: 1502144 - DNA, 25 bp, Homo sapien
gcatctaccacagtcaacacggact

SEQ ID NO: 1502145 - DNA, 25 bp, Homo sapien
gtgtcagaactatcattccatcctg

SEQ ID NO: 1502146 - DNA, 25 bp, Homo sapien
ctagatcctggcagaactccaacgt

SEQ ID NO: 1502147 - DNA, 25 bp, Homo sapien
tctggactgaggatgtgtcagaact

SEQ ID NO: 1502148 - DNA, 25 bp, Homo sapien
cactgttggcgccactatcggctct

SEQ ID NO: 1502149 - DNA, 25 bp, Homo sapien
tctgacaggtgttttccgggatgcc

SEQ ID NO: 1502150 - DNA, 25 bp, Homo sapien
cttgatctcatgactagcagcagca

SEQ ID NO: 1502151 - DNA, 25 bp, Homo sapien
ggtgttttccgggatgccacttggc

SEQ ID NO: 1502152 - DNA, 25 bp, Homo sapien
gatctcatgactagcagcagcagaa

SEQ ID NO: 1502153 - DNA, 25 bp, Homo sapien
tctctacaggaagagaactttacgg

SEQ ID NO: 1502154 - DNA, 25 bp, Homo sapien
ctctacaggaagagaactttacggg

SEQ ID NO: 1502155 - DNA, 25 bp, Homo sapien
ctctctacaggaagagaactttacg

SEQ ID NO: 1502156 - DNA, 25 bp, Homo sapien
tctacaggaagagaactttacggga

SEQ ID NO: 1502157 - DNA, 25 bp, Homo sapien
cacgtggagggtcagatttaccgaa

SEQ ID NO: 1502158 - DNA, 25 bp, Homo sapien
gggtgacagacaatatgatcaacta

SEQ ID NO: 1502159 - DNA, 25 bp, Homo sapien
ggcatatctgtttctcacgtggagg

SEQ ID NO: 1502160 - DNA, 25 bp, Homo sapien
tatgatcaactacctgggcactggc

SEQ ID NO: 1502161 - DNA, 25 bp, Homo sapien
actgaaaatatctaagccagagcct

SEQ ID NO: 1502162 - DNA, 25 bp, Homo sapien
tcatccaggttacccagataactga

SEQ ID NO: 1502163 - DNA, 25 bp, Homo sapien
ggtatcgtttcgcaactcatccagg

SEQ ID NO: 1502164 - DNA, 25 bp, Homo sapien
ctaagccagagcctccgagggatac

SEQ ID NO: 1502165 - DNA, 25 bp, Homo sapien
gatagggacccatgttggattcact

SEQ ID NO: 1502166 - DNA, 25 bp, Homo sapien
ccctgcttcctgatagggacccatg

SEQ ID NO: 1502167 - DNA, 25 bp, Homo sapien
gttgctttgggtcctcatgcagcct

SEQ ID NO: 1502168 - DNA, 25 bp, Homo sapien
gtgttgctttgggtcctcatgcagc

SEQ ID NO: 1502169 - DNA, 25 bp, Homo sapien
tgactcctgtttatcgggatttcct

SEQ ID NO: 1502170 - DNA, 25 bp, Homo sapien
cctgactcctgtttatcgggatttc

SEQ ID NO: 1502171 - DNA, 25 bp, Homo sapien
tcctgactcctgtttatcgggattt

SEQ ID NO: 1502172 - DNA, 25 bp, Homo sapien
ctgactcctgtttatcgggatttcc

SEQ ID NO: 1502173 - DNA, 25 bp, Homo sapien
tccataaatcgcctggagagacctc

SEQ ID NO: 1502174 - DNA, 25 bp, Homo sapien
ctaccaaatccgagagtccataaat

SEQ ID NO: 1502175 - DNA, 25 bp, Homo sapien
ctgaatcactaccaaatccgagagt

SEQ ID NO: 1502176 - DNA, 25 bp, Homo sapien
aatccgagagtccataaatcgcctg

SEQ ID NO: 1502177 - DNA, 25 bp, Homo sapien
ctacctgagcaaactcaattttggt

SEQ ID NO: 1502178 - DNA, 25 bp, Homo sapien
gggtcaccatcctcacttatctcga

SEQ ID NO: 1502179 - DNA, 25 bp, Homo sapien
ggtagtcaagttagggtcaccatcc

SEQ ID NO: 1502180 - DNA, 25 bp, Homo sapien
gattaggttcgccatcatatctgga

SEQ ID NO: 1502181 - DNA, 25 bp, Homo sapien
gggacatctcatcagtgaaccaggt

SEQ ID NO: 1502182 - DNA, 25 bp, Homo sapien
tgcgtgcatcagcaatacctcagcc

SEQ ID NO: 1502183 - DNA, 25 bp, Homo sapien
ggacagtcccatggtgcatgctgtg

SEQ ID NO: 1502184 - DNA, 25 bp, Homo sapien
tgaaagaaatcacggcgggaagacg

SEQ ID NO: 1502185 - DNA, 25 bp, Homo sapien
tgtgtgattatactgtaggatccat

SEQ ID NO: 1502186 - DNA, 25 bp, Homo sapien
gattatactgtaggatccattttgg

SEQ ID NO: 1502187 - DNA, 25 bp, Homo sapien
ctgtgtgattatactgtaggatcca

SEQ ID NO: 1502188 - DNA, 25 bp, Homo sapien
tgtgattatactgtaggatccattt

SEQ ID NO: 1502189 - DNA, 25 bp, Homo sapien
aacaacagtcagatctgccgggcca

SEQ ID NO: 1502190 - DNA, 25 bp, Homo sapien
taagccgccaagaaaccaatagaga

SEQ ID NO: 1502191 - DNA, 25 bp, Homo sapien
gttaagcatgcaaggtagttccgga

SEQ ID NO: 1502192 - DNA, 25 bp, Homo sapien
tcagagggcccttgaactaagccgc

SEQ ID NO: 1502193 - DNA, 25 bp, Homo sapien
gcctcaattgcacatcagctagatg

SEQ ID NO: 1502194 - DNA, 25 bp, Homo sapien
aataagcaatgccttgaagttctgg

SEQ ID NO: 1502195 - DNA, 25 bp, Homo sapien
ttcagaaaacatggatgataccggt

SEQ ID NO: 1502196 - DNA, 25 bp, Homo sapien
tttagccctgtggaattagcctcaa

SEQ ID NO: 1502197 - DNA, 25 bp, Homo sapien
aaagtgtaaaggctcacaccatctt

SEQ ID NO: 1502198 - DNA, 25 bp, Homo sapien
tgaagctctccaaagtgtaaaggct

SEQ ID NO: 1502199 - DNA, 25 bp, Homo sapien
tccaaagtgtaaaggctcacaccat

SEQ ID NO: 1502200 - DNA, 25 bp, Homo sapien
tctccaaagtgtaaaggctcacacc

SEQ ID NO: 1502201 - DNA, 25 bp, Homo sapien
caccagcaacgtcccatgttaacca

SEQ ID NO: 1502202 - DNA, 25 bp, Homo sapien
ccagcaacgtcccatgttaaccacc

SEQ ID NO: 1502203 - DNA, 25 bp, Homo sapien
acaccagcaacgtcccatgttaacc

SEQ ID NO: 1502204 - DNA, 25 bp, Homo sapien
agcaacgtcccatgttaaccaccgt

SEQ ID NO: 1502205 - DNA, 25 bp, Homo sapien
gggcaccaggtgaatccctgtgaat

SEQ ID NO: 1502206 - DNA, 25 bp, Homo sapien
gcaccaggtgaatccctgtgaatga

SEQ ID NO: 1502207 - DNA, 25 bp, Homo sapien
accaggtgaatccctgtgaatgacc

SEQ ID NO: 1502208 - DNA, 25 bp, Homo sapien
caccaggtgaatccctgtgaatgac

SEQ ID NO: 1502209 - DNA, 25 bp, Homo sapien
tcctttgtgatctctggataggcat

SEQ ID NO: 1502210 - DNA, 25 bp, Homo sapien
taggtcctttgtgatctctggatag

SEQ ID NO: 1502211 - DNA, 25 bp, Homo sapien
tatttaggtcctttgtgatctctgg

SEQ ID NO: 1502212 - DNA, 25 bp, Homo sapien
aaacatatttaggtcctttgtgatc

SEQ ID NO: 1502213 - DNA, 25 bp, Homo sapien
attcatctgttgctcggagtgataa

SEQ ID NO: 1502214 - DNA, 25 bp, Homo sapien
gctcggagtgataaatatgcattat

SEQ ID NO: 1502215 - DNA, 25 bp, Homo sapien
ctggtgatagataagactataaatt

SEQ ID NO: 1502216 - DNA, 25 bp, Homo sapien
tagataagactataaattacctgga

SEQ ID NO: 1502217 - DNA, 25 bp, Homo sapien
agaaactccttcatctcttgaagac

SEQ ID NO: 1502218 - DNA, 25 bp, Homo sapien
tgaattccaagttcaaaccaaggta

SEQ ID NO: 1502219 - DNA, 25 bp, Homo sapien
ttgaagacatatctgcaaaatgacc

SEQ ID NO: 1502220 - DNA, 25 bp, Homo sapien
gaagacatatctgcaaaatgaccaa

SEQ ID NO: 1502221 - DNA, 25 bp, Homo sapien
ccacttttagtttcataacaatcag

SEQ ID NO: 1502222 - DNA, 25 bp, Homo sapien
tttagtttcataacaatcagttcac

SEQ ID NO: 1502223 - DNA, 25 bp, Homo sapien
tagtttcataacaatcagttcacag

SEQ ID NO: 1502224 - DNA, 25 bp, Homo sapien
cttttagtttcataacaatcagttc

SEQ ID NO: 1502225 - DNA, 25 bp, Homo sapien
ctagaaaatccaacgctctgcattg

SEQ ID NO: 1502226 - DNA, 25 bp, Homo sapien
tacaggacgcaaacagttatcacta

SEQ ID NO: 1502227 - DNA, 25 bp, Homo sapien
taattacccccattacaggacgcaa

SEQ ID NO: 1502228 - DNA, 25 bp, Homo sapien
acgctctgcattgtgtaattacccc

SEQ ID NO: 1502229 - DNA, 25 bp, Homo sapien
gacctccagacctgtatcatactca

SEQ ID NO: 1502230 - DNA, 25 bp, Homo sapien
tgacctccagacctgtatcatactc

SEQ ID NO: 1502231 - DNA, 25 bp, Homo sapien
actcattgtgatgtcacggtcaggg

SEQ ID NO: 1502232 - DNA, 25 bp, Homo sapien
tgtatcatactcattgtgatgtcac

SEQ ID NO: 1502233 - DNA, 25 bp, Homo sapien
ctccaaggtctaggccattgcagga

SEQ ID NO: 1502234 - DNA, 25 bp, Homo sapien
ttctctggcccgcttctctgcaaag

SEQ ID NO: 1502235 - DNA, 25 bp, Homo sapien
gcaggtcctccaaggtctaggccat

SEQ ID NO: 1502236 - DNA, 25 bp, Homo sapien
ctctgcaaagccaccatggttactc

SEQ ID NO: 1502237 - DNA, 25 bp, Homo sapien
aaaaccacatatgtgaccaatgtgt

SEQ ID NO: 1502238 - DNA, 25 bp, Homo sapien
ctaaaaccacatatgtgaccaatgt

SEQ ID NO: 1502239 - DNA, 25 bp, Homo sapien
taaaaccacatatgtgaccaatgtg

SEQ ID NO: 1502240 - DNA, 25 bp, Homo sapien
ctaaatacaggcacagtcctccgct

SEQ ID NO: 1502241 - DNA, 25 bp, Homo sapien
acagtcctccgctcaagcacgaaga

SEQ ID NO: 1502242 - DNA, 25 bp, Homo sapien
caagcacgaagaggtttcctgtgac

SEQ ID NO: 1502243 - DNA, 25 bp, Homo sapien
agaggtttcctgtgacctttccacg

SEQ ID NO: 1502244 - DNA, 25 bp, Homo sapien
gtcttggttggcaaagcatcgtttc

SEQ ID NO: 1502245 - DNA, 25 bp, Homo sapien
tcttggttggcaaagcatcgtttct

SEQ ID NO: 1502246 - DNA, 25 bp, Homo sapien
cagtcttggttggcaaagcatcgtt

SEQ ID NO: 1502247 - DNA, 25 bp, Homo sapien
agtcttggttggcaaagcatcgttt

SEQ ID NO: 1502248 - DNA, 25 bp, Homo sapien
tcaacacggactcaggttcaaggca

SEQ ID NO: 1502249 - DNA, 25 bp, Homo sapien
cacggactcaggttcaaggcacatt

SEQ ID NO: 1502250 - DNA, 25 bp, Homo sapien
acatctccctcagtcaacacggact

SEQ ID NO: 1502251 - DNA, 25 bp, Homo sapien
tcagtcaacacggactcaggttcaa

SEQ ID NO: 1502252 - DNA, 25 bp, Homo sapien
cttgatctcatgactagcagcagca

SEQ ID NO: 1502253 - DNA, 25 bp, Homo sapien
tctgacaggtgttttccgggatgcc

SEQ ID NO: 1502254 - DNA, 25 bp, Homo sapien
ggtgttttccgggatgccacttggc

SEQ ID NO: 1502255 - DNA, 25 bp, Homo sapien
gatctcatgactagcagcagcagaa

SEQ ID NO: 1502256 - DNA, 25 bp, Homo sapien
ctgggattggtaaggactcaatcat

SEQ ID NO: 1502257 - DNA, 25 bp, Homo sapien
actcaatcatttctctcccaaatac

SEQ ID NO: 1502258 - DNA, 25 bp, Homo sapien
tgggattggtaaggactcaatcatt

SEQ ID NO: 1502259 - DNA, 25 bp, Homo sapien
gatacacggtcaaaatctatgcaga

SEQ ID NO: 1502260 - DNA, 25 bp, Homo sapien
caacttcagtgatacacggtcaaaa

SEQ ID NO: 1502261 - DNA, 25 bp, Homo sapien
agtgatacacggtcaaaatctatgc

SEQ ID NO: 1502262 - DNA, 25 bp, Homo sapien
ctgcacaacttcagtgatacacggt

SEQ ID NO: 1502263 - DNA, 25 bp, Homo sapien
cagaaatgtggcctgataatgaccc

SEQ ID NO: 1502264 - DNA, 25 bp, Homo sapien
taaagtgaacatcattacttaccac

SEQ ID NO: 1502265 - DNA, 25 bp, Homo sapien
aatgacccctgttcattgggatttc

SEQ ID NO: 1502266 - DNA, 25 bp, Homo sapien
ccacagataccagaaatgtggcctg

SEQ ID NO: 1502267 - DNA, 25 bp, Homo sapien
agttactactatgaagcacaccacg

SEQ ID NO: 1502268 - DNA, 25 bp, Homo sapien
caccacgttgttatctgtgtacacg

SEQ ID NO: 1502269 - DNA, 25 bp, Homo sapien
catttgatactcacagcgtaaacca

SEQ ID NO: 1502270 - DNA, 25 bp, Homo sapien
ttttcttgactacctatctgcaagg

SEQ ID NO: 1502271 - DNA, 25 bp, Homo sapien
ccattgttgatcatgatgaggtttc

SEQ ID NO: 1502272 - DNA, 25 bp, Homo sapien
tcataattggcttggataccagcaa

SEQ ID NO: 1502273 - DNA, 25 bp, Homo sapien
gaggtttcccatgaccccttgagag

SEQ ID NO: 1502274 - DNA, 25 bp, Homo sapien
aatgtcccattgttgatcatgatga

SEQ ID NO: 1502275 - DNA, 25 bp, Homo sapien
tcaggtaagacggtcatttcttgac

SEQ ID NO: 1502276 - DNA, 25 bp, Homo sapien
tcatttcttgacaggacacctgtaa

SEQ ID NO: 1502277 - DNA, 25 bp, Homo sapien
taagacggtcatttcttgacaggac

SEQ ID NO: 1502278 - DNA, 25 bp, Homo sapien
gacggtcatttcttgacaggacacc

SEQ ID NO: 1502279 - DNA, 25 bp, Homo sapien
aaacaaacccacaattgctactatg

SEQ ID NO: 1502280 - DNA, 25 bp, Homo sapien
caattgctactatgacatgcaactc

SEQ ID NO: 1502281 - DNA, 25 bp, Homo sapien
tatgacatgcaactccatggttaat

SEQ ID NO: 1502282 - DNA, 25 bp, Homo sapien
tgctactatgacatgcaactccatg

SEQ ID NO: 1502283 - DNA, 25 bp, Homo sapien
tgatgaggtttaccatgtcttcttg

SEQ ID NO: 1502284 - DNA, 25 bp, Homo sapien
ggtttaccatgtcttcttgacagga

SEQ ID NO: 1502285 - DNA, 25 bp, Homo sapien
tttaccatgtcttcttgacaggatc

SEQ ID NO: 1502286 - DNA, 25 bp, Homo sapien
tgaggtttaccatgtcttcttgaca

SEQ ID NO: 1502287 - DNA, 25 bp, Homo sapien
tgggaaaacatcatttcttaactga

SEQ ID NO: 1502288 - DNA, 25 bp, Homo sapien
tagccttggttgggaaaacatcatt

SEQ ID NO: 1502289 - DNA, 25 bp, Homo sapien
ccttggttgggaaaacatcatttct

SEQ ID NO: 1502290 - DNA, 25 bp, Homo sapien
aaaacatcatttcttaactgaatgc

SEQ ID NO: 1502291 - DNA, 25 bp, Homo sapien
tatgggtacctgaagaaacacattc

SEQ ID NO: 1502292 - DNA, 25 bp, Homo sapien
tatgatttcatgactatgggtacct

SEQ ID NO: 1502293 - DNA, 25 bp, Homo sapien
cataaatgaccactgttaggttcac

SEQ ID NO: 1502294 - DNA, 25 bp, Homo sapien
ggttactaccaagaacacataaatg

SEQ ID NO: 1502295 - DNA, 25 bp, Homo sapien
gaagaacaggtggtctgtagtgtgg

SEQ ID NO: 1502296 - DNA, 25 bp, Homo sapien
tggtaagacccaatttatcactgac

SEQ ID NO: 1502297 - DNA, 25 bp, Homo sapien
tggtctgtagtgtggtaagacccaa

SEQ ID NO: 1502298 - DNA, 25 bp, Homo sapien
tagtgtggtaagacccaatttatca

SEQ ID NO: 1502299 - DNA, 25 bp, Homo sapien
ctgaaaagacgaaggcatctaatga

SEQ ID NO: 1502300 - DNA, 25 bp, Homo sapien
catctaatgagttagagtcacacca

SEQ ID NO: 1502301 - DNA, 25 bp, Homo sapien
tcatgcctgtatactatcaaacaac

SEQ ID NO: 1502302 - DNA, 25 bp, Homo sapien
tagagtcacaccatctcatgcctgt

SEQ ID NO: 1502303 - DNA, 25 bp, Homo sapien
gcatacatgccataaacaaggttta

SEQ ID NO: 1502304 - DNA, 25 bp, Homo sapien
ttaaactgcatacatgccataaaca

SEQ ID NO: 1502305 - DNA, 25 bp, Homo sapien
tgtaacggccttgaaaacaccattc

SEQ ID NO: 1502306 - DNA, 25 bp, Homo sapien
ttatgtaacggccttgaaaacacca

SEQ ID NO: 1502307 - DNA, 25 bp, Homo sapien
aggaatgaagttgatagctttcttt

SEQ ID NO: 1502308 - DNA, 25 bp, Homo sapien
ccttcaaataatctgcaagcctaaa

SEQ ID NO: 1502309 - DNA, 25 bp, Homo sapien
gggtaccatggttctgaccagatgt

SEQ ID NO: 1502310 - DNA, 25 bp, Homo sapien
gcaagcctaaattttcgtggccgtg

SEQ ID NO: 1502311 - DNA, 25 bp, Homo sapien
tagacatccaatttcctggcgtgga

SEQ ID NO: 1502312 - DNA, 25 bp, Homo sapien
tttcaaagtggagatactatttttc

SEQ ID NO: 1502313 - DNA, 25 bp, Homo sapien
ccaggtgtttcttctaaagcttttg

SEQ ID NO: 1502314 - DNA, 25 bp, Homo sapien
gcattttcaaagtggagatactatt

SEQ ID NO: 1502315 - DNA, 25 bp, Homo sapien
aagtggagatactatttttccaggt

SEQ ID NO: 1502316 - DNA, 25 bp, Homo sapien
cagattcagctttcacaaatacgat

SEQ ID NO: 1502317 - DNA, 25 bp, Homo sapien
gatagggagcctttgtgcttcggcc

SEQ ID NO: 1502318 - DNA, 25 bp, Homo sapien
tgtaggtgatctctcttaaagccag

SEQ ID NO: 1502319 - DNA, 25 bp, Homo sapien
tcaagccctggattctttggcagcc

SEQ ID NO: 1502320 - DNA, 25 bp, Homo sapien
taatctactgtggaattgggcatac

SEQ ID NO: 1502321 - DNA, 25 bp, Homo sapien
caggaattttccacaagttgaagtg

SEQ ID NO: 1502322 - DNA, 25 bp, Homo sapien
gagtctactggagtctactgagcag

SEQ ID NO: 1502323 - DNA, 25 bp, Homo sapien
aattgggcatactgtctccaagcca

SEQ ID NO: 1502324 - DNA, 25 bp, Homo sapien
tcctctctctcgtgtgtagcttcta

SEQ ID NO: 1502325 - DNA, 25 bp, Homo sapien
tctcgtgtgtagcttctagatgtga

SEQ ID NO: 1502326 - DNA, 25 bp, Homo sapien
ttccagcagccatttagtgaccgtg

SEQ ID NO: 1502327 - DNA, 25 bp, Homo sapien
tgaccgtgaggaaaactgctttagg

SEQ ID NO: 1502328 - DNA, 25 bp, Homo sapien
cccagcttcccagggctgaccacaa

SEQ ID NO: 1502329 - DNA, 25 bp, Homo sapien
gcttcccagggctgaccacaatcat

SEQ ID NO: 1502330 - DNA, 25 bp, Homo sapien
cagcttcccagggctgaccacaatc

SEQ ID NO: 1502331 - DNA, 25 bp, Homo sapien
gcccagcttcccagggctgaccaca

SEQ ID NO: 1502332 - DNA, 25 bp, Homo sapien
ccacacgtggctatcccctttctga

SEQ ID NO: 1502333 - DNA, 25 bp, Homo sapien
cgtggctatcccctttctgacagct

SEQ ID NO: 1502334 - DNA, 25 bp, Homo sapien
acacgtggctatcccctttctgaca

SEQ ID NO: 1502335 - DNA, 25 bp, Homo sapien
ccccacacgtggctatcccctttct

SEQ ID NO: 1502336 - DNA, 25 bp, Homo sapien
gggctcttctctgtcctgggctttc

SEQ ID NO: 1502337 - DNA, 25 bp, Homo sapien
tcagagcttctgggctcttctctgt

SEQ ID NO: 1502338 - DNA, 25 bp, Homo sapien
ctgggctcttctctgtcctgggctt

SEQ ID NO: 1502339 - DNA, 25 bp, Homo sapien
gcttctgggctcttctctgtcctgg

SEQ ID NO: 1502340 - DNA, 25 bp, Homo sapien
tgatgcaatgaaaacagttgttaaa

SEQ ID NO: 1502341 - DNA, 25 bp, Homo sapien
ctaatgatgcaatgaaaacagttgt

SEQ ID NO: 1502342 - DNA, 25 bp, Homo sapien
aatgatgcaatgaaaacagttgtta

SEQ ID NO: 1502343 - DNA, 25 bp, Homo sapien
taatgatgcaatgaaaacagttgtt

SEQ ID NO: 1502344 - DNA, 25 bp, Homo sapien
gagttcatagtctaacaaaggagct

SEQ ID NO: 1502345 - DNA, 25 bp, Homo sapien
actttatggcaatcattggtggtag

SEQ ID NO: 1502346 - DNA, 25 bp, Homo sapien
taactgtgccattgaatgtggctgc

SEQ ID NO: 1502347 - DNA, 25 bp, Homo sapien
ttggtggtagaagataaataagtca

SEQ ID NO: 1502348 - DNA, 25 bp, Homo sapien
cttcagctcattgccaatggcattt

SEQ ID NO: 1502349 - DNA, 25 bp, Homo sapien
tgggaagttccaaacttcagcaggc

SEQ ID NO: 1502350 - DNA, 25 bp, Homo sapien
tggtagagtaaatcagtcttcagct

SEQ ID NO: 1502351 - DNA, 25 bp, Homo sapien
cctgtttccttgatgggaagttcca

SEQ ID NO: 1502352 - DNA, 25 bp, Homo sapien
ctcatccccagatgtcctgctgctc

SEQ ID NO: 1502353 - DNA, 25 bp, Homo sapien
agtgatgcttccagactgcaacatt

SEQ ID NO: 1502354 - DNA, 25 bp, Homo sapien
gtgatgcttccagactgcaacatta

SEQ ID NO: 1502355 - DNA, 25 bp, Homo sapien
cgactcagctgggtgaaaacgtggt

SEQ ID NO: 1502356 - DNA, 25 bp, Homo sapien
cactcttaaactcggcttggattct

SEQ ID NO: 1502357 - DNA, 25 bp, Homo sapien
aacgtggttggagcataagagtccc

SEQ ID NO: 1502358 - DNA, 25 bp, Homo sapien
aaaggcgtgatacgaaggcgactca

SEQ ID NO: 1502359 - DNA, 25 bp, Homo sapien
aaatggtgaagcagacataaatctc

SEQ ID NO: 1502360 - DNA, 25 bp, Homo sapien
cagtgtatgacaggtcaagtcttgg

SEQ ID NO: 1502361 - DNA, 25 bp, Homo sapien
gaagcagacataaatctcccttttt

SEQ ID NO: 1502362 - DNA, 25 bp, Homo sapien
tatgacaggtcaagtcttgggcaaa

SEQ ID NO: 1502363 - DNA, 25 bp, Homo sapien
tgagaacagtgtcgataaccttgca

SEQ ID NO: 1502364 - DNA, 25 bp, Homo sapien
ttcttttgattaggctgtttgcccc

SEQ ID NO: 1502365 - DNA, 25 bp, Homo sapien
gagtgtctcttcttacctatccata

SEQ ID NO: 1502366 - DNA, 25 bp, Homo sapien
ggtcacttcttcctttcacaatagg

SEQ ID NO: 1502367 - DNA, 25 bp, Homo sapien
cattccagtaaaggtggagcaggcc

SEQ ID NO: 1502368 - DNA, 25 bp, Homo sapien
cagccgactaacacatgactcatgc

SEQ ID NO: 1502369 - DNA, 25 bp, Homo sapien
caggcagctgcatgcatttgctgaa

SEQ ID NO: 1502370 - DNA, 25 bp, Homo sapien
tcaatcaactgcgaatgcccaggca

SEQ ID NO: 1502371 - DNA, 25 bp, Homo sapien
gagcttggactgtaagacatctaac

SEQ ID NO: 1502372 - DNA, 25 bp, Homo sapien
gaagttactggtcttatagaagccc

SEQ ID NO: 1502373 - DNA, 25 bp, Homo sapien
cacccagaggttaggattagaccaa

SEQ ID NO: 1502374 - DNA, 25 bp, Homo sapien
tagaagccctgttgtagaaaactgt

SEQ ID NO: 1502375 - DNA, 25 bp, Homo sapien
tcccttcttctctcacacggtcctt

SEQ ID NO: 1502376 - DNA, 25 bp, Homo sapien
agacgaacttctcctatggatgaaa

SEQ ID NO: 1502377 - DNA, 25 bp, Homo sapien
ctatggatgaaaggctgttcccttc

SEQ ID NO: 1502378 - DNA, 25 bp, Homo sapien
aacttctcctatggatgaaaggctg

SEQ ID NO: 1502379 - DNA, 25 bp, Homo sapien
ttttgagtgctcagcggccacatgg

SEQ ID NO: 1502380 - DNA, 25 bp, Homo sapien
gccgatgtggactttatactaacaa

SEQ ID NO: 1502381 - DNA, 25 bp, Homo sapien
tatccataatgttatcagttcaaca

SEQ ID NO: 1502382 - DNA, 25 bp, Homo sapien
ttattaaggagatatttggtattct

SEQ ID NO: 1502383 - DNA, 25 bp, Homo sapien
gcccatgatgtagggttggtaatga

SEQ ID NO: 1502384 - DNA, 25 bp, Homo sapien
gcctaaagagacattcagcaatttc

SEQ ID NO: 1502385 - DNA, 25 bp, Homo sapien
ttttccacagacagctcatgccata

SEQ ID NO: 1502386 - DNA, 25 bp, Homo sapien
ggctttcttggatttatggacttca

SEQ ID NO: 1502387 - DNA, 25 bp, Homo sapien
cagagggccgagcttctcgttaatc

SEQ ID NO: 1502388 - DNA, 25 bp, Homo sapien
tcccaattcaagaacatccaatgtt

SEQ ID NO: 1502389 - DNA, 25 bp, Homo sapien
cgagcttctcgttaatctgggacat

SEQ ID NO: 1502390 - DNA, 25 bp, Homo sapien
tcttgaagtgttctagacagagggc

SEQ ID NO: 1502391 - DNA, 25 bp, Homo sapien
cttctttgtggaggcctaaatgcgt

SEQ ID NO: 1502392 - DNA, 25 bp, Homo sapien
ttctgtacagcttgcaatgctccag

SEQ ID NO: 1502393 - DNA, 25 bp, Homo sapien
cagaataaaaggagtggttgccggc

SEQ ID NO: 1502394 - DNA, 25 bp, Homo sapien
tccagaaaggactagaagtcttgct

SEQ ID NO: 1502395 - DNA, 25 bp, Homo sapien
tggataataagctctgtcccaactt

SEQ ID NO: 1502396 - DNA, 25 bp, Homo sapien
gtctacttgataacatacccaactc

SEQ ID NO: 1502397 - DNA, 25 bp, Homo sapien
gagggtccccaaattgtctacttga

SEQ ID NO: 1502398 - DNA, 25 bp, Homo sapien
gttctacttgtattactgaggaacc

SEQ ID NO: 1502399 - DNA, 25 bp, Homo sapien
ttagtgcaattcaccacatttgaat

SEQ ID NO: 1502400 - DNA, 25 bp, Homo sapien
caccacatttgaattccacttgcaa

SEQ ID NO: 1502401 - DNA, 25 bp, Homo sapien
gcaattcaccacatttgaattccac

SEQ ID NO: 1502402 - DNA, 25 bp, Homo sapien
attcaccacatttgaattccacttg

SEQ ID NO: 1502403 - DNA, 25 bp, Homo sapien
acatagtgtcttttgcagggccatt

SEQ ID NO: 1502404 - DNA, 25 bp, Homo sapien
gaacatagtgtcttttgcagggcca

SEQ ID NO: 1502405 - DNA, 25 bp, Homo sapien
aacatagtgtcttttgcagggccat

SEQ ID NO: 1502406 - DNA, 25 bp, Homo sapien
catgtaccaaggatggcatcacctg

SEQ ID NO: 1502407 - DNA, 25 bp, Homo sapien
tggcatcacctgaaccatgcctgga

SEQ ID NO: 1502408 - DNA, 25 bp, Homo sapien
gctgcatgtaccaaggatggcatca

SEQ ID NO: 1502409 - DNA, 25 bp, Homo sapien
catcacctgaaccatgcctggacag

SEQ ID NO: 1502410 - DNA, 25 bp, Homo sapien
caaaacggccttccggacttctgct

SEQ ID NO: 1502411 - DNA, 25 bp, Homo sapien
gacaaggagatatagcaaaacggcc

SEQ ID NO: 1502412 - DNA, 25 bp, Homo sapien
gccttccggacttctgcttttgttc

SEQ ID NO: 1502413 - DNA, 25 bp, Homo sapien
tgccacaagtttgacaaggagatat

SEQ ID NO: 1502414 - DNA, 25 bp, Homo sapien
gctcgctttctcttgccacgaaggt

SEQ ID NO: 1502415 - DNA, 25 bp, Homo sapien
actttccagtggctcgctttctctt

SEQ ID NO: 1502416 - DNA, 25 bp, Homo sapien
tgccacgaaggtttcgatggaaaaa

SEQ ID NO: 1502417 - DNA, 25 bp, Homo sapien
cactttcttttcacggtctgaaagg

SEQ ID NO: 1502418 - DNA, 25 bp, Homo sapien
tggagaaataccattgcagttgagt

SEQ ID NO: 1502419 - DNA, 25 bp, Homo sapien
tcaaggtacatatttgccgtgactg

SEQ ID NO: 1502420 - DNA, 25 bp, Homo sapien
taaattggaaagcatgttggaaaca

SEQ ID NO: 1502421 - DNA, 25 bp, Homo sapien
taccattgcagttgagtgtaaattg

SEQ ID NO: 1502422 - DNA, 25 bp, Homo sapien
ttttgccccatcctctttgctagga

SEQ ID NO: 1502423 - DNA, 25 bp, Homo sapien
tgaggtccttgttaggcacttttgc

SEQ ID NO: 1502424 - DNA, 25 bp, Homo sapien
tccttgttaggcacttttgccccat

SEQ ID NO: 1502425 - DNA, 25 bp, Homo sapien
ttcacaggggtgttgatgaggtcct

SEQ ID NO: 1502426 - DNA, 25 bp, Homo sapien
gccggaccccgtagcagctaagccg

SEQ ID NO: 1502427 - DNA, 25 bp, Homo sapien
gctccactcgcagttaccgggtgct

SEQ ID NO: 1502428 - DNA, 25 bp, Homo sapien
cgcagttaccgggtgctgtccctgc

SEQ ID NO: 1502429 - DNA, 25 bp, Homo sapien
ggctcctctgcggatgaagctggac

SEQ ID NO: 1502430 - DNA, 25 bp, Homo sapien
cgggagcgcaaggctccagggcaga

SEQ ID NO: 1502431 - DNA, 25 bp, Homo sapien
ctggccgcgttcccgaaaccacctg

SEQ ID NO: 1502432 - DNA, 25 bp, Homo sapien
tggccgcgttcccgaaaccacctgc

SEQ ID NO: 1502433 - DNA, 25 bp, Homo sapien
gccgcgttcccgaaaccacctgcca

SEQ ID NO: 1502434 - DNA, 25 bp, Homo sapien
actcacacccatacacgcgggggtg

SEQ ID NO: 1502435 - DNA, 25 bp, Homo sapien
acactcacacccatacacgcggggg

SEQ ID NO: 1502436 - DNA, 25 bp, Homo sapien
gcacactcacacccatacacgcggg

SEQ ID NO: 1502437 - DNA, 25 bp, Homo sapien
ctcacacccatacacgcgggggtgc

SEQ ID NO: 1502438 - DNA, 25 bp, Homo sapien
ggcacagctgatgcaaaaggagcta

SEQ ID NO: 1502439 - DNA, 25 bp, Homo sapien
atcaagcccgcacgcacccacgggt

SEQ ID NO: 1502440 - DNA, 25 bp, Homo sapien
cgcacccacgggtctgcgtgcagag

SEQ ID NO: 1502441 - DNA, 25 bp, Homo sapien
aaccctccggacgcagccaggtggg

SEQ ID NO: 1502442 - DNA, 25 bp, Homo sapien
gttcatcaaccctaatcagagagca

SEQ ID NO: 1502443 - DNA, 25 bp, Homo sapien
tagcgactgacaagcacttggtgtc

SEQ ID NO: 1502444 - DNA, 25 bp, Homo sapien
ggctggctcagctcaagaacagtaa

SEQ ID NO: 1502445 - DNA, 25 bp, Homo sapien
cagtaaatgctttatcgtcctcggt

SEQ ID NO: 1502446 - DNA, 25 bp, Homo sapien
ccatggctaactctgatgaaatatt

SEQ ID NO: 1502447 - DNA, 25 bp, Homo sapien
catacattctaagaacctggtttga

SEQ ID NO: 1502448 - DNA, 25 bp, Homo sapien
ggaaattgaaacttgcgatcataca

SEQ ID NO: 1502449 - DNA, 25 bp, Homo sapien
ataccatggctaactctgatgaaat

SEQ ID NO: 1502450 - DNA, 25 bp, Homo sapien
tgttggcaaggatgacagtttcact

SEQ ID NO: 1502451 - DNA, 25 bp, Homo sapien
tcaaagctgtacaattgttggcaag

SEQ ID NO: 1502452 - DNA, 25 bp, Homo sapien
ggagcctacagctgattgactccgg

SEQ ID NO: 1502453 - DNA, 25 bp, Homo sapien
cagctgattgactccggtgattttt

SEQ ID NO: 1502454 - DNA, 25 bp, Homo sapien
acagaccccaggctgacgtgccgat

SEQ ID NO: 1502455 - DNA, 25 bp, Homo sapien
cagaccccaggctgacgtgccgatg

SEQ ID NO: 1502456 - DNA, 25 bp, Homo sapien
gccgtagcagcaggccagtttagtt

SEQ ID NO: 1502457 - DNA, 25 bp, Homo sapien
cgtagcagcaggccagtttagttcc

SEQ ID NO: 1502458 - DNA, 25 bp, Homo sapien
agccgtagcagcaggccagtttagt

SEQ ID NO: 1502459 - DNA, 25 bp, Homo sapien
tagcagcaggccagtttagttccat

SEQ ID NO: 1502460 - DNA, 25 bp, Homo sapien
tagtgaaatgcacgcaaaacttcgc

SEQ ID NO: 1502461 - DNA, 25 bp, Homo sapien
tagtgtagtgaaatgcacgcaaaac

SEQ ID NO: 1502462 - DNA, 25 bp, Homo sapien
gaaatgcacgcaaaacttcgctgcg

SEQ ID NO: 1502463 - DNA, 25 bp, Homo sapien
cagtagttagtgtagtgaaatgcac

SEQ ID NO: 1502464 - DNA, 25 bp, Homo sapien
tcaccaaacttacatccaggttcgc

SEQ ID NO: 1502465 - DNA, 25 bp, Homo sapien
gcactcaccaaacttacatccaggt

SEQ ID NO: 1502466 - DNA, 25 bp, Homo sapien
gtcccacgcactcaccaaacttaca

SEQ ID NO: 1502467 - DNA, 25 bp, Homo sapien
aacttacatccaggttcgcatgtag

SEQ ID NO: 1502468 - DNA, 25 bp, Homo sapien
ttgactgcaggttttcccggtgtat

SEQ ID NO: 1502469 - DNA, 25 bp, Homo sapien
ttttcccggtgtatcctggaaagca

SEQ ID NO: 1502470 - DNA, 25 bp, Homo sapien
ctgcaggttttcccggtgtatcctg

SEQ ID NO: 1502471 - DNA, 25 bp, Homo sapien
ccggtgtatcctggaaagcatctgc

SEQ ID NO: 1502472 - DNA, 25 bp, Homo sapien
gaactatgaccctgggctaccttac

SEQ ID NO: 1502473 - DNA, 25 bp, Homo sapien
atattgagtcgccagccctgctgca

SEQ ID NO: 1502474 - DNA, 25 bp, Homo sapien
gaatttgaactatgaccctgggcta

SEQ ID NO: 1502475 - DNA, 25 bp, Homo sapien
ccctgctgcaatgattgaatttgaa

SEQ ID NO: 1502476 - DNA, 25 bp, Homo sapien
ggatggtcgtcctctccacacgagc

SEQ ID NO: 1502477 - DNA, 25 bp, Homo sapien
atggtcgtcctctccacacgagcgc

SEQ ID NO: 1502478 - DNA, 25 bp, Homo sapien
tcgtcctctccacacgagcgcgcag

SEQ ID NO: 1502479 - DNA, 25 bp, Homo sapien
ggtcgtcctctccacacgagcgcgc

SEQ ID NO: 1502480 - DNA, 25 bp, Homo sapien
aaagcacttgtagcttccgtgtgta

SEQ ID NO: 1502481 - DNA, 25 bp, Homo sapien
tagcttccgtgtgtattcacacatc

SEQ ID NO: 1502482 - DNA, 25 bp, Homo sapien
actgaggcaaaagcacttgtagctt

SEQ ID NO: 1502483 - DNA, 25 bp, Homo sapien
cacttgtagcttccgtgtgtattca

SEQ ID NO: 1502484 - DNA, 25 bp, Homo sapien
ggtgttgggacactttgccaaggag

SEQ ID NO: 1502485 - DNA, 25 bp, Homo sapien
ggcaagattttataatctcgggaaa

SEQ ID NO: 1502486 - DNA, 25 bp, Homo sapien
gaggagcccgtgcactaggcaagat

SEQ ID NO: 1502487 - DNA, 25 bp, Homo sapien
tgtgcaactccgcaaccacaggaag

SEQ ID NO: 1502488 - DNA, 25 bp, Homo sapien
tcacagctgtactgacagtttatca

SEQ ID NO: 1502489 - DNA, 25 bp, Homo sapien
cacagctgtactgacagtttatcat

SEQ ID NO: 1502490 - DNA, 25 bp, Homo sapien
caggcactgtggcccttcttctgtg

SEQ ID NO: 1502491 - DNA, 25 bp, Homo sapien
cgtccactgatatattgcagttcga

SEQ ID NO: 1502492 - DNA, 25 bp, Homo sapien
tgcagttcgaaaccaatgtgacatt

SEQ ID NO: 1502493 - DNA, 25 bp, Homo sapien
acacatcttcgattgtagggacaga

SEQ ID NO: 1502494 - DNA, 25 bp, Homo sapien
tgtgacatttgcagtagtagcttcc

SEQ ID NO: 1502495 - DNA, 25 bp, Homo sapien
caactaatagcttgaattgacatca

SEQ ID NO: 1502496 - DNA, 25 bp, Homo sapien
ctaatagcttgaattgacatcaaaa

SEQ ID NO: 1502497 - DNA, 25 bp, Homo sapien
tcaactaatagcttgaattgacatc

SEQ ID NO: 1502498 - DNA, 25 bp, Homo sapien
aactaatagcttgaattgacatcaa

SEQ ID NO: 1502499 - DNA, 25 bp, Homo sapien
cgttgacatcatctaacttataggc

SEQ ID NO: 1502500 - DNA, 25 bp, Homo sapien
tcatctaacttataggcacaggcat

SEQ ID NO: 1502501 - DNA, 25 bp, Homo sapien
ctaacttataggcacaggcattttg

SEQ ID NO: 1502502 - DNA, 25 bp, Homo sapien
ctaggaaccgttgacatcatctaac

SEQ ID NO: 1502503 - DNA, 25 bp, Homo sapien
ggctgcacgtatggctatccatagt

SEQ ID NO: 1502504 - DNA, 25 bp, Homo sapien
ggctatccatagtacattcatttat

SEQ ID NO: 1502505 - DNA, 25 bp, Homo sapien
cgtatggctatccatagtacattca

SEQ ID NO: 1502506 - DNA, 25 bp, Homo sapien
ggtggctgcacgtatggctatccat

SEQ ID NO: 1502507 - DNA, 25 bp, Homo sapien
cagaacaccgaagtccattgccttt

SEQ ID NO: 1502508 - DNA, 25 bp, Homo sapien
cccttgggtattgaagcaattggca

SEQ ID NO: 1502509 - DNA, 25 bp, Homo sapien
catttacacttgaaggacccttggg

SEQ ID NO: 1502510 - DNA, 25 bp, Homo sapien
cattgcctttatatccctgcttgca

SEQ ID NO: 1502511 - DNA, 25 bp, Homo sapien
gaatgtgacgtaagttagggtacac

SEQ ID NO: 1502512 - DNA, 25 bp, Homo sapien
tagggtacaccttgcagccatattt

SEQ ID NO: 1502513 - DNA, 25 bp, Homo sapien
tgcatcattgggagcattggccaga

SEQ ID NO: 1502514 - DNA, 25 bp, Homo sapien
atttattgaacatgcgggaactctg

SEQ ID NO: 1502515 - DNA, 25 bp, Homo sapien
tctaggcatgtactaatctaagact

SEQ ID NO: 1502516 - DNA, 25 bp, Homo sapien
cagaatatccaactgatgtaaagaa

SEQ ID NO: 1502517 - DNA, 25 bp, Homo sapien
tctaagactaagcaagaaagggtct

SEQ ID NO: 1502518 - DNA, 25 bp, Homo sapien
gaaagggtctaataacacctcaatc

SEQ ID NO: 1502519 - DNA, 25 bp, Homo sapien
caaagacatggatttgccatgttcg

SEQ ID NO: 1502520 - DNA, 25 bp, Homo sapien
agttgggctacagatcccaaagaca

SEQ ID NO: 1502521 - DNA, 25 bp, Homo sapien
gccatgttcgtctaatatttctgct

SEQ ID NO: 1502522 - DNA, 25 bp, Homo sapien
ccagttgggctacagatcccaaaga

SEQ ID NO: 1502523 - DNA, 25 bp, Homo sapien
ggagaccactttagtgaaacactta

SEQ ID NO: 1502524 - DNA, 25 bp, Homo sapien
tgttttgcttcggagaccactttag

SEQ ID NO: 1502525 - DNA, 25 bp, Homo sapien
tgcttcggagaccactttagtgaaa

SEQ ID NO: 1502526 - DNA, 25 bp, Homo sapien
tcggagaccactttagtgaaacact

SEQ ID NO: 1502527 - DNA, 25 bp, Homo sapien
gcaggcttcgctcctctatgtcatt

SEQ ID NO: 1502528 - DNA, 25 bp, Homo sapien
ctgtctttgatggtaccaggtgctc

SEQ ID NO: 1502529 - DNA, 25 bp, Homo sapien
tgcaagttcaccttaggggtaggag

SEQ ID NO: 1502530 - DNA, 25 bp, Homo sapien
ccgcctctggaaactatctcttcat

SEQ ID NO: 1502531 - DNA, 25 bp, Homo sapien
tatgttccagtttggaagttagcgc

SEQ ID NO: 1502532 - DNA, 25 bp, Homo sapien
gcgctttcctttggaccagaatcag

SEQ ID NO: 1502533 - DNA, 25 bp, Homo sapien
gaagttagcgctttcctttggacca

SEQ ID NO: 1502534 - DNA, 25 bp, Homo sapien
gaccagaatcaggccgaattcacct

SEQ ID NO: 1502535 - DNA, 25 bp, Homo sapien
gtcacagatcccatgattgaagctg

SEQ ID NO: 1502536 - DNA, 25 bp, Homo sapien
cacagatcccatgattgaagctgca

SEQ ID NO: 1502537 - DNA, 25 bp, Homo sapien
tgtttccagtcacagatcccatgat

SEQ ID NO: 1502538 - DNA, 25 bp, Homo sapien
ccagtcacagatcccatgattgaag

SEQ ID NO: 1502539 - DNA, 25 bp, Homo sapien
tatgggctcccaatatgatatagct

SEQ ID NO: 1502540 - DNA, 25 bp, Homo sapien
ggtcctggaataacctatgggctcc

SEQ ID NO: 1502541 - DNA, 25 bp, Homo sapien
cataaccttatatcagctgtggagg

SEQ ID NO: 1502542 - DNA, 25 bp, Homo sapien
tatgatttgaatgatgcagaagctg

SEQ ID NO: 1502543 - DNA, 25 bp, Homo sapien
tttcttgtgacctgccaaggccgga

SEQ ID NO: 1502544 - DNA, 25 bp, Homo sapien
ccggccagccggtaatcaaagagca

SEQ ID NO: 1502545 - DNA, 25 bp, Homo sapien
ccatgccagggcattgttactgttt

SEQ ID NO: 1502546 - DNA, 25 bp, Homo sapien
ggagaagtttcaatcggccaatgtc

SEQ ID NO: 1502547 - DNA, 25 bp, Homo sapien
gcctgggtctgagaatgcctcttat

SEQ ID NO: 1502548 - DNA, 25 bp, Homo sapien
tttcccctagaactgaagaattcaa

SEQ ID NO: 1502549 - DNA, 25 bp, Homo sapien
cccctagaactgaagaattcaagga

SEQ ID NO: 1502550 - DNA, 25 bp, Homo sapien
ttatgaaagcactgctgtgttccag

SEQ ID NO: 1502551 - DNA, 25 bp, Homo sapien
tccactgcgatttcgccggttttgc

SEQ ID NO: 1502552 - DNA, 25 bp, Homo sapien
gatttcgccggttttgcccttgcca

SEQ ID NO: 1502553 - DNA, 25 bp, Homo sapien
tgaaacaagcaagacgccatccact

SEQ ID NO: 1502554 - DNA, 25 bp, Homo sapien
acagataaaaggctatctggacata

SEQ ID NO: 1502555 - DNA, 25 bp, Homo sapien
gctaagccacttaggcaaaagtcta

SEQ ID NO: 1502556 - DNA, 25 bp, Homo sapien
gtttggctatgaaagacccagctaa

SEQ ID NO: 1502557 - DNA, 25 bp, Homo sapien
ccagggaactgacatacaaagtcaa

SEQ ID NO: 1502558 - DNA, 25 bp, Homo sapien
ccagaggtcctatgatgcaatatca

SEQ ID NO: 1502559 - DNA, 25 bp, Homo sapien
gaaaaattaaaccatgacacaagat

SEQ ID NO: 1502560 - DNA, 25 bp, Homo sapien
acataagtaaacacagaatcaagaa

SEQ ID NO: 1502561 - DNA, 25 bp, Homo sapien
tcaagaacatattttcttacctaga

SEQ ID NO: 1502562 - DNA, 25 bp, Homo sapien
tacctagaaaaattaaaccatgaca

SEQ ID NO: 1502563 - DNA, 25 bp, Homo sapien
cagaatcccaactttaccgctatag

SEQ ID NO: 1502564 - DNA, 25 bp, Homo sapien
gaagttcttactgaagtatgacaca

SEQ ID NO: 1502565 - DNA, 25 bp, Homo sapien
gtacaaatcgtaagtgtactgcttg

SEQ ID NO: 1502566 - DNA, 25 bp, Homo sapien
tatagaaaagtcagtgtacaaatcg

SEQ ID NO: 1502567 - DNA, 25 bp, Homo sapien
ggaggaccctccctttgctggtagc

SEQ ID NO: 1502568 - DNA, 25 bp, Homo sapien
tagccccttattacccattccatgg

SEQ ID NO: 1502569 - DNA, 25 bp, Homo sapien
cattccatggttcagatgctgcacc

SEQ ID NO: 1502570 - DNA, 25 bp, Homo sapien
tgcaccctctggttaaccgctggct

SEQ ID NO: 1502571 - DNA, 25 bp, Homo sapien
cacggagaacttccgatcaccggga

SEQ ID NO: 1502572 - DNA, 25 bp, Homo sapien
ccagtgcccacggagaacttccgat

SEQ ID NO: 1502573 - DNA, 25 bp, Homo sapien
ggcgcagttccggagccttcagccg

SEQ ID NO: 1502574 - DNA, 25 bp, Homo sapien
aaagcgcaggcgcagttccggagcc

SEQ ID NO: 1502575 - DNA, 25 bp, Homo sapien
ggctcgcctttttgcgggacacagg

SEQ ID NO: 1502576 - DNA, 25 bp, Homo sapien
taagggctcgcctttttgcgggaca

SEQ ID NO: 1502577 - DNA, 25 bp, Homo sapien
tccgctgggaataagggctcgcctt

SEQ ID NO: 1502578 - DNA, 25 bp, Homo sapien
tgggcttccgctgggaataagggct

SEQ ID NO: 1502579 - DNA, 25 bp, Homo sapien
cggatctacgccgcccagggcgcac

SEQ ID NO: 1502580 - DNA, 25 bp, Homo sapien
cttcggatctacgccgcccagggcg

SEQ ID NO: 1502581 - DNA, 25 bp, Homo sapien
tcggatctacgccgcccagggcgca

SEQ ID NO: 1502582 - DNA, 25 bp, Homo sapien
ttcggatctacgccgcccagggcgc

SEQ ID NO: 1502583 - DNA, 25 bp, Homo sapien
gcattgttctacagcagggggtcag

SEQ ID NO: 1502584 - DNA, 25 bp, Homo sapien
ggcattgttctacagcagggggtca

SEQ ID NO: 1502585 - DNA, 25 bp, Homo sapien
caggcattgttctacagcagggggt

SEQ ID NO: 1502586 - DNA, 25 bp, Homo sapien
aggcattgttctacagcagggggtc

SEQ ID NO: 1502587 - DNA, 25 bp, Homo sapien
gtactcattgcacctaagcccagtg

SEQ ID NO: 1502588 - DNA, 25 bp, Homo sapien
tcatttcttttcactacacaccagc

SEQ ID NO: 1502589 - DNA, 25 bp, Homo sapien
tactcattgcacctaagcccagtgc

SEQ ID NO: 1502590 - DNA, 25 bp, Homo sapien
acagtggaaggcaacatatatttat

SEQ ID NO: 1502591 - DNA, 25 bp, Homo sapien
ctgagtcaaatattgcttaacttcc

SEQ ID NO: 1502592 - DNA, 25 bp, Homo sapien
gagtcaaatattgcttaacttcctt

SEQ ID NO: 1502593 - DNA, 25 bp, Homo sapien
ccttttgggcgctgtaggcccatct

SEQ ID NO: 1502594 - DNA, 25 bp, Homo sapien
taacttccttttgggcgctgtaggc

SEQ ID NO: 1502595 - DNA, 25 bp, Homo sapien
gcctgggcaacacagcaagactctg

SEQ ID NO: 1502596 - DNA, 25 bp, Homo sapien
tggcatgaacctggaaggcggagtt

SEQ ID NO: 1502597 - DNA, 25 bp, Homo sapien
ccaagatcgtgccactgcactccag

SEQ ID NO: 1502598 - DNA, 25 bp, Homo sapien
gcagtgagccaagatcgtgccactg

SEQ ID NO: 1502599 - DNA, 25 bp, Homo sapien
tggttgccaagatcctcaaaattcc

SEQ ID NO: 1502600 - DNA, 25 bp, Homo sapien
tggagatgctccttagtcacataaa

SEQ ID NO: 1502601 - DNA, 25 bp, Homo sapien
taagagaagctctggcagctatctg

SEQ ID NO: 1502602 - DNA, 25 bp, Homo sapien
ttttggacatcagttgctcaataag

SEQ ID NO: 1502603 - DNA, 25 bp, Homo sapien
aggactctgtacacagctctgacca

SEQ ID NO: 1502604 - DNA, 25 bp, Homo sapien
ggactctgtacacagctctgaccac

SEQ ID NO: 1502605 - DNA, 25 bp, Homo sapien
cactttgatagcaaacacttggctt

SEQ ID NO: 1502606 - DNA, 25 bp, Homo sapien
ccactttgatagcaaacacttggct

SEQ ID NO: 1502607 - DNA, 25 bp, Homo sapien
actttgatagcaaacacttggcttt

SEQ ID NO: 1502608 - DNA, 25 bp, Homo sapien
cactgagttttgcaacgtcttggga

SEQ ID NO: 1502609 - DNA, 25 bp, Homo sapien
agagaattcgagctgcagatgccca

SEQ ID NO: 1502610 - DNA, 25 bp, Homo sapien
tgtgggatccagcaactcactcgat

SEQ ID NO: 1502611 - DNA, 25 bp, Homo sapien
caaattctcgtggagacgtggtccc

SEQ ID NO: 1502612 - DNA, 25 bp, Homo sapien
tgtctgtgtgccatcaattacttgg

SEQ ID NO: 1502613 - DNA, 25 bp, Homo sapien
ccacattcgttacaaattacgtaag

SEQ ID NO: 1502614 - DNA, 25 bp, Homo sapien
caagattccgtgtaggaggctctca

SEQ ID NO: 1502615 - DNA, 25 bp, Homo sapien
tgttcctggatacaagattccgtgt

SEQ ID NO: 1502616 - DNA, 25 bp, Homo sapien
gattcggattcaatggtgtgaggcc

SEQ ID NO: 1502617 - DNA, 25 bp, Homo sapien
cagtaaggtactaaatggccacaag

SEQ ID NO: 1502618 - DNA, 25 bp, Homo sapien
tcagaagtcgatattgagccagtct

SEQ ID NO: 1502619 - DNA, 25 bp, Homo sapien
gaagatctagtcacccaatgttgga

SEQ ID NO: 1502620 - DNA, 25 bp, Homo sapien
aacaaaattctaactgcgggatgag

SEQ ID NO: 1502621 - DNA, 25 bp, Homo sapien
tcaactaagcaagagggctccaaac

SEQ ID NO: 1502622 - DNA, 25 bp, Homo sapien
cgggatgagttccagggtgactttt

SEQ ID NO: 1502623 - DNA, 25 bp, Homo sapien
aactaagcaagagggctccaaacaa

SEQ ID NO: 1502624 - DNA, 25 bp, Homo sapien
tacacttgatggcattgagccgact

SEQ ID NO: 1502625 - DNA, 25 bp, Homo sapien
catagaaggcgtgttgtagtcaaac

SEQ ID NO: 1502626 - DNA, 25 bp, Homo sapien
tgtacacacagttaggccttcagag

SEQ ID NO: 1502627 - DNA, 25 bp, Homo sapien
cattcaaaggctaaagtgatgggct

SEQ ID NO: 1502628 - DNA, 25 bp, Homo sapien
cagctactcaagggagtggggatgc

SEQ ID NO: 1502629 - DNA, 25 bp, Homo sapien
agctactcaagggagtggggatgct

SEQ ID NO: 1502630 - DNA, 25 bp, Homo sapien
acttgcgtgtatcaggcagtctcct

SEQ ID NO: 1502631 - DNA, 25 bp, Homo sapien
cttgttccccttgctcactgtgact

SEQ ID NO: 1502632 - DNA, 25 bp, Homo sapien
cgtggactcttgctggaacttgcgt

SEQ ID NO: 1502633 - DNA, 25 bp, Homo sapien
cgaccgacaagagccctcacgatgg

SEQ ID NO: 1502634 - DNA, 25 bp, Homo sapien
tatggtgctggaacagactttccca

SEQ ID NO: 1502635 - DNA, 25 bp, Homo sapien
aaaaggtaaaacgattgctggctgc

SEQ ID NO: 1502636 - DNA, 25 bp, Homo sapien
gataaaccacatggatgccacgaga

SEQ ID NO: 1502637 - DNA, 25 bp, Homo sapien
gagccagcaatcctagccaggtggt

SEQ ID NO: 1502638 - DNA, 25 bp, Homo sapien
aagcaacatgttcttatactgtcaa

SEQ ID NO: 1502639 - DNA, 25 bp, Homo sapien
acatgttcttatactgtcaaatttc

SEQ ID NO: 1502640 - DNA, 25 bp, Homo sapien
caacatgttcttatactgtcaaatt

SEQ ID NO: 1502641 - DNA, 25 bp, Homo sapien
gcaacatgttcttatactgtcaaat

SEQ ID NO: 1502642 - DNA, 25 bp, Homo sapien
gatgtttagcatgtgcatccatcac

SEQ ID NO: 1502643 - DNA, 25 bp, Homo sapien
gatattatttatactatacaattca

SEQ ID NO: 1502644 - DNA, 25 bp, Homo sapien
tatttatactatacaattcactcat

SEQ ID NO: 1502645 - DNA, 25 bp, Homo sapien
aattcagtgatgtttagcatgtgca

SEQ ID NO: 1502646 - DNA, 25 bp, Homo sapien
tcagctgtggttcccgtccatgtca

SEQ ID NO: 1502647 - DNA, 25 bp, Homo sapien
taatgtccattatgggtcagctgtg

SEQ ID NO: 1502648 - DNA, 25 bp, Homo sapien
gagctaatggatcagcttctgtctg

SEQ ID NO: 1502649 - DNA, 25 bp, Homo sapien
cctctggacctgacgaacctgagct

SEQ ID NO: 1502650 - DNA, 25 bp, Homo sapien
tacagaaacgagacccaagactagc

SEQ ID NO: 1502651 - DNA, 25 bp, Homo sapien
taatcaggtcattcacgttccggcc

SEQ ID NO: 1502652 - DNA, 25 bp, Homo sapien
ccaccattggtgctagtgtccagaa

SEQ ID NO: 1502653 - DNA, 25 bp, Homo sapien
agttcagggttcattctggcacagg

SEQ ID NO: 1502654 - DNA, 25 bp, Homo sapien
cggtttggttagcatctgaaagtcc

SEQ ID NO: 1502655 - DNA, 25 bp, Homo sapien
tgcgcccagtcaagtttgcttatct

SEQ ID NO: 1502656 - DNA, 25 bp, Homo sapien
taaaagtcccaatggagagacactt

SEQ ID NO: 1502657 - DNA, 25 bp, Homo sapien
tatacaaccatcagacctcctacga

SEQ ID NO: 1502658 - DNA, 25 bp, Homo sapien
cggtagcgcagccaggctcccgctc

SEQ ID NO: 1502659 - DNA, 25 bp, Homo sapien
aggcagccgcggtagcgcagccagg

SEQ ID NO: 1502660 - DNA, 25 bp, Homo sapien
cgtccagcgcggagggaacaacatg

SEQ ID NO: 1502661 - DNA, 25 bp, Homo sapien
ctgctcccgtccagcgcggagggaa

SEQ ID NO: 1502662 - DNA, 25 bp, Homo sapien
tcgcggccacacgaaagacgacccg

SEQ ID NO: 1502663 - DNA, 25 bp, Homo sapien
gccacacgaaagacgacccgggagc

SEQ ID NO: 1502664 - DNA, 25 bp, Homo sapien
cacgaaagacgacccgggagctctg

SEQ ID NO: 1502665 - DNA, 25 bp, Homo sapien
acacgaaagacgacccgggagctct

SEQ ID NO: 1502666 - DNA, 25 bp, Homo sapien
cctcagaccccgacacccgcgcact

SEQ ID NO: 1502667 - DNA, 25 bp, Homo sapien
cgccccagctgcccgaggcccgagc

SEQ ID NO: 1502668 - DNA, 25 bp, Homo sapien
cctctctcccggggcggccttgtga

SEQ ID NO: 1502669 - DNA, 25 bp, Homo sapien
agggagacaaccagccgtcctctct

SEQ ID NO: 1502670 - DNA, 25 bp, Homo sapien
gctaggtggaacttcagaggtcgcc

SEQ ID NO: 1502671 - DNA, 25 bp, Homo sapien
taagacatcgagcaaacacgttctg

SEQ ID NO: 1502672 - DNA, 25 bp, Homo sapien
tcacccgagtggtcgtaagacatcg

SEQ ID NO: 1502673 - DNA, 25 bp, Homo sapien
gattgtgaaacgttagccagcgtct

SEQ ID NO: 1502674 - DNA, 25 bp, Homo sapien
aaaatgatgaggtatcccaaatagg

SEQ ID NO: 1502675 - DNA, 25 bp, Homo sapien
cccaaataggaaaacgacattgcat

SEQ ID NO: 1502676 - DNA, 25 bp, Homo sapien
agtgaatatgcttctcagtagagag

SEQ ID NO: 1502677 - DNA, 25 bp, Homo sapien
ggttacttggactgctgaaaaggag

SEQ ID NO: 1502678 - DNA, 25 bp, Homo sapien
gcctggcagtaatcctcttgaaaat

SEQ ID NO: 1502679 - DNA, 25 bp, Homo sapien
tttcttcaacatagacagctccctt

SEQ ID NO: 1502680 - DNA, 25 bp, Homo sapien
gctcttcatgaagctatttcacgag

SEQ ID NO: 1502681 - DNA, 25 bp, Homo sapien
cattactgcttctatcaggtccaaa

SEQ ID NO: 1502682 - DNA, 25 bp, Homo sapien
aacaggtctaactgggaaagtgtct

SEQ ID NO: 1502683 - DNA, 25 bp, Homo sapien
ggagaccttcaagtctgagccagga

SEQ ID NO: 1502684 - DNA, 25 bp, Homo sapien
tcacacatctagctagaggcacagg

SEQ ID NO: 1502685 - DNA, 25 bp, Homo sapien
gtgtcttacacaggatcacacatct

SEQ ID NO: 1502686 - DNA, 25 bp, Homo sapien
tcaaaaatgatctgcaacgttctgc

SEQ ID NO: 1502687 - DNA, 25 bp, Homo sapien
tgctcagtttataggacaccagggc

SEQ ID NO: 1502688 - DNA, 25 bp, Homo sapien
tataggactcgactagactagaggc

SEQ ID NO: 1502689 - DNA, 25 bp, Homo sapien
ggtctgcccctatcgaagtgttgaa

SEQ ID NO: 1502690 - DNA, 25 bp, Homo sapien
tcctacttagaggtgtacttaccac

SEQ ID NO: 1502691 - DNA, 25 bp, Homo sapien
taatgggtaccagctctacagcaag

SEQ ID NO: 1502692 - DNA, 25 bp, Homo sapien
tttaggcgtgtctcacttaacagcc

SEQ ID NO: 1502693 - DNA, 25 bp, Homo sapien
cttaacagcctaattggttccactg

SEQ ID NO: 1502694 - DNA, 25 bp, Homo sapien
ggccttctccaaccccttgctggct

SEQ ID NO: 1502695 - DNA, 25 bp, Homo sapien
caaccccttgctggcttccaaagcc

SEQ ID NO: 1502696 - DNA, 25 bp, Homo sapien
cttctccaaccccttgctggcttcc

SEQ ID NO: 1502697 - DNA, 25 bp, Homo sapien
tctctggccttctccaaccccttgc

SEQ ID NO: 1502698 - DNA, 25 bp, Homo sapien
caggccaactatttcacttgctgag

SEQ ID NO: 1502699 - DNA, 25 bp, Homo sapien
taatgagagactgtacatcggtttc

SEQ ID NO: 1502700 - DNA, 25 bp, Homo sapien
gccactatcttacggagttgcctga

SEQ ID NO: 1502701 - DNA, 25 bp, Homo sapien
cttaaaatagtgcaagggattctgc

SEQ ID NO: 1502702 - DNA, 25 bp, Homo sapien
ctttctatggtcatgtcttacatca

SEQ ID NO: 1502703 - DNA, 25 bp, Homo sapien
agacaggttctttctatggtcatgt

SEQ ID NO: 1502704 - DNA, 25 bp, Homo sapien
acaggttctttctatggtcatgtct

SEQ ID NO: 1502705 - DNA, 25 bp, Homo sapien
ggcagttttacagacaggttctttc

SEQ ID NO: 1502706 - DNA, 25 bp, Homo sapien
gaagatgcactcaaacgacacggga

SEQ ID NO: 1502707 - DNA, 25 bp, Homo sapien
tgcactcaaacgacacgggaaaagt

SEQ ID NO: 1502708 - DNA, 25 bp, Homo sapien
cacgggaaaagtgtttcatcacagt

SEQ ID NO: 1502709 - DNA, 25 bp, Homo sapien
cgacacgggaaaagtgtttcatcac

SEQ ID NO: 1502710 - DNA, 25 bp, Homo sapien
atttaattgttcaattcaagcatca

SEQ ID NO: 1502711 - DNA, 25 bp, Homo sapien
tggccccagggaatacctaataata

SEQ ID NO: 1502712 - DNA, 25 bp, Homo sapien
ggtaggagaccaaagttcgcatgtt

SEQ ID NO: 1502713 - DNA, 25 bp, Homo sapien
gaaccgttactctatgataagcccc

SEQ ID NO: 1502714 - DNA, 25 bp, Homo sapien
tagtaagccccaccatttgttagag

SEQ ID NO: 1502715 - DNA, 25 bp, Homo sapien
gttaatctcaaaagcttcaagaacc

SEQ ID NO: 1502716 - DNA, 25 bp, Homo sapien
tgttaatctcaaaagcttcaagaac

SEQ ID NO: 1502717 - DNA, 25 bp, Homo sapien
ttagttacatatctgttcataagtg

SEQ ID NO: 1502718 - DNA, 25 bp, Homo sapien
gttacatatctgttcataagtgaac

SEQ ID NO: 1502719 - DNA, 25 bp, Homo sapien
ctgttcataagtgaactcttcccaa

SEQ ID NO: 1502720 - DNA, 25 bp, Homo sapien
catatctgttcataagtgaactctt

SEQ ID NO: 1502721 - DNA, 25 bp, Homo sapien
tatcctcggtagcaagaactcttcg

SEQ ID NO: 1502722 - DNA, 25 bp, Homo sapien
ttcggaatcgctcctgacctgccgt

SEQ ID NO: 1502723 - DNA, 25 bp, Homo sapien
tcttcgaaccgcttcctcaaaggct

SEQ ID NO: 1502724 - DNA, 25 bp, Homo sapien
caaaataaggatagtcgccgttgtc

SEQ ID NO: 1502725 - DNA, 25 bp, Homo sapien
tattagtagatgatacactgctgca

SEQ ID NO: 1502726 - DNA, 25 bp, Homo sapien
tctccatccccatgttgattttgtg

SEQ ID NO: 1502727 - DNA, 25 bp, Homo sapien
tccaagagtggatgtgtcccttctc

SEQ ID NO: 1502728 - DNA, 25 bp, Homo sapien
tctcccaccaactaatgaagcagca

SEQ ID NO: 1502729 - DNA, 25 bp, Homo sapien
ctggtgaggcccattccttgcgcac

SEQ ID NO: 1502730 - DNA, 25 bp, Homo sapien
ccggtgtggcacctgggagcccaat

SEQ ID NO: 1502731 - DNA, 25 bp, Homo sapien
gccggtgtggcacctgggagcccaa

SEQ ID NO: 1502732 - DNA, 25 bp, Homo sapien
acaagagaccatgccccccagggta

SEQ ID NO: 1502733 - DNA, 25 bp, Homo sapien
cagggtagagatgatgccaggaaga

SEQ ID NO: 1502734 - DNA, 25 bp, Homo sapien
tctcagggccctcaaccttaaacca

SEQ ID NO: 1502735 - DNA, 25 bp, Homo sapien
gcctgggatgaggacatctgtgcac

SEQ ID NO: 1502736 - DNA, 25 bp, Homo sapien
ggccagacaggcctaaactcagggc

SEQ ID NO: 1502737 - DNA, 25 bp, Homo sapien
aggacaggatgtacccaccttggtg

SEQ ID NO: 1502738 - DNA, 25 bp, Homo sapien
tttattgccagtgctgagcggcggc

SEQ ID NO: 1502739 - DNA, 25 bp, Homo sapien
cggtagtgaactcgtctccctgggc

SEQ ID NO: 1502740 - DNA, 25 bp, Homo sapien
ctgggaagcccgaggacagcatgaa

SEQ ID NO: 1502741 - DNA, 25 bp, Homo sapien
aaggatagcaggcagggctacggcc

SEQ ID NO: 1502742 - DNA, 25 bp, Homo sapien
ccgcagcgcaaacgaggcgtcttca

SEQ ID NO: 1502743 - DNA, 25 bp, Homo sapien
cagcgcaaacgaggcgtcttcaaat

SEQ ID NO: 1502744 - DNA, 25 bp, Homo sapien
cgtccgcagcgcaaacgaggcgtct

SEQ ID NO: 1502745 - DNA, 25 bp, Homo sapien
gtccgcagcgcaaacgaggcgtctt

SEQ ID NO: 1502746 - DNA, 25 bp, Homo sapien
ggccggcctagccgccctgccctgc

SEQ ID NO: 1502747 - DNA, 25 bp, Homo sapien
gggagctggccggcctagccgccct

SEQ ID NO: 1502748 - DNA, 25 bp, Homo sapien
gagctggccggcctagccgccctgc

SEQ ID NO: 1502749 - DNA, 25 bp, Homo sapien
ctggccggcctagccgccctgccct

SEQ ID NO: 1502750 - DNA, 25 bp, Homo sapien
ttccttaagggagaatctggcggtc

SEQ ID NO: 1502751 - DNA, 25 bp, Homo sapien
cttaagggagaatctggcggtcgca

SEQ ID NO: 1502752 - DNA, 25 bp, Homo sapien
ccttaagggagaatctggcggtcgc

SEQ ID NO: 1502753 - DNA, 25 bp, Homo sapien
aattccttaagggagaatctggcgg

SEQ ID NO: 1502754 - DNA, 25 bp, Homo sapien
ctttgcgactgaacagaggagcgtg

SEQ ID NO: 1502755 - DNA, 25 bp, Homo sapien
atggctgggccgcatgagtgttcac

SEQ ID NO: 1502756 - DNA, 25 bp, Homo sapien
catgagtgttcacctttgcgactga

SEQ ID NO: 1502757 - DNA, 25 bp, Homo sapien
tcacctttgcgactgaacagaggag

SEQ ID NO: 1502758 - DNA, 25 bp, Homo sapien
tgcctgtgttttgccctggccagtt

SEQ ID NO: 1502759 - DNA, 25 bp, Homo sapien
catttcgaggcctgaagtaaaatac

SEQ ID NO: 1502760 - DNA, 25 bp, Homo sapien
tacctgaatcttgtatgttataccc

SEQ ID NO: 1502761 - DNA, 25 bp, Homo sapien
cacggacatcatttcgaggcctgaa

SEQ ID NO: 1502762 - DNA, 25 bp, Homo sapien
gttatacccttgaccgtcgcctctg

SEQ ID NO: 1502763 - DNA, 25 bp, Homo sapien
ggcggcggcggagcgaggtgatgcg

SEQ ID NO: 1502764 - DNA, 25 bp, Homo sapien
cggcggcggagcgaggtgatgcggg

SEQ ID NO: 1502765 - DNA, 25 bp, Homo sapien
ggcggcggagcgaggtgatgcgggg

SEQ ID NO: 1502766 - DNA, 25 bp, Homo sapien
cggcggagcgaggtgatgcggggac

SEQ ID NO: 1502767 - DNA, 25 bp, Homo sapien
ctttagaacaagctggcaagaactc

SEQ ID NO: 1502768 - DNA, 25 bp, Homo sapien
gcccagttggtcttagggtctgaaa

SEQ ID NO: 1502769 - DNA, 25 bp, Homo sapien
ccaaattgtctaagccaggaggcct

SEQ ID NO: 1502770 - DNA, 25 bp, Homo sapien
tgctgggttcccctgatctgggtcc

SEQ ID NO: 1502771 - DNA, 25 bp, Homo sapien
tatgatgagagattccagcccaagc

SEQ ID NO: 1502772 - DNA, 25 bp, Homo sapien
aagtcccccctgttgtagatttcat

SEQ ID NO: 1502773 - DNA, 25 bp, Homo sapien
ggtgctgccctatttatacctgggt

SEQ ID NO: 1502774 - DNA, 25 bp, Homo sapien
aatcaggatcctaatggtgctgccc

SEQ ID NO: 1502775 - DNA, 25 bp, Homo sapien
gaggaaccccagagagtgatagagc

SEQ ID NO: 1502776 - DNA, 25 bp, Homo sapien
aatccccggcattgatgggatccga

SEQ ID NO: 1502777 - DNA, 25 bp, Homo sapien
tgtgatcatgatgccggtaagaagg

SEQ ID NO: 1502778 - DNA, 25 bp, Homo sapien
aggcccaccgggcactgtgatcatg

SEQ ID NO: 1502779 - DNA, 25 bp, Homo sapien
tgaccctgaacaggcagtaagagag

SEQ ID NO: 1502780 - DNA, 25 bp, Homo sapien
gagaatctcttaaatcctctctgca

SEQ ID NO: 1502781 - DNA, 25 bp, Homo sapien
ctcaattctggactgaccctgaaca

SEQ ID NO: 1502782 - DNA, 25 bp, Homo sapien
aaacatttcttctccgcacctacta

SEQ ID NO: 1502783 - DNA, 25 bp, Homo sapien
ggcagcacctgactctgaccattca

SEQ ID NO: 1502784 - DNA, 25 bp, Homo sapien
gcagcacctgactctgaccattcat

SEQ ID NO: 1502785 - DNA, 25 bp, Homo sapien
gttgatcccctccctggactcgtga

SEQ ID NO: 1502786 - DNA, 25 bp, Homo sapien
ctggactcgtgacctccgccgggca

SEQ ID NO: 1502787 - DNA, 25 bp, Homo sapien
tgagcagccggagatcaacacagtc

SEQ ID NO: 1502788 - DNA, 25 bp, Homo sapien
atgagcagccggagatcaacacagt

SEQ ID NO: 1502789 - DNA, 25 bp, Homo sapien
cctggtagcgcttcttggggtcatg

SEQ ID NO: 1502790 - DNA, 25 bp, Homo sapien
ggccaccgactcatcactgcacacg

SEQ ID NO: 1502791 - DNA, 25 bp, Homo sapien
ctgagacactgggccaccgactcat

SEQ ID NO: 1502792 - DNA, 25 bp, Homo sapien
actgggccaccgactcatcactgca

SEQ ID NO: 1502793 - DNA, 25 bp, Homo sapien
gagacactgggccaccgactcatca

SEQ ID NO: 1502794 - DNA, 25 bp, Homo sapien
tgcaggcccatgacactgctgatca

SEQ ID NO: 1502795 - DNA, 25 bp, Homo sapien
gctgatcaccacgatgtggccctgc

SEQ ID NO: 1502796 - DNA, 25 bp, Homo sapien
cagctccgaaaaagttggtgtcaaa

SEQ ID NO: 1502797 - DNA, 25 bp, Homo sapien
agcacagctttgacgagacggacag

SEQ ID NO: 1502798 - DNA, 25 bp, Homo sapien
cctccagggcgaacttggaagctgc

SEQ ID NO: 1502799 - DNA, 25 bp, Homo sapien
gcatagacatcgttgaagatgacac

SEQ ID NO: 1502800 - DNA, 25 bp, Homo sapien
ctggatagcgaggctttcgaagaat

SEQ ID NO: 1502801 - DNA, 25 bp, Homo sapien
gctgcatagacatcgttgaagatga

SEQ ID NO: 1502802 - DNA, 25 bp, Homo sapien
actgcactcagcttcattgtcttca

SEQ ID NO: 1502803 - DNA, 25 bp, Homo sapien
tcctctccccctttcgatgccacct

SEQ ID NO: 1502804 - DNA, 25 bp, Homo sapien
tctcaaaacgctggacttacaggtg

SEQ ID NO: 1502805 - DNA, 25 bp, Homo sapien
cctttcgatgccacctccccatcac

SEQ ID NO: 1502806 - DNA, 25 bp, Homo sapien
ctgcgccagaagcttcccctcaaac

SEQ ID NO: 1502807 - DNA, 25 bp, Homo sapien
aactcggtgaccacggggcctggct

SEQ ID NO: 1502808 - DNA, 25 bp, Homo sapien
gaagcttcccctcaaactcggtgac

SEQ ID NO: 1502809 - DNA, 25 bp, Homo sapien
cagaagcttcccctcaaactcggtg

SEQ ID NO: 1502810 - DNA, 25 bp, Homo sapien
tgaaccacgtcctgtgggttctgtc

SEQ ID NO: 1502811 - DNA, 25 bp, Homo sapien
tctgtcccacggagcaaaacagctt

SEQ ID NO: 1502812 - DNA, 25 bp, Homo sapien
agatagaggtcccggaagtagtgca

SEQ ID NO: 1502813 - DNA, 25 bp, Homo sapien
tgtgggttctgtcccacggagcaaa

SEQ ID NO: 1502814 - DNA, 25 bp, Homo sapien
tgccagaggaatccacggttttgag

SEQ ID NO: 1502815 - DNA, 25 bp, Homo sapien
tagcggatgttggtctgtcggcgca

SEQ ID NO: 1502816 - DNA, 25 bp, Homo sapien
cgagtcgagctgatgacgttgacaa

SEQ ID NO: 1502817 - DNA, 25 bp, Homo sapien
cggtgggtcgttcgcacatacaggc

SEQ ID NO: 1502818 - DNA, 25 bp, Homo sapien
gcccaggatcatgaagtcacgaggt

SEQ ID NO: 1502819 - DNA, 25 bp, Homo sapien
tcacgaggttgaatgtagcagagtc

SEQ ID NO: 1502820 - DNA, 25 bp, Homo sapien
cacagagctctggtgtatgcatgga

SEQ ID NO: 1502821 - DNA, 25 bp, Homo sapien
ggattctagccatgtctaggcacag

SEQ ID NO: 1502822 - DNA, 25 bp, Homo sapien
tcagacaaggaacctccttttatct

SEQ ID NO: 1502823 - DNA, 25 bp, Homo sapien
caacccaggacttccattcgggatg

SEQ ID NO: 1502824 - DNA, 25 bp, Homo sapien
tccattcgggatgcccaccgaagat

SEQ ID NO: 1502825 - DNA, 25 bp, Homo sapien
ttggtcacagccgtacaacccagga

SEQ ID NO: 1502826 - DNA, 25 bp, Homo sapien
ttcccaaaagaagcagaatccaccc

SEQ ID NO: 1502827 - DNA, 25 bp, Homo sapien
ggcttcccaaaagaagcagaatcca

SEQ ID NO: 1502828 - DNA, 25 bp, Homo sapien
tcagcgtggatgagggggcttccca

SEQ ID NO: 1502829 - DNA, 25 bp, Homo sapien
gctcagcgtggatgagggggcttcc

SEQ ID NO: 1502830 - DNA, 25 bp, Homo sapien
gcctggtccataaagttgtttcctg

SEQ ID NO: 1502831 - DNA, 25 bp, Homo sapien
tggagtctgagtgggcctgaatgtg

SEQ ID NO: 1502832 - DNA, 25 bp, Homo sapien
ggttcaccttgagggtccttgtgag

SEQ ID NO: 1502833 - DNA, 25 bp, Homo sapien
aagtcccacactgtgaggttcacct

SEQ ID NO: 1502834 - DNA, 25 bp, Homo sapien
ggaggtacatcaggctctcgggaac

SEQ ID NO: 1502835 - DNA, 25 bp, Homo sapien
tgggtgcccaagttgcccggatgat

SEQ ID NO: 1502836 - DNA, 25 bp, Homo sapien
tctccatgaatgaggagcccgaggt

SEQ ID NO: 1502837 - DNA, 25 bp, Homo sapien
aagatgtagccagcatgaagagcca

SEQ ID NO: 1502838 - DNA, 25 bp, Homo sapien
accaccttgatgtccagagtgaatg

SEQ ID NO: 1502839 - DNA, 25 bp, Homo sapien
ccctcatcgggaaagaccaccttga

SEQ ID NO: 1502840 - DNA, 25 bp, Homo sapien
ttgtggttcacagtgaacacccggt

SEQ ID NO: 1502841 - DNA, 25 bp, Homo sapien
gttcacagtgaacacccggtagtga

SEQ ID NO: 1502842 - DNA, 25 bp, Homo sapien
catgtaaccccagtgtccaggatcc

SEQ ID NO: 1502843 - DNA, 25 bp, Homo sapien
atgtaaccccagtgtccaggatcca

SEQ ID NO: 1502844 - DNA, 25 bp, Homo sapien
agtgtccaggatccaccaccacccc

SEQ ID NO: 1502845 - DNA, 25 bp, Homo sapien
cccagtgtccaggatccaccaccac

SEQ ID NO: 1502846 - DNA, 25 bp, Homo sapien
ggggtggggctggtgactgccctct

SEQ ID NO: 1502847 - DNA, 25 bp, Homo sapien
ctctgggagggccctggtggctcat

SEQ ID NO: 1502848 - DNA, 25 bp, Homo sapien
ctggtggctcatgcccccaggactt

SEQ ID NO: 1502849 - DNA, 25 bp, Homo sapien
gggctggtgactgccctctgggagg

SEQ ID NO: 1502850 - DNA, 25 bp, Homo sapien
tggccatcagactctggctaatcac

SEQ ID NO: 1502851 - DNA, 25 bp, Homo sapien
ccatcagactctggctaatcacggt

SEQ ID NO: 1502852 - DNA, 25 bp, Homo sapien
gactctggctaatcacggtgattcc

SEQ ID NO: 1502853 - DNA, 25 bp, Homo sapien
ctaatcacggtgattccctttgggt

SEQ ID NO: 1502854 - DNA, 25 bp, Homo sapien
tcacatcaaaggcagcctcgaactt

SEQ ID NO: 1502855 - DNA, 25 bp, Homo sapien
tagctggcttcgatggtccaggtcc

SEQ ID NO: 1502856 - DNA, 25 bp, Homo sapien
tttggtagctggcttcgatggtcca

SEQ ID NO: 1502857 - DNA, 25 bp, Homo sapien
ctgcttgggtgtactttggtagctg

SEQ ID NO: 1502858 - DNA, 25 bp, Homo sapien
gtcaagcccgaagggctgcaacacc

SEQ ID NO: 1502859 - DNA, 25 bp, Homo sapien
cagcacccaacacttagcatccagc

SEQ ID NO: 1502860 - DNA, 25 bp, Homo sapien
tctgtcaagcccgaagggctgcaac

SEQ ID NO: 1502861 - DNA, 25 bp, Homo sapien
gtggctctgtcaagcccgaagggct

SEQ ID NO: 1502862 - DNA, 25 bp, Homo sapien
gagcctggatgtcaacgcccagagc

SEQ ID NO: 1502863 - DNA, 25 bp, Homo sapien
ccagctggacctcaaaagatgggag

SEQ ID NO: 1502864 - DNA, 25 bp, Homo sapien
aagaaagtcttatttgggaccagct

SEQ ID NO: 1502865 - DNA, 25 bp, Homo sapien
gcctggatgtcaacgcccagagcct

SEQ ID NO: 1502866 - DNA, 25 bp, Homo sapien
agccatagcacctggtgcttgtttc

SEQ ID NO: 1502867 - DNA, 25 bp, Homo sapien
tgtttctctgtactcaatctttgtg

SEQ ID NO: 1502868 - DNA, 25 bp, Homo sapien
tttctctgtactcaatctttgtgtc

SEQ ID NO: 1502869 - DNA, 25 bp, Homo sapien
tctttgtgtccctggtcttctggca

SEQ ID NO: 1502870 - DNA, 25 bp, Homo sapien
aactgtgaagtggcagatgagatga

SEQ ID NO: 1502871 - DNA, 25 bp, Homo sapien
tgagatgagatgcagtacaacacca

SEQ ID NO: 1502872 - DNA, 25 bp, Homo sapien
gaagtggcagatgagatgagatgca

SEQ ID NO: 1502873 - DNA, 25 bp, Homo sapien
ggcagatgagatgagatgcagtaca

SEQ ID NO: 1502874 - DNA, 25 bp, Homo sapien
gatggcaaacataacctgtactacc

SEQ ID NO: 1502875 - DNA, 25 bp, Homo sapien
tagagctgcagagatggtctggaca

SEQ ID NO: 1502876 - DNA, 25 bp, Homo sapien
ggtctggacaatctcatgatggcaa

SEQ ID NO: 1502877 - DNA, 25 bp, Homo sapien
tgtactacctcatagactttcagag

SEQ ID NO: 1502878 - DNA, 25 bp, Homo sapien
tgtagcatgttagagctgcaggaat

SEQ ID NO: 1502879 - DNA, 25 bp, Homo sapien
gcaggaatgattcatataatgtcca

SEQ ID NO: 1502880 - DNA, 25 bp, Homo sapien
ggaaactaggtggcctgtgtagcat

SEQ ID NO: 1502881 - DNA, 25 bp, Homo sapien
aggtggacagcattgcctgcacaac

SEQ ID NO: 1502882 - DNA, 25 bp, Homo sapien
cccaaagatgaccaaagcatgtccg

SEQ ID NO: 1502883 - DNA, 25 bp, Homo sapien
tgcagggagctttggatagggatcc

SEQ ID NO: 1502884 - DNA, 25 bp, Homo sapien
ccgtccactggcttgttaaatatat

SEQ ID NO: 1502885 - DNA, 25 bp, Homo sapien
ggagtccaatttcaccccaaagatg

SEQ ID NO: 1502886 - DNA, 25 bp, Homo sapien
ggagacgtggcccaggccttcagag

SEQ ID NO: 1502887 - DNA, 25 bp, Homo sapien
gagggagacgtggcccaggccttca

SEQ ID NO: 1502888 - DNA, 25 bp, Homo sapien
agacgtggcccaggccttcagagat

SEQ ID NO: 1502889 - DNA, 25 bp, Homo sapien
ctggagggagacgtggcccaggcct

SEQ ID NO: 1502890 - DNA, 25 bp, Homo sapien
cctgggccttggaatgcggccatga

SEQ ID NO: 1502891 - DNA, 25 bp, Homo sapien
cttggaatgcggccatgagcgtgtc

SEQ ID NO: 1502892 - DNA, 25 bp, Homo sapien
ttgacaaagattgagcctccaatga

SEQ ID NO: 1502893 - DNA, 25 bp, Homo sapien
gcctccaatgaagtcctctcctggg

SEQ ID NO: 1502894 - DNA, 25 bp, Homo sapien
ttgtatgggctctggatgatcttca

SEQ ID NO: 1502895 - DNA, 25 bp, Homo sapien
ggatgatcttcacccctgaggtctc

SEQ ID NO: 1502896 - DNA, 25 bp, Homo sapien
gaaatactggggtgtcctggtgaac

SEQ ID NO: 1502897 - DNA, 25 bp, Homo sapien
acttgatgttgtatgggctctggat

SEQ ID NO: 1502898 - DNA, 25 bp, Homo sapien
tgcatctgtgttgatggtcagagtg

SEQ ID NO: 1502899 - DNA, 25 bp, Homo sapien
agtggccaacccctcagctgaggtg

SEQ ID NO: 1502900 - DNA, 25 bp, Homo sapien
cagctgaggtgtacactttttggtc

SEQ ID NO: 1502901 - DNA, 25 bp, Homo sapien
gctggggacccatcaggatttgaga

SEQ ID NO: 1502902 - DNA, 25 bp, Homo sapien
tgtgcccaatgtctttacttcgatg

SEQ ID NO: 1502903 - DNA, 25 bp, Homo sapien
gtcatcttggctgaagcctgctcct

SEQ ID NO: 1502904 - DNA, 25 bp, Homo sapien
tcctgatgccttgtgttgaggctca

SEQ ID NO: 1502905 - DNA, 25 bp, Homo sapien
tgacccatcctgagtcaagtaaggc

SEQ ID NO: 1502906 - DNA, 25 bp, Homo sapien
tgtttggcactcacggtctggccct

SEQ ID NO: 1502907 - DNA, 25 bp, Homo sapien
catcaataatggctgatgtgtagac

SEQ ID NO: 1502908 - DNA, 25 bp, Homo sapien
cacatcaataatggctgatgtgtag

SEQ ID NO: 1502909 - DNA, 25 bp, Homo sapien
actgatgtttggcactcacggtctg

SEQ ID NO: 1502910 - DNA, 25 bp, Homo sapien
taaaaggccagaatgcggaaggagg

SEQ ID NO: 1502911 - DNA, 25 bp, Homo sapien
cagccaccaactcagggtcttggct

SEQ ID NO: 1502912 - DNA, 25 bp, Homo sapien
tcaatccatatggaatcagccacca

SEQ ID NO: 1502913 - DNA, 25 bp, Homo sapien
tgtcattcacatcaatccatatgga

SEQ ID NO: 1502914 - DNA, 25 bp, Homo sapien
tggcttctgcatcacctgtcacctt

SEQ ID NO: 1502915 - DNA, 25 bp, Homo sapien
caaagactggaagaatctatcattc

SEQ ID NO: 1502916 - DNA, 25 bp, Homo sapien
gaagaatctatcattcttcaagcca

SEQ ID NO: 1502917 - DNA, 25 bp, Homo sapien
accttcagttcgacttggctgttgg

SEQ ID NO: 1502918 - DNA, 25 bp, Homo sapien
gagtgagcttgtgtttgctgttcaa

SEQ ID NO: 1502919 - DNA, 25 bp, Homo sapien
caagacatagacagccttgtccaca

SEQ ID NO: 1502920 - DNA, 25 bp, Homo sapien
tgtttgctgttcaagacatagacag

SEQ ID NO: 1502921 - DNA, 25 bp, Homo sapien
atgtcatgttcctccaccacattcc

SEQ ID NO: 1502922 - DNA, 25 bp, Homo sapien
tcctgtgcagccaatgtcatgttcc

SEQ ID NO: 1502923 - DNA, 25 bp, Homo sapien
caatgtcatgttcctccaccacatt

SEQ ID NO: 1502924 - DNA, 25 bp, Homo sapien
ttcctcctgtgcagccaatgtcatg

SEQ ID NO: 1502925 - DNA, 25 bp, Homo sapien
cttgccaggctatccattcctgtgc

SEQ ID NO: 1502926 - DNA, 25 bp, Homo sapien
cctgagcttgccaggctatccattc

SEQ ID NO: 1502927 - DNA, 25 bp, Homo sapien
cattcctgtgctgattttcaggtcc

SEQ ID NO: 1502928 - DNA, 25 bp, Homo sapien
tgagcttgccaggctatccattcct

SEQ ID NO: 1502929 - DNA, 25 bp, Homo sapien
ccatttctgccctcctcttgcccca

SEQ ID NO: 1502930 - DNA, 25 bp, Homo sapien
catttctgccctcctcttgccccaa

SEQ ID NO: 1502931 - DNA, 25 bp, Homo sapien
atttctgccctcctcttgccccaac

SEQ ID NO: 1502932 - DNA, 25 bp, Homo sapien
tcttcagggagcggcgatggcggct

SEQ ID NO: 1502933 - DNA, 25 bp, Homo sapien
gcctcttcagggagcggcgatggcg

SEQ ID NO: 1502934 - DNA, 25 bp, Homo sapien
ttcagggagcggcgatggcggctgg

SEQ ID NO: 1502935 - DNA, 25 bp, Homo sapien
cctcttcagggagcggcgatggcgg

SEQ ID NO: 1502936 - DNA, 25 bp, Homo sapien
gatgcaattgatcctctcgagcctc

SEQ ID NO: 1502937 - DNA, 25 bp, Homo sapien
accatggcggacatgccaggtcctc

SEQ ID NO: 1502938 - DNA, 25 bp, Homo sapien
tggaccatggcggacatgccaggtc

SEQ ID NO: 1502939 - DNA, 25 bp, Homo sapien
ttgtccacagatgcaattgatcctc

SEQ ID NO: 1502940 - DNA, 25 bp, Homo sapien
cagagccaactctcggggaacaagg

SEQ ID NO: 1502941 - DNA, 25 bp, Homo sapien
cccgatttactctttggcagagtga

SEQ ID NO: 1502942 - DNA, 25 bp, Homo sapien
tctttggcagagtgaacttcctcca

SEQ ID NO: 1502943 - DNA, 25 bp, Homo sapien
acaaggtccgcacaggcatgtcatc

SEQ ID NO: 1502944 - DNA, 25 bp, Homo sapien
gccacgtggtgatggaatctggcac

SEQ ID NO: 1502945 - DNA, 25 bp, Homo sapien
cgtggtgatggaatctggcaccttc

SEQ ID NO: 1502946 - DNA, 25 bp, Homo sapien
ggtgatggaatctggcaccttcaca

SEQ ID NO: 1502947 - DNA, 25 bp, Homo sapien
ctgccacgtggtgatggaatctggc

SEQ ID NO: 1502948 - DNA, 25 bp, Homo sapien
cttggcactgggcttgctgcggctc

SEQ ID NO: 1502949 - DNA, 25 bp, Homo sapien
tggcactgggcttgctgcggctcac

SEQ ID NO: 1502950 - DNA, 25 bp, Homo sapien
ccccattcccttggcactgggcttg

SEQ ID NO: 1502951 - DNA, 25 bp, Homo sapien
ccattcccttggcactgggcttgct

SEQ ID NO: 1502952 - DNA, 25 bp, Homo sapien
cgatccctgaaattgtacaacatgg

SEQ ID NO: 1502953 - DNA, 25 bp, Homo sapien
ggacctgctcattcctgatcacgga

SEQ ID NO: 1502954 - DNA, 25 bp, Homo sapien
tacaacatggcttggatctggacct

SEQ ID NO: 1502955 - DNA, 25 bp, Homo sapien
tgatcacggaggagggcaacttaag

SEQ ID NO: 1502956 - DNA, 25 bp, Homo sapien
agaggttttggcaggaagttgaggg

SEQ ID NO: 1502957 - DNA, 25 bp, Homo sapien
tagcagaggttttggcaggaagttg

SEQ ID NO: 1502958 - DNA, 25 bp, Homo sapien
gttttggcaggaagttgagggcttg

SEQ ID NO: 1502959 - DNA, 25 bp, Homo sapien
ttttggcaggaagttgagggcttgg

SEQ ID NO: 1502960 - DNA, 25 bp, Homo sapien
tccttgtgggggaactccactcgga

SEQ ID NO: 1502961 - DNA, 25 bp, Homo sapien
gtcctggaccccgtagcccacagcc

SEQ ID NO: 1502962 - DNA, 25 bp, Homo sapien
gacgcactgcacagtgtctccttgt

SEQ ID NO: 1502963 - DNA, 25 bp, Homo sapien
gtgctcctggctttgacgcactgca

SEQ ID NO: 1502964 - DNA, 25 bp, Homo sapien
gcagctagtgagttgggagtgccca

SEQ ID NO: 1502965 - DNA, 25 bp, Homo sapien
cagcagctagtgagttgggagtgcc

SEQ ID NO: 1502966 - DNA, 25 bp, Homo sapien
agctagtgagttgggagtgcccatt

SEQ ID NO: 1502967 - DNA, 25 bp, Homo sapien
ctagtgagttgggagtgcccattac

SEQ ID NO: 1502968 - DNA, 25 bp, Homo sapien
ctggtggaagccccgctgtctgcac

SEQ ID NO: 1502969 - DNA, 25 bp, Homo sapien
tataggacgtttgctggatctgaac

SEQ ID NO: 1502970 - DNA, 25 bp, Homo sapien
tgctataggacgtttgctggatctg

SEQ ID NO: 1502971 - DNA, 25 bp, Homo sapien
gacgatgctataggacgtttgctgg

SEQ ID NO: 1502972 - DNA, 25 bp, Homo sapien
taggacgtttgctggatctgaaccc

SEQ ID NO: 1502973 - DNA, 25 bp, Homo sapien
ctgaataaccacaaccttctgtgac

SEQ ID NO: 1502974 - DNA, 25 bp, Homo sapien
gaataaccacaaccttctgtgacaa

SEQ ID NO: 1502975 - DNA, 25 bp, Homo sapien
taaccacaaccttctgtgacaagtg

SEQ ID NO: 1502976 - DNA, 25 bp, Homo sapien
accacaaccttctgtgacaagtggg

SEQ ID NO: 1502977 - DNA, 25 bp, Homo sapien
cttggcaccagttttgtctgggtct

SEQ ID NO: 1502978 - DNA, 25 bp, Homo sapien
tgataaacacttccgcctccgtgtc

SEQ ID NO: 1502979 - DNA, 25 bp, Homo sapien
cgtgtcgggtaccatgttcaagaac

SEQ ID NO: 1502980 - DNA, 25 bp, Homo sapien
ttccgcctccgtgtcgggtaccatg

SEQ ID NO: 1502981 - DNA, 25 bp, Homo sapien
ctgataaacacttccgcctccgtgt

SEQ ID NO: 1502982 - DNA, 25 bp, Homo sapien
tgtcaggtgggtgagttgggtcacc

SEQ ID NO: 1502983 - DNA, 25 bp, Homo sapien
ctgtcaggtgggtgagttgggtcac

SEQ ID NO: 1502984 - DNA, 25 bp, Homo sapien
caaatagcgggacaggatgatgacg

SEQ ID NO: 1502985 - DNA, 25 bp, Homo sapien
cacaattgtctcaccaaggatgtca

SEQ ID NO: 1502986 - DNA, 25 bp, Homo sapien
tgacaatattcttcatcacctggtc

SEQ ID NO: 1502987 - DNA, 25 bp, Homo sapien
cccactggccggtggtatccaaata

SEQ ID NO: 1502988 - DNA, 25 bp, Homo sapien
gccccaggagggtccccgctctcac

SEQ ID NO: 1502989 - DNA, 25 bp, Homo sapien
ggccccaggagggtccccgctctca

SEQ ID NO: 1502990 - DNA, 25 bp, Homo sapien
tatcaggaataacctggcgggcagg

SEQ ID NO: 1502991 - DNA, 25 bp, Homo sapien
tcaggaataacctggcgggcaggga

SEQ ID NO: 1502992 - DNA, 25 bp, Homo sapien
atcaggaataacctggcgggcaggg

SEQ ID NO: 1502993 - DNA, 25 bp, Homo sapien
tggtaggtgccgtctgaactccggt

SEQ ID NO: 1502994 - DNA, 25 bp, Homo sapien
gccgtctgaactccggtgggtcagc

SEQ ID NO: 1502995 - DNA, 25 bp, Homo sapien
gtgccgtctgaactccggtgggtca

SEQ ID NO: 1502996 - DNA, 25 bp, Homo sapien
gtgtggtaggtgccgtctgaactcc

SEQ ID NO: 1502997 - DNA, 25 bp, Homo sapien
tgtcaggagagggcaaaagtgacac

SEQ ID NO: 1502998 - DNA, 25 bp, Homo sapien
ctgtcaggagagggcaaaagtgaca

SEQ ID NO: 1502999 - DNA, 25 bp, Homo sapien
gacgcggaacacatagcttgtgagc

SEQ ID NO: 1503000 - DNA, 25 bp, Homo sapien
taagcacttgggtcgtcatcataga

SEQ ID NO: 1503001 - DNA, 25 bp, Homo sapien
tcatcatagagtaggccagggcaaa

SEQ ID NO: 1503002 - DNA, 25 bp, Homo sapien
cctgtcgatgatgatccagttggcc

SEQ ID NO: 1503003 - DNA, 25 bp, Homo sapien
gtgagggatacatcctcctcggagc

SEQ ID NO: 1503004 - DNA, 25 bp, Homo sapien
tgtgagggatacatcctcctcggag

SEQ ID NO: 1503005 - DNA, 25 bp, Homo sapien
ctgtgagggatacatcctcctcgga

SEQ ID NO: 1503006 - DNA, 25 bp, Homo sapien
cctgccctcctctctggggtcctac

SEQ ID NO: 1503007 - DNA, 25 bp, Homo sapien
tcctgccctcctctctggggtccta

SEQ ID NO: 1503008 - DNA, 25 bp, Homo sapien
gatcctgccctcctctctggggtcc

SEQ ID NO: 1503009 - DNA, 25 bp, Homo sapien
agatcctgccctcctctctggggtc

SEQ ID NO: 1503010 - DNA, 25 bp, Homo sapien
caggcagtcgttggcttgggagctg

SEQ ID NO: 1503011 - DNA, 25 bp, Homo sapien
gaatgtcgggaagttttctctccag

SEQ ID NO: 1503012 - DNA, 25 bp, Homo sapien
cagtgcataggaggctatggctacg

SEQ ID NO: 1503013 - DNA, 25 bp, Homo sapien
tatggctacggcaaaggttgtctga

SEQ ID NO: 1503014 - DNA, 25 bp, Homo sapien
ctccccactccatgactgaggttga

SEQ ID NO: 1503015 - DNA, 25 bp, Homo sapien
tgactgaggttgattaagaagcatc

SEQ ID NO: 1503016 - DNA, 25 bp, Homo sapien
tgaggttgattaagaagcatcccac

SEQ ID NO: 1503017 - DNA, 25 bp, Homo sapien
tccccactccatgactgaggttgat

SEQ ID NO: 1503018 - DNA, 25 bp, Homo sapien
gaaacgtggacatccaattttcaga

SEQ ID NO: 1503019 - DNA, 25 bp, Homo sapien
tctattttccgatcgggaaattgag

SEQ ID NO: 1503020 - DNA, 25 bp, Homo sapien
ctttgctgaggaaacgtggacatcc

SEQ ID NO: 1503021 - DNA, 25 bp, Homo sapien
actctattttccgatcgggaaattg

SEQ ID NO: 1503022 - DNA, 25 bp, Homo sapien
ccacttggctatggcgtgtgtctca

SEQ ID NO: 1503023 - DNA, 25 bp, Homo sapien
ataggctgtggcctcaatggtgtac

SEQ ID NO: 1503024 - DNA, 25 bp, Homo sapien
tcctgcttctctagtagccacttgg

SEQ ID NO: 1503025 - DNA, 25 bp, Homo sapien
gtgtgtctcattgtaccggcccagc

SEQ ID NO: 1503026 - DNA, 25 bp, Homo sapien
acagcttcgcggaagcgggtcagag

SEQ ID NO: 1503027 - DNA, 25 bp, Homo sapien
gctgttggtaggcattgctgtgatc

SEQ ID NO: 1503028 - DNA, 25 bp, Homo sapien
tgctgtgatcaatgtaccaattcac

SEQ ID NO: 1503029 - DNA, 25 bp, Homo sapien
atctggacgtggagatcctggatgc

SEQ ID NO: 1503030 - DNA, 25 bp, Homo sapien
tgaacactcaccagggcctcggttt

SEQ ID NO: 1503031 - DNA, 25 bp, Homo sapien
ctgaacactcaccagggcctcggtt

SEQ ID NO: 1503032 - DNA, 25 bp, Homo sapien
aagtgagggtcaagtgtagggggat

SEQ ID NO: 1503033 - DNA, 25 bp, Homo sapien
cagcaaagtgagggtcaagtgtagg

SEQ ID NO: 1503034 - DNA, 25 bp, Homo sapien
agggtcaagtgtagggggatgtgga

SEQ ID NO: 1503035 - DNA, 25 bp, Homo sapien
agcaaagtgagggtcaagtgtaggg

SEQ ID NO: 1503036 - DNA, 25 bp, Homo sapien
gcctctcccgttgccactggctttg

SEQ ID NO: 1503037 - DNA, 25 bp, Homo sapien
tctctaggtcgtcctgggcaaggaa

SEQ ID NO: 1503038 - DNA, 25 bp, Homo sapien
tttgatctctaggtcgtcctgggca

SEQ ID NO: 1503039 - DNA, 25 bp, Homo sapien
gatctctaggtcgtcctgggcaagg

SEQ ID NO: 1503040 - DNA, 25 bp, Homo sapien
cctctgcaccccaatccttgacttc

SEQ ID NO: 1503041 - DNA, 25 bp, Homo sapien
tactgcaagattgcccccaccgacc

SEQ ID NO: 1503042 - DNA, 25 bp, Homo sapien
tcctctgcaccccaatccttgactt

SEQ ID NO: 1503043 - DNA, 25 bp, Homo sapien
atttactgcaagattgcccccaccg

SEQ ID NO: 1503044 - DNA, 25 bp, Homo sapien
gttgcagttgtcctcccgggactct

SEQ ID NO: 1503045 - DNA, 25 bp, Homo sapien
aggttgcagttgtcctcccgggact

SEQ ID NO: 1503046 - DNA, 25 bp, Homo sapien
gactctggggacttgtgatacattg

SEQ ID NO: 1503047 - DNA, 25 bp, Homo sapien
tgcagttgtcctcccgggactctgg

SEQ ID NO: 1503048 - DNA, 25 bp, Homo sapien
tgtggagagtcgcattcaggtggta

SEQ ID NO: 1503049 - DNA, 25 bp, Homo sapien
tttccatccggagccgaaaagtctc

SEQ ID NO: 1503050 - DNA, 25 bp, Homo sapien
cttgtttccatccggagccgaaaag

SEQ ID NO: 1503051 - DNA, 25 bp, Homo sapien
tgtttccatccggagccgaaaagtc

SEQ ID NO: 1503052 - DNA, 25 bp, Homo sapien
catccggagccgaaaagtctcacct

SEQ ID NO: 1503053 - DNA, 25 bp, Homo sapien
catctgagtcatggagcatgtcagc

SEQ ID NO: 1503054 - DNA, 25 bp, Homo sapien
agcgcagtagcctccttccaggtct

SEQ ID NO: 1503055 - DNA, 25 bp, Homo sapien
tctctggcttggaccagcgcagtag

SEQ ID NO: 1503056 - DNA, 25 bp, Homo sapien
tgtctctggcttggaccagcgcagt

SEQ ID NO: 1503057 - DNA, 25 bp, Homo sapien
gctgttgtctctggcttggaccagc

SEQ ID NO: 1503058 - DNA, 25 bp, Homo sapien
acagccccagtctttccccactatc

SEQ ID NO: 1503059 - DNA, 25 bp, Homo sapien
agttcacagccccagtctttcccca

SEQ ID NO: 1503060 - DNA, 25 bp, Homo sapien
cagtctttccccactatcctcccgc

SEQ ID NO: 1503061 - DNA, 25 bp, Homo sapien
ctggaagttcacagccccagtcttt

SEQ ID NO: 1503062 - DNA, 25 bp, Homo sapien
gcagggagacctccatgatagtcat

SEQ ID NO: 1503063 - DNA, 25 bp, Homo sapien
tagaagcccgtgagcagggagacct

SEQ ID NO: 1503064 - DNA, 25 bp, Homo sapien
ctgtttgaggtcatcctggttgggg

SEQ ID NO: 1503065 - DNA, 25 bp, Homo sapien
ttggggtagaagcccgtgagcaggg

SEQ ID NO: 1503066 - DNA, 25 bp, Homo sapien
gaaaggcgtacctctccacatcact

SEQ ID NO: 1503067 - DNA, 25 bp, Homo sapien
tttgtactgaaaggcgtacctctcc

SEQ ID NO: 1503068 - DNA, 25 bp, Homo sapien
ttttccaggtagaggacaacagtgc

SEQ ID NO: 1503069 - DNA, 25 bp, Homo sapien
agtgctgtcgctggtacttgtcttg

SEQ ID NO: 1503070 - DNA, 25 bp, Homo sapien
gcggcctgcaggaactccgcctgca

SEQ ID NO: 1503071 - DNA, 25 bp, Homo sapien
gcaccgtgttcttctcatgggagag

SEQ ID NO: 1503072 - DNA, 25 bp, Homo sapien
aaggctcgtagtagtcgtagatggt

SEQ ID NO: 1503073 - DNA, 25 bp, Homo sapien
cgtagtagtcgtagatggtgaccag

SEQ ID NO: 1503074 - DNA, 25 bp, Homo sapien
cagatgtctttgtggcagatctttc

SEQ ID NO: 1503075 - DNA, 25 bp, Homo sapien
gcagatgtctttgtggcagatcttt

SEQ ID NO: 1503076 - DNA, 25 bp, Homo sapien
tgcagatgtctttgtggcagatctt

SEQ ID NO: 1503077 - DNA, 25 bp, Homo sapien
agatgtctttgtggcagatctttct

SEQ ID NO: 1503078 - DNA, 25 bp, Homo sapien
tgcctcacatgctgttgtctggagc

SEQ ID NO: 1503079 - DNA, 25 bp, Homo sapien
gatgtcttcgagctgcgtgttgtaa

SEQ ID NO: 1503080 - DNA, 25 bp, Homo sapien
tgttgtaatagacgtaagggttgga

SEQ ID NO: 1503081 - DNA, 25 bp, Homo sapien
cgagctgcgtgttgtaatagacgta

SEQ ID NO: 1503082 - DNA, 25 bp, Homo sapien
cttaatgatgtcttcgagctgcgtg

SEQ ID NO: 1503083 - DNA, 25 bp, Homo sapien
cctcccacacaatgggacccccagg

SEQ ID NO: 1503084 - DNA, 25 bp, Homo sapien
ggtgaccccacactgggattccttc

SEQ ID NO: 1503085 - DNA, 25 bp, Homo sapien
cccagggtgaccccacactgggatt

SEQ ID NO: 1503086 - DNA, 25 bp, Homo sapien
ctcccacacaatgggacccccaggg

SEQ ID NO: 1503087 - DNA, 25 bp, Homo sapien
ctggagaaaacccggtgtgtgcaca

SEQ ID NO: 1503088 - DNA, 25 bp, Homo sapien
tggagaaaacccggtgtgtgcacat

SEQ ID NO: 1503089 - DNA, 25 bp, Homo sapien
gtctggcccatgatgaggtacgatt

SEQ ID NO: 1503090 - DNA, 25 bp, Homo sapien
acgattcctgttcttgcaaccccag

SEQ ID NO: 1503091 - DNA, 25 bp, Homo sapien
gcaaccccagggagtcatggcaagt

SEQ ID NO: 1503092 - DNA, 25 bp, Homo sapien
cccagggagtcatggcaagtggcat

SEQ ID NO: 1503093 - DNA, 25 bp, Homo sapien
tcagatttgattctccacaggtctg

SEQ ID NO: 1503094 - DNA, 25 bp, Homo sapien
cagatttgattctccacaggtctga

SEQ ID NO: 1503095 - DNA, 25 bp, Homo sapien
agatttgattctccacaggtctgac

SEQ ID NO: 1503096 - DNA, 25 bp, Homo sapien
gtgggttacaagaagcaagaaggtg

SEQ ID NO: 1503097 - DNA, 25 bp, Homo sapien
ccatctgctggccaaaggatgagga

SEQ ID NO: 1503098 - DNA, 25 bp, Homo sapien
gcagccgtgggtgcgcatatattcc

SEQ ID NO: 1503099 - DNA, 25 bp, Homo sapien
tgaggaacgtctccttgcccagaac

SEQ ID NO: 1503100 - DNA, 25 bp, Homo sapien
tccagttggtcccgcaattctttct

SEQ ID NO: 1503101 - DNA, 25 bp, Homo sapien
ggttaaacccagtggcccagagctg

SEQ ID NO: 1503102 - DNA, 25 bp, Homo sapien
tgacacctccctgaaagcagaagag

SEQ ID NO: 1503103 - DNA, 25 bp, Homo sapien
gagctgcctgatgacacctccctga

SEQ ID NO: 1503104 - DNA, 25 bp, Homo sapien
acacctccctgaaagcagaagaggc

SEQ ID NO: 1503105 - DNA, 25 bp, Homo sapien
cgggtctgcaccctgcggcggagcg

SEQ ID NO: 1503106 - DNA, 25 bp, Homo sapien
gcggagcgcgcagacctcggacggg

SEQ ID NO: 1503107 - DNA, 25 bp, Homo sapien
cggcccctgtttcgctttcgattca

SEQ ID NO: 1503108 - DNA, 25 bp, Homo sapien
ggcctctgcagtcggtcacatgtcc

SEQ ID NO: 1503109 - DNA, 25 bp, Homo sapien
cgagggtccgcactgcgcggctcag

SEQ ID NO: 1503110 - DNA, 25 bp, Homo sapien
ctacctgggtgcgcccgtcggtcca

SEQ ID NO: 1503111 - DNA, 25 bp, Homo sapien
tgcgcccgtcggtccagcagccgcg

SEQ ID NO: 1503112 - DNA, 25 bp, Homo sapien
gcgcagttccccgcgagggtccgca

SEQ ID NO: 1503113 - DNA, 25 bp, Homo sapien
ccggcccagccgtagccatcgctta

SEQ ID NO: 1503114 - DNA, 25 bp, Homo sapien
cggcccagccgtagccatcgcttac

SEQ ID NO: 1503115 - DNA, 25 bp, Homo sapien
cccggcccagccgtagccatcgctt

SEQ ID NO: 1503116 - DNA, 25 bp, Homo sapien
gaaacgggatcatccctcccccatc

SEQ ID NO: 1503117 - DNA, 25 bp, Homo sapien
aaacgggatcatccctcccccatct

SEQ ID NO: 1503118 - DNA, 25 bp, Homo sapien
acgggatcatccctcccccatctct

SEQ ID NO: 1503119 - DNA, 25 bp, Homo sapien
gggatcatccctcccccatctctag

SEQ ID NO: 1503120 - DNA, 25 bp, Homo sapien
ggaggataccttcccatgaaacttc

SEQ ID NO: 1503121 - DNA, 25 bp, Homo sapien
ggaggcgccggacgctcttctccag

SEQ ID NO: 1503122 - DNA, 25 bp, Homo sapien
atggagcgccccactcccgtgtggt

SEQ ID NO: 1503123 - DNA, 25 bp, Homo sapien
gctgccgaatttcctcatcagagcc

SEQ ID NO: 1503124 - DNA, 25 bp, Homo sapien
gggcatccagatcgttacttagttc

SEQ ID NO: 1503125 - DNA, 25 bp, Homo sapien
ctgggcatccagatcgttacttagt

SEQ ID NO: 1503126 - DNA, 25 bp, Homo sapien
atccagatcgttacttagttcttgg

SEQ ID NO: 1503127 - DNA, 25 bp, Homo sapien
ggcatccagatcgttacttagttct

SEQ ID NO: 1503128 - DNA, 25 bp, Homo sapien
ggcaggctaaatccacagcgttccc

SEQ ID NO: 1503129 - DNA, 25 bp, Homo sapien
agaagcaaagtagccatgatgcacc

SEQ ID NO: 1503130 - DNA, 25 bp, Homo sapien
gcctattatactctttaacagccct

SEQ ID NO: 1503131 - DNA, 25 bp, Homo sapien
gccctacactaagcctttcaggcag

SEQ ID NO: 1503132 - DNA, 25 bp, Homo sapien
aggtggccagggttcaaatcgcagc

SEQ ID NO: 1503133 - DNA, 25 bp, Homo sapien
caggtggccagggttcaaatcgcag

SEQ ID NO: 1503134 - DNA, 25 bp, Homo sapien
ccaggtggccagggttcaaatcgca

SEQ ID NO: 1503135 - DNA, 25 bp, Homo sapien
ggtggccagggttcaaatcgcagct

SEQ ID NO: 1503136 - DNA, 25 bp, Homo sapien
gggacttgggcaagccactccctgc

SEQ ID NO: 1503137 - DNA, 25 bp, Homo sapien
gctgtatcacttccagctgtgggga

SEQ ID NO: 1503138 - DNA, 25 bp, Homo sapien
caaatcccagctgtatcacttccag

SEQ ID NO: 1503139 - DNA, 25 bp, Homo sapien
tgggagagagatgtgggttcaaatc

SEQ ID NO: 1503140 - DNA, 25 bp, Homo sapien
atatcgcccctttgaggccacgttg

SEQ ID NO: 1503141 - DNA, 25 bp, Homo sapien
cttgttgatgttgtgacatatcgcc

SEQ ID NO: 1503142 - DNA, 25 bp, Homo sapien
gttgtgacatatcgcccctttgagg

SEQ ID NO: 1503143 - DNA, 25 bp, Homo sapien
gatgttgtgacatatcgcccctttg

SEQ ID NO: 1503144 - DNA, 25 bp, Homo sapien
cagagcaccactcacttattgagag

SEQ ID NO: 1503145 - DNA, 25 bp, Homo sapien
cggccgcaatgagtagggtgcccct

SEQ ID NO: 1503146 - DNA, 25 bp, Homo sapien
ggtgtgtggcctcagttgtcctcat

SEQ ID NO: 1503147 - DNA, 25 bp, Homo sapien
gggtgcccctaactcgccagaagct

SEQ ID NO: 1503148 - DNA, 25 bp, Homo sapien
ctgaatgtcccggtcctgcttcata

SEQ ID NO: 1503149 - DNA, 25 bp, Homo sapien
aatgtcccggtcctgcttcatatct

SEQ ID NO: 1503150 - DNA, 25 bp, Homo sapien
gaatgtcccggtcctgcttcatatc

SEQ ID NO: 1503151 - DNA, 25 bp, Homo sapien
tgaatgtcccggtcctgcttcatat

SEQ ID NO: 1503152 - DNA, 25 bp, Homo sapien
gccccagtgaatatctcccctcctg

SEQ ID NO: 1503153 - DNA, 25 bp, Homo sapien
atcccaagccctagccaccaactca

SEQ ID NO: 1503154 - DNA, 25 bp, Homo sapien
tcctctccctacagacgagtcctct

SEQ ID NO: 1503155 - DNA, 25 bp, Homo sapien
ccttctgcaccaacataagcatcag

SEQ ID NO: 1503156 - DNA, 25 bp, Homo sapien
cgtaggttggcttctgtcagtggca

SEQ ID NO: 1503157 - DNA, 25 bp, Homo sapien
tgccggtccacagcagggataaggt

SEQ ID NO: 1503158 - DNA, 25 bp, Homo sapien
taaggtcgtcctgggcacgttgaaa

SEQ ID NO: 1503159 - DNA, 25 bp, Homo sapien
cacgttgaaacatgcgtaggttggc

SEQ ID NO: 1503160 - DNA, 25 bp, Homo sapien
gccaccagacgtggtcgcaggagga

SEQ ID NO: 1503161 - DNA, 25 bp, Homo sapien
gcacgcggcgccaccagacgtggtc

SEQ ID NO: 1503162 - DNA, 25 bp, Homo sapien
gcgccaccagacgtggtcgcaggag

SEQ ID NO: 1503163 - DNA, 25 bp, Homo sapien
gcggcgccaccagacgtggtcgcag

SEQ ID NO: 1503164 - DNA, 25 bp, Homo sapien
tcgggacagtcaaagtcgaggttaa

SEQ ID NO: 1503165 - DNA, 25 bp, Homo sapien
ccttaggtcagaggtacagtcactg

SEQ ID NO: 1503166 - DNA, 25 bp, Homo sapien
tgggatcagagatcaaggctgagct

SEQ ID NO: 1503167 - DNA, 25 bp, Homo sapien
gtaaggaggtattgggcttctcaca

SEQ ID NO: 1503168 - DNA, 25 bp, Homo sapien
gctggcactggctcgtagcgcttcc

SEQ ID NO: 1503169 - DNA, 25 bp, Homo sapien
cttccggcatttccggcaccgggat

SEQ ID NO: 1503170 - DNA, 25 bp, Homo sapien
tgtgccgacacttcgggcagtggaa

SEQ ID NO: 1503171 - DNA, 25 bp, Homo sapien
ggaagttgtgccgacacttcgggca

SEQ ID NO: 1503172 - DNA, 25 bp, Homo sapien
tgtgagggtccgagggcgaggctgg

SEQ ID NO: 1503173 - DNA, 25 bp, Homo sapien
ggacggggaccccatctgtgcccag

SEQ ID NO: 1503174 - DNA, 25 bp, Homo sapien
tggatacacggggaagccgcacccg

SEQ ID NO: 1503175 - DNA, 25 bp, Homo sapien
ccagcgcggggggaggatccgtgtt

SEQ ID NO: 1503176 - DNA, 25 bp, Homo sapien
aagccgcacccgtagcagggggacg

SEQ ID NO: 1503177 - DNA, 25 bp, Homo sapien
cggttgtagcagtcggcagctgagc

SEQ ID NO: 1503178 - DNA, 25 bp, Homo sapien
tcgccggttgtagcagtcggcagct

SEQ ID NO: 1503179 - DNA, 25 bp, Homo sapien
ctcgccggttgtagcagtcggcagc

SEQ ID NO: 1503180 - DNA, 25 bp, Homo sapien
gtagcagtcggcagctgagcaggag

SEQ ID NO: 1503181 - DNA, 25 bp, Homo sapien
gggacaaagactgtccaggctgttg

SEQ ID NO: 1503182 - DNA, 25 bp, Homo sapien
ggcacagaaggggacaaagactgtc

SEQ ID NO: 1503183 - DNA, 25 bp, Homo sapien
agacaaagtggactgagtggagatt

SEQ ID NO: 1503184 - DNA, 25 bp, Homo sapien
gagacaaagtggactgagtggagat

SEQ ID NO: 1503185 - DNA, 25 bp, Homo sapien
tggaggccatgtggaagcagtggct

SEQ ID NO: 1503186 - DNA, 25 bp, Homo sapien
ggccatgtggaagcagtggctgctg

SEQ ID NO: 1503187 - DNA, 25 bp, Homo sapien
gaggccatgtggaagcagtggctgc

SEQ ID NO: 1503188 - DNA, 25 bp, Homo sapien
tcatggaggccatgtggaagcagtg

SEQ ID NO: 1503189 - DNA, 25 bp, Homo sapien
tgggcaagaccacggagactggggg

SEQ ID NO: 1503190 - DNA, 25 bp, Homo sapien
tgggggtcacctgagattacagggg

SEQ ID NO: 1503191 - DNA, 25 bp, Homo sapien
ggggtgaaacctcagagcctcctgg

SEQ ID NO: 1503192 - DNA, 25 bp, Homo sapien
ctggggtgaaacctcagagcctcct

SEQ ID NO: 1503193 - DNA, 25 bp, Homo sapien
cggggaccagcacaactggacattc

SEQ ID NO: 1503194 - DNA, 25 bp, Homo sapien
gaccagcacaactggacattcaggg

SEQ ID NO: 1503195 - DNA, 25 bp, Homo sapien
gagaccaccagatacggggaccagc

SEQ ID NO: 1503196 - DNA, 25 bp, Homo sapien
ctgagaccaccagatacggggacca

SEQ ID NO: 1503197 - DNA, 25 bp, Homo sapien
acatggggctggaggtcccatgaga

SEQ ID NO: 1503198 - DNA, 25 bp, Homo sapien
ggagaggtgctgcagacatggggct

SEQ ID NO: 1503199 - DNA, 25 bp, Homo sapien
gctggaggtcccatgagagtctggg

SEQ ID NO: 1503200 - DNA, 25 bp, Homo sapien
tggggctggaggtcccatgagagtc

SEQ ID NO: 1503201 - DNA, 25 bp, Homo sapien
ccacagtggagccactgctaatgtg

SEQ ID NO: 1503202 - DNA, 25 bp, Homo sapien
gcttccggctcttggggtgagcaca

SEQ ID NO: 1503203 - DNA, 25 bp, Homo sapien
aatgtgagggttgctggggtggagc

SEQ ID NO: 1503204 - DNA, 25 bp, Homo sapien
cagtggagccactgctaatgtgagg

SEQ ID NO: 1503205 - DNA, 25 bp, Homo sapien
tccaggatgaggttgtccaggtctt

SEQ ID NO: 1503206 - DNA, 25 bp, Homo sapien
cttcaggtcctccaggatgaggttg

SEQ ID NO: 1503207 - DNA, 25 bp, Homo sapien
caggatgaggttgtccaggtcttcc

SEQ ID NO: 1503208 - DNA, 25 bp, Homo sapien
cactccctgggcccgccctcctcgt

SEQ ID NO: 1503209 - DNA, 25 bp, Homo sapien
tccccaaggtcattcatatctcggt

SEQ ID NO: 1503210 - DNA, 25 bp, Homo sapien
tctggtttgtatctgcacctggcag

SEQ ID NO: 1503211 - DNA, 25 bp, Homo sapien
gaccctgggcgctgaaaatgggacc

SEQ ID NO: 1503212 - DNA, 25 bp, Homo sapien
gcaggagcccaagttgttctggcca

SEQ ID NO: 1503213 - DNA, 25 bp, Homo sapien
ggtaactgtgccctgtaccagcggg

SEQ ID NO: 1503214 - DNA, 25 bp, Homo sapien
ctaccgaagccgctaccaggatggt

SEQ ID NO: 1503215 - DNA, 25 bp, Homo sapien
aagcaagcttttattccgtcaagag

SEQ ID NO: 1503216 - DNA, 25 bp, Homo sapien
aacctcaacggtgtgtggcaccacg

SEQ ID NO: 1503217 - DNA, 25 bp, Homo sapien
aatgagggtacatacagaatccagc

SEQ ID NO: 1503218 - DNA, 25 bp, Homo sapien
tatgtgcccatatgtgtgtgacagc

SEQ ID NO: 1503219 - DNA, 25 bp, Homo sapien
ggagagtttagagccaagccctaca

SEQ ID NO: 1503220 - DNA, 25 bp, Homo sapien
tccagctcaggttgtaaggatcaaa

SEQ ID NO: 1503221 - DNA, 25 bp, Homo sapien
tcacttccggcgcctgagagccggc

SEQ ID NO: 1503222 - DNA, 25 bp, Homo sapien
cggcgctgcgcagctcacttccggc

SEQ ID NO: 1503223 - DNA, 25 bp, Homo sapien
cacttccggcgcctgagagccggca

SEQ ID NO: 1503224 - DNA, 25 bp, Homo sapien
ctcacttccggcgcctgagagccgg

SEQ ID NO: 1503225 - DNA, 25 bp, Homo sapien
gcgacgagagacaaagggtcagcgc

SEQ ID NO: 1503226 - DNA, 25 bp, Homo sapien
gacgagagacaaagggtcagcgccg

SEQ ID NO: 1503227 - DNA, 25 bp, Homo sapien
acgagagacaaagggtcagcgccgc

SEQ ID NO: 1503228 - DNA, 25 bp, Homo sapien
cgacgagagacaaagggtcagcgcc

SEQ ID NO: 1503229 - DNA, 25 bp, Homo sapien
ttcgcggcataggcctcgaggttgc

SEQ ID NO: 1503230 - DNA, 25 bp, Homo sapien
tgagctgccggatgttgcgacccgt

SEQ ID NO: 1503231 - DNA, 25 bp, Homo sapien
tcgaggttgcggagctgcgcctggg

SEQ ID NO: 1503232 - DNA, 25 bp, Homo sapien
tgcagcctcgcgtgaacacgaacga

SEQ ID NO: 1503233 - DNA, 25 bp, Homo sapien
tcccgcatcagcatccccaaatgct

SEQ ID NO: 1503234 - DNA, 25 bp, Homo sapien
ggcttaggcgactatctatctccca

SEQ ID NO: 1503235 - DNA, 25 bp, Homo sapien
ccagtcttaactgtcaggcttaggc

SEQ ID NO: 1503236 - DNA, 25 bp, Homo sapien
taactgtcaggcttaggcgactatc

SEQ ID NO: 1503237 - DNA, 25 bp, Homo sapien
cacgcagtccttcagcgagttcttc

SEQ ID NO: 1503238 - DNA, 25 bp, Homo sapien
atcagaaagtgtgtgaccccgaggg

SEQ ID NO: 1503239 - DNA, 25 bp, Homo sapien
ccttcagcgagttcttcttacgaac

SEQ ID NO: 1503240 - DNA, 25 bp, Homo sapien
ctcaggatcagaaagtgtgtgaccc

SEQ ID NO: 1503241 - DNA, 25 bp, Homo sapien
atgaagggtgagggcgtctactcac

SEQ ID NO: 1503242 - DNA, 25 bp, Homo sapien
gatgaagggtgagggcgtctactca

SEQ ID NO: 1503243 - DNA, 25 bp, Homo sapien
cagagcgtttactttgaagccagaa

SEQ ID NO: 1503244 - DNA, 25 bp, Homo sapien
tatgtgttcatcatgagagataggg

SEQ ID NO: 1503245 - DNA, 25 bp, Homo sapien
gcagctcagaggcatatgtgttcat

SEQ ID NO: 1503246 - DNA, 25 bp, Homo sapien
ccccatctcttcttcagagcgttta

SEQ ID NO: 1503247 - DNA, 25 bp, Homo sapien
agaggtgcccggagtaggcaccttt

SEQ ID NO: 1503248 - DNA, 25 bp, Homo sapien
ctctggaggggtctagcagaggtgc

SEQ ID NO: 1503249 - DNA, 25 bp, Homo sapien
tctagcagaggtgcccggagtaggc

SEQ ID NO: 1503250 - DNA, 25 bp, Homo sapien
agaaaagatcagtgactctggaggg

SEQ ID NO: 1503251 - DNA, 25 bp, Homo sapien
ctggaaggtcaaggtggggcctcct

SEQ ID NO: 1503252 - DNA, 25 bp, Homo sapien
gtggggcctcctgggaggcgcatca

SEQ ID NO: 1503253 - DNA, 25 bp, Homo sapien
ggggcctcctgggaggcgcatcagc

SEQ ID NO: 1503254 - DNA, 25 bp, Homo sapien
ggcctcctgggaggcgcatcagctt

SEQ ID NO: 1503255 - DNA, 25 bp, Homo sapien
gagaccacatcacgcaccagcgagt

SEQ ID NO: 1503256 - DNA, 25 bp, Homo sapien
ccaaagctgttgagtaccaggaggg

SEQ ID NO: 1503257 - DNA, 25 bp, Homo sapien
tgccggcgcagtgaggagaccacat

SEQ ID NO: 1503258 - DNA, 25 bp, Homo sapien
gctgctcgtgcatgcggtgccggcg

SEQ ID NO: 1503259 - DNA, 25 bp, Homo sapien
agtagagtggcgtgaacacaactca

SEQ ID NO: 1503260 - DNA, 25 bp, Homo sapien
tgcaccgccacaccgggctttttaa

SEQ ID NO: 1503261 - DNA, 25 bp, Homo sapien
gtagagtggcgtgaacacaactcac

SEQ ID NO: 1503262 - DNA, 25 bp, Homo sapien
gagtcggggttgtagtcgatgagga

SEQ ID NO: 1503263 - DNA, 25 bp, Homo sapien
cggggttgtagtcgatgaggaggca

SEQ ID NO: 1503264 - DNA, 25 bp, Homo sapien
agcgcttgatggtgttcaggttcac

SEQ ID NO: 1503265 - DNA, 25 bp, Homo sapien
gcagcgcttgatggtgttcaggttc

SEQ ID NO: 1503266 - DNA, 25 bp, Homo sapien
gactcgcgcccacaggaacaacttt

SEQ ID NO: 1503267 - DNA, 25 bp, Homo sapien
cagcttcttcatcccgcgactcgcg

SEQ ID NO: 1503268 - DNA, 25 bp, Homo sapien
ctcgcgcccacaggaacaactttga

SEQ ID NO: 1503269 - DNA, 25 bp, Homo sapien
cgcgcccacaggaacaactttgatg

SEQ ID NO: 1503270 - DNA, 25 bp, Homo sapien
tgtgtaggacataacagggctcagt

SEQ ID NO: 1503271 - DNA, 25 bp, Homo sapien
ccgcagtggcctcccgccctatgcc

SEQ ID NO: 1503272 - DNA, 25 bp, Homo sapien
tgtaggacataacagggctcagtgg

SEQ ID NO: 1503273 - DNA, 25 bp, Homo sapien
ctgtgtgtaggacataacagggctc

SEQ ID NO: 1503274 - DNA, 25 bp, Homo sapien
tgagccgcactgcactctgctgggc

SEQ ID NO: 1503275 - DNA, 25 bp, Homo sapien
tcggtgagccgcactgcactctgct

SEQ ID NO: 1503276 - DNA, 25 bp, Homo sapien
gttgtggtcgccgtcaggctctgcc

SEQ ID NO: 1503277 - DNA, 25 bp, Homo sapien
ggcccgcatgttgccacggccagcg

SEQ ID NO: 1503278 - DNA, 25 bp, Homo sapien
gcccaccgttgggactggtggagcc

SEQ ID NO: 1503279 - DNA, 25 bp, Homo sapien
tcagcccaccgttgggactggtgga

SEQ ID NO: 1503280 - DNA, 25 bp, Homo sapien
gcgtcagcccaccgttgggactggt

SEQ ID NO: 1503281 - DNA, 25 bp, Homo sapien
cgtcagcccaccgttgggactggtg

SEQ ID NO: 1503282 - DNA, 25 bp, Homo sapien
gctgcagtgtcatccgcgggccgat

SEQ ID NO: 1503283 - DNA, 25 bp, Homo sapien
gacgccctcctggaccttgatgagc

SEQ ID NO: 1503284 - DNA, 25 bp, Homo sapien
aactgtggaacatcactttgccctc

SEQ ID NO: 1503285 - DNA, 25 bp, Homo sapien
tgatgagctgcagtgtcatccgcgg

SEQ ID NO: 1503286 - DNA, 25 bp, Homo sapien
tgagccaagagacgcgggtcaccaa

SEQ ID NO: 1503287 - DNA, 25 bp, Homo sapien
agacgcgggtcaccaagatccgggt

SEQ ID NO: 1503288 - DNA, 25 bp, Homo sapien
cgggtcaccaagatccgggtgcagc

SEQ ID NO: 1503289 - DNA, 25 bp, Homo sapien
caagagacgcgggtcaccaagatcc

SEQ ID NO: 1503290 - DNA, 25 bp, Homo sapien
ctcctgcttgcgctgcacattctgg

SEQ ID NO: 1503291 - DNA, 25 bp, Homo sapien
cctgcttgcgctgcacattctgggc

SEQ ID NO: 1503292 - DNA, 25 bp, Homo sapien
tcctgcttgcgctgcacattctggg

SEQ ID NO: 1503293 - DNA, 25 bp, Homo sapien
gctcgccgtccttgaagggatccca

SEQ ID NO: 1503294 - DNA, 25 bp, Homo sapien
caggctcgccgtccttgaagggatc

SEQ ID NO: 1503295 - DNA, 25 bp, Homo sapien
aactccaggctcgccgtccttgaag

SEQ ID NO: 1503296 - DNA, 25 bp, Homo sapien
tccaggctcgccgtccttgaaggga

SEQ ID NO: 1503297 - DNA, 25 bp, Homo sapien
aatactcgatgtcatcatcttcctg

SEQ ID NO: 1503298 - DNA, 25 bp, Homo sapien
ccaccgcctggcagaaatactcgat

SEQ ID NO: 1503299 - DNA, 25 bp, Homo sapien
cgcctggcagaaatactcgatgtca

SEQ ID NO: 1503300 - DNA, 25 bp, Homo sapien
ggcagaaatactcgatgtcatcatc

SEQ ID NO: 1503301 - DNA, 25 bp, Homo sapien
gcaagccgtttctgcttggcctcgg

SEQ ID NO: 1503302 - DNA, 25 bp, Homo sapien
gatccatttcccaccgcttccgctt

SEQ ID NO: 1503303 - DNA, 25 bp, Homo sapien
cttggcaagccgtttctgcttggcc

SEQ ID NO: 1503304 - DNA, 25 bp, Homo sapien
ctcgatccatttcccaccgcttccg

SEQ ID NO: 1503305 - DNA, 25 bp, Homo sapien
ttggtcttgggaaacttctggtcac

SEQ ID NO: 1503306 - DNA, 25 bp, Homo sapien
tgggaaacttctggtcacaaaggcg

SEQ ID NO: 1503307 - DNA, 25 bp, Homo sapien
tgtccttggtcttgggaaacttctg

SEQ ID NO: 1503308 - DNA, 25 bp, Homo sapien
ttctggtcacaaaggcgacccctgc

SEQ ID NO: 1503309 - DNA, 25 bp, Homo sapien
tgggcccccgcctggcctgggctcc

SEQ ID NO: 1503310 - DNA, 25 bp, Homo sapien
gcccccgcctggcctgggctccctg

SEQ ID NO: 1503311 - DNA, 25 bp, Homo sapien
cccgcctggcctgggctccctggga

SEQ ID NO: 1503312 - DNA, 25 bp, Homo sapien
cccctctgggcccccgcctggcctg

SEQ ID NO: 1503313 - DNA, 25 bp, Homo sapien
tcaggccactctcttccctgggcgg

SEQ ID NO: 1503314 - DNA, 25 bp, Homo sapien
ccactctcttccctgggcggccccg

SEQ ID NO: 1503315 - DNA, 25 bp, Homo sapien
ggccactctcttccctgggcggccc

SEQ ID NO: 1503316 - DNA, 25 bp, Homo sapien
aggccactctcttccctgggcggcc

SEQ ID NO: 1503317 - DNA, 25 bp, Homo sapien
caatgaaaccaaccccgtgcagggt

SEQ ID NO: 1503318 - DNA, 25 bp, Homo sapien
ttatgaaaggaaaccgagggccaca

SEQ ID NO: 1503319 - DNA, 25 bp, Homo sapien
tctgctgaaagtgtgacctgtctgc

SEQ ID NO: 1503320 - DNA, 25 bp, Homo sapien
tgcttgcacggctctttggtgggac

SEQ ID NO: 1503321 - DNA, 25 bp, Homo sapien
ctgcttaaggaggaagtgtcgtcta

SEQ ID NO: 1503322 - DNA, 25 bp, Homo sapien
tgcttacccattactggtgccagtg

SEQ ID NO: 1503323 - DNA, 25 bp, Homo sapien
cctgatgacggtgagaaaaatctcc

SEQ ID NO: 1503324 - DNA, 25 bp, Homo sapien
aaggccaccctaaccactgttgaca

SEQ ID NO: 1503325 - DNA, 25 bp, Homo sapien
agccagggttatgcattgggcccca

SEQ ID NO: 1503326 - DNA, 25 bp, Homo sapien
ttgggccccaatggaccagcttagg

SEQ ID NO: 1503327 - DNA, 25 bp, Homo sapien
tatgtggacaggattgaggctcaga

SEQ ID NO: 1503328 - DNA, 25 bp, Homo sapien
ggagttgccgccaaaaagccagact

SEQ ID NO: 1503329 - DNA, 25 bp, Homo sapien
gaacccactgagtttgtcgtcggca

SEQ ID NO: 1503330 - DNA, 25 bp, Homo sapien
gcttgggtcgcaggtggcttcgggc

SEQ ID NO: 1503331 - DNA, 25 bp, Homo sapien
ccaggaactcaaccaccagtatggg

SEQ ID NO: 1503332 - DNA, 25 bp, Homo sapien
atgggcgctgcttccggatgctgaa

SEQ ID NO: 1503333 - DNA, 25 bp, Homo sapien
tatgtctgcaaagctcgggcagcgg

SEQ ID NO: 1503334 - DNA, 25 bp, Homo sapien
ggctatacgctctgtaggccgccag

SEQ ID NO: 1503335 - DNA, 25 bp, Homo sapien
tcattggctcagctcacgggactgg

SEQ ID NO: 1503336 - DNA, 25 bp, Homo sapien
cacccgcatgatgtggtagggcaca

SEQ ID NO: 1503337 - DNA, 25 bp, Homo sapien
tgaggaggcagcttccgctaggcca

SEQ ID NO: 1503338 - DNA, 25 bp, Homo sapien
tgttcttgcgtctccagtcctgtgg

SEQ ID NO: 1503339 - DNA, 25 bp, Homo sapien
tctccagcaacacctagggtgagga

SEQ ID NO: 1503340 - DNA, 25 bp, Homo sapien
gacccttggcgacagaagacagcct

SEQ ID NO: 1503341 - DNA, 25 bp, Homo sapien
taattgtaacataccccatgccaag

SEQ ID NO: 1503342 - DNA, 25 bp, Homo sapien
ggcttgagagatctcccaccttcgc

SEQ ID NO: 1503343 - DNA, 25 bp, Homo sapien
gccaagcaccttgcacgaagtgttt

SEQ ID NO: 1503344 - DNA, 25 bp, Homo sapien
tgtcaacctgcaggaacggaagcag

SEQ ID NO: 1503345 - DNA, 25 bp, Homo sapien
tggagtgcagcgatgttctactgca

SEQ ID NO: 1503346 - DNA, 25 bp, Homo sapien
aatatgtgtatcagttttgtccttt

SEQ ID NO: 1503347 - DNA, 25 bp, Homo sapien
ttcatccatgtcattaatatgtgta

SEQ ID NO: 1503348 - DNA, 25 bp, Homo sapien
agtgcagcgatgttctactgcagcc

SEQ ID NO: 1503349 - DNA, 25 bp, Homo sapien
tgatttgcacgggacttctggctga

SEQ ID NO: 1503350 - DNA, 25 bp, Homo sapien
gagtcacgtgagttgatccccatga

SEQ ID NO: 1503351 - DNA, 25 bp, Homo sapien
cgtttgaagctagacactccgtgtg

SEQ ID NO: 1503352 - DNA, 25 bp, Homo sapien
gacccacgtggagtttgaagctagc

SEQ ID NO: 1503353 - DNA, 25 bp, Homo sapien
tcccgcactgtaagtctgactgatc

SEQ ID NO: 1503354 - DNA, 25 bp, Homo sapien
agtgttcccgcaaccaaaaaatgag

SEQ ID NO: 1503355 - DNA, 25 bp, Homo sapien
catacacttgatgcttaggtgggag

SEQ ID NO: 1503356 - DNA, 25 bp, Homo sapien
aaactctgggtgatagaacgctgtc

SEQ ID NO: 1503357 - DNA, 25 bp, Homo sapien
cgccgggcccacaatcatatctgat

SEQ ID NO: 1503358 - DNA, 25 bp, Homo sapien
tgttgatagctctcaaatcttggag

SEQ ID NO: 1503359 - DNA, 25 bp, Homo sapien
tggatctgaagatcccatttgttga

SEQ ID NO: 1503360 - DNA, 25 bp, Homo sapien
aggctgttgcctaatagggaccaac

SEQ ID NO: 1503361 - DNA, 25 bp, Homo sapien
aaaagaaaatagtgccaggtgtggg

SEQ ID NO: 1503362 - DNA, 25 bp, Homo sapien
cagataacccaagacacaaatgtgc

SEQ ID NO: 1503363 - DNA, 25 bp, Homo sapien
caccagattgtacctggatagctgg

SEQ ID NO: 1503364 - DNA, 25 bp, Homo sapien
gaggaataggtttctcaccccacag

SEQ ID NO: 1503365 - DNA, 25 bp, Homo sapien
ccccagaatgaatgctgtcctgtct

SEQ ID NO: 1503366 - DNA, 25 bp, Homo sapien
caagttatatagaatggagcatggg

SEQ ID NO: 1503367 - DNA, 25 bp, Homo sapien
taatggaagggatgttacggtacaa

SEQ ID NO: 1503368 - DNA, 25 bp, Homo sapien
cgcgtgtgcacataggcgtgatgtc

SEQ ID NO: 1503369 - DNA, 25 bp, Homo sapien
gactcttgatgcaaggcgcaacttg

SEQ ID NO: 1503370 - DNA, 25 bp, Homo sapien
tgggcaacttcgtgcgactacagaa

SEQ ID NO: 1503371 - DNA, 25 bp, Homo sapien
cactgtcctgaggagctagaggcct

SEQ ID NO: 1503372 - DNA, 25 bp, Homo sapien
cagctaaggtaccaggtctcctgag

SEQ ID NO: 1503373 - DNA, 25 bp, Homo sapien
gccattgtggtggaaaaccttctgg

SEQ ID NO: 1503374 - DNA, 25 bp, Homo sapien
tgcggtggcccgaaacagcaagttc

SEQ ID NO: 1503375 - DNA, 25 bp, Homo sapien
tctggctctgtcacgctgaggctga

SEQ ID NO: 1503376 - DNA, 25 bp, Homo sapien
gcaggcgtggccttcgtagccaata

SEQ ID NO: 1503377 - DNA, 25 bp, Homo sapien
gataccgcgcattcctaaaccagat

SEQ ID NO: 1503378 - DNA, 25 bp, Homo sapien
ccagtcttcccagaatctcgaggcg

SEQ ID NO: 1503379 - DNA, 25 bp, Homo sapien
taaaccagataaggaggccgagagt

SEQ ID NO: 1503380 - DNA, 25 bp, Homo sapien
ctggcgggacggagaggaatccttc

SEQ ID NO: 1503381 - DNA, 25 bp, Homo sapien
tcctctttcaactccggctcaggga

SEQ ID NO: 1503382 - DNA, 25 bp, Homo sapien
tcggacgtcgggctttctgcctcgg

SEQ ID NO: 1503383 - DNA, 25 bp, Homo sapien
gagaaagtgactgcgtggctcagac

SEQ ID NO: 1503384 - DNA, 25 bp, Homo sapien
atgggtcgtgggtgaaggcgcgcgt

SEQ ID NO: 1503385 - DNA, 25 bp, Homo sapien
ctttgggaggcaggacgccgtgctc

SEQ ID NO: 1503386 - DNA, 25 bp, Homo sapien
ggggggcaacacccctcctggctga

SEQ ID NO: 1503387 - DNA, 25 bp, Homo sapien
gatgtgcgcgccgtggagcctccaa

SEQ ID NO: 1503388 - DNA, 25 bp, Homo sapien
tgactccggctgagcgagggcaaaa

SEQ ID NO: 1503389 - DNA, 25 bp, Homo sapien
aggctgaatccgagcgctttcgact

SEQ ID NO: 1503390 - DNA, 25 bp, Homo sapien
ctcggccgcgaacccgcagactgtg

SEQ ID NO: 1503391 - DNA, 25 bp, Homo sapien
gaatccgagcgctttcgactggagt

SEQ ID NO: 1503392 - DNA, 25 bp, Homo sapien
gcagactgtgctccccgcctttctc

SEQ ID NO: 1503393 - DNA, 25 bp, Homo sapien
ctagccaggtgagcgcgcgtggcga

SEQ ID NO: 1503394 - DNA, 25 bp, Homo sapien
cgcgtggcgacaaggaggcagaaaa

SEQ ID NO: 1503395 - DNA, 25 bp, Homo sapien
cagaaaaggcgggcctggtcccctg

SEQ ID NO: 1503396 - DNA, 25 bp, Homo sapien
cctgaggtctcgggatccgagctga

SEQ ID NO: 1503397 - DNA, 25 bp, Homo sapien
tgttgagtcaataaatgtgacctcg

SEQ ID NO: 1503398 - DNA, 25 bp, Homo sapien
tatttgctgcgttgacacctagtag

SEQ ID NO: 1503399 - DNA, 25 bp, Homo sapien
cctagtaggtacttccaaggctctt

SEQ ID NO: 1503400 - DNA, 25 bp, Homo sapien
caccaggctgcgtgacgtttcgcgc

SEQ ID NO: 1503401 - DNA, 25 bp, Homo sapien
aacaggcctgcgtctcatggatttc

SEQ ID NO: 1503402 - DNA, 25 bp, Homo sapien
gccagagacgagagccaggggggtg

SEQ ID NO: 1503403 - DNA, 25 bp, Homo sapien
tgcgtctcatggatttcagggccat

SEQ ID NO: 1503404 - DNA, 25 bp, Homo sapien
tggagaacaggcctgcgtctcatgg

SEQ ID NO: 1503405 - DNA, 25 bp, Homo sapien
gaaagttgggatccatctcagacac

SEQ ID NO: 1503406 - DNA, 25 bp, Homo sapien
ggagatgaggctgccgcagttccct

SEQ ID NO: 1503407 - DNA, 25 bp, Homo sapien
tgatgagaaagttgggatccatctc

SEQ ID NO: 1503408 - DNA, 25 bp, Homo sapien
cctgccaagatcagcatctgggaag

SEQ ID NO: 1503409 - DNA, 25 bp, Homo sapien
gcatcaaccctgtaatccagagagg

SEQ ID NO: 1503410 - DNA, 25 bp, Homo sapien
gaggtcaaaggccaatgcaaccagc

SEQ ID NO: 1503411 - DNA, 25 bp, Homo sapien
tcctgtggatcaaaggctcaattgc

SEQ ID NO: 1503412 - DNA, 25 bp, Homo sapien
gcacatatcagatgcgggaaggccc

SEQ ID NO: 1503413 - DNA, 25 bp, Homo sapien
tcttatgaagctgtagcctgagagc

SEQ ID NO: 1503414 - DNA, 25 bp, Homo sapien
cagaggtggctgaacctttcggact

SEQ ID NO: 1503415 - DNA, 25 bp, Homo sapien
gccgcctggcttagtttcttagtga

SEQ ID NO: 1503416 - DNA, 25 bp, Homo sapien
tgtgggcgtccacaggaggaattcc

SEQ ID NO: 1503417 - DNA, 25 bp, Homo sapien
cgcctccgacgagccggtgcaggaa

SEQ ID NO: 1503418 - DNA, 25 bp, Homo sapien
gacgagccggtgcaggaattcagcc

SEQ ID NO: 1503419 - DNA, 25 bp, Homo sapien
agcaagaagacccagcttccgtagg

SEQ ID NO: 1503420 - DNA, 25 bp, Homo sapien
gcttccgtaggcctagcctactttg

SEQ ID NO: 1503421 - DNA, 25 bp, Homo sapien
gggtgtgcaaaaccgaagatggagg

SEQ ID NO: 1503422 - DNA, 25 bp, Homo sapien
actcctgcctcaaggaccctccgta

SEQ ID NO: 1503423 - DNA, 25 bp, Homo sapien
gtccgacccggcgtgcccagacctc

SEQ ID NO: 1503424 - DNA, 25 bp, Homo sapien
ctcaaggaccctccgtaacactggg

SEQ ID NO: 1503425 - DNA, 25 bp, Homo sapien
ctcccacgccgcgggaggtcaaggc

SEQ ID NO: 1503426 - DNA, 25 bp, Homo sapien
tggatgacgtcacgcacgcgacgcc

SEQ ID NO: 1503427 - DNA, 25 bp, Homo sapien
aggcgccgctggatgacgtcacgca

SEQ ID NO: 1503428 - DNA, 25 bp, Homo sapien
tggagcctcgcgaggcgccgctgga

SEQ ID NO: 1503429 - DNA, 25 bp, Homo sapien
cgcgccccggcccggacgaactgca

SEQ ID NO: 1503430 - DNA, 25 bp, Homo sapien
gccccggcccggacgaactgcagca

SEQ ID NO: 1503431 - DNA, 25 bp, Homo sapien
tgccggtaggccgaagccaggcccg

SEQ ID NO: 1503432 - DNA, 25 bp, Homo sapien
ggctgccggtaggccgaagccaggc

SEQ ID NO: 1503433 - DNA, 25 bp, Homo sapien
caaatttcatccttcgaccacgcct

SEQ ID NO: 1503434 - DNA, 25 bp, Homo sapien
atttcatccttcgaccacgcctcca

SEQ ID NO: 1503435 - DNA, 25 bp, Homo sapien
ttcatccttcgaccacgcctccagc

SEQ ID NO: 1503436 - DNA, 25 bp, Homo sapien
aaatttcatccttcgaccacgcctc

SEQ ID NO: 1503437 - DNA, 25 bp, Homo sapien
gcaagggttgggcgaaagtgagaga

SEQ ID NO: 1503438 - DNA, 25 bp, Homo sapien
gttgggcgaaagtgagagacgaccc

SEQ ID NO: 1503439 - DNA, 25 bp, Homo sapien
caagggttgggcgaaagtgagagac

SEQ ID NO: 1503440 - DNA, 25 bp, Homo sapien
agggttgggcgaaagtgagagacga

SEQ ID NO: 1503441 - DNA, 25 bp, Homo sapien
cacctgctccgggttctcggtcgca

SEQ ID NO: 1503442 - DNA, 25 bp, Homo sapien
cgcacgcgctgcctcttccgccagg

SEQ ID NO: 1503443 - DNA, 25 bp, Homo sapien
ctcgccacctgctccgggttctcgg

SEQ ID NO: 1503444 - DNA, 25 bp, Homo sapien
tccgggttctcggtcgcacgcgctg

SEQ ID NO: 1503445 - DNA, 25 bp, Homo sapien
gcgattgcgggggtcagaggttagg

SEQ ID NO: 1503446 - DNA, 25 bp, Homo sapien
tcctggagccaccccggttgcctta

SEQ ID NO: 1503447 - DNA, 25 bp, Homo sapien
tcaagggtcagacctctctgtcgcc

SEQ ID NO: 1503448 - DNA, 25 bp, Homo sapien
tctgtcgccgcccctcctggagcca

SEQ ID NO: 1503449 - DNA, 25 bp, Homo sapien
ggtaccgggagctcgactttgcgca

SEQ ID NO: 1503450 - DNA, 25 bp, Homo sapien
cactgggcgtcgatgagtgggtacc

SEQ ID NO: 1503451 - DNA, 25 bp, Homo sapien
actttgcgcagcacgggctccggga

SEQ ID NO: 1503452 - DNA, 25 bp, Homo sapien
tgctcgaagccccgcaaggactcga

SEQ ID NO: 1503453 - DNA, 25 bp, Homo sapien
cgaccgctgacaaaatagggacact

SEQ ID NO: 1503454 - DNA, 25 bp, Homo sapien
catcattcccctttgacaggtggag

SEQ ID NO: 1503455 - DNA, 25 bp, Homo sapien
gaacctaatcagtcgggctccagaa

SEQ ID NO: 1503456 - DNA, 25 bp, Homo sapien
aatacagcactttcccaagggtaca

SEQ ID NO: 1503457 - DNA, 25 bp, Homo sapien
agcaacctggtgcagtatgtccagc

SEQ ID NO: 1503458 - DNA, 25 bp, Homo sapien
ttctgccacatagcaacctggtgca

SEQ ID NO: 1503459 - DNA, 25 bp, Homo sapien
gccacatagcaacctggtgcagtat

SEQ ID NO: 1503460 - DNA, 25 bp, Homo sapien
catagcaacctggtgcagtatgtcc

SEQ ID NO: 1503461 - DNA, 25 bp, Homo sapien
ccccagccgagcagtccagagaaaa

SEQ ID NO: 1503462 - DNA, 25 bp, Homo sapien
ggacccatcggtgaatagttcagga

SEQ ID NO: 1503463 - DNA, 25 bp, Homo sapien
gaaccaaaaatggacccatcggtga

SEQ ID NO: 1503464 - DNA, 25 bp, Homo sapien
ccagcgatgggcttcctctgggtcc

SEQ ID NO: 1503465 - DNA, 25 bp, Homo sapien
gcacctcggctctcgtcttggtctt

SEQ ID NO: 1503466 - DNA, 25 bp, Homo sapien
ctctcgtcttggtcttggcatagct

SEQ ID NO: 1503467 - DNA, 25 bp, Homo sapien
ccagtgcctttctgcggccaaggct

SEQ ID NO: 1503468 - DNA, 25 bp, Homo sapien
cagtgcctttctgcggccaaggctt

SEQ ID NO: 1503469 - DNA, 25 bp, Homo sapien
cgaactttcaggtcaagcgggagag

SEQ ID NO: 1503470 - DNA, 25 bp, Homo sapien
attccggcagggcagaaaagaggct

SEQ ID NO: 1503471 - DNA, 25 bp, Homo sapien
tgggagcaacaacagtcagggagac

SEQ ID NO: 1503472 - DNA, 25 bp, Homo sapien
tgtggcccagaaccctgaaaggtga

SEQ ID NO: 1503473 - DNA, 25 bp, Homo sapien
catgggcagcatgtagtagtaactt

SEQ ID NO: 1503474 - DNA, 25 bp, Homo sapien
tgggccagcttgacggtcagtgcca

SEQ ID NO: 1503475 - DNA, 25 bp, Homo sapien
agcttgacggtcagtgccactttga

SEQ ID NO: 1503476 - DNA, 25 bp, Homo sapien
gccagcttgacggtcagtgccactt

SEQ ID NO: 1503477 - DNA, 25 bp, Homo sapien
agctctgtcaggtactgtgggtctc

SEQ ID NO: 1503478 - DNA, 25 bp, Homo sapien
ctagggagtccatgatgtgcaggtc

SEQ ID NO: 1503479 - DNA, 25 bp, Homo sapien
ccagcggcggtagtgcgccagctct

SEQ ID NO: 1503480 - DNA, 25 bp, Homo sapien
gtgggtctccggtgggcagctctag

SEQ ID NO: 1503481 - DNA, 25 bp, Homo sapien
gaaccctcagagtacggagctcagg

SEQ ID NO: 1503482 - DNA, 25 bp, Homo sapien
tgaaccctcagagtacggagctcag

SEQ ID NO: 1503483 - DNA, 25 bp, Homo sapien
gggttgaaccctcagagtacggagc

SEQ ID NO: 1503484 - DNA, 25 bp, Homo sapien
gttgaaccctcagagtacggagctc

SEQ ID NO: 1503485 - DNA, 25 bp, Homo sapien
caacagccgggatcaagttgaaggt

SEQ ID NO: 1503486 - DNA, 25 bp, Homo sapien
tgctctgtggcatctcctcgtgtgt

SEQ ID NO: 1503487 - DNA, 25 bp, Homo sapien
gttgaaggtcttaagcctagaggtg

SEQ ID NO: 1503488 - DNA, 25 bp, Homo sapien
taagcctagaggtggcctccacgat

SEQ ID NO: 1503489 - DNA, 25 bp, Homo sapien
ctaacagcggagcctgcacatgcgc

SEQ ID NO: 1503490 - DNA, 25 bp, Homo sapien
taacagcggagcctgcacatgcgca

SEQ ID NO: 1503491 - DNA, 25 bp, Homo sapien
gcacatgcgcactctaggggcctgg

SEQ ID NO: 1503492 - DNA, 25 bp, Homo sapien
cagcggagcctgcacatgcgcactc

SEQ ID NO: 1503493 - DNA, 25 bp, Homo sapien
gcaagctgaaggttgggtccgggag

SEQ ID NO: 1503494 - DNA, 25 bp, Homo sapien
cctgaggccactcagcgaccagatg

SEQ ID NO: 1503495 - DNA, 25 bp, Homo sapien
gagcgtggtcactgcctgaggccac

SEQ ID NO: 1503496 - DNA, 25 bp, Homo sapien
gatgccggatttgaaccgctgtgat

SEQ ID NO: 1503497 - DNA, 25 bp, Homo sapien
ctttgacagaggtgactttggagct

SEQ ID NO: 1503498 - DNA, 25 bp, Homo sapien
tgtggctttgacagaggtgactttg

SEQ ID NO: 1503499 - DNA, 25 bp, Homo sapien
cgtgggttgagggacaggacttgac

SEQ ID NO: 1503500 - DNA, 25 bp, Homo sapien
tgacttaggctcatgtcgccatctt

SEQ ID NO: 1503501 - DNA, 25 bp, Homo sapien
tgacgtgccaccctgatgacttggg

SEQ ID NO: 1503502 - DNA, 25 bp, Homo sapien
tctagtgtgactttgtgagcccagc

SEQ ID NO: 1503503 - DNA, 25 bp, Homo sapien
atcacctgctgaccgagagccaggc

SEQ ID NO: 1503504 - DNA, 25 bp, Homo sapien
tacagagatcgtcactgtggtctag

SEQ ID NO: 1503505 - DNA, 25 bp, Homo sapien
tgtcctccaggaaggcgacggtggg

SEQ ID NO: 1503506 - DNA, 25 bp, Homo sapien
gcgtcaggaccagcgtctggtgctt

SEQ ID NO: 1503507 - DNA, 25 bp, Homo sapien
cgacggtgggcagcgtcaggaccag

SEQ ID NO: 1503508 - DNA, 25 bp, Homo sapien
aggaccagcgtctggtgcttgagca

SEQ ID NO: 1503509 - DNA, 25 bp, Homo sapien
tagaggggtctgtaacgtgagtcct

SEQ ID NO: 1503510 - DNA, 25 bp, Homo sapien
ggtagaggggtctgtaacgtgagtc

SEQ ID NO: 1503511 - DNA, 25 bp, Homo sapien
agaggggtctgtaacgtgagtcctg

SEQ ID NO: 1503512 - DNA, 25 bp, Homo sapien
gtagaggggtctgtaacgtgagtcc

SEQ ID NO: 1503513 - DNA, 25 bp, Homo sapien
ggtcgggggaagtcgctgtagggca

SEQ ID NO: 1503514 - DNA, 25 bp, Homo sapien
tcgggggaagtcgctgtagggcagg

SEQ ID NO: 1503515 - DNA, 25 bp, Homo sapien
gtcgggggaagtcgctgtagggcag

SEQ ID NO: 1503516 - DNA, 25 bp, Homo sapien
aacagtggtacggggtggccgctgg

SEQ ID NO: 1503517 - DNA, 25 bp, Homo sapien
tcaacagtggtacggggtggccgct

SEQ ID NO: 1503518 - DNA, 25 bp, Homo sapien
caacagtggtacggggtggccgctg

SEQ ID NO: 1503519 - DNA, 25 bp, Homo sapien
cagtggtacggggtggccgctgggc

SEQ ID NO: 1503520 - DNA, 25 bp, Homo sapien
gtgacaccttcctcgaagggtgggc

SEQ ID NO: 1503521 - DNA, 25 bp, Homo sapien
aatggatgcagaagcccgtctgggc

SEQ ID NO: 1503522 - DNA, 25 bp, Homo sapien
tcagcttcctccgtggaatgaaggg

SEQ ID NO: 1503523 - DNA, 25 bp, Homo sapien
tctgggctttccgtggagtcgcccc

SEQ ID NO: 1503524 - DNA, 25 bp, Homo sapien
ccacgtcgaggctgggtactcttaa

SEQ ID NO: 1503525 - DNA, 25 bp, Homo sapien
tatgagcgggtgtttgcttggccac

SEQ ID NO: 1503526 - DNA, 25 bp, Homo sapien
gaaatccctgcctgtcgctgggaaa

SEQ ID NO: 1503527 - DNA, 25 bp, Homo sapien
tcgaacccaggctcatgcactaaat

SEQ ID NO: 1503528 - DNA, 25 bp, Homo sapien
agggtgcccgggccgagagggtcat

SEQ ID NO: 1503529 - DNA, 25 bp, Homo sapien
ggctgaggttgcaactctgagtagc

SEQ ID NO: 1503530 - DNA, 25 bp, Homo sapien
agtagcagaggagctcagcgtcgac

SEQ ID NO: 1503531 - DNA, 25 bp, Homo sapien
cgactggggcgcgtgatcctttata

SEQ ID NO: 1503532 - DNA, 25 bp, Homo sapien
tgaggttgcaactctgagtagcaga

SEQ ID NO: 1503533 - DNA, 25 bp, Homo sapien
gaccaggagtgcgggcagcgcgggc

SEQ ID NO: 1503534 - DNA, 25 bp, Homo sapien
caggaccaggagtgcgggcagcgcg

SEQ ID NO: 1503535 - DNA, 25 bp, Homo sapien
acacagatgtctgggcattgccagg

SEQ ID NO: 1503536 - DNA, 25 bp, Homo sapien
aggagcaactcctttttaggcaacg

SEQ ID NO: 1503537 - DNA, 25 bp, Homo sapien
caacaacttgggctggtcacaggag

SEQ ID NO: 1503538 - DNA, 25 bp, Homo sapien
ggttttagctgttgactgcccatca

SEQ ID NO: 1503539 - DNA, 25 bp, Homo sapien
tacaccttccggttgttcccaggca

SEQ ID NO: 1503540 - DNA, 25 bp, Homo sapien
tgatcatttacccagaggcttcctt

SEQ ID NO: 1503541 - DNA, 25 bp, Homo sapien
agaacatcctttgtcactcaccgtg

SEQ ID NO: 1503542 - DNA, 25 bp, Homo sapien
gatcatttacccagaggcttccttg

SEQ ID NO: 1503543 - DNA, 25 bp, Homo sapien
ttgtcactcaccgtgtcattttccc

SEQ ID NO: 1503544 - DNA, 25 bp, Homo sapien
ggcacccacagtcatagagggagaa

SEQ ID NO: 1503545 - DNA, 25 bp, Homo sapien
caaacctggagttctatgctctcag

SEQ ID NO: 1503546 - DNA, 25 bp, Homo sapien
ggaggcttctttatgtttacaccag

SEQ ID NO: 1503547 - DNA, 25 bp, Homo sapien
gaatgcctgtccttatgaactccta

SEQ ID NO: 1503548 - DNA, 25 bp, Homo sapien
ttcagtgcggcacgagaaattggct

SEQ ID NO: 1503549 - DNA, 25 bp, Homo sapien
ggtgccagttccacccgttctggag

SEQ ID NO: 1503550 - DNA, 25 bp, Homo sapien
accagcaccgtggtcgtgacctcag

SEQ ID NO: 1503551 - DNA, 25 bp, Homo sapien
cagcgtagggtaaggttcttgccca

SEQ ID NO: 1503552 - DNA, 25 bp, Homo sapien
tgcgtgtccacctctaggacccggg

SEQ ID NO: 1503553 - DNA, 25 bp, Homo sapien
tctgcggtcacactgactgaggcct

SEQ ID NO: 1503554 - DNA, 25 bp, Homo sapien
ctgggcctccgagactgggaacagc

SEQ ID NO: 1503555 - DNA, 25 bp, Homo sapien
gtattactgcacacgtcagccgctg

SEQ ID NO: 1503556 - DNA, 25 bp, Homo sapien
cttgtgtataagctggccggccacc

SEQ ID NO: 1503557 - DNA, 25 bp, Homo sapien
ggaaccccattcagcgtcaccttgg

SEQ ID NO: 1503558 - DNA, 25 bp, Homo sapien
agcaggagaagctgcgcccgttgtc

SEQ ID NO: 1503559 - DNA, 25 bp, Homo sapien
gcttcgtcagaatcacgttgggcgc

SEQ ID NO: 1503560 - DNA, 25 bp, Homo sapien
taggtgccctcaagatctcgagtga

SEQ ID NO: 1503561 - DNA, 25 bp, Homo sapien
tcctttagacacttgagctcgggca

SEQ ID NO: 1503562 - DNA, 25 bp, Homo sapien
ggacaatccctctcgtccagtcggg

SEQ ID NO: 1503563 - DNA, 25 bp, Homo sapien
acagtcactgattccccgatgggca

SEQ ID NO: 1503564 - DNA, 25 bp, Homo sapien
tgtggggaggatacaacaggcggtg

SEQ ID NO: 1503565 - DNA, 25 bp, Homo sapien
gggaggatacaacaggcggtgagga

SEQ ID NO: 1503566 - DNA, 25 bp, Homo sapien
tggggaggatacaacaggcggtgag

SEQ ID NO: 1503567 - DNA, 25 bp, Homo sapien
ggaggatacaacaggcggtgaggat

SEQ ID NO: 1503568 - DNA, 25 bp, Homo sapien
tatttcttgatcttccgctggcggt

SEQ ID NO: 1503569 - DNA, 25 bp, Homo sapien
gtgatgatgacaatctcataccggg

SEQ ID NO: 1503570 - DNA, 25 bp, Homo sapien
cccattatgactgcggctgctacca

SEQ ID NO: 1503571 - DNA, 25 bp, Homo sapien
ttatagaggtacgtgctgaggcctg

SEQ ID NO: 1503572 - DNA, 25 bp, Homo sapien
catccgtcaggaagtgtgggccttt

SEQ ID NO: 1503573 - DNA, 25 bp, Homo sapien
tagcttgggcatattccctgggcac

SEQ ID NO: 1503574 - DNA, 25 bp, Homo sapien
tacagatcagatgcgtggcctagtg

SEQ ID NO: 1503575 - DNA, 25 bp, Homo sapien
tacacatgtctatggagggccactt

SEQ ID NO: 1503576 - DNA, 25 bp, Homo sapien
cggactaaggggccccgcgccagag

SEQ ID NO: 1503577 - DNA, 25 bp, Homo sapien
gtcccggagggcgcgagagggctac

SEQ ID NO: 1503578 - DNA, 25 bp, Homo sapien
cgcgctcccaactcccgggtaggcg

SEQ ID NO: 1503579 - DNA, 25 bp, Homo sapien
gctttgcgcccgcttagtccggcgt

SEQ ID NO: 1503580 - DNA, 25 bp, Homo sapien
taggcggccgccaaaaaaaacagca

SEQ ID NO: 1503581 - DNA, 25 bp, Homo sapien
tgagcgtcttgccttgccgcagcgg

SEQ ID NO: 1503582 - DNA, 25 bp, Homo sapien
cggaggctggaattctgcggctggg

SEQ ID NO: 1503583 - DNA, 25 bp, Homo sapien
tgttgctgcaattgagctgcactga

SEQ ID NO: 1503584 - DNA, 25 bp, Homo sapien
tcacgtcgagcagctggtaagacac

SEQ ID NO: 1503585 - DNA, 25 bp, Homo sapien
gccgggaccgagcccctgtccctca

SEQ ID NO: 1503586 - DNA, 25 bp, Homo sapien
cagccgggaccgagcccctgtccct

SEQ ID NO: 1503587 - DNA, 25 bp, Homo sapien
tgccctttaagaccggaggctccaa

SEQ ID NO: 1503588 - DNA, 25 bp, Homo sapien
tccaaaatcacgctgtggggcggtt

SEQ ID NO: 1503589 - DNA, 25 bp, Homo sapien
tgcgtcacgtggcagcgcaaagtgt

SEQ ID NO: 1503590 - DNA, 25 bp, Homo sapien
gcaaagtgtatttcctgccctttaa

SEQ ID NO: 1503591 - DNA, 25 bp, Homo sapien
tttcggaatagatgacccggcttcc

SEQ ID NO: 1503592 - DNA, 25 bp, Homo sapien
gaccaccaggccgtcgagattgagg

SEQ ID NO: 1503593 - DNA, 25 bp, Homo sapien
cagcaaactcgtaggtcaaggtcac

SEQ ID NO: 1503594 - DNA, 25 bp, Homo sapien
tcaaggtcacgttggccagatccag

SEQ ID NO: 1503595 - DNA, 25 bp, Homo sapien
cctctcggggtcataactctctctg

SEQ ID NO: 1503596 - DNA, 25 bp, Homo sapien
gcgagaattaggaacggaacacagg

SEQ ID NO: 1503597 - DNA, 25 bp, Homo sapien
tgtcgacccgcgtggagctcacgct

SEQ ID NO: 1503598 - DNA, 25 bp, Homo sapien
cgcttggtctgtgcgccctctcggg

SEQ ID NO: 1503599 - DNA, 25 bp, Homo sapien
ctgggacttcatagctaggcacttg

SEQ ID NO: 1503600 - DNA, 25 bp, Homo sapien
taggcacttgcataggtacgcagcg

SEQ ID NO: 1503601 - DNA, 25 bp, Homo sapien
cccacagtgaggaggatccctacaa

SEQ ID NO: 1503602 - DNA, 25 bp, Homo sapien
tccctacaagggcagcgatggaacc

SEQ ID NO: 1503603 - DNA, 25 bp, Homo sapien
ctttttctcgctcagccggcataga

SEQ ID NO: 1503604 - DNA, 25 bp, Homo sapien
ctctttttctcgctcagccggcata

SEQ ID NO: 1503605 - DNA, 25 bp, Homo sapien
ccaccatgtatggccatttccccag

SEQ ID NO: 1503606 - DNA, 25 bp, Homo sapien
ttttctcgctcagccggcatagaac

SEQ ID NO: 1503607 - DNA, 25 bp, Homo sapien
gacagaggctggttaaggaagcctt

SEQ ID NO: 1503608 - DNA, 25 bp, Homo sapien
cagaggctggttaaggaagccttta

SEQ ID NO: 1503609 - DNA, 25 bp, Homo sapien
ggacccttaggtcacaggacagagg

SEQ ID NO: 1503610 - DNA, 25 bp, Homo sapien
gaagaagggcagtaatgcggaccct

SEQ ID NO: 1503611 - DNA, 25 bp, Homo sapien
gaggcgaggagagcgcgagccgagg

SEQ ID NO: 1503612 - DNA, 25 bp, Homo sapien
agccgaggagctgggctagaggacg

SEQ ID NO: 1503613 - DNA, 25 bp, Homo sapien
gccgcggcggggaaagcacaggagg

SEQ ID NO: 1503614 - DNA, 25 bp, Homo sapien
ggaggcgaggagagcgcgagccgag

SEQ ID NO: 1503615 - DNA, 25 bp, Homo sapien
agcccagaggccgagtagcgcccgg

SEQ ID NO: 1503616 - DNA, 25 bp, Homo sapien
agaggccgagtagcgcccggcgcag

SEQ ID NO: 1503617 - DNA, 25 bp, Homo sapien
ccagaggccgagtagcgcccggcgc

SEQ ID NO: 1503618 - DNA, 25 bp, Homo sapien
ccgagtagcgcccggcgcagccctg

SEQ ID NO: 1503619 - DNA, 25 bp, Homo sapien
tagcgcccctatgtcgagtcaaggg

SEQ ID NO: 1503620 - DNA, 25 bp, Homo sapien
ccctgacatcttagcgcccctatgt

SEQ ID NO: 1503621 - DNA, 25 bp, Homo sapien
atcttagcgcccctatgtcgagtca

SEQ ID NO: 1503622 - DNA, 25 bp, Homo sapien
ttagcgcccctatgtcgagtcaagg

SEQ ID NO: 1503623 - DNA, 25 bp, Homo sapien
ctgcccagggaaacgcgggctgagc

SEQ ID NO: 1503624 - DNA, 25 bp, Homo sapien
tctgggtcccgtttcggcgcagcga

SEQ ID NO: 1503625 - DNA, 25 bp, Homo sapien
gggcagttggtgctgcaattcagcc

SEQ ID NO: 1503626 - DNA, 25 bp, Homo sapien
ctgagtctccggctcgcgaatgtcc

SEQ ID NO: 1503627 - DNA, 25 bp, Homo sapien
ggaaagtgcgaatgagcccacgcgc

SEQ ID NO: 1503628 - DNA, 25 bp, Homo sapien
gagagtagtggagtacgcgcgtggc

SEQ ID NO: 1503629 - DNA, 25 bp, Homo sapien
agtggagtacgcgcgtggccaccca

SEQ ID NO: 1503630 - DNA, 25 bp, Homo sapien
agggagggagagtagtggagtacgc

SEQ ID NO: 1503631 - DNA, 25 bp, Homo sapien
gagggagagtagtggagtacgcgcg

SEQ ID NO: 1503632 - DNA, 25 bp, Homo sapien
gctctttgaacaccgggacttggaa

SEQ ID NO: 1503633 - DNA, 25 bp, Homo sapien
cagctctttgaacaccgggacttgg

SEQ ID NO: 1503634 - DNA, 25 bp, Homo sapien
agctctttgaacaccgggacttgga

SEQ ID NO: 1503635 - DNA, 25 bp, Homo sapien
gcagctctttgaacaccgggacttg

SEQ ID NO: 1503636 - DNA, 25 bp, Homo sapien
ctcggcgcgacacgagaaattggct

SEQ ID NO: 1503637 - DNA, 25 bp, Homo sapien
ttttcaaacagtcccagtccgtgcg

SEQ ID NO: 1503638 - DNA, 25 bp, Homo sapien
gcatcagctctacgcgatctggtcg

SEQ ID NO: 1503639 - DNA, 25 bp, Homo sapien
cctccgagccagtaccgtggctgtg

SEQ ID NO: 1503640 - DNA, 25 bp, Homo sapien
cagtgcgaggtagaccctggcctct

SEQ ID NO: 1503641 - DNA, 25 bp, Homo sapien
gaatgcgtccccttcgagggtgaca

SEQ ID NO: 1503642 - DNA, 25 bp, Homo sapien
tgtagatggtcacgttctcccgggt

SEQ ID NO: 1503643 - DNA, 25 bp, Homo sapien
ccagggtgacgttgcagaccagctg

SEQ ID NO: 1503644 - DNA, 25 bp, Homo sapien
ccagctgcgcaggttactgtcacca

SEQ ID NO: 1503645 - DNA, 25 bp, Homo sapien
ccacatcgagggtggcgtcgcagaa

SEQ ID NO: 1503646 - DNA, 25 bp, Homo sapien
cctccagtgtgaccagagcttgggc

SEQ ID NO: 1503647 - DNA, 25 bp, Homo sapien
gcgtctgtcgtcgttctcggtggca

SEQ ID NO: 1503648 - DNA, 25 bp, Homo sapien
gcgcgcacagtgcactgagggttct

SEQ ID NO: 1503649 - DNA, 25 bp, Homo sapien
gccttgcagcggtaagtgcctgaga

SEQ ID NO: 1503650 - DNA, 25 bp, Homo sapien
tagcgttacgtccttgaccgcctcg

SEQ ID NO: 1503651 - DNA, 25 bp, Homo sapien
cgcccgagtgactggacccagcagg

SEQ ID NO: 1503652 - DNA, 25 bp, Homo sapien
ttggcgcggcaaggcttccacgaag

SEQ ID NO: 1503653 - DNA, 25 bp, Homo sapien
cacgaagtgttgtccctgcataacc

SEQ ID NO: 1503654 - DNA, 25 bp, Homo sapien
ggcaaatctgacgtccctagaccct

SEQ ID NO: 1503655 - DNA, 25 bp, Homo sapien
tagaccctccttggcgcggcaaggc

SEQ ID NO: 1503656 - DNA, 25 bp, Homo sapien
caagtaatgcgttctgggcagccca

SEQ ID NO: 1503657 - DNA, 25 bp, Homo sapien
tctgttccctccagccaagtaatgc

SEQ ID NO: 1503658 - DNA, 25 bp, Homo sapien
cacgcagatcacatcaggcggcggt

SEQ ID NO: 1503659 - DNA, 25 bp, Homo sapien
gccacacagctcagcgaggcttctg

SEQ ID NO: 1503660 - DNA, 25 bp, Homo sapien
gatccttccacccatgtccaattgc

SEQ ID NO: 1503661 - DNA, 25 bp, Homo sapien
tcccatcgacctcacaggaaaacag

SEQ ID NO: 1503662 - DNA, 25 bp, Homo sapien
cgggtgccaggactctagggattct

SEQ ID NO: 1503663 - DNA, 25 bp, Homo sapien
tggtggcgttgcagacgtagatacc

SEQ ID NO: 1503664 - DNA, 25 bp, Homo sapien
ggtagattcatccatctccggtggc

SEQ ID NO: 1503665 - DNA, 25 bp, Homo sapien
ccatgggatgccttcccgagagcag

SEQ ID NO: 1503666 - DNA, 25 bp, Homo sapien
gccacacagtggtaagtgcccgcgt

SEQ ID NO: 1503667 - DNA, 25 bp, Homo sapien
ccacgtctggtgacttgggcaggta

SEQ ID NO: 1503668 - DNA, 25 bp, Homo sapien
tcattcttccgaggaccgtgtcccc

SEQ ID NO: 1503669 - DNA, 25 bp, Homo sapien
tcgacaggccgatgttgagggcccc

SEQ ID NO: 1503670 - DNA, 25 bp, Homo sapien
gcaagttcggccaccactggccggt

SEQ ID NO: 1503671 - DNA, 25 bp, Homo sapien
ccgcgcggcaggtcaacgtgaagtt

SEQ ID NO: 1503672 - DNA, 25 bp, Homo sapien
tgtgctgttgttgctcgacaggccg

SEQ ID NO: 1503673 - DNA, 25 bp, Homo sapien
cgcgttggtggctgcgcactcgtac

SEQ ID NO: 1503674 - DNA, 25 bp, Homo sapien
acgcgcaccgtgatgcgccgcgcgt

SEQ ID NO: 1503675 - DNA, 25 bp, Homo sapien
gcgcaccgtgatgcgccgcgcgtgg

SEQ ID NO: 1503676 - DNA, 25 bp, Homo sapien
ggtggctgcgcactcgtactcgccg

SEQ ID NO: 1503677 - DNA, 25 bp, Homo sapien
cacgcagaatccagcccaagtttta

SEQ ID NO: 1503678 - DNA, 25 bp, Homo sapien
acgcagaatccagcccaagttttaa

SEQ ID NO: 1503679 - DNA, 25 bp, Homo sapien
cagaatccagcccaagttttaaagt

SEQ ID NO: 1503680 - DNA, 25 bp, Homo sapien
gcagaatccagcccaagttttaaag

SEQ ID NO: 1503681 - DNA, 25 bp, Homo sapien
tgcggggtggagaccctcgcggagg

SEQ ID NO: 1503682 - DNA, 25 bp, Homo sapien
ctgcggggtggagaccctcgcggag

SEQ ID NO: 1503683 - DNA, 25 bp, Homo sapien
gccgcccacggcgacccatagccac

SEQ ID NO: 1503684 - DNA, 25 bp, Homo sapien
ccgcgccgcccacggcgacccatag

SEQ ID NO: 1503685 - DNA, 25 bp, Homo sapien
cgccgcgccgcccacggcgacccat

SEQ ID NO: 1503686 - DNA, 25 bp, Homo sapien
cccacggcgacccatagccacggac

SEQ ID NO: 1503687 - DNA, 25 bp, Homo sapien
actcgcccttcttgcaggcggtgga

SEQ ID NO: 1503688 - DNA, 25 bp, Homo sapien
gttgtactcgcccttcttgcaggcg

SEQ ID NO: 1503689 - DNA, 25 bp, Homo sapien
gcctcctgcacgttgtactcgccct

SEQ ID NO: 1503690 - DNA, 25 bp, Homo sapien
ctgcacgttgtactcgcccttcttg

SEQ ID NO: 1503691 - DNA, 25 bp, Homo sapien
ccgccgcccgctccgttcagacaca

SEQ ID NO: 1503692 - DNA, 25 bp, Homo sapien
cgccgcccgctccgttcagacacac

SEQ ID NO: 1503693 - DNA, 25 bp, Homo sapien
tgtcagctgtatggcgaagacctcg

SEQ ID NO: 1503694 - DNA, 25 bp, Homo sapien
tgtatggcgaagacctcgccctccg

SEQ ID NO: 1503695 - DNA, 25 bp, Homo sapien
gccgatgtcagctgtatggcgaaga

SEQ ID NO: 1503696 - DNA, 25 bp, Homo sapien
tcacgccgatgtcagctgtatggcg

SEQ ID NO: 1503697 - DNA, 25 bp, Homo sapien
aaagcaataaataagcccccgtgtg

SEQ ID NO: 1503698 - DNA, 25 bp, Homo sapien
agcaataaataagcccccgtgtgag

SEQ ID NO: 1503699 - DNA, 25 bp, Homo sapien
gcccttggagttgaatacataaata

SEQ ID NO: 1503700 - DNA, 25 bp, Homo sapien
gggtgacgcccttggagttgaatac

SEQ ID NO: 1503701 - DNA, 25 bp, Homo sapien
tcacgactggaaccctgggcttgtt

SEQ ID NO: 1503702 - DNA, 25 bp, Homo sapien
cacgactggaaccctgggcttgttc

SEQ ID NO: 1503703 - DNA, 25 bp, Homo sapien
cgactggaaccctgggcttgttcca

SEQ ID NO: 1503704 - DNA, 25 bp, Homo sapien
gactggaaccctgggcttgttccac

SEQ ID NO: 1503705 - DNA, 25 bp, Homo sapien
aagactttactgaccaatcagccgg

SEQ ID NO: 1503706 - DNA, 25 bp, Homo sapien
tctggcctagggattgggccaccct

SEQ ID NO: 1503707 - DNA, 25 bp, Homo sapien
tgacctcccgtgaagatacagagac

SEQ ID NO: 1503708 - DNA, 25 bp, Homo sapien
tctgggagcttgactatggaccaaa

SEQ ID NO: 1503709 - DNA, 25 bp, Homo sapien
aatctgggccccagtgagcatgggc

SEQ ID NO: 1503710 - DNA, 25 bp, Homo sapien
gcttcgtggagcctagagtcaatgg

SEQ ID NO: 1503711 - DNA, 25 bp, Homo sapien
actgcccttggtatcacccgagtga

SEQ ID NO: 1503712 - DNA, 25 bp, Homo sapien
cgagtgacccacagcgttcttagga

SEQ ID NO: 1503713 - DNA, 25 bp, Homo sapien
taatagcaaacgcttcgactggccc

SEQ ID NO: 1503714 - DNA, 25 bp, Homo sapien
gatcgtctgcaacgtgaccctaggg

SEQ ID NO: 1503715 - DNA, 25 bp, Homo sapien
taaatgctaccgagagtgacgacgg

SEQ ID NO: 1503716 - DNA, 25 bp, Homo sapien
caaagctcacagttctcggcaggac

SEQ ID NO: 1503717 - DNA, 25 bp, Homo sapien
cctgggagtgtcaagtctcctgtga

SEQ ID NO: 1503718 - DNA, 25 bp, Homo sapien
gaggcccagcgttttgtaggtgtac

SEQ ID NO: 1503719 - DNA, 25 bp, Homo sapien
gtgactgtgccggagtatcttgaga

SEQ ID NO: 1503720 - DNA, 25 bp, Homo sapien
tctgaacctgattggagagaactga

SEQ ID NO: 1503721 - DNA, 25 bp, Homo sapien
acgcagtcttgctattgtcccccat

SEQ ID NO: 1503722 - DNA, 25 bp, Homo sapien
cgcagtcttgctattgtcccccatg

SEQ ID NO: 1503723 - DNA, 25 bp, Homo sapien
tccttgagctcataggcattgctca

SEQ ID NO: 1503724 - DNA, 25 bp, Homo sapien
tgagctcataggcattgctcagggt

SEQ ID NO: 1503725 - DNA, 25 bp, Homo sapien
cttgagctcataggcattgctcagg

SEQ ID NO: 1503726 - DNA, 25 bp, Homo sapien
ccttgagctcataggcattgctcag

SEQ ID NO: 1503727 - DNA, 25 bp, Homo sapien
cagatctgcgaggttggtcggcccc

SEQ ID NO: 1503728 - DNA, 25 bp, Homo sapien
tttgcttggtgccacgtgccatccg

SEQ ID NO: 1503729 - DNA, 25 bp, Homo sapien
caacgacaggctggtcaagatcggg

SEQ ID NO: 1503730 - DNA, 25 bp, Homo sapien
ttgcactgacctccgaactgtttgg

SEQ ID NO: 1503731 - DNA, 25 bp, Homo sapien
agttttgatgcagccaactctgcat

SEQ ID NO: 1503732 - DNA, 25 bp, Homo sapien
cccaaacaggtgtcagttttgatgc

SEQ ID NO: 1503733 - DNA, 25 bp, Homo sapien
taagtggactctttcagctgttgca

SEQ ID NO: 1503734 - DNA, 25 bp, Homo sapien
tcttacctctagaatcggatcctgg

SEQ ID NO: 1503735 - DNA, 25 bp, Homo sapien
aactagccggggttggtggcgcaca

SEQ ID NO: 1503736 - DNA, 25 bp, Homo sapien
cctgtaatcccagcaactcaggagg

SEQ ID NO: 1503737 - DNA, 25 bp, Homo sapien
ctgagacaggagaatcacttgaacc

SEQ ID NO: 1503738 - DNA, 25 bp, Homo sapien
agcgagccaagatcgtgtcactgct

SEQ ID NO: 1503739 - DNA, 25 bp, Homo sapien
ccaggcttggtgactgagtactata

SEQ ID NO: 1503740 - DNA, 25 bp, Homo sapien
ggtgactgagtactatagtcccaac

SEQ ID NO: 1503741 - DNA, 25 bp, Homo sapien
ccaggtgaatatgtgggtaaaggac

SEQ ID NO: 1503742 - DNA, 25 bp, Homo sapien
gatgtgctgaaggtacccaggtgaa

SEQ ID NO: 1503743 - DNA, 25 bp, Homo sapien
tgtgaaaaggcgctgccatgaggcc

SEQ ID NO: 1503744 - DNA, 25 bp, Homo sapien
tggtaaataccaagcccgagaagac

SEQ ID NO: 1503745 - DNA, 25 bp, Homo sapien
ggagcagaaacacaagaccttcgtg

SEQ ID NO: 1503746 - DNA, 25 bp, Homo sapien
gaggagacagccaattacctggtca

SEQ ID NO: 1503747 - DNA, 25 bp, Homo sapien
agcctccagagtagcagctggtact

SEQ ID NO: 1503748 - DNA, 25 bp, Homo sapien
gcacgcgccatcatgcctggctaat

SEQ ID NO: 1503749 - DNA, 25 bp, Homo sapien
tccagagtagcagctggtactacag

SEQ ID NO: 1503750 - DNA, 25 bp, Homo sapien
cacgcgccatcatgcctggctaatt

SEQ ID NO: 1503751 - DNA, 25 bp, Homo sapien
ctagcgcgccgttgggactgcggtg

SEQ ID NO: 1503752 - DNA, 25 bp, Homo sapien
ttgggactgcggtggccatgtcggc

SEQ ID NO: 1503753 - DNA, 25 bp, Homo sapien
gccaacctagcgcgccgttgggact

SEQ ID NO: 1503754 - DNA, 25 bp, Homo sapien
gactgcggtggccatgtcggcaggg

SEQ ID NO: 1503755 - DNA, 25 bp, Homo sapien
ctgccacggacagggcactgcgact

SEQ ID NO: 1503756 - DNA, 25 bp, Homo sapien
cggtccctgccacggacagggcact

SEQ ID NO: 1503757 - DNA, 25 bp, Homo sapien
acagggcactgcgactcctcttcat

SEQ ID NO: 1503758 - DNA, 25 bp, Homo sapien
cgtccccggtccctgccacggacag

SEQ ID NO: 1503759 - DNA, 25 bp, Homo sapien
cccagggtccgagggctcaggctgg

SEQ ID NO: 1503760 - DNA, 25 bp, Homo sapien
tcggccctggtgatggaaatccgcg

SEQ ID NO: 1503761 - DNA, 25 bp, Homo sapien
gaaatccgcggtgggatcagcagcg

SEQ ID NO: 1503762 - DNA, 25 bp, Homo sapien
agcatgttggcacggtcggattcgg

SEQ ID NO: 1503763 - DNA, 25 bp, Homo sapien
ttgaggagtggtcctagtgccaccg

SEQ ID NO: 1503764 - DNA, 25 bp, Homo sapien
tttgaggagtggtcctagtgccacc

SEQ ID NO: 1503765 - DNA, 25 bp, Homo sapien
agtttttgaggagtggtcctagtgc

SEQ ID NO: 1503766 - DNA, 25 bp, Homo sapien
tttttgaggagtggtcctagtgcca

SEQ ID NO: 1503767 - DNA, 25 bp, Homo sapien
tcagtcggtccatcatggcgagggc

SEQ ID NO: 1503768 - DNA, 25 bp, Homo sapien
tccggtgttggcgtgtcctcgccgc

SEQ ID NO: 1503769 - DNA, 25 bp, Homo sapien
tggttgccagagtgtcagtcagtcg

SEQ ID NO: 1503770 - DNA, 25 bp, Homo sapien
ggtgttggcgtgtcctcgccgctac

SEQ ID NO: 1503771 - DNA, 25 bp, Homo sapien
ccttccaacctacaccccgctcagc

SEQ ID NO: 1503772 - DNA, 25 bp, Homo sapien
ttccaacctacaccccgctcagctg

SEQ ID NO: 1503773 - DNA, 25 bp, Homo sapien
agctgcgcgcaagccagcgagccca

SEQ ID NO: 1503774 - DNA, 25 bp, Homo sapien
gcccttccaacctacaccccgctca

SEQ ID NO: 1503775 - DNA, 25 bp, Homo sapien
ccggggcccgggcagtgacagagac

SEQ ID NO: 1503776 - DNA, 25 bp, Homo sapien
ggaggcttcagggtggcctggccct

SEQ ID NO: 1503777 - DNA, 25 bp, Homo sapien
cccgggcagtgacagagacaggctc

SEQ ID NO: 1503778 - DNA, 25 bp, Homo sapien
gagacaggctcctttccgaggggac

SEQ ID NO: 1503779 - DNA, 25 bp, Homo sapien
cagtgccatggaaggacgagggcca

SEQ ID NO: 1503780 - DNA, 25 bp, Homo sapien
caggacatgcgggtcgtgcgcaggc

SEQ ID NO: 1503781 - DNA, 25 bp, Homo sapien
agtagccgcgctgctggatacggat

SEQ ID NO: 1503782 - DNA, 25 bp, Homo sapien
tgtccatggcatcggcgcgctctat

SEQ ID NO: 1503783 - DNA, 25 bp, Homo sapien
tcacactgtcacaattacactgtcc

SEQ ID NO: 1503784 - DNA, 25 bp, Homo sapien
gtgacagtcacagcattcttggagc

SEQ ID NO: 1503785 - DNA, 25 bp, Homo sapien
gtcacagcattcttggagcacacac

SEQ ID NO: 1503786 - DNA, 25 bp, Homo sapien
attcttggagcacacacagtcactg

SEQ ID NO: 1503787 - DNA, 25 bp, Homo sapien
cattcttggagcacacacagtcact

SEQ ID NO: 1503788 - DNA, 25 bp, Homo sapien
agatcagagctggattatggaccca

SEQ ID NO: 1503789 - DNA, 25 bp, Homo sapien
ttttgccagttcgtcagatcagccc

SEQ ID NO: 1503790 - DNA, 25 bp, Homo sapien
caatgatgcttgtcccgtcctagga

SEQ ID NO: 1503791 - DNA, 25 bp, Homo sapien
ttactaggcccatttcagagacggg

SEQ ID NO: 1503792 - DNA, 25 bp, Homo sapien
ctctgcttgctaggttcaaaggatt

SEQ ID NO: 1503793 - DNA, 25 bp, Homo sapien
ctggcgaagaagacgggcgaggagg

SEQ ID NO: 1503794 - DNA, 25 bp, Homo sapien
ggctcgggcaggaacgcctcgtcct

SEQ ID NO: 1503795 - DNA, 25 bp, Homo sapien
ggatgcggcctaggccgcgcggccg

SEQ ID NO: 1503796 - DNA, 25 bp, Homo sapien
ttgcagctccgggatgcggcctagg

SEQ ID NO: 1503797 - DNA, 25 bp, Homo sapien
agcctggcggcccaaatcctggcag

SEQ ID NO: 1503798 - DNA, 25 bp, Homo sapien
gcagctgcggagaagccgaaggcgt

SEQ ID NO: 1503799 - DNA, 25 bp, Homo sapien
ccaagcctggcggcccaaatcctgg

SEQ ID NO: 1503800 - DNA, 25 bp, Homo sapien
aagcctggcggcccaaatcctggca

SEQ ID NO: 1503801 - DNA, 25 bp, Homo sapien
gcagggcggtgtggcgcgcgctgct

SEQ ID NO: 1503802 - DNA, 25 bp, Homo sapien
gacagccccgggcggtcgagcgttc

SEQ ID NO: 1503803 - DNA, 25 bp, Homo sapien
caagcgccgtcgtcggggcgcgcat

SEQ ID NO: 1503804 - DNA, 25 bp, Homo sapien
tgtctgcggcctccactgccggcac

SEQ ID NO: 1503805 - DNA, 25 bp, Homo sapien
cccgtggggggcagtgccagggcag

SEQ ID NO: 1503806 - DNA, 25 bp, Homo sapien
gggggcagtgccagggcagggggcc

SEQ ID NO: 1503807 - DNA, 25 bp, Homo sapien
ccgtggggggcagtgccagggcagg

SEQ ID NO: 1503808 - DNA, 25 bp, Homo sapien
ggcagtgccagggcagggggccggg

SEQ ID NO: 1503809 - DNA, 25 bp, Homo sapien
tgcccggagggtgccgacgggtgtc

SEQ ID NO: 1503810 - DNA, 25 bp, Homo sapien
cggagggtgccgacgggtgtcctca

SEQ ID NO: 1503811 - DNA, 25 bp, Homo sapien
ggagggtgccgacgggtgtcctcat

SEQ ID NO: 1503812 - DNA, 25 bp, Homo sapien
tctgcccggagggtgccgacgggtg

SEQ ID NO: 1503813 - DNA, 25 bp, Homo sapien
taggcaggaatggacccagcaccca

SEQ ID NO: 1503814 - DNA, 25 bp, Homo sapien
gataggcaggaatggacccagcacc

SEQ ID NO: 1503815 - DNA, 25 bp, Homo sapien
gcaggaatggacccagcacccactt

SEQ ID NO: 1503816 - DNA, 25 bp, Homo sapien
tggataggcaggaatggacccagca

SEQ ID NO: 1503817 - DNA, 25 bp, Homo sapien
tgtagacgaggatgtgcgagggctg

SEQ ID NO: 1503818 - DNA, 25 bp, Homo sapien
cagtgtagacgaggatgtgcgaggg

SEQ ID NO: 1503819 - DNA, 25 bp, Homo sapien
cgcagtgtagacgaggatgtgcgag

SEQ ID NO: 1503820 - DNA, 25 bp, Homo sapien
gaacgcagtgtagacgaggatgtgc

SEQ ID NO: 1503821 - DNA, 25 bp, Homo sapien
tctgtttcaagacccgatgtcccct

SEQ ID NO: 1503822 - DNA, 25 bp, Homo sapien
tttctgtttcaagacccgatgtccc

SEQ ID NO: 1503823 - DNA, 25 bp, Homo sapien
tgtttcaagacccgatgtcccctgg

SEQ ID NO: 1503824 - DNA, 25 bp, Homo sapien
ttctgtttcaagacccgatgtcccc

SEQ ID NO: 1503825 - DNA, 25 bp, Homo sapien
cgccccggcgtgcagcacgagtcct

SEQ ID NO: 1503826 - DNA, 25 bp, Homo sapien
cgagtcctgggctcgcctgcgagtc

SEQ ID NO: 1503827 - DNA, 25 bp, Homo sapien
gctggtggccgccccggcgtgcagc

SEQ ID NO: 1503828 - DNA, 25 bp, Homo sapien
tcctgggctcgcctgcgagtccagg

SEQ ID NO: 1503829 - DNA, 25 bp, Homo sapien
ttccgggacatggtcttgggtgaca

SEQ ID NO: 1503830 - DNA, 25 bp, Homo sapien
tcttgggtgacatgtcatagtcgct

SEQ ID NO: 1503831 - DNA, 25 bp, Homo sapien
tcgctggtgaccgatgagttccggg

SEQ ID NO: 1503832 - DNA, 25 bp, Homo sapien
tgaccgatgagttccgggacatggt

SEQ ID NO: 1503833 - DNA, 25 bp, Homo sapien
ttcactggggaggacaggttgggag

SEQ ID NO: 1503834 - DNA, 25 bp, Homo sapien
cttcactggggaggacaggttggga

SEQ ID NO: 1503835 - DNA, 25 bp, Homo sapien
ccttcactggggaggacaggttggg

SEQ ID NO: 1503836 - DNA, 25 bp, Homo sapien
cactggggaggacaggttgggagtg

SEQ ID NO: 1503837 - DNA, 25 bp, Homo sapien
tgggtgggcactcacacctttctgg

SEQ ID NO: 1503838 - DNA, 25 bp, Homo sapien
ggctggacatgctataaagtaactg

SEQ ID NO: 1503839 - DNA, 25 bp, Homo sapien
aggatacagtgggtgggcactcaca

SEQ ID NO: 1503840 - DNA, 25 bp, Homo sapien
gctataaagtaactgagggcgggca

SEQ ID NO: 1503841 - DNA, 25 bp, Homo sapien
gtcacgataagggaggttagcttag

SEQ ID NO: 1503842 - DNA, 25 bp, Homo sapien
cacgataagggaggttagcttagga

SEQ ID NO: 1503843 - DNA, 25 bp, Homo sapien
cctcaacaagtgtcacgataaggga

SEQ ID NO: 1503844 - DNA, 25 bp, Homo sapien
acctcaacaagtgtcacgataaggg

SEQ ID NO: 1503845 - DNA, 25 bp, Homo sapien
attatgagtgtgagcttccaagcct

SEQ ID NO: 1503846 - DNA, 25 bp, Homo sapien
tgtgtacagcaatggctggtggaaa

SEQ ID NO: 1503847 - DNA, 25 bp, Homo sapien
aagtgggttgaggtgtgtacagcaa

SEQ ID NO: 1503848 - DNA, 25 bp, Homo sapien
gacccgaggtgaatatgttgcaagg

SEQ ID NO: 1503849 - DNA, 25 bp, Homo sapien
gcaaatggtgttacgatgaggtctt

SEQ ID NO: 1503850 - DNA, 25 bp, Homo sapien
agcaaatggtgttacgatgaggtct

SEQ ID NO: 1503851 - DNA, 25 bp, Homo sapien
gagcaaatggtgttacgatgaggtc

SEQ ID NO: 1503852 - DNA, 25 bp, Homo sapien
ctgagcaaatggtgttacgatgagg

SEQ ID NO: 1503853 - DNA, 25 bp, Homo sapien
ggatggggagcggcagtgaggagtg

SEQ ID NO: 1503854 - DNA, 25 bp, Homo sapien
gatggggagcggcagtgaggagtgg

SEQ ID NO: 1503855 - DNA, 25 bp, Homo sapien
agttgctacggacgctccggaggct

SEQ ID NO: 1503856 - DNA, 25 bp, Homo sapien
ttggtcaggagtgagaagttgctac

SEQ ID NO: 1503857 - DNA, 25 bp, Homo sapien
aagttgctacggacgctccggaggc

SEQ ID NO: 1503858 - DNA, 25 bp, Homo sapien
gcacattggtcaggagtgagaagtt

SEQ ID NO: 1503859 - DNA, 25 bp, Homo sapien
ctgacagcgtggccttgcagacagg

SEQ ID NO: 1503860 - DNA, 25 bp, Homo sapien
cagcgtggccttgcagacaggggtg

SEQ ID NO: 1503861 - DNA, 25 bp, Homo sapien
gacagcgtggccttgcagacagggg

SEQ ID NO: 1503862 - DNA, 25 bp, Homo sapien
tgacagcgtggccttgcagacaggg

SEQ ID NO: 1503863 - DNA, 25 bp, Homo sapien
gacggggttcgccaggtgagtggac

SEQ ID NO: 1503864 - DNA, 25 bp, Homo sapien
cagaccgccgtgacggggttcgcca

SEQ ID NO: 1503865 - DNA, 25 bp, Homo sapien
gccgtgacggggttcgccaggtgag

SEQ ID NO: 1503866 - DNA, 25 bp, Homo sapien
ctccagaccgccgtgacggggttcg

SEQ ID NO: 1503867 - DNA, 25 bp, Homo sapien
catctcgctgacagagcgataggtc

SEQ ID NO: 1503868 - DNA, 25 bp, Homo sapien
gagcgataggtctgcatggtctcca

SEQ ID NO: 1503869 - DNA, 25 bp, Homo sapien
cgggccaactgctgacacgtttctt

SEQ ID NO: 1503870 - DNA, 25 bp, Homo sapien
cttgtgcgaggccatctcgctgaca

SEQ ID NO: 1503871 - DNA, 25 bp, Homo sapien
gcaggctgcatgggatgtcaggtgg

SEQ ID NO: 1503872 - DNA, 25 bp, Homo sapien
ggttacatggcccgccagccctggg

SEQ ID NO: 1503873 - DNA, 25 bp, Homo sapien
ctggttacatggcccgccagccctg

SEQ ID NO: 1503874 - DNA, 25 bp, Homo sapien
ccctggttacatggcccgccagccc

SEQ ID NO: 1503875 - DNA, 25 bp, Homo sapien
tggttacatggcccgccagccctgg

SEQ ID NO: 1503876 - DNA, 25 bp, Homo sapien
tctcgcagaagaaatccaccaaggg

SEQ ID NO: 1503877 - DNA, 25 bp, Homo sapien
aggcttagagcaggtctcgcagaag

SEQ ID NO: 1503878 - DNA, 25 bp, Homo sapien
ggtctcgcagaagaaatccaccaag

SEQ ID NO: 1503879 - DNA, 25 bp, Homo sapien
cgcagaagaaatccaccaagggcat

SEQ ID NO: 1503880 - DNA, 25 bp, Homo sapien
acctggtttccggacctgctcattt

SEQ ID NO: 1503881 - DNA, 25 bp, Homo sapien
gacctggtttccggacctgctcatt

SEQ ID NO: 1503882 - DNA, 25 bp, Homo sapien
tgagacctggtttccggacctgctc

SEQ ID NO: 1503883 - DNA, 25 bp, Homo sapien
gagacctggtttccggacctgctca

SEQ ID NO: 1503884 - DNA, 25 bp, Homo sapien
caaactgctgatgtcaagtgatccg

SEQ ID NO: 1503885 - DNA, 25 bp, Homo sapien
actgctgatgtcaagtgatccgcct

SEQ ID NO: 1503886 - DNA, 25 bp, Homo sapien
aaactgctgatgtcaagtgatccgc

SEQ ID NO: 1503887 - DNA, 25 bp, Homo sapien
tcaaactgctgatgtcaagtgatcc

SEQ ID NO: 1503888 - DNA, 25 bp, Homo sapien
tcatcgtgggtgatgggatctccac

SEQ ID NO: 1503889 - DNA, 25 bp, Homo sapien
tgttcaggctgttactatgcatcaa

SEQ ID NO: 1503890 - DNA, 25 bp, Homo sapien
tggtcgcggcgcttgctgtttttct

SEQ ID NO: 1503891 - DNA, 25 bp, Homo sapien
tgatcggtcttcaccccaaatcggg

SEQ ID NO: 1503892 - DNA, 25 bp, Homo sapien
taagcacttgatctcgtttggcagg

SEQ ID NO: 1503893 - DNA, 25 bp, Homo sapien
ttagctaagctgttcacgagcccca

SEQ ID NO: 1503894 - DNA, 25 bp, Homo sapien
ctaggataggaacccagcacgactg

SEQ ID NO: 1503895 - DNA, 25 bp, Homo sapien
aatgtactgccctcgtcctactggg

SEQ ID NO: 1503896 - DNA, 25 bp, Homo sapien
tggagaacatttcctaggagtttga

SEQ ID NO: 1503897 - DNA, 25 bp, Homo sapien
ctggagaacatttcctaggagtttg

SEQ ID NO: 1503898 - DNA, 25 bp, Homo sapien
gaagcctgtaaggctcagggccctg

SEQ ID NO: 1503899 - DNA, 25 bp, Homo sapien
gccagaggtcagaagcctgtaaggc

SEQ ID NO: 1503900 - DNA, 25 bp, Homo sapien
gacacgcaaaagatgttcaggcccc

SEQ ID NO: 1503901 - DNA, 25 bp, Homo sapien
ccagcgtaatccgacacgcaaaaga

SEQ ID NO: 1503902 - DNA, 25 bp, Homo sapien
acatgatgcaggtgagtgagcggcc

SEQ ID NO: 1503903 - DNA, 25 bp, Homo sapien
tgagcggcctccagcgtaatccgac

SEQ ID NO: 1503904 - DNA, 25 bp, Homo sapien
gcgccccgctatgagcccctcaccc

SEQ ID NO: 1503905 - DNA, 25 bp, Homo sapien
ccggcctccagcgccccgctatgag

SEQ ID NO: 1503906 - DNA, 25 bp, Homo sapien
caccggcctccagcgccccgctatg

SEQ ID NO: 1503907 - DNA, 25 bp, Homo sapien
gccccgctatgagcccctcacccgg

SEQ ID NO: 1503908 - DNA, 25 bp, Homo sapien
tctagtgcaggcgtggccagcagta

SEQ ID NO: 1503909 - DNA, 25 bp, Homo sapien
caggctgttatggtaggccacgtca

SEQ ID NO: 1503910 - DNA, 25 bp, Homo sapien
cacgtcagcgtggtagtgatcctcc

SEQ ID NO: 1503911 - DNA, 25 bp, Homo sapien
ccatcgtgtccacagggatgcggaa

SEQ ID NO: 1503912 - DNA, 25 bp, Homo sapien
tggcagccgcgaagagggcggcgag

SEQ ID NO: 1503913 - DNA, 25 bp, Homo sapien
gggcggcgagaatctccaggtccgt

SEQ ID NO: 1503914 - DNA, 25 bp, Homo sapien
gatccacatcgtggatggcagccgc

SEQ ID NO: 1503915 - DNA, 25 bp, Homo sapien
atccacatcgtggatggcagccgcg

SEQ ID NO: 1503916 - DNA, 25 bp, Homo sapien
ccaggtggtgattctcgagcaccga

SEQ ID NO: 1503917 - DNA, 25 bp, Homo sapien
tgccgctggcgcttgctgaggttct

SEQ ID NO: 1503918 - DNA, 25 bp, Homo sapien
tcatcgttgtacatgagcgccagct

SEQ ID NO: 1503919 - DNA, 25 bp, Homo sapien
tgaccatcttgcgtaggctctgccg

SEQ ID NO: 1503920 - DNA, 25 bp, Homo sapien
tgacccgggcctctgaagttttcac

SEQ ID NO: 1503921 - DNA, 25 bp, Homo sapien
gcaagggggcgtcactggggccgct

SEQ ID NO: 1503922 - DNA, 25 bp, Homo sapien
caaagccctcgactcctaggcttcc

SEQ ID NO: 1503923 - DNA, 25 bp, Homo sapien
ttttcaccaggtagaagccgcccgc

SEQ ID NO: 1503924 - DNA, 25 bp, Homo sapien
ggaggacccctgagctggtcacttt

SEQ ID NO: 1503925 - DNA, 25 bp, Homo sapien
cggtcggagtagttatctagcagga

SEQ ID NO: 1503926 - DNA, 25 bp, Homo sapien
tggatgcggtcggagtagttatcta

SEQ ID NO: 1503927 - DNA, 25 bp, Homo sapien
gtagttatctagcaggaggacccct

SEQ ID NO: 1503928 - DNA, 25 bp, Homo sapien
ctccacggaggcagtgtgcttgtca

SEQ ID NO: 1503929 - DNA, 25 bp, Homo sapien
gcgctctcggtcaccctgctggaag

SEQ ID NO: 1503930 - DNA, 25 bp, Homo sapien
cacagtgcaccatgttccggaggac

SEQ ID NO: 1503931 - DNA, 25 bp, Homo sapien
ggctgatttccatgccacgctcgcg

SEQ ID NO: 1503932 - DNA, 25 bp, Homo sapien
ctgtgcccgtccatcaatgccccga

SEQ ID NO: 1503933 - DNA, 25 bp, Homo sapien
cctgtgcccgtccatcaatgccccg

SEQ ID NO: 1503934 - DNA, 25 bp, Homo sapien
tgtgcccgtccatcaatgccccgag

SEQ ID NO: 1503935 - DNA, 25 bp, Homo sapien
gtgcccgtccatcaatgccccgagc

SEQ ID NO: 1503936 - DNA, 25 bp, Homo sapien
ctcccacaatgggtgcacaatgtag

SEQ ID NO: 1503937 - DNA, 25 bp, Homo sapien
ggtggacaaggtccgcccaggtctc

SEQ ID NO: 1503938 - DNA, 25 bp, Homo sapien
ccaggtctcccacaatgggtgcaca

SEQ ID NO: 1503939 - DNA, 25 bp, Homo sapien
ctgggtggacaaggtccgcccaggt

SEQ ID NO: 1503940 - DNA, 25 bp, Homo sapien
tgccggatggcgctgtagtaccagt

SEQ ID NO: 1503941 - DNA, 25 bp, Homo sapien
tgtagtaccagtcccggttgtcctc

SEQ ID NO: 1503942 - DNA, 25 bp, Homo sapien
ccttgactcctcctcgggtggcgga

SEQ ID NO: 1503943 - DNA, 25 bp, Homo sapien
ttgactcctcctcgggtggcggaga

SEQ ID NO: 1503944 - DNA, 25 bp, Homo sapien
tgtgcacggtatctgggccattgat

SEQ ID NO: 1503945 - DNA, 25 bp, Homo sapien
tgcgcagtcaatgcctcttgggctg

SEQ ID NO: 1503946 - DNA, 25 bp, Homo sapien
gtcaaatacactgcctccagctcgg

SEQ ID NO: 1503947 - DNA, 25 bp, Homo sapien
ataacttccaacgactcctgggccg

SEQ ID NO: 1503948 - DNA, 25 bp, Homo sapien
ctgggagtgcggatgtgtcctcccc

SEQ ID NO: 1503949 - DNA, 25 bp, Homo sapien
gcagcctggtgctctcgttgggcct

SEQ ID NO: 1503950 - DNA, 25 bp, Homo sapien
aatgtccctgcgcaggcactgcaag

SEQ ID NO: 1503951 - DNA, 25 bp, Homo sapien
tgcgcaggcactgcaagccctcttg

SEQ ID NO: 1503952 - DNA, 25 bp, Homo sapien
gactttctagtcagtatcgccagga

SEQ ID NO: 1503953 - DNA, 25 bp, Homo sapien
gacttcccataaaacaacagcggtg

SEQ ID NO: 1503954 - DNA, 25 bp, Homo sapien
cgatgaatgaggtcggtccagctgc

SEQ ID NO: 1503955 - DNA, 25 bp, Homo sapien
tcaacggaccgaatgactgatcgtc

SEQ ID NO: 1503956 - DNA, 25 bp, Homo sapien
gaagcgtttgcaggggtcggcctta

SEQ ID NO: 1503957 - DNA, 25 bp, Homo sapien
tgccacagaagcgtttgcaggggtc

SEQ ID NO: 1503958 - DNA, 25 bp, Homo sapien
cagaagcgtttgcaggggtcggcct

SEQ ID NO: 1503959 - DNA, 25 bp, Homo sapien
cacagaagcgtttgcaggggtcggc

SEQ ID NO: 1503960 - DNA, 25 bp, Homo sapien
gctatgatggtcacacgttcctgga

SEQ ID NO: 1503961 - DNA, 25 bp, Homo sapien
ctgtacatagaagccaccggatggc

SEQ ID NO: 1503962 - DNA, 25 bp, Homo sapien
agtccaaagcgggaatcatgtgccc

SEQ ID NO: 1503963 - DNA, 25 bp, Homo sapien
ggagtgttacgacccagatacagac

SEQ ID NO: 1503964 - DNA, 25 bp, Homo sapien
gccctggactgttacaaccccatga

SEQ ID NO: 1503965 - DNA, 25 bp, Homo sapien
gagcgtgccccgtaaccgcatcggg

SEQ ID NO: 1503966 - DNA, 25 bp, Homo sapien
tgaccaatcagtggtcgccctgcgc

SEQ ID NO: 1503967 - DNA, 25 bp, Homo sapien
gatggccacatctatgccgtcggcg

SEQ ID NO: 1503968 - DNA, 25 bp, Homo sapien
aagatcttcgaggagctcaccctgc

SEQ ID NO: 1503969 - DNA, 25 bp, Homo sapien
ttccgacagtcgctcagctacctgg

SEQ ID NO: 1503970 - DNA, 25 bp, Homo sapien
gaagtgcgagatcctgcagtccgac

SEQ ID NO: 1503971 - DNA, 25 bp, Homo sapien
tacctggaggcttacaaccccagtg

SEQ ID NO: 1503972 - DNA, 25 bp, Homo sapien
tcaactgggtcaagtacgactgcga

SEQ ID NO: 1503973 - DNA, 25 bp, Homo sapien
tcttccacgcctgcatcaactgggt

SEQ ID NO: 1503974 - DNA, 25 bp, Homo sapien
gcaagaggagttcttcaacctgtcc

SEQ ID NO: 1503975 - DNA, 25 bp, Homo sapien
acgacctgaacgtgcgctgcgagtc

SEQ ID NO: 1503976 - DNA, 25 bp, Homo sapien
tttgaggttacagtggcacctctgc

SEQ ID NO: 1503977 - DNA, 25 bp, Homo sapien
ggtgagttggctcgtgcgtataatc

SEQ ID NO: 1503978 - DNA, 25 bp, Homo sapien
ttggctcgtgcgtataatctcagtg

SEQ ID NO: 1503979 - DNA, 25 bp, Homo sapien
aataaactcagacatcccatctcta

SEQ ID NO: 1503980 - DNA, 25 bp, Homo sapien
catgtaccagatcgacagcgttgtc

SEQ ID NO: 1503981 - DNA, 25 bp, Homo sapien
gcgtgcccgggagtacatctacatg

SEQ ID NO: 1503982 - DNA, 25 bp, Homo sapien
tttggcatcatgaacgagctgcggc

SEQ ID NO: 1503983 - DNA, 25 bp, Homo sapien
tggaggatcataccaagcaggcctt

SEQ ID NO: 1503984 - DNA, 25 bp, Homo sapien
ccacgcggctaagcgcgctcagggt

SEQ ID NO: 1503985 - DNA, 25 bp, Homo sapien
ggaccacgcggctaagcgcgctcag

SEQ ID NO: 1503986 - DNA, 25 bp, Homo sapien
actccccgcgactcggaccacgcgg

SEQ ID NO: 1503987 - DNA, 25 bp, Homo sapien
taagcgcgctcagggtcgcgtgccc

SEQ ID NO: 1503988 - DNA, 25 bp, Homo sapien
tcactgtgcccggagcccctgcgcg

SEQ ID NO: 1503989 - DNA, 25 bp, Homo sapien
actgtgcccggagcccctgcgcgcc

SEQ ID NO: 1503990 - DNA, 25 bp, Homo sapien
cactgtgcccggagcccctgcgcgc

SEQ ID NO: 1503991 - DNA, 25 bp, Homo sapien
gcgatggagcgtccctgggaggaca

SEQ ID NO: 1503992 - DNA, 25 bp, Homo sapien
ctcgcctgtgccagtcgccgccggg

SEQ ID NO: 1503993 - DNA, 25 bp, Homo sapien
agggctcgcctgtgccagtcgccgc

SEQ ID NO: 1503994 - DNA, 25 bp, Homo sapien
tgccgcggcgagtggcacaggctgg

SEQ ID NO: 1503995 - DNA, 25 bp, Homo sapien
ccgtctggaagttcctgggaagtcg

SEQ ID NO: 1503996 - DNA, 25 bp, Homo sapien
gggcaaagggcacggtcctggagaa

SEQ ID NO: 1503997 - DNA, 25 bp, Homo sapien
cacggtcctggagaaggtcgcagca

SEQ ID NO: 1503998 - DNA, 25 bp, Homo sapien
ccagcgggactggtcgttggaggag

SEQ ID NO: 1503999 - DNA, 25 bp, Homo sapien
tatcgctgagcggtgagacaatcac

SEQ ID NO: 1504000 - DNA, 25 bp, Homo sapien
gacaatcacctatcgccaagcaatg

SEQ ID NO: 1504001 - DNA, 25 bp, Homo sapien
agatgggaccttcgccaattgccga

SEQ ID NO: 1504002 - DNA, 25 bp, Homo sapien
aattgccgagcggtgagaccatcgc

SEQ ID NO: 1504003 - DNA, 25 bp, Homo sapien
ctccttatcacaccgccaggagcgc

SEQ ID NO: 1504004 - DNA, 25 bp, Homo sapien
cccggatgacggtgggcgtggccaa

SEQ ID NO: 1504005 - DNA, 25 bp, Homo sapien
gccaggaccccggatgacggtgggc

SEQ ID NO: 1504006 - DNA, 25 bp, Homo sapien
tgccccgatcccgggtcgccaggcg

SEQ ID NO: 1504007 - DNA, 25 bp, Homo sapien
cgccgctgctaccgcagccatcgcc

SEQ ID NO: 1504008 - DNA, 25 bp, Homo sapien
ccgctgctaccgcagccatcgccat

SEQ ID NO: 1504009 - DNA, 25 bp, Homo sapien
cgggccaggcaacagccgccgccgc

SEQ ID NO: 1504010 - DNA, 25 bp, Homo sapien
cgccgccgctgctaccgcagccatc

SEQ ID NO: 1504011 - DNA, 25 bp, Homo sapien
aagggcgacccgcagccggttcacg

SEQ ID NO: 1504012 - DNA, 25 bp, Homo sapien
cgctgccccccaagggcgacccgca

SEQ ID NO: 1504013 - DNA, 25 bp, Homo sapien
tgccccccaagggcgacccgcagcc

SEQ ID NO: 1504014 - DNA, 25 bp, Homo sapien
ccaagggcgacccgcagccggttca

SEQ ID NO: 1504015 - DNA, 25 bp, Homo sapien
gctgctccggtactgcgcggcggcc

SEQ ID NO: 1504016 - DNA, 25 bp, Homo sapien
ctgctccggtactgcgcggcggccg

SEQ ID NO: 1504017 - DNA, 25 bp, Homo sapien
tgctccggtactgcgcggcggccgg

SEQ ID NO: 1504018 - DNA, 25 bp, Homo sapien
cccgcggcctgcgggcctcgggccg

SEQ ID NO: 1504019 - DNA, 25 bp, Homo sapien
gggccgctggctccggaaggcccca

SEQ ID NO: 1504020 - DNA, 25 bp, Homo sapien
caggctgtcaggaacttggccttga

SEQ ID NO: 1504021 - DNA, 25 bp, Homo sapien
cttggccttgaacttgtccacttcg

SEQ ID NO: 1504022 - DNA, 25 bp, Homo sapien
gaacttgtccacttcgtccggctca

SEQ ID NO: 1504023 - DNA, 25 bp, Homo sapien
gcacttgcatgacagcaacagcgct

SEQ ID NO: 1504024 - DNA, 25 bp, Homo sapien
gaagcacttgcatgacagcaacagc

SEQ ID NO: 1504025 - DNA, 25 bp, Homo sapien
ctggggagacgtaggggcagcgccc

SEQ ID NO: 1504026 - DNA, 25 bp, Homo sapien
agcgcccagcgagatgaagcacttg

SEQ ID NO: 1504027 - DNA, 25 bp, Homo sapien
tgctaaagctggtccggcttttaac

SEQ ID NO: 1504028 - DNA, 25 bp, Homo sapien
gagatcttgctaaagctggtccggc

SEQ ID NO: 1504029 - DNA, 25 bp, Homo sapien
cctcgccctcgaaacggtagcggcg

SEQ ID NO: 1504030 - DNA, 25 bp, Homo sapien
ctcgaaacggtagcggcggccacag

SEQ ID NO: 1504031 - DNA, 25 bp, Homo sapien
ctacaagagcgggtctgtcagctgc

SEQ ID NO: 1504032 - DNA, 25 bp, Homo sapien
acaagagcgggtctgtcagctgcca

SEQ ID NO: 1504033 - DNA, 25 bp, Homo sapien
gacactccggcgggcgtggagaggc

SEQ ID NO: 1504034 - DNA, 25 bp, Homo sapien
actccggcgggcgtggagaggcctc

SEQ ID NO: 1504035 - DNA, 25 bp, Homo sapien
catctggccgctgcgtaacatgcac

SEQ ID NO: 1504036 - DNA, 25 bp, Homo sapien
agccacaggcgggacacaaagtccc

SEQ ID NO: 1504037 - DNA, 25 bp, Homo sapien
atcatctggccgctgcgtaacatgc

SEQ ID NO: 1504038 - DNA, 25 bp, Homo sapien
tcccgctggaaacgctgtatgtcac

SEQ ID NO: 1504039 - DNA, 25 bp, Homo sapien
actcttataaacaactctcatctct

SEQ ID NO: 1504040 - DNA, 25 bp, Homo sapien
ctttaccttgccaaattacaggtgc

SEQ ID NO: 1504041 - DNA, 25 bp, Homo sapien
taccttgccaaattacaggtgcctg

SEQ ID NO: 1504042 - DNA, 25 bp, Homo sapien
tgaaactcttataaacaactctcat

SEQ ID NO: 1504043 - DNA, 25 bp, Homo sapien
ctgagctctgcccaagctccaccag

SEQ ID NO: 1504044 - DNA, 25 bp, Homo sapien
caggcccatggtaccggctgggaga

SEQ ID NO: 1504045 - DNA, 25 bp, Homo sapien
ggtggtcggcgaaccaggacacaat

SEQ ID NO: 1504046 - DNA, 25 bp, Homo sapien
caatctgccggtgccggcgttcctg

SEQ ID NO: 1504047 - DNA, 25 bp, Homo sapien
atgtgtgccactagcgatggcccat

SEQ ID NO: 1504048 - DNA, 25 bp, Homo sapien
gtgtgccactagcgatggcccatac

SEQ ID NO: 1504049 - DNA, 25 bp, Homo sapien
tgtgtgccactagcgatggcccata

SEQ ID NO: 1504050 - DNA, 25 bp, Homo sapien
gatgtgtgccactagcgatggccca

SEQ ID NO: 1504051 - DNA, 25 bp, Homo sapien
gcgggtacccagcaactcccgtgat

SEQ ID NO: 1504052 - DNA, 25 bp, Homo sapien
agtgcctgcgggtacccagcaactc

SEQ ID NO: 1504053 - DNA, 25 bp, Homo sapien
ctgagtgcctgcgggtacccagcaa

SEQ ID NO: 1504054 - DNA, 25 bp, Homo sapien
gcaactcccgtgatccctgcagcag

SEQ ID NO: 1504055 - DNA, 25 bp, Homo sapien
aggcgggtgacgtcggagcagctct

SEQ ID NO: 1504056 - DNA, 25 bp, Homo sapien
tgagaaacgtacaccaccaggcggg

SEQ ID NO: 1504057 - DNA, 25 bp, Homo sapien
agtcctgagaaacgtacaccaccag

SEQ ID NO: 1504058 - DNA, 25 bp, Homo sapien
ctgtgcagtcctgagaaacgtacac

SEQ ID NO: 1504059 - DNA, 25 bp, Homo sapien
aaatttacagaggtagccgggcacg

SEQ ID NO: 1504060 - DNA, 25 bp, Homo sapien
gaagtagattagacccattttggag

SEQ ID NO: 1504061 - DNA, 25 bp, Homo sapien
tgccttgcagctacgtaagcccatt

SEQ ID NO: 1504062 - DNA, 25 bp, Homo sapien
cccaaacacctacaattttgcataa

SEQ ID NO: 1504063 - DNA, 25 bp, Homo sapien
aggcgtgccacatccgccttgtaca

SEQ ID NO: 1504064 - DNA, 25 bp, Homo sapien
ttcacgcagggcacatacacggggt

SEQ ID NO: 1504065 - DNA, 25 bp, Homo sapien
ccagtcgcacgggcaccaggatgac

SEQ ID NO: 1504066 - DNA, 25 bp, Homo sapien
gggttgagagtctcgccacccagtc

SEQ ID NO: 1504067 - DNA, 25 bp, Homo sapien
ggcacagctcgcaacgcaggagttc

SEQ ID NO: 1504068 - DNA, 25 bp, Homo sapien
caatgaagtacagtgagtgtcgcgg

SEQ ID NO: 1504069 - DNA, 25 bp, Homo sapien
aagtacagtgagtgtcgcggtttcc

SEQ ID NO: 1504070 - DNA, 25 bp, Homo sapien
cttggtagccaatgaagtacagtga

SEQ ID NO: 1504071 - DNA, 25 bp, Homo sapien
gtgagtgtcgcggtttcccacccat

SEQ ID NO: 1504072 - DNA, 25 bp, Homo sapien
caggtgtgagtgggggtgcggtggg

SEQ ID NO: 1504073 - DNA, 25 bp, Homo sapien
tgcagggggtgcaggtgtgagtggg

SEQ ID NO: 1504074 - DNA, 25 bp, Homo sapien
ggtgcaggtgtgagtgggggtgcgg

SEQ ID NO: 1504075 - DNA, 25 bp, Homo sapien
ctgcagggggtgcaggtgtgagtgg

SEQ ID NO: 1504076 - DNA, 25 bp, Homo sapien
atccacagtgggctggcagtagtga

SEQ ID NO: 1504077 - DNA, 25 bp, Homo sapien
gacatccacagtgggctggcagtag

SEQ ID NO: 1504078 - DNA, 25 bp, Homo sapien
agtagtgagggtccaggtacagcag

SEQ ID NO: 1504079 - DNA, 25 bp, Homo sapien
tgacatccacagtgggctggcagta

SEQ ID NO: 1504080 - DNA, 25 bp, Homo sapien
cttgggtccatcttggcaaaggcca

SEQ ID NO: 1504081 - DNA, 25 bp, Homo sapien
ctccagcatagaagcccacggtaca

SEQ ID NO: 1504082 - DNA, 25 bp, Homo sapien
ggtacagcttgggtccatcttggca

SEQ ID NO: 1504083 - DNA, 25 bp, Homo sapien
tagaagcccacggtacagcttgggt

SEQ ID NO: 1504084 - DNA, 25 bp, Homo sapien
gccacaaacagtgccaagccatatt

SEQ ID NO: 1504085 - DNA, 25 bp, Homo sapien
acaaacagtgccaagccatattcct

SEQ ID NO: 1504086 - DNA, 25 bp, Homo sapien
cacaaacagtgccaagccatattcc

SEQ ID NO: 1504087 - DNA, 25 bp, Homo sapien
ccacaaacagtgccaagccatattc

SEQ ID NO: 1504088 - DNA, 25 bp, Homo sapien
gaacatggggtaccgctctgtggct

SEQ ID NO: 1504089 - DNA, 25 bp, Homo sapien
gctggggcgtttggccctgaggagc

SEQ ID NO: 1504090 - DNA, 25 bp, Homo sapien
aggagccgccctgtgcgagggagcc

SEQ ID NO: 1504091 - DNA, 25 bp, Homo sapien
ctgtgcgagggagccggagtgtggg

SEQ ID NO: 1504092 - DNA, 25 bp, Homo sapien
ccgggcgtccagtgcaaactacagt

SEQ ID NO: 1504093 - DNA, 25 bp, Homo sapien
ctacagtacgtgagtcaggccctga

SEQ ID NO: 1504094 - DNA, 25 bp, Homo sapien
tcatcactgccagagctcaagatcc

SEQ ID NO: 1504095 - DNA, 25 bp, Homo sapien
gacaacaggaagtaccatcatcact

SEQ ID NO: 1504096 - DNA, 25 bp, Homo sapien
atcccctcagaacgctgcgcccagc

SEQ ID NO: 1504097 - DNA, 25 bp, Homo sapien
ccgtgacttggagctctcacctcga

SEQ ID NO: 1504098 - DNA, 25 bp, Homo sapien
gtgacttggagctctcacctcgaga

SEQ ID NO: 1504099 - DNA, 25 bp, Homo sapien
gacttggagctctcacctcgagaca

SEQ ID NO: 1504100 - DNA, 25 bp, Homo sapien
gctggggaaggaagatcacttaagg

SEQ ID NO: 1504101 - DNA, 25 bp, Homo sapien
tggggaaggaagatcacttaaggcc

SEQ ID NO: 1504102 - DNA, 25 bp, Homo sapien
ttaaggccatgagtttgaggctaca

SEQ ID NO: 1504103 - DNA, 25 bp, Homo sapien
acttaaggccatgagtttgaggcta

SEQ ID NO: 1504104 - DNA, 25 bp, Homo sapien
aagaggaagcccctgtatcacccca

SEQ ID NO: 1504105 - DNA, 25 bp, Homo sapien
atgcttggtggatgcgagttcagcc

SEQ ID NO: 1504106 - DNA, 25 bp, Homo sapien
aaacggctgcacttccgccagctgg

SEQ ID NO: 1504107 - DNA, 25 bp, Homo sapien
cacccacaagtactatctgctgcag

SEQ ID NO: 1504108 - DNA, 25 bp, Homo sapien
gagtgaagtcatgacctccagggag

SEQ ID NO: 1504109 - DNA, 25 bp, Homo sapien
ggagcgtcccaaatcaataagaagg

SEQ ID NO: 1504110 - DNA, 25 bp, Homo sapien
ggccacagccacctaaacggttcag

SEQ ID NO: 1504111 - DNA, 25 bp, Homo sapien
tcagagacctgaagtgtgcacgttg

SEQ ID NO: 1504112 - DNA, 25 bp, Homo sapien
tcctggacaccctgaaggtcctagt

SEQ ID NO: 1504113 - DNA, 25 bp, Homo sapien
gtaccagtccagtccatgacgcagc

SEQ ID NO: 1504114 - DNA, 25 bp, Homo sapien
cactgctgtggtcagctttctggca

SEQ ID NO: 1504115 - DNA, 25 bp, Homo sapien
tgtcaacgtgcctgatggcaccggg

SEQ ID NO: 1504116 - DNA, 25 bp, Homo sapien
cttctgcaccgggagctggtgcatc

SEQ ID NO: 1504117 - DNA, 25 bp, Homo sapien
taagcgggatgaggatcgagacccc

SEQ ID NO: 1504118 - DNA, 25 bp, Homo sapien
tttgcaggccgccagtgtcgacatg

SEQ ID NO: 1504119 - DNA, 25 bp, Homo sapien
ggcaagacggcgctgcaggtgaggc

SEQ ID NO: 1504120 - DNA, 25 bp, Homo sapien
ttatagtcgtagtcgcccaccatca

SEQ ID NO: 1504121 - DNA, 25 bp, Homo sapien
tgggattatagtcgtagtcgcccac

SEQ ID NO: 1504122 - DNA, 25 bp, Homo sapien
ggattatagtcgtagtcgcccacca

SEQ ID NO: 1504123 - DNA, 25 bp, Homo sapien
gattatagtcgtagtcgcccaccat

SEQ ID NO: 1504124 - DNA, 25 bp, Homo sapien
ttacagccccggatgcagattttag

SEQ ID NO: 1504125 - DNA, 25 bp, Homo sapien
gagtgccttcttgcaattacctgcc

SEQ ID NO: 1504126 - DNA, 25 bp, Homo sapien
ttacctgccttagcgggtgttgcgg

SEQ ID NO: 1504127 - DNA, 25 bp, Homo sapien
ggtgttgcgggtccctccttcacag

SEQ ID NO: 1504128 - DNA, 25 bp, Homo sapien
gagtccgagccagcgcgaccccagc

SEQ ID NO: 1504129 - DNA, 25 bp, Homo sapien
cggggagcggagtccgagccagcgc

SEQ ID NO: 1504130 - DNA, 25 bp, Homo sapien
ggggagcggagtccgagccagcgcg

SEQ ID NO: 1504131 - DNA, 25 bp, Homo sapien
agcggagtccgagccagcgcgaccc

SEQ ID NO: 1504132 - DNA, 25 bp, Homo sapien
gctccgtttttccgctcgtcctcca

SEQ ID NO: 1504133 - DNA, 25 bp, Homo sapien
ctccgtttttccgctcgtcctccat

SEQ ID NO: 1504134 - DNA, 25 bp, Homo sapien
ggcggcccctgaccggaggcggctc

SEQ ID NO: 1504135 - DNA, 25 bp, Homo sapien
gaggcggcccctgaccggaggcggc

SEQ ID NO: 1504136 - DNA, 25 bp, Homo sapien
cggcccctgaccggaggcggctcct

SEQ ID NO: 1504137 - DNA, 25 bp, Homo sapien
gcccctgaccggaggcggctcctac

SEQ ID NO: 1504138 - DNA, 25 bp, Homo sapien
ctcttgccaagggtgggctggctgg

SEQ ID NO: 1504139 - DNA, 25 bp, Homo sapien
ctccatggtcagagtttattgtttt

SEQ ID NO: 1504140 - DNA, 25 bp, Homo sapien
cagagtttattgttttggattgcag

SEQ ID NO: 1504141 - DNA, 25 bp, Homo sapien
tatgatctctgctgaggaatgcact

SEQ ID NO: 1504142 - DNA, 25 bp, Homo sapien
ggactacccacacaccattgcaccc

SEQ ID NO: 1504143 - DNA, 25 bp, Homo sapien
actacccacacaccattgcacccag

SEQ ID NO: 1504144 - DNA, 25 bp, Homo sapien
tgggactacccacacaccattgcac

SEQ ID NO: 1504145 - DNA, 25 bp, Homo sapien
ctgggactacccacacaccattgca

SEQ ID NO: 1504146 - DNA, 25 bp, Homo sapien
accctcccgagtctggagggaggca

SEQ ID NO: 1504147 - DNA, 25 bp, Homo sapien
aaaccggtcagaccggcccgagctg

SEQ ID NO: 1504148 - DNA, 25 bp, Homo sapien
actgaccgcgcgactggcggcggct

SEQ ID NO: 1504149 - DNA, 25 bp, Homo sapien
ctgcccagactaagggacccgggag

SEQ ID NO: 1504150 - DNA, 25 bp, Homo sapien
tcccgtagtagtggggccgctcgtc

SEQ ID NO: 1504151 - DNA, 25 bp, Homo sapien
agtagtggggccgctcgtcccccat

SEQ ID NO: 1504152 - DNA, 25 bp, Homo sapien
tagtagtggggccgctcgtccccca

SEQ ID NO: 1504153 - DNA, 25 bp, Homo sapien
gggagagtaaggagggtcgtctgcg

SEQ ID NO: 1504154 - DNA, 25 bp, Homo sapien
tggtgaccaccacggaaccaggtgg

SEQ ID NO: 1504155 - DNA, 25 bp, Homo sapien
aagatctgaggtgggatagggggaa

SEQ ID NO: 1504156 - DNA, 25 bp, Homo sapien
agagtaaggagggtcgtctgcgagg

SEQ ID NO: 1504157 - DNA, 25 bp, Homo sapien
aatgggtcctttgaaagtgggatca

SEQ ID NO: 1504158 - DNA, 25 bp, Homo sapien
gtgggatcatacttctgtggcgttc

SEQ ID NO: 1504159 - DNA, 25 bp, Homo sapien
gggtcctttgaaagtgggatcatac

SEQ ID NO: 1504160 - DNA, 25 bp, Homo sapien
ctattgtaaatgggtcctttgaaag

SEQ ID NO: 1504161 - DNA, 25 bp, Homo sapien
tatgatgcctacagccacgtagccc

SEQ ID NO: 1504162 - DNA, 25 bp, Homo sapien
acacacagcatatgatatccgtgca

SEQ ID NO: 1504163 - DNA, 25 bp, Homo sapien
ctatgatgcctacagccacgtagcc

SEQ ID NO: 1504164 - DNA, 25 bp, Homo sapien
acagcatatgatatccgtgcagccc

SEQ ID NO: 1504165 - DNA, 25 bp, Homo sapien
agaactcgccccggctgtcagtggg

SEQ ID NO: 1504166 - DNA, 25 bp, Homo sapien
tgcccgcagaactcgccccggctgt

SEQ ID NO: 1504167 - DNA, 25 bp, Homo sapien
gggtagatcacctttcgagggtctc

SEQ ID NO: 1504168 - DNA, 25 bp, Homo sapien
gtagatcacctttcgagggtctcca

SEQ ID NO: 1504169 - DNA, 25 bp, Homo sapien
agagagattgagacacctgccctag

SEQ ID NO: 1504170 - DNA, 25 bp, Homo sapien
tgtccccaaggactagactagtggc

SEQ ID NO: 1504171 - DNA, 25 bp, Homo sapien
gaagtgacgccactcaggctatgct

SEQ ID NO: 1504172 - DNA, 25 bp, Homo sapien
gtctctcccgcccttaaaatgtgtg

SEQ ID NO: 1504173 - DNA, 25 bp, Homo sapien
ggggagtgggacattggaattccag

SEQ ID NO: 1504174 - DNA, 25 bp, Homo sapien
tggggagtgggacattggaattcca

SEQ ID NO: 1504175 - DNA, 25 bp, Homo sapien
ggagtgggacattggaattccagca

SEQ ID NO: 1504176 - DNA, 25 bp, Homo sapien
gggagtgggacattggaattccagc

SEQ ID NO: 1504177 - DNA, 25 bp, Homo sapien
cattcaggtacgtgaggtagcggtc

SEQ ID NO: 1504178 - DNA, 25 bp, Homo sapien
tcaaagtcccgggagctgcgagcat

SEQ ID NO: 1504179 - DNA, 25 bp, Homo sapien
tattgttcttgaagccaggaacaca

SEQ ID NO: 1504180 - DNA, 25 bp, Homo sapien
gaacacagaactgcttatagtactc

SEQ ID NO: 1504181 - DNA, 25 bp, Homo sapien
accatcttgaagcacctcagccact

SEQ ID NO: 1504182 - DNA, 25 bp, Homo sapien
catcttgaagcacctcagccactcc

SEQ ID NO: 1504183 - DNA, 25 bp, Homo sapien
ccatcttgaagcacctcagccactc

SEQ ID NO: 1504184 - DNA, 25 bp, Homo sapien
aggacacccttgtaggcgtggatag

SEQ ID NO: 1504185 - DNA, 25 bp, Homo sapien
atagcggggaagcatctccgggcca

SEQ ID NO: 1504186 - DNA, 25 bp, Homo sapien
tgcccatcctcataggtcgtctcat

SEQ ID NO: 1504187 - DNA, 25 bp, Homo sapien
gacacccttgtaggcgtggatagcg

SEQ ID NO: 1504188 - DNA, 25 bp, Homo sapien
taccaagagacggtgtaatcttcaa

SEQ ID NO: 1504189 - DNA, 25 bp, Homo sapien
aatcttcaaatatgcgcatggcgag

SEQ ID NO: 1504190 - DNA, 25 bp, Homo sapien
tatgcgcatggcgagttgccgcgcc

SEQ ID NO: 1504191 - DNA, 25 bp, Homo sapien
caagagacggtgtaatcttcaaata

SEQ ID NO: 1504192 - DNA, 25 bp, Homo sapien
ccatgatgatcatcacccagaccat

SEQ ID NO: 1504193 - DNA, 25 bp, Homo sapien
agaatcaccatgatgatcatcaccc

SEQ ID NO: 1504194 - DNA, 25 bp, Homo sapien
ataccagccaggaagcgaagcagga

SEQ ID NO: 1504195 - DNA, 25 bp, Homo sapien
accagccaggaagcgaagcaggatg

SEQ ID NO: 1504196 - DNA, 25 bp, Homo sapien
agcaaacatcgaggcttctgcctca

SEQ ID NO: 1504197 - DNA, 25 bp, Homo sapien
gaagcaaacatcgaggcttctgcct

SEQ ID NO: 1504198 - DNA, 25 bp, Homo sapien
agaagcaaacatcgaggcttctgcc

SEQ ID NO: 1504199 - DNA, 25 bp, Homo sapien
acagaagcaaacatcgaggcttctg

SEQ ID NO: 1504200 - DNA, 25 bp, Homo sapien
caggtacacccggaaatccgtctga

SEQ ID NO: 1504201 - DNA, 25 bp, Homo sapien
gggagtactccatgtagcagtgaaa

SEQ ID NO: 1504202 - DNA, 25 bp, Homo sapien
gaggtccaccaaagagacatcagag

SEQ ID NO: 1504203 - DNA, 25 bp, Homo sapien
cacgcagtcgggagtactccatgta

SEQ ID NO: 1504204 - DNA, 25 bp, Homo sapien
tgcaaagggcaaaggctgagccggc

SEQ ID NO: 1504205 - DNA, 25 bp, Homo sapien
gcaggaatgggagactgtgactcac

SEQ ID NO: 1504206 - DNA, 25 bp, Homo sapien
tccctccaaggcctcatgtgggggc

SEQ ID NO: 1504207 - DNA, 25 bp, Homo sapien
tgagccggctgggctccccactccc

SEQ ID NO: 1504208 - DNA, 25 bp, Homo sapien
tctcttccggagaaagatgagcagc

SEQ ID NO: 1504209 - DNA, 25 bp, Homo sapien
tgataatgacttcaaggatactcag

SEQ ID NO: 1504210 - DNA, 25 bp, Homo sapien
tctttgatgagtgcaatcgcgatga

SEQ ID NO: 1504211 - DNA, 25 bp, Homo sapien
gacttcaaggatactcagaatgatc

SEQ ID NO: 1504212 - DNA, 25 bp, Homo sapien
cagtgctggcccagtaggcgatgca

SEQ ID NO: 1504213 - DNA, 25 bp, Homo sapien
agagcaaggagcacatgacgtatcc

SEQ ID NO: 1504214 - DNA, 25 bp, Homo sapien
gcccagtaggcgatgcagaggcaca

SEQ ID NO: 1504215 - DNA, 25 bp, Homo sapien
aggagcacatgacgtatcccacagc

SEQ ID NO: 1504216 - DNA, 25 bp, Homo sapien
aagcagaggtctaggactgaggacc

SEQ ID NO: 1504217 - DNA, 25 bp, Homo sapien
gcaaagttggtctttagccatccct

SEQ ID NO: 1504218 - DNA, 25 bp, Homo sapien
taagctgcaggtcacttctaggcaa

SEQ ID NO: 1504219 - DNA, 25 bp, Homo sapien
ttttgtgggaaagaatccattctcc

SEQ ID NO: 1504220 - DNA, 25 bp, Homo sapien
gcaggttttcgcagtaaatgggcag

SEQ ID NO: 1504221 - DNA, 25 bp, Homo sapien
aaagatcttatagaccgcttcgttg

SEQ ID NO: 1504222 - DNA, 25 bp, Homo sapien
ccgcttcgttggaagtggacaggaa

SEQ ID NO: 1504223 - DNA, 25 bp, Homo sapien
ctgggttgcaggttttcgcagtaaa

SEQ ID NO: 1504224 - DNA, 25 bp, Homo sapien
gaaacaagacgtggccatcactggg

SEQ ID NO: 1504225 - DNA, 25 bp, Homo sapien
aaaccatgaggtaggacaggagaca

SEQ ID NO: 1504226 - DNA, 25 bp, Homo sapien
taagagttcagaatatggcttgtgc

SEQ ID NO: 1504227 - DNA, 25 bp, Homo sapien
gaaccgagtccaaaaagaggcacca

SEQ ID NO: 1504228 - DNA, 25 bp, Homo sapien
gtggtagcccgactcaccaccgtag

SEQ ID NO: 1504229 - DNA, 25 bp, Homo sapien
aacatgaaggcattgaagatctgca

SEQ ID NO: 1504230 - DNA, 25 bp, Homo sapien
ccggcttgcgcagggcccagtagta

SEQ ID NO: 1504231 - DNA, 25 bp, Homo sapien
ccagtagtaggaggcaaaggccccg

SEQ ID NO: 1504232 - DNA, 25 bp, Homo sapien
ctgagcgcccggccaaaggcagaga

SEQ ID NO: 1504233 - DNA, 25 bp, Homo sapien
tgagcgcccggccaaaggcagagaa

SEQ ID NO: 1504234 - DNA, 25 bp, Homo sapien
gcgcccggccaaaggcagagaagag

SEQ ID NO: 1504235 - DNA, 25 bp, Homo sapien
agcgcccggccaaaggcagagaaga

SEQ ID NO: 1504236 - DNA, 25 bp, Homo sapien
cgcgccaaaggccagggagcctgtg

SEQ ID NO: 1504237 - DNA, 25 bp, Homo sapien
aaaggccagggagcctgtgtggtac

SEQ ID NO: 1504238 - DNA, 25 bp, Homo sapien
ccaaaggccagggagcctgtgtggt

SEQ ID NO: 1504239 - DNA, 25 bp, Homo sapien
cgccaaaggccagggagcctgtgtg

SEQ ID NO: 1504240 - DNA, 25 bp, Homo sapien
tcgagtatcacacggatgatctgca

SEQ ID NO: 1504241 - DNA, 25 bp, Homo sapien
ctgatccaggtactcgagtatcaca

SEQ ID NO: 1504242 - DNA, 25 bp, Homo sapien
tactcgagtatcacacggatgatct

SEQ ID NO: 1504243 - DNA, 25 bp, Homo sapien
caggtactcgagtatcacacggatg

SEQ ID NO: 1504244 - DNA, 25 bp, Homo sapien
tgtcccctcaacagcaagaattcca

SEQ ID NO: 1504245 - DNA, 25 bp, Homo sapien
cctgctctcttcagcgcaaatatat

SEQ ID NO: 1504246 - DNA, 25 bp, Homo sapien
gcgcccggctaataaaccagtctta

SEQ ID NO: 1504247 - DNA, 25 bp, Homo sapien
tatataccactccaattcactctgg

SEQ ID NO: 1504248 - DNA, 25 bp, Homo sapien
caatgtccaggtctcctgagtccac

SEQ ID NO: 1504249 - DNA, 25 bp, Homo sapien
aatgtccaggtctcctgagtccacg

SEQ ID NO: 1504250 - DNA, 25 bp, Homo sapien
agcatttgagacaggtcatgaggca

SEQ ID NO: 1504251 - DNA, 25 bp, Homo sapien
catgatgtaggcattcctattaagg

SEQ ID NO: 1504252 - DNA, 25 bp, Homo sapien
atttgagacaggtcatgaggcactt

SEQ ID NO: 1504253 - DNA, 25 bp, Homo sapien
tgatgtaggcattcctattaaggaa

SEQ ID NO: 1504254 - DNA, 25 bp, Homo sapien
ccagcaggagctggcgggttggttg

SEQ ID NO: 1504255 - DNA, 25 bp, Homo sapien
agcaggagctggcgggttggttggg

SEQ ID NO: 1504256 - DNA, 25 bp, Homo sapien
tggttgggggtcccaggcccactca

SEQ ID NO: 1504257 - DNA, 25 bp, Homo sapien
caggagctggcgggttggttggggg

SEQ ID NO: 1504258 - DNA, 25 bp, Homo sapien
tgcagaaattggtgccgtagatggc

SEQ ID NO: 1504259 - DNA, 25 bp, Homo sapien
gatgtttctcatgagcaggaagaag

SEQ ID NO: 1504260 - DNA, 25 bp, Homo sapien
tcctggccgaggtgcagaaattggt

SEQ ID NO: 1504261 - DNA, 25 bp, Homo sapien
ggaagaaggcattcctggccgaggt

SEQ ID NO: 1504262 - DNA, 25 bp, Homo sapien
gatcagaagtttgcccaacaggaag

SEQ ID NO: 1504263 - DNA, 25 bp, Homo sapien
caacgatcagaagtttgcccaacag

SEQ ID NO: 1504264 - DNA, 25 bp, Homo sapien
taccaacgatcagaagtttgcccaa

SEQ ID NO: 1504265 - DNA, 25 bp, Homo sapien
ccacactaccaacgatcagaagttt

SEQ ID NO: 1504266 - DNA, 25 bp, Homo sapien
tatcctgcacgatcctgatacggtg

SEQ ID NO: 1504267 - DNA, 25 bp, Homo sapien
gggtggtgctgtatcctgcacgatc

SEQ ID NO: 1504268 - DNA, 25 bp, Homo sapien
tataggaacccagtaataattgagg

SEQ ID NO: 1504269 - DNA, 25 bp, Homo sapien
acgatcctgatacggtgggtgaaga

SEQ ID NO: 1504270 - DNA, 25 bp, Homo sapien
catccacacaaaatcctctttctct

SEQ ID NO: 1504271 - DNA, 25 bp, Homo sapien
gagacagggtctcacggtctcactc

SEQ ID NO: 1504272 - DNA, 25 bp, Homo sapien
ctctttctctctctccgtctttttt

SEQ ID NO: 1504273 - DNA, 25 bp, Homo sapien
gtagcccaggctggattgtagtggt

SEQ ID NO: 1504274 - DNA, 25 bp, Homo sapien
tgtgcaatcaagtaggagccaacga

SEQ ID NO: 1504275 - DNA, 25 bp, Homo sapien
aaccgtgtgcaatcaagtaggagcc

SEQ ID NO: 1504276 - DNA, 25 bp, Homo sapien
gctgaagaaaccgtgtgcaatcaag

SEQ ID NO: 1504277 - DNA, 25 bp, Homo sapien
tcaagtaggagccaacgatcaccgt

SEQ ID NO: 1504278 - DNA, 25 bp, Homo sapien
ctcagctcgggcgacatgaagtagg

SEQ ID NO: 1504279 - DNA, 25 bp, Homo sapien
aagtagggtcgctcctgagagccgt

SEQ ID NO: 1504280 - DNA, 25 bp, Homo sapien
cactccccttcaacaggatgtctct

SEQ ID NO: 1504281 - DNA, 25 bp, Homo sapien
tgagagccgtcattcctttccaggt

SEQ ID NO: 1504282 - DNA, 25 bp, Homo sapien
cccccagtctacatggaggaaacct

SEQ ID NO: 1504283 - DNA, 25 bp, Homo sapien
gggcagactgtagtgggctccgagg

SEQ ID NO: 1504284 - DNA, 25 bp, Homo sapien
gagggacacacaggatccccacact

SEQ ID NO: 1504285 - DNA, 25 bp, Homo sapien
tcagagggttagaaagcagacacac

SEQ ID NO: 1504286 - DNA, 25 bp, Homo sapien
caagagtttcttgagggtggaagac

SEQ ID NO: 1504287 - DNA, 25 bp, Homo sapien
ggaagacatgaagtaaggcctctcg

SEQ ID NO: 1504288 - DNA, 25 bp, Homo sapien
caggactccgctgccttcttgttgg

SEQ ID NO: 1504289 - DNA, 25 bp, Homo sapien
gccgagccgtcattcctctccaggt

SEQ ID NO: 1504290 - DNA, 25 bp, Homo sapien
cagacatcaagaggccccaatgggt

SEQ ID NO: 1504291 - DNA, 25 bp, Homo sapien
gggcagccatgaaaactccaagcgc

SEQ ID NO: 1504292 - DNA, 25 bp, Homo sapien
taaacgtgggtgttcactgtggcca

SEQ ID NO: 1504293 - DNA, 25 bp, Homo sapien
caagcgccccttggcataagaagga

SEQ ID NO: 1504294 - DNA, 25 bp, Homo sapien
actggcagaggaagtcgggaaattc

SEQ ID NO: 1504295 - DNA, 25 bp, Homo sapien
gagagctgtgtcaataactggcaga

SEQ ID NO: 1504296 - DNA, 25 bp, Homo sapien
aggaaggcactccttggcggcccca

SEQ ID NO: 1504297 - DNA, 25 bp, Homo sapien
actcccagctaggagggagcaaaag

SEQ ID NO: 1504298 - DNA, 25 bp, Homo sapien
tgagtttgacaagtttggcaaaagg

SEQ ID NO: 1504299 - DNA, 25 bp, Homo sapien
ggcaaaaggatcaagtgaggtgtgt

SEQ ID NO: 1504300 - DNA, 25 bp, Homo sapien
gggcccggtttgcccaggacatctg

SEQ ID NO: 1504301 - DNA, 25 bp, Homo sapien
gaatatggcaaaggggcaactggga

SEQ ID NO: 1504302 - DNA, 25 bp, Homo sapien
cactttattagtggttggaatgcag

SEQ ID NO: 1504303 - DNA, 25 bp, Homo sapien
taggcactttattagtggttggaat

SEQ ID NO: 1504304 - DNA, 25 bp, Homo sapien
ggcactttattagtggttggaatgc

SEQ ID NO: 1504305 - DNA, 25 bp, Homo sapien
caataggcactttattagtggttgg

SEQ ID NO: 1504306 - DNA, 25 bp, Homo sapien
gactgtttgccaatggttgtattta

SEQ ID NO: 1504307 - DNA, 25 bp, Homo sapien
cactgaaaagtcgaggccaaaggaa

SEQ ID NO: 1504308 - DNA, 25 bp, Homo sapien
cctcctccggagcaaagttgaaaag

SEQ ID NO: 1504309 - DNA, 25 bp, Homo sapien
tgctatagattacatgacctgtgac

SEQ ID NO: 1504310 - DNA, 25 bp, Homo sapien
catccgcaggcgtagttgctaggaa

SEQ ID NO: 1504311 - DNA, 25 bp, Homo sapien
tgttgattcagacgttcccaggatt

SEQ ID NO: 1504312 - DNA, 25 bp, Homo sapien
tgaatgcttccaggcgccttatgag

SEQ ID NO: 1504313 - DNA, 25 bp, Homo sapien
aaatatctcactagagggctcaccg

SEQ ID NO: 1504314 - DNA, 25 bp, Homo sapien
gacattttgcgcctgcgcggccgcc

SEQ ID NO: 1504315 - DNA, 25 bp, Homo sapien
cattttgcgcctgcgcggccgccat

SEQ ID NO: 1504316 - DNA, 25 bp, Homo sapien
gcgacattttgcgcctgcgcggccg

SEQ ID NO: 1504317 - DNA, 25 bp, Homo sapien
ggctgcgacattttgcgcctgcgcg

SEQ ID NO: 1504318 - DNA, 25 bp, Homo sapien
tccctttgccgtactgggagtcctc

SEQ ID NO: 1504319 - DNA, 25 bp, Homo sapien
tgctccatcatgtgacaatggcgaa

SEQ ID NO: 1504320 - DNA, 25 bp, Homo sapien
tcgcggtttccttcgccatctgaca

SEQ ID NO: 1504321 - DNA, 25 bp, Homo sapien
ctgacaacttttggcgccttccctt

SEQ ID NO: 1504322 - DNA, 25 bp, Homo sapien
ggggcgagcgggcgggcgggcaggc

SEQ ID NO: 1504323 - DNA, 25 bp, Homo sapien
ctgcaatggcgagaagaggaggagg

SEQ ID NO: 1504324 - DNA, 25 bp, Homo sapien
cgggggcgagcgggcgggcgggcag

SEQ ID NO: 1504325 - DNA, 25 bp, Homo sapien
tgcaatggcgagaagaggaggagga

SEQ ID NO: 1504326 - DNA, 25 bp, Homo sapien
tgtcggcgtccccttcttcgaccgc

SEQ ID NO: 1504327 - DNA, 25 bp, Homo sapien
ccccaaaagccacgcggtgcgcgcc

SEQ ID NO: 1504328 - DNA, 25 bp, Homo sapien
tcggcgtccccttcttcgaccgcag

SEQ ID NO: 1504329 - DNA, 25 bp, Homo sapien
tgccacagcccgccggggtctgccc

SEQ ID NO: 1504330 - DNA, 25 bp, Homo sapien
accgcgaaccctcagtggggatctc

SEQ ID NO: 1504331 - DNA, 25 bp, Homo sapien
ccgcgaaccctcagtggggatctca

SEQ ID NO: 1504332 - DNA, 25 bp, Homo sapien
caccgcgaaccctcagtggggatct

SEQ ID NO: 1504333 - DNA, 25 bp, Homo sapien
tcaccgcgaaccctcagtggggatc

SEQ ID NO: 1504334 - DNA, 25 bp, Homo sapien
gcttcctcagcaatccgcgtgggaa

SEQ ID NO: 1504335 - DNA, 25 bp, Homo sapien
caagttttgaccctgatctgagaga

SEQ ID NO: 1504336 - DNA, 25 bp, Homo sapien
agagaggcctggctgaccagagatt

SEQ ID NO: 1504337 - DNA, 25 bp, Homo sapien
cctggctgaccagagatttggaaac

SEQ ID NO: 1504338 - DNA, 25 bp, Homo sapien
tgcagtccgttacatgcctgggtcc

SEQ ID NO: 1504339 - DNA, 25 bp, Homo sapien
tgtgcccttgctataacgactgcct

SEQ ID NO: 1504340 - DNA, 25 bp, Homo sapien
caaaatgagaaacgtgggtgtgccc

SEQ ID NO: 1504341 - DNA, 25 bp, Homo sapien
tatcattcggtcaaaatatcgcccc

SEQ ID NO: 1504342 - DNA, 25 bp, Homo sapien
aagtggaccgtaatctgcagcaggg

SEQ ID NO: 1504343 - DNA, 25 bp, Homo sapien
tcctgaggacatcggagctgacttg

SEQ ID NO: 1504344 - DNA, 25 bp, Homo sapien
tataccaagtgagcctggatcctac

SEQ ID NO: 1504345 - DNA, 25 bp, Homo sapien
gcctggatcctaccggagcgccaga

SEQ ID NO: 1504346 - DNA, 25 bp, Homo sapien
acatcacgttcaactctgaagaggc

SEQ ID NO: 1504347 - DNA, 25 bp, Homo sapien
caaccacatcacgttcaactctgaa

SEQ ID NO: 1504348 - DNA, 25 bp, Homo sapien
ctcccgaaaagtgaacatttgaaat

SEQ ID NO: 1504349 - DNA, 25 bp, Homo sapien
gaaatatcaggtggacgatgacaac

SEQ ID NO: 1504350 - DNA, 25 bp, Homo sapien
tatcttttcaaattgtgatagagtt

SEQ ID NO: 1504351 - DNA, 25 bp, Homo sapien
tagagttccttggtgttatcaatac

SEQ ID NO: 1504352 - DNA, 25 bp, Homo sapien
agttccttggtgttatcaatacttc

SEQ ID NO: 1504353 - DNA, 25 bp, Homo sapien
tcaaattgtgatagagttccttggt

SEQ ID NO: 1504354 - DNA, 25 bp, Homo sapien
tgttatcggactctgcctgctcgct

SEQ ID NO: 1504355 - DNA, 25 bp, Homo sapien
tggataaacggaagaatgctttgcc

SEQ ID NO: 1504356 - DNA, 25 bp, Homo sapien
cacatggcggtcatcattcacaaaa

SEQ ID NO: 1504357 - DNA, 25 bp, Homo sapien
tccagtcggacacagctttgagcgc

SEQ ID NO: 1504358 - DNA, 25 bp, Homo sapien
gcatcactccccgcagggttctggt

SEQ ID NO: 1504359 - DNA, 25 bp, Homo sapien
tctggtcatgtgctccgtcttctgt

SEQ ID NO: 1504360 - DNA, 25 bp, Homo sapien
tcactccccgcagggttctggtcat

SEQ ID NO: 1504361 - DNA, 25 bp, Homo sapien
caggttgtcggccaccttgtccagg

SEQ ID NO: 1504362 - DNA, 25 bp, Homo sapien
tgaaccataattgcgcaaccacact

SEQ ID NO: 1504363 - DNA, 25 bp, Homo sapien
gggctacagagcgaaaccttcctca

SEQ ID NO: 1504364 - DNA, 25 bp, Homo sapien
gatcttttagctcggggtggtagta

SEQ ID NO: 1504365 - DNA, 25 bp, Homo sapien
tagctcggggtggtagtacatgact

SEQ ID NO: 1504366 - DNA, 25 bp, Homo sapien
ctgctggaagcctcaaacagacgct

SEQ ID NO: 1504367 - DNA, 25 bp, Homo sapien
taatgacacgaactacaccacaagg

SEQ ID NO: 1504368 - DNA, 25 bp, Homo sapien
tgagcagccagtgtagaataaaccc

SEQ ID NO: 1504369 - DNA, 25 bp, Homo sapien
tcagtgtgcagtatcctatggtgca

SEQ ID NO: 1504370 - DNA, 25 bp, Homo sapien
gacagattgcagtatttcgtacttg

SEQ ID NO: 1504371 - DNA, 25 bp, Homo sapien
cagtatttcgtacttgtcttctgtt

SEQ ID NO: 1504372 - DNA, 25 bp, Homo sapien
gcagcatcgtcgacagattgcagta

SEQ ID NO: 1504373 - DNA, 25 bp, Homo sapien
gttttttatcacaatcgcagcatcg

SEQ ID NO: 1504374 - DNA, 25 bp, Homo sapien
tgttggtcaaaggtccagcgtccct

SEQ ID NO: 1504375 - DNA, 25 bp, Homo sapien
tgacagaggacaaacgaagaggccc

SEQ ID NO: 1504376 - DNA, 25 bp, Homo sapien
taaacagcaacaagggcgctatgcc

SEQ ID NO: 1504377 - DNA, 25 bp, Homo sapien
tgcggccaagcagagcgtttatctt

SEQ ID NO: 1504378 - DNA, 25 bp, Homo sapien
gaccaaggggtttctgtcaggtgga

SEQ ID NO: 1504379 - DNA, 25 bp, Homo sapien
gcacagtttgaccaaggggtttctg

SEQ ID NO: 1504380 - DNA, 25 bp, Homo sapien
ctattcatggatggaataagaagac

SEQ ID NO: 1504381 - DNA, 25 bp, Homo sapien
cagtttgaccaaggggtttctgtca

SEQ ID NO: 1504382 - DNA, 25 bp, Homo sapien
ctggaaccacttggcgtgtcggagg

SEQ ID NO: 1504383 - DNA, 25 bp, Homo sapien
tccggggggtcgttgactgatagcg

SEQ ID NO: 1504384 - DNA, 25 bp, Homo sapien
tcggagggacgccaaggcagcaagg

SEQ ID NO: 1504385 - DNA, 25 bp, Homo sapien
tttctgcctgtccagaacgtccggg

SEQ ID NO: 1504386 - DNA, 25 bp, Homo sapien
cacggctatcgtcaatgttaaggaa

SEQ ID NO: 1504387 - DNA, 25 bp, Homo sapien
tctttatggtgacagttagccaagt

SEQ ID NO: 1504388 - DNA, 25 bp, Homo sapien
taggaattctctaccaaaagacaaa

SEQ ID NO: 1504389 - DNA, 25 bp, Homo sapien
tgcaggtgctaagctcggcacggct

SEQ ID NO: 1504390 - DNA, 25 bp, Homo sapien
tgcacaggtccctcaagacccggat

SEQ ID NO: 1504391 - DNA, 25 bp, Homo sapien
cacaagacttcagcccgttggctct

SEQ ID NO: 1504392 - DNA, 25 bp, Homo sapien
accccaggtgggcacgcgagtgcac

SEQ ID NO: 1504393 - DNA, 25 bp, Homo sapien
tgacacaagacttcagcccgttggc

SEQ ID NO: 1504394 - DNA, 25 bp, Homo sapien
ccatcggtctgttggccgtgccaat

SEQ ID NO: 1504395 - DNA, 25 bp, Homo sapien
cagcacccatcggtctgttggccgt

SEQ ID NO: 1504396 - DNA, 25 bp, Homo sapien
tggcatcacgatgcccgacgccagg

SEQ ID NO: 1504397 - DNA, 25 bp, Homo sapien
tgttggccgtgccaatggatttctc

SEQ ID NO: 1504398 - DNA, 25 bp, Homo sapien
tgctgtctgtctagatgcccaatag

SEQ ID NO: 1504399 - DNA, 25 bp, Homo sapien
tctgtgtgatatcttcccgttgctg

SEQ ID NO: 1504400 - DNA, 25 bp, Homo sapien
tgcccaatagcatcagtggcttctt

SEQ ID NO: 1504401 - DNA, 25 bp, Homo sapien
cacaagggtcataaatgccagaacc

SEQ ID NO: 1504402 - DNA, 25 bp, Homo sapien
atggagctggccgaaggcagcgagc

SEQ ID NO: 1504403 - DNA, 25 bp, Homo sapien
catgcctaggactttatggagctgg

SEQ ID NO: 1504404 - DNA, 25 bp, Homo sapien
ggcagagggtccatgcctaggactt

SEQ ID NO: 1504405 - DNA, 25 bp, Homo sapien
cgaaggcagcgagccgcagtgcgtg

SEQ ID NO: 1504406 - DNA, 25 bp, Homo sapien
cgtttcatgggcgtaatggcatagg

SEQ ID NO: 1504407 - DNA, 25 bp, Homo sapien
cattgggcgtttcatgggcgtaatg

SEQ ID NO: 1504408 - DNA, 25 bp, Homo sapien
cctcctccattgggcgtttcatggg

SEQ ID NO: 1504409 - DNA, 25 bp, Homo sapien
tttcatgggcgtaatggcataggtg

SEQ ID NO: 1504410 - DNA, 25 bp, Homo sapien
acactgattttaagcaaggtctcgc

SEQ ID NO: 1504411 - DNA, 25 bp, Homo sapien
atggcaggtctccacgagagctctg

SEQ ID NO: 1504412 - DNA, 25 bp, Homo sapien
ggaccagatggataaagcagcagca

SEQ ID NO: 1504413 - DNA, 25 bp, Homo sapien
tcccatagcttcagggtgagccttc

SEQ ID NO: 1504414 - DNA, 25 bp, Homo sapien
tcagctggttcaaccgcatcagggc

SEQ ID NO: 1504415 - DNA, 25 bp, Homo sapien
cgcatcagggcattcatagcctggg

SEQ ID NO: 1504416 - DNA, 25 bp, Homo sapien
ggcctcgaatgaattgccatcaacc

SEQ ID NO: 1504417 - DNA, 25 bp, Homo sapien
ctcgaatgaattgccatcaacctcc

SEQ ID NO: 1504418 - DNA, 25 bp, Homo sapien
ttcagcacccgtcggcaagcccatg

SEQ ID NO: 1504419 - DNA, 25 bp, Homo sapien
tgctggcttcgcctcggtctcctca

SEQ ID NO: 1504420 - DNA, 25 bp, Homo sapien
aaaggccgcactaggggtggagaca

SEQ ID NO: 1504421 - DNA, 25 bp, Homo sapien
ggtggagacagcttctaccactggg

SEQ ID NO: 1504422 - DNA, 25 bp, Homo sapien
tgtccaggcagtcactcccagcgcc

SEQ ID NO: 1504423 - DNA, 25 bp, Homo sapien
gtccaggcagtcactcccagcgccc

SEQ ID NO: 1504424 - DNA, 25 bp, Homo sapien
ctcccagcgcccaccatgtgctcac

SEQ ID NO: 1504425 - DNA, 25 bp, Homo sapien
tcactcccagcgcccaccatgtgct

SEQ ID NO: 1504426 - DNA, 25 bp, Homo sapien
acagaaaagaagaccgacaaactca

SEQ ID NO: 1504427 - DNA, 25 bp, Homo sapien
cagaaaagaagaccgacaaactcag

SEQ ID NO: 1504428 - DNA, 25 bp, Homo sapien
tcggagatgagctcgtacttgagcc

SEQ ID NO: 1504429 - DNA, 25 bp, Homo sapien
tgccgtgctttgtcaggatcggccc

SEQ ID NO: 1504430 - DNA, 25 bp, Homo sapien
tgggttcttgccgtgctttgtcagg

SEQ ID NO: 1504431 - DNA, 25 bp, Homo sapien
gacgaagcgcttgtcgtggctgccc

SEQ ID NO: 1504432 - DNA, 25 bp, Homo sapien
tcagggaaaagcttttctagggcag

SEQ ID NO: 1504433 - DNA, 25 bp, Homo sapien
tctttttgttggcatcaagggcgag

SEQ ID NO: 1504434 - DNA, 25 bp, Homo sapien
tttttgttggaaccagcaccttgga

SEQ ID NO: 1504435 - DNA, 25 bp, Homo sapien
agcagcgtaggccttcgccaccttt

SEQ ID NO: 1504436 - DNA, 25 bp, Homo sapien
acttcgttgtgcatggggcctccca

SEQ ID NO: 1504437 - DNA, 25 bp, Homo sapien
gcgccctcgtccccggatgctcccg

SEQ ID NO: 1504438 - DNA, 25 bp, Homo sapien
gttggcgccaccaaatcctcgcccg

SEQ ID NO: 1504439 - DNA, 25 bp, Homo sapien
cctccatggttggcgccaccaaatc

SEQ ID NO: 1504440 - DNA, 25 bp, Homo sapien
tgtagcctgctgtcgccgagttgcc

SEQ ID NO: 1504441 - DNA, 25 bp, Homo sapien
gcctccgtacccatagcttccatac

SEQ ID NO: 1504442 - DNA, 25 bp, Homo sapien
gtagcctgctgtcgccgagttgcct

SEQ ID NO: 1504443 - DNA, 25 bp, Homo sapien
cgagttgcctccgtacccatagctt

SEQ ID NO: 1504444 - DNA, 25 bp, Homo sapien
cactggccggaaaagcgtattcaca

SEQ ID NO: 1504445 - DNA, 25 bp, Homo sapien
cacaagattggtgcttcgcatggct

SEQ ID NO: 1504446 - DNA, 25 bp, Homo sapien
taatcaccgcaaaaaggtgtgtgcc

SEQ ID NO: 1504447 - DNA, 25 bp, Homo sapien
tttgctaactcaggcccagacgcta

SEQ ID NO: 1504448 - DNA, 25 bp, Homo sapien
agccgtagcagtctgtgaaaaagtc

SEQ ID NO: 1504449 - DNA, 25 bp, Homo sapien
gatagccgtagcagtctgtgaaaaa

SEQ ID NO: 1504450 - DNA, 25 bp, Homo sapien
aaaatcatgatagccgtagcagtct

SEQ ID NO: 1504451 - DNA, 25 bp, Homo sapien
catgatagccgtagcagtctgtgaa

SEQ ID NO: 1504452 - DNA, 25 bp, Homo sapien
tttgtgtgcaatacttttagacgct

SEQ ID NO: 1504453 - DNA, 25 bp, Homo sapien
ttttgtgtgcaatacttttagacgc

SEQ ID NO: 1504454 - DNA, 25 bp, Homo sapien
cacggttgagaaacccagtgaagca

SEQ ID NO: 1504455 - DNA, 25 bp, Homo sapien
gcggtgaaaagccacggttgagaaa

SEQ ID NO: 1504456 - DNA, 25 bp, Homo sapien
ttctgcaggctaagagtttcagaca

SEQ ID NO: 1504457 - DNA, 25 bp, Homo sapien
agtttcagacaagctgcggtgaaaa

SEQ ID NO: 1504458 - DNA, 25 bp, Homo sapien
tattgtgaacttcaataggaccaag

SEQ ID NO: 1504459 - DNA, 25 bp, Homo sapien
caagttcaaaggcaaatcacgataa

SEQ ID NO: 1504460 - DNA, 25 bp, Homo sapien
gacaaaggtagattaaaatgcgtca

SEQ ID NO: 1504461 - DNA, 25 bp, Homo sapien
gatgccgaacaacgctgtctctaga

SEQ ID NO: 1504462 - DNA, 25 bp, Homo sapien
catcaaccagatttgggagtttgtt

SEQ ID NO: 1504463 - DNA, 25 bp, Homo sapien
gcatcaaccagatttgggagtttgt

SEQ ID NO: 1504464 - DNA, 25 bp, Homo sapien
cagtcctttactggagaaacaggga

SEQ ID NO: 1504465 - DNA, 25 bp, Homo sapien
aaaaagccggtttctctggattcag

SEQ ID NO: 1504466 - DNA, 25 bp, Homo sapien
gaacccaccagagcattacaagagg

SEQ ID NO: 1504467 - DNA, 25 bp, Homo sapien
tacaagaggcgggagaagttaattc

SEQ ID NO: 1504468 - DNA, 25 bp, Homo sapien
cagtttttgcctgaataaacgcaaa

SEQ ID NO: 1504469 - DNA, 25 bp, Homo sapien
gcaagtcaacacagatgcaggcttt

SEQ ID NO: 1504470 - DNA, 25 bp, Homo sapien
acaaatcatgtagtaaccattttga

SEQ ID NO: 1504471 - DNA, 25 bp, Homo sapien
taaacgcaaaatcttgcaagtcaac

SEQ ID NO: 1504472 - DNA, 25 bp, Homo sapien
caacgtcattcaggataactatttt

SEQ ID NO: 1504473 - DNA, 25 bp, Homo sapien
gcttgttactttcacatgtattgat

SEQ ID NO: 1504474 - DNA, 25 bp, Homo sapien
tacatcatgcaatcaaagttttaaa

SEQ ID NO: 1504475 - DNA, 25 bp, Homo sapien
gagggggagttttcaacgtcattca

SEQ ID NO: 1504476 - DNA, 25 bp, Homo sapien
cccagcagctgatgacaacaatggg

SEQ ID NO: 1504477 - DNA, 25 bp, Homo sapien
gcgccagcagcttttgcagcggatg

SEQ ID NO: 1504478 - DNA, 25 bp, Homo sapien
ggtccttagcacagccgtttgggct

SEQ ID NO: 1504479 - DNA, 25 bp, Homo sapien
gcagcggatgtcaacattacaatga

SEQ ID NO: 1504480 - DNA, 25 bp, Homo sapien
gaatgccctccgttgctgtagaact

SEQ ID NO: 1504481 - DNA, 25 bp, Homo sapien
tcaccttggtagtaggagccatagc

SEQ ID NO: 1504482 - DNA, 25 bp, Homo sapien
tagcccgagccgtaggagggcttct

SEQ ID NO: 1504483 - DNA, 25 bp, Homo sapien
tctcgtagttgtagtcggatccgcc

SEQ ID NO: 1504484 - DNA, 25 bp, Homo sapien
gctggatgcaaaactctctagagca

SEQ ID NO: 1504485 - DNA, 25 bp, Homo sapien
aacacaccagagagagtggcggaga

SEQ ID NO: 1504486 - DNA, 25 bp, Homo sapien
agctaccctgccttcggagaacaca

SEQ ID NO: 1504487 - DNA, 25 bp, Homo sapien
aagtcccaggaagtcaccttgcagc

SEQ ID NO: 1504488 - DNA, 25 bp, Homo sapien
actgggtcactggtgcagcccgggc

SEQ ID NO: 1504489 - DNA, 25 bp, Homo sapien
ctactcagccccactgggtcactgg

SEQ ID NO: 1504490 - DNA, 25 bp, Homo sapien
agccccactgggtcactggtgcagc

SEQ ID NO: 1504491 - DNA, 25 bp, Homo sapien
gtcactggtgcagcccgggcctgct

SEQ ID NO: 1504492 - DNA, 25 bp, Homo sapien
cctggcctgctgctgacagctgctg

SEQ ID NO: 1504493 - DNA, 25 bp, Homo sapien
agcacagcctctgtcaagtccctgg

SEQ ID NO: 1504494 - DNA, 25 bp, Homo sapien
cagctgctgggtcccaaggacacac

SEQ ID NO: 1504495 - DNA, 25 bp, Homo sapien
cagcacagcctctgtcaagtccctg

SEQ ID NO: 1504496 - DNA, 25 bp, Homo sapien
tgtttgccttggtatgaggagccgc

SEQ ID NO: 1504497 - DNA, 25 bp, Homo sapien
gccgtagctgttcccgccgcttcgg

SEQ ID NO: 1504498 - DNA, 25 bp, Homo sapien
cttcggcctccactaccactgtagt

SEQ ID NO: 1504499 - DNA, 25 bp, Homo sapien
ttgccttggtatgaggagccgcccc

SEQ ID NO: 1504500 - DNA, 25 bp, Homo sapien
ttgtagttcgactgtgagtagcctc

SEQ ID NO: 1504501 - DNA, 25 bp, Homo sapien
agggccactgtagttctggccggac

SEQ ID NO: 1504502 - DNA, 25 bp, Homo sapien
cactgtagttctggccggaccccgg

SEQ ID NO: 1504503 - DNA, 25 bp, Homo sapien
ttatctgtactggtagttcatgctg

SEQ ID NO: 1504504 - DNA, 25 bp, Homo sapien
aactgtgatgcataaaactcgatct

SEQ ID NO: 1504505 - DNA, 25 bp, Homo sapien
cgatcttctgatggggagtaagtgc

SEQ ID NO: 1504506 - DNA, 25 bp, Homo sapien
tgatgcataaaactcgatcttctga

SEQ ID NO: 1504507 - DNA, 25 bp, Homo sapien
gcataaaactcgatcttctgatggg

SEQ ID NO: 1504508 - DNA, 25 bp, Homo sapien
caaaccattgaagacacggagtccc

SEQ ID NO: 1504509 - DNA, 25 bp, Homo sapien
tgagttaccactaacacgaagtgtg

SEQ ID NO: 1504510 - DNA, 25 bp, Homo sapien
cacgacacagcaacgtggacgggat

SEQ ID NO: 1504511 - DNA, 25 bp, Homo sapien
taaatatgggtcacaggacgggcca

SEQ ID NO: 1504512 - DNA, 25 bp, Homo sapien
gtttaactcacttcacaaaagcatt

SEQ ID NO: 1504513 - DNA, 25 bp, Homo sapien
caaatgacgtatcccttctgtaact

SEQ ID NO: 1504514 - DNA, 25 bp, Homo sapien
cattcagcttaattcagatgtactg

SEQ ID NO: 1504515 - DNA, 25 bp, Homo sapien
agatgtactgcctgaatgacccaga

SEQ ID NO: 1504516 - DNA, 25 bp, Homo sapien
cacgctctagggaaatctgctggta

SEQ ID NO: 1504517 - DNA, 25 bp, Homo sapien
gatgggttccccaagaccagaatgg

SEQ ID NO: 1504518 - DNA, 25 bp, Homo sapien
tacttagaactacaccagaatcggg

SEQ ID NO: 1504519 - DNA, 25 bp, Homo sapien
caggcttggccagtacagttcttcc

SEQ ID NO: 1504520 - DNA, 25 bp, Homo sapien
caaccccttaatgtgtccaggagag

SEQ ID NO: 1504521 - DNA, 25 bp, Homo sapien
aacacgaggtctgctgatctcacag

SEQ ID NO: 1504522 - DNA, 25 bp, Homo sapien
tcactgatccggaaactgttaaggg

SEQ ID NO: 1504523 - DNA, 25 bp, Homo sapien
gaagtgtccctctccatgagtgttg

SEQ ID NO: 1504524 - DNA, 25 bp, Homo sapien
agcactggtgaggatcgtgagcggg

SEQ ID NO: 1504525 - DNA, 25 bp, Homo sapien
tcagcactggtgaggatcgtgagcg

SEQ ID NO: 1504526 - DNA, 25 bp, Homo sapien
tgacggcatcatcagcactggtgag

SEQ ID NO: 1504527 - DNA, 25 bp, Homo sapien
gatcgtgagcggggtgagggctcca

SEQ ID NO: 1504528 - DNA, 25 bp, Homo sapien
catattcctgaacccggtgtcgtcc

SEQ ID NO: 1504529 - DNA, 25 bp, Homo sapien
aacccggtgtcgtcctgttgtagct

SEQ ID NO: 1504530 - DNA, 25 bp, Homo sapien
tcctgaacccggtgtcgtcctgttg

SEQ ID NO: 1504531 - DNA, 25 bp, Homo sapien
gtcctgttgtagctgggatactgtc

SEQ ID NO: 1504532 - DNA, 25 bp, Homo sapien
gaagctcccaactatgctgcaaagg

SEQ ID NO: 1504533 - DNA, 25 bp, Homo sapien
ggtccgggtacatgcagtgagtcct

SEQ ID NO: 1504534 - DNA, 25 bp, Homo sapien
tagctctactaaattcagggtggcg

SEQ ID NO: 1504535 - DNA, 25 bp, Homo sapien
ggatcagtaccaatcccctgcaagg

SEQ ID NO: 1504536 - DNA, 25 bp, Homo sapien
cacatgaagtctccatttattctgg

SEQ ID NO: 1504537 - DNA, 25 bp, Homo sapien
catgaagtctccatttattctggga

SEQ ID NO: 1504538 - DNA, 25 bp, Homo sapien
acatgaagtctccatttattctggg

SEQ ID NO: 1504539 - DNA, 25 bp, Homo sapien
tgaagtctccatttattctgggatg

SEQ ID NO: 1504540 - DNA, 25 bp, Homo sapien
tccgatgttccaaaagtcaagcctc

SEQ ID NO: 1504541 - DNA, 25 bp, Homo sapien
tatcaagaccagtggactcagctgc

SEQ ID NO: 1504542 - DNA, 25 bp, Homo sapien
cactgtaaacctcagctccgatgtt

SEQ ID NO: 1504543 - DNA, 25 bp, Homo sapien
taaccctcttgagtctagaaactct

SEQ ID NO: 1504544 - DNA, 25 bp, Homo sapien
ctatgaggagcggcgcgctccacgc

SEQ ID NO: 1504545 - DNA, 25 bp, Homo sapien
tatgaggagcggcgcgctccacgca

SEQ ID NO: 1504546 - DNA, 25 bp, Homo sapien
cggcgcgctccacgcagtggcacac

SEQ ID NO: 1504547 - DNA, 25 bp, Homo sapien
aggagcggcgcgctccacgcagtgg

SEQ ID NO: 1504548 - DNA, 25 bp, Homo sapien
gcggcgcttggtgtgcggcttcagc

SEQ ID NO: 1504549 - DNA, 25 bp, Homo sapien
tggagaccaggaaagcggccgctca

SEQ ID NO: 1504550 - DNA, 25 bp, Homo sapien
ctagaggcggcgcttggtgtgcggc

SEQ ID NO: 1504551 - DNA, 25 bp, Homo sapien
gtggacagcgccgtacgcgttgcct

SEQ ID NO: 1504552 - DNA, 25 bp, Homo sapien
gagcggctgcattcggccaccagcc

SEQ ID NO: 1504553 - DNA, 25 bp, Homo sapien
gccgcatgatccgtggggccgactc

SEQ ID NO: 1504554 - DNA, 25 bp, Homo sapien
ggccaccagccgcatgatccgtggg

SEQ ID NO: 1504555 - DNA, 25 bp, Homo sapien
ccagggaagcctgggtagctgctcc

SEQ ID NO: 1504556 - DNA, 25 bp, Homo sapien
ccagagcgtccagctgttcggtcgt

SEQ ID NO: 1504557 - DNA, 25 bp, Homo sapien
tgttcggtcgtgatgcccttcatgg

SEQ ID NO: 1504558 - DNA, 25 bp, Homo sapien
ttcatggtggcctgcgtgcccactg

SEQ ID NO: 1504559 - DNA, 25 bp, Homo sapien
gatgcccttcatggtggcctgcgtg

SEQ ID NO: 1504560 - DNA, 25 bp, Homo sapien
agatggtaggtattgcccaggcaga

SEQ ID NO: 1504561 - DNA, 25 bp, Homo sapien
ccttagacccagatggtaggtattg

SEQ ID NO: 1504562 - DNA, 25 bp, Homo sapien
gacccagatggtaggtattgcccag

SEQ ID NO: 1504563 - DNA, 25 bp, Homo sapien
cggccttagacccagatggtaggta

SEQ ID NO: 1504564 - DNA, 25 bp, Homo sapien
tggccagctttagtccctgctgctc

SEQ ID NO: 1504565 - DNA, 25 bp, Homo sapien
tgtccgggcctggaggacgctccat

SEQ ID NO: 1504566 - DNA, 25 bp, Homo sapien
tctttcacgcccagtacaaggcctg

SEQ ID NO: 1504567 - DNA, 25 bp, Homo sapien
gggcgctcaatacagctggtcgatt

SEQ ID NO: 1504568 - DNA, 25 bp, Homo sapien
atgaagccgtggagaccgttggctt

SEQ ID NO: 1504569 - DNA, 25 bp, Homo sapien
tggctttctggatcagctcgggtcc

SEQ ID NO: 1504570 - DNA, 25 bp, Homo sapien
agcagattatgaggccaattcatga

SEQ ID NO: 1504571 - DNA, 25 bp, Homo sapien
tatgaggccaattcatgaagccgtg

SEQ ID NO: 1504572 - DNA, 25 bp, Homo sapien
gaaaccccaccgcaaagctgtcagg

SEQ ID NO: 1504573 - DNA, 25 bp, Homo sapien
aagggccctagaacgtcggctctct

SEQ ID NO: 1504574 - DNA, 25 bp, Homo sapien
cagagaagggccctagaacgtcggc

SEQ ID NO: 1504575 - DNA, 25 bp, Homo sapien
aaaccccaccgcaaagctgtcaggg

SEQ ID NO: 1504576 - DNA, 25 bp, Homo sapien
gacaccatctggaaaccgccgctgt

SEQ ID NO: 1504577 - DNA, 25 bp, Homo sapien
ggacagagacaccagcgacaccatc

SEQ ID NO: 1504578 - DNA, 25 bp, Homo sapien
cagcgacaccatctggaaaccgccg

SEQ ID NO: 1504579 - DNA, 25 bp, Homo sapien
acagagacaccagcgacaccatctg

SEQ ID NO: 1504580 - DNA, 25 bp, Homo sapien
ggctcagcagggtctcattgccgtc

SEQ ID NO: 1504581 - DNA, 25 bp, Homo sapien
tctggatctgcacggatttctccgg

SEQ ID NO: 1504582 - DNA, 25 bp, Homo sapien
agcggaagcggacgccctcctccgt

SEQ ID NO: 1504583 - DNA, 25 bp, Homo sapien
cagcgcattctggatctgcacggat

SEQ ID NO: 1504584 - DNA, 25 bp, Homo sapien
ggatcacctgaggtccggagtttga

SEQ ID NO: 1504585 - DNA, 25 bp, Homo sapien
gaccagccttgccaacatagtgaaa

SEQ ID NO: 1504586 - DNA, 25 bp, Homo sapien
agcactctgcgaggccgaagcaggt

SEQ ID NO: 1504587 - DNA, 25 bp, Homo sapien
cttgccaacatagtgaaacccgtct

SEQ ID NO: 1504588 - DNA, 25 bp, Homo sapien
gaaggcagagacaggagaatagctt

SEQ ID NO: 1504589 - DNA, 25 bp, Homo sapien
tgtattcccagctgcttggaaggca

SEQ ID NO: 1504590 - DNA, 25 bp, Homo sapien
tattcccagctgcttggaaggcaga

SEQ ID NO: 1504591 - DNA, 25 bp, Homo sapien
agcttgaatctgggagacagaggta

SEQ ID NO: 1504592 - DNA, 25 bp, Homo sapien
agtcacagtactgctaaccacgtcg

SEQ ID NO: 1504593 - DNA, 25 bp, Homo sapien
tactgctaaccacgtcgtccagctg

SEQ ID NO: 1504594 - DNA, 25 bp, Homo sapien
acacgtggcccagtcacagtactgc

SEQ ID NO: 1504595 - DNA, 25 bp, Homo sapien
tcacagtactgctaaccacgtcgtc

SEQ ID NO: 1504596 - DNA, 25 bp, Homo sapien
aacagggccccagtcacaagcccca

SEQ ID NO: 1504597 - DNA, 25 bp, Homo sapien
ctgcaacagggccccagtcacaagc

SEQ ID NO: 1504598 - DNA, 25 bp, Homo sapien
tgcaacagggccccagtcacaagcc

SEQ ID NO: 1504599 - DNA, 25 bp, Homo sapien
agggccccagtcacaagccccaggg

SEQ ID NO: 1504600 - DNA, 25 bp, Homo sapien
gctgatgggctgcaatgcaccggtc

SEQ ID NO: 1504601 - DNA, 25 bp, Homo sapien
aggttctgcttgtccggccgctgat

SEQ ID NO: 1504602 - DNA, 25 bp, Homo sapien
ttcaaggcaggtggcccggagatct

SEQ ID NO: 1504603 - DNA, 25 bp, Homo sapien
gcccaccctggataatggcgaagag

SEQ ID NO: 1504604 - DNA, 25 bp, Homo sapien
gggacctccgcgatggccaagccct

SEQ ID NO: 1504605 - DNA, 25 bp, Homo sapien
ggacctccgcgatggccaagccctg

SEQ ID NO: 1504606 - DNA, 25 bp, Homo sapien
atgacgcacgggttgttgtcgttgt

SEQ ID NO: 1504607 - DNA, 25 bp, Homo sapien
ccagaaagcattgcatgtaaaaggt

SEQ ID NO: 1504608 - DNA, 25 bp, Homo sapien
atggctggacacaccggcgtgcacc

SEQ ID NO: 1504609 - DNA, 25 bp, Homo sapien
ctgcaggtggttgagaaatgacttt

SEQ ID NO: 1504610 - DNA, 25 bp, Homo sapien
gaggccatgccatcaagaacgcagg

SEQ ID NO: 1504611 - DNA, 25 bp, Homo sapien
agctgcccagttcaacccgaagagg

SEQ ID NO: 1504612 - DNA, 25 bp, Homo sapien
ccagttcaacccgaagaggccatgc

SEQ ID NO: 1504613 - DNA, 25 bp, Homo sapien
tcaagaacgcaggtgttggccaggt

SEQ ID NO: 1504614 - DNA, 25 bp, Homo sapien
gattttagactttcgctctgaggac

SEQ ID NO: 1504615 - DNA, 25 bp, Homo sapien
tgttctggattttagactttcgctc

SEQ ID NO: 1504616 - DNA, 25 bp, Homo sapien
tctggattttagactttcgctctga

SEQ ID NO: 1504617 - DNA, 25 bp, Homo sapien
tggtacccggccaatgttctggatt

SEQ ID NO: 1504618 - DNA, 25 bp, Homo sapien
tgcaaatttttcagggcattctaag

SEQ ID NO: 1504619 - DNA, 25 bp, Homo sapien
gcaaatttttcagggcattctaagt

SEQ ID NO: 1504620 - DNA, 25 bp, Homo sapien
caaatttttcagggcattctaagtt

SEQ ID NO: 1504621 - DNA, 25 bp, Homo sapien
taacagctgtcatgttaggcgcagt

SEQ ID NO: 1504622 - DNA, 25 bp, Homo sapien
tctggtgttgaagaacaatctggcc

SEQ ID NO: 1504623 - DNA, 25 bp, Homo sapien
cccttagctgaaactgttggaacca

SEQ ID NO: 1504624 - DNA, 25 bp, Homo sapien
tcgaaagcaggctaaccaacgtggt

SEQ ID NO: 1504625 - DNA, 25 bp, Homo sapien
ggtgctcagcgccaccatccgccag

SEQ ID NO: 1504626 - DNA, 25 bp, Homo sapien
gccagaactgcgacttgctctcacc

SEQ ID NO: 1504627 - DNA, 25 bp, Homo sapien
tcaggcccccgatggcgaagccagg

SEQ ID NO: 1504628 - DNA, 25 bp, Homo sapien
gatggcgaagccaggcacgtctcgc

SEQ ID NO: 1504629 - DNA, 25 bp, Homo sapien
agatcagacctgtgtccgtttcccc

SEQ ID NO: 1504630 - DNA, 25 bp, Homo sapien
agggacagccatgtcttcctagtct

SEQ ID NO: 1504631 - DNA, 25 bp, Homo sapien
gactgggccatattccctcagaatg

SEQ ID NO: 1504632 - DNA, 25 bp, Homo sapien
tagtctcctcagatcagacctgtgt

SEQ ID NO: 1504633 - DNA, 25 bp, Homo sapien
atgtcacatccaagagccacgcaga

SEQ ID NO: 1504634 - DNA, 25 bp, Homo sapien
gcagactaccagatcagtggcatag

SEQ ID NO: 1504635 - DNA, 25 bp, Homo sapien
gagccacgcagactaccagatcagt

SEQ ID NO: 1504636 - DNA, 25 bp, Homo sapien
gggaagacgcagtcgaacatgtcac

SEQ ID NO: 1504637 - DNA, 25 bp, Homo sapien
aggggcgtcacccagggcttcattc

SEQ ID NO: 1504638 - DNA, 25 bp, Homo sapien
ggggcgtcacccagggcttcattct

SEQ ID NO: 1504639 - DNA, 25 bp, Homo sapien
aaggggcgtcacccagggcttcatt

SEQ ID NO: 1504640 - DNA, 25 bp, Homo sapien
tgcactccgggtctatggggccgaa

SEQ ID NO: 1504641 - DNA, 25 bp, Homo sapien
aggtgcactccgggtctatggggcc

SEQ ID NO: 1504642 - DNA, 25 bp, Homo sapien
gtgcactccgggtctatggggccga

SEQ ID NO: 1504643 - DNA, 25 bp, Homo sapien
cactccgggtctatggggccgaagt

SEQ ID NO: 1504644 - DNA, 25 bp, Homo sapien
taggcgatgttgtggaccgtgaggt

SEQ ID NO: 1504645 - DNA, 25 bp, Homo sapien
tgcagcgcggccgtgttgtcactgt

SEQ ID NO: 1504646 - DNA, 25 bp, Homo sapien
tgttgtggaccgtgaggtggtgcag

SEQ ID NO: 1504647 - DNA, 25 bp, Homo sapien
cggccgtgttgtcactgtgcagcag

SEQ ID NO: 1504648 - DNA, 25 bp, Homo sapien
ccacgatgctggtgcggacggcgct

SEQ ID NO: 1504649 - DNA, 25 bp, Homo sapien
cacagaggccagagcgtcagtggcc

SEQ ID NO: 1504650 - DNA, 25 bp, Homo sapien
ccgggaagcgcttctccacgatgct

SEQ ID NO: 1504651 - DNA, 25 bp, Homo sapien
gatccccgtacatggcgcccatgaa

SEQ ID NO: 1504652 - DNA, 25 bp, Homo sapien
ttcaaaaaggaatccttcagtatct

SEQ ID NO: 1504653 - DNA, 25 bp, Homo sapien
aaaggaatccttcagtatcttccag

SEQ ID NO: 1504654 - DNA, 25 bp, Homo sapien
caaaaaggaatccttcagtatcttc

SEQ ID NO: 1504655 - DNA, 25 bp, Homo sapien
ctttcaaaaaggaatccttcagtat

SEQ ID NO: 1504656 - DNA, 25 bp, Homo sapien
tgagattagagaaaagatcgccatc

SEQ ID NO: 1504657 - DNA, 25 bp, Homo sapien
gatcgccatctaggaagtttgccct

SEQ ID NO: 1504658 - DNA, 25 bp, Homo sapien
cagtgtcctcctccgtaaaatggaa

SEQ ID NO: 1504659 - DNA, 25 bp, Homo sapien
tctgaatgtttatagaccagccctc

SEQ ID NO: 1504660 - DNA, 25 bp, Homo sapien
acgacctggccccgcggcgtctgta

SEQ ID NO: 1504661 - DNA, 25 bp, Homo sapien
gcgtctgtagccgttgctccccgcc

SEQ ID NO: 1504662 - DNA, 25 bp, Homo sapien
cgccgccgaccctcaacgacctggc

SEQ ID NO: 1504663 - DNA, 25 bp, Homo sapien
ggcccgagcgccctgcgctcctcgc

SEQ ID NO: 1504664 - DNA, 25 bp, Homo sapien
gatggagctgaaggcgtcctgcagt

SEQ ID NO: 1504665 - DNA, 25 bp, Homo sapien
cagtttgttgaccagcgggatcagc

SEQ ID NO: 1504666 - DNA, 25 bp, Homo sapien
acaaatgagtagttcctggaatgga

SEQ ID NO: 1504667 - DNA, 25 bp, Homo sapien
ccacaaatgagtagttcctggaatg

SEQ ID NO: 1504668 - DNA, 25 bp, Homo sapien
caccaccacaaatgagtagttcctg

SEQ ID NO: 1504669 - DNA, 25 bp, Homo sapien
ccaccacaaatgagtagttcctgga

SEQ ID NO: 1504670 - DNA, 25 bp, Homo sapien
tgtgggactaccaccctacctggct

SEQ ID NO: 1504671 - DNA, 25 bp, Homo sapien
caggtgtgggactaccaccctacct

SEQ ID NO: 1504672 - DNA, 25 bp, Homo sapien
ctacaggtgtgggactaccacccta

SEQ ID NO: 1504673 - DNA, 25 bp, Homo sapien
gtgtgggactaccaccctacctggc

SEQ ID NO: 1504674 - DNA, 25 bp, Homo sapien
tcaaatcgggcagaagtttggcaga

SEQ ID NO: 1504675 - DNA, 25 bp, Homo sapien
cagccgaggggcctataatttcagc

SEQ ID NO: 1504676 - DNA, 25 bp, Homo sapien
tcagcactttcattcaaatcgggca

SEQ ID NO: 1504677 - DNA, 25 bp, Homo sapien
gcagaagtttggcagatgtggctct

SEQ ID NO: 1504678 - DNA, 25 bp, Homo sapien
gacaacctcgatgcatatccaaagc

SEQ ID NO: 1504679 - DNA, 25 bp, Homo sapien
cagagctgacaacctcgatgcatat

SEQ ID NO: 1504680 - DNA, 25 bp, Homo sapien
catatccaaagccacgcgttgctca

SEQ ID NO: 1504681 - DNA, 25 bp, Homo sapien
tatccaaagccacgcgttgctcact

SEQ ID NO: 1504682 - DNA, 25 bp, Homo sapien
aactggtgtagagtggttgctgctt

SEQ ID NO: 1504683 - DNA, 25 bp, Homo sapien
caactggtgtagagtggttgctgct

SEQ ID NO: 1504684 - DNA, 25 bp, Homo sapien
gggagcgtgttcagatttatccaaa

SEQ ID NO: 1504685 - DNA, 25 bp, Homo sapien
cagatttatccaaaggaggtctctt

SEQ ID NO: 1504686 - DNA, 25 bp, Homo sapien
gatttatccaaaggaggtctcttgt

SEQ ID NO: 1504687 - DNA, 25 bp, Homo sapien
tgccatgggagcgtgttcagattta

SEQ ID NO: 1504688 - DNA, 25 bp, Homo sapien
gcctcttgtctaccgccccataggt

SEQ ID NO: 1504689 - DNA, 25 bp, Homo sapien
gctggcctcttgtctaccgccccat

SEQ ID NO: 1504690 - DNA, 25 bp, Homo sapien
agggcaggctccaagtagcctgctc

SEQ ID NO: 1504691 - DNA, 25 bp, Homo sapien
ggcaggctccaagtagcctgctcct

SEQ ID NO: 1504692 - DNA, 25 bp, Homo sapien
ggtgagcaccaccaggccaagctaa

SEQ ID NO: 1504693 - DNA, 25 bp, Homo sapien
gtgagcaccaccaggccaagctaat

SEQ ID NO: 1504694 - DNA, 25 bp, Homo sapien
ttttttttctacacacgaggtctca

SEQ ID NO: 1504695 - DNA, 25 bp, Homo sapien
ttttctacacacgaggtctcactat

SEQ ID NO: 1504696 - DNA, 25 bp, Homo sapien
gggcttctctgtcgctctgttggag

SEQ ID NO: 1504697 - DNA, 25 bp, Homo sapien
gcttctctgtcgctctgttggagca

SEQ ID NO: 1504698 - DNA, 25 bp, Homo sapien
tctctgtcgctctgttggagcagaa

SEQ ID NO: 1504699 - DNA, 25 bp, Homo sapien
ctgtcgctctgttggagcagaagtg

SEQ ID NO: 1504700 - DNA, 25 bp, Homo sapien
ttctaagtcgggcacaggagggcac

SEQ ID NO: 1504701 - DNA, 25 bp, Homo sapien
ctgggcgacggagacgcagctctca

SEQ ID NO: 1504702 - DNA, 25 bp, Homo sapien
aaattttgagtgttattccgaacag

SEQ ID NO: 1504703 - DNA, 25 bp, Homo sapien
ccaaaattggtttagattgtatgac

SEQ ID NO: 1504704 - DNA, 25 bp, Homo sapien
acaacctgagggcaggccggataga

SEQ ID NO: 1504705 - DNA, 25 bp, Homo sapien
tgttagagcaatgccaccagctggg

SEQ ID NO: 1504706 - DNA, 25 bp, Homo sapien
gaggaggctggtcatcactgttaga

SEQ ID NO: 1504707 - DNA, 25 bp, Homo sapien
accgctgtggttcatgtgagtgaca

SEQ ID NO: 1504708 - DNA, 25 bp, Homo sapien
ctggatgatgggttctagcccgtca

SEQ ID NO: 1504709 - DNA, 25 bp, Homo sapien
tgatgggttctagcccgtcagccgg

SEQ ID NO: 1504710 - DNA, 25 bp, Homo sapien
gatgatgggttctagcccgtcagcc

SEQ ID NO: 1504711 - DNA, 25 bp, Homo sapien
tggatgatgggttctagcccgtcag

SEQ ID NO: 1504712 - DNA, 25 bp, Homo sapien
tgggaatgtattacccagtggctgg

SEQ ID NO: 1504713 - DNA, 25 bp, Homo sapien
tcctgggaatgtattacccagtggc

SEQ ID NO: 1504714 - DNA, 25 bp, Homo sapien
gaatgtattacccagtggctggcgt

SEQ ID NO: 1504715 - DNA, 25 bp, Homo sapien
tgtattacccagtggctggcgtcgg

SEQ ID NO: 1504716 - DNA, 25 bp, Homo sapien
gcacctagatgtttggatcgttgaa

SEQ ID NO: 1504717 - DNA, 25 bp, Homo sapien
atttgtacaggacacagggcaattg

SEQ ID NO: 1504718 - DNA, 25 bp, Homo sapien
ggatcgttgaaaatttgtacaggac

SEQ ID NO: 1504719 - DNA, 25 bp, Homo sapien
ttcaaacaggttttgcacctagatg

SEQ ID NO: 1504720 - DNA, 25 bp, Homo sapien
ctgtttttgagaagatgagctgcag

SEQ ID NO: 1504721 - DNA, 25 bp, Homo sapien
ttgagaagatgagctgcagaatgag

SEQ ID NO: 1504722 - DNA, 25 bp, Homo sapien
ttttgagaagatgagctgcagaatg

SEQ ID NO: 1504723 - DNA, 25 bp, Homo sapien
ctgcagaatgagaggccgccgggtg

SEQ ID NO: 1504724 - DNA, 25 bp, Homo sapien
gtgtaagtgttcactgagccgtttt

SEQ ID NO: 1504725 - DNA, 25 bp, Homo sapien
acatgtggaacacgtgaattcaatg

SEQ ID NO: 1504726 - DNA, 25 bp, Homo sapien
gtgaattcaatgtccaatgacagcc

SEQ ID NO: 1504727 - DNA, 25 bp, Homo sapien
aagtgttcactgagccgtttttcaa

SEQ ID NO: 1504728 - DNA, 25 bp, Homo sapien
ccaatccctaggagccacgtggtct

SEQ ID NO: 1504729 - DNA, 25 bp, Homo sapien
tctatggctggaagttatggttcac

SEQ ID NO: 1504730 - DNA, 25 bp, Homo sapien
gaagagacagcataccacagccaat

SEQ ID NO: 1504731 - DNA, 25 bp, Homo sapien
acagtcccaggcactcagagtttac

SEQ ID NO: 1504732 - DNA, 25 bp, Homo sapien
agctcgttcactcggccgtgcatgc

SEQ ID NO: 1504733 - DNA, 25 bp, Homo sapien
cagccctttgagctcgttcactcgg

SEQ ID NO: 1504734 - DNA, 25 bp, Homo sapien
tcacttcccgcccagtaggcaagaa

SEQ ID NO: 1504735 - DNA, 25 bp, Homo sapien
ggcagagccgatctgcatgcctgtt

SEQ ID NO: 1504736 - DNA, 25 bp, Homo sapien
gttcctgtaattcctcggcaaactg

SEQ ID NO: 1504737 - DNA, 25 bp, Homo sapien
caggcatttccagataccaaagcca

SEQ ID NO: 1504738 - DNA, 25 bp, Homo sapien
gccttaacactgagttccctgtcaa

SEQ ID NO: 1504739 - DNA, 25 bp, Homo sapien
ttcctcggcaaactgcaaagcattt

SEQ ID NO: 1504740 - DNA, 25 bp, Homo sapien
tggagcacggcaccttccccggttg

SEQ ID NO: 1504741 - DNA, 25 bp, Homo sapien
actttggagcacggcaccttccccg

SEQ ID NO: 1504742 - DNA, 25 bp, Homo sapien
accttccccggttgtcacatgcagg

SEQ ID NO: 1504743 - DNA, 25 bp, Homo sapien
gcaccttccccggttgtcacatgca

SEQ ID NO: 1504744 - DNA, 25 bp, Homo sapien
aatctcctgccggacttcatcaaag

SEQ ID NO: 1504745 - DNA, 25 bp, Homo sapien
gagatgcctttgttggtccccgtga

SEQ ID NO: 1504746 - DNA, 25 bp, Homo sapien
tagactcgaaggttgatgggcactg

SEQ ID NO: 1504747 - DNA, 25 bp, Homo sapien
gacttgcagtgcaaaaactcggcat

SEQ ID NO: 1504748 - DNA, 25 bp, Homo sapien
tgtccatgaacgaccagaaacggtc

SEQ ID NO: 1504749 - DNA, 25 bp, Homo sapien
cgaccagaaacggtcagtgatgggt

SEQ ID NO: 1504750 - DNA, 25 bp, Homo sapien
tcagtgatgggtccccacccgtgct

SEQ ID NO: 1504751 - DNA, 25 bp, Homo sapien
ccatagcactgtccatgaacgacca

SEQ ID NO: 1504752 - DNA, 25 bp, Homo sapien
acaggcaccttggtgatacccggga

SEQ ID NO: 1504753 - DNA, 25 bp, Homo sapien
aggtcgatgagggtcaagttcaaca

SEQ ID NO: 1504754 - DNA, 25 bp, Homo sapien
tcccggctgatgaactgcaggatca

SEQ ID NO: 1504755 - DNA, 25 bp, Homo sapien
tgatctggtactcgatgtctggagg

SEQ ID NO: 1504756 - DNA, 25 bp, Homo sapien
acgggagcaacttgttctccaagac

SEQ ID NO: 1504757 - DNA, 25 bp, Homo sapien
ctcttctcaacgggagcaacttgtt

SEQ ID NO: 1504758 - DNA, 25 bp, Homo sapien
gtgatgacaccgatggtccgtaggc

SEQ ID NO: 1504759 - DNA, 25 bp, Homo sapien
tccaagacgtccctggcgtcggtgc

SEQ ID NO: 1504760 - DNA, 25 bp, Homo sapien
atccttctggctgcggttcaccacg

SEQ ID NO: 1504761 - DNA, 25 bp, Homo sapien
gctgcacggatgtccttcttgccct

SEQ ID NO: 1504762 - DNA, 25 bp, Homo sapien
ccatgtgccggtaggccgggtggga

SEQ ID NO: 1504763 - DNA, 25 bp, Homo sapien
tgcccatgcggtcggccatgtgccg

SEQ ID NO: 1504764 - DNA, 25 bp, Homo sapien
tgtctgaaaaatcaaaaaggctggg

SEQ ID NO: 1504765 - DNA, 25 bp, Homo sapien
atgcaatgagccgtgtttgtgtcac

SEQ ID NO: 1504766 - DNA, 25 bp, Homo sapien
gtttgtgtcactgcaatccattctg

SEQ ID NO: 1504767 - DNA, 25 bp, Homo sapien
tgtgtcactgcaatccattctggac

SEQ ID NO: 1504768 - DNA, 25 bp, Homo sapien
cagcgactcccggatgtggttggtc

SEQ ID NO: 1504769 - DNA, 25 bp, Homo sapien
gactcccggatgtggttggtcagtt

SEQ ID NO: 1504770 - DNA, 25 bp, Homo sapien
gctctgtagtttgctacgtagggcc

SEQ ID NO: 1504771 - DNA, 25 bp, Homo sapien
tagtttgctacgtagggccggcagc

SEQ ID NO: 1504772 - DNA, 25 bp, Homo sapien
cccatggccatgtgagatgacagct

SEQ ID NO: 1504773 - DNA, 25 bp, Homo sapien
gagaggtccaatcacctgcctgtgg

SEQ ID NO: 1504774 - DNA, 25 bp, Homo sapien
aaagggccactatctgctctgtaga

SEQ ID NO: 1504775 - DNA, 25 bp, Homo sapien
gaccctcactttagaggtgcagaaa

SEQ ID NO: 1504776 - DNA, 25 bp, Homo sapien
aatgggaaccgctcgtggaagatgc

SEQ ID NO: 1504777 - DNA, 25 bp, Homo sapien
caccagctcaaatgggaaccgctcg

SEQ ID NO: 1504778 - DNA, 25 bp, Homo sapien
tctcctgagccctcgatcctcttct

SEQ ID NO: 1504779 - DNA, 25 bp, Homo sapien
aagatgcgattgattcgggcgcccc

SEQ ID NO: 1504780 - DNA, 25 bp, Homo sapien
cagagacgggagggcccagccccgg

SEQ ID NO: 1504781 - DNA, 25 bp, Homo sapien
tagctgatctcccgtcgtaagtcct

SEQ ID NO: 1504782 - DNA, 25 bp, Homo sapien
catagctgatctcccgtcgtaagtc

SEQ ID NO: 1504783 - DNA, 25 bp, Homo sapien
gctgatctcccgtcgtaagtccttc

SEQ ID NO: 1504784 - DNA, 25 bp, Homo sapien
ctgatctcccgtcgtaagtccttct

SEQ ID NO: 1504785 - DNA, 25 bp, Homo sapien
acggagaggaaggaacagtggtgac

SEQ ID NO: 1504786 - DNA, 25 bp, Homo sapien
cacggagaggaaggaacagtggtga

SEQ ID NO: 1504787 - DNA, 25 bp, Homo sapien
taagccctatttgatcaggagctgc

SEQ ID NO: 1504788 - DNA, 25 bp, Homo sapien
gcaatggacgcaggactaagacaca

SEQ ID NO: 1504789 - DNA, 25 bp, Homo sapien
gaggttcacaccaaccgactgggca

SEQ ID NO: 1504790 - DNA, 25 bp, Homo sapien
taacgattagggactcagaggtgtg

SEQ ID NO: 1504791 - DNA, 25 bp, Homo sapien
cctcgaatgccaagtccggggtgaa

SEQ ID NO: 1504792 - DNA, 25 bp, Homo sapien
cagggctctttcagcttgacgacct

SEQ ID NO: 1504793 - DNA, 25 bp, Homo sapien
gataaccaggtcgacacatttcaga

SEQ ID NO: 1504794 - DNA, 25 bp, Homo sapien
gcctaactgtattgattagctcctg

SEQ ID NO: 1504795 - DNA, 25 bp, Homo sapien
agtcaccctgccgagggagcaatac

SEQ ID NO: 1504796 - DNA, 25 bp, Homo sapien
gagtcaccctgccgagggagcaata

SEQ ID NO: 1504797 - DNA, 25 bp, Homo sapien
tcaggagtcaccctgccgagggagc

SEQ ID NO: 1504798 - DNA, 25 bp, Homo sapien
aggagtcaccctgccgagggagcaa

SEQ ID NO: 1504799 - DNA, 25 bp, Homo sapien
aagtctgagaatgccgggcattggt

SEQ ID NO: 1504800 - DNA, 25 bp, Homo sapien
agagaagtcggtggctccagggaag

SEQ ID NO: 1504801 - DNA, 25 bp, Homo sapien
agggacagagaagtcggtggctcca

SEQ ID NO: 1504802 - DNA, 25 bp, Homo sapien
agaatgccgggcattggtcaagaag

SEQ ID NO: 1504803 - DNA, 25 bp, Homo sapien
cccagctggctctcatgatgtcgct

SEQ ID NO: 1504804 - DNA, 25 bp, Homo sapien
ctcatgatgtcgctggcattcaggc

SEQ ID NO: 1504805 - DNA, 25 bp, Homo sapien
cgctggcattcaggccattcccgga

SEQ ID NO: 1504806 - DNA, 25 bp, Homo sapien
tgatgtcgctggcattcaggccatt

SEQ ID NO: 1504807 - DNA, 25 bp, Homo sapien
taagtggatccaaaaatgggctgcc

SEQ ID NO: 1504808 - DNA, 25 bp, Homo sapien
ggacactgtggtcgcgcaagcacag

SEQ ID NO: 1504809 - DNA, 25 bp, Homo sapien
cgtcgagagcgcatagaggcactgt

SEQ ID NO: 1504810 - DNA, 25 bp, Homo sapien
ttggccaaagcgtgctgccctggga

SEQ ID NO: 1504811 - DNA, 25 bp, Homo sapien
acccagggacagtgcaggccacaca

SEQ ID NO: 1504812 - DNA, 25 bp, Homo sapien
gcaggatgaggcagaaagacaccca

SEQ ID NO: 1504813 - DNA, 25 bp, Homo sapien
ctgggtcatgcggagggcaggatga

SEQ ID NO: 1504814 - DNA, 25 bp, Homo sapien
cagaaagacacccagggacagtgca

SEQ ID NO: 1504815 - DNA, 25 bp, Homo sapien
caaactcggctctttgagttttaca

SEQ ID NO: 1504816 - DNA, 25 bp, Homo sapien
gagaccacgagatcaacacacttca

SEQ ID NO: 1504817 - DNA, 25 bp, Homo sapien
caatggcttcaaaggccatgtcggg

SEQ ID NO: 1504818 - DNA, 25 bp, Homo sapien
acttttttatgaccgtggccagctc

SEQ ID NO: 1504819 - DNA, 25 bp, Homo sapien
ggtcctcgtggcacgggaagcaaca

SEQ ID NO: 1504820 - DNA, 25 bp, Homo sapien
gaacaagcagagtggtcgcattggc

SEQ ID NO: 1504821 - DNA, 25 bp, Homo sapien
aacaagcagagtggtcgcattggcg

SEQ ID NO: 1504822 - DNA, 25 bp, Homo sapien
gcacgggaagcaacatgaaccacac

SEQ ID NO: 1504823 - DNA, 25 bp, Homo sapien
ggtgacgattcgctctgtctcctct

SEQ ID NO: 1504824 - DNA, 25 bp, Homo sapien
tcccgttcccggatgtaagtggtga

SEQ ID NO: 1504825 - DNA, 25 bp, Homo sapien
tcccggatgtaagtggtgacgattc

SEQ ID NO: 1504826 - DNA, 25 bp, Homo sapien
tgtctcctctcgcaaccgggggtag

SEQ ID NO: 1504827 - DNA, 25 bp, Homo sapien
gagagtataaggacggcccagtgct

SEQ ID NO: 1504828 - DNA, 25 bp, Homo sapien
tggccaaatcaaaactgggcgcctc

SEQ ID NO: 1504829 - DNA, 25 bp, Homo sapien
gatacaatttccaagctacagcagc

SEQ ID NO: 1504830 - DNA, 25 bp, Homo sapien
caaagtgacatagcaagcaagggct

SEQ ID NO: 1504831 - DNA, 25 bp, Homo sapien
actcggacctgtcgcctgctggaaa

SEQ ID NO: 1504832 - DNA, 25 bp, Homo sapien
aaagtagggcaaggcactcggacct

SEQ ID NO: 1504833 - DNA, 25 bp, Homo sapien
tcctgagaataaagtagggcaaggc

SEQ ID NO: 1504834 - DNA, 25 bp, Homo sapien
tccaagttcctgagaataaagtagg

SEQ ID NO: 1504835 - DNA, 25 bp, Homo sapien
gctcactggcttgattcccatttat

SEQ ID NO: 1504836 - DNA, 25 bp, Homo sapien
gggatgcgcgtcactggactcccct

SEQ ID NO: 1504837 - DNA, 25 bp, Homo sapien
gaggcgctgggatgcgcgtcactgg

SEQ ID NO: 1504838 - DNA, 25 bp, Homo sapien
cagctcactggcttgattcccattt

SEQ ID NO: 1504839 - DNA, 25 bp, Homo sapien
agaccacaggcgcacgccacaccac

SEQ ID NO: 1504840 - DNA, 25 bp, Homo sapien
cacaggcgcacgccacaccacctgg

SEQ ID NO: 1504841 - DNA, 25 bp, Homo sapien
ctgagaccacaggcgcacgccacac

SEQ ID NO: 1504842 - DNA, 25 bp, Homo sapien
accacaggcgcacgccacaccacct

SEQ ID NO: 1504843 - DNA, 25 bp, Homo sapien
ggggtcactgtgagtacaaggccaa

SEQ ID NO: 1504844 - DNA, 25 bp, Homo sapien
ctgtgagtacaaggccaagcctggc

SEQ ID NO: 1504845 - DNA, 25 bp, Homo sapien
cactgtgagtacaaggccaagcctg

SEQ ID NO: 1504846 - DNA, 25 bp, Homo sapien
gtcactgtgagtacaaggccaagcc

SEQ ID NO: 1504847 - DNA, 25 bp, Homo sapien
gtcctcatggttcgtgttgatgtag

SEQ ID NO: 1504848 - DNA, 25 bp, Homo sapien
gatgtaggactgctcaatgtcgatc

SEQ ID NO: 1504849 - DNA, 25 bp, Homo sapien
ggactgctcaatgtcgatcagcaga

SEQ ID NO: 1504850 - DNA, 25 bp, Homo sapien
gttcgtgttgatgtaggactgctca

SEQ ID NO: 1504851 - DNA, 25 bp, Homo sapien
acagtggaccactatcagcccagga

SEQ ID NO: 1504852 - DNA, 25 bp, Homo sapien
agtgaggattggtgccgcccgacca

SEQ ID NO: 1504853 - DNA, 25 bp, Homo sapien
tgtctgacacctgccctctcagaga

SEQ ID NO: 1504854 - DNA, 25 bp, Homo sapien
gagcttccagatattctcagttggc

SEQ ID NO: 1504855 - DNA, 25 bp, Homo sapien
ggagagattgtgagaaggaactgtg

SEQ ID NO: 1504856 - DNA, 25 bp, Homo sapien
gagattgtgagaaggaactgtggat

SEQ ID NO: 1504857 - DNA, 25 bp, Homo sapien
aagcagagacatcaaggtgaggaaa

SEQ ID NO: 1504858 - DNA, 25 bp, Homo sapien
acaggagagattgtgagaaggaact

SEQ ID NO: 1504859 - DNA, 25 bp, Homo sapien
caccagctgctcagtatagtaacag

SEQ ID NO: 1504860 - DNA, 25 bp, Homo sapien
tcaccagctgctcagtatagtaaca

SEQ ID NO: 1504861 - DNA, 25 bp, Homo sapien
ggtcaccagctgctcagtatagtaa

SEQ ID NO: 1504862 - DNA, 25 bp, Homo sapien
caggtcaccagctgctcagtatagt

SEQ ID NO: 1504863 - DNA, 25 bp, Homo sapien
tccagtgatattcccaacattcagt

SEQ ID NO: 1504864 - DNA, 25 bp, Homo sapien
accttcctttgctgactacctcggg

SEQ ID NO: 1504865 - DNA, 25 bp, Homo sapien
tattatagggcttcttatctgggct

SEQ ID NO: 1504866 - DNA, 25 bp, Homo sapien
gaaaagcaagtcagcttggtcacct

SEQ ID NO: 1504867 - DNA, 25 bp, Homo sapien
cagacagggttcacgtggacaagat

SEQ ID NO: 1504868 - DNA, 25 bp, Homo sapien
cagggttcacgtggacaagatgccg

SEQ ID NO: 1504869 - DNA, 25 bp, Homo sapien
gacagggttcacgtggacaagatgc

SEQ ID NO: 1504870 - DNA, 25 bp, Homo sapien
gaacagacagggttcacgtggacaa

SEQ ID NO: 1504871 - DNA, 25 bp, Homo sapien
ttcttgttcagctgcgtgctcctct

SEQ ID NO: 1504872 - DNA, 25 bp, Homo sapien
cgagtaggtggaattataggcaccc

SEQ ID NO: 1504873 - DNA, 25 bp, Homo sapien
tctcctgggttcaagtgattctcct

SEQ ID NO: 1504874 - DNA, 25 bp, Homo sapien
gatcctggctcaccacaaccaccat

SEQ ID NO: 1504875 - DNA, 25 bp, Homo sapien
ataggcacccaccatcatgccaggc

SEQ ID NO: 1504876 - DNA, 25 bp, Homo sapien
ctttgaatatgcaaagttagggttg

SEQ ID NO: 1504877 - DNA, 25 bp, Homo sapien
tgaatatgcaaagttagggttgtgg

SEQ ID NO: 1504878 - DNA, 25 bp, Homo sapien
ttgaatatgcaaagttagggttgtg

SEQ ID NO: 1504879 - DNA, 25 bp, Homo sapien
aatatgcaaagttagggttgtgggt

SEQ ID NO: 1504880 - DNA, 25 bp, Homo sapien
ttaagcgagatcttccacagccagg

SEQ ID NO: 1504881 - DNA, 25 bp, Homo sapien
gaatgtccagcaaaagggagcccct

SEQ ID NO: 1504882 - DNA, 25 bp, Homo sapien
gagtgcttagtagaccctggttcca

SEQ ID NO: 1504883 - DNA, 25 bp, Homo sapien
ggttccaagggtagcatccacacag

SEQ ID NO: 1504884 - DNA, 25 bp, Homo sapien
gatgttgttgatggtcagccagccc

SEQ ID NO: 1504885 - DNA, 25 bp, Homo sapien
cttgtaccaggacagtgactcggca

SEQ ID NO: 1504886 - DNA, 25 bp, Homo sapien
cagtgactcggcagtcagcacaaac

SEQ ID NO: 1504887 - DNA, 25 bp, Homo sapien
ccttggagccgcctttcatcaggct

SEQ ID NO: 1504888 - DNA, 25 bp, Homo sapien
gaagagaggacctgaactgttctga

SEQ ID NO: 1504889 - DNA, 25 bp, Homo sapien
aggaataccaaagtgacagacacca

SEQ ID NO: 1504890 - DNA, 25 bp, Homo sapien
gacacagggtaatgctatgttgctc

SEQ ID NO: 1504891 - DNA, 25 bp, Homo sapien
tctttttctacataggaccatcagg

SEQ ID NO: 1504892 - DNA, 25 bp, Homo sapien
gctgccgcctccaagttcaggagca

SEQ ID NO: 1504893 - DNA, 25 bp, Homo sapien
gagcagccacagtgactgtggagaa

SEQ ID NO: 1504894 - DNA, 25 bp, Homo sapien
ctggctgccgcctccaagttcagga

SEQ ID NO: 1504895 - DNA, 25 bp, Homo sapien
ccacagtgactgtggagaaggcagc

SEQ ID NO: 1504896 - DNA, 25 bp, Homo sapien
ccacatcacggatcttgaggttgtc

SEQ ID NO: 1504897 - DNA, 25 bp, Homo sapien
tctgctccgtgttgaagatggcgaa

SEQ ID NO: 1504898 - DNA, 25 bp, Homo sapien
tgtccagaggcagcatgtacttctt

SEQ ID NO: 1504899 - DNA, 25 bp, Homo sapien
atggcgaagacgtgcttgttggaca

SEQ ID NO: 1504900 - DNA, 25 bp, Homo sapien
tgagtgacgcctacacagaagagcg

SEQ ID NO: 1504901 - DNA, 25 bp, Homo sapien
cagactgccgagaggaatgggctct

SEQ ID NO: 1504902 - DNA, 25 bp, Homo sapien
atgtgaccctcgacaccaactgtgg

SEQ ID NO: 1504903 - DNA, 25 bp, Homo sapien
aagagcgctgtgcacaagctcggca

SEQ ID NO: 1504904 - DNA, 25 bp, Homo sapien
tccacgtcttcctgggagtcacagg

SEQ ID NO: 1504905 - DNA, 25 bp, Homo sapien
aggccagctcgatctgccgcaggtc

SEQ ID NO: 1504906 - DNA, 25 bp, Homo sapien
tccttctcggggtagacgccagctc

SEQ ID NO: 1504907 - DNA, 25 bp, Homo sapien
tcggaggaacgaggccttccagctg

SEQ ID NO: 1504908 - DNA, 25 bp, Homo sapien
tgctcaagtgggcatctgctacatg

SEQ ID NO: 1504909 - DNA, 25 bp, Homo sapien
cgtgcccggcaaggcattttaatat

SEQ ID NO: 1504910 - DNA, 25 bp, Homo sapien
catgttcactctacctcaggatgga

SEQ ID NO: 1504911 - DNA, 25 bp, Homo sapien
cccggtcactggcttccgtgaggga

SEQ ID NO: 1504912 - DNA, 25 bp, Homo sapien
gagaaggtgttctcctgggccccat

SEQ ID NO: 1504913 - DNA, 25 bp, Homo sapien
cctgggccccatcctcgttttctgc

SEQ ID NO: 1504914 - DNA, 25 bp, Homo sapien
gtgttctcctgggccccatcctcgt

SEQ ID NO: 1504915 - DNA, 25 bp, Homo sapien
tctcctgggccccatcctcgttttc

SEQ ID NO: 1504916 - DNA, 25 bp, Homo sapien
acctgccgctccagttgggggtcca

SEQ ID NO: 1504917 - DNA, 25 bp, Homo sapien
tgatggccacgtatgagtccaccag

SEQ ID NO: 1504918 - DNA, 25 bp, Homo sapien
tggacttgttgatgatggccacgta

SEQ ID NO: 1504919 - DNA, 25 bp, Homo sapien
tatgagtccaccaggttgcgaatgg

SEQ ID NO: 1504920 - DNA, 25 bp, Homo sapien
tggtgcactctaggcttaccacaac

SEQ ID NO: 1504921 - DNA, 25 bp, Homo sapien
agtggtgcactctaggcttaccaca

SEQ ID NO: 1504922 - DNA, 25 bp, Homo sapien
gtggtgcactctaggcttaccacaa

SEQ ID NO: 1504923 - DNA, 25 bp, Homo sapien
cagtggtgcactctaggcttaccac

SEQ ID NO: 1504924 - DNA, 25 bp, Homo sapien
cccagatcattaggacacagcggct

SEQ ID NO: 1504925 - DNA, 25 bp, Homo sapien
gatgccagcctaagttaattcagag

SEQ ID NO: 1504926 - DNA, 25 bp, Homo sapien
gtttcccaaagaggatggccgtgca

SEQ ID NO: 1504927 - DNA, 25 bp, Homo sapien
aacccaagggtatggttgcaaccag

SEQ ID NO: 1504928 - DNA, 25 bp, Homo sapien
cccagccaatcctgttatatcttta

SEQ ID NO: 1504929 - DNA, 25 bp, Homo sapien
ccgcgcccagccaatcctgttatat

SEQ ID NO: 1504930 - DNA, 25 bp, Homo sapien
gcgcccagccaatcctgttatatct

SEQ ID NO: 1504931 - DNA, 25 bp, Homo sapien
gcccagccaatcctgttatatcttt

SEQ ID NO: 1504932 - DNA, 25 bp, Homo sapien
aggagtataggtaggccagcagctc

SEQ ID NO: 1504933 - DNA, 25 bp, Homo sapien
ccagcagctcgtggtggatgaaggc

SEQ ID NO: 1504934 - DNA, 25 bp, Homo sapien
gatgttgagcgcctccttgagggca

SEQ ID NO: 1504935 - DNA, 25 bp, Homo sapien
gctgctctggtctgccgaggagtat

SEQ ID NO: 1504936 - DNA, 25 bp, Homo sapien
agccctgggtgccacccttgggctg

SEQ ID NO: 1504937 - DNA, 25 bp, Homo sapien
cccagccctgggtgccacccttggg

SEQ ID NO: 1504938 - DNA, 25 bp, Homo sapien
gggtgccacccttgggctgtgtcct

SEQ ID NO: 1504939 - DNA, 25 bp, Homo sapien
cacccttgggctgtgtcctgtttcc

SEQ ID NO: 1504940 - DNA, 25 bp, Homo sapien
tgtatgctggacaccggtcggcgct

SEQ ID NO: 1504941 - DNA, 25 bp, Homo sapien
actgttggcaaacacgctctggggt

SEQ ID NO: 1504942 - DNA, 25 bp, Homo sapien
cactgttggcaaacacgctctgggg

SEQ ID NO: 1504943 - DNA, 25 bp, Homo sapien
gccaggggggtgtatgctggacacc

SEQ ID NO: 1504944 - DNA, 25 bp, Homo sapien
ctggggggatccgaactggccgaga

SEQ ID NO: 1504945 - DNA, 25 bp, Homo sapien
gatccgaactggccgagatgggatc

SEQ ID NO: 1504946 - DNA, 25 bp, Homo sapien
gggggatccgaactggccgagatgg

SEQ ID NO: 1504947 - DNA, 25 bp, Homo sapien
gggatccgaactggccgagatggga

SEQ ID NO: 1504948 - DNA, 25 bp, Homo sapien
aaacctaggcatcaactcgcctgct

SEQ ID NO: 1504949 - DNA, 25 bp, Homo sapien
tgacctccgcaagccaccagggtgt

SEQ ID NO: 1504950 - DNA, 25 bp, Homo sapien
ccgcaagccaccagggtgtcgggca

SEQ ID NO: 1504951 - DNA, 25 bp, Homo sapien
cctgctgtttgaccctcagtgagcc

SEQ ID NO: 1504952 - DNA, 25 bp, Homo sapien
ctcggctgggcggataatggtgggc

SEQ ID NO: 1504953 - DNA, 25 bp, Homo sapien
tagtcgagcagggatggctcggctg

SEQ ID NO: 1504954 - DNA, 25 bp, Homo sapien
ctgggcggataatggtgggccggct

SEQ ID NO: 1504955 - DNA, 25 bp, Homo sapien
gggatggctcggctgggcggataat

SEQ ID NO: 1504956 - DNA, 25 bp, Homo sapien
tatggccgggaaggactatgtacac

SEQ ID NO: 1504957 - DNA, 25 bp, Homo sapien
tggtgcccgcacttatagaaggcct

SEQ ID NO: 1504958 - DNA, 25 bp, Homo sapien
gctaatgggaagttgatatacccct

SEQ ID NO: 1504959 - DNA, 25 bp, Homo sapien
gagtgcaggcacttacagtggtcaa

SEQ ID NO: 1504960 - DNA, 25 bp, Homo sapien
aaagcaaagtttaactgagccccag

SEQ ID NO: 1504961 - DNA, 25 bp, Homo sapien
aaagctctcccctgtatcgagtggc

SEQ ID NO: 1504962 - DNA, 25 bp, Homo sapien
tgggcttccccacgaggtgagagaa

SEQ ID NO: 1504963 - DNA, 25 bp, Homo sapien
cagggacttgggcatccttatggga

SEQ ID NO: 1504964 - DNA, 25 bp, Homo sapien
tctggtcagctgtcaacgtggcggt

SEQ ID NO: 1504965 - DNA, 25 bp, Homo sapien
tttcctgccaaaacgggagtgtgca

SEQ ID NO: 1504966 - DNA, 25 bp, Homo sapien
tggagcgggtcaacttctggtcagc

SEQ ID NO: 1504967 - DNA, 25 bp, Homo sapien
gaaatctcacatggtgggcactgca

SEQ ID NO: 1504968 - DNA, 25 bp, Homo sapien
tgccacctcagtgggactacgggtg

SEQ ID NO: 1504969 - DNA, 25 bp, Homo sapien
ggattgcagttgcacatcaccaccc

SEQ ID NO: 1504970 - DNA, 25 bp, Homo sapien
ttacaggtgtaatcttgcttcagcc

SEQ ID NO: 1504971 - DNA, 25 bp, Homo sapien
tgagctacggcgaggcaaggtcttg

SEQ ID NO: 1504972 - DNA, 25 bp, Homo sapien
cccgaggctactgtaatggctctat

SEQ ID NO: 1504973 - DNA, 25 bp, Homo sapien
tttctgacccgaggctactgtaatg

SEQ ID NO: 1504974 - DNA, 25 bp, Homo sapien
atggctctatttacctgctggccct

SEQ ID NO: 1504975 - DNA, 25 bp, Homo sapien
tggcccttgagtctgagacccttgg

SEQ ID NO: 1504976 - DNA, 25 bp, Homo sapien
gcttcccattcgtgacaaatcctag

SEQ ID NO: 1504977 - DNA, 25 bp, Homo sapien
actggcattccatttgaatcaggat

SEQ ID NO: 1504978 - DNA, 25 bp, Homo sapien
aagaaaagtagacagatcctcccat

SEQ ID NO: 1504979 - DNA, 25 bp, Homo sapien
gataagaaaagtagacagatcctcc

SEQ ID NO: 1504980 - DNA, 25 bp, Homo sapien
tgaaattccaatctgagcaacagat

SEQ ID NO: 1504981 - DNA, 25 bp, Homo sapien
tacgggagtctgctgagccatactg

SEQ ID NO: 1504982 - DNA, 25 bp, Homo sapien
acagatggagttcggacaatattca

SEQ ID NO: 1504983 - DNA, 25 bp, Homo sapien
agccatactgtccaataattccact

SEQ ID NO: 1504984 - DNA, 25 bp, Homo sapien
tcagaaccacatttgccggaatgaa

SEQ ID NO: 1504985 - DNA, 25 bp, Homo sapien
agaaccacatttgccggaatgaaca

SEQ ID NO: 1504986 - DNA, 25 bp, Homo sapien
acatttgccggaatgaacatttcag

SEQ ID NO: 1504987 - DNA, 25 bp, Homo sapien
ccacatttgccggaatgaacatttc

SEQ ID NO: 1504988 - DNA, 25 bp, Homo sapien
ctctgcgtttggctgggaaatccgg

SEQ ID NO: 1504989 - DNA, 25 bp, Homo sapien
ctgcgtttggctgggaaatccggct

SEQ ID NO: 1504990 - DNA, 25 bp, Homo sapien
ctctctgcgtttggctgggaaatcc

SEQ ID NO: 1504991 - DNA, 25 bp, Homo sapien
ctctctctgcgtttggctgggaaat

SEQ ID NO: 1504992 - DNA, 25 bp, Homo sapien
tgcaaagagcaagatggtccagggc

SEQ ID NO: 1504993 - DNA, 25 bp, Homo sapien
cagctgcaaagagcaagatggtcca

SEQ ID NO: 1504994 - DNA, 25 bp, Homo sapien
gcaaagagcaagatggtccagggca

SEQ ID NO: 1504995 - DNA, 25 bp, Homo sapien
gctgcaaagagcaagatggtccagg

SEQ ID NO: 1504996 - DNA, 25 bp, Homo sapien
aatacggattttggagcacggcttc

SEQ ID NO: 1504997 - DNA, 25 bp, Homo sapien
tacggattttggagcacggcttcct

SEQ ID NO: 1504998 - DNA, 25 bp, Homo sapien
gaagaatacggattttggagcacgg

SEQ ID NO: 1504999 - DNA, 25 bp, Homo sapien
ggattttggagcacggcttcctgca

SEQ ID NO: 1505000 - DNA, 25 bp, Homo sapien
taacactccatactggcagtggaag

SEQ ID NO: 1505001 - DNA, 25 bp, Homo sapien
acgttcacgggctcgctgaggtctg

SEQ ID NO: 1505002 - DNA, 25 bp, Homo sapien
tcaggttaaatgtcaccccgcgctg

SEQ ID NO: 1505003 - DNA, 25 bp, Homo sapien
gctgggactggttgagctcacctaa

SEQ ID NO: 1505004 - DNA, 25 bp, Homo sapien
tcagggagagcaccaagatccaagt

SEQ ID NO: 1505005 - DNA, 25 bp, Homo sapien
cagggagagcaccaagatccaagtg

SEQ ID NO: 1505006 - DNA, 25 bp, Homo sapien
tgtgccaggctttgcgtgctgttac

SEQ ID NO: 1505007 - DNA, 25 bp, Homo sapien
ttccagaagttgtcaactggcaact

SEQ ID NO: 1505008 - DNA, 25 bp, Homo sapien
gtgtgccaggctttgcgtgctgtta

SEQ ID NO: 1505009 - DNA, 25 bp, Homo sapien
tcaactggcaacttgtgtgccaggc

SEQ ID NO: 1505010 - DNA, 25 bp, Homo sapien
tttcttctgtaaatttctgagttta

SEQ ID NO: 1505011 - DNA, 25 bp, Homo sapien
ttcttctgtaaatttctgagtttaa

SEQ ID NO: 1505012 - DNA, 25 bp, Homo sapien
cttttcttctgtaaatttctgagtt

SEQ ID NO: 1505013 - DNA, 25 bp, Homo sapien
ctgtgctgtcgaagttaatctgggc

SEQ ID NO: 1505014 - DNA, 25 bp, Homo sapien
ctgtcgaagttaatctgggcccagc

SEQ ID NO: 1505015 - DNA, 25 bp, Homo sapien
gtcgaagttaatctgggcccagcag

SEQ ID NO: 1505016 - DNA, 25 bp, Homo sapien
tgctgtcgaagttaatctgggccca

SEQ ID NO: 1505017 - DNA, 25 bp, Homo sapien
gaacaagcagtcacagaagaaattt

SEQ ID NO: 1505018 - DNA, 25 bp, Homo sapien
gcatttggaggtgtaatcctttccc

SEQ ID NO: 1505019 - DNA, 25 bp, Homo sapien
tttccccactggagtcaggagtgtg

SEQ ID NO: 1505020 - DNA, 25 bp, Homo sapien
tggtgtgtgatgaggcctgatggca

SEQ ID NO: 1505021 - DNA, 25 bp, Homo sapien
aacagggagttatcgaaggacatgt

SEQ ID NO: 1505022 - DNA, 25 bp, Homo sapien
gtaaacagggagttatcgaaggaca

SEQ ID NO: 1505023 - DNA, 25 bp, Homo sapien
taaacagggagttatcgaaggacat

SEQ ID NO: 1505024 - DNA, 25 bp, Homo sapien
gagacggtaaacagggagttatcga

SEQ ID NO: 1505025 - DNA, 25 bp, Homo sapien
gctcttctttgctaagtgaacacaa

SEQ ID NO: 1505026 - DNA, 25 bp, Homo sapien
ggcagaatgctagtacccaccactt

SEQ ID NO: 1505027 - DNA, 25 bp, Homo sapien
agcaaatggcacatcgtaagctctt

SEQ ID NO: 1505028 - DNA, 25 bp, Homo sapien
cctagggctgctatgaggcttaaaa

SEQ ID NO: 1505029 - DNA, 25 bp, Homo sapien
taataacttaagcaagccagcaggc

SEQ ID NO: 1505030 - DNA, 25 bp, Homo sapien
gcaggcccggaaagtgctgaattcg

SEQ ID NO: 1505031 - DNA, 25 bp, Homo sapien
tgttgtctgtatagtgccaggccca

SEQ ID NO: 1505032 - DNA, 25 bp, Homo sapien
gagacctgggacgtcttatggccca

SEQ ID NO: 1505033 - DNA, 25 bp, Homo sapien
gactcgctttgtcagccgccccgct

SEQ ID NO: 1505034 - DNA, 25 bp, Homo sapien
ggactcgctttgtcagccgccccgc

SEQ ID NO: 1505035 - DNA, 25 bp, Homo sapien
ccggactcgctttgtcagccgcccc

SEQ ID NO: 1505036 - DNA, 25 bp, Homo sapien
cggactcgctttgtcagccgccccg

SEQ ID NO: 1505037 - DNA, 25 bp, Homo sapien
ccgccgctgcgcccgggcccaggcc

SEQ ID NO: 1505038 - DNA, 25 bp, Homo sapien
ccgctgcgcccgggcccaggccgcc

SEQ ID NO: 1505039 - DNA, 25 bp, Homo sapien
cgctgcgcccgggcccaggccgccg

SEQ ID NO: 1505040 - DNA, 25 bp, Homo sapien
cttagatccggctccaggccccgcc

SEQ ID NO: 1505041 - DNA, 25 bp, Homo sapien
ctcgccgttcgcgtcgccgatggtg

SEQ ID NO: 1505042 - DNA, 25 bp, Homo sapien
cggggaacaccgacacggtagcgca

SEQ ID NO: 1505043 - DNA, 25 bp, Homo sapien
cgtcgccgatggtgaggaggcgggc

SEQ ID NO: 1505044 - DNA, 25 bp, Homo sapien
aacaccgacacggtagcgcagggcc

SEQ ID NO: 1505045 - DNA, 25 bp, Homo sapien
gtagagggcgatgcccgccgagtcc

SEQ ID NO: 1505046 - DNA, 25 bp, Homo sapien
cacctcgaggcgcagcgcctgctgc

SEQ ID NO: 1505047 - DNA, 25 bp, Homo sapien
ggctgtagagggcgatgcccgccga

SEQ ID NO: 1505048 - DNA, 25 bp, Homo sapien
ctgtagagggcgatgcccgccgagt

SEQ ID NO: 1505049 - DNA, 25 bp, Homo sapien
gcaaacactttccaaccgtcctgag

SEQ ID NO: 1505050 - DNA, 25 bp, Homo sapien
acacctcgcacagcggtggaactcg

SEQ ID NO: 1505051 - DNA, 25 bp, Homo sapien
ggtcctgaacgccacacctcgcaca

SEQ ID NO: 1505052 - DNA, 25 bp, Homo sapien
tggaactcggtactcgcgggcgccc

SEQ ID NO: 1505053 - DNA, 25 bp, Homo sapien
tccacgttttcaaagtcgaggtgca

SEQ ID NO: 1505054 - DNA, 25 bp, Homo sapien
ggaaaacccagtgtgaacggactgc

SEQ ID NO: 1505055 - DNA, 25 bp, Homo sapien
agtgtgaacggactgctcctcgggc

SEQ ID NO: 1505056 - DNA, 25 bp, Homo sapien
cgttttcaaagtcgaggtgcaggga

SEQ ID NO: 1505057 - DNA, 25 bp, Homo sapien
aactggtaccctttttcagtcacag

SEQ ID NO: 1505058 - DNA, 25 bp, Homo sapien
cttctgagaagctgaccgaaatcag

SEQ ID NO: 1505059 - DNA, 25 bp, Homo sapien
aagctgaccgaaatcaggggaggtt

SEQ ID NO: 1505060 - DNA, 25 bp, Homo sapien
tcagtcacagatccttctgagaagc

SEQ ID NO: 1505061 - DNA, 25 bp, Homo sapien
gtaagccttgggcaggcacttcctc

SEQ ID NO: 1505062 - DNA, 25 bp, Homo sapien
aagaggtcgctatggccaacacggt

SEQ ID NO: 1505063 - DNA, 25 bp, Homo sapien
gaagaggtcgctatggccaacacgg

SEQ ID NO: 1505064 - DNA, 25 bp, Homo sapien
cacggcaggaaccaggggagacggg

SEQ ID NO: 1505065 - DNA, 25 bp, Homo sapien
caggcacacggcaggaaccagggga

SEQ ID NO: 1505066 - DNA, 25 bp, Homo sapien
gcacacggcaggaaccaggggagac

SEQ ID NO: 1505067 - DNA, 25 bp, Homo sapien
tcaggcacacggcaggaaccagggg

SEQ ID NO: 1505068 - DNA, 25 bp, Homo sapien
gagtcggatcctccgatgtcgtcct

SEQ ID NO: 1505069 - DNA, 25 bp, Homo sapien
ggatcctccgatgtcgtcctcggag

SEQ ID NO: 1505070 - DNA, 25 bp, Homo sapien
ctgagtcggatcctccgatgtcgtc

SEQ ID NO: 1505071 - DNA, 25 bp, Homo sapien
ctccgatgtcgtcctcggagaagct

SEQ ID NO: 1505072 - DNA, 25 bp, Homo sapien
gctctgggcatgacccacacagtac

SEQ ID NO: 1505073 - DNA, 25 bp, Homo sapien
ggctctgggcatgacccacacagta

SEQ ID NO: 1505074 - DNA, 25 bp, Homo sapien
agggctctgggcatgacccacacag

SEQ ID NO: 1505075 - DNA, 25 bp, Homo sapien
acagccccacaaagcgcagatccag

SEQ ID NO: 1505076 - DNA, 25 bp, Homo sapien
gttgcggcatcagccggcgcatgtt

SEQ ID NO: 1505077 - DNA, 25 bp, Homo sapien
cccaggattcagaaaggccctctgt

SEQ ID NO: 1505078 - DNA, 25 bp, Homo sapien
ccaaaaagcaccactgttgcggcat

SEQ ID NO: 1505079 - DNA, 25 bp, Homo sapien
ccctctgtgttggcctctagagaca

SEQ ID NO: 1505080 - DNA, 25 bp, Homo sapien
tgggtgtggcgaactggatgaggac

SEQ ID NO: 1505081 - DNA, 25 bp, Homo sapien
tggatgaggacgctgttgcagccca

SEQ ID NO: 1505082 - DNA, 25 bp, Homo sapien
cgctgttgcagcccagggtgatgat

SEQ ID NO: 1505083 - DNA, 25 bp, Homo sapien
ttgcccacacggctgcactctgtct

SEQ ID NO: 1505084 - DNA, 25 bp, Homo sapien
aacacagaccgctccagggtgtggc

SEQ ID NO: 1505085 - DNA, 25 bp, Homo sapien
cggcaggttttcaggatgttgtaga

SEQ ID NO: 1505086 - DNA, 25 bp, Homo sapien
agtactgcacggcagaagactcctc

SEQ ID NO: 1505087 - DNA, 25 bp, Homo sapien
ttcaggatgttgtagaaggaacaga

SEQ ID NO: 1505088 - DNA, 25 bp, Homo sapien
tccctcgggaggtcgtgcaccctct

SEQ ID NO: 1505089 - DNA, 25 bp, Homo sapien
tcactgcagccgatggcaacagctg

SEQ ID NO: 1505090 - DNA, 25 bp, Homo sapien
gccactatcactgcagccgatggca

SEQ ID NO: 1505091 - DNA, 25 bp, Homo sapien
tcgggaggtcgtgcaccctctgcct

SEQ ID NO: 1505092 - DNA, 25 bp, Homo sapien
ggcacatggtggcacgaggcagcca

SEQ ID NO: 1505093 - DNA, 25 bp, Homo sapien
aacagagacataccgatggcacggg

SEQ ID NO: 1505094 - DNA, 25 bp, Homo sapien
cataccgatggcacggggcacatgg

SEQ ID NO: 1505095 - DNA, 25 bp, Homo sapien
gagacataccgatggcacggggcac

SEQ ID NO: 1505096 - DNA, 25 bp, Homo sapien
cgcacgtagtcctgcatcatgttct

SEQ ID NO: 1505097 - DNA, 25 bp, Homo sapien
caggatggcgcgctggtaggtgcct

SEQ ID NO: 1505098 - DNA, 25 bp, Homo sapien
gttttgcaggatggcgcgctggtag

SEQ ID NO: 1505099 - DNA, 25 bp, Homo sapien
ggtgcctgtccgcacgtagtcctgc

SEQ ID NO: 1505100 - DNA, 25 bp, Homo sapien
tagattttccgtgctccagcttggg

SEQ ID NO: 1505101 - DNA, 25 bp, Homo sapien
ggcaaaaaacgacaggatcccagag

SEQ ID NO: 1505102 - DNA, 25 bp, Homo sapien
ctccaccgcgtagattttccgtgct

SEQ ID NO: 1505103 - DNA, 25 bp, Homo sapien
cagcttgggcggcaaaaaacgacag

SEQ ID NO: 1505104 - DNA, 25 bp, Homo sapien
tagctctccagcatgcgctcgttga

SEQ ID NO: 1505105 - DNA, 25 bp, Homo sapien
ttgcccgggatgaccacgatgcggt

SEQ ID NO: 1505106 - DNA, 25 bp, Homo sapien
cgatgcggtccgtcaggttgttact

SEQ ID NO: 1505107 - DNA, 25 bp, Homo sapien
ctcgttgaagagcatgtagcccatg

SEQ ID NO: 1505108 - DNA, 25 bp, Homo sapien
tagagctgttcatccgtgaagggtg

SEQ ID NO: 1505109 - DNA, 25 bp, Homo sapien
aaggtggacgtcaccaatggtagga

SEQ ID NO: 1505110 - DNA, 25 bp, Homo sapien
gccttggtgaactgctccatgtaga

SEQ ID NO: 1505111 - DNA, 25 bp, Homo sapien
aagggtgcaaggtggacgtcaccaa

SEQ ID NO: 1505112 - DNA, 25 bp, Homo sapien
acctcggagggccgacaggtccact

SEQ ID NO: 1505113 - DNA, 25 bp, Homo sapien
gcacctcggagggccgacaggtcca

SEQ ID NO: 1505114 - DNA, 25 bp, Homo sapien
cggcacctcggagggccgacaggtc

SEQ ID NO: 1505115 - DNA, 25 bp, Homo sapien
cggagggccgacaggtccactccat

SEQ ID NO: 1505116 - DNA, 25 bp, Homo sapien
cacaggctgccggaaatactcatcc

SEQ ID NO: 1505117 - DNA, 25 bp, Homo sapien
caggctgccggaaatactcatccac

SEQ ID NO: 1505118 - DNA, 25 bp, Homo sapien
acaggctgccggaaatactcatcca

SEQ ID NO: 1505119 - DNA, 25 bp, Homo sapien
tagcgatggcgtctctgtgttgccc

SEQ ID NO: 1505120 - DNA, 25 bp, Homo sapien
ctgtgtgctaagtgtctacatgcat

SEQ ID NO: 1505121 - DNA, 25 bp, Homo sapien
ccaaatctctgtgagagcgctgtgc

SEQ ID NO: 1505122 - DNA, 25 bp, Homo sapien
cacagcaatggcaagtgatcactgc

SEQ ID NO: 1505123 - DNA, 25 bp, Homo sapien
tgaactatgtaaaccgaataaaatc

SEQ ID NO: 1505124 - DNA, 25 bp, Homo sapien
catgaactatgtaaaccgaataaaa

SEQ ID NO: 1505125 - DNA, 25 bp, Homo sapien
ctgccatgaactatgtaaaccgaat

SEQ ID NO: 1505126 - DNA, 25 bp, Homo sapien
gccatgaactatgtaaaccgaataa

SEQ ID NO: 1505127 - DNA, 25 bp, Homo sapien
catcaaagaccatgcggacgtgaga

SEQ ID NO: 1505128 - DNA, 25 bp, Homo sapien
taagcccgagagtgtgaatcaagcc

SEQ ID NO: 1505129 - DNA, 25 bp, Homo sapien
taattaaaccagtgatggctctccc

SEQ ID NO: 1505130 - DNA, 25 bp, Homo sapien
cacaggtgtgacgtggcatctgacg

SEQ ID NO: 1505131 - DNA, 25 bp, Homo sapien
tcaggatccggatgtcaaatgtgtc

SEQ ID NO: 1505132 - DNA, 25 bp, Homo sapien
gacttggccatcaggatccggatgt

SEQ ID NO: 1505133 - DNA, 25 bp, Homo sapien
gacagacttggccatcaggatccgg

SEQ ID NO: 1505134 - DNA, 25 bp, Homo sapien
tggccatcaggatccggatgtcaaa

SEQ ID NO: 1505135 - DNA, 25 bp, Homo sapien
tctccttctttggcttctaagaagt

SEQ ID NO: 1505136 - DNA, 25 bp, Homo sapien
tgtgcaaatctccttctttggcttc

SEQ ID NO: 1505137 - DNA, 25 bp, Homo sapien
ccttctttggcttctaagaagttca

SEQ ID NO: 1505138 - DNA, 25 bp, Homo sapien
ctgtgcaaatctccttctttggctt

SEQ ID NO: 1505139 - DNA, 25 bp, Homo sapien
cagtggctgctggggaagccagaca

SEQ ID NO: 1505140 - DNA, 25 bp, Homo sapien
ctggaaggcaaagggcagtggctgc

SEQ ID NO: 1505141 - DNA, 25 bp, Homo sapien
ggctgctggggaagccagacaggcg

SEQ ID NO: 1505142 - DNA, 25 bp, Homo sapien
gtggctgctggggaagccagacagg

SEQ ID NO: 1505143 - DNA, 25 bp, Homo sapien
gcatgtggaatttgaatgggatttc

SEQ ID NO: 1505144 - DNA, 25 bp, Homo sapien
atggagccgatgaaagcaacgtcaa

SEQ ID NO: 1505145 - DNA, 25 bp, Homo sapien
gcagcatgtggaatttgaatgggat

SEQ ID NO: 1505146 - DNA, 25 bp, Homo sapien
gatgaaagcaacgtcaaaccagaaa

SEQ ID NO: 1505147 - DNA, 25 bp, Homo sapien
tgtcccctgccttggcgaacagtgg

SEQ ID NO: 1505148 - DNA, 25 bp, Homo sapien
atgtccctgagagcgtgtcccctgc

SEQ ID NO: 1505149 - DNA, 25 bp, Homo sapien
tgttggcaataagcagacatgtccc

SEQ ID NO: 1505150 - DNA, 25 bp, Homo sapien
gaacagtggtgactggaacaggcac

SEQ ID NO: 1505151 - DNA, 25 bp, Homo sapien
ccaggaggttactggacttggagcc

SEQ ID NO: 1505152 - DNA, 25 bp, Homo sapien
tactggacttggagccggtctggtc

SEQ ID NO: 1505153 - DNA, 25 bp, Homo sapien
cttggagccggtctggtccacctgg

SEQ ID NO: 1505154 - DNA, 25 bp, Homo sapien
ttcagatccaggaggttactggact

SEQ ID NO: 1505155 - DNA, 25 bp, Homo sapien
cacatgttttccgagggagatgtgt

SEQ ID NO: 1505156 - DNA, 25 bp, Homo sapien
gggtgagggcgttgtgcccgtgtat

SEQ ID NO: 1505157 - DNA, 25 bp, Homo sapien
gagatgtgtagtgggagccgggtgg

SEQ ID NO: 1505158 - DNA, 25 bp, Homo sapien
aggttgtaggtgctgcccgtgttcc

SEQ ID NO: 1505159 - DNA, 25 bp, Homo sapien
gtccagagagggagacgtcagggct

SEQ ID NO: 1505160 - DNA, 25 bp, Homo sapien
cctcccgggttggctgggcattggg

SEQ ID NO: 1505161 - DNA, 25 bp, Homo sapien
gcctcccgggttggctgggcattgg

SEQ ID NO: 1505162 - DNA, 25 bp, Homo sapien
ctcccgggttggctgggcattgggg

SEQ ID NO: 1505163 - DNA, 25 bp, Homo sapien
ctggcaataacactgctcaagtcat

SEQ ID NO: 1505164 - DNA, 25 bp, Homo sapien
cactggcaataacactgctcaagtc

SEQ ID NO: 1505165 - DNA, 25 bp, Homo sapien
gctcaagtcataggcggtcggcatc

SEQ ID NO: 1505166 - DNA, 25 bp, Homo sapien
actgctcaagtcataggcggtcggc

SEQ ID NO: 1505167 - DNA, 25 bp, Homo sapien
cattatggagcccatccgggagtgg

SEQ ID NO: 1505168 - DNA, 25 bp, Homo sapien
tggacaatccccgtgctcattatgg

SEQ ID NO: 1505169 - DNA, 25 bp, Homo sapien
gtgtgattgacaatccccgtgttgg

SEQ ID NO: 1505170 - DNA, 25 bp, Homo sapien
ggagtgggtgtgattgacaatcccc

SEQ ID NO: 1505171 - DNA, 25 bp, Homo sapien
acacgctagctcggcccccacgggc

SEQ ID NO: 1505172 - DNA, 25 bp, Homo sapien
cacgctagctcggcccccacgggcc

SEQ ID NO: 1505173 - DNA, 25 bp, Homo sapien
cacacgctagctcggcccccacggg

SEQ ID NO: 1505174 - DNA, 25 bp, Homo sapien
tcacacgctagctcggcccccacgg

SEQ ID NO: 1505175 - DNA, 25 bp, Homo sapien
agtgcatggtgttggtcgggatgga

SEQ ID NO: 1505176 - DNA, 25 bp, Homo sapien
accactgccctgggcgccggaggac

SEQ ID NO: 1505177 - DNA, 25 bp, Homo sapien
tgttggtcgggatggacatgggcga

SEQ ID NO: 1505178 - DNA, 25 bp, Homo sapien
tggacatgggcgacgccatggagat

SEQ ID NO: 1505179 - DNA, 25 bp, Homo sapien
ccgggtgttcgagcttctccagtac

SEQ ID NO: 1505180 - DNA, 25 bp, Homo sapien
caaagagagctgtgaccgggtgttc

SEQ ID NO: 1505181 - DNA, 25 bp, Homo sapien
cgagggctcccacaacatgattttg

SEQ ID NO: 1505182 - DNA, 25 bp, Homo sapien
tgtaaaatatggcagcgacacacgc

SEQ ID NO: 1505183 - DNA, 25 bp, Homo sapien
acgtccgttgtgaccgaggcctggt

SEQ ID NO: 1505184 - DNA, 25 bp, Homo sapien
tacattcaagtgtgaggtgaaccct

SEQ ID NO: 1505185 - DNA, 25 bp, Homo sapien
tggcttcacagagggtctgcggatt

SEQ ID NO: 1505186 - DNA, 25 bp, Homo sapien
aaaaagcagcatgtcacgtccgttg

SEQ ID NO: 1505187 - DNA, 25 bp, Homo sapien
gtgtctgccccaagtggccggcagt

SEQ ID NO: 1505188 - DNA, 25 bp, Homo sapien
gatggaaatgccgtcacagtagtag

SEQ ID NO: 1505189 - DNA, 25 bp, Homo sapien
gggagctactcaggcctaacgttag

SEQ ID NO: 1505190 - DNA, 25 bp, Homo sapien
cagatccttgaggtgtctgtgtctg

SEQ ID NO: 1505191 - DNA, 25 bp, Homo sapien
ctgggtgcacacacggcgggcctga

SEQ ID NO: 1505192 - DNA, 25 bp, Homo sapien
gattcagagaatttatataaaggcg

SEQ ID NO: 1505193 - DNA, 25 bp, Homo sapien
gggccacctgctttccctcctatgg

SEQ ID NO: 1505194 - DNA, 25 bp, Homo sapien
agcgcccgctcctgcctgggtgcac

SEQ ID NO: 1505195 - DNA, 25 bp, Homo sapien
agacgcccctgaacgaccatggcat

SEQ ID NO: 1505196 - DNA, 25 bp, Homo sapien
cctgaacgaccatggcatcggccga

SEQ ID NO: 1505197 - DNA, 25 bp, Homo sapien
gcggagacgcccctgaacgaccatg

SEQ ID NO: 1505198 - DNA, 25 bp, Homo sapien
cgagggatgcggagacgcccctgaa

SEQ ID NO: 1505199 - DNA, 25 bp, Homo sapien
aactcctgatacccgacgttaagag

SEQ ID NO: 1505200 - DNA, 25 bp, Homo sapien
cgacgttaagagcccgggagtctct

SEQ ID NO: 1505201 - DNA, 25 bp, Homo sapien
ctgatacccgacgttaagagcccgg

SEQ ID NO: 1505202 - DNA, 25 bp, Homo sapien
ctcctgatacccgacgttaagagcc

SEQ ID NO: 1505203 - DNA, 25 bp, Homo sapien
ggcgccgggaccaaaatctcctcag

SEQ ID NO: 1505204 - DNA, 25 bp, Homo sapien
tcccggcttcgccactaccgcgtcg

SEQ ID NO: 1505205 - DNA, 25 bp, Homo sapien
gccgggaccaaaatctcctcagagc

SEQ ID NO: 1505206 - DNA, 25 bp, Homo sapien
cgcggcgccgggaccaaaatctcct

SEQ ID NO: 1505207 - DNA, 25 bp, Homo sapien
ccagcgtgaagcaggccgccgcgcc

SEQ ID NO: 1505208 - DNA, 25 bp, Homo sapien
agcctccgccgaagcgtccctgcag

SEQ ID NO: 1505209 - DNA, 25 bp, Homo sapien
agcagacccacatacacagcggcgc

SEQ ID NO: 1505210 - DNA, 25 bp, Homo sapien
tcggcgtagtcccggagcagcgcgc

SEQ ID NO: 1505211 - DNA, 25 bp, Homo sapien
tacttctcatcgaagagccgctcgt

SEQ ID NO: 1505212 - DNA, 25 bp, Homo sapien
caggtgcaggaattcgtcgtcgttg

SEQ ID NO: 1505213 - DNA, 25 bp, Homo sapien
tcgtcgttgatgtcgcagtcgcgca

SEQ ID NO: 1505214 - DNA, 25 bp, Homo sapien
cgttggtctcggaatgcagctgctg

SEQ ID NO: 1505215 - DNA, 25 bp, Homo sapien
tataaaaggctcatgaccagctctg

SEQ ID NO: 1505216 - DNA, 25 bp, Homo sapien
ggcagaaaggctccccaaacttgtg

SEQ ID NO: 1505217 - DNA, 25 bp, Homo sapien
tgtcaagtcgttctgctgtccccaa

SEQ ID NO: 1505218 - DNA, 25 bp, Homo sapien
gaccaatgtggtacctccttaagga

SEQ ID NO: 1505219 - DNA, 25 bp, Homo sapien
ttgagccaccgggcccatccactta

SEQ ID NO: 1505220 - DNA, 25 bp, Homo sapien
gcttgagccaccgggcccatccact

SEQ ID NO: 1505221 - DNA, 25 bp, Homo sapien
agccaccgggcccatccacttattt

SEQ ID NO: 1505222 - DNA, 25 bp, Homo sapien
aggcttgagccaccgggcccatcca

SEQ ID NO: 1505223 - DNA, 25 bp, Homo sapien
aacctagctaagtaccagctgtgta

SEQ ID NO: 1505224 - DNA, 25 bp, Homo sapien
cagctgtgtacactaacttacttct

SEQ ID NO: 1505225 - DNA, 25 bp, Homo sapien
tgaagtacaacataaccagaatcta

SEQ ID NO: 1505226 - DNA, 25 bp, Homo sapien
tagaattctgtttcagggttactga

SEQ ID NO: 1505227 - DNA, 25 bp, Homo sapien
gacaggatttcaccatgtcgcctag

SEQ ID NO: 1505228 - DNA, 25 bp, Homo sapien
aggatttcaccatgtcgcctaggct

SEQ ID NO: 1505229 - DNA, 25 bp, Homo sapien
ttgtaattttgtgtattttgtagag

SEQ ID NO: 1505230 - DNA, 25 bp, Homo sapien
tttgtaattttgtgtattttgtaga

SEQ ID NO: 1505231 - DNA, 25 bp, Homo sapien
cctgaggtagcatcactcccttaat

SEQ ID NO: 1505232 - DNA, 25 bp, Homo sapien
tgaggtagcatcactcccttaatac

SEQ ID NO: 1505233 - DNA, 25 bp, Homo sapien
ggtagcatcactcccttaatacttc

SEQ ID NO: 1505234 - DNA, 25 bp, Homo sapien
tagcatcactcccttaatacttcag

SEQ ID NO: 1505235 - DNA, 25 bp, Homo sapien
ttaggatcaaagtccacaagtttga

SEQ ID NO: 1505236 - DNA, 25 bp, Homo sapien
cagttcgaatcttggtcctgccaca

SEQ ID NO: 1505237 - DNA, 25 bp, Homo sapien
tgggagttacagttcgaatcttggt

SEQ ID NO: 1505238 - DNA, 25 bp, Homo sapien
actatttctgacaagaattattagg

SEQ ID NO: 1505239 - DNA, 25 bp, Homo sapien
caaaatagtgcagtatgagaggccg

SEQ ID NO: 1505240 - DNA, 25 bp, Homo sapien
gcctgggaaccgctttgatccctga

SEQ ID NO: 1505241 - DNA, 25 bp, Homo sapien
cctgaggctcggaaataggaaccct

SEQ ID NO: 1505242 - DNA, 25 bp, Homo sapien
caagaccgggcagtggtttcccgcg

SEQ ID NO: 1505243 - DNA, 25 bp, Homo sapien
ggcagaatgggcgtctcgcttctct

SEQ ID NO: 1505244 - DNA, 25 bp, Homo sapien
gggcgtctcgcttctcttcacgaaa

SEQ ID NO: 1505245 - DNA, 25 bp, Homo sapien
gccggcgccgtcgacttcccggcgc

SEQ ID NO: 1505246 - DNA, 25 bp, Homo sapien
cgcttctcttcacgaaacaaagaag

SEQ ID NO: 1505247 - DNA, 25 bp, Homo sapien
catatctggaggtttggctgagccc

SEQ ID NO: 1505248 - DNA, 25 bp, Homo sapien
agcttcgccaaaaacgcaacattcg

SEQ ID NO: 1505249 - DNA, 25 bp, Homo sapien
taagacaatttgaggtcggctagcc

SEQ ID NO: 1505250 - DNA, 25 bp, Homo sapien
tgcctattgttgcagccgctgtaat

SEQ ID NO: 1505251 - DNA, 25 bp, Homo sapien
aacaccaggcatctggcagagaaca

SEQ ID NO: 1505252 - DNA, 25 bp, Homo sapien
caccaggcatctggcagagaacaac

SEQ ID NO: 1505253 - DNA, 25 bp, Homo sapien
gatgactacccccaaatacgaacag

SEQ ID NO: 1505254 - DNA, 25 bp, Homo sapien
gaacagcgctgaatgcaccaagctg

SEQ ID NO: 1505255 - DNA, 25 bp, Homo sapien
aatgaaatccattgcagaccaggag

SEQ ID NO: 1505256 - DNA, 25 bp, Homo sapien
ccctaaggtgtcttacacggtgccg

SEQ ID NO: 1505257 - DNA, 25 bp, Homo sapien
cacggtgccgcttagagtcctgcaa

SEQ ID NO: 1505258 - DNA, 25 bp, Homo sapien
aaatccagatgtgtgcggcccttgg

SEQ ID NO: 1505259 - DNA, 25 bp, Homo sapien
ccgcacctagcccaagccacagtgc

SEQ ID NO: 1505260 - DNA, 25 bp, Homo sapien
ccttgctcccacagccataagcatg

SEQ ID NO: 1505261 - DNA, 25 bp, Homo sapien
tccttgctcccacagccataagcat

SEQ ID NO: 1505262 - DNA, 25 bp, Homo sapien
accgcacctagcccaagccacagtg

SEQ ID NO: 1505263 - DNA, 25 bp, Homo sapien
ctagcctgggcaaaagggcgagacg

SEQ ID NO: 1505264 - DNA, 25 bp, Homo sapien
catgttgtcctgagggtaccctcca

SEQ ID NO: 1505265 - DNA, 25 bp, Homo sapien
gggtgtcctgctgagggcggccctg

SEQ ID NO: 1505266 - DNA, 25 bp, Homo sapien
ccatcatgctgtgggcggagcccgg

SEQ ID NO: 1505267 - DNA, 25 bp, Homo sapien
acccgggctagggcccagcatggct

SEQ ID NO: 1505268 - DNA, 25 bp, Homo sapien
ttgtagcgcgggtcgtccgacatgc

SEQ ID NO: 1505269 - DNA, 25 bp, Homo sapien
gaccgcatccccattcctttcatct

SEQ ID NO: 1505270 - DNA, 25 bp, Homo sapien
ggtcgtccgacatgcccttctcatg

SEQ ID NO: 1505271 - DNA, 25 bp, Homo sapien
ccttctcatgcatggactccatggg

SEQ ID NO: 1505272 - DNA, 25 bp, Homo sapien
ggtagcgttggcatctgctgctgca

SEQ ID NO: 1505273 - DNA, 25 bp, Homo sapien
tgcaccgccatctgcaggtggtcgg

SEQ ID NO: 1505274 - DNA, 25 bp, Homo sapien
cctcctggcccggaagacatctggg

SEQ ID NO: 1505275 - DNA, 25 bp, Homo sapien
tgtaggccatgatctgagctctgag

SEQ ID NO: 1505276 - DNA, 25 bp, Homo sapien
gcctgctgtaatttggaggtgccgg

SEQ ID NO: 1505277 - DNA, 25 bp, Homo sapien
ctgctgtaatttggaggtgccgggc

SEQ ID NO: 1505278 - DNA, 25 bp, Homo sapien
cctgctgtaatttggaggtgccggg

SEQ ID NO: 1505279 - DNA, 25 bp, Homo sapien
aggcctgctgtaatttggaggtgcc

SEQ ID NO: 1505280 - DNA, 25 bp, Homo sapien
ctgggggaggcatgttgggccctcc

SEQ ID NO: 1505281 - DNA, 25 bp, Homo sapien
ggcctttttgttctgtctgtggctc

SEQ ID NO: 1505282 - DNA, 25 bp, Homo sapien
gctcccaaggcctttttgttctgtc

SEQ ID NO: 1505283 - DNA, 25 bp, Homo sapien
tctgtctgtggctctatggcagcat

SEQ ID NO: 1505284 - DNA, 25 bp, Homo sapien
ctatggcagcatttcctgtcatctc

SEQ ID NO: 1505285 - DNA, 25 bp, Homo sapien
ctgccttgggctccaacctcctcca

SEQ ID NO: 1505286 - DNA, 25 bp, Homo sapien
ttgggctccaacctcctccagatct

SEQ ID NO: 1505287 - DNA, 25 bp, Homo sapien
ccttgggctccaacctcctccagat

SEQ ID NO: 1505288 - DNA, 25 bp, Homo sapien
gggctccaacctcctccagatctca

SEQ ID NO: 1505289 - DNA, 25 bp, Homo sapien
tgcagtggcaccatgggcgcgggct

SEQ ID NO: 1505290 - DNA, 25 bp, Homo sapien
tggctgcgggggaatcagcttctga

SEQ ID NO: 1505291 - DNA, 25 bp, Homo sapien
acagggtcgaggccccgcggcttct

SEQ ID NO: 1505292 - DNA, 25 bp, Homo sapien
tctgcggtggcatcacgggcgaggc

SEQ ID NO: 1505293 - DNA, 25 bp, Homo sapien
tggttcgcaaatccccggccaggga

SEQ ID NO: 1505294 - DNA, 25 bp, Homo sapien
aattcggtgtgcgatgcgagcctgc

SEQ ID NO: 1505295 - DNA, 25 bp, Homo sapien
tgcctctggaagttcagcagcctga

SEQ ID NO: 1505296 - DNA, 25 bp, Homo sapien
ccttgagctcaatggtcgctttggt

SEQ ID NO: 1505297 - DNA, 25 bp, Homo sapien
cgggcctcgcgcagggactggcgct

SEQ ID NO: 1505298 - DNA, 25 bp, Homo sapien
taggccttagcattgagggctgtct

SEQ ID NO: 1505299 - DNA, 25 bp, Homo sapien
ggtgcttctgccggcgcttgcgctc

SEQ ID NO: 1505300 - DNA, 25 bp, Homo sapien
agggactggcgcttgctgcgcttgt

SEQ ID NO: 1505301 - DNA, 25 bp, Homo sapien
ccttgaaatccttggcatgctggag

SEQ ID NO: 1505302 - DNA, 25 bp, Homo sapien
gctcccgctccgtgttggcatggta

SEQ ID NO: 1505303 - DNA, 25 bp, Homo sapien
gattttgcctgtgacggatctgtga

SEQ ID NO: 1505304 - DNA, 25 bp, Homo sapien
catgctggagaatgctattgaggta

SEQ ID NO: 1505305 - DNA, 25 bp, Homo sapien
cagctccgtgaggttagccacgtac

SEQ ID NO: 1505306 - DNA, 25 bp, Homo sapien
ccttcttctggtcgatgagcttgcg

SEQ ID NO: 1505307 - DNA, 25 bp, Homo sapien
tagccacgtactcgtctgtctgctg

SEQ ID NO: 1505308 - DNA, 25 bp, Homo sapien
gatgagcttgcggtacccctcctca

SEQ ID NO: 1505309 - DNA, 25 bp, Homo sapien
cccaatggcaggcgtctgtccttct

SEQ ID NO: 1505310 - DNA, 25 bp, Homo sapien
ctcgccatccggcccaatggcaggc

SEQ ID NO: 1505311 - DNA, 25 bp, Homo sapien
aatggcaggcgtctgtccttctgca

SEQ ID NO: 1505312 - DNA, 25 bp, Homo sapien
tcgccatccggcccaatggcaggcg

SEQ ID NO: 1505313 - DNA, 25 bp, Homo sapien
tcctgtgtccgtcacctcggtacag

SEQ ID NO: 1505314 - DNA, 25 bp, Homo sapien
cgaaggcctatagattggataacag

SEQ ID NO: 1505315 - DNA, 25 bp, Homo sapien
tggccaaacctcatacgaaggccta

SEQ ID NO: 1505316 - DNA, 25 bp, Homo sapien
gactaaagctgactaaagggacctc

SEQ ID NO: 1505317 - DNA, 25 bp, Homo sapien
tataactacctgcaaaactgctgcg

SEQ ID NO: 1505318 - DNA, 25 bp, Homo sapien
gatatcagtctctacgcgctaaaag

SEQ ID NO: 1505319 - DNA, 25 bp, Homo sapien
tcaaagatgccgattgctgcatgcc

SEQ ID NO: 1505320 - DNA, 25 bp, Homo sapien
gtcaataccgtccacacagcggagg

SEQ ID NO: 1505321 - DNA, 25 bp, Homo sapien
tggatcaccttcaccgggaggtcgc

SEQ ID NO: 1505322 - DNA, 25 bp, Homo sapien
tcatctggctggtctcgtccagagg

SEQ ID NO: 1505323 - DNA, 25 bp, Homo sapien
tcccactctccacgtggatcacctt

SEQ ID NO: 1505324 - DNA, 25 bp, Homo sapien
ctcatctggctggtctcgtccagag

SEQ ID NO: 1505325 - DNA, 25 bp, Homo sapien
actatcagacctcggagctacttca

SEQ ID NO: 1505326 - DNA, 25 bp, Homo sapien
ttcactatcagacctcggagctact

SEQ ID NO: 1505327 - DNA, 25 bp, Homo sapien
tcttcactatcagacctcggagcta

SEQ ID NO: 1505328 - DNA, 25 bp, Homo sapien
tatcagacctcggagctacttcata

SEQ ID NO: 1505329 - DNA, 25 bp, Homo sapien
ctcagagacgtcatcgctgtctgga

SEQ ID NO: 1505330 - DNA, 25 bp, Homo sapien
atgtgccgcgcgtccacctcagaga

SEQ ID NO: 1505331 - DNA, 25 bp, Homo sapien
tcaatgatgtgccgcgcgtccacct

SEQ ID NO: 1505332 - DNA, 25 bp, Homo sapien
catcgctgtctggatctggaatctt

SEQ ID NO: 1505333 - DNA, 25 bp, Homo sapien
gactgcttgtccactctctcagtga

SEQ ID NO: 1505334 - DNA, 25 bp, Homo sapien
tactgtttgaggacaccattgacca

SEQ ID NO: 1505335 - DNA, 25 bp, Homo sapien
tgggacacgccatattcatcatcga

SEQ ID NO: 1505336 - DNA, 25 bp, Homo sapien
ccattgaccataagcgctgactgct

SEQ ID NO: 1505337 - DNA, 25 bp, Homo sapien
gatggcaggccgcattaagagcatg

SEQ ID NO: 1505338 - DNA, 25 bp, Homo sapien
tagatctaagctcctgacgctcgcc

SEQ ID NO: 1505339 - DNA, 25 bp, Homo sapien
agggctgccggctcctagatctaag

SEQ ID NO: 1505340 - DNA, 25 bp, Homo sapien
cccagaagaaagagcggagtccagg

SEQ ID NO: 1505341 - DNA, 25 bp, Homo sapien
agggactatctcactacggatcagc

SEQ ID NO: 1505342 - DNA, 25 bp, Homo sapien
tgggcagattcgctcctccttaggc

SEQ ID NO: 1505343 - DNA, 25 bp, Homo sapien
acctaagccgcccaactatctggga

SEQ ID NO: 1505344 - DNA, 25 bp, Homo sapien
tacagacacctgatcgacatagggc

SEQ ID NO: 1505345 - DNA, 25 bp, Homo sapien
aagggcccattgatgcgtttgtgct

SEQ ID NO: 1505346 - DNA, 25 bp, Homo sapien
catctcgtcggccaggatgccgttc

SEQ ID NO: 1505347 - DNA, 25 bp, Homo sapien
tccatgaggtacgtgatgagcgcga

SEQ ID NO: 1505348 - DNA, 25 bp, Homo sapien
tgttgttgtacagggacaccagcca

SEQ ID NO: 1505349 - DNA, 25 bp, Homo sapien
gaagccggaggtgtgcggagcatct

SEQ ID NO: 1505350 - DNA, 25 bp, Homo sapien
aagccggaggtgtgcggagcatctg

SEQ ID NO: 1505351 - DNA, 25 bp, Homo sapien
gagaagccggaggtgtgcggagcat

SEQ ID NO: 1505352 - DNA, 25 bp, Homo sapien
agccggaggtgtgcggagcatctgc

SEQ ID NO: 1505353 - DNA, 25 bp, Homo sapien
ctgtcaggggcgaggccaacatggc

SEQ ID NO: 1505354 - DNA, 25 bp, Homo sapien
aacatggccacagccctccgagtgg

SEQ ID NO: 1505355 - DNA, 25 bp, Homo sapien
cgagtgggcagagaaactgtgttta

SEQ ID NO: 1505356 - DNA, 25 bp, Homo sapien
tgtgcaaacccatagccactggctg

SEQ ID NO: 1505357 - DNA, 25 bp, Homo sapien
gggcccacttgtcaaactcgtacgc

SEQ ID NO: 1505358 - DNA, 25 bp, Homo sapien
tgtaagacaccttcaccacggaggg

SEQ ID NO: 1505359 - DNA, 25 bp, Homo sapien
cttgtaagacaccttcaccacggag

SEQ ID NO: 1505360 - DNA, 25 bp, Homo sapien
aactcgtacgcccagttggacagcg

SEQ ID NO: 1505361 - DNA, 25 bp, Homo sapien
agtgagctaatctgccctgtccctg

SEQ ID NO: 1505362 - DNA, 25 bp, Homo sapien
gaggtatgtgtggacgtcctgccca

SEQ ID NO: 1505363 - DNA, 25 bp, Homo sapien
caggttcactgtccagaggtatgtg

SEQ ID NO: 1505364 - DNA, 25 bp, Homo sapien
tccgtagcaagagaggaaacctcag

SEQ ID NO: 1505365 - DNA, 25 bp, Homo sapien
agcagtgcaggccagcggcggccgg

SEQ ID NO: 1505366 - DNA, 25 bp, Homo sapien
agaggaagcagtgcaggccagcggc

SEQ ID NO: 1505367 - DNA, 25 bp, Homo sapien
ggaagcagtgcaggccagcggcggc

SEQ ID NO: 1505368 - DNA, 25 bp, Homo sapien
cagtgcaggccagcggcggccgggg

SEQ ID NO: 1505369 - DNA, 25 bp, Homo sapien
ggccgctggcgcgtccccagacctc

SEQ ID NO: 1505370 - DNA, 25 bp, Homo sapien
ccgctggcgcgtccccagacctcac

SEQ ID NO: 1505371 - DNA, 25 bp, Homo sapien
ggctggcagggccgctggcgcgtcc

SEQ ID NO: 1505372 - DNA, 25 bp, Homo sapien
tggcagggccgctggcgcgtcccca

SEQ ID NO: 1505373 - DNA, 25 bp, Homo sapien
agtgacacggcgggagggctcgtcc

SEQ ID NO: 1505374 - DNA, 25 bp, Homo sapien
ctgcccagtgacacggcgggagggc

SEQ ID NO: 1505375 - DNA, 25 bp, Homo sapien
gacacggcgggagggctcgtcctca

SEQ ID NO: 1505376 - DNA, 25 bp, Homo sapien
tgcccagtgacacggcgggagggct

SEQ ID NO: 1505377 - DNA, 25 bp, Homo sapien
caggatgcacagctcggcttttgga

SEQ ID NO: 1505378 - DNA, 25 bp, Homo sapien
gcacagctcggcttttggagccggg

SEQ ID NO: 1505379 - DNA, 25 bp, Homo sapien
caagggaagcaggatgcacagctcg

SEQ ID NO: 1505380 - DNA, 25 bp, Homo sapien
ttggagccgggtggccaggtggcaa

SEQ ID NO: 1505381 - DNA, 25 bp, Homo sapien
gttgaacttcccactccggagctgg

SEQ ID NO: 1505382 - DNA, 25 bp, Homo sapien
cttggcgaggatgtgcttgtctttg

SEQ ID NO: 1505383 - DNA, 25 bp, Homo sapien
cgtcagcaagacgttgaacttccca

SEQ ID NO: 1505384 - DNA, 25 bp, Homo sapien
tctttgatgatgtactcgtacgtcg

SEQ ID NO: 1505385 - DNA, 25 bp, Homo sapien
tggacctgaggtaagagcctgcacg

SEQ ID NO: 1505386 - DNA, 25 bp, Homo sapien
ttacatcaactgagccactggcagg

SEQ ID NO: 1505387 - DNA, 25 bp, Homo sapien
tggagccacacaacgtagcctcttg

SEQ ID NO: 1505388 - DNA, 25 bp, Homo sapien
taggccagacacagttgcccagtgc

SEQ ID NO: 1505389 - DNA, 25 bp, Homo sapien
tgcgttaaaccactgctcgaaggtg

SEQ ID NO: 1505390 - DNA, 25 bp, Homo sapien
tcatgcggtgaccttcgtccacaat

SEQ ID NO: 1505391 - DNA, 25 bp, Homo sapien
tttccccggtcatggcaaagggtgc

SEQ ID NO: 1505392 - DNA, 25 bp, Homo sapien
tgttgagcacctgcgtcagcttgca

SEQ ID NO: 1505393 - DNA, 25 bp, Homo sapien
agcatgggcacagctgggcaaaccc

SEQ ID NO: 1505394 - DNA, 25 bp, Homo sapien
tcagcatgggcacagctgggcaaac

SEQ ID NO: 1505395 - DNA, 25 bp, Homo sapien
catgggcacagctgggcaaacccac

SEQ ID NO: 1505396 - DNA, 25 bp, Homo sapien
ctggaaccgtcagcatgggcacagc

SEQ ID NO: 1505397 - DNA, 25 bp, Homo sapien
gctcaacacgttccaaccagcaaag

SEQ ID NO: 1505398 - DNA, 25 bp, Homo sapien
ggtgctcaacacgttccaaccagca

SEQ ID NO: 1505399 - DNA, 25 bp, Homo sapien
ctgtagctggtgctcaacacgttcc

SEQ ID NO: 1505400 - DNA, 25 bp, Homo sapien
tagctggtgctcaacacgttccaac

SEQ ID NO: 1505401 - DNA, 25 bp, Homo sapien
gcatgaggccaggaaggccccagct

SEQ ID NO: 1505402 - DNA, 25 bp, Homo sapien
aggaaggccccagctgccctggacc

SEQ ID NO: 1505403 - DNA, 25 bp, Homo sapien
aaggccccagctgccctggacctgt

SEQ ID NO: 1505404 - DNA, 25 bp, Homo sapien
catgaggccaggaaggccccagctg

SEQ ID NO: 1505405 - DNA, 25 bp, Homo sapien
gacaggagaagcaagcgttacctcc

SEQ ID NO: 1505406 - DNA, 25 bp, Homo sapien
agaagcaagcgttacctccaaagga

SEQ ID NO: 1505407 - DNA, 25 bp, Homo sapien
ccaaaggagggcgacagaggtctca

SEQ ID NO: 1505408 - DNA, 25 bp, Homo sapien
ctccaaaggagggcgacagaggtct

SEQ ID NO: 1505409 - DNA, 25 bp, Homo sapien
cgacttccttcttgagtcgtcggag

SEQ ID NO: 1505410 - DNA, 25 bp, Homo sapien
gcactttgtggagacgccggatgat

SEQ ID NO: 1505411 - DNA, 25 bp, Homo sapien
aagggccgcagcactttgtggagac

SEQ ID NO: 1505412 - DNA, 25 bp, Homo sapien
tccttcttgagtcgtcggagcaaga

SEQ ID NO: 1505413 - DNA, 25 bp, Homo sapien
tgtcgcacttgatgacgtactccac

SEQ ID NO: 1505414 - DNA, 25 bp, Homo sapien
atgtggcggtagagcactcgctgca

SEQ ID NO: 1505415 - DNA, 25 bp, Homo sapien
acatgtcgcacttgatgacgtactc

SEQ ID NO: 1505416 - DNA, 25 bp, Homo sapien
gctgcagcgcagacatgtcgcactt

SEQ ID NO: 1505417 - DNA, 25 bp, Homo sapien
taggggtggttgcagatcttccgca

SEQ ID NO: 1505418 - DNA, 25 bp, Homo sapien
ttccgcagctgcatgatggtgttca

SEQ ID NO: 1505419 - DNA, 25 bp, Homo sapien
gggtggttgcagatcttccgcagct

SEQ ID NO: 1505420 - DNA, 25 bp, Homo sapien
tcagggtcttggtgccgcctttgcc

SEQ ID NO: 1505421 - DNA, 25 bp, Homo sapien
atgccgccagtgaaccccaagtgct

SEQ ID NO: 1505422 - DNA, 25 bp, Homo sapien
gccagtgaaccccaagtgctcggaa

SEQ ID NO: 1505423 - DNA, 25 bp, Homo sapien
ccttggacaatgccgccagtgaacc

SEQ ID NO: 1505424 - DNA, 25 bp, Homo sapien
tgaaccccaagtgctcggaaaagga

SEQ ID NO: 1505425 - DNA, 25 bp, Homo sapien
gccgcgatacgcaaagtaatcttcc

SEQ ID NO: 1505426 - DNA, 25 bp, Homo sapien
ttacccgaggctcggtacaggtcca

SEQ ID NO: 1505427 - DNA, 25 bp, Homo sapien
agggaggtcatttggcagaacagca

SEQ ID NO: 1505428 - DNA, 25 bp, Homo sapien
gcctgaggtatttaaagccgcgata

SEQ ID NO: 1505429 - DNA, 25 bp, Homo sapien
gccactggcgaataactggatttcc

SEQ ID NO: 1505430 - DNA, 25 bp, Homo sapien
ctgtgggccactggcgaataactgg

SEQ ID NO: 1505431 - DNA, 25 bp, Homo sapien
tgggccactggcgaataactggatt

SEQ ID NO: 1505432 - DNA, 25 bp, Homo sapien
tggcgaataactggatttccagtgt

SEQ ID NO: 1505433 - DNA, 25 bp, Homo sapien
cagagccgggctcgttgaaggtttt

SEQ ID NO: 1505434 - DNA, 25 bp, Homo sapien
ccagtcgctgtcaaaaatgatcaca

SEQ ID NO: 1505435 - DNA, 25 bp, Homo sapien
tctgccgactggaggttcaggccga

SEQ ID NO: 1505436 - DNA, 25 bp, Homo sapien
ggctcgttgaaggttttcagcagca

SEQ ID NO: 1505437 - DNA, 25 bp, Homo sapien
gattagatggctgggtagcttccga

SEQ ID NO: 1505438 - DNA, 25 bp, Homo sapien
tggaagaggcacatgctaggccacg

SEQ ID NO: 1505439 - DNA, 25 bp, Homo sapien
gaacaagcgccagtgtgtgtgctca

SEQ ID NO: 1505440 - DNA, 25 bp, Homo sapien
catacatgtgcgaaggcagatgggc

SEQ ID NO: 1505441 - DNA, 25 bp, Homo sapien
gaacacgaagaggacaatgtctggg

SEQ ID NO: 1505442 - DNA, 25 bp, Homo sapien
gacctagggtgtttgcacaagcact

SEQ ID NO: 1505443 - DNA, 25 bp, Homo sapien
atgtctgagggctgcgcagacctag

SEQ ID NO: 1505444 - DNA, 25 bp, Homo sapien
tgaaaccactttggcagtagcaacc

SEQ ID NO: 1505445 - DNA, 25 bp, Homo sapien
tttacacactgagaacgctgctgcc

SEQ ID NO: 1505446 - DNA, 25 bp, Homo sapien
cacagtacgaggaggctaacacgaa

SEQ ID NO: 1505447 - DNA, 25 bp, Homo sapien
tgaaacttaagactggcacccatgg

SEQ ID NO: 1505448 - DNA, 25 bp, Homo sapien
tacaccccagcctgatcgtaaaagg

SEQ ID NO: 1505449 - DNA, 25 bp, Homo sapien
ctgttgacggtgcagaggcggagca

SEQ ID NO: 1505450 - DNA, 25 bp, Homo sapien
ttggctgcagctaggatcttctcct

SEQ ID NO: 1505451 - DNA, 25 bp, Homo sapien
ccttctggtccacgttgagcttgta

SEQ ID NO: 1505452 - DNA, 25 bp, Homo sapien
gaggacttctggtcgaacatgccgg

SEQ ID NO: 1505453 - DNA, 25 bp, Homo sapien
tgtgggcgaagctggcactgccgct

SEQ ID NO: 1505454 - DNA, 25 bp, Homo sapien
ctccaagtcggggttgacgcccgct

SEQ ID NO: 1505455 - DNA, 25 bp, Homo sapien
caagtcggggttgacgcccgctggc

SEQ ID NO: 1505456 - DNA, 25 bp, Homo sapien
agtcggggttgacgcccgctggcgg

SEQ ID NO: 1505457 - DNA, 25 bp, Homo sapien
tcaaactcctcctcgtgccgggcga

SEQ ID NO: 1505458 - DNA, 25 bp, Homo sapien
ttgacggtctcgtcgtcgggcacct

SEQ ID NO: 1505459 - DNA, 25 bp, Homo sapien
gatcatctggttgacggtctcgtcg

SEQ ID NO: 1505460 - DNA, 25 bp, Homo sapien
ctcgtgccgggcgatcatctggttg

SEQ ID NO: 1505461 - DNA, 25 bp, Homo sapien
gcttctccgtcagtgagtcgctgta

SEQ ID NO: 1505462 - DNA, 25 bp, Homo sapien
cgtcgtccttgatgatccacgaggg

SEQ ID NO: 1505463 - DNA, 25 bp, Homo sapien
tggcgggagccacggccgaacatct

SEQ ID NO: 1505464 - DNA, 25 bp, Homo sapien
cacctccttgcggtggcgggagcca

SEQ ID NO: 1505465 - DNA, 25 bp, Homo sapien
atcggaaggctctcggctgcctgcg

SEQ ID NO: 1505466 - DNA, 25 bp, Homo sapien
aaggctctcggctgcctgcggagcc

SEQ ID NO: 1505467 - DNA, 25 bp, Homo sapien
tggcggtgggccctttgtctcccca

SEQ ID NO: 1505468 - DNA, 25 bp, Homo sapien
tggcccacatcggaaggctctcggc

SEQ ID NO: 1505469 - DNA, 25 bp, Homo sapien
gctgccatctgctgagaacgggccc

SEQ ID NO: 1505470 - DNA, 25 bp, Homo sapien
gagcaccgcacgactgactcaaaga

SEQ ID NO: 1505471 - DNA, 25 bp, Homo sapien
tttgcagggcgcctcaatagtccat

SEQ ID NO: 1505472 - DNA, 25 bp, Homo sapien
acttgcccaaagtgaggctgcctgc

SEQ ID NO: 1505473 - DNA, 25 bp, Homo sapien
actcatacagcagccaaacagctct

SEQ ID NO: 1505474 - DNA, 25 bp, Homo sapien
ctgggtcctggagcgctgtgcttgg

SEQ ID NO: 1505475 - DNA, 25 bp, Homo sapien
aaaaaatgcagggccggtgacactc

SEQ ID NO: 1505476 - DNA, 25 bp, Homo sapien
agggccggtgacactcatacagcag

SEQ ID NO: 1505477 - DNA, 25 bp, Homo sapien
tgacttgaaccagccagggcccttt

SEQ ID NO: 1505478 - DNA, 25 bp, Homo sapien
tctacctggaacctcggaatgggac

SEQ ID NO: 1505479 - DNA, 25 bp, Homo sapien
taacaaacgtgtcaggtgccaggaa

SEQ ID NO: 1505480 - DNA, 25 bp, Homo sapien
gaaggcaaccgggtcaaagaagcag

SEQ ID NO: 1505481 - DNA, 25 bp, Homo sapien
actgctggctgtgtcatggatatct

SEQ ID NO: 1505482 - DNA, 25 bp, Homo sapien
ctggctgtgtcatggatatcttttc

SEQ ID NO: 1505483 - DNA, 25 bp, Homo sapien
acgctggaattgtagcccacgtgcc

SEQ ID NO: 1505484 - DNA, 25 bp, Homo sapien
gaaggccacgctggaattgtagccc

SEQ ID NO: 1505485 - DNA, 25 bp, Homo sapien
ttcttagacatgtggtcttgctaca

SEQ ID NO: 1505486 - DNA, 25 bp, Homo sapien
ttaaattttcttagacatgtggtct

SEQ ID NO: 1505487 - DNA, 25 bp, Homo sapien
aaattttcttagacatgtggtcttg

SEQ ID NO: 1505488 - DNA, 25 bp, Homo sapien
aattttcttagacatgtggtcttgc

SEQ ID NO: 1505489 - DNA, 25 bp, Homo sapien
caggcgcaaaccaccacgcctagct

SEQ ID NO: 1505490 - DNA, 25 bp, Homo sapien
acaggcgcaaaccaccacgcctagc

SEQ ID NO: 1505491 - DNA, 25 bp, Homo sapien
tgaaatcccttcacccggaggtgat

SEQ ID NO: 1505492 - DNA, 25 bp, Homo sapien
ggcataacacacactgggactctca

SEQ ID NO: 1505493 - DNA, 25 bp, Homo sapien
gaaaagaacgtgctcctgaaatccc

SEQ ID NO: 1505494 - DNA, 25 bp, Homo sapien
tctcccttcagcttgactggctcgg

SEQ ID NO: 1505495 - DNA, 25 bp, Homo sapien
tagtaaaataggacagccagcaccc

SEQ ID NO: 1505496 - DNA, 25 bp, Homo sapien
cagaggccgcgacgcaatcccaggg

SEQ ID NO: 1505497 - DNA, 25 bp, Homo sapien
gccagcacccaggtcgacaagcaga

SEQ ID NO: 1505498 - DNA, 25 bp, Homo sapien
aatagtagtaaaataggacagccag

SEQ ID NO: 1505499 - DNA, 25 bp, Homo sapien
gatgatttcttctgccggacctcct

SEQ ID NO: 1505500 - DNA, 25 bp, Homo sapien
tgtccttgtacttgatcacggcatc

SEQ ID NO: 1505501 - DNA, 25 bp, Homo sapien
tcgcttgcgcttccgtgatgatttc

SEQ ID NO: 1505502 - DNA, 25 bp, Homo sapien
aggagccggcgtcgctgtctcgctt

SEQ ID NO: 1505503 - DNA, 25 bp, Homo sapien
accaacacagagatggcacaggtag

SEQ ID NO: 1505504 - DNA, 25 bp, Homo sapien
tgaggacagcgatctccaggcttgg

SEQ ID NO: 1505505 - DNA, 25 bp, Homo sapien
acaggagagggctgccactttctct

SEQ ID NO: 1505506 - DNA, 25 bp, Homo sapien
tgggagggtgcaaggacaggagagg

SEQ ID NO: 1505507 - DNA, 25 bp, Homo sapien
aaatggcactcatgatccaccaaca

SEQ ID NO: 1505508 - DNA, 25 bp, Homo sapien
cgcatgctgcctcgtatataggaca

SEQ ID NO: 1505509 - DNA, 25 bp, Homo sapien
atgatccgccgctgggccgtggcca

SEQ ID NO: 1505510 - DNA, 25 bp, Homo sapien
accaacacgttatgatccgccgctg

SEQ ID NO: 1505511 - DNA, 25 bp, Homo sapien
cacagctggccttgcgcggtaattt

SEQ ID NO: 1505512 - DNA, 25 bp, Homo sapien
ggcatgggccttacacctttgctgg

SEQ ID NO: 1505513 - DNA, 25 bp, Homo sapien
tggtacccatatagagtcgctcacg

SEQ ID NO: 1505514 - DNA, 25 bp, Homo sapien
gattctctccaaaccatgcatgtgg

SEQ ID NO: 1505515 - DNA, 25 bp, Homo sapien
cagagggtatgtacaggctgagcct

SEQ ID NO: 1505516 - DNA, 25 bp, Homo sapien
tctcctgggtagaacgagggctgca

SEQ ID NO: 1505517 - DNA, 25 bp, Homo sapien
taatgcaatgacgtgagcacctttc

SEQ ID NO: 1505518 - DNA, 25 bp, Homo sapien
tactcctacacgcagggtgtgaggc

SEQ ID NO: 1505519 - DNA, 25 bp, Homo sapien
gatgtgattataccccactgcggcc

SEQ ID NO: 1505520 - DNA, 25 bp, Homo sapien
cctgagttgatgtgccctatgtgat

SEQ ID NO: 1505521 - DNA, 25 bp, Homo sapien
gctgaggtagcttttcaacgactat

SEQ ID NO: 1505522 - DNA, 25 bp, Homo sapien
gtctcaagggatccacaagcctcac

SEQ ID NO: 1505523 - DNA, 25 bp, Homo sapien
ccctggacagcagaagccagcactg

SEQ ID NO: 1505524 - DNA, 25 bp, Homo sapien
cagcagaagccagcactgccggcat

SEQ ID NO: 1505525 - DNA, 25 bp, Homo sapien
actggagccaccacaagcccctgga

SEQ ID NO: 1505526 - DNA, 25 bp, Homo sapien
accacaagcccctggacagcagaag

SEQ ID NO: 1505527 - DNA, 25 bp, Homo sapien
ccctatcactgtcgcaggcaggctg

SEQ ID NO: 1505528 - DNA, 25 bp, Homo sapien
cctggcccgcatggtctttattgta

SEQ ID NO: 1505529 - DNA, 25 bp, Homo sapien
ttctctgagcccttaccaagcacac

SEQ ID NO: 1505530 - DNA, 25 bp, Homo sapien
acatggaccagcagatgcccttctc

SEQ ID NO: 1505531 - DNA, 25 bp, Homo sapien
gactggccttttacacgacgaaatg

SEQ ID NO: 1505532 - DNA, 25 bp, Homo sapien
tgttatacatggcaccacccagagc

SEQ ID NO: 1505533 - DNA, 25 bp, Homo sapien
cctatatctggaggcaagaacctga

SEQ ID NO: 1505534 - DNA, 25 bp, Homo sapien
gaggcagatgccagatgagaaccca

SEQ ID NO: 1505535 - DNA, 25 bp, Homo sapien
aagccggcacatcctgttctccact

SEQ ID NO: 1505536 - DNA, 25 bp, Homo sapien
tccctctcctaagccggcacatcct

SEQ ID NO: 1505537 - DNA, 25 bp, Homo sapien
ctgttctccactctacggaatttta

SEQ ID NO: 1505538 - DNA, 25 bp, Homo sapien
gttctccactctacggaattttata

SEQ ID NO: 1505539 - DNA, 25 bp, Homo sapien
tacacacactaaactctgaagcagg

SEQ ID NO: 1505540 - DNA, 25 bp, Homo sapien
tggccttgacaaccgccatcatccc

SEQ ID NO: 1505541 - DNA, 25 bp, Homo sapien
ccatcatcccctgcttgctgggcca

SEQ ID NO: 1505542 - DNA, 25 bp, Homo sapien
taaactctgaagcaggcaccagtgc

SEQ ID NO: 1505543 - DNA, 25 bp, Homo sapien
gctcctttcgcgagggcagctggat

SEQ ID NO: 1505544 - DNA, 25 bp, Homo sapien
tcttgaagtccacgggcttgcggat

SEQ ID NO: 1505545 - DNA, 25 bp, Homo sapien
gatgagctcgtagtactcgggcagc

SEQ ID NO: 1505546 - DNA, 25 bp, Homo sapien
tggatgaagacctcgctgagctgac

SEQ ID NO: 1505547 - DNA, 25 bp, Homo sapien
tctaggtcgttgaggctgcggtact

SEQ ID NO: 1505548 - DNA, 25 bp, Homo sapien
ctggcacaggagcatgacgtccttc

SEQ ID NO: 1505549 - DNA, 25 bp, Homo sapien
ctgcggtacttgtggttgcgaatgc

SEQ ID NO: 1505550 - DNA, 25 bp, Homo sapien
ggtacttgtggttgcgaatgcgctc

SEQ ID NO: 1505551 - DNA, 25 bp, Homo sapien
cgggttgggtcaaagcccagctgtg

SEQ ID NO: 1505552 - DNA, 25 bp, Homo sapien
gcgggttgggtcaaagcccagctgt

SEQ ID NO: 1505553 - DNA, 25 bp, Homo sapien
ggcgggttgggtcaaagcccagctg

SEQ ID NO: 1505554 - DNA, 25 bp, Homo sapien
gtttgggaatagctgcaggtgcctc

SEQ ID NO: 1505555 - DNA, 25 bp, Homo sapien
tgcctccctccttctgcacaatctc

SEQ ID NO: 1505556 - DNA, 25 bp, Homo sapien
cctccttctgcacaatctctgaggt

SEQ ID NO: 1505557 - DNA, 25 bp, Homo sapien
tggtttgggaatagctgcaggtgcc

SEQ ID NO: 1505558 - DNA, 25 bp, Homo sapien
ctggtgaagaccgactgcaagacga

SEQ ID NO: 1505559 - DNA, 25 bp, Homo sapien
gaagaccgactgcaagacgatggag

SEQ ID NO: 1505560 - DNA, 25 bp, Homo sapien
gaccgactgcaagacgatggagtct

SEQ ID NO: 1505561 - DNA, 25 bp, Homo sapien
ggtgaagaccgactgcaagacgatg

SEQ ID NO: 1505562 - DNA, 25 bp, Homo sapien
attcggattcggagccttcctcctc

SEQ ID NO: 1505563 - DNA, 25 bp, Homo sapien
ccccacagcaaggggcgtctgggag

SEQ ID NO: 1505564 - DNA, 25 bp, Homo sapien
ccacagcaaggggcgtctgggagcc

SEQ ID NO: 1505565 - DNA, 25 bp, Homo sapien
acagcaaggggcgtctgggagccgg

SEQ ID NO: 1505566 - DNA, 25 bp, Homo sapien
agcaaggggcgtctgggagccggga

SEQ ID NO: 1505567 - DNA, 25 bp, Homo sapien
gccttgagctctgggaatgcagcac

SEQ ID NO: 1505568 - DNA, 25 bp, Homo sapien
gaccgggagggaaagacagccttga

SEQ ID NO: 1505569 - DNA, 25 bp, Homo sapien
aaagacagccttgagctctgggaat

SEQ ID NO: 1505570 - DNA, 25 bp, Homo sapien
gggagggaaagacagccttgagctc

SEQ ID NO: 1505571 - DNA, 25 bp, Homo sapien
tccttccggccaagcttgatcttca

SEQ ID NO: 1505572 - DNA, 25 bp, Homo sapien
cggccgcccttcagccggtcctgtg

SEQ ID NO: 1505573 - DNA, 25 bp, Homo sapien
actcacgaccggcttggctcgggac

SEQ ID NO: 1505574 - DNA, 25 bp, Homo sapien
tgtcatcgtcactcacgaccggctt

SEQ ID NO: 1505575 - DNA, 25 bp, Homo sapien
cagtcttcttcgctgccacttcctg

SEQ ID NO: 1505576 - DNA, 25 bp, Homo sapien
tcagtcttcttcgctgccacttcct

SEQ ID NO: 1505577 - DNA, 25 bp, Homo sapien
agtcttcttcgctgccacttcctga

SEQ ID NO: 1505578 - DNA, 25 bp, Homo sapien
cagatgctactgatgccaggacagg

SEQ ID NO: 1505579 - DNA, 25 bp, Homo sapien
ggtatcgtgtgttccccaattcgga

SEQ ID NO: 1505580 - DNA, 25 bp, Homo sapien
tatgccatctcagctctggaacgag

SEQ ID NO: 1505581 - DNA, 25 bp, Homo sapien
gggccagtcacaaacagtcctacag

SEQ ID NO: 1505582 - DNA, 25 bp, Homo sapien
actgtttgacatccagtgacactga

SEQ ID NO: 1505583 - DNA, 25 bp, Homo sapien
tactgtttgacatccagtgacactg

SEQ ID NO: 1505584 - DNA, 25 bp, Homo sapien
gaagtgcgtgccctgataggaacca

SEQ ID NO: 1505585 - DNA, 25 bp, Homo sapien
gcaagacagcacatatgccctggag

SEQ ID NO: 1505586 - DNA, 25 bp, Homo sapien
aaggaggtcgagacagagactgccc

SEQ ID NO: 1505587 - DNA, 25 bp, Homo sapien
cagaaagcaaaggtagggccagcct

SEQ ID NO: 1505588 - DNA, 25 bp, Homo sapien
gactactcctagttagatttcacga

SEQ ID NO: 1505589 - DNA, 25 bp, Homo sapien
tctgtgaccttcctcggacgaatca

SEQ ID NO: 1505590 - DNA, 25 bp, Homo sapien
tcttgattacgttgcttctgtgacc

SEQ ID NO: 1505591 - DNA, 25 bp, Homo sapien
tgagccaacatacccggccgtaaaa

SEQ ID NO: 1505592 - DNA, 25 bp, Homo sapien
tcggggcccacgtcatttacagcat

SEQ ID NO: 1505593 - DNA, 25 bp, Homo sapien
ctggcttcccgcgattgcactcggg

SEQ ID NO: 1505594 - DNA, 25 bp, Homo sapien
ctgctgtgtcctagctggaaaccct

SEQ ID NO: 1505595 - DNA, 25 bp, Homo sapien
gacccggatcacgacctgctgtgtc

SEQ ID NO: 1505596 - DNA, 25 bp, Homo sapien
aggagcaaggcgacggtccagcgca

SEQ ID NO: 1505597 - DNA, 25 bp, Homo sapien
caaggcgacggtccagcgcaatttc

SEQ ID NO: 1505598 - DNA, 25 bp, Homo sapien
ggcgaggagcaaggcgacggtccag

SEQ ID NO: 1505599 - DNA, 25 bp, Homo sapien
ccgcggcgaggagcaaggcgacggt

SEQ ID NO: 1505600 - DNA, 25 bp, Homo sapien
cggaggtgtcgccacagagcacagc

SEQ ID NO: 1505601 - DNA, 25 bp, Homo sapien
gactcgtgtatgtcgcggaggcggc

SEQ ID NO: 1505602 - DNA, 25 bp, Homo sapien
ccgggacttgtcgtcgcctttgtga

SEQ ID NO: 1505603 - DNA, 25 bp, Homo sapien
cccaggataacggagggcgactcgt

SEQ ID NO: 1505604 - DNA, 25 bp, Homo sapien
tgaagatctcggctgcagaccaagg

SEQ ID NO: 1505605 - DNA, 25 bp, Homo sapien
tgaggcaacgtttcaacctcgtaag

SEQ ID NO: 1505606 - DNA, 25 bp, Homo sapien
gggagattctgaggcaacgtttcaa

SEQ ID NO: 1505607 - DNA, 25 bp, Homo sapien
cctcgtaaggaaccgaggccttgag

SEQ ID NO: 1505608 - DNA, 25 bp, Homo sapien
tcaacgccagaatcagaaactgacc

SEQ ID NO: 1505609 - DNA, 25 bp, Homo sapien
tctcaacgccagaatcagaaactga

SEQ ID NO: 1505610 - DNA, 25 bp, Homo sapien
ggagaaagggtctctcaacgccaga

SEQ ID NO: 1505611 - DNA, 25 bp, Homo sapien
agggtctctcaacgccagaatcaga

SEQ ID NO: 1505612 - DNA, 25 bp, Homo sapien
aactcgtttctttcgcatctgtcgc

SEQ ID NO: 1505613 - DNA, 25 bp, Homo sapien
ggaactcgtttctttcgcatctgtc

SEQ ID NO: 1505614 - DNA, 25 bp, Homo sapien
ctggaactcgtttctttcgcatctg

SEQ ID NO: 1505615 - DNA, 25 bp, Homo sapien
tcgtttctttcgcatctgtcgccca

SEQ ID NO: 1505616 - DNA, 25 bp, Homo sapien
ccatcgcagacccacttgtaggaga

SEQ ID NO: 1505617 - DNA, 25 bp, Homo sapien
gctgccatcgcagacccacttgtag

SEQ ID NO: 1505618 - DNA, 25 bp, Homo sapien
cacttgtaggagatgcatttcccgt

SEQ ID NO: 1505619 - DNA, 25 bp, Homo sapien
tggcactcagcgctgccatcgcaga

SEQ ID NO: 1505620 - DNA, 25 bp, Homo sapien
tccccggatttgcaggtgacagaca

SEQ ID NO: 1505621 - DNA, 25 bp, Homo sapien
tctgagccgttgtcgcagtccactt

SEQ ID NO: 1505622 - DNA, 25 bp, Homo sapien
ggccatcgcacctccagaactgagg

SEQ ID NO: 1505623 - DNA, 25 bp, Homo sapien
aactgaggaatgcagcggttgacac

SEQ ID NO: 1505624 - DNA, 25 bp, Homo sapien
agctgccttgcagctcgagcaggac

SEQ ID NO: 1505625 - DNA, 25 bp, Homo sapien
tgtgcgtgacaaacccgaagaggta

SEQ ID NO: 1505626 - DNA, 25 bp, Homo sapien
gagcaggaccccgtagagacaaagt

SEQ ID NO: 1505627 - DNA, 25 bp, Homo sapien
cagcggcttgccagtgtgtgtgcca

SEQ ID NO: 1505628 - DNA, 25 bp, Homo sapien
accatcaccgtgtgaagtctcccaa

SEQ ID NO: 1505629 - DNA, 25 bp, Homo sapien
accaccatcaccgtgtgaagtctcc

SEQ ID NO: 1505630 - DNA, 25 bp, Homo sapien
catcaccgtgtgaagtctcccaaca

SEQ ID NO: 1505631 - DNA, 25 bp, Homo sapien
atcaccgtgtgaagtctcccaacac

SEQ ID NO: 1505632 - DNA, 25 bp, Homo sapien
cttaggcagtggaactcgaaggccg

SEQ ID NO: 1505633 - DNA, 25 bp, Homo sapien
gatgcacttcccatcgtggcagcga

SEQ ID NO: 1505634 - DNA, 25 bp, Homo sapien
tcacagacgaactgccgagagatgc

SEQ ID NO: 1505635 - DNA, 25 bp, Homo sapien
aagcagtcccggtctgagtcacaga

SEQ ID NO: 1505636 - DNA, 25 bp, Homo sapien
gacaggtgataggacgccccgcccc

SEQ ID NO: 1505637 - DNA, 25 bp, Homo sapien
cagggacaggtgataggacgccccg

SEQ ID NO: 1505638 - DNA, 25 bp, Homo sapien
ggacaggtgataggacgccccgccc

SEQ ID NO: 1505639 - DNA, 25 bp, Homo sapien
agggacaggtgataggacgccccgc

SEQ ID NO: 1505640 - DNA, 25 bp, Homo sapien
gttgattttctcaagaagagacaac

SEQ ID NO: 1505641 - DNA, 25 bp, Homo sapien
gcagggccttttgccgggtgcagcg

SEQ ID NO: 1505642 - DNA, 25 bp, Homo sapien
cagagtgtgttgattttctcaagaa

SEQ ID NO: 1505643 - DNA, 25 bp, Homo sapien
ggacagagtgtgttgattttctcaa

SEQ ID NO: 1505644 - DNA, 25 bp, Homo sapien
atattcccggtcacactgccggctg

SEQ ID NO: 1505645 - DNA, 25 bp, Homo sapien
gatgcagtttccatcagagcactgg

SEQ ID NO: 1505646 - DNA, 25 bp, Homo sapien
cactggaattcgtcagggcgacagg

SEQ ID NO: 1505647 - DNA, 25 bp, Homo sapien
catgtccttgcagtcatattcccgg

SEQ ID NO: 1505648 - DNA, 25 bp, Homo sapien
ctgtgagagccagagagaggaagga

SEQ ID NO: 1505649 - DNA, 25 bp, Homo sapien
tgtgagagccagagagaggaaggag

SEQ ID NO: 1505650 - DNA, 25 bp, Homo sapien
gtgagagccagagagaggaaggagg

SEQ ID NO: 1505651 - DNA, 25 bp, Homo sapien
gggttcatctgaccagtcccggcag

SEQ ID NO: 1505652 - DNA, 25 bp, Homo sapien
ttgttgggtccctcgcagagtgtca

SEQ ID NO: 1505653 - DNA, 25 bp, Homo sapien
cggcagtctctagccatgttgcaga

SEQ ID NO: 1505654 - DNA, 25 bp, Homo sapien
tgcattcgccgctgtgacacttgaa

SEQ ID NO: 1505655 - DNA, 25 bp, Homo sapien
cagcactcatgtctcagtccctttc

SEQ ID NO: 1505656 - DNA, 25 bp, Homo sapien
cacaaactctgcaagccgcctgcac

SEQ ID NO: 1505657 - DNA, 25 bp, Homo sapien
accctacagcactcatgtctcagtc

SEQ ID NO: 1505658 - DNA, 25 bp, Homo sapien
tccccacaaactctgcaagccgcct

SEQ ID NO: 1505659 - DNA, 25 bp, Homo sapien
cagaggaggtccctagagccatcac

SEQ ID NO: 1505660 - DNA, 25 bp, Homo sapien
aaatgctgtctgattccactcagag

SEQ ID NO: 1505661 - DNA, 25 bp, Homo sapien
agaggaggtccctagagccatcaca

SEQ ID NO: 1505662 - DNA, 25 bp, Homo sapien
ctgattccactcagaggaggtccct

SEQ ID NO: 1505663 - DNA, 25 bp, Homo sapien
gggcacaggcactcgtagccgatct

SEQ ID NO: 1505664 - DNA, 25 bp, Homo sapien
tagccgatcttaaggtcattgcaga

SEQ ID NO: 1505665 - DNA, 25 bp, Homo sapien
agacgtgggaacagccgccgttgtt

SEQ ID NO: 1505666 - DNA, 25 bp, Homo sapien
cgccgttgttgtccaagcattcgtt

SEQ ID NO: 1505667 - DNA, 25 bp, Homo sapien
tcgggatcctgacactcatcgatat

SEQ ID NO: 1505668 - DNA, 25 bp, Homo sapien
tgcaggtgtcgggatcctgacactc

SEQ ID NO: 1505669 - DNA, 25 bp, Homo sapien
accctccaggttcacgcagagctgg

SEQ ID NO: 1505670 - DNA, 25 bp, Homo sapien
caggccttcgtgtgggggtccagct

SEQ ID NO: 1505671 - DNA, 25 bp, Homo sapien
tggtgtactcgctccggtccagcgt

SEQ ID NO: 1505672 - DNA, 25 bp, Homo sapien
gcagatcattctctgggacaggtca

SEQ ID NO: 1505673 - DNA, 25 bp, Homo sapien
tccagagcgaccacgttcctcaggt

SEQ ID NO: 1505674 - DNA, 25 bp, Homo sapien
agtagattctattgctggccacctc

SEQ ID NO: 1505675 - DNA, 25 bp, Homo sapien
tgacggtgtcataggaagagacgcc

SEQ ID NO: 1505676 - DNA, 25 bp, Homo sapien
cttggtatccgcaacagagacagtg

SEQ ID NO: 1505677 - DNA, 25 bp, Homo sapien
atgaacaggatccaccacgatggcc

SEQ ID NO: 1505678 - DNA, 25 bp, Homo sapien
ttggagccgttctccctgaataacg

SEQ ID NO: 1505679 - DNA, 25 bp, Homo sapien
agccctcagcgtcgtggatacgcac

SEQ ID NO: 1505680 - DNA, 25 bp, Homo sapien
cagccctcagcgtcgtggatacgca

SEQ ID NO: 1505681 - DNA, 25 bp, Homo sapien
ccagactcagtgacagagcgacacc

SEQ ID NO: 1505682 - DNA, 25 bp, Homo sapien
actcagtgacagagcgacaccctgt

SEQ ID NO: 1505683 - DNA, 25 bp, Homo sapien
cacagtggtgttcacctgtagttcc

SEQ ID NO: 1505684 - DNA, 25 bp, Homo sapien
agactcagtgacagagcgacaccct

SEQ ID NO: 1505685 - DNA, 25 bp, Homo sapien
tgggaggacagagaatagctgtgag

SEQ ID NO: 1505686 - DNA, 25 bp, Homo sapien
gggaggacagagaatagctgtgagg

SEQ ID NO: 1505687 - DNA, 25 bp, Homo sapien
tgttttcagtcaccagcgagtagat

SEQ ID NO: 1505688 - DNA, 25 bp, Homo sapien
ttggcgggagttccccagtcagtcc

SEQ ID NO: 1505689 - DNA, 25 bp, Homo sapien
agtcaccagcgagtagatgtccaca

SEQ ID NO: 1505690 - DNA, 25 bp, Homo sapien
gatcttggcgggagttccccagtca

SEQ ID NO: 1505691 - DNA, 25 bp, Homo sapien
tccaagatggtcttccggttgcccc

SEQ ID NO: 1505692 - DNA, 25 bp, Homo sapien
ccccgttgacatcgatgcttgagat

SEQ ID NO: 1505693 - DNA, 25 bp, Homo sapien
tggagtcaacccagtagaggcggcc

SEQ ID NO: 1505694 - DNA, 25 bp, Homo sapien
atggagtgaagtttggagtcaaccc

SEQ ID NO: 1505695 - DNA, 25 bp, Homo sapien
ccaggctggtctcggtctcacactc

SEQ ID NO: 1505696 - DNA, 25 bp, Homo sapien
ggctggtctcggtctcacactcctg

SEQ ID NO: 1505697 - DNA, 25 bp, Homo sapien
aggctggtctcggtctcacactcct

SEQ ID NO: 1505698 - DNA, 25 bp, Homo sapien
caggctggtctcggtctcacactcc

SEQ ID NO: 1505699 - DNA, 25 bp, Homo sapien
aagttgacatcggaacctgtgaggc

SEQ ID NO: 1505700 - DNA, 25 bp, Homo sapien
ggttgtggaagagaaccatatcctc

SEQ ID NO: 1505701 - DNA, 25 bp, Homo sapien
cctgtgaggcggttggcactgaaaa

SEQ ID NO: 1505702 - DNA, 25 bp, Homo sapien
gcttcgttgatgatatctgtccaaa

SEQ ID NO: 1505703 - DNA, 25 bp, Homo sapien
gcgcaggtaaacttgggcgagtggg

SEQ ID NO: 1505704 - DNA, 25 bp, Homo sapien
cagggtggtcctctcacaccagttc

SEQ ID NO: 1505705 - DNA, 25 bp, Homo sapien
cgggcaggcgcaggtaaacttgggc

SEQ ID NO: 1505706 - DNA, 25 bp, Homo sapien
cagcagcatgccgtccgggcaggcg

SEQ ID NO: 1505707 - DNA, 25 bp, Homo sapien
tgtgctgtgtccttacggctgtgga

SEQ ID NO: 1505708 - DNA, 25 bp, Homo sapien
ggtgagacattgtcactatctccac

SEQ ID NO: 1505709 - DNA, 25 bp, Homo sapien
tagcctgacggtggatgtctcctgg

SEQ ID NO: 1505710 - DNA, 25 bp, Homo sapien
tatctccaccgtggtgagcccaggg

SEQ ID NO: 1505711 - DNA, 25 bp, Homo sapien
tcgaggttgtaggactcaattccgg

SEQ ID NO: 1505712 - DNA, 25 bp, Homo sapien
gaacttcccaagtctgtgagaggcc

SEQ ID NO: 1505713 - DNA, 25 bp, Homo sapien
tggcacatctccctggacacttgga

SEQ ID NO: 1505714 - DNA, 25 bp, Homo sapien
gccacacgggcttatttgtgagtta

SEQ ID NO: 1505715 - DNA, 25 bp, Homo sapien
cctctgccagcaacgtcgcccagag

SEQ ID NO: 1505716 - DNA, 25 bp, Homo sapien
ttcctctgccagcaacgtcgcccag

SEQ ID NO: 1505717 - DNA, 25 bp, Homo sapien
tcctctgccagcaacgtcgcccaga

SEQ ID NO: 1505718 - DNA, 25 bp, Homo sapien
accagccaggcacgaggtcacatag

SEQ ID NO: 1505719 - DNA, 25 bp, Homo sapien
acatcctccatctgaccccttagct

SEQ ID NO: 1505720 - DNA, 25 bp, Homo sapien
gaaaaagtgaacaggcccaaccagc

SEQ ID NO: 1505721 - DNA, 25 bp, Homo sapien
tctgaccccttagctgtctgatctt

SEQ ID NO: 1505722 - DNA, 25 bp, Homo sapien
cttgactcctggtcttttatgtttg

SEQ ID NO: 1505723 - DNA, 25 bp, Homo sapien
tgtttgtttagagatcgccttgcgg

SEQ ID NO: 1505724 - DNA, 25 bp, Homo sapien
gtttgtttagagatcgccttgcggc

SEQ ID NO: 1505725 - DNA, 25 bp, Homo sapien
tgaaaacacgggcatcgtaccataa

SEQ ID NO: 1505726 - DNA, 25 bp, Homo sapien
cgagaccagagacccagctccgtgg

SEQ ID NO: 1505727 - DNA, 25 bp, Homo sapien
tagggagaggcacgctctgtcacac

SEQ ID NO: 1505728 - DNA, 25 bp, Homo sapien
acagctgcccccgagaccagagacc

SEQ ID NO: 1505729 - DNA, 25 bp, Homo sapien
ctgtagggagaggcacgctctgtca

SEQ ID NO: 1505730 - DNA, 25 bp, Homo sapien
ctgtagccgtcctggttgtggcaaa

SEQ ID NO: 1505731 - DNA, 25 bp, Homo sapien
caaatgtggacctcatcctctgtgg

SEQ ID NO: 1505732 - DNA, 25 bp, Homo sapien
tgatgttcttaagccgccagttctt

SEQ ID NO: 1505733 - DNA, 25 bp, Homo sapien
ttgtcaaagttgatgctgttgatgt

SEQ ID NO: 1505734 - DNA, 25 bp, Homo sapien
gctgacattctgaatgagcgcacag

SEQ ID NO: 1505735 - DNA, 25 bp, Homo sapien
taatgctgtcctcgatctggagggc

SEQ ID NO: 1505736 - DNA, 25 bp, Homo sapien
caccaaggccattgtccgctgacat

SEQ ID NO: 1505737 - DNA, 25 bp, Homo sapien
tcggcctggtcccttgaggatcata

SEQ ID NO: 1505738 - DNA, 25 bp, Homo sapien
tcacgccacgtcatcctccagactg

SEQ ID NO: 1505739 - DNA, 25 bp, Homo sapien
cacgccacgtcatcctccagactga

SEQ ID NO: 1505740 - DNA, 25 bp, Homo sapien
ctaggtgggcggacataaagacgac

SEQ ID NO: 1505741 - DNA, 25 bp, Homo sapien
taagggtgaccagtgactcaggctc

SEQ ID NO: 1505742 - DNA, 25 bp, Homo sapien
caaaaagcgttgcacacagtccagt

SEQ ID NO: 1505743 - DNA, 25 bp, Homo sapien
tacgtgctccgaaaccagaaaggct

SEQ ID NO: 1505744 - DNA, 25 bp, Homo sapien
caggggtggcgttccccaagctgca

SEQ ID NO: 1505745 - DNA, 25 bp, Homo sapien
gggtggcgttccccaagctgcaggc

SEQ ID NO: 1505746 - DNA, 25 bp, Homo sapien
aggggtggcgttccccaagctgcag

SEQ ID NO: 1505747 - DNA, 25 bp, Homo sapien
ctgcaggggtggcgttccccaagct

SEQ ID NO: 1505748 - DNA, 25 bp, Homo sapien
cctgtcctggccagagctgttgagc

SEQ ID NO: 1505749 - DNA, 25 bp, Homo sapien
cttccaccctgtcctggccagagct

SEQ ID NO: 1505750 - DNA, 25 bp, Homo sapien
accctgtcctggccagagctgttga

SEQ ID NO: 1505751 - DNA, 25 bp, Homo sapien
ccaccctgtcctggccagagctgtt

SEQ ID NO: 1505752 - DNA, 25 bp, Homo sapien
agctgtggtctgggatgcctcgggc

SEQ ID NO: 1505753 - DNA, 25 bp, Homo sapien
gctgtggtctgggatgcctcgggct

SEQ ID NO: 1505754 - DNA, 25 bp, Homo sapien
gcccagaggctccaggctgactcac

SEQ ID NO: 1505755 - DNA, 25 bp, Homo sapien
ctccctctggcagccgcggctcagc

SEQ ID NO: 1505756 - DNA, 25 bp, Homo sapien
tggcagccgcggctcagcccagagg

SEQ ID NO: 1505757 - DNA, 25 bp, Homo sapien
ctctggcagccgcggctcagcccag

SEQ ID NO: 1505758 - DNA, 25 bp, Homo sapien
tgtgcaggtcatgaattcacaccat

SEQ ID NO: 1505759 - DNA, 25 bp, Homo sapien
tacggcaagaggtgtgcaggtcatg

SEQ ID NO: 1505760 - DNA, 25 bp, Homo sapien
gaggtgtgcaggtcatgaattcaca

SEQ ID NO: 1505761 - DNA, 25 bp, Homo sapien
ccagccccctgctcgtaactggtgt

SEQ ID NO: 1505762 - DNA, 25 bp, Homo sapien
cctgaagctctagccacttagtcat

SEQ ID NO: 1505763 - DNA, 25 bp, Homo sapien
cagccacatccccatcctcgtcccc

SEQ ID NO: 1505764 - DNA, 25 bp, Homo sapien
ccccatcctcgtcccccccaggcag

SEQ ID NO: 1505765 - DNA, 25 bp, Homo sapien
cctcgtcccccccaggcaggtccag

SEQ ID NO: 1505766 - DNA, 25 bp, Homo sapien
acatccccatcctcgtcccccccag

SEQ ID NO: 1505767 - DNA, 25 bp, Homo sapien
gcacggctgagcgtcctgggatggg

SEQ ID NO: 1505768 - DNA, 25 bp, Homo sapien
ggattgggcacgtctccctctcgtc

SEQ ID NO: 1505769 - DNA, 25 bp, Homo sapien
tcgtcctgcaaactgcagctctgag

SEQ ID NO: 1505770 - DNA, 25 bp, Homo sapien
gggggattgggcacgtctccctctc

SEQ ID NO: 1505771 - DNA, 25 bp, Homo sapien
ctgtgggcgccgggagtggagtggg

SEQ ID NO: 1505772 - DNA, 25 bp, Homo sapien
cgccgggagtggagtgggcccagcc

SEQ ID NO: 1505773 - DNA, 25 bp, Homo sapien
gcgccgggagtggagtgggcccagc

SEQ ID NO: 1505774 - DNA, 25 bp, Homo sapien
tgggcgccgggagtggagtgggccc

SEQ ID NO: 1505775 - DNA, 25 bp, Homo sapien
acacgggacaggatgcctccactgg

SEQ ID NO: 1505776 - DNA, 25 bp, Homo sapien
caccttggcggtcattcctttcccg

SEQ ID NO: 1505777 - DNA, 25 bp, Homo sapien
tccactggccggttcactggggcaa

SEQ ID NO: 1505778 - DNA, 25 bp, Homo sapien
ccagggttggctaagcgctgctgtc

SEQ ID NO: 1505779 - DNA, 25 bp, Homo sapien
cagaagcgacttttgtgccgggact

SEQ ID NO: 1505780 - DNA, 25 bp, Homo sapien
gagtcgacttatctatgccaggcct

SEQ ID NO: 1505781 - DNA, 25 bp, Homo sapien
tcagctaggtaaccaacgggagtcg

SEQ ID NO: 1505782 - DNA, 25 bp, Homo sapien
gacaccgtggtattcgatgacagct

SEQ ID NO: 1505783 - DNA, 25 bp, Homo sapien
gtctccatctcctgagtttgtgatc

SEQ ID NO: 1505784 - DNA, 25 bp, Homo sapien
tctccatctcctgagtttgtgatct

SEQ ID NO: 1505785 - DNA, 25 bp, Homo sapien
acataaaatggtgcatagcaggacc

SEQ ID NO: 1505786 - DNA, 25 bp, Homo sapien
tggtcaaaggcagtatcctttttgg

SEQ ID NO: 1505787 - DNA, 25 bp, Homo sapien
gatggtcaaaggcagtatccttttt

SEQ ID NO: 1505788 - DNA, 25 bp, Homo sapien
agcaggaccctgtaaaaattagccg

SEQ ID NO: 1505789 - DNA, 25 bp, Homo sapien
cttgttggcaaaacgcagggccggc

SEQ ID NO: 1505790 - DNA, 25 bp, Homo sapien
taacaacctagagactttccggagc

SEQ ID NO: 1505791 - DNA, 25 bp, Homo sapien
gaatagtgttgtgtccactgccccg

SEQ ID NO: 1505792 - DNA, 25 bp, Homo sapien
caatgagaaattaccggccaggcgt

SEQ ID NO: 1505793 - DNA, 25 bp, Homo sapien
gagctcagtgagattcaaggtcaca

SEQ ID NO: 1505794 - DNA, 25 bp, Homo sapien
ctggattcttggagacgaaggcctc

SEQ ID NO: 1505795 - DNA, 25 bp, Homo sapien
gcatgcccggcaactgattttccac

SEQ ID NO: 1505796 - DNA, 25 bp, Homo sapien
ggtgctggccctttagtgacattat

SEQ ID NO: 1505797 - DNA, 25 bp, Homo sapien
ttcattgcactctatatttagatgt

SEQ ID NO: 1505798 - DNA, 25 bp, Homo sapien
cgctgatctgtatcctaagtctctt

SEQ ID NO: 1505799 - DNA, 25 bp, Homo sapien
ttagatgtcccagatgatctctgat

SEQ ID NO: 1505800 - DNA, 25 bp, Homo sapien
cattaagggcccacaatggctgtcg

SEQ ID NO: 1505801 - DNA, 25 bp, Homo sapien
gcaaaaagtagggaacatccaagtg

SEQ ID NO: 1505802 - DNA, 25 bp, Homo sapien
gaaattcttagccattctcacttga

SEQ ID NO: 1505803 - DNA, 25 bp, Homo sapien
gatttgtgggtggatgcctttcatc

SEQ ID NO: 1505804 - DNA, 25 bp, Homo sapien
tattaggccttttgatcacatctgt

SEQ ID NO: 1505805 - DNA, 25 bp, Homo sapien
tgacctcgccgtggcccctggctct

SEQ ID NO: 1505806 - DNA, 25 bp, Homo sapien
tggcgcgttccaagagcatcagcag

SEQ ID NO: 1505807 - DNA, 25 bp, Homo sapien
ccctggctctgtggatgacgaggtt

SEQ ID NO: 1505808 - DNA, 25 bp, Homo sapien
gcagcagcaaccctgacctcgccgt

SEQ ID NO: 1505809 - DNA, 25 bp, Homo sapien
cgcccagctattccgtgctcacacc

SEQ ID NO: 1505810 - DNA, 25 bp, Homo sapien
cactgctgcagcacgggcgcctgag

SEQ ID NO: 1505811 - DNA, 25 bp, Homo sapien
ccagccgccgcccagctattccgtg

SEQ ID NO: 1505812 - DNA, 25 bp, Homo sapien
gccgcccagctattccgtgctcaca

SEQ ID NO: 1505813 - DNA, 25 bp, Homo sapien
cagctgcagtgaatttacccgcgag

SEQ ID NO: 1505814 - DNA, 25 bp, Homo sapien
ggtccctcatgaatccactctccca

SEQ ID NO: 1505815 - DNA, 25 bp, Homo sapien
gcagtgaatttacccgcgaggcctt

SEQ ID NO: 1505816 - DNA, 25 bp, Homo sapien
catctttggcaagtccagctgcagt

SEQ ID NO: 1505817 - DNA, 25 bp, Homo sapien
ggctccgtgcgcaaccttgctgtgc

SEQ ID NO: 1505818 - DNA, 25 bp, Homo sapien
tgctgtgcgagtgcagtacatgaca

SEQ ID NO: 1505819 - DNA, 25 bp, Homo sapien
gtgcagtacatgacaggcgaggacc

SEQ ID NO: 1505820 - DNA, 25 bp, Homo sapien
tgcgcaaccttgctgtgcgagtgca

SEQ ID NO: 1505821 - DNA, 25 bp, Homo sapien
ccaggagttctattgtgcggccata

SEQ ID NO: 1505822 - DNA, 25 bp, Homo sapien
tgcggccatagagacccaggctgtt

SEQ ID NO: 1505823 - DNA, 25 bp, Homo sapien
ctgtacacaccgttgagggcctggc

SEQ ID NO: 1505824 - DNA, 25 bp, Homo sapien
tccaacaggcttgcccgaagttcct

SEQ ID NO: 1505825 - DNA, 25 bp, Homo sapien
acgctgtcccgtagcaccttctgtg

SEQ ID NO: 1505826 - DNA, 25 bp, Homo sapien
aaattctcggtaggcagggcccagc

SEQ ID NO: 1505827 - DNA, 25 bp, Homo sapien
tcctcagctggacttctagccgctg

SEQ ID NO: 1505828 - DNA, 25 bp, Homo sapien
ctagccgctgcacgctgtcccgtag

SEQ ID NO: 1505829 - DNA, 25 bp, Homo sapien
tcagcccactagggttgggggagct

SEQ ID NO: 1505830 - DNA, 25 bp, Homo sapien
agggtctcagcccactagggttggg

SEQ ID NO: 1505831 - DNA, 25 bp, Homo sapien
gtctcagcccactagggttggggga

SEQ ID NO: 1505832 - DNA, 25 bp, Homo sapien
cagggtctcagcccactagggttgg

SEQ ID NO: 1505833 - DNA, 25 bp, Homo sapien
ctctcctggatctgtcgcagccgat

SEQ ID NO: 1505834 - DNA, 25 bp, Homo sapien
tctgtcgcagccgatgctgctgtgc

SEQ ID NO: 1505835 - DNA, 25 bp, Homo sapien
agccgatgctgctgtgccaccatct

SEQ ID NO: 1505836 - DNA, 25 bp, Homo sapien
atgtggctctgcttgtcagcgtgag

SEQ ID NO: 1505837 - DNA, 25 bp, Homo sapien
caggctgggagcgccgctgtgtgga

SEQ ID NO: 1505838 - DNA, 25 bp, Homo sapien
ggctgggagcgccgctgtgtggagt

SEQ ID NO: 1505839 - DNA, 25 bp, Homo sapien
tcaggctgggagcgccgctgtgtgg

SEQ ID NO: 1505840 - DNA, 25 bp, Homo sapien
aggctgggagcgccgctgtgtggag

SEQ ID NO: 1505841 - DNA, 25 bp, Homo sapien
ggctgatcccagtgaacaggcagct

SEQ ID NO: 1505842 - DNA, 25 bp, Homo sapien
catgattggtcctcagttccatcca

SEQ ID NO: 1505843 - DNA, 25 bp, Homo sapien
tgccacgactctgctttaatgaggg

SEQ ID NO: 1505844 - DNA, 25 bp, Homo sapien
tgtaggcatgaaagggtacatgtcc

SEQ ID NO: 1505845 - DNA, 25 bp, Homo sapien
agggaatgggccctgacaaggccct

SEQ ID NO: 1505846 - DNA, 25 bp, Homo sapien
ccccttgggcttcgacagggaatgg

SEQ ID NO: 1505847 - DNA, 25 bp, Homo sapien
tctgaagcagcgtttccaccaaggc

SEQ ID NO: 1505848 - DNA, 25 bp, Homo sapien
cctgacaaggccctgaagtttgctg

SEQ ID NO: 1505849 - DNA, 25 bp, Homo sapien
cactggggcgggtactgtgctcgag

SEQ ID NO: 1505850 - DNA, 25 bp, Homo sapien
ctggggcgggtactgtgctcgaggc

SEQ ID NO: 1505851 - DNA, 25 bp, Homo sapien
aggcactggggcgggtactgtgctc

SEQ ID NO: 1505852 - DNA, 25 bp, Homo sapien
ggggcgggtactgtgctcgaggcat

SEQ ID NO: 1505853 - DNA, 25 bp, Homo sapien
ctccacgtagcagcagggtcctctg

SEQ ID NO: 1505854 - DNA, 25 bp, Homo sapien
tccacgtagcagcagggtcctctgc

SEQ ID NO: 1505855 - DNA, 25 bp, Homo sapien
cccaagatgatagggatctgaggaa

SEQ ID NO: 1505856 - DNA, 25 bp, Homo sapien
gactggggcaccctgaacatttaag

SEQ ID NO: 1505857 - DNA, 25 bp, Homo sapien
gctactgtttcccaagatgataggg

SEQ ID NO: 1505858 - DNA, 25 bp, Homo sapien
gggcgccaatgctgacttgctctgc

SEQ ID NO: 1505859 - DNA, 25 bp, Homo sapien
ggaagaatacggagtgtggatttca

SEQ ID NO: 1505860 - DNA, 25 bp, Homo sapien
ttgagtaaagataacagtttcttca

SEQ ID NO: 1505861 - DNA, 25 bp, Homo sapien
cttcaaggaagaatacggagtgtgg

SEQ ID NO: 1505862 - DNA, 25 bp, Homo sapien
agccacgaagccattgagtaaagat

SEQ ID NO: 1505863 - DNA, 25 bp, Homo sapien
aaaccaggggcctggattgtgacat

SEQ ID NO: 1505864 - DNA, 25 bp, Homo sapien
caaaccaggggcctggattgtgaca

SEQ ID NO: 1505865 - DNA, 25 bp, Homo sapien
gttgatggaggtccccacgctccct

SEQ ID NO: 1505866 - DNA, 25 bp, Homo sapien
gatgccaatttggatcaacttattt

SEQ ID NO: 1505867 - DNA, 25 bp, Homo sapien
cagctctcggttgatggaggtcccc

SEQ ID NO: 1505868 - DNA, 25 bp, Homo sapien
ccacagatctcgatgccaatttgga

SEQ ID NO: 1505869 - DNA, 25 bp, Homo sapien
cagatcacactcatctgtgctggat

SEQ ID NO: 1505870 - DNA, 25 bp, Homo sapien
tcccccagatcacactcatctgtgc

SEQ ID NO: 1505871 - DNA, 25 bp, Homo sapien
acctgggctcccccagatcacactc

SEQ ID NO: 1505872 - DNA, 25 bp, Homo sapien
ccccagatcacactcatctgtgctg

SEQ ID NO: 1505873 - DNA, 25 bp, Homo sapien
cccaggccaactaggatgatgccag

SEQ ID NO: 1505874 - DNA, 25 bp, Homo sapien
gtgatgcatcccatcaccaggcaca

SEQ ID NO: 1505875 - DNA, 25 bp, Homo sapien
cacaggttgccaacgtgaaggaggt

SEQ ID NO: 1505876 - DNA, 25 bp, Homo sapien
gaggacattcgtcagagaggcccct

SEQ ID NO: 1505877 - DNA, 25 bp, Homo sapien
cataccacccggcacagccaagcag

SEQ ID NO: 1505878 - DNA, 25 bp, Homo sapien
ctccataccacccggcacagccaag

SEQ ID NO: 1505879 - DNA, 25 bp, Homo sapien
tgctctctttagtcgctccatacca

SEQ ID NO: 1505880 - DNA, 25 bp, Homo sapien
gcctctgctctctttagtcgctcca

SEQ ID NO: 1505881 - DNA, 25 bp, Homo sapien
aaggaccactgtggcagctgtaact

SEQ ID NO: 1505882 - DNA, 25 bp, Homo sapien
aagaaggaccactgtggcagctgta

SEQ ID NO: 1505883 - DNA, 25 bp, Homo sapien
ggacaataaccattgacaggatgca

SEQ ID NO: 1505884 - DNA, 25 bp, Homo sapien
atgaggacaataaccattgacagga

SEQ ID NO: 1505885 - DNA, 25 bp, Homo sapien
agtggcccgttcattggccgaggtt

SEQ ID NO: 1505886 - DNA, 25 bp, Homo sapien
taccccaactagcaagagtggcccg

SEQ ID NO: 1505887 - DNA, 25 bp, Homo sapien
aggaagtgatcagtaccccaactag

SEQ ID NO: 1505888 - DNA, 25 bp, Homo sapien
caagagtggcccgttcattggccga

SEQ ID NO: 1505889 - DNA, 25 bp, Homo sapien
tcctcagggtcacgaaggtgtgttc

SEQ ID NO: 1505890 - DNA, 25 bp, Homo sapien
tcgttgtaacctctgtaattcttcc

SEQ ID NO: 1505891 - DNA, 25 bp, Homo sapien
tcagggtcacgaaggtgtgttccaa

SEQ ID NO: 1505892 - DNA, 25 bp, Homo sapien
cactgtgtagaatagtcgtctggct

SEQ ID NO: 1505893 - DNA, 25 bp, Homo sapien
tatagagaggagaagaaatacttgg

SEQ ID NO: 1505894 - DNA, 25 bp, Homo sapien
aggagaagaaatacttggagagtcc

SEQ ID NO: 1505895 - DNA, 25 bp, Homo sapien
ctatagagaggagaagaaatacttg

SEQ ID NO: 1505896 - DNA, 25 bp, Homo sapien
gagaggagaagaaatacttggagag

SEQ ID NO: 1505897 - DNA, 25 bp, Homo sapien
cttctggtggatgacgtttggagac

SEQ ID NO: 1505898 - DNA, 25 bp, Homo sapien
gtttggagacacatcgcgtccgtca

SEQ ID NO: 1505899 - DNA, 25 bp, Homo sapien
cgatggatttacagcaactcctggg

SEQ ID NO: 1505900 - DNA, 25 bp, Homo sapien
cgttgtcatttcgaaggaagagcca

SEQ ID NO: 1505901 - DNA, 25 bp, Homo sapien
tgagtgctccatcacgtggctggcc

SEQ ID NO: 1505902 - DNA, 25 bp, Homo sapien
tgccggcaatggactcaggccaatg

SEQ ID NO: 1505903 - DNA, 25 bp, Homo sapien
tgatcttgaactagtgatgtcccct

SEQ ID NO: 1505904 - DNA, 25 bp, Homo sapien
gctccatttagggtctctagaaggc

SEQ ID NO: 1505905 - DNA, 25 bp, Homo sapien
ctcccactcagggtgaagctctgag

SEQ ID NO: 1505906 - DNA, 25 bp, Homo sapien
tgatttttaggagtttatggaaaca

SEQ ID NO: 1505907 - DNA, 25 bp, Homo sapien
gctcccactcagggtgaagctctga

SEQ ID NO: 1505908 - DNA, 25 bp, Homo sapien
tgcttaataaaacagctcaaagacc

SEQ ID NO: 1505909 - DNA, 25 bp, Homo sapien
gtgcttaataaaacagctcaaagac

SEQ ID NO: 1505910 - DNA, 25 bp, Homo sapien
cagcaaagtggcaagaattcctggc

SEQ ID NO: 1505911 - DNA, 25 bp, Homo sapien
gcaaagtggcaagaattcctggcaa

SEQ ID NO: 1505912 - DNA, 25 bp, Homo sapien
cagcagcaaagtggcaagaattcct

SEQ ID NO: 1505913 - DNA, 25 bp, Homo sapien
aacagcagcaaagtggcaagaattc

SEQ ID NO: 1505914 - DNA, 25 bp, Homo sapien
aacttcaagtagcagccgagagagc

SEQ ID NO: 1505915 - DNA, 25 bp, Homo sapien
tcttgaatagggcagagctaacctg

SEQ ID NO: 1505916 - DNA, 25 bp, Homo sapien
gatgtttttgcagattacctcaggg

SEQ ID NO: 1505917 - DNA, 25 bp, Homo sapien
agacacattaaaccaaaggccgtgg

SEQ ID NO: 1505918 - DNA, 25 bp, Homo sapien
agaggctacccttagaactttggag

SEQ ID NO: 1505919 - DNA, 25 bp, Homo sapien
ggacaaatcctatgcacaaagtgag

SEQ ID NO: 1505920 - DNA, 25 bp, Homo sapien
tttaagacagagagtcgctcgtcgc

SEQ ID NO: 1505921 - DNA, 25 bp, Homo sapien
cacgcccagccgagggtatctttta

SEQ ID NO: 1505922 - DNA, 25 bp, Homo sapien
tgagagtggcaggaccttatgtgaa

SEQ ID NO: 1505923 - DNA, 25 bp, Homo sapien
cagaggttacgtgtgcagtttgaag

SEQ ID NO: 1505924 - DNA, 25 bp, Homo sapien
gcccatcagattccaaactctaggg

SEQ ID NO: 1505925 - DNA, 25 bp, Homo sapien
ccggtttagaggcactttctgccca

SEQ ID NO: 1505926 - DNA, 25 bp, Homo sapien
taggggtcacttctaagggatgctg

SEQ ID NO: 1505927 - DNA, 25 bp, Homo sapien
ctcaaactaggggtcacttctaagg

SEQ ID NO: 1505928 - DNA, 25 bp, Homo sapien
gcctcaaactaggggtcacttctaa

SEQ ID NO: 1505929 - DNA, 25 bp, Homo sapien
aactaggggtcacttctaagggatg

SEQ ID NO: 1505930 - DNA, 25 bp, Homo sapien
tgtgggttcttggagttcatccagg

SEQ ID NO: 1505931 - DNA, 25 bp, Homo sapien
atggtgatccctttgacccctgcag

SEQ ID NO: 1505932 - DNA, 25 bp, Homo sapien
aaggcggcgcctctttctcaggtcc

SEQ ID NO: 1505933 - DNA, 25 bp, Homo sapien
gaccctctacttgcgaaaagcagca

SEQ ID NO: 1505934 - DNA, 25 bp, Homo sapien
accttaaaaggatgcaggaagccca

SEQ ID NO: 1505935 - DNA, 25 bp, Homo sapien
aggaaccttaaaaggatgcaggaag

SEQ ID NO: 1505936 - DNA, 25 bp, Homo sapien
cctcaggaaccttaaaaggatgcag

SEQ ID NO: 1505937 - DNA, 25 bp, Homo sapien
gaaccttaaaaggatgcaggaagcc

SEQ ID NO: 1505938 - DNA, 25 bp, Homo sapien
taaggagcctctagcatgggccctg

SEQ ID NO: 1505939 - DNA, 25 bp, Homo sapien
gaatttcttccgctaccatgggctg

SEQ ID NO: 1505940 - DNA, 25 bp, Homo sapien
tctctttgcaatctgggctgcgtcc

SEQ ID NO: 1505941 - DNA, 25 bp, Homo sapien
gaaggaccccaagtacagtgctctc

SEQ ID NO: 1505942 - DNA, 25 bp, Homo sapien
ttcggactagtgcagagcaaactct

SEQ ID NO: 1505943 - DNA, 25 bp, Homo sapien
cctggtagatacaaagctgggctct

SEQ ID NO: 1505944 - DNA, 25 bp, Homo sapien
ggacctcagtcagcgcctatggcta

SEQ ID NO: 1505945 - DNA, 25 bp, Homo sapien
ccaggtacgtgggtttgagtgccac

SEQ ID NO: 1505946 - DNA, 25 bp, Homo sapien
ttcagctgcgcttagtagccgcggc

SEQ ID NO: 1505947 - DNA, 25 bp, Homo sapien
tacgattagtcaatacccaggaggg

SEQ ID NO: 1505948 - DNA, 25 bp, Homo sapien
gaaaggtgcagatctacgacccgat

SEQ ID NO: 1505949 - DNA, 25 bp, Homo sapien
gcgtaattggataaaagcccgtgga

SEQ ID NO: 1505950 - DNA, 25 bp, Homo sapien
gtcacgctgagaacccgggacttag

SEQ ID NO: 1505951 - DNA, 25 bp, Homo sapien
gacttagggaccataggaagcctgg

SEQ ID NO: 1505952 - DNA, 25 bp, Homo sapien
tttgagaaccagcttaggtccccag

SEQ ID NO: 1505953 - DNA, 25 bp, Homo sapien
ttgtgaaatctacacccgccaggct

SEQ ID NO: 1505954 - DNA, 25 bp, Homo sapien
gggcatcccctaagcattcactgga

SEQ ID NO: 1505955 - DNA, 25 bp, Homo sapien
cacctaattgagtgccgggcatccc

SEQ ID NO: 1505956 - DNA, 25 bp, Homo sapien
gacggttaagcagggaaactctcca

SEQ ID NO: 1505957 - DNA, 25 bp, Homo sapien
tgtccccaactataaaaacgagatg

SEQ ID NO: 1505958 - DNA, 25 bp, Homo sapien
aggagtttcgacctggccccacagg

SEQ ID NO: 1505959 - DNA, 25 bp, Homo sapien
aaaagcttggaggtgtggaatcaca

SEQ ID NO: 1505960 - DNA, 25 bp, Homo sapien
tcatgatggctgaatcgaggtccga

SEQ ID NO: 1505961 - DNA, 25 bp, Homo sapien
ccagtaaggcattgacggccaagcc

SEQ ID NO: 1505962 - DNA, 25 bp, Homo sapien
ggctgctttgagataagtccccatg

SEQ ID NO: 1505963 - DNA, 25 bp, Homo sapien
tcagttatggtaggagccaaagctg

SEQ ID NO: 1505964 - DNA, 25 bp, Homo sapien
cttgacattggcttaaaggaaggcc

SEQ ID NO: 1505965 - DNA, 25 bp, Homo sapien
gaggcctcagccctaaactcaaggc

SEQ ID NO: 1505966 - DNA, 25 bp, Homo sapien
gacacagagtagtcagggtcccggg

SEQ ID NO: 1505967 - DNA, 25 bp, Homo sapien
cacagagtagtcagggtcccggggt

SEQ ID NO: 1505968 - DNA, 25 bp, Homo sapien
cagagtagtcagggtcccggggtag

SEQ ID NO: 1505969 - DNA, 25 bp, Homo sapien
aggacacagagtagtcagggtcccg

SEQ ID NO: 1505970 - DNA, 25 bp, Homo sapien
gtcacacttcatgttagcaggcaaa

SEQ ID NO: 1505971 - DNA, 25 bp, Homo sapien
tgtcacacttcatgttagcaggcaa

SEQ ID NO: 1505972 - DNA, 25 bp, Homo sapien
cacttcatgttagcaggcaaacaca

SEQ ID NO: 1505973 - DNA, 25 bp, Homo sapien
cacacttcatgttagcaggcaaaca

SEQ ID NO: 1505974 - DNA, 25 bp, Homo sapien
agtgcagggcactcctcacattccc

SEQ ID NO: 1505975 - DNA, 25 bp, Homo sapien
gtgcagggcactcctcacattccca

SEQ ID NO: 1505976 - DNA, 25 bp, Homo sapien
acagtgcagggcactcctcacattc

SEQ ID NO: 1505977 - DNA, 25 bp, Homo sapien
cagtgcagggcactcctcacattcc

SEQ ID NO: 1505978 - DNA, 25 bp, Homo sapien
tccagagccttgtccgaggaagagc

SEQ ID NO: 1505979 - DNA, 25 bp, Homo sapien
accagtgagctgtacgctccagagc

SEQ ID NO: 1505980 - DNA, 25 bp, Homo sapien
agggcatcccaaggtctctggctct

SEQ ID NO: 1505981 - DNA, 25 bp, Homo sapien
tgtacgctccagagccttgtccgag

SEQ ID NO: 1505982 - DNA, 25 bp, Homo sapien
agcctcatgtggcgaaggccctgag

SEQ ID NO: 1505983 - DNA, 25 bp, Homo sapien
tcatgtggcgaaggccctgagcccc

SEQ ID NO: 1505984 - DNA, 25 bp, Homo sapien
cctcatgtggcgaaggccctgagcc

SEQ ID NO: 1505985 - DNA, 25 bp, Homo sapien
gcagcctcatgtggcgaaggccctg

SEQ ID NO: 1505986 - DNA, 25 bp, Homo sapien
ttagctacgttgtgatgcctcttca

SEQ ID NO: 1505987 - DNA, 25 bp, Homo sapien
tagctacgttgtgatgcctcttcaa

SEQ ID NO: 1505988 - DNA, 25 bp, Homo sapien
cttagctacgttgtgatgcctcttc

SEQ ID NO: 1505989 - DNA, 25 bp, Homo sapien
tcacagccaaatccccatggaagac

SEQ ID NO: 1505990 - DNA, 25 bp, Homo sapien
cacttatgtggctgagagacgatca

SEQ ID NO: 1505991 - DNA, 25 bp, Homo sapien
cacagcagtagattgcagtggtttt

SEQ ID NO: 1505992 - DNA, 25 bp, Homo sapien
ccccttgggctacatatgctcagaa

SEQ ID NO: 1505993 - DNA, 25 bp, Homo sapien
tcagttctaggtgtcccaaaccgta

SEQ ID NO: 1505994 - DNA, 25 bp, Homo sapien
gagttggatctcctcagttctaggt

SEQ ID NO: 1505995 - DNA, 25 bp, Homo sapien
cccaaaccgtaagtgcaggcaaagc

SEQ ID NO: 1505996 - DNA, 25 bp, Homo sapien
taggtgtcccaaaccgtaagtgcag

SEQ ID NO: 1505997 - DNA, 25 bp, Homo sapien
gagatgggagtagaaatttgtccct

SEQ ID NO: 1505998 - DNA, 25 bp, Homo sapien
gatgggagtagaaatttgtccctga

SEQ ID NO: 1505999 - DNA, 25 bp, Homo sapien
tgagatgggagtagaaatttgtccc

SEQ ID NO: 1506000 - DNA, 25 bp, Homo sapien
gatgagatgggagtagaaatttgtc

SEQ ID NO: 1506001 - DNA, 25 bp, Homo sapien
tgactttggaagagctggtctccaa

SEQ ID NO: 1506002 - DNA, 25 bp, Homo sapien
ctttgactttggaagagctggtctc

SEQ ID NO: 1506003 - DNA, 25 bp, Homo sapien
tttgactttggaagagctggtctcc

SEQ ID NO: 1506004 - DNA, 25 bp, Homo sapien
ctttggaagagctggtctccaaggg

SEQ ID NO: 1506005 - DNA, 25 bp, Homo sapien
tgggcagagaagagggtgagccagg

SEQ ID NO: 1506006 - DNA, 25 bp, Homo sapien
gggcagagaagagggtgagccaggg

SEQ ID NO: 1506007 - DNA, 25 bp, Homo sapien
tgtgggcagagaagagggtgagcca

SEQ ID NO: 1506008 - DNA, 25 bp, Homo sapien
ctgtgggcagagaagagggtgagcc

SEQ ID NO: 1506009 - DNA, 25 bp, Homo sapien
aagttcacatcgcaggagcttctgg

SEQ ID NO: 1506010 - DNA, 25 bp, Homo sapien
gagtcgggaatcatcacaatggtct

SEQ ID NO: 1506011 - DNA, 25 bp, Homo sapien
gagcttctgggagtcgggaatcatc

SEQ ID NO: 1506012 - DNA, 25 bp, Homo sapien
ttgagtgactcaagttcacatcgca

SEQ ID NO: 1506013 - DNA, 25 bp, Homo sapien
ggagggcaaggagaaacagaggttg

SEQ ID NO: 1506014 - DNA, 25 bp, Homo sapien
gcaaggagaaacagaggttgctggg

SEQ ID NO: 1506015 - DNA, 25 bp, Homo sapien
ggcaaggagaaacagaggttgctgg

SEQ ID NO: 1506016 - DNA, 25 bp, Homo sapien
agggcaaggagaaacagaggttgct

SEQ ID NO: 1506017 - DNA, 25 bp, Homo sapien
tgctgaatcttgatttgctgcaagc

SEQ ID NO: 1506018 - DNA, 25 bp, Homo sapien
agcagctctccttctccaacatggt

SEQ ID NO: 1506019 - DNA, 25 bp, Homo sapien
acatggtcactgagtggttcaggaa

SEQ ID NO: 1506020 - DNA, 25 bp, Homo sapien
ttcaagctgctgaatcttgatttgc

SEQ ID NO: 1506021 - DNA, 25 bp, Homo sapien
tgaccttgatctctggtcagtcctc

SEQ ID NO: 1506022 - DNA, 25 bp, Homo sapien
ctggcctagcctgaccttgatctct

SEQ ID NO: 1506023 - DNA, 25 bp, Homo sapien
ctagcctgaccttgatctctggtca

SEQ ID NO: 1506024 - DNA, 25 bp, Homo sapien
accttgatctctggtcagtcctcac

SEQ ID NO: 1506025 - DNA, 25 bp, Homo sapien
agggccccatacagctcctgccggc

SEQ ID NO: 1506026 - DNA, 25 bp, Homo sapien
gtcagggccccatacagctcctgcc

SEQ ID NO: 1506027 - DNA, 25 bp, Homo sapien
ggcagcgagtggtgcgggcccgctg

SEQ ID NO: 1506028 - DNA, 25 bp, Homo sapien
ggccctgctccatgccccacttgtg

SEQ ID NO: 1506029 - DNA, 25 bp, Homo sapien
ctgacctcccatgcccctatctgtg

SEQ ID NO: 1506030 - DNA, 25 bp, Homo sapien
tcccatgcccctatctgtgcctcca

SEQ ID NO: 1506031 - DNA, 25 bp, Homo sapien
ggcccctgacctcccatgcccctat

SEQ ID NO: 1506032 - DNA, 25 bp, Homo sapien
acccatccccgcaagctctgtcccc

SEQ ID NO: 1506033 - DNA, 25 bp, Homo sapien
gcttctgatagatgaaggtcacctc

SEQ ID NO: 1506034 - DNA, 25 bp, Homo sapien
agcttctgatagatgaaggtcacct

SEQ ID NO: 1506035 - DNA, 25 bp, Homo sapien
gagcttctgatagatgaaggtcacc

SEQ ID NO: 1506036 - DNA, 25 bp, Homo sapien
ggagcttctgatagatgaaggtcac

SEQ ID NO: 1506037 - DNA, 25 bp, Homo sapien
ctcaggcggacaaaggctgaagaag

SEQ ID NO: 1506038 - DNA, 25 bp, Homo sapien
ggggctcaggcggacaaaggctgaa

SEQ ID NO: 1506039 - DNA, 25 bp, Homo sapien
gctcaggcggacaaaggctgaagaa

SEQ ID NO: 1506040 - DNA, 25 bp, Homo sapien
ggagggggctcaggcggacaaaggc

SEQ ID NO: 1506041 - DNA, 25 bp, Homo sapien
tgaatgttcaccaagttctctgaga

SEQ ID NO: 1506042 - DNA, 25 bp, Homo sapien
tctgagatctcatcctcctgcgctt

SEQ ID NO: 1506043 - DNA, 25 bp, Homo sapien
tttgcggcatttcacctgcgttttc

SEQ ID NO: 1506044 - DNA, 25 bp, Homo sapien
gcattttctgaatgttcaccaagtt

SEQ ID NO: 1506045 - DNA, 25 bp, Homo sapien
catggtggaggctggccaaaatccc

SEQ ID NO: 1506046 - DNA, 25 bp, Homo sapien
gctccaatctcatggtggaggctgg

SEQ ID NO: 1506047 - DNA, 25 bp, Homo sapien
gcacccaacaggatgagttttcttt

SEQ ID NO: 1506048 - DNA, 25 bp, Homo sapien
cagcacccaacaggatgagttttct

SEQ ID NO: 1506049 - DNA, 25 bp, Homo sapien
ataatgacaatagtgccaggcgcgg

SEQ ID NO: 1506050 - DNA, 25 bp, Homo sapien
aataatgacaatagtgccaggcgcg

SEQ ID NO: 1506051 - DNA, 25 bp, Homo sapien
gacaggcggctgtctcatgaccctg

SEQ ID NO: 1506052 - DNA, 25 bp, Homo sapien
cttcagtctccggacaggcggctgt

SEQ ID NO: 1506053 - DNA, 25 bp, Homo sapien
tggctccctgcggtatctcttcagt

SEQ ID NO: 1506054 - DNA, 25 bp, Homo sapien
catatatcactcagttccttctgga

SEQ ID NO: 1506055 - DNA, 25 bp, Homo sapien
tgagggaagtctggactcaggtggg

SEQ ID NO: 1506056 - DNA, 25 bp, Homo sapien
ctagggggtgagggaagtctggact

SEQ ID NO: 1506057 - DNA, 25 bp, Homo sapien
cactgccagatcccgttgggggaac

SEQ ID NO: 1506058 - DNA, 25 bp, Homo sapien
actgccagatcccgttgggggaacg

SEQ ID NO: 1506059 - DNA, 25 bp, Homo sapien
tgctcagggtgtagacagcagtaca

SEQ ID NO: 1506060 - DNA, 25 bp, Homo sapien
tgggagactccacactgctcagggt

SEQ ID NO: 1506061 - DNA, 25 bp, Homo sapien
gggcgctgggagactccacactgct

SEQ ID NO: 1506062 - DNA, 25 bp, Homo sapien
tgtagacagcagtacagctaaggtt

SEQ ID NO: 1506063 - DNA, 25 bp, Homo sapien
aggcccccgagcacaaagtgaggct

SEQ ID NO: 1506064 - DNA, 25 bp, Homo sapien
tcttaggctcgaggccttgggacag

SEQ ID NO: 1506065 - DNA, 25 bp, Homo sapien
cttgggacaggcccccgagcacaaa

SEQ ID NO: 1506066 - DNA, 25 bp, Homo sapien
ctcttaggctcgaggccttgggaca

SEQ ID NO: 1506067 - DNA, 25 bp, Homo sapien
ctggtcacagtcggagtcagagtcc

SEQ ID NO: 1506068 - DNA, 25 bp, Homo sapien
gggagtggagggctcaggcactggt

SEQ ID NO: 1506069 - DNA, 25 bp, Homo sapien
ctcaggcactggtgccccttgtggc

SEQ ID NO: 1506070 - DNA, 25 bp, Homo sapien
tcacagtcggagtcagagtcccagg

SEQ ID NO: 1506071 - DNA, 25 bp, Homo sapien
gagcggccgctcttgctgaaaggtg

SEQ ID NO: 1506072 - DNA, 25 bp, Homo sapien
gaaggagcggccgctcttgctgaaa

SEQ ID NO: 1506073 - DNA, 25 bp, Homo sapien
aaggagcggccgctcttgctgaaag

SEQ ID NO: 1506074 - DNA, 25 bp, Homo sapien
cggccgctcttgctgaaaggtggct

SEQ ID NO: 1506075 - DNA, 25 bp, Homo sapien
ggaccgcatgcccagatcaggatct

SEQ ID NO: 1506076 - DNA, 25 bp, Homo sapien
cctgttctgagggtctagactgtgg

SEQ ID NO: 1506077 - DNA, 25 bp, Homo sapien
gatctgggcctgttctgagggtcta

SEQ ID NO: 1506078 - DNA, 25 bp, Homo sapien
gactgtgggagtcaagggcaggtca

SEQ ID NO: 1506079 - DNA, 25 bp, Homo sapien
tattttctctctggaggggtcttca

SEQ ID NO: 1506080 - DNA, 25 bp, Homo sapien
ttcagggagagcagtcccggctgct

SEQ ID NO: 1506081 - DNA, 25 bp, Homo sapien
agggagagcagtcccggctgctcaa

SEQ ID NO: 1506082 - DNA, 25 bp, Homo sapien
tagaggagggtctgggctagtttat

SEQ ID NO: 1506083 - DNA, 25 bp, Homo sapien
cttcagagtatgtccctgggccgcg

SEQ ID NO: 1506084 - DNA, 25 bp, Homo sapien
catcgattgtaggaaggaaccaaga

SEQ ID NO: 1506085 - DNA, 25 bp, Homo sapien
caggaagcagcaagactaacagtcg

SEQ ID NO: 1506086 - DNA, 25 bp, Homo sapien
tctggctgctcgtgtctggacagaa

SEQ ID NO: 1506087 - DNA, 25 bp, Homo sapien
tccgcctagactgccccggcgcggc

SEQ ID NO: 1506088 - DNA, 25 bp, Homo sapien
ctgagcccccgctccgcctagactg

SEQ ID NO: 1506089 - DNA, 25 bp, Homo sapien
cagacgcgaagaccgagacgcggtc

SEQ ID NO: 1506090 - DNA, 25 bp, Homo sapien
gatggacagacggactgccagccag

SEQ ID NO: 1506091 - DNA, 25 bp, Homo sapien
cttaggaagcacaacccagccgcag

SEQ ID NO: 1506092 - DNA, 25 bp, Homo sapien
cccatgctgtcacccttaggaagca

SEQ ID NO: 1506093 - DNA, 25 bp, Homo sapien
gtcctagatacccagagtcacccat

SEQ ID NO: 1506094 - DNA, 25 bp, Homo sapien
gttgccagaggtcctagatacccag

SEQ ID NO: 1506095 - DNA, 25 bp, Homo sapien
cctgaagactcacagccgctcctgg

SEQ ID NO: 1506096 - DNA, 25 bp, Homo sapien
atccacgcctgaagactcacagccg

SEQ ID NO: 1506097 - DNA, 25 bp, Homo sapien
cagggatggtcacccccattgtgca

SEQ ID NO: 1506098 - DNA, 25 bp, Homo sapien
cgagggtaggcactctgggtccagc

SEQ ID NO: 1506099 - DNA, 25 bp, Homo sapien
aaactcctcttcagatgcggtctcc

SEQ ID NO: 1506100 - DNA, 25 bp, Homo sapien
ctccacgaagacaaagcaggggatg

SEQ ID NO: 1506101 - DNA, 25 bp, Homo sapien
tggagaaactcctcttcagatgcgg

SEQ ID NO: 1506102 - DNA, 25 bp, Homo sapien
tgatggagaaactcctcttcagatg

SEQ ID NO: 1506103 - DNA, 25 bp, Homo sapien
taagcaagcaggatcacaatgccca

SEQ ID NO: 1506104 - DNA, 25 bp, Homo sapien
aagcaagcaggatcacaatgcccag

SEQ ID NO: 1506105 - DNA, 25 bp, Homo sapien
agcaagcaggatcacaatgcccagc

SEQ ID NO: 1506106 - DNA, 25 bp, Homo sapien
tgggtgtgcacagggaaggtgtccg

SEQ ID NO: 1506107 - DNA, 25 bp, Homo sapien
ggtgtgcacagggaaggtgtccgtg

SEQ ID NO: 1506108 - DNA, 25 bp, Homo sapien
ctgggtgtgcacagggaaggtgtcc

SEQ ID NO: 1506109 - DNA, 25 bp, Homo sapien
tgtgcacagggaaggtgtccgtgaa

SEQ ID NO: 1506110 - DNA, 25 bp, Homo sapien
gtgaccagtgcgtagacaagagcag

SEQ ID NO: 1506111 - DNA, 25 bp, Homo sapien
gagcaggaggcactcggctggcagc

SEQ ID NO: 1506112 - DNA, 25 bp, Homo sapien
aggtactgtcatagcagaagaatcc

SEQ ID NO: 1506113 - DNA, 25 bp, Homo sapien
tagggcttggcgtaggtactgtcat

SEQ ID NO: 1506114 - DNA, 25 bp, Homo sapien
ctgtgggcaagaccaagatggagtc

SEQ ID NO: 1506115 - DNA, 25 bp, Homo sapien
ttaccggcccacctgcctcctagga

SEQ ID NO: 1506116 - DNA, 25 bp, Homo sapien
cctcctaggaggtcttcattgtctc

SEQ ID NO: 1506117 - DNA, 25 bp, Homo sapien
tgggcaagaccaagatggagtcttc

SEQ ID NO: 1506118 - DNA, 25 bp, Homo sapien
ggaagcggaccagcctccgcactgg

SEQ ID NO: 1506119 - DNA, 25 bp, Homo sapien
gcagcaggccccagacacgatggtg

SEQ ID NO: 1506120 - DNA, 25 bp, Homo sapien
tccccgatgactgggacggctgaag

SEQ ID NO: 1506121 - DNA, 25 bp, Homo sapien
tggtgcagggaaaaaggcacgcgcc

SEQ ID NO: 1506122 - DNA, 25 bp, Homo sapien
taggtgaccgcgtaggcgcagaggg

SEQ ID NO: 1506123 - DNA, 25 bp, Homo sapien
ggcaccctggtcagtgacaaagcgg

SEQ ID NO: 1506124 - DNA, 25 bp, Homo sapien
tggcgtgggattgccggtcaccacc

SEQ ID NO: 1506125 - DNA, 25 bp, Homo sapien
caaagcggtcgggacctggccgatc

SEQ ID NO: 1506126 - DNA, 25 bp, Homo sapien
cgaccccgaagctcccgaagctcac

SEQ ID NO: 1506127 - DNA, 25 bp, Homo sapien
tccgaccccgaagctcccgaagctc

SEQ ID NO: 1506128 - DNA, 25 bp, Homo sapien
ccgaccccgaagctcccgaagctca

SEQ ID NO: 1506129 - DNA, 25 bp, Homo sapien
tcctttctgggctagagcgcatggc

SEQ ID NO: 1506130 - DNA, 25 bp, Homo sapien
gaacccaagtggacgctcctttctg

SEQ ID NO: 1506131 - DNA, 25 bp, Homo sapien
tcagggattgaggtcttggagtctc

SEQ ID NO: 1506132 - DNA, 25 bp, Homo sapien
tccagggagcgtgaccaaaaaggca

SEQ ID NO: 1506133 - DNA, 25 bp, Homo sapien
gccagcacgtccgaccagtggtttc

SEQ ID NO: 1506134 - DNA, 25 bp, Homo sapien
ttgaccaggcgggagcccttcacgc

SEQ ID NO: 1506135 - DNA, 25 bp, Homo sapien
cgcggaacacgagagtcacgtacat

SEQ ID NO: 1506136 - DNA, 25 bp, Homo sapien
tggtttcggtactcggccacgcgga

SEQ ID NO: 1506137 - DNA, 25 bp, Homo sapien
gaaagttatgcacaacgcaggtgac

SEQ ID NO: 1506138 - DNA, 25 bp, Homo sapien
tcggccagagggtggccggctctga

SEQ ID NO: 1506139 - DNA, 25 bp, Homo sapien
tcccagggagagagccttcggccag

SEQ ID NO: 1506140 - DNA, 25 bp, Homo sapien
ttttcgagggggctatccatggtgg

SEQ ID NO: 1506141 - DNA, 25 bp, Homo sapien
gtccacagagatgggtgatccctcc

SEQ ID NO: 1506142 - DNA, 25 bp, Homo sapien
ttctttggggctgtccgcccaggac

SEQ ID NO: 1506143 - DNA, 25 bp, Homo sapien
gggctgtccgcccaggacctatgtc

SEQ ID NO: 1506144 - DNA, 25 bp, Homo sapien
agttctcatgattaaccgtgtcccc

SEQ ID NO: 1506145 - DNA, 25 bp, Homo sapien
tgagccgtgccggtgtcgaatgcgg

SEQ ID NO: 1506146 - DNA, 25 bp, Homo sapien
ccggtgtcgaatgcggcctgcagac

SEQ ID NO: 1506147 - DNA, 25 bp, Homo sapien
aatgcggcctgcagacctcgggttc

SEQ ID NO: 1506148 - DNA, 25 bp, Homo sapien
gtcgaatgcggcctgcagacctcgg

SEQ ID NO: 1506149 - DNA, 25 bp, Homo sapien
tcaggtggccacggcgggcgcagtt

SEQ ID NO: 1506150 - DNA, 25 bp, Homo sapien
cgtcggctcagacctcaatcgagga

SEQ ID NO: 1506151 - DNA, 25 bp, Homo sapien
ggctcagacctcaatcgaggacggg

SEQ ID NO: 1506152 - DNA, 25 bp, Homo sapien
acacggggcgacgaacacatggctg

SEQ ID NO: 1506153 - DNA, 25 bp, Homo sapien
caagggcgtcggctcagacctcaat

SEQ ID NO: 1506154 - DNA, 25 bp, Homo sapien
caggtccaggggaggaaggcgaggg

SEQ ID NO: 1506155 - DNA, 25 bp, Homo sapien
aggaaggcgaggggccctggctggg

SEQ ID NO: 1506156 - DNA, 25 bp, Homo sapien
cccaggtccaggggaggaaggcgag

SEQ ID NO: 1506157 - DNA, 25 bp, Homo sapien
ggaggaaggcgaggggccctggctg

SEQ ID NO: 1506158 - DNA, 25 bp, Homo sapien
tcacggctggcaaacaggtaagggc

SEQ ID NO: 1506159 - DNA, 25 bp, Homo sapien
actcagggtgtacaggtcccgcagc

SEQ ID NO: 1506160 - DNA, 25 bp, Homo sapien
acaggtaagggctgaagttgtcccg

SEQ ID NO: 1506161 - DNA, 25 bp, Homo sapien
agggatagagtccactcagggtgta

SEQ ID NO: 1506162 - DNA, 25 bp, Homo sapien
gactttggcactcacgtggcacacg

SEQ ID NO: 1506163 - DNA, 25 bp, Homo sapien
ttggcactcacgtggcacacgcaca

SEQ ID NO: 1506164 - DNA, 25 bp, Homo sapien
aggggactttggcactcacgtggca

SEQ ID NO: 1506165 - DNA, 25 bp, Homo sapien
acacacgcgtggcagggaagaagtg

SEQ ID NO: 1506166 - DNA, 25 bp, Homo sapien
tcctaaatgtccttctagccatctt

SEQ ID NO: 1506167 - DNA, 25 bp, Homo sapien
tccatttgtgcccatcgggatatct

SEQ ID NO: 1506168 - DNA, 25 bp, Homo sapien
tgtgcccatcgggatatctcagagg

SEQ ID NO: 1506169 - DNA, 25 bp, Homo sapien
tgtccttctagccatcttctaatgt

SEQ ID NO: 1506170 - DNA, 25 bp, Homo sapien
gctgaacactggctggagttgccct

SEQ ID NO: 1506171 - DNA, 25 bp, Homo sapien
taacagaagggtttgggatgacctg

SEQ ID NO: 1506172 - DNA, 25 bp, Homo sapien
cattgactggaatcatgcccaccca

SEQ ID NO: 1506173 - DNA, 25 bp, Homo sapien
tttgcacatgcttagacacgggcgg

SEQ ID NO: 1506174 - DNA, 25 bp, Homo sapien
ccctggttagcacccgcctcagcgt

SEQ ID NO: 1506175 - DNA, 25 bp, Homo sapien
caggccgcaccgcccctggttagca

SEQ ID NO: 1506176 - DNA, 25 bp, Homo sapien
ccgcaccgcccctggttagcacccg

SEQ ID NO: 1506177 - DNA, 25 bp, Homo sapien
cgcccctggttagcacccgcctcag

SEQ ID NO: 1506178 - DNA, 25 bp, Homo sapien
tgtaccgagcagcagcaaaggcggt

SEQ ID NO: 1506179 - DNA, 25 bp, Homo sapien
ctctagggccgcagcaaatagcagc

SEQ ID NO: 1506180 - DNA, 25 bp, Homo sapien
cattgggtctagagtcgttccggtc

SEQ ID NO: 1506181 - DNA, 25 bp, Homo sapien
ttccagatcctggtgtaccgagcag

SEQ ID NO: 1506182 - DNA, 25 bp, Homo sapien
ttaaaagtaaccctgcctccttgca

SEQ ID NO: 1506183 - DNA, 25 bp, Homo sapien
gggccggattcagcacaggaagcca

SEQ ID NO: 1506184 - DNA, 25 bp, Homo sapien
ccgagtattagttgagggcaagcca

SEQ ID NO: 1506185 - DNA, 25 bp, Homo sapien
gtttttggccaaatctctagcgcaa

SEQ ID NO: 1506186 - DNA, 25 bp, Homo sapien
ggtactcttctaggccgtcgagcag

SEQ ID NO: 1506187 - DNA, 25 bp, Homo sapien
gcagctgtgtctagaagtaaggcaa

SEQ ID NO: 1506188 - DNA, 25 bp, Homo sapien
ggctctgggtcttccgctaggtact

SEQ ID NO: 1506189 - DNA, 25 bp, Homo sapien
taaggcaatgaggtaggcggcttcc

SEQ ID NO: 1506190 - DNA, 25 bp, Homo sapien
gaaaataccgctggagcagtgccag

SEQ ID NO: 1506191 - DNA, 25 bp, Homo sapien
tgccaggtgcaggacgtccccacta

SEQ ID NO: 1506192 - DNA, 25 bp, Homo sapien
actgggcaggaaaataccgctggag

SEQ ID NO: 1506193 - DNA, 25 bp, Homo sapien
cagtgccaggtgcaggacgtcccca

SEQ ID NO: 1506194 - DNA, 25 bp, Homo sapien
gcaggctcggaggccgtgctctcct

SEQ ID NO: 1506195 - DNA, 25 bp, Homo sapien
ggctcggaggccgtgctctcctgga

SEQ ID NO: 1506196 - DNA, 25 bp, Homo sapien
aggcaggctcggaggccgtgctctc

SEQ ID NO: 1506197 - DNA, 25 bp, Homo sapien
gctcggaggccgtgctctcctggac

SEQ ID NO: 1506198 - DNA, 25 bp, Homo sapien
ggtgggccacggagcgatcatcatt

SEQ ID NO: 1506199 - DNA, 25 bp, Homo sapien
tccatctgatcggaaagtcacccac

SEQ ID NO: 1506200 - DNA, 25 bp, Homo sapien
tttctccatctgatcggaaagtcac

SEQ ID NO: 1506201 - DNA, 25 bp, Homo sapien
cacggagcgatcatcatttctccat

SEQ ID NO: 1506202 - DNA, 25 bp, Homo sapien
gcctccagagcttgaacccttgcct

SEQ ID NO: 1506203 - DNA, 25 bp, Homo sapien
ctccagagcttgaacccttgcctga

SEQ ID NO: 1506204 - DNA, 25 bp, Homo sapien
ccagagcttgaacccttgcctgagc

SEQ ID NO: 1506205 - DNA, 25 bp, Homo sapien
gagcttgaacccttgcctgagctgg

SEQ ID NO: 1506206 - DNA, 25 bp, Homo sapien
tgttcgcagcagtaaataaggcaat

SEQ ID NO: 1506207 - DNA, 25 bp, Homo sapien
gaagcacagagaggtagtcacccac

SEQ ID NO: 1506208 - DNA, 25 bp, Homo sapien
gaaatcagggtatagtcacccatgg

SEQ ID NO: 1506209 - DNA, 25 bp, Homo sapien
gatctgcatatgtccctgaggtaag

SEQ ID NO: 1506210 - DNA, 25 bp, Homo sapien
cacacacacacaaggctagaccttg

SEQ ID NO: 1506211 - DNA, 25 bp, Homo sapien
tgggcgacgaaggaacaccttgtca

SEQ ID NO: 1506212 - DNA, 25 bp, Homo sapien
gcctgggcgacgaaggaacaccttg

SEQ ID NO: 1506213 - DNA, 25 bp, Homo sapien
gacgaaggaacaccttgtcacacac

SEQ ID NO: 1506214 - DNA, 25 bp, Homo sapien
agcggccttgctggcggcccggggg

SEQ ID NO: 1506215 - DNA, 25 bp, Homo sapien
gcggccttgctggcggcccgggggc

SEQ ID NO: 1506216 - DNA, 25 bp, Homo sapien
tgctggcggcccgggggcccgaaga

SEQ ID NO: 1506217 - DNA, 25 bp, Homo sapien
ccgtggcgggggctgtatcatggac

SEQ ID NO: 1506218 - DNA, 25 bp, Homo sapien
ggcgggggctgtatcatggaccacc

SEQ ID NO: 1506219 - DNA, 25 bp, Homo sapien
ctcccggaccccaagttcgagagca

SEQ ID NO: 1506220 - DNA, 25 bp, Homo sapien
tatcatggaccacctcggggcgtcc

SEQ ID NO: 1506221 - DNA, 25 bp, Homo sapien
gataagtcactaccttgggaccagc

SEQ ID NO: 1506222 - DNA, 25 bp, Homo sapien
gagataagtcactaccttgggacca

SEQ ID NO: 1506223 - DNA, 25 bp, Homo sapien
ttgagataagtcactaccttgggac

SEQ ID NO: 1506224 - DNA, 25 bp, Homo sapien
taagtcactaccttgggaccagcca

SEQ ID NO: 1506225 - DNA, 25 bp, Homo sapien
tctcaagccggaaagaaagttcctg

SEQ ID NO: 1506226 - DNA, 25 bp, Homo sapien
agcacgtgaccccaaagtgtccaga

SEQ ID NO: 1506227 - DNA, 25 bp, Homo sapien
tagggaaacggaatgagcacgtgac

SEQ ID NO: 1506228 - DNA, 25 bp, Homo sapien
catcttgggagtggcggcttctcaa

SEQ ID NO: 1506229 - DNA, 25 bp, Homo sapien
gtcacttccggtcgtacgttccgca

SEQ ID NO: 1506230 - DNA, 25 bp, Homo sapien
tgccagagccgagacggccatcttg

SEQ ID NO: 1506231 - DNA, 25 bp, Homo sapien
gggcaggactgtgaaaccttagaga

SEQ ID NO: 1506232 - DNA, 25 bp, Homo sapien
ctgcagaaagaaagcggaaatttct

SEQ ID NO: 1506233 - DNA, 25 bp, Homo sapien
cctcttgtccagcagccgcggttcc

SEQ ID NO: 1506234 - DNA, 25 bp, Homo sapien
ctcttgtccagcagccgcggttcct

SEQ ID NO: 1506235 - DNA, 25 bp, Homo sapien
ccctcttgtccagcagccgcggttc

SEQ ID NO: 1506236 - DNA, 25 bp, Homo sapien
tcttgtccagcagccgcggttcctg

SEQ ID NO: 1506237 - DNA, 25 bp, Homo sapien
gagcaaaggtcagtatccaccgcac

SEQ ID NO: 1506238 - DNA, 25 bp, Homo sapien
aggccggagcaaaggtcagtatcca

SEQ ID NO: 1506239 - DNA, 25 bp, Homo sapien
ccggagcaaaggtcagtatccaccg

SEQ ID NO: 1506240 - DNA, 25 bp, Homo sapien
ggagcaaaggtcagtatccaccgca

SEQ ID NO: 1506241 - DNA, 25 bp, Homo sapien
gaggaagcctacagcggggagatgc

SEQ ID NO: 1506242 - DNA, 25 bp, Homo sapien
cggggagatgcgctgtgtcttcacg

SEQ ID NO: 1506243 - DNA, 25 bp, Homo sapien
accagacgctctgaggcccgaaacg

SEQ ID NO: 1506244 - DNA, 25 bp, Homo sapien
tctgaggcccgaaacgggttctgtg

SEQ ID NO: 1506245 - DNA, 25 bp, Homo sapien
gacctccacggcccagcacatgggt

SEQ ID NO: 1506246 - DNA, 25 bp, Homo sapien
ccagggcaggtaagcgccttctcca

SEQ ID NO: 1506247 - DNA, 25 bp, Homo sapien
cagggcaggtaagcgccttctccac

SEQ ID NO: 1506248 - DNA, 25 bp, Homo sapien
gggcaggtaagcgccttctccacca

SEQ ID NO: 1506249 - DNA, 25 bp, Homo sapien
gcaggtaagcgccttctccaccaaa

SEQ ID NO: 1506250 - DNA, 25 bp, Homo sapien
gcttggactcatcgtagaagtgatg

SEQ ID NO: 1506251 - DNA, 25 bp, Homo sapien
tagtcatcgttgacctgatcaaatg

SEQ ID NO: 1506252 - DNA, 25 bp, Homo sapien
catctttgcagtcgcaatagtcatc

SEQ ID NO: 1506253 - DNA, 25 bp, Homo sapien
ccgaaccgtccaggcaggtgaaagg

SEQ ID NO: 1506254 - DNA, 25 bp, Homo sapien
ggcactgagcagtgttcaataaaca

SEQ ID NO: 1506255 - DNA, 25 bp, Homo sapien
tctctgaccccgaggcttgggagga

SEQ ID NO: 1506256 - DNA, 25 bp, Homo sapien
cagcagaggtagtatcttggtcaca

SEQ ID NO: 1506257 - DNA, 25 bp, Homo sapien
taacactgaccactgacttctgagc

SEQ ID NO: 1506258 - DNA, 25 bp, Homo sapien
ggcttatagccagtgttggtgcagt

SEQ ID NO: 1506259 - DNA, 25 bp, Homo sapien
cacaaacaccatcgttgacccggtt

SEQ ID NO: 1506260 - DNA, 25 bp, Homo sapien
ctgccattaggacaggcagccgtgc

SEQ ID NO: 1506261 - DNA, 25 bp, Homo sapien
caccatcgttgacccggttggaggg

SEQ ID NO: 1506262 - DNA, 25 bp, Homo sapien
tactcgtctgttccatcgcagcagt

SEQ ID NO: 1506263 - DNA, 25 bp, Homo sapien
tctcacagatgacgccgctgttgta

SEQ ID NO: 1506264 - DNA, 25 bp, Homo sapien
gccgctgttgtactcgtctgttcca

SEQ ID NO: 1506265 - DNA, 25 bp, Homo sapien
tgttctcacagatgacgccgctgtt

SEQ ID NO: 1506266 - DNA, 25 bp, Homo sapien
ggctctgctatctcctatgtgaccc

SEQ ID NO: 1506267 - DNA, 25 bp, Homo sapien
tccttccgttgtatactttacctgc

SEQ ID NO: 1506268 - DNA, 25 bp, Homo sapien
gcctggcctccttccgttgtatact

SEQ ID NO: 1506269 - DNA, 25 bp, Homo sapien
gtttagagtccaagtgccggctctg

SEQ ID NO: 1506270 - DNA, 25 bp, Homo sapien
ggagccaccatgagccgggtcttat

SEQ ID NO: 1506271 - DNA, 25 bp, Homo sapien
cgccaaggtcgcaacaaggtttaag

SEQ ID NO: 1506272 - DNA, 25 bp, Homo sapien
aacctaatcatcgtggccaagcgcg

SEQ ID NO: 1506273 - DNA, 25 bp, Homo sapien
gggaggcgtatctctcacacgtgca

SEQ ID NO: 1506274 - DNA, 25 bp, Homo sapien
ggactctctctccttacggcccttc

SEQ ID NO: 1506275 - DNA, 25 bp, Homo sapien
agggactctctctccttacggccct

SEQ ID NO: 1506276 - DNA, 25 bp, Homo sapien
cagggactctctctccttacggccc

SEQ ID NO: 1506277 - DNA, 25 bp, Homo sapien
tcagacggaacccttcgcgggtgac

SEQ ID NO: 1506278 - DNA, 25 bp, Homo sapien
tccagtcctcaataaggatcttctt

SEQ ID NO: 1506279 - DNA, 25 bp, Homo sapien
cttcttcagacggaacccttcgcgg

SEQ ID NO: 1506280 - DNA, 25 bp, Homo sapien
ggatcttcttcagacggaacccttc

SEQ ID NO: 1506281 - DNA, 25 bp, Homo sapien
gtccgcagcatctccacctggtctt

SEQ ID NO: 1506282 - DNA, 25 bp, Homo sapien
ttcactgtccgcagcatctccacct

SEQ ID NO: 1506283 - DNA, 25 bp, Homo sapien
actgtccgcagcatctccacctggt

SEQ ID NO: 1506284 - DNA, 25 bp, Homo sapien
gcagcatctccacctggtcttccag

SEQ ID NO: 1506285 - DNA, 25 bp, Homo sapien
ccaggactgaaggtgagtccttggc

SEQ ID NO: 1506286 - DNA, 25 bp, Homo sapien
tgtaaagaagccacctctgtcaccc

SEQ ID NO: 1506287 - DNA, 25 bp, Homo sapien
gtaaagaagccacctctgtcacccc

SEQ ID NO: 1506288 - DNA, 25 bp, Homo sapien
ctgtaaagaagccacctctgtcacc

SEQ ID NO: 1506289 - DNA, 25 bp, Homo sapien
agctcctgctcctgttgggccttgg

SEQ ID NO: 1506290 - DNA, 25 bp, Homo sapien
ccttgaaggcatcagccgccagctc

SEQ ID NO: 1506291 - DNA, 25 bp, Homo sapien
atgtcatcatccagctccttgaagg

SEQ ID NO: 1506292 - DNA, 25 bp, Homo sapien
gtcccgtccatgtcatcatccagct

SEQ ID NO: 1506293 - DNA, 25 bp, Homo sapien
ctgtgtccagctccgggtgagtctg

SEQ ID NO: 1506294 - DNA, 25 bp, Homo sapien
ctgagcttccgcttctgacaacgcc

SEQ ID NO: 1506295 - DNA, 25 bp, Homo sapien
atctgtgtccagctccgggtgagtc

SEQ ID NO: 1506296 - DNA, 25 bp, Homo sapien
gcttccgcttctgacaacgccccat

SEQ ID NO: 1506297 - DNA, 25 bp, Homo sapien
accggtacttgtccctgatggcggc

SEQ ID NO: 1506298 - DNA, 25 bp, Homo sapien
tcgtagaaagaggtggcgtctgtct

SEQ ID NO: 1506299 - DNA, 25 bp, Homo sapien
tgatggcggcccagacgcggtcgta

SEQ ID NO: 1506300 - DNA, 25 bp, Homo sapien
ctcggaccggtacttgtccctgatg

SEQ ID NO: 1506301 - DNA, 25 bp, Homo sapien
caaggggcagcctcggtgtctctgc

SEQ ID NO: 1506302 - DNA, 25 bp, Homo sapien
aaggggcagcctcggtgtctctgcc

SEQ ID NO: 1506303 - DNA, 25 bp, Homo sapien
gagcagtgcggtcggtgttgtggac

SEQ ID NO: 1506304 - DNA, 25 bp, Homo sapien
ggtgagcagtgcggtcggtgttgtg

SEQ ID NO: 1506305 - DNA, 25 bp, Homo sapien
aaggtgctggaaggtcggtgggcag

SEQ ID NO: 1506306 - DNA, 25 bp, Homo sapien
cctccttgggctccgtcaagtcagg

SEQ ID NO: 1506307 - DNA, 25 bp, Homo sapien
aggtgctggaaggtcggtgggcagt

SEQ ID NO: 1506308 - DNA, 25 bp, Homo sapien
cttgggctccgtcaagtcaggggca

SEQ ID NO: 1506309 - DNA, 25 bp, Homo sapien
ctcctcctctgtgggcgacgagggc

SEQ ID NO: 1506310 - DNA, 25 bp, Homo sapien
tcctcctcctctgtgggcgacgagg

SEQ ID NO: 1506311 - DNA, 25 bp, Homo sapien
tcctcctcctcctctgtgggcgacg

SEQ ID NO: 1506312 - DNA, 25 bp, Homo sapien
ctcctcctcctctgtgggcgacgag

SEQ ID NO: 1506313 - DNA, 25 bp, Homo sapien
ggggtgacagtggcggtggggcctc

SEQ ID NO: 1506314 - DNA, 25 bp, Homo sapien
gcctgcgtctgctcgtcgtagggcg

SEQ ID NO: 1506315 - DNA, 25 bp, Homo sapien
ctgctcgtcgtagggcggcattttg

SEQ ID NO: 1506316 - DNA, 25 bp, Homo sapien
cgtctgctcgtcgtagggcggcatt

SEQ ID NO: 1506317 - DNA, 25 bp, Homo sapien
gtcgtagggcggcattttgtcttcc

SEQ ID NO: 1506318 - DNA, 25 bp, Homo sapien
tgagggcctcaccagctatagagca

SEQ ID NO: 1506319 - DNA, 25 bp, Homo sapien
gacttcaccccgacagccttgaggg

SEQ ID NO: 1506320 - DNA, 25 bp, Homo sapien
gatgtggctgtgtgctcccataccc

SEQ ID NO: 1506321 - DNA, 25 bp, Homo sapien
ggttggaggtcagagatgtcctcaa

SEQ ID NO: 1506322 - DNA, 25 bp, Homo sapien
tcctcgaacttgttgcgggcctcct

SEQ ID NO: 1506323 - DNA, 25 bp, Homo sapien
ctcctcgaacttgttgcgggcctcc

SEQ ID NO: 1506324 - DNA, 25 bp, Homo sapien
accagctcccctgggagtcaaggag

SEQ ID NO: 1506325 - DNA, 25 bp, Homo sapien
gctggggacgccagtgcctgaccca

SEQ ID NO: 1506326 - DNA, 25 bp, Homo sapien
ccctgggagtcaaggagcagtcgct

SEQ ID NO: 1506327 - DNA, 25 bp, Homo sapien
cccaggacgacagacacaggagggt

SEQ ID NO: 1506328 - DNA, 25 bp, Homo sapien
tagcactggctgtacaggtaagcaa

SEQ ID NO: 1506329 - DNA, 25 bp, Homo sapien
ctgtacaggtaagcaaactccccgt

SEQ ID NO: 1506330 - DNA, 25 bp, Homo sapien
tggtgagctcgtagcactggctgta

SEQ ID NO: 1506331 - DNA, 25 bp, Homo sapien
tcgttggtggtgagctcgtagcact

SEQ ID NO: 1506332 - DNA, 25 bp, Homo sapien
tgccagtgggggcccctgcattcct

SEQ ID NO: 1506333 - DNA, 25 bp, Homo sapien
tgggggcccctgcattcctgggacg

SEQ ID NO: 1506334 - DNA, 25 bp, Homo sapien
ccagtgggggcccctgcattcctgg

SEQ ID NO: 1506335 - DNA, 25 bp, Homo sapien
gggcccctgcattcctgggacgcac

SEQ ID NO: 1506336 - DNA, 25 bp, Homo sapien
ttgggtttctgcgagacaagcttga

SEQ ID NO: 1506337 - DNA, 25 bp, Homo sapien
cccgagtttgggtttctgcgagaca

SEQ ID NO: 1506338 - DNA, 25 bp, Homo sapien
ggtttctgcgagacaagcttgaagg

SEQ ID NO: 1506339 - DNA, 25 bp, Homo sapien
gagtttgggtttctgcgagacaagc

SEQ ID NO: 1506340 - DNA, 25 bp, Homo sapien
gaaggggccagcccaagccactcac

SEQ ID NO: 1506341 - DNA, 25 bp, Homo sapien
gtggtggagcggttggggccctgcc

SEQ ID NO: 1506342 - DNA, 25 bp, Homo sapien
catacttcatggcactgaacttgtc

SEQ ID NO: 1506343 - DNA, 25 bp, Homo sapien
gaacttgtcgtggtcggggccaatc

SEQ ID NO: 1506344 - DNA, 25 bp, Homo sapien
catggcactgaacttgtcgtggtcg

SEQ ID NO: 1506345 - DNA, 25 bp, Homo sapien
gggcagacgggtgctcgagagggtt

SEQ ID NO: 1506346 - DNA, 25 bp, Homo sapien
gacgggtgctcgagagggttcggct

SEQ ID NO: 1506347 - DNA, 25 bp, Homo sapien
gtgctcgagagggttcggctgggcc

SEQ ID NO: 1506348 - DNA, 25 bp, Homo sapien
gctcgagagggttcggctgggccag

SEQ ID NO: 1506349 - DNA, 25 bp, Homo sapien
tctgtggtgctggtcaccatggtct

SEQ ID NO: 1506350 - DNA, 25 bp, Homo sapien
cagctccatgaggtactcgcagcga

SEQ ID NO: 1506351 - DNA, 25 bp, Homo sapien
tagagctcgtcatggtcgtcttcgg

SEQ ID NO: 1506352 - DNA, 25 bp, Homo sapien
catggtctctttcccgcacaggagg

SEQ ID NO: 1506353 - DNA, 25 bp, Homo sapien
ggacacaggttgatagagtggccat

SEQ ID NO: 1506354 - DNA, 25 bp, Homo sapien
tagagtggccatgtgggtccatctt

SEQ ID NO: 1506355 - DNA, 25 bp, Homo sapien
tgatagagtggccatgtgggtccat

SEQ ID NO: 1506356 - DNA, 25 bp, Homo sapien
gggcaggccgacgagactccacctc

SEQ ID NO: 1506357 - DNA, 25 bp, Homo sapien
aaggcaggagatggccgggtgtggt

SEQ ID NO: 1506358 - DNA, 25 bp, Homo sapien
aaaaaaggcaggagatggccgggtg

SEQ ID NO: 1506359 - DNA, 25 bp, Homo sapien
ggctcatgcctgtaatcccagcact

SEQ ID NO: 1506360 - DNA, 25 bp, Homo sapien
aaaaggcaggagatggccgggtgtg

SEQ ID NO: 1506361 - DNA, 25 bp, Homo sapien
gatcgcgccattgcattccacattc

SEQ ID NO: 1506362 - DNA, 25 bp, Homo sapien
gcgccattgcattccacattccagc

SEQ ID NO: 1506363 - DNA, 25 bp, Homo sapien
tcgcgccattgcattccacattcca

SEQ ID NO: 1506364 - DNA, 25 bp, Homo sapien
cgcgccattgcattccacattccag

SEQ ID NO: 1506365 - DNA, 25 bp, Homo sapien
attcttgtgcttcagcctcttgagc

SEQ ID NO: 1506366 - DNA, 25 bp, Homo sapien
gctggaactacaggcacctaccacc

SEQ ID NO: 1506367 - DNA, 25 bp, Homo sapien
agagatggggttttacaccatgttg

SEQ ID NO: 1506368 - DNA, 25 bp, Homo sapien
ctaccaccacacccagctaattttt

SEQ ID NO: 1506369 - DNA, 25 bp, Homo sapien
agcctggagaccttgtctattttct

SEQ ID NO: 1506370 - DNA, 25 bp, Homo sapien
ggagaccttgtctattttctcttat

SEQ ID NO: 1506371 - DNA, 25 bp, Homo sapien
gagttgaccagcctggagaccttgt

SEQ ID NO: 1506372 - DNA, 25 bp, Homo sapien
agttgaccagcctggagaccttgtc

SEQ ID NO: 1506373 - DNA, 25 bp, Homo sapien
gggcaagagaaagaccagattagaa

SEQ ID NO: 1506374 - DNA, 25 bp, Homo sapien
ggggcaagagaaagaccagattaga

SEQ ID NO: 1506375 - DNA, 25 bp, Homo sapien
tggggcaagagaaagaccagattag

SEQ ID NO: 1506376 - DNA, 25 bp, Homo sapien
catctttgaaggctgttggggcctg

SEQ ID NO: 1506377 - DNA, 25 bp, Homo sapien
ctgggaatgtggaccagccccgcct

SEQ ID NO: 1506378 - DNA, 25 bp, Homo sapien
cacaaaggtcctgccgccacagagg

SEQ ID NO: 1506379 - DNA, 25 bp, Homo sapien
tggtggggcgagtcaccaaggtggg

SEQ ID NO: 1506380 - DNA, 25 bp, Homo sapien
aagacctcgtggagaatttttactg

SEQ ID NO: 1506381 - DNA, 25 bp, Homo sapien
aaagcgaaccgtgaggaggggtgtg

SEQ ID NO: 1506382 - DNA, 25 bp, Homo sapien
ccccctggtggaatgcgggggagca

SEQ ID NO: 1506383 - DNA, 25 bp, Homo sapien
gaccacccccgatgggatggcttgg

SEQ ID NO: 1506384 - DNA, 25 bp, Homo sapien
actctggcggcccaatcctgggact

SEQ ID NO: 1506385 - DNA, 25 bp, Homo sapien
cggcctgggtctcgtactgcctggc

SEQ ID NO: 1506386 - DNA, 25 bp, Homo sapien
aggccttgtaactaaccaggccctg

SEQ ID NO: 1506387 - DNA, 25 bp, Homo sapien
tccgactgcccaatcctagggtgca

SEQ ID NO: 1506388 - DNA, 25 bp, Homo sapien
gcggggccgccctcacaggaacctc

SEQ ID NO: 1506389 - DNA, 25 bp, Homo sapien
ctgcggggccgccctcacaggaacc

SEQ ID NO: 1506390 - DNA, 25 bp, Homo sapien
ggggccgccctcacaggaacctcca

SEQ ID NO: 1506391 - DNA, 25 bp, Homo sapien
gggccgccctcacaggaacctccat

SEQ ID NO: 1506392 - DNA, 25 bp, Homo sapien
tgtactcttgtagtgtgcccgaggc

SEQ ID NO: 1506393 - DNA, 25 bp, Homo sapien
ctcttgtagtgtgcccgaggccttc

SEQ ID NO: 1506394 - DNA, 25 bp, Homo sapien
tactcttgtagtgtgcccgaggcct

SEQ ID NO: 1506395 - DNA, 25 bp, Homo sapien
caccttgtactcttgtagtgtgccc

SEQ ID NO: 1506396 - DNA, 25 bp, Homo sapien
gcaggcggtacttctcgaatgcctg

SEQ ID NO: 1506397 - DNA, 25 bp, Homo sapien
ttctcgaatgcctgcccacagttga

SEQ ID NO: 1506398 - DNA, 25 bp, Homo sapien
catttgggagtgagcaggcagcaac

SEQ ID NO: 1506399 - DNA, 25 bp, Homo sapien
agtgggacttggcaacgacatgatc

SEQ ID NO: 1506400 - DNA, 25 bp, Homo sapien
tgggagtttgtagcgcagccagatg

SEQ ID NO: 1506401 - DNA, 25 bp, Homo sapien
ctgggagtttgtagcgcagccagat

SEQ ID NO: 1506402 - DNA, 25 bp, Homo sapien
tggtcaggtcccaatattcctggta

SEQ ID NO: 1506403 - DNA, 25 bp, Homo sapien
gtcaggtcccaatattcctggtaca

SEQ ID NO: 1506404 - DNA, 25 bp, Homo sapien
gtggtcaggtcccaatattcctggt

SEQ ID NO: 1506405 - DNA, 25 bp, Homo sapien
ggtcaggtcccaatattcctggtac

SEQ ID NO: 1506406 - DNA, 25 bp, Homo sapien
aactgcttgacggccagccggtggg

SEQ ID NO: 1506407 - DNA, 25 bp, Homo sapien
catgatctggatggaatgggtccag

SEQ ID NO: 1506408 - DNA, 25 bp, Homo sapien
ccaggtggggtaccgggcgcccatg

SEQ ID NO: 1506409 - DNA, 25 bp, Homo sapien
ggtgggacttgctggctgctatctc

SEQ ID NO: 1506410 - DNA, 25 bp, Homo sapien
tgaagctgaatcttgaacataccca

SEQ ID NO: 1506411 - DNA, 25 bp, Homo sapien
ggcagtgggttatgggtgaagctga

SEQ ID NO: 1506412 - DNA, 25 bp, Homo sapien
gggtgaagctgaatcttgaacatac

SEQ ID NO: 1506413 - DNA, 25 bp, Homo sapien
gcagtgggttatgggtgaagctgaa

SEQ ID NO: 1506414 - DNA, 25 bp, Homo sapien
agcttcacagattccacgtgctagg

SEQ ID NO: 1506415 - DNA, 25 bp, Homo sapien
cagcttcacagattccacgtgctag

SEQ ID NO: 1506416 - DNA, 25 bp, Homo sapien
ggcttatcacagttggatcaagcac

SEQ ID NO: 1506417 - DNA, 25 bp, Homo sapien
aggcttatcacagttggatcaagca

SEQ ID NO: 1506418 - DNA, 25 bp, Homo sapien
tttggtgctcagcacaaagggactc

SEQ ID NO: 1506419 - DNA, 25 bp, Homo sapien
acaaagggactccaccagcttgaca

SEQ ID NO: 1506420 - DNA, 25 bp, Homo sapien
taattaagttgatttggtgctcagc

SEQ ID NO: 1506421 - DNA, 25 bp, Homo sapien
agcacaaagggactccaccagcttg

SEQ ID NO: 1506422 - DNA, 25 bp, Homo sapien
atttgaagtactcttggatgacatc

SEQ ID NO: 1506423 - DNA, 25 bp, Homo sapien
gcatttgaagtactcttggatgaca

SEQ ID NO: 1506424 - DNA, 25 bp, Homo sapien
tggcctgagactccttgccatagtc

SEQ ID NO: 1506425 - DNA, 25 bp, Homo sapien
aactgcaaccaaccactttacaggg

SEQ ID NO: 1506426 - DNA, 25 bp, Homo sapien
aatgggcttatgagggcagatagcc

SEQ ID NO: 1506427 - DNA, 25 bp, Homo sapien
gttattaacagcctaaatctggtgc

SEQ ID NO: 1506428 - DNA, 25 bp, Homo sapien
tgccaatagcccattttatgtgctt

SEQ ID NO: 1506429 - DNA, 25 bp, Homo sapien
ttatccaccttagttattaacagcc

SEQ ID NO: 1506430 - DNA, 25 bp, Homo sapien
agaacagaggcagcggctgaagttc

SEQ ID NO: 1506431 - DNA, 25 bp, Homo sapien
agtggcggcactgacgctgagaaca

SEQ ID NO: 1506432 - DNA, 25 bp, Homo sapien
ggctgaagttccgtctgcacactct

SEQ ID NO: 1506433 - DNA, 25 bp, Homo sapien
tgtttttgaagctccggaggcgacc

SEQ ID NO: 1506434 - DNA, 25 bp, Homo sapien
ggcagggcctcggttgaagtgagca

SEQ ID NO: 1506435 - DNA, 25 bp, Homo sapien
gcagggcctcggttgaagtgagcag

SEQ ID NO: 1506436 - DNA, 25 bp, Homo sapien
cttgttcttaacctcggctgacagc

SEQ ID NO: 1506437 - DNA, 25 bp, Homo sapien
caaccatagcatgaaggtggtgtcc

SEQ ID NO: 1506438 - DNA, 25 bp, Homo sapien
tgggaccccagctatttgcctctcc

SEQ ID NO: 1506439 - DNA, 25 bp, Homo sapien
tccaggtatcttcctagctccacag

SEQ ID NO: 1506440 - DNA, 25 bp, Homo sapien
aggatctcccacactttcacggcgt

SEQ ID NO: 1506441 - DNA, 25 bp, Homo sapien
cccagggggccattccgggcattct

SEQ ID NO: 1506442 - DNA, 25 bp, Homo sapien
attccgggcattctgaggtttggca

SEQ ID NO: 1506443 - DNA, 25 bp, Homo sapien
ggccattccgggcattctgaggttt

SEQ ID NO: 1506444 - DNA, 25 bp, Homo sapien
cctctgagctagaggggtggcaccc

SEQ ID NO: 1506445 - DNA, 25 bp, Homo sapien
ccgctggtggtcatacttctgggcc

SEQ ID NO: 1506446 - DNA, 25 bp, Homo sapien
tcctgctcccgctggtggtcatact

SEQ ID NO: 1506447 - DNA, 25 bp, Homo sapien
ctttgaggccgtccatgaagttgtt

SEQ ID NO: 1506448 - DNA, 25 bp, Homo sapien
tgttgccgatgcgacggcctgtcac

SEQ ID NO: 1506449 - DNA, 25 bp, Homo sapien
ccgagattgtgtctctgcactgcag

SEQ ID NO: 1506450 - DNA, 25 bp, Homo sapien
agccgagattgtgtctctgcactgc

SEQ ID NO: 1506451 - DNA, 25 bp, Homo sapien
ccagggcctcctttaattattgctg

SEQ ID NO: 1506452 - DNA, 25 bp, Homo sapien
cctgggcaacagaacaagactgtat

SEQ ID NO: 1506453 - DNA, 25 bp, Homo sapien
aagaagaagaaggtcgggcgaggtg

SEQ ID NO: 1506454 - DNA, 25 bp, Homo sapien
agaagaagaaggtcgggcgaggtgg

SEQ ID NO: 1506455 - DNA, 25 bp, Homo sapien
tgtttcttgaacaccccaagcacga

SEQ ID NO: 1506456 - DNA, 25 bp, Homo sapien
tacctcacgcctttgcactggtggc

SEQ ID NO: 1506457 - DNA, 25 bp, Homo sapien
atttggtgctcgtcacgccagcctc

SEQ ID NO: 1506458 - DNA, 25 bp, Homo sapien
tccacttctgctcaatcatttggtg

SEQ ID NO: 1506459 - DNA, 25 bp, Homo sapien
attttgggttgactcattgatcttc

SEQ ID NO: 1506460 - DNA, 25 bp, Homo sapien
ttgggttgactcattgatcttcttc

SEQ ID NO: 1506461 - DNA, 25 bp, Homo sapien
ttttgggttgactcattgatcttct

SEQ ID NO: 1506462 - DNA, 25 bp, Homo sapien
aattttgggttgactcattgatctt

SEQ ID NO: 1506463 - DNA, 25 bp, Homo sapien
tatggttggtgttctcaaacaggtc

SEQ ID NO: 1506464 - DNA, 25 bp, Homo sapien
cctgtgtatggttggtgttctcaaa

SEQ ID NO: 1506465 - DNA, 25 bp, Homo sapien
gcctcaaaaatgtcgtggggcttca

SEQ ID NO: 1506466 - DNA, 25 bp, Homo sapien
gactgcacctgtgtatggttggtgt

SEQ ID NO: 1506467 - DNA, 25 bp, Homo sapien
tctctgcgtacttcactcccacgtt

SEQ ID NO: 1506468 - DNA, 25 bp, Homo sapien
tcaccttgtttcctttcgtcttcgc

SEQ ID NO: 1506469 - DNA, 25 bp, Homo sapien
tagcttccccggctcgaatttccgc

SEQ ID NO: 1506470 - DNA, 25 bp, Homo sapien
tgcagcccaatgatgttccgccctt

SEQ ID NO: 1506471 - DNA, 25 bp, Homo sapien
ctgatggtcgcctggtccagaggct

SEQ ID NO: 1506472 - DNA, 25 bp, Homo sapien
gccgggtgccataggccgtcatgcc

SEQ ID NO: 1506473 - DNA, 25 bp, Homo sapien
ggtcgtagaggtggcgccgggtgcc

SEQ ID NO: 1506474 - DNA, 25 bp, Homo sapien
ctgcaggctgatggtcgcctggtcc

SEQ ID NO: 1506475 - DNA, 25 bp, Homo sapien
ggctggctcctttgttggtgcccat

SEQ ID NO: 1506476 - DNA, 25 bp, Homo sapien
tggctggctcctttgttggtgccca

SEQ ID NO: 1506477 - DNA, 25 bp, Homo sapien
ctggctggctcctttgttggtgccc

SEQ ID NO: 1506478 - DNA, 25 bp, Homo sapien
gtagacctggcgtggcagcccatac

SEQ ID NO: 1506479 - DNA, 25 bp, Homo sapien
gcaggctgacattgagcgtgtcgca

SEQ ID NO: 1506480 - DNA, 25 bp, Homo sapien
ccggctcgaagatctgccgcttggt

SEQ ID NO: 1506481 - DNA, 25 bp, Homo sapien
tggtccctggcgcagtcatgccagc

SEQ ID NO: 1506482 - DNA, 25 bp, Homo sapien
ggcggaattgtagtagttgtgtgcg

SEQ ID NO: 1506483 - DNA, 25 bp, Homo sapien
aattgtagtagttgtgtgcgtggtg

SEQ ID NO: 1506484 - DNA, 25 bp, Homo sapien
ctaggcggaattgtagtagttgtgt

SEQ ID NO: 1506485 - DNA, 25 bp, Homo sapien
cggaattgtagtagttgtgtgcgtg

SEQ ID NO: 1506486 - DNA, 25 bp, Homo sapien
acacccggctctatgttggaccctg

SEQ ID NO: 1506487 - DNA, 25 bp, Homo sapien
tgtagcactacagagcggagggtcc

SEQ ID NO: 1506488 - DNA, 25 bp, Homo sapien
tagcgttgctcagtgcgtcctttgg

SEQ ID NO: 1506489 - DNA, 25 bp, Homo sapien
tctccaaactctaaccctgtagagg

SEQ ID NO: 1506490 - DNA, 25 bp, Homo sapien
aaaccgcgtgtgtccgctgggtctc

SEQ ID NO: 1506491 - DNA, 25 bp, Homo sapien
tcacatccacatagtatgccagtcg

SEQ ID NO: 1506492 - DNA, 25 bp, Homo sapien
gtcgctgcaaaccaaaccgcgtgtg

SEQ ID NO: 1506493 - DNA, 25 bp, Homo sapien
ggtctctgggcatgcagtttgctcc

SEQ ID NO: 1506494 - DNA, 25 bp, Homo sapien
agtgctctcattacaaacgccactg

SEQ ID NO: 1506495 - DNA, 25 bp, Homo sapien
catttattgtgctccagtgaaatag

SEQ ID NO: 1506496 - DNA, 25 bp, Homo sapien
cagccatttattgtgctccagtgaa

SEQ ID NO: 1506497 - DNA, 25 bp, Homo sapien
gccatttattgtgctccagtgaaat

SEQ ID NO: 1506498 - DNA, 25 bp, Homo sapien
ggacttgcggtagccaggccaaaag

SEQ ID NO: 1506499 - DNA, 25 bp, Homo sapien
ggtctccacgttccagcctcaactc

SEQ ID NO: 1506500 - DNA, 25 bp, Homo sapien
tctgtgcgcgggtcttctggtgtct

SEQ ID NO: 1506501 - DNA, 25 bp, Homo sapien
aagcgcctggaatccggtttacgag

SEQ ID NO: 1506502 - DNA, 25 bp, Homo sapien
tcttgtaccgtgtgcctagaggaat

SEQ ID NO: 1506503 - DNA, 25 bp, Homo sapien
taccgtgtgcctagaggaattccag

SEQ ID NO: 1506504 - DNA, 25 bp, Homo sapien
ccgcaacaccggagtcatctcttgt

SEQ ID NO: 1506505 - DNA, 25 bp, Homo sapien
gagtcatctcttgtaccgtgtgcct

SEQ ID NO: 1506506 - DNA, 25 bp, Homo sapien
gatggggttagagcctcgtctcacc

SEQ ID NO: 1506507 - DNA, 25 bp, Homo sapien
gggaccacggtgcaagtcccagacc

SEQ ID NO: 1506508 - DNA, 25 bp, Homo sapien
catccagagtgggacagggaattgt

SEQ ID NO: 1506509 - DNA, 25 bp, Homo sapien
ctcctgcatcaggactgagggcctc

SEQ ID NO: 1506510 - DNA, 25 bp, Homo sapien
cagggcctatttgctgggctgtccg

SEQ ID NO: 1506511 - DNA, 25 bp, Homo sapien
aagtcactatctcccgggtgaacgg

SEQ ID NO: 1506512 - DNA, 25 bp, Homo sapien
tccggcaggagtcggaagtcactat

SEQ ID NO: 1506513 - DNA, 25 bp, Homo sapien
tgctatttgagtacgcgtgcgctca

SEQ ID NO: 1506514 - DNA, 25 bp, Homo sapien
tgaactttttagtttgagtagagcg

SEQ ID NO: 1506515 - DNA, 25 bp, Homo sapien
ccctgattcagccataaggttattt

SEQ ID NO: 1506516 - DNA, 25 bp, Homo sapien
gagcgagttagaacagcagcctctc

SEQ ID NO: 1506517 - DNA, 25 bp, Homo sapien
tagagcgtcttccatgcttacaagc

SEQ ID NO: 1506518 - DNA, 25 bp, Homo sapien
cagcctgtccactcaacctcatcta

SEQ ID NO: 1506519 - DNA, 25 bp, Homo sapien
catctactacaatctgggcactcaa

SEQ ID NO: 1506520 - DNA, 25 bp, Homo sapien
aaaatgtggtctgcggatcagcagc

SEQ ID NO: 1506521 - DNA, 25 bp, Homo sapien
ggcccacgaggctccatggaatctg

SEQ ID NO: 1506522 - DNA, 25 bp, Homo sapien
actcctgtcttcacgtgattcgcac

SEQ ID NO: 1506523 - DNA, 25 bp, Homo sapien
tcctgtcttcacgtgattcgcacac

SEQ ID NO: 1506524 - DNA, 25 bp, Homo sapien
ctgtcttcacgtgattcgcacacct

SEQ ID NO: 1506525 - DNA, 25 bp, Homo sapien
tcttcacgtgattcgcacacctcgg

SEQ ID NO: 1506526 - DNA, 25 bp, Homo sapien
cctaggcagcagagtaaggccccgt

SEQ ID NO: 1506527 - DNA, 25 bp, Homo sapien
ctaggcagcagagtaaggccccgtc

SEQ ID NO: 1506528 - DNA, 25 bp, Homo sapien
taggcagcagagtaaggccccgtct

SEQ ID NO: 1506529 - DNA, 25 bp, Homo sapien
cagccatttttggaaagatgccttt

SEQ ID NO: 1506530 - DNA, 25 bp, Homo sapien
agccatttttggaaagatgcctttt

SEQ ID NO: 1506531 - DNA, 25 bp, Homo sapien
gccatttttggaaagatgcctttta

SEQ ID NO: 1506532 - DNA, 25 bp, Homo sapien
tcagccatttttggaaagatgcctt

SEQ ID NO: 1506533 - DNA, 25 bp, Homo sapien
cagaggtcaccatcatagcccaagg

SEQ ID NO: 1506534 - DNA, 25 bp, Homo sapien
tctaggaagtggcagtccctcaatc

SEQ ID NO: 1506535 - DNA, 25 bp, Homo sapien
cacaacagtctagggaggtcacagc

SEQ ID NO: 1506536 - DNA, 25 bp, Homo sapien
tggacggcttaaccactgtgaccaa

SEQ ID NO: 1506537 - DNA, 25 bp, Homo sapien
tctttaagaccaggctgccgaggcg

SEQ ID NO: 1506538 - DNA, 25 bp, Homo sapien
tctgaggcccgatctccactgttgg

SEQ ID NO: 1506539 - DNA, 25 bp, Homo sapien
tatgggactgaagactcactgggtg

SEQ ID NO: 1506540 - DNA, 25 bp, Homo sapien
ggctatctgcgcttccactatggga

SEQ ID NO: 1506541 - DNA, 25 bp, Homo sapien
taagtgctctacctatgaaatagga

SEQ ID NO: 1506542 - DNA, 25 bp, Homo sapien
cctaaaagtcaggaaattgaagcca

SEQ ID NO: 1506543 - DNA, 25 bp, Homo sapien
caaggtgactctgtggttagggcca

SEQ ID NO: 1506544 - DNA, 25 bp, Homo sapien
tagggccagatcgagccctggacct

SEQ ID NO: 1506545 - DNA, 25 bp, Homo sapien
cacgtgagaacacaggcgtgcatcg

SEQ ID NO: 1506546 - DNA, 25 bp, Homo sapien
caacaccatcaggtacagagccgag

SEQ ID NO: 1506547 - DNA, 25 bp, Homo sapien
caggctcagcatacatgtctgcagc

SEQ ID NO: 1506548 - DNA, 25 bp, Homo sapien
cgtgcatcgcagacaagccacacag

SEQ ID NO: 1506549 - DNA, 25 bp, Homo sapien
gaagagcttattcagcaccctggag

SEQ ID NO: 1506550 - DNA, 25 bp, Homo sapien
gagagatagccaagaacgcacaggt

SEQ ID NO: 1506551 - DNA, 25 bp, Homo sapien
caatgggtgacctcagtatctgact

SEQ ID NO: 1506552 - DNA, 25 bp, Homo sapien
tctgagacagtcaagcaatgcggag

SEQ ID NO: 1506553 - DNA, 25 bp, Homo sapien
gagttaaaagcagctctggtgccct

SEQ ID NO: 1506554 - DNA, 25 bp, Homo sapien
cttgccgtgggtagaatcatattgg

SEQ ID NO: 1506555 - DNA, 25 bp, Homo sapien
tctcagctttgatggtgccgcggaa

SEQ ID NO: 1506556 - DNA, 25 bp, Homo sapien
tgtcttcactttcaccacggtgtct

SEQ ID NO: 1506557 - DNA, 25 bp, Homo sapien
cctttggctgcccatcctaagcgag

SEQ ID NO: 1506558 - DNA, 25 bp, Homo sapien
gatccctttggctgcccatcctaag

SEQ ID NO: 1506559 - DNA, 25 bp, Homo sapien
gccagcatcgtcacccaatttgatt

SEQ ID NO: 1506560 - DNA, 25 bp, Homo sapien
gaggtttttgtatctctcatggttc

SEQ ID NO: 1506561 - DNA, 25 bp, Homo sapien
caacacattggtggcagggactcgg

SEQ ID NO: 1506562 - DNA, 25 bp, Homo sapien
cctgttcagtgcaggaatttgccca

SEQ ID NO: 1506563 - DNA, 25 bp, Homo sapien
aggtcgggtcaaccaccaacacatt

SEQ ID NO: 1506564 - DNA, 25 bp, Homo sapien
tgcagggatgatgtttgtcacgcca

SEQ ID NO: 1506565 - DNA, 25 bp, Homo sapien
tagcccgggatgcccttgagggggc

SEQ ID NO: 1506566 - DNA, 25 bp, Homo sapien
tcaatgtagcccgggatgcccttga

SEQ ID NO: 1506567 - DNA, 25 bp, Homo sapien
cttgagggggcccccccaatgcctg

SEQ ID NO: 1506568 - DNA, 25 bp, Homo sapien
aatgtagcccgggatgcccttgagg

SEQ ID NO: 1506569 - DNA, 25 bp, Homo sapien
ttgatggtggagacgatggatgttt

SEQ ID NO: 1506570 - DNA, 25 bp, Homo sapien
ggtggagacgatggatgtttttact

SEQ ID NO: 1506571 - DNA, 25 bp, Homo sapien
ctggtggatatctgagaggatgtgg

SEQ ID NO: 1506572 - DNA, 25 bp, Homo sapien
gggctagagctggtggatatctgag

SEQ ID NO: 1506573 - DNA, 25 bp, Homo sapien
taaccatggaatcagtgggcaccgg

SEQ ID NO: 1506574 - DNA, 25 bp, Homo sapien
tcaggtaaccatggaatcagtgggc

SEQ ID NO: 1506575 - DNA, 25 bp, Homo sapien
caggtaaccatggaatcagtgggca

SEQ ID NO: 1506576 - DNA, 25 bp, Homo sapien
ggtaaccatggaatcagtgggcacc

SEQ ID NO: 1506577 - DNA, 25 bp, Homo sapien
tgcggcggagacaccttgggcctct

SEQ ID NO: 1506578 - DNA, 25 bp, Homo sapien
tacgactcccgcgacctgtacaggt

SEQ ID NO: 1506579 - DNA, 25 bp, Homo sapien
gtcgccagaaacaaaggctccgtag

SEQ ID NO: 1506580 - DNA, 25 bp, Homo sapien
acggcgcgacagaggctgcggcgga

SEQ ID NO: 1506581 - DNA, 25 bp, Homo sapien
taacctggaacagaggtacgtctga

SEQ ID NO: 1506582 - DNA, 25 bp, Homo sapien
ggctgcgctaacctggaacagaggt

SEQ ID NO: 1506583 - DNA, 25 bp, Homo sapien
ggtacgtctgactcaagtttcacat

SEQ ID NO: 1506584 - DNA, 25 bp, Homo sapien
tgaacaaatcttttgcaggggacaa

SEQ ID NO: 1506585 - DNA, 25 bp, Homo sapien
ggctgagacatatgatagaccatct

SEQ ID NO: 1506586 - DNA, 25 bp, Homo sapien
tactcagaaaaacccaggtatgctg

SEQ ID NO: 1506587 - DNA, 25 bp, Homo sapien
tgagccaacagattatggctgagac

SEQ ID NO: 1506588 - DNA, 25 bp, Homo sapien
ccttcatgtccaggaaagaacgcat

SEQ ID NO: 1506589 - DNA, 25 bp, Homo sapien
tatgctcagggaattgctcttaaca

SEQ ID NO: 1506590 - DNA, 25 bp, Homo sapien
aacttcatcagttctcacagtgaag

SEQ ID NO: 1506591 - DNA, 25 bp, Homo sapien
aaatgtgtgagctctacctccagaa

SEQ ID NO: 1506592 - DNA, 25 bp, Homo sapien
tcctgcttatggcaggaagagggta

SEQ ID NO: 1506593 - DNA, 25 bp, Homo sapien
ctacagaagccaggttcctgaaggt

SEQ ID NO: 1506594 - DNA, 25 bp, Homo sapien
cctgaaggtttcccgcatcacatcc

SEQ ID NO: 1506595 - DNA, 25 bp, Homo sapien
gttcctgaaggtttcccgcatcaca

SEQ ID NO: 1506596 - DNA, 25 bp, Homo sapien
gaaggtttcccgcatcacatccctg

SEQ ID NO: 1506597 - DNA, 25 bp, Homo sapien
ctcctgggaattttgaatgggtctt

SEQ ID NO: 1506598 - DNA, 25 bp, Homo sapien
tcctgggaattttgaatgggtcttc

SEQ ID NO: 1506599 - DNA, 25 bp, Homo sapien
ctgggaattttgaatgggtcttcaa

SEQ ID NO: 1506600 - DNA, 25 bp, Homo sapien
gggaattttgaatgggtcttcaatg

SEQ ID NO: 1506601 - DNA, 25 bp, Homo sapien
tcgtgacttcgaacagaactggcgc

SEQ ID NO: 1506602 - DNA, 25 bp, Homo sapien
gaactggcgcacctaaaggctttac

SEQ ID NO: 1506603 - DNA, 25 bp, Homo sapien
gatgataactcaaggctcgtccaca

SEQ ID NO: 1506604 - DNA, 25 bp, Homo sapien
ggatgagtcctttcacgtactggaa

SEQ ID NO: 1506605 - DNA, 25 bp, Homo sapien
tgtgggtcctttcatggattcgaaa

SEQ ID NO: 1506606 - DNA, 25 bp, Homo sapien
aatgaactggggaaatcaaaggctt

SEQ ID NO: 1506607 - DNA, 25 bp, Homo sapien
tggattcgaaatgaactggggaaat

SEQ ID NO: 1506608 - DNA, 25 bp, Homo sapien
tttcatgttttcgaaacgaactgga

SEQ ID NO: 1506609 - DNA, 25 bp, Homo sapien
gaaagtaagtggatcgactgaaggc

SEQ ID NO: 1506610 - DNA, 25 bp, Homo sapien
agcgttagggttagggttctcatag

SEQ ID NO: 1506611 - DNA, 25 bp, Homo sapien
gaactgggacaactgaagcgttagg

SEQ ID NO: 1506612 - DNA, 25 bp, Homo sapien
gattcggaagtaactggaacgactg

SEQ ID NO: 1506613 - DNA, 25 bp, Homo sapien
tgtatgcacatggttaacgctgact

SEQ ID NO: 1506614 - DNA, 25 bp, Homo sapien
tctgcggtctttagcaagagagcac

SEQ ID NO: 1506615 - DNA, 25 bp, Homo sapien
tgtggaagcctatcacctccgagaa

SEQ ID NO: 1506616 - DNA, 25 bp, Homo sapien
ttgacaacaggtatggtctctgcgg

SEQ ID NO: 1506617 - DNA, 25 bp, Homo sapien
catacagtcatggtttggttgctga

SEQ ID NO: 1506618 - DNA, 25 bp, Homo sapien
tatcctgtgatacctgggcttttga

SEQ ID NO: 1506619 - DNA, 25 bp, Homo sapien
tctgacaggcaatgactccaccctt

SEQ ID NO: 1506620 - DNA, 25 bp, Homo sapien
ccctctctaatccaaatgactgtag

SEQ ID NO: 1506621 - DNA, 25 bp, Homo sapien
tcaaggccaataatcaggctcagct

SEQ ID NO: 1506622 - DNA, 25 bp, Homo sapien
tatgctgtcaacagagcatcaggac

SEQ ID NO: 1506623 - DNA, 25 bp, Homo sapien
ccttccaaaagtggtggccctctgg

SEQ ID NO: 1506624 - DNA, 25 bp, Homo sapien
ggtttatgaacactctttgggcctg

SEQ ID NO: 1506625 - DNA, 25 bp, Homo sapien
cgcaggagtctatatgggatcaaac

SEQ ID NO: 1506626 - DNA, 25 bp, Homo sapien
tccaaaggatgcagtctcacaagcc

SEQ ID NO: 1506627 - DNA, 25 bp, Homo sapien
tcagtccaataggtccaaggcgggt

SEQ ID NO: 1506628 - DNA, 25 bp, Homo sapien
cctggtgtgaaccaaatggccaact

SEQ ID NO: 1506629 - DNA, 25 bp, Homo sapien
aggttccagcccgaccgagcaggga

SEQ ID NO: 1506630 - DNA, 25 bp, Homo sapien
cggttcctacctacacctccggctg

SEQ ID NO: 1506631 - DNA, 25 bp, Homo sapien
agcgcgggtgacagagaagacgccg

SEQ ID NO: 1506632 - DNA, 25 bp, Homo sapien
cctccggctgccagtacaggttcca

SEQ ID NO: 1506633 - DNA, 25 bp, Homo sapien
aaactataatattcaacacaccaca

SEQ ID NO: 1506634 - DNA, 25 bp, Homo sapien
taacacacatgaaggattttgaaac

SEQ ID NO: 1506635 - DNA, 25 bp, Homo sapien
ctaacacacatgaaggattttgaaa

SEQ ID NO: 1506636 - DNA, 25 bp, Homo sapien
ttgaaactataatattcaacacacc

SEQ ID NO: 1506637 - DNA, 25 bp, Homo sapien
agtttcttctgggacggatccagca

SEQ ID NO: 1506638 - DNA, 25 bp, Homo sapien
gacatcaggttcctgatgatttccc

SEQ ID NO: 1506639 - DNA, 25 bp, Homo sapien
ctacagacatcaggttcctgatgat

SEQ ID NO: 1506640 - DNA, 25 bp, Homo sapien
tcaggttcctgatgatttcccacat

SEQ ID NO: 1506641 - DNA, 25 bp, Homo sapien
caatgttccggtcttcccattttat

SEQ ID NO: 1506642 - DNA, 25 bp, Homo sapien
ttttgtactgatcttcaatgttccg

SEQ ID NO: 1506643 - DNA, 25 bp, Homo sapien
gatttctcctggaatttttgtactg

SEQ ID NO: 1506644 - DNA, 25 bp, Homo sapien
cttggatttctcctggaatttttgt

SEQ ID NO: 1506645 - DNA, 25 bp, Homo sapien
gatgaatgatccacgttgccttctc

SEQ ID NO: 1506646 - DNA, 25 bp, Homo sapien
tgttcctgacactcatacggtttgt

SEQ ID NO: 1506647 - DNA, 25 bp, Homo sapien
ctaccctgtatcttcgaacggtttg

SEQ ID NO: 1506648 - DNA, 25 bp, Homo sapien
tcagagatgaatgatccacgttgcc

SEQ ID NO: 1506649 - DNA, 25 bp, Homo sapien
gcaacaggataacggaaggcttccc

SEQ ID NO: 1506650 - DNA, 25 bp, Homo sapien
tactcgaagtgaactggaatatctg

SEQ ID NO: 1506651 - DNA, 25 bp, Homo sapien
ctatgaaaggtcgtgggatgactga

SEQ ID NO: 1506652 - DNA, 25 bp, Homo sapien
cagtgtgggtaattttatgtctacg

SEQ ID NO: 1506653 - DNA, 25 bp, Homo sapien
ccaagtggctatggcggttccagca

SEQ ID NO: 1506654 - DNA, 25 bp, Homo sapien
ggccaatactttgcaaaaccacgaa

SEQ ID NO: 1506655 - DNA, 25 bp, Homo sapien
ccctatggcggtggaggccaatact

SEQ ID NO: 1506656 - DNA, 25 bp, Homo sapien
gaagctacaggttacaatagatttg

SEQ ID NO: 1506657 - DNA, 25 bp, Homo sapien
gaccagcgggtaatgtttgagtccg

SEQ ID NO: 1506658 - DNA, 25 bp, Homo sapien
ggcaagattaccaaggaccagcggg

SEQ ID NO: 1506659 - DNA, 25 bp, Homo sapien
taaagaactattggatgaagctcaa

SEQ ID NO: 1506660 - DNA, 25 bp, Homo sapien
tttgagtccgatggatgggatcctt

SEQ ID NO: 1506661 - DNA, 25 bp, Homo sapien
tcattaagtaaacacaaacttaagc

SEQ ID NO: 1506662 - DNA, 25 bp, Homo sapien
acttatccacggtcacaaattcttc

SEQ ID NO: 1506663 - DNA, 25 bp, Homo sapien
cacataacaggaaacgaacttatcc

SEQ ID NO: 1506664 - DNA, 25 bp, Homo sapien
taggtgttgctaaatgctgtcccac

SEQ ID NO: 1506665 - DNA, 25 bp, Homo sapien
ttttaggtgttgctaaatgctgtcc

SEQ ID NO: 1506666 - DNA, 25 bp, Homo sapien
aaaagtctgtggcaccttgccctgc

SEQ ID NO: 1506667 - DNA, 25 bp, Homo sapien
tgaatgtaagcaggctaaatgcccc

SEQ ID NO: 1506668 - DNA, 25 bp, Homo sapien
gcaatggcacccttaggctcaaagt

SEQ ID NO: 1506669 - DNA, 25 bp, Homo sapien
cttctctggccgtgtgaactgctgc

SEQ ID NO: 1506670 - DNA, 25 bp, Homo sapien
gaatatattcagtaaagtgacagcc

SEQ ID NO: 1506671 - DNA, 25 bp, Homo sapien
aatatattcagtaaagtgacagcca

SEQ ID NO: 1506672 - DNA, 25 bp, Homo sapien
tatattcagtaaagtgacagccaac

SEQ ID NO: 1506673 - DNA, 25 bp, Homo sapien
atatattcagtaaagtgacagccaa

SEQ ID NO: 1506674 - DNA, 25 bp, Homo sapien
tgtagagattcttctgggaaggacc

SEQ ID NO: 1506675 - DNA, 25 bp, Homo sapien
gaaggtttcccacatcacatctctg

SEQ ID NO: 1506676 - DNA, 25 bp, Homo sapien
ctacagacatcaggttcctgaaggt

SEQ ID NO: 1506677 - DNA, 25 bp, Homo sapien
tcctgaaggtttcccacatcacatc

SEQ ID NO: 1506678 - DNA, 25 bp, Homo sapien
tttggaattattgtactgatcttca

SEQ ID NO: 1506679 - DNA, 25 bp, Homo sapien
caatgatctggtcttcacattttat

SEQ ID NO: 1506680 - DNA, 25 bp, Homo sapien
tcttttggaattattgtactgatct

SEQ ID NO: 1506681 - DNA, 25 bp, Homo sapien
gatcttcaatgatctggtcttcaca

SEQ ID NO: 1506682 - DNA, 25 bp, Homo sapien
gcaatagctgaaggttttcacacac

SEQ ID NO: 1506683 - DNA, 25 bp, Homo sapien
gatttgactccagtaaaagtcgtct

SEQ ID NO: 1506684 - DNA, 25 bp, Homo sapien
ggcttctatgttgctgacactcatc

SEQ ID NO: 1506685 - DNA, 25 bp, Homo sapien
cgtcttcactataccatttggaaca

SEQ ID NO: 1506686 - DNA, 25 bp, Homo sapien
tttccacgttctgcattcatagggt

SEQ ID NO: 1506687 - DNA, 25 bp, Homo sapien
ggaactaaaacaatcaaatgctttc

SEQ ID NO: 1506688 - DNA, 25 bp, Homo sapien
gtgaaccccttcatgactatgaaag

SEQ ID NO: 1506689 - DNA, 25 bp, Homo sapien
ctttcatgtgtaagatataaatgta

SEQ ID NO: 1506690 - DNA, 25 bp, Homo sapien
ggtcaccagtgtgtcataccctgtg

SEQ ID NO: 1506691 - DNA, 25 bp, Homo sapien
taccctgtgccttccaaagactgga

SEQ ID NO: 1506692 - DNA, 25 bp, Homo sapien
gatgatgtgtactaggtaggtagcc

SEQ ID NO: 1506693 - DNA, 25 bp, Homo sapien
taacagtactggacgaatggaaggc

SEQ ID NO: 1506694 - DNA, 25 bp, Homo sapien
gcatgtatggattaactggcagacc

SEQ ID NO: 1506695 - DNA, 25 bp, Homo sapien
tattccacggctcataggacttgaa

SEQ ID NO: 1506696 - DNA, 25 bp, Homo sapien
aatgtgctaggaaaacccgttggca

SEQ ID NO: 1506697 - DNA, 25 bp, Homo sapien
tgctgtctgaggtgtgggtcaccca

SEQ ID NO: 1506698 - DNA, 25 bp, Homo sapien
tgtatttcaaggtttatagttttca

SEQ ID NO: 1506699 - DNA, 25 bp, Homo sapien
ccaatttggaaaatgtgtggctgat

SEQ ID NO: 1506700 - DNA, 25 bp, Homo sapien
tttcatccaatttggaaaatgtgtg

SEQ ID NO: 1506701 - DNA, 25 bp, Homo sapien
atttggaaaatgtgtggctgatttt

SEQ ID NO: 1506702 - DNA, 25 bp, Homo sapien
cagtgcgggtcccagcgagacagaa

SEQ ID NO: 1506703 - DNA, 25 bp, Homo sapien
gctgtcagtgcgggtcccagcgaga

SEQ ID NO: 1506704 - DNA, 25 bp, Homo sapien
tgtcagtgcgggtcccagcgagaca

SEQ ID NO: 1506705 - DNA, 25 bp, Homo sapien
ccgctgtcagtgcgggtcccagcga

SEQ ID NO: 1506706 - DNA, 25 bp, Homo sapien
cacacacgagtctgcctggtgacct

SEQ ID NO: 1506707 - DNA, 25 bp, Homo sapien
caagggattttctgtcggccctagg

SEQ ID NO: 1506708 - DNA, 25 bp, Homo sapien
tggtgacctgtcatcaccgtgcagc

SEQ ID NO: 1506709 - DNA, 25 bp, Homo sapien
tctttggaagactcgaaggcgaacg

SEQ ID NO: 1506710 - DNA, 25 bp, Homo sapien
ggtttctgatggtttcctgcatcac

SEQ ID NO: 1506711 - DNA, 25 bp, Homo sapien
gagactcttctgtgatggacccagc

SEQ ID NO: 1506712 - DNA, 25 bp, Homo sapien
acaggtgaagtttatagccacatcc

SEQ ID NO: 1506713 - DNA, 25 bp, Homo sapien
tatacagtccaggtttctgatggtt

SEQ ID NO: 1506714 - DNA, 25 bp, Homo sapien
tctctgctactcttgagacagcaag

SEQ ID NO: 1506715 - DNA, 25 bp, Homo sapien
gtctctgctactcttgagacagcaa

SEQ ID NO: 1506716 - DNA, 25 bp, Homo sapien
tctgagatctttgtactgatcttct

SEQ ID NO: 1506717 - DNA, 25 bp, Homo sapien
ttctgagatctttgtactgatcttc

SEQ ID NO: 1506718 - DNA, 25 bp, Homo sapien
cttctgagatctttgtactgatctt

SEQ ID NO: 1506719 - DNA, 25 bp, Homo sapien
gaaatgggaggaccattgagcacag

SEQ ID NO: 1506720 - DNA, 25 bp, Homo sapien
aggaacgcttaaggacaggagctgg

SEQ ID NO: 1506721 - DNA, 25 bp, Homo sapien
gcacaggagtccgaggctacagcga

SEQ ID NO: 1506722 - DNA, 25 bp, Homo sapien
aggaggaacgcttaaggacaggagc

SEQ ID NO: 1506723 - DNA, 25 bp, Homo sapien
gtacactcactgctttcccatggat

SEQ ID NO: 1506724 - DNA, 25 bp, Homo sapien
ggtaaagggtcctccacattgacta

SEQ ID NO: 1506725 - DNA, 25 bp, Homo sapien
tgaacgacccatgaggacgtctgta

SEQ ID NO: 1506726 - DNA, 25 bp, Homo sapien
gtagcaattaagagatgaacgaccc

SEQ ID NO: 1506727 - DNA, 25 bp, Homo sapien
caacttacatatacgaggtccatct

SEQ ID NO: 1506728 - DNA, 25 bp, Homo sapien
tcatgccttcgacataaactgggag

SEQ ID NO: 1506729 - DNA, 25 bp, Homo sapien
tgtgtcttcgaaaacctgtgcaatc

SEQ ID NO: 1506730 - DNA, 25 bp, Homo sapien
ggaaacgctgtagaacactgctcat

SEQ ID NO: 1506731 - DNA, 25 bp, Homo sapien
tttgaaggtaagtgcaacaaatgaa

SEQ ID NO: 1506732 - DNA, 25 bp, Homo sapien
tgtatttgaaggtaagtgcaacaaa

SEQ ID NO: 1506733 - DNA, 25 bp, Homo sapien
tgaaggtaagtgcaacaaatgaagg

SEQ ID NO: 1506734 - DNA, 25 bp, Homo sapien
taattggaagacctgaaggcttttc

SEQ ID NO: 1506735 - DNA, 25 bp, Homo sapien
gaactctttcgtgtattcgtaagta

SEQ ID NO: 1506736 - DNA, 25 bp, Homo sapien
ggtccatttccagtatgtgttatca

SEQ ID NO: 1506737 - DNA, 25 bp, Homo sapien
catgtctttgcactgaactgggata

SEQ ID NO: 1506738 - DNA, 25 bp, Homo sapien
gcactgggacaatggaatggtttcc

SEQ ID NO: 1506739 - DNA, 25 bp, Homo sapien
gagtcatttcatgtttatgaaagga

SEQ ID NO: 1506740 - DNA, 25 bp, Homo sapien
ctagtgagtcatttcatgtttatga

SEQ ID NO: 1506741 - DNA, 25 bp, Homo sapien
tcatgtttatgaaaggaactgatac

SEQ ID NO: 1506742 - DNA, 25 bp, Homo sapien
ttcatgtttatgaaaggaactgata

SEQ ID NO: 1506743 - DNA, 25 bp, Homo sapien
tactcgcaaactccacagatcctga

SEQ ID NO: 1506744 - DNA, 25 bp, Homo sapien
cagctgcaattatggagatgaaacc

SEQ ID NO: 1506745 - DNA, 25 bp, Homo sapien
taaggtacacatgagcatttcttgc

SEQ ID NO: 1506746 - DNA, 25 bp, Homo sapien
gcaacaaaggctccaggtcacttga

SEQ ID NO: 1506747 - DNA, 25 bp, Homo sapien
tgtagctattgtaaagaggactttc

SEQ ID NO: 1506748 - DNA, 25 bp, Homo sapien
ctgtagtataatctgaggtcaagta

SEQ ID NO: 1506749 - DNA, 25 bp, Homo sapien
catgcttgaggtcttgggtttaaac

SEQ ID NO: 1506750 - DNA, 25 bp, Homo sapien
ctggagacgttcctcaatgttttat

SEQ ID NO: 1506751 - DNA, 25 bp, Homo sapien
tatattgatttccaatcccacccag

SEQ ID NO: 1506752 - DNA, 25 bp, Homo sapien
atatcctggatattaatctattgtc

SEQ ID NO: 1506753 - DNA, 25 bp, Homo sapien
aaagctattttaattgaggtaagat

SEQ ID NO: 1506754 - DNA, 25 bp, Homo sapien
ctattttaattgaggtaagatgata

SEQ ID NO: 1506755 - DNA, 25 bp, Homo sapien
ggatccacattccttccgcagctgt

SEQ ID NO: 1506756 - DNA, 25 bp, Homo sapien
acattccttccgcagctgttctgag

SEQ ID NO: 1506757 - DNA, 25 bp, Homo sapien
tctcaggatccacattccttccgca

SEQ ID NO: 1506758 - DNA, 25 bp, Homo sapien
gatccacattccttccgcagctgtt

SEQ ID NO: 1506759 - DNA, 25 bp, Homo sapien
cagcaaggactggatgcagaacgca

SEQ ID NO: 1506760 - DNA, 25 bp, Homo sapien
caggtcacagcgcaggtgacagcgt

SEQ ID NO: 1506761 - DNA, 25 bp, Homo sapien
tgtcccggcgtcctctttatgactc

SEQ ID NO: 1506762 - DNA, 25 bp, Homo sapien
caggtgacagcgtcacaggagccgt

SEQ ID NO: 1506763 - DNA, 25 bp, Homo sapien
acaatctgggaagacgccgggctgc

SEQ ID NO: 1506764 - DNA, 25 bp, Homo sapien
gaagaaaggcgggacacatccgacc

SEQ ID NO: 1506765 - DNA, 25 bp, Homo sapien
gcaggatcctgttggttccacccag

SEQ ID NO: 1506766 - DNA, 25 bp, Homo sapien
accgagggccaagccacgccatggg

SEQ ID NO: 1506767 - DNA, 25 bp, Homo sapien
catgaccgggtgtttctcactcgga

SEQ ID NO: 1506768 - DNA, 25 bp, Homo sapien
ccacatacggcgacagcatcactgt

SEQ ID NO: 1506769 - DNA, 25 bp, Homo sapien
tttcaggttgacaagtccacatacg

SEQ ID NO: 1506770 - DNA, 25 bp, Homo sapien
tcttcaatcacaagccatgaccggg

SEQ ID NO: 1506771 - DNA, 25 bp, Homo sapien
gacaaactggaacctatgtacactg

SEQ ID NO: 1506772 - DNA, 25 bp, Homo sapien
caagggaacacactatcaacaaggg

SEQ ID NO: 1506773 - DNA, 25 bp, Homo sapien
taattgatgaagtgctgaaggctga

SEQ ID NO: 1506774 - DNA, 25 bp, Homo sapien
ctgtccaagggattgtaaaatggct

SEQ ID NO: 1506775 - DNA, 25 bp, Homo sapien
tgtttcctaggtaccccaatgtctc

SEQ ID NO: 1506776 - DNA, 25 bp, Homo sapien
tgtagcatcttttgtaacagagtcc

SEQ ID NO: 1506777 - DNA, 25 bp, Homo sapien
tctttttggtgaatccggagagaaa

SEQ ID NO: 1506778 - DNA, 25 bp, Homo sapien
gagtcctactaattcatgtgcagag

SEQ ID NO: 1506779 - DNA, 25 bp, Homo sapien
cgtgcctggcgtgccttgatcttag

SEQ ID NO: 1506780 - DNA, 25 bp, Homo sapien
aactatggagctgaattggccctcc

SEQ ID NO: 1506781 - DNA, 25 bp, Homo sapien
cctccagaactatggagctgaattg

SEQ ID NO: 1506782 - DNA, 25 bp, Homo sapien
accgtgcctggcgtgccttgatctt

SEQ ID NO: 1506783 - DNA, 25 bp, Homo sapien
ctctgtagagatcttctggaaagga

SEQ ID NO: 1506784 - DNA, 25 bp, Homo sapien
ctatacagatgaggttcgtgaaggt

SEQ ID NO: 1506785 - DNA, 25 bp, Homo sapien
gatgaggttcgtgaaggtttcctgc

SEQ ID NO: 1506786 - DNA, 25 bp, Homo sapien
tacagatgaggttcgtgaaggtttc

SEQ ID NO: 1506787 - DNA, 25 bp, Homo sapien
cagatgaggttcgtgaaggtttcct

SEQ ID NO: 1506788 - DNA, 25 bp, Homo sapien
tcatgtgttcgaaagcagtggctat

SEQ ID NO: 1506789 - DNA, 25 bp, Homo sapien
tatatcttcgaatgcttgcaggaga

SEQ ID NO: 1506790 - DNA, 25 bp, Homo sapien
gttcagcatgtcttccggaacctgg

SEQ ID NO: 1506791 - DNA, 25 bp, Homo sapien
tcatggattcgaacagaactgtgcc

SEQ ID NO: 1506792 - DNA, 25 bp, Homo sapien
tcctgaccagagcaaggtgttcctt

SEQ ID NO: 1506793 - DNA, 25 bp, Homo sapien
taagataggccaccagtgaatccca

SEQ ID NO: 1506794 - DNA, 25 bp, Homo sapien
gacacttcaagctgggagggatgct

SEQ ID NO: 1506795 - DNA, 25 bp, Homo sapien
gaatcaagaacaaggtcactaccag

SEQ ID NO: 1506796 - DNA, 25 bp, Homo sapien
taatagagcttctcagtatacaaaa

SEQ ID NO: 1506797 - DNA, 25 bp, Homo sapien
caagtacacaactgaaaaacagtga

SEQ ID NO: 1506798 - DNA, 25 bp, Homo sapien
atagagcttctcagtatacaaaaaa

SEQ ID NO: 1506799 - DNA, 25 bp, Homo sapien
gaaaaacatttgcaagtacacaact

SEQ ID NO: 1506800 - DNA, 25 bp, Homo sapien
ttgggcaacacagcaccataacagc

SEQ ID NO: 1506801 - DNA, 25 bp, Homo sapien
gcaagatttaacttcggggattata

SEQ ID NO: 1506802 - DNA, 25 bp, Homo sapien
ttagtactggtggttttgggcaaca

SEQ ID NO: 1506803 - DNA, 25 bp, Homo sapien
ggttttgggcaacacagcaccataa

SEQ ID NO: 1506804 - DNA, 25 bp, Homo sapien
caaaaacaggtccacaagtctggga

SEQ ID NO: 1506805 - DNA, 25 bp, Homo sapien
ggagcattttgtggaacagtgttca

SEQ ID NO: 1506806 - DNA, 25 bp, Homo sapien
tcagacacctgcagtgtgaagcagt

SEQ ID NO: 1506807 - DNA, 25 bp, Homo sapien
caaaaacgagggcattctgtaacca

SEQ ID NO: 1506808 - DNA, 25 bp, Homo sapien
gatcctgaccgctgtcggcgcagca

SEQ ID NO: 1506809 - DNA, 25 bp, Homo sapien
tagtccctctcgaagcaagaaagcc

SEQ ID NO: 1506810 - DNA, 25 bp, Homo sapien
tctggtggaggcacctagtccctct

SEQ ID NO: 1506811 - DNA, 25 bp, Homo sapien
aggttacagagcgacagaagctctg

SEQ ID NO: 1506812 - DNA, 25 bp, Homo sapien
gcgtggctcccgcgactagtgtagg

SEQ ID NO: 1506813 - DNA, 25 bp, Homo sapien
tgcgtggctcccgcgactagtgtag

SEQ ID NO: 1506814 - DNA, 25 bp, Homo sapien
ttccagggtgttccggcgtcctctg

SEQ ID NO: 1506815 - DNA, 25 bp, Homo sapien
ctgcgtggctcccgcgactagtgta

SEQ ID NO: 1506816 - DNA, 25 bp, Homo sapien
gtaaagttacgccttagaattcata

SEQ ID NO: 1506817 - DNA, 25 bp, Homo sapien
caaactgtcttgagctgcctcggga

SEQ ID NO: 1506818 - DNA, 25 bp, Homo sapien
taaggccacgcaaggcaaaggtaaa

SEQ ID NO: 1506819 - DNA, 25 bp, Homo sapien
agaatccctcaactacctgtgcctt

SEQ ID NO: 1506820 - DNA, 25 bp, Homo sapien
gattatttcgggttgacaagtccaa

SEQ ID NO: 1506821 - DNA, 25 bp, Homo sapien
tctttgcactgtactttccgactcg

SEQ ID NO: 1506822 - DNA, 25 bp, Homo sapien
gaactctcttgggatctgatcagga

SEQ ID NO: 1506823 - DNA, 25 bp, Homo sapien
tgatcaggacctcttttcccagtaa

SEQ ID NO: 1506824 - DNA, 25 bp, Homo sapien
cagctcagtttagtcttttacatag

SEQ ID NO: 1506825 - DNA, 25 bp, Homo sapien
tgccctactctgtaagagaggcttt

SEQ ID NO: 1506826 - DNA, 25 bp, Homo sapien
tagacagtacgttcctccacttgct

SEQ ID NO: 1506827 - DNA, 25 bp, Homo sapien
tgtcagcccacatgcacgtaggcac

SEQ ID NO: 1506828 - DNA, 25 bp, Homo sapien
tgtgctggtgggcgactatagtctc

SEQ ID NO: 1506829 - DNA, 25 bp, Homo sapien
gtgctggtgggcgactatagtctca

SEQ ID NO: 1506830 - DNA, 25 bp, Homo sapien
gattgtgagccatgcactgtatgtc

SEQ ID NO: 1506831 - DNA, 25 bp, Homo sapien
tttacaagggacaagcccacagagg

SEQ ID NO: 1506832 - DNA, 25 bp, Homo sapien
gaaacactcaagctgcaatctatga

SEQ ID NO: 1506833 - DNA, 25 bp, Homo sapien
ccaagaaacgctttggcccacaggt

SEQ ID NO: 1506834 - DNA, 25 bp, Homo sapien
taagagtcgatcctttctgaatgag

SEQ ID NO: 1506835 - DNA, 25 bp, Homo sapien
gggtgttacggcatgaatatttgca

SEQ ID NO: 1506836 - DNA, 25 bp, Homo sapien
tcacatattaataacctacccccaa

SEQ ID NO: 1506837 - DNA, 25 bp, Homo sapien
agaatagccaagatgctctatagag

SEQ ID NO: 1506838 - DNA, 25 bp, Homo sapien
aggcacacatcacaatgacgaggta

SEQ ID NO: 1506839 - DNA, 25 bp, Homo sapien
gccatgttgccgacactggaataat

SEQ ID NO: 1506840 - DNA, 25 bp, Homo sapien
tttttgtataggcaaagtttgccat

SEQ ID NO: 1506841 - DNA, 25 bp, Homo sapien
catcacaatgacgaggtaatttttt

SEQ ID NO: 1506842 - DNA, 25 bp, Homo sapien
aataagaaagtgaattaactatcat

SEQ ID NO: 1506843 - DNA, 25 bp, Homo sapien
taagaaagtgaattaactatcattc

SEQ ID NO: 1506844 - DNA, 25 bp, Homo sapien
aagaaagtgaattaactatcattcc

SEQ ID NO: 1506845 - DNA, 25 bp, Homo sapien
agaaagtgaattaactatcattcca

SEQ ID NO: 1506846 - DNA, 25 bp, Homo sapien
tcccgagtccaagctgtcctgctgc

SEQ ID NO: 1506847 - DNA, 25 bp, Homo sapien
cctggccagtcaagatgtttagaat

SEQ ID NO: 1506848 - DNA, 25 bp, Homo sapien
aatagggggaactatgctgggtacg

SEQ ID NO: 1506849 - DNA, 25 bp, Homo sapien
tgtttagaatagggggaactatgct

SEQ ID NO: 1506850 - DNA, 25 bp, Homo sapien
gctttggtcatcagatctctttctc

SEQ ID NO: 1506851 - DNA, 25 bp, Homo sapien
cctgtgtatacttactttcttccac

SEQ ID NO: 1506852 - DNA, 25 bp, Homo sapien
tgccgtggactccaaacacgtattc

SEQ ID NO: 1506853 - DNA, 25 bp, Homo sapien
gcactgggggcctagactctattcc

SEQ ID NO: 1506854 - DNA, 25 bp, Homo sapien
ccacatccttaaaagccactgggtc

SEQ ID NO: 1506855 - DNA, 25 bp, Homo sapien
ctggttcactaatggactgagggaa

SEQ ID NO: 1506856 - DNA, 25 bp, Homo sapien
actggttcactaatggactgaggga

SEQ ID NO: 1506857 - DNA, 25 bp, Homo sapien
tattcaatgttctggtctttccacc

SEQ ID NO: 1506858 - DNA, 25 bp, Homo sapien
tctcctggggttttggtgctcatat

SEQ ID NO: 1506859 - DNA, 25 bp, Homo sapien
ggggttttggtgctcatattcaatg

SEQ ID NO: 1506860 - DNA, 25 bp, Homo sapien
ggtgctcatattcaatgttctggtc

SEQ ID NO: 1506861 - DNA, 25 bp, Homo sapien
tttcatgtctacgataggatctggg

SEQ ID NO: 1506862 - DNA, 25 bp, Homo sapien
aactactgaacgttgcttgcattca

SEQ ID NO: 1506863 - DNA, 25 bp, Homo sapien
tgaaggaactactgaacgttgcttg

SEQ ID NO: 1506864 - DNA, 25 bp, Homo sapien
catgcattcaaaggattgacacagc

SEQ ID NO: 1506865 - DNA, 25 bp, Homo sapien
ggcttctctccattgtgtgtcctac

SEQ ID NO: 1506866 - DNA, 25 bp, Homo sapien
tagggcttctctccattgtgtgtcc

SEQ ID NO: 1506867 - DNA, 25 bp, Homo sapien
agggcttctctccattgtgtgtcct

SEQ ID NO: 1506868 - DNA, 25 bp, Homo sapien
gggcttctctccattgtgtgtccta

SEQ ID NO: 1506869 - DNA, 25 bp, Homo sapien
ctgggcagatccgaagggtttccca

SEQ ID NO: 1506870 - DNA, 25 bp, Homo sapien
cagatccgaagggtttcccacattc

SEQ ID NO: 1506871 - DNA, 25 bp, Homo sapien
ggcagatccgaagggtttcccacat

SEQ ID NO: 1506872 - DNA, 25 bp, Homo sapien
gggcagatccgaagggtttcccaca

SEQ ID NO: 1506873 - DNA, 25 bp, Homo sapien
gtgtttgtgtcctttcatgaattcg

SEQ ID NO: 1506874 - DNA, 25 bp, Homo sapien
tatgtgtgtttgtgtcctttcatga

SEQ ID NO: 1506875 - DNA, 25 bp, Homo sapien
tgtgtttgtgtcctttcatgaattc

SEQ ID NO: 1506876 - DNA, 25 bp, Homo sapien
tgtgtgtttgtgtcctttcatgaat

SEQ ID NO: 1506877 - DNA, 25 bp, Homo sapien
tttataaggtctctctacagagtgc

SEQ ID NO: 1506878 - DNA, 25 bp, Homo sapien
ttataaggtctctctacagagtgca

SEQ ID NO: 1506879 - DNA, 25 bp, Homo sapien
catttataaggtctctctacagagt

SEQ ID NO: 1506880 - DNA, 25 bp, Homo sapien
tacatttataaggtctctctacaga

SEQ ID NO: 1506881 - DNA, 25 bp, Homo sapien
ttggcagaataaaagcccctcccac

SEQ ID NO: 1506882 - DNA, 25 bp, Homo sapien
cttggcagaataaaagcccctccca

SEQ ID NO: 1506883 - DNA, 25 bp, Homo sapien
ggcagaataaaagcccctcccacat

SEQ ID NO: 1506884 - DNA, 25 bp, Homo sapien
cagaataaaagcccctcccacatat

SEQ ID NO: 1506885 - DNA, 25 bp, Homo sapien
tgtgtccttttatgaaatcgaagat

SEQ ID NO: 1506886 - DNA, 25 bp, Homo sapien
gtgtgtccttttatgaaatcgaaga

SEQ ID NO: 1506887 - DNA, 25 bp, Homo sapien
gtgtccttttatgaaatcgaagatt

SEQ ID NO: 1506888 - DNA, 25 bp, Homo sapien
cctttcatgtatttgcaaagaagag

SEQ ID NO: 1506889 - DNA, 25 bp, Homo sapien
gcaaagaagagaaattatggaatgc

SEQ ID NO: 1506890 - DNA, 25 bp, Homo sapien
agaaattatggaatgcttttctaca

SEQ ID NO: 1506891 - DNA, 25 bp, Homo sapien
aaagaagagaaattatggaatgctt

SEQ ID NO: 1506892 - DNA, 25 bp, Homo sapien
tgaaaggaagtaggcaagctgaatg

SEQ ID NO: 1506893 - DNA, 25 bp, Homo sapien
tatgaaaggaagtaggcaagctgaa

SEQ ID NO: 1506894 - DNA, 25 bp, Homo sapien
atgaaaggaagtaggcaagctgaat

SEQ ID NO: 1506895 - DNA, 25 bp, Homo sapien
gcattcatagtgtttccttccagtg

SEQ ID NO: 1506896 - DNA, 25 bp, Homo sapien
cttgcattcatagtgtttccttcca

SEQ ID NO: 1506897 - DNA, 25 bp, Homo sapien
tgcttgcattcatagtgtttccttc

SEQ ID NO: 1506898 - DNA, 25 bp, Homo sapien
attcatagtgtttccttccagtgtg

SEQ ID NO: 1506899 - DNA, 25 bp, Homo sapien
attgaagggaactagaagaaatgaa

SEQ ID NO: 1506900 - DNA, 25 bp, Homo sapien
agaatcttgtcaggtctgaacgctt

SEQ ID NO: 1506901 - DNA, 25 bp, Homo sapien
gaatcttgtcaggtctgaacgcttt

SEQ ID NO: 1506902 - DNA, 25 bp, Homo sapien
aatcttgtcaggtctgaacgctttc

SEQ ID NO: 1506903 - DNA, 25 bp, Homo sapien
atcttgtcaggtctgaacgctttcc

SEQ ID NO: 1506904 - DNA, 25 bp, Homo sapien
tattgttggagagacacgtgtcaca

SEQ ID NO: 1506905 - DNA, 25 bp, Homo sapien
tgatctaatacatgacaccaatggg

SEQ ID NO: 1506906 - DNA, 25 bp, Homo sapien
gaagaaggcactcagaggtgcatga

SEQ ID NO: 1506907 - DNA, 25 bp, Homo sapien
caaaaacaggtccaggagtttacag

SEQ ID NO: 1506908 - DNA, 25 bp, Homo sapien
ttgtcattggccattccaacactgt

SEQ ID NO: 1506909 - DNA, 25 bp, Homo sapien
attgtcattggccattccaacactg

SEQ ID NO: 1506910 - DNA, 25 bp, Homo sapien
tgtcattggccattccaacactgtg

SEQ ID NO: 1506911 - DNA, 25 bp, Homo sapien
ttcccacctattctctatgagggag

SEQ ID NO: 1506912 - DNA, 25 bp, Homo sapien
gcagcatttcccacctattctctat

SEQ ID NO: 1506913 - DNA, 25 bp, Homo sapien
aaccctgtctgggtatggcggctca

SEQ ID NO: 1506914 - DNA, 25 bp, Homo sapien
accctgtctgggtatggcggctcat

SEQ ID NO: 1506915 - DNA, 25 bp, Homo sapien
aacaaatgctatataagactaatga

SEQ ID NO: 1506916 - DNA, 25 bp, Homo sapien
ggccaaggcttgtggataacaaggc

SEQ ID NO: 1506917 - DNA, 25 bp, Homo sapien
tgcaatgccccgagatcacaccaat

SEQ ID NO: 1506918 - DNA, 25 bp, Homo sapien
caaggcttgtggataacaaggccag

SEQ ID NO: 1506919 - DNA, 25 bp, Homo sapien
ggctatcctcaaactatgtgctcag

SEQ ID NO: 1506920 - DNA, 25 bp, Homo sapien
ccttgaaatttggtagctgcaacct

SEQ ID NO: 1506921 - DNA, 25 bp, Homo sapien
tgcaccggccttgtatggaaaatgt

SEQ ID NO: 1506922 - DNA, 25 bp, Homo sapien
cattttgccctatagaagagaagac

SEQ ID NO: 1506923 - DNA, 25 bp, Homo sapien
gacccacaacttcacggagcagcat

SEQ ID NO: 1506924 - DNA, 25 bp, Homo sapien
gtgacccacaacttcacggagcagc

SEQ ID NO: 1506925 - DNA, 25 bp, Homo sapien
tgacccacaacttcacggagcagca

SEQ ID NO: 1506926 - DNA, 25 bp, Homo sapien
aggtacaaattgggccttatggcaa

SEQ ID NO: 1506927 - DNA, 25 bp, Homo sapien
gttgtaattatgtcatagagatgaa

SEQ ID NO: 1506928 - DNA, 25 bp, Homo sapien
ctttagagggtagagctgtgagttg

SEQ ID NO: 1506929 - DNA, 25 bp, Homo sapien
attgggccttatggcaaacacagtg

SEQ ID NO: 1506930 - DNA, 25 bp, Homo sapien
acaaagaagtcatcgatgaggaggg

SEQ ID NO: 1506931 - DNA, 25 bp, Homo sapien
tggctatcataatttgggacgtgaa

SEQ ID NO: 1506932 - DNA, 25 bp, Homo sapien
tcataatttgggacgtgaaaacttg

SEQ ID NO: 1506933 - DNA, 25 bp, Homo sapien
cttggattccgtgggaatttatgaa

SEQ ID NO: 1506934 - DNA, 25 bp, Homo sapien
tgacagagcgacagaaatctgggta

SEQ ID NO: 1506935 - DNA, 25 bp, Homo sapien
cttcggggccaaggccgcagtcgac

SEQ ID NO: 1506936 - DNA, 25 bp, Homo sapien
caaggccgcagtcgacgggcaggga

SEQ ID NO: 1506937 - DNA, 25 bp, Homo sapien
acccgagtcgaaatccgcgcatgac

SEQ ID NO: 1506938 - DNA, 25 bp, Homo sapien
ccgctgctcctcctacggacgaaat

SEQ ID NO: 1506939 - DNA, 25 bp, Homo sapien
taaacatgaagggtgctagaagctc

SEQ ID NO: 1506940 - DNA, 25 bp, Homo sapien
gggcccacgttcactacaagcaaga

SEQ ID NO: 1506941 - DNA, 25 bp, Homo sapien
tatactgaggacaatcactccctgg

SEQ ID NO: 1506942 - DNA, 25 bp, Homo sapien
gaattcctgcaaggcctagagagcc

SEQ ID NO: 1506943 - DNA, 25 bp, Homo sapien
cagacactaagatgctgcaggaggt

SEQ ID NO: 1506944 - DNA, 25 bp, Homo sapien
gcaggtgaaggattaaaatgggctc

SEQ ID NO: 1506945 - DNA, 25 bp, Homo sapien
tggtgctcaggttagttctcagaca

SEQ ID NO: 1506946 - DNA, 25 bp, Homo sapien
cagacaggcactttcgatgtggaaa

SEQ ID NO: 1506947 - DNA, 25 bp, Homo sapien
gaagcgtataccaggcatctctgcc

SEQ ID NO: 1506948 - DNA, 25 bp, Homo sapien
gaacttgagtcagcccgaggcagtt

SEQ ID NO: 1506949 - DNA, 25 bp, Homo sapien
tgcttttgcaggctattgttccacc

SEQ ID NO: 1506950 - DNA, 25 bp, Homo sapien
tctgccaccataaggcattcagctg

SEQ ID NO: 1506951 - DNA, 25 bp, Homo sapien
tattgacccaagtgaactgaaaact

SEQ ID NO: 1506952 - DNA, 25 bp, Homo sapien
gaatcaaacaaggtgagtcttaaaa

SEQ ID NO: 1506953 - DNA, 25 bp, Homo sapien
acctgttgcggtagatgaaatccaa

SEQ ID NO: 1506954 - DNA, 25 bp, Homo sapien
aagcacggtcttatggattcagtag

SEQ ID NO: 1506955 - DNA, 25 bp, Homo sapien
tgtgacaagccttaacccatttgag

SEQ ID NO: 1506956 - DNA, 25 bp, Homo sapien
tggtggcacaaaacaaatggtactg

SEQ ID NO: 1506957 - DNA, 25 bp, Homo sapien
tgcaaaaccggaggtcaaggcggac

SEQ ID NO: 1506958 - DNA, 25 bp, Homo sapien
tccatatgatcgcaagagaggcact

SEQ ID NO: 1506959 - DNA, 25 bp, Homo sapien
gaaactcctaagagatacccaggtg

SEQ ID NO: 1506960 - DNA, 25 bp, Homo sapien
ggcagtaatgagcaatgcagccacc

SEQ ID NO: 1506961 - DNA, 25 bp, Homo sapien
ggcagatatctagccaagagcagga

SEQ ID NO: 1506962 - DNA, 25 bp, Homo sapien
caagaccgtaattacacaagagggc

SEQ ID NO: 1506963 - DNA, 25 bp, Homo sapien
gggcctagactctattcccaagaag

SEQ ID NO: 1506964 - DNA, 25 bp, Homo sapien
caagaagttctcaggatgccgtgga

SEQ ID NO: 1506965 - DNA, 25 bp, Homo sapien
gctttggtcatcagatccctttctc

SEQ ID NO: 1506966 - DNA, 25 bp, Homo sapien
tctctgtctatacttactttcttcc

SEQ ID NO: 1506967 - DNA, 25 bp, Homo sapien
tgtgtagaggaggatgggtgagagt

SEQ ID NO: 1506968 - DNA, 25 bp, Homo sapien
cacatgtgtagaggaggatgggtga

SEQ ID NO: 1506969 - DNA, 25 bp, Homo sapien
catgtgtagaggaggatgggtgaga

SEQ ID NO: 1506970 - DNA, 25 bp, Homo sapien
ctcacatgtgtagaggaggatgggt

SEQ ID NO: 1506971 - DNA, 25 bp, Homo sapien
ccacatccttaaaagccactgggtc

SEQ ID NO: 1506972 - DNA, 25 bp, Homo sapien
tagaggtcaggttccagaaagtttc

SEQ ID NO: 1506973 - DNA, 25 bp, Homo sapien
agattcttctgggaaatatccagca

SEQ ID NO: 1506974 - DNA, 25 bp, Homo sapien
ctatagaggtcaggttccagaaagt

SEQ ID NO: 1506975 - DNA, 25 bp, Homo sapien
agtttccagcatcacttccctgtag

SEQ ID NO: 1506976 - DNA, 25 bp, Homo sapien
gggttttggtactcatattcaatgt

SEQ ID NO: 1506977 - DNA, 25 bp, Homo sapien
ggggttttggtactcatattcaatg

SEQ ID NO: 1506978 - DNA, 25 bp, Homo sapien
aagatgagttacctaggccaacttc

SEQ ID NO: 1506979 - DNA, 25 bp, Homo sapien
caaagctgtcacatgattttacttc

SEQ ID NO: 1506980 - DNA, 25 bp, Homo sapien
acacacaaagctgtcacatgatttt

SEQ ID NO: 1506981 - DNA, 25 bp, Homo sapien
cacaaagctgtcacatgattttact

SEQ ID NO: 1506982 - DNA, 25 bp, Homo sapien
acgatggattcgaagttgtgaggca

SEQ ID NO: 1506983 - DNA, 25 bp, Homo sapien
gtgagtcctaccatgcaattgaaga

SEQ ID NO: 1506984 - DNA, 25 bp, Homo sapien
tctgtgacaggatctgggactatgg

SEQ ID NO: 1506985 - DNA, 25 bp, Homo sapien
tatcgaaaggaaccggaacgagtga

SEQ ID NO: 1506986 - DNA, 25 bp, Homo sapien
gccaagtgtgagtgcttccatgcat

SEQ ID NO: 1506987 - DNA, 25 bp, Homo sapien
tacggattctctctcgtatgagtcc

SEQ ID NO: 1506988 - DNA, 25 bp, Homo sapien
tcttgaggctgatctgacggctttc

SEQ ID NO: 1506989 - DNA, 25 bp, Homo sapien
tgcttacattcttagggcgcctctc

SEQ ID NO: 1506990 - DNA, 25 bp, Homo sapien
aaagaatcctagccgatctgaaggc

SEQ ID NO: 1506991 - DNA, 25 bp, Homo sapien
ctaatacatgacaccaatggatatt

SEQ ID NO: 1506992 - DNA, 25 bp, Homo sapien
taatacatgacaccaatggatattt

SEQ ID NO: 1506993 - DNA, 25 bp, Homo sapien
aatcctagccgatctgaaggctttc

SEQ ID NO: 1506994 - DNA, 25 bp, Homo sapien
gattctgcatcctgtggtgcctaga

SEQ ID NO: 1506995 - DNA, 25 bp, Homo sapien
tggatacattatctgggactgggtg

SEQ ID NO: 1506996 - DNA, 25 bp, Homo sapien
tctgagttactttgtgtgatccgac

SEQ ID NO: 1506997 - DNA, 25 bp, Homo sapien
tcgactagcctggagagagcaatgg

SEQ ID NO: 1506998 - DNA, 25 bp, Homo sapien
cagaggtaggatccttttgagacca

SEQ ID NO: 1506999 - DNA, 25 bp, Homo sapien
gagaaaatacccagcgtttgaagaa

SEQ ID NO: 1507000 - DNA, 25 bp, Homo sapien
tccagagtttaagcgattatcgtgc

SEQ ID NO: 1507001 - DNA, 25 bp, Homo sapien
gcctgacgtgagctttcaataacct

SEQ ID NO: 1507002 - DNA, 25 bp, Homo sapien
gaaaattacttctgggacttccaca

SEQ ID NO: 1507003 - DNA, 25 bp, Homo sapien
gaacaccagcgaattctccagcact

SEQ ID NO: 1507004 - DNA, 25 bp, Homo sapien
gcagtcatgcaaccactcaattcag

SEQ ID NO: 1507005 - DNA, 25 bp, Homo sapien
tcagcaactgcatctagacctgggt

SEQ ID NO: 1507006 - DNA, 25 bp, Homo sapien
aatggtctaggggatcttgcgagtt

SEQ ID NO: 1507007 - DNA, 25 bp, Homo sapien
ctaggggatcttgcgagttgttctt

SEQ ID NO: 1507008 - DNA, 25 bp, Homo sapien
tctttttcattaaagatggttctat

SEQ ID NO: 1507009 - DNA, 25 bp, Homo sapien
gggaatggtctaggggatcttgcga

SEQ ID NO: 1507010 - DNA, 25 bp, Homo sapien
tctcttaagtttggccggacatttg

SEQ ID NO: 1507011 - DNA, 25 bp, Homo sapien
taaagcttgactaagtgcaaacagc

SEQ ID NO: 1507012 - DNA, 25 bp, Homo sapien
cactggcctgactataataaatgct

SEQ ID NO: 1507013 - DNA, 25 bp, Homo sapien
aaatgtatgagccacgataaaggtg

SEQ ID NO: 1507014 - DNA, 25 bp, Homo sapien
cgggtgtgatgggtctatcctttct

SEQ ID NO: 1507015 - DNA, 25 bp, Homo sapien
tttcaatggtgggaagtactaggcc

SEQ ID NO: 1507016 - DNA, 25 bp, Homo sapien
tggaataatggcctacgactttggg

SEQ ID NO: 1507017 - DNA, 25 bp, Homo sapien
cggtgttgacgcactgggaactcca

SEQ ID NO: 1507018 - DNA, 25 bp, Homo sapien
ccgcagcccgcgcagggacaaaggt

SEQ ID NO: 1507019 - DNA, 25 bp, Homo sapien
gcctgggcagaggaaccaggtccct

SEQ ID NO: 1507020 - DNA, 25 bp, Homo sapien
caaaggtgaggtaaggaatgcgacc

SEQ ID NO: 1507021 - DNA, 25 bp, Homo sapien
gggctggaaagaccggatcccagcc

SEQ ID NO: 1507022 - DNA, 25 bp, Homo sapien
agatgtcccggggtcctctctacac

SEQ ID NO: 1507023 - DNA, 25 bp, Homo sapien
tggctttcagatgtcccggggtcct

SEQ ID NO: 1507024 - DNA, 25 bp, Homo sapien
ggggtcctctctacacctcctgtga

SEQ ID NO: 1507025 - DNA, 25 bp, Homo sapien
tctacacctcctgtgactacagcag

SEQ ID NO: 1507026 - DNA, 25 bp, Homo sapien
caggtgcactggctaacgtctgtga

SEQ ID NO: 1507027 - DNA, 25 bp, Homo sapien
cactactgatctctgtagtagacta

SEQ ID NO: 1507028 - DNA, 25 bp, Homo sapien
actggctaacgtctgtgatcgcagc

SEQ ID NO: 1507029 - DNA, 25 bp, Homo sapien
tctgtagtagactaacttccctctt

SEQ ID NO: 1507030 - DNA, 25 bp, Homo sapien
gatttcactgcaagcccttgaagag

SEQ ID NO: 1507031 - DNA, 25 bp, Homo sapien
tcccttcacggttgagacaatccag

SEQ ID NO: 1507032 - DNA, 25 bp, Homo sapien
taaggcactaatacccatgagaccc

SEQ ID NO: 1507033 - DNA, 25 bp, Homo sapien
gagatccggcatcccatatatttgg

SEQ ID NO: 1507034 - DNA, 25 bp, Homo sapien
cagctgtgggaatattaggtcaccc

SEQ ID NO: 1507035 - DNA, 25 bp, Homo sapien
taggagtctccttccatcgtaaggc

SEQ ID NO: 1507036 - DNA, 25 bp, Homo sapien
cataggagagtgtgctgaagacaca

SEQ ID NO: 1507037 - DNA, 25 bp, Homo sapien
ggagcctcaaccaaaagacaatctg

SEQ ID NO: 1507038 - DNA, 25 bp, Homo sapien
atttgcaggctactggtccaccccg

SEQ ID NO: 1507039 - DNA, 25 bp, Homo sapien
tgtctccaacttacgaaaactggga

SEQ ID NO: 1507040 - DNA, 25 bp, Homo sapien
atcctgctcaccgaagcgctcatga

SEQ ID NO: 1507041 - DNA, 25 bp, Homo sapien
actatgccccgctgtgaacctcaat

SEQ ID NO: 1507042 - DNA, 25 bp, Homo sapien
cctgagcgacgtctccttgttcaat

SEQ ID NO: 1507043 - DNA, 25 bp, Homo sapien
tacagaccacctcttaatcacagta

SEQ ID NO: 1507044 - DNA, 25 bp, Homo sapien
aactccctgagcgacgtctccttgt

SEQ ID NO: 1507045 - DNA, 25 bp, Homo sapien
agaaacaactccctgagcgacgtct

SEQ ID NO: 1507046 - DNA, 25 bp, Homo sapien
gccaatgatacaagtggtgaacact

SEQ ID NO: 1507047 - DNA, 25 bp, Homo sapien
aaactatgacaaaccaggtattgcc

SEQ ID NO: 1507048 - DNA, 25 bp, Homo sapien
ccaggtattgccagccaatgataca

SEQ ID NO: 1507049 - DNA, 25 bp, Homo sapien
aaagcagcgacaaatggttatctac

SEQ ID NO: 1507050 - DNA, 25 bp, Homo sapien
agaatagccaagatgctctatagaa

SEQ ID NO: 1507051 - DNA, 25 bp, Homo sapien
ccgaaatacaagacaatgactaaga

SEQ ID NO: 1507052 - DNA, 25 bp, Homo sapien
ctaaaaaccgaaatacaagacaatg

SEQ ID NO: 1507053 - DNA, 25 bp, Homo sapien
gaatagccaagatgctctatagaat

SEQ ID NO: 1507054 - DNA, 25 bp, Homo sapien
gctcactgccggggttctaccactt

SEQ ID NO: 1507055 - DNA, 25 bp, Homo sapien
tcactgccggggttctaccacttct

SEQ ID NO: 1507056 - DNA, 25 bp, Homo sapien
ggctcactgccggggttctaccact

SEQ ID NO: 1507057 - DNA, 25 bp, Homo sapien
ctcggctcactgccggggttctacc

SEQ ID NO: 1507058 - DNA, 25 bp, Homo sapien
gccgtggactccaagggtcatcaga

SEQ ID NO: 1507059 - DNA, 25 bp, Homo sapien
cgtggactccaagggtcatcagatc

SEQ ID NO: 1507060 - DNA, 25 bp, Homo sapien
atgccgtggactccaagggtcatca

SEQ ID NO: 1507061 - DNA, 25 bp, Homo sapien
ggactccaagggtcatcagatctct

SEQ ID NO: 1507062 - DNA, 25 bp, Homo sapien
caacatcatcaaaggccactgggtc

SEQ ID NO: 1507063 - DNA, 25 bp, Homo sapien
ggtgaagttcacagcaacatcatca

SEQ ID NO: 1507064 - DNA, 25 bp, Homo sapien
cagcaacatcatcaaaggccactgg

SEQ ID NO: 1507065 - DNA, 25 bp, Homo sapien
ctgggtgaagttcacagcaacatca

SEQ ID NO: 1507066 - DNA, 25 bp, Homo sapien
ctgaaagtttccagcatcacttcct

SEQ ID NO: 1507067 - DNA, 25 bp, Homo sapien
tcacttccttgtagagtttcctctg

SEQ ID NO: 1507068 - DNA, 25 bp, Homo sapien
ttccttgtagagtttcctctgggaa

SEQ ID NO: 1507069 - DNA, 25 bp, Homo sapien
tacagaggtcaggttcctgaaagtt

SEQ ID NO: 1507070 - DNA, 25 bp, Homo sapien
ctaaaatatagacacagaaaaatag

SEQ ID NO: 1507071 - DNA, 25 bp, Homo sapien
taaaatatagacacagaaaaatagt

SEQ ID NO: 1507072 - DNA, 25 bp, Homo sapien
aaaatatagacacagaaaaatagtc

SEQ ID NO: 1507073 - DNA, 25 bp, Homo sapien
ggggttttggtactcatattcaatg

SEQ ID NO: 1507074 - DNA, 25 bp, Homo sapien
gggttttggtactcatattcaatgt

SEQ ID NO: 1507075 - DNA, 25 bp, Homo sapien
tattaaaagatgagttacctaggcc

SEQ ID NO: 1507076 - DNA, 25 bp, Homo sapien
cacacaaagctgtcacatgatttta

SEQ ID NO: 1507077 - DNA, 25 bp, Homo sapien
gtccaatgtcacctctgatgttcat

SEQ ID NO: 1507078 - DNA, 25 bp, Homo sapien
gatgagttacctaggccaacttctc

SEQ ID NO: 1507079 - DNA, 25 bp, Homo sapien
tgttctaaaggaggggtgatatctg

SEQ ID NO: 1507080 - DNA, 25 bp, Homo sapien
ggtgatatctgaaggcttttttagg

SEQ ID NO: 1507081 - DNA, 25 bp, Homo sapien
ctccagtgtgatccctttgtggtgt

SEQ ID NO: 1507082 - DNA, 25 bp, Homo sapien
gatccctttgtggtgttctaaagga

SEQ ID NO: 1507083 - DNA, 25 bp, Homo sapien
ctttcatgtctacgatagcatctgg

SEQ ID NO: 1507084 - DNA, 25 bp, Homo sapien
tttcatgtctacgatagcatctggg

SEQ ID NO: 1507085 - DNA, 25 bp, Homo sapien
accatgcaattgaaggtgtgaggaa

SEQ ID NO: 1507086 - DNA, 25 bp, Homo sapien
gactttgaaggttcttcatagatct

SEQ ID NO: 1507087 - DNA, 25 bp, Homo sapien
ctttgaaggttcttcatagatctga

SEQ ID NO: 1507088 - DNA, 25 bp, Homo sapien
taccatgcaattgaaggtgtgagga

SEQ ID NO: 1507089 - DNA, 25 bp, Homo sapien
atagggtttatcttcagggtgagtc

SEQ ID NO: 1507090 - DNA, 25 bp, Homo sapien
ggtttatcttcagggtgagtcctac

SEQ ID NO: 1507091 - DNA, 25 bp, Homo sapien
tagggtttatcttcagggtgagtcc

SEQ ID NO: 1507092 - DNA, 25 bp, Homo sapien
actcatagggtttatcttcagggtg

SEQ ID NO: 1507093 - DNA, 25 bp, Homo sapien
atgtgtgcttgtgtcctttactgaa

SEQ ID NO: 1507094 - DNA, 25 bp, Homo sapien
tcttgattgtgtgtcctaccatgca

SEQ ID NO: 1507095 - DNA, 25 bp, Homo sapien
tgtgtgcttgtgtcctttactgaat

SEQ ID NO: 1507096 - DNA, 25 bp, Homo sapien
tggtttctcttgattgtgtgtccta

SEQ ID NO: 1507097 - DNA, 25 bp, Homo sapien
catgcatcacatagttctcgtgcca

SEQ ID NO: 1507098 - DNA, 25 bp, Homo sapien
aaagtcaaagtccagctttgttcca

SEQ ID NO: 1507099 - DNA, 25 bp, Homo sapien
tctttgtgatgggttcgaacatcct

SEQ ID NO: 1507100 - DNA, 25 bp, Homo sapien
agaagaggcgctctgatgtttagaa

SEQ ID NO: 1507101 - DNA, 25 bp, Homo sapien
gcttccttcaggagatcttttacag

SEQ ID NO: 1507102 - DNA, 25 bp, Homo sapien
ttcaggagatcttttacagcaggcc

SEQ ID NO: 1507103 - DNA, 25 bp, Homo sapien
ggagatcttttacagcaggcctggt

SEQ ID NO: 1507104 - DNA, 25 bp, Homo sapien
ccttcaggagatcttttacagcagg

SEQ ID NO: 1507105 - DNA, 25 bp, Homo sapien
gaagggttttttctgtctctgtctc

SEQ ID NO: 1507106 - DNA, 25 bp, Homo sapien
tgaagggttttttctgtctctgtct

SEQ ID NO: 1507107 - DNA, 25 bp, Homo sapien
ttgaagggttttttctgtctctgtc

SEQ ID NO: 1507108 - DNA, 25 bp, Homo sapien
tcaggtagcctaatgccttgagctt

SEQ ID NO: 1507109 - DNA, 25 bp, Homo sapien
tagcctaatgccttgagctttgttc

SEQ ID NO: 1507110 - DNA, 25 bp, Homo sapien
aggtagcctaatgccttgagctttg

SEQ ID NO: 1507111 - DNA, 25 bp, Homo sapien
agtcaggtagcctaatgccttgagc

SEQ ID NO: 1507112 - DNA, 25 bp, Homo sapien
acgttttcttaatctagcctatcat

SEQ ID NO: 1507113 - DNA, 25 bp, Homo sapien
gtgccacgttttcttaatctagcct

SEQ ID NO: 1507114 - DNA, 25 bp, Homo sapien
gccacgttttcttaatctagcctat

SEQ ID NO: 1507115 - DNA, 25 bp, Homo sapien
cacgttttcttaatctagcctatca

SEQ ID NO: 1507116 - DNA, 25 bp, Homo sapien
tataaggtctttctacagagtgcat

SEQ ID NO: 1507117 - DNA, 25 bp, Homo sapien
ttataaggtctttctacagagtgca

SEQ ID NO: 1507118 - DNA, 25 bp, Homo sapien
agagaaattatggaacgctttccca

SEQ ID NO: 1507119 - DNA, 25 bp, Homo sapien
agaaattatggaacgctttcccaca

SEQ ID NO: 1507120 - DNA, 25 bp, Homo sapien
gagaaattatggaacgctttcccac

SEQ ID NO: 1507121 - DNA, 25 bp, Homo sapien
tgccacattgcttgccttcataggg

SEQ ID NO: 1507122 - DNA, 25 bp, Homo sapien
gaaataaaggctttcgcacattgct

SEQ ID NO: 1507123 - DNA, 25 bp, Homo sapien
gtgaattctttcatgatattgaaaa

SEQ ID NO: 1507124 - DNA, 25 bp, Homo sapien
agaactggaagaagtgaaagctttg

SEQ ID NO: 1507125 - DNA, 25 bp, Homo sapien
agtcctttcatgacatcgaaagcaa

SEQ ID NO: 1507126 - DNA, 25 bp, Homo sapien
tgagtcctttcatgacatcgaaagc

SEQ ID NO: 1507127 - DNA, 25 bp, Homo sapien
tccatacatttgaaggtgtgaggct

SEQ ID NO: 1507128 - DNA, 25 bp, Homo sapien
ccagtgtgagtccttccatacattt

SEQ ID NO: 1507129 - DNA, 25 bp, Homo sapien
cgcacccggccttactattatagct

SEQ ID NO: 1507130 - DNA, 25 bp, Homo sapien
agaatcttgtcaggtctgaatgctt

SEQ ID NO: 1507131 - DNA, 25 bp, Homo sapien
ttagtatacagttattacaaacagt

SEQ ID NO: 1507132 - DNA, 25 bp, Homo sapien
ttgttagtatacagttattacaaac

SEQ ID NO: 1507133 - DNA, 25 bp, Homo sapien
agaggttgcagcgacctgagatcat

SEQ ID NO: 1507134 - DNA, 25 bp, Homo sapien
tccagcctgggtgacagagtgagat

SEQ ID NO: 1507135 - DNA, 25 bp, Homo sapien
cagcctgggtgacagagtgagattt

SEQ ID NO: 1507136 - DNA, 25 bp, Homo sapien
gcctgggtgacagagtgagattttt

SEQ ID NO: 1507137 - DNA, 25 bp, Homo sapien
gggaagaaggcactcagaggtacat

SEQ ID NO: 1507138 - DNA, 25 bp, Homo sapien
ttctcttcttactaatgtgacgtgt

SEQ ID NO: 1507139 - DNA, 25 bp, Homo sapien
aaaaacaggtccaggagtctacaga

SEQ ID NO: 1507140 - DNA, 25 bp, Homo sapien
caggtatggtactgctggcttttgg

SEQ ID NO: 1507141 - DNA, 25 bp, Homo sapien
gaattcaggtgcatccaactctttc

SEQ ID NO: 1507142 - DNA, 25 bp, Homo sapien
cacccgctttggactagcaaagtgg

SEQ ID NO: 1507143 - DNA, 25 bp, Homo sapien
tctttggtgaaaagtatcagggtgt

SEQ ID NO: 1507144 - DNA, 25 bp, Homo sapien
tgaaaagtatcagggtgtatttggc

SEQ ID NO: 1507145 - DNA, 25 bp, Homo sapien
ttgtcattggccattccaacactgt

SEQ ID NO: 1507146 - DNA, 25 bp, Homo sapien
attgtcattggccattccaacactg

SEQ ID NO: 1507147 - DNA, 25 bp, Homo sapien
tgtcattggccattccaacactgtg

SEQ ID NO: 1507148 - DNA, 25 bp, Homo sapien
ctccagtgtgtcctgttcatcaccc

SEQ ID NO: 1507149 - DNA, 25 bp, Homo sapien
tcaggactcaagcaggcaccaatgt

SEQ ID NO: 1507150 - DNA, 25 bp, Homo sapien
tcctggcatatgaacaccctttggg

SEQ ID NO: 1507151 - DNA, 25 bp, Homo sapien
tggtcactctttgtaggatcaggac

SEQ ID NO: 1507152 - DNA, 25 bp, Homo sapien
tccttgggctctttgtgaagcatca

SEQ ID NO: 1507153 - DNA, 25 bp, Homo sapien
gtccctctcgggctggtctgaccgg

SEQ ID NO: 1507154 - DNA, 25 bp, Homo sapien
gcgacagagcgacagaagcctgggt

SEQ ID NO: 1507155 - DNA, 25 bp, Homo sapien
tcgggctggtctgaccggttaccaa

SEQ ID NO: 1507156 - DNA, 25 bp, Homo sapien
cccgcgcagcgaggaaggtgaggaa

SEQ ID NO: 1507157 - DNA, 25 bp, Homo sapien
agatgtaccggggtcctctctacag

SEQ ID NO: 1507158 - DNA, 25 bp, Homo sapien
catttcccggctttcagatgtaccg

SEQ ID NO: 1507159 - DNA, 25 bp, Homo sapien
tgtaccggggtcctctctacagctc

SEQ ID NO: 1507160 - DNA, 25 bp, Homo sapien
atttcccggctttcagatgtaccgg

SEQ ID NO: 1507161 - DNA, 25 bp, Homo sapien
gagggccgaactgctcaaggaggac

SEQ ID NO: 1507162 - DNA, 25 bp, Homo sapien
gtctcacgacatctggtcccgcaca

SEQ ID NO: 1507163 - DNA, 25 bp, Homo sapien
agaccccggagtcgcccacagggag

SEQ ID NO: 1507164 - DNA, 25 bp, Homo sapien
gccggttcccgcctgttccaggcag

SEQ ID NO: 1507165 - DNA, 25 bp, Homo sapien
ttgtgtttccctcggccaaggtctc

SEQ ID NO: 1507166 - DNA, 25 bp, Homo sapien
aaggtctctcctattcggctctgaa

SEQ ID NO: 1507167 - DNA, 25 bp, Homo sapien
cgtgaatcgctgtttgctcaaatga

SEQ ID NO: 1507168 - DNA, 25 bp, Homo sapien
cgttgacaaaccacaacccaggacg

SEQ ID NO: 1507169 - DNA, 25 bp, Homo sapien
tgcagtggtacatcctcggctgggc

SEQ ID NO: 1507170 - DNA, 25 bp, Homo sapien
tggtcttgacctctttcctgtttgt

SEQ ID NO: 1507171 - DNA, 25 bp, Homo sapien
tacatcctcggctgggctgcaacct

SEQ ID NO: 1507172 - DNA, 25 bp, Homo sapien
tttttgctagttttggaagagatgg

SEQ ID NO: 1507173 - DNA, 25 bp, Homo sapien
tacctacataggctgtttgaacaaa

SEQ ID NO: 1507174 - DNA, 25 bp, Homo sapien
tcctacctaaggaccctgaaatcga

SEQ ID NO: 1507175 - DNA, 25 bp, Homo sapien
gactgaactgtgtgtagtgtcctaa

SEQ ID NO: 1507176 - DNA, 25 bp, Homo sapien
tttgaacaaatgagtcaggccgggc

SEQ ID NO: 1507177 - DNA, 25 bp, Homo sapien
tcttcacagttgagacaatccaaag

SEQ ID NO: 1507178 - DNA, 25 bp, Homo sapien
ctcaatagcaacatccaattagctg

SEQ ID NO: 1507179 - DNA, 25 bp, Homo sapien
tagctgattggccatgtgtctccaa

SEQ ID NO: 1507180 - DNA, 25 bp, Homo sapien
tgtaggacagctaaatacaaccttg

SEQ ID NO: 1507181 - DNA, 25 bp, Homo sapien
ctccatgctcgtcagggtgatcttg

SEQ ID NO: 1507182 - DNA, 25 bp, Homo sapien
gatgtaacctctctgaaatatgcct

SEQ ID NO: 1507183 - DNA, 25 bp, Homo sapien
cctgaactcaggctatctgcatgca

SEQ ID NO: 1507184 - DNA, 25 bp, Homo sapien
gattaagtatcactatgatgtaacc

SEQ ID NO: 1507185 - DNA, 25 bp, Homo sapien
gagctatgattaggaagagcacagg

SEQ ID NO: 1507186 - DNA, 25 bp, Homo sapien
gaggcctgtgacacgcttctgtata

SEQ ID NO: 1507187 - DNA, 25 bp, Homo sapien
tatttttacatcgaggaagcaagtc

SEQ ID NO: 1507188 - DNA, 25 bp, Homo sapien
gagggaactctggattatctgctca

SEQ ID NO: 1507189 - DNA, 25 bp, Homo sapien
tgcggtgagccgaggttgtgccact

SEQ ID NO: 1507190 - DNA, 25 bp, Homo sapien
ctgaaaggcagaggctgcggtgagc

SEQ ID NO: 1507191 - DNA, 25 bp, Homo sapien
ggtgagccgaggttgtgccactgaa

SEQ ID NO: 1507192 - DNA, 25 bp, Homo sapien
gccgaggttgtgccactgaactcca

SEQ ID NO: 1507193 - DNA, 25 bp, Homo sapien
gccagtacaggacttgtgcttggtc

SEQ ID NO: 1507194 - DNA, 25 bp, Homo sapien
tgatggtcaaaggtgtgggcagaag

SEQ ID NO: 1507195 - DNA, 25 bp, Homo sapien
tgggcagaagacaaccctccagggc

SEQ ID NO: 1507196 - DNA, 25 bp, Homo sapien
tacaggacttgtgcttggtcaatca

SEQ ID NO: 1507197 - DNA, 25 bp, Homo sapien
taccaccacgcgtgagtgaccttta

SEQ ID NO: 1507198 - DNA, 25 bp, Homo sapien
cacagacacttagttacagctggtt

SEQ ID NO: 1507199 - DNA, 25 bp, Homo sapien
taagccagggtatccagacaagttc

SEQ ID NO: 1507200 - DNA, 25 bp, Homo sapien
cccacagtggttgagaggacaggca

SEQ ID NO: 1507201 - DNA, 25 bp, Homo sapien
aggaagatgggtgagagtgacagca

SEQ ID NO: 1507202 - DNA, 25 bp, Homo sapien
ctcacatgtgtagaggaagatgggt

SEQ ID NO: 1507203 - DNA, 25 bp, Homo sapien
agaggaagatgggtgagagtgacag

SEQ ID NO: 1507204 - DNA, 25 bp, Homo sapien
gtagaggaagatgggtgagagtgac

SEQ ID NO: 1507205 - DNA, 25 bp, Homo sapien
cctgaaagtttccagcatcacttcc

SEQ ID NO: 1507206 - DNA, 25 bp, Homo sapien
tatagaggtcaggttcctgaaagtt

SEQ ID NO: 1507207 - DNA, 25 bp, Homo sapien
aatatccagcaatgtccactcttcc

SEQ ID NO: 1507208 - DNA, 25 bp, Homo sapien
tatccagcaatgtccactcttcctg

SEQ ID NO: 1507209 - DNA, 25 bp, Homo sapien
acactggtttgctaatgcactgacg

SEQ ID NO: 1507210 - DNA, 25 bp, Homo sapien
tttgctaatgcactgacggaaggaa

SEQ ID NO: 1507211 - DNA, 25 bp, Homo sapien
gctaatgcactgacggaaggaatat

SEQ ID NO: 1507212 - DNA, 25 bp, Homo sapien
ggtttgctaatgcactgacggaagg

SEQ ID NO: 1507213 - DNA, 25 bp, Homo sapien
attcaatgttctggtcactccattt

SEQ ID NO: 1507214 - DNA, 25 bp, Homo sapien
atattcaatgttctggtcactccat

SEQ ID NO: 1507215 - DNA, 25 bp, Homo sapien
tattcaatgttctggtcactccatt

SEQ ID NO: 1507216 - DNA, 25 bp, Homo sapien
tcattgactttctcttctatgagac

SEQ ID NO: 1507217 - DNA, 25 bp, Homo sapien
ctgggtaaaagtttctccacaatga

SEQ ID NO: 1507218 - DNA, 25 bp, Homo sapien
cctgggtaaaagtttctccacaatg

SEQ ID NO: 1507219 - DNA, 25 bp, Homo sapien
cttctttaatttcattgactttctc

SEQ ID NO: 1507220 - DNA, 25 bp, Homo sapien
attaaaagatgagttacctatgcca

SEQ ID NO: 1507221 - DNA, 25 bp, Homo sapien
agatgagttacctatgccaacttct

SEQ ID NO: 1507222 - DNA, 25 bp, Homo sapien
caaagctgtcacatgattttacttc

SEQ ID NO: 1507223 - DNA, 25 bp, Homo sapien
acacacaaagctgtcacatgatttt

SEQ ID NO: 1507224 - DNA, 25 bp, Homo sapien
ctccagtgtgatccctttcttgtgt

SEQ ID NO: 1507225 - DNA, 25 bp, Homo sapien
tctctccagtgtgatccctttcttg

SEQ ID NO: 1507226 - DNA, 25 bp, Homo sapien
gataggaactagaactatgaaatgc

SEQ ID NO: 1507227 - DNA, 25 bp, Homo sapien
gaaaacttataagataggataagcc

SEQ ID NO: 1507228 - DNA, 25 bp, Homo sapien
tgtctacgaagagaactggtatatg

SEQ ID NO: 1507229 - DNA, 25 bp, Homo sapien
taagataggataagccttccccata

SEQ ID NO: 1507230 - DNA, 25 bp, Homo sapien
gtgtttgaaatgacttggcagaata

SEQ ID NO: 1507231 - DNA, 25 bp, Homo sapien
atgtgtttgaaatgacttggcagaa

SEQ ID NO: 1507232 - DNA, 25 bp, Homo sapien
ttcatgtgtttgaaatgacttggca

SEQ ID NO: 1507233 - DNA, 25 bp, Homo sapien
tttgaaatgacttggcagaataaaa

SEQ ID NO: 1507234 - DNA, 25 bp, Homo sapien
catgaatttgaaggtgcttcacata

SEQ ID NO: 1507235 - DNA, 25 bp, Homo sapien
caccgtgcactcgaagctgtgaggc

SEQ ID NO: 1507236 - DNA, 25 bp, Homo sapien
cccaccgtgcactcgaagctgtgag

SEQ ID NO: 1507237 - DNA, 25 bp, Homo sapien
taccatgcactcgaaggtgtgaggt

SEQ ID NO: 1507238 - DNA, 25 bp, Homo sapien
taccatgctttcgaaggtttgaggc

SEQ ID NO: 1507239 - DNA, 25 bp, Homo sapien
ttgcatgtatttgaagaatcttggc

SEQ ID NO: 1507240 - DNA, 25 bp, Homo sapien
taaaagcctttctcacatatactac

SEQ ID NO: 1507241 - DNA, 25 bp, Homo sapien
tatcgaagggaattgcaacatctga

SEQ ID NO: 1507242 - DNA, 25 bp, Homo sapien
catatgagtccttgcgtgtatatgc

SEQ ID NO: 1507243 - DNA, 25 bp, Homo sapien
atatgagtccttgcgtgtatatgca

SEQ ID NO: 1507244 - DNA, 25 bp, Homo sapien
cccatatgagtccttgcgtgtatat

SEQ ID NO: 1507245 - DNA, 25 bp, Homo sapien
ccatatgagtccttgcgtgtatatg

SEQ ID NO: 1507246 - DNA, 25 bp, Homo sapien
tagctgaatgctttcccacaatcct

SEQ ID NO: 1507247 - DNA, 25 bp, Homo sapien
gctgaatgctttcccacaatcctta

SEQ ID NO: 1507248 - DNA, 25 bp, Homo sapien
ctgaatgctttcccacaatccttac

SEQ ID NO: 1507249 - DNA, 25 bp, Homo sapien
ctagctgaatgctttcccacaatcc

SEQ ID NO: 1507250 - DNA, 25 bp, Homo sapien
tttctcccaagtgtgaacccttcca

SEQ ID NO: 1507251 - DNA, 25 bp, Homo sapien
tgcttgcattcatagtgcttccttc

SEQ ID NO: 1507252 - DNA, 25 bp, Homo sapien
acggaactagaatacactcataggg

SEQ ID NO: 1507253 - DNA, 25 bp, Homo sapien
cgttgaaggtgcgaggcacatctga

SEQ ID NO: 1507254 - DNA, 25 bp, Homo sapien
acatgttagtatacttatgataatt

SEQ ID NO: 1507255 - DNA, 25 bp, Homo sapien
tagtatacttatgataattgtttac

SEQ ID NO: 1507256 - DNA, 25 bp, Homo sapien
tacttatgataattgtttacattaa

SEQ ID NO: 1507257 - DNA, 25 bp, Homo sapien
accaatgggatattttattatacct

SEQ ID NO: 1507258 - DNA, 25 bp, Homo sapien
tagatccaggtgcacccaactcttt

SEQ ID NO: 1507259 - DNA, 25 bp, Homo sapien
gtgaaaagtatcagggtgcatttgg

SEQ ID NO: 1507260 - DNA, 25 bp, Homo sapien
tctttggtgaaaagtatcagggtgc

SEQ ID NO: 1507261 - DNA, 25 bp, Homo sapien
agacaggggttagatccaggtgcac

SEQ ID NO: 1507262 - DNA, 25 bp, Homo sapien
ttctattgttactgtctttggctat

SEQ ID NO: 1507263 - DNA, 25 bp, Homo sapien
tgttactgtctttggctattccaac

SEQ ID NO: 1507264 - DNA, 25 bp, Homo sapien
cctgcacttctattgttactgtctt

SEQ ID NO: 1507265 - DNA, 25 bp, Homo sapien
attgttactgtctttggctattcca

SEQ ID NO: 1507266 - DNA, 25 bp, Homo sapien
ctccagtgtgtcctgttcatcaccc

SEQ ID NO: 1507267 - DNA, 25 bp, Homo sapien
tccagtgtgtcctgttcatcaccct

SEQ ID NO: 1507268 - DNA, 25 bp, Homo sapien
tagttcagaataaaccacgagtgtg

SEQ ID NO: 1507269 - DNA, 25 bp, Homo sapien
catatataaccagaaaatgctgttc

SEQ ID NO: 1507270 - DNA, 25 bp, Homo sapien
tgttttcatccagggtaatgttggg

SEQ ID NO: 1507271 - DNA, 25 bp, Homo sapien
gggtcccactgactttgtgaagagt

SEQ ID NO: 1507272 - DNA, 25 bp, Homo sapien
ggactgcttgagacaaacaattaga

SEQ ID NO: 1507273 - DNA, 25 bp, Homo sapien
agggaatcgtcatgttgctgtggct

SEQ ID NO: 1507274 - DNA, 25 bp, Homo sapien
cagcctcctggatatggtatgtgcc

SEQ ID NO: 1507275 - DNA, 25 bp, Homo sapien
tagagagcaacccaagcaacatagc

SEQ ID NO: 1507276 - DNA, 25 bp, Homo sapien
cccctcatcagggaaagtatctaac

SEQ ID NO: 1507277 - DNA, 25 bp, Homo sapien
agtatctaaccctttcactcaataa

SEQ ID NO: 1507278 - DNA, 25 bp, Homo sapien
tataaggcacttacctatcacccct

SEQ ID NO: 1507279 - DNA, 25 bp, Homo sapien
aattataaggcacttacctatcacc

SEQ ID NO: 1507280 - DNA, 25 bp, Homo sapien
ctcactggctttagtttgcagtcac

SEQ ID NO: 1507281 - DNA, 25 bp, Homo sapien
ttctcactggctttagtttgcagtc

SEQ ID NO: 1507282 - DNA, 25 bp, Homo sapien
tttagtttgcagtcactggactcag

SEQ ID NO: 1507283 - DNA, 25 bp, Homo sapien
tggctttagtttgcagtcactggac

SEQ ID NO: 1507284 - DNA, 25 bp, Homo sapien
gcagaagttgcagagagttgagatc

SEQ ID NO: 1507285 - DNA, 25 bp, Homo sapien
agaagttgcagagagttgagatcgc

SEQ ID NO: 1507286 - DNA, 25 bp, Homo sapien
aagttgcagagagttgagatcgcgc

SEQ ID NO: 1507287 - DNA, 25 bp, Homo sapien
ggcagaagttgcagagagttgagat

SEQ ID NO: 1507288 - DNA, 25 bp, Homo sapien
atagaaacctgggtagaggtaccag

SEQ ID NO: 1507289 - DNA, 25 bp, Homo sapien
ggatatcaaccaccggctgcgcaag

SEQ ID NO: 1507290 - DNA, 25 bp, Homo sapien
gcgatagaaacctgggtagaggtac

SEQ ID NO: 1507291 - DNA, 25 bp, Homo sapien
ctctcggggatggatacagcggata

SEQ ID NO: 1507292 - DNA, 25 bp, Homo sapien
aaaaacagactccttgtggcaagaa

SEQ ID NO: 1507293 - DNA, 25 bp, Homo sapien
gagtgcctctgtatgacaggatggc

SEQ ID NO: 1507294 - DNA, 25 bp, Homo sapien
agggtaagtcatgccttggaattca

SEQ ID NO: 1507295 - DNA, 25 bp, Homo sapien
aacaagacctaaggccacgcaaggt

SEQ ID NO: 1507296 - DNA, 25 bp, Homo sapien
taaggtcctacctaaggatcctgaa

SEQ ID NO: 1507297 - DNA, 25 bp, Homo sapien
tgaacaagtaagtcaggcccggtgc

SEQ ID NO: 1507298 - DNA, 25 bp, Homo sapien
gcctggcgaacgtgataaaacgctg

SEQ ID NO: 1507299 - DNA, 25 bp, Homo sapien
tatgcttaatcaggcacaatccacc

SEQ ID NO: 1507300 - DNA, 25 bp, Homo sapien
gagagatagaattaggaggagcaca

SEQ ID NO: 1507301 - DNA, 25 bp, Homo sapien
tccaacactgcagttcaagctgtcc

SEQ ID NO: 1507302 - DNA, 25 bp, Homo sapien
gattatttgctcaacgttttgggca

SEQ ID NO: 1507303 - DNA, 25 bp, Homo sapien
gatgcatacccaggttgtgaaagta

SEQ ID NO: 1507304 - DNA, 25 bp, Homo sapien
aataagcatggtcttactgattcag

SEQ ID NO: 1507305 - DNA, 25 bp, Homo sapien
aatgaactgaacactgatgttcaca

SEQ ID NO: 1507306 - DNA, 25 bp, Homo sapien
catattaacctaaatgaactgaaca

SEQ ID NO: 1507307 - DNA, 25 bp, Homo sapien
tagtctcaatcctacatattaacct

SEQ ID NO: 1507308 - DNA, 25 bp, Homo sapien
ttcccaagaagttgccgtggactcc

SEQ ID NO: 1507309 - DNA, 25 bp, Homo sapien
tattcccaagaagttgccgtggact

SEQ ID NO: 1507310 - DNA, 25 bp, Homo sapien
tcccaagaagttgccgtggactcca

SEQ ID NO: 1507311 - DNA, 25 bp, Homo sapien
cccaagaagttgccgtggactccaa

SEQ ID NO: 1507312 - DNA, 25 bp, Homo sapien
agtttcctctgcgaaatatccagca

SEQ ID NO: 1507313 - DNA, 25 bp, Homo sapien
agcaacatcctcacaggccacaggg

SEQ ID NO: 1507314 - DNA, 25 bp, Homo sapien
ctctgcgaaatatccagcaaagccc

SEQ ID NO: 1507315 - DNA, 25 bp, Homo sapien
cttccctgtagagtttcctctgcga

SEQ ID NO: 1507316 - DNA, 25 bp, Homo sapien
ctaaaatacagacacagaaaagtag

SEQ ID NO: 1507317 - DNA, 25 bp, Homo sapien
taaaatacagacacagaaaagtagt

SEQ ID NO: 1507318 - DNA, 25 bp, Homo sapien
aaaatacagacacagaaaagtagtc

SEQ ID NO: 1507319 - DNA, 25 bp, Homo sapien
gggttttggtactcatattcaatgt

SEQ ID NO: 1507320 - DNA, 25 bp, Homo sapien
ggggttttggtactcatattcaatg

SEQ ID NO: 1507321 - DNA, 25 bp, Homo sapien
tgcgtcttcgaatgcctgaatggga

SEQ ID NO: 1507322 - DNA, 25 bp, Homo sapien
gataggatctgtaactacggaatgc

SEQ ID NO: 1507323 - DNA, 25 bp, Homo sapien
tgtctacgaagggaactgggatacg

SEQ ID NO: 1507324 - DNA, 25 bp, Homo sapien
ggtgcatagtcctgatactcgtatg

SEQ ID NO: 1507325 - DNA, 25 bp, Homo sapien
tctccagagcgcattcttaggtgtg

SEQ ID NO: 1507326 - DNA, 25 bp, Homo sapien
aggctttaccacatggcatgcattt

SEQ ID NO: 1507327 - DNA, 25 bp, Homo sapien
gaaatgacttggcagaataaaggcc

SEQ ID NO: 1507328 - DNA, 25 bp, Homo sapien
gtgtgtttgaaaacttataagataa

SEQ ID NO: 1507329 - DNA, 25 bp, Homo sapien
gagttctaccatggattcgaaggtg

SEQ ID NO: 1507330 - DNA, 25 bp, Homo sapien
catgaattcgaaggttcttggcaga

SEQ ID NO: 1507331 - DNA, 25 bp, Homo sapien
tctccagtgagtcctaccatgcctt

SEQ ID NO: 1507332 - DNA, 25 bp, Homo sapien
tgagtcccagcatgcatttgaagga

SEQ ID NO: 1507333 - DNA, 25 bp, Homo sapien
catgttatcgaaaagaagtgaaaga

SEQ ID NO: 1507334 - DNA, 25 bp, Homo sapien
gtaaacagcacccatacattttatg

SEQ ID NO: 1507335 - DNA, 25 bp, Homo sapien
tattagcttcctgtgactcactaaa

SEQ ID NO: 1507336 - DNA, 25 bp, Homo sapien
agaataaggcaaaaacagctccagg

SEQ ID NO: 1507337 - DNA, 25 bp, Homo sapien
tgtcattggccattccaacattgtg

SEQ ID NO: 1507338 - DNA, 25 bp, Homo sapien
cccgttcaccttccgctatgattga

SEQ ID NO: 1507339 - DNA, 25 bp, Homo sapien
cagtgagttctagtgagctgcacct

SEQ ID NO: 1507340 - DNA, 25 bp, Homo sapien
ggacctatggcttgtttctctcatg

SEQ ID NO: 1507341 - DNA, 25 bp, Homo sapien
gatgccaggcagacgtcactgtgaa

SEQ ID NO: 1507342 - DNA, 25 bp, Homo sapien
tcgggtttcctctagcagccaggca

SEQ ID NO: 1507343 - DNA, 25 bp, Homo sapien
agatattccggcgtctcctgcagaa

SEQ ID NO: 1507344 - DNA, 25 bp, Homo sapien
agaactcccgtgagcagtccaggac

SEQ ID NO: 1507345 - DNA, 25 bp, Homo sapien
acacggcgcaggcaatagagagaca

SEQ ID NO: 1507346 - DNA, 25 bp, Homo sapien
taaatggatcaaacccctcggagga

SEQ ID NO: 1507347 - DNA, 25 bp, Homo sapien
tctactgcgtcttgaagatgggcaa

SEQ ID NO: 1507348 - DNA, 25 bp, Homo sapien
tgtctgacgggcataaaagatggac

SEQ ID NO: 1507349 - DNA, 25 bp, Homo sapien
tctacaagaagtcattggccatggc

SEQ ID NO: 1507350 - DNA, 25 bp, Homo sapien
gacacggggttgtgggcagcaagcc

SEQ ID NO: 1507351 - DNA, 25 bp, Homo sapien
tccgccaaggtctttcataacactg

SEQ ID NO: 1507352 - DNA, 25 bp, Homo sapien
ttccctccgccaaggtctttcataa

SEQ ID NO: 1507353 - DNA, 25 bp, Homo sapien
caaggtctttcataacactgtaacc

SEQ ID NO: 1507354 - DNA, 25 bp, Homo sapien
gctatgccaaacagatgcgtttagg

SEQ ID NO: 1507355 - DNA, 25 bp, Homo sapien
ggcccaatcccgcttagctatgcca

SEQ ID NO: 1507356 - DNA, 25 bp, Homo sapien
caaacagatgcgtttagggtggcat

SEQ ID NO: 1507357 - DNA, 25 bp, Homo sapien
aatcccgcttagctatgccaaacag

SEQ ID NO: 1507358 - DNA, 25 bp, Homo sapien
cttcaatattctggtctttccattt

SEQ ID NO: 1507359 - DNA, 25 bp, Homo sapien
tgatcttcaatattctggtctttcc

SEQ ID NO: 1507360 - DNA, 25 bp, Homo sapien
cttagatttctgtagtgatcttcaa

SEQ ID NO: 1507361 - DNA, 25 bp, Homo sapien
atcttcaatattctggtctttccat

SEQ ID NO: 1507362 - DNA, 25 bp, Homo sapien
ttacaaatactaaacctctatcatt

SEQ ID NO: 1507363 - DNA, 25 bp, Homo sapien
tcttgaatgggggtcatcctgttgc

SEQ ID NO: 1507364 - DNA, 25 bp, Homo sapien
tttacaaatactaaacctctatcat

SEQ ID NO: 1507365 - DNA, 25 bp, Homo sapien
tttttcttgaatgggggtcatcctg

SEQ ID NO: 1507366 - DNA, 25 bp, Homo sapien
gggactacagctgagtaccaccatg

SEQ ID NO: 1507367 - DNA, 25 bp, Homo sapien
actacagctgagtaccaccatgccc

SEQ ID NO: 1507368 - DNA, 25 bp, Homo sapien
ccgggttcaagattgaggctgtgcc

SEQ ID NO: 1507369 - DNA, 25 bp, Homo sapien
ctcccgggttcaagattgaggctgt

SEQ ID NO: 1507370 - DNA, 25 bp, Homo sapien
atgttgtcagtctttatatgccaat

SEQ ID NO: 1507371 - DNA, 25 bp, Homo sapien
cctgacctccagaacgcctcccagg

SEQ ID NO: 1507372 - DNA, 25 bp, Homo sapien
cttttaaagcaagaagcagtggcgt

SEQ ID NO: 1507373 - DNA, 25 bp, Homo sapien
ttattagaatgttgtcagtctttat

SEQ ID NO: 1507374 - DNA, 25 bp, Homo sapien
cagggactggcactaaaaattttca

SEQ ID NO: 1507375 - DNA, 25 bp, Homo sapien
aactttcaatgatatattcagggac

SEQ ID NO: 1507376 - DNA, 25 bp, Homo sapien
ttcagactgcaaatgagttatataa

SEQ ID NO: 1507377 - DNA, 25 bp, Homo sapien
gatccagttatcacaatgaaagcac

SEQ ID NO: 1507378 - DNA, 25 bp, Homo sapien
aactgctctccttgtacccttggga

SEQ ID NO: 1507379 - DNA, 25 bp, Homo sapien
cacatcatgcaaaaacgtaggactg

SEQ ID NO: 1507380 - DNA, 25 bp, Homo sapien
cacagggctccaaagacaagagttc

SEQ ID NO: 1507381 - DNA, 25 bp, Homo sapien
tcagttttaggaattaggctcacac

SEQ ID NO: 1507382 - DNA, 25 bp, Homo sapien
tgtctcaatggcacccagattggct

SEQ ID NO: 1507383 - DNA, 25 bp, Homo sapien
ctcatagtaaggctttagatgtctc

SEQ ID NO: 1507384 - DNA, 25 bp, Homo sapien
caaatcggggctgacggccttcaga

SEQ ID NO: 1507385 - DNA, 25 bp, Homo sapien
tgcaatatccaagtttctagagtgt

SEQ ID NO: 1507386 - DNA, 25 bp, Homo sapien
gattctgcaatgagcggacatcgca

SEQ ID NO: 1507387 - DNA, 25 bp, Homo sapien
tcagcctcgtaaatgaaaatgcact

SEQ ID NO: 1507388 - DNA, 25 bp, Homo sapien
tgttgttggaaaatagtcactcagc

SEQ ID NO: 1507389 - DNA, 25 bp, Homo sapien
aaatgtcccatgtgataggatggcc

SEQ ID NO: 1507390 - DNA, 25 bp, Homo sapien
tgtctaaaacttcgaggcggtagga

SEQ ID NO: 1507391 - DNA, 25 bp, Homo sapien
taaaggaagcgggtataatgaggcc

SEQ ID NO: 1507392 - DNA, 25 bp, Homo sapien
cccaggaggcctgaagtaagtggtc

SEQ ID NO: 1507393 - DNA, 25 bp, Homo sapien
ccgaggcggctcaagactgttttta

SEQ ID NO: 1507394 - DNA, 25 bp, Homo sapien
ggcccggcgcttcgtccaatcaggg

SEQ ID NO: 1507395 - DNA, 25 bp, Homo sapien
tctgccatagcttctgtcgcctgtg

SEQ ID NO: 1507396 - DNA, 25 bp, Homo sapien
cgagctgaggttgggagcctggctt

SEQ ID NO: 1507397 - DNA, 25 bp, Homo sapien
tgtgctgtgacccgcactggtcgtg

SEQ ID NO: 1507398 - DNA, 25 bp, Homo sapien
gctgggcttaagttcctaggctcaa

SEQ ID NO: 1507399 - DNA, 25 bp, Homo sapien
cattagtctgtcataggagcccgaa

SEQ ID NO: 1507400 - DNA, 25 bp, Homo sapien
caccgccggacgagctaaagtttct

SEQ ID NO: 1507401 - DNA, 25 bp, Homo sapien
tattcaacagtactctatggcaggg

SEQ ID NO: 1507402 - DNA, 25 bp, Homo sapien
gatcacatatcattgctatactcag

SEQ ID NO: 1507403 - DNA, 25 bp, Homo sapien
tctttagatcacatatcattgctat

SEQ ID NO: 1507404 - DNA, 25 bp, Homo sapien
gctatactcagtctccatggctcag

SEQ ID NO: 1507405 - DNA, 25 bp, Homo sapien
tcattgctatactcagtctccatgg

SEQ ID NO: 1507406 - DNA, 25 bp, Homo sapien
catgatggcatcactggagggcagc

SEQ ID NO: 1507407 - DNA, 25 bp, Homo sapien
taaagtgtgacatggcttatgtgta

SEQ ID NO: 1507408 - DNA, 25 bp, Homo sapien
aggtcaggatggaagatcgcttgaa

SEQ ID NO: 1507409 - DNA, 25 bp, Homo sapien
tgacatggcttatgtgtataatcca

SEQ ID NO: 1507410 - DNA, 25 bp, Homo sapien
acacagacgacagggcgacagaagt

SEQ ID NO: 1507411 - DNA, 25 bp, Homo sapien
aggtgactcccacgtccaaagcagt

SEQ ID NO: 1507412 - DNA, 25 bp, Homo sapien
gccaaagactgaggcgaacggcaat

SEQ ID NO: 1507413 - DNA, 25 bp, Homo sapien
cgacagaagtatggcggtggcaacc

SEQ ID NO: 1507414 - DNA, 25 bp, Homo sapien
ccgcctcttgcctccctgcgagctg

SEQ ID NO: 1507415 - DNA, 25 bp, Homo sapien
ttatattgcccaggcaggtctcgaa

SEQ ID NO: 1507416 - DNA, 25 bp, Homo sapien
ttttgtggagaacggggtctcatta

SEQ ID NO: 1507417 - DNA, 25 bp, Homo sapien
ctcccgcctcttgcctccctgcgag

SEQ ID NO: 1507418 - DNA, 25 bp, Homo sapien
ccctgcttagctacagagaatagat

SEQ ID NO: 1507419 - DNA, 25 bp, Homo sapien
gcttagctacagagaatagatgtgt

SEQ ID NO: 1507420 - DNA, 25 bp, Homo sapien
aaacagccagtattcctaggcattt

SEQ ID NO: 1507421 - DNA, 25 bp, Homo sapien
cctgcttagctacagagaatagatg

SEQ ID NO: 1507422 - DNA, 25 bp, Homo sapien
cccacatgtatagaggaggatgggt

SEQ ID NO: 1507423 - DNA, 25 bp, Homo sapien
aggaggatgggtgagactgacagca

SEQ ID NO: 1507424 - DNA, 25 bp, Homo sapien
tatagaggaggatgggtgagactga

SEQ ID NO: 1507425 - DNA, 25 bp, Homo sapien
gatgggtgagactgacagcactggg

SEQ ID NO: 1507426 - DNA, 25 bp, Homo sapien
ctatggaggccagattcctcaaggt

SEQ ID NO: 1507427 - DNA, 25 bp, Homo sapien
ggaggccagattcctcaaggtttcc

SEQ ID NO: 1507428 - DNA, 25 bp, Homo sapien
ggccagattcctcaaggtttcctgc

SEQ ID NO: 1507429 - DNA, 25 bp, Homo sapien
tatggaggccagattcctcaaggtt

SEQ ID NO: 1507430 - DNA, 25 bp, Homo sapien
tattcctgggatttttgtactgatc

SEQ ID NO: 1507431 - DNA, 25 bp, Homo sapien
tttgtactgatcttcaatgttctgg

SEQ ID NO: 1507432 - DNA, 25 bp, Homo sapien
gattattcctgggatttttgtactg

SEQ ID NO: 1507433 - DNA, 25 bp, Homo sapien
cttagattattcctgggatttttgt

SEQ ID NO: 1507434 - DNA, 25 bp, Homo sapien
gacacttatatggctcctgtccata

SEQ ID NO: 1507435 - DNA, 25 bp, Homo sapien
cctgatactcagacggcttgtgtgc

SEQ ID NO: 1507436 - DNA, 25 bp, Homo sapien
tgcttgaatgggatatgaaggtttt

SEQ ID NO: 1507437 - DNA, 25 bp, Homo sapien
tgcagtgtcagctctaatgtgccta

SEQ ID NO: 1507438 - DNA, 25 bp, Homo sapien
tataagatatatgctgagacaaggg

SEQ ID NO: 1507439 - DNA, 25 bp, Homo sapien
ataagatatatgctgagacaagggc

SEQ ID NO: 1507440 - DNA, 25 bp, Homo sapien
aagggaattgggactaccgaatgct

SEQ ID NO: 1507441 - DNA, 25 bp, Homo sapien
gaattgggactaccgaatgctttcc

SEQ ID NO: 1507442 - DNA, 25 bp, Homo sapien
ggaattgggactaccgaatgctttc

SEQ ID NO: 1507443 - DNA, 25 bp, Homo sapien
tcataaagggaattgggactaccga

SEQ ID NO: 1507444 - DNA, 25 bp, Homo sapien
ctttcatgtatttgaaaggaatgga

SEQ ID NO: 1507445 - DNA, 25 bp, Homo sapien
ggtacattcataagccttctcctca

SEQ ID NO: 1507446 - DNA, 25 bp, Homo sapien
ccttctcctcactgtgagttctttc

SEQ ID NO: 1507447 - DNA, 25 bp, Homo sapien
cacatttggtacattcataagcctt

SEQ ID NO: 1507448 - DNA, 25 bp, Homo sapien
tgggtcacttcatgtctacaaagat

SEQ ID NO: 1507449 - DNA, 25 bp, Homo sapien
cagagtgggtcacttcatgtctaca

SEQ ID NO: 1507450 - DNA, 25 bp, Homo sapien
tttataaggtctcattctagtgtgc

SEQ ID NO: 1507451 - DNA, 25 bp, Homo sapien
catttataaggtctcattctagtgt

SEQ ID NO: 1507452 - DNA, 25 bp, Homo sapien
tagtgaaaggaactggaacgattga

SEQ ID NO: 1507453 - DNA, 25 bp, Homo sapien
gtgaaaggaactggaacgattgaag

SEQ ID NO: 1507454 - DNA, 25 bp, Homo sapien
taccacagtgcttgcattcataagg

SEQ ID NO: 1507455 - DNA, 25 bp, Homo sapien
tgatagtgaaaggaactggaacgat

SEQ ID NO: 1507456 - DNA, 25 bp, Homo sapien
ccatgcatttgaaggtgtgaggcag

SEQ ID NO: 1507457 - DNA, 25 bp, Homo sapien
agaaatgaaggctttactacactgc

SEQ ID NO: 1507458 - DNA, 25 bp, Homo sapien
tcatgatatcgaaaggaagtggaag

SEQ ID NO: 1507459 - DNA, 25 bp, Homo sapien
tcttgagtgtgagtccttccatgca

SEQ ID NO: 1507460 - DNA, 25 bp, Homo sapien
ctttcatgcatttgaaggtgtgagg

SEQ ID NO: 1507461 - DNA, 25 bp, Homo sapien
catttgaaggtgtgaggcagatgtg

SEQ ID NO: 1507462 - DNA, 25 bp, Homo sapien
tcatgatatcgaaaggaagtggaaa

SEQ ID NO: 1507463 - DNA, 25 bp, Homo sapien
catgatatcgaaaggaagtggaaaa

SEQ ID NO: 1507464 - DNA, 25 bp, Homo sapien
aggtttctgacagatccaaaggttt

SEQ ID NO: 1507465 - DNA, 25 bp, Homo sapien
tgcttttccatattccttatagggt

SEQ ID NO: 1507466 - DNA, 25 bp, Homo sapien
gaaggtttctgacagatccaaaggt

SEQ ID NO: 1507467 - DNA, 25 bp, Homo sapien
ttcataggcattctgtcctctgtgc

SEQ ID NO: 1507468 - DNA, 25 bp, Homo sapien
ttgtgtatacgcaaagaagaaaaat

SEQ ID NO: 1507469 - DNA, 25 bp, Homo sapien
ttttgtgtatacgcaaagaagaaaa

SEQ ID NO: 1507470 - DNA, 25 bp, Homo sapien
tttgtgtatacgcaaagaagaaaaa

SEQ ID NO: 1507471 - DNA, 25 bp, Homo sapien
cttttgtgtatacgcaaagaagaaa

SEQ ID NO: 1507472 - DNA, 25 bp, Homo sapien
tacgaaaggaaccaggcaaactgaa

SEQ ID NO: 1507473 - DNA, 25 bp, Homo sapien
cgaaaggaaccaggcaaactgaatg

SEQ ID NO: 1507474 - DNA, 25 bp, Homo sapien
acgaaaggaaccaggcaaactgaat

SEQ ID NO: 1507475 - DNA, 25 bp, Homo sapien
ctacgaaaggaaccaggcaaactga

SEQ ID NO: 1507476 - DNA, 25 bp, Homo sapien
ttccttgcattcatacggtttcact

SEQ ID NO: 1507477 - DNA, 25 bp, Homo sapien
gaaaggaaccagaagaagtgaaggc

SEQ ID NO: 1507478 - DNA, 25 bp, Homo sapien
cattccttgcattcatacggtttca

SEQ ID NO: 1507479 - DNA, 25 bp, Homo sapien
ctgaaaggaaccagaagaagtgaag

SEQ ID NO: 1507480 - DNA, 25 bp, Homo sapien
catgtctacgaatggcagtggaaga

SEQ ID NO: 1507481 - DNA, 25 bp, Homo sapien
tttcatgtctacgaatggcagtgga

SEQ ID NO: 1507482 - DNA, 25 bp, Homo sapien
atgtctacgaatggcagtggaagaa

SEQ ID NO: 1507483 - DNA, 25 bp, Homo sapien
tcatgtctacgaatggcagtggaag

SEQ ID NO: 1507484 - DNA, 25 bp, Homo sapien
tctatgcatctgaagttgagtggca

SEQ ID NO: 1507485 - DNA, 25 bp, Homo sapien
gaaggctaccggaagaaatgaaggc

SEQ ID NO: 1507486 - DNA, 25 bp, Homo sapien
tgtgaatctttctatgcatctgaag

SEQ ID NO: 1507487 - DNA, 25 bp, Homo sapien
tcatgatatcgaaggctaccggaag

SEQ ID NO: 1507488 - DNA, 25 bp, Homo sapien
tgtctgtatttgaaggttcttagca

SEQ ID NO: 1507489 - DNA, 25 bp, Homo sapien
tgaaggttcttagcaaatctgaagg

SEQ ID NO: 1507490 - DNA, 25 bp, Homo sapien
ttgtgagacagatctgtaggctttc

SEQ ID NO: 1507491 - DNA, 25 bp, Homo sapien
cctttcatgcaccagaagttgtgag

SEQ ID NO: 1507492 - DNA, 25 bp, Homo sapien
aatagagaataacagctgggtgcag

SEQ ID NO: 1507493 - DNA, 25 bp, Homo sapien
gggtttcaatgccactcagatcaga

SEQ ID NO: 1507494 - DNA, 25 bp, Homo sapien
gagagaggcctatctgtcatgtgca

SEQ ID NO: 1507495 - DNA, 25 bp, Homo sapien
aaatagagaataacggccgggcacg

SEQ ID NO: 1507496 - DNA, 25 bp, Homo sapien
cagcctgtatggatgtggcacctgt

SEQ ID NO: 1507497 - DNA, 25 bp, Homo sapien
ggaagaagctcctatctagttggac

SEQ ID NO: 1507498 - DNA, 25 bp, Homo sapien
caagataagggtcagtaacagcagg

SEQ ID NO: 1507499 - DNA, 25 bp, Homo sapien
tctgcattagctctctggtaaagac

SEQ ID NO: 1507500 - DNA, 25 bp, Homo sapien
cagtatacagttgtggaaaagttca

SEQ ID NO: 1507501 - DNA, 25 bp, Homo sapien
gtatacagttgtggaaaagttcaac

SEQ ID NO: 1507502 - DNA, 25 bp, Homo sapien
taagaaagaataatgtttgtcagta

SEQ ID NO: 1507503 - DNA, 25 bp, Homo sapien
aaagaataatgtttgtcagtataca

SEQ ID NO: 1507504 - DNA, 25 bp, Homo sapien
gacaggagctctggcggagaaacct

SEQ ID NO: 1507505 - DNA, 25 bp, Homo sapien
tccaacggtcgttagcacagcaaca

SEQ ID NO: 1507506 - DNA, 25 bp, Homo sapien
gagcgttccaagagccagaaagagg

SEQ ID NO: 1507507 - DNA, 25 bp, Homo sapien
gaacacagcgcaactgacagagcga

SEQ ID NO: 1507508 - DNA, 25 bp, Homo sapien
ttcattgtcctgtggaatcatattt

SEQ ID NO: 1507509 - DNA, 25 bp, Homo sapien
tttgatttgcttcaccctgttgggg

SEQ ID NO: 1507510 - DNA, 25 bp, Homo sapien
ggcagctgtgggccgagatcgagcc

SEQ ID NO: 1507511 - DNA, 25 bp, Homo sapien
gcagctgtgggccgagatcgagcca

SEQ ID NO: 1507512 - DNA, 25 bp, Homo sapien
aggcagctgtgggccgagatcgagc

SEQ ID NO: 1507513 - DNA, 25 bp, Homo sapien
aacatactatgggagattgcaacac

SEQ ID NO: 1507514 - DNA, 25 bp, Homo sapien
taataaatgaccactcctaacttcc

SEQ ID NO: 1507515 - DNA, 25 bp, Homo sapien
cagctgtgaaatatcttggcctatt

SEQ ID NO: 1507516 - DNA, 25 bp, Homo sapien
gtctactcatcaacagacttaaaca

SEQ ID NO: 1507517 - DNA, 25 bp, Homo sapien
cagattctccatggtacctaggaca

SEQ ID NO: 1507518 - DNA, 25 bp, Homo sapien
tggtacctaggacaccatatcctac

SEQ ID NO: 1507519 - DNA, 25 bp, Homo sapien
tctccatggtacctaggacaccata

SEQ ID NO: 1507520 - DNA, 25 bp, Homo sapien
catggtacctaggacaccatatcct

SEQ ID NO: 1507521 - DNA, 25 bp, Homo sapien
gttgcagaagaacataatgccatgg

SEQ ID NO: 1507522 - DNA, 25 bp, Homo sapien
cagaagaacataatgccatggccag

SEQ ID NO: 1507523 - DNA, 25 bp, Homo sapien
tcgtccacctaaccttgtgaggatt

SEQ ID NO: 1507524 - DNA, 25 bp, Homo sapien
attgttgcagaagaacataatgcca

SEQ ID NO: 1507525 - DNA, 25 bp, Homo sapien
aaactaagaatttagcagttctaat

SEQ ID NO: 1507526 - DNA, 25 bp, Homo sapien
gaatttagcagttctaattctccaa

SEQ ID NO: 1507527 - DNA, 25 bp, Homo sapien
gcagttctaattctccaaggggctt

SEQ ID NO: 1507528 - DNA, 25 bp, Homo sapien
ttacttttcatttgagtgaccttat

SEQ ID NO: 1507529 - DNA, 25 bp, Homo sapien
tgaacaaaacggtcagatggcagaa

SEQ ID NO: 1507530 - DNA, 25 bp, Homo sapien
cctattatctggaaccatggcggta

SEQ ID NO: 1507531 - DNA, 25 bp, Homo sapien
gctgaccttaatgccagaactggag

SEQ ID NO: 1507532 - DNA, 25 bp, Homo sapien
tgtaaacaggatcggacccagttag

SEQ ID NO: 1507533 - DNA, 25 bp, Homo sapien
ccagacccaatcctggcaggaactg

SEQ ID NO: 1507534 - DNA, 25 bp, Homo sapien
agcactcagtattcccagtattact

SEQ ID NO: 1507535 - DNA, 25 bp, Homo sapien
cagacccaatcctggcaggaactga

SEQ ID NO: 1507536 - DNA, 25 bp, Homo sapien
actctcatataagtaataaccagac

SEQ ID NO: 1507537 - DNA, 25 bp, Homo sapien
aaagcccactcgtctggggtgaagt

SEQ ID NO: 1507538 - DNA, 25 bp, Homo sapien
tatagaggccaagttcctcaaggtt

SEQ ID NO: 1507539 - DNA, 25 bp, Homo sapien
acttctcggtagagattcttttggg

SEQ ID NO: 1507540 - DNA, 25 bp, Homo sapien
ttcttgcatcacttctcggtagaga

SEQ ID NO: 1507541 - DNA, 25 bp, Homo sapien
ctaattcactgagggagtaatattg

SEQ ID NO: 1507542 - DNA, 25 bp, Homo sapien
tgagggagtaatattgtcaccgtta

SEQ ID NO: 1507543 - DNA, 25 bp, Homo sapien
taattcactgagggagtaatattgt

SEQ ID NO: 1507544 - DNA, 25 bp, Homo sapien
gagggagtaatattgtcaccgttac

SEQ ID NO: 1507545 - DNA, 25 bp, Homo sapien
gttgctcctgggatttttgtactca

SEQ ID NO: 1507546 - DNA, 25 bp, Homo sapien
tgtactcattttcaatgttctggtc

SEQ ID NO: 1507547 - DNA, 25 bp, Homo sapien
cttaggttgctcctgggatttttgt

SEQ ID NO: 1507548 - DNA, 25 bp, Homo sapien
caatgttctggtctttccatttctt

SEQ ID NO: 1507549 - DNA, 25 bp, Homo sapien
tgtctgcaaaagtaggggagacagc

SEQ ID NO: 1507550 - DNA, 25 bp, Homo sapien
tttctccagtgtgtgcaattacatg

SEQ ID NO: 1507551 - DNA, 25 bp, Homo sapien
attacatgtctgcaaaagtagggga

SEQ ID NO: 1507552 - DNA, 25 bp, Homo sapien
ggataaatgacccatgctgacctca

SEQ ID NO: 1507553 - DNA, 25 bp, Homo sapien
actaaatgtcttcgcagaatcctta

SEQ ID NO: 1507554 - DNA, 25 bp, Homo sapien
aaactaaatgtcttcgcagaatcct

SEQ ID NO: 1507555 - DNA, 25 bp, Homo sapien
ggaaaaactaaatgtcttcgcagaa

SEQ ID NO: 1507556 - DNA, 25 bp, Homo sapien
aaaaactaaatgtcttcgcagaatc

SEQ ID NO: 1507557 - DNA, 25 bp, Homo sapien
tccacactgagtccttgcatgcatt

SEQ ID NO: 1507558 - DNA, 25 bp, Homo sapien
catccaaagggttttccagattgtt

SEQ ID NO: 1507559 - DNA, 25 bp, Homo sapien
gcatgcatttgaagttctgaggcgc

SEQ ID NO: 1507560 - DNA, 25 bp, Homo sapien
taggggttccctccagagtgagctc

SEQ ID NO: 1507561 - DNA, 25 bp, Homo sapien
aaaggaagataagttattaaatgct

SEQ ID NO: 1507562 - DNA, 25 bp, Homo sapien
gtatgtattcccagaacccttacag

SEQ ID NO: 1507563 - DNA, 25 bp, Homo sapien
aaggaagataagttattaaatgctt

SEQ ID NO: 1507564 - DNA, 25 bp, Homo sapien
ggtatgtattcccagaacccttaca

SEQ ID NO: 1507565 - DNA, 25 bp, Homo sapien
cgaaggccactccagtaacgataga

SEQ ID NO: 1507566 - DNA, 25 bp, Homo sapien
tgaaggccgctccaataacgagaga

SEQ ID NO: 1507567 - DNA, 25 bp, Homo sapien
ccatgtattcggaggcttgaggcac

SEQ ID NO: 1507568 - DNA, 25 bp, Homo sapien
gagttagtccatgtattcgaaggcc

SEQ ID NO: 1507569 - DNA, 25 bp, Homo sapien
ttattcacagggcttttcgccagtg

SEQ ID NO: 1507570 - DNA, 25 bp, Homo sapien
cttttcgccagtgtgtgccctttca

SEQ ID NO: 1507571 - DNA, 25 bp, Homo sapien
gcttttcgccagtgtgtgccctttc

SEQ ID NO: 1507572 - DNA, 25 bp, Homo sapien
ttcgccagtgtgtgccctttcatat

SEQ ID NO: 1507573 - DNA, 25 bp, Homo sapien
gctccacagaagatatgaaaaatcc

SEQ ID NO: 1507574 - DNA, 25 bp, Homo sapien
tcatgcattcaaagctccacagaag

SEQ ID NO: 1507575 - DNA, 25 bp, Homo sapien
gaagatatgaaaaatcctttcccac

SEQ ID NO: 1507576 - DNA, 25 bp, Homo sapien
cattcaaagctccacagaagatatg

SEQ ID NO: 1507577 - DNA, 25 bp, Homo sapien
aaaatgggctgaagcatgtggccac

SEQ ID NO: 1507578 - DNA, 25 bp, Homo sapien
gtcactgccactagaacaatgcttg

SEQ ID NO: 1507579 - DNA, 25 bp, Homo sapien
tcagggcagcatagtaaatgtcagg

SEQ ID NO: 1507580 - DNA, 25 bp, Homo sapien
tgaatcatgaacagggtcactgcca

SEQ ID NO: 1507581 - DNA, 25 bp, Homo sapien
tccgggaccgcagtcaccaggcagg

SEQ ID NO: 1507582 - DNA, 25 bp, Homo sapien
ggcaggactctccttatgtcatgtg

SEQ ID NO: 1507583 - DNA, 25 bp, Homo sapien
accttgcggccgaggagactgaggg

SEQ ID NO: 1507584 - DNA, 25 bp, Homo sapien
cgagatgtgccagaactcgggtccc

SEQ ID NO: 1507585 - DNA, 25 bp, Homo sapien
aaaagaaattagtggccagatacag

SEQ ID NO: 1507586 - DNA, 25 bp, Homo sapien
gaattgaaagctcatgtccccagaa

SEQ ID NO: 1507587 - DNA, 25 bp, Homo sapien
caagcccagctcaagatgaactttt

SEQ ID NO: 1507588 - DNA, 25 bp, Homo sapien
tcacaaagacgttttcagcagcctt

SEQ ID NO: 1507589 - DNA, 25 bp, Homo sapien
tattgagcacatccagggaaaaggc

SEQ ID NO: 1507590 - DNA, 25 bp, Homo sapien
ggatgcacggaagaaaaagataccc

SEQ ID NO: 1507591 - DNA, 25 bp, Homo sapien
aaagtggagttggtcgctgtacgca

SEQ ID NO: 1507592 - DNA, 25 bp, Homo sapien
gacttacagaactcatgggcagatg

SEQ ID NO: 1507593 - DNA, 25 bp, Homo sapien
tagaaggatctttgctataactggg

SEQ ID NO: 1507594 - DNA, 25 bp, Homo sapien
ctgtaatatgggagagagattgacc

SEQ ID NO: 1507595 - DNA, 25 bp, Homo sapien
acttcattgggtatcacgtttggag

SEQ ID NO: 1507596 - DNA, 25 bp, Homo sapien
gattgacctcaaccttgcatgcagc

SEQ ID NO: 1507597 - DNA, 25 bp, Homo sapien
gcaggtacaggaaaccgcgccacag

SEQ ID NO: 1507598 - DNA, 25 bp, Homo sapien
aggtacaggaaaccgcgccacagag

SEQ ID NO: 1507599 - DNA, 25 bp, Homo sapien
ggaaaccgcgccacagagactccag

SEQ ID NO: 1507600 - DNA, 25 bp, Homo sapien
acaggaaaccgcgccacagagactc

SEQ ID NO: 1507601 - DNA, 25 bp, Homo sapien
accaccagtgtgtctccaaaggatg

SEQ ID NO: 1507602 - DNA, 25 bp, Homo sapien
caccagtgtgtctccaaaggatgga

SEQ ID NO: 1507603 - DNA, 25 bp, Homo sapien
ctgaccaccagtgtgtctccaaagg

SEQ ID NO: 1507604 - DNA, 25 bp, Homo sapien
gaccaccagtgtgtctccaaaggat

SEQ ID NO: 1507605 - DNA, 25 bp, Homo sapien
cttcctccaggttccagatacccat

SEQ ID NO: 1507606 - DNA, 25 bp, Homo sapien
ccttcctccaggttccagataccca

SEQ ID NO: 1507607 - DNA, 25 bp, Homo sapien
cgtatgcagtggtgtgccttcctcc

SEQ ID NO: 1507608 - DNA, 25 bp, Homo sapien
atgcagtggtgtgccttcctccagg

SEQ ID NO: 1507609 - DNA, 25 bp, Homo sapien
aacagaatcggatgctgatggcgag

SEQ ID NO: 1507610 - DNA, 25 bp, Homo sapien
ctccagccatgtcggaccccaggcc

SEQ ID NO: 1507611 - DNA, 25 bp, Homo sapien
catttgagcaactcagatgaaacag

SEQ ID NO: 1507612 - DNA, 25 bp, Homo sapien
caggcccctgcacacttgccatttc

SEQ ID NO: 1507613 - DNA, 25 bp, Homo sapien
cctcaacctcccgaggaggtgggag

SEQ ID NO: 1507614 - DNA, 25 bp, Homo sapien
ctcaagggattatcccgcctcaacc

SEQ ID NO: 1507615 - DNA, 25 bp, Homo sapien
tcaacctcccgaggaggtgggagta

SEQ ID NO: 1507616 - DNA, 25 bp, Homo sapien
ggctcaagggattatcccgcctcaa

SEQ ID NO: 1507617 - DNA, 25 bp, Homo sapien
aattttagggcgcacctgtcctgca

SEQ ID NO: 1507618 - DNA, 25 bp, Homo sapien
tgttacacgcgcaacacatagtgcc

SEQ ID NO: 1507619 - DNA, 25 bp, Homo sapien
cctatgtaagagtagctcggtgcct

SEQ ID NO: 1507620 - DNA, 25 bp, Homo sapien
tatcgggtagaacaatagcagtgtc

SEQ ID NO: 1507621 - DNA, 25 bp, Homo sapien
ggccagattcctcatggtttcccac

SEQ ID NO: 1507622 - DNA, 25 bp, Homo sapien
aggccagattcctcatggtttccca

SEQ ID NO: 1507623 - DNA, 25 bp, Homo sapien
gccagattcctcatggtttcccaca

SEQ ID NO: 1507624 - DNA, 25 bp, Homo sapien
gttcatgataccctgtgactatgcc

SEQ ID NO: 1507625 - DNA, 25 bp, Homo sapien
tagattctaggttcatgataccctg

SEQ ID NO: 1507626 - DNA, 25 bp, Homo sapien
taattgctaagtgatggaagtatac

SEQ ID NO: 1507627 - DNA, 25 bp, Homo sapien
caaaccatggaacagcatcactgca

SEQ ID NO: 1507628 - DNA, 25 bp, Homo sapien
ccctcggtgtttgtagtgatcttta

SEQ ID NO: 1507629 - DNA, 25 bp, Homo sapien
ttctccctcggtgtttgtagtgatc

SEQ ID NO: 1507630 - DNA, 25 bp, Homo sapien
gtgatctttaatgttctggtccttc

SEQ ID NO: 1507631 - DNA, 25 bp, Homo sapien
tagatttctccctcggtgtttgtag

SEQ ID NO: 1507632 - DNA, 25 bp, Homo sapien
tccagggattttcttgctcagattc

SEQ ID NO: 1507633 - DNA, 25 bp, Homo sapien
tgtctattaagggatgactgaccca

SEQ ID NO: 1507634 - DNA, 25 bp, Homo sapien
ctaaaaattcctccacgctgactac

SEQ ID NO: 1507635 - DNA, 25 bp, Homo sapien
tatacaatgctttcacagagtttca

SEQ ID NO: 1507636 - DNA, 25 bp, Homo sapien
tgtctctgaaagctggcacggcaag

SEQ ID NO: 1507637 - DNA, 25 bp, Homo sapien
tcttcgcatacttgggatacaactg

SEQ ID NO: 1507638 - DNA, 25 bp, Homo sapien
gaaaggtactggcagatctaaaggc

SEQ ID NO: 1507639 - DNA, 25 bp, Homo sapien
catgtattcgaaatggactcagaga

SEQ ID NO: 1507640 - DNA, 25 bp, Homo sapien
ggcttcaagtggaactaaaatgact

SEQ ID NO: 1507641 - DNA, 25 bp, Homo sapien
gacagaatttcatgctttcccacgt

SEQ ID NO: 1507642 - DNA, 25 bp, Homo sapien
ctggctaaaaacgtgtggacattgc

SEQ ID NO: 1507643 - DNA, 25 bp, Homo sapien
catttatagtgttttgatccagggt

SEQ ID NO: 1507644 - DNA, 25 bp, Homo sapien
gccagacaagtactttaacccacaa

SEQ ID NO: 1507645 - DNA, 25 bp, Homo sapien
gattgaaatccagcatctcctgttt

SEQ ID NO: 1507646 - DNA, 25 bp, Homo sapien
gggattgaaatccagcatctcctgt

SEQ ID NO: 1507647 - DNA, 25 bp, Homo sapien
cctgtttgccagacaagtactttaa

SEQ ID NO: 1507648 - DNA, 25 bp, Homo sapien
tacatgacccgctatgcatgaggct

SEQ ID NO: 1507649 - DNA, 25 bp, Homo sapien
taacatacctgaatatgagaaacac

SEQ ID NO: 1507650 - DNA, 25 bp, Homo sapien
cctatgaaattcatgcactattgct

SEQ ID NO: 1507651 - DNA, 25 bp, Homo sapien
tcagtggtcctcaatcacagaacaa

SEQ ID NO: 1507652 - DNA, 25 bp, Homo sapien
ggaaactcttagtatgcttaacaga

SEQ ID NO: 1507653 - DNA, 25 bp, Homo sapien
cactacacaatgcatcccttttaag

SEQ ID NO: 1507654 - DNA, 25 bp, Homo sapien
taaacgactatgatatacctaaggt

SEQ ID NO: 1507655 - DNA, 25 bp, Homo sapien
agtgtacatttcacactacaggaaa

SEQ ID NO: 1507656 - DNA, 25 bp, Homo sapien
gagtgacagagctgcgaaaggtcat

SEQ ID NO: 1507657 - DNA, 25 bp, Homo sapien
tggagtgacagagctgcgaaaggtc

SEQ ID NO: 1507658 - DNA, 25 bp, Homo sapien
ggagtgacagagctgcgaaaggtca

SEQ ID NO: 1507659 - DNA, 25 bp, Homo sapien
atggagtgacagagctgcgaaaggt

SEQ ID NO: 1507660 - DNA, 25 bp, Homo sapien
tagcgggagatattactacggtcag

SEQ ID NO: 1507661 - DNA, 25 bp, Homo sapien
tcacaacgcgcgtagcgggagatat

SEQ ID NO: 1507662 - DNA, 25 bp, Homo sapien
aggtgatagtcgaggtgcccagcaa

SEQ ID NO: 1507663 - DNA, 25 bp, Homo sapien
tcctgtatgcagcattggtcacaac

SEQ ID NO: 1507664 - DNA, 25 bp, Homo sapien
tgtaacttctagagtggaatagtcc

SEQ ID NO: 1507665 - DNA, 25 bp, Homo sapien
ctccctctgacatgtaacttctaga

SEQ ID NO: 1507666 - DNA, 25 bp, Homo sapien
tgaggtccatgctctccctctgaca

SEQ ID NO: 1507667 - DNA, 25 bp, Homo sapien
caccttaacatgcttgaggtccatg

SEQ ID NO: 1507668 - DNA, 25 bp, Homo sapien
taaggatctctagcctatgtcaggt

SEQ ID NO: 1507669 - DNA, 25 bp, Homo sapien
tgtggactcagtgcgccacctgatg

SEQ ID NO: 1507670 - DNA, 25 bp, Homo sapien
cagagaggctcagttcagtgtcatc

SEQ ID NO: 1507671 - DNA, 25 bp, Homo sapien
tattgtcccgtctatgccccagggt

SEQ ID NO: 1507672 - DNA, 25 bp, Homo sapien
gacccctggccatagtaggattcat

SEQ ID NO: 1507673 - DNA, 25 bp, Homo sapien
tcatcacacaagaatttggataatt

SEQ ID NO: 1507674 - DNA, 25 bp, Homo sapien
ttaattctaccaacatgacccctgg

SEQ ID NO: 1507675 - DNA, 25 bp, Homo sapien
cacacaagaatttggataattaatt

SEQ ID NO: 1507676 - DNA, 25 bp, Homo sapien
tagagttttttctgccaaggatcca

SEQ ID NO: 1507677 - DNA, 25 bp, Homo sapien
ctactgaagccaggttcctataggt

SEQ ID NO: 1507678 - DNA, 25 bp, Homo sapien
gccaggttcctataggtttccagca

SEQ ID NO: 1507679 - DNA, 25 bp, Homo sapien
tttttctgccaaggatccagcaaag

SEQ ID NO: 1507680 - DNA, 25 bp, Homo sapien
gcaacttgttctctaagtgaaggaa

SEQ ID NO: 1507681 - DNA, 25 bp, Homo sapien
tgccaggtcttgaaatatcgttgat

SEQ ID NO: 1507682 - DNA, 25 bp, Homo sapien
aagtgaaggaatgttgtcgtcatca

SEQ ID NO: 1507683 - DNA, 25 bp, Homo sapien
aatatcgttgatgggcaacttgttc

SEQ ID NO: 1507684 - DNA, 25 bp, Homo sapien
ttagctgtcaccatgcttggtttat

SEQ ID NO: 1507685 - DNA, 25 bp, Homo sapien
gctgtcaccatgcttggtttattta

SEQ ID NO: 1507686 - DNA, 25 bp, Homo sapien
tagctgtcaccatgcttggtttatt

SEQ ID NO: 1507687 - DNA, 25 bp, Homo sapien
ctgtcaccatgcttggtttatttac

SEQ ID NO: 1507688 - DNA, 25 bp, Homo sapien
ctgatcttcaatgttatgctcttca

SEQ ID NO: 1507689 - DNA, 25 bp, Homo sapien
tgatcttcaatgttatgctcttcac

SEQ ID NO: 1507690 - DNA, 25 bp, Homo sapien
gatcttcaatgttatgctcttcaca

SEQ ID NO: 1507691 - DNA, 25 bp, Homo sapien
tcttcaatgttatgctcttcacatt

SEQ ID NO: 1507692 - DNA, 25 bp, Homo sapien
cacacactgcattcacatggattta

SEQ ID NO: 1507693 - DNA, 25 bp, Homo sapien
aaatgaagacttttccacacacact

SEQ ID NO: 1507694 - DNA, 25 bp, Homo sapien
ttccacacacactgcattcacatgg

SEQ ID NO: 1507695 - DNA, 25 bp, Homo sapien
ctattaagggatgaatgacaaatga

SEQ ID NO: 1507696 - DNA, 25 bp, Homo sapien
tctccataatcttgacactcatatg

SEQ ID NO: 1507697 - DNA, 25 bp, Homo sapien
acagattgacgataactgaagggtt

SEQ ID NO: 1507698 - DNA, 25 bp, Homo sapien
tttcatgtctaagaacagattgacg

SEQ ID NO: 1507699 - DNA, 25 bp, Homo sapien
tctaagaacagattgacgataactg

SEQ ID NO: 1507700 - DNA, 25 bp, Homo sapien
aaagcttgcaaggtaaataaaggct

SEQ ID NO: 1507701 - DNA, 25 bp, Homo sapien
gaaatgaactaggacaactgaatgc

SEQ ID NO: 1507702 - DNA, 25 bp, Homo sapien
taacgtagttcgataaatgaaggct

SEQ ID NO: 1507703 - DNA, 25 bp, Homo sapien
tcatgtactcgaaaggaaccaagcc

SEQ ID NO: 1507704 - DNA, 25 bp, Homo sapien
aaaaggaattgtgccaaatgaaggc

SEQ ID NO: 1507705 - DNA, 25 bp, Homo sapien
caaaaggaattgtgccaaatgaagg

SEQ ID NO: 1507706 - DNA, 25 bp, Homo sapien
taacaaacaggtatgcctcaacttg

SEQ ID NO: 1507707 - DNA, 25 bp, Homo sapien
ccattgaatttaaacatggcacccc

SEQ ID NO: 1507708 - DNA, 25 bp, Homo sapien
gtataaccttatagcaaattcctga

SEQ ID NO: 1507709 - DNA, 25 bp, Homo sapien
catggcttctaaatgaactgggatg

SEQ ID NO: 1507710 - DNA, 25 bp, Homo sapien
aaacattcaaaaaggccacgcacag

SEQ ID NO: 1507711 - DNA, 25 bp, Homo sapien
caaggataggccatatatagttcac

SEQ ID NO: 1507712 - DNA, 25 bp, Homo sapien
taagagctggatacttcaacacccc

SEQ ID NO: 1507713 - DNA, 25 bp, Homo sapien
gagctaaagagagaggccctgatac

SEQ ID NO: 1507714 - DNA, 25 bp, Homo sapien
attctgaggtgtgtagtgatacata

SEQ ID NO: 1507715 - DNA, 25 bp, Homo sapien
ttcaccaaatgttataggaataatg

SEQ ID NO: 1507716 - DNA, 25 bp, Homo sapien
tgaggtgtgtagtgatacatattca

SEQ ID NO: 1507717 - DNA, 25 bp, Homo sapien
tcaccaaatgttataggaataatga

SEQ ID NO: 1507718 - DNA, 25 bp, Homo sapien
caatggtactgtgggaatctcttcc

SEQ ID NO: 1507719 - DNA, 25 bp, Homo sapien
tggacagccctcagatgttaaactg

SEQ ID NO: 1507720 - DNA, 25 bp, Homo sapien
taaactgcactgattgctggctgat

SEQ ID NO: 1507721 - DNA, 25 bp, Homo sapien
cactgcatcaaggatggagtgccct

SEQ ID NO: 1507722 - DNA, 25 bp, Homo sapien
tttgctggatttttccgtgaagaat

SEQ ID NO: 1507723 - DNA, 25 bp, Homo sapien
tgtcctcctctacacatatctggga

SEQ ID NO: 1507724 - DNA, 25 bp, Homo sapien
gtcctcctctacacatatctgggat

SEQ ID NO: 1507725 - DNA, 25 bp, Homo sapien
ctgtcctcctctacacatatctggg

SEQ ID NO: 1507726 - DNA, 25 bp, Homo sapien
cacagcttctgtccggtggtgacca

SEQ ID NO: 1507727 - DNA, 25 bp, Homo sapien
taaattatccaatcaggcgctccgc

SEQ ID NO: 1507728 - DNA, 25 bp, Homo sapien
tgaattcagccttccagaggccgag

SEQ ID NO: 1507729 - DNA, 25 bp, Homo sapien
aggtactggctcaattggacacgga

SEQ ID NO: 1507730 - DNA, 25 bp, Homo sapien
gatcatggcactgttgtcaaaaaat

SEQ ID NO: 1507731 - DNA, 25 bp, Homo sapien
gattccaaatgaacgttagggttga

SEQ ID NO: 1507732 - DNA, 25 bp, Homo sapien
gggtagtatgctcatcctaacaata

SEQ ID NO: 1507733 - DNA, 25 bp, Homo sapien
caggaagcgtgagtctttgaacttt

SEQ ID NO: 1507734 - DNA, 25 bp, Homo sapien
tccctaatcaccagtggtaatgagc

SEQ ID NO: 1507735 - DNA, 25 bp, Homo sapien
cctcactcatttttgaatgggctca

SEQ ID NO: 1507736 - DNA, 25 bp, Homo sapien
taggagttcctatgtattttgggta

SEQ ID NO: 1507737 - DNA, 25 bp, Homo sapien
gggtattaatctcttccaagatacg

SEQ ID NO: 1507738 - DNA, 25 bp, Homo sapien
gaatttgctgattctaggtgcgtca

SEQ ID NO: 1507739 - DNA, 25 bp, Homo sapien
tttagaaccatcacagctagctagc

SEQ ID NO: 1507740 - DNA, 25 bp, Homo sapien
gctagctagctagttccagaatttt

SEQ ID NO: 1507741 - DNA, 25 bp, Homo sapien
tgtaagtatgccattcagtagcatt

SEQ ID NO: 1507742 - DNA, 25 bp, Homo sapien
caaggtcttactatataggtcttac

SEQ ID NO: 1507743 - DNA, 25 bp, Homo sapien
gtcttactatataggtcttactata

SEQ ID NO: 1507744 - DNA, 25 bp, Homo sapien
aggtcttactatataggtcttacta

SEQ ID NO: 1507745 - DNA, 25 bp, Homo sapien
acaaggtcttactatataggtctta

SEQ ID NO: 1507746 - DNA, 25 bp, Homo sapien
tataaaataaggcagacataggcaa

SEQ ID NO: 1507747 - DNA, 25 bp, Homo sapien
ccaagttgtaaggtgaacacgttct

SEQ ID NO: 1507748 - DNA, 25 bp, Homo sapien
tgccactcgcatatgttcattacag

SEQ ID NO: 1507749 - DNA, 25 bp, Homo sapien
gaggaacggtggttactagagtcca

SEQ ID NO: 1507750 - DNA, 25 bp, Homo sapien
tgaggctaggaatctgggaccaacc

SEQ ID NO: 1507751 - DNA, 25 bp, Homo sapien
ggtgcccaattgtagtcccagtact

SEQ ID NO: 1507752 - DNA, 25 bp, Homo sapien
gcctgggacgcaccaacaagttgta

SEQ ID NO: 1507753 - DNA, 25 bp, Homo sapien
cactcataagtttaggaggccaggt

SEQ ID NO: 1507754 - DNA, 25 bp, Homo sapien
cacaaagcatcaatgacggagggtt

SEQ ID NO: 1507755 - DNA, 25 bp, Homo sapien
cacctatagtcaaagagtggcatgt

SEQ ID NO: 1507756 - DNA, 25 bp, Homo sapien
ccataagagggtgctcaagaggact

SEQ ID NO: 1507757 - DNA, 25 bp, Homo sapien
cattgccattcaacaaagtgaggtg

SEQ ID NO: 1507758 - DNA, 25 bp, Homo sapien
ttctgggccattgaaaaatgacagt

SEQ ID NO: 1507759 - DNA, 25 bp, Homo sapien
ttcccttgctaatgaatagtgggcc

SEQ ID NO: 1507760 - DNA, 25 bp, Homo sapien
tagtgcagaagtataattggtagtg

SEQ ID NO: 1507761 - DNA, 25 bp, Homo sapien
tggtactgggagttttctactggca

SEQ ID NO: 1507762 - DNA, 25 bp, Homo sapien
gcatgccaccattcttgtctgattt

SEQ ID NO: 1507763 - DNA, 25 bp, Homo sapien
ggtgcatgccaccattcttgtctga

SEQ ID NO: 1507764 - DNA, 25 bp, Homo sapien
caccaggttggccagagtagtctcg

SEQ ID NO: 1507765 - DNA, 25 bp, Homo sapien
accaggttggccagagtagtctcga

SEQ ID NO: 1507766 - DNA, 25 bp, Homo sapien
taggtcggcatagtcctcttgatca

SEQ ID NO: 1507767 - DNA, 25 bp, Homo sapien
gctgtaggtcggcatagtcctcttg

SEQ ID NO: 1507768 - DNA, 25 bp, Homo sapien
ttggtgctgtaggtcggcatagtcc

SEQ ID NO: 1507769 - DNA, 25 bp, Homo sapien
gtcggcatagtcctcttgatcagaa

SEQ ID NO: 1507770 - DNA, 25 bp, Homo sapien
tcagcccgttgtagcggaaggagct

SEQ ID NO: 1507771 - DNA, 25 bp, Homo sapien
aatcagcccgttgtagcggaaggag

SEQ ID NO: 1507772 - DNA, 25 bp, Homo sapien
tgtggtgaatcagcccgttgtagcg

SEQ ID NO: 1507773 - DNA, 25 bp, Homo sapien
cttgtggtgaatcagcccgttgtag

SEQ ID NO: 1507774 - DNA, 25 bp, Homo sapien
ggatctctgcttcgtgaccaccacc

SEQ ID NO: 1507775 - DNA, 25 bp, Homo sapien
ttcggctggccggatctctgcttcg

SEQ ID NO: 1507776 - DNA, 25 bp, Homo sapien
cttcggctggccggatctctgcttc

SEQ ID NO: 1507777 - DNA, 25 bp, Homo sapien
agctcttggtggcgcgggtccgctt

SEQ ID NO: 1507778 - DNA, 25 bp, Homo sapien
ttggtggcgcgggtccgcttccgct

SEQ ID NO: 1507779 - DNA, 25 bp, Homo sapien
ctcttggtggcgcgggtccgcttcc

SEQ ID NO: 1507780 - DNA, 25 bp, Homo sapien
tcttggtggcgcgggtccgcttccg

SEQ ID NO: 1507781 - DNA, 25 bp, Homo sapien
tttgttttttgcgggcatgaggggc

SEQ ID NO: 1507782 - DNA, 25 bp, Homo sapien
ggtgagaaagccagctgactcttta

SEQ ID NO: 1507783 - DNA, 25 bp, Homo sapien
tgactctttattgctttgggggcag

SEQ ID NO: 1507784 - DNA, 25 bp, Homo sapien
catgaggggctggtggtgagaaagc

SEQ ID NO: 1507785 - DNA, 25 bp, Homo sapien
gcgtgcctgtggtcccacctatttt

SEQ ID NO: 1507786 - DNA, 25 bp, Homo sapien
ttagtcaggcatagtggtgcgtgcc

SEQ ID NO: 1507787 - DNA, 25 bp, Homo sapien
aaattagtcaggcatagtggtgcgt

SEQ ID NO: 1507788 - DNA, 25 bp, Homo sapien
tagtcaggcatagtggtgcgtgcct

SEQ ID NO: 1507789 - DNA, 25 bp, Homo sapien
tatcaccttgaaaacgtcgactcga

SEQ ID NO: 1507790 - DNA, 25 bp, Homo sapien
cactagagcgtgaaggatggtacaa

SEQ ID NO: 1507791 - DNA, 25 bp, Homo sapien
cagacatcttacgtgttgaggatcc

SEQ ID NO: 1507792 - DNA, 25 bp, Homo sapien
catagttgcggatcagcactgagcc

SEQ ID NO: 1507793 - DNA, 25 bp, Homo sapien
gggaaccagtcaccagcttccaaat

SEQ ID NO: 1507794 - DNA, 25 bp, Homo sapien
tttctccttcgacattacccagtag

SEQ ID NO: 1507795 - DNA, 25 bp, Homo sapien
aactacatttgatctacagggaacc

SEQ ID NO: 1507796 - DNA, 25 bp, Homo sapien
gaaagctgacactgaattctgtcta

SEQ ID NO: 1507797 - DNA, 25 bp, Homo sapien
ggccttgcctctcagagctccgcgg

SEQ ID NO: 1507798 - DNA, 25 bp, Homo sapien
agggcctctggacccccgcgctgca

SEQ ID NO: 1507799 - DNA, 25 bp, Homo sapien
cgcgctgcacctgcgtcatcagcca

SEQ ID NO: 1507800 - DNA, 25 bp, Homo sapien
aggcagcccagcttggtaacgggca

SEQ ID NO: 1507801 - DNA, 25 bp, Homo sapien
ctccagggactagatcttcatgtcc

SEQ ID NO: 1507802 - DNA, 25 bp, Homo sapien
gggactagatcttcatgtccttgac

SEQ ID NO: 1507803 - DNA, 25 bp, Homo sapien
tccagggactagatcttcatgtcct

SEQ ID NO: 1507804 - DNA, 25 bp, Homo sapien
cagggactagatcttcatgtccttg

SEQ ID NO: 1507805 - DNA, 25 bp, Homo sapien
cttgatgggcagggagaagagatag

SEQ ID NO: 1507806 - DNA, 25 bp, Homo sapien
tgatgggcagggagaagagatagat

SEQ ID NO: 1507807 - DNA, 25 bp, Homo sapien
gatgggcagggagaagagatagatc

SEQ ID NO: 1507808 - DNA, 25 bp, Homo sapien
tgggcagggagaagagatagatctc

SEQ ID NO: 1507809 - DNA, 25 bp, Homo sapien
tctgcactggtgtaatcaaaacctc

SEQ ID NO: 1507810 - DNA, 25 bp, Homo sapien
gcactggtgtaatcaaaacctcgtc

SEQ ID NO: 1507811 - DNA, 25 bp, Homo sapien
tgcttctgcactggtgtaatcaaaa

SEQ ID NO: 1507812 - DNA, 25 bp, Homo sapien
actggtgtaatcaaaacctcgtcct

SEQ ID NO: 1507813 - DNA, 25 bp, Homo sapien
ccccgcggatggcagtggctgcctc

SEQ ID NO: 1507814 - DNA, 25 bp, Homo sapien
caggcgctgagacgatgccagtgtc

SEQ ID NO: 1507815 - DNA, 25 bp, Homo sapien
gcgctgagacgatgccagtgtccct

SEQ ID NO: 1507816 - DNA, 25 bp, Homo sapien
gccccgcggatggcagtggctgcct

SEQ ID NO: 1507817 - DNA, 25 bp, Homo sapien
ctgggtcctctgcacagagactctg

SEQ ID NO: 1507818 - DNA, 25 bp, Homo sapien
gggtcctctgcacagagactctggt

SEQ ID NO: 1507819 - DNA, 25 bp, Homo sapien
ggagcctgggtcctctgcacagaga

SEQ ID NO: 1507820 - DNA, 25 bp, Homo sapien
ctggagcctgggtcctctgcacaga

SEQ ID NO: 1507821 - DNA, 25 bp, Homo sapien
tatttttcttgtatgaaagccctat

SEQ ID NO: 1507822 - DNA, 25 bp, Homo sapien
tttttcttgtatgaaagccctatgt

SEQ ID NO: 1507823 - DNA, 25 bp, Homo sapien
tttcttgtatgaaagccctatgttg

SEQ ID NO: 1507824 - DNA, 25 bp, Homo sapien
ttcttgtatgaaagccctatgttgt

SEQ ID NO: 1507825 - DNA, 25 bp, Homo sapien
gtggcgtatgcctctctaatcccgg

SEQ ID NO: 1507826 - DNA, 25 bp, Homo sapien
gttgggttgtcttgcatagcattca

SEQ ID NO: 1507827 - DNA, 25 bp, Homo sapien
tcttgcatagcattcagttcattca

SEQ ID NO: 1507828 - DNA, 25 bp, Homo sapien
agttcattcatgttcaaacagggca

SEQ ID NO: 1507829 - DNA, 25 bp, Homo sapien
tatgtacacattgctaggctttgta

SEQ ID NO: 1507830 - DNA, 25 bp, Homo sapien
ccatatcgttagtgattttctgaca

SEQ ID NO: 1507831 - DNA, 25 bp, Homo sapien
ctaaaacccgatttgtctgaatgta

SEQ ID NO: 1507832 - DNA, 25 bp, Homo sapien
gaaatccagctgattaatagtgcta

SEQ ID NO: 1507833 - DNA, 25 bp, Homo sapien
ccacttccactcgacaaaaccgcca

SEQ ID NO: 1507834 - DNA, 25 bp, Homo sapien
ttctcagagatcttatccccaggca

SEQ ID NO: 1507835 - DNA, 25 bp, Homo sapien
ttcaacctgattggcgccagccttt

SEQ ID NO: 1507836 - DNA, 25 bp, Homo sapien
tgctgaatgggctccctcgttggga

SEQ ID NO: 1507837 - DNA, 25 bp, Homo sapien
gagaactccggcgactcttgagcag

SEQ ID NO: 1507838 - DNA, 25 bp, Homo sapien
tttatactgggatctcgggctgctg

SEQ ID NO: 1507839 - DNA, 25 bp, Homo sapien
ttcagcacagtactcgaagtcccag

SEQ ID NO: 1507840 - DNA, 25 bp, Homo sapien
gagagccttgtttcagacctttgga

SEQ ID NO: 1507841 - DNA, 25 bp, Homo sapien
taattaaacctagggatcagccaga

SEQ ID NO: 1507842 - DNA, 25 bp, Homo sapien
gaataaactaatgccactacaaggg

SEQ ID NO: 1507843 - DNA, 25 bp, Homo sapien
tatgtcaaggagatcttctggaggc

SEQ ID NO: 1507844 - DNA, 25 bp, Homo sapien
catcaggtcaaggactatagtagcc

SEQ ID NO: 1507845 - DNA, 25 bp, Homo sapien
taggaccatttctatccgtgcatga

SEQ ID NO: 1507846 - DNA, 25 bp, Homo sapien
gaccctgatcgtgttatattgtaga

SEQ ID NO: 1507847 - DNA, 25 bp, Homo sapien
tgcagttcctgccaaattggaccct

SEQ ID NO: 1507848 - DNA, 25 bp, Homo sapien
acctgggtgcttttgagtaccctga

SEQ ID NO: 1507849 - DNA, 25 bp, Homo sapien
cctgatatctggaggacattttctc

SEQ ID NO: 1507850 - DNA, 25 bp, Homo sapien
gctgcataaattctatatggctaaa

SEQ ID NO: 1507851 - DNA, 25 bp, Homo sapien
cttttaacattattggcaagacaag

SEQ ID NO: 1507852 - DNA, 25 bp, Homo sapien
ccaatcacatgttctctcaatttca

SEQ ID NO: 1507853 - DNA, 25 bp, Homo sapien
accttgcagctgcataaattctata

SEQ ID NO: 1507854 - DNA, 25 bp, Homo sapien
tgtactggcttttagggtaatgctc

SEQ ID NO: 1507855 - DNA, 25 bp, Homo sapien
tgcccaatttaacatcaccgtcatc

SEQ ID NO: 1507856 - DNA, 25 bp, Homo sapien
ggtaatgctcatataacccagtgtt

SEQ ID NO: 1507857 - DNA, 25 bp, Homo sapien
cgtcatccatttgccctattataaa

SEQ ID NO: 1507858 - DNA, 25 bp, Homo sapien
aaactccagcgtagtcaaaggaatg

SEQ ID NO: 1507859 - DNA, 25 bp, Homo sapien
cggagtgttcgtagccccacgttgg

SEQ ID NO: 1507860 - DNA, 25 bp, Homo sapien
gggccaacgctggtatggatgctgc

SEQ ID NO: 1507861 - DNA, 25 bp, Homo sapien
aagaagcaggtcttgaggacgtagg

SEQ ID NO: 1507862 - DNA, 25 bp, Homo sapien
taatacaggtgatcagtcagagcca

SEQ ID NO: 1507863 - DNA, 25 bp, Homo sapien
gagccaaccaacctgaaactcgcaa

SEQ ID NO: 1507864 - DNA, 25 bp, Homo sapien
attgagtggcaatccctggagtcag

SEQ ID NO: 1507865 - DNA, 25 bp, Homo sapien
tcagaggtggtcctatccaatgtag

SEQ ID NO: 1507866 - DNA, 25 bp, Homo sapien
actttaaacttagaagaacattgca

SEQ ID NO: 1507867 - DNA, 25 bp, Homo sapien
tctgcctcaggttcactccgttctc

SEQ ID NO: 1507868 - DNA, 25 bp, Homo sapien
tgcaaggtttgtataattatatcct

SEQ ID NO: 1507869 - DNA, 25 bp, Homo sapien
tttgttttgcaatacttacacactt

SEQ ID NO: 1507870 - DNA, 25 bp, Homo sapien
taatatagttatgattttttcccag

SEQ ID NO: 1507871 - DNA, 25 bp, Homo sapien
aaatcatggttgtttcagtgccttt

SEQ ID NO: 1507872 - DNA, 25 bp, Homo sapien
aatatagttatgattttttcccaga

SEQ ID NO: 1507873 - DNA, 25 bp, Homo sapien
cttaaatcatggttgtttcagtgcc

SEQ ID NO: 1507874 - DNA, 25 bp, Homo sapien
tgtgcagggaatgcacttacccagt

SEQ ID NO: 1507875 - DNA, 25 bp, Homo sapien
cctaatatcaagcagattgtcggtg

SEQ ID NO: 1507876 - DNA, 25 bp, Homo sapien
tcctacagtgtaagaataagcacct

SEQ ID NO: 1507877 - DNA, 25 bp, Homo sapien
caaaaagaactacatgggtgtctgc

SEQ ID NO: 1507878 - DNA, 25 bp, Homo sapien
gtcatcccagttcttttcgaaatca

SEQ ID NO: 1507879 - DNA, 25 bp, Homo sapien
aagaatgcgggaaaacgttcagtca

SEQ ID NO: 1507880 - DNA, 25 bp, Homo sapien
aatcatgaaagaactcactctggag

SEQ ID NO: 1507881 - DNA, 25 bp, Homo sapien
agcaatgtggtaaagctcttagttg

SEQ ID NO: 1507882 - DNA, 25 bp, Homo sapien
cacactggagagaaaccctataaat

SEQ ID NO: 1507883 - DNA, 25 bp, Homo sapien
tcatttcgaatacatgaaagaactc

SEQ ID NO: 1507884 - DNA, 25 bp, Homo sapien
gttcatttcgaatacatgaaagaac

SEQ ID NO: 1507885 - DNA, 25 bp, Homo sapien
gaaagaactcacactggagagaaac

SEQ ID NO: 1507886 - DNA, 25 bp, Homo sapien
caatcctctcaacttggcttaccaa

SEQ ID NO: 1507887 - DNA, 25 bp, Homo sapien
ggtctcactctcttgaccagattgg

SEQ ID NO: 1507888 - DNA, 25 bp, Homo sapien
aaaattccctagtatgagccaccac

SEQ ID NO: 1507889 - DNA, 25 bp, Homo sapien
tggcttaccaaaattccctagtatg

SEQ ID NO: 1507890 - DNA, 25 bp, Homo sapien
tcttggacccaaaacactccacggc

SEQ ID NO: 1507891 - DNA, 25 bp, Homo sapien
tacgccgtgatgtgtccttagccca

SEQ ID NO: 1507892 - DNA, 25 bp, Homo sapien
gctggataccctcggctggaaagag

SEQ ID NO: 1507893 - DNA, 25 bp, Homo sapien
gcacctggcgctctaccgtaaaaat

SEQ ID NO: 1507894 - DNA, 25 bp, Homo sapien
ggatgacctgacctgacacttgagt

SEQ ID NO: 1507895 - DNA, 25 bp, Homo sapien
ggccatttcctggacagtgttttgg

SEQ ID NO: 1507896 - DNA, 25 bp, Homo sapien
gaaaatctgtgagggtcagactcag

SEQ ID NO: 1507897 - DNA, 25 bp, Homo sapien
tcacgactttacattgactccgggt

SEQ ID NO: 1507898 - DNA, 25 bp, Homo sapien
cgctgagtcaggctgtaatttgtat

SEQ ID NO: 1507899 - DNA, 25 bp, Homo sapien
cagcttatacataaccacagaagga

SEQ ID NO: 1507900 - DNA, 25 bp, Homo sapien
caagtgaataaactgcagtgggcag

SEQ ID NO: 1507901 - DNA, 25 bp, Homo sapien
gtgagaagcaagtgaataaactgca

SEQ ID NO: 1507902 - DNA, 25 bp, Homo sapien
tcaaaggaatcattacttgccagtt

SEQ ID NO: 1507903 - DNA, 25 bp, Homo sapien
aggtctggtagaacgaaggcgaaca

SEQ ID NO: 1507904 - DNA, 25 bp, Homo sapien
cttccacatgaaggtctggtagaac

SEQ ID NO: 1507905 - DNA, 25 bp, Homo sapien
tccacatgaaggtctggtagaacga

SEQ ID NO: 1507906 - DNA, 25 bp, Homo sapien
gtagaacgaaggcgaacagccgcat

SEQ ID NO: 1507907 - DNA, 25 bp, Homo sapien
agatggttgaacaaactcctatcca

SEQ ID NO: 1507908 - DNA, 25 bp, Homo sapien
agagatggttgaacaaactcctatc

SEQ ID NO: 1507909 - DNA, 25 bp, Homo sapien
gagatggttgaacaaactcctatcc

SEQ ID NO: 1507910 - DNA, 25 bp, Homo sapien
aactcctatccaaaagtcatccaca

SEQ ID NO: 1507911 - DNA, 25 bp, Homo sapien
tgatgcttgggacagcagccttaat

SEQ ID NO: 1507912 - DNA, 25 bp, Homo sapien
gggacaccatcaggccaacctaggt

SEQ ID NO: 1507913 - DNA, 25 bp, Homo sapien
tgggttggtacaggctttctccact

SEQ ID NO: 1507914 - DNA, 25 bp, Homo sapien
gctgggttggtacaggctttctcca

SEQ ID NO: 1507915 - DNA, 25 bp, Homo sapien
cagcagctgggttggtacaggcttt

SEQ ID NO: 1507916 - DNA, 25 bp, Homo sapien
ttggtacaggctttctccacttctg

SEQ ID NO: 1507917 - DNA, 25 bp, Homo sapien
gaggttctcccgcaggatgacagac

SEQ ID NO: 1507918 - DNA, 25 bp, Homo sapien
gcggaggttctcccgcaggatgaca

SEQ ID NO: 1507919 - DNA, 25 bp, Homo sapien
atgaaagcggaggttctcccgcagg

SEQ ID NO: 1507920 - DNA, 25 bp, Homo sapien
gaaagcggaggttctcccgcaggat

SEQ ID NO: 1507921 - DNA, 25 bp, Homo sapien
aaagcttctaatttggctggatcag

SEQ ID NO: 1507922 - DNA, 25 bp, Homo sapien
atcagcattagccttgttcccagaa

SEQ ID NO: 1507923 - DNA, 25 bp, Homo sapien
aagcttctaatttggctggatcagc

SEQ ID NO: 1507924 - DNA, 25 bp, Homo sapien
ggctggatcagcattagccttgttc

SEQ ID NO: 1507925 - DNA, 25 bp, Homo sapien
tcattgactttgcccagcatgttct

SEQ ID NO: 1507926 - DNA, 25 bp, Homo sapien
ttctcatcaaacttgccagcagtga

SEQ ID NO: 1507927 - DNA, 25 bp, Homo sapien
cagattgacttctgccatggagctg

SEQ ID NO: 1507928 - DNA, 25 bp, Homo sapien
gcaactttagttctgcccaggatgg

SEQ ID NO: 1507929 - DNA, 25 bp, Homo sapien
ttctaggagctctaaaccggcacca

SEQ ID NO: 1507930 - DNA, 25 bp, Homo sapien
tatcaaccccaggatggactttacc

SEQ ID NO: 1507931 - DNA, 25 bp, Homo sapien
aatattgccaagagtatcaacccca

SEQ ID NO: 1507932 - DNA, 25 bp, Homo sapien
tttatcctccatgttccattctaca

SEQ ID NO: 1507933 - DNA, 25 bp, Homo sapien
taagttgacttaggggctgtgcaca

SEQ ID NO: 1507934 - DNA, 25 bp, Homo sapien
ctaagttgacttaggggctgtgcac

SEQ ID NO: 1507935 - DNA, 25 bp, Homo sapien
ttttttggtaccaggcatatgcagg

SEQ ID NO: 1507936 - DNA, 25 bp, Homo sapien
tcaaccagggacgtccttggtgatg

SEQ ID NO: 1507937 - DNA, 25 bp, Homo sapien
agacgctttgacctgtgcacttctg

SEQ ID NO: 1507938 - DNA, 25 bp, Homo sapien
cacgcggccaatgcctgaactgcag

SEQ ID NO: 1507939 - DNA, 25 bp, Homo sapien
gcagcctgagggctttttccagacg

SEQ ID NO: 1507940 - DNA, 25 bp, Homo sapien
gaggcctgacaggggtcagtagaaa

SEQ ID NO: 1507941 - DNA, 25 bp, Homo sapien
tggttacagggagtgactttctcta

SEQ ID NO: 1507942 - DNA, 25 bp, Homo sapien
aggcctgacaggggtcagtagaaaa

SEQ ID NO: 1507943 - DNA, 25 bp, Homo sapien
actggttacagggagtgactttctc

SEQ ID NO: 1507944 - DNA, 25 bp, Homo sapien
gccactctgcctggctggttatttt

SEQ ID NO: 1507945 - DNA, 25 bp, Homo sapien
cactctgcctggctggttattttgt

SEQ ID NO: 1507946 - DNA, 25 bp, Homo sapien
tctgcctggctggttattttgtttg

SEQ ID NO: 1507947 - DNA, 25 bp, Homo sapien
gcgcgtgccaccataccgagctagt

SEQ ID NO: 1507948 - DNA, 25 bp, Homo sapien
caatatgggaacatcttcaatgaca

SEQ ID NO: 1507949 - DNA, 25 bp, Homo sapien
aaaccatgaaaccacccacactgga

SEQ ID NO: 1507950 - DNA, 25 bp, Homo sapien
gagagccaccttcttaaatgtaagc

SEQ ID NO: 1507951 - DNA, 25 bp, Homo sapien
ccattgtcgagattcttcgtaggaa

SEQ ID NO: 1507952 - DNA, 25 bp, Homo sapien
atgtaaggaatgtggcaaagccttc

SEQ ID NO: 1507953 - DNA, 25 bp, Homo sapien
aatgtaaggaatgtggcaaagcctt

SEQ ID NO: 1507954 - DNA, 25 bp, Homo sapien
ggtctttgtgaaggcactcccatag

SEQ ID NO: 1507955 - DNA, 25 bp, Homo sapien
tagtcaaggccaataaccaggctct

SEQ ID NO: 1507956 - DNA, 25 bp, Homo sapien
gcactcccatagtcaaggccaataa

SEQ ID NO: 1507957 - DNA, 25 bp, Homo sapien
tcaggtatgtcctgttcattgccct

SEQ ID NO: 1507958 - DNA, 25 bp, Homo sapien
ccttgtttataatgaccatttgggt

SEQ ID NO: 1507959 - DNA, 25 bp, Homo sapien
ctgacgcgtcaaggggccaggagac

SEQ ID NO: 1507960 - DNA, 25 bp, Homo sapien
caagctaagcacaacccgatcgcac

SEQ ID NO: 1507961 - DNA, 25 bp, Homo sapien
cccaagctaagcacaacccgatcgc

SEQ ID NO: 1507962 - DNA, 25 bp, Homo sapien
caggagaccccaagctaagcacaac

SEQ ID NO: 1507963 - DNA, 25 bp, Homo sapien
cagggtacagcgcatccgatgcagg

SEQ ID NO: 1507964 - DNA, 25 bp, Homo sapien
agcgcagggtacagcgcatccgatg

SEQ ID NO: 1507965 - DNA, 25 bp, Homo sapien
gcgcatccgatgcaggggtacagca

SEQ ID NO: 1507966 - DNA, 25 bp, Homo sapien
gcatccgatgcaggggtacagcaac

SEQ ID NO: 1507967 - DNA, 25 bp, Homo sapien
gcctcgcgggtgtcccggtgttgtc

SEQ ID NO: 1507968 - DNA, 25 bp, Homo sapien
aaaatgagaatgttgggccggtaat

SEQ ID NO: 1507969 - DNA, 25 bp, Homo sapien
aatgttgggccggtaatagtagctc

SEQ ID NO: 1507970 - DNA, 25 bp, Homo sapien
ttgggccggtaatagtagctcatgc

SEQ ID NO: 1507971 - DNA, 25 bp, Homo sapien
aatgagaatgttgggccggtaatag

SEQ ID NO: 1507972 - DNA, 25 bp, Homo sapien
aaaccacaattaaaacctcagacat

SEQ ID NO: 1507973 - DNA, 25 bp, Homo sapien
gaaaccacaattaaaacctcagaca

SEQ ID NO: 1507974 - DNA, 25 bp, Homo sapien
tacagatgtgaaactcaaatgtaat

SEQ ID NO: 1507975 - DNA, 25 bp, Homo sapien
cttacagatgtgaaactcaaatgta

SEQ ID NO: 1507976 - DNA, 25 bp, Homo sapien
acagatgtgaaactcaaatgtaatg

SEQ ID NO: 1507977 - DNA, 25 bp, Homo sapien
cagatgtgaaactcaaatgtaatgt

SEQ ID NO: 1507978 - DNA, 25 bp, Homo sapien
ggctgaagctcacagacacatcctc

SEQ ID NO: 1507979 - DNA, 25 bp, Homo sapien
tggctgaagctcacagacacatcct

SEQ ID NO: 1507980 - DNA, 25 bp, Homo sapien
tcctggctgaagctcacagacacat

SEQ ID NO: 1507981 - DNA, 25 bp, Homo sapien
acacatcctcaaaagccactgagtc

SEQ ID NO: 1507982 - DNA, 25 bp, Homo sapien
tagatgccaggttcttgaatgtttc

SEQ ID NO: 1507983 - DNA, 25 bp, Homo sapien
gatgccaggttcttgaatgtttcct

SEQ ID NO: 1507984 - DNA, 25 bp, Homo sapien
tttcttctgtgaaggagccagcaga

SEQ ID NO: 1507985 - DNA, 25 bp, Homo sapien
ctatagatgccaggttcttgaatgt

SEQ ID NO: 1507986 - DNA, 25 bp, Homo sapien
tgatcttcaacattcgggtcttccc

SEQ ID NO: 1507987 - DNA, 25 bp, Homo sapien
tttgtgttgatcttcaacattcggg

SEQ ID NO: 1507988 - DNA, 25 bp, Homo sapien
gttgatcttcaacattcgggtcttc

SEQ ID NO: 1507989 - DNA, 25 bp, Homo sapien
ttcgtccttggtttttgtgttgatc

SEQ ID NO: 1507990 - DNA, 25 bp, Homo sapien
ttcacagagtctctctcccgtatgg

SEQ ID NO: 1507991 - DNA, 25 bp, Homo sapien
attgactaccttctttaccttcaca

SEQ ID NO: 1507992 - DNA, 25 bp, Homo sapien
ttaccttcacagagtctctctcccg

SEQ ID NO: 1507993 - DNA, 25 bp, Homo sapien
acagagtctctctcccgtatggctt

SEQ ID NO: 1507994 - DNA, 25 bp, Homo sapien
tcttcgtcacactgagattgggact

SEQ ID NO: 1507995 - DNA, 25 bp, Homo sapien
ttcttcgtcacactgagattgggac

SEQ ID NO: 1507996 - DNA, 25 bp, Homo sapien
tccacagatagtacactcatatggt

SEQ ID NO: 1507997 - DNA, 25 bp, Homo sapien
gatgagagacgcatgaaggcttttc

SEQ ID NO: 1507998 - DNA, 25 bp, Homo sapien
tctcaaatagctcgtatccagtgtg

SEQ ID NO: 1507999 - DNA, 25 bp, Homo sapien
tgagacctcatgtgtctagtaaggg

SEQ ID NO: 1508000 - DNA, 25 bp, Homo sapien
ggctggtgatatatgaaggtttttc

SEQ ID NO: 1508001 - DNA, 25 bp, Homo sapien
ctccaatgtgagtccgctcatgtct

SEQ ID NO: 1508002 - DNA, 25 bp, Homo sapien
tccaatgtgagtccgctcatgtctt

SEQ ID NO: 1508003 - DNA, 25 bp, Homo sapien
tttgaaagggctggtgatatatgaa

SEQ ID NO: 1508004 - DNA, 25 bp, Homo sapien
tgcactctcacgtgtactcgaaagg

SEQ ID NO: 1508005 - DNA, 25 bp, Homo sapien
catgtgttcgtaacgcactaggaaa

SEQ ID NO: 1508006 - DNA, 25 bp, Homo sapien
aatggaggtggaacatctgaaggct

SEQ ID NO: 1508007 - DNA, 25 bp, Homo sapien
aaaggctgggcgtgcactgaaagat

SEQ ID NO: 1508008 - DNA, 25 bp, Homo sapien
ttttaaggatgtggacacactgaag

SEQ ID NO: 1508009 - DNA, 25 bp, Homo sapien
taaggatgtggacacactgaaggct

SEQ ID NO: 1508010 - DNA, 25 bp, Homo sapien
ttgaaaggaactgtgaagactaaag

SEQ ID NO: 1508011 - DNA, 25 bp, Homo sapien
tttgaaaggaactgtgaagactaaa

SEQ ID NO: 1508012 - DNA, 25 bp, Homo sapien
ggcagtcctgcacatggagccgtca

SEQ ID NO: 1508013 - DNA, 25 bp, Homo sapien
tactactgctactaaattgcggttg

SEQ ID NO: 1508014 - DNA, 25 bp, Homo sapien
tttgtcccgccagaatacgttcagg

SEQ ID NO: 1508015 - DNA, 25 bp, Homo sapien
gaaagtgcagcacgtttacaccagc

SEQ ID NO: 1508016 - DNA, 25 bp, Homo sapien
tggtatagctacaacacatctagac

SEQ ID NO: 1508017 - DNA, 25 bp, Homo sapien
aaacgtgttgtaggtgatttcctca

SEQ ID NO: 1508018 - DNA, 25 bp, Homo sapien
gctactaggctataaaccatacaac

SEQ ID NO: 1508019 - DNA, 25 bp, Homo sapien
tcatagtccagagatgtacttgaag

SEQ ID NO: 1508020 - DNA, 25 bp, Homo sapien
gccagtaggaaaaatcctagttaca

SEQ ID NO: 1508021 - DNA, 25 bp, Homo sapien
tgtgtcagtattcaacaatctcttt

SEQ ID NO: 1508022 - DNA, 25 bp, Homo sapien
caccttccacatgaggccagtagga

SEQ ID NO: 1508023 - DNA, 25 bp, Homo sapien
atataatgggtaatatatgcaccac

SEQ ID NO: 1508024 - DNA, 25 bp, Homo sapien
ggagggccacgtccagctctagatt

SEQ ID NO: 1508025 - DNA, 25 bp, Homo sapien
gaacaatgccaaccatgacagtctg

SEQ ID NO: 1508026 - DNA, 25 bp, Homo sapien
cagtctgaaatagatgcttgggcca

SEQ ID NO: 1508027 - DNA, 25 bp, Homo sapien
gtcaagcagctcagggtgttttcag

SEQ ID NO: 1508028 - DNA, 25 bp, Homo sapien
gcctcattcaaattttctaagtccg

SEQ ID NO: 1508029 - DNA, 25 bp, Homo sapien
gcttatggaagcatgcacctgcagt

SEQ ID NO: 1508030 - DNA, 25 bp, Homo sapien
ttttcaacacgactgagcctcactg

SEQ ID NO: 1508031 - DNA, 25 bp, Homo sapien
gcatgaggcacccagtacggcctca

SEQ ID NO: 1508032 - DNA, 25 bp, Homo sapien
cacgtgccaccacgcacggataatt

SEQ ID NO: 1508033 - DNA, 25 bp, Homo sapien
gcacgtgccaccacgcacggataat

SEQ ID NO: 1508034 - DNA, 25 bp, Homo sapien
ccaagattcgcatttttgacctggg

SEQ ID NO: 1508035 - DNA, 25 bp, Homo sapien
agaacaagccgtacccaaagtctcg

SEQ ID NO: 1508036 - DNA, 25 bp, Homo sapien
gatggcttccatatccgggtgcggc

SEQ ID NO: 1508037 - DNA, 25 bp, Homo sapien
tggaggctgcccgaatttgtgccaa

SEQ ID NO: 1508038 - DNA, 25 bp, Homo sapien
agtgtcacctttagcccaaccagtg

SEQ ID NO: 1508039 - DNA, 25 bp, Homo sapien
tcttcatagcccgtgagacgccagt

SEQ ID NO: 1508040 - DNA, 25 bp, Homo sapien
gcattaagaggcattccgtcttgga

SEQ ID NO: 1508041 - DNA, 25 bp, Homo sapien
tccgtcttggaattccggcattaag

SEQ ID NO: 1508042 - DNA, 25 bp, Homo sapien
gacaccctggattcccatggacaca

SEQ ID NO: 1508043 - DNA, 25 bp, Homo sapien
tggacacactacaccggctaggaaa

SEQ ID NO: 1508044 - DNA, 25 bp, Homo sapien
ttccaggaccctagcgctgaaggtc

SEQ ID NO: 1508045 - DNA, 25 bp, Homo sapien
ttaggcaagctaggtccttccagga

SEQ ID NO: 1508046 - DNA, 25 bp, Homo sapien
agctttgccaactctcggagctcgg

SEQ ID NO: 1508047 - DNA, 25 bp, Homo sapien
tggtgtgcttgggtcgctgtctact

SEQ ID NO: 1508048 - DNA, 25 bp, Homo sapien
tttccctagctgaagtggtgtgctt

SEQ ID NO: 1508049 - DNA, 25 bp, Homo sapien
tgagtagcttcatgtgagacttgcc

SEQ ID NO: 1508050 - DNA, 25 bp, Homo sapien
ccacgcttgggtgtaaccttattat

SEQ ID NO: 1508051 - DNA, 25 bp, Homo sapien
ctgtacggaaaattccgcgccttag

SEQ ID NO: 1508052 - DNA, 25 bp, Homo sapien
cgcgccttagaaacccacgcttggg

SEQ ID NO: 1508053 - DNA, 25 bp, Homo sapien
acgcttgggtgtaaccttattattg

SEQ ID NO: 1508054 - DNA, 25 bp, Homo sapien
ctccttccttgcagccttaaatcgg

SEQ ID NO: 1508055 - DNA, 25 bp, Homo sapien
ctcccaggactccttccttgcagcc

SEQ ID NO: 1508056 - DNA, 25 bp, Homo sapien
tccttccttgcagccttaaatcggt

SEQ ID NO: 1508057 - DNA, 25 bp, Homo sapien
ggactccttccttgcagccttaaat

SEQ ID NO: 1508058 - DNA, 25 bp, Homo sapien
ccgtttctgcggcagctctggaggc

SEQ ID NO: 1508059 - DNA, 25 bp, Homo sapien
tcttcaaccgtttctgcggcagctc

SEQ ID NO: 1508060 - DNA, 25 bp, Homo sapien
cattaaatcgtacggctcgcactgc

SEQ ID NO: 1508061 - DNA, 25 bp, Homo sapien
cgcagtccagcgtcttcaaccgttt

SEQ ID NO: 1508062 - DNA, 25 bp, Homo sapien
ggttactgggccgtcgatctcagga

SEQ ID NO: 1508063 - DNA, 25 bp, Homo sapien
gaggacccggaatgaagacgaaggc

SEQ ID NO: 1508064 - DNA, 25 bp, Homo sapien
gacccggaatgaagacgaaggcgct

SEQ ID NO: 1508065 - DNA, 25 bp, Homo sapien
tactgggccgtcgatctcaggaggc

SEQ ID NO: 1508066 - DNA, 25 bp, Homo sapien
cgtcttgtcactgccgcacgtcagg

SEQ ID NO: 1508067 - DNA, 25 bp, Homo sapien
ttcagcgtcttgtcactgccgcacg

SEQ ID NO: 1508068 - DNA, 25 bp, Homo sapien
ctcgtagccgtggccgctgtacgtc

SEQ ID NO: 1508069 - DNA, 25 bp, Homo sapien
ggccgctgtacgtccgcagcagcgt

SEQ ID NO: 1508070 - DNA, 25 bp, Homo sapien
acatcccacagaaccaccgccttgt

SEQ ID NO: 1508071 - DNA, 25 bp, Homo sapien
tgcgtggccccggaatttgcgcacg

SEQ ID NO: 1508072 - DNA, 25 bp, Homo sapien
aatttgcgcacgacctgccctgatg

SEQ ID NO: 1508073 - DNA, 25 bp, Homo sapien
cggagcagagactactgttgtcaaa

SEQ ID NO: 1508074 - DNA, 25 bp, Homo sapien
ccagtgtcggttaaagcaagggcga

SEQ ID NO: 1508075 - DNA, 25 bp, Homo sapien
cgtcatctggggaagggatccttac

SEQ ID NO: 1508076 - DNA, 25 bp, Homo sapien
gggtggccgtgtcaccacctatgcg

SEQ ID NO: 1508077 - DNA, 25 bp, Homo sapien
tgactgcctagcctggcatgcggag

SEQ ID NO: 1508078 - DNA, 25 bp, Homo sapien
tgagaaagttattgccactcagagg

SEQ ID NO: 1508079 - DNA, 25 bp, Homo sapien
agaaagttattgccactcagaggag

SEQ ID NO: 1508080 - DNA, 25 bp, Homo sapien
gagaaagttattgccactcagagga

SEQ ID NO: 1508081 - DNA, 25 bp, Homo sapien
ctgagaaagttattgccactcagag

SEQ ID NO: 1508082 - DNA, 25 bp, Homo sapien
tcttcattaaactgcaccgtgttca

SEQ ID NO: 1508083 - DNA, 25 bp, Homo sapien
cttcattaaactgcaccgtgttcac

SEQ ID NO: 1508084 - DNA, 25 bp, Homo sapien
ctcttcattaaactgcaccgtgttc

SEQ ID NO: 1508085 - DNA, 25 bp, Homo sapien
cctcttcattaaactgcaccgtgtt

SEQ ID NO: 1508086 - DNA, 25 bp, Homo sapien
ttcacactggacacgccatctctgg

SEQ ID NO: 1508087 - DNA, 25 bp, Homo sapien
gtgagcggcaatcccaacagcggat

SEQ ID NO: 1508088 - DNA, 25 bp, Homo sapien
cctgccaggatctcgtggtctgaca

SEQ ID NO: 1508089 - DNA, 25 bp, Homo sapien
catctctggcctcatccagcgtctg

SEQ ID NO: 1508090 - DNA, 25 bp, Homo sapien
agagggtagatccagcgggaacctt

SEQ ID NO: 1508091 - DNA, 25 bp, Homo sapien
gggccaattacgtcctactccatca

SEQ ID NO: 1508092 - DNA, 25 bp, Homo sapien
caggcccagggccaattacgtccta

SEQ ID NO: 1508093 - DNA, 25 bp, Homo sapien
gaaccttgactacactcacatggct

SEQ ID NO: 1508094 - DNA, 25 bp, Homo sapien
catagcgtctcacgcggccatccac

SEQ ID NO: 1508095 - DNA, 25 bp, Homo sapien
tgcccacgtagtctgagaagagctg

SEQ ID NO: 1508096 - DNA, 25 bp, Homo sapien
gcccacgtagtctgagaagagctgc

SEQ ID NO: 1508097 - DNA, 25 bp, Homo sapien
cccatccttaggtcatagcgtctca

SEQ ID NO: 1508098 - DNA, 25 bp, Homo sapien
tgagggtggggtgcccctggttggc

SEQ ID NO: 1508099 - DNA, 25 bp, Homo sapien
ctttgtccaggagccgcaatgtgga

SEQ ID NO: 1508100 - DNA, 25 bp, Homo sapien
ggtgcactgcccatcccggctgaag

SEQ ID NO: 1508101 - DNA, 25 bp, Homo sapien
ccaggagccgcaatgtggagtccag

SEQ ID NO: 1508102 - DNA, 25 bp, Homo sapien
gggtgcactgcccatcccggctgaa

SEQ ID NO: 1508103 - DNA, 25 bp, Homo sapien
accttcccgtcctcagaacagctga

SEQ ID NO: 1508104 - DNA, 25 bp, Homo sapien
ttcccgtcctcagaacagctgacca

SEQ ID NO: 1508105 - DNA, 25 bp, Homo sapien
cagctgaccacatgtgtgtcacgct

SEQ ID NO: 1508106 - DNA, 25 bp, Homo sapien
caggtcccagaagaacaccttcccg

SEQ ID NO: 1508107 - DNA, 25 bp, Homo sapien
aggcatctaggtatgaagtagggct

SEQ ID NO: 1508108 - DNA, 25 bp, Homo sapien
caggcatctaggtatgaagtagggc

SEQ ID NO: 1508109 - DNA, 25 bp, Homo sapien
ggggcaggcatctaggtatgaagta

SEQ ID NO: 1508110 - DNA, 25 bp, Homo sapien
ggcaggcatctaggtatgaagtagg

SEQ ID NO: 1508111 - DNA, 25 bp, Homo sapien
cagcactggacgctgcctcccatgg

SEQ ID NO: 1508112 - DNA, 25 bp, Homo sapien
ctctgttgggtggtaggccagcgac

SEQ ID NO: 1508113 - DNA, 25 bp, Homo sapien
tgcaccacaccggaacccacaggca

SEQ ID NO: 1508114 - DNA, 25 bp, Homo sapien
ataggcctcctctcgccagcactgg

SEQ ID NO: 1508115 - DNA, 25 bp, Homo sapien
agaataagatggtatctgaagtcct

SEQ ID NO: 1508116 - DNA, 25 bp, Homo sapien
actttttggtcagctacgtctctag

SEQ ID NO: 1508117 - DNA, 25 bp, Homo sapien
ttattaatttgcagacccagcccct

SEQ ID NO: 1508118 - DNA, 25 bp, Homo sapien
tctcggtccttggtcctgttggtgg

SEQ ID NO: 1508119 - DNA, 25 bp, Homo sapien
gatgggaactcaccatgttgcacaa

SEQ ID NO: 1508120 - DNA, 25 bp, Homo sapien
ataatggctcactgctgtcttgagc

SEQ ID NO: 1508121 - DNA, 25 bp, Homo sapien
tgagcttctgggctcagtcgattct

SEQ ID NO: 1508122 - DNA, 25 bp, Homo sapien
cacccagcctacttactctttcttt

SEQ ID NO: 1508123 - DNA, 25 bp, Homo sapien
cctgcccaatgtcactgttgatggc

SEQ ID NO: 1508124 - DNA, 25 bp, Homo sapien
tcacttggtcgatgcctgcctccat

SEQ ID NO: 1508125 - DNA, 25 bp, Homo sapien
agagggcctgcccaatgtcactgtt

SEQ ID NO: 1508126 - DNA, 25 bp, Homo sapien
ttcacttggtcgatgcctgcctcca

SEQ ID NO: 1508127 - DNA, 25 bp, Homo sapien
agaccagacccaggcatgcacctgt

SEQ ID NO: 1508128 - DNA, 25 bp, Homo sapien
tgtcccctggcccatgtgttcccac

SEQ ID NO: 1508129 - DNA, 25 bp, Homo sapien
ctggcccatgtgttcccacctcttc

SEQ ID NO: 1508130 - DNA, 25 bp, Homo sapien
ctggttcagccagaccagacccagg

SEQ ID NO: 1508131 - DNA, 25 bp, Homo sapien
ggtggcggccgggatgcccacaagg

SEQ ID NO: 1508132 - DNA, 25 bp, Homo sapien
ggcggccgggatgcccacaaggaag

SEQ ID NO: 1508133 - DNA, 25 bp, Homo sapien
agaacttcagcagatcggcggccat

SEQ ID NO: 1508134 - DNA, 25 bp, Homo sapien
cacaaggaaggggtcattcttggcc

SEQ ID NO: 1508135 - DNA, 25 bp, Homo sapien
tctcagtccgccaaaatccgggctg

SEQ ID NO: 1508136 - DNA, 25 bp, Homo sapien
agtgagccgggccttctgagccttc

SEQ ID NO: 1508137 - DNA, 25 bp, Homo sapien
cccctagggcggtgcgatgattccc

SEQ ID NO: 1508138 - DNA, 25 bp, Homo sapien
gatgattcccgcacctgggacgatg

SEQ ID NO: 1508139 - DNA, 25 bp, Homo sapien
cgggtctgtccatttgttactgtgc

SEQ ID NO: 1508140 - DNA, 25 bp, Homo sapien
gaagtttcagcttctcaaccttctc

SEQ ID NO: 1508141 - DNA, 25 bp, Homo sapien
tgtagaactttgttgagtaaagatc

SEQ ID NO: 1508142 - DNA, 25 bp, Homo sapien
cgccgaggtggcgtgagattccact

SEQ ID NO: 1508143 - DNA, 25 bp, Homo sapien
catgaaactcgagcaggtctctgga

SEQ ID NO: 1508144 - DNA, 25 bp, Homo sapien
tctgactggagtctcgcatcctggg

SEQ ID NO: 1508145 - DNA, 25 bp, Homo sapien
ggtaacccctcgctactcaagatgg

SEQ ID NO: 1508146 - DNA, 25 bp, Homo sapien
ggtgtagttacttcccagttggcca

SEQ ID NO: 1508147 - DNA, 25 bp, Homo sapien
catgtcaagccctgtatcggtacga
